United States Patent Application Publication US 2008/0050393 A1 - sequence listing, part 9

SEQ ID NO: 33318 - DNA, 438 bp, Homo sapiens
  misc_feature (1)...(438): n = a,t,c or g
gnnnnnnnnnnnnnnnnnnnnnnnnnnnnnnnnnnnnnnnnnnnnnnnnnnnnnnnnnnnnnnnnnnggcacgagtgattttattggcaattataaggtcaacggtatgactatggaattgagtggctaaggtctgttgaagaaaagattgtcggaaatgcaggggtcaaggaactggcctgtggatgttgaactcactggcagtgatcaaggaatagtagtggagtgaaagtagttaatgaatcaggcactaagatctccaagggatgaaaggatgcagtttggagatgacaagataactgtagtaatcaggaatagcaggttttgtagctctgtctcataggcctcagaggagatgggcttttgaaggacaagagaaatgatgatgaataaattctaagcaggggaagtgtttgggaaagcagggcaggctttgtg

SEQ ID NO: 33319 - DNA, 451 bp, Homo sapiens
  misc_feature (1)...(451): n = a,t,c or g
accnnnnnnnnnnnnnnnnnnnnnnnnnnnnnnnnnnnnnnnnnnnnnnnnnnnnnnnnnnnnnnnnnnnggcacgagcggcacgagactgcacccggccctcattttgaagattaaactgaaaaatctatataataagctttatatagagccaagtgcatacagctccattaatggtagtggcttttattattccaggaaaaggaaactatttgcaaagaatggatatgtaagagtatgccaggctctgaactacaagttgttcagtctggcttgtgagtaggttatatatagagagagaatggaagtgatccggagagctaggcagagaccacattatgaataatgaggggtctaccatcaagacttttctcaaagaggtgacagatagggtgccatttgacttcagagaaggaatgacctgagacctcatctgggctctcaagagctc

SEQ ID NO: 33320 - DNA, 456 bp, Homo sapiens
  misc_feature (1)...(456): n = a,t,c or g
ancccnnnntttgannnnnnnnnnnnnnnnnnnnnnnnnnnnnnnnnnnnnnnnnnnnnnnnnnnnnnnnnnnnnnnnnnnnnnnnggcacgaggctctacaccgtatctcgttttcattctcacactagacctgtgagaggggttttattattatcggttttacagataagcatcctgaaattcagagtgctaaagtagctttccctgtctgagccccagtttctctataaaataagaatattaatatctccctgggagggtgatgataagggctgaatgagataatgtgtgtaaactgcccagcacagagcctggaatagaggaggtgctcagtcaatacttgtttcctttccctagttcctcctctgacttctaatctagtggtctttctactgcaccccactaaatacatttggaagctaaggtcatgcttaagtcctctccatagctctct

SEQ ID NO: 33321 - DNA, 448 bp, Homo sapiens
  misc_feature (1)...(448): n = a,t,c or g
ntttggannnnnnnnnnnnnnnnnnnnnnnnnnnnnnnnnnnnnnnnnnnnnnnnnnnnnnnnnnnnnnnnnnnnnnnnggcacgaggtgataactgtttcacttctgagttgtaattctaagagatataaggcaagtagtcttgccatgagtttgttacgtggatgaattaagatgccaattctttcaatactgatttctcagagaagctctcattgatttgctttcttggggctctccctcagaagttatacattctcaaattgtccctttgtttaacactttgttcataccctgtcattgtaccataataaagtttgagataagagagagctatgacattcttgtttaacgtgggagaagggtaattgtaaaagagagtgagaaagaagaaccaactcagacagatcattgttaggaaatattacatatggaagttgaggatcta

SEQ ID NO: 33322 - DNA, 472 bp, Homo sapiens
  misc_feature (1)...(472): n = a,t,c or g
gnntnnnnnnttttgaaaacccttnntttgannaccntnnnnnnnnnnnnnnnnnnnnnnnnnnnnnnnnnnnnnnnnnnnnnnnnnnnnnnnnnnnnnnnnnggcacgaggtctcctaagggcgttttaagagttgctcagattcctgatggtacctttttgggtctggaagactaagtcccatcttcttttgacaaagattctacagaaaggaggctttataacatagtagaaaatcacgtaggatctggagtcaccctgcctgggttcgaatcctagctctgcctcttctgtgacctcagataagttatttaacacctctgaatctacattttctaatttgtaaaatagggttaaagtggtgcctnnnnnnnnnnnnnnnnnnnnnnnnnnnnnnnnnnnnnnnnnnnnnnnnnnnnnnnnnnnnnnnnnnnnnnnnnnnnnnnnnnnnnnnnnnnnnnnnnnnnnnnn

SEQ ID NO: 33323 - DNA, 449 bp, Homo sapiens
  misc_feature (1)...(449): n = a,t,c or g
annnnnnnnnnnnnnnnnnnnnnnnnnnnnnnnnnnnnnnnnnnnnnnnnnnnnnnnnnnnnnnnnnnnnnnnggcacgagcggcacgagggaaaatgcccttttgctcttagagtccttgactaacctgcttttaattcccctggaccatgcacatctttgtccaggtgctgttaggagtcctttccctttagggatggtggatccctgaggtccccagagctacctgacagccacagggccagcctacctgaggcctggggcccagcgtgggttccctaattattgctgaaaaccatctctcgcctgtcaacattctataaatagggacctggaggaagaataaaaaataccaccggctcttttccccagtgggggtgggttgagttaaaaagcctctgaaatagcagcatcaatggcgtaggaaagctggagggagttgggagagc

SEQ ID NO: 33324 - DNA, 445 bp, Homo sapiens
  misc_feature (1)...(445): n = a,t,c or g
tgaagnnnnnnnnnnnnnnnnnnnnnnnnnnnnnnnnnnnnnnnnnnnnnnnnnnnnnnnnnnnnnnnnnnnnnnnggcacgagaccaagaagaccagggacttgcgtagacagctccgcaaagctgtcatggaccacgtttcagattctttcctggaaaccaatgttccacttttggtattgattgaagctgcaaagaatggaaatgagaaagaagttaaggagtatgcccaagttttccgtgaacatgccaacaaattgattgaggttgccaacttggcctgttccatctcaaataatgaagaaggtgtaaagcttgttcgaatgtctgcaagccagttagaagccctctgtcctcaggttattaatgctgcactggctttagcagcaaaaccacagagtaaactggcccaagagaacatggatctttttaaagaacaatggg

SEQ ID NO: 33325 - DNA, 449 bp, Homo sapiens
  misc_feature (1)...(449): n = a,t,c or g
ntttgaanaannnnnnnnnnnnnnnnnnnnnnnnnnnnnnnnnnnnnnnnnnnnnnnnnnnnnnnnnnnnnnnnnnnnnggcacgannnnnnnnnnnnnnnnnnnnnnnnnnnnnnnnnnnnnnnnnnnnnnnnnnnnnnnnnnnnnnnnnnnnnnnnnnnnnnnnnnnnnnnnnnnnnnnnnnnnnnnnnnnnnnnnnnnnnnnnnnnnnnnnnnnnnnnnnnnnnnnnnnnnnnnnnnnnnnnnnnnnnnnnnnnnnnnnnntaagcattgtatttttttaaatgaaaactattttccaaaacaaaaataatgagaagtatagccttgttttacatttttgcaaatctcgttaatgcctgacttcatagaagacagctggattttcatcagtttctgatttaatctgttgcaatatgttttcattgatgtatatgaagaaaatttgg

SEQ ID NO: 33326 - DNA, 435 bp, Homo sapiens
  misc_feature (1)...(435): n = a,t,c or g
gnnnnnnnnnnnnnnnnnnnnnnnnnnnnnnnnnnnnnnnnnnnnnnnnnnnnnnnnnnnnnnnnnnggcacgagcaggggcgtcatcagaaaagccttggagtaaggaaaagctgctaagctcacagtagttcataaaagttttccagaattctggtttttcttgaaagcacaaatgttgtcattggcaacgagtaccatcagttgtttgcctggaagtgacagatttgttctattcgttttggagaatatggtcagccagatgcccaagcctgggtagctgtgtctgcctgtcagttttctgttctgcaagaagcagctagttcagctcacagctcagacagctgcccagagcttttctgtaaacagccatgagacacccgtgtgcaacagaagtgctgtatgcttctcatttcatcacaaagaatataaaaa

SEQ ID NO: 33327 - DNA, 249 bp, Homo sapiens
  misc_feature (1)...(249): n = a,t,c or g
anaccgnnnnnnnnnnnnnnnnnnnnnnnnnnnnnnnnnnnnnnnnnnnnnnnnnnnnnnnnnnnnnnnnnnggcacgaggtgataattgccttcattttcaacccaggagtgcctctcacagctatatgactacggatccattagtgaggagcgacacacacacctgtaggcatcctgtgcaaacactttgtcattatcaagagagatggcagtattgaccatttagtttagttaaaaaaaaaaaaaa

SEQ ID NO: 33328 - DNA, 480 bp, Homo sapiens
  misc_feature (1)...(480): n = a,t,c or g
gtgtnnnnnttgaaatcctcgtttgaaacctttgaatgacacnatatantactctcnnnnnnnnnnnnnnnnnnnnnnnnnnnnnnnnnnggcacgagcggcacgaggggaattcctaatacagatagaggtcattgtggaaagacatttgccattttggaaagatttctgaatcgtagccaggacaaaacagcatggttagtcattgtggatgatgatacattaataagtatctccaggctccagcacttgcttagctgttatgactccggcgagcctgtgtttctgggagagcgctacggctacggcctgggcactggtggctacagctacatcacgggaggaggaggaatggtcttcagcagagaagccgtcaggagacttctcgccagtaaatgtcnatgctacagcaatgatgctcccnatgatatggtcctgggaatgtgctttagtggcttgggaatccctgtgacacacagc

SEQ ID NO: 33329 - DNA, 494 bp, Homo sapiens
  misc_feature (1)...(494): n = a,t,c or g
gtgnnnnnnntttgaaacccttngnttgganancnnnnnnnnnnnnnnnnnnnnnnnnnnnnnnnnnnnnnnnnnnnnnnnnnnnnnnnnnnnnnnnnnnnggcacgaggtcttaatctcttgttgcttctgaaggtgctttgaattcagaatctttatgtcaaaatagaggatgaaggaagctgctttcagtgattctcagatcttacatagatgcaggagcgtnnnnnnnnnnnnnnnnnnnnnnnnnnnnnnnnnnnnnnnnnnnnnnttgtgacccgcagaatgcaaaagcagctgccttcgtaaacactatatcagagtccggcagtggtttaacactcattgncctgcctcttttatttaanccagagaaacantgtcanctggatgcanacagctctctgccatgaacagaagtgtttttgcaggctagcccaagcangtcacaaagagttggggggaaaaatggatntaccctttgcaaannaata

SEQ ID NO: 33330 - DNA, 431 bp, Homo sapiens
  misc_feature (1)...(431): n = a,t,c or g
nnnnnnnnnnnnnnnnnnnnnnnnnnnnnnnnnnnnnnnnnnnnnnnnnnnnnnnnnnnnnnnnnnggcacgagattaaaattttaaaagagaaataaaaaaagttaagccacctgagaaggaatgtaagaacataacctccctaactatatttacattctaaatggaattttaggacatcaacactattaatgttcccttttttttttcacactgccctgcccctcccttcttttttttttnnaaanngggtttngntttgtnnccnnnncngnanngnaggggnnnnannnnngntnanngnaccntnnncctcngggnntaaanccnttngccnncntnggnntcccnagnacnngaanntacnggggcncnccntnacncccanntaattttggggtttngnaaaancngnatntccccnggttgcc

SEQ ID NO: 33331 - DNA, 484 bp, Homo sapiens
  misc_feature (1)...(484): n = a,t,c or g
ggtgtcnncctttgaaacctntgacnnnnnnnnnnnnnnnnnnnnnnnnnnnnnnnnnnnnnnnnnnnnnnnnnnnnnnnnnnggcacnnnnnnnnnnnnnnnnnnnnnnnnnnnnnnnnnnnnnnnnnnnnnnnnnnnnnnnnnnnnnnnnnnnnnnnnnnnnnnnnnnnnnnnnnnnnnnnnnnnnnnnnnnnnnnnnnnnnnnnnnnnnnnnnnnnnnnactagatccacannnnnnnnnnnnnnnnnnnnnnnnnnnnnnnnnnnnnnnnnnnnnnnnnnnnnnnnnnnnnnnnnnnnnnnnnnnnnnnnnnnnnnnnnnnnnnnnnnnnnnnnnnnnnnnnnnnnnnnnnnnnnnnnnnnnnnnnnnnnnnnnnnnnnnnnngaacnaaaaaaaaccctttgtaatcccctacattgtataaacatcagtaactaagaatcatgataaattagtaaagagctacagattacatagagtc

SEQ ID NO: 33332 - DNA, 446 bp, Homo sapiens
  misc_feature (1)...(446): n = a,t,c or g
ggtgnnnnnnntttgaacccttgacnnnnnnnnnnnnnnnnnnnnnnnnnnnnnnnnnnnnnnnnnnnnnnnnnnnnnnnnnnggcacgaggaagtaaggtgatatgatgcctccagttttgttctttttgctcagaaatgctttggttnnnnnnnnnnnnnnnnnnnnnnnnnnnnnnnnnnnnnnnnnnnnnnnnnnnnnnnnnnnnnnnnnnnnnnnnnnnnnnnnnnnnnnnnnnnnnnnnnnnnnnnnnnnnnnnnnnnnnnnnnnnnnnnnnnnnnnnnnnnnnnnnnnnnnnnnnnnnnnnnnnnnnnnnnnnnnnnnnnnnnnnnnnnnnnnnnnnnnnnnnnnnnnnnnnnnnnnnnnnnnnnnnnnnnnnnnnnnnnnnnnnnnnnnnnnnnnnnnnnnnnnnnnnnnnnnnnnnnnnnnnnnnnnnnnnnnnnnn

SEQ ID NO: 33333 - DNA, 476 bp, Homo sapiens
  misc_feature (1)...(476): n = a,t,c or g
anacccntnnntttnnnnnnnnnnnnnnnnnnnnnnnnnnnnnnnnnnnnnnnnnnnnnnnnnnnnnnnnnnnnnnnnnnnnnnnnnggcacgagtcagcctgtcacactttgataagatatatttgggggaatatcatgagtttttggcttatttgttaaacacctggatttttatggcctaactttagttgttgactaagcaaagtatttgttgactaatgtgactgagttgtgaaacgtctcgaaatggcatttcaattgtcagtgaagggggtggcatagacatatgattccttcatatccactcaactgagtctggcgtctccttgaatgcaggcatgcggaatgtccatgtgcctggcatcttggcggtggtcagtaaatgtttgtcaaaaggagctgaagtgtataccgtttctttgacttcttctgtgagtcaagcaccaggttcatctgagtgaaaaaatgcaatgt

SEQ ID NO: 33334 - DNA, 461 bp, Homo sapiens
  misc_feature (1)...(461): n = a,t,c or g
anaccnctnnnnnnnnnnnnnnnnnnnnnnnnnnnnnnnnnnnnnnnnnnnnnnnnnnnnnnnnnnnnnnnggcacgagcggcgtggattactgcaaagccacatggaactttaaagacatctcaattaacagcttcactggggtttcagattagtactacatattggaaaaaagattaatccagatgagtggttctaaaccctgccgagccgcaacccaaagtgtctgacgcaggaggtctgtctggggtggaacccagaactggcattcctaacagtttccaggggatgctaatgctggtgtcaggacctcactgtgagaactgctgacttaagatagcactcgtccaaaaacatggactcctcaacagagccacccaagcagctgcccggctggtaggtgagcctgggcaggcatctatcatttggcagtgatggcagccacattcacgtttccactg

SEQ ID NO: 33335 - DNA, 485 bp, Homo sapiens
  misc_feature (1)...(485): n = a,t,c or g
gtgnnnnnnntttgaaaccntatgatnnnnnnnnnnnnnnnnnnnnnnnnnnnnnnnnnnnnnnnnnnnnnnnnnnnnnnnnnnggcacgagctggaagatgagactcgaggttttctgcatgcctggaagtgcacatgctcatctacagctttcttggaagaagaaagaaacaaaaactgagatttagaacaccaggtctgtttccactggcggccactcttgggcactggagaccagcaagagctttgtttttaaaaggctcttccatggcagatattcgcagaggcatcagggctacacttaaatgaagggctccggctggcacctgaggagcggcatggtgggcacgttgatcaccaccatcctgccgcactggcggaggacagcgcacgtgggcaccaacatcctcacggccgtgtcctacctgaaagggctctggatggagtgtgtgtggcacagcacaggcatctaccagtgccagat

SEQ ID NO: 33336 - DNA, 487 bp, Homo sapiens
  misc_feature (1)...(487): n = a,t,c or g
gnnnnnnnnntttnnntccnnnncttgaaaccnnttgacnnnnnnnnnnnnnnnnnnnnnnnnnnnnnnnnnnnnnnnnnnnnnnnnnnnnnnnnnnggcacgagcaatgggnnnnnnnnnnnnnnnnnnnnnnnnnnnnnnnnnnnnnnnnnnnnnnnnnnnnnnnnnnnnnnnnnnnnnnnnnnnnnnnnnnnnnnnnnnnnnnnnnnnnnnnnnnnnnnnnnnnnnnnnnnnnnnnnnnnnnnnnnnntcctttgagaaatcgtataagtaactaaagaaactttacggtaatgcgaaagctatgtgcattcagtagaaagcagtcaatcctctcttgtgatgctgagtagcagcagggagccacagctgccagtcagccacacagtctcagtttagggtattttcagcttacagtgggttatcatgggtcatgagttatgggaatatcatgatcagagagcatctgtaaagtgagaaattaga

SEQ ID NO: 33337 - DNA, 458 bp, Homo sapiens
  misc_feature (1)...(458): n = a,t,c or g
ccnnnnnnnnnnnnnnnnnnnnnnnnnnnnnnnnnnnnnnnnnnnnnnnnnnnnnnnnnnnnnnnnnnggcacgagaactggactttatcaaaatgaaaaactgctgctcttcaaaagaactgtgtggaaagtatgaaaagccataaactaggagaaaatgtttgcaaagcatatatcaaataaataatttatattcagaatatagaaatgactatcaaaactcactaagnnnnnnnnnnnnnnnnnnnnnnnnnnnnnnnnnnnnnnnnnnnnnnnnnnnnnnnnnnnnnnnnnnnnnnnnnnnnnnnnnnnnnnnnnnnnnnnnnnnnnnnnnnnnnnnnnnnnnnnnnnnnnnnctattagaatggcttaagttaaagatcagccagactaagtgatagcaaggatggggaggaactggacctctcatacactgctggtgggaatatcccatgat

SEQ ID NO: 33338 - DNA, 472 bp, Homo sapiens
  misc_feature (1)...(472): n = a,t,c or g
tccntncctttgannnnnnnnnnnnnnnnnnnnnnnnnnnnnnnnnnnnnnnnnnnnnnnnnnnnnnnnnnnnnnnnnnnnnnnnggcacgaggtgtcagcctggctttgtcatgaaaggaccccccgcaccgtgtgcaatgccaggccctgaacaaatgggagacagagctaccaagctgctccaggggtgtgtttgcctgaggcctagaagggccctgcaagtgacatgcattgctgttggatcaggagatgagtatttgtttagggggagggatgtatgttgaggagggtggaaaagtaagttttgggggaagaagcatgaaattaaaaatctggggtgtgcatgcacccatgcatangtgtcttcattttgaaangcatgaccttaattatncannaacnctggtattttgnactcacctattantcaattgnangncntagtnccagctgcnatctctctcanttat

SEQ ID NO: 33339 - DNA, 485 bp, Homo sapiens
  misc_feature (1)...(485): n = a,t,c or g
gngnnnnnnnntttgaaacccttgatnnnnnnnnnnnnnnnnnnnnnnnnnnnnnnnnnnnnnnnnnnnnnnnnnnnnnnnnnnggcacgagggagaagagagcaccagcctgagagtcaagggatctaaggcttcttttgtcaactgagcatagggtcaataaaaacaaaccaaagatgtagggcctagcttcagttttgtccataatttaccatgcagccttgtgaggttacctccccgccctacagtttggtttacttcagctgtaaaatggagaagggtgggaccaggggtattttagtgggatgatctctacagcttcttacagctctggggtcagataatgtaacttaaaacctatgtgtgnnnnnnnnnnnnnnnnnnnnnnnnnnnnnnnnnnnnnnnnnnnnnnnnnnnnnnnnnnnnnnnnnnnnnnnnnnnnnnnnnnnnnnnnnnnnnnnnnnnnnnnnnnnnnnnnnnnnnn

SEQ ID NO: 33340 - DNA, 457 bp, Homo sapiens
  misc_feature (1)...(457): n = a,t,c or g
ntttgnaaaccgctatgacnnnnnnnnnnnnnnnnnnnnnnnnnnnnnnnnnnnnnnnnnnnnnnnnnnnnnnnnnnggcacgagggctcggcnnnnnnnnnnnnnnnnnnnnnnnnnnnnnnnnnnnnnnnnnnnnnnnnnnnnnnnnnnnnnnnnnnnnnnnnnnnnnnnnnnnnnnnnnnnnnnnnnnnnnnnnnnnnnnnnnnnnnnnnnnnnnnnnnnnnnnnnnnnnnnnnnnnnnnnnnnnnnnnnnnnnnnnnnnnnnnnnnnnnnnnnnnnnnnnnnnnnnnnnnnnnnnnnnnnnnnnnnnnnnnnnnnnnnnnnnnnnnnnnnnnnnnnnnnnnnnnnnccttttgtcctctcagcaggctctagataaattcataagctacttattaaatatctaatatgtaaagcatgtgttacttacatgtacttctgtaaaaaaaaaaaaaa

SEQ ID NO: 33341 - DNA, 471 bp, Homo sapiens
  misc_feature (1)...(471): n = a,t,c or g
aaaccctnnnnnnnnnnnnnnnnnnnnnnnnnnnnnnnnnnnnnnnnnnnnnnnnnnnnnnnnnnnnnnnggcacgaggtccatcaatgataagaatcatctgggggccctgttgagaataaaaattcctgggcccatcccaggccccatgaattagaccctccagggagcggcctgcaaggctgtatgttggatgagaactacaggtggctgttatcaccagggaaattaggaaaacactttcaagagatgagtggataggctctgggagtttgagacccttcgaaattctacatagacctaagtgccatttttgggggggtgtccatagcttcaatcatattatcaaaagggtctgaaccaaaaaggccaccaagagacagcatggaggataaaaacacatacacgtgtccttgatctgatgaaatagtccacagacagcgggcagaccctgtgtcttcttggcgacag

SEQ ID NO: 33342 - DNA, 474 bp, Homo sapiens
  misc_feature (1)...(474): n = a,t,c or g
cnnnnnntttgnaaaccnctatgacatgattacgaatttaatacnnnnnnnnnnnnnnnnnnnnnnnnnnnnnnnnnnnnnnnnnggcacgaggggagaagcgataactcccagggaggacatcgtgaaatttctgtgattggatggagagctagcatcttcattcccttcccacttgaagttctgatgcttttctcggaagacatgtcttccagctgtctgttgagaattagtgttccatagtaagttaattgtgggaaagaaaattggtgccaatagcttttcagggttggactattactgataattggtgaggtccatacatagttaaacagcacctatatataacggtaaatgctgctgttcaatttcggctccagagcgtttagtaacattagttacagcaagtgctgatgattacattgaagctttgtaaaatgataaaaaattagaatattggaaatgcattctgta

SEQ ID NO: 33343 - DNA, 474 bp, Homo sapiens
  misc_feature (1)...(474): n = a,t,c or g
ttgaanaaccgctatgactgattacgaatttaatacnnnnnnnnnnnnnnnnnnnnnnnnnnnnnnnnnnnnnnnnnggcacgagtgaagagaccagtcatatgaactctttactcaagaactgaaggcttatgagccaggtgtagtggcactttgggaggtcaaggcannnnnnnnnnnnnnnnnnnnnnnnnnnnnnnnnnnnnnnnnnnnnnnnnnnnnnnnnnnnnnnnnnnnnnnnnnnnnnnnnnnnnnnnnnnnnnnnnnnnnnnnnnnnnnnnnnnnnnnnnnnnnnnnnnnnnnnnnnnnnnnnnnnnnnnnnnnnnnnnnnnnnnnnnnnnnnnnnnnnnnnnnnnnnnnnnnnnnnnnnnnnnnnnnnnnnnnnnnnnnnnnnnnnnnnnnnnnnnnnnnnnnnnantttcaggccnancnttcttttgaaaanntgtaaattattgtttnnggtaatcgggg

SEQ ID NO: 33344 - DNA, 479 bp, Homo sapiens
  misc_feature (1)...(479): n = a,t,c or g
aannttgnannnnnnnnnnnnnnnnnnnnnnnnnnnnnnnnnnnnnnnnnnnnnnnnnnnnnnnnnnnnnnnnnnnnnnnnggcacgagaaaagcagttctaagcgcagccaggggctcttggtcaagcagagcctttgactgcaggatccctgagtccattgcatctttccattagactggatcttcttgttttgtttttgtttttgtttttgtttcctccaagccacctttgtttccctatctttttattaagaaaatttcaaatatttagaaaattgaaaggatgatgcattgaacacctatagaaccatctactttgtcatattagttttatgagtggatttgtttttatttttgctagaccatttaaaagcaagtaaatctgtgtgcctctctgaagaatagaggcattctcccttataaccacaatcccattattgtacctaaggcagttaacaaatttctattaacattagg

SEQ ID NO: 33345 - DNA, 479 bp, Homo sapiens
  misc_feature (1)...(479): n = a,t,c or g
cccnnnnnnnnnnnnnnnnnnnnnnnnnnnnnnnnnnnnnnnnnnnnnnnnnnnnnnnnnnnnnnnnnggcacgagcatgcaaaatgaagaaagaatatttcaggctgaagaaacaccaagtgcataggtcctgaaacgagaacatatggtttgtttctggaattataagcagatcagctggagcataggaagcaaaagggagagtggtaggaaatacaattggagaggaagcccaaggctaaatgatagagtggcttgcaagccatactacaaacttcaggttttactgttgggcattatgggaatgctattacctgttatgcagtattaggaagactattttggcagctatgaagcaaatagggagtcaagagtggaagcaaggcagtcactanagaaaactgtagtaatccaagagaatgatactgttttggatganggttgntgtagtanaggaggtaaaggggaaaaaaaaagg

SEQ ID NO: 33346 - DNA, 474 bp, Homo sapiens
  misc_feature (1)...(474): n = a,t,c or g
nnnnnnnnnnnnnnnnnnnnnnnnnnnnnnnnnnnnnnnnnnnnnnnnnnnnnnnnnnnnnggcacgagctggaagatctcgaaatcacagggtgaaagcaacatgaatgaacagagttagaaacaaagaactaacggaagagagaacagataaagggaaggaagacagaggaatcaaatacagccatcctgaaataacttttgctgactacaggggtgaataatagagtcttttaaaaaataatctaggttctaaaaggtactaaatgcgtgactcagaaaactgaaccgtattgtaatgagcttcaggtacctgttacnnnnnnnnnnnnnnnnnnnnnnnnnnnnnnnnnnnnnnnnnnnnnnnnnnnnnnnnnnnnnnnnnnnnnnnnnnnnnnnnnnnnnnnnnnnnnnnnnnnnnnnnnnnnnnnnnnnnnnnnnnnnnnnnnnnnnnnnnnnnnnnnnnnnnnnnnn

SEQ ID NO: 33347 - DNA, 490 bp, Homo sapiens
  misc_feature (1)...(490): n = a,t,c or g
ttgcccccccttcgacacccnnnnnnnnnnnnnnnnnnnnnnnnnnnnnnnnnnnnnnnnnnnnnnnnnnnnnnnnnnnnnnnnnnggcacgaggcccagtttttataagcctatgataactgcttttgtaggctgtctggagaaatgttctggctgcttacctggagtaacttaaggtgatttttttttttaaggaattntccaaaaaaanccntnanaaaactgttaantttctaaaananggaagttnatngtttnttcccccctttttcttctnttcatccaaccnttggaaaagtaatattgttnagggctgctttttttcnccttcttcttttntttttttttnnggacnnnagtttnntttggntccccngnnnnanncnngggggnnaaattannnnnannngacccnccccnntnggggtnnnnccnantttngggccnaaanaantttnggggntngggcnanngnanttnttnnggccg

SEQ ID NO: 33348 - DNA, 486 bp, Homo sapiens
  misc_feature (1)...(486): n = a,t,c or g
ttgacccccctttgnnancnnnnnnnnnnnnnnnnnnnnnnnnnnnnnnnnnnnnnnnnnnnnnnnnnnnnnnnnnnnnnnnnnnnggcacgaggagagctagcaccatgagcttcaaccctggacaacacctgaaatcaattcttataatgggaagccaaataggtatcaccaccttaatgtctaaaacatgccgaaagggtaatgtgtccaaaactgaacttccgacctctcctttacactgatgttccagtcatttctttatcacttagtggcaactccatttttccagctgctcagttaaaaatactgagtaggagcgnnnnnnnnnnnnnnnnnnnnnnnnnnnnnnnnnnnnnnnnnnnnnnnnnnnnnnnnnnnnnnnnnnnnnnnnnnnnnnnnnnnnnnnnnnnnnnnnnnnnnnnnnnnnnnngcacanagtgagacctnatctnaaaaaacaaaanaanaannaaagannaagaa

SEQ ID NO: 33349 - DNA, 492 bp, Homo sapiens
  misc_feature (1)...(492): n = a,t,c or g
tattgncccnctttganatcaccnnnnnnnnnnnnnnnnnnnnnnnnnnnnnnnnnnnnnnnnnnnnnnnnnnnnggcacgagcacaatttataataaatggaggaaggattttgaaaatatgttttttccctctaagcatgtatcctcaggaaatctttatttacatcagaccttatgataacttatttaggaatataactatcacaccacagcaggtcaaacaaactacacttttcttctgattgttcttacatagagcataaagctgactttgaattctgctacagctccagccttcatgattaggccgtgctgctttccagaaggtttcaggaatactggttatgcaagtgacacttcctgtttacctatttttaataattagnggctgaataanatgaattgtgaccacaaagtgttctaatgatatttatttgaaatgtttaacttgngtantagttgtgccaaacaactgtagcagttcagttta

SEQ ID NO: 33350 - DNA, 408 bp, Homo sapiens
  misc_feature (1)...(408): n = a,t,c or g
gngngnnntnntttttanntntgaantnccttagccnnttcnnnnnnnnnnnnnnnnnnnnnnnnnnnnnnnnnnnnnnnnnnnnnnnnnnnnnnnnnnnnnggcacgagatggaaccaggttatgaagagccttgcacatttcagcgggtcaaatgcaagggcttgtgttttccttggtaggtgggagaagtcacgaagggtttcaaattgcatatgataagggcatagctagactttaggaagatgcactcagcacagggagtttttgattctgactctgtaaggtgctgtaaaagtttagtgagtttgtatttaaaaggacttcagaggagaggtaatttagcagcagcttctaagccctgatgtgggaccaagaacacaggagcctctttaactgtggagctgc

SEQ ID NO: 33351 - DNA, 481 bp, Homo sapiens
  misc_feature (1)...(481): n = a,t,c or g
ggnnttnnntnttgnnaaagtgaactnttggaatcccctgattattaatntaatacgacncnnnnnnnnnnnnnnnnnnnnnnnnnnnnnnnnnnggcacgaggggcattaagctgaggaagagacatgctgtggtctctctggtttctgtgttcggaataatctatagggtgccaagagtggaagtagggaacccctgtcagaggcttgtgcagtggttcacgtgtgagatcatgagtggtagaggggaagaagagaaaagtgcttggatcaaatataagatttagtaattggatgtggaaataagcaaaaaaggaggcatcggctgtgactctagactgttggcttaagccataggtggggaatatctagccctctaaatttgaggtgcctgttagatagccaaagaaagatgtcaaataagcagttgaataaatgtatttgaagctctaaagataggcccgggttgggagatagcagt

SEQ ID NO: 33352 - DNA, 493 bp, Homo sapiens
  misc_feature (1)...(493): n = a,t,c or g
gtgnnnnnnnnttgaanncccnnnnntttgaaancnnnnnnnnnnnnnnnnnnnnnnnnnnnnnnnnnnnnnnnnnnnnnnnnnnnnnnnnnnnnnnnnnnnggcacgagggcgtgagccactgtgcccagcctatatttttattcctaaataaaattattttcccttacttccttctacggcctcctctgcttgcccagctaggctgaaccacaggaggccaggacaggattctcaatctcagcactattaacatttggggatggaccattctttgttgtgggggcctaccttatgcattataggatattcagctgcatccctggcccccaccctctacatgccacagcacccgctccagtcgcggggtctctggacattgccacatgtgcccaggggaggtggggtagattgcccctgcttgagaaccactgggctcaaagagctttctgcagtgatggaagcggtctctgcaccatccagtccagcagcc

SEQ ID NO: 33353 - DNA, 434 bp, Homo sapiens
  misc_feature (1)...(434): n = a,t,c or g
nnnnnnnnnnnnnnnnnnnnnnnnnnnnnnnnnnnnnnnnnnnnnnnnnnggcacgagtggtgctaatgctacacctaagggatttcaaagctcatttccaaacatcatctcatttgaacttaaccagaattgggagatggactgtgcaattatttttacccagcattccaaaaggggaaaaataagcatctgaaaatgacttccccaaggtcacacaaagaaccaagacaagacactacgtttcctaactcctattactctgttttctattgtattatatactttatgcttgaacataaccaggcaagtcattttccttgaaaactctcaggagaaatgttctctagtcccaatcccttgtctaatttctacttaaacctatatcctcccccatttctccttctcggtaggcatgggggatcccacactgcaa

SEQ ID NO: 33354 - DNA, 247 bp, Homo sapiens
  misc_feature (1)...(247): n = a,t,c or g
anacctctnnnnnnnnnnnnnnnnnnnnnnnnnnnnnnnnnnnnnnnnnnnnnnnnnnnnnnnnnnnnnnggcacgagcaataaatgagagtggagactatattttatttgtctaaaatatatgttttttaaaatgtgttcctcaatagctggtaaaggacaaagccagggagttgagagcaaagggtatgcacgagctgagatagcaggatatttggaaaagttattgtttctttttttttttttt

SEQ ID NO: 33355 - DNA, 471 bp, Homo sapiens
  misc_feature (1)...(471): n = a,t,c or g
ttgnnnntttnnnnnnnnnnnnnnnnnnnnnnnnnnnnnnnnnnnnnnnnnnnnnnnnnnnnnnnnnnnnnnnnnnnnnnnnnnggcacgaggggactgatattacttctgtgactcttggggatacaacagctgtcaaaaccaaaatactcttaaagaaagggagaggaaatctggaaaaaaccaacttggacctcggcccaactgccccatccctggagaaggagaaaaccctctgcctttccactccttcatctagcactgttaaacattccacttcctccataggctccatgttggctcaggcagacaagcttccaatgactgacaagagggttgccagcctcctaaaaaaggccaaagctcagctctgcaagattgagaagagtaagagtcttaaacaaaccgaccagcccaaagcacagggtcaagaaagtgactcatcagagacctctgtgcgaggaccccggg

SEQ ID NO: 33356 - DNA, 444 bp, Homo sapiens
  misc_feature (1)...(444): n = a,t,c or g
nnnnnnnnnnnnnnnnnnnnnnnnnnnnnnnnnnnnnnnnnnnnnnnnnnggcacgaggtcgataacatttttagtagcaggaatgtctaaacctcattttttgtttttgttggctctgcaacccgcctctatggccctagaccttcagtcttgagttgacagtgttcctgaaagtaaggggattacaaaggatccatcagcttgatacaaagtagaaaatgcaatgaagaacagttgctaagaatttagtggaagcagaaactcagctttgaaaagtaaccacccctgcccgtcctcccacctccgattccaagcacccagagatattcgtccagagatattcagggatgccaagttacctaacatatatggcgtgtaggtttgagacaatttacttaaatcttggaagacaaggttctatggggttgaatacattcccctcg

SEQ ID NO: 33357 - DNA, 411 bp, Homo sapiens
  misc_feature (1)...(411): n = a,t,c or g
atttggccctcgaggccaagaattcggcacgaggtgactgtaatggctgtctagtattctgatgcaggggtttgggtaccctgctttaatttagcccgtcttcctgttagtggctgtgaaagttgtttcctggaacagataaatgcggcttgtcttttttccatttactggagtaacttggagatctttttgtagccccacatatggatctcctgtgcaatttagccactcctacttccccattggagcacattttccgtgctggcatgagcattttgcacatagaattttgcattcttgtgggaatgtagttgtattccttcttgaaagttagattctaagtcanaggtatatttttaaattttcatagctaccaccatngactacnctncaaacaggttgcangaatta

SEQ ID NO: 33358 - DNA, 469 bp, Homo sapiens
  misc_feature (1)...(469): n = a,t,c or g
tttgaaatccttgacnnnnnnnnnnnnnnnnnnnnnnnnnnnnnnnnnnnnnnnnnnnnnnnnnnnnnnnnnnggcacgaggagcttgtttgctctgaaggcaggtaggtaggtgtgcatttgtgcctgtgtccagctttccatgttagctgagaagtcagaaaatgctagctttcttgttggtaagaagtaggccaggtatgccatagcatactttaaaaatgcaatgagaattcgttccagcatagaatgatttcaagaggccaaccacaaggtaacagcaaaggacatcctcctttctcgaaggactaaagtacctggagctatgaagagccccatgttaatcccaagatagagggattacatccttggttcttcttcttcttttnnnnnnnnnnnnnaaacngggtnncnntttntnccccnnggnngnannnnttnggcnnnngcccacncccttannncctaa

SEQ ID NO: 33359 - DNA, 502 bp, Homo sapiens
  misc_feature (1)...(502): n = a,t,c or g
gnnnnnggnnngtgnnnttntnnnatncngnaaantngnnnnnnnnnnnnnnnnnnnnnnnnnnnnnnnnnnnnnnnnnnnnnnnnnnnnnnnnnnnnnnnnnggcacgnnnnnnnnnnnnnnnnnnnnnnnnnnnnnnnnnnnnnnnnnnnnnnnnnnnnnnnnnnnnnnnnnnnnnnnnnnnnnnnnnnnnnnnnnnnnnnnnnnnnnnnnnnnnnnnnnnnnnnnnnnnnnnnnnnnnancgngccnctacactncanccttggngacagagtgagantntgtctnnaaacaaacaaacaaaaaaaggntgaatgccagacatactgcggtatgcccnaatccnganacaccactcagtancgaanngaataaatnntcggtacacagtgtcttaaanctgttccagctgctataacaaagtaccttagactgcataatttannnnnnnnnnnnnnnnnnnnnnnnnnnnnnnnnnnnnnnnnnnnnnnnnnnnnnnnn

SEQ ID NO: 33360 - DNA, 492 bp, Homo sapiens
  misc_feature (1)...(492): n = a,t,c or g
gnnnagnnnntgnnttntgnatacngnaactntatgaccnnnnnnnnnnnnnnnnnnnnnnnnnnnnnnnnnnnnnnnnnnnnnnnnnnnnnnnnnggcacgagcaaactttttgaaacttggattcttaagcaagtgtttttctggtaattctcagtgttactcaaaccaggaaggaatgcttatttggcctgtgagtttattaaattactgctgtgcagagacagcgcgtctgctctgcgtccttgttctgaaggttggccatgcagttagaatgtgggatgcccacgtgcaccagcacaggacatgcatggtgcctttttgcactcacttaaatacaaattgtgccagtggctttaaaagtattnnnnnnnnnnnnnnnnnnnnnnnnnnnnnnnnnnnnnnnnnnnnnnnnnnnnnnnnnnnnnnnnnnnnnnnnnnnnnnnnnnnnnnnnnnnnnnnnnnnnnnnnnnnnnnnnnnnnnnnnnnnnn

SEQ ID NO: 33361 - DNA, 489 bp, Homo sapiens
  misc_feature (1)...(489): n = a,t,c or g
gnnnngttgnnttntgnnatcnnaaatnngatgacccgttnnnnnnnnnnnnnnnnnnnnnnnnnnnnnnnnnnnnnnnnnnnnnnnnnnnnnnggcacgagcctccctctctccacctcccctctctctctccctccctctccacctcccctcaaccacatcgcatcaaagagaggggcttccctctctccaccacggttacttctctctctaccttccttcatcttccttcctttagcaaaataaaattaggaaactcactcaggacattgtgataatgacatttctataactagtaatgactcctgtaagctgagtggaaatggggtctttataacatggtgcccatgtgactaaagggctgtgccctgctccatggcaatagactgcccacttttccctccaaggcacggcactgacactatgattcccttaacttttaaagtgaactgtgaagaccaagaccatccctaactagagtttcatgt

SEQ ID NO: 33362 - DNA, 479 bp, Homo sapiens
  misc_feature (1)...(479): n = a,t,c or g
tgnnnntttggaannncggatacccnnnnnnnnnnnnnnnnnnnnnnnnnnnnnnnnnnnnnnnnnnnnnnnnnnnnnnnnnnnnnnnnnnggcacgagggttgcatggagtaggaactctaggttggaaatccctttctctcagaagttagaaagcattgcttttctagatttcagaattgccattgagatgtgtggtgtcattctaaaggcttatgctttgaatggatatcccctcctgaaagttcttaggatttcctcgtcatcctctaatattctctctgttgtcatgaagtttcattgtaagacttggtgtgagtcttttcccatccattttactaggcttccagtgggctttctcaatctagaaactctgcccttccattctgaacagtttgctagagttttgttggtttcgtgtgtgtgtatttttatttttatttatttattttggagatgggtgacagagcgagactctg

SEQ ID NO: 33363 - DNA, 489 bp, Homo sapiens
  misc_feature (1)...(489): n = a,t,c or g
gnnngggnnntngnttnnnntctgantnnngatactccttgacatgacnnnnnnnnnnnnnnnnnnnnnnnnnnnnnnnnnnnnnnnnnnnnnnnnnnnnnggcacgagaattgaaattttaaaactctttcaaagctctttgtacactagaaaaaaaaacttagtgaatggactcaacagcagaatggagataaaggaaagaaatagtgaactggatgatagaacaatagtaactacttagtctaaactgcagagagaaaattgaggaaacaaatgaacactacctcagggacttataggactgtaacaaaagctgacgttatatgatgcatcataagtcctagaaggagaggaaaaaggaatggctctgaaaaatactcaaagaaataatggctgaaaacttcttaaatgtggcaaaaagtatataaacctacagattgaagacagccccaaagaggttaaacccagacaaatccacatgatgacga

SEQ ID NO: 33364 - DNA, 484 bp, Homo sapiens
  misc_feature (1)...(484): n = a,t,c or g
ggnnggnnnntggnttttgacanctaaactngttgaccgacacgaattaatacgactcnnnnnnnnnnnnnnnnnnnnnnnnnnnnnnnnnnggcacgagggtttttctatcatggtcagtctgcaaatcttccaaaccattatgatctgcttcctttttaaacataagttccaatttcaaatcatctctttgtgaacacatataaccatacactttcaggaaannnnnnnnnnnnnnnnnnnnnnnnnnnnnnnnnnnnnnnnnnnnnnnnnnnnnnnnnnnnnnnnnnnnnnnnnnnnnnnnnnnnnnnnnnnnnnnnnnnnnnnnnnnnnnnnnnnnnnnnnnnnnnnnnnnnnnnnnnnnnnnnnnnnnnnnnnnnnnnnnnnnnnnnnnnnnnnnnnnnnnnnnnnnnnnnnnnnnnnnnnnnnnnnnnnnnnnnnnnnnnnnnnnnnnnnnnnnnnnnnnnnnnnnnnnnnnnnnnnn

SEQ ID NO: 33365 - DNA, 489 bp, Homo sapiens
  misc_feature (1)...(489): n = a,t,c or g
gnnnngnaggntgnntttngnatacnnaannngnnnnnnnnnnnnnnnnnnnnnnnnnnnnnnnnnnnnnnnnnnnnnnnnnnnnnnnnnnnnnnnnggcacgagcaaactgtgcttcatgcagaatgggcactctaatggaaggatttggctccaggatagatacaaaactgtacctggtgtttgttggtgtaaagtggtagttaagaagagaacaatgacactacaaaatacaagccaaaaagggaaagtgttagcatttaacatcatagtttatggatattgggatacattgaccattgctttcttctttggtgtccttgatagttattgattctgcagaactgcaggcgtatccagcacttgtggtggagaaaatgttgaaagctttaaaattaaattccaatgaagccagattgaagtttcctagattacttcagattatagaacggtatccagaggagactttgagcctcatgacaaaagagg

SEQ ID NO: 33366 - DNA, 490 bp, Homo sapiens
  misc_feature (1)...(490): n = a,t,c or g
gnnnnggnnnntnnnnttnnnnntctgaaaccgttgacnnnnnnnnnnnnnnnnnnnnnnnnnnnnnnnnnnnnnnnnnnnnnnnnnnnnnnnnnnggcacgaggaggaatcgctggtcgccagcgaggggtgcggcttcaatttcaataactttattggtggcctgatctgcagaacagccatcacatcagtggcccttggaggagggagcgcatcgcccgaggtggtccccgacgagctgcagccatgggaaacaccaccagcgaccgggtgtccggggagcgccacggcgccaaggctgcacgctccgagggcgcaggcggccatgccccggggaaggagcacaagatcatggtggggagtacggacgaccccagcgtgttcagcctccctgactccaagctccctggggacaaagagtttgtatcatggcagcaggatttggaggactccgtaaagcccacacagcaggcccggcccactgttatt

SEQ ID NO: 33367 - DNA, 490 bp, Homo sapiens
  misc_feature (1)...(490): n = a,t,c or g
gnnnnnggnnnntnnnnttnnnnntctgaaacncgttgacnnnnnnnnnnnnnnnnnnnnnnnnnnnnnnnnnnnnnnnnnnnnnnnnnnnnnnnattcggcacgaggaagaagcgggtagagaaagaaatagttagcctcatgcaaaaagtagggcatatgagagcctgagatatggcttaagaagagtattgtttgagaagtttnnnnnnnnnnnnnnnnnnnnnnnnnnnnnnnnnnnnnnnnnnnnnnnnnnnnnnnnnnnnnnnnnnnnnnnnnnnnnnnnnnnnnnnnnnnnnnnnnnnnnnnnnnnnnnnnnnnnnnnnnnnnnnnnnnnnnnnnnnnncngaaaagtttaaggtntgttggcaggtagncctaaanggggtttactgccaggancagttaggattcaaanancaaaantttgngggtaaaaggatgtntggcaggttgttggngggggatntntagccccaacntccagtca

SEQ ID NO: 33368 - DNA, 497 bp, Homo sapiens
  misc_feature (1)...(497): n = a,t,c or g
gnnnnaggnnggnnnntttgnnntntggacncnntnatactcnnnnnnnnnnnnnnnnnnnnnnnnnnnnnnnnnnnnnnnnnnnnnnnnnnnnnnnnnnnnnnnnnnggcacgagatttccttggccgaggatggaagatttggagaatcatgtccatgctggcccaggacccagccatctggcccaaaggcacaagctcctggccctgttgagttgagagtttccaagaagcatccagaagatcccaagggagagaaggaaaatggctgataatgattgtcttcctaatatgcaagttctcacttcctacttccagcatcggccttcctggccttgtcttttttttgtttccctggagtataatgggaagttgcatgctgcctcctgggttttatcccagatagctctggctttcttgctgcccacaggggcctggggcaggaaggagacttgctgagatgccatggagtgcccatctggtcactggcagtctgg

SEQ ID NO: 33369 - DNA, 465 bp, Homo sapiens
  misc_feature (1)...(465): n = a,t,c or g
ggngtctnacagcttgacatgattnnnnnnnnnnnnnnnnnnnnnnnnnnnnnnnnnnnnnnnnnnnnnnnnnnnnggcacgagctgggggagtgtgggtagaatggggtcagaagagaagctgtaaaattgcagtgtgacttgatgtctgaggtctcaattggcttcattgatcttgtagatggaagtgtggaggagaaagaacgactataaaaataaaggaattgagctgagtgcagtggcttatgcttaannnnnnnnnnnnnnnnnnnnnnnnnnnnnnnnnnnnnnnnnnnnnnnnnnnnnnnnnnnnnnnnnnnnnnnnnnnnnnnnnnnnnnnnnnnnnnnnnnnnnnnnnnnnnnnnnnnnnnnnnnnnnnnnnnnnnnnnnnnnnnnnnnnnnnnnnnnnnnnnntgggaggatcacttgagcccagagttcgaggctgagtgagctatgattttg

SEQ ID NO: 33370 - DNA, 466 bp, Homo sapiens
  misc_feature (1)...(466): n = a,t,c or g
ggcntgttaccgttnnnnnnnnnnnnnnnnnnnnnnnnnnnnnnnnnnnnnnnnnnnnnnnnnnnnnnnnnnnnnnnggcacgagcggcacgagcgtccatcctaggtacaatgctcgtacctagatcatagggagatgtgctctgctacaagggtgacgtgtgatgagtgttccttgtattgtaattgttttggggcgccatgagctgtgcccatataagatacannnnnnnnnnnnnnnnnnnnnnnnnnnnnnnnnnnnnnnnnnnnnnnnnnnnnnnnnnnnnnnnnnnnnnnnnnnnnnnnnnnnnnnnnnnnnnnnnnnnnnnnnnnnnnnnnnnnnnnnnnnnnnnnnnnnnnnnnnnnnnnnnnnnnnnnnnnnnnnnnnnnnnnnnnnnnnnnnnnnnnnnnnnnnnnnnnnnnnnnnnnnnnnnnnnnnnnnnnnnnnnnnnnnnnnnnnngcaag

SEQ ID NO: 33371 - DNA, 465 bp, Homo sapiens
  misc_feature (1)...(465): n = a,t,c or g
ggcntntttcnnnnnnnnnnnnnnnnnnnnnnnnnnnnnnnnnnnnnnnnnnnnnnnnnnnnnnnnnnnnnggcacnnnnnnnnnnnnnnnnnnnnnnnnnnnnnnnnnnnnnnnnnnnnnnnnnnnnnnnnnnnnnnnnnnnnnnnnnnnnnnnnnnnnnnnnnnnnnnnnnnnnnnnnnnnnnnnnnnnnnnnnnnnnnnnnnnnnnnnnnnnnnnnnnnnnnnnnnnnnnnnnnnnnnnnnnnnnnnnnnnnnnnnnnnnnnnnnnnnnnnnnnnnnnnnnnnnnnnnnnnnnnnnnnnnnnnnnnnnnnnnnnnnnnnnnnnnnctgaaatcttgaatgtgttcagtaggcatcttcttacccaatcattggctatttctggtaacctaaaatctcccgaggaattctgactgcgtcaaaaaaccatactgaggctgggtgtggtagctcatgcctgtaat

SEQ ID NO: 33372 - DNA, 468 bp, Homo sapiens
  misc_feature (1)...(468): n = a,t,c or g
ggagntntnacnnnnnnnnnnnnnnnnnnnnnnnnnnnnnnnnnnnnnnnnnnnnnnnnnnnnnnnnnnnnnnnnnnnnnggcacgagtccctgctctgagtggatgcagccaggcagcctggggtgaccttcagggcttcctgccctccccatgcacacacctacccggagtccagagggccagctttatagatgtgcttgctgagacaacacctctgtctccacctccctaaggcccctgccccacccattgctgtcaacgagatgtctattcccctggccactgccacctctgggacccaggacttggccctccttcctgctggtaactgctcctggtacccctcctccaaggccccttgagaagcctgtggggccggcaacccctggaacagactctgctcacagagactggtggctagagctgggggtgtgtatttttccaatgcctcctctactgaccttta

SEQ ID NO: 33373 - DNA, 467 bp, Homo sapiens
  misc_feature (1)...(467): n = a,t,c or g
ggnnnnntnaccgttnnnnnnnnnnnnnnnnnnnnnnnnnnnnnnnnnnnnnnnnnnnnnnnnnnnnnnnnnnnnnnnnnggcacgaggggggaggtctcaacagagtgggatttgaggggcctgacactgctagggtccctggatgcctcatcgtataccttctttggaggatccactgtcctgtaggagtttgcagttttgctgaggagtcagcagtcgcacagggagagaaatggttatgaagaaaacaggaagcctgtaagtaactgaatgcaaagggaaaaggaactcccatttgctgtgtccctatgccatgctcttcatagatgttacctttttacctcatgtattggttccctgagatnnnnnnnnnnnnnnnnnnnnnnnnnnnnnnnnnnnnnnnnnnnnnnnnnnnnnnnnnnnnnnnnnnnnnnnnnnnnnnnnnnngtcagtaccaccgggctg

SEQ ID NO: 33374 - DNA, 462 bp, Homo sapiens
  misc_feature (1)...(462): n = a,t,c or g
ggnnacntntcnnnnnnnnnnnnnnnnnnnnnnnnnnnnnnnnnnnnnnnnnnnnnnnnnnnnnnnnnnnnnggcacgagggtgttgcacgcctgtggtcctgctatttggaggctggggtgggagaatcacctgtgtgtgggaggcagagtctgcannnnnnnnnnnnnnnnnnnnnnnnnnnnnnnnnnnnnnnnnnnnnnnnnnnnnnnnnnnnnnnnnnnnnnnnnnnnnnnattanantgaangnnncttctctaatcnntnaatcatnnnaaaactnaaatctggactnagaggcanaatgcccattcctgaatctnnngaatcttttgcattgttttatttttagctgtgagaaaatatttttaaaatggtatgtccatgtggctatggttttttcaagaatactttattgtggaataattttagattacagaaaaattgcggagatggtctaaa

SEQ ID NO: 33375 - DNA, 463 bp, Homo sapiens
  misc_feature (1)...(463): n = a,t,c or g
ggngacngtnnnnnnnnnnnnnnnnnnnnnnnnnnnnnnnnnnnnnnnnnnnnnnnnnnnnnnnnnnnnnnnggcacgagattttattaaaattttatttacttatttttaaacttttgttttaggttcagannnnnnnnnnnnnnnnnnnnnnnnnnnnnnnnnnnnnnnnnnnnnnnnnnnnnnnnnnnnnnnnnnnnnnnnnnnnnnnnnnnnnnnnnnnnngatggggagtttacagtcctgtctcctcccatcctccaccgaaactatgcatgttctcacttagtagtgggagcnnnnnnnnnnnnnnnnnnnnnnnnnnnnnnnnnnnnnnnnnnnnnnnnnnnnnnnnnnnnnnnnnnnnnnnnnnnnnnnnnnnnnnnnnnnnnnnnnnnnnnnnnnnnnnnnnnnnnnnnnnnnnnnnnnnnnnnnnnnnnnnnnnnnnnnnnnnnnnnnnacg

SEQ ID NO: 33376 - DNA, 461 bp, Homo sapiens
  misc_feature (1)...(461): n = a,t,c or g
ggannnnnnnnnnnnnnnnnnnnnnnnnnnnnnnnnnnnnnnnnnnnnnnnnnnnnnnnnnnnnnnnnnnnggcacgaggtttaatcagctaatgtgagagaaatgacactcttcatggaagctgtgggaggtgaattttgcatatgatctagtggccattttatctctgattggaattcctcttctggtctcatttcagtgttatttgtacctgttctacagtccagccaggactatgaaggtggtgcttatgctgctctttatttgcctgggcaacatgtacctgcacgggctgaggaacctctggcaaatccttttccacataggagtggcttttctgtcttcatatcagatactaacaaggcagcttcaggagaagcagtctgactgtggagtatgaggatgacactgtgatgaatggattctttgattttcttttgaggatcaatctatgtttctt

SEQ ID NO: 33377 - DNA, 467 bp, Homo sapiens
  misc_feature (1)...(467): n = a,t,c or g
gtaccaangactcntttntnnnnnnnnnnnnnnnnnnnnnnnnnnnnnnnnnnnnnnnnnnnnnnnnnnnnnnnnnnnnnnggcacgaggagttctcacaggtatctcaaattcaaatgtctgaaaataatctcaagatgtcccccacccctgtaatctctagttcagtaattggtaccatggtctacccagttgcttgtgccaggaacctgagagtctgtctcaacttatccctctcttcaccctctcttgtctggactctcaacaggttctattggttccaccttctaaatatatctcagtcctgctctttctcctcccatctgtgccaccaccatgatccaaaccaccattacctcttcttgggtgaatacagcagcctctgtatcagttaggattgggttatgctatgtaccacacacaatccctaagtaatagtttaaacaagataaagnttnttctttttt

SEQ ID NO: 33378 - DNA, 340 bp, Homo sapiens
  misc_feature (1)...(340): n = a,t,c or g
ggtgannnnnnnnnnnnnnnnnnnnnnnnnnnnnnnnnnnnnnnnnnnnnnnnnnnnnnnnnnnnnnnnnnggcacgagggaacattttataatgataaaagatacccagaatgcagagatttgagcagaactatcattgagtggtcagagtcccatgatagaggctatggaaagtttcagactgctagaatggaagatttcaccttcaatgacttgtgtattaaactgggttttccttacttatactgtcatcagggagactgtgaacatgtcattgtcattactgacataaggtaggtgacagcacttaagacattttgttacctttttttttttttt

SEQ ID NO: 33379 - DNA, 460 bp, Homo sapiens
  misc_feature (1)...(460): n = a,t,c or g
ggngncnnnnnnnnnnnnnnnnnnnnnnnnnnnnnnnnnnnnnnnnnnnnnnnnnnnnnnnnnnnnnnnnnnggcacgaggccaaaagactcgtcttttccatgttcaggtaatttattctttgggagagcactgtaatcatatatcaatcgtattttaaagtgactttattatttaatgtcaagatgtacccttgatatgaagtagttttatttaataaagcagcaacagatcaagagcacttggtctagaggagtatgctgacaagtggcggcgcctgccttcttctcggggccagtcttcatctcagagctgtctagctttcaggtttgtcttcattgcttccagtctcacctaagcctcatgaatcctcagagacctatttcttaggtgagtagaggagtgtttgtaatcatcactgtgacttgnttttgtgctaaaataccctttttatttttga

SEQ ID NO: 33380 - DNA, 462 bp, Homo sapiens
  misc_feature (1)...(462): n = a,t,c or g
ggngtnnnnnnnnnnnnnnnnnnnnnnnnnnnnnnnnnnnnnnnnnnnnnnnnnnnnnnnnnnnnnnnnnnggcacgaggacagcagcagttgctaaagaaaattgaacacgctcggacttgctagacgcttctcaaaactggacagtcactgccactttgcacattttgattttttttttaaacaaacattgggttgacattaagaatgttggtttactttcaaatcggtcccctgtcgagttcggctctgggtgggcagtaggaccaccagtgtggggttctgctgggaccttggaaagcctgcatcccaggatgctgggtggccctgcagcctcctccacctcacctccatgacagcgctaaacgttggtgacggttgggagcctctggggctgttgaagtcaccttgngngttccaagtttccaaacaacagaaagncattccttctttttaaaatgg

SEQ ID NO: 33381 - DNA, 466 bp, Homo sapiens
  misc_feature (1)...(466): n = a,t,c or g
ggagcnnnnnnnnnnnnnnnnnnnnnnnnnnnnnnnnnnnnnnnnnnnnnnnnnnnnnnnnnnnnnnnnnnggcacgagattattattattattgaaggttttaaagtagaatagtgacccagtatcttgttttttgatggctaattctggccatattgtgtgcaacaaattattggagggcaagaagcttaaagcaggttgtctaattagaagattaatggagtagtccaagtgagggatgaccaaggcatgaaaaactagatacgacacaaattcctactaatattagaaggtaagtatattggatgagtgattgagtatggaggtggnnnnnnnnnnnnnnnnnnnnnnnnnnnnnnnnnnnnnnnccggcgacgatgcgagactctgccaagaaaacaacaaaaaaagagattgtgtgtagggttgtgggatagattaaaacaaaatcttataataggaatt

SEQ ID NO: 33382 - DNA, 496 bp, Homo sapiens
  misc_feature (1)...(496): n = a,t,c or g
gnggnggnnnnnntnnnnttttgganntntgannnnnnnnnnnnnnnnnnnnnnnnnnnnnnnnnnnnnnnnnnnnnnnnnnnnnnnnnnnnnnnnnnnnnnnnggcacgagcgcccggtcatgnnnnnnnnnnnnnnnnnnnnnnnnnnnnnnnnnnnnnnnnnnnnnnnnnnnnnnnnnnnnnnnnnnnnnnnnnnnnnnnnnnnnnnnnnnnnnnnnnnnnnnnnnnnnnnnnnnnnnnnnnnnnnnnnnnnnnnnnnnnnnnnnnnnnnnnnnnnnnnnnnnnnnnnnnnnnnnnnnnnnnnnnnnnnnnnnnnnnnnnnnnnnnnnnnnnnnnnnnnnnnnnnnnnnnnnnnnnnnnnnnnnnnnnnnnnnnnnnnnnnnnnnnnnnnnnnnnnnnnnnnnnnnnnnnnnnnnncttattagcttcttagaatcaacccatatgttattgtgtcatcctttcctaaaattatattttcagattagaacatg

SEQ ID NO: 33383 - DNA, 472 bp, Homo sapiens
  misc_feature (1)...(472): n = a,t,c or g
ttggaaatnggnnnnnnnnnnnnnnnnnnnnnnnnnnnnnnnnnnnnnnnnnnnnnnnnnnnnnnnnnnnnnnnnggcacgagggtatatgaacttgctctggacattatttgagctttaaggacaaataatgctacatgtttagtttatgtatttatttatttattaattnnnnnnnnnnnnnnnnnnnnnnnnnnnnnnnnnnnnnnnnnnnnnnnnnnnnnnnnnnnnnnnnnnnnnnnnnnnnnnnnnnnnnnnnnnnnnnnnnnnnnnnnnnnnnnnnnnnnnnnncatcatgccaggctaattcctttttttttttnnnnnnnngnnnnntnnntgggtngcccntnctaggacnacnngttaaattngggnagttttgnncaaaatnnaaagggggcccnagnnnancatntngaaataaaanttccnggtnaaatctgaagtntnaaangccccanacngggaa

SEQ ID NO: 33384 - DNA, 432 bp, Homo sapiens
  misc_feature (1)...(432): n = a,t,c or g
gnnnnngnnnnnntnnnnnttttggnatttgnaaancnnnnnnnnnnnnnnnnnnnnnnnnnnnnnnnnnnnnnnnnnnnnnnnnnnnnnnnnnnnnnnnnnnnggcacgagannnnnnnnnnnnnnnnnnnnnnnnnnnnnnnnnnnnnnnnnnnnnnnnnnnnnnnnnnnnnnnnnnnnnnnnnnnnnnnnnnnnnnnnnnnnnnnnnnnnnnnnnnnnnnnnnnnnnnnnnnnnnnnnnnnnnnnnnnnnnnnnnnnnnnnnnnnnnnnnnnnnnnnnnnnnnnnnnnnnnnnnnnnnnnnnnnnnnnnnnnnnnnnnnnnnnnnnnnnnnnnnnnnnnnnnnnnnnnnnnnnccgggcgcagggggaggggaggnnctctgtctgcttctttctctctctctctctgtatatatatatagngtgtgtg

SEQ ID NO: 33385 - DNA, 473 bp, Homo sapiens
  misc_feature (1)...(473): n = a,t,c or g
atttgnanancnctatgacatgattacgaatttaatacnnnnnnnnnnnnnnnnnnnnnnnnnnnnnnnnnnnnnnnnnggcacgagnnnnnnnnnnnnnnnnnnnnnnnnnnnnnnnnnnnnnnnnnnnnnnnnnnnnnnnnnnnnnnnnnnnnnnnnnnnnnnnnnnnnnnnnnnnnnnnnnnnnnnnnnnnnnnnnnnnnnnnnntaaaataaaaataaaaaataaaagcttctgcaccacaaaggaagcaattaaggtggcctacagactgggagaaaatacttgcaaatctgtaaaccatatatctgttaagggattaacatccaaaatatatagagaacgcctataactgaatnnnnnnnnnnnnnnnnnnnnnnnnnnnnnnnnnnnnnnnnnnnnnnnnnnnnnnnnnnnnnnnnnnnnnnnnnnnnnnnnnnnnnnnnnnnnnnnnnnnnnctcagaatcacaa

SEQ ID NO: 33386 - DNA, 469 bp, Homo sapiens
  misc_feature (1)...(469): n = a,t,c or g
tgnaaattngttgacnnnnnnnnnnnnnnnnnnnnnnnnnnnnnnnnnnnnnnnnnnnnnnnnnnnnnnnnnnggcacgagcaagttttctggggaagtaataatttttgtattagcttaagcatattccggaccatcgggttaaccacttgacagttggtctgctccatgactacagtgaccccacttgtgtaggtgtttaccattacacggcattgagaagacagcacttctaatccttgcctactaatgaggaaagaatacggtagactgaatttgtaaaagatgctcttgggccaaaagtccagatgccaccaaaaagagctgtttaaaccaagtttctctttttagtgtgatggggaactggatcatcatgtctgaattgcattttcacaatggttcaaatagagaaaagcaatggaaatgaggcatcatttggcatgataaagtgtgtttatggaaggagaaa

SEQ ID NO: 33387 - DNA, 476 bp, Homo sapiens
  misc_feature (1)...(476): n = a,t,c or g
tttgnanatttgaaagcccnnnnnnnnnnnnnnnnnnnnnnnnnnnnnnnnnnnnnnnnnnnnnnnnnnnnnnnnnnnnnnnnnnggcacgaggttggactttgatggatcacttattgttttgtttgaccattgattcagcccgtcagccctactagcacatacagctagtcacagaggaaactgcatgatagcaatagaaattaacaagcatcctcttcagcaggaaaagtttccccaaagaggtggatccatagttctcccttgtaagagtcagatgtctctcagagtggggccactgctgggattccttcaaagcctggagatgcttagatctttgtttgaggatgtcactggcagtagatgtatagagagcacattacacaaaccataaataagaggcgtggctaacctcatggagaaacacgatgttaattttggtaggtttgaaaattctctacttggaataagagatt

SEQ ID NO: 33388 - DNA, 498 bp, Homo sapiens
  misc_feature (1)...(498): n = a,t,c or g
gnnnnnngnnnnntgnnnttnnnnnntttgnaaanccnnnnnnnnnnnnnnnnnnnnnnnnnnnnnnnnnnnnnnnnnnnnnnnnnnnnnnnnnnnnnnnnnnggcacgaggaatgattaaagaatttcgggctactttggaatgtcatccacttactatgactgatcctgtaagtacatccaaagaacttctctttcttaagtgtacaattgagagacagaaaacttctctttacaggaatgagggcatgcaggaatctttactcacctttgagggnnnnnnnnnnnnnnnnnnnnnnnnnnnnnnnnnnnnnnnnnnnnnnnnnnnnnnnnnnnnnnnnnnnnnnnnnnnnnnnnnnnnnnnnnnnnnnnnnnnnnnnnnnnnnnnnnnnnnnnnnnnnnnnnnnnnnnnnnnnnnnnnnnnnnnnnnnnnnnnnnnnnnnnnnnnnnnnnnnnnnnnnnnnnnnnnnnnnnnnnnnnnnnnnnnnnnnnnnnnaa

SEQ ID NO: 33389 - DNA, 468 bp, Homo sapiens
  misc_feature (1)...(468): n = a,t,c or g
tgnaaacccttgacnnnnnnnnnnnnnnnnnnnnnnnnnnnnnnnnnnnnnnnnnnnnnnnnnnnnnnnnnnggcacgagatcatattatttcattagaatcacaatggaaagaatttcttgctgtactcttaaaagctgtcttatagagaggtttggtgagttttggcaatttatttaattttacacttacatgatttaatttttaataattataaataatcttaccaaagtcattactttccaatggtagagttgtttttaaccacaacattgttgaacctctagtattacataatcttatctctccttttcagtgttatttatgggcagtgtattccaagtattaactggagatatgaggagttttttttattactgctatttcaaaacccaggaaatggtctcttcccaactcttctgctcataaagaagactgctggtccattagggcctttggcaaagcagg

SEQ ID NO: 33390 - DNA, 466 bp, Homo sapiens
  misc_feature (1)...(466): n = a,t,c or g
tgngnaatcgnnnnnnnnnnnnnnnnnnnnnnnnnnnnnnnnnnnnnnnnnnnnnnnnnnnnnnnnnnnnnnnnnnggcacgaggaagattttagattgtttccagtcccaaagccaaaatcatttccttaaaggacagacatcagcttccccactatacaaacgggtagtcctagggttaaattctcttcttgaaatgcactgaatgggctgttactcttttggccatcacataattatagactaccctgttccttaatgaaaaggataaaagtttgcattagtactgannnnnnnnnnnnnnnnnnnnnnnnnnnnnnnnnnnnnnnnnnnngcgcgtgcgcgcgcgcgcgcgcgcgcnnnncnannncnatanaaantgcattccacactactntgggctttgattattttgggggancacacacgtantaggacccacaagtctcacagcaccccatnatca

SEQ ID NO: 33391 - DNA, 471 bp, Homo sapiens
  misc_feature (1)...(471): n = a,t,c or g
tttgnaaaccnctatgacatgattacgaatttaatacnnnnnnnnnnnnnnnnnnnnnnnnnnnnnnnnnnnnnnnnnggcacgaggtgagacccccttctctataaaaataataaaagactttgccagagatggtgtcttatggttgtggnnnnnnnnnnnnnnnnnnnnnnnnnnnnnnnnnnnnnnnnnnnnnnnnnnnnnnnnnnnnnnnnnnnnnnnnnnnnnnnnnnnnnnnnnnnnnnnnnnnnnnnnnnnnnnnnnnnnnnnnnnnnnnnnnnnnnnnnnnnnnnnnnnnnnnnnnnnnnnnnnnnnnnnnnnnnnnnnnnnnnnnnnnnnnnnnnnnnnnnnnnnnnnnnnnnnnnnnnnnnnnnnnnnnnnnnnnnnnnnnnnnnnnnnnnnnnnnnnnnnnnnnnnnnnntaataataaaaaatttcaagtgtagtgtaggatggaatgggagaggcttg

SEQ ID NO: 33392 - DNA, 474 bp, Homo sapiens
  misc_feature (1)...(474): n = a,t,c or g
annntttgnaaancnnnnnnnnnnnnnnnnnnnnnnnnnnnnnnnnnnnnnnnnnnnnnnnnnnnnnnnnnnnnnnnnnnnggcacgaggtcattatcaaagtaaggagcactgttgacttgcagcccacggcttcacagaaaatagcatgacaactacccttttaaaagtgtttccatgtgctaggcattttcctgagccctcttcccatacagctctttgaaaagattagtgttttttaagacaggggtccccaaatcccaggccacagactagcactggtctacaannnnnnnnnnnnnnnnnnnnnnnnnnnnnnnnnnnnnnnnnnnnnnnnnnnnnnnnnnnnnnnnnnnnnnnnnnnnnnnnnnnnnnnnnnnnnnnnnnnnnnnnnnnnnnnnnnnnnnnnnnnnnnnnnnnnnnnnnnnnnnnnnnnnnnnnnnnnnnnnnnnnnnnnnnnnnnnnnnnnnnnnn

SEQ ID NO: 33393 - DNA, 472 bp, Homo sapiens
  misc_feature (1)...(472): n = a,t,c or g
nanatttgaaanccnnnnnnnnnnnnnnnnnnnnnnnnnnnnnnnnnnnnnnnnnnnnnnnnnnnnnnnnnnnnnnnnnnnggcacgagcctccattaggtgctaaaaagaagctattaatacaaaagcaattcatcctccaggtgtctaggcaggtgtcccagcagcctcagagggtgtccctgatagaagagggatgtgagcctcagtgagtagttggaagactgatttaggaggaaggaggcttggatttagatctgggactgctgctgacttacagagtgaaggagtctaatcagagactaagcttctttgtgccttagtcttccttaacagtctttccctatccccttttacagctgacaggagagtaaaagattacagcacaccaaagtactttgtggggatggggcaaaacttgaaagcacaacgtaaacacgagatagctttagggtcccagtaaggaaagaat

SEQ ID NO: 33394 - DNA, 472 bp, Homo sapiens
  misc_feature (1)...(472): n = a,t,c or g
aganctgcatgannnnnnnnnnnnnnnnnnnnnnnnnnnnnnnnnnnnnnnnnnnnnnnnnnnnnnggcacgagtgaaagtggaagctcaagtggagcttacttcaaagctttggagattatctcactaaccagcattactttgcagaagtgggactaaggctcggaggctgggttgcttggaggccaagccagttccagaacccaggattttgactctgccccatttagctcaatgcagtgccgccttccttctttgactgtggacacttaacttgcctttaaaacttggccacatttattttcatagtttatgacattgacatacctgtgcataactctgtctcagcattttaaggccctggtggtgcacaggaagccgtgactaaaatgataggtacactgttcctaatacgggatataaaagactcaacaccacacctgcaaaagaagctgtgcttaaagatgcatct

SEQ ID NO: 33395 - DNA, 468 bp, Homo sapiens
  misc_feature (1)...(468): n = a,t,c or g
gagngacngcttgacnnnnnnnnnnnnnnnnnnnnnnnnnnnnnnnnnnnnnnnnnnnnnnnnnnnnnnnnnnggcacgaggtagagttgggattgatactgggagaatgagatgtgggtgaatttcctatggttccttacagagagaatgtgtggtgccaatagcttagcagagtcatttcatggatttcatgaacatggcaaagaactggtgaaaagacactgaagtatttaccagaccttcacgactcatgaaagtgattattctctgactgtaagctccctgaagaagagataaatcccaagcaggatgggatccaggaaatatccaggaaagcttgcttttcaatagagtcatagaggtcctcaggcagagaacagccccttctgatactctaggctgagattctaaatatcctggcttgaaacattgnattctcattggttatagtggtgaaagtaacagcc

SEQ ID NO: 33396 - DNA, 475 bp, Homo sapiens
  misc_feature (1)...(475): n = a,t,c or g
ngnggcttnccgattacgaatttaatacgactcnnnnnnnnnnnnnnnnnnnnnnnnnnnnnnnnnnggcacgagtttaaaatgataactggttcaattcccaaatagtatatagaaattctgaatgcatgtttctaataacatctcaaaagtttattaatattagtcgactgaactaaaaggagaagtagacaaatccatggtcataatgggagattttaacattcctctttcagtaacagatagaaagtgcagaagaaaaaattggtaaggaattagaaaaatttgagcaacatgattaacagacttgacctaggagcacatgacctaagcacctaagagtatatatatgtacattttcaaaaatggaaaccaatacattctctgaccatggtggaatctggctagaaagcagtaataaacagaaatctgtatatgtttggaaaaagtaaatctcaatggaaatcagaaaata

SEQ ID NO: 33397 - DNA, 469 bp, Homo sapiens
  misc_feature (1)...(469): n = a,t,c or g
tgtntacatgccnnnnnnnnnnnnnnnnnnnnnnnnnnnnnnnnnnnnnnnnnnnnnnnnnnnnnggcacgaggannnnnnnnnnnnnnnnnnnnnnnnnnnnnnnnnnnnnnnnnnnnnnnnnnnnnnnnnnnnnnnnnnnnnnnnnnnnnnnnnnnnnnnnnnnnnnnnnnnnnnnnnnnnnnnnnnnnnnnnnnnnnnnnnnnnnnnnnnnnnnnagtaataagtctttagcaaaaataacataaagcaagaaagnnnnnnnnnnnnnnnnnnnnnnnnnnnnnnnnnnnnnnnnnnnnnnnnnnnnnnnnnnnnnnnnnnnnnnnnnnnnnnnnnnnnnnnnnnnnnnnnnnnnnnnnnnnnnnntagtttgcttagtgtttttatcatgaaaaggtattagatttttaaaatgttttttctgctgttgaggttatcatgtgttattttgctttgntgattattg

SEQ ID NO: 33398 - DNA, 468 bp, Homo sapiens
  misc_feature (1)...(468): n = a,t,c or g
agtttgnnaccagctnnnnnnnnnnnnnnnnnnnnnnnnnnnnnnnnnnnnnnnnnnnnnnnnnnnnnnnnnnnnnnnggcacgagagcaaagcagtataagctgccagccctccctcaaggagcttatggattccttggggcaaatggacacacagaaaaacagtcaacaatgctgagcacccaggtgctgcacctgaatagtagcaaaaacagagctctaaagaggagcgtaccccagcaggaggaacttcatgcaggagccgactccacaaaactggacttcgagtctggtgggattctgggaagcattgaggaagatggaaggcttttaacatgaagactgacgtgactaaaggcagggttatgagtggcaagttcttctgacaagtaggtcttgctaaactgaaggagctttgctgggagttggaaagagaatactggaaatctgttggagcagctgtggtga

SEQ ID NO: 33399 - DNA, 467 bp, Homo sapiens
  misc_feature (1)...(467): n = a,t,c or g
gannntnnnnnnnnnnnnnnnnnnnnnnnnnnnnnnnnnnnnnnnnnnnnnnnnnnnnnnnnnnnnnnnggcacgagatctttcaatgattgattgggtgatctcagcaggctgcttacacttatatatatgttgtatctgtgtgttcagtgtacactcattcagttaggaattgcagttgtctgtgaatgacctgaaaatcaatggttttaacaaaatgatatttgtgttttctttcacataccatgaagtatagaggtaggcactgcagggagtggagcacaggctccgtgatgtcatcagcaccccagattcattcattttcgttatcatgtcatccttagtgtgtgacttctattctcaaaattgcttcactgtcacaagatactgtggctccagccatcgtgtctctattcctgataggaaggaggaacaangaggaaggacagaanaggggttttagctat

SEQ ID NO: 33400 - DNA, 468 bp, Homo sapiens
  misc_feature (1)...(468): n = a,t,c or g
gagttgnnnnnnnnnnnnnnnnnnnnnnnnnnnnnnnnnnnnnnnnnnnnnnnnnnnnnnnnnnnnnnnnnnnnnnnnnggcacgagggctcctgcactatttattttccttccttgacatttaaatacatggttatcagccccttttcccctttgaaatgcacctccaggcttagctctccaatccttatgtgtcctccatctgtctatgccttttcttaacaaccacttctcttaaactacctaatccacccccagcaaaaatagtcactatgactcatccccaagggcattggcaaaagaaaaccatgacaagaggacatgctggataagtgtggggtcaaatgatctttgtacacacctgaaggagcagaaagggggagttaaagggagagtctaaagaggggtgagtagaacaaaagggcctgtggatcccgaaaagtggtaacatcaacctaagaactcagg

SEQ ID NO: 33401 - DNA, 463 bp, Homo sapiens
  misc_feature (1)...(463): n = a,t,c or g
gtnnntgacangantnnnnnnnnnnnnnnnnnnnnnnnnnnnnnnnnnnnnnnnnnnnnnnnnnnnnggcacgagccctgatttgatcattacacaattatacatgtatgataacatgttgtgaccccataaacatgtacaattattatgtcaatcataaatttaagaaaataaaataaaatggacataagatatgagaattaataagtgtattactaaagtatagtaaacacatcacacaagctattagcactggcatctctatatcttagcttgttttggaaatgatatgcttattcctcattttaaaatagacacaataattcctactttccatagttgctgtaaagatcagagagaatgtttccaaaatgcctaccataagaattagcatgtcatnnnnnnnnnnnnnnnnnnnnnnnnnnnnnnnnnnnnnnnnnnnnnnnnnnnnnnnnnnnnnnnn

SEQ ID NO: 33402 - DNA, 468 bp, Homo sapiens
  misc_feature (1)...(468): n = a,t,c or g
gngttggnacnnnnnnnnnnnnnnnnnnnnnnnnnnnnnnnnnnnnnnnnnnnnnnnnnnnnnnnnnnnnnnnnnnnnnnggcacgagcggcacgagaccacacctaaaaccagctctgggtatgaatggcgccaaagcccgcagccacagcttcagtacacactcaggagacaagccttctacgccccccatcgaagggtcaggcaaagtccgcactcagatcattaccaataccgccgagagaggcaattctcttacccggcagaactcttccacggaaagctctcccaacaaggccccttctgctcccatgttggagagtctccccagtgttgggaggccctcggggcacccctcctccgggaagggctccctggggagctcaggcagcttcagcagtcagcatgggagcccaagtaagttgcctttgaggatccctccaaagnctgagggactcctnatcccac

SEQ ID NO: 33403 - DNA, 466 bp, Homo sapiens
  misc_feature (1)...(466): n = a,t,c or g
gnntcgnatacccgtnnnnnnnnnnnnnnnnnnnnnnnnnnnnnnnnnnnnnnnnnnnnnnnnnnnnnnnnnnnnnnnnnggcacgagtaggtggaacacttgatatttaaataggacttgaaaattttgaaaagagtatcagagacctcatttttttcctttgcaataagctgaagaaactttctttttcaggagagatggcaaaggtatatgctgttgccagagtcctgtggtataagcatctgtttttattatagtatgtcaaagttagggaaatgggactggcaagtaaaaaatggaatttaatttcaatgttttatgggaactctgatttaatgggaagcaaactagttcatattagcaggaattattttattttttcgagacagagtttcactccagcctgggccgacagagngagactccatctccagaaaaaaaataaataaataaatantaaaaaat

SEQ ID NO: 33404 - DNA, 462 bp, Homo sapiens
  misc_feature (1)...(462): n = a,t,c or g
gatntnnnnnnnnnnnnnnnnnnnnnnnnnnnnnnnnnnnnnnnnnnnnnnnnnnnnnnnnnnnnnnnggcacgannnnnnnnnnnnnnnnnnnnnnnnnnnnnnnnnnnnnnnnnnnnnnnnnnnnnnnnnnnnnnnnnnnnnnnnnnnnnnnnnnnnnnnnnnnnnnnnnnnnnnnnnnnnnnnnnnnnnnnnnnnnnnnnnnnnnnnnnnnnnnnnnnnnnnnnnnnnnnnnnnnnnnnnncaacaacaacaaacaagctcacccaccttcgcttgccctccctgctgaaaacagtcatgcctgtcaccctgtaacttgtccctatttcgagcacaaactctttctctacaaaaaagcttaagagtttgttctcttgtgttcctttcacttgttcactcagtttcccagagacatcttctgccatgcaccacggttaagtttatttgtatgcatcttga

SEQ ID NO: 33405 - DNA, 462 bp, Homo sapiens
  misc_feature (1)...(462): n = a,t,c or g
gttntnataccgttnnnnnnnnnnnnnnnnnnnnnnnnnnnnnnnnnnnnnnnnnnnnnnnnnnnnnnnnnnnnnnnggcacgagcggaagaatgagggtaagctcctaaatctgtgagccaaagactgcagacagcggggagggaggcatgttgggtccagggtgttggcaacctgggttgctataggcgtttttatttcctcctgctccccataggctcctggtggaggatgggactgccgaagccgtggtgacctgtaggaatcaccatgtggcagcagcactagggctgtgtcctagagagtgggcctccctcctagatttcgtccaagtgccaggcagagtggtcttgcagtttgcagggcctggagcccaacttgaggtgtaatgtggctgggagggagggactcggatacccaaattcctgggcttttggcaaagggtttaggagccagttaacc

SEQ ID NO: 33406 - DNA, 462 bp, Homo sapiens
  misc_feature (1)...(462): n = a,t,c or g
gagttnnnnnnnnnnnnnnnnnnnnnnnnnnnnnnnnnnnnnnnnnnnnnnnnnnnnnnnnnnnnnnnnnnnnnnnnnnggcacgagagattagtgaaaacaacttttaaaaataattctgaaagttggaaaannnnnnnnnnnnnnnnnnnnnnnnnnnnnnnnnnnnnnnnnnnnnnnnnnnnnnnnnnnnnnnnnnnnnnnnnnnnnnnnnnnnnnnnnnnnaacatggcnnnnnnnnnnnnnnnnnnnnnnnnnnnnnnnnnnnnnnnnnnnnnnnnnnnnnnnnnnnnnnnnnnnnnnnnnnnnnnnnnnnnnnnnnnnnnnnnnnnnnnnnnnnnnnnnnnnnnnnnnnnnnnnnnnnnnnnnnnnnnnnnnnnnnnnnnnnnnnnnnnnnnnnnnnnnnnnnnnnnnnnnnnnnnnnnnnnnnnnnnggaaancntnngtacccngattttaaaa

SEQ ID NO: 33407 - DNA, 459 bp, Homo sapiens
  misc_feature (1)...(459): n = a,t,c or g
gtnnataccgtttgacnnnnnnnnnnnnnnnnnnnnnnnnnnnnnnnnnnnnnnnnnnnnnnnnnnnnnnnnnnggcacgagagagcctgtgttgccaagtccaccaatttccttctgtaaagggaaggaacatgatgccaaagaggagttgggcagatatttcttctgatgggaatgtgaccctcatcgggtagataatcaccaacgaaactacagtgggagggcatcaagagacaactgaaacagggaactacacaagagtgaagttgcctgtggactgacagagcttcctgcagaaccactgctgggttggatatacatgaatgacaaaggagctcttttccttgtattaggtactgtcaaatgtaccttcaaatgaaagggtgtgtttggtcttaattagctgaattcgttgaagatcttcaattagctgcagcttttgccggaatgtggttagc

SEQ ID NO: 33408 - DNA, 464 bp, Homo sapiens
  misc_feature (1)...(464): n = a,t,c or g
gancnntaccgttnnnnnnnnnnnnnnnnnnnnnnnnnnnnnnnnnnnnnnnnnnnnnnnnnnnnnnnnnnnnnnnggcacgagcaaatcaccaacaattttcagaacacctggcattaaaaaaaattctaaaaattttcagagagaaaccaaaaatgatgtgagagggaccataagtcagaatgatatcagatgtctcaacagcaaccttggaacctagaacacacaggaacaatcccttccaaattctgagaaaatgatttccagtgtggatttcaaagaatggagatcgttttcagctataaaatgtctcaagaaatttacgttccatagaacgtttctcaagaatctactagaggatatgctcattaaaacaaggaagtagacaaagaaagtggatggcatgtggtccagaaataggagattcagcctanatggagaataaaggagtccccagagtgatg

SEQ ID NO: 33409 - DNA, 464 bp, Homo sapiens
  misc_feature (1)...(464): n = a,t,c or g
gatntganacccgnnnnnnnnnnnnnnnnnnnnnnnnnnnnnnnnnnnnnnnnnnnnnnnnnnnnnnnnnnnnnnnnnnggcacgagagtctcacgtgctctcaaaccaaaggctgtcagaggttggtgctgcctgttctcgaaatggctctggatgggggccgtagccacgtgtctgtgcatatgctgcttttgctctgattttaaagctgtaggcttgctaattccataaggatcgtattttgtttctgtcaggacatggtcttgtaaggatatgtactcaggttgtgtttctaattaaaggcagtttttgattcaagaaagaagacggagcatgtgcacgtgtttctcctctttcctgcctgaggctgtggagaagttttcatttataaaggctcanaaatgatgccgtgggggaacaggaangagcgggatgtgtcaggatgagggagcctgtccctctc

SEQ ID NO: 33410 - DNA, 464 bp, Homo sapiens
  misc_feature (1)...(464): n = a,t,c or g
gatctnnnnnnnnnnnnnnnnnnnnnnnnnnnnnnnnnnnnnnnnnnnnnnnnnnnnnnnnnnnnnnnggcacgaggaagttccccggagcaggactgcctttgaaggggccttggggctggggtgggagtctggaattgttttcaaagtgatggtcagaccctccaggcttcggggaaatgtgggtttgctggtctctctgtcgccttcccccacctctcctggacctagcaggccctcagtcctagctgtcttacctgcgctcagcttggagtcaggcctcaggtggagagccgcatgtcactgtcagagatgagcccacccccacccttccctgggggcgattagctgctgagtcacccacccagccttggagctggatgcctgtgcagcagaacagaggcaacggtggcaggcaggtggaggctgcgcacagcttctcccggcatggcacacacctgtgc

SEQ ID NO: 33411 - DNA, 467 bp, Homo sapiens
  misc_feature (1)...(467): n = a,t,c or g
gttnnnnnnnnnnnnnnnnnnnnnnnnnnnnnnnnnnnnnnnnnnnnnnnnnnnnnnnnnnnnnnnnnnnnnnnnnnggcacgaggtagaagttatgcattttgtgtttattttagcatacattcttacatgtataatatgctgacaaagtgaaaggtaatcagtatttcttttctctacggaaaaagacaaggaccttagcaaacagtaacttcctccaaatttcctctgcttcaaggtttccaagttactgtggaatattttatttctagcttcttttgaaacacaaaacacaaaaacaactgttcttgttattttatggaaaatactttttgaaattgtgttcaacattttattgcttcctttgttcatcattgcttcttgtactttatcactccaccctgcaatcatttatcttctcactgaaccccagggctttagccccagtcaaatagatactttaaccc

SEQ ID NO: 33412 - DNA, 481 bp, Homo sapiens
  misc_feature (1)...(481): n = a,t,c or g
gaggnngnnnnttnnnntttganntntganacctttgacnnnnnnnnnnnnnnnnnnnnnnnnnnnnnnnnnnnnnnnnnnnnnnnnnnnnnnnnnnggcacgagcgttgtgtttgtgctgcccaaacaatgccatgcttcatggggtcctgagcatcccggccctgtagtaaggcctggagccagacccaagcaagggcaggttgtaggaaagcacaggactgtgtgccacttgtgagccagaaaggtgtcactctgccgttgagtgtttctgggatgctttgaatggttttgctcttgtttcctccatcccaggaaggcctgaacacccccagagggtggaatctggagagggacagtaggattgctgtgtgccgtttatctctcccatgcttctgatggaaatgatggaaataagcatttctgcacatttcagggacagagtgaggttggcagagatgatcgactgtcatggaagcct

SEQ ID NO: 33413 - DNA, 460 bp, Homo sapiens
  misc_feature (1)...(460): n = a,t,c or g
anntggatgacctgattacgaatttaatacnnnnnnnnnnnnnnnnnnnnnnnnnnnnnnnnnnnnnnnnnggcacgagcttggaatatgaaatgcaaagacttttgtgatgtagccactgctttaccagtcttcacattagttttttagcctgttgaacaaattgattatcttccaaaagatcctaggtctttcttctttaccctttcctgcacctccccctgtccccctttatccttaaagactgcctcattcttagtatatggtttttggagtccttataatacaggtttgaccttgtgtgagctgcttaacttttctctgtgcctcatttcctcatctacaaaattgggccaaagaatctatgtcaaattaagtgaatacatatgaagcactttgaactcttagtaagcacatagttagctctcaataaatgctagcaaatattataattcaacag

SEQ ID NO: 33414 - DNA, 456 bp, Homo sapiens
  misc_feature (1)...(456): n = a,t,c or g
nnnnnnnnnnnnnnnnnnnnnnnnnnnnnnnnnnnnnnnnnnnnnnnnnnnnnnnnnnnnnnnnggcacgagctacaatacccgtaacaaaagcccaacagctgatgcatgtgatgttaggaggtgacaaaacagttaaagtatgctgctggctacaggcaagcagtcagcagatgcagacaaaagggtttgtgacaagaataactctctctccaaggcgagcagtgaagagtatccaaaataccagtacccttttctccttgacattgtcttcttacagtcagcattttattgcccttttatagtataaaaaaaaatggaggaggaagaagaaggaaaacccacacacaaactaattcaccaaaatactaggcaggattgtactttcccattcgctagccatgcctgccagtacacgtgtccttttccatttctccatcgaagcaagtttgaaaa

SEQ ID NO: 33415 - DNA, 487 bp, Homo sapiens
  misc_feature (1)...(487): n = a,t,c or g
gnnnngnnnnnttgnnntttggnnntntgnatacccgtnnnnnnnnnnnnnnnnnnnnnnnnnnnnnnnnnnnnnnnnnnnnnnnnnnnnnnnnnnnnnnnnnggcacgagggctttgaacttgaccaagtatctcaaaagggaagagaattttttaccatggcagagagtaatttcagctgtaacctacatcattagcatgtttgaagatgataaagagctatatcctatgattgaggaatacttccaaggtcaagtgaagcctattgcagattctctgggatggaatgatgctggagaccatgtcacaaagttactccgttcctccgtgttagggtttgcgtgcaagatgggagacagagaagccttgaacaatgcttcctcgttatttgagcagtggctaaatgggactgtaagccttcccgtaaatctcaggcttctggtgtatcggtatgggatgcagaactctggcaatgagatttcatgg

SEQ ID NO: 33416 - DNA, 486 bp, Homo sapiens
  misc_feature (1)...(486): n = a,t,c or g
gnnnnnnnnnntnnnnntttgnnnnttnnnnnnnnnnnnnnnnnnnnnnnnnnnnnnnnnnnnnnnnnnnnnnnnnnnnnnnnnnnnnnnnnnnnnnnnnnggcacgagtttccacctgcagaagcaagggactgggggtgaaccatggactgaagccacagcgcacatttctcagtgtgcaattgcagcccagggaaagggtgaaaggagcagtggtcactgaatgtactgtctcttttccacaacatgcatgtctttcttgaaaatgaaaatgactacttggagcatctcctaaccaggttaggcaaagaatgtgtggacacgagactcagagggccattcagagaggatggtcatggtcctactatccaacaacagcctgacgcctgctcactggagacaccgccaagcaggtgcaggcatccagtgggaacctggagcaaggcgggcaggtcagggcagcgggaagggaccttacagacctt

SEQ ID NO: 33417 - DNA, 467 bp, Homo sapiens
  misc_feature (1)...(467): n = a,t,c or g
ttgganntntnnnnnnnnnnnnnnnnnnnnnnnnnnnnnnnnnnnnnnnnnnnnnnnnnnnnnnnnnnnnnnnnnnnnnnnnnnggcacgagtgacagttccacttgtttcatatccaacactttatattgttagtcttttttagccatattattagccattaatgtcatgttttcgtagnnnnnnnnnnnnnnnnnnnnnnnnnnnnnnnnnnnnnnnnnnnnnnnnnnnnnnnnnnnnnnnnnnnnnnnnnnnnnnnnnnnnnnnnnnnnnnnnnnnnnnnnnnnnnnnnnnnnnncctgtttttcactatgttctctgttcttttcttactgattggtaggcattctttatattattgaatgtgagtactttgtcagacataagtattacaaaaatctttcttcagtctgcagcttgcctttttacacttaatagtgcttgttttttttttngtttttgaaaag

SEQ ID NO: 33418 - DNA, 462 bp, Homo sapiens
  misc_feature (1)...(462): n = a,t,c or g
ttgnnanntnttgacnnnnnnnnnnnnnnnnnnnnnnnnnnnnnnnnnnnnnnnnnnnnnnnnnnnnnnnnnnggcacgagccctggtcactgttccagctctccctccaaccaatggtataaccttgggtgacatctactctgaatctttgtttcttcatccaacaggagctgctccacagtgttatcaaggattgaatgagataatccaagtaggatgctgagtgccaggccctgtgcacacgtagtcagatcatcatgcaattaacacgcaaacctacagctgtcttattctagacctcttcactgcctttgtgtgcacagcttcatgcaacaaaagactctcagctaaatctggttttggatttacttctcatctcattgcaaaatgtatttgagtttcctgnttcangnntnaactcctatgcanaaatgngngtncnnttggggagganattatta

SEQ ID NO: 33419 - DNA, 483 bp, Homo sapiens
  misc_feature (1)...(483): n = a,t,c or g
ggnngnnnnntgnnnnttgnnnnttgganancnnnnnnnnnnnnnnnnnnnnnnnnnnnnnnnnnnnnnnnnnnnnnnnnnnnnnnnnnnnnnnnnattcggcacgagcttaatttctcgagagaaaatagacattgctagtattttattaatctgttcaaagaatcaacttttaacattgttggctttattgtatctttgctttctagttcaccagtttctgctgttataatttccttccttctactttcttaggttccacttgccattcttttcccagtttcttgatagggaagctcaggtcattgattttcaacctttctacttttctgatctgtgcatttagaactatagatttcctctaagcactgctttggccacatctgcatcattttgatagtctgttagaaataaactccacctattcctcccattattctattcttccctgccagcttagattcactccccagatcctgcttt

SEQ ID NO: 33420 - DNA, 485 bp, Homo sapiens
  misc_feature (1)...(485): n = a,t,c or g
gnngnnntnnnnnnnnnnnnttgganaccgctatgacnnnnnnnnnnnnnnnnnnnnnnnnnnnnnnnnnnnnnnnnnnnnnnnnnnnnnnnnnnggcacgaggagcaattgctgtgagctgcttctcttaccctttgggataagaggctgctggggaagagccctaatccccaaatctgcctcagtgtcaggagacagaaggatcagccccagactcaaagggcaaagggcatgggtggacctcactggagtggcttgctctacttccctactggacatgagctccatagcagaacagataaccagcagagaactgggtgaatgtaaagttcctttttttttccttaggtttttctaaaaagtcaggcttgattctatagtggtggttgtttattatataattatgaaatagttatatctgacttttatgtgccagccctttacatgtattgcatgtattggctcatttatttgtcacaatagc

SEQ ID NO: 33421 - DNA, 458 bp, Homo sapiens
  misc_feature (1)...(458): n = a,t,c or g
ccnnnnnnnnnnnnnnnnnnnnnnnnnnnnnnnnnnnnnnnnnnnnnnnnnnnnnnnnnnnnnnnnnnnggcacgaggagtgatattggtcatggtgcccatttcattggtggatgtcactggtggattaaatgagttactatatgtaaaactttagaacagctcctggcctgtggcaagggctctataggtttaattagtcattaaaattaaaatttgtatgttgtaggtctaaagatggctaataaaaaatcaccccacccaggccagaatccaagttagaggactgcttgacagggactgccagacacagacttggttgtgggagtcaggggtgcagcctctggctaccacccccaggaggcattcagaaatggggggnnnnnnnnnnnnnnnnnnnnnnnnnnnnnnnnnnnnnnnnnnnnnnnnnnnnnnnnnnnnnnnnnnnnnnnnnnnng

SEQ ID NO: 33422 - DNA, 464 bp, Homo sapiens
  misc_feature (1)...(464): n = a,t,c or g
tttggananccgnnnnnnnnnnnnnnnnnnnnnnnnnnnnnnnnnnnnnnnnnnnnnnnnnnnnnnnnnnnnnnnnnnggcacgaggagagcatgagcttcaataccctgcctcaaaacaacaacaacaacaaacccaaagaacaatttagatctaaagcaagcagaacgaaggaaagcaaaacaaaacttagagcagaaattaatgaaatttaaaacagaaaaacaatagagaaaataaatgaaaccaaaggctggttctttgaaatgatcaagaaaatcaataaatgnnnnnnnnnnnnnnnnnnnnnnnnnnnnnnnnnnnnnnnnnnnnnnnnnnnnnnnnnnnnnnnnnnnnnnnnnnnnnnnnnnnnnnnnnnnnnnnnnnnnnnnnnnnnnnnnnnnnnnnnnnnnnnnnnnnnnnnnnnnnnnnnnnnnnnnnnnnnnnnnnnnnnnnnnnnnnnt

SEQ ID NO: 33423 - DNA, 486 bp, Homo sapiens
  misc_feature (1)...(486): n = a,t,c or g
gnngnnntnnnnnnnnnnntttgganancnnnnnnnnnnnnnnnnnnnnnnnnnnnnnnnnnnnnnnnnnnnnnnnnnnnnnnnnnnnnnnnnnnnggcacgaggttccttgccttgtccagcttctggttgccaccagcattccttggctctggcagcatcattctcatctctgcctctgtcttcatgtggccttttcctctttcgtgtgtctcatctccgcctgcctctctcctataaggacactcgtggtggcatttagggcctatccagataatccaagaaaatctcacttcgggattcttaattagtcctatctgcaaagatactttttccttgtaaggtaacatttgcgggccttacaaaacacattcaaggcagacaaggagacaggcggtcatgtgtcctgtatgtccccttggctagaagagtccattcctaagtgtgagagagaaaggaaaagcaaagatctggcaaagaggggca

SEQ ID NO: 33424 - DNA, 461 bp, Homo sapiens
  misc_feature (1)...(461): n = a,t,c or g
antttgaaanccnnnnnnnnnnnnnnnnnnnnnnnnnnnnnnnnnnnnnnnnnnnnnnnnnnnnnnnnnnnnnnnnnnnggcacgagggttcttccacagccggaaagtctaagggtactgacgctgaggtggaagggattgtgaactcagatgctggtagtcgacagaaaagtgctgaggagttggagctgctgagattgcagctaggacctgtccatgtccctctccagtcagcccctggcacgtggggtccaccccccacctagtcgggcctggcaggtgatggtgccactctcatccggggcacttgcggtcaggcccctcgctgcggctgccaggctttgcttagctcttcctgcccttgggccgcactttcctcccctttgaacagaggagctgggttcgcgatgcccgatgcaggcacagcagcctctcagccgcgtgcgtacttccgaaaggg

SEQ ID NO: 33425 - DNA, 462 bp, Homo sapiens
  misc_feature (1)...(462): n = a,t,c or g
ttgggnaccncttgactgattacgaatttaatacgactcnnnnnnnnnnnnnnnnnnnnnnnnnnnnnnnnnnggcacgagacctgctagatttgtgggggtgtggagagaatgagaagaatagaacggtggtctcttggtggtatgagaacagaatcgcagacagaactctctgggccatttgaagaaatggcttgaaaggagggggcagagataaagaaagacgggaataggagagaatggtttcacagaaaagcaggaaagagagaaatgaagggttagtttcagcagactggccaagaaagagacatcctactgggtggttttattcatgactggttctagcagactcaagtcttcacctggaggattgggtataagaggacctagaactgaattactgcaaggtaagatgttaaancatatcagatagtagcagcaccacanagaaaacactcctga

SEQ ID NO: 33426 - DNA, 467 bp, Homo sapiens
  misc_feature (1)...(467): n = a,t,c or g
ttgaatcngnataccnnnnnnnnnnnnnnnnnnnnnnnnnnnnnnnnnnnnnnnnnnnnnnnnnnnnnnnnnnnnnnnnnnggcacgagtgtggaattagatgtgaagattttgctaacagggtgatataactggagtgggagttttagcttgaagccttgatttatctcgaaggggccagcccttttgctatggcgttgtgtattatcatctaccataacaaaggaacaagtagtcagtttcaagcatgcttttctttagtaatttcataaatagcaactcagatggtcttcctcaggcagctcctaaaacccagcagttggtatgtttagccagtgcttctcaaggaagtcgagtgnancaactagaganntgcncnnnnctganncnnnctnatgagtnnccanntcatttncntggctcatntnanncgtntggcnnntnntnccnnnacccnntnctnttca

SEQ ID NO: 33427 - DNA, 482 bp, Homo sapiens
  misc_feature (1)...(482): n = a,t,c or g
ggggnntgnnttntnnntntganacccctatgacnnnnnnnnnnnnnnnnnnnnnnnnnnnnnnnnnnnnnnnnnnnnnnnnnnnnnnnnnnggcacgagctcatgagaaataagatctctcagttgttaagggactcgtgcagtgtcacacaactgctaagaagtgggcaggcttcatttccacccaggtgtatctgattacagatcccagaagtaccccgaccacatttgagcgctggcttcctccacaggagcaaaggatggagccatttggccaggaactggctcatctctagctggctggctctcttctgggtcgttggtgcttattctggggctgatattgcacactctcctttgnnnnngattngcttngcaggatatgnaggananggnnntntgtgctctgagatggncccttgctcntgacttacntccatganggtgttngcggtatgcnnanngcntcnnanatgggggg

SEQ ID NO: 33428 - DNA, 466 bp, Homo sapiens
  misc_feature (1)...(466): n = a,t,c or g
gannnttgnanaccnnnnnnnnnnnnnnnnnnnnnnnnnnnnnnnnnnnnnnnnnnnnnnnnnnnnnnnnnnnnnnnnnnnggcacgaggtgaatgggatctcattgcattgcatttccctaatgaataatgatggggcaagaaaaggatgaaaaggacttttgttgctggaaatttgactgataggctcaggattttaaagaagaaaagaactaggatttgatggaaaggtcaatggattatggaaagtcttcccagaaaagaagtttacctgaaaaatgatttcttgcctcaacggttctgtatacagtgctatacaatctgcaacgcttaaaccaagcactagttgaattctaggcagaaataaccattgtaatatgagagccgcaggatgtggcatttttggaggtatcacagcaggcccatgtgtcttacgaaccctgtgcctctgtgatgaacctaagaa

SEQ ID NO: 33429 - DNA, 458 bp, Homo sapiens
  misc_feature (1)...(458): n = a,t,c or g
anatggcttgctcgacnnnnnnnnnnnnnnnnnnnnnnnnnnnnnnnnnnnnnnnnnnnnnnnnggcacgagcggcacgagtggaaaccttctctggtatttcacagtttgaattcattctaaccctgttttaacttttatgaaatttgaaatctcttataattttcctatcttattttgtaatagttactacctgtttatctcaactggactgtaagctgcctgagggcagggatcctattttgcttacaatgcaagacctcgcatatagtaactgttgagtgaagtttgttggattgaattaataatgttcaattactgatgctttangtgctctggaggttttcagtaaattcactgagatngctcagatttctaaacnaaacatnnntatatnttctatactcattggttnacaaatgtntatgnanctatgctcatgnttattatatgtgacc

SEQ ID NO: 33430 - DNA, 464 bp, Homo sapiens
  misc_feature (1)...(464): n = a,t,c or g
gnatcctcngttnnnnnnnnnnnnnnnnnnnnnnnnnnnnnnnnnnnnnnnnnnnnnnnnnnnnnnnnnnnnnnnggcacgagatcttttgttaactctacaaattcctagaaagttacttggattactgtgcccattatagatgttttaagaatatacttagctgcatttttgtgcatagtcaataacctagtgctccagagtctgttttctttgtctgcaatggagatttactaacattgcagtaaatgcttacaccacataactgaaaaccctttgaggctaaacaactcactccacatgctggaatgctcctacctttcttgatcccaccctgtttcncnncctcttttnnacccacctggaagattcacacctntgacaatcccacgtgattcacccatgccattagggaccnnttganctgcaccntggcacnaanncccngttcctannacgggggg

SEQ ID NO: 33431 - DNA, 466 bp, Homo sapiens
  misc_feature (1)...(466): n = a,t,c or g
ggnnctcacatgattnnnnnnnnnnnnnnnnnnnnnnnnnnnnnnnnnnnnnnnnnnnnnnnnnnnnggcacgagtctcaaaccaggctgggctggaattatttgcttaagagactgaacaggactcttcatgccaaaacaaagaggctctctgtccactgtctgagaatgagtggaaaagctatacaacttgcctgaagtttcatccagggctggaaaaaatagcttacaggtgaggttgaaagggacagtaagataaagaagtgggtttatcaataagccagttgcacacgcaccaacacagcggaactaaaagcttgtccctgagcagccaggcagaggtggacagagactccagagacctgcagagggagcacggagaccagcagagggagcacacagacctgcagagggagcacggagacctgcagagggagcacagaaaccctggtccagggaggtggtg

SEQ ID NO: 33432 - DNA, 468 bp, Homo sapiens
  misc_feature (1)...(468): n = a,t,c or g
gnatnaccagntnnnnnnnnnnnnnnnnnnnnnnnnnnnnnnnnnnnnnnnnnnnnnnnnnnnnnnnnnnnnnnnggcacgagcccgccgcctagcaaagactattaccagttactggtcacccggtctcaggtaatctttagatggtggaagatctttctaaggagtgagtatcgatcaacaaaacctggagaagcaaaagaaacccatgaagacttcctagagaattcacatcttcaaggnnnnnnnnnnnnnnnnnnnnnnnnnnnnnnnnnnnnnnnnnnnnnnnnnnnacgnnnnnnnnnnnnnnnnnnnnnnnnnnnnnnnnnnnnnnnnnnnnnngtcaaactgccttaatatttggtgcaagaatattagactatgtcatcaatttgtgcaaaggtaaatttgacttccttgaacggctctcagacgatttgctcctgactatcatttcttatctggatc

SEQ ID NO: 33433 - DNA, 467 bp, Homo sapiens
  misc_feature (1)...(467): n = a,t,c or g
ggntnacngtnnnnnnnnnnnnnnnnnnnnnnnnnnnnnnnnnnnnnnnnnnnnnnnnnnnnnnnnnnnnnnnnnggcacgaggggtcatggtcttcatcagattctcacatagccagtaacccaaagaggttaggaagatctaagttagtcataggggcaccagaaaatggatgggattgtccagagggagtgaatgagaaagcctacggcagggaaaagaacatttaagggatctgtgaagggcctaatgtcaggaggatgagtgtggagcacctcttcagaaagggtctgcctgcctctgtacaagtacagaactccagctggaactccagccctcctgcctgctctctgccctgcctctttcacaggtgcttggagcccaactcggtgacagcatgggtggtatgtcgcttggacatatctcgccaccctgacgccttcagtgtttgttggagctggatataa

SEQ ID NO: 33434 - DNA, 457 bp, Homo sapiens
  misc_feature (1)...(457): n = a,t,c or g
ggnacctcacatgannnnnnnnnnnnnnnnnnnnnnnnnnnnnnnnnnnnnnnnnnnnnnnnnnnnnnggcacgaggagaatattatatgtgtctcctctctccagccatgtggcctcccccagcagaggctttgaggacctatctgtcccctcctctgagtgtcttcagcatggaatcctctttctttcaggagtccgtgattcttgactgaaacaagggttagttccctacctccatgcccgtcaaggagtaatacttttttcagccttgggtttagtgacagggaaaaaagaacgttagctcatgtgaggatacgtataagggaattagataactntctacgtgatttgcanacaccttaaaattgcnagatgganaagagacccacagcccctttngnnctccccatnnnttntanggaatactgctnctnanagcngnngnaactnnataaa

SEQ ID NO: 33435 - DNA, 463 bp, Homo sapiens
  misc_feature (1)...(463): n = a,t,c or g
ggagtctcncatgannnnnnnnnnnnnnnnnnnnnnnnnnnnnnnnnnnnnnnnnnnnnnnnnnnnnnggcacgagagtttgtgtatatcgtgctgattcagaagagaatgaaggcatttgtcaagagataatgtcagactaatcagacatgttccaatcgattaatgcatttggaggatttccaaatatttgctgatctaaggacggtgaggtatatgatgggaaacaaatctgagaaaagaaggatggtagatgctttcccattgtgacctgtgatcattttgacaatcannnnnnnnnnnnnnnnnnnnnnnnnnnnnnnnnnnnnnnnnnnnnacctggcttgaaagaaaaggtcaagnnnnnnnnnnnnnnnnnnnnnnnnnnnnnnnnnnnnnnnnnnnnnnnnnnnnnnnnnnnnnnnnnnnnnnnnnnnnnnnnnnnnnnnnnnnnnnnnnnngg

SEQ ID NO: 33436 - DNA, 456 bp, Homo sapiens
  misc_feature (1)...(456): n = a,t,c or g
ggtgnntcccntgannnnnnnnnnnnnnnnnnnnnnnnnnnnnnnnnnnnnnnnnnnnnnnnnnnnnnggcacgagaaataatgaaggtagaaattataacactagggaaaaatttgtagcggatggcagtgttgaaggcaaatgtaaacataagggtaatggtctgtcatggcttttagaaaaagatgatagagttcatcattattttgccttcatctttgttaaggacagaaaattccctgacaggtgggcaagtatcaggttacctattttttattcctttggtacaaaagggttgaacgtcaggctaaaaaagcagccatgcatttattattaagcattttctaccgacaaggcactgtgctaggtactgtaatcctaccataagtaggtaggtatttcttccactgtaaatcataggggtttgctgntttatgngagttagcctcttccct

SEQ ID NO: 33437 - DNA, 458 bp, Homo sapiens
  misc_feature (1)...(458): n = a,t,c or g
ngtaatacncgttnnnnnnnnnnnnnnnnnnnnnnnnnnnnnnnnnnnnnnnnnnnnnnnnnnnnnnnnnnnnnnnggcacgaggagcccgggaggttgaggccaggcattcatgctggtccagacgtcgtggcagcattggaggtggtgagacatgggcagatgatagatacatcttgaaggtaaaccagcaagatttccatggacaactggatgaaagataagagagaaagtgaagttgagaatgactcaagtttctggcccctagcaaaagaagtatggagttgctgttaatttcgatggagaaggtagcatggaacagatttgacagttaggaattccattttgaacatgcgtaacttaaaatctatcatctaaaggaagatgttgagtangcattctggaggctggtctgcanatatctgtttggaggtcttctcntanggaggtncttattt

SEQ ID NO: 33438 - DNA, 459 bp, Homo sapiens
  misc_feature (1)...(459): n = a,t,c or g
ggtgccttnnnnnnnnnnnnnnnnnnnnnnnnnnnnnnnnnnnnnnnnnnnnnnnnnnnnnnnnnnnnnnggcacgagctaagctgtgcatcatagaatccaagaatttttctaatgttctgcctgtgtggagaagagtaaggatcttctccacacagtggagaacatttctcacagtggaaatgttcataggccctgggcagattattcagtgtttcanaacttgtttctcttgctgaatgggaagcattttattggcttcagcatgctaaaaaaaaggctataacaagatctgaggctgttcttacgaggtagtggtaaagtatgggtatgggattcagtttgaacatttagagaaggtgactttgtaatctgtatatagctcaccctagaggtgaatggtactggttttcagcctctacttgggagatgtgtgtttcttcttttgctgctctgcta

SEQ ID NO: 33439 - DNA, 372 bp, Homo sapiens
  misc_feature (1)...(372): n = a,t,c or g
ggttntacagctnnnnnnnnnnnnnnnnnnnnnnnnnnnnnnnnnnnnnnnnnnnnnnnnnnnnnnnnnnnnnnnggcacgagctggtttctttatgaataaacaaaatttagatacttagagtatgtcagatgggtacattgctagtagaccagtttattttatggcagggttttcggacactcttctttactcaggcttacccagcgtaatgctagacacggaggtggcactcgataataaactctagatgatttttctaacattgccttaattttctcgtgaccctctccatctggaggaatttgttgttacatgctaatgtttggtacacaatggcaaatatatatatatacataaaaaaaaaaaaaa

SEQ ID NO: 33440 - DNA, 451 bp, Homo sapiens
  misc_feature (1)...(451): n = a,t,c or g
ggnacttactgatnnnnnnnnnnnnnnnnnnnnnnnnnnnnnnnnnnnnnnnnnnnnnnnnnnnnnggcacgagcggcgtggggttgcctgcagctggacagcggaacttgacggtgttccccgcaggtactgcatgcagtttcttctccatgcgctgggggtgtgtccagtagggtgcttgctgggggtaactgtgcctattcgaggggtccctatgggacttggggtcctcatcatcgttgctggaggtcaaggagtcacctgtaatcaaggtgagattctgcaggacgatcatggagcctcgtgccaggcagaggtagcggccagcatcctcaggtaggaagctggcaatccctaggcggccctccagccccgtacacggccagcaggtgccaggcgactgccttcttgtaccagtggcaccacgctnacccgccacagcacagacgc

SEQ ID NO: 33441 - DNA, 451 bp, Homo sapiens
  misc_feature (1)...(451): n = a,t,c or g
gntttcttncatgattacgaatttaatacgactcnnnnnnnnnnnnnnnnnnnnnnnnnnnnnnnnnnggcacgagggaggtagttttcaggctgcagagcagggatggggaagtcaaacagagcatggtgtcttagaattgggaggacaagatgggggttggcggggagggaaggttgtcatcattcgtggggcagagtaccagagaggtgggagttgtacacagaactccagtgataggtggaggagtctcctganatctggttgantcctgatctacagntgcntgataggagancacttgacgccatagaangaaccccctggacancnncagccanacaattcctggnactcanncntanctggtaanngtctgtgttcccnttancctcagntttncntcgncntttaancnngctttgccnnacgcttttctgnnntaanttaa

SEQ ID NO: 33442 - DNA, 473 bp, Homo sapiens
  misc_feature (1)...(473): n = a,t,c or g
gnnnggnnnnnnnnnntttganactttgagaccnnttacgaatttcnnnnnnnnnnnnnnnnnnnnnnnnnnnnnnnnnnnnnnnnnnnggcacgagtttaagctctcatttgacgacgtttcacttatatcacttgcaccatggcatcatctgcctagggttttctgtttattttcacagagcatacacatcactgtgtattctagaaacagctgtaggctcgtattagcaaagtgataagaatctggggctttgaagacatgtaggatattagctaactgaactgtgctatgagattgtttccctttcttcttggcaaaccatttcagagcagcctggtgtggagactgtgttactgaaatggggccataggagcctccagactcctttctccctgccagaggctgattaggtagatcccatagtgcagaactccatgtcaccaccacatacgtgtatggcacacgtgggc

SEQ ID NO: 33443 - DNA, 471 bp, Homo sapiens
  misc_feature (1)...(471): n = a,t,c or g
tnnnnntttgganactttgaanaccnnnnnnnnnnnnnnnnnnnnnnnnnnnnnnnnnnnnnnnnnnnnnnnnnnnnnnnnnnnnnnnnnnnggcacgagggggcactcttgggagacttttttttggtttctttccacccagccaagagtgagatggacatggctcccattaatcaccccctccctctgcagagcaggagtgtttttttcctacttcacaaagtgatggagttccccttttagcattttggcttgtctcctgtgccctgcacctgttgtccattgaagcctggctttaggcaaatgacaactactgcatacttgattctccctctggattcttgctttctcatcatttctggcctcggaagaatttcctcacttccctgccagctcagaagtgaatgttaaaagactttaaaaaatgtttgatcagcaattttagtagtgccctactgggaggagtttct

SEQ ID NO: 33444 - DNA, 452 bp, Homo sapiens
  misc_feature (1)...(452): n = a,t,c or g
ttganaactnnnnnnnnnnnnnnnnnnnnnnnnnnnnnnnnnnnnnnnnnnnnnnnnnnnnnnnnnnnnnnnnnnggcacgagggaaacagcaaagctggttcccacattgataatgacacctaatcctgcaatctgcttctgtccggttctaatcacgccactgcttccattcccaggaggaccaggggcaccctctgtttcgtcctgacaaagtggactgcccatggttgacagcctgcgtgtccggggtcgcctgggggtgagggtggngagggtgtgngagggacggaggcactgccttctgctcanatgancagnacgtanataaccctncccaggngacctgcctggcatggaaagnccttntcgnggcccccangnnanatancgnnnnctggntacggnnancanngangntccnnannncnannnnncnngnncacatgttta

SEQ ID NO: 33445 - DNA, 460 bp, Homo sapiens
  misc_feature (1)...(460): n = a,t,c or g
anacttggannnnnnnnnnnnnnnnnnnnnnnnnnnnnnnnnnnnnnnnnnnnnnnnnnnnnnnnnnnnnnnnnnnnnnnnggcacgagcactgatggttttcagatggctaagagagctccatttcttgccacctgagattctgaccaagcctttcacaacccttcttggccttttagagttccccctgtagcagagtttgcccgctcattaatatccggggatctatgccagctcatttggcttgccccttcaccagcgttggatcagtgaaagttgcaagcagtcatatgttgctctcggcaaatgttttacaggtgaaaacacaagaagggtcaatagcaggtggtggttttctaaaacccatctgtgtcataattataatagactgagatacatggaatgccagggactgccacaggcaaagctaacagaattttgaaaagatatttaagtttca

SEQ ID NO: 33446 - DNA, 461 bp, Homo sapiens
  misc_feature (1)...(461): n = a,t,c or g
anactttgnannnnnnnnnnnnnnnnnnnnnnnnnnnnnnnnnnnnnnnnnnnnnnnnnnnnnnnnnnnnnnnnnnnnnnnnggcacgagaactgggtgagaagccagttccttgtcacttctctttcttttttttaagagcataaagcagaggaaaagagaggaaaacaaggggggaaaagtttgaagatatgtattaagatatgttaaaatctgttcctgttgccattttagtatgattctagattttttgtttgtgttataatttttgcaaatggtccaatagtgtggaaaaggaggctgcctgagatagtcggttccttgagttgtttcttttaatcagaaaagaagaaacaagcagtttcctttctgcccccacaggccggcacccctacagtacatgagtcataaaatagctcctggaagagccagttccatcaagtcttctcagcaactctcca

SEQ ID NO: 33447 - DNA, 462 bp, Homo sapiens
  misc_feature (1)...(462): n = a,t,c or g
tttgganacctnnnnnnnnnnnnnnnnnnnnnnnnnnnnnnnnnnnnnnnnnnnnnnnnnnnnnnnnnnnnnnnnnnggcacgagcggcacgaggagagagcnnnnnnnnnnnnnnnnnnnnnnnnnnnnnnnnnnnnnnnnnnnnnnnnnnnnnnnnnnnnnnnnnnnnnnnnnnnnnnnnnnnnnnnnnnnnnnnnnttctcttcttgaagggtaacttttagatttctgaatctttaggaacttacaggaatggtaggtaagaaaataatcctaaacagggctgctgtggtagtttaaaacttcagaaagccaaattctacatgtttcagaggaaagtggagaaaaatgttatgttaactggagggaaaatcaacttcctgaggaagtggagtctagcaacctctttcggtttcacagagtagttcaataaataggaagcacttgccagcacacaaacc

SEQ ID NO: 33448 - DNA, 458 bp, Homo sapiens
  misc_feature (1)...(458): n = a,t,c or g
naaccnnnnnnnnnnnnnnnnnnnnnnnnnnnnnnnnnnnnnnnnnnnnnnnnnnnnnnnnnnnnnnnnnnnggcacgagcggcacgagataaatcaagttttattggaacaaagccacgcccaccggtttacagattgtctacagctgcttcggggccacaacagcagtggtgagtcatcctaacagaggccgcgccctctaccagggagccatcctgggggagggatgccgcagtgggtgggagctggtggtggggaccctccctcccgcagacagaagggcaggtctctgcaagggggccgtccagtggggacacctgaggcatcactgtgacaagtgactcttgcaaggccattcctgggccaccatttcaactgaggcatcagactgaccttaatcctgcctttgaggcaatgaagtctctgggaatatttgtggttgtcatgactggtaggg

SEQ ID NO: 33449 - DNA, 459 bp, Homo sapiens
  misc_feature (1)...(459): n = a,t,c or g
atttgaannnnnnnnnnnnnnnnnnnnnnnnnnnnnnnnnnnnnnnnnnnnnnnnnnnnnnnnnnnnnnnnnnnnnnnnggcacgaggtgagnnnnnnnnnnnnnnnnnnnnnnnnnnnnnnnnnnnnnnnnnnnnnnnnnnnnnnnnnnnggtgnnnnnnnnnnnnnnnnnnnnnnnnnnnnnnnnnnngcatgttttaatggagagagatgtcctgggcatttgaactgcagattcccttaaactggacattgtcagctatttatgtattacaaaaacaattgtgtttcatgtaaagtattaaacatcaacattacgtcaccacaagggtgattacagcaaccttcactcctaagtgtgcgtcacctacacaaacagagttgtttgtctgcancattgntttcatttggtaacaattgtaagagttgaagtagcaccttaaggagtaattttcagag

SEQ ID NO: 33450 - DNA, 457 bp, Homo sapiens
  misc_feature (1)...(457): n = a,t,c or g
anaacttgnnnnnnnnnnnnnnnnnnnnnnnnnnnnnnnnnnnnnnnnnnnnnnnnnnnnnnnnnnnnnnnnnggcacgagagtgtcatgattgtaagggcatttgtcaaagggtttggtctaggtctaggtcccattgagggaagctgcaagtccggaagctgacaggaccctcaggaggtcattgctttgtgagtgagatgtgatgtggacagtggaaatggcagatgcagattctcttttggaggattaaatggactggacttgctcatgagggggatgtataggagaggaagagctataaatgtctccctggtttctgagaagataaaggtggagttatttgctaaaatggagctagttgggcaggatagaatgaggggtaagtttgagatgtctgcagggtgggcatgattacagaagttaaacacttgggagccatcagcatatggaaggt

SEQ ID NO: 33451 - DNA, 451 bp, Homo sapiens
  misc_feature (1)...(451): n = a,t,c or g
nnnnnnnnnnnnnnnnnnnnnnnnnnnnnnnnnnnnnnnnnnnnnnnnnnnnnnnnnnnnnnnnnnnnnnnnggcacgagaactggaagtcagtgtttttctacaagaccttcatattggctataaataaaagtgataccttggaagagagtctatttctggacagccagagagggaaatgggaatgatcaggaaacataccgggattataagagagcttcattattttggtctggcttgagtccgtaaatggagtagcctcttagcggaacaaaatttcctccaattataatggtagttgccagaggcaacaacagtgaaagagccatttaaaaagtcaaaaccagaggaatcatttgactagaaccttcaatggctttgagtcactatgccagacagctcaattatcttatctctgccgtgaaaagctgtctttttcttgnacttacat

SEQ ID NO: 33452 - DNA, 454 bp, Homo sapiens
  misc_feature (1)...(454): n = a,t,c or g
ccnctnnnnnnnnnnnnnnnnnnnnnnnnnnnnnnnnnnnnnnnnnnnnnnnnnnnnnnnnnnnnnnnggcacgagatcaaaggaaggcttccttcggaagtgtggtttgagtagtgagatagagaatgaaggtgggaggagataggagtccaggtacaacagcatgtgcaaggcctaaaggtcaaaaatactacggcttaagagtgggatgaagatcagagtgactgggttattgagttcaagtgagaggataggataaaaagagattggagaannnnnnnnnnnnnnnnnnnnnnnnnnnnnnnnnnnnnnnnnnnnnnnnnnnnnnnnnnnnnnnnnnnnnnnnnnnnnnnnnnnnnnnnnnnnnnnnnnnnnnnnnnnnnnnnnnnnnnnnnnnnnnaattggctgggtgtggtggcggtgacgcgtacttgtgtgtgtacctgctttac

SEQ ID NO: 33453 - DNA, 468 bp, Homo sapiens
  misc_feature (1)...(468): n = a,t,c or g
tngnnntttggaaaatnnggaaaccctnnnnnnnnnnnnnnnnnnnnnnnnnnnnnnnnnnnnnnnnnnnnnnnnnnnnnnnnnnnnnnnnnggcacgagtcaacaccatgtatcaaccactgatctgaccacttataggacagcaccccaacttcacaagatgttgtctcccagcaggctccataaatgagccttcgataggacatttcatcattccatcaatctagctgcttccaggtaagaacaatgaattctacgatgtgagcgtaataccacagctgtttcactgtaaatgagttccttgatcagtgacaatgctgtgtgtgacaccatggggatgaataaggcagcctatcaaccacatatggtaatgctggcggaagcaacatgcacaggaaagggaagttactctccagtatatgtaattattcccatgaagacaaattcctgccccttccataatgtag

SEQ ID NO: 33454 - DNA, 467 bp, Homo sapiens
  misc_feature (1)...(467): n = a,t,c or g
nnnnntttgganacttgaanancnctatgacnnnnnnnnnnnnnnnnnnnnnnnnnnnnnnnnnnnnnnnnnnnnnnnnnnnnnnnnnnggcacgaggaaatttctgtattttcttgacttttctcctatagcctgcatttaagcattgcagaaaaaaaaatctctcacatacctaactgggtattggaagctattaaataatggtaaaaactgggatggatggagggaacttttctcccccattttttaaagtttggctgtaggtccttctgcctgcaggctacagtcacattagcagttggaaattggataacgacagcacaatgacaaatccaggttgcttgcaataagttgctaatccctttgctttaatattggagcagcatgtaacgatgtttggacatcactccagtttactgacgaccccactggggccagcaatagaaccttacaactgtctaacaag

SEQ ID NO: 33455 - DNA, 488 bp, Homo sapiens
  misc_feature (1)...(488): n = a,t,c or g
gnnnnnnnngnnnnntnnnntnnnnnnntttgnaaacccctatgacnnnnnnnnnnnnnnnnnnnnnnnnnnnnnnnnnnnnnnnnnnnnnnnnnnnnnnnnnnggcacgagacaagaccccctggcatttaatttcaagctgagtatttttctccatgatgccgggttacctcccaccaccatttggtcagttgagaagtcttggaagaaataagggatgatgagcctgacagggaggttttgggagaagaaagagggaagacatggccactgttgctcctgatggaaggttatttgtgggtagagagagcaggtttgttctttgtggctgcaggggagatggggtagacagatcagaaagtttgagggaggcacatttagatcagtaaaagaaagaactttctaaagtcacttgagaatgaaaagccatttagttagtgcaagaaatgaaatgtctccaccacagagcctctgttaggaatagcat

SEQ ID NO: 33456 - DNA, 458 bp, Homo sapiens
  misc_feature (1)...(458): n = a,t,c or g
ttgaaaacttgnnnnnnnnnnnnnnnnnnnnnnnnnnnnnnnnnnnnnnnnnnnnnnnnnnnnnnnnnnnnnnnnggcacgagaatgtggagtgccatgggatgaagccagtcaatttcatctaggagcattttatggcttatggaaagaaatattctcttagattgaagggcgccagcctgtaatgggcatcagctgattctcagaaagaagaaacaacgtactgttacataattggggcttctccaaagtggcctgaccaaactgtagagctgcttgtttgtctgnnnnnnnnnnnnnnnnnnnnnnnnnnnnnnnnnnnnnnnnnnnnnnnnnnnnnnnnnnnnnnntgtaaaaatcacttcttcggtttcattaactagcctcatttcaagtgctcagtagctacatgtacctaacacattggacagcacggttacagaacgttttcatttcat

SEQ ID NO: 33457 - DNA, 453 bp, Homo sapiens
  misc_feature (1)...(453): n = a,t,c or g
tntganaaccctatgacnnnnnnnnnnnnnnnnnnnnnnnnnnnnnnnnnnnnnnnnnnnnnnnnnnnnnnnnnnggcacgaggggtggttgggaggtaaagaagagtgtagagtaactcctcagttgctggtttgattattgagttgtggtgatgggggagggatggcaatcaggaggtcagcggccagaggccacccatcatctctgggtctaaaaggcaaattccaacagaagtttaattggcttcctttgagtcagacgcttacctggttcattagctaggctgaggttgggggagcacacaggnannggtatgctacnnagggcctgnctnaacttgntnncagcctacatgaatggagaacagaagcatgtgaataactagaatccaganaattttaangcctgnggcnaatgccttctggggtgncatcncatccccccagtcatt

SEQ ID NO: 33458 - DNA, 459 bp, Homo sapiens
  misc_feature (1)...(459): n = a,t,c or g
tgnaaacctnnnnnnnnnnnnnnnnnnnnnnnnnnnnnnnnnnnnnnnnnnnnnnnnnnnnnnnnnnnnnnnnnnggcacgagggaagatctaaggggattcatcgtaatgagtgttctaactttcctgcaggttagaaatttttcaaaataacgaaaaagttttaaaaatgcttaatctcttagagagttaatgtttgaacaactattctgatattatatttaccttccatagcactcttgcctattaactatgctgaatatatatccccacattaaaatatgcaaaaagaaactactagattttttagaattacacccctatccnnnnnnnnnnnnnnnnnnnnnnnnnnnnnnnnnnnnnnnnnnnnnnnnnnnnnnnnnnnnnnnnnnnnnnnnnnnnnnnnnnnnnnnnnnnnnnnnnnnnnnnnnnnnnnnnnnnnnnnnnnnnnnnnnnnnn

SEQ ID NO: 33459 - DNA, 452 bp, Homo sapiens
  misc_feature (1)...(452): n = a,t,c or g
aaaatttgnanaccnnnnnnnnnnnnnnnnnnnnnnnnnnnnnnnnnnnnnnnnnnnnnnnnnnnnnnnnnnnnnnnnnnggcacgagatttgattaggtcaggtttggtatttttttccgcaaaaaaaaaatttgtaatggtaggtaggatcattcagttttaaannttcaaatgnggngnggaactccanagattaagggggtaaaaangcnatttatgnacctcttctcttcctaatcttggggagcttcgggcactgnaaatttgcttanagaanatctntgatgttcctntgtatanngggtgtttgggtcatacccagctggtatgaanaagtttanactgacaatttagggagcctcccagtcatagcaaacttaacttatgtttctttctttttcccagctttgctcctcagcnctntgctgtcactcaaggaagnatcatcaa

SEQ ID NO: 33460 - DNA, 420 bp, Homo sapiens
  misc_feature (1)...(420): n = a,t,c or g
ttannntntgntacccgctnnnnnnnnnnnnnnnnnnnnnnnnnnnnnnnnnnnnnnnnnnnnnnnnnnnnnnnnnnnnnnnggcacgagagctaaagaaatgtgattgagcaataatctttgtttcaccaggacctttacttgagatacttgtcagtagtttgacagtcagtatgggaattaggaactcctagtctcctatattttggtgactgctatatagaatctctattaaatgtgatnnnnnnnnnnnnnnnnnnnnnnnnnnnnnnnnnnnnnnnnnnnnnnnnnnnnnnnnnnnnnnnnnnnnnnnnnnnnnnnnnnnnnnnnnnnnnnnnnnnnnnnnnnnnnnnnnnnnnnnnnnnnnnnnnnnannnannantnnattntananttnnnnggnatttntntggggaaaaa

SEQ ID NO: 33461 - DNA, 426 bp, Homo sapiens
  misc_feature (1)...(426): n = a,t,c or g
tggnnnacccnnnnnnnnnnnnnnnnnnnnnnnnnnnnnnnnnnnnnnnnnnnnnnnnnnnnnnnnnnnnnnnnnnnggcacgaggaatgagtcagaaagcagaatccaggttttggtcatctgccagagacccatgtaaagtctaataacatannnnnnnnnnnnnnnnnnnnnnnnnnnnnnnnnnnnnnnnnnnnnnnnnnnnnnnnnnnnnnnnnnnnnnnnnnnnnnnnnnnnnnnnnnnnnnnnnnnnnnnnnnnnnnnnnnnnnnnnnnnnnnnnnnnnnnnnnnnnnnnnnnnnnnnnnnnnnnnnnnnnnnnnnnnnnnnnnnnnnnnnngagataaagaagggacaaatatatattaaataaatgcatacgtaaagaaagcaagaattatacttaaattgcactagtggaaagtat

SEQ ID NO: 33462 - DNA, 417 bp, Homo sapiens
  misc_feature (1)...(417): n = a,t,c or g
gctatgacatgattacgaatttaatannnnnnnnnnnnnnnnnnnnnnnnnnnnnnnnnnnnnnnnnnggcacgagaagatgtcttcctttgcaaaatcagaagatgaaagtgtgactccttccaggggctgtgagtgttgatctgcggaagccctggggccgaggttgctggccataggcagcagaggggccgggaggcgactcatggccaacaccggagtggggtggtcccagtcctggttgcctctagtgaaggaatctctagatgcaagtttaaaaccgtgcctagccctctggccaaatgctgttttcaagatgcactgttccacaatgaaagataaaagctcttttattaaaacaaagcagttgtaaaacagtttgtatctgatcctgagttaaaggcattactaagggaa

SEQ ID NO: 33463 - DNA, 424 bp, Homo sapiens
  misc_feature (1)...(424): n = a,t,c or g
tgnnnnnnnnnnnnnnnnnnnnnnnnnnnnnnnnnnnnnnnnnnnnnnnnnnnnnnnnnnnnnnnnnnnnnnnnnnnggcacgagtgttcctctattttcctggctccgtagtaaataagtgcctagccttaggaggctattgacctttgataatgtgagcagataaagcccccccccccacagccctcggcccctaaccccctctttccggattaaagtgtaagaatacaaaggtaatatgggatggaggggggcgatttgggaccccggtcaaaaaaacaaaccgtattactaanaagaaaacaaaggtcttgcattggagtttccccgngaatctgaganaaaangatcgttngttgaaatgaagcgtntaaagcgatccagngcttcacgcccggacactgcactacaccgccagncgcg

SEQ ID NO: 33464 - DNA, 438 bp, Homo sapiens
  misc_feature (1)...(438): n = a,t,c or g
gnnnnnnngtgnttnnntgngnnnaccgctnnnnnnnnnnnnnnnnnnnnnnnnnnnnnnnnnnnnnnnnnnnnnnnnnnnnnnnnnnnnnnnggcacgnnnnnnnnnnnnnnnnnnnnnnnnnnnnnnnnnnnnnnnnnnnnnnnnnnnnnnnnnnnnnnnnnnnnnnnnnnnnnnnnnnnnnnnnnnnnnnnnnnnnnnnnnnnnnnnnnnnnnnnnnnnnnnnnnnnnnnnnnnnnnnnnnnnnnnnnnnnnnnnnnnnnnnnnnnnnnnnnnnnnnnnnnnnnnnnnnnnnnnnnnnnnnnnnnnnnnnnnnnnnnnnnnnnnnnnnncttgacaactgttttgtaaggaaccattgcctgaagtagaattgctggatcaagactacttttccaaaagaggataataaacatgatctcctcttttgttaatgac

SEQ ID NO: 33465 - DNA, 352 bp, Homo sapiens
  misc_feature (1)...(352): n = a,t,c or g
gnnnnnnnnntgnttnnnntttggnnnaccnnnnnnnnnnnnnnnnnnnnnnnnnnnnnnnnnnnnnnnnnnnnnnnnnnnnnnnnnnnnnnnnnnnggcacgagatttaatggacataccattatttattacaggacaaatgaggtgtttccagtgtttttccattacagataattgttgcaatgactaatcttgtacgtgtgtcttttcacacatgggttaatatatttgtaagaaaaaaattataaaagtggaaatgtaaagtcaaagggtttaggaggttttgttttgttttgtttttctnnnnnnnnnnnnnnnnnnnnnnnnnnnnnnnnnnnnnnnnnnnnnnnn

SEQ ID NO: 33466 - DNA, 174 bp, Homo sapiens
  misc_feature (1)...(174): n = a,t,c or g
ggtgngttngnattgtgttgtttngnntattcctnnnnnnnnnnnnnnnnnnnnnnnnnnnnnnnnnnnnnnnnnnnnnnnnnnnnnnnnnnnnnnnggcacgaggtattttcttgaggtaacttaaatgtggggcaaagtttgacacagaccaataattaaaaaaaaaaaaaa

SEQ ID NO: 33467 - DNA, 431 bp, Homo sapiens
  misc_feature (1)...(431): n = a,t,c or g
tntgnnnanccnnnnnnnnnnnnnnnnnnnnnnnnnnnnnnnnnnnnnnnnnnnnnnnnnnnnnnnnnnnnnnnnnnnggcacgagagtggatctgatcaccagcctcaccttctccctgatcaagattcacaaatagaccnnnnnnnnnnnnnnnnnnnnnnnnnnnnnnnnnnnnnnnnnnnnnnnnnnnnnnnnnnnnnnnnnnnnnnnnnnnnnnnnnnnnnnnnnnnnnnnnnnnnnnnnnnnnnnnnnnnnnnnnnnnnnnnnnnnnnnnnnnnnnnnnnnnnnnnnnnnnnnnnnnnnnnnnnnnnnnnnnnnnnnnnnnnnnnnnnnnnnnnnnnnnnnnnnnnnnnnnnnnnnnnnnnnnnnnnnnnnnnnnnnnnnnnnnnnnnnnnnnnnnnnnnnnnnnnnnnnnnnnnnnnnnnnnnn

SEQ ID NO: 33468 - DNA, 468 bp, Homo sapiens
  misc_feature (1)...(468): n = a,t,c or g
gatnatngangtgactgggaaaaacgagcgnnnnnnnnnnnnnnnnnnnnnnnnnnnnnnnnnnnnnnnnnnnnnnnggcacgagagatnnnnnnnnnnnnnnnnnnnnnnnnnnnnnnnnnnnnnnnnnnnnnnnnnnnnnnnnnnnnnnnnnnnnnnnnnnnnnnnnnnnnnnnnnnnnnnnnnnnnnnnnnnnnnnnnnnnnnnnnnnnnnnnnnnnnnnnnnnnnnnnnnnnnnnnnnnnnnnnnnnnnnnnnnnnnnnnnnnnnnnnnnnnnnnnnnnnnnnnnnnnnnnnnnnnnnnnnnnnnnnnnnnnnnnnnnnnnnnnnnnagccacagctgtagctagagtggctgggatgcagggagcagtatagggcagtgaaacttnnnnnnnnnnnnnnnnnnnnnnnnnnnnnnnnnnnnnnnnnnnnnnnnnnnnnnnnnnnnnnnnnnnnnnnnnnnnnn

SEQ ID NO: 33469 - DNA, 461 bp, Homo sapiens
  misc_feature (1)...(461): n = a,t,c or g
gatnnntgcgtnattncgagcgnnnnnnnnnnnnnnnnnnnnnnnnnnnnnnnnnnnnnnnnnnnnnnggcacgagcggtggaaacttgctcagtgtcagggctgggctttagggaggtcctgagacaccggagccacagaagggccaacgttccacctctggggctgtctccacgttgttcctcctgctagcggcgtttggcacaggccttacctgctctgagccactgaaacagccggtgggatgtgtatacccatgttgccatggaataaagcaaaactttacaaagcttggattaaataagattctcctaggatctgccggctttattaatttctttttctttgctccacttcctttcctttttcaagactggtataggggaaggagacaaatttaacagctcagcaatggnnctgctacggatagaaatagcaagaaacgaggaaatccaagctct

SEQ ID NO: 33470 - DNA, 459 bp, Homo sapiens
  misc_feature (1)...(459): n = a,t,c or g
tttncntgagnnnnnnnnnnnnnnnnnnnnnnnnnnnnnnnnnnnnnnnnnnnnnnnnnnnnnnnnnnnggcacgagaaagttttacaatgagcctcctagaaaaattttaaaagaggcataatgtggagtatggtggctcaccatgttggcagcaaggtcagtttcaatagtcaggtgaaaaatgattttagcatgaacctatgttggagagaaatgaattgatacaaggcagggttggtcaggcttggtgaatactcagtcacggttatggagcacgacagaataaagccaaggtcctggcataaacagctgggtgattggtcctgcaacgtgcaaggctcctcaatactgggagaggcatagggtttagtgggaggaagtatatattggactttcttaatttgaggtccttgtagaccatctgggtgtggctcaaaatagcgatatgctagggggt

SEQ ID NO: 33471 - DNA, 455 bp, Homo sapiens
  misc_feature (1)...(455): n = a,t,c or g
gttgtacagcttgacnnnnnnnnnnnnnnnnnnnnnnnnnnnnnnnnnnnnnnnnnnnnnnnnnnnnnnnnnnggcacgagcattcacctatgtatttattattcaaaagtgtcattttaatatttattgctaccttctgtgaatgcttagctcctgtcgggttcattaaggagaaatgtgtctgaaagcacagaacnnnnnnnnnnnnnnnnnnnnnnnnnnnnnnnnnnnnnnnnnnnnnnnnnnnnnnnnnnnnnnnnnnnnnnnnnnnnnnnnnnnnnnnnnnnnnnnnnnnnnnnnnnnnnnnnnnnnnnnnnnnnnnnnnnnnnnnnnnnnnnnnnnnnnnnnnnnnnnnnnnnnnnnnnnnnnnnnnnnnnnnnnnnnnnnnnnnnnnnnnnnnnnnnnnnnnnnnnnnnnnnnnnnnnnnnnnnnnnnnnnnnnnnnnnnnnnnnca

SEQ ID NO: 33472 - DNA, 458 bp, Homo sapiens
  misc_feature (1)...(458): n = a,t,c or g
gantcgtgcnnnnnnnnnnnnnnnnnnnnnnnnnnnnnnnnnnnnnnnnnnnnnnnnnnnnnnnnnnnggcacgagagactgcatagggctcggcgtggaggtgggcgctgtggactgaaaacaaaaggtttgtgtaagaagcaaactgacattactcccaacgctcctgctcttatcttcctactctcctactaaaccacgaggtcaagttcatccttaagccacaggaacagtaaaagaatgaaaaaaactaatgtggctggtttttgacctccccattcccccattctccatctatacccaaagccttagactctaaggagtagtgttagaaagggtgtgttctgtaatcctgtcctcgcaagccaaagtctactctccccttctgcccaaagcttcctagttgctttctatggtcctcctgaattcttaggggaggctttttctcacagattac

SEQ ID NO: 33473 - DNA, 303 bp, Homo sapiens
  misc_feature (1)...(303): n = a,t,c or g
tnngcntgacgnnattgcgagcggnnnnnnnnnnnnnnnnnnnnnnnnnnnnnnnnnnnnnnnnnnnnnggcacgagcaaagtgctggaatgacaggtgtgggcctctgtgccaggccaggattcttcttttaagagactatagtgagcagcatctaccaacttgcatccttgtatgttgcatatcttatttgtttgcttggggagtaaaccaaagtaaaaacgtcctttgtcaaattaaggaccttacaagattttctgtgttaatggattggaagtctttactattctttttttttttttt

SEQ ID NO: 33474 - DNA, 454 bp, Homo sapiens
  misc_feature (1)...(454): n = a,t,c or g
gggngnnnnnttgnnacagctagtttgtgatccctgggnnnnnnnnnnnnnnnnnnnnnnnnnnnnnnnnnnnnnnnnnnnnnnggcacgagggtcagtggtggttcatataactatgactgagaacagaccacttcaaggccagtgttcttgttggtgatgcttttaaattgacaaagccagtttataaaatgagattaaaatggaggcagaaatctaatgtaaatgtgggaatcccagcctctttatgatgttctttgaactggggtgtttttaaaaataatctgagggaagatagaacgcactggtctggccagtgtttgtggaagatgtaaaccaggggttctgaaaatggggcctagacctccacactccatatcttggccctcccgctgagctgtgccctgtgtcctggtgccgtggtggggctggggctgcgtggactcctgtggag

SEQ ID NO: 33475 - DNA, 438 bp, Homo sapiens
  misc_feature (1)...(438): n = a,t,c or g
agntattttgtgatnncgagnnnnnnnnnnnnnnnnnnnnnnnnnnnnnnnnnnnnnnnnnnnnnnnnnggcacgagcagactttgtaacttttctgatgaaagggtatccaggtggataattacatattttatgctcttaaacaagttaagaactggagttggattttttgctattgtttttaaaagtcaatatgttgtggctgttaaaaagcattattttgtgtatgtatcactaataacttatgttagcacataatgagtatgaccatcaagatcagtaacactctcttctttcattgtaccaaacataatgtagcctgcctggaatctttttgtgtatgaaaaagaacaaaatagcatcttccattggaaggtctggttaagagtagccttattatctacacctccttccatgaaactctgcttctgatttcct

SEQ ID NO: 33476 - DNA, 440 bp, Homo sapiens
  misc_feature (1)...(440): n = a,t,c or g
anancangtnctttggnatccgagcggnnnnnnnnnnnnnnnnnnnnnnnnnnnnnnnnnnnnnnnnnnnnnggcacgagtagtttaaaagtacagttttttgaaagtatagtcatcttcatttttatgacgcccactgcaggctcannnnnnnnnnnnnnnnnnnnnnnnnnnnnnnnnnnnnnnnnnnnnnnnnnnnnnnnnnnnnnnnnnnnatggntttttttttcaagnttnancanantggaggcctcantggntngcccaactggaaagntttttgagncacccttaaatanantnnnncctttgaaacntcttaaccanaggcccagnatttctacanggggnnggnttgnnaaaacttgngaatcnagccttttncctttatagatattaannctcggncaaaacntcaaagnttnnnggcnttnnngggc

SEQ ID NO: 33477 - DNA, 509 bp, Homo sapiens
  misc_feature (1)...(509): n = a,t,c or g
nnccnnnnnngcccccctnnnngnncnncgncgangcnccngnngagagtngatcctcatntggtctnccccttgaaccagtnntgggaaccnncgtnnnnnnnnnnnnnnnnnnnnnnnnnnnnnnnnnnnnnnnnnnnnggcacgaggtctctgctgcttggaaccgcttctagagcagtctctgcttttgccttgcttgctgccagctagactgtgacgacagcacatccaccctccacctctagcccagacacccccatttctacttataatcaagagaaaagctctaagtatctggcattgccctaggctgctttagtgttaaaagaaaagtttgctgaaaaagtaagatatcttctgccaggaaatcaaggaggaaaaaaaaaatcattttctcgattttgctctaaactgctgcatctgcctatgccaaactaatcaataccgattgcaccaccaaactccattgcaaattcagctgtgaggagattccctttcagacaact

SEQ ID NO: 33478 - DNA, 450 bp, Homo sapiens
  misc_feature (1)...(450): n = a,t,c or g
ttggnnnccnnnnntttgaacacnnnnnnnnnnnnnnnnnnnnnnnnnnnnnnnnnnnnnnnnnnnnnnnnnnnnnnnnnnnnnnnnnnnnnggcacgagaatgataggaggtaaaggatgagaccagctcttacatataactttagcaccatttcatatcaggtagctgccttgagtcagtagcagttagtggggatactgaactccagtctcagtttggaaaatgctttgctgcagtaatgggctatggcttctcaagcgattactcacggcatatgttttaagggagacattagacatcctgaaacaactgcagatgtcacttagggaaaatgcatggaaatggtagccgtataagaccatacctcttgagttgtgaaaatatcttaccttaaacaagatcctgagaagtctacttcctgtctacattcttgggaatatcagtggcc

SEQ ID NO: 33479 - DNA, 432 bp, Homo sapiens
  misc_feature (1)...(432): n = a,t,c or g
anncaccangttangacgnnattncgagcgnnnnnnnnnnnnnnnnnnnnnnnnnnnnnnnnnnnnnnnnnnnnnnggcacgaggccacatggacatgacagaccactcaggtggccggctgctcctgggagtagcaggagggccccagcaggaagtgcttttcaagtggtgagcttggtggctgtggccgagacatgcaccttcccgtcattgttcctcccagtgtcattcttcctctgagaagctgtgaacttgaggctttgcccctggggtttgaggctcccatgaggtcccctcagaggaaggtgccttcactgggcagagcctggtggacctgcaccagccccatgaggctgagcggagagtgcagggtggggcccgcctgagggtaagcacagcagcacccctcagggctgcgctttccagagctg

SEQ ID NO: 33480 - DNA, 443 bp, Homo sapiens
  misc_feature (1)...(443): n = a,t,c or g
tttgaataccagttnctgggnattacgagcggnnnnnnnnnnnnnnnnnnnnnnnnnnnnnnnnnnnnnnnnnnnnnggcacgagtcggccccagcgcacgccgtgttcagcgcagtctcgccctggctggtgcgcaggcccacgtcggcgccatgctccaggtacagagccacatgttgctccaggtacagagccacatgttgctccaggtacagagccacatgttgctccaggccgcgcgccgccgccacgtgcaggggcgtctcctggctctcgcctgctgccaggttcaccgtcgctcctgcttccagcagcaacttggcgcacctggggacaagagagcaaggtcctgaggaaaatcctgaaggcttgggaccccttcagcttgctgtgacactcccttgcctttccacccctctcagcttgaggtcctacctggtgt

SEQ ID NO: 33481 - DNA, 433 bp, Homo sapiens
  misc_feature (1)...(433): n = a,t,c or g
acagnttttgnnnnnnnnnnnnnnnnnnnnnnnnnnnnnnnnnnnnnnnnnnnnnnnnnnnnnnnnnnggcacgagggaaagtggtagaaatggaacaaaaacggaatgaccaagatcaggagactattacaggtttacgtgtctggcgtactaatcctggttcggtttttgactatgatccagcagaagacaacatccagtcccgaagcttacacatgattaatgtccaagctcagcgccggagccgggagcagtcacgatctgccagtgcactaagcatcagtgggggtgaggagaagtctgagcattcagaagcaccagaccaccacctttcgacttacagcgacgggggtgtctttgcagtctcaacagcttacaaacatgcaaaaaccacagagctcccacaacaacgatcatcttcagttgctaccc

SEQ ID NO: 33482 - DNA, 431 bp, Homo sapiens
  misc_feature (1)...(431): n = a,t,c or g
ggtatgnggngattacgaganngaatacgactcnnnnnnnnnnnnnnnnnnnnnnnnnnnnnnnnnnggcacgaggggagcagcatccaagaattttttttttaagttagcatatgtttttaaaagaaacctatctgagccaaggtcagcattcctttcagttatgaaactgtatgttatgctctgatgtggaatgcaggcggccactatttttaaacataaaaataaccgcacttgtcatctcgcagtctaagaaattcagagcaaacagcaaagagtttgtggttgccttagtgatcatgaatggtacaacataggacacaagtatttctatggcaatggttaatgtgacaccatggccaagaatgacatattctcatgtgtcgaagttatgtgcacattctttcataggccagactaaccccctggtt

SEQ ID NO: 33483 - DNA, 446 bp, Homo sapiens
  misc_feature (1)...(446): n = a,t,c or g
ttgnnnnccnnnnnntttgaacacnnnnnnnnnnnnnnnnnnnnnnnnnnnnnnnnnnnnnnnnnnnnnnnnnnnnnnnnnnnnnnnnnnnnnggcacgagctgagattggttacttcgactaaaggggcggagacaaggaaaagtcagccccccccgaccccgcctccttgatgaaggaaggttgtgattggtccggagaggctgccgtcggatcctggctctttgcggtctgggagggtgggccttacctagacgccggaggggaccgatctctgtttccgcagggctctggagctggtgcaggtttaagtccgtctcagacagtcccctcaacccacagcctaagccccttgcccttgggcctccgtgacacagaacttgcttccttttcctaggtcgtccttcacctcccttcaggtgttgcttcttttgtgaaaccttttt

SEQ ID NO: 33484 - DNA, 438 bp, Homo sapiens
  misc_feature (1)...(438): n = a,t,c or g
ggnnacnntnattgagnacagttngantnattncgacgnnnnnnnnnnnnnnnnnnnnnnnnnnnnnnnnnnnnnnnnnnnnnnggcacgagaactggagcccggcggagcagttggctgagttgttgcaacttttttcgaaagctgggtttcccgggagatcccaggcggtgacagagtggagccatggctagaggtatttgcccaagtggccggcaccggagcggctgggtcgggggtcgtgctggaggggttgccggggtggaggcagcggctgcggggaggcgtcctcctcgggtggctcggggcaagcttggggacccgcgtggggggagagggggtgctgctgcggaacccntngggncccccttgcggctncagatgcccccagaaacccttcccactgtcangcttcttgttncccttctatgangtgaa

SEQ ID NO: 33485 - DNA, 439 bp, Homo sapiens
  misc_feature (1)...(439): n = a,t,c or g
ttgatacanttgtngtgattgcgagcggnnnnnnnnnnnnnnnnnnnnnnnnnnnnnnnnnnnnnnnnnnnnnggcacgagggcagaggacaggagggaggcttggggagcctgggaagggccggctgacagcttgatgggccctccctccctccacagtcccacccccagcctggggcctctgggagccttggtcctgagcagccaacacaccagcccagacagctgcaagtcaccatggacgctgaaggcggtgcgggcggccagacaggcggctgacttcgctctgaaggtggaagtggaatgcagcagcctgcaggaggccgtgcaggcagctgaggctggtgccgaccttgtcctgctggacaacttcaagccagaggagctgcaccccacggtcaccgtgctgaaggcccagttcccgagtgtggctgtggaa

SEQ ID NO: 33486 - DNA, 441 bp, Homo sapiens
  misc_feature (1)...(441): n = a,t,c or g
anacccntnntttgaacacagtttgagngattacgagcggnnnnnnnnnnnnnnnnnnnnnnnnnnnnnnnnnnnnnnnnnnnnnggcacgagggtggtaacaatgatgttaataaatactatgagatcacaaaacaatgagtgcagcttttaatgtgtcctccaaagttcacatcttggaaacacaatcctcaatgcaacagtgttgggaggtggaatctaataagaggtgattagatcatgagtcctcatgaacgatttaatgttatcatgggagtgagtttgttataagaacaggcttgttataaaagcaaatttggccccctctagctctatcaggctccttgccgttccaccttcggccatgatgacacagccagaagaccctcatcaaatgtggcgctctcaacctgggacttcccagcttccggaactgtaaga

SEQ ID NO: 33487 - DNA, 459 bp, Homo sapiens
  misc_feature (1)...(459): n = a,t,c or g
gnnnnnnnnnnttgganncccnnnnnttgnntancangtnngacntgattgcgagcggnnnnnnnnnnnnnnnnnnnnnnnnnnnnnnnnnnnnnnnnnnnnnggcacgagagagactggtttggcctgacccaagtgatggtgtctggagccaaaccttttatcaggagaaatataggaccacagagatgagacaagtactaccagtcctggggaagtaaagagacggaaaattcctttctttaactagagggaatggaccctgcagtcaacctgtgtacttgcagagctatatgtctttggtattctgatatacttcacaaagtatattttatgccctaggtgctaagtgaattgacaatgaagacttggtattgagggaattaaagggcaggtggggttctgttcccaaggctacagtccatagaatattggcaaggtggagacaaacatgacata

SEQ ID NO: 33488 - DNA, 485 bp, Homo sapiens
  misc_feature (1)...(485): n = a,t,c or g
ggtgnnnnnntttgaagccgtgcgaggnattgcgagcggaatacgactcnnnnnnnnnnnnnnnnnnnnnnnnnnnnnnnnnnggcacgaggcccatgaagccagttcagctgagaatctaaatattatttttttccctagagattgagattgtcagcattacccaaaaggattattttaatgatcagattggattaaatttaaactgcatcggacatatagttaattctttttccattaaccagtgagtgagtttttgggagaaatgccagattagattatggataatcaagacattagtgagttgaatatgagttaaatttgtggtcctgtggtaaagagctaattttctcacttttataggagaagaactggtgatcagagaggttaagggattgttcaacgttgctcaggtgaaactgagtacattgaagtgaaattgaaatttaaatcaaaatgtgattccaaaactttgacttgtttcc

SEQ ID NO: 33489 - DNA, 494 bp, Homo sapiens
  misc_feature (1)...(494): n = a,t,c or g
ggagnnnnnnnttgnannttgganagccgtntctaggnnnnnnnnnnnnnnnnnnnnnnnnnnnnnnnnnnnnnnnnnnnnnnnnnnnnnnnnnnggcacgagactggctagaacatcacgggctatgctcatcaatgagacagctccttggctgacttcattttggcttacgtctccatgttaccaattacaaataaaagatgaacaaaccaggcaaatattccaacggagaccttaaaattgcttagaacagcaaggagagggcgggccactcaccaaccagagtccgcaggtttaacaaccagtctctccaaactgaaaggctattagtgtcacacttagtataatatataattaaccacaaaactttgggcttgattcattcactgaatgtgtatttaaaacanagcaagcttangaatcacagcaatgngcataacgacttcaggaggatagactctcccctgacgctctntgccatgctntgtctccg

SEQ ID NO: 33490 - DNA, 489 bp, Homo sapiens
  misc_feature (1)...(489): n = a,t,c or g
ggngnnnnnnttggnnntttgatagccgtttgantnattncgagnggnnnnnnnnnnnnnnnnnnnnnnnnnnnnnnnnnnnnnnnnnnnnnggcacgagtggttnnnnnnnnnnnnnnnnnnnnnnnnnnnnnnnnnnnnnnnnnnnnnnnnnnnnnnnnnnnnnnnnnnnnnnnnnnnnnnnnnnnnnnnnnnnnnnnnnnnnnnnnnnnnnnnnnnnnnnnnnnnnnnnnnnagggcacacctgtggtacaaactacctgggagactcaggtgggaggatcatttgatcttcnnnnnnnnnnnnnnnnnnnnnnnnnnnnnnnnnnnnnnnnnnnnnnnnnnnnnnnnnnnnnnnnnnnnnnnnnnnnnnnnnnnnnnnnnnnnnnnnnnntgtagcagctcaggctacagttcacacttatgacttctaagttatataaccagatttgtgctaatgttactgttggtgctgatgtgaaatataat

SEQ ID NO: 33491 - DNA, 353 bp, Homo sapiens
  misc_feature (1)...(353): n = a,t,c or g
ggngnnnnnnnttggnnntttnnnnnnnnnnnnnnnnnnnnnnnnnnnnnnnnnnnnnnnnnnnnnnnnnnnnnnnnnnnnnnnnnnnnnnnnnnggcacgagctctcatatcctgtctcttactggtcagagttgcctgaaggatcttaattattctatacttttgggtttgttacttggcttctctatgcagctgctggaaaagcagctgatttggggtaacagggcttctgccacagcaggcacagtgaggaccaccaaagcctacctgttaacactggggaggtagagaccactannggnaggctganntcatatgancctnccanantgnnnganttngntngngctg

SEQ ID NO: 33492 - DNA, 487 bp, Homo sapiens
  misc_feature (1)...(487): n = a,t,c or g
ggagnnnnnttgnnnttgntagccgtgtncgnnatgcagcggnnnnnnnnnnnnnnnnnnnnnnnnnnnnnnnnnnnnnnnnnnnnnggcacnnnnnnnnnnnnnnnnnnnnnnnnnnnnnnnnnnnnnnnnnnnnaaacccaagccccgcttgattcctaaccagattgaccaaaccccatgcagacggtctaacagaacacacttgcccatttccgagcattaatatgatttacctcattctcttctgttatataagcaatgnnnnnnnnnnnnnnnnnnnnnnnnnnnnnnnnnnnnnnnnnnnnnnnnnnnnnnnnnnnnnnnnnnnnnnnnnnnnnnnnnnnnnnnnnnnnnnnnnnnnnnnnnnnnnnnnnnnnnnnnnnnnnnnnnnnnnnnnnnnnnnnnnnnnnnnnnnnnnnnnnnnnnnnnnnnnnnnnnnnnaacccagatgtttgaactaatggacagagactttaacatgttg

SEQ ID NO: 33493 - DNA, 479 bp, Homo sapiens
  misc_feature (1)...(479): n = a,t,c or g
ggagnnnnnttgaanncnangntnaaacgaatttaaacgactcnnnnnnnnnnnnnnnnnnnnnnnnnnnnnnnnnnggcacgnnnnnnnnnnnnnnnnnnnnnnnnnnnnnnnnnnnnnnnnnnnnnnnnnnnnnnnnnnnnnnnnnnnnnnnnnnnnnnnnnnnnnnnnnnnnnnnnnnnnnnnnnnnnnnnnnnnnnnnnnnnnnnnnnnnnnnnnnnnnnnnnnnnnnnnnnnnnnnnnncttttcaagtattacatgttcaattttttgcaataatgtaaactatatctttctcagaaaaggtacacacagatcttaatgtgacttacttgaaaacagtcaacagttacaacttagttattttcacttttctctccccaaaggagattttcttttaaccattaaaggtgtggntcttaatatggtttcaggcctacaagtgggaatttgaacagcggctcctanaccttctctt

SEQ ID NO: 33494 - DNA, 487 bp, Homo sapiens
  misc_feature (1)...(487): n = a,t,c or g
gnggnnnnnnnttnnnnnnnnnnnnnnnnnnnnnnnnnnnnnnnnnnnnnnnnnnnnnnnnnnnnnnnnnnnnnnnnnnnnnnnnnggcacgagaccaagcacctggctcatatccaaggtgtagggagacctgttactgagaaagagtcaagggcaagagttttagagccaaccgaaataggactcccagctcgacacttaatagctgcatgatgtcctaccagttttctaatctgtctaatccatagtttctctacctctaaatgggctgatgacaataaaactcacctttcaggattgtcatggggcttagatgagattatatttgtaaaagaattagcatagtccttacacatgcatgcaaagcattaaataagtggtacctttaattacccaggaagatgcagaacaagatgaagtgtgttctctgtatctgtaactaagtctgacagacagccaacgccaggacctgggaggaattaatca

SEQ ID NO: 33495 - DNA, 444 bp, Homo sapiens
  misc_feature (1)...(444): n = a,t,c or g
nannnnnnnnnnnnnnnnnnnnnnnnnnnnnnnnnnnnnnnnnnnnnnnnnnnnnnnnnnnnnnnnnnnnnnggcacgagtgccttcagccatcagggcagcatccaggtggacaggaattctcagtcctacatccaggccattagtgacctgaacagcctggttttttgccgtatgaggaatgcctttcatgagaatgacaccatctacagcctgacctctgctggccgctggacacaccgcgcctgccagctggcccatcagcacacagaccaagtgatccaactgaggaaggctcaactacagaaggagggggagctggagaagatcaagaggaagaggcacttggattttctggacatcctcctcttggccaaaatggagaatgggagcatcttgtcagacaaggacctccgtgctgaagtggacacgttcatgtttgag

SEQ ID NO: 33496 - DNA, 447 bp, Homo sapiens
  misc_feature (1)...(447): n = a,t,c or g
tttgatacctgttgtgcgngattgcgagcggnnnnnnnnnnnnnnnnnnnnnnnnnnnnnnnnnnnnnnnnnnnnnggcacgagggctcggcgtggttttcagaatagtccatgagcactgactgcaacttgaagtctccagcggcattaacccctaatannnnnnnnnnnnnnnnnnnnnnnnnnnnnnnnnnnnnnnnnnnnnnnnnnnnnnnnnnnnnnnnnnnnnnnnnnnnnnnnnnnnnnnnnnnnnnnnnnnnnnnnnnnnnnnnnnnnnnnnnnnnnnnnnnnnnnnnnnnnnnnnnnnnnnnnnnnnnnnnnnnnnnnnnnnnnnnnnnnnnnnnnnnnnnnnnnnnnnnnnnnnnnnnnnnnnnnnnnnnnnnnnnnnnnnnnnnnnnnnnnnnnnnnnnnnnnnnnnnnnnnnnnnnnnnnnnnnnnnnnnnnnnt

SEQ ID NO: 33497 - DNA, 438 bp, Homo sapiens
  misc_feature (1)...(438): n = a,t,c or g
aggnacgggnnattacgagcggnnnnnnnnnnnnnnnnnnnnnnnnnnnnnnnnnnnnnnnnnnnnnggcacgaggagaactgattctgagagcacatttcagatatccaaattctgccatgtaggtagctggattccctggcacctggccccctccacctctccttgtagcttctttcttgccctttgccaactcctcttatcagcactgtggaaatttgaggaggcagtctctgctgtcactcactggcaggatatgaatgcccaagccaaaaataatacaaaaacctcctccaagcagtcacccagatgagggaattagccacgtggatgaaatgtcatgaaaactatacaaaggaaatgtttcaggatcatttccttaaaatggaataaaaggaagaagaggactaatgggaggagaaaattaagaccaggaat

SEQ ID NO: 33498 - DNA, 443 bp, Homo sapiens
  misc_feature (1)...(443): n = a,t,c or g
tannnnnnnnnnnnnnnnnnnnnnnnnnnnnnnnnnnnnnnnnnnnnnnnnnnnnnnnnnnnnnnnnnnnnnggcacgaggcagaggtgctggtgaccgcctcaggaaatagccctaagacaggtggccttaaagtgactggctggcttcagcccagctggtggctgctctctgagaatcagagaccttgagcacatctcagcccacaggcagccccatgaagagccctgtctccaccttgcccttccccaccgagactctccagcagggactctggcctgctgggctgccacggtaaagcagcgcccctgggaaggcggtgccatctgcctgatttcgctagactttagccatctccagaaccccacctgatgtcctgggatcccactcttcaggaaagggacattcctggaggcagaaatgtancgcagctctgaatgagg

SEQ ID NO: 33499 - DNA, 449 bp, Homo sapiens
  misc_feature (1)...(449): n = a,t,c or g
tttgaactcangtgactgggaanaacgagcggaatatnnnnnnnnnnnnnnnnnnnnnnnnnnnnnnnnnnnnnnnnnggcacgagctttgaccaccacgtggtccgtgtaccccacacacaggctgttgtcctcaactccaaggacaaggctccctacctgatttatgtggaagtccttgaatgtgaaaactttgacaccaccagtgtccctgcccggatccccgagaaccgaattcggagtacgaggtccgtagaaaacttgcccgaatgtggtattacccatgagcagcgagctggcagcttcagcactgtgcccaactatgacaacgatgatgaggcctggtcggtggatgacataggcgagctgcaagtggagctccccgaagtgcataccaacagctgtgacaacatctcccagttctctgtggacagcatcaccagccaggg

SEQ ID NO: 33500 - DNA, 435 bp, Homo sapiens
  misc_feature (1)...(435): n = a,t,c or g
aggtangacntgattncgagcggnnnnnnnnnnnnnnnnnnnnnnnnnnnnnnnnnnnnnnnnnnnnnggcacgagaactggaagaatagagagtaaagcttctaggcatctgaaacttttgcttcatctctgacgctcgcaggactgaagatgggcaaattgtaggcatttctgctgagcagagttggagccagagatctacttgtgacttgttggccttcttcccacatctgcctcagactggagggggctcagctcctggggtgatatctagcctgcttgtgagctctagcagggataaggagagctgagattggagggaattgtgttgctcctggagggagcccaggcatcattaaacaagccagtaggtcacctggcttccgtggaccaattcatctttcagacaagctttagcagaaatggactcaggg

SEQ ID NO: 33501 - DNA, 440 bp, Homo sapiens
  misc_feature (1)...(440): n = a,t,c or g
tancatgtngtgacntgattncgagcggnnnnnnnnnnnnnnnnnnnnnnnnnnnnnnnnnnnnnnnnnnnnnggcacgaggtcagaagtgggggagaaacccccaccactgggttgctttcgttgctgagataacattgggactgagaactgggtcttcaatgatgactcatgaagcctgtgctacctccacactcccggtggctgtggctctgggagcacacgtggtggcctgggcctcataggtcaccaccagcaggaaagcagctgggagcccagctcctatgaggcccatagtagccatctttgtatacaaagacctgcctgttttgtgtccattccaatactgcatttaagagcctttctgccttctctggcaatgttatgtgtgctgaatactacatgtatcaagaagaaaggaatggaaacctccatgacag

SEQ ID NO: 33502 - DNA, 440 bp, Homo sapiens
  misc_feature (1)...(440): n = a,t,c or g
tatcaggtancncgtgattgcgagcgnnnnnnnnnnnnnnnnnnnnnnnnnnnnnnnnnnnnnnnnnnnnnnggcacgagctggaacatagcaattatgaaaacatttgccgaatgaacatgtggtgaggattcattcgccaaatactttaaaaaatttcctctcgatgcaaaaatgctgactggtacaagagcaaaatgaaattgttttccaaagtcagtaaaatagccctatttttcaatcagataaaagcagctttaaaaaatgtttaaggctgggtgcagtggctcaagtcagcnnnnnnnnnnnnnnnnnnnnnnnnnnnnnnnnnnnnnnnnnnnnnnnnnnnnnnnnnnnnnnnnnnnnnnnnnnnnnnnnnnnnnnnnnnnnnnnnnnnnnnnnnnnnnnnnnnnnnnnnnnnnnnnnnnnnnnnnnnnnnn

SEQ ID NO: 33503 - DNA, 441 bp, Homo sapiens
  misc_feature (1)...(441): n = a,t,c or g
ntttgnntacangtntgacgngattncgagcgnnnnnnnnnnnnnnnnnnnnnnnnnnnnnnnnnnnnnnnnnnnnnnggcacgaggaaatttaaaaatgaataaaagtttaaaaaaatgtaaatgttattgccatgtaagacaacagtgtatttcttgtgtttccttgcaggcacaaggaaacctttagtatttcaaacattggtttattgaacaataatgaaattatagaaattatagcagttttaactgtaagaacacacactgctgtactgtcctgagaacaaactaagttaatccctatatacacacaaatttatacctaaaatcaactaccttaaaaacttttaggaaacataaaaatacagatgcatacattctattagccatcagagtgatggtttctttaaaagtcttggcacctctgggaaactccattgg

SEQ ID NO: 33504 - DNA, 460 bp, Homo sapiens
  misc_feature (1)...(460): n = a,t,c or g
natacctnnnnnnnnnnnnnnnnnnnnnnnnnnnnnnnnnnnnnnnnnnnnnnnnnnnnnnnnnnnnnnnggcacgagggatttttctttacatctactagcatagatgtgtatgctcacattaaaaaaggaaaaaaannnnnnnnnnnnnnnnnnnnnnnnnnnnnnnnnnnnnnnnnnnnnnnnnnnnnnnnnnnnnnnnnnnnnnnnnnnnnnnnnnnnnnnnnnnnnnnnnnnnnnnnnnnnnnnnnnnnnnnnnnnnnnnnnnnnnnnnnnnnnnnnnnnaacaaaaactgtttttgttctgtatcttaaattttttgttagcaataagttgcagacactggtccttggaggtttatttatgggtgtgtgatgttctgagatcacagaaggcccagtgtgaagacctaaatcagcgatggtcctgagccccaatcccactgacctcccaccaccg

SEQ ID NO: 33505 - DNA, 455 bp, Homo sapiens
  misc_feature (1)...(455): n = a,t,c or g
tntnacacagntnnnnnnnnnnnnnnnnnnnnnnnnnnnnnnnnnnnnnnnnnnnnnnnnnnnnnnnnnnnnnnnggcacgagaaaaggattgctgtcgcaggggagaccgtttatgacattgctaagtatggaccccgagggggaaaaagctcattctggaattgctctgtggcggttgcttctgttgcgagtgtgttcgggtgtgggttggtcacagcagaaatgggctccaccacaaaattgatattcctgactcatggtcaggcagatgtgtgcttctggttatttttccaggaacaggaatgggctctgccgagcctttcacacgttgtgtctctgctgtgcgggatcagtaccccagactgtgagataacaggatcgaattcaggggttggttggtgatccaggaaccatacctacttggatgtgatactgagtggcctagacgntgta

SEQ ID NO: 33506 - DNA, 445 bp, Homo sapiens
  misc_feature (1)...(445): n = a,t,c or g
gantcgtacagctnnnnnnnnnnnnnnnnnnnnnnnnnnnnnnnnnnnnnnnnnnnnnnnnnnnnnnnnnnnnnnnggcacgagagacagggtgcaatggctcatgctannnnnnnnnnnnnnnnnnnnnnnnnnnnnnnnnnnnnnnnnnnnnnnnnnnnnnnnnnnnnnnnnnnnnnnnnnnnnnnnnnnnnnnnnnnnnnnnnnnnnnnnnnnnnnnnnnnnnnnnnnnnnnnnnnnnnnnnnnnnnnnnnnnnnnnnnnnnnnnnnnnnnnnnnnnnnnnnnnnnnnnnnnnnnnnnnnnnnnnnnnnnnnnnnnnnnnnnnnnnnnnnnnnnnnnnnnnnnnnnnnnnnnnnnnnnnnnnctgtntcaaactangaataaagatggacactttgtngttaannanctatnaggaactgtnttcngggcctacctttgctt

SEQ ID NO: 33507 - DNA, 464 bp, Homo sapiens
  misc_feature (1)...(464): n = a,t,c or g
cctgtcctcnnnnnnnnnnnnnnnnnnnnnnnnnnnnnnnnnnnnnnnnnnnnnnnnnnnnnnnnnnnnnnnnnnnnnnggcacgagcaaaaactgaagataaagagactactgtgtcttttaagtttcttttcaactcccaaattcttggatttctcacctcttggcttcctcaatagaggtgagaaatgttaaagtagtgaaaacaggaaaaataacttactcattcaagaagtagataatggtccagatggaaagcttgaattatttttgtaaaactaaaattaaataaagtagccaaannnnnnnnnnnnnnnnnnnnnnnnnnnnnnnnnnnnnnnnnnttttcgttagtttgttttaatgcatgaattgtttcctactaagaagctatgatatagttccttgaccaaatgcagatgancaggattatctgattaatactttaacgaggagcagacaag

SEQ ID NO: 33508 - DNA, 452 bp, Homo sapiens
  misc_feature (1)...(452): n = a,t,c or g
gttcacacangttgagngatncgacggnnnnnnnnnnnnnnnnnnnnnnnnnnnnnnnnnnnnnnnnnnnnnggcacgagaaattttgcatttgattaaaagttctaatttaatataagttttgcaaagcatcatctctttgaagatctttttttatgctacatgttacccataatagaaaaataaaaaccagaatatctcacctccactggttcgttatactctcctatctcctctcctcctaccatttattatcaannnnnnnnnnnnnnnnnnnnnnnnnnnnnnnnnnnnnnnnnnnngncccgnttngnacccnnggntgnanngnagggggggnantnannctannggaaccntnggccnanggggtcaanggnatncncnggcntaanccnccnangnancnggantncgggggcccccnccacccngggnnnatttngtttttg

SEQ ID NO: 33509 - DNA, 460 bp, Homo sapiens
  misc_feature (1)...(460): n = a,t,c or g
nnanactgtgannggattacgaatttaatatnnnnnnnnnnnnnnnnnnnnnnnnnnnnnnnnnnnnnnnnnggcacgaggtgtcgggaccttgccaggtgaagctgctgattggcttcgtctgggtcacctccgccctggtggcactgcccttgctgtttgccatgggtactgagtaccccctggtgaacgtgcccagccaccggggtctcacttgcaaccgctccagcacccgccaccacgagcagcccgagacctccaatatgtccatctgtaccaacctctccagccgctggaccgtgttccagtccagcatcttcggcgccttcgtggtctacctcgtggtcctgctctccgtagccttcatgtgctggaacatgatgcaggtgctcatgaaaagccagaagggctcgctggccgggggcacgcggctccgcagctgaggaagtccgagagcgaa

SEQ ID NO: 33510 - DNA, 458 bp, Homo sapiens
  misc_feature (1)...(458): n = a,t,c or g
gtttgtacagcttgacnnnnnnnnnnnnnnnnnnnnnnnnnnnnnnnnnnnnnnnnnnnnnnnnnnnnnnnnnnggcacgagggaagacttaggcctttcgcttcctcctcaggttttccagggctttcttgtgagtttcccttgagttcctcccccgacaggggacactgtgacatttctgtatgctcacttctcagccactgctccctggagagaaatgaaattgtttgcctggattaatgaaaagcgtctgtgttgccaggtcagggctggctttggatgtagatggtgcccagaccttttccctcaacttttcagtttgaaaaatttcaaacttagaggaaaatggaaagaacagtagaatgaacacccatccaccccggacttagatttagcaatcgttaacattggctatatttgctttctctttctctatgtctaaacatagacacacacg

SEQ ID NO: 33511 - DNA, 461 bp, Homo sapiens
  misc_feature (1)...(461): n = a,t,c or g
caggttgagnnnnnnnnnnnnnnnnnnnnnnnnnnnnnnnnnnnnnnnnnnnnnnnnnnnnnnnnnnggcacgagaaaacatcttacgctggagtaaaggagaagtacctgagtgaatactgcttttctggtacctacattctctccctccttctgcaaggctatcatttcacagctgattcctgggagcacatccatttcattggcaagatccagggcagcgacgccggctggactttgggctacatgctgaacctgaccaacatgatcccagctgagcaaccattgtccacacctctctcccactccacctatgtcttcctcatggttctattctccctggtccttttcacagtggccatcataggcttgcttatctttcacaagccttcatatttctggaaagatatggtatagcaaaagcagctgaaatatgctggctggagtgaggaaaaaaatcg

SEQ ID NO: 33512 - DNA, 389 bp, Homo sapiens
tttggccctcgaggccaagaattcggcacgagagccattgaagaagaaacatcaggcgacttgcagaaggcctatttaactctcgtgagatgtgcccaggattgtgaggactattttgctgaacgtctgtacaagtcgatgaagggtgcggggaccgatgaggagacgttgattcgcataatcgtgaccagggccgaggtggaccttcaggggatcaaagcaaagttccaagagaagtatcagaagtctctctctgacatggttcgctcagatacctccggggacttccggaaactgctagtatccctcttgcactgagccaagccagggcaataggaacacagggtggaaccacctttgtcaagagcacattccaaatcaaacttgcg

SEQ ID NO: 33513 - DNA, 453 bp, Homo sapiens
  misc_feature (1)...(453): n = a,t,c or g
ttnnnnagcantnnnnnnnnnnnnnnnnnnnnnnnnnnnnnnnnnnnnnnnnnnnnnnnnnnnnnnnnnnnnnnnggcacgagaaagggatgaatgaatgaacatgatgaggtgagagggaagaggtaaagggaaaaggagaacaagcaactcttctctgcgtggcacctgggatgaatggtttctggggacatccctgatggcagttttgtggagaggtgcaaagctttatgtgttaagaaatgagcnnnnnnnnnnnnnnnnnnnnnnnnnnnnnnnnnnnnnnnnnnnnnnnnnnnnnnnnnnnnnnnnnnnnnnnnnnnnnnnnnnnnnnnnnnnnnnnnnnnnnnnnnnnnnnnnnnnnnnnnnnnnnnnnnnnnnnnnnnnnnnnnnnnnnnnnnnnnnnnnnnnnnnnnnnnnnnnnnnnnnnnnnnnnnnnnnnnnnnnnnnaaa

SEQ ID NO: 33514 - DNA, 444 bp, Homo sapiens
  misc_feature (1)...(444): n = a,t,c or g
anctgtatgacgtgattncgagcgtaatacgactcnnnnnnnnnnnnnnnnnnnnnnnnnnnnnnnnnnggcacgagtggaaggtggcgagtgtgtgcggtgggagacagatgaggagtaatctgtaataacagtaatccaagtggaagatgttggagaattggacctgctgatggcttctgtgtatgggatgaaagaaaaaggaatcaaagatgcctctcaggtctctggcttaatcagctggtaaggccatatactgagatgatagagaacatgggagaaggaacagatttgggaggaatgtgctaggaaattaagaactcagttttggatataagtttggaatgcccattagccaagtggcagtgtcaggtgcattgtacttgaaacacagatgtccagaggcatatatgattctgagggaggttaggctggagataatga

SEQ ID NO: 33515 - DNA, 441 bp, Homo sapiens
  misc_feature (1)...(441): n = a,t,c or g
gtangaggnnnnnnnnnnnnnnnnnnnnnnnnnnnnnnnnnnnnnnnnnnnnnnnnnnnnnnnnnnggcacgagcaggtgaccaaagatgaaggctccaggggctcaaaggggaaactgaagggtaacatgagtcaggggttccagaggcttgactcagaagctctgcgcctgtcctgggcaggccgagcctgataagtttccagccctaaggtgtgattgcagtaaaccttctggaagccagagccggcttcatctacagatgtgaggtttgtgggaggaggcagaagtgctcttgtggcttaacgggccctcttggctccagctgctcagaggaggggcagctgagagccacacaaggccttgcctctgaagtttgaagcatttacaggcaccacctccccccctacaactttttccaggccacatcaggcaagctcct

SEQ ID NO: 33516 - DNA, 389 bp, Homo sapiens
ctcgaggccaagaattcggcacgagcggcacgagtggagaagtaggtgcagttggtccccctggcttcgctggtgagaagggtccctctggagaggctggtactgctggacctcctggcactccaggtcctcagggtcttcttggtgctcctggtattctgggtctccctggctcgagaggtgaacgtggtctaccaggtgttgctggtgctgtgggtgaacctggtcctcttggcattgccggccctcctggggcccgtggtcctcctggtgctgtgggtagtcctggagtcaacggtgctcctggtgaagctggtcgtgatggcaaccctgggaacgatggtcccccaggtcgcgatggtcaacccggacacaagggaaagcgcggg

SEQ ID NO: 33517 - DNA, 454 bp, Homo sapiens
  misc_feature (1)...(454): n = a,t,c or g
cagnttgannnnnnnnnnnnnnnnnnnnnnnnnnnnnnnnnnnnnnnnnnnnnnnnnnnnnnnnnnnggcacgaggagactgcatagggctcggcgtggttaatgacccatcacaagaccatccaggcggtaagtggcagagcttggatttgaacccaggtctgtcaattttggcaacatgtgctttttccacacccccaagctgcctcaagggagaccagtacgcacaccagacaaaagcgcctcagcccgccgccggctcactcagtcacacaaacatgactgagcaccaggctcggtggtgtggaatgaacaggtcgggctcctgccctcatggggcttgttttcttgatgaaggccagcccttcatctgccagctagacccaaaggccccagctggaccctggcttccgtgacccgtggctgctctcctcaggcaggagctcaggctgct

SEQ ID NO: 33518 - DNA, 437 bp, Homo sapiens
  misc_feature (1)...(437): n = a,t,c or g
agntnnnnnnnnnnnnnnnnnnnnnnnnnnnnnnnnnnnnnnnnnnnnnnnnnnnnnnnnnnnnnnnggcacgagcacggtcggccatgttagttgtgttaaccggcatgtgatgtgaagtgccctggctaccttgtctgtctggggaactctgttctcaaaggcttttgcttttcacaccaggcctactttgacagatctccggctgaatccatcttttcatcttttgtacaatgtattttcctcactttccgttttgtgacgagcagtttagttgctggtttgacataatctttgacattcaagttcagaaaatgatgaaagctagaaaatggggaagctgagagagaatgcctgattccttttagtatgtccttctaccaaaataatttctgttttaaaacatgtaggcttaatatttccttatgatattaaag

SEQ ID NO: 33519 - DNA, 435 bp, Homo sapiens
  misc_feature (1)...(435): n = a,t,c or g
caggtntntggngattacgaanttaatacgactcnnnnnnnnnnnnnnnnnnnnnnnnnnnnnnnnnnggcacgagcggcacgagggaaaatataagctctcagtaccagaagaaatataaattagaatagaatgcatggaatgcagtgaccaggaggaggaaaatgttcttcataggctaaaaaatctggctaggctgagtacagtggcttatgcctctaatctcaaatcccaaagtattaggattacatacgtgagccaccacacacggctgagaccccacgtcttaaaaaaaaagaaaaagacattgtcgtagctatgccattccttgtgtttcagtgtttgaattaatgaattttttatcttatgcctacttttcatggaaatggtagtattctctacttgccagtcatgacttgcagccttttctggaaa

SEQ ID NO: 33520 - DNA, 463 bp, Homo sapiens
  misc_feature (1)...(463): n = a,t,c or g
ggttctgnnnnnnnnnnnnnnnnnnnnnnnnnnnnnnnnnnnnnnnnnnnnnnnnnnnnnnnnnnnnnggcacgagaccagtttgagggacaaagacaatggcttgagtcaggatcatggattcagtctggatgagacaagtgggatttgtggaacttactggcgctgctgctcacacctggagctgcctctgggtgtgaaagagtaggaggtgaagacccccaattcccttctggaagaggttagtagggcctaccagagcttggtggcaggtgctggtcaggagcaccctgggctggggccagcataccgggcagacccagccaggccaaggtggcagctgctccaaccaggccaagacccatgcactgggctctcagccttcctgggtcaaggccagagggctggtgtgatggaagatgccccagttctggcagatcttggctcttgcttcatgccctat

SEQ ID NO: 33521 - DNA, 459 bp, Homo sapiens
  misc_feature (1)...(459): n = a,t,c or g
gtancctganatgattacgantttaatacnnnnnnnnnnnnnnnnnnnnnnnnnnnnnnnnnnnnnnnnnggcacgaggtggactctgtaaggaacaggttgtgagtggggagtggctattggttaggtaactaatagtctgtttgtcattgcccatttttctgttaagtcgatcatcctttttaaatgatttgtaaataatttttgcatgctaagaaagtaagtatttgttatataattctagattctaaatattttggagctgtaaatgaggttttaaactctgagatcagttttctaattttgaaataaagtgaatctccattgaaatttacaagtaggggctggtgatcgcagagtccaatgcataatttatagtttttcctattctgggtgcagttgcattttaacctgaatgccaggtagttatctttataaaactatcatgtgtgagttata

SEQ ID NO: 33522 - DNA, 465 bp, Homo sapiens
  misc_feature (1)...(465): n = a,t,c or g
ggattgtaccacgtgncngggnattacggcgntaatatnnnnnnnnnnnnnnnnnnnnnnnnnnnnnnnnnnnnnnnnnggcacgagggtgtttgcgaacatacttccaattcttctcaaatcagcaggtaaaaccccacgtttctcctaaagttgcaccttcatggatgccatgttagtatgttaaaggccaagactaatggaagaactggaagccaattctccagctttagttatagagctggccataaaggtcacagtactttctcaaagttcttagtggtaagatttgctttgatatattgacttaaataaagaaagatttaaaaaatattcattcaacaaacctttataggttaattagtagatttatagatttcactctgttggatggatggatggcaccatgggcaggaaacatattcagttctaggaatatgaaagtgagtaagatctggtacctgc

SEQ ID NO: 33523 - DNA, 459 bp, Homo sapiens
  misc_feature (1)...(459): n = a,t,c or g
gnagctgtnntannnnnnnnnnnnnnnnnnnnnnnnnnnnnnnnnnnnnnnnnnnnnnnnnnnnnnnnggcacgagcggcacgagggagatgacctatctcaagccaaccttctgcgaacactgtgcgggatttctctggggcataatcaagcaaggatacaaatgcaaagactgtggagccaattgtcacaaacagtgcaaagacctcctggttctggcctgcaggagatttgcccgggcgccctccttgagcagtggtcatgggtcactgcctggaagcccctcgctgcccccagcgcaggatgaggtgtttgagttccctggagtcactgctggacacagggatttagacagcagagccatcacactggttacaggctcttctcgcaagatctctgtgaggctacagagggccaccaccagccaggccacccagactgaacctgtctggtcagagg

SEQ ID NO: 33524 - DNA, 455 bp, Homo sapiens
  misc_feature (1)...(455): n = a,t,c or g
ggctgtacagntngacgngattncgacgnnnnnnnnnnnnnnnnnnnnnnnnnnnnnnnnnnnnnnnnnnnnnnggcacgaggatgccaaagccaagtccccaccgaccatggtggacagcctcctggcagtcaccctggctggaaacctgggcctgaccttcctccgaggttcccagacccagagccatccagacctgggaactgagggctgctgggaccagctctctgcccctcggacctttacgcttttggaccccaaggcatctctgttaaccaaggccttcctcaatggcgccctggatggggtcatccttggagactacctgagccggactcctgagccccggccatccctcagccacttgctgagccagtactatggggctggggtggccagagacccagggttccgcagcaacttccgacggcagaacggtgctgctctgacttcac

SEQ ID NO: 33525 - DNA, 460 bp, Homo sapiens
  misc_feature (1)...(460): n = a,t,c or g
ngatcgtgncnnnnnnnnnnnnnnnnnnnnnnnnnnnnnnnnnnnnnnnnnnnnnnnnnnnnnnnnnnnggcacgagctcagcttgcggtgatcgaaaatctgttcagaagttcaaagactgatcaataaaataggtacatgtgaagattttttggcagcttagcgtggaaaccattgatcaccctgctctcatttctacctgttctgtgttggcaagggagagtgcccaaatgagcaagatatcgcagcaaaacagcactccaggggtgaacggaattagtgttatccatacccaggcacatgccagcggcttacagcaggttcctcagctggtgcctgctggccctgggggaggaggcaaagctgtggctcccagcaagcagagcaaaaagagttcgcccatggatcgaaacagtgacgagtatcggcaacgccgagagaggaacaacatggctgtga

SEQ ID NO: 33526 - DNA, 461 bp, Homo sapiens
  misc_feature (1)...(461): n = a,t,c or g
gnatctgncgnnattgcgagcggnnnnnnnnnnnnnnnnnnnnnnnnnnnnnnnnnnnnnnnnnnnnnggcacgaggaaatcccagaagatcagaattgaagagaggttgcctctggtgggtaggaatcagggatatgtagggattggacataagactgctactttttctcatactcttgtcatttcgacattttaaaacatattttttataattgtggaccagcagttggcagatcccgatttaagtccagtctggttattcaggagtccaagcaggtttactgggtcccttgaactgtattccccaaattccagagcagtttctagaacaaaataaggaatctccaaatatttgctccaaaacaccttcaggcatgttttgagcatattttctgaacccagaagccccaaattcttgacaaagtgtagcataaccatatcctgttcccaaaccacgaat

SEQ ID NO: 33527 - DNA, 463 bp, Homo sapiens
  misc_feature (1)...(463): n = a,t,c or g
gntnctgtgggaatnncgagcggnnnnnnnnnnnnnnnnnnnnnnnnnnnnnnnnnnnnnnnnnnnnnggcacgagctggaaagtaaagtttatggtaattctttttacactaggtaaaaccccaaattatattctcttttgaatcatactaacaaagatactctaccatgaaactaaatgagattttaagtaaagacccacctaacaaaacaacatactaaaaataacttctgtataacgacacaaaacagtctctaataatttatatcacacaagaacaaaggttttcatggtgatgagatggattctacactgtataaagggacttccatgtttattcaacaaaactcaaggaagatacacaaattctgtccataacagctatgaagaaatcaaaatcctgtttcccttttgntagattctattctcctaatattcattcctgtcacagggactgnattt

SEQ ID NO: 33528 - DNA, 222 bp, Homo sapiens
  misc_feature (1)...(222): n = a,t,c or g
gnngtgtacccgttgngnggnattgcgagcggaatacnnnnnnnnnnnnnnnnnnnnnnnnnnnnnnnnnnnnnnnnnggcacgagcttcaatacctgtacaatattatgaatataatggttattcaatagagatctgtttaagaaaaaaataaaagagggaaagagaggcggggttatccttaggatccaccaagttaacagttatctttttttttttttt

SEQ ID NO: 33529 - DNA, 464 bp, Homo sapiens
  misc_feature (1)...(464): n = a,t,c or g
gngttcataccangtgactgnnnattacgaatttaatatnnnnnnnnnnnnnnnnnnnnnnnnnnnnnnnnnnnnnnnnnggcacgagcggcacgnnnnnnnnnnnnnnnnnnnnnnnnnnnnnnnnnnnnnnnnnnnnnnnnnnnnnnnnnnnnnnnnnnnnnnnnnnnnnnnnnnnnnnnnnnnnnnnnnnnnnnnnnnnnnnnnnaagttacattttaatggaatctgagcaatagtctctgaccttaaggtcttttttagcctactgtttctgggattcttcttccacgtctctccttgttcccaggtgatagggaagatatatttataaataaagggtaggaaggtatctgtagtattgtctgattaataactggctgttactgtgttggactccagctaaactgaggcttctaaagaatggtacattcatatacctttagtttatacttcttaaggaa

SEQ ID NO: 33530 - DNA, 460 bp, Homo sapiens
  misc_feature (1)...(460): n = a,t,c or g
gntactgacgtgattnnnnnnnnnnnnnnnnnnnnnnnnnnnnnnnnnnnnnnnnnnnnnnnnnnnnggcacgagcaagaactaagtaacgatctggatgcccaggtaacctatcccctcccctcgcaaaggaccgggtcacgggagggagagcaagaggggggacccgacccgttcatggtgactgacccccctctgaaacaggagggaccaggcattgtcggtccataactcatcacccaatctcactttttcacctctccatcatttgtccggccagggagcctgcaaacagtaggcgctcattatgtgctgattgtattcaatgggggagagagccatgaaactaagcaatgaaaggagccaggattattgccatcatagcgggggcgcagaggtcagagaaggcttactggaggaggaggtaccaagtcttaaaggatggggaggagtgagccct

SEQ ID NO: 33531 - DNA, 451 bp, Homo sapiens
  misc_feature (1)...(451): n = a,t,c or g
gnnnnnnnnntttnaaaccngtnttgggncagcagntancgngngattacgacggannnnnnnnnnnnnnnnnnnnnnnnnnnnnnnnnnnnnnnnnnnnggcacgagcccttcgtctccaccttccttctctgcactcctgttttccactctccaaggagaccattttcaattctcaaataaaattgctatttaannnnnnnnnnnnnnnnnnnnnnnnnnnnnnnnnnnnnnnnnnnnnnnnnnnnnnnnnnnnnnnnnnnnnnnnnnnnnnnnnnnnnnnnnnnnnnnnnnnnnnnnnnnnnnnnnnnnnnnnnnnnnnnnnnnnnnnnnnnnnnnnnnnnnnnnnnnnnnnnnnnnnnnnnnnnnnnnnnnnnnnnnnnnnnnnnnnnnnnnnnnnnnnnnnnnnnnnnnnnnnnnnnnnnnnnnnnnnnnnnnnnnnnnnnnnnnn

SEQ ID NO: 33532 - DNA, 452 bp, Homo sapiens
  misc_feature (1)...(452): n = a,t,c or g
gnnnnnnnnnnnttgnntancntgtangannngattncgagcggaatacnnnnnnnnnnnnnnnnnnnnnnnnnnnnnnnnnnnnnnnnnggcacgagcggcacgagattataaatggtctgaattttcacatttatttgcacagatacaaaagacagtgacagatgcttgattatatagtgagactaacaaccaggtattaaacattgcactgatacttgtcattgccttcaaaataagctctacgtgttttctttacttcagttgtctcatttaaccataaataagtcctcagaggtcaggggctgtgactcatctggttttggtactggaccatgaatgcagtagacacccagcaagtatgggttgatgggaaacagcaatggctgattgagcagctgaaaaggtggggtgaggttgtggctccccttctcttctcaggatgaaccagt

SEQ ID NO: 33533 - DNA, 453 bp, Homo sapiens
  misc_feature (1)...(453): n = a,t,c or g
gnnnnnnnnnntttgnannccnnntttgnnaacangtangacnnnattncgagcgnnnnnnnnnnnnnnnnnnnnnnnnnnnnnnnnnnnnnnnnnnnnnnggcacgagaccagctggaagctgcatgttaggtggcctttctctgcaggaggtgacctccttggctatggaggaatcccaagaagcaaaatcattgcaccagcccctggggatttgcacagacagaacatctgacccaaatgtgctacacagtggggaggaagggacaccacagtacctaaagggccagctccccctcctctcctcagtccagatcgagggccaccccatgtccctccctttgcaacctccttccggtccatgttccccctcggaccaaggtccaagtccctggggcctgctggagtcccttgtgtgtccaaggatgaagccaagagcccagcccctgagac

SEQ ID NO: 33534 - DNA, 448 bp, Homo sapiens
  misc_feature (1)...(448): n = a,t,c or g
gnnnnnnnnnntttgntancaggtatganntgattncgagnggnnnnnnnnnnnnnnnnnnnnnnnnnnnnnnnnnnnnnnnnnnnnnggcacgagataaaatacaaaagaaatagaagatacatagtccctttccttcaggaaacaagctatgtaatattaaacaacagtcttaaagtatttttagaaggaatggtatagcgacatcatacgcttttggagttctaataaaggagctatagtgggtcagattatttagaacctttttagagaaagttgaattagagctggacctgaatccctgaatggggtgagaacaggcattccaggtggagagctctgcatgaataagatcatggcagtagagtgaggttggcatgtttgtaatagtgtgtgatgaggccccgtacctaacctgaggagtactgggcagcaaaggtggtattta

SEQ ID NO: 33535 - DNA, 451 bp, Homo sapiens
  misc_feature (1)...(451): n = a,t,c or g
gnnnnnnnnntttgaacacanntntgacgngattncgagcggnnnnnnnnnnnnnnnnnnnnnnnnnnnnnnnnnnnnnnnnnnnnnggcaccgagaatttacagactttattcagatcttgccaggtgcccattaatgttctctatttcgtgcagtatccattccaggagcacacgttgcatttaattgcagccctctttagtcttttttagtctggaagagctattcagtctggcaatcaggaccttcacagttttgaagaatacaatctagttaattctagcaagtttgctgaacgacccttgatttggatttgtgtggtatttccttgtgatgtgggtgggaatactactgaagggtggtattgtgctctctgtgcattttgtcaggcaaggtgttgatatgcctgtcctatgggtgatgacataaactttggtcacatagttaaaa

SEQ ID NO: 33536 - DNA, 454 bp, Homo sapiens
  misc_feature (1)...(454): n = a,t,c or g
gnnntnnnnnctttgaanaccttnttggaacacatgtagcgacgnnattgcgagcggannnnnnnnnnnnnnnnnnnnnnnnnnnnnnnnnnnnnnnnnnnnggcacgannnnnnnnnnnnnnnnnnnnnnnnnnnnnnnnnnnnnnnnnnnnnnnnnnnnnnnnnnnnnnnnnnnnnnnnnnnnnnnnnnnnnnnnnnnnnnnnnnnnnnnnnnnnnnnnnnnnnnnnnnnnnnnnnnnnnnnnnnnnnnnnnnnnnnnnnnnnnnnnnnnnnnnnnnnnnnnnnnnnnnnnnnnnnnnnnnnnnnnnnnnnnnnnnnnnnnnnnnnnnnnnnnnnnnnnnnnnnnnnnnnnnnnnnnnnnnnnnnnnnnnnnnnnnnnnnnnnnnnnnnccatctggttctttaaaattatatattgcnctttgcataacacattctgcatgctcatctttg

SEQ ID NO: 33537 - DNA, 438 bp, Homo sapiens
  misc_feature (1)...(438): n = a,t,c or g
tagnnnnnnnnnnnnnnnnnnnnnnnnnnnnnnnnnnnnnnnnnnnnnnnnnnnnnnnnnnnnnnnnnnnnnggcacgagtggtgaggaggcacccatgcctcattttagagacagagctagtgcctgacaagtgttacactctcttctgcttggagaagcatatgctatgaccggcttgtggatattcaatttaaaattttatttatgaaaacaaaattaccattactgttttttagtcaaaatgaattatactttataattctataaggccaaggagctacttacttgaaaaatgagcatattgtttttggtcatttttctttgcaaagtaaaagggaaaaaattattgcacttagttgaagagaggaccttctgtgtgacttgcaacaaagcagaattaatttgattaatattaagaaaatactccttttatggg

SEQ ID NO: 33538 - DNA, 435 bp, Homo sapiens
  misc_feature (1)...(435): n = a,t,c or g
ttnnnatagcagntangacntgattncgagcggnnnnnnnnnnnnnnnnnnnnnnnnnnnnnnnnnnnnnnnnnnnnnggcacgaggcaggggcaggtggcaaatggggaaggctattggaattcacatcaatgtgcaaaaaaattgcttcctttgctctttgtatagaaagggactagaattatttagttccctttgtcacaactagctaagctctttaaagcaatcaacagacattcaacatttattgagattgaacagtgtatttcgtgattaaaagcatgggctctgacttcagaccagnnnnnnnnnnnnnnnnnnnnnnnnnnnnnnnnnnnnnnnnnnnnnnnnnnnnnnnnnnngtctctgcatcaggttcctcctttgtaaaatggggataatggtaagtatctgcatatatagagtacctagcaa

SEQ ID NO: 33539 - DNA, 457 bp, Homo sapiens
  misc_feature (1)...(457): n = a,t,c or g
gggtttgatacctttgngaacngntatgacnnnnnnnnnnnnnnnnnnnnnnnnnnnnnnnnnnnnnnnnnnnnnnnnnnnnnnnnnnggcacgagggggcttataaacaacttgctccagttcctccagattgtgtttgactgttgctatcactgacgcatcaagagaagcacacagcttgcagatataatccaaggcttcatctgtgtttttggcatccccaacaccaaccgaggcagtcagcccaatgacctggggcagtgggcctgaagatcctccaagtttctgatctagataattaaacatgatcatattgtacgggtgttgtttactagtgttgtggcattcatcaaatatcatcaaaggaaagatggatagtgatggaatcgntccctttttaaggnngttnacnagaatctgtggagttnaaantgatgattnattggtctgancaat

SEQ ID NO: 33540 - DNA, 455 bp, Homo sapiens
  misc_feature (1)...(455): n = a,t,c or g
gagnnntttgnnnnnnnnnnnnnnnnnnnnnnnnnnnnnnnnnnnnnnnnnnnnnnnnnnnnnnnnnnnnnnnnnnnnnnnnnggcacgaggtttaaaatattgcaagaattaccaaacttgacccagagacattnnnnnnnnnnnnnnnnnnnnnnnnnnnnnnnnnnnnnnnnnnnnnnnnnnnnnnnnnnnnnnnnnnnnnnnnnnnnnnnnnnnnnnnnnnnncatgaagcacaagaagatgaagtaccatctgaggtgtgtctgtattttcttccatgctgttaggtgtcttcatataacctaagttttaaattttgctagacaataacttaagtaattttagaacattataaattacttcccccttgannnnnnnnnnnnnnnnnnnnnnnnnnnnnnnnnnnnnnnnnnnnnnnnnnnnnnnnnnnnnnnnnnnnnttanaaaaaaaa

SEQ ID NO: 33541 - DNA, 460 bp, Homo sapiens
  misc_feature (1)...(460): n = a,t,c or g
gngnnntttgnnnaccnttggcnnnnnnnnnnnnnnnnnnnnnnnnnnnnnnnnnnnnnnnnnnnnnnnnnnnnnnnnnnnnnnnnnnnnnnnnggcacgagttggaagatcaatacccaagccattttcaaattttcctgcttgtcttaaaaaaaaaatctgtttttacagttatcttattcaaataaggatccaaaaagctcactaattacatctgcttgtatgtcttctttaatccagagcagcccatctccttttttcagttcattatcttattgacttgctgaagaaaactgggtcatttttcctgaagtacatcctacattttgnctctatttcttttctttctttccttctgttttttanagatgggtgnctattngcttncttgtgncattcagcttattcctgnataccctgtatttcctataaatgaatgntggcttaattagatttggg

SEQ ID NO: 33542 - DNA, 456 bp, Homo sapiens
  misc_feature (1)...(456): n = a,t,c or g
gtgngntttgatacngtnnnnnnnnnnnnnnnnnnnnnnnnnnnnnnnnnnnnnnnnnnnnnnnnnnnnnnnnnnnnnnnnnggcacgagtgaaccgtagctcatttaatccttgcaatagccctaagaggaaggtacttctgttactcctatttacagaaaaggaaactgaggcacacaaacttaaataacttgcccaagaccacataactaataagcaacagagtcagcatttgaacctaggcagtatagtttcagagtttgtgacttgactctatattgtactggcactgactttgtagattcatggtggcacataatcatagtaccacagtgacaaataaaaagaaggaaactcttttgtcaggtaggtcaagacctgaggtttcccatcacaagatgaggaagcccaacaccaccccccaccaccccaccaccatcaccaccctttcacac

SEQ ID NO: 33543 - DNA, 461 bp, Homo sapiens
  misc_feature (1)...(461): n = a,t,c or g
gagnnnnttggnnaccnttgnnnnnnnnnnnnnnnnnnnnnnnnnnnnnnnnnnnnnnnnnnnnnnnnnnnnnnnnnnnnnnnnnnnnnnnnnnggcacgagcagagatagacagtagaatgcaaatacctccctcccctaaactgactggacggctgccaaggaggccccaaacccaggccccatgcaaaggcacgtggtttccttttctcctctctctgcatctgcgctttccagataagcccaaagacagcaacttctccactcatgacaaatcaactgtgaccctcgctccttccatttctgtccattagaaaccagccttttcagcatctcacccattagcagccccatcacccagtgatcagtcgcctcagtaaagcagatctgtggatggggagcctacgggtggtaagaagtggtgttttgtgtttcatctccagcttggtgttccatggccc

SEQ ID NO: 33544 - DNA, 456 bp, Homo sapiens
  misc_feature (1)...(456): n = a,t,c or g
gngnnntttgncnannnnnnnnnnnnnnnnnnnnnnnnnnnnnnnnnnnnnnnnnnnnnnnnnnnnnnnnnnnnnnnnnnnnnnggcacgagcctgacagtgttaatggaagtgaaccaagcattcctcagtcaggtgacacacagtcttttgcacagaagctccagctccgggtgccctccgtggagtctttgtttcgaagtccgataaaggaatctctattccggtcttcttctaaagagtctttggtacgaacatcttccagagaatccctgaatcgacttgacctggacagttctactgccagttttgatccaccctctgatatggatagcgaggctgaagacttggtagggaattcacacagtctcaacaaagaacagntgattcatgnggatgcgacnaatggaacgaaacttaagtanctcaggggaaaatatnctgaggtannagcat

SEQ ID NO: 33545 - DNA, 455 bp, Homo sapiens
  misc_feature (1)...(455): n = a,t,c or g
gngnntttggcnnnnnnnnnnnnnnnnnnnnnnnnnnnnnnnnnnnnnnnnnnnnnnnnnnnnnnnnnnnnnnnnnnnnnnnnggcacgagacaaaagtgacgagaaaaaaaaatcaggagtcagctctgacaatgaagatgatgatgatgaagaagatgggaattaccttcatccctctctctttgcctccaagaagtgtaaccgccttgaagagctgatgaagcccttgaaggtagtggacccagatcatcccctcgcagcacttgttcgtaaggcacaggctgacagttccactcccaccccacacaacgcagacggtgcgcctgtgcagccctcccaggtggagtacacggcagactcgaccgtggcagccatgtattacagctactacatgctaccggacggcacttactgctggcgccgcccctccggaatcgacgtgactacttacta

SEQ ID NO: 33546 - DNA, 457 bp, Homo sapiens
  misc_feature (1)...(457): n = a,t,c or g
gagnnnttgnnnncnttggaacacagntnggagnnnnnnnnnnnnnnnnnnnnnnnnnnnnnnnnnnnnnnnnnnnnnnnnnnnnnnnnnggcacgagttcaataccctgcttaattatgttactatgatataaaccaaaaagattaagaaaattaaaggtttattttttcatggatccctaactgctagccattttgcagagcatagttttttaaatcacttaaaatcatgagcccaagcaagaaagaatggcaccttgttttacatcagaccattacaagaacagttttcaaataaccacatatattctcataaatttcatatccatttttaactcctctacattagtctatcctctgaggagaagaattaaaagggaaaaaaaggacattagcagtataatttgattaaggagaaaaaactgattatattaactcactggcaaaaatagccctg

SEQ ID NO: 33547 - DNA, 459 bp, Homo sapiens
  misc_feature (1)...(459): n = a,t,c or g
gtgnnntttganacctttgaanancagctnnnnnnnnnnnnnnnnnnnnnnnnnnnnnnnnnnnnnnnnnnnnnnnnnnnnnnnnnnnnnnnggcacgagaaggaaacatacttaatctaatacctgagtgaactgggttacatgttaagaatttctggacatnnnnnnnnnnnnnnnnnnnnnnnnnnnnnnnnnnnnnnnnnnnnnnnnnnnnnnnnnnnnnnnnnnnnnnnnnnnnnnnnnnnnnnnnnnnnnnnnnnnnnnnnnnnnnnnnnnnnnnnnnnnnnnnnnnnnnnnnnnnnnnnnnnnnnnnnnnnnnnnnnnnnnnnnnnnnnnnnnnnnnnnnnnnnnnnnnnnnnnnnnnnnnnnnnnnnnnnnnnnnnnnnnnnnnnnnnnnnnnnnnnnnnnnnnnnnnnnnnnnnnnnnnnnnnnnnnnaaaataaaaaagaatttccggg

SEQ ID NO: 33548 - DNA, 174 bp, Homo sapiens
  misc_feature (1)...(174): n = a,t,c or g
cctttgacaccctttgactttacnnnnnnnnnnnnnnnnnnnnnnnnnnnnnnnnnnnnnnnnnnnnnnnnnnnnnggcacgagattgtagtctagatgagtgatcatgtaggttttgttttgttttgagatggagcctgggcaagagtgactcagtctcaaaaaaaaaaaaaa

SEQ ID NO: 33549 - DNA, 479 bp, Homo sapiens
  misc_feature (1)...(479): n = a,t,c or g
tttgacacccttgacnttgccacagctatgacnnnnnnnnnnnnnnnnnnnnnnnnnnnnnnnnnnnnnnnnnnnnnnnnnnnnnnnnnnggcacgagataccctggcattataagctcattcacagcttacttcaaaaacaaccgaaaatattcacaccaaagtcttgagattttattctctccagcttttaatcatcaaaactgcaacacttttcccctctagttcactatctttgtgagttattcataattntgnaattctanagntacccatttatcctgcactgcttagagtatcanttgagcnnttatanctnaggncnaanangaccatggggcnttcaaacccnggncnggnccanatncancaagggaggggctggnaatgattaaattcnnnggnttgnngganantgtnacctntcnggcngccnnactggnggancccctgagtcttnggtnaggggcntcttttag

SEQ ID NO: 33550 - DNA, 479 bp, Homo sapiens
  misc_feature (1)...(479): n = a,t,c or g
anccnttnnnncttggccannnnnnnnnnnnnnnnnnnnnnnnnnnnnnnnnnnnnnnnnnnnnnnnnnnnnnnnnnnnnnnnnnnnnnggcacgagcggcacgagctggcacagtattcattccagtaaatgtggttttaacaactattaaactcctttaaacataaactgttaatctctatggtatatgctgctttccataaatagaaaccaaaatacttaatttttcataaagataaatggaaaagatttttacagaaacttgctctttataaagatttcccagaatacatctaatttgacaaaagtgatttacaactaattacaactaagctcagtagtgtgacctcaaaactgagtgaaaggaatcaaatcctttaatgtcctacaatttatttattttatataatagtcaatgttgtttgctaatgaaaatgccgaacctttaacaataagaaaacataatcagaccacaagg

SEQ ID NO: 33551 - DNA, 476 bp, Homo sapiens
  misc_feature (1)...(476): n = a,t,c or g
nannnnnnnnnnnnnnnnnnnnnnnnnnnnnnnnnnnnnnnnnnnnnnnnnnnnnnnnnnnnnnnnnnnnnnggcacgagnnnnnnnnnnnnnnnnnnnnnnnnnnnnnnnnnnnnnnnnnnnnnnnnnnnnnnnnnnnnnnnnnnnnnnnnnnnnnnnnnnnnnnnnnnnnnnnnnnnnnnnnnnnnnnnnnnnnnnnnnnnnnnnnnnnnnnnnnnnnnnnnnnnnnnnnnnnnnnnnnnnnnnnnnnnnnnnnnnnnnnnnntaatgttctatttaaggttgcctgcagtgttaagatataaactccctctgcccccttaaagcatctgtaaactttgttacatgtatttaatacaaaaaattacctatgggccctaccgtctgtgatgttagagagttagagtaggtagctaatcagatataaacagggccccctccaaccaggaatgtcaggtgaccatcangtaatgggt

SEQ ID NO: 33552 - DNA, 488 bp, Homo sapiens
  misc_feature (1)...(488): n = a,t,c or g
gccccncctttgacaccctnnnctttgaacaccgtttgacnnnnnnnnnnnnnnnnnnnnnnnnnnnnnnnnnnnnnnnnnnnnnnnnnnnnnnnnnnggcacgagcgggccccgacgcgcgcgggtctcgtttggagcggtagtgagttcctgagcgagtggacccggcagcgggcgataggggggccaggtgcctccacagtcagccatggcagcgctgcgctacgcggggctggacgacacggacagtgaggacgagctgcctncggnctggnagganagaancaccaaggacggctgngntaantncgncnctcnnaccgannngannantctgtgctancatacacttacngtgnacccngncnntttgncgntctnnntgncctncctgnnggngancttgacggccnnnancntcnnngagatcattnctgtgancatccattctgnncnncnnttggnttntgnnannancgngtntgac

SEQ ID NO: 33553 - DNA, 480 bp, Homo sapiens
  misc_feature (1)...(480): n = a,t,c or g
ctttgncaccctnnnnnnnnnnnnnnnnnnnnnnnnnnnnnnnnnnnnnnnnnnnnnnnnnnnnnnnnnnnnnnnggcacgagcggcacgagattatgttaaaaataaacatattgaagttttgaaagaataaatgacttgctcatggtttgatgaactgccagtggtgtaataggactaaaaggcatgtttcatgatattctggtacttctttttggtgtgaacaaacagaatatttatattgcaatcatgttctcagaggcttcatcaaatatgattttgaagcagacatttttctttattctctgtcaaaatttggtgtactttatataaactgattaccattagaaataatgaggaaagtggtgtgtataaaaagttctaaaaatataagtgctaatcagtagaaacctaccacatcttaaaagaaatagttccactgcaacttgacctggagattttataagtaattttagatat

SEQ ID NO: 33554 - DNA, 452 bp, Homo sapiens
  misc_feature (1)...(452): n = a,t,c or g
tttgaaaccctatgacnnnnnnnnnnnnnnnnnnnnnnnnnnnnnnnnnnnnnnnnnnnnnnnnnnnnnnnnnnggcacgaggtagttcttttgtgacatctttggttttggtgctggaatcatactggctcataggataagttgggaagtgatccctcctttatgttttttaaaagagtttgtgaaggattggtgttttaaatgtttgggagcagtgaagccatttggtcctgggcttttcttcatggaaaatgttttaattactaattcaatctcattacttacaggtctattcagattttctatttcttcttgaattagttttgatagtttgtatcatacaaatttgaccatttcatgtatattatctaatttgntggcatatanntatttatagnattttttaataatcctttcattnntgnnanannggnnnnnagcccctcnctta

SEQ ID NO: 33555 - DNA, 426 bp, Homo sapiens
  misc_feature (1)...(426): n = a,t,c or g
gnnnnngnctttgtnancccnttngnctttgnnanccnnnnnnnnnnnnnnnnnnnnnnnnnnnnnnnnnnnnnnnnnnnnnnnnnnnnnnnnnnnnnnnnnnnggcacgagcggcacgagggtcgcttggtcagattgagacagtctgcgtggtaaacttttgggcagcctggtttcttgcaggagacgagctggccagcatccccacaactaaaacactcatcttctcgctcctttgtgatttcaccctgggtcctgcgctttccctgttgcttcttcttgaatttctttgacttttcttccgtggcaatgggttgattctttggccttacacccaagaagccactgcngttcggggctccacatttgcanacngtctttccattcccangacattctnggntgccnngngngnnnccnngggc

SEQ ID NO: 33556 - DNA, 500 bp, Homo sapiens
  misc_feature (1)...(500): n = a,t,c or g
gnnnnnnnntttgnnanccnnnnnnnnttggnnnnnnnnnnnnnnnnnnnnnnnnnnnnnnnnnnnnnnnnnnnnnnnnnnnnnnnnnnnnnnnnnnnnnnnnnnggcacgagctctaccctggacctctctccttcaccctggacctatatatctcgctgcctaccaggtgtctccacttgtctttcttacacacacttcaccttagcatgtcaagacaacttaccttcccctcagcctgctcctgcaggtgctcaggtcaaaacctggtagtctttgttcttccatccctcacccctacatctaacaatcagagaaagcccagttaatgagtcttgttgattctacctcataaatgttggattcattcatttccctcattctccactgcaaccagcttagtctaaattgccagcttccatcttttgactggactgcacatatagccccttatgtgtctcctcatatgcctttgatcccttcattctattctctacctg

SEQ ID NO: 33557 - DNA, 481 bp, Homo sapiens
  misc_feature (1)...(481): n = a,t,c or g
gnnaccnnnnnnnnnnnnnnnnnnnnnnnnnnnnnnnnnnnnnnnnnnnnnnnnnnnnnnnnnnnnnnnnnnnggcacgagaaaagaaaaaaaactagccgaagactgggagaaaatagttgcaaatcatatacaactatatatggttgtatatatggttgtatatattttggttgnnnnnnnnnnnnnnnnnnnnnnnnnnnnnnnnnnnnnnnnnnnnnnnnnntnnnnnnnnnnnnnnnnnnnnnnnnnnnnnnnnnnnnnntaatatgtatatgaatggctaataactacatgaaaagatacacgacatagtcattagataaatgagaattaaaaccacagttacataccatgtcatgtccactaggatggttataatcaaagagacagaaaacaagtattggtgaggatatggagagacaaatcctcatatattgctggtgggaaaactttgaaaaacagtctggccatttcttaa

SEQ ID NO: 33558 - DNA, 467 bp, Homo sapiens
  misc_feature (1)...(467): n = a,t,c or g
acnnnnnnnnnnnnnnnnnnnnnnnnnnnnnnnnnnnnnnnnnnnnnnnnnnnnnnnnnnnnnnnnnnnnnggcacgaggggaatcaaaagtgaaagatgggtaaggtcagagttgctgagcattgagagaaaaaaaaatggaaagaggctgtgcctcatcattcctgccaacctatcacgttattgtcttcgttgtttccaatcacgaagccctggccagtggcctccaatcatagatttccagtctacaaaggacttagccatttagcttagtcaaactgtcagtttattagaagaggcagtttgcagaaatggcaatgttgggaccaagaccatgttttctttgtcccgctactccagacatccacctaggcactccaacaggacttgcttagaaaaaagttgcaacacagaccattttaaagttagtgatcgatgtctaatagcagtggtttccaagctggtc

SEQ ID NO: 33559 - DNA, 462 bp, Homo sapiens
  misc_feature (1)...(462): n = a,t,c or g
cnnnnnnnnnnnnnnnnnnnnnnnnnnnnnnnnnnnnnnnnnnnnnnnnnnnnnnnnnnnnnnnnnnnnggcacgagaatttataacatggagggtggggccagtgatgcataaccacaaattgcaggaaagtgaagctgtctataattgagaaaagattacatgttactccttgtcttgtctgggagctgctattatggtaaatgacttcatttggtgcttatggtcttcacataggagtatggngnggaagatgatngagtctggntagnggnntatncaattcagacganttgagccatctgtactgngtatanattgcactgccttctctgaccacactacangggttgtgtgaccnactcnccgganancnacctgggcactcnatcngcacttcgantgccantanttgtatncatactcttaagactnnncgtcnanntcnttnaccnccggctc

SEQ ID NO: 33560 - DNA, 461 bp, Homo sapiens
  misc_feature (1)...(461): n = a,t,c or g
ccagcagctnnnnnnnnnnnnnnnnnnnnnnnnnnnnnnnnnnnnnnnnnnnnnnnnnnnnnnnnnnnnnnnggcacgagactgtggaaattagattctcctcctccttgtggtttgttgttgttgctgttttctaagtaccctttgtaaagtctgtattctttgtcatatgtggccactgaagtctctgttaggatagcttaatagttcatgattagactgagatttctttaaaagctttgacccaataaacctcccagcctatgccaactggttctgtgtgtgtgtgctggggcatgcgttcagtaccctggcaatttacatctttgttttagctttcacatcccacttgcacagggtctcaatgccagccagaaatgagaggtgttctcagancttcctcgggcatccatatanttgcacatacatgnggctttctaaattctcaggaatatgtaggt

SEQ ID NO: 33561 - DNA, 445 bp, Homo sapiens
  misc_feature (1)...(445): n = a,t,c or g
ggggctttgataccgnttgacnnnnnnnnnnnnnnnnnnnnnnnnnnnnnnnnnnnnnnnnnnnnnnnnnnnnnnnnnnggcacgagcactcaagctttaatacaatgcttccctgtggctcttatacagggcattggttctgttcgctggagctttatagcacaagcccaagtcctcttctgtacaacatccttcagataactgaccacagttgcatgtctcctcctccttcagagtcttctacagggtacatgtaccaagnnnctcactggcctctaatctantgcttcaagtcncctgctgatgaggancttcnncngccttgctcacnccccacganacngnntcnanatgnncncatantacangagtggnncnannnntnnnganaanngggnagtncgaacnnnttanngaatnnagnagncnntgnagnncnnggga

SEQ ID NO: 33562 - DNA, 425 bp, Homo sapiens
  misc_feature (1)...(425): n = a,t,c or g
gtgngntttgaanacngtttnnnnnnnnnnnnnnnnnnnnnnnnnnnnnnnnnnnnnnnnnnnnnnnnnnnnnnnnnnnnnnnggcacgagggactgactgctgctcagccagcccctcatgtggtcaggtgacaccgcacctgtctctaggtgcctctgcttcctcctacacctgagtcataaggtcaggtgccatgctgggcgccatctgagtgtaccacatggatccacccattaatcctcctacccactatgaaataagnnnnnnnnnnnnnnnnnnnnnnnnnnnnnnnnnnnnnnnnnnnnnnnnnnnnnnnnnnnnnnnnnnnnnnnnnnnnnnnnnnnnnnnnnnnnnnnnnnnnnnnnnnnnnnnnnnnnnnnnnnnnnnnnnnnnnnnnnnnnnnnnnnnnnnnnnnnnccccgg

SEQ ID NO: 33563 - DNA, 370 bp, Homo sapiens
  misc_feature (1)...(370): n = a,t,c or g
gagnngnnnttngnnaccnntttgaccnnnnnnnnnnnnnnnnnnnnnnnnnnnnnnnnnnnnnnnnnnnnnnnnnnnnnnnnnnnnnnnnnnnnnnggcacgagggttccacaactaggaaagaagaaactgaaagtattagtaaggcatgtttccatttcctctggatgcatctgaggaaaacttccagtgccatgtggacttggccaccatcttcctcccattggaagggcatgaagagaagcatgtggtagtgttgagagcatgtgttttggacattatcattgctggttgaagtncanagaaaggcttcanganattgactttannnatcnnaaagctatancatatganaggagatgtnnctcc

SEQ ID NO: 33564 - DNA, 405 bp, Homo sapiens
  misc_feature (1)...(405): n = a,t,c or g
gagngnntttggnnncctnttggaccnnnnnnnnnnnnnnnnnnnnnnnnnnnnnnnnnnnnnnnnnnnnnnnnnnnnnnnnnnnnnnnnnnnnnnggcacgagcgagtagctgagactacaccgagtagctgagaccnnnnnnnnnnnnnnnnnnnnnnnnnnnnnnnnnnnnnnnnnnnnnnnnnnnnnnnnnnnnnnnnnnnnnnnnnnnnnnnnnnnnnnnnnnnnnnnnnnnnnnnnnnnnnnnnnnnnnnnnnnnnnnnnnnnnnnnnnnnnnnnngcaaattggtgttttaatgatattgaatctttcancnccatgancatggttcagnntccatttattttnntcgtcattatctnttannnntcttaanagnttcagnnngntnnnnnnnnatct

SEQ ID NO: 33565 - DNA, 427 bp, Homo sapiens
  misc_feature (1)...(427): n = a,t,c or g
gngngnnnttgtgacngcttgacacagnttgacnnnnnnnnnnnnnnnnnnnnnnnnnnnnnnnnnnnnnnnnnnnnnnnnnnnnnnnnnnggcacgagacaatggtcacaggctacagaaaagctttgagtctgctctgaatcctgagatcacccctgtctccctgcctctccctgagccaccccaggcaccctgcccaggtttactcacccaggttgttgctaactgggtgcctgtgctcgtgtcccttcttgnangcttnntaaaaggctatttggaatgacgagagggcatatcanagaagggagacntgcatcctccaggccntgtaccacnnnggcnggtntngngtggnnnggntaggtgnaggtgnctnngcnngggggnttnngnnntncggntnggnntgnnntnncngtnnggtcg

SEQ ID NO: 33566 - DNA, 444 bp, Homo sapiens
  misc_feature (1)...(444): n = a,t,c or g
gngnngnnnnttgannaccntnttgaccannnnnnnnnnnnnnnnnnnnnnnnnnnnnnnnnnnnnnnnnnnnnnnnnnnnnnnnnnnnnnnnnnnnnnggcacgannnnnnnnnnnnnnnnnnnnnnnnnnnnnnnnnnnnnnnnnnnnnnnnnnnnnnnnnnnnnnnnnnnnnnnnnnnnnnnnnnnnnnnnnnnnnnnnnnnntgaaacattttaaagaactctattatttcttatattaggaatgtgggcaggaggtaacatcacagctgatgtcaaactgcaggttccttggttttataccttcaaatttgtaaatcaagactttaaaaaaacctttttaccccttagtaaaagnangaaaaacctttntaccccttagcatataccttcgatatgctaanaacnctgtatatgctaaggtccnacngngnttnctctg

SEQ ID NO: 33567 - DNA, 243 bp, Homo sapiens
  misc_feature (1)...(243): n = a,t,c or g
gngngnntnttggtnaccgctctgacaccngtnnnnnnnnnnnnnnnnnnnnnnnnnnnnnnnnnnnnnnnnnnnnnnnnnnnnnnnnnnnnnnnnnggcacgagaccnnnnnnnnnnnnnnnnnnnnnnnnnnnnnnnnnnnnnnnnnnnnnnnnnnnnnnnnnnnnnnnnnnnnnnnnnnnnnnnnttgcatgttggcctgtcttgctaggttggggaagttctcctggctnntntcttga

SEQ ID NO: 33568 - DNA, 418 bp, Homo sapiens
  misc_feature (1)...(418): n = a,t,c or g
gngnnnnttttgnnaccnnttgaccacnnnnnnnnnnnnnnnnnnnnnnnnnnnnnnnnnnnnnnnnnnnnnnnnnnnnnnnnnnnnnnnnnnnnnggcacgagcatggtatatatgtatgagtggatgaatggatggacaaatggacagacagatagatgttttgcccagtggcacgatcatagnnnnnnnnnnnnnnnnnnnnnnnnnnnnnnnnnnnnnnnnnnnnnnnnnggctannnnnnnnnnnnnnnnnnnnnnnnnnnnnnnnnnnnnnnnnnnnnaannnnnnnnnnnnnnnnnnnnnnnnnnnnnnnnnnnnnnnnnnnnnnnnnnnnnnnnnnnnnnnnnnnnnnnnnnnnnnnnncctccnggttnagggantntttgnctnggntcccagnatntngggattcca

SEQ ID NO: 33569 - DNA, 444 bp, Homo sapiens
  misc_feature (1)...(444): n = a,t,c or g
gngnnnnnnnttnnnnncnnntttggcnacnnnnnnnnnnnnnnnnnnnnnnnnnnnnnnnnnnnnnnnnnnnnnnnnnnnnnnnnnnnnnnnnnnnnnggcacgagcatccttatgaagatgccactcccagaaactgggacttgagctactcttaggaagccacagaccatggaatacagattcttctcctggaaacttctccatttccaagaaggcataaaatgaaggaaagcaatcctctttcctttccgtttcttggaatctaatatctaagcattaccctttacactctagcaaagtaaagcaaactaaggcatgacggcccctcccagcagtaattatgagatcatttggcctcagtaactaggcagactccactacctttcacctagtttcgtgggaagaaatggtaaagctccctcgatggaaatgttccttctt

SEQ ID NO: 33570 - DNA, 416 bp, Homo sapiens
  misc_feature (1)...(416): n = a,t,c or g
gggtnnnnttgccacagcttgactgattnnnnnnnnnnnnnnnnnnnnnnnnnnnnnnnnnnnnnnnnnnnnnnnnnnnnggcacgagcttnnnnnnnnnnnnnnnnnnnnnnnnnnnnnnnnnaagaattttggaggggcacaaacatttagaccatagcactgatatagttctttgaagtctgagcacaatgaatgtctacagtcaaccttttaagcaaagatagtgtcatgaggaaaacaataaatatttggcatttttgtttagggattaataccctgtgggaaaatctttgccagatctcttatgnctctttagcactggtcngataaaattctccccgtnctctctnctntgnatttaccncaaatagnccngttnagtntggntntgntagntagntnatgtcnnatta

SEQ ID NO: 33571 - DNA, 342 bp, Homo sapiens
  misc_feature (1)...(342): n = a,t,c or g
gggnnnnntttgcnacagcttgactgattacgaatttaatacgactcnnnnnnnnnnnnnnnnnnnnnnnnnnnnnnnnnnggcacgagagcttcaatttttttcagagaaatagggagttaagttcagcaacagagagtgaaacagggcagaaagtattacagtatagttttgaagaataagaaaaaactatgcaactatctaagagtgggagaatgaatgggctaaagaaatataggctgggtgcannnnnnnnnnnnnnnnnnnnnnnnnnnnnnnnnnnnnnnnnnnnnnnnnnnnnnnnnnnnnccctgggagtncnngacnannctggcnnnatgg

SEQ ID NO: 33572 - DNA, 453 bp, Homo sapiens
  misc_feature (1)...(453): n = a,t,c or g
ngnnacagtttgaacacctttnggaatttcctacgactttttanagnnaattncngccctcgaggccnagaattcggcacgagcggcacgaggaaaaaactgaccttgtatagatcctgtcagctgattgcagtgctcttaacttctccattgtgagttgttcagtctgaggagttaggtataaacccagagtggtattctcttttctgttgtgnnnggttttgcttncatattcangaactgatttttancgccnnnncntccgnatntatgncangttgttgnnnctggantgacagatgttnanananccgcctcanngtngngngaggnggantgtgnattgggcacccnttnnnctccnagnnaantgnntngntgggctcgggtaggtcngnntgnggcgnagcggnnagagctnacncnnnggcgggnnnacgggnatcccacaga

SEQ ID NO: 33573 - DNA, 447 bp, Homo sapiens
  misc_feature (1)...(447): n = a,t,c or g
nccntttgnnnancnnnnnnnnnnnnnnnnnnnnnnnnnnnnnnnnnnnnnnnnnnnnnnnnnnnnnnnnnnnnnnnnnnnnnggcacgagaactggatatgatgtcagaaagcctgttttttttctttttaaaaaaaaacattttttnnnnnnnnnnnnnnnnnnnnnnnnnnnnnnnnnnnnnnnnnnnnnnnnnnnnnnnnnnnnnnnnnnnnnnnnnnnnnnnnnnnnnnnnnnnnnnnnnnnnnnnnnnnnnnnnnnnnnnnnnnnnnnnnnnnnnnnnnnnnnnnnnnnnntccttgcccccttaccccagcnnnnnnnnnnnnnnnnnnnnnnnnnnnnnnnnnnnnnnnnnnnnnnnnnnnnnnnnnnnnnnnnnnnnnnnnnnnnnnnnnaggnggacacctggtttatcctncacttacactatctcctgcnntagc

SEQ ID NO: 33574 - DNA, 442 bp, Homo sapiens
  misc_feature (1)...(442): n = a,t,c or g
accnttggcnannnnnnnnnnnnnnnnnnnnnnnnnnnnnnnnnnnnnnnnnnnnnnnnnnnnnnnnnnnnnnnnnnnnnnggcacgagaagaaataatttaaagtagcaggtattatagtgtcgagtttttaatttgggcttacatcccttggtatgtattattcactcctcaataatgtgctgtcatcagattaggtagttgctgctatgtaaacagtaaaatgaaatctctttcaagagagcctgctctaaatgttaagtacttcaatatcaaggaaaatgccaccctcctcatacccctttctcctgtcctttcttaggtcttactcagaggaaggaaataatcttttcaacctgttaaactttgcctattnntagtctattangaaataatgatttcatctantannaantantgctcntangatgactgnttcctg

SEQ ID NO: 33575 - DNA, 443 bp, Homo sapiens
  misc_feature (1)...(443): n = a,t,c or g
nnnnnnnnnnnnnnnnnnnnnnnnnnnnnnnnnnnnnnnnnnnnnnnnnnnnnnnnnnnnnnnnnnnnnnnnnggcacgannnnnnnnnnnnnnnnnnnnnnnnnnnnnnnnnnnnnnnnnnnnnnnnnnnnnnnnnnnnnnnnnnnnnnnnnnnnnnnnnnnnnnnnnnnnnnnnnnnnnnnnnnnnnnnnnnnnnnnnnnnnnnnnnnnnnnnnnnnnnnnnnnnnnnnnnnnnnnnnnnnttgccctatgtttttttgccttttagtattgccttgtccctttacattcatagctagacatgatgtactgagtaaaaggaattacttttaatagtactttactaatgtggtgatgagatgtcaggaaagggtgagcattctgtaggcccctgattaggtctgnntntttgngancctgnnctcctgnactntnaacctca

SEQ ID NO: 33576 - DNA, 442 bp, Homo sapiens
  misc_feature (1)...(442): n = a,t,c or g
aacngctnnnnnnnnnnnnnnnnnnnnnnnnnnnnnnnnnnnnnnnnnnnnnnnnnnnnnnnnnnnnnnnggcacgagcagaacattttccttcatctgttcttttgttcgtttacagcccaaaaatatccaatggtccatttattgcaaaaaagtgataactcatttaaccaggaactgttgaaaagtatggtaaaaagcattaaaatgaatgatgtctatggaccaatgagtcagattttagagacactgaataagtgtccacattttaaaagacagaggtaagtccttctcttagacgaatatattgttctcctaggcagattcatattgtttgcttagtaatttgttagaatatctcatgcttatgatagcattaaattttttatagggaacatatggactatatggatactaatattttctccatgactttttctcc

SEQ ID NO: 33577 - DNA, 442 bp, Homo sapiens
  misc_feature (1)...(442): n = a,t,c or g
nnnnnnnnnnnnnnnnnnnnnnnnnnnnnnnnnnnnnnnnnnnnnnnnnnnnnnnnnnnnnnnnnnnnnnnggcacgnnnnnnnnnnnnnnnnnnnnnnnnnnnnnnnnnnnnnnnnnnnnnnnnnnnnnntatcttgtttttatcttaaatattcattaatggaaatttagaaaagaccaaaggcatagggaaaaaaactgaagtcatctgttatctcattaccctgtcacttttaatattttgctgtacttcctctcatgcaaaaacatatgtagtagtgttcatgctgcatatgcaattttgtgttgtgctttttgtctttttaagacaatattattttataagcatttctcttgtcattaaaacccatgcttannnnnnnnnnnnnnnnnnnnnnnnnnnnnnnnnnnnnnnnnnnnnnnnnnnnnnnnnnnnnnnnn

SEQ ID NO: 33578 - DNA, 401 bp, Homo sapiens
  misc_feature (1)...(401): n = a,t,c or g
ccaacagctnnnnnnnnnnnnnnnnnnnnnnnnnnnnnnnnnnnnnnnnnnnnnnnnnnnnnnnnnnnnnnggcacgagcatttatgaagtggattggaaaagaagaaattctgaattcctcaagaacaatggaatgtagattttgattatcatgcagagccttacaagagactcaataaatcaaaatatgcctctcttaaagacttcnnnnnnnnnnnnnnnnnnnnnnnnnnnnnnnnnnnnnnnnnnnnnnnnnnnnnnnnnnnnnnnnnnnnnnnnnnnnnnnnnnnnnnnnnnnnnnnnnnnnnnnnnnnnnntnatctctattanaantnncttnntantnacnattngcctggcatgntggncnagcctgcngcncnactctcangangctgag

SEQ ID NO: 33579 - DNA, 303 bp, Homo sapiens
  misc_feature (1)...(303): n = a,t,c or g
ggnnngnnnnntgntttntacntttgncancgntatgacnnnnnnnnnnnnnnnnnnnnnnnnnnnnnnnnnnnnnnnnnnnnnnnnnnnnnnnnnnggcacgagcggcacgagcggcgtgggagtgcactcggtgacatggaggttactggtaatcttggtcagagcaattaatacactggtggggacaaaagtaagattagaatgtgctgagaagggagtgggagataggaaagatgtggagagaaactgagcaagagtaaggaagaaagtatagtanctggtgggcancnnagggaggat

SEQ ID NO: 33580 - DNA, 440 bp, Homo sapiens
  misc_feature (1)...(440): n = a,t,c or g
ttgnnnancntttggcnnnnnnnnnnnnnnnnnnnnnnnnnnnnnnnnnnnnnnnnnnnnnnnnnnnnnnnnnnnnnnnnnnnnnnnnggcacgagcggcacgagnnnnnnnnnnnnnnnnnnnnnnnnnnnnnnnnnnnnnnnnnnnnnnnnnnnnnnnnnnnnnnnnnnnnnnnnnnnnnnnnnnnnngcaagcagtgacttctctctagctatgaaagtcctaaacagcatcttccaatatcagaatgtttcatctgcattgaaaaatcnnnnnnnnnnnnnnnnnnnnnnnnnnnnnnnnnnnnnnnnnnnnnnnnnnnnnnnnnnnnnnnnnnnnnnnnnnnnnnnnnnnnnnnnnnnnnnnnnnnnnnnnnnnnnnnnnnnnnnnnnnnntanacctnggnaaccaacttctgctagcttcgtacttgnttctg

SEQ ID NO: 33581 - DNA, 444 bp, Homo sapiens
  misc_feature (1)...(444): n = a,t,c or g
ttgnnaacagcttgacnnnnnnnnnnnnnnnnnnnnnnnnnnnnnnnnnnnnnnnnnnnnnnnnnnnnnnnnnnggcacgagagctcttactcaaagggttatgattattggattgccttcatcgttgagagaaatgtctagtataatacttctccaaatgagttacaaggaaagaacactagttcttcatgatgttcatagagttaacttaaaaggagaactctgagtcaaatgtggtggaatgctagtttttaaagagttaaatttggntgggngaaagtgnagnacaccatgnnntcctatctctttgcaggccanngcggtnaagantgcttganntnnngntnntgtngantantctgttnanngcgcgctnttcccncnnngngngnatntntcnagccnaatacatnntnttcnnnnttcnagntngntntcngagc

SEQ ID NO: 33582 - DNA, 465 bp, Homo sapiens
  misc_feature (1)...(465): n = a,t,c or g
gtagnnnntttgaannnnnnnnnnnnnnnnnnnnnnnnnnnnnnnnnnnnnnnnnnnnnnnnnnnnnnnnnnnnnnnnnnnnnnnnggcacgagattgaacccactcagcatgacagagtcaagaataagactttgagacaagtgtgaacgttttcttgaaaaagtgaggatccaggaggtctgaaaggacaagccagggacatggtgtctcattcgtctttataataccagcatgcaacactctgcatgatacatattagacactcagtaaaacacgtggaatcaatggcttgcttatcggctgactggtatacagtctgtttcttctgcatcccctgccttagctccctccccataccacaactcaaacacaagctccgtgagagctgtgaatctggctacttcatttataagactgagtcttcagtgcccagataacagcctggcacactgtaagtgttcag

SEQ ID NO: 33583 - DNA, 468 bp, Homo sapiens
  misc_feature (1)...(468): n = a,t,c or g
gagnngnnttggaanaccctttgtttgngcacnnnnnnnnnnnnnnnnnnnnnnnnnnnnnnnnnnnnnnnnnnnnnnnnnnnnnnnnnnnnnnnnnnnnnggcacgagcacaaagggattcttcgtgacattcttgcttgaggacacatttctagctccaaccttgttattagccataccctttggagaatgtgtaacacataactgggaagggagtgggaacactaattcaatcagctgagctcataaaatgtggccaagtcagaaataagaaggaacatgaagtgtcaggctgctgacagggctagggagagcaactggcaagccagaaggaaatcgcatttcagcctggactggccacctcatgtctcttggcatcctctgggtatcaaggctgcatgctaaaaaagcagtggctttgataagtatgggngaacccatttggttaaaaaaaatccagtggcctc

SEQ ID NO: 33584 - DNA, 460 bp, Homo sapiens
  misc_feature (1)...(460): n = a,t,c or g
gngnnnntttgannnnnnnnnnnnnnnnnnnnnnnnnnnnnnnnnnnnnnnnnnnnnnnnnnnnnnnnnnnnnnnnnnnnnnnnggcacgagtgnnnnnnnnnnnnnnnnnnnnnnnnnnnnnnnnnnnnnnnnnnnnnnnnnnnnnnaaaatattcacatacaggtttttgttgaacatgcatcnnnnnnnnnnnnnnnnnnnnnnnnnnnnnnnnnnnnnnnnnnnnnnnnnnnnnnngtgnnnnnnnnnnnnnnnnnnnnnnnnnnnnnnnnnnnnnnnnnnnnnnnnnnnnnnnnnnnnnnnnnnnnnnnnnnnnnnnnnnnnnnnnnnnnnnnnnnnnnnnnnnnnnnnnnnnnnnnnnnnnnnnnnnnnnnnnnnnnnnnnnnnnnnnnnnnnnnaggtcatttgattgaagttttatagaagccaactctggtgtgtctgtgtggaggatgaa

SEQ ID NO: 33585 - DNA, 443 bp, Homo sapiens
  misc_feature (1)...(443): n = a,t,c or g
gggatttganacccntnntttnccnnnnnnnnnnnnnnnnnnnnnnnnnnnnnnnnnnnnnnnnnnnnnnnnnnnnnnnnnnnnnnnnnnnnnnggcacgagatgatttttcaaaaaaatcttttaatgttgaattattcactattttagggtctgctcttgataaaataacagcaagtttatgtgatcttaaatcaaggcttgattcaagaactggtgtggcaccagatgtcttcgctgaaaacatgaagctcagagaggacacccatcatttgggtaaaaatattaaatgttctttaagttaacccatttggagggctgatatcattaaggatgctacntatacgataaggatatcaagactttactcanactaatctgatgtcagtganngnattgggatanatganncttatctttnnctncannaccagactgaaatg

SEQ ID NO: 33586 - DNA, 418 bp, Homo sapiens
  misc_feature (1)...(418): n = a,t,c or g
ccacagctnnnnnnnnnnnnnnnnnnnnnnnnnnnnnnnnnnnnnnnnnnnnnnnnnnnnnnnnnnnnnnggcacgagcggcacgagcttttctttttagtgatttagaagttgtcagttaaaagagctttgcaactatttaaactttaaaaattgttgacatttactgaagaatgtttttgcccttctgtaaaataaaatcacatttcaatttagaaagataaataattgttttttgtttgtgaaatcttcgattttaagaattcaactttttattatgtgcttatataaacttttaagttgtccggtgctagaataaggattgctttaaaaaaaaaattgaaatacttntaaagatttttaacttgnaaaattggtgncttnagntatgnattnagngagtnnanncgnncnctat

SEQ ID NO: 33587 - DNA, 444 bp, Homo sapiens
  misc_feature (1)...(444): n = a,t,c or g
nanaccnttgtttgccacagctatgaccgaataccagnttnattngacncactatanggaatttggncctggangccnagaattcggcacgagcaaatatggagttgatagtattactcaatttctttcacaccctttgcaatcattattcatgttctccaaatattaacctcccattggcactccttaaataagacaaacttgtctagattgccaataaggagagtaacactctgtttatcaaatggccaaaaaaatcttaaataaattttgtctttttaactaaacaactgctcaatatattgagataattaagttgcttgttcatttgttcaacaaatatttggtaagagtgttatgcactgttcagggctctgtgtggacagaagnggccnnaagtcctgacctnnnnganctnatctntgccaggncgacggnngacga

SEQ ID NO: 33588 - DNA, 447 bp, Homo sapiens
  misc_feature (1)...(447): n = a,t,c or g
nnnnnnnnnnnnnnnnnnnnnnnnnnnnnnnnnnnnnnnnnnnnnnnnnnnnnnnnnnnnnnnnnnnnggcacgaggagagagctaggatgaagaagcgatgggggcctgaccccgcccaggcggccctgggcatcagcataggcacctcactgggttcacaatggctcagaacatgctcacctgcttgagctcagcctcttgaacgtctgctgctaatagccgctcttcaagcaaagcacatgtcatgagacctattcaaatacaactgagtgggaccctgaaactggggctggcaatggtgggagcactaagtcaggccctcttgctgggaggtgatgtgaagagggccacttctcatccctgctctgctgtccccttaaccggggncttgagcagggnangaggagttnaggcccntctnntgnncngncngntgagggagact

SEQ ID NO: 33589 - DNA, 460 bp, Homo sapiens
  misc_feature (1)...(460): n = a,t,c or g
nanaccgttnntttggannnnnnnnnnnnnnnnnnnnnnnnnnnnnnnnnnnnnnnnnnnnnnnnnnnnnnnnnnnnnnnnnnnnnnnnggcacgannnnnnnnnnnnnnnnnnnnnnnnnnnnnnnnnnnnnnnnnnnnnnnnnnnnnnnnnnnnnnnnnnnnnnnnnnnnnnnnnnnnnnnnnnnnnncttaattgataagtagttgataagtnnnnnnnnnnnnnnnnnnnnnnnnnnnnnnnnnnnnnnnnnnnnnnnnnnnnnnnnnnnnnnnnnnnnnnnnnnnnnnnnnnnnnnnnnnnnngttctatatttgcaatttcaaagtgatttccaattgaaatagcttgccccacttgttccttcttgccctgtccactgtggagacctctccctgacccctgacgtctgggtccccgactggctgggcagtgagccccgaggccttctgtgcca

SEQ ID NO: 33590 - DNA, 438 bp, Homo sapiens
  misc_feature (1)...(438): n = a,t,c or g
tttgacaccnnnnnnnnnnnnnnnnnnnnnnnnnnnnnnnnnnnnnnnnnnnnnnnnnnnnnnnnnnnnnnnnnnnggcacgagcacacactgaaatatctttagtaagactactagtatgagtcagacacatcaagttctcaaaacatcttggtaagatctatgtaacagtttgaattactatttttttaaaatgagaagcaatagggtcagagtaatttaacaatttttatgtctgtcatagatgctactttaatgtancaccgtggaanaatntttatgagtgntatanngcntanntgnccngtattgatcnnnggnnntgatatngtnattntcggttgntnnnnctntngnnnncnnngcntncgnnttnncnttgngttnnnntnnnccntnnnnctcttgccnnnnnnnncnnntnnnnntcngngctgg

SEQ ID NO: 33591 - DNA, 474 bp, Homo sapiens
  misc_feature (1)...(474): n = a,t,c or g
gnnnnnnnnnnttgganacccnnnntttgaannnnnnnnnnnnnnnnnnnnnnnnnnnnnnnnnnnnnnnnnnnnnnnnnnnnnnnnnnnnnnnnnnnnnnnggcacgagtaccctgctttgtcccactgactagatctatttcattgtagtggtgtatcagactttaacaaactctttacagatgttcccaatatttcagtatcataaatcatgctgtaatgaacatggctatacatagaactgcaagtatctgttcccattatgtatcaccgccttacagacccctgaaaacttagtggtttaaaagaaccnnnnnnnnnnnnnnnnnnnnnnnnnnnnnnnnnnnnnnnnnnnnnnnnnnnnnnnnnnnnnnnnnnnnnnnnnnnnnnnnnnnnnnnnnnnnnnnnnnnnnnnnnnnnnnnnnnnnnnnnnnnnnnnnnnnnnnnnnnnnnnnnnnnnnnnnnnnnnnnng

SEQ ID NO: 33592 - DNA, 451 bp, Homo sapiens
  misc_feature (1)...(451): n = a,t,c or g
nnnnnnnnnnnnnnnnnnnnnnnnnnnnnnnnnnnnnnnnnnnnnnnnnnnnnnnnnnnnnnnnnnnnnggcacgaggggtgttcagcagcgtcaccagcctttacccactaaatgccaacagtcttccccattgacttgtgacaaccaaaaaatctctagaaattgccaaatgtcccctgagagccaagatcacatgtgacagaggatcactgcctttcacgactctcagtannnnnnnnnnnnnnnnnnnnnnnnnnnnnnnnnnnnnnnnnnnnnnnnnnnnnnnnnnnnnnnnnnnnnnnnnnnnnnnnnnnnnnnnnnnnnnnnnnnnnnnnnnnnnnnnnnnnnnnnnnnnnnnnnnnnnnnnnnnnnnnnnnnnnnnnnnnnnnnnnnnncatgcttgnaatcccagctctnaggaggctnaggcngganaatggtttgnaccc

SEQ ID NO: 33593 - DNA, 434 bp, Homo sapiens
  misc_feature (1)...(434): n = a,t,c or g
gagtnttgnnacgttgaaccattacgaatttcnnnnnnnnnnnnnnnnnnnnnnnnnnnnnnnnnnnnnnnnnnnggcacgagaactgggttggctgggttggtagctcctacctactgtgtggcaagaaggtatgggtcatgaacagaaccaaggagctgcgctgctacagatgttaccacttctgtggctgctaccccactcctgggccgtccctgaagctcctactccaatgtggccagatgacctgcaaaaccacacattcctgcacacagtgtactgccaggatgggagtcccagtgtggnnntntctgaggcctacgacgaggaccagcttttcttcttcgacttttcccanaacactcgggtgcctcnctgcccnaatttncngactgngctnangancaggnatangctactgccattttattaga

SEQ ID NO: 33594 - DNA, 374 bp, Homo sapiens
  misc_feature (1)...(374): n = a,t,c or g
tgtttganaccgttnnnnnnnnnnnnnnnnnnnnnnnnnnnnnnnnnnnnnnnnnnnnnnnnnnnnnnnnnnnnnnnggcacgagaagcaccacaggatttctgcagtatgcatatgacgggcaggatttcctgatcttcaataaagacaccctctcctggctggctgtagataatgtggctcacaccatcaagcaggcatgggaggccaatcagcatgagttgctgtatcaaaagaattggctggaagaagaatgtattgcctggctaaagagattcctggagtatgggaaagacaccctacnnngaacagaatcagaanctatccctcttgtgatgaaagctgtatctgggnccattgacttgtnattatct

SEQ ID NO: 33595 - DNA, 438 bp, Homo sapiens
  misc_feature (1)...(438): n = a,t,c or g
gtnattgaanaccnttggannnnnnnnnnnnnnnnnnnnnnnnnnnnnnnnnnnnnnnnnnnnnnnnnnnnnnnnnnnnnnnnnnnnnnnnggcacgagatgagccaggcggctaccatatgcaagtccaattttaagtacatgtactggacgatgctgcagcagctcactcaccactctgtcaacggctgcaacctgcggccgggggacctcctggcttctgggaccatcagcgggccggagccagaaaacttcggctccatgttggaactgtcgtggaagggaacgaagcccatagacctggggaatggtcagaccaggaagtttctgctggacggggatgaagtcatcataacagggtactgccagggggatggttaccgcatcggctttggccanngtgctgnaaaagtgctgnctgctntnctgccatnatga

SEQ ID NO: 33596 - DNA, 416 bp, Homo sapiens
  misc_feature (1)...(416): n = a,t,c or g
gtggnttganacngtttgacnnnnnnnnnnnnnnnnnnnnnnnnnnnnnnnnnnnnnnnnnnnnnnnnnnnnnnnnnnggcacgaggagccaagcaatttggagccaagttgaagggacagggcaacaaaatacagtagtagtttcttttgtattttgtatattcgcctgaagatcatcccgcaaggcaggctggaggtgccggtgggcctgtgttgctgggattttagtctgtgctgggaggcagggctccgctgcgcctcagctgtgggggcctcaggcaggtccctcagttctcacgccttcctgtccagtggaatgggggccaggagtgctggctcctcgtgtttggtgagggtggagtgaggcccctgcagagctgctgatgangngggcacacggncgntgnaanntgtg

SEQ ID NO: 33597 - DNA, 449 bp, Homo sapiens
  misc_feature (1)...(449): n = a,t,c or g
gngnttgannnccnttggnnnnnnnnnnnnnnnnnnnnnnnnnnnnnnnngnnnnnnnnnnnnnnnnnnnnnnnnnnnnnnnnnnnnnnnnnggcacgagcctttctccatatcttgctccatcgcttcattcaggtttcagcccagaatgtccagtctacagaggccttccctgacctccacatctagaatagcatgtggggagcatgtagatagaggtgtgcatcatccctacagagtatgactgagctctctggaaggagtgaggaccaaaaaaatgacagtggaagaatggggaagaggaagagaaagggaaggaagtcagaatcaggagaaagagtaaagggaggtatcctgtcttagcaagggatactgagttcagtgactccctgggtcaagatcatntcattcaggatcagaaagttccatgacagngccccatgctgaga

SEQ ID NO: 33598 - DNA, 383 bp, Homo sapiens
  misc_feature (1)...(383): n = a,t,c or g
gngngnttnnnnnnntttgnnnnnnnnnnnnnnnnnnnnnnnnnnnnnnnnnnnnnnnnnnnnnnnnnnnnnnnnnnnnnnnnnnnnnnnnnnggcacgagacacctcacctcgtgatgagttggagtcaaaacactggtgtacaacatagtttattcagtgttcctaagagaagaaagcttccccccgccctctagctgtaagatgatcttttccaggcatacccagattctctcatgcgagcatgcccacaaagcgtaatacagtggcacatgtgcaggccagatggcgccaagggcaggttccccatgatgctccacgtggggccaagactcatgtgctttacttgctgtgttttttttccttcttttctgctctgnnnt

SEQ ID NO: 33599 - DNA, 444 bp, Homo sapiens
  misc_feature (1)...(444): n = a,t,c or g
gtgnttganacagttnnnnnnnnnnnnnnnnnnnnnnnnnnnnnnnnnnnnnnnnnnnnnnnnnnnnnnnnnnnnnnnggcacgaggttcaaagagattttgagatttgagcactataaccaagtcccatgccactagtggcaacaggtacttatggagcctctgcaaggagctggctgtgtgtataaaagggtaggtacatgtggactcctgcctacaggaacccttaacctaatgtgagagaccagggaaacataatctacagaaatcacatctcgtgggaaagggtttcggtgaacattagccaattagttgcaagcttctcacaccgtcaccaacacatcatagatattgtagagtttctctgcctgtgcagcttaaaaattccatccagaagtcattgatttaccaaaaaggcangagacagcagggcttaggactatg

SEQ ID NO: 33600 - DNA, 443 bp, Homo sapiens
  misc_feature (1)...(443): n = a,t,c or g
nattgnnaacngntatgacatgattacgaatttaataccgactcnnnnnnnnnnnnnnnnnnnnnnnnnnnnnnnnnnggcacgagcaataccctgcaattgtgaataatatatcaaattttaaaatgacttcagctttaatggtcagaaaatacagtagactagataacacaagaaattcccactgtaaacacttttatatggtgtataaaatgtgacagacattcaatttaatagctggctttgcaggaaagaaagaaaattttgcattccaggaatgaaggtctgactggttgctatggtttgaatgtgtctcctccaaaattcaggtgctgnnnnnnnnnnnnnnnnnnnnnnnnnnnnnnnnnnnggtgattagatcatgaaaggtcctccctttttaatgagattagggtccttataaaagaggattcatgaagtat

SEQ ID NO: 33601 - DNA, 445 bp, Homo sapiens
  misc_feature (1)...(445): n = a,t,c or g
gggtgtttgatacctttgaaaccgntnnnnnnnnnnnnnnnnnnnnnnnnnnnnnnnnnnnnnnnnnnnnnnnnnnnnnnnnnnnnnnnggcacgagagaatatttgccctctgggcccagatgtgccatttaaaattgagtgttctttcattcatttattcattcttgcccttgtttggtaaagggtattgggaaagatctgtaattaaagataaaagtgtaaaaagaaagaaaaattgccttgaaaacaaaacaaaagtgccagcaacggggctaaaaagataacataatgttatatgcccttgctataaataggtcataatttttgtttcaagatttctagcagccaatgcaaaaaaggaaatcctggtgaaattacacaagtttaggatatcttccagaccacgaatcaaccagtcacaaagaatatgaatacttattttc

SEQ ID NO: 33602 - DNA, 444 bp, Homo sapiens
  misc_feature (1)...(444): n = a,t,c or g
tgnnttgaanacngttnnnnnnnnnnnnnnnnnnnnnnnnnnnnnnnnnnnnnnnnnnnnnnnnnnnnnnnnnnnnnnggcacgagggagggccggagccgaggatgtcctttcccgggagacaagtcgggaaagcctggctggactgcctcagccccgcgcgcctcctggactcagggttccccgtcctgagctcgggagatgttcagagtcacactgccgcccggtctgccacgcagaggtccaacttgccacccgcgtccctggtacctgagaccaccgacatcctcaggttcctgaccgtggcgcccttctacccagcccagtgtgcggccgccgcgctgtctgcacagctgggggcctctgagcctggtgggcttcctggactcttggcctcactccttgccccctccccacgacacccatgagccgaaaggatgtcac

SEQ ID NO: 33603 - DNA, 445 bp, Homo sapiens
  misc_feature (1)...(445): n = a,t,c or g
tnnttgnanaccnttgnnnnnnnnnnnnnnnnnnnnnnnnnnnnnnnnnnnnnnnnnnnnnnnnnnnnnnnnnnnnnnnnnnnnnnnnnnggcacgagctggaacagaagacttcagactcaccataattgctgataattacccactcttaaatttgtcgagtgatttttagcctctgaaaactctatgctggccactgattcctttgagtctcacaaaaccctacttaggtcatcagggcaggagttctcactcccattttacagatgagaatactgaggcctggacaggtgaagtgaccagagagcaaaaggcaaaggggtgnnnnnnnnnnnnnnnnnnnnnnnnnnnnnnnnnnnnnnnnnnnnnnnnnnnnnnnnnnnnnnnnnnnnnnnnnnnnnnnnnnnnnnnnnnnnnnnnnnnnnnnnnnnnnnnnnnnnnnnnn

SEQ ID NO: 33604 - DNA, 354 bp, Homo sapiens
  misc_feature (1)...(354): n = a,t,c or g
ngnatttganaccagttnnnnnnnnnnnnnnnnnnnnnnnnnnnnnnnnnnnnnnnnnnnnnnnnnnnnnnnnnnnnnnggcacgagctaatttataatgtatccttttcagaaagattgtaagtctaagtttctcagagaaacagtgtatgtgatggcaggaccccagtaaagtccaaaatatcccataatggccttaggaccatgcccatcatagtctccatagagccatggtccccaagagccatggtgcccaagagccaccacttcagtgggtggtaggtggttgtgaagaatgcannnngcnnntnncanannnnnngngcngnnnnannnnnnncnnnnttnnntaag

SEQ ID NO: 33605 - DNA, 429 bp, Homo sapiens
  misc_feature (1)...(429): n = a,t,c or g
attgnnnnnnnnnnnnnnnnnnnnnnnnnnnnnnnnnnnnnnnnnnnnnnnnnnnnnnnnnnnnnnnnnnnnnnnnnnnggcacgagctggggtcctttagacaaggagaaaagcaggtgccctcttcaggcatgtttcataattgttctaggaatgcagaataatacaattcaggaagcattagagctgcaagctgccctaggaattttgatttctgagataaagtgactgaggaggcactgctgggctaatctctgccaagagactgccttggatttttattaaactgatatgaataaattttttggacttggtgcatagtcatgaattcattttcagactttttgggttagaagattaggaacacagccttctttgaggcannggctctatgntcactttgntggantccttgntggctngngtat

SEQ ID NO: 33606 - DNA, 413 bp, Homo sapiens
  misc_feature (1)...(413): n = a,t,c or g
gnngnnnnnntnnttnnnncccctttgnanaccgntatgacnnnnnnnnnnnnnnnnnnnnnnnnnnnnnnnnnnnnnnnnnnnnnnnnnnnnnnnnnnggcacgaggatgtttgcttggagtagagtggtaacagttgatttggagagaattgaacagatgaaaggaaatttaggagacaatatcaacaggattttgtgatcactgaatataaggaataagaaaggaggatttatctattctgacttaaggcacctaaggtagatgagatgctatttagcaaagaaaaccctgcagaagatggaacttggggggattaggatgggcagagatctgctggccatgttgaattttaggaacgtttgagattctgaatgaaantgttnnnngggaatttgnatgtntanncctaa

SEQ ID NO: 33607 - DNA, 431 bp, Homo sapiens
  misc_feature (1)...(431): n = a,t,c or g
ttgaaacagctttgacatgnntacgaatttaatacnnnnnnnnnnnnnnnnnnnnnnnnnnnnnnnnnnnnnnnnnggcacgagcggcacgagataaactgtagtaagcatctggattttctcatgtagctggcatattaaatcacaatgacggtttgctggctcaggtttctaactgcagtggaaaagttttcaaacaggattcagagacctgggccctactctcgtctccctatgtgtcatcttgggaaagtttcttcatctcttggtgcctaggtttnttcatnagtanttcataactnncaacnnntataancttnttctttctnanncnntttntnnnnnnngctntccctananccnnnntnantgntnagnngngnntaannncacnntacacntttnnnnanccgtttnnttnnnnttttaat

SEQ ID NO: 33608 - DNA, 423 bp, Homo sapiens
  misc_feature (1)...(423): n = a,t,c or g
nnnnnnnnnnnnnnnnnnnnnnnnnnnnnnnnnnnnnnnnnnnnnnnnnnnnnnnnnnnnnnnnnnnnnnnnnggcacgagaagcgtttcagggtggtatggccgtagacaatatataccattattttcaatgctgaaataactgcctggattgagatgatgcagggacttcaacttccagttcagataaaatggcctagatctgttctcctactgcccctactcacgaagcacaactgtaaaccactgaaataataagcaaaggaaaatccaaaggtggtaaaaaggcagtaaaccaagttgggacccaaggaatggagaaacaaaagagcagcagagtgtttcatgtcctcacacccaatagaagaagacaatccagacctggcatttcccaaccaccaatctagcaacagaaagcagctc

SEQ ID NO: 33609 - DNA, 415 bp, Homo sapiens
  misc_feature (1)...(415): n = a,t,c or g
nnnnnnnnnnnnnnnnnnnnnnnnnnnnnnnnnnnnnnnnnnnnnnnnnnnnnnnnnnnnnnnnnnnnggcacgaggggaattcttgctatacaactgcaaagaataggccccactacttcctagctgtgcctcaatttcctgatcagttaaatgggactaataaaagagcagctagtggctgggattaaaggcgtgagtcaccacccctggccttatagtttatcttctagtggtcttctatcctcatttgaaaatgtgaaaagtgggtacctgagataattcaccgactcattgtttcttggaaccacaattgatctcagaagtgtaaccctgtactactgagaagcttaatcaaggacaaatacaatcccctcactccacagatggctgacatgatggtctgtgacctgaaa

SEQ ID NO: 33610 - DNA, 430 bp, Homo sapiens
  misc_feature (1)...(430): n = a,t,c or g
aaacagctnnnnnnnnnnnnnnnnnnnnnnnnnnnnnnnnnnnnnnnnnnnnnnnnnnnnnnnnnnnnnnnggcacgagcacaggttatacagcagagcgggttttgtgttttcattcctatttccacccttcatttggttggtggactccacaacctcaccctaccctacactttgggagcacaaatttggtgttgaaacaagcttaaatttcattttagggcatactgggcttactctcctcccagctgtctgtggattgatttgattntaatgcncnagtnctannnnncangtngnnaaacnngaannatgctntnaactgcgttggnanntnganngnnngnnnatncnaagannatnnatgnnctnnnnctntntgnntnnatttagcntntctaanntcntganagnncanngannngcagcc

SEQ ID NO: 33611 - DNA, 427 bp, Homo sapiens
  misc_feature (1)...(427): n = a,t,c or g
cntttgcnnnnnnnnnnnnnnnnnnnnnnnnnnnnnnnnnnnnnnnnnnnnnnnnnnnnnnnnnnnnnnnnnnnnnnnnggcacgaggacacctaatttcttgggagtcttccttttcttttacattctatatgtaattggtttaccaagttgtattatatttacctcaaatctaacgctttcacttaaggttagtctggtggctaatggcattgattttggggtcgaatttggagctaaactcaagcatttccccttaaaagcagttgaaattggcaagttgctcagtgtcaagtggcaataacaaatgcctgccttccaggaggttggttaggagaatgggtgagtacaggattagttctttccctttactgagtgctttaaacaagggatcaaactttcttcanggcttannnggctcatctgg

SEQ ID NO: 33612 - DNA, 427 bp, Homo sapiens
  misc_feature (1)...(427): n = a,t,c or g
aaacagctnnnnnnnnnnnnnnnnnnnnnnnnnnnnnnnnnnnnnnnnnnnnnnnnnnnnnnnnnnnnnnnggcacgagctaagttaggttagggacaaggataggcacagagcttggaaagcagtgccagtaaaaactttatcacactccccaggcccccaacacccttcccccacccaagagttgccttctcttccccattttatatccccaaatcccctgagaagagcaagatctgcctaagtgccccccagcctcacccagcccttccttcagactgtgagtcatctccttggctgtctcattgcctgccttcttaactgcagacaggatgagaagagctctcctcagatccctccaaaacagtttggaaagaatttatctaggaccccgtgcctacttctaagggccccaggggtgtcagca

SEQ ID NO: 33613 - DNA, 435 bp, Homo sapiens
  misc_feature (1)...(435): n = a,t,c or g
ctgntccccctttganacccttgacnnnnnnnnnnnnnnnnnnnnnnnnnnnnnnnnnnnnnnnnnnnnnnnnnnnnnnnnnnggcacgagggagttactgagtttannnnnnnnnnnnnnnnnnnnnnnnnnnnnnnnnnnnnnnnnnnnnnnnnnnnnnnnnnnnnnnnnnnnnnnnnnnnnnnnnnnnnnnnnnnnnnnnnnnnnnnnnnnnnnnnnnnnnnnnnnnnnnnnnnnnnnnnnnnnnnnnnnnnnnnnnnnnnnnnnnnnnnnnnnnnnnngtttttnnntttttttttaaanaaacccggggtttnataattttgnccnggttggnntnaanctnnaaacctcnggnnnnctccnnnnntnggcnttccannatnntgggattangggcttggagccantnnnccgcngncnggaattacggg

SEQ ID NO: 33614 - DNA, 443 bp, Homo sapiens
  misc_feature (1)...(443): n = a,t,c or g
gnnngnnnngttgtnaccccttgaanaccgnnnnnnnnnnnnnnnnnnnnnnnnnnnnnnnnnnnnnnnnnnnnnnnnnnnnnnnnnnnnnnnnnnggcacgagatttctaacaactctgaatgaactaaagatattttaattgtactctttaaatgagtcaatagtatggtatgtgaacgatatcttagtgaaactaatttttaaaaaagatttacattgcagttttggaaatctgttgagtaaggaattgggaataggaatgtttaattgtgtatttgccgttacacctatagctaatgtacatagtacgttgctctgttaaagatgagatccccacagtacacttgataagatactgagtgctctagtacaaattcttttgagttcagttgcatatcttaatgcatcctgctattttttattttattcataccgnacacg

SEQ ID NO: 33615 - DNA, 421 bp, Homo sapiens
  misc_feature (1)...(421): n = a,t,c or g
aaacngctnnnnnnnnnnnnnnnnnnnnnnnnnnnnnnnnnnnnnnnnnnnnnnnnnnnnnnnnnnnnnnnggcacgagggagtgacagatgcagggaattttggatcagacaaaccagaaatgatcactttccacatatgcgactttgggtgagttgtgtttgtatctgtgaacctcagttttcctaatctgaaatagcattagtcatgccgacctcagagagtcctagaaattaagtgactattatgtataaaatgccaggcatggtgactcagatccagtatttactcgatactttttcccctcttcataccctaatatggtaatggaaaatggattttgatggattttgtaggcacattttaaaattaaaagctattgcagaattccagctagtcattcactggtgttcataaggta

SEQ ID NO: 33616 - DNA, 350 bp, Homo sapiens
  misc_feature (1)...(350): n = a,t,c or g
cctttgcnnnnnnnnnnnnnnnnnnnnnnnnnnnnnnnnnnnnnnnnnnnnnnnnnnnnnnnnnnnnnnnnnnnnnnnnggcacgagaaactgccttatagtacactatgaacaaaaggacataactttggaactatatagagtttgaatcccagctccatcccttcaggcaccctggccaagtatcaacttctctaagacttggtttcctcacctgacttgccttgaggtgaagtttaaatataaaattttctagcctagtgcctgattatcaataggcattcctatcaatgctgtttcctgtagagatntangnaataatattataagggntttanaagganntcttg

SEQ ID NO: 33617 - DNA, 433 bp, Homo sapiens
  misc_feature (1)...(433): n = a,t,c or g
ttgnnaacagctttgacatgcntacgaatttaatacnnnnnnnnnnnnnnnnnnnnnnnnnnnnnnnnnnnnnnnnnggcacgnnnnnnnnnnnnnnnnnnnnnnnnnnnnnnnnnnnnnnnnnnnnnnnnnnnnnnnnnnnnnnnnnnnnnnnnnnnnnnnnnnnnnnnnnnnnnnnnnnnnnnnnnnnnnnnnnnnnnnnnnnnnnnnnnnnnnnnaaaggcgtagcgtgcctcctgtgattgttgaagagctgtggtgtgctgctgagtggcgtgtgtattccatgtgaggggaagggtccaacagtcctggtcattcagactgcagttccccaggacagacccacgaagtcaagcatgcggagtgcnnccaagccctggaacccagccatcagagcagggggccacggcccagaccggtgcggcctctt

SEQ ID NO: 33618 - DNA, 427 bp, Homo sapiens
  misc_feature (1)...(427): n = a,t,c or g
nnnnnnnnnnnnnnnnnnnnnnnnnnnnnnnnnnnnnnnnnnnnnnnnnnnnnnnnnnnnnnnnnnnnnnnnggcacgagaacatcttaggcaagttggttaacttcttagtcatccctggtcacagaaatccaatctaggttaaagctttcatctcagaccctctgcaaatggcatctaagccgcaccccaggcagcctggccagggagggacatgctgtgggagaggaggggaagcaagggtggctccgagcccctctngcccgncctncncnngggctttgggctttgagcanaacccanagctnaggggaangnctgctgactntnctgcttagtngctccctgtggccttnnccagaatgnngtctctnactctncntnatgtcngannctcanggtcnnctnnactttnggnagatnttct

SEQ ID NO: 33619 - DNA, 554 bp, Homo sapiens
  misc_feature (1)...(554): n = a,t,c or g
nnnnnncncnnnnnnnatnnnnnnncnnnnnnntctnnnnatnnnnntnnnaatnnnnnnnnnnatnctnnccnnccccgnntgncgtcacnnnnnnnnnnnnnnnnnnnnnnnnnnnnnnnnnnnnnnnnnnnnnnnnnnnnnnnnnnnnnnnnnnnnnggcacgaggaggagattagacaagcagcgcagggctgatctatagtttagttaggaaggaaaaagccagacacagaagaggtcagattatagccttggacaacatggaagacaactcagggcaacaagtgattggattggttcagacagtgctgtaaagtcctctcttccccttttccaaaatagtttatcttttccaacataaaaattacatggannnnnnnnnnnnnnnnnnnnnnnnnnnnnnnnnnnnnnnnnnnnnnnnnnnnnnnnnnnnnnnnnnnnnnnnnnnnnnnnnnnnnnnnnnnnnnnnnnnnnnnnnnnnnnnnnnnnnnnnnnnnnnnnnnnnnnnnnnnnnnnnnnnnnnnnnnnnnnnnnnnnnnnnnnnnnnnnnn

SEQ ID NO: 33620 - DNA, 475 bp, Homo sapiens
  misc_feature (1)...(475): n = a,t,c or g
gnattangccattcnnnnnnnnnnnnnnnnnnnnnnnnnnnnnnnnnnnnnnnnnnnnnnnnnnnnnnnnnnnnnnnggcacgaggcttttgcaatcgggtgaaatgtgtgaccccttcttaaaatatttccaaatacttttttaagtaaaatacccaggattacagaggggacccatgacattgaaatatagccatcaaaatgataaagaacaaatttgtgatatggtaatatgtttctttgtcctttgttgaataacaagtcctcatagtgggtctaattattgtaattttaaaataatgatgttatttcaagataatctgcaaccactgtaaatcagtataagagtatttgcaattttttgtgttgataccaaactcacacagaattacatttttggtgtgtggcgtatattcaaaatataagggaatgatacatttcagcaagagattggtgaaagtgaatatgggactgt

SEQ ID NO: 33621 - DNA, 534 bp, Homo sapiens
  misc_feature (1)...(534): n = a,t,c or g
tnnnaannntnnntnnnantnacctttncctgnatnaannntctaantgcngnnatnntgnnnnagaacnagngcgnaccgntacgaannnnnnnnnnnnnnnnnnnnnnnnnnnnnnnnnnnnnnnnnnnnnnnggcacgaggcatgaacctctaaaataatgtgtattaaagcagcagtatagacacagataatatatataataattgttgatagatactaaaatatcagttatgcttttgtgtttctccttttaggattggcatattttaaatctattaataaaaacaatttaagccaccgtgcccagccaaatttgttattttttttaatgtggaagctaacaaacatcattaagatctttcttcttattctattataggcatttgatgctatacatttcccattaagtgttgttttaactgcatctcacagatttgnatcatgttncatttttattcagtcattcaagataatttngaaatctgntntaagtnttgaattcccccttttattanttctttggcccatgg

SEQ ID NO: 33622 - DNA, 460 bp, Homo sapiens
  misc_feature (1)...(460): n = a,t,c or g
ggtgnnttcccttgannnnnnnnnnnnnnnnnnnnnnnnnnnnnnnnnnnnnnnnnnnnnnnnnnnnnnggcacgagagaagccagagcaatacagagttccacttcgtatgtgttaagtttgatgagcctgtgaaaacccaaggaggtgttaaatatctgggagtctggagcttgaaagagagctttgggctacaaatgcattggtagcagttttcagaatatagaaagcctaaagaggataaaattgcctaagaaaaggatatggagatgttatcctagggttaactcgtgtaataggatggcaataagtgcaaaattttatgttgccaactatggtctccaaagtctgtgaaaacgtggcagtgcaaaggttgactgctggttcatttcctaaattgcgtatcttccctgcaaatggggcccccattgaagtcggtattntggatgttancatctgg

SEQ ID NO: 33623 - DNA, 423 bp, Homo sapiens
  misc_feature (1)...(423): n = a,t,c or g
gngncttccnnnnnnnnnnnnnnnnnnnnnnnnnnnnnnnnnnnnnnnnnnnnnnnnnnnnnnnnnnggcacgagctggagaattatgggcaatttttgttccttcttagaataagagagagagaaaaaaaggaatttgctgtaggtaaaagaaccaaaatgcatcataattacctatgaacccatttattaactattgtctggagagctggatcagaagacagaaaaggagttaaagtattttcagaaataaagcacatggtgaaaggggttgttaatatgcacatggacttgtttgcatctatatttgaccaacattacttgagctctgattttttatacacaaaatgccaggctttttttcttttccttctctgtctgcttgctctcataaaaggcataagttttgtttttttttttttt

SEQ ID NO: 33624 - DNA, 462 bp, Homo sapiens
  misc_feature (1)...(462): n = a,t,c or g
agtgnntnccatgannnnnnnnnnnnnnnnnnnnnnnnnnnnnnnnnnnnnnnnnnnnnnnnnnnnnnggcacgagnnnnnnnnnnnnnnnnnnnnnnnnnnnnnnnnnnnnnnnnnnnnnnnnnnnnnnnnnnnnnnnnnnnnnnnnnnnnnnnnnnnnnnnnnnnnnnnnnnnnnnnnnnnnnnnnnnnnnnnnnnnnnnnnnnnnnnnnnnnnnnnnnnnnnnnnnnnnnnnnnnnnnnnnnnnnnnnnnnnnnnnntgatggttttatttaatttttaaaacaccagtcactgtatgtgtctgttacattatggtaaaaacttagctaatagcatcatatggtcattttaaaacttctccaggatttgagaaacctgagtgtgaattccagtcctgagagcccaggtcttctaataggaaaaaaaggagattagaatatttagctcataggactactg

SEQ ID NO: 33625 - DNA, 460 bp, Homo sapiens
  misc_feature (1)...(460): n = a,t,c or g
anaccngccgttangacnnnnnnnnnnnnnnnnnnnnnnnnnnnnnnnnnnnnnnnnnnnnnnnnnnnnnnnnnnggcacgaggcattttctacttaaaatattttcaacttataatgatgcgtttatccagacataaccctgtcataagttgagagttatgttgagggtctgtatatgtctatttgcataacggtttgcttgggtactttaatttgacaccctaggagcatttctcttgaggctggaattcttcccttatgatctgagagttttgcatagcactggggctcactgtgtttctgcatggagaccatgccattcctaagatttttgtcttgtgttctgaggccatgtaacttttcctttgcataaaattagttaattttggtttataaaaactatactcggtggaacaaggttttgtagtttggaacttaggctgtgggaactcaatgtta

SEQ ID NO: 33626 - DNA, 262 bp, Homo sapiens
  misc_feature (1)...(262): n = a,t,c or g
ancngctnnnnnnnnnnnnnnnnnnnnnnnnnnnnnnnnnnnnnnnnnnnnnnnnnnnnnnnnnnnnnnnggcacgaggtctatgacccaatccaaattaattttgtgtatgatgtgaggccatggtgaaagtcatttttgcatatgtgtattcaaccattatagcacattttgttgaaaggactttttctctcatgaattaccttgacatttttgcaaagaatcgattggccatatttatgtggggctttttttttttttt

SEQ ID NO: 33627 - DNA, 481 bp, Homo sapiens
  misc_feature (1)...(481): n = a,t,c or g
gngnntngnntntgnccaagagatctngtatgcccnacnnnnnnnnnnnnnnnnnnnnnnnnnnnnnnnnnnnnnnnnnnnnnnnnnnnnnggcacgnnnnnnnnnnnnnnnnnnnnnnnnnnnnnnnnnnnnnnnnnnnnnnnnnnnnnnnnnnnnnnnnnnnnnnnnnnnnnnnnnnnnnnntgggattataggtgtgagcctccatgcctggcctaaactgcatactcctaacatcagtatatggaaatattttctctttagttctattaaaattttaaaaaatctttatcaatttagtaggcaaagactggaaaatgttttaatttgatcagccactttaatgtatgtctcatttcaaagcatataaagtatacaagtttcaggtcctagcttaaacctataagaggccttattatgggcttatttcctttgcagccctttaccataatgggnttcttctacctnccctgnacaaca

SEQ ID NO: 33628 - DNA, 429 bp, Homo sapiens
  misc_feature (1)...(429): n = a,t,c or g
nnttttnnnacccnnnnnnnnnnnnnnnnnnnnnnnnnnnnnnnnnnnnnnnnnnnnnnnnnnnnnnnnnnnnnnnnnnnggcacgagtctggacagtgtctaggctggtagccatgaatttatggtagcctcaatccttataaacgtatgatgctttttccaacagtgttcggcactttaggtacaagcatggagaaggcagttagttggttttagttgaggtttggtagccaggtaacacagagagaaaggcatggattttaaagtattggcagaatttattgaatgtatagaccatgcagtccaagatgaatataaggcagtaggaaaaaggcaggtgagtagtggttagagagaaaatggactgattgaattgcttgaggtttagctgaagtagcgtaggagtagtagccataatttaataggtt

SEQ ID NO: 33629 - DNA, 484 bp, Homo sapiens
  misc_feature (1)...(484): n = a,t,c or g
ggggggtgggattgtgccttgaganctagtgngcttttggaaaaccnnnnnnnnnnnnnnnnnnnnnnnnnnnnnnnnnnnnnnnnnnnnnggcacgaggtaaagacaatattttgttgaagaagaatgctaactatacctgacaagccataatgtacaacaggcatgagagctgttcttttcaacctatcaacagcatgtacatttgcttgtttcttcactaaaattccaccttttgctgtgttttgcaaactatagcaagtaaaagtggtgtgtttgcatccttgttcagcacttcagtatccttgttcagcacttcagtattcacatggtgtgagggcagtttttctgccagtagtgtattctcattatacacagcatagtgtagtgcattgttgctatagacatccataagatctgggttggtgccacattctagcagaatgatgacacaaatctcttcttggcaangtacaagccttct

SEQ ID NO: 33630 - DNA, 545 bp, Homo sapiens
  misc_feature (1)...(545): n = a,t,c or g
cnnnantnnttancncnncngttnannnatnannnnnntanatnntgaannnntnnttaaantnnatantatanatanaccnntagngnntgtaccnttatgaatgatacgaannnnnnnnnnnnnnnnnnnnnnnnnnnnnnnnnnnnnnnnnnnnnnnggcacgagcagcatatggtgagcagttcggcgagaggaccacacttccaatactggcaggtacgggtccacaaggacccttcttccagggaaccctggctgctagatatcacagggctgagggaagctggcttctcaacttcgctgctgcccgtgtttcttcccaccatcccctccactctaattggccctgttttccagcctcacatctgccactgtgcccgttctcacagggatcccagaaagtcttacatgcccgggattggcttctagccccagcaggaagcatggaattcatccattaaggaactctttactgagtgcctactgctaggcactgtgctaggcaataatgatatgaaagtgagcnaaagaaacagttttct

SEQ ID NO: 33631 - DNA, 466 bp, Homo sapiens
  misc_feature (1)...(466): n = a,t,c or g
agacnaannacagcctgacatgattacgaatttaatacnnnnnnnnnnnnnnnnnnnnnnnnnnnnnnnnnnnnnnnnnggcacgagttcttctttcaaccttgacgaaagggtataattaatctgtaattaaagtcatgatagtttcttaatacgaggaaatgttgtcattgcggttctctgaacacaagagggcgctgtggcaaagcttaccgtctgctcatcctctgccgcaggagggtacaacttcgtgggacaaacttcaaaagaaagatgccatttctaagacctcatttatcacctcgggatagccagtcttcatgcctttaaaatacagaataaaaataacacataaatcaacacaattacattccttcttgatagcatcaccagtcttcttgaggcctggcgtcaaacctctgcttcagtgttacgttatggggtgcgcatgcctccttaataccca

SEQ ID NO: 33632 - DNA, 487 bp, Homo sapiens
  misc_feature (1)...(487): n = a,t,c or g
gggtnnnntttganntctganaccttatgacnnnnnnnnnnnnnnnnnnnnnnnnnnnnnnnnnnnnnnnnnnnnnnnnnnnnnnnnnnggcacgaggtatttgtggtgaccttcagattagacagtcttcatttccagccagtggagtcctggctccagagccatctctgagactcgtactactggatgttttaatatcagatcattacccaccatatgcctcccacaggccaagggaaaacagacaccagaacttgggttgagggcactaccagactgacatggccagtacagaggagaactagggaaggaatgatgttttgcaccttattgaaaagaaaattttaagtgcatacataatagttaagagcttttattgtgacaggagaacttttttccatatgcgtgcatactctctgtaattccagtgtaaaatattgtacttgcactagcttttttaaacaaatattaaaaaatggaagaatt

SEQ ID NO: 33633 - DNA, 488 bp, Homo sapiens
  misc_feature (1)...(488): n = a,t,c or g
gagngtctcctttgacnnctgnatacccttatgacnnnnnnnnnnnnnnnnnnnnnnnnnnnnnnnnnnnnnnnnnnnnnnnnnnnnnnnnnnggcacgagcagtgttgtgtgaatgcacagttgtaaatgttgaatatgtgatcatggtgccctttagcagatttctctaaaatggctgttctcaattatttccacaagctgaatagattaactttatgacatggacagagattcctttcggtttcatcttaagtgacagacatgtgtttttcagcatttgtgagtggttattgattcattcattcgttcagcaaatagtcatggagagtctactatgcccaacaagaggaaaaacccgtgatgcctgacagtctaatattgggttagtgattcactgacctgcanaaatttgtgggagngacttctttggacctctgtattgtattccacctcagcangtttatgtctgatgatagctatattgtg

SEQ ID NO: 33634 - DNA, 493 bp, Homo sapiens
  misc_feature (1)...(493): n = a,t,c or g
gngtgtnnnntttgaaanctgnnnnnnnnnnnnnnnnnnnnnnnnnnnnnnnnnnnnnnnnnnnnnnnnnnnnnnnnnnnnnnnnggcacgagnnnnnnnnnnnnnnnnnnnnnnnnnnnnnnnnnnnnnnnnnnnnnnnnnnnnnnnnnnnnnnnnnnnnnnnnnnnnnnnnnnnnnnnnnnnnnnnnnnnnnnnnnnnnnnnnnnnnnnnnnnnnnnnnnnnnnnnnnnnnnnnnnnnnnnnnngagagaatgtgtgtttctaccaagttcctggcaaggctgatgccagtgtgctgggaccacacctggagaaccagggtgtagataaagcaaagagctgaggacagacatttgagcgtgcaagcctgagaggatttggggagactgaggcggggagagaggtgagaaggagcagccataaggcaggaagaaaccagttagaaccgantcctggannnnnnnnnnnnnnnnnnnnnnnnnnnnnnnaagt

SEQ ID NO: 33635 - DNA, 458 bp, Homo sapiens
  misc_feature (1)...(458): n = a,t,c or g
ggtnntgacatgannnnnnnnnnnnnnnnnnnnnnnnnnnnnnnnnnnnnnnnnnnnnnnnnnnnnnggcacgagagttcaaccctgcttgtcagtttactctttaaaagaaaccctgataactgaggactattttattcctttggcaagtctcccattcattgtatgcaaatactgctactcagtgctctaaatgatgtttgtgtaaaagcggatttcactacatccctgcccgcatcctgttgactcattcactgcttatcaccgctctctccagaaccctctgtgtactaagccccattacttaacagcttgtctcttgacctctccatgaccctgaatgaggcaggccaggccaggctgagattatttgttgcagtgggaaaagatggagtgttgaaactgggaaacctgggttcagaatctgccctcagcgacgtgtccaggacggccacttc

SEQ ID NO: 33636 - DNA, 493 bp, Homo sapiens
  misc_feature (1)...(493): n = a,t,c or g
nnnntnnnatnnnnnnnntnannnnnnnnnnnnntggntggtgcctgatacgaattnnnnnnnnnnnnnnnnnnnnnnnnnnnnnnnnnnnnnnnnnnnnggcacgaggaacaaaggacaaactcaactagagccagagactgacagactgaaatgcaagcatagtcagaagacagaggggggattaacatcgaaggatacctgccatttacttgaatattggattatatacagtgttgctttttcttatgtgttccccttactctccctcactacccccatgaattcataataggcttagtgtgagcaatttaattgtttctcttctgtcttatatgacatttcctttggtgttgggtgttcagatacttgagtaaaacttaaaaaacaaaaacaaaagataggtaccttccaggttttaatgcctagaaaactcttgtgaagttaaatttatgaaantaagtgttagtgaaatacgtattctcttttcatc

SEQ ID NO: 33637 - DNA, 457 bp, Homo sapiens
  misc_feature (1)...(457): n = a,t,c or g
ggnnngnnnnttggantccnncttngaanaccntttgacnnnnnnnnnnnnnnnnnnnnnnnnnnnnnnnnnnnnnnnnnnnnnnnnnnnnnnnnnnggcacgagagaacagcaacagaaatttcaccaaatttgctaaaataagaagagtcttctcaaactagattcctccaggtaccagtaggcaaaacagtcatgagttatggatagattcataataagtcctttattcagtgccccaaggaaatggtgcctttcagcatgcaaatgaaaagtattctcttactaatcaatctgtccatcatttcttttttgtttttccttgagagagagggtctnnnnnnnnnnnnnnnnnnnnnnnnnnnnnnnnnnnnnnnnnnnnnnnnnnnnnnctaacaactcctgggctcgggcaatcctcccacctcaacctccgagggagctacaactacaggaa

SEQ ID NO: 33638 - DNA, 458 bp, Homo sapiens
  misc_feature (1)...(458): n = a,t,c or g
ggnngtnnnngtgnngttttgantnggnataccntttgacnnnnnnnnnnnnnnnnnnnnnnnnnnnnnnnnnnnnnnnnnnnnnnnnnnnnnnnnnnggcacgagtgatgatattgggcaatctttgatcagactttccagccatgatcttcagttccagctggtggaggccttcctgcagttcttgggtgtgccttctggctttactcctccagcctcctgtctttatctggccatggatgagaacagcatctttgataatggactttatgatgaaaagcccttgacttttttcaaccctttgttttctggggctagctgtgttggccgcatggataggttgggctatcctcgctggaccaggggtcagaaccgagagggcgaggagttcatccgcaatgtcttccaccttgtcatgcctttattttcaggcaaagagaagtcccagctctgcttc

SEQ ID NO: 33639 - DNA, 459 bp, Homo sapiens
  misc_feature (1)...(459): n = a,t,c or g
ggnagnnnnntgnnntnttggnatcggnataccntttgacnnnnnnnnnnnnnnnnnnnnnnnnnnnnnnnnnnnnnnnnnnnnnnnnnnnnnnnnnnggcacgagcctgggtagctgggattacagcacgnnnnnnnnnnnnnnnnnnnnnnnnnnnnnnnnnnnnnnnnnnnnnnnnnnnnnnnnnnnnnnnnnnnnnnnnnnnnnnnnnnnnnnnnnnnnnnnnnnnnnnnnnnnnnnnnnnnnnnnnnnnnnnnnnnnnnnnnnnnnnnnnnnnnnnnnnnnnnattttatttttaattgtacttgtttatttacttagtgtcatatctgaatgacttactttttctgcctattttaaggtaacttttacgtaggctgcctctccaggaagaaaatgtatcctggattacaaaagaagagtgggaaataggggaatctaataaagctgtgttaat

SEQ ID NO: 33640 - DNA, 448 bp, Homo sapiens
  misc_feature (1)...(448): n = a,t,c or g
tttgaatcctttgnttggacacngcttgacnnnnnnnnnnnnnnnnnnnnnnnnnnnnnnnnnnnnnnnnnnnnnnnnnnnnnnnnnnggcacgagatttgaccttatatgtgtagatctatttctggacattattctgttcatctgtatgtctattcttctaccaatataccactgtgactatataagaaagttttggattttttaaaatcatagtttaggggtttttttggagggtagagaggaggccagaagaagcaaaaggttgaccagccacatctgtctggggccttcagttattcccagacttgtagtaccatttgggtgcaagaagtgaagccagcaatgacaggctatcagagacacaacaaggaaaccaacttctctgggtgcctctgcgttcagcctagtcctctggaaactagtttactatggtttatgatttaaa

SEQ ID NO: 33641 - DNA, 445 bp, Homo sapiens
  misc_feature (1)...(445): n = a,t,c or g
acccttnnnntttgaanacngctnnnnnnnnnnnnnnnnnnnnnnnnnnnnnnnnnnnnnnnnnnnnnnnnnnnnnnnnnnnnnnnggcacgaggcttttgatccttttctttcattctgctgtccatactccatcagttatcattagtatgtttcttttctttctctttactttttctcttaacttgtgaacatgttcaagcctctctgctactttttcctgtacctgtaactggcaaattctttttaattttctgaaaaacagatctataaaactgtgctggctgatgtatttggaatgtggctagtttgagtagagttattcttacgtataaaatacacattggatttcaaaaacagtattannnnnnnnnnnnnnnnnnnnnnnnnnnnnnnnnnnnnnnnnnnnnnnnnnnnnnnnnnnnnnnnnnnnnnnnnnnnnnnn

SEQ ID NO: 33642 - DNA, 511 bp, Homo sapiens
  misc_feature (1)...(511): n = a,t,c or g
cannnnnncnanantnatnnngannnnnngatnnnanttnngnnnnncncntatnatnnnnnnagggaattgantccttgannaccgctatgaatgatacgaannnnnnnnnnnnnnnnnnnnnnnnnnnnnnnnnnnnnnnnnnnnnnnggcacgagggattctgtaatgtcatttttgaaaaacattcaagaacatttttagcacataatgacattttaaaaatagcatttttactattaaaaggtcattgaaaattggaaaatgctagcgtttgtgactgggaactcccttttaattgtttcaatcagaaaatagtcaatgttggttgatggttagctcattctatacacagattagcacatcctttctctgagctctcaagtgagcagtaaaatgttctatttgagtgctccactgttattttttgggaggaaagaaacttgnatggtggttagcagtggtgtagaggctgaaaggtagggagngataaagagaaaataaatatgga

SEQ ID NO: 33643 - DNA, 455 bp, Homo sapiens
  misc_feature (1)...(455): n = a,t,c or g
ggtnatntgataccttggngaaccnnnnnnnnnnnnnnnnnnnnnnnnnnnnnnnnnnnnnnnnnnnnnnnnnnnnnnnnnggcacgagggtaaattttgcatttcacactgattacttttgtttggccattgtgtttggataagattagcctaagtgccgttttaatgtattaggtctagactagaaacagactttttggattctgtattcttgaatcttccttagtccatgatacccttgctgttggtgttttacttgcttctgttagtagcataaaggaaagtttttatgccatacgtagcagcttggtagcagacaaaatacaaataaccttctaaggaatttgaagaatatcttcacattcttttagagttggatacgccttcagagaaagtaaatggaatgtcttgactgtaaagactcagttaaagtgttttagtctctacagtcagg

SEQ ID NO: 33644 - DNA, 450 bp, Homo sapiens
  misc_feature (1)...(450): n = a,t,c or g
ggtgtacgngttnanatcccttttgaaanaccntnnnnnnnnnnnnnnnnnnnnnnnnnnnnnnnnnnnnnnnnnnnnnnnnnnnnnnnnnnnnnnnnnggcacgagatattctcttgcaacataatttaaaatagctgcatagtaactcattgtgtagccaaagtataatttttctaattccctgtaactagatgtttaaatggtttctcctagtctctaatatacaaatttctgagatgaagcaatacaattgctatatatctttactcacattacttattatttcattaagatcatttccaaaataactcctgggtcaaaagtcttacagaattctaaagttcttgaagtcttgattcatattaataaattgtcccanagaaangttagaatcatcancttactctccaccagcanagttaggaaattacccatttcctggcactct

SEQ ID NO: 33645 - DNA, 443 bp, Homo sapiens
  misc_feature (1)...(443): n = a,t,c or g
ggtgtntnnntttgatacccgtttnnnnnnnnnnnnnnnnnnnnnnnnnnnnnnnnnnnnnnnnnnnnnnnnnnnnnnnnnnnnnnnggcacgaggaaattgccaaacagtgcatttcttagaacacatcctgtcaagcaatgcacgattgtttcttccaacaaagatgcctttggttaatcagaccttataccaattatttattgtgaaataaaccatctgaaacttagtgatattataaaccaagaagagtcatcagtattacctatcatgggtctggggctcatcttggcttagctagttggttcttgctcaaattcttacgtggttgcagttagatggttgccagggccatgagccagagcacctgcgtgtgacttctcggtaagacttgagtttccttacagcaagtggctggtttcagagggcaagtggatgaaagg

SEQ ID NO: 33646 - DNA, 443 bp, Homo sapiens
  misc_feature (1)...(443): n = a,t,c or g
gtnttcnnatacccgtnnnnnnnnnnnnnnnnnnnnnnnnnnnnnnnnnnnnnnnnnnnnnnnnnnnnnnnnnnnnnnnnnggcacgagactatgaagcctttactgaattcgctggttcctgaggtttcttctcaagcttctgtagaagctatcctctgcaccacaacatcagatcctgaatcatgtgctatcaatactactggattttctgtttttctgtgcctgcttttctttcctgtgtaggtggacagaaatgcacatgggttgcagtatctagggaaatgccaactgagggttcttcaggcctattacagactaacataactttgaagagcatagtgaattccaatatctaatcttcatctttgcaagaccaagaattcactcttgtctgagtcctagaaatgattattgattcgaacattaattatattttcctaa

SEQ ID NO: 33647 - DNA, 500 bp, Homo sapiens
  misc_feature (1)...(500): n = a,t,c or g
ntnnnnnncnaanananaanngnnnttancananannnngannnnnnttnnannnnnaantnnnggttntggatccttgaaacntttgactgatacgaattaannnnnnnnnnnnnnnnnnnnnnnnnnnnnnnnnnnnnnnnnnggcacgagcagcttctgagagataatcgagctgaaagaggacacaagaaaaattgttctgtgagaacagccagcaggcaaacaagcatgcatttaggatccttatgcacgggagatatcaaacggagaagaaaagctgcacctttgcctggacctactactgcaggatttgtaggtgaaaatgcccagccaatcctagaaaataatattggaaaccgaatgcttaaaaatatgggctggacgcctgggtcaggccttggacgagatggcaaggggatctctgagccaattcaagccatgcagaggccaaagggattaggacttggatttcctctaccaaaaagtacttccgcaac

SEQ ID NO: 33648 - DNA, 410 bp, Homo sapiens
tttggccctcgaggccaagaattcggcacgagaagaacgcgacggagcattaactctgccactgacccctggcctgccttcgcctcctcctcttcctcctctacctcctcccaggcgcattaccgcctctctgccttcggccagcagtttctatttaatctcaccgccaatgccggatttatcgctccactgttcactgtcaccctcctcgggacgcccggggtgaatcagaccaagttttattccgaagaggaagcggaactcaagcactgtttctacaaaggctatgtcaataccaactccgagcacacggccgtcatcagcctctgctcaggaatgctgggcacattccggtctcatgatggggattattttattgaaccactacagtctatggatgaacaagaaga

SEQ ID NO: 33649 - DNA, 445 bp, Homo sapiens
  misc_feature (1)...(445): n = a,t,c or g
tttggannnnnnnnnnnnnnnnnnnnnnnnnnnnnnnnnnnnnnnnnnnnnnnnnnnnnnnnnnnnnnnnnnnnnnnnggcacgagcaagtaaaaggcggaagtctgtcttcacaatccggtattttatagaatattcacaggattatgcagccgctatctnnnnnnnnnnnnnnnnnnnnnnnnnnnnnnnnnnnnnnnnnnnnnnnnnnnnnnnnnnnnnnnnnnnnnnnnnnnncccttagtnnnnnnnnnnnnnnnnnnnnnnnnnnnnnnnnnnnnnnnnnnnnnnnnnnnnnnnnnnnnnnnnnnnnnnnnnnnnnnnnnnnnnnnnnnnnnnnnnnnnnnnnnnnnnnnnnnnnnnnnnnnnnnnnnnnnnnnnnnnnnnnnnnnnnnnnnnnnnnnnnnnnnnnnnnnnnnnnnnnnncattctcttgtatgactat

SEQ ID NO: 33650 - DNA, 473 bp, Homo sapiens
  misc_feature (1)...(473): n = a,t,c or g
ggntgnnntnnnnanatttganaccnttgannnnnnnnnnnnnnnnnnnnnnnnnnnnnnnnnnnnnnnnnnnnnnnnnnnnnnnnnnnnggcacgagtatcccaacttagccaattgaagaaccgaggcagtcagtggttaagacaacctgcccacgttgttgcaggcacccgggacctgctgggaaggtcttggatggtagatctctgcagagagtgtgaactgccaagggctgctgggtctagaagagagggcctggaaggtgttggagtctcggatgaacagctctctagtaagggcagacaagatgatggtagaaagactttaggctctgaagggtgcctccgtcctctttgtaggtttgcccttaaacccagtgtgactcggtgcaaacctccatttcaggtctgttttcctttcttccttcccttttgctcatcctcgtgcagagcccagggtatttttggtgttt

SEQ ID NO: 33651 - DNA, 439 bp, Homo sapiens
  misc_feature (1)...(439): n = a,t,c or g
ttnnnnnnnnnnnnnnnnnnnnnnnnnnnnnnnnnnnnnnnnnnnnnnnnnnnnnnnnnnnnnnnnnnnnnnnnnnggcacgagatagaaattgactatatcagttgagattttgctggtttaataaactatcccaaagtttcatagcttaaaacatcagccatttagttggttcttaattctgtgggttcactgggctgttcttgggtctggaccagcttggctcatctcaggcactcactcatgcatctggggtaagctagtgcctggtatgcaactgaatggtcttggatagccttatggacatgtctggtagttagcaagctctcagacagcaagggtaatagagataactgggccttgttgttatcatcaagaaggctagtccaggcttccttttaaggcagttgcaggaggagcagaaagaaaaggcaagcct

SEQ ID NO: 33652 - DNA, 443 bp, Homo sapiens
  misc_feature (1)...(443): n = a,t,c or g
tttgannnnnnnnnnnnnnnnnnnnnnnnnnnnnnnnnnnnnnnnnnnnnnnnnnnnnnnnnnnnnnnnnnnnnnnnggcacgagggatgacgtgtccttgacacatctgaccttcgggaaggagttcacagaagcggtggaagccaaacaggtggctcagcaggaagcagagagggccagatttgtggtggaaaaggctgagcaacagaaaaaggcggccatcatctctgctgagggcgactccaaggcagctgagctgattgccaactcactggccactgcaggggatggcctgatcgagctgcgcaagctggaagctgcagaggacatcgcgtaccagctctcacgctctcggaacatcacctacctgccagcggggcagtccgtgctcctccagctgccccagtgagggcccaccctgcctgcacctccgcgggctgac

SEQ ID NO: 33653 - DNA, 476 bp, Homo sapiens
  misc_feature (1)...(476): n = a,t,c or g
ggntgnnntnnnnnnatttgaaaccnctatgacatgattacgattttaatacnnnnnnnnnnnnnnnnnnnnnnnnnnnnnnnnnnnnnnnnnggcacgagttttttttttcttttattattattatttttaatnnnnnnnnnnnnnnnnnnnnnnnnnnnnnnnnnnnnnnnnnnnnnnnnnnnnnnnnnnnnnnnnnnnnnnnnnnnnnnnnnnnnnnnnnnnnnnnnnnnnnnnnnnnnnnnnnnnnnnnnnnnnnnnnnnnnnnnnnnnnnnnnnnnnnnnnnnnnnnnnnnnnnnnnnnnnnnnnnnnnnnnnnnnnnnnnnnnnnnnnnnnnnnnnnnnnnnnnnnnnnnnnatcttttcccactgaatcaagttttttgtagctaaagctttaaagaatacatattttatcataagtgttgaaaataaactgtaactaaaataatttaaacaaaanggctttttttcct

SEQ ID NO: 33654 - DNA, 473 bp, Homo sapiens
  misc_feature (1)...(473): n = a,t,c or g
ggntgnnttnnaaaattngaaaccttnnnnnnnnnnnnnnnnnnnnnnnnnnnnnnnnnnnnnnnnnnnnnnnnnnnnnnnnnnnnnnnggcacgaggttaatataagatttaaatcaacttcaataataaatagactcaggaaagaaatgattgtgctagtttccaaaagccattatgtatgataaatatttatatagcttttagacctatcagcattcattcaagaaactttacactagatgagctatagaaagaaaaattttgacaatccatgctcccaaggagattacaatcttatggaaacaacagccattatattatgttgtaatacaatattagatgtattgtagaagtacaaagactatacttagcaggagtgctaaacccggtgaaggggtcaaggatagctttctgaaagaggtnnnnnnnnnnnnnnnnnnnnnnnnnnnnnnnttccatgtaaattttacg

SEQ ID NO: 33655 - DNA, 475 bp, Homo sapiens
  misc_feature (1)...(475): n = a,t,c or g
ggntgnnntnnnnnnntttggaaaccnctatgacnnnnnnnnnnnnnnnnnnnnnnnnnnnnnnnnnnnnnnnnnnnnnnnnnnnnnnnnnnggcacgagcccgatccctggaggggcacctccgttcccacctcctcctcagatccttccctggccagggcccgnnnnnnnnnnnnnnnnnnnnnnnnnnnnnnnnnnnnnnnnnnngtttcatctttctaaaataactttctcatcaaattgtatggtctaagtgtgcatttatacagacctattctttttccaagaaagaatgtgcatggttcataaacatacctgtagtctgagataaaatgaaattacaattagttggtgaggcagtcagggtgagggcgaggcgggggtggcaggtaggtagaagcccccacagcgtatacaaggtggtcttctgcttgtgcaggcaactcccaaggtgggcgccagtaggggcacaac

SEQ ID NO: 33656 - DNA, 441 bp, Homo sapiens
  misc_feature (1)...(441): n = a,t,c or g
tttgaaaaccnttnnnnnnnnnnnnnnnnnnnnnnnnnnnnnnnnnnnnnnnnnnnnnnnnnnnnnnnnnnnnnnnggcacgaggcaaagcttaggacagcatttgactcagtccaggctcacctcggccctgaggttagacacaaagataaggaatacttcccagcctttgaattgtgttgtcttgattcagtccctgtgtctgaacaatgtttgagccattccattgagggacctgtcctaggaaaaggctgaaaattagacttattttttcagaaaaatgagtcaacgtacttgagcaagacattgtcagacatcagccttgatgtttggtcaaatggaatattccgttactattgctagtgagggttcccattaattgacacccactgtgtgctcagctgccttctaagcacgtctactaagtcacttcaacttcat

SEQ ID NO: 33657 - DNA, 445 bp, Homo sapiens
  misc_feature (1)...(445): n = a,t,c or g
tttggaaacccctnnnnnnnnnnnnnnnnnnnnnnnnnnnnnnnnnnnnnnnnnnnnnnnnnnnnnnnnnnnnnnnnnggcacgagaccctggtagagttgaattttacaatataattgttaaaaatgttagtgaggtggcagcgagctggaacttcatctgcttccatttaaaatgttaacatcttacatgtagtttctaggcaatttaaaaccctttttggtgtaagaatgagtataaatacacaaattaagatcatctggnnnnnnnnnnnnnnnnnnnnnnnnnnnnnnnnnnnnnnnnnnnnnnnnnnnnnnnnnnnnnnnnnnnnnnnnnnnnnnnnnnnnnnnnnnnnnnnnnnnnnnnnnnnnnnnnnnnnnnnnnnnnnnnnnnnnnnnnnnnnnnnnnnnnnnnnnnnnnnnnnnnnnnnnnnnnnnnnnnnnnn

SEQ ID NO: 33658 - DNA, 473 bp, Homo sapiens
  misc_feature (1)...(473): n = a,t,c or g
ccttngncccccctntgaacacccnnnnnnnnnnnnnnnnnnnnnnnnnnnnnnnnnnnnnnnnnnnnnnnnnnnnnnnnnnnnnnnnnnnggcacgaggatgataattaggtattgccagcattccccttacaaatccttcaggcagggcaactttggagcacagtggttgtgtcttaggaggtccagcaaagccagttcccttcaacattagaacaagtcactcttccttctacggagcactgcctgggaagtgactgccactgccatgttgtgtgacagaggacagtctttaaaggggtttcattcattgtggacagatactatatgaaggcacataagggatttcctgatggggaggatggcaggggaggtgtcccacgatctcagtgcttgttcatcctgtctgtgtctctctctccactccctgccccactcctcatgttgcaaagttaaatganaacgtgacacat

SEQ ID NO: 33659 - DNA, 467 bp, Homo sapiens
  misc_feature (1)...(467): n = a,t,c or g
tttggacanccctttggacatncnnnnnnnnnnnnnnnnnnnnnnnnnnnnnnnnnnnnnnnnnnnnnnnnnnnnnnnggcacgaggtcagagaagcctgcctggaagaagtgatcttcaggtgaaaacctggaatctgatagcagtcagccaggtgaaaaaaggaagcgagctgaggttctgcacacacctctccttagcgctgcagcccagttgcctttctactgaggtcactccagaaagcgccagtactcctggggcacagtgacttctgcagtacttagatcctcagccctgcccaacctccccgaggtcctcggtctggtttctggtgactaaagcaggttcgataattaacattgcttacttccttgattcagcatttctccagcaagaggttaaactttacatnatcgntatgcccnattaatcctggcaggtgagtcactgagacgacccaaccctgc

SEQ ID NO: 33660 - DNA, 550 bp, Homo sapiens
  misc_feature (1)...(550): n = a,t,c or g
gnnnnnnnnnncnnnnannnnggttnnnnnganngnnncangnagnangnntnannnnnnnnanggnannnnngggnnggtcccnccttggacncctntggacaccnttgactgatacgaannnnnnnnnnnnnnnnnnnnnnnnnnnnnnnnnnnnnnnnnnnnnnnggcacgagggaatgttatgtcttgaactttattcaatataatcaagaataaagatagagtaaacgtcactgatttgaactattaagagagaaaaaatatgccacacaactaaacataggtttaaattatgaagaaatttagaatagaggtttattagatttagggaacactaagaacaaaaaaggaaggagtgatacctgcctgagtggacagctgtaaatcagctgtaagtactgcagntgtaccaatagttgngagtggctccagtcactttaggagtccttggaagtacttggtacacatttgctggctgtaccttaaaggaagtggcaangtccagtangtactctctaccacactaggactgccactgacaagtttg

SEQ ID NO: 33661 - DNA, 462 bp, Homo sapiens
  misc_feature (1)...(462): n = a,t,c or g
tttgananccctttgactgcnnnnnnnnnnnnnnnnnnnnnnnnnnnnnnnnnnnnnnnnnnnnnnnnnnnnnnnggcacgagagcccgctgaacatctcggtgtcctctcacatacacacccgcggggggtttccagagcatcgcacctcttccagcccagggagccgcctgctctgctaaactctatgggaactgagacatccacctgctgcgtgacccacccgtgcgcaacttcagagctttcagggggtgatgcgggctgtggctccttcgtgaaaatgtcaccgtctgcagcgcctttcttgtgatatagaacttgacgggtgagagcgggtatttcttgggttactcaggatctgctaacagcagaggagaaaaccacaattcccaggcataagaatctacctaaagacgatggtttagatattttacagttgaaatcaccagcctcatctcaact

SEQ ID NO: 33662 - DNA, 460 bp, Homo sapiens
  misc_feature (1)...(460): n = a,t,c or g
ggannccccttnnnnnnnnnnnnnnnnnnnnnnnnnnnnnnnnnnnnnnnnnnnnnnnnnnnnnnnnnnnnnnnnnnnnnnnnnnggcacgagcatctgaggggggatggcttgaaggatcttaatgagaccatgctggacagcctgtcctttgtaatgctgacgtccaaaggctggagtctggatgccagttgctggcatgaggacagcctctttcgcttctgctattacatcttgttcacagctggctacctgagcttgttcggctacacgaaggacaaggagcaggacctgctacaggcaggagagttattcatggagttccgcaagtttgaccttcttttcccaaggtttgtctactccctgctgtggccccgggagtggctagaagtgggccgactccagcgtctctttcacaagatgctctccgtgagccacagccaggagaaggagggcatca

SEQ ID NO: 33663 - DNA, 550 bp, Homo sapiens
  misc_feature (1)...(550): n = a,t,c or g
gnnnnnnnnntannnngtnnngnnannnannncnnnnanaannagnngcngccnnnggnncnnnntnnngnnacnnnngnngtngcnccntccttggnccccttgganacccttgacagatacgaannnnnnnnnnnnnnnnnnnnnnnnnnnnnnnnnnnnnnnnnnnnnnnggcacgagaattgaaaggaactgtttacaactataggacttctgggatgcagttctgtgttaaaatgtctgctgtggagggaatctgcacttcggaaagcccagtcattgatcatcagggcacaaagtcctccaaatgtgtgcgccagaaagtagagggctcctccagtcacttggtgacattcactgtgcttcctctggaaattggccttcacaacatcaatttttcactggagacttggtttggaaaagaaatcttagtaaaaacattacgagtggtgccagaaggtgtcaaaagggaaagctattctggggttactttggatcctaggggtatttatgggaccattagcagacgaaaggagttcccatacagga

SEQ ID NO: 33664 - DNA, 538 bp, Homo sapiens
  misc_feature (1)...(538): n = a,t,c or g
gnannnnannnncccnnctntntcnnnnnnnnnntncctgggnnggcgctacnctatncngngnnnnnngnctgcctcccccttggacacccnttgaatgcntacgaannnnnnnnnnnnnnnnnnnnnnnnnnnnnnnnnnnnnnnnnnnnnnnggcacgaggatctcatacaaaaatcccaaattctagattctcttgagaaaactaaatatctggaaacgttagattcctattttgtgtggtagctgacctcatgagagagcacctgttaccatcttagcccacatctcactgggagcctgcatctctcctcgaccctggtggggaactgctggcagaatcttttgaatgagcttcatttggaggagcttctaggcatttgtttttccttaaatagtgaactgatggtttagagaccaacttggttgccccagaatgtttagggtaaacaagaaacccacactgcccaaaaaattctggtctggntttctgtctagatttctatctaatatctaaattttcatgctgtaattcct

SEQ ID NO: 33665 - DNA, 457 bp, Homo sapiens
  misc_feature (1)...(457): n = a,t,c or g
ttgnacaccncttgacnnnnnnnnnnnnnnnnnnnnnnnnnnnnnnnnnnnnnnnnnnnnnnnnnnnnnnnnnnggcacgagcagaagtgatggtgctgggacttcagccaaggtccacccaagtccaaggctcatcctcttacctccctcctgccctccgcaggatgctgatgctctggatttggagatgctggccccctacatctccatggatgatgacttccagctcaacgccagcgagcagctacccagggcctaccacagacctctgggggctgtcccccggccccgtgctcggagcttccatggcctgtcacctccagcccttgagccctccctgctaccccgctgggggagtgacccccggctgagctgctccagcccttccagaggggacccctcagcatcctctcccatggctggggctcggaagaggtgagcccagtaaagggggga

SEQ ID NO: 33666 - DNA, 455 bp, Homo sapiens
  misc_feature (1)...(455): n = a,t,c or g
ggagcccgntnnnnnnnnnnnnnnnnnnnnnnnnnnnnnnnnnnnnnnnnnnnnnnnnnnnnnnnnnnnnnnnggcacgaggcggtgctgctgctccggctgctcttggagttgcatgtacacgacgtggcagactttccaatgggaggattgtggattctgatgacataggaaactgcatcttccagacattgccacagaaagcacacagactttggaaaccagcagacctgaagtcaaatgtcgactttcagcttgctcctgtgtcacctttgctttggtaccaggatgatgcgagcctcaaannnnnnnnnnnnnnnnnnnnnnnnnnnnnnnnnnnnnnnnnnnnnnnnnnnnnnnnnnnnnnnnnnnnnnnnnnnnnnnnnnnnnnnnnnnnnnnnnnnnnnnnnnnnnnnnnnnnnnnnnnnnnnnnaaacatgttccaaatcaagtat

SEQ ID NO: 33667 - DNA, 449 bp, Homo sapiens
  misc_feature (1)...(449): n = a,t,c or g
ggcncccgcatgannnnnnnnnnnnnnnnnnnnnnnnnnnnnnnnnnnnnnnnnnnnnnnnnnnnnnggcacgaggactctttaacctagctgcgggaagatgactgtgccaagactgcaggtaggagaaagctcactgacgaggccttgtgggtctgaacgtcctgcagctatcaaagcctgttggcttcctgttgtgcattccaacaaatcatcttcaaacccactttagtgttttgtttataatgtccagaaatagtgaccctgtcacatgctctacagattacaggattcttagcctcttcctttttggtaggtcagtcctgggtttgagcccaagtgaccctcctgggaggtgatgatacacactgggtagagtggaatcagatggacttggattagaattctgcctctttactagttattttcctctaggcaaactgccaaca

SEQ ID NO: 33668 - DNA, 456 bp, Homo sapiens
  misc_feature (1)...(456): n = a,t,c or g
gnnnnccgtnnnnnnnnnnnnnnnnnnnnnnnnnnnnnnnnnnnnnnnnnnnnnnnnnnnnnnnnnnnnnnnnnggcacgaggctggctactaaagaatacttagattctacaatggaatacagtcacacagccgctgaagaaatgtctgtggggttggttcagattccagaagcaatcaaaatctacctttgtcaaaagtgcaagataattcacaggtcatggagaaaatgtcatttactctctagatagcctaatcctgcaacagctgcattttgaccctgatttttcctttctttcaacagtattgctagtctattcggggtaagtttgaagaagcgcccaaggtgatggtgataaccgatagctgctatagaaagaatgtcagaccttgttaagtgtcttacatacaatctcaatattaattacacttaactatgagatggantaacattac

SEQ ID NO: 33669 - DNA, 455 bp, Homo sapiens
  misc_feature (1)...(455): n = a,t,c or g
ggagcccgnnnnnnnnnnnnnnnnnnnnnnnnnnnnnnnnnnnnnnnnnnnnnnnnnnnnnnnnnnnnnnnnnnggcacgagagcagttcttagcattccttttttgttcatgtaaattctaatttatattaaagaaaagcaaattatatcatctacaaacctaagtgtgttcactactacagagttacttaggaaacacttaaccaatctagatgctgctcttgaagactactacttaaggcaatggagatgttaagctggggagtaagattttgaaggtactattttaagaggattcatttggaaggatggattgacagaagaacatgaagtcagataaaccaagaaggtcctttagccatccaggtatgatgaagtgacaagaagtcaggtggtaaagactgtggaaaggaagccacagacncaagacacatcaaagtggaaaaactgcttg

SEQ ID NO: 33670 - DNA, 454 bp, Homo sapiens
  misc_feature (1)...(454): n = a,t,c or g
ggngcctnnnnnnnnnnnnnnnnnnnnnnnnnnnnnnnnnnnnnnnnnnnnnnnnnnnnnnnnnnnnnggcacgagaggaggtggaggaggtggaggaggtggaggaggtggtgggtggtcactctccctgccccaccaagccagccacaggttccatcttggagatagatatgcctgtgactaaagcctccagcctggtnnncnnnagcaaaactctgtctcanaancaataaattatgaaananntttanttgntgatttacaanacancantttatcccttactcttcaccctgnctgncagccttnnncgccttncccctacccncttgngttnnataggaancattaatcntgtntgnccntcncctgaagnntttactntctgtntangcatatntatttgacggcctggcanngcntctgccattggttcagctgtgtctgnagaga

SEQ ID NO: 33671 - DNA, 525 bp, Homo sapiens
  misc_feature (1)...(525): n = a,t,c or g
nttntaanntnttannnagggaaggggnannaanntatgnntattntttncttnngatatatttannntnanataggnnanctttgaatgatacgaannnnnnnnnnnnnnnnnnnnnnnnnnnnnnnnnnnnnnnnnnnnnnnggaacgagcggcacgagcttaaaagcttaatctgtttttaacaaaattaaaaataatttgtagctatagtggaatgatcagagtttgtgcccagtgtttacctgtgagcattttctttttgcatacaaacgttttggtcaacccacggttgcctcctccaggaacagaatcttttgattcaaatacattgattaaaatttacagagactatggtctttccctgccatgggtttagtntatagaaaatggtanaggatgaggatgatgattnctaagtntacttgnacattacttgaatagcntagacaatgaccntgttggcccaattattttangccatgcaaanagtgattnccaaaganttgcangtgatctggttaa

SEQ ID NO: 33672 - DNA, 452 bp, Homo sapiens
  misc_feature (1)...(452): n = a,t,c or g
ggngacgctnnnnnnnnnnnnnnnnnnnnnnnnnnnnnnnnnnnnnnnnnnnnnnnnnnnnnnnnnnnnnnnggcacgagcaccgtgggaataaaactcgtgatagtcagttacaaatacacagcaaatgatgagcagcacaatataaacacagatctagattggtgggtctgaggactcattcttaaatttggaggccatcacctaatcttgtcttttcactttacatagcaggagacagggacccagagaagtgaagaggcgttgccttaggttgcacagcagatgacgcctctcaagatggaccctaggttgtctgactccgtctcacagctttgccccatttatcatgaagatgaacgctggtaacactgctacctacgagctgagcttgcacgcacattcctggtgtgtacatgcatgcgtgcacgctcacgcaatgtgctaagtgc

SEQ ID NO: 33673 - DNA, 448 bp, Homo sapiens
  misc_feature (1)...(448): n = a,t,c or g
gntgcccgttnnnnnnnnnnnnnnnnnnnnnnnnnnnnnnnnnnnnnnnnnnnnnnnnnnnnnnnnnnnnnnnggcacgaggaatagcctgaaatatttctcttttgggcaggattatttgacccttttaaaagtagcacattaaataaaattcaaacctcaactatacacagaagcagacacccaaaactaaatttcagatctaaatacagtatttaggccaggcgcggtggntcactcctgnaatcccangactttgntaggccntgcctgnctggaatngatgtcntgncctnnagtgtnncntncggcttgacttgcanagtgctgagattncaggnnagagcngttatgcgnattantatnnnnantattattgtctnntntganncgntgttccgntntnntcgccnngntggncttcatctggtgaannntggttnctgta

SEQ ID NO: 33674 - DNA, 453 bp, Homo sapiens
  misc_feature (1)...(453): n = a,t,c or g
ggncccgttnnnnnnnnnnnnnnnnnnnnnnnnnnnnnnnnnnnnnnnnnnnnnnnnnnnnnnnnnnnnnnnggcacgagggactgagtaatttgcttctaatgaatagaatatggaaagaataatgcatgtcacttctgagatcaggttacaaagacctctggcttctgttttattagctctctcctgctgtctggttcactcattttgatggagcactttgtgttccgtggagaggcccatgggacaaggaactgagggaggccttggattaacagccagtgggaaactgaggccctcaacccaacagtcctgtgggagctgaatgctgccaacaaccatgtgagtggtctttgaagtcaatttctcccagtcaagcctcagatgagaccataggcccaactgacacgttaattgcagccttcgagaccctgagtcagcagagccatacct

SEQ ID NO: 33675 - DNA, 455 bp, Homo sapiens
  misc_feature (1)...(455): n = a,t,c or g
ggcnccgnnnnnnnnnnnnnnnnnnnnnnnnnnnnnnnnnnnnnnnnnnnnnnnnnnnnnnnnnnnnnnnnnnggcacgagcggcacgaggcattgtgatgaaacagatcttttgcttatgtttttcctttttatcttctctcatcccagcatactgagttatttattaattagttgatttatttttgcctttttaaattttaacttatatcagtcacttgccactcccccaccctcctgtccacaactcctttccactttaggccaatttttctctcttagatcttccagcagccccaggggtaggaagctcctcttagtactaagagacttcaagcttcttgctttaagtcctcaccctttacattatctaattcttcagttttgatgctgatacctgcccccggccctaccttagctctgnggcattatatctnctctctgggactcttcaa

SEQ ID NO: 33676 - DNA, 453 bp, Homo sapiens
  misc_feature (1)...(453): n = a,t,c or g
gntnncgcatgannnnnnnnnnnnnnnnnnnnnnnnnnnnnnnnnnnnnnnnnnnnnnnnnnnnnnggcacgaggagcctacaagggtatctgaagtgtggttagaaaagtaaggaaaaacctttagaaagtatttgaagctccacaagataaaataactttagttattaaagtctgaaagagaggtcttttggatttggctattagtgattttaaaacatttcttgtgggacatcttgggtgttagaggtgggttgaagactaaatacgatatgaagaaatacaggtagtgtagactattctgagtgtaggatcttggctttgataggaataagaaggggcagtaccaagaagagaaggcaagattgagtgaggatttatttttttgaaaataagagaacctcgagtatatttatagaccataagggaaganagttgggagagaatgggaaa

SEQ ID NO: 33677 - DNA, 454 bp, Homo sapiens
  misc_feature (1)...(454): n = a,t,c or g
ggcnccgttnnnnnnnnnnnnnnnnnnnnnnnnnnnnnnnnnnnnnnnnnnnnnnnnnnnnnnnnnnnnnnnggcacgagccaaaatccacacacatnnnnnnnnnnnnnnnnnnnnnnnnnnnnnnnnnnnnnnnnnnnnnnnnnnnnnnnnnnnnnnnnnnngaccatnnnnnnnnnnnnnnnnnnnnnnnnnnnnnnnnnnnnnnnnnnnnnnnnnnnnnnnnnnnnnnnnnnnnnnnnnnnnnnnnnnnnnnnnnnnnnnnnnnnnnnnnnttaaaaaattctatacatgtttagtacagaagcaaccatcctttttttgttcctccannnnnnnnnnnnnnnnnnnnnnnnnnnnnnnnnnnnnnnnnnnnnnnnnnnntgaaggccaagtctgtggctttattgaacagatgttacttaacacctttgtctcttggtttgctcactta

SEQ ID NO: 33678 - DNA, 455 bp, Homo sapiens
  misc_feature (1)...(455): n = a,t,c or g
ggtncntgctgannnnnnnnnnnnnnnnnnnnnnnnnnnnnnnnnnnnnnnnnnnnnnnnnnnnnnggcacgaggaagcttgctcnnnnnnnnnnnnnnnnnnnnnnnnnnnnnnnnnnnnnnnnnnnnnnnnnnnnnnnnnnnnnnnnnnnnnnnnnnnnnnnnnnnnnnnnnnnnnnnnnnnnnnnnnnnnnnnnnnnnnnnnnncggggtatccattgctgtacttccctgatcccctgaaataatgcatacatcctgcagcccagtacttagcagagagtaattgctcaataaatgtcagttccttcctcgttcctttctagaagaggaaagtgggcttaaagttcaacaccagtccaggaagctagtgccagggagcccacaactaaagcaactgtgtggcttgcactatgatttctaactaagcctgcatcagccagtctctgctctct

SEQ ID NO: 33679 - DNA, 496 bp, Homo sapiens
  misc_feature (1)...(496): n = a,t,c or g
nnnnnnnnnnntnnnnnnnnnnnnnnnntnnngnnnnnnnnngnnnntnnnagnngncnnggnttgnnnnntgantttgaancttgganaccntagactgacacgaannnnnnnnnnnnnnnnnnnnnnnnnnnnnnnnnnnnnnnnnnnnnnnggcacgagagttgagttaactgatagctaaaaatctgttttaacagcatgtaaaaagttattttatctgttaaaagtcattatacagttttgaatgttatgtagtttctttttaacagtttaggtaataaggtctgttttcattctggtgcttttattaattttgatagtatgatgttacttactactgaaatgtaagctagagtgtacactagaatgtaagctccatgagagcaggtaccttgtctgtcttctctgctgtatctattcccaacgcttgatgatgnnnnnnnnnnnnnnnnnnnnnnnnnnnnnnnnnnnnnnnnnnnnnaaaaaaaaaaaa

SEQ ID NO: 33680 - DNA, 470 bp, Homo sapiens
  misc_feature (1)...(470): n = a,t,c or g
ngnncntnattggattngatnnnnnnnnnnnnnnnnnnnnnnnnnnnnnnnnnnnnnnnnnnnnnnnnnnnnnnnnnnnnnnnnnnnnnnnggcacgaggtgagcacctcccctctctccactctattgagtatatgagaggctacaattgtcatttatttgaatgaacacagagaaaccaatttaatcaagcaagggaatggaatgcaaatccaaggtcaagaatgtactttcttcttagttctccttctnnnnnnnnnnnnnnnnnnnnnnnnnnnnnnnnnnnnnnnnnnnnnnnnnnnnnnnnnnnnnnnnnnnnnnnnnnnnnnnnnnnnnnnnnnnnnnnnnnnnnnnnnnnnnnnnnnnnnnnnnnnnnnnnnnnnnnnnnnnnnnnnnnnnnnnnnnnnnnnnnnnnnnnnnnnnnnnnnnnnnnnnnnnnnnnnnntggccanaaaggtgggacaactggg

SEQ ID NO: 33681 - DNA, 458 bp, Homo sapiens
  misc_feature (1)...(458): n = a,t,c or g
tttgattccgttncnnnnnnnnnnnnnnnnnnnnnnnnnnnnnnnnnnnnnnnnnnnnnnnnnnnnnnnnnnnnnnggcacgaggaactgtgggaaataattagtgaacagtatcttaatgcacttattatcatattgggaagcatttccatcttttaaatttagaatgttaataagaaaatgcttgtaaatacgacctttaatgtgaatttggagacaaacctagttccacttaaagtgagttatataaaatattttaaagataaacatatatatttcctgtggaatgaatcttttgttgcatttgggcttttctcaattatagccatgttcactgaacctgtacaggaactgagaatggagtcttgtggagaaaaatgtcaaatatacttttctcancagttgttgagctgcccagttcttgatggggtacaattattgtttaggtgttgattcta

SEQ ID NO: 33682 - DNA, 469 bp, Homo sapiens
  misc_feature (1)...(469): n = a,t,c or g
ggantntcgtnattggttnnatacctttangacnnnnnnnnnnnnnnnnnnnnnnnnnnnnnnnnnnnnnnnnnnnnnnnnnnnnnnnnnnggcacgagagataattcaggagatgtcttgataaccctgtatattannnnnnnnnnnnnnnnnnnnnnnnnnnnnnnnnnnnnnnnnnnnnnnnnnnnnnnnnnnnnnnnnnnnnnnnnnnnnnnnnnnnnnnnnnncttctgcttttggggaagcctcaggaaacttacagtcatagtagaaggcgagggctaagtaggcacattttcacatgggcagcaggagaaagagacatgacagaagggagaagttctacacactttcaaagaatcagatctcatgaaaactcactgtcgagaacagcaaggggggaagtccaccttnnnnnnnnnnnnnnnnnnnnnnnnnnnnnnnnnnnnnnnnnnnnnnnnnnnnnnn

SEQ ID NO: 33683 - DNA, 460 bp, Homo sapiens
  misc_feature (1)...(460): n = a,t,c or g
ggtggnctcttgtttnatacctttgacnnnnnnnnnnnnnnnnnnnnnnnnnnnnnnnnnnnnnnnnnnnnnnnnnnnnnnnnnnggcacgagatcaaaggtaaatgaaaatatatgtttatacaaggacttatattcacatgttcgtagaaactgtattcataatagccaaaacagggttctcaccaaatgtctatcagatggtgacaggataagcaaattgttgtgtgtccatccgtgcagtggaatgcttcttggcaataaaaaggaccagactaccagtatacacaacattatggataaccctcagtaacattacactaaggagagaatccagatacataggactacagatggtatgattgtgttatatgaaattccagaaaagactatgccatagtgacagaaagcagatcagtggtttctggagaatagaggttgngggganggaattgactgc

SEQ ID NO: 33684 - DNA, 464 bp, Homo sapiens
  misc_feature (1)...(464): n = a,t,c or g
ggtgtnnnnnttgatacngnttgacnnnnnnnnnnnnnnnnnnnnnnnnnnnnnnnnnnnnnnnnnnnnnnnnnnnnnnnnnnggcacgagggaagacattcattacagtgtttgttaaactagagaaaaactagagacaaatgcaaagcaaaaggggactggttaaataaattacagtattgtgcattcaatggaatacactcagtcattaaaaatgatacaggagagaaataatggaaattaaaagagaaatgttaatattaaattcannnnnnnnnnnnnnnnnnnnnnnnnnnnnnnnnnnnnnnnnnnnnnnnnnnnnnnnnnnnnnnnnnnnnnnnnnnnnnnnnnnnnnnnnnnnnnnnnnnnnnnnnnnnnnnnnnnnnnnnnnnnnnnnnnnnnnnnnnnnnnnnnnnnnnnnnnnnnnnnnnnnnnnnnnnnnnnnnnnnnnnnnnnnnnnnnn

SEQ ID NO: 33685 - DNA, 461 bp, Homo sapiens
  misc_feature (1)...(461): n = a,t,c or g
ggngnntnttgattgatacngcttgacnnnnnnnnnnnnnnnnnnnnnnnnnnnnnnnnnnnnnnnnnnnnnnnnnnnnnnnnnnggcacgagaaatactaatgtcaggaaagagcattttggtgttgggaaggagggacaaaaagcctgtttggagttgaggaaagactggatacagaaaaaactgtactgattatatacaaaaataaagctatatagtttgttcttttgccttttttgaatgtaaatggaattggagatagaaacatgtcttatatcccagtcatattgatctgctcagcttgttatgcttctgtgtactgcatcagtgatgactttactgcactgttttccaaaggtgcccacgtttgttgctcattgtgcactttcccacatttgttcccatgtgcagtttctcctgacgtgtaagcgcatgcacacataaacacacacatatgggc

SEQ ID NO: 33686 - DNA, 464 bp, Homo sapiens
  misc_feature (1)...(464): n = a,t,c or g
ggnnnnnnnnttgnttganacagnttgacnnnnnnnnnnnnnnnnnnnnnnnnnnnnnnnnnnnnnnnnnnnnnnnnnnnnnnnnnnggcacgaggtgggaacagggaggtgggcaatactcctagggctatgctggccctcatcctacccaggtcatgtccctttggcttaaatgtcaaagtttcactcccaggagaaactcagaagcccagccagaccaagaccaaccaggctttgccctaaaagcaaagcaggcagaagaggcagatagagcatagggggccaggacagggatcccccgtcagcacagcaggagtcactgctgtgtcatctgtttcactgccacatggaaagctcatggcagctgcaggccataaaagatctgtgtaatcagggttctctcctagcattactcagaggggtctggctggcttccagtgacaagccaaggaagggaaaatgt

SEQ ID NO: 33687 - DNA, 465 bp, Homo sapiens
  misc_feature (1)...(465): n = a,t,c or g
ggtgtntnntttgattccagttacgacnnnnnnnnnnnnnnnnnnnnnnnnnnnnnnnnnnnnnnnnnnnnnnnnnnnnnnnnnnggcacgagcaagatcgtgccactgcactcccccttcaaagattcttgcccagaaagcttcagtgaaatgggtttgagtcttgagaattcttctcatgtccttgtttggtgaccttgcaattggtaaactctctgttgcaaactccactgtcttggtatattctgttgctgcacagcaggcatacaaaccttacaatcttataaaaattcatggcaagcacnnnnnnnnnnnnnnnnnnnnnnnnnnnnnnnnnnnnnnnnnnnnnnnnnnnnnnnnnnnnnnnnnnnnnnnnnnnnnnnnnnnnnnnnnnnnnnnnnnnnnnnnnnnnnnnnnnnnnnnnnnnnnnnnnnnnnnnnnnnnnnnnnnnnnnnnnnnnnnnn

SEQ ID NO: 33688 - DNA, 462 bp, Homo sapiens
  misc_feature (1)...(462): n = a,t,c or g
ggtgtntnntcaaganttngcttaccattgcnnnnnnnnnnnnnnnnnnnnnnnnnnnnnnnnnnnnnnnnnnnnnnnnnnnnnnggcacgagagatgtgactcatccttaagcctggccccagaaatcccattgtgaatgagaaaatccctttaaaactctctcacaggcttgcttgcctcctgtgacagtgagttcataccccctgttgctggccctgaatgccgggtcattcttcccatgatcctggtctgttagagctgcctcagccctttccccaggcaccactccagtagcacccatacagtatccctgggctccctggccatcacgggcctttagatctttgcagagctgggcctctgccagagccctccctttgtggccacaactgctcctgttttgaagaccganagcttttcttctttctcngaatccctttntttatagcaanattatacc

SEQ ID NO: 33689 - DNA, 458 bp, Homo sapiens
  misc_feature (1)...(458): n = a,t,c or g
anccccctttggacaccgtttgacnnnnnnnnnnnnnnnnnnnnnnnnnnnnnnnnnnnnnnnnnnnnnnnnnnnnnnnnnnggcacgagggcgtggagggataggttggaaggtaagaactgcttctgtgaaaaacagcctctatgaagaaaagaaacagttgctgagtggactagaaacaaatggaaaatgacaagtagcattgagaactcatgtatggtagatttttcttcctttctccttgtctgatgccttccacgaggctaggcacaccacatatgttcaataaaattgagctgctttaaggcaaggaggtagacggaaagttcaaagtgctcaaaggccactagggggcaggctttggtaggcagctagagattggacagttttccatcctcacaggatttagaatagagagcatctgagttagactggaatgccctttggagataatcca

SEQ ID NO: 33690 - DNA, 521 bp, Homo sapiens
  misc_feature (1)...(521): n = a,t,c or g
ccannngnnnaangnncnnaancnngngnnnnnangntgacntnnnnnacnagggnacnnagcaggnnccncccctntgacacccttgaagcctcgaattaaacgatcannnnnnnnnnnnnnnnnnnnnnnnnnnnnnnnnnnnnnnnnnnnnnnnnnnnnnnnnnnnnnnnnnnnnnnnnnnnnnnnnnnnnnnnnnnnnnnnnnnnnnnnnnnnnnnnnnnnnnnnnnncccaaaaaactctcctacctcggcccggtgnnnnnnnnnnnnnnnnnnnnnnnnnnnnnnnnnnnnnnnnnnnnnnnnnnnnnnnnnnnnnnnnnnnnnnnnnnnnnnnnnnnnnnnnnnnnnnnnnnnnnnnnnnnnnnnnnnnnnnnnnnnnnnnnnnnnnnnnnnnnnnnnnnnnnnnnnnnnnnnnnnnnnnnnnntctaagggtatacttttaacacatctacataatcacagtacctgactaagaatctaaacnnggaaattaacattgaccntganactaat

SEQ ID NO: 33691 - DNA, 462 bp, Homo sapiens
  misc_feature (1)...(462): n = a,t,c or g
ttgnnnccccctttggacaccgttnnnnnnnnnnnnnnnnnnnnnnnnnnnnnnnnnnnnnnnnnnnnnnnnnnnnnnnnnnnnnnnggcacgagcagagctgagttggaggacgtgcatggcttgtatctgcagacaaataagcttgattctgagccctagaatggaagagatttaattcgcctttcacgcccatcccccaagcctggagaacactagacccttgaggagcagagtggaaactgtgcaccctgcagcccagctttctctctagtatgatcagttcctccttcccagagtcaccaggctggtagcagtgagtgagacagtggggagaagcagtaatgtttcactaacagcattcccttcaaatggaaataaataaatatcaagagcaggagaaacctcctcactccaaaaatccttcatttgggaaacagtgttaaccagttggtttgagag

SEQ ID NO: 33692 - DNA, 471 bp, Homo sapiens
  misc_feature (1)...(471): n = a,t,c or g
gnnngnnnnntnttnncccccctttgaacaccgtnnnnnnnnnnnnnnnnnnnnnnnnnnnnnnnnnnnnnnnnnnnnnnnnnnnnnnnnnnnnnnnnnggcacgagtgcaaattaaaattggaatgtccactgtacaccctcaggaatagctgtaatcgaaaagactgtcaaaatgttctagaaagtgttaggatgtgtagaaactagaaatcttgcgtgttacaatggtaatgtaaatcagttggaaatcagtttggcagttcattaaaaagttaaacttaccatatgatccagcaattccactcctggatatccaagagaattaaaaacttatgtccatacaaagactgtannnnnnnnnnnnnnnnnnnnnnnnnnnnnnnnnnnnnnnnnnnnnnnnnnnnnnnnnnnnnnnnnnnnnnnnnnnnnnnnnnnnnnnnnnnnnnnnnnnnnnnnnnnnnnnnnnnnn

SEQ ID NO: 33693 - DNA, 524 bp, Homo sapiens
  misc_feature (1)...(524): n = a,t,c or g
ngnannnatcnctnngnngnnanangagcgnnncgatnatananggnactgnntnnangacgtnanngccntngccntgacaccgtttgaaagcctacgaaannnnnnnnnnnnnnnnnnnnnnnnnnnnnnnnnnnnnnnnnnnnnnggcacgaggaaatcctctccacgaaggaagagacagaaaacgcttttattaagcattaaaccaggaatgggatgcacatcacagacaatccactaagaaattgcaaggtaagaaaaaagcctcactccttcatatggcctagcagatgtagcccattacacacgttttcaagataaacaacaacaagtcctcaaatacgaatttgacagcactatttgtcacacatagnncatcctaacaggtgatgctctattaccttactggctttacctagaggaaaagcaaacntcatatctttatgacagaagataatgangggagctgccttggggctgctggatganacantagggacaggacagngcgagctttcaag

SEQ ID NO: 33694 - DNA, 523 bp, Homo sapiens
  misc_feature (1)...(523): n = a,t,c or g
ncnnnncnnnncncnnnnnncnngnncnnnnncngannnnnnnnanntgcnccnnnctncnnnnnccncnttcccttgacacctttgactgccacgaannnnnnnnnnnnnnnnnnnnnnnnnnnnnnnnnnnnnnnnnnnnnnnggcacgaggggtgatagcccccaatttaggaagagcttgcagtgttaatccatttcttactgggtgaaggaagaagttggtctgccttgagctcaccccgcctcccacccccacagggacaagagccatctctcagctctttccttcacagtttgcctggaaagccagtccaggccacacctggatgctgcggggcccgcctgcccacggcggnggctgatgcctcccagttgttgggcctgtanctggtgtctccttcctgactctggaccaccgaccctgntgcttaggacaccagctgccaggacatggctagaagatgatcggggggtctnctcanagaggcaggccccgtctatggaggagcanggacagctg

SEQ ID NO: 33695 - DNA, 460 bp, Homo sapiens
  misc_feature (1)...(460): n = a,t,c or g
tctccccnctnnanacnctttngactgncnnnnnnnnnnnnnnnnnnnnnnnnnnnnnnnnnnnnnnnnnnnnnnnnnnnnnnggcacgagaaacttggtgttcacacacacacgtagcaagcctccatgaacaggagacgcagaaacaacatagcaaagaaacagtttttgctatttttggacacaaaagaaaaataagtatatttaacatgtttaaagacatgttaaagagggaactatnnnnnnnnnnnnnnnnnnnnnnnnnnnnnnnnnnnnnnnnnnnnnnnnnnnnnnnnnnnnnnnnnnnnnnnnnnnnnnnnnnnnnnnnnnnnnnnnnnnnnnnnnnnnnnnnnnnnnnnnnnnnnnnnnnnnnnnnaggtannnnnnnnnnnnnnnnnnnnnnnnnnnnnnnnnnnnnnnnnnnnnnnnnnnnnnnnnnnnnnnnnnnnnnnnnnnnnn

SEQ ID NO: 33696 - DNA, 455 bp, Homo sapiens
  misc_feature (1)...(455): n = a,t,c or g
tttganacccntttgaanaccgttnnnnnnnnnnnnnnnnnnnnnnnnnnnnnnnnnnnnnnnnnnnnnnnnnnnnnnnnnnnnnnnggcacgagggcagccttcagtttgtcctgcattccaaatcccagttggactgtcctcccagttgacttctgtcacaatctccaatgttcttgagagcacccttagggttgaatgtctccactatctgttggagatgaagtcagctcctttgtgaaaggattaagagtttcctgttttacagcttgcttctcacatcaggcaaaatctctaagccaaagctctggagttgcaagtgggaaaaatggcaaacttctcttttagtgagctgtagaagctaagtgcttgatagaggattgagagcagcagactgaggtcctcttgtcttgcctctcctggtaaggcatggaaccatcacctttccagattga

SEQ ID NO: 33697 - DNA, 455 bp, Homo sapiens
  misc_feature (1)...(455): n = a,t,c or g
tntgacacccgtttnnnnnnnnnnnnnnnnnnnnnnnnnnnnnnnnnnnnnnnnnnnnnnnnnnnnnnnnnnnnnnnggcacgagggcagtatatcaagtgcaaacatccttttggatgatcagtttcaacccaaactaactgattttgccatggcacacttccggtcccacctagaacatcagagttgtaccataaatatgaccagcagcagcagtaaacatctgtggtacatgccagaagagtacatcagacaggggaaactttccattaaaacagatgtctacagctttggaattgtaataatggaagttctaacaggatgtagagtagtgttagatgatccaaaacatatccagctgcgggatctccttagagaattgatggagaagagaggcctggattcatgtctctcatttctagataagaaagtgcctccctgccctcggaatttct

SEQ ID NO: 33698 - DNA, 453 bp, Homo sapiens
  misc_feature (1)...(453): n = a,t,c or g
ttggannccccttgaacacagntatgacnnnnnnnnnnnnnnnnnnnnnnnnnnnnnnnnnnnnnnnnnnnnnnnnnnnnnnnnnnggcacgagcaggaaaggggaaggagcaggggtggggctgatggtggctggagccaggtcctagccctagccctggcccaggctcccctcccaccccaggtactgaggacaaatcagttctctgtgaccagacatgagaaggttgccaatgggctgttgggcgaccaaggccttcccggagtcttcgtcctctatgagctctcgcccatgatggtgaagctgacggagaagcacaggtccttcacccacttcctgacaggtgtgtccgccatcattgggggcatgttcacagtggcttgactcatcgattcgctcatctaccactnaacacgagccatccagaagaaaattgatctaggggagacacc

SEQ ID NO: 33699 - DNA, 453 bp, Homo sapiens
  misc_feature (1)...(453): n = a,t,c or g
annccccctttgancaccgtnnnnnnnnnnnnnnnnnnnnnnnnnnnnnnnnnnnnnnnnnnnnnnnnnnnnnnnnnnnnnnnnnggcacgagcgtgggatttatagacaatgaaaaataggcagccagcaaaaagaatatgatggatgtatgctaagtggaaaggtctccaatatagattactgaggagaaaaggcaacaatatgtttagtatatgttcccgtgtgtagaaagctttcaaagcaggggaggggacatacatatcatacaaacgcatgcacagaacatttttggaaagataagcaacagtcattcccttgggaggaaaggcagaggtctgggaataagatgaaggtggaaaacctcaaagtgtattctttaaactgtatgcatttttcttgttgcacactgtttaagccaatgcttctaagagtgagtaggaatggtgcttga

SEQ ID NO: 33700 - DNA, 452 bp, Homo sapiens
  misc_feature (1)...(452): n = a,t,c or g
tttgagaccgtttnnnnnnnnnnnnnnnnnnnnnnnnnnnnnnnnnnnnnnnnnnnnnnnnnnnnnnnnnnnnnnnggcacgannnnnnnnnnnnnnnnnnnnnnnnnnnnnnnnnnnnnnnnnnnnnnnnnnnnnnnnnnnnnnnnnnnnnnnnnnnnnnnnnnnnnnnnnnnnnnnnnnnnnnnnnnnnnnnnnnnnnnnnnnnnnnnnnnnnnnnnnnnnnnnnnnnnnnnnnnnnnnnnnnnnnnnnnnnnnnnnnnnnnnnnnnnnnnnnnnnnnnnnnnnnnnnnnnnnnnnnnnnnnnnnnnnnnnnnnnnnnnnnnnnnnnnnnnnnnnnnnnnnnnctccccaggtgagcccattatgctgccaagtctgagacccaccactggtcccacgggtagagccgtagatcaaggatnagaaaatgtcagtaactttgggtaaatta

SEQ ID NO: 33701 - DNA, 467 bp, Homo sapiens
  misc_feature (1)...(467): n = a,t,c or g
gnnnnnnttnnntntncctctgagaccgtttgacnnnnnnnnnnnnnnnnnnnnnnnnnnnnnnnnnnnnnnnnnnnnnnnnnnnnnnnnnnggcacgaggtccacactgtaacaaggaaatagatgagatctttacactgaagcaatggagctggccaacaggcgtctcttgtcagcacaaatagcaagctaccagagacaatacaggaatgagattctgtcccagagtgctgtccaggtgttggttggtgcagcagaaagttttggtgagaagaagggaaaatgtatgagtcttgatacaataaagaattattctgaaagccaaaaaacagttacctttgctagaaaactactacttaattgggtgtataataccagaaaggaaaaagagggcccatcaaactcatagcaccaaagttgctgcaaataatagataaaagaatgagtcatcagaagaccttttggt

SEQ ID NO: 33702 - DNA, 449 bp, Homo sapiens
  misc_feature (1)...(449): n = a,t,c or g
tttganaccgntttgactgcnnnnnnnnnnnnnnnnnnnnnnnnnnnnnnnnnnnnnnnnnnnnnnnnnnnnnnnggcacgagtgaggtaggagccttggaactgggacagcagcctcagggagggacttgcagagaacccaggggatccctgggaatggcaagaaatacggtctgtggattgtggtggtttaagagcatgggccctggattcagatcctagcttcatttttgtaacctggggcaagttacttggtttgactgtaactcagttttctcatcttaaaatggcaataataatagcactttaatagatttgtgnnnnnnnnnnnnnnnnnnnnnnnnnnnnnnnnnnnngtgttatccattattgtaatgatcattttaatgatcaaggcaagccttgacgacacagnctgtccctaaaacctgaaagtagaggattatttt

SEQ ID NO: 33703 - DNA, 452 bp, Homo sapiens
  misc_feature (1)...(452): n = a,t,c or g
tttgaacacccgtttnnnnnnnnnnnnnnnnnnnnnnnnnnnnnnnnnnnnnnnnnnnnnnnnnnnnnnnnnnnnnnnggcacgagtaaggatctctgaaaatctgttcctccataaaagcaatgtgaatgcaggccagaattgccaaaatcagtattttcagaactctagaaattaaccaacggcttgcaacaatgacaaacatttattaaagaaaaatgattgaatcttagtaagaacagtaagcttcatggcattttaacttgacctatttccatcccgctcttcccaactccacagtagccttgaaagtcagtaaccaagaaacagaagcttaggagctattgaaaggagcagaaaggcttggtgcctccccacccccacaataaaaccgcatctccagacagttgtcactacttggcatctgtggcagctctctggaaaagcccatt

SEQ ID NO: 33704 - DNA, 470 bp, Homo sapiens
  misc_feature (1)...(470): n = a,t,c or g
ngtgtgtttnncttcgagncanngaggccctgnctacgaatttaatacgactcnnnnnnnnnnnnnnnnnnnnnnnnnnnnnnnnnnggcacgaggtgagtgtctgttaaatgagatgtatctgtattctgagtcaaacattccatggcaattgctttaatcacacaaaacaggtatcaggatcctgagaggatcaaattgtctgtaggtttatttcttattgggatgttctcaagtggtgttttaggttaatttatggtatatatatgtttatatgtgaatatacttatgattttagttgtagcaatggatagatactataagcagagttagttgttgagattaaaacccatggcctaaaaatagattcttggattcacatcttagctcacttaaattgtctttgtgactgaggtgaagttgcttctttttaagcctcaggtttcctctcttgngaaatggaccaggga

SEQ ID NO: 33705 - DNA, 470 bp, Homo sapiens
  misc_feature (1)...(470): n = a,t,c or g
gggtgntntcccctttgatacctnannnnnnnnnnnnnnnnnnnnnnnnnnnnnnnnnnnnnnnnnnnnnnnnnnnnnnnnnnnnnnnnggcacgagtgcatttatttggtgactcaacaatcaggcaatggtttgaataccttactacatttgttccagatttagtggagtttaacttgggtagtcccaagaatgtgggtcccttccttgcagtggaccagaagcacaacatcctgctcaaataccgctgccatggtccacccatccgcttcacgactgtctttagcaatgagctccattatgtggcgaatgagctgaatggcattgtgggagggaagaacacagtggttgccatagctgtatggtctcacttcagcaccttccctttggaagtgtacatccggcggctcaggaacatccgtcgagcagtggttcggctcctcgatcgaagcccaaagaccgtggtggg

SEQ ID NO: 33706 - DNA, 471 bp, Homo sapiens
  misc_feature (1)...(471): n = a,t,c or g
gtgtgntntcccctttgatactgnataccctttnnnnnnnnnnnnnnnnnnnnnnnnnnnnnnnnnnnnnnnnnnnnnnnnnnnnnnnnnnnnnnnnggcacgannnnnnnnnnnnnnnnnnnnnnnnnnnnnnnnnnnnnnnnnnnnnnnnnnnnnnnnnnnnnnnnnnnnnnnnnnnnnnnnnnnnnnnnnnnnnnnnnnnnnnnnnnnnnnnnnnnnnnnnnnnnnnnnnnnnnnnnnnnnnnnnnnnnnnnnnnnnnnnnnnnnnnnnnnnnnnnnnnnnnnnnnnnnnnnnnnnnnnnnnnnnnnnnnnnnnnnnnnnnnnnnnnnnnnnnnnnnnnnnnnnnnnnnnnncatttattaattgagtgtctttggtcaccttttttaaccgagctgaacttcatttttcttatgtaattgacttataggtaggatgtgagagggtgaaggcatgtaatgtgctcagc

SEQ ID NO: 33707 - DNA, 470 bp, Homo sapiens
  misc_feature (1)...(470): n = a,t,c or g
gagtgntctccctttnnatcctgaagaccttccnnnnnnnnnnnnnnnnnnnnnnnnnnnnnnnnnnnnnnnnnnnnnnnnnnnnnnnnnnnnnnnggcacnnnnnnnnnnnnnnnnnnnnnnnnnnnnnnnnnnnnnnnnnnnnnnnnnnnnnnnnnnnnnnnnnnnnnnnnnnnnnnnnnnnnnnnnnnnnnnnnnnnnnnnnnnnnnnnnnnnnnnnnnnnnnnnnnnnnnnnnnnnnnnnnnnnnnnnnnnnnnnnnnnnnnnnnnnnnnnnnnnnnnnnnnnnnnnnnnnnnnnnnnnnnnnnnnnnnnnnnnnnnnnnnnnnnnnnnnnnnnnnnnnatacaattttttttttgagacggaancttgcatctgtcgnccaggctggnggtacagnggcatgaactnggctaantgcnacctccacctaccgggttnaagngattctttttgcctcagcttctga

SEQ ID NO: 33708 - DNA, 467 bp, Homo sapiens
  misc_feature (1)...(467): n = a,t,c or g
gggtgttnncctntgaanaagagatctctttngannnnnnnnnnnnnnnnnnnnnnnnnnnnnnnnnnnnnnnnnnnnnnnnnnnnnnnnnnnnnggcacgagagcccatactgaccatgcctcatccagagctcctctgaagccagggggctaacggatgttgtgtggagtcctggctggaggtcctcccccagtggccttcctcccttcctttcacagccggtctctctgccaggaaatgggggaaggaactagaaccacctgcaccttgagatgtttctgtaaatgggtacttgtgatcacactacgggaatctctgtggtatatacctggggccattctaggctctttcaagtgacttttggaaatcaaccttttttatttgggggggaggatggggaaaagagctgagagtttatgctgaaatggatttatagaatatttgnaaatctatttttagggttgg

SEQ ID NO: 33709 - DNA, 176 bp, Homo sapiens
  misc_feature (1)...(176): n = a,t,c or g
gagtgntgtgncatanaanctactagatctcnttcnnnnnnnnnnnnnnnnnnnnnnnnnnnnnnnnnnnnnnnnnnnnnnnnnnnnnnnnnnnnnnnggcacgagtctttttcgagaacatgtagtttatatgaggaaactgactctgagaaagcttgatctttttttttttttt

SEQ ID NO: 33710 - DNA, 466 bp, Homo sapiens
  misc_feature (1)...(466): n = a,t,c or g
gtgtgntnttgccnacnnannaactnatactcttnnnnnnnnnnnnnnnnnnnnnnnnnnnnnnnnnnnnnnnnnnnnnnnnnnnnnnnnnnnnnnnnnggcacgagccagatagtttatttttttgagaataactagaaaactagacagagtgaaaagaaagtatgcttggctgggcctggttgcnnnnnnnnnnnnnnnnnnnnnnnnnnnnnnnnnnnnnnnnnnnnnnnnnnnnnnnnnnnnnnnnnnnnnnnnnnnnnnnnnnnnnnnnnnnnnnnnnnnnnnnnnnnnnnnnnnnnnnnnnnnnnnnnnnnnnnnnnnnnnnnnnnnnnnnnnnnnnnnnnnnnnnnnnnnnnnnnnnnnnnnnnnnnnnnnnnnnnnnnnnnnnnnnnnnnnnnnnnnnnnnnnnnnnnnnnnnnnnnnnnnnnnnnnnnnnnnnnnnnnnnnnnnnnnnnnnnnnnnn

SEQ ID NO: 33711 - DNA, 467 bp, Homo sapiens
  misc_feature (1)...(467): n = a,t,c or g
gagtgntntnncnntgatactcgttnnnnnnnnnnnnnnnnnnnnnnnnnnnnnnnnnnnnnnnnnnnnnnnnnnnnnnnnnnnnnnnggcacgagggccattgaaaagctcaaaggcccgaggcccaaggttcctaattcctcagtattcaccaggcctgcatcctctgggactgaaggaaagaagtcgcagagtgaaagagactgaagaaagatgaggagaaatttgtcaggacatttaagaagccatggattctgatagacaacaagctcctacaaactggtcagaagaggatagttaacccgatttttttaacatcaaattaaatgaataagcaattcaaagaaaagaaagatgcaaaaggtcaatgagcatattaaaaaggtgtctgggaaatatccattttcacatagcagattggcaaaaacagtcattcccatttgatgtgctaaaaagccaaaattat

SEQ ID NO: 33712 - DNA, 468 bp, Homo sapiens
  misc_feature (1)...(468): n = a,t,c or g
gagtgntgtgcctcnnatctcgtgatacncttcntnnnnnnnnnnnnnnnnnnnnnnnnnnnnnnnnnnnnnnnnnnnnnnnnnnnnnnnnnnnnnnggcacgannnnnnnnnnnnnnnnnnnnnnnnnnnnnnnnnnnnnnggcgcannnnnnnnnnnnnnnnnnnnnnnnnnnnnnnnnnnnnnnnnnnnnnnngttgtgagcacatcaccaagcnnnnnnnnnnnnnnnnnnnnnnnnnnnnnnnnnnnnnnnnnnnnnnnnnnnnnnnnnnnnnnnnnnnnnnnnnnnnnnnnnnnnagaggggacaatatccaaactatatcaggggccaaccataaataggaaattccaattcctagttgcttcccaggagcagggtcagagggagaccaatttccttattacacagtagtctctgtggaaggatctaaaatgccttttttgctttacggaactacagtata

SEQ ID NO: 33713 - DNA, 465 bp, Homo sapiens
  misc_feature (1)...(465): n = a,t,c or g
gagtgntntnccaacgnatacttttatgacntgattacgaatttaatacnnnnnnnnnnnnnnnnnnnnnnnnnnnnnnnnnnnnnnnnnggcacgaggtagaaccttagtaaatgcctttttttccttctcttgtgacttgtaagataaggccatccttttaaattgaattgtgcgtggttctactcaatttctataggtatagttactagacattattcactatcttaatgaaacgcttgaataggaactctgccctcagaaatgcaaactgttcatctgaaaggagtgggcttacgagggtctatagctcacctggttcatgggttgtgattctgccttctggtttgagagtgaagggaggactttggagagatccgcttgctgataacaggtggagggcaggagtttcagtggcttgcttatccccacgacatgtcagaaacataggcaatgactatcctg

SEQ ID NO: 33714 - DNA, 463 bp, Homo sapiens
  misc_feature (1)...(463): n = a,t,c or g
gagtgntnnnnctctgataccntttgacnnnnnnnnnnnnnnnnnnnnnnnnnnnnnnnnnnnnnnnnnnnnnnnnnnnnnnnnnnggcacgagtcagatcctgtctcagaaagaagagtgggagagcaggactcagcaccaacccaggaaaaacccacctcacctggcaaggctattgaaaaaagagcaaaggatgacagtaggcgggtggtgaagagcactcaggacttaagcgatgtttccatggatgaagtgggcatcccactccggaacactgagagatcaaaagactggtacaagactatgtttaaacagatccacaaactgaacagaggtactgattttcatttgtagaagctgtgctgtgctatgtgccaatacacgttttgtgggcctgaactcactttgctaggatgccagaagactgggtcctgcagttggacctcattaggtactggtctg

SEQ ID NO: 33715 - DNA, 470 bp, Homo sapiens
  misc_feature (1)...(470): n = a,t,c or g
gagtgntntnncctctngnatacctgnanaacnnnnnnnnnnnnnnnnnnnnnnnnnnnnnnnnnnnnnnnnnnnnnnnnnnnnnnnnnnnnnnnnnnnnnggcacgaggggaagttaaacaaatcaacaagcaaaaaacaactccttttannnnnnnnnnnnnnnnnnnnnnnnnnnnnnnnnnnnnnnnnnnnnnnnnnnnnnnnnnnnnnnnnnnnnnnnnnnnnnnnnnnnnnnnnnnnnnnnnnnnnnnnnnnnnnnnnnnnnnnnnnnnnnnnnnnnnnnnnnnnnnnnnnnnnnnnnnnnnnnnnnnnnnnnnnnnngatgttggcaaggttgtgaagaaaagaaatgcttatacactttttttttttttnnnnnnnnnnnnnnnnttttttgcccnnntngaatnncnttggtgnnatnnnngnanantgaancctccgcntccgggtttaanccnnttttc

SEQ ID NO: 33716 - DNA, 482 bp, Homo sapiens
  misc_feature (1)...(482): n = a,t,c or g
gggtaggnnggnttnnnttttgttacntnatcccttttgaaacctttnnactgccnnnnnnnnnnnnnnnnnnnnnnnnnnnnnnnnnnnnnnnnnnnnnnnnnnnnnnggcacgaggcattgtctgctaacttcaaccacaaaaaagatttgatggaattgcgagtaatgctggaagatgctgaggataggaaatacccagagaatgatctctttcgaaaactcagggatgctgtaaaagaagctgagacctgtgcttctgtggctcagctgcttctgagcaaaaagcagaaacacagacagagcccagatagtgggaggactcggaccaaactgacagtggaagaattgaaggcctttgtccaacaactttttagtcttccgtgtgtcatcagccaagctcggcaagtaaagaatctgctagatgatgtggaagagtttcatgaacgtgctcaggaggccatgacggatgaaaccccaga

SEQ ID NO: 33717 - DNA, 484 bp, Homo sapiens
  misc_feature (1)...(484): n = a,t,c or g
gnnnnnggnnngnngttggnttnttgcaatacnaataccctttggactcccnnnnnnnnnnnnnnnnnnnnnnnnnnnnnnnnnnnnnnnnnnnnnnnnnnnnnnggcacgagatatgaaagacccctccctccttagtttccttctctctctgaccaccacgatgcatgcaccagcccaatggagcactagtattctcttacagaactattggttattacttaatccttttagtaatttagaatccagggctttccttctcagtttcaaaactgaaggacctcgcatatgattttttttaccattattgtcaagattactgtcaccatcttaattgtcatttattttaagggtacttaaatgctaactgctatataagcattatctcgtttagtttcatttaactgtcagagaaaacctataagggaggcattattattttcttttaccgatgaggaaactgaggcttagaaaagttcagtaa

SEQ ID NO: 33718 - DNA, 484 bp, Homo sapiens
  misc_feature (1)...(484): n = a,t,c or g
gnnnnngnnaggnttnngntntnntntttgaatacctacngaatacctttnnnnnnnnnnnnnnnnnnnnnnnnnnnnnnnnnnnnnnnnnnnnnnnnnnnnnnnnnnnnnnnggcacgagccattcactaagttaaaaaatatagagtaagaagcagatttggggtaaaaggtccccctcactcagaaattggctgatttgtatggcaacagaacaagggaccatnnnnnnnnnnnnnnnnnnnnnnnnnnnnnnnnnnnnnnnnnnnnnnnnnnnnnnnnnnnnnnnnnnnnnnnnnnnnnnnnnnnnnnnnnnnnnnnnnnnnnnnnnnnnnnnnnnnnnnnnnnnnnnnnnnnnnnnnnnnnnnnnnnnnnnnnnncacatctgtggtccnnnnnnnnnnnnnnnnnnnnnnnnnnnnnnnnnnnnnnnnnnnnnnnnnnnnnnnnnnnnnnnnnnnnnnnnnnnnnnnnnnnnnnnnnn

SEQ ID NO: 33719 - DNA, 468 bp, Homo sapiens
  misc_feature (1)...(468): n = a,t,c or g
tnngnttntnntatctgaataccctttttgactccctacgaatttantacnnnnnnnnnnnnnnnnnnnnnnnnnnnnnnnnnnnnnnnnnggcacgaggagtatatgacttttgagcatgtcattatttctgtttcccagcgtcgtcttctataaaatggaaatagtcacactcacctacttcttagagttgtcttagggtgagatagaagcctgcattctttatgcctgcttgtccttctagggaatgctctggaattggaacagcatgtgggccaccccttaggataggtgactcttagaaggtgagaggaggcagggcgtctggtgtgcaagagaatcagctacatcatctttcaggttcctgctgcggtgggtgaattctgttattctgtgcccatggaatgggaggtgtcatagaagtcatagacatcanacgtanagtttgacctgagtgagtcagttgcc

SEQ ID NO: 33720 - DNA, 452 bp, Homo sapiens
  misc_feature (1)...(452): n = a,t,c or g
anncccnttggannnnnnnnnnnnnnnnnnnnnnnnnnnnnnnnnnnnnnnnnnnnnnnnnnnnnnnnnnnnnnnnnnnnnnnnggcacgagnnnnnnnnnnnnnnnnnnnnnnnnnnnnnnnnnnnnnnnnnnnnnnnnnnnnnnnnnnnnnnnnnnnnnnnnnnnnnnnnnnnnnnnnnnnnnnnnnnnnnnnnnnnnnnnnnnnnnnnnnnnnnnnnnnnnnnnnnnnnnnnnnnnnnnnnnnnnnnnnnnnnnnnnnnnnnnnnnnnnnnntttctgaattctgttctattccagctcctcttgcctaggaaaaaaaaatcacacccatgaaccaatacaatatctatatgctattgacatgagctaagtggtactgtagaaagcttgtgttgtaaaagaatcgactgtaaaagtgctagatctggctagaggtgaactctgcctaca

SEQ ID NO: 33721 - DNA, 470 bp, Homo sapiens
  misc_feature (1)...(470): n = a,t,c or g
gnnnnnngnnnnnnntntttggaataccntctgaanacccttnnnnnnnnnnnnnnnnnnnnnnnnnnnnnnnnnnnnnnnnnnnnnnnnnnnnnnnnnnnnnnnnnggcacgagcatttaccataggaaggctataaaaataagatttggaacataaactggatcaatttagaataaaattatattcaatggtgcttgttatatttatgagaactattttcacaaaattttctttggctttattcactttttgaaaaatctgtgtcccaagttcatatattaaagaactattgccttgtaatatacacttatggttgtaaattgagaagctggactaaacatgctttattactttggaagtgtggtcaaatgtgtttcctgaaaaaatgccattttacttgttttagacactaaacaatattcttaaaagaactgcaaagcaaggaggtacattgnggattttttcatg

SEQ ID NO: 33722 - DNA, 447 bp, Homo sapiens
  misc_feature (1)...(447): n = a,t,c or g
tttgganacccgttttgactcnnnnnnnnnnnnnnnnnnnnnnnnnnnnnnnnnnnnnnnnnnnnnnnnnnnnnnnnggcacgaggtagaggctgaagaactttatgcttttgcacttttgggcatagctttggattaacaggagtaaacaaactttttctataaagggccggggagtcaatattttaggtaagccagactgtcacaactgctcaactctggccttgtagctggaaagcagccctagacaatccgtcaccaggtgggcatggctgtgctccgataaaacttgatttacacaaacaagttgtttgcaatccctagatcagaaggaactaccctgtatcatgtctctgtaggctctcccttatgggtaggagttcccaatttctggtgtgtgtgttatacagtaattaggtataggatcaaaccttgtttaactgttta

SEQ ID NO: 33723 - DNA, 441 bp, Homo sapiens
  misc_feature (1)...(441): n = a,t,c or g
anacctttgganacatttgacnnnnnnnnnnnnnnnnnnnnnnnnnnnnnnnnnnnnnnnnnnnnnnnnnnnnnnnnnnggcacgagcagaaatgagaaaaagagagaacaaataaaaaataaaatatcagacttaagccttaacatagcagtaattattttactttatttcatttatttttttatttactgagatggagtttnnnnnnnnnnnnnnnnnnnnnnnnnnnnnnnnnnnnnnnnnnnnnaaggaatataatagacttatctcctcatgaattttttaaagtcataaatcatatttgaagcacaaattgtaatgccatctgatgtagtgcttaatctatgaagaggaaacacttaagacatatttnnnnnnnnnnnnnnnnnnnnnnnnnnnnnnnnnnnnnnnnnnnnnnnnnnnnnnnnnnnnnnnnnnnn

SEQ ID NO: 33724 - DNA, 450 bp, Homo sapiens
  misc_feature (1)...(450): n = a,t,c or g
tnttgaataccgtttgacaccntnnnnnnnnnnnnnnnnnnnnnnnnnnnnnnnnnnnnnnnnnnnnnnnnnnnnnnnnnnnnnnnnnggcacgagactggaagaataaataatggtggactgcgtatttccaaattgctaaaagagtaaattttaaatgttctcaccacacaaaatgataagtatttaaggtgatagatgttaattatgttgatttaatcatttcactcgtgtgtgtgtgtatatgtatatatagagagaaaatattgctttgtacctcatataaaattataatttgtccatttataatatttaataataaaagtaaattattagggacgtacttagagctacaaagatgctgaattgtttataatggcaaaaattccctgcatctattaaaacttcatactatctgttaagattncatatttattatgtacctaaagg

SEQ ID NO: 33725 - DNA, 449 bp, Homo sapiens
  misc_feature (1)...(449): n = a,t,c or g
tttgaanccttttgaanaccnttnnnnnnnnnnnnnnnnnnnnnnnnnnnnnnnnnnnnnnnnnnnnnnnnnnnnnnnnnnnnnnnggcacgagggtagttgtttcccataagaaaaagtgtgggtgtgaggggaatgtgatggtctgtggaggacttgactgcagaagagagtggtggtacaatttgtaaggttgcagaggagatcctatgagtggtttgtaggagagagaaaactattaaaatatctaagataaaaacagcactagataaagtaatgaatgtttgttttaagaaagctagagaatatagaaaaagtataaagaagaaagtaaacatcctttgtaattacatctctccaataatcactatggaaatttggcatatttccctttaggtgtataattcttgtggcccgctacccactatgcagtgtttctgttccatttt

SEQ ID NO: 33726 - DNA, 469 bp, Homo sapiens
  misc_feature (1)...(469): n = a,t,c or g
gnnttnggntnnnntntttggaataccctccngaatacccttnnnnnnnnnnnnnnnnnnnnnnnnnnnnnnnnnnnnnnnnnnnnnnnnnnnnnnnnnnnnnnnnnggcacgagagtctagcacctcagttaagaatatggactctaaagtcgaactgccaggcttcaaattccagttctgcgacctcagcaaagttacttaaccaagctctcagtgccttgttttcttcatctgtaaaatgaggatgacgtcacagcattgttgagagaattaatacaggctccagacttgtgaatggagaagtgttgaggtgaccccagctccagccaccagctgacgacaaccataccggagatcctgagagctgcctagctgaccccaggcaccctccagacttcatgtaagctgtttgaagccgaggactttgtctgttttgttcactcccaatggattcagcacttagaaga

SEQ ID NO: 33727 - DNA, 465 bp, Homo sapiens
  misc_feature (1)...(465): n = a,t,c or g
gnnnnnggnnnnnntntttgannnccatntnnnnnnnnnnnnnnnnnnnnnnnnnnnnnnnnnnnnnnnnnnnnnnnnnnnnnnnnnnnnnnnnnnnnnnnnnnggcacgaggacatctttctctgtgggtcagtgttatttaatcctggtaccacctaaggtcattccagggcctctcggagtcatctaaggtgatagtagcagcacgtgcccggcactctgtgaaacactattcacactattcctgtttaaagactnnnnnnnnnnnnnnnnnnnnnnnnnnnnnnnnnnnnnnnnnnnnnnnnnnnnnnnnnnnnnnnnnnnnnnnnnnnnnnnnnnnnnnnnnnnnnnnnnnnnnnnnnnnnnnnnnnnnnnnnnnnnnnnnnnnnnnnnnnnnnnnnnnnnnnnnnnnnnnnnnnnnnnnnnnnnnnnnnnnnnnnnnnnnnnnnnnnnnnnnnnnnnnn

SEQ ID NO: 33728 - DNA, 442 bp, Homo sapiens
  misc_feature (1)...(442): n = a,t,c or g
tttganaccgttttgactcnnnnnnnnnnnnnnnnnnnnnnnnnnnnnnnnnnnnnnnnnnnnnnnnnnnnnnnggcacgagggnnnnnnnnnnnnnnnnnnnnnnnnnnnnnnnnnnnnnnnnnnnnnnnnnnnnnnnnnnnnnnnnnnnnnnnnnnnnnnnnnnnnnnnnnnnnnnnnnnnnnnnnnnnnnnnnnnnnnnnnnnnnnnnnnnnnnnnnnnnnnnnnnnnnnnnnnnnnnnnnaggaagaaacagagccttggcagggcacgaaaagtgattgagttggttaactggatagggatgagaaaactatggcaagggtatgagggtgcccaaaagaaagaaccctaatggaaggggaggtggaatgggcacaatctaaggaggcgttttccaaacctcacaaacatttccccacagtcagctgaaaaatatcag

SEQ ID NO: 33729 - DNA, 450 bp, Homo sapiens
  misc_feature (1)...(450): n = a,t,c or g
tttnnnnnnnnnnnnnnnnnnnnnnnnnnnnnnnnnnnnnnnnnnnnnnnnnnnnnnnnnnnnnnnnnnnnnnnnnnggcacgaggaggacaatacagttaaagatagatgtagaaacacaaagagaagagatggaggatataaggaagcattcttaatttaatgggggtttcagaaaacaagtagaaatgtgaggaaatgggacagtaggaggtttggtcatggtagtgggacacagagcagtagaggtatgagaatagaagaaagaataggtgacaggagataacaaagataaaatcatactatgtttagctgccatgagcataaattgttatattaaataatgtttatggagcttttgaacatgtgctagtcaccattctcagcacttaacatgttttacctaatcacaacaaacccaagaggtagaatcaattattattctttgca

SEQ ID NO: 33730 - DNA, 447 bp, Homo sapiens
  misc_feature (1)...(447): n = a,t,c or g
tttganaccnttnnnnnnnnnnnnnnnnnnnnnnnnnnnnnnnnnnnnnnnnnnnnnnnnnnnnnnnnnnnnnnnggcacgagctggcctgtaagtgaagcatacatctttgagagagatgttaagatatcaaagatcctataagacatcatttagtatctaaatcatggataactggttctcaacaacatactaggcagtaaaaaacattaattctttcagtaagtactgacagcctattaggtgccaggagccataagtggatatacctatggattactatagacaaatatatgtctgttataattttaaatgaaaaataatcatttatttactccaacgtaagagataaaagatattgctctcatctcgacaatgagaataggctggataaactttaaaaaatgtataaacccatcacagctgaagaaacaaagaaaaatctac

SEQ ID NO: 33731 - DNA, 447 bp, Homo sapiens
  misc_feature (1)...(447): n = a,t,c or g
ttganaccgttnnnnnnnnnnnnnnnnnnnnnnnnnnnnnnnnnnnnnnnnnnnnnnnnnnnnnnnnnnnnnnnnggcacgagggaattcttcttgcacctggtgaatctagtagagaggaaccgcatcggctcagaaaacccaagcgatgtttttcgttttttggtggaagaacgcattcagtgctgtcagacccggaaagtccgctacacggagagggtggattacctgatgcagttacctgtggccatggaggcggcaaccaacaaggatgaactgatcgcttatgaactaacgagaagggaagcagaagcaaacagaagaccccttcctgagttggtacgtgccaagataccatttagtgcctgccttcaggccttctctgaaccagaaaatgttgatgatttctggagcagtgccctacaagcaaagtctgcgggtgtgaaa

SEQ ID NO: 33732 - DNA, 443 bp, Homo sapiens
  misc_feature (1)...(443): n = a,t,c or g
acttgganacngctatgacnnnnnnnnnnnnnnnnnnnnnnnnnnnnnnnnnnnnnnnnnnnnnnnnnnnnnnnnnnggcacgagcttagaaactggctttttaatctttgcattgctacttcttaaaaatttatccttaattttactcattggatgatgaaaaacaggtctttaaagggggagggttaacaggtaatggatagaatttaaaagtatagtcagtttcaatagataacagagtttagataaaagctatattagacgagccaatcttcccggggccctaattttctcacatgtaaaatggaaccaacaactaccctattttaaagaaagttgtaaactgtaaagtgcagtataagatcgtttacaaagaatgtctaggaccagatttgctcccaattattatttctggaatttagatatctgaaactccaaaaga

SEQ ID NO: 33733 - DNA, 433 bp, Homo sapiens
  misc_feature (1)...(433): n = a,t,c or g
nnnnnnnnnnnnnnnnnnnnnnnnnnnnnnnnnnnnnnnnnnnnnnnnnnnnnnnnnnnnnnnnnnnnggcacgagagcagagtcctgggagatgaaccaagcatcagttgaggctggaacagttaaaatgtatacatcaaattctctccaaggacactgtacccttggctgaaaattccctccttagtctacttcccatcccaaattctacccatccacactgtggcatcctaggtctctctagcagctgaacaggnnnnnnnnnnnnnnnnnnnnnnnnnnnnnnnnnnnnnnnnnnnnnnnnnnnnnnnnnnnnnnnnnnnnnnnnnnnnnnnnnnnnnnnnnnnnnnnnnnnnnnnnnnnnnnnnnnnnnnnnnnnnnnnnnnnnnnnnnnnnnnnnnnnnnnnnnnnnnnnnnnnnnnnnnnnnnnnt

SEQ ID NO: 33734 - DNA, 435 bp, Homo sapiens
  misc_feature (1)...(435): n = a,t,c or g
nnacnnnnnnnnnnnnnnnnnnnnnnnnnnnnnnnnnnnnnnnnnnnnnnnnnnnnnnnnnnnnnnnnnnnnnggcacgagnnnnnnnnnnnnnnnnnnnnnnnnnnnnnnnnnnnnnnnnnnnnnnnnnnnnnnnnnnnnnnnnnnnnnnnnnnnnnnnnnnnnnnnnnnnnnnnnnnnnnnnnnnnnnnnnnnnnnnnnnnnnnnnnnnnnnnnnnnnnnnnnnnnnnnnnnnnnnnnnnnnnnnnnnnnnnaatgcgaaacagctggtcagtggagcagctcagaacacacatgcttacaagttaagttcatcattttatgtggacgtggttggtggcaccctaaaacacttagaattgtaccatnnnnnnnnnnnnnnnnnnnnnnnnnnnnnnnnnnnnnnnnnnnnnnnnnnnnnnnnnnnnnnnnnnn

SEQ ID NO: 33735 - DNA, 399 bp, Homo sapiens
  misc_feature (1)...(399): n = a,t,c or g
nnnnnnnnnnnnnnnnnnnnnnnnnnnnnnnnnnnnnnggcacgaggggtttgagactgagtggcaatagctttgtaatggcacagcttgcttcatctctgtccactacaaaaggatgtatagtctaattaaggagtgactttcctgagcatcataggagttttgaacaaaatcattttggtaaaatgtgaaaccatagtttgcagaagctaggcaagttacgatttgcataaacagataaccagtaaagnnnnnnnnnnnnnnnnnnnnnnnnnnnnnnnnnnnnnnnnnnnnnnnnnnnnnnnnnnnnnnnnnnnnnnnnnnnnnnnnnnnnnnnnnnnnnnnnnnnnnnnnnnnnnnnnnnnnnnnnnnnnnnnnnnnnnnnnnnnnnnnnnnnag

SEQ ID NO: 33736 - DNA, 432 bp, Homo sapiens
  misc_feature (1)...(432): n = a,t,c or g
nnacnnnnnnnnnnnnnnnnnnnnnnnnnnnnnnnnnnnnnnnnnnnnnnnnnnnnnnnnnnnnnnnnnnnnnnggcacgaggaggtgnnnnnnnnnnnnnnnnnnnnnnnnnnnnnnnnnnnnnnnnnnnnnnnnnnnnnnnnnnnnatacgtacacacacacacacacagattgctttagtcacaaggtgattgcagcaattagaagtgctcattccggcatgggctggtgaggggcacagatggcagccactggactctctggaaatgtcccctcatttggagacaacccctgaagttcagttttgaggacctcaccccaggtcaaggaagaggccctggccctggatgtttgctcgctcttcacctgttgttttctttccaggtcgagaatacagctcttctcgaaggtaaggaagcccatgaccctc

SEQ ID NO: 33737 - DNA, 431 bp, Homo sapiens
  misc_feature (1)...(431): n = a,t,c or g
annannnnnnnnnnnnnnnnnnnnnnnnnnnnnnnnnnnnnnnnnnnnnnnnnnnnnnnnnnnnnnnnnnnnnnggcacgaggttgatttttgtatatggtatgaaattagggtcaaggtttatttttcctgtttgcatattcagttggtccagcaccttttgttgaaaagattatccttttcctattaaactgccttgacactttagataagcatcagttggccatatatatgtgggtctatttctgtaccctcagttctgttctgttgatctatcttgatgaaagtaccactatcttgttgccactaccacgtcttgattactagttactagttttatattaataataagcttaaaagtcagataatgtacatctttaatgttttctctatcagttagaattgttttgctattctcagtccattgcctt

SEQ ID NO: 33738 - DNA, 459 bp, Homo sapiens
  misc_feature (1)...(459): n = a,t,c or g
nnnnnnnnnnnnnnnnnnnnnnnnnnnnnnnnnnnnnnnnnnnnnnnnnnnnnnnnnnnnnnnnnnnnnnnnggcacgagtgaaacaccaaaaacttgcctaacttgtgaacttgaaaagatatttttattgtaagaacattttcttttannnnnnnnnnnnnnnnnnnnnnnnnnnnnnnnnnnnnnnnnnnnnnnnnnnnnnnnnnnnnnnnnnnnnnnnnnnnnnnnnnnnnnnnnnnnnnnnnnnnnnnnnnnnnnnnnnnnnnnnnnnnnnnnnnnnnnnnnnnnnnnnnnnnnnnnnnnnnnnnnnnnnnnnnnnnnnnnnnnnnnnnnnnnnnnnnnnnnnnnnnnnnnnnnnnnnnnnnnnnnnnnnnnnnnnnnnnnnnnnnnnnnnnnnnnnnnnnnnnnnnnnnnnnnnnnnnnnnnnnnnnnnnnnnnnaagaacattttcaaccag

SEQ ID NO: 33739 - DNA, 451 bp, Homo sapiens
  misc_feature (1)...(451): n = a,t,c or g
tggannnnnnnnnnnnnnnnnnnnnnnnnnnnnnnnnnnnnnnnnnnnnnnnnnnnnnnnnnnnnnnnnnnnnnnnggcacgagagagagctagcaccatgagctnnnnnnnnnnnnnnnnnnnnnnnnnnnnnnnnnnnnnnnnnnnnnnnnnnnnnnnnnnnnnnnnnnnnnnnnnnnnnnnnnnnnnnnnnnnnnnnnnnnnnnnnnnnnnnnnnnnnnnnnnnnnnnnnnnnnnnnnnnnnnnnnnnnnnnnnnnnnnnnnnnnnnnnnnnnnnnnnnnnnnnnnnnnnccncaaaaaancncaaanggattntgggngnaacaatntcagtaaanccagcgggngactntggttctcctaaaattntgccnttacttgccantcaccanacccccaaatntgaagggccagccnttttttacctatgacncctnaccagcangtaa

SEQ ID NO: 33740 - DNA, 471 bp, Homo sapiens
  misc_feature (1)...(471): n = a,t,c or g
ggnnnggnnttngtgacttntgncttatgaataccctttnnnnnnnnnnnnnnnnnnnnnnnnnnnnnnnnnnnnnnnnnnnnnnnnnnnnnnnnnnnnnnnggcacgagcctagatgttgcgttgggggaagcgcagccccaggctacccagacgcactgcctgagtcaccttcctgccaggcatgggaggaggggtgtgagggaccttgttactgggcagggcggggccaaatcttgtctgttccctggccacagacttctggaggcatcaggaggtgtactgccgtaccatatacttgtgaggtttggggtcctttcctgaggccccagtttctctaagacagcagatggcctcctgaggctcattgggtgcaaggaagcacagaaggcgaaaccccagctggaagccctggccctcagggacctctctgagcacagggtgagttggcaggcaggggctgtagcccct

SEQ ID NO: 33741 - DNA, 519 bp, Homo sapiens
  misc_feature (1)...(519): n = a,t,c or g
ntnnnnnncnnnnnnnnnnannncggngnnnnnnnnntnnnnngagggnnnnnnnnngnnnngnnttgatacgntagaattgaacgccnnnnnnnnnnnnnnnnnnnnnnnnnnnnnnnnnnnnnnnnnnnnnnnnggcacgagnnnnnnnnnnnnnnnnnnnnnnnnnnnnnnnnnnnnnnnnnnnnnnnnnnnnnnnnnnnnnnnnnnnnnnnnnnnnnnnnnnnnnnnnnnnnnnnnnnnnnnnnnnnnnnnnnnnnnnnnnnnnnnnnnnnnnnnnnnnnnnnnnnnnnnnnnnnnnnnnnnnnnnnnnnnnnnnnnnnnnnnnnnnnnnnnnnngtaggatgataagctgcacccagccaatgtaattcttaataatacgggttttaaaaatccatcctatacactatcatccatcctagcctctcctgaacctccaggaaaatgcaagtcgttggtggtggttacaattatagacaaggtggcgtttcatttttcccaaagcaaaatgcttta

SEQ ID NO: 33742 - DNA, 453 bp, Homo sapiens
  misc_feature (1)...(453): n = a,t,c or g
nnnnnnnnnnnnnnnnnnnnnnnnnnnnnnnnnnnnnnnnnnnnnnnnnnnnnnnnnnnnnnnnnnnnnnnnggcacgagcggcacgagaaaaataaaagacttcttaaaaatttaggtaaacaactgatattttaaaattgtgattaatggctgaaactcatttcttttctctcagacttcgaatcatccctgacaccagagaacactaaatgacagtggacaggcagacagtgtaccttttgctcctgatggtcataagaaccacctccttcttcttattgtgaagtgcaaggtgcaaaaaggaggcctgcctgctccttgttcaggactatgtcagcattgtggctcagaagtgcaaaggctttggcatggccttcccttgcagcaaagtgaagtgcagtgttcttttgaagaaacggacacagaaaatgtggtgacaatgcctaatctg

SEQ ID NO: 33743 - DNA, 442 bp, Homo sapiens
  misc_feature (1)...(442): n = a,t,c or g
ttggnnnnnnnnnnnnnnnnnnnnnnnnnnnnnnnnnnnnnnnnnnnnnnnnnnnnnnnnnnnnnnnnnnnnnnnnnggcacgaggaggaaacagatctgcccacactcacactgttggtcaggttgaatacagtgaaatacactccaggttcaatggtatttagggcattgcaccagacatggcagaaagtgttacttaaattgataccatgctttcctttaccaatggtataatttgaaaagggaacacaaaaggtttagatgttcccttttgatcatttttttgggaggggaaagaaaattacaatccatacaactatggaatatttctcactatattcagattaggagatatgtcttagaaattccnnnnnnnnnnnnnnnnnnnnnnnnnnnnnnnnnnnnnnnnnnnnnnnnnnnnnnnnnnnnnnnnnnnnnnnn

SEQ ID NO: 33744 - DNA, 451 bp, Homo sapiens
  misc_feature (1)...(451): n = a,t,c or g
nnnnnnnnnnnnnnnnnnnnnnnnnnnnnnnnnnnnnnnnnnnnnnnnnnnnnnnnnnnnnnnnnnnnnnnggcacgagagcagtatccttacgtatttgttttcttttcactggtaaaaatttcacgtagttttagtttaaaagttaagatctggtgataacttaagggttaggataggaaaatgaggacaacatactgcaaaataattgccacacttaatgctttttcatgttagaaatagtaaaagttacactgtcttctatgtttttacctctcagagnnnnnnnnnnnnnnnnnnnnnnnnnnnnnnnnnnnnnnnnnnnnnnnntctannnnnnnnnnnnnnnnnnnnnnnnnnnnnnnnnnnnnnnnnnnnnnnnnnnnnnnnnnnnnnnnnnnnnnnnnnnnnnnnnnnnnnnnnnnnnnnnnnnnnnnnnnnnnngggctaa

SEQ ID NO: 33745 - DNA, 431 bp, Homo sapiens
  misc_feature (1)...(431): n = a,t,c or g
gtnnnnnnnnnnnnnnnnnnnnnnnnnnnnnnnnnnnnnnnnnnnnnnnnnnnnnnnnnnnnnnnnnggcacgagggaaaaaggagaagtgggagagaaatcaatggggaagaaggatagaggggaagagagttggtgagtccagagagcaagaaagttaagtagaaaagtcaacaagaaatgggcaaataagaattagaagcaaaggtttaaaaaaaaaaaaagggnaagngtaaaaatntttgtnnnggccntttccncagnacccntgaaantncngncctttttcccccannantgtntnaaangaaantcncanccttnanggttnntnancccntcgtccttgnaattctggcaaaggggaaanttaggaaaancttttttaaaaaaatcaggtttccntgngccnttngatnnctaagtttttt

SEQ ID NO: 33746 - DNA, 470 bp, Homo sapiens
  misc_feature (1)...(470): n = a,t,c or g
gggnnntnnntttgactctgagacctttgacnnnnnnnnnnnnnnnnnnnnnnnnnnnnnnnnnnnnnnnnnnnnnnnnnnnnnnnnnnggcacgagcggcacgaggaggaatgtgtgttacttcaattacctttgagctgtagaaaaatctttagctgtggtaacagccacttctaggagaggagaaaatacggatcaactagcccaatttgcgatgttaggaatttgtcgattttcttagtaggatggctttcaaaggttagagcatcagagtcacctgaagcccgactttaactgtaatggtttaagatggggttgatggggaaacttgtagtacccctcaggtaattctgatactgcagcaaggtttgagaattcacaaagtctttttttttttcctcccganatagnctnattntgtcccccaggntgnaatncagnganccgaaattgnccactgnantccagc

SEQ ID NO: 33747 - DNA, 472 bp, Homo sapiens
  misc_feature (1)...(472): n = a,t,c or g
gngnnntnnnnnttgactttgaanacctttgacnnnnnnnnnnnnnnnnnnnnnnnnnnnnnnnnnnnnnnnnnnnnnnnnnnnnnnnnnnggcacgagtaaagatcttttgttcttgtccatttatatatatgattgaaagttggtgtttcattttttactaaatgctttaagatactgtaatggtttaatgctatagcttaaaagataataaatgcctcaccctgcctttccagcctgacttcctcctccacccctccatgagactaggccacatgcagccccggattgtgcttctcttcccggaccccctgcagtgttccacctcgaggcttttgcccatgctgcgccctcggcctggagtgcccttcctccgaagccctagctgcaaagtccttctcatccttcaaggcccatctcagatgctgcccctctgtgaaatttacgctgatgcccccaggcagaattcatc

SEQ ID NO: 33748 - DNA, 474 bp, Homo sapiens
  misc_feature (1)...(474): n = a,t,c or g
gntgnnttncncctttgagatncgntatgannnnnnnnnnnnnnnnnnnnnnnnnnnnnnnnnnnnnnnnnnnnnnnnnnnnnnnnnnnggcacgaggtgggcactcaggaaacaagctctgcagtcctggtttatgttctgtaaggggggcccggccggcaggccagccgggcatccatagctcccttacaaacattccctgnnnnnnnnnnnnnnnnnnnnnnnnnnnnnnnnnnnnnnnnnnnnnnnnnnnnnnnnnnnnnnnnnnnnnnnnnnnnnnnnnnnnnnnnnnnnnnnnnnnnnnnnnnnnnnnnnnnnnnnnnnnnnnnnnnnnnnnnnnnntanccggtgtgatggcacacctgtagctacttggganactgaggtggnaggatcgntggancctgggaagcaaggntgctgagccatgattgngccctgnactccagcccgggtgacagagcaanaccctt

SEQ ID NO: 33749 - DNA, 469 bp, Homo sapiens
  misc_feature (1)...(469): n = a,t,c or g
gngatgtnttnttgcctctgnaganctnnnnnnnnnnnnnnnnnnnnnnnnnnnnnnnnnnnnnnnnnnnnnnnnnnnnnnnnnnnnnnnnnggcacgaggcagctgatgcccagactatgtcacattctcactataagggcaggaagctccctaacagacaactcagcacaaggaactgagcaaatgtaaagctaagagcatactcagatatcatcactctaacttccaccatctccccatgtcactttttattaataaaaaataagtgaggaagctaggcatggaggctnacgcctgnaatcccancgctttgggancctgggattctccagctgagaaaaaaagggttttttagccnggagtttgnaaccagcttggcaaattagggaacccnttttttnttaaaaaaaatttttttaaaaaatcncccatntggggggattggccctgaanctnanttttttaaa

SEQ ID NO: 33750 - DNA, 472 bp, Homo sapiens
  misc_feature (1)...(472): n = a,t,c or g
gntgnntntnnctttganttngnanaccgtnnnnnnnnnnnnnnnnnnnnnnnnnnnnnnnnnnnnnnnnnnnnnnnnnnnnnnnnnnnnnnnnnggcacgannnnnnnnnnnnnnnnnnnnnnnnnnnnnnnnnnnnnnnnnnnnnnnnnnnnnnnnnnnnnnnnnnnnnnnnnnnnnnnnnnnnnnnnnnnnnnnnnnnnnnnnnnnnnnnnnnnnnnnnnnnnnnntgaataaaactagaaatacaaaatctgtgttaagaaagctctcaaactttaccaaaagaccagacctaaataaagaggggccaggtgcnnnggcttacccctggaattccagcactttanggaggccaccgtggtggatcctttaanccaggnngttcaanccaccgtggcaacttggcnaaccccttggttccaaaaaatccaaaaattaccnnggcttgggaaatgcncttggaannccag

SEQ ID NO: 33751 - DNA, 473 bp, Homo sapiens
  misc_feature (1)...(473): n = a,t,c or g
gnngtgnntnnnncnctgagancttatgnnnnnnnnnnnnnnnnnnnnnnnnnnnnnnnnnnnnnnnnnnnnnnnnnnnnnnnnnnnnggcacgaggctcggcgtggtggtgggcgcctgtagtcagttactgggaacactgtgagagccaagttctcagatgccagccaatggccaatcttgcaagcagacctttctaagaatagctatctcagacctactatgttaactcttttctgcacagcaagttatttatcttctccagatctcagagtcatgtgtaaaaagtgaataataataatagaaactatttcatggagaccatagtacaagtaatatgtaatcctgtatgatgacaagacttcatgacctaaagatcagtcgatggtagtgatgaggaagattacagaaagttatagacaaggtaaaacaactcaaaacataaatttcaaccccacagcaacttttagagg

SEQ ID NO: 33752 - DNA, 471 bp, Homo sapiens
  misc_feature (1)...(471): n = a,t,c or g
gtgnttgnnnnttgnacttnganaccgtttgacnnnnnnnnnnnnnnnnnnnnnnnnnnnnnnnnnnnnnnnnnnnnnnnnnnnnnnnnnnggcacgaggtttctttacatagcaagtctccatannnnnnnnnnnnnnnnnnnnnnnnnnnnnnnnnnnnnnnnnnnnnnnnnnnnnnnnnnnnnnnnnnnnnnnnnnnnnnnnnnnnnnnnnnnnnnnnnnnnnnnnnnnnnnnnnnnnnnnnnnnnnnnnntatataagtaagtaaaaaataaatgtaggcgtgagccaccatgtctggccaggatgtttgttcctttcttatcttacttttagaaccaagaacacatcgttttgatcagagtagatacaggccattttaaaattgatcttggtaatagaggcagagagtgaaccaatgagactgagttgattacagcaaaggcagaatactgcttctctcctaattt

SEQ ID NO: 33753 - DNA, 473 bp, Homo sapiens
  misc_feature (1)...(473): n = a,t,c or g
gtgnntnnnnntttganntngganancngnnnnnnnnnnnnnnnnnnnnnnnnnnnnnnnnnnnnnnnnnnnnnnnnnnnnnnnnnnnnnnnnnnggcacgagatcagtgtttgtaggtttcctttcaggataggagaaggtagaactgttaatctcataaagcaagctgcttctcactcaggacttttcatgggtatccctcccgtggaagtctagagaaactcccaggcaactgtctctgtttccccttccccttctaaaaaacttcatgaaataatgttttcttcatatgctacaaaactatcatatgcccaatgtcattaaatcctgatagacctacccagattaataacatctgatgatcaaaaggaactaaaacattcctcttatttggtatgctcatcgcattgaagaggaatgtgagttttaaaccattgacctcagtgggcctagatctgctctggtcgggaga

SEQ ID NO: 33754 - DNA, 471 bp, Homo sapiens
  misc_feature (1)...(471): n = a,t,c or g
gggnntnnnnnttgantttganaccgttatgacnnnnnnnnnnnnnnnnnnnnnnnnnnnnnnnnnnnnnnnnnnnnnnnnnnnnnnnnnnggcacgagaagattattgccagttcaggaaggattctatcctatttaaaagagattccaggtcatgctnnnnnnnnnnnnnnnnnnnnnnnnnnnnnnnnnnnnnnnnnnnnnnnnnnnnnnnnnnnnnnnnnnnnnnnnnnnnnnnnnnnnnnnnnnnnnnnnnnnnnnnnnnnnnnnnnnnnnnnnnngcaagagcaagaccctgtctctaaannnnnnnnnnnnnnnnnnnnnnnnnnnnnnnnnnnnnnnnnnnnnnnnnnnnnttgattaacaagcaggtggaagaaaacaacaatgccagggggaatattacaaaggaatattttccccatgttttgatcttacctggaaatatgtaactatatatgtctggta

SEQ ID NO: 33755 - DNA, 471 bp, Homo sapiens
  misc_feature (1)...(471): n = a,t,c or g
gngtgntntncctttganaccgtnnnnnnnnnnnnnnnnnnnnnnnnnnnnnnnnnnnnnnnnnnnnnnnnnnnnnnnnnnnnnnnnnggcacgaggaaagtcatctcagcatcactccccaagctgacctgcaaattcagtgcaatccccatcacaattccactgtctcctgcctgggggctgcccctccccatatcagccctctgcccaggacacaagactgctgggtggccttgtgtgtgtgttggggtgggagggctccactcctgtctgtggcgtgcagccctgctcaatgcattcccagcactgaagaacggcctctcccagggcccagcagttggggcagccttcctcctgaggtaggaggcaggactcaactccggaggtggggtttggacactggaccaaagtgaggattagctaaaacaagtgtcttacagggaggtggaagcacctcctgtaagacaccc

SEQ ID NO: 33756 - DNA, 475 bp, Homo sapiens
  misc_feature (1)...(475): n = a,t,c or g
gngnnnnnnnntttgganntncgaanancngnnnnnnnnnnnnnnnnnnnnnnnnnnnnnnnnnnnnnnnnnnnnnnnnnnnnnnnnnnnnnnnnnnggcacgagccttagggctgatctcttaccacacactggtctgacttggtgacctggaagaggacagtcagagccaacaggatgaggggaccagcttggagagcatctattgtatgccacccttgagtggctggaaatgtcttctgccactttgcaaggggctgggggctggggagtgggagtggcaagggaacacggggtggtagattgttcccagggctgctggttttggagcagtctgactaccctctcttcttagtgggaaagaaaggaggaagaagggggaagggatgcttttggaggggagctctaagggtgggagaaaagaaagcctgaaagaacatcactaaagggtctgaagttaaagactccaatgaac

SEQ ID NO: 33757 - DNA, 446 bp, Homo sapiens
  misc_feature (1)...(446): n = a,t,c or g
annacngtnnnnnnnnnnnnnnnnnnnnnnnnnnnnnnnnnnnnnnnnnnnnnnnnnnnnnnnnnnnnnnnnnggcacgannnnnnnnnnnnnnnnnnnnnnnnnnnnnnnnnnnnnnnnnnnnnnnnnnnnnnnnnnnnnnnnnnnnnnnnnnnnnnnnnnnnnnnnnnnnnnnnnnnnnnnnnnnnnnnnnntaaannnnnnnnnnnnnnnnnnnnnnnnnnnnnnnnnnnnnnnnnnnnnnnnnnnnnnnnnnnnnnnnnnnnnnnnnnnnnnnnnnnnnnnnnnnnnnnnnnnnnnnnnnnnngcaaggcctccaaactttttatctaatgggtcttttatcttcccttcctaatttcctggttgtttctcttcaactttgaggacatttgagtctttggacatataatggaggccttgcaatatcaccataactcttaact

SEQ ID NO: 33758 - DNA, 444 bp, Homo sapiens
  misc_feature (1)...(444): n = a,t,c or g
gnnnnnnnnnnnnnnnnnnnnnnnnnnnnnnnnnnnnnnnnnnnnnnnnnnnnnnnnnnnnnnnnnnggcacgaggaagctacaattaatctattgcattacgtgctaattctgttcaaccaaatttaaccaattctgagcgcctgctgtttgcccatgactcattcttcctcaggagtaggaatagaagtaaatgtggatcnnnnnnnnnnnnnnnnnnnnnnnnnnnnnnnnnnnnnnnnnnnnnnnnnnnnnnnnnnnnnnnnnnnnnnnnnnnnnnnnnnnnnnnnnnnnnnnnnnnnnnnnnnnnnnnnnnnnnnnnnnnnnnnnnnnnnnnnnnnnnnnnnnnnnnnnnnnnnnnnnnnnnnnnnnnnnnnnnnnnnnnnnnnnnnnnnnnnnnnnnnnnnnnnnnnnnnnnnnnnnnnnnnnnnnnnnnnnnnnnct

SEQ ID NO: 33759 - DNA, 530 bp, Homo sapiens
  misc_feature (1)...(530): n = a,t,c or g
annnnccnnacgatggantnannnnnncncgngatnnantntnactntgntganntnnnanngagggnnnctnaagnancntcantttgaccttgaanaccgttagaatgatacgaattaatacgannnnnnnnnnnnnnnnnnnnnnnnnnnnnnnnnnnnnggcacgagctgccgcttctccattctccggtctcacatacggctgctcctgcctgattccctagtttggcttcatgtctgccctcactctgatcttaggacctactcagcctcacacagtagtcttgttatatccctgagtttctcagcagcaggtactgttgacatcttgagccagtcattctttggggcgggggcagtgtcctgggccttgcaggatgttccacaccatccctggcctctgcccccagatgccaggcttgtcccacccaagtcatgatgaccaaaaatgggttccctgggggaagaatcatccctggttgagaaccactggtataaccagaggagggctatttctttggctgttg

SEQ ID NO: 33760 - DNA, 455 bp, Homo sapiens
  misc_feature (1)...(455): n = a,t,c or g
ttgaanatttgaataccgttnnnnnnnnnnnnnnnnnnnnnnnnnnnnnnnnnnnnnnnnnnnnnnnnnnnnnnnnnnnnnnnnnggcacgagtgtttctatcagtaaatataaaatcacttaacattgctatagctacagaattaaaatagatggctgccttttcatttaataatgtgatttcaaattatgccaattaaaaagaaagaattaagcaagcgcaactgtagcattataggaatttttctgaatattaagtataacagataattcagttatagactccattttcccatgcagccaaactccatcatttgaagaagcaaatttactgaaacaaattggaactaatctccggttatgagcgagatgcctcgcttctgttgacggtgtgaaagaccctgagctttacaatccatttaaaaattctgatctggaatcctgtatgaagaata

SEQ ID NO: 33761 - DNA, 471 bp, Homo sapiens
  misc_feature (1)...(471): n = a,t,c or g
ggnnnngnnnnntgnntctccctttgatacnctttgacnnnnnnnnnnnnnnnnnnnnnnnnnnnnnnnnnnnnnnnnnnnnnnnnnnnnnnnnnnggcacgaggtcttggtttgtggcaagaaagtggtttaaataagatacagtgtggtacaaaaggggagtcaaagacaggagtaaatggtgggaagaatgtcaaaaggtcaaaggaatagtagtcttgctgagggtgatcagcaagtactgtgagtgcagtggagtgggagggctgcatgatgtctgtgttaccatactctgctggttgtccttttacctgactgctcctcagtctccttttcagacatatttgttctgcctgtgccttacatgtttgtgcttctcatggttaccctaggctctgctttaatttctccctactttctcctgaaattgctatctgtatcctcattattcttaacaatatcttcagccc

SEQ ID NO: 33762 - DNA, 537 bp, Homo sapiens
  misc_feature (1)...(537): n = a,t,c or g
cnnnnngannnnnnncnnnnnannnngnnnctgnnnnnnnnaannannnntnaanntctgngagannggcnannnngntctnccttgaantntgaatacctttatgacatgantacgaannnnnnnnnnnnnnnnnnnnnnnnnnnnnnnnnnnnnnnnnnnnnnnggcacgaggggaactgtaaggtggccccaaactcagactgtccccaagttggaggcctgctagggcctgggagcacagcagtcccccaccagggagtcttcccttccccacctgcccactgcagactgggcacccctgctgcatgtgtctgacctctgtgaacctcagtttccccaacatacaataaccctgacagtctgtcattctgagcttctgtgacgtcagccttaggagttatcagggacccaaacttgggcttcacagggggcaggatggaggccctgccactcggaccagaccaggttgtggtgaggggcaagggtggngcctccaggcaccaatccanagtggacctcactctctgcaggccc

SEQ ID NO: 33763 - DNA, 452 bp, Homo sapiens
  misc_feature (1)...(452): n = a,t,c or g
tttgnagacncgtnnnnnnnnnnnnnnnnnnnnnnnnnnnnnnnnnnnnnnnnnnnnnnnnnnnnnnnnnnnnnnnnnggcacgagaataccctggggccgcctatgagggccatatttaacacatatccttaattctcaggctctgaatacttgtcccagttgacatctgcagctgccaagagtgacatttgactctggaagtgtgttccaataaacttgcctattaaagctttccagctcccactggataagcctaagactgaagacttaggaaggtgaacaattaaatcacctcctggaaaactaaccataagcaatttaatataatcgtgtatcacaactcctagttcacttactgaaatcattcaaaatctcttttcctaataaataaccctccggccaattgcaagataaaaacacacaggaatgtcaactaaatttttaaactaa

SEQ ID NO: 33764 - DNA, 473 bp, Homo sapiens
  misc_feature (1)...(473): n = a,t,c or g
ttagnaagcagttatgacatgattacgaatttagtacnnnnnnnnnnnnnnnnnnnnnnnnnnnnnnnnnnnnnnnnnggcacgagcatgagcttcaataccctgcttgacttatccttcttgggagttcctatgatttatttagcaagctggccatttttctttttctaaaaaaaaattatttatttgtgcattttttagtaatagagacgaggtctccnnnnnnnnnnnnnnnnnnnnnnnnnnnnnnnnnnnnnnnnnnnnnnnnnnnnnnnnnnnnnnnnnnnnnnnnnnnnnnnnnnnnnnnnnnnnnnnnnnnnnccaaactgggcattttttggggcttcatgtcagtttccctggggcagggagtatgcctgtgtagatccctgttgtgtcctctacccctaggacctggccaggtacacagtgggtgctcacagccttcgnggaaaaaatgaacaaagaattag

SEQ ID NO: 33765 - DNA, 438 bp, Homo sapiens
  misc_feature (1)...(438): n = a,t,c or g
ttganaccgntnnnnnnnnnnnnnnnnnnnnnnnnnnnnnnnnnnnnnnnnnnnnnnnnnnnnnnnnnnnnnnnggcacgaggacgcccatctgctggtgcaaacaattaaaacagtggatatagttttgttcctttccttgctttccctttcttaaaatgttacccaaagtaatgaacacatgacggaaatcatactcctgaataattgcttaagtataagtaggttaggcatcaatacaaagctatcgaaaattccaagccatatttattactgactttggagatggttctttcagtgaatcatatgacaccattaaatataaaaatatattgagtcgcatcccctcaaatacattataactttaatgctctttattgaatcaattctacttttattggaaaaaaatgatttgtgcttttgagagaaacagtaata

SEQ ID NO: 33766 - DNA, 430 bp, Homo sapiens
  misc_feature (1)...(430): n = a,t,c or g
gaanancngctnnnnnnnnnnnnnnnnnnnnnnnnnnnnnnnnnnnnnnnnnnnnnnnnnnnnnnnnnnnnnnnggcacgaggagaggcaagaagattccccaataaattctgtcagtgccttctttcataatttggatattgattttaaatatatcccatataagtttatgaataggtataatggtgccatgatggatgtgtgggatgcacattacaaaatgttttggtttgatcatcatggcaatagtcccatggccagtatacaggaagcagagcaagctgctgaatttaaaaaacgatggactcaatttgttaatgttacttttcagatggaatccacaatcacaagaattgcatatgtcttttatgggccatatatcaatgtctccagctgcagatttattgatagttccaatcctggacttcag

SEQ ID NO: 33767 - DNA, 446 bp, Homo sapiens
  misc_feature (1)...(446): n = a,t,c or g
tttnnnnnnnnnnnnnnnnnnnnnnnnnnnnnnnnnnnnnnnnnnnnnnnnnnnnnnnnnnnnnnnnnnnnnnnnnnnggcacgaggccattataacaagaaaatgcccattaatgtaattaactaatgtaattaattgatttattgactaacacgtataaacacttgggtgttggtcctgattattaggtgtatacccaacaatgcagtataaatataataggttcatagactcttcagcagataatgattttatataaaatgagtaaaagagactattggagaataaattaaaacccttgagtatttttcaaaattatgctttccagcttnnnnnnnnnnnnnnnnnnnnnnnnnnnnnnnnnnnnnnnnnnnnnnnnnnnnnnnnnnnnnnnnnnnnnnnnnnnnnnnnnnnnnnnnnnnnnnnnnnnnnnnnnnnnnnnnnn

SEQ ID NO: 33768 - DNA, 451 bp, Homo sapiens
  misc_feature (1)...(451): n = a,t,c or g
ggacctgctgannnnnnnnnnnnnnnnnnnnnnnnnnnnnnnnnnnnnnnnnnnnnnnnnnnnnnggcacgagcccattccttcacagggaccctagccagttaaagctgatacattcctgtgggtcaactatgcaactaactcagattttgagcaaacaaagctctcaagttggggatcctcaggagtctctgcattagttggacagctcttctggaattatcttctaagtcaactgtgggttgggtaggtggctctgctgatttttcgctggacttccacatttgggaccagttggctgtcatcagctctagaaagggtgtggctgttttacattggcngtcttcctcacattcctcaagcaggtaagcttaatcatgttctcatattgaagcataaactgtttactcattnanctatttacttactgggnctcctggcactangtacc

SEQ ID NO: 33769 - DNA, 455 bp, Homo sapiens
  misc_feature (1)...(455): n = a,t,c or g
gntcctctgattnnnnnnnnnnnnnnnnnnnnnnnnnnnnnnnnnnnnnnnnnnnnnnnnnnnnggcacgaggagaaggagactgtgcatagaccagtgatgacactaaggtatgtgattaattcaaccctctgcccctgaggtccccattcatatcctccctcatccccccagaagtagaaagatagtttttgttgagagggaaggaagactcctggcttcccctagtctagatattgcagattccaacctgttactcacaagttaggggaagagagagaaatttggaaccaggaggctctgagatctccaccctgacatgcctttcccacctgaagagccttctgggataaaccctgggttcagcctggcaccccagccctcacctgccccgtgggtccatgagcacttcccaccattgaggcatgtgttctggctgcagtagtcactgtgga

SEQ ID NO: 33770 - DNA, 460 bp, Homo sapiens
  misc_feature (1)...(460): n = a,t,c or g
gannnntgntgnnnnnnnnnnnnnnnnnnnnnnnnnnnnnnnnnnnnnnnnnnnnnnnnnnnnnnnggcacgagcggcacgagagcattttatgtaactatagttccagcaaataccactatgccttcattaatgccttaaaaccatcttatttacatctgtagaaccactggccatttaatagggcaattcaggagcaatcattaaaaacagttgcagttttcattaggttttctctgtttattctaatatgtaaactgaaattaaaagtaaatccttcagagttcattctttaaaaaaagtaagtcctaaggaaaactgttatattagctatttaaaaggatgctgtaataatgtagaatcagtcactgttgaattttattgagtttccatggaacagccttgaaattataaattgctagatatttactctgtaagattacagaaattatttatcacg

SEQ ID NO: 33771 - DNA, 464 bp, Homo sapiens
  misc_feature (1)...(464): n = a,t,c or g
ttgannncccttggnnnnnnnnnnnnnnnnnnnnnnnnnnnnnnnnnnnnnnnnnnnnnnnnnnnnnnnnnnnnnnnnnnnnnnnnnggcacgagatattttacttcaataattgaaacaattcttagaagtttgaagttataggttccaaagaaaggtcataaaaactagattacatttcttattgtttnnnnnnnnnnnnnnnnnnnnnnnnnnnnnnnnnnnnnnnnnnnnnnnnnnnnnnnnnnnnnnnnnnnnnnnnnnnnnnnnnnnnnnnnnnnnnnnnnnnnnnnnnnnnnnnnnnnnnnnnnnnnnnnnnnnnnnnnnnnnnnnnnnnnnnnnnnnnnnnnnnnnnnnnnnnnnnnnnnnnnnnnnnnnntgaaannnnnnnnnnnnnnnnnnnnnnnnnnnnnnnnnnnnnnnnnnnnnnnnnnnnnnnnnnnnnnnnnnnnnnnnnnnngtgg

SEQ ID NO: 33772 - DNA, 473 bp, Homo sapiens
  misc_feature (1)...(473): n = a,t,c or g
ggtgnnnnnnnntttgnnaccgntnnnnnnnnnnnnnnnnnnnnnnnnnnnnnnnnnnnnnnnnnnnnnnnnnnnnnnnnnnnnnnnggcacgagaagacgtgttgccaggtgaaagagctgggtgcaaaatctnnnnnnnnnnnnnnnnnnnnnnnnnnnnnnnnnnnnnnnnnnnnnnnnnnnnnnnnnnnnnnnnnnnnnnnnnnnnnnnnnnnnnnnaggagagagggcaatagggactggagtggctgcttagtgggtacagggttttctgttnnnnnnnnnnnnnnnnnnnnnnnnnnnnnnnnnnnnnnnnnnnnnnnnnnnnnnnnnnnnnnnnnnnnnnnnnnnnnnnnnnnnnnnnnnnnnnnnnnnatggtgaaagtgatacattaattttaccttaattttttttaaaaaaaacagtgttatgaacagacacgatagctcatgcctgtaatccagacactt

SEQ ID NO: 33773 - DNA, 478 bp, Homo sapiens
  misc_feature (1)...(478): n = a,t,c or g
ggtgntnnnnnntttgaanncntttgananccnnnnnnnnnnnnnnnnnnnnnnnnnnnnnnnnnnnnnnnnnnnnnnnnnnnnnnnnnnnnnnnnnnnggcacgagctttgggtgcgggcaatgttctagcagcagggggatggggataggcatggttcttctgtagcctggtttcagaagagggatccaggcagaaccccacagtatctactcattctaccttcctgcccagctgccacaaggtgtgattgctttctgagtccccagcctctgtctaggggttttctgtccacaagctgccactgtcgtaggggtgggtctgagtttgtgatgagctgtgggcaaacagtggaatgcccacccggccccctgtgctgctcctgacatccagtccaggagccctgtgttggagtggagcctccagcctgtgcctgggcatcagatcccacagctgctgccctggggtgtggcatctg

SEQ ID NO: 33774 - DNA, 463 bp, Homo sapiens
  misc_feature (1)...(463): n = a,t,c or g
ttgnnnaccgttntgacannattangacntgattacgactnctatcgggnnnnnnnnnnnnnnnnnnnnnnnnnnnnnnnnnnnnnggcacgagagctgccccgtctgagtgcacagaggggacggaggaccatctcttatagccagtaaccggagagctggaacttgggtctcctgactcctagtctaatgctcttcttactataatgaaaggggaggggggctcagtgcagatgttcgagatctgatagatcagctgggtcatgggttccggagatccttccttgaaaaggtaaaaagatgcttagagattatggggagagggttagatttgcatctcactaagctgnnnnnngngggctgngncctggggaatacttgggaacggccatggncngggggcaggaggctttcggagtgnccctcccccgccactccctggaggaccccgggagacacaggc

SEQ ID NO: 33775 - DNA, 464 bp, Homo sapiens
  misc_feature (1)...(464): n = a,t,c or g
ttgnaaaccctttgaaanccgtttgacnnnnnnnnnnnnnnnnnnnnnnnnnnnnnnnnnnnnnnnnnnnnnnnnnnnnnnnnnnggcacgagacacctacaaggccagcagatccctaattctctctccaatcaagtgcgctctccccagcctgtcccttctccacggccacagtcccagcccccccactccagtccttccccaaggatgcagcctcagccttctccacaccacgtttccccacagacaagttccccacatcctggactggtagctgcccaggccaaccccatggaacaagggcattttgccagcccggaccagaattcaatgctttctcagcttgctagcaatccaggcatggcaaacctccatggtgcaagcgccacggacctgggactcagcaccgataactcagacttgaattcaaacctctcacagagtacactagacatacactaga

SEQ ID NO: 33776 - DNA, 451 bp, Homo sapiens
  misc_feature (1)...(451): n = a,t,c or g
ngttnnnnnnnnnnnnnnnnnnnnnnnnnnnnnnnnnnnnnnnnnnnnnnnnnnnnnnnnnnnnnnnggcacgagaggatatatattaaatgggaaaaaaagcaaagtacagaacaatgtgtgtttagtatgttcctttggtgtgagaagtagggaatggnnnnnnnnnnnnnnnnnnnnnnnnnnnnnnnnnnnnnnnnnnnnnnnnnnnnnnnnnnnnnnnnnnnnnnnnnnnnnnnnnnnnnnnnnnnnnnnnnnnnnnnnnnnnnnnnnnnnnnnnnnnnnnnnnnnnnnnnnnnnnnnnnnnnnnnnnnnnnnnnnnnnnnnnnnnnnnnnnnnnnnnnnnnnnnnnnnnnnnnnnnnnnnnnnnnnnnnnnnnnnnnnnnnnnnnnnnnnnnnnnnnnnnnnnnnnnnnnnnnnnnnnnnnnnnnnnnnnnnnncagggaaaaaa

SEQ ID NO: 33777 - DNA, 458 bp, Homo sapiens
  misc_feature (1)...(458): n = a,t,c or g
ancctttgannnnnnnnnnnnnnnnnnnnnnnnnnnnnnnnnnnnnnnnnnnnnnnnnnnnnnnnnnnnnnnnnnnnnnnnggcacgagcagcgtggatctttttaagaggattaattgaagcacagagaagtagctcaagccctgttgaaatgacaaatcctgggctagagctcctgcttcccaactctccttccagcagagcaatataactctaaggaaagcaacgcctttggtcgtggatttcttggatgcagatcagttaacctctgtatctgtttcctccttggtaaaatggggacagtaataacacctttttttaagggttgttaggaagattaattgaagtataaatatgaatgctcagcagagtgcccacacatagtagtctctttcactagtattaagcatggaatataaagtcagaaatattgagatcacactagtgctcagcgtggg

SEQ ID NO: 33778 - DNA, 454 bp, Homo sapiens
  misc_feature (1)...(454): n = a,t,c or g
ganaccgttnnnnnnnnnnnnnnnnnnnnnnnnnnnnnnnnnnnnnnnnnnnnnnnnnnnnnnnnnnnnnnggcacgagcttctggcctgtgttctttcagaatataggttgcagcttgtgttaagtgcaggaactattgatagactgagtttagaagaagggaaaattggtataaagtggttgtgtattttaaacattggggagcttcatagatgagttaaattgttaggatatggattaagaaatgttgggttaagccaccacgcctggcctagaatattgttgtttacttggaggaggaagagactgacagaaaaggcaaaattttaatggcctctctagtaagcttcaccacaagattcctttggggtagggtcatgtctctggtaccgtgcatgtccaataccttgtgcagtgcatggcttgtgtctgtcactgaataacctatattgg

SEQ ID NO: 33779 - DNA, 454 bp, Homo sapiens
  misc_feature (1)...(454): n = a,t,c or g
aaaccgttnnnnnnnnnnnnnnnnnnnnnnnnnnnnnnnnnnnnnnnnnnnnnnnnnnnnnnnnnnnnnnnggcacgagaaaaaaagatctaattgaatatttaaatagcattaaaatgttagcagtagaatgctgtattaaatatcctaagtcgaaaatgtttttaatacacctaatctaccaaacataccttagcctagcctaccttaaaaaggctgagcatacttaaatcagcctatggttgagtaaaatagtgcaaaacaaagcctattttacaataaagtgttacnnnnnnnnnnnnnnnnnnnnnnnnnnnnnnnnnnnnnnnnnnnnnnnnnnnnnnnnnnnnnnnnnnnnnnnnnnnnnnnnnnnnnnnnnnnnnnnnnnnnnnnnnnnnnnnnnnnnnnnnnnnnnnnnnnnnnnnnnnntcagtgtggtggtgagtgcctataa

SEQ ID NO: 33780 - DNA, 470 bp, Homo sapiens
  misc_feature (1)...(470): n = a,t,c or g
ggtgnnnnnnnnnttgnnaaccnnnnnnnnnnnnnnnnnnnnnnnnnnnnnnnnnnnnnnnnnnnnnnnnnnnnnnnnnnnnnnnnnnggcacgagcggcacgaggagagctagtgagctcaatccctgaaaaaaataatctgaaatacactcaatgcttgagacaagaaaatattcatgcaacactattatcatgacaaaaatgtaaaaacatattaaatgcatattaagaatttctgtacataattgaatgtaatgaggacattttttaaaatgcccaaggcagggcacagggtcccctactggcaatcccagcactttgggaggccaagannnnnnnnnnnnnnnnnnnnnnnnnnnnnnnnnnnnnnnnnnnnnnnnnnnnnnnnnnnnnnnnnnnnnnnnnnnnnnnnnnnnnnnnnnnnnnnnnnnnnnnnnnnnnnnnagtcccacctactagggaggttgag

SEQ ID NO: 33781 - DNA, 475 bp, Homo sapiens
  misc_feature (1)...(475): n = a,t,c or g
ggngnnnnnnnnntttgganaccnttggananccgntatgacatgattacgaatttaatacnnnnnnnnnnnnnnnnnnnnnnnnnnnnnnnnnnnnnnnnnggcacgaggtgagaaaacatttctagcttgcatagaattctgtttttctgaaagaatagaaaaatatagaaatttcctatgtttttcctaaatatcttctcttcctttttctcttcatttgctaagatacctaaattattattatttttaaaaagacataattatcttaattacgtgacagaaattgactatgctttaggtactaaaagtgatgctgttttaaattctacaagcccagnnnnnnnnnnnnnnnnnnnnnnnnnnnnnnnnnnnnnnnnnnnntgacaggaagaggaataaaatactaaatgaaatactacattgtgggtgaaatttgaaaaccttatgctaagtgaaagaagctagttataaa

SEQ ID NO: 33782 - DNA, 466 bp, Homo sapiens
  misc_feature (1)...(466): n = a,t,c or g
gngnnnnnnnnnttggnacncttgacnnnnnnnnnnnnnnnnnnnnnnnnnnnnnnnnnnnnnnnnnnnnnnnnnnnnnnnnnnggcacgaggtgctgatcaaggcagaatgaagaaagtggtatgtttaggcaaaaggggtctaagttcccaggtctagtctctggaaatgccacaaaagcatgagatagtaaccaaaatgaatgtggattgcccaagaggctttgtgatgagcatgaagaaggcacagagcagcctatatcaaccagagacaggatctccaaggacaggagaacctgactagtgaattccttaggttatgagttaaggggcaaagaatagatgggatgagttacttcagcagaggatgctagcagaaaaacaaccatgggccagatgcccatccttccccctaccccaccatgttacaggggaggaaaacataattttctcttataaggggcct

SEQ ID NO: 33783 - DNA, 228 bp, Homo sapiens
  misc_feature (1)...(228): n = a,t,c or g
ttggnaaccntttgnnnnnnnnnnnnnnnnnnnnnnnnnnnnnnnnnnnnnnnnnnnnnnnnnnnnnnnnnnnnnnnnnnnnnnnnnggcacgagcaggtgctcacaggtagacagcagaggagaggaaccaagctatactcaatcttaaagcagcaggatggtcagaattaagtgagagagagatgccatctacaaatcattcttcttccaaatttttttttttttt

SEQ ID NO: 33784 - DNA, 460 bp, Homo sapiens
  misc_feature (1)...(460): n = a,t,c or g
tttgnnnncnttggannnnnnnnnnnnnnnnnnnnnnnnnnnnnnnnnnnnnnnnnnnnnnnnnnnnnnnnnnnnnnnnnnnnnnnnggcacgagccccagaactatgcatctacctacatactctttccgtgcttttaggatttaattttattttgagatccataatccatttatgcatgatactggtacaggtaggaatctagcttttgtgcttctctagatgtttgcctggttgacctagtcccactgttcattgtaaaacaaggtatctgtgtctcctcatgtcttacttctggtcatcgtcctctgtgccacttacctacaatctattcctttgttgttaccaaactgctctgtttgctatagccctgtaacccacttgtatttgctggcacaagacccagcagcacgcaactttttaaaacaagccttttcactcataggagattgtgtttgct

SEQ ID NO: 33785 - DNA, 454 bp, Homo sapiens
  misc_feature (1)...(454): n = a,t,c or g
tttgaananccgtnnnnnnnnnnnnnnnnnnnnnnnnnnnnnnnnnnnnnnnnnnnnnnnnnnnnnnnnnnnnnnnnnggcacgagacaggctctagccaacatgcagttacaacagcatacagcatttctcccaccaggctcaatattgtgcatgacacccgctacaagtgttgttcccatggtgcacggtgctacgccagccactgtgtccgcagcaacaacatctgccacaagtgttcccttcgctgcaacagccacagccaaccagatacccataatatctgccgaacatctgactagccacaagtatgttacccagatgtagaattttcatcactaaacaatcatgctaaagaggaaaggacagtgtgcttggttagagtaaaggacgaggtcattagccatattgtatatatcgtcaagcaacacacacaaaagttcctcagccacag

SEQ ID NO: 33786 - DNA, 447 bp, Homo sapiens
  misc_feature (1)...(447): n = a,t,c or g
tttgacatgattacgaatttaatacnnnnnnnnnnnnnnnnnnnnnnnnnnnnnnnnnnnnnnnnnggcacgagcttgtgctgtgctcaggaagaggaaggggcaagttacctacaccctcgccttttggtatggaaggagataggtttcagagatgcaaaaaaatctaattggcttcaggtgatggcctttgaatgccttatattaaccagtaatgaccttaggcatatttaatctctccgagtcttgtttttttggctataaaatggaatgatactatctccttcacagagttattgtgtggatgaaatgaaacaatacaggttaagtatctacatagagtggaagcttagtaaatgctagtttcctaccccctttcttttctttgttctgagtcttgctattaggtagataagcctgatgattgagcaagcttatgtattttat

SEQ ID NO: 33787 - DNA, 432 bp, Homo sapiens
  misc_feature (1)...(432): n = a,t,c or g
nnnnnnnnnnnnnnnnnnnnnnnnnnnnnnnnnnnnnnnnnnnnnnnnnnggcacgagcgacgacattgatcctcactcccttatcattcccggatgaggaaaaggattcccagctgcatgcctactccatccctatgcggcgtgtcagtttcagcacttttgacgtttggggccagataactctttcttgtggggggccgctctgtgcatggcagcaganttancancgttttggcctntagctcctanatgccagtagcnnccccccactntcctaaaangtctggatgcaatgcccantgtgccctggagagaagaattgctcatagctganaatcagtggttcagaggataaccccaaagccctagaggttaatggggaantagaaaatanaaccactctaatagcaaacagtaacagagtacttacg

SEQ ID NO: 33788 - DNA, 453 bp, Homo sapiens
  misc_feature (1)...(453): n = a,t,c or g
ataccntnnnnnnnnnnnnnnnnnnnnnnnnnnnnnnnnnnnnnnnnnnnnnnnnnnnnnnnnnnnnnnnnnggcacgagggaagaattaattcagtagcaggccgttaagcatgttcactcgtgctgagatatttcttagtgagctctcaccacatgccctgatggtgagcagcctcacctcttaaacaggattcctgcatggttgagaacccgtccacctttctcggcttgttatgatcagagcttacacttttgggaggtagaactgcatctgacatggaggaacatggtccttagagtcagacagacctggattcaaatcccacttctgcttacaagccagatagccttggactgatgattgaacctgcatgcctccgtttccccttatgaacatggggatgattttgtctacctggcagggttctgcatggccttagcgagatcacgt

SEQ ID NO: 33789 - DNA, 468 bp, Homo sapiens
  misc_feature (1)...(468): n = a,t,c or g
ggtgnnnnnnnnntttgaaaccgtttgacnnnnnnnnnnnnnnnnnnnnnnnnnnnnnnnnnnnnnnnnnnnnnnnnnnnnnnnnnnggcacgagactatattcatttggactcttgctccttgagctcttctgtacttaaatgggactagcagttctcatctctgagcttcggttttgtcattgagttatgttgaggattaaatactatactgtatgtgatgccagaacttagtatgttgcctggcacactaagttgactcagtaaaggttaggaactgggccagtacaataaatatcagggttttgacattcatctttagattttcaacatgaattaagacatatctgactggaagccagaagatgtgctgaatgagcatgtacagaagatgtacaccaagttgaattacactttagattgaattggaggagtttttttggcttgcttgcttgcttgtttactcca

SEQ ID NO: 33790 - DNA, 466 bp, Homo sapiens
  misc_feature (1)...(466): n = a,t,c or g
agtntgnnactngtatgacnnnnnnnnnnnnnnnnnnnnnnnnnnnnnnnnnnnnnnnnnnnnnnnnnnnnnnnnnnggcacgagcactgacaccaattttctttttatagtgatggttcaattttgaaaagatggcttttgtgaggccaggttaaggtgaccaggatcttgtatgatgaattccttccatccctgagactctggtactatattgtaaacctggctacagtagttaattacttgagattctttaattttggtctctgnnnnnnnnnnnnnnnnnnnnnnnnnnnnnnnnnnnnnnnnnnnnnnnnnnnnnnnnnnnnnnnnnnnnnnnnnnnnnnnnnnnnnnnnnnnnnnnnnnnnnnnnnnnnnnnnnnnnnnnnnnnnnnnnnnnnnnnnnnnnnnnnnnnnnnnnnnnnnnnnnnnnnnnnnnnnnnnnnnnnnnnnnnnnnnnnnnnngtg

SEQ ID NO: 33791 - DNA, 462 bp, Homo sapiens
  misc_feature (1)...(462): n = a,t,c or g
gttgnnactttnataccngnnnnnnnnnnnnnnnnnnnnnnnnnnnnnnnnnnnnnnnnnnnnnnnnnnnnnnnnnnnnnnnnnnggcacgagatctttatttgtgtttttctgtatcaatgggtacgtatttcaaagacaggacagggcagtggctataattctggttgtggaatggctttgccaagtcaggtactagaaagtgaaactgcaaagcatagaaactgatttagtttgtaacgtttaactcattatgatttagtgacacctccaatttgtatttatatttgtgattagcatcctataccatgaaatttatatatatatatatgtgatatcatatatgtgactatatatgtaggacatttttagagtggcatcagatgtgattcaaatagagcaatctttattattctgnttgattgtgattgctaacatatattttggaagtagcctanaggc

SEQ ID NO: 33792 - DNA, 467 bp, Homo sapiens
  misc_feature (1)...(467): n = a,t,c or g
gagttgaanaccntnnnnnnnnnnnnnnnnnnnnnnnnnnnnnnnnnnnnnnnnnnnnnnnnnnnnnnnnnnnnnnnnnggcacgaggagagctagcaccatgagcttcaatctgattactatcatcatggataaattttgcctagtctagattatataaatagaatcatacaatatagactcctctgtctgcctttttaacttttttttttccctntgaaacagnnnnnnnnnnnnnnnnnnnnnnnnnnnnnnnnnnnnnnnnnnnnnnnnnnnnnnnnnnnnnnnnnnnnnnnnnnnnnnnnnnnnnnnnnnnnnnnnnnnnnnnnnnnnnnnnnnnnnnnnnnnnnnnnnctcggntaattttngaatnnnnnnnnnnnnnnnnnnnnnnnnnnnnnnnnnnnnnnnnnnnnnnnnnnnnnnnnnnnnnnnnnnnnnnnnnnnnnnnnnnnnnnnnggnttgg

SEQ ID NO: 33793 - DNA, 467 bp, Homo sapiens
  misc_feature (1)...(467): n = a,t,c or g
gagntgnnnnnnnnnnnnnnnnnnnnnnnnnnnnnnnnnnnnnnnnnnnnnnnnnnnnnnnnnnnnnnnnnnnnnnnnnggcacgagctggtcacttatatgctttaacatttttcttcaatagtcaaatctgtttgtttccaagaatctataagacttgtaaaaagagtttttggttgcctttcctgaatttagtaagcctgtgtgctatagagggttacaaaacaaaaaaagtacccagtaatgtgtaaaagggaatttttatccatcaccaaacaggatttattctaagaatgcaaggttggttaaacatatgaacctcaattaatggaatataccatatcagcagaatagaggacaaaaaccacaaaaccatgtttatagatgcagaaaaatggtttcacaacatctaacacccattcataatagaaaacattcggccaggtgtggtggctcacatctgtaat

SEQ ID NO: 33794 - DNA, 467 bp, Homo sapiens
  misc_feature (1)...(467): n = a,t,c or g
gagatgganacctttgatnacnnnnnnnnnnnnnnnnnnnnnnnnnnnnnnnnnnnnnnnnnnnnnnnnnnnnnnnnnnnnnnnnnnnnnnggcacgagtggtgttcaaatccttatgatttttttgttctattggttactaagagaggattattaaaatctacaattacaattttaggtttgtctggtttttcatttagtcagaacaaaatgtaagtacttgtttcatgtgttttgaaactgttttattaggttaatatgtattttggattgtaatgcctctggtaaatttagccttttatcattatgaaatatttgtttttgttaatattctttgtctttatctcctttttctcatatttaatgtacactccttatgattagcattcacatttttttttcactctttnngntntgnnngttntgatacaggatgtcactctcacctaagctgcngccagtggcgc

SEQ ID NO: 33795 - DNA, 460 bp, Homo sapiens
  misc_feature (1)...(460): n = a,t,c or g
ggnttgnnnnnnnnnnnnnnnnnnnnnnnnnnnnnnnnnnnnnnnnnnnnnnnnnnnnnnnnnnnnnnnnnnnnnnnnnggcacgagctgacctcttttagtcagggaagtagtttgggcagtagaaagcagaacttgcacctgctggtaagatctgagtggtcactgacaaccagctctgcaaccctgttaccagggcaacaaagatgggcccaggggtagtggtgggctctgccacatctctctgtgcataagaacctttggccacttgctctggccttgtctttcaccaatcccagtgttcatatccagtgtaccaaccactgagggcagctgtcctggaatctgtctctcatctctgcccataattaactgcttctgggcacagtgcatgagttacatagatgagtgtgggtaagtttgccctttctgtggggggagcatccttttggtccactct

SEQ ID NO: 33796 - DNA, 458 bp, Homo sapiens
  misc_feature (1)...(458): n = a,t,c or g
gtgnttgnnncttganacngtttgacnnnnnnnnnnnnnnnnnnnnnnnnnnnnnnnnnnnnnnnnnnnnnnnnnnnnnnnnnnggcacgagagacacagagagacaaaggcaaggaggactgtctgggagccacgcgggcgatacagtttccgaggcacgccgcgtcccgcctagcctgttgaacaggtagacatgagcgacccaagctgcggatttgcgaggcgcgccctggagctgctagagatccggaagcacagccccgaggtgtgcgaagccaccaaacatcccagttaccagtgtccttgaattgatagtggcttctgtttgtcagtctcatataagaactacagctcatcaggaggagatcgcagcagggtaagagacaccaacaccatgttctgcacgaagctcaaggatctcaagatcacaggagagtgtcctttctccttactggca

SEQ ID NO: 33797 - DNA, 458 bp, Homo sapiens
  misc_feature (1)...(458): n = a,t,c or g
gagttttganaccttnnnnnnnnnnnnnnnnnnnnnnnnnnnnnnnnnnnnnnnnnnnnnnnnnnnnnnnnnnnnnnnnnggcacgaggaaccagacgccaactttgtactgcatttgggatcatatctttccccttctctgtcccccattctctgaatgctgctttctctggcttgtttcctacagtgggggcctgtggggttgagtcttgaggaatcccctcaaatgagaaggccttgggagaaggcctcatctctggctgtttcatgagcaactcattcctagagttcattgtttgcatgggtttctcacaagcgtccttcctcataggaaggctcatcaactgaatttagtgacatgtacacagtagatgctcaagcagtgtctgcaaggacacaagctgagctttctccttatggggcaaacctatgtctaaccagatacagaccanttagtt

SEQ ID NO: 33798 - DNA, 451 bp, Homo sapiens
  misc_feature (1)...(451): n = a,t,c or g
gagttttnanacngtnnnnnnnnnnnnnnnnnnnnnnnnnnnnnnnnnnnnnnnnnnnnnnnnnnnnnnnnnnnnnnnnnggcacgannnnnnnnnnnnnnnnnnnnnnnnnnnnnnnnnnnnnnnnnnnnnnnnnnnnnnnnnnnnnnnnnnnnnnnnnnnnnnnnnnnnnnnnnnnnnnnnnnnnnnnnnnnnnnnnnnnnnnnnnnnnnnnnnnnnnnnnnnnnnnnnnnnnnnnnnnnnnnnnnnnnnnnnnnnnnnnnnnnnnnnnnnnnnnnnnnnnnnnnnnnnnnnnnnnnnnnnnnnnnnnnnnnnnnnnnnaacaaacaaataaaaaagtgttaaagaggaggaaggcatttcaggaaaaggaactactgagggcaaagagaaggaggcatgacttctgggttgtttagggaatagtaagagatcacaaaaaaaaaaaaaa

SEQ ID NO: 33799 - DNA, 459 bp, Homo sapiens
  misc_feature (1)...(459): n = a,t,c or g
gtgatttnanaccngnnnnnnnnnnnnnnnnnnnnnnnnnnnnnnnnnnnnnnnnnnnnnnnnnnnnnnnnnnnnnnnnnggcacgagaggaaaaatagcttttgacaggggaaaaaactcaataactagctatttttgacctcctgatcaggaactttagttgaagcgtaaatctaaagaaacattttctctgaaatatattattaagggcaatggagataaattaatagtagatgtggttcccagaaaatataatcaaaattcaaagattttttttgtttctgtaactggaactaaatcaaatgattactagtgttaatagtagataacttgtttttattgttggtgcatattagtataactgtggggtaggtcggggagagggtaagggaatagatcactcagatgtattttagataagctatttagcctttgatggaatcataaatacagtgaag

SEQ ID NO: 33800 - DNA, 462 bp, Homo sapiens
  misc_feature (1)...(462): n = a,t,c or g
gagntttganacttgaannnnnnnnnnnnnnnnnnnnnnnnnnnnnnnnnnnnnnnnnnnnnnnnnnnnnnnnnnnnnnnnnnnnnnnggcacgagctcttctagccagaatgaataaacatctgtttaaacagaagtctaggaaccatgaagaactggaggaggttacccaagagctaagaaacaattgggtggagtttggaaaggcagggatttgatagagtgcacaaaagctccagaggaatggaaatcaaatgcaagaagattttggttcaagataagaaaaaatgtaccaaaaggaagacttatacattcataaaatacctgtcagttccctattagcagaagtttttacatttagaattgattggaaattttagaataccaaacatttttaacagcacataagttacacagggaaaatctgaattcaaatgcctcaaagcaggtgcaattttattt

SEQ ID NO: 33801 - DNA, 460 bp, Homo sapiens
  misc_feature (1)...(460): n = a,t,c or g
gtgtnttgganacccgtnnnnnnnnnnnnnnnnnnnnnnnnnnnnnnnnnnnnnnnnnnnnnnnnnnnnnnnnnnnnnnnnnggcacgagctggaagagttctcgggtgtttttggaaagtactctgttcacccaacgttatgaagaataagtcaagataatattactaatttgtgtggtatatttcccccatatcatgagctcagtctcatcttcacactatgcatattcattggaaagtactctgttcacccaacattgtgaagaataagtctagataatattactaattcgtgtggtacatttcccccatatcacgggctcagtctcatcttcacactacgcatgttcagctggtagcaaggggacgctgactctgaccccttttcatagctcattttcttacctggaatgttctcccttctttttcccatttcctccttcaagagccaactcaaga

SEQ ID NO: 33802 - DNA, 462 bp, Homo sapiens
  misc_feature (1)...(462): n = a,t,c or g
gtgntttnnnnncttnnnnnnnnnnnnnnnnnnnnnnnnnnnnnnnnnnnnnnnnnnnnnnnnnnnnnnnnnnnnnnnnnnnnnnnnnnggcacgagnnnnnnnnnnnnnnnnnnnnnnnnnnnnnnnnnnnnnnnnnnnnnnnnnnnnnnngagattatgattggcgccaattcaaattctagctccaccattaactagttgcatgtttatggataaatggctcagtctaactgagcctcagtttcctactccataaaatgtaggatttggatgatattaaggataataaatatatggcacacacattctctcccacacaccaggcagcagggccagatgttgatgtgtgggcactccagactaattggccctcatccaaccaatattacttacaaagttgttcaatatttatttatctagggaggagagagaagttgaaagaaaaaaaatttgtattggc

SEQ ID NO: 33803 - DNA, 460 bp, Homo sapiens
  misc_feature (1)...(460): n = a,t,c or g
gnntttnnnnnnnnnnnnnnnnnnnnnnnnnnnnnnnnnnnnnnnnnnnnnnnnnnnnnnnnnnnnnnnnnnnnnnnnnnggcacgaggtttctggagctgggactgtgtcatccctgtcagcatcccctctccatgtgatgcctttcagaaacaagtttggaaagatgacaatggcgtcagccacaatacacattctgtttgctgagcctctgtcttgccctgtgagcgcccaccctctcctccccacctgcaggcccaccgccatgcagctcccaggatgaggtcatgcttactcacagggtcccttcctccaactctaggcagtccagtgcccctacatgaagtggtgtccatgctgtgcgtgaacatgctccgcagtcttgagaccattacacggctggacaaaggaatgcctggccaagccaccaatgggaaatactttgcaatgcaaatgagtc

SEQ ID NO: 33804 - DNA, 406 bp, Homo sapiens
  misc_feature (1)...(406): n = a,t,c or g
gtgntttnnnanctttgannannnnnnnnnnnnnnnnnnnnnnnnnnnnnnnnnnnnnnnnnnnnnnnnnnnnnnnnnnnnnnnnnnnnnnggcacgaggatggttgcatatatctgtggatatactaaaaactacagaatttgtgttaattgtatgatctgtgaattagatctcagttaagctctttaaaagaaatgttaggattcaagaccttggcctctcccctgtactgtcctgcctcttaatagagcctggaccagctcccttgttgaaggcctgaaggccaccctggaagttgctgcttttgacagtagctccaggaggctgcccttttaatcacagcaaccagtattttttgagcccccactctgtctttggcactgctccatgctttttttttttttt

SEQ ID NO: 33805 - DNA, 476 bp, Homo sapiens
  misc_feature (1)...(476): n = a,t,c or g
ttgnacncccttngnannnccntnnnnnnnnnnnnnnnnnnnnnnnnnnnnnnnnnnnnnnnnnnnnnnnnnnnnnnnnnnnnnnnnnnnnnnnnnnggcacgagaataaacctggctctaaagggtattactctttatcctgttttcccttcaaatgaaaaggctagacttccctaaaggaagctgaaatccgcatcattcttcaaacgcccttcctggaaatgctctcttcctcatgaactctttcctgaactataaaggaatccaacctccaataacatccacagcactttctcagagccattcttgccgaagggatgcaaagatcttgccatgatcattttacagaattttctctcttccgtgagactcacagctctcaaaagaggnnnnnnnnatacacagctgcgtatcccctccccacccaangctgngcccaacaacgtctngccgagtcgatgacattaggcnatta

SEQ ID NO: 33806 - DNA, 330 bp, Homo sapiens
  misc_feature (1)...(330): n = a,t,c or g
gtnnnnnnnnnnnnnnnnnnnnnnnnnnnnnnnnnnnnnnnnnnnnnnnnnnnnnnnnnnnnnnnnnggcacgagtcgaaataaggatgataatggtacctatgattcctctagggattaaatgagataatttagcaatggtcttggcacacatgtaataactactcagtaaaaattagctgttaaatctagaatatgannnnnnnnnnnnnnnnnnnnnnnnnnnnnnnnnnnnnnnnnnnnnnnnnnnnnnnnnnnnnnnnnnnnnnnnnnnnnnnnnnnnnnnnnnnnnnnnnnnnnnnnnnnnnnnnnnnnnnnnnnnnnnnnnnn

SEQ ID NO: 33807 - DNA, 433 bp, Homo sapiens
  misc_feature (1)...(433): n = a,t,c or g
nnnnnnnnnnnnnnnnnnnnnnnnnnnnnnnnnnnnnnnnnnnnnnnnnnnnggcacgagttaaggnnnnnnnnnnnnnnnnnnnnnnnnnnnnnnnnnnnnnnnnnnnnnnnnnnnnnnnnnnnnnnnnnnnnnnnnnnnnnnnnnnnnnnnnnnnnnnnnnnnnnnnnnnnnnnnnnnnnnnnnnnnnnnnnnnnnnnnnnnnnnnnnnnnnnnnnnnnnnnnncatacataataaaataaagttaaattaaaaagagacatataaggaagtaaaactgannnnnnnnnnnnnnnnnnnnnnnnnnnnnnnnnnnnnnnnnnnnnnnnnnnnnnnnnnnnnnnnnnnnnnnnnnnnnnnnnnnnnnnnnnnnnnnnnnnnnnnnnnnnnnnnnnnnnnnnnnttttacaattagctgggcacggnggtgct

SEQ ID NO: 33808 - DNA, 431 bp, Homo sapiens
  misc_feature (1)...(431): n = a,t,c or g
nnnnnnnnnnnnnnnnnnnnnnnnnnnnnnnnnnnnnnnnnnnnnnnnnnnnggcacgagcatacacacaagaacacaaccacatggtatagtcacctatatggcatcttacgttttgatacccataagatctggtgaaaatgcccttcaagcaaaaccttgcctgggaggagatgttgcaaagggctagcatgcaccctacaatgtggatgcagccaaaggggagtggggtgcagcctgttcgctccccactcctgcttgctgtgatctctggaaggagcacttctggctggctccttccactgcctcccctctccccacccccacccccacatatccttctttttcccatctcacagtggcctttttctcccccataaaaaagggaatcaaagctgagctttcagtggtccagacacatgctcgagctg

SEQ ID NO: 33809 - DNA, 419 bp, Homo sapiens
  misc_feature (1)...(419): n = a,t,c or g
nnnnnnnnnnnnnnnnnnnnnnnnnnnnnnnnnnnnnnggcacgagcttcttaaaaatcagctttaaggagctggcagaaagcccccagccccacagccctgagagatggtgttgctagctcaggtggctgacacatggggtatgccgggcactgggcaggtcccagagccggggaaccagctcacctctggttgctgtagctcctgccggaggcatgtctacttgtgatcccggacagccgaacccaagagctggtggctctgagcagacagagacatcttggcctgtccctgcctgggggtcatggagaccatgtcttcttagagcaaatgtggaggcggccagggcagttgttgggtgaatgtggagagcacatggccatgtcttggccccggagtaccactgggcgtggggggtc

SEQ ID NO: 33810 - DNA, 428 bp, Homo sapiens
  misc_feature (1)...(428): n = a,t,c or g
nnnnnnnnnnnnnnnnnnnnnnnnnnnnnnnnnnnnnnggcacgagnnnnnnnnnnnnnnnnnnnnnnnnnnnnnnnnnnnnnnnnnnnnnnnnnnnnnnnnnnnnnnnnnnnnnnnnnnnnnnnnnnnnnnnnnnnnnnnnnnnnnnnnnnnnnnnnnnnnnnnnnnnnnnnnnnnnnnnnnnnnnnnnnnnnnnnnnnnnnnnnnnnnnnnnnnnnnnnnnnnnnnnnnnnnnnnnnnnnnnnnnnnnnnnnnnnnnnnnnnctagacttggataccaagtctagttaattgagaacctttggggaagacttgtgggcatcagtttttgttttgttttggtttgaattggtttttttgttcatattttggtactgggtataccagcatacagccaagattgagaatctggatgatttctagcctgg

SEQ ID NO: 33811 - DNA, 427 bp, Homo sapiens
  misc_feature (1)...(427): n = a,t,c or g
actcnnnnnnnnnnnnnnnnnnnnnnnnnnnnnnnnnnggcacgaggtgtgacacagaaggtgggggaagaggatagtgaagcaacagttcctttcctgtaattctgtttggtgcacagcgatgctgtacataaggtaaatatgcagttgagcagtagggagaaagtttaggtatctcaggggtctggtggagggtgactgattttgtcaatcctgccttttgttctacatctgataaacaggtttctgaccagttcctgtcagcaaaatatttgacaaactctggttatacaggcaagaggtcagctttagtttataggcctaggtcttattaccctcgtgctcatctgcagccatcaggggccactggtaaatttttcgttagaaattttcttttcctgaaaattatgtagatcntggattaaac

SEQ ID NO: 33812 - DNA, 434 bp, Homo sapiens
  misc_feature (1)...(434): n = a,t,c or g
nnnnnnnnnnnnnnnnnnnnnnnnnnnnnnnnnnnnnnnnnnnnnnnnnnnnnnnnnggcacgagccatttactgttgtgtgcatgtgggccatattttcctagtcagatggtgagttctgtgagggcaaaggctgagtcattctctatttacattttaagtaggcatccagagacttggttatattctgagtctgtattattgatcaaagccctcacctggagtttctggggccattcactgacccagaatctggtgacattgacacagggagggaataacatccagctacagatggttaacacaggtctttagtgccccaatccccattttgctgactcatctatgcctcaagaactccaatcttcatgcagattctggtgccctttgagtactcagttctgctcttctgcatacctctgtggaccctggaa

SEQ ID NO: 33813 - DNA, 431 bp, Homo sapiens
  misc_feature (1)...(431): n = a,t,c or g
agctcnnnnnnnnnnnnnnnnnnnnnnnnnnnnnnnnnnggcacgagagttacatcaaacaatcttacgggatttatatttatttcttttatgtttagaaaggaattttatgcaaaaagaaaaataaattaatcttattttccaagattggaggaaatggcattaataaagtacttgcttgttattactgccttagaaggtgttaagtaaccttgatgtcaaatgagttaggaaataggaagcttatatgcccctggcaacatggcagaattgtaacttcgttcactggaactttcattattcttgcagtggaggtgcttagaagcttttttttgcatgctactgatgatgttgaagacaagtaataacaacccctactctgctaagtgcactaatatatcctgctcctacncaataataatactaagtac

SEQ ID NO: 33814 - DNA, 427 bp, Homo sapiens
  misc_feature (1)...(427): n = a,t,c or g
actnnnnnnnnnnnnnnnnnnnnnnnnnnnnnnnnnnnggcacgagtaccctgctggagtcctggagcccctggctctagagagattttcctcctggtttgtttttgcaccctgatggatatgcagactgtcaggcaatgccttggtgactgtgaataaagcctttactggcctgggctctcaacaagcagtcccaggtagctctccctcaacctcaggaagaggagacacacttggcatccatttctgaagagctcttgcggttgaattccttaaacataaaagatggaggtggagagaagcccctttttagtgagtgaacacctacacactctagcaacaggcaactcagttacctgacagtatccctctcttcctttcccctgctagcaccctgggcccctttaccttctgaattttangctgc

SEQ ID NO: 33815 - DNA, 432 bp, Homo sapiens
  misc_feature (1)...(432): n = a,t,c or g
gnnnnnnnnnnnnnnnnnnnnnnnnnnnnnnnnnnnnnnnnnnnnnnnnnnnnnnnnnnggcacgagaataccctggctcctgcacctgctcacctgcatgcttcctcccagaaggggtggagtgcagggggttcaagtgagtgcagttcacctctactggcaccaaagcagccagctagttccagcatccgcactccacttcctgcctgcaaaggggtcagggaaatttcctgcttcatcaacacggaaaccaacaagactcttcaggagatttgtaaaactttatgattagcattacctgttatttttgcttcagtgcattctacagggtcacagagagaactatatgtaagtatagctgctccctttataatcctaggtatttaatagtatgcattttaaaacactctgaggctgggcatggnggctca

SEQ ID NO: 33816 - DNA, 433 bp, Homo sapiens
  misc_feature (1)...(433): n = a,t,c or g
cgngantacgaatttaatacgactcnnnnnnnnnnnnnnnnnnnnnnnnnnnnnnnnnnggcacgagaaataggtaattctacttgtttttctaatttttaaaatgctttacaaataattattaatgatactgtatgattaaggaaagggaatttgtatgaagctaatttgaaggtaattggcttttgcatttatttattcatgtatatatttaattcgcatctgttatgtgtcaagtatagtgcaggagtcagcagaaaaagtacttcctaaaatcatggctcttgaaatcagttatttgtctttgtttttcctcctcaaagattactccctgttcagtcttgttaatgtgatcagagatttatattaacttttaangatctcataatcccaataatgtaagatatagtagagatgagtagagaacngaact

SEQ ID NO: 33817 - DNA, 432 bp, Homo sapiens
  misc_feature (1)...(432): n = a,t,c or g
cnnnnnnnnnnnnnnnnnnnnnnnnnnnnnnnnnnnnnnnnnnnnnnnnnnnnnnnnnnnggcacgagtgaattgtgtgattcttttcatctggcaaatgtctttttttacagctgaggaaatgaacccccagcttgctaaagtcctcgtatgtgctgtcccctctgcccatgcttgtcccctgatgactggacttgggctttggctctgccaagannnnnnnnnnnnnnnnnnnnnnnnnnnnnnnnnnnnnnnnnnnnnnnnnnnnnnnnnnnnnnnnnnnnnnnnnnnnnnnnnnnnnnnnnnnnnnnnnnnnnnnnnnnnnnnnnnnnnnnnnnnnnnnnnnnnnnnnnnnnnnnnnnnnnnnnnnnnnnnnnnnnnnttggaattccactactcaggagctgaagtgnaagaatcacttgaccccaa

SEQ ID NO: 33818 - DNA, 406 bp, Homo sapiens
  misc_feature (1)...(406): n = a,t,c or g
ggccctcgaggccaagaattcggcacgagagcccctgccggcacccaagtccagcggcctcaaggggcagcacgtgcaaggctggagctgcggctgaccctgtgcgctctccgtggagcacacattcatgagaaagactggcagacatgccagggaatgcagatccgggtcctggcaggaacaaagtgagcctgtggcttcaaggagaacaacggacagtgttagcagtattaaaattggagctttcagttgaaaattggacttttgtgtgctcaccagcttctcagtgtgtcaggactttctcaggtgaccattgcaggatgtcacagaatcatgcctgggtaaaagacccattcnaagttcaagatagaccaatggatttcagaagaaccaagttggaaaagtg

SEQ ID NO: 33819 - DNA, 461 bp, Homo sapiens
  misc_feature (1)...(461): n = a,t,c or g
gnttgnanacttttatgacnnnnnnnnnnnnnnnnnnnnnnnnnnnnnnnnnnnnnnnnnnnnnnnnnnnnnnnnnnggcacgagaaaaaacttgcaaaacacagcgtttatgatactgaaaaatacccagtaaccaatactcgttaaactggattgaattactcagccttttaatatagcaagaggaaatcaagaaagctgtagcaccacagctttattggtctgtactccatttctgaaaacacttttcatgagaagatttttcaatggattagaagactaacatcagacaatgatgattccttagcttcatctcaagagtccagattatttccttctatactcactttcaatgtatgcaatcattccttttaaatacaacagagttaccttagaaaagtaaacaaannnnnnnnnnnnnnnnnnnnnnnnnnnnnnnnnnnnnnnnnnnnnnnnnnnn

SEQ ID NO: 33820 - DNA, 461 bp, Homo sapiens
  misc_feature (1)...(461): n = a,t,c or g
gttttgaaacttnatgacnnnnnnnnnnnnnnnnnnnnnnnnnnnnnnnnnnnnnnnnnnnnnnnnnnnnnnnnnnggcacgaggggctccgtggtcctcgaatgggaaggagaaccgcatcctcatccctaagtatcagctctaaggccaccttctcactgcgcctcccctggctgtgttatcaggccagtctctcatcagactgggagctccacagggcagggggtccatccgttttgttacttaacaccttgatacctggagctggccttggcgcacagggagcacttggtggatgtggaggccaaagcagctccatcttggaggctaattcaccatgctggcttctgattaatcccagttccaggaaggcctccaagattgacagtttnnnnnnnnnnnnnnnnnnnnnnnnnnnnnnnnnnnnnnnnnnnnnnnnnnnnnnnnnnnnnnnnnnnnn

SEQ ID NO: 33821 - DNA, 451 bp, Homo sapiens
  misc_feature (1)...(451): n = a,t,c or g
ncccttngaaanncccnnnnnntagnannnnnnnnnnnnnnnnnnnnnnnnnnnnnnnnnnnnnnnnnnnnnnnnnnnnggcacgagtagggctcggcgtggctgtgggaggacaagagcacacagcactgagcgctgtccttcctgagcacgtcccagcagaaaaggtgttgcgctccctggagggtctcatttcacaatgaagatgtatcaaataaggaaatgccccaagcttcagcgagtcgggaaggaccaaacagacctggatgtccgggctctattgcggctggcgtgttactgaattcagtggaatgactccgtgtagaatgcggcaggtgccacattttggtaaaacagatatcgaggaagagtaacagaggcttgacatttttgctaaattacatggnccgttcaaacacttattgcagctaacataaactttcaagtcatc

SEQ ID NO: 33822 - DNA, 477 bp, Homo sapiens
  misc_feature (1)...(477): n = a,t,c or g
ttgntnntttgaanaccgctatgacnnnnnnnnnnnnnnnnnnnnnnnnnnnnnnnnnnnnnnnnnnnnnnnnnnnnnnnnnnggcacgaggtcttcgctgtggtgactttaactctcggttttcggttatagccggccggcgctcacttgtcttcaggaagctcggagcctttggtggagccggggagaggaagggtgggtgcaagagtaaaaggcgagaggggactgcaagcatccgggtcggctcctggccggagcaagatggctgagggcgagcggcagccgccgccagattcttcagaggaggcccctccagccactcagaacttcatcattccaaaaaaggagatccacacagttccagacatgggcaaatggaagcgttctcaggcatacgctgactacatcggattcatccttaccctcaacgaaggtgtgaaggggaagaagctgaccttcgagtacagagtctccgg

SEQ ID NO: 33823 - DNA, 457 bp, Homo sapiens
  misc_feature (1)...(457): n = a,t,c or g
gagnnnnttgantcctttcctgancnnnnnnnnnnnnnnnnnnnnnnnnnnnnnnnnnnnnnnnnnnnnnnnnnnnnnggcacgagcggcacgagcttttctgctattcaggaaataacccagttctgcaccactggtttttgtagctatctcgtaaggctgctggctgaaaactgtgtctatgcaaccttccaagtgcggagtgtcaaccaactggacgggagagagtactgctcctactccaggactctcacaaagctgatgagctgtacttcagaaaaaaataataatttccatgttttgtatatatctgacaaaactggcaacatcttacagactactgacttgaagacaacctcttttatatttctctatttctgggctgatgaatttgttttcatctgtcttttcccccttcagaattttccttggaaaaaaaatactagcctagctggtc

SEQ ID NO: 33824 - DNA, 465 bp, Homo sapiens
  misc_feature (1)...(465): n = a,t,c or g
gngnnnnntttnanttngataaccgtnnnnnnnnnnnnnnnnnnnnnnnnnnnnnnnnnnnnnnnnnnnnnnnnnnnnnnnnnnnnnnnnnggcacgagtgccctaatagctcgtgattttttaaaagctcattaaatatatacacaaatttattttaagtgtcttaatgaactaagctactccaaggttgaggatattgtaggcaattactgacgtaaaactacaaatgtaaaaaccatctttggtaagtgtcacttatatcctatatcccaactgctttttctcccttttatcctaattttaaaataaaaaagaaaagataacgaagaactttttataataaaaccatgtcagccacagagagatggtgactgtaagctaagtgaccagaatgtaggtgcctctaaaagttgagggtgcactgttctttgaattcttgcctgttaacacttttcataacatct

SEQ ID NO: 33825 - DNA, 463 bp, Homo sapiens
  misc_feature (1)...(463): n = a,t,c or g
gngnntntttgattgatancgttatgacnnnnnnnnnnnnnnnnnnnnnnnnnnnnnnnnnnnnnnnnnnnnnnnnnnnnnnnnnnggcacgagccaagacagctggagttctcaagacagagcaccagagaggagacagttgcacagatagaacactctggagtcccccacaagtttcagatgagtattagccagctattcccaattgatctctcacggcctttgttcaggggacaaagaaggatctcatctcacaaatagggaaaaattaacccccaaagctccagtcctccctgataaaatttgaaagcaaaatgcaaaaggatcaaactgcttccaagtaacttaactgcgtaacagaacaaagctcaagcatacacggatacaaaaacatccagcactccacaaggtaaaattcgcaatgtccagcatccaattaaaagtaatcagacacacaaagag

SEQ ID NO: 33826 - DNA, 463 bp, Homo sapiens
  misc_feature (1)...(463): n = a,t,c or g
gngnnnnntttganttcgataccntttgacnnnnnnnnnnnnnnnnnnnnnnnnnnnnnnnnnnnnnnnnnnnnnnnnnnnnnnnnnnggcacgagggcattttgtgttctagtgttctgcgtttcctctttggcaattaagctcacacacacacacactcaactgtcccaaagaagagagtcacctgattctagttattccgagggctgtgtaagcactgatacacacacacactgtcacacttacacacatgcaactgtcccaaagaagagagtcacctgattctagttattccaagggttgagtaagacgttagtcaatctctagggaagccctgctgctgggcactggagctcagaaatttatctcaaagaattagaattcataaggagctctgtgttttggaaagaggacacattgtttaggacagtttccattccaattgtgcagcatgaaatagaa

SEQ ID NO: 33827 - DNA, 463 bp, Homo sapiens
  misc_feature (1)...(463): n = a,t,c or g
gngnnnnnttnanttnataccgtnnnnnnnnnnnnnnnnnnnnnnnnnnnnnnnnnnnnnnnnnnnnnnnnnnnnnnnnnnnnnnnnnggcacgagattgcaggcaacccttcttcctgtttctcaaaccagacccgctcactcccactgggggtttataccagccattgttccctctgccctgaacatgcgtggccaaccccttcctgtctcatgtcacccttcagcgaggccttcccgctaagctggtccatctgatctacaatggcagcccaagagctatttcccacaccctccttttccacttctctgcttaacgcgggtacactataaggtgtctttcttgctcagttgatggtttcacctgctgttgcctggtttgtaagccccataagaggaagaccagagatcttggtcattgctgtaccctcaccattcatagcagtccctgtacctctgtagg

SEQ ID NO: 33828 - DNA, 460 bp, Homo sapiens
  misc_feature (1)...(460): n = a,t,c or g
nnnntttgaatttgataccntnnnnnnnnnnnnnnnnnnnnnnnnnnnnnnnnnnnnnnnnnnnnnnnnnnnnnnnnnnnnnnnnnggcacgagcccattgcttctcatgtgaagccaaggtggaaaatgactaatttaaggtagttctattggatacgaaggactaccacagtccaaggccatccttactgacctcaccttccaggtgcctagctccaaccaactgggctccttttcaactcaattataactctgctaatcttctttcctttcttctcctcattctgttcttatctttcaagtcctaattcaattcccaagcccctccaaggtgtcttcttgacctagtccagggctcatttactcctctgctctgttattagttactggaggctattatcttataatttcataatttgccattaaatcattgagttttgntctctatattttctcttt

SEQ ID NO: 33829 - DNA, 459 bp, Homo sapiens
  misc_feature (1)...(459): n = a,t,c or g
gngnnnnttgaatcgttgnnnnnnnnnnnnnnnnnnnnnnnnnnnnnnnnnnnnnnnnnnnnnnnnnnnnnnnnnnnnggcacgagaaaacctgttctgactatatcatgggagttggagtatgaataaaatggttactgtaagtgaaaatgctctgtaaatacaaaagcactctgcaaatatcagagactattagtattatgaagttattaaaataaaaaaacacattagctgagctaacagccttgaaacacaatgagcaactcctgggggaaaagacacacagctgaccagacacacagcccagagtaagtctttgggaggggtggaagtgggaaagctgctaaacatggtgcaaaaggcttctagccccagggaaggaaatgacagaaatcttgctttgacaagtttttttcagagctggctttgctaggaaactaagggctaaaatgaattttt

SEQ ID NO: 33830 - DNA, 460 bp, Homo sapiens
  misc_feature (1)...(460): n = a,t,c or g
gngnnnntttgaatcgatacccttnnnnnnnnnnnnnnnnnnnnnnnnnnnnnnnnnnnnnnnnnnnnnnnnnnnnnnnnnnnnnnnggcacgaggggcttttaaaattaagccaccaaagttgttcacatcctggttataactattggctgttcataatgaaactatggcctcttgatagattaatcactattgcttatcaaatgagctcccaaaatttctttgcaacaactttcagggtcttttcatggtcattgtcctttttctttccgtcatctttgtatttatcttctgctccagcagaattgatctccctgcactgctctacatcacttaatatttttttaatctctacctgtgctagaatgcttcacccacatacatacctgcctgtcagtgttccccttgtcttttaagccagccttgttgtagcctcatctgtggcccctacctcctgaat

SEQ ID NO: 33831 - DNA, 460 bp, Homo sapiens
  misc_feature (1)...(460): n = a,t,c or g
gngnnnattgaaatcntntgnnnnnnnnnnnnnnnnnnnnnnnnnnnnnnnnnnnnnnnnnnnnnnnnnnnnnnnnnnnnggcacgagtgaagctggtgacttcgttcacccaaataaaccccaaatgatggacttgttatatatttaattcttacctcaagaagacaggttgttacaggattgggcacacctacaaattattaatctcccctttagattcttaaccaaatgaggacaaggatatatatgaaaatgaaagtaaactatcagaaccatcacccccaaggaagtttgtgctttttatgtatcatgttggcagacacagcttggatctaggtcaagtgagacttcgtgctacctcgtcataatcttcccccaattaattgagaacttgaggtctgtgtggatatgcagagaaaagctgaagtacagttacacaggtagctgtgtagaggactg

SEQ ID NO: 33832 - DNA, 459 bp, Homo sapiens
  misc_feature (1)...(459): n = a,t,c or g
ggngnnnnttganacnnttgacnnnnnnnnnnnnnnnnnnnnnnnnnnnnnnnnnnnnnnnnnnnnnnnnnnnnnnnnnnggcacgagcctgaacacagctcttgataaatgataacaagcaggcacaaaaaaattgtagtacaggagtctgaggtcacttagcaaagggacataaagttcaaacagctcagcagctgctgagggtcccgtgttacattgtagcatttgttgttgtgactgggctagaaagaaggtgaagaaggttggagctcactccctgcctcccctcccactctcctccctttgacctacactcatagttcacgcagcactctgatgtgtccccttaggccatcctctagtcaatgctgtgggtaggctggaccagcagggaccagtattgtcacagcaagtccaggccaacagtggtcaggctgctgcccggtgttgtgcctttg

SEQ ID NO: 33833 - DNA, 456 bp, Homo sapiens
  misc_feature (1)...(456): n = a,t,c or g
ttnnnnnnnnnnnnnnnnnnnnnnnnnnnnnnnnnnnnnnnnnnnnnnnnnnnnnnnnnnnnnnnnnnnnnnnnnggcacgagaactggaagtagcgggagcagtttggggcttctgtggggttttctgcagagatcaaccacatcatcagttgctttccctgcatcagtgtgaacacagggctccaactctaggcatcctcctccagactcaagttccagggcaacccacacttcccacccataaagagataaggcagcttcatggacccaatggggaacaaaaaatacacctacaaactaaacaaaaccccatcttcccagcccctaacccatgttcctctgatctatactacaatatcctgagaacaatcacctgaattttaattctgacattttaccaaaggaataaaacaactattgatggtaatccaatcatgacaataactattacatt

SEQ ID NO: 33834 - DNA, 463 bp, Homo sapiens
  misc_feature (1)...(463): n = a,t,c or g
gtgtnnnnnntttgaaattggaataccgttatgacnnnnnnnnnnnnnnnnnnnnnnnnnnnnnnnnnnnnnnnnnnnnnnnnnnnnnnnnnnggcacgagcccattttataacatgcagaatgccaacaggggaaaatattcagaatctatagtaggattttggcttgctttggcattgatattgcacctgtttcagccaagctctttcttgtcctggggaaaacctaagcataactgccaccaggccagcaatttctatattcttttgacttggagctggagagggaaaactacagtgatgtccagctcctgctttgggaggccgtggcttctgctgggttggagccattcttatttgacccagaatggagccaagcctgtatggcagcagagaacggtcagtggtatttgntatctgggggaacaacaggtctgaggatataagaaacccaccgaggaga

SEQ ID NO: 33835 - DNA, 460 bp, Homo sapiens
  misc_feature (1)...(460): n = a,t,c or g
gtgtnnnnnttganaccnttatgacnnnnnnnnnnnnnnnnnnnnnnnnnnnnnnnnnnnnnnnnnnnnnnnnnnnnnnnnnnggcacgagcggcacgagcacaaannnnnnnnnnnnnnnnnnnnnnnnnnnnnnnnnnnnnnnnnnnnnnnnnnnnnnnnnnnnnnnnnnnnnnnnnnnnnnnnnnnnnnnnnnnnnnnnnnnnnnnnnnnnnnnnnnnnnnnnnnnnnnnnnnnnnnnnnnnnnnnnnnnnnnnnnnnnnnnnnnnnnnnnnnnnnnnnnnnnnnnnnnnnnnnnnnnnnnnnnnnnnnnnnnnnnnnnnnnnnnnnnnnnnnnnnnnnnnnnnnnnnnnnnnnnnnnnnnnnnnccccttccttacagcatatacaaaaacaaaatatggattaaaaacttcaannnnnnnnnnnnnnnnnnnnnnnnnnnnnnnnnnnnnnnnnn

SEQ ID NO: 33836 - DNA, 459 bp, Homo sapiens
  misc_feature (1)...(459): n = a,t,c or g
gngnnnnnnnnttgannttgganaccgttnnnnnnnnnnnnnnnnnnnnnnnnnnnnnnnnnnnnnnnnnnnnnnnnnnnnnnnnnnnnnnnggcacgagnnnnnnnnnnnnnnnnnnnnnnnnnnnnnnnnnnnnnnnnnnnnnnnnnnnnnnnnnnnnnnnnnnnnnnnnnnnnnnnnnnnnnnnnnnnnnnnnnnnnnnnnnnnnnnnnnnattttctttatagcagcagcctactctgctggtaccaattctctgtgttannnnnnnnnnnnnnnnnnnnnnnnnnnnnnnnnnnnnnnnnnnnnnnnnnnnnnntaaannnnnnnnnnnnnnnnnnnnnnnnnnnnnnnnnnnnnnnnggaaactaacaattatggtagaaggtgaagaggaagcaaggcatgccttacatggttgcaggagagagacggtgaggaagtgccacactttaaagt

SEQ ID NO: 33837 - DNA, 422 bp, Homo sapiens
  misc_feature (1)...(422): n = a,t,c or g
nnnnnnnnnnnnnnnnnnnnnnnnnnnnnnnnnnnnnnnnnnnnnnnnnnnggcacgagcggcacgagnnnnnnnnnnnnnnnnnnnnnnnnnnnnnnnnnnnnnnnnnnnnnnnnnnnnnnnnnnnnnnnnnnnnnnnnnnnnnnnnnnnnnnnnnnnnnnnnnnnnncaaatcttcttgatcatatgtttaaatatattttttaatatttggagcatgagttgtcacttcttgtttgccttttttataaggaaatgttggagagttacatcattgctaatgtagaaatgttaagtggaaaaatatacagtttggtaaaataaactagattctacatttatttgtgggtttttttcccctcctttctttccacagcacttttgatatcaagcaagtggcttcctttttgagatattaaaaa

SEQ ID NO: 33838 - DNA, 457 bp, Homo sapiens
  misc_feature (1)...(457): n = a,t,c or g
gngntnnnnnnttgaaaccgttnnnnnnnnnnnnnnnnnnnnnnnnnnnnnnnnnnnnnnnnnnnnnnnnnnnnnnnnnnnnnnnggcacgaggacttgcccacagcctcaaggaggagacggcgaggcccggcccccgctgtccctggtgtaaagaagtcgccgtagccgtcgcggccgggactccccgggctctcgcccttcaggtttcgttgacactcaggaccgtacgtacgctgcgccatgttcaagaaactgaagcaaaagatcagcgaggagcagcagcagctccagcaggcgctggctcctgctcaggcgtcctccaattcttcaacaccaacaagaatgaggagcaggacatcttcatttacagagcaacttgatgaaggtacacccaatagagagtcaggtgacacacagtcttttgcacagaagctccagctncgggtgccctccg

SEQ ID NO: 33839 - DNA, 445 bp, Homo sapiens
  misc_feature (1)...(445): n = a,t,c or g
ttgannttgganaccgtttgacnnnnnnnnnnnnnnnnnnnnnnnnnnnnnnnnnnnnnnnnnnnnnnnnnnnnnnnnnnggcacgagccatttttaaaaggacacattgtataatcagtcaacagaaaaaggaacaatcagcagtttctgctttttctatatctgggacctttaacctcttgagtccttgcttctggaatcctctctagatttggtcagtccattatcagccccttcatcatatagagttacctaggagccagtggcttttgcctgtcttcatttttcttaccgttgtgattttctgcaaaccaaaattagaaagagctagtcagaaattaggcaagtcccatttcacacattgcacacatggggcctatatgatcagggacataacactttacatgngngttcagaatactctgngagatttattgnaggagg

SEQ ID NO: 33840 - DNA, 456 bp, Homo sapiens
  misc_feature (1)...(456): n = a,t,c or g
gngnnnnnnntttganaccntnnnnnnnnnnnnnnnnnnnnnnnnnnnnnnnnnnnnnnnnnnnnnnnnnnnnnnnnnnnnnnnnnggcacgagacaaagatacttttagcaatgtatctattagaggcttaggtacaatgttttagaattaaaaatccaagtttaatatgtatattgacctcctggggtctttcaagtccatattatttaggcttatgtagataattacagtaaccatttttaggtttgtaattgtttgatacgtggatgataaaggcagaaatgtaattctcaagtccttgaaattaatgtaattagaagcttagctgactacagaataggtgagggtttcttaaaaatcagannnnnnnnnnnnnnnnnnnnnnnnnnnnnnnnnnnnnnnnnnnnnnnnnnnnnnnnnnnnnnnnnnnnnnnnnnnnnnnnnnnnnnnnnnn

SEQ ID NO: 33841 - DNA, 441 bp, Homo sapiens
  misc_feature (1)...(441): n = a,t,c or g
ntttgaanaccgtttgacnnnnnnnnnnnnnnnnnnnnnnnnnnnnnnnnnnnnnnnnnnnnnnnnnnnnnnnnnnggcacgagagtgtcagtgtcctcattgtgagttaagatggtggttcacagttgttcattctattgtattattatcttttgctgtgtaatgaattactgaacaatttaatggattaaaacaacaataaacatttgtcatttctcacggtttctatgtggcaggaatccaggagaggcttactggnnnnnnnnnnnnnnnnnnnnnnnnnnnnnnnnnnnnnnnnnnnnnnnnnnnnnnnnnnnnnnnnnnnnnnnnnnnnnnnntgctagagtgtctgcttcacttacatggctggaaagttggtgctgattgcgggaagccacagtttcttcacaaatagactcttcctcaggactgcttgagta

SEQ ID NO: 33842 - DNA, 465 bp, Homo sapiens
  misc_feature (1)...(465): n = a,t,c or g
tttgaaaccctttgactgattacgaatttaatacgactcnnnnnnnnnnnnnnnnnnnnnnnnnnnnnnnnnnggcacgaggtgacatttgagcaaagacttcaggaaaatgagggaaatggccatgcggaaaactggagaaattgctttccatgaagagggaactgccagtgcaatggtactaacgctgggagtatgtatggtttattggaggaacttcaaagaggcaagcatggctggagggagtgagtaaggggaaaagtagagggacaggtaatggaggggaaaacagagtagagtcttgtaggacaatatatgaacctctgaggagccattggaaggttgtggttttttttaattttagtttttaaaaacacgagatnnnnnnnnnnnnnnnnnnnnnnnnnnnnnnnnnnnnnnnnnnnnnnnnnnnnnnnnnnnnnnnnnnnnnnnnnnnnnnnnnnn

SEQ ID NO: 33843 - DNA, 454 bp, Homo sapiens
  misc_feature (1)...(454): n = a,t,c or g
nnnnnnnnnnnnnnnnnnnnnnnnnnnnnnnnnnnnnnnnnnnnnnnnnnnnnnnnnnnnnnnnnggcacgagatattaaccaaaaatgcacattttacagaaaataacctattttccaactaaccaaattactgaaaaggtcaggtttatacttttgcaatcttttaaatgtctgttttaataaagacagctagattctctcttctcttgaattcaatctgttgcaatatcacatagcacgcancctntggaaaactncactgtacattcgnatgtaaatggtggtgaaaatggcaaatancatcttattatcacaaagatagtctgatttnacagattccctanaaggatgcccagaaccactgctctaatgatttcccatctnanttggtataaaagcccaggtccttacaaagataancantagcctacagnatccacacaggctccctt

SEQ ID NO: 33844 - DNA, 468 bp, Homo sapiens
  misc_feature (1)...(468): n = a,t,c or g
tgaaanctttgaanaccntnnnnnnnnnnnnnnnnnnnnnnnnnnnnnnnnnnnnnnnnnnnnnnnnnnnnnnnnnnnnnnnnnggcacgagctggaannnnnnnnnnnnnnnnnnnnnnnnnnnnnnnnnnnnnnnnnnnnnnnnnnnnnnnnnnnnnnnnnnnnnnncccatggacggcttgaataagatgatgggttaagaaaggtttctgctccactgtctttgagctgggacatcagtcttctgccttaagccttggacttggtcttgaactatattcgactctcctaggtatagagcttactcagagtagaacttgggcttctctgcgtgnnnnnnnnnnnnnnnnnnnnnnnnnnnnnnnnnnnnnnnnnnnnnnnnnnnnncttgccctctggataactcacactaatatagtattatatgccagttgccgggttttgtctntatgctttnaaaaggtgg

SEQ ID NO: 33845 - DNA, 460 bp, Homo sapiens
  misc_feature (1)...(460): n = a,t,c or g
ganntttganacctttgacatgacnnnnnnnnnnnnnnnnnnnnnnnnnnnnnnnnnnnnnnnnnnnnnnnnnnnnnggcacgagtggtaatataatttttcattctatttattgtaggttttcaaaaatatttggctataggtgttttataataaaactacttttaaagtctttattatagctataatttgttcccttatttattttgtttgcttgcattctattgttattttgttaaactgttatttcctgaggttatcaacaatagtctttttctagaagaagcttctgatagtattaacctttttttttctataccgttccattattttttcttggtttctaccttttattattttctttcttcctgtttctttgggtgtactctgtctcttgcttatgtcttcagttgcgctnatttttcagcttttcctattttctaatacatgnatngagaac

SEQ ID NO: 33846 - DNA, 465 bp, Homo sapiens
  misc_feature (1)...(465): n = a,t,c or g
tgaaaacccttnnnnnnnnnnnnnnnnnnnnnnnnnnnnnnnnnnnnnnnnnnnnnnnnnnnnnnnnnnnnnnnggcacgagtttctatggtcctctaaataagatcttttcaatcagtatcacgattttttaaaaaccannnnnnnnnnnnnnnnnnnnnnnnnnnnnnnnnnnnnnnnnnnnnnnnnnnnnnnnnnnnnnnnnnnnnnnnnnnnnnnnnnnnnnnnnnnnnnnnnnnnnnnnnnnnnnnnnnnnnnnnnnnnnnnnnnnnnnnnnnnnnnnnnnnnnnnnnnnnnnnnnnnnnnnnnnnnnnnnnnnnnnnnnnnnnnnnnnnnnnnnnnnnnnnnnnnnnnnnnnnnnnnnnnnnnnnnnnnnnnnnnnnnnnnnnnnnnnnnnnnnnnnnnnnnnnnnnnnnnnnnnnnnnnnnnnnnnnnnnnnnnnnnnncatgtgtcaaaagtacttt

SEQ ID NO: 33847 - DNA, 463 bp, Homo sapiens
  misc_feature (1)...(463): n = a,t,c or g
ttganaaccgtnnnnnnnnnnnnnnnnnnnnnnnnnnnnnnnnnnnnnnnnnnnnnnnnnnnnnnnnnnnnnnnnnggcacgaggaatgaaatgaaggaaggttgcttatgctgatgacagagtgtcagggaacagccgactcagcacaggtttagagacctggaaaacatcaaagcggcaaccacataaataagggacacaatagtaaaaatgatgaactggaatgagagtccattaaataatgaaagcatcacacaaataaatggtaatgaacaaacagagaccagactggtgagaagcctaggagcagacgtgcagaaatgatgagggaaacagactatgggcattgttacacgtgggagatttgcaacttcagttagaagacaggatgaggctggtagaaacagatctacttccaatttttttctgtgtgttcattatatatagcttggactagtaaaa

SEQ ID NO: 33848 - DNA, 453 bp, Homo sapiens
  misc_feature (1)...(453): n = a,t,c or g
gtnnnnnnnnnnnnnnnnnnnnnnnnnnnnnnnnnnnnnnnnnnnnnnnnnnnnnnnnnnnnnnnnnggcacgagagtagggtttcgagggagcaagtttgccacacaccataagggcacaggtataacccttcctaacagctcttgattttacaaaagtagtttcctgaattttaagtagtcatatccctgacatctcttctttaatatggctttcggatttttcaccactgtttaatgtgatggaaagaggacaggtttttaagttactctagcatggcaagcgaccctagctcctgcgtgttctggacccaacatgcctttctttgctttcactagtttcctttaccaacttgaatcttcagccaattgagaattactttctctgctctccctcccttttttaatcccatattttgcttatgttgccatttttccatctttacctgtagt

SEQ ID NO: 33849 - DNA, 467 bp, Homo sapiens
  misc_feature (1)...(467): n = a,t,c or g
ttgaanntntganaccgtttgactgacnnnnnnnnnnnnnnnnnnnnnnnnnnnnnnnnnnnnnnnnnnnnnnnnnnnnnggcacgaggatgctattacccccaaaagagaagtggcttcaaaagatatggaacgaagaattgtagcccaactcctaacctgcatggatgatctgaataatgtggctgctacagcccgggtcctagttattggagctactaatcgaccagactcgttagaccctgctttgagacgtgcgggaaggttcgaccgagaaatatgcctaggtatcccagatgaagcatccagggaaagaatacttcaaacattgtgcagaaaactgaggcttcctcaagcttttgatttctgtcacttagcacacctaactccaggctttgttggtgctgatctcatggcactgtgccgagaggcagcaatgtgtgcagtcaatagagtcttaatgaagg

SEQ ID NO: 33850 - DNA, 466 bp, Homo sapiens
  misc_feature (1)...(466): n = a,t,c or g
tgaaancnttttgacnnnnnnnnnnnnnnnnnnnnnnnnnnnnnnnnnnnnnnnnnnnnnnnnnnnnnnnnnnggcacgagcaatcatttcattgttaataatcagtaaatttgagaaaatttaccaaaagcaaacttatctccagtaaacaggacaaggaagaggcctcataagtttttaacttttaaaaacttgggannnnnnnnnnnnnnnnnnnnnnnnnnnnnnnnnnnnnnnnnnnnnnnnnnnnnnnnnnnnnnnnnnnnnnnnnnnnnnnnnnnnnnnnnnnnnnnnnnnnnnnnnnnnnnnnnnnnnnnnnnnnnnnnnnnnnnnnnnnnnnnnnnnnnnnnnnnnnnnnnnnnnnnnnnnnnnnnnnnnnnnnnnnnnnnnnnnnnnnnnnnnnnnnnnnnnnnnnnnnnnnnnnnnnnnnnnnnnnnnnnnnnnnnnnnnnnnnnnnnnnnnnnn

SEQ ID NO: 33851 - DNA, 468 bp, Homo sapiens
  misc_feature (1)...(468): n = a,t,c or g
ttganaccctnnnnnnnnnnnnnnnnnnnnnnnnnnnnnnnnnnnnnnnnnnnnnnnnnnnnnnnnnnnnnnnnnggcacgagggcagattaaatgtcgatacacttaggcatagctggaaatgtacagagagcaggtgaatatcccattgccaggagagcaagctgatttgctggcagaggattgaaagtcagccacctgtgggaatagtggaagccttaggtgaggtaaggtccgctcccagagagtgctggggtaggggcccaggggaactagagagagccttggggagacactgaccttaaggggaagtggaagaatgattgatgctacagaatgtaaggaggggtccaagaagtagaaggagagaagcaacggagaatgagtgctcattcatatctaatgccatacagcagtgctgtccagtaggaataaaatacatgctgcatagataatggtaaactttcc

SEQ ID NO: 33852 - DNA, 469 bp, Homo sapiens
  misc_feature (1)...(469): n = a,t,c or g
anntttnnnnnnnnnnnnnnnnnnnnnnnnnnnnnnnnnnnnnnnnnnnnnnnnnnnnnnnnnnnnnnnnnnnnnnnnnnggcacgagnnnnnnnnnnnnnnnnnnnnnnnnnnnnnnnnnnnnnnnnnnnnnnnnnnnnnnnnnnnnnnnnnnnnnnnnnnnnnnnnnnnnnnnnnnnnnnnnnnnnnnnnnnnnnnnnnnnnnnnnnnnnnnnnnnnnnnnnnnnnnnnnnnnnnntagtgatattttaaagccaaattcagaatgtgaanntanagaatttgaaactcagaatgtgaaaactananaatttaatccattgagnaaatattcttaaagaattaatttgtgtnagacatctaancacatgctgcccttaagaattttacaatctgancagannnnnnnnnnnnnnnnnnnnnnnnnnnnnnnnnnnnnnnnnnnnnnnnnnnnnnnnnnnnnnnnnng

SEQ ID NO: 33853 - DNA, 459 bp, Homo sapiens
  misc_feature (1)...(459): n = a,t,c or g
nnnnnnnnnnnnnnnnnnnnnnnnnnnnnnnnnnnnnnnnnnnnnnnnnnnnnnnnnnnnnnnnnnggcacgaggagagagaaaaaagagccatggtgatgaggagagagtttagtcctgtacctcctcttgcctgctgctttcaagtctgttttgttgaattctcaggactcgattgagcttagtctcttgtcaggctatgccaaagcagcacagtagtctagggactgacagttgggcctcactggactttagtggttttcttttaccagtttgaaaaagggccaggctcacagtgagagctggaaagcaggggactatttgcctgcgaattcctcaatagcatacacgcgatgcctagaacatttctgtccaataaacagcatgtgcttgataaacatactgaacttagcggtgtccccagtgcattctaggcgaggtcacctccttgacaaggcc

SEQ ID NO: 33854 - DNA, 485 bp, Homo sapiens
  misc_feature (1)...(485): n = a,t,c or g
ggggntnnnttnnnnntttgaaanccntttgacnnnnnnnnnnnnnnnnnnnnnnnnnnnnnnnnnnnnnnnnnnnnnnnnnnnnnnnnnnggcacgaggtgattgaattgaagaggaatcatatttttttaaacgatctttcccctgccctttgtatcacagaggctgaatcggtcctgggcactcagcattctcagcattggatcagccctaacctgcttgtatttcttttgctgcagagcatagacccataatcctggatcaaacatgttgaagtctcactcttccatctactcaggttgacctctaacaaaattctgtttttctctccatttgtctgtgaaaagagttttcattctaaactcttccaatttaacaaagggaaaaggttaacaagaaagtaaatcccccctccaaaaaaaaaagnggccacagtttcccactgaattggagccaaaaactntgccagttttgctctcatatc

SEQ ID NO: 33855 - DNA, 462 bp, Homo sapiens
  misc_feature (1)...(462): n = a,t,c or g
ttnnnnnnnnnnnnnnnnnnnnnnnnnnnnnnnnnnnnnnnnnnnnnnnnnnnnnnnnnnnnnnnggcacgaggtatattaaagaggattatacaccctgaccaagtgttctttatcccagcaatgcaaggttggttcaacatatgaaaatgaattaatactgtaataccatattattagaataaaggggaaaaaaccgcatgatcatctcactagacactgtaaaagcatttggtaaaatccagcagccatttatgattttaaaaactaggaataaaaggtaattttctcaatctaataaagggtacctatgaaaacccacagnnnnnnnnnnnnnnnnnnnnnnnnnnnnnnnnnnnnnnnnnnnnnnnnnnnnnnnnnnnnnnnnnnnnnnnnnnnnnnnnnnnnnnnnnnnnnnnnnnnnnncaaaactccatctttactaatacaaaaactagcccg

SEQ ID NO: 33856 - DNA, 468 bp, Homo sapiens
  misc_feature (1)...(468): n = a,t,c or g
anaccnnnnnnnnnnnnnnnnnnnnnnnnnnnnnnnnnnnnnnnnnnnnnnnnnnnnnnnnnnnnnnnnnnnggcacgagtgagtaataaaaacagagcagacacagcactgatacaaaaataaaagaannnnnnnnnnnnnnnnnnnnnnnnnnnnnnnnnnnnnnnnnnnnnnnnnnnnnnnnnnnnnnnnnnnnnnnnnnnnnnnnnnnnnnnnnnnnnnnnnnnnnnnnnnnnnnnnnnnnnnnnnnnnnnnnnnnnnnnnnnnnnnnnnnnnnnnnnnnnnnnnnnnnnnnnnnnnnnnnnnnnnnnnnnnnnnnnnnnnnnnnnngtgcnnnnnnnnnnnnnnnnnnnnnnnnnnnnnnnnnnnnnnnnnnnnnnnnnnnnnnnnnnnnnnnnnnnnnnnnnnnnnnnnnnnnnnnnnnngaatgaatgaatgaatgaatgagtgaatgaatgaaaaccata

SEQ ID NO: 33857 - DNA, 466 bp, Homo sapiens
  misc_feature (1)...(466): n = a,t,c or g
tttganaccctnnnnnnnnnnnnnnnnnnnnnnnnnnnnnnnnnnnnnnnnnnnnnnnnnnnnnnnnnnnnnnnnnggcacgagtaaagaccctatgagttaagtaatatcaatatcagatgagaagaaggaggcacagagggttaataatttattccaggtcacacagcatctgactattagatctgggagttaaattcaaataatctggctttggtgtgtactatcctgggtatgaggtttgtgtttgccattagaagtcataggagaagaatttgcattaataagacgaaaatgagttgaaattgagacttgtgaaatttaagttctctgtggaataccccagtgggaatagcaattaggcaagngaatatttataataaaattaataaaaactgctcctaaagtgcaaactctaangaaaatgattacnaantaaaaaaaanaanncccnnnnttntttttg

SEQ ID NO: 33858 - DNA, 467 bp, Homo sapiens
  misc_feature (1)...(467): n = a,t,c or g
ntttgganaaccgtnnnnnnnnnnnnnnnnnnnnnnnnnnnnnnnnnnnnnnnnnnnnnnnnnnnnnnnnnnnnnnnnnggcacgagtttttttcagtatctctccttaccctttttctcctctttagtacccccttcaaagtatgtgtgtgtatgtgtgtgtgtgaccaaatgccaaccaccactgacacacatacatacatgggggaagtggtattggcataggcaactttcaaaagttaataccctatctttgtgcttaatttattcttctctcctcccatgtcagctacactctcctcagtggtcattaatgacctctgaatggccagcattttcttctcagagcctatacaatttgatctatctgtggcatggcattatggatattctagaaattctgtcctgttttggcattacaacacaattctccctggctctcgtcctgtaactctgatggctcttta

SEQ ID NO: 33859 - DNA, 467 bp, Homo sapiens
  misc_feature (1)...(467): n = a,t,c or g
anacccnnnnnnnnnnnnnnnnnnnnnnnnnnnnnnnnnnnnnnnnnnnnnnnnnnnnnnnnnnnnnnnnnnggcacgagggaccacatcctctagaagtttctgaagaaactcttcttgagtccttggatgtctacaaatgtcttttctcaacactcaaaacagaatgatagtttgtttatgaaagtctaggtcagagtttattttctccatcagaatattgaagaatcgttcttattgtttcttgcttttanaggtgttcttgagaattccattgcccctctaatttttgatgccttttatatgacctgctcttctctctggcggcttttaatgtctttatcccttattctgaaatttgactctcagctatttgggaaaagagagggagaaagatcacatgtatcgttgatttattatatgacaggtatagtgtgaggcattgcatatacaatttcatttaattg

SEQ ID NO: 33860 - DNA, 468 bp, Homo sapiens
  misc_feature (1)...(468): n = a,t,c or g
aannttggannnnnnnnnnnnnnnnnnnnnnnnnnnnnnnnnnnnnnnnnnnnnnnnnnnnnnnnnnnnnnnnnnnnnnnnggcacgagcatttttctgcctattcactgtttttattttttagtgggaagataagtttttactctttttaatcagtagggtttggattttggagatggctgtcatattcaggtcagaggcagttgacttggtgctgatgcttgtttcagcttgtttctttccattttcctccagagtaaagaaaagattgaaaaactaaaactccaagctgaatccttctgccagcgtttggggaaataccggatgccctttgcctgggcacccataagcttatcaagcttcttcaatgtctccacccttgagagggaggtaactgatgtggactctgtggttggtaagattttcacctgcagtgggaaagggagggctccccagtgtgcgctgcca

SEQ ID NO: 33861 - DNA, 403 bp, Homo sapiens
  misc_feature (1)...(403): n = a,t,c or g
anatttganaccgttatgacatgannnnnnnnnnnnnnnnnnnnnnnnnnnnnnnnnnnnnnnnnnnnnnnnnnnnnnggcacgaggacagagaaggaacattcgtggagcatgcgggtcatagaattaaaatagataagtatatacgtggggaaaaggcaagacttaacttagagaacagtcctctctaaggcctggctataggcacggagggatcaggggtacccgtgtagcatttcacatgctgtcacatcagcagctgcttataccaccatcaggaaacacgcttcccacacaaacctcaccaccgtccacccaggctcctgcagactggccagggcaccagatgctaccagttnantgnaaagtacactgaccttgnngtccttagccctgggttgga

SEQ ID NO: 33862 - DNA, 414 bp, Homo sapiens
  misc_feature (1)...(414): n = a,t,c or g
gnnnnnnnnnntttgaatcnanaccgtttgactgannnnnnnnnnnnnnnnnnnnnnnnnnnnnnnnnnnnnnnnnnnnnnnnnnnnnnggcacgagaaagcacttgactgagaagacagaccctttaaaggaaacgggttctagggacaaactctacgtgggcctgttctcttgataagaccgtgaactctttgagaaaagaggctacttgtgaaaataatgagcccccttcggggcaggagttccggggtttgaacctgccttcttacatcttgagggctaagtgagttcccaaggcctctgttcagtggttgctccgtcagtgagctcaggtctggtgagtggcagggtcttccacccccaaccccaccgggtgtcagagcaagacactgtcccccatggagctggaatgg

SEQ ID NO: 33863 - DNA, 415 bp, Homo sapiens
  misc_feature (1)...(415): n = a,t,c or g
gnnnnnnnnnnntttganacgtttgcatgattacgaatttaatacgactnnnnnnnnnnnnnnnnnnnnnnnnnnnnnnnnnnnggcacgagaagaaactcatcgcaagtggaaaataccataaatcaaaaatgcatttaatggccacgtggggtggctaacgcctgtannnnnnnnnnnnnnnnnnnnnnnnnnnnnnnnnnnnnnnnnnnnnnnnccatctctttaactttgggcaaatgcctcatttcactgagcctgattcttcatctatatcctggggataaaatatctctttgtaggactgttgaaggattagagagtacacaaactatacctggcacatcatagaaactcattaaatggagagagagagagaaaacagatgaacttctcaggtgttgatttttgaagg

SEQ ID NO: 33864 - DNA, 396 bp, Homo sapiens
  misc_feature (1)...(396): n = a,t,c or g
atcgtttgnnnnnnnnnnnnnnnnnnnnnnnnnnnnnnnnnnnnnnnnnnnnnnnnnnnnnnnnnnnnggcacgaggtaagctctcctccatccagctcctcaacagcaacaacaggaccacctcccaaactctgcctggtgtgctctgatgaagcttcaggatgtcattatggagtcttaacttgtggaagctgtaaagttttcttcaaaagagcagtggaaggacagcacaattacctatgtgctggaaggaatgattgcatcatcgataaaattcgaagaaaaaactgcccagcatgccgctatcgaaaatgtcttcaggctggaatgaacntggaagctcgaaaaccaaggaaaaaattaaanggatttcancaggcccntncnggantttc

SEQ ID NO: 33865 - DNA, 413 bp, Homo sapiens
  misc_feature (1)...(413): n = a,t,c or g
ggnnnnnnnnnnnnttganattgganaccgtttgactgannnnnnnnnnnnnnnnnnnnnnnnnnnnnnnnnnnnnnnnnnnnnnnnnnnnnnggcacgagataccctggcagaaaactggagatgtactctcttaagcaagttagaaaagagctgttggactgaataggcacagtgatgaaaataaacagtttactttttgagatccctcaacttctttttccactgggatcagaaactgaccaccttttcttatcctttagggaggagagtaagacacctctggtaagcatgaccagcttcagaaaacaaancagggaantgtatcangngatttctcantaaanngncncagccttaccacccaacagggaaccagggnttgaaagcnctttgccanacccacacattta

SEQ ID NO: 33866 - DNA, 390 bp, Homo sapiens
  misc_feature (1)...(390): n = a,t,c or g
atcgtatcatganacgaatttaatacgactcnnnnnnnnnnnnnnnnnnnnnnnnnnnnnnnnnnggcacgagataagcacccccaatctttatgtgattatcttgagcctcttcactcacttggcttgggaaggagaagaatcgctcctcacaataaatgctgcattttgataattcattctcttctcttccctagtctttctgcttaattatcagagacatgaattgggaatacaagggtgagggttagaggtagatgaactcttccaggagccacaagcaagctttggttgtgatatttgacttcangtattttcagcatttttcaaaangnggggcctnggggctttggggtttnaantttaaccnttcnaggccgnnacnttaaa

SEQ ID NO: 33867 - DNA, 398 bp, Homo sapiens
  misc_feature (1)...(398): n = a,t,c or g
tnnnnttgganacagnttgactgattacgaatttaatacgactnnnnnnnnnnnnnnnnnnnnnnnnnnnnnnnnnnnggcacgannnnnnnnnnnnnnnnnnnnnnnnnnnnnnnnnnnnnnnnnnnnnnnnnnnnnnnnnnnnnnnnnnnnnnnnnnnnnnnnnnnnnnnnnnnnnnnnnnnnnnnnnnnnnnnnnnnnnnnnnnnnnnnnnnnnnnnnnnnnnnnnnnnnnnnnnaaattaaattaaattttttttaaaaagctgctctaacatacatgggtatatataaccccgggcagtgatggactctactgctatcctaagacaaaagagagttctgctgcatcaagattgatgcnccaatgctnataccagtatgangctttnttatata

SEQ ID NO: 33868 - DNA, 397 bp, Homo sapiens
  misc_feature (1)...(397): n = a,t,c or g
ttganntnganacattatgactgatacgaatttaatacgactnnnnnnnnnnnnnnnnnnnnnnnnnnnnnnnnnnnggcacgaggaggcaccaccttgttagagtttgggaggaggccaagaaataaaggttaacatccaaactccttgagctgggcagttaggacagttttccactgggccctccaagccattcttccaccaggtccctggcctgcaaaggtgagacccctttgttctttcccccttactgcttcagttttagccaagccatgctgcacttttgaacgaggcatcctagctgtcacttcctccagcagttaacccctctgtccctcggttcctcaactggataacagtagggttgtcggaggatgaaatgagttaatatgggtaa

SEQ ID NO: 33869 - DNA, 396 bp, Homo sapiens
  misc_feature (1)...(396): n = a,t,c or g
ttganaccgtanncatgctacgaatttaatacgactcnnnnnnnnnnnnnnnnnnnnnnnnnnnnnnnnnnggcacgagcttaaatctatcaatggggaagaatgttttttattaggatcatatgaaaagtctgttcagctgtggaaaaaagctctacaagaaatcgaagagaaaggaggaagaaggacgtattttcttcagatacgctattatctttctctcttatactgccacctctatagctataatttaaatgatgctcaaggattgtgtgatcagctagcaagagaaatcctgagatggtcccaactacctgtaaaagaaaataaagatttttcaggtgctgcaaagtctcattttgagtgtggaatggtggccggngttcatnctgaggc

SEQ ID NO: 33870 - DNA, 396 bp, Homo sapiens
  misc_feature (1)...(396): n = a,t,c or g
ttganttnganacnttatgactgantacgaatttaatacgactcnnnnnnnnnnnnnnnnnnnnnnnnnnnnnnnnnnggcacgagcggaagaaaaggatgttcctattattactatgccatcacaactgagtgacagaagattctacagatagaagctttgttcacagtggtgactatcagcaaggaggagggaaagcagtcacttgagcctagtgctgtgaaatttaatagaggcctcgagacgtgaatatttgcttttgattcaatacagctctgttaactaactcagagaactgcaactcatttcttggcttctgaaagtgtagggagatttaangaaaatgattttttcctctaaggtttttaacccatgnccnttngggtttcaattgga

SEQ ID NO: 33871 - DNA, 386 bp, Homo sapiens
  misc_feature (1)...(386): n = a,t,c or g
ttgnnttcgttacatttgactgnttacgaatttaatacnnnnnnnnnnnnnnnnnnnnnnnnnnnnnnnnnnnnnnnggcacgagggctctgagggtcaagacagaagctgggctaagaagtctaaggtaagcaaagtcaacctggacctccccagaaattagccaaaaatgtgggtatgggacttaggaaaaaagttaggcttgaaatagagatttgggagcaatctcccaagagctgaagccaagaagagagtgccaagagaaacacagatgactgtcaaagcctatagaggagcccatttaagggagggagggaaaggaggcagttnctttggcagtcaaannacgcttncccaaaancccaaaacacttngggccaggattg

SEQ ID NO: 33872 - DNA, 388 bp, Homo sapiens
  misc_feature (1)...(388): n = a,t,c or g
ttganaccnttnccatgctacgaanttaatacgactnnnnnnnnnnnnnnnnnnnnnnnnnnnnnnnnnnnggcacgaggcgttnnnnnnnnnnnnnnnnnnnnnnnnnnnnnnnnnnnnnnnnnnnnnnnnnnnnnnnnnnnnnnnnnnnnnnnnnngctgcacgctnnnnnnnnnnnnnnnnnnnnnnnnnnnnnnnnnnnnnnnnnnnnnnnnnnnnnnnnnnnnnnnnnnnnnnnnnnnnnnnnnnnnnnnnnnnnnnnnnnnnnnnnnnnnnnnnnnnnnnnnnnnnnnnnnnnnnnnnnnnnnnnnnnnnnncttagcatatctaantttccaaataatatacccnttaattnaggaanaanattttnggaagccncntaat

SEQ ID NO: 33873 - DNA, 392 bp, Homo sapiens
  misc_feature (1)...(392): n = a,t,c or g
accgtntgacatganacgaatttaatacgactnnnnnnnnnnnnnnnnnnnnnnnnnnnnnnnnnnnggcacgagtgaaggtccatcagtcacacagtaatgaggacctaattatcattgtgatttcttttattaacactgtcactttttccgttaagtgcttttgcatctgtttcatctacggaattgtttcagtatgagccctcttctgccttaaacataagtgaattcattctcctttcagcttttccttcctggtttcctcctgtgtatagtggaggttggtgctcactcttggccttctgagcttancaaaaanaactatgggcagttntncctgaaaggggaanctcantgggccagaaaaaacnttggggccnaagnggaaggcc

SEQ ID NO: 33874 - DNA, 396 bp, Homo sapiens
  misc_feature (1)...(396): n = a,t,c or g
ancgttngcatganacgaattaatacgactnnnnnnnnnnnnnnnnnnnnnnnnnnnnnnnnnnnggcacgaggaaaagttggaagactctagtacagaaacccttgaacgcctgtcacctatattaaacaaatgatattttgtcatatttatatatcttttttgatatatattcctttgtatctcttttttttgcacttaactgtttgaaagtgaatatagacatcatgacacttcaatgtgaatctcttaaaagtaaagctgttctcctacgtaaccacagtaccattatcactgctaagaaagattattatatcttcatgtcctctganatctagcccntagnccaaatccctaaatgggcctnaaaagggctttaanaccngggnttttttc

SEQ ID NO: 33875 - DNA, 405 bp, Homo sapiens
  misc_feature (1)...(405): n = a,t,c or g
ttganatcgttgacctttngactgnntacgantttaatacgactgnnnnnnnnnnnnnnnnnnnnnnnnnnnnnnnnnnggcacgannnnnnnnnnnnnnnnnnnnnnnnnnnnnnnnnnnnnnnnnnnnnnnnnnnnnnnnnnnnnnnnnnnnnnnnnnnnnnnnnnnnnnnnnnnnnnnnnnnnnnnnnnnnnnnnnnnnnnnnnnnnnnnnnnnnnnnnnnnnnnnnnnnnnnnnnnnnnnnnnnnnnnnnnnnnnnnnnnnnnnnnnnnnnnnnnnnnnnnnnnnnnnnnnnnnnnnnnnnnnnnnnnnnnnnnnnnnnnnnnnnnnnnnnnnnnnnnttgacggntttanatnctncncaancttantaaataatngctttttaaaggnttnaaaaaaac

SEQ ID NO: 33876 - DNA, 461 bp, Homo sapiens
  misc_feature (1)...(461): n = a,t,c or g
annnnnnnnnnnnnnnnnnnnnnnnnnnnnnnnnnnnnnnnnnnnnnnnnnnnnnnnnnnnnnnnnnnnnnnnggcacgagccacattgtttttgagaagatgggttaaaaccagttacaagtgactaatattaaaatttactctctaagaagtgatgagtaaaatggttttatcaagtcttgtgttttattaatggcatgaaatatagaaaagcaggcttagagatactattttttacagttggataaacttttgtacacagtagaaatctgattttgccatgtgtttttttgtttatgagggagaagtgttcaatgactttttcccaaagatttttttttttcattcagtgaattacaaaatgtgctagaaaaatataatggaaatgtaccttnnnnnnnnnnnnnnnnnnnnnnnnnnnnnnnnnnnnnnnnnnnnnnnnnnnnnnnnnnnnnnnnnt

SEQ ID NO: 33877 - DNA, 540 bp, Homo sapiens
  misc_feature (1)...(540): n = a,t,c or g
tntnattnnttnnggntntngnnnntnntnnnnnncnngtngntcggttttccnnnnnntnnaagagtgnnttgatgccntngttggaaacgtttgaatgatacgaattaatacgannnnnnnnnnnnnnnnnnnnnnnnnnnnnnnnnnnnnggcacgagtccaggctgggtaacaaagcgagactcccatctcccaaaaagcagttctggaatagaactcacgctagatggatagaccagtggacactttggaaccttggggctggggaggaaactgcccatccagtaaacccccaaaaagccatttgttctgcactacgtatattgcttattctttctggtcttaagtacttgcctctcaacctccctttttagtaaaagacaaggccacgtgagaggcgggactatcaacattgtgatgaatttacttgaaacccagtgcccaaaatcaatgtaggtagccaagtccaaaaacctgttctagtccaactagtgaaatcaaactgtgatacttggataagcttagaaggaaacgtgg

SEQ ID NO: 33878 - DNA, 475 bp, Homo sapiens
  misc_feature (1)...(475): n = a,t,c or g
ttggannccnttnnttgganancnttnnnnnnnnnnnnnnnnnnnnnnnnnnnnnnnnnnnnnnnnnnnnnnnnnnnnnnnnnnnnnnnggcacgaggggagaagcaggtatgttctttgctgtcctaggtcattggtggccccaatgaaactcccagtcagagccttggtgccctttgcagaggagatgcttgcactctacatcttttcccaccccagccacgtgtccgcggggcatccagaatggacagtcctggaggtgctctgccacggtgggggcaacactcctgtcctcgtttcagaaaacagtggggatgtttccatcccagaaggagctgccagaaaggcagaggcccttctgctagctccacgcccccatccccctgtgccaggcagccccttggcaggagcaagccccacagatgcgatgagggcctcagattggctcccaggggccacgtcacatctgtgggct

SEQ ID NO: 33879 - DNA, 475 bp, Homo sapiens
  misc_feature (1)...(475): n = a,t,c or g
ttgnnnnccnnnnntttnnnnnnnnnnnnnnnnnnnnnnnnnnnnnnnnnnnnnnnnnnnnnnnnnnnnnnnnnnnnnnnnnnnnnnnnnnggcacgaggtgaagacacaaatgccaggaggtaggagagcactttccacgttaggtgtgagagctcctctcagccttgccttctaaactaagtgacttgctatcagtcttttcaggttgttttgttggtttggtttgggttttttgtattcattttatgattagagctataaaatgaataaatatattaaatattctccattactcctctagaacattgtagagaatattgtgttttgctggcctggtgtctgcttcctccagacgtgcactgtatgtatcaatccagaaacgtctgacgnnnnnnnnnnnnnnnnnnnnnnnnnnnnnnnnnnnnnnnnnnnnnnnnnnnnnnnnnnnnnnnnnnnnnnnnnnnnnnnnnnnn

SEQ ID NO: 33880 - DNA, 469 bp, Homo sapiens
  misc_feature (1)...(469): n = a,t,c or g
ttgaaaccgcttgacatgattacgaatttaatacnnnnnnnnnnnnnnnnnnnnnnnnnnnnnnnnnnnnnnnnnggcacgagcaatatctttgctattatcagacatttgtctgctctttcgcttttcagaagtagtttttcttaagttcactaacaaagcaaacctggttgtggatttcatggaagttaaaatgctgtaactatgtggaagagcctacgttatggggagctcagtctcctttctaaggacatatgccatcttgccatttcttttattatactttgatgtataatgtataaatatcgttgtatacttttttctattattattttatataatttattagacttatttcatgacaacaaaaattagttttaatagcttgtgttattttttaaaagtnnnnnnnnnnnnnnnnnnnnnnnnnnnnnnnnnnnnnnnnnnnnnnnnnnnnnnnnnnnnnnnn

SEQ ID NO: 33881 - DNA, 472 bp, Homo sapiens
  misc_feature (1)...(472): n = a,t,c or g
gnnnnnnttgaacccttgacnnnnnnnnnnnnnnnnnnnnnnnnnnnnnnnnnnnnnnnnnnnnnnnnnnnnnnnnnnggcacgagggcatgctggggattctggtctcaatcgcaagaagaccacagtgagccccgtgaactattggagccccatatatgtgtgtttctgatttttgtaggataacactaagtgttcagctgtttattgacctattacaacttagagtatgacttacagtgattgcacccaggatgataccttataatttacagtgagctggtgtctcagaagaggatggaaagtgaaatcctgtggcatttgggattctccctttgaacagtgaaagaaccaaacagaagccagttctgttatgtcagcatgctctaccacagaagccaccgggcttgtggttgatcagcttgctccgtctgtaaggtgggcatggctcttgtgagggagcagatggtac

SEQ ID NO: 33882 - DNA, 435 bp, Homo sapiens
  misc_feature (1)...(435): n = a,t,c or g
nnnnnnnnnnnnnnnnnnnnnnnnnnnnnnnnnnnnnnnnnnnnnnnnnnnggcacgagtataatcttaccacctgtggtgctaccctgtggaattcaggatatcaaggcatacaggacctggggaacagatttcccccactggcactgaacacgatgcagtattccttgtgaacaagagaacaatttcatgttgctttcagaaacatcaaaggatgtcaagtaactgctgcctcctcaggctgacctctatggcatccaggatataaattaggacaataccctgtagttttttctcagaggccttgaatagcaatgaaaactaggctcaaactagagagagagctatattctgccatcctactgtccctgtccctgtccctgttgagctacacaatgtttgggatctccaaaaaaagttattcaccccttcatg

SEQ ID NO: 33883 - DNA, 479 bp, Homo sapiens
  misc_feature (1)...(479): n = a,t,c or g
gngnnnnnntttgaaaccgctnnnnnnnnnnnnnnnnnnnnnnnnnnnnnnnnnnnnnnnnnnnnnnnnnnnnnnnnnnnnnnnggcacgagaattgctgcttcattgtgctatgcatagaagtggtgcagaattcttgggatttgttttttctacactacccccttcctttgctctccatctcagaagactagaagacaacttggtaagtgttgaatatattgtttctcagacttcttcactcaaaaaccaaaaccttcatatgacccacatctgctgaggatttacttgatggtgaccaagatgacagctgcccactgctaaacaacccaatgtcaacaactctttttcttgtctttctgctctaatgggacatcttctctgttttatttcttgagcagaaatttttcttaaaaccatcaaatgaacagtgaaattggcttggtcattaggaatatgaaacagaccaggcatggtgg

SEQ ID NO: 33884 - DNA, 465 bp, Homo sapiens
  misc_feature (1)...(465): n = a,t,c or g
aaaccnnnnnnnnnnnnnnnnnnnnnnnnnnnnnnnnnnnnnnnnnnnnnnnnnnnnnnnnnnnnnnnnnnggcacgagccctggcaagttgaaaagttaaggtggccccaaactcttgctagatctgacatgaaccagaggttgaatctgggacatacagtctgggactctgttgtctagcggggttgaactcagctcccaccggcaccagataagcttagaaattttctgcaggcttcggtaggggagatgctaaagagcaaaatgacccctaagcctatctggtgttagtgggagctgctttaacagtgtatcatctaaatatttgttggtgctagatgttctgctttgttgttggctcagtactagataacaaaatcacagatgtgtgagaggcatgtgtgcttggaggtggaagctgggtaagaagagacattttaggctgggagcggtggctcacagct

SEQ ID NO: 33885 - DNA, 475 bp, Homo sapiens
  misc_feature (1)...(475): n = a,t,c or g
tttgannnccntnnntttgaananccgtnnnnnnnnnnnnnnnnnnnnnnnnnnnnnnnnnnnnnnnnnnnnnnnnnnnnnnnnnnnnnnnnnggcacgagcaaaaacaaaacaaaacaaagaatccctgttgcctcaccatacttcatgcatcctacccctatagcacttctgatgaaattgcgtgccgtagatttagcaatttagagaattctagcttgtttgtatgggtttaaagtttgcatgacatttatgtttctattgttggtctaaagttagcccagagattagcagggagcagcaggctcagagagttgtcttccttctttacttggtactgcatctctaggcttggtagctcttcagtaaatactctcaaaaaatacttatttttaagaagacatttatgtgatatttataaacaaattaatcctcagtggttagaatatgcagtgaaatagcaagcagacaatcg

SEQ ID NO: 33886 - DNA, 198 bp, Homo sapiens
  misc_feature (1)...(198): n = a,t,c or g
gcgtgnnnnnntttgaantcctttggtttggacancntnnnnnnnnnnnnnnnnnnnnnnnnnnnnnnnnnnnnnnnnnnnnnnnnnnnnnnnnnnnnnnnnnggcacgagataatgttagagtcagatgaaaagatgagacagggaggcttttgagagcagagaaggatcagggaaagagtgatttttttttttttt

SEQ ID NO: 33887 - DNA, 480 bp, Homo sapiens
  misc_feature (1)...(480): n = a,t,c or g
ggtgttgnntctnnaaacccttnnnnnnnnnnnnnnnnnnnnnnnnnnnnnnnnnnnnnnnnnnnnnnnnnnnnnnnnnnnnnnnggcacgagtgcatagggctcggcgtggaggaactggagcgatgttcgggaggtaagagttgtcaggaagaattggatttggggataagggaagacaggatcaaagatgacttctagtttgctagctctagcagctgggtaagtactgatagcatttaagacggggaagagtgaagtaggagcaggtgtggtaaagacaagcatgcgttctcttttcagagtttgctataataactatcacccacaattacaaggaaaaagccaaattcatgcattttaattttccttttttagttatttataaagatcaatttgttcaatttgaggaacattttttctgcaatggcttttctgaaatcattaaaaagtataacaataacatacatatggtgaaca

SEQ ID NO: 33888 - DNA, 377 bp, Homo sapiens
cctcgaggccaagaattcggcacgagtatttatgacctggacctttcccttacaccagaaatggcttgaacttacaccccatgggaacctctttctttctggttctgcgtgcaataaatgcctatgaatgagacacatctgattgattcgtcaactcataaaatgtttttgtttgagcggtcaggaaatgtagaggaggaggggggagtttatgaccagcaataaatttatccttaagtagaaatattagatattggctcatggcattaataaatcatgcctccctagttctttttaggtgtaaacttcctaagtacatttagattcatgtttattaaataaaattattcttaaatcaactgcttttaaaaaggcaa

SEQ ID NO: 33889 - DNA, 437 bp, Homo sapiens
  misc_feature (1)...(437): n = a,t,c or g
nnnnnnnnnnnnnnnnnnnnnnnnnnnnnnnnnnnnnnnnnnnnnnnnnnnnnnnnnnnnnnnnnnnnnnnnggcacgagtgaaaaaaggtgtgtttgttgaattcatgccttttttcaatggagtagagaaatcctactcctctgtatccctaattccttcaggtaaatgttacagtagggagcagcagggatttaggtggaaggaaggatgtatatcctgcctaaaagcacttccactaaaatttaaaaactgtatgacactttctgtggaagagattcagttagttgctattatgtaatctttggaataaaacattgtaagtgcttaaatgtttgttcagtgaaatgtagttcatttcctagcctaagataagtaaaggggatgagagtcccttaaggtaatattaattaagcggcgcaagcttattcccttta

SEQ ID NO: 33890 - DNA, 426 bp, Homo sapiens
  misc_feature (1)...(426): n = a,t,c or g
nnnnnnnnnnnnnnnnnnnnnnnnnnnnnnnnnnnnnnnnnnnnnnnnnnnnnnnnnnnnnnnnnnnnnnggcacgagagcctcaactctgagttattactttagttggatatttcacagagatgtaattctgttaattttaagtcttagaagtctacagaaatcacttgtgaaaaatgaaattttatgaattactttgtcttttaaagtatgctgtttcggatataatttgcttttcatttttcagaaacattttcattttttacattaataatgacgacgattaagtttctttttcaaagaggtcacattcaggtacttaacatttttaattctcatcccaaatagtggaaaattgannnnnnnnnnnnnnnnnnnnnnnnnnnnnnnnnnnnnnnnnnnnnnnnnnnnnnnnnnnnnnnnnnn

SEQ ID NO: 33891 - DNA, 507 bp, Homo sapiens
  misc_feature (1)...(507): n = a,t,c or g
attnannnnnnnnnntnnganntnctntannnnnnnntntnnntngntnnnttagnnnagngggntnnnnttganacatttgactgatacgaannnnnnnnnnnnnnnnnnnnnnnnnnnnnnnnnnnnnnnnnnnnnnnggcacgagatgatcttcgtttttcatatgaggaaactaggcatatggatgttgattaatttgcccacggtcgctcagctagcaatagcacagcgtatttaaatttagccaccctggatttagtttccttacacttaaccattatgcatcatggccccattttacagtgggcttgagtctttgtcatataacccagtaggttagcagccactattccaaccctgtagattgactctagggtccatgttctttacccctgcaccgtgctactaacgtaggtacaaaatgtcctcagaaactcactttatacggaagctcagaggagggtccacaacccangcaggggganacgatggtgtcanggggag

SEQ ID NO: 33892 - DNA, 445 bp, Homo sapiens
  misc_feature (1)...(445): n = a,t,c or g
tgaantcccttttgannaccatttatgacnnnnnnnnnnnnnnnnnnnnnnnnnnnnnnnnnnnnnnnnnnnnnnnnnnnnnnnnnnggcacgagcagctctagccaacttgtcaaaataatgctgctaattacccctgatctcctttaatgggaagctgctcctaactccacaaaggagtaaatgaggggtctacagcacaaacccgggagcactggcattttttgagcttacagtgagctgggggtggggaaagcggcagaggggagtgtcctgagaaggtcccagaaatctccacattgattactccaggtctaaatactagcttgaaaggggaattagactttatgtattgccaaaagctattggtattctcttgctaagcatgtcaccaactgctgaatgttcagagcctactatgaacttgaaagaaaacagagcattg

SEQ ID NO: 33893 - DNA, 441 bp, Homo sapiens
  misc_feature (1)...(441): n = a,t,c or g
ganaaccgttttgacatgattacgaatttaatacnnnnnnnnnnnnnnnnnnnnnnnnnnnnnnnnnnnnnnnnnggcacgagctggtatgaaatgcagctgggaatgtgtggaagagtcaagatatggaaggatcaagatatgtgtctggaggacattgagactcactggagggctttaaacccaggaggggcatggctagagttttagggtacatggatgatttgatatgtttgtgagtatgacccactgtttaccctacaatcaccagtttccacagttgcaagaggggagggtgtagaaatggctcgggagaaagccattcctattaatatattttcttaaaatccctggatgcatgcagcttactctatgacacgattgattaaataacaccttataaagaatcaggctaggcgcagtggctcatgcctctaatcc

SEQ ID NO: 33894 - DNA, 444 bp, Homo sapiens
  misc_feature (1)...(444): n = a,t,c or g
ttganncccttttnnnnnnnnnnnnnnnnnnnnnnnnnnnnnnnnnnnnnnnnnnnnnnnnnnnnnnnnnnnnnnnnnnnnnnnnnggcacgagatgggatcagacctggtggcatctgaggtgaaggtgagtgaccaattcaaaatggatactctgggaccccaggtagatgttctcaccctagaacatgatagtcagggtggtgaattagctgtgtgacgatggacaggtcactgggcctctctgagccccagtttgcatggtgggaagtttgcatgttcaaacaaagtttgagtttgtttctcccctgtgatgggtgccaggggagaaacagtaaacaaatgcagtgacctctaggaaagccaagccctgtgcccacctctagtgagcatcatgagacagtctttgttctttgattctgggactggactagttgggggggg

SEQ ID NO: 33895 - DNA, 443 bp, Homo sapiens
  misc_feature (1)...(443): n = a,t,c or g
ttnannccntttnnnnnnnnnnnnnnnnnnnnnnnnnnnnnnnnnnnnnnnnnnnnnnnnnnnnnnnnnnnnnnnnnnnnnnnnnnggcacgagaactggaagnnnnnnnnnnnnnnnnnnnnnnnnnnnnnnnnnnnnnnnnnnnnnnnnnnnnnnnnnnnnnnnnnnnnnnnnnnnnnnnnnnnnnnnnnnntactattattaagtaatgaaaagatctccttccaaggtctcgagaacactgtagctaatttttggatatccatgaaggtaggggatactaaaaataaacctcttgtgaaaactaagaaacaagtacactgctagaacgatcaagaaagcatggagaaaatggtgaagacagaaatccagtaggaataaccaatctaaagagaagtttgaagattggctgggaaggctttgggtaaatatcaaagtacca

SEQ ID NO: 33896 - DNA, 436 bp, Homo sapiens
  misc_feature (1)...(436): n = a,t,c or g
accgttnnnnnnnnnnnnnnnnnnnnnnnnnnnnnnnnnnnnnnnnnnnnnnnnnnnnnnnnnnnnnnnnggcacgagctggtattcaaataccctcaaatccctgctcctaaacttcctaactgtaggcctatttatcccatgtctgaaggccaagattatgcaaaactgaagtgccaatgggtttacatggttcactccaggtggaatgaatccctttaccatcatacttccatggtaagtttaccagtcccctaggtctatcaaatgccacttcctctttgaagccttgccctcttcccttcagctaaaattaacctctgcctggcttannnnnnnnnnnnnnnnnnnnnnnnnnnnnnnnnnnnnnnnnnnnnnnnnnnnnnnnnnnctgaggtgggaggatccgcgggaggccgaggtgggaggatcgctg

SEQ ID NO: 33897 - DNA, 386 bp, Homo sapiens
ggccctcgaggccaagaattcggcacgagcttaactctatccccaatacactctctcacagagacttttcttttccttctgagaccctactccagcttgtagttctaaatctgtgattatgcactgtctgtcttcctcttgaggtcaggggccatttcttttgttctctgctatgctcaggacccagatcaaaggagctcagtaactatttacaggcgtacatcatatgtggaggacacttatgctgtgatggccccacacacagcttcctttggggtctgtcccctgctctccgttacccgcgtggtagccactgagcactggctcttcctggcttcactctctggcatcaaaacttatcagtcctacatctcagtcttttgcaa

SEQ ID NO: 33898 - DNA, 439 bp, Homo sapiens
  misc_feature (1)...(439): n = a,t,c or g
ttgataccgttttgacatgattnnnnnnnnnnnnnnnnnnnnnnnnnnnnnnnnnnnnnnnnnnnnnnnnnnnnggcacgagcttagacaagactatttctgagtacctgttataaaattctgaggttctttaagactttacaagtccataattgaatgaaatctttacgtttatccctgttttacatgctgaggtcaccagaataagtatggtcataatatttaccttttagtatattagcctttgacttactagccaagttggttggtggtgctattaagggtaaagtaacaggtaacccctgtgggccagttgggttcatggcccaaggttgctccactgcttagccatctcagaaataaatgcagggttgcaaggttaaccaagaatatttggaggaatgcagatccatcatcactgaaggaaaatcaatgccat

SEQ ID NO: 33899 - DNA, 443 bp, Homo sapiens
  misc_feature (1)...(443): n = a,t,c or g
ttganaccttttgaanaccgttatgacnnnnnnnnnnnnnnnnnnnnnnnnnnnnnnnnnnnnnnnnnnnnnnnnnnnnnnnnnnggcacgaggagagagctagcaccatgagccctggagaaacatggattagggaaccactcccacagaagataattatattcccagaccctagaacaggggccatgacaacatgtgctgactggatttcaggactgctatggccgagagatggctatgttcctctcctgtccctcttcttactacaattaacttactcctatctcattattgtatatagggcatatgcggagcagataacctgtctaattcacaagtttctcaatcaagaagagctgcaacaaaattactacatgtgaaagcctcatgtgtatccagaactgatgcataccatgagatcatcaattcaaccctgaggtcg

SEQ ID NO: 33900 - DNA, 482 bp, Homo sapiens
  misc_feature (1)...(482): n = a,t,c or g
ggngnntttnnnnnntttgganancgttnnnnnnnnnnnnnnnnnnnnnnnnnnnnnnnnnnnnnnnnnnnnnnnnnnnnnnnnnnnnnnnggcacgagctgtgaaaaaagataggggttcatgtttcagtcttacgtggagatgtgaaatgtttatccatttacaaggcagaagtcacaaacccagacacaaggcatccgatctcgtcctctgctagatgattacagacatgttcagtgcctcacattggacctgtgtatttatcaccgcaagttctcagcaggatgtaagttgtcttcgtcagtgttcttggtggggacaccaccagcgctaggcatgaccgatgagttccttgtctgtgaaccatgactgggctcttggacttctggagctgcttatacttcctgcaggtgcctgctgtgtattcaagggtgtggtggggaacctgcagtcaagttccaggagcagcgaggctgcatgc

SEQ ID NO: 33901 - DNA, 411 bp, Homo sapiens
  misc_feature (1)...(411): n = a,t,c or g
ggccctcgaggccaagaattcggcacgagggcgacagctctaggggaatctgccaaatcgccagtgacagagcttcaactttaatgcagtgggcacaggctccactgnnnnnnnnnnnnnnnnnnnnnnnnnnnnnnnnnnnnnnnnnnnnaagttttattttctataccttcttcagctctcttaatttgtcaacccactgaaattaaccttttatccttatgactttactacatctattctcaaaatgcctaattgccaaatacaataacctttttttcagtccttatctgaatttttttcctctcttgtccttttaggaactcctgactttcttcccaatttcatatattcaatgagacaggggtccccaaaccctgggctgcagaccagcaccagttcatggcctgt

SEQ ID NO: 33902 - DNA, 439 bp, Homo sapiens
  misc_feature (1)...(439): n = a,t,c or g
nnnnnnnnnnnnnnnnnnnnnnnnnnnnnnnnnnnnnnnnnnnnnnnnnnggcacgaggagtgctgtgagaggcatacagcagtcactttggagtcaaccaaaaccagctgggttgtggctcctagagtgccatggaggtatgagccacgttacattaggaagggcagttcacacatagacacctgggtcccccatcatgggcctgacttagcagctctggctggggcctgggagcctgcatttctaccatgttctccaaggtgaggaccagccacaccaggccacctggtaccctaacaggcatgcccacagtccacagcacagctcaccattttcttcctcccacgagtcactttttatgtgtactctttgaaaccttcagcccttaatccacagagtgagggaagttaagccacctgcctctgttagccagggtct

SEQ ID NO: 33903 - DNA, 478 bp, Homo sapiens
  misc_feature (1)...(478): n = a,t,c or g
gannnntttgataccgttnnnnnnnnnnnnnnnnnnnnnnnnnnnnnnnnnnnnnnnnnnnnnnnnnnnnnnnnnnnnnnnggcacgagggtggtgtttggttacnnnnnnnnnnnnnnnnnnnnnnnnnnnnnnnnnnnnnnnnnnnnnnnnnnnnnnnnnnnnnnnnnnnnnnnnnnnnnnnnnnnnnnnnnnnnnnnnnnnttgtccccctcccacccttccctccgagtccccaaagtccagtgtatcgttcttaggcgtcttcctgtttcctgatggcttaacctgggaaaccctcgcagagggagccggttttgagccccagggtaggggcggccgcctgggatgttcagtgatgcgcctgattactcaggtttatgttccccgtttgcattcagccaggatccgtcatggccacgttgtttttaacatacatgtttatgaattatacagaaacgttggtttcctgacacag

SEQ ID NO: 33904 - DNA, 477 bp, Homo sapiens
  misc_feature (1)...(477): n = a,t,c or g
gngnntttganaccgctnnnnnnnnnnnnnnnnnnnnnnnnnnnnnnnnnnnnnnnnnnnnnnnnnnnnnnnnnnnnnnnggcacgagatttccattttattgatgaggaaaccaacacatagaaaggtaaaggaacttgccaaaagtgatggtcacacagccaaagagctgtagaagcagcacaggaatcccagcaaactcacagccaagctctgcttttcaccttcacatcatacagtcctcagactaaaaccctaactctgaccttccaaatcaaaaatcgtactnnnnnnnnnnnnnnnnnnnnnnnnnnnnnnnnnnnnnnnnnnnnnnnnnnnnnnnnnnnnnnnnnnnnnnnnnnnnnnnnnnnnnnnnnnnnnnnnnnnnnnnnnnnnnnnnnnnnnnnnnnnnnnnnnnnnnnnnnnnnnnnnnnnnnnnnnnnnnnnnnnnnnnnnnnnnnnnnnnnnnnnnnnnnc

SEQ ID NO: 33905 - DNA, 427 bp, Homo sapiens
  misc_feature (1)...(427): n = a,t,c or g
nnnnnnnnnnnnnnnnnnnnnnnnnnnnggcacgagggaggatcacagggggtaatctgaagatcaggcctggagtgggcttacttcacctccagccactttccattggcaggattcagcagcgtgctacagagcccagctttactgtaaggatactgggaaagtcctagtcctcttgggtgtctaggaagagaaaatagtgagcacggccctggctctgcttcgttatctccattttaatagcttctcttctccccctcccaccccactcccaccatttccactgacaattccacacatccttcccttctgtgttccttctcacaaaaccttgttctcagcaagctgccaatcagccttccaggggtattaatagataacattctggggaatttcttctctcaagagtatttcctttttaatcaag

SEQ ID NO: 33906 - DNA, 440 bp, Homo sapiens
  misc_feature (1)...(440): n = a,t,c or g
nnnnnnnnnnnnnnnnnnnnnnnnnnnnnnnnnnnnnnnnnnnnnnnnnnnggcacgagcataaatgtgtctataatatacatttctagtagtttgattgctgtttcaaaaataaaaaattttgatagatattaccaaattgctannnnnnnnnnnnnnnnnnnnnnnnnnnnnnnnnnnnnnnnnnnnnnnnnnnnnnnnnnnnnnnnnnnnnnnnnnnnnnnnnnnnnnnnnnnnnnnnnnnnnnnnnnnnnnnnnnnnnnnnnnnnnnnnnnnnnnnnnnnnnnnnnnnnnnnnnnnnnnnnnnnnnnnnnnnnnnnnnnnnnnnnnnnnnnnnnnnnnnnnnnnnnnnnnnnnnnnnnnnnnnnnnnnnnnnnnnnnnnnnnnnnnnnnnnnnnnnnnnnnnnnnnnnnnnnnnnnnnnnnnnnnnnnnnnnncgc

SEQ ID NO: 33907 - DNA, 480 bp, Homo sapiens
  misc_feature (1)...(480): n = a,t,c or g
gnnnnntttganaccgtnnnnnnnnnnnnnnnnnnnnnnnnnnnnnnnnnnnnnnnnnnnnnnnnnnnnnnnnnnnnnnnnggcacgagcaacacacaccggggcctggttggcgtgggggcaggggggtggtgcggagaggggtgaggggagggcgaacaccaggacaaagagctaatgctcgtgggtcttaannnnnnnnnnnnnnnnnnnnnnnnnnnnnnnnnnnnnnnnnnnnnnnnnnnnnnnnnnnnnnnnnnnnnnnnngtatcccagaacttaaactaaactaaaattttttttaagtgaattttagccactagattttagagttgaagcatgccatggtacttgtgattaggcatctacctgtgtatttattcacctgaacacctggatgtgtagaataaaaattgctcaattgttgaaggctgctgcatcgctctatgctacttgttctgttaaagtatgttcagggag

SEQ ID NO: 33908 - DNA, 480 bp, Homo sapiens
  misc_feature (1)...(480): n = a,t,c or g
gtnnntttganncctttgganancgctnnnnnnnnnnnnnnnnnnnnnnnnnnnnnnnnnnnnnnnnnnnnnnnnnnnnnnnnnnnnnnnggcacgaggtacaatgccagggacaccgtgttctatagagccgcggtgaggctgcgcgatcagggaggtgttgttctgaggcaggcccggcgcgaggtggacagcatcggcttggaagaggcctcggggatgcacctgcctgagcggcctgctgcggcaccgcggcggcctttctcctgggaagacgtggacaggttgctggaccccgccaacagagcccacctgggcctggaggagcagctgagagagctgctggacatgctcgacctcacctgcgctatgaagtccagcggctcccggagcaagcgggcaaagctgctcaaaaaggaaattgcccttctccgaaacaagctgagccagcagcacagccagcccctgccacggggccag

SEQ ID NO: 33909 - DNA, 420 bp, Homo sapiens
  misc_feature (1)...(420): n = a,t,c or g
ggccctcgaggccaagaattcggcacgaggtcagattataaacaaaatactatttgggagcatgaactcaaaggtggatggtaagatgatcaaagccgttggtaatcatgatgctgtgtgccccagtagataggagatttatataggctaacttctgctgcactgtgctggagatagactttctattttgttttgttgaacttctcttttatcataaaaccagtccccttaaattatttttttcaggcagtttagttaataattttatggttatgagcccagcctaataatgccccccagtgtaacataaaaaacgtacagcaacctgtactcccaatttgattagatttgagtcttannnnnnnnnnnnnnnnnnnnnnnnnnnnnnnnnnnnnnnnnnnnnnnnnnnnntagcagatg

SEQ ID NO: 33910 - DNA, 482 bp, Homo sapiens
  misc_feature (1)...(482): n = a,t,c or g
gntgnntttganncctttganaaccnttnnnnnnnnnnnnnnnnnnnnnnnnnnnnnnnnnnnnnnnnnnnnnnnnnnnnnnnnnnnnnnnggcacgagctgtgaagagtgcagtgactattggtattgtttggggccactgccttgattcacttgactcatgctaaggcatcagcagttgacttcttgcttttgtgccattagtgtaaatgtcaacatggtttttcttaaaaaaaagggcagatcatgtcttaatgttgctgtgaaaatagttttgactttgtgaacctctggaagggtcttaggggcttctagtgattcatagagcacattttgagaattgctgctttaaactctgatgctacctctctagtcacgggaagactgcttagcttgtatgaaaggaaagatggttatttgcaacctgggagcttccaagggagcttcatgtagttagggatgggagggagagggaagcagta

SEQ ID NO: 33911 - DNA, 437 bp, Homo sapiens
  misc_feature (1)...(437): n = a,t,c or g
tganacnnnnnnnnnnnnnnnnnnnnnnnnnnnnnnnnnnnnnnnnnnnnnnnnnnnnnnnnnnnnnnnnnnnggcacgagcgcagacaacagcaagacgggagcgagtaaaggagggatcctgtccaaggcctgcgattacatccgggagttgcgccagaccaaccagcgcatgcaggagaccttcaaagaggccgagcggctgcagatggacaacgagctcctgaggcagcagatcgaggagctgaagaatgagaacgccctgcttcgagcccagctgcagcagcacaacctggagatggtgggcgagggcacccggcagtgacgcccgccaccaccacgcagccgccgccgcccacgccggcctctgctgccccttccccagcccttagcacagagagggacacatgcccctccccagctgcgtttttttatag

SEQ ID NO: 33912 - DNA, 383 bp, Homo sapiens
  misc_feature (1)...(383): n = a,t,c or g
ggccctcgaggccaagaattcggcacnnnnnnnnnnnnnnnnnnnnnnnnnnnnnnnnnnnnnnnnnnnnnnnnnnnnnnnnnnnnnnnnnnnnnnnnnnnnnnnnnnnnnnnnnnnnnnnnnnnnnnnnnnnnnnnnnnnnnnnnnnnnnnnnnnnnnnnnnnnnnnnnnnnnnnnnnnnnnnnnnnnnnnnnnnnnnnnnnctcgactacacacttgtgcaaaggaaaagcacttgtgcaattatttgagttctaaactgaacaaatgtctttttcaagaacactatttttatttaaaagaaaaactgactgcaaactgcagtggcagtcattttctaaaaattagacaaagcgggccctttatctccatgatatttctcc

SEQ ID NO: 33913 - DNA, 439 bp, Homo sapiens
  misc_feature (1)...(439): n = a,t,c or g
anacnnnnnnnnnnnnnnnnnnnnnnnnnnnnnnnnnnnnnnnnnnnnnnnnnnnnnnnnnnnnnnnnnnnnnggcacgagaactggaggtatggatattaaccacagaggaatatggaacatagaacttaaaatcatgctacgcnnnnnnnnnnnnnnnnnnnnnnnnnnnnnnnnnnnnnnnnnnnnnnnnnnnnnnnnnnnnnnnnnnnnnnnnnnnnnnnnnnnnnnnnnnnnnnnnnnnnnnnnnnnnnnnnnnnnnnnnnnnnnnnnnnnnnnnnnnnnnnnnnnnnnnnnnnnnnnnnnnnnnnnnnnnnnnnnnnnnnnnnnnnnnnnnnnnnnnnnnnnnnnnnnnnnnnnnnnnnnnnnnnnnnnnnnnnnnnnnnnnnnnnnnnnnnnnnnnnnnnnnnnnnnnnnnnnnnnnnnnnnnnnnnnnnnn

SEQ ID NO: 33914 - DNA, 465 bp, Homo sapiens
  misc_feature (1)...(465): n = a,t,c or g
ggntntgtctttnatangatactcttttannnnnnnnnnnnnnnnnnnnnnnnnnnnnnnnnnnnnnnnnnnnnnnnnnnnnnnnnnnnnggcacgaggttaaaaccctgagcattggcatggattcaagttctatctttaagtaataacaaagttcaataatagttgtaaaacacagtgattacatgtagcataattatttctacttatttctaccaactacagtaggagtgctcagtatcctccaggagattataagaattttcattcagtatttgaaatttaagtttttctcaataactgaggattgagtacacccctaaagtttaaaatagatgttgggaattgtaaaggtagggtgtttgtccattcttgcgnnnnnnnnnnnnnnnnnnnnnnnnnnnnnnnnnnnnnnnnnnnnnnnnnnnnnnnnnnnnnnnnnnnnnnnnnnnnnnnnagcctgct

SEQ ID NO: 33915 - DNA, 466 bp, Homo sapiens
  misc_feature (1)...(466): n = a,t,c or g
ggtgtnnntctntgattccnttncnnnnnnnnnnnnnnnnnnnnnnnnnnnnnnnnnnnnnnnnnnnnnnnnnnnnnnnnnnnnnnggcacgagaactggaagagaggaatacaatgaaacaatgcaaggcagttgtcaaaagtggtgcctgacgggggggtcagtgctggtggaacaggcatctaaagcttaagaacaaagagggagctggctgtgcccctaagtggccacagaaggctctgccactcccagggacttccattctccctttcttcctgcaccttcacttcccagctcccaggtatctccctgatactccttcatactttaaacttagcttcccgctctgagaccttttcttacctgcagcaagtcaaaccctgtgggaataagcagggacaagaggatgtttactggtgattctcatgacctccaattcccacccctcaaaatgagtgctgaatc

SEQ ID NO: 33916 - DNA, 464 bp, Homo sapiens
  misc_feature (1)...(464): n = a,t,c or g
ggtgtnnttctttnatnncattccannnnnnnnnnnnnnnnnnnnnnnnnnnnnnnnnnnnnnnnnnnnnnnnnnnnnnnnnnnggcacgagaaaaataaagtactcattttttgttctccatggattctatgtcttgaagcagtcctcaaactttaaggtgcaaataagtcacctgggggtcttgttaaaaagcagattcttggccgggcgcagtannnnnnnnnnnnnnnnnnnnnnnnnnnnnnnnnnnnnnnnnnnnnnnnnnnnnnnnnnnnnnnnnnnnnnnnnnnnnnnnnnnnnnnnnnnnnnnnnnnnnnnnnnnnnnnnnnnnnnnnnnnnnnnnnnnnnnnnnnnnnnnnnnnnnnnnnnnnnnnnnnnnnnnnnnnnnnnnnnnnnnnnnnnnnnnnnnnnnnnnnnnnnnnnnnnnnnnnnnnnncatgagatggcaccactgcattccag

SEQ ID NO: 33917 - DNA, 464 bp, Homo sapiens
  misc_feature (1)...(464): n = a,t,c or g
ggtgttntctcnntcctngttccnnnnnnnnnnnnnnnnnnnnnnnnnnnnnnnnnnnnnnnnnnnnnnnnnnnnnnnnnnnnnggcacgaggtctttaaagcctgaaaataaatgtgatgaagatttattctttatcatcagtactagacatgattttctccttccctttaataaagtatttgagtagaagtatgttctaggaagactagaagagaatataacttgtttaccaagatatttaaattaagtaatttgataggtgttttaaaaattagagtaaannnnnnnnnnnnnnnnnnnnnnnnnnnnnnnnnnnnnnnnnnnnnnnnnnnnnnnnnnnnnnnnnnnnnnnnnnnnnnnnnnnnnnnnnnnnnnnnnnnnnnnnnnnnnnnnnnnnntttttaaaaaatattaagtaaatggtgtaatggaactcctttaaaatatgctttatgttctttt

SEQ ID NO: 33918 - DNA, 465 bp, Homo sapiens
  misc_feature (1)...(465): n = a,t,c or g
gagtgttntnnctacnnatactctttatgactgcntacgaatttaatacnnnnnnnnnnnnnnnnnnnnnnnnnnnnnnnnnnnnnnnnnggcacgagcgcatagtagcaccttttcattgaaagtattttgatgtgataactatggtgtccaaccgtgagaaataatgtggaataatgagtggcaatgtcaaggtcgggaattagaagacctctaattcttgttttatctgccctatttgaagcaagttcagcaaatcacttaatgtctctgggtttgactagacaatctcaacagagtcctgttcacatttttaactttgtaatttccatcaactatttttcaaatggcacattagaaatatttgagactgttttgatgacatcttaggtataggctcagagaatgaaacaagttactctttaggtgcataagctgtattcagttgtagtaggatgtattagt

SEQ ID NO: 33919 - DNA, 467 bp, Homo sapiens
  misc_feature (1)...(467): n = a,t,c or g
gtgtgttnccctttgatanctgatgccctgantacnaaccaanancgactcactatctnnannttggnnntttggncctcgaggccaagaattcggcacgaggcgaagtaaaagaagtttctgggaacataatagttttgctgttctcttgcacctggcagtaatatagccacaggcatgagtaatgggagttgtcactctctgtgccagaaattagctcnnnnnnnnnnnnnaataattattaccanntgttgaaatggactaagactggntgaatgcagcagncattattcagcccttantgcaaaataatgctctttggaaaaaatctgnntaaccagataggtcacttataccggtcactatagatttacaattgtgngtgtatcctgtgctccgaaatatcttggtgttatgcttaactatcccatggtatttctattatttncagttntgctnctgnctgg

SEQ ID NO: 33920 - DNA, 459 bp, Homo sapiens
  misc_feature (1)...(459): n = a,t,c or g
gnagnntngngttgtgtnnactgatctacnantaccctcnnnnnnnnnnnnnnnnnnnnnnnnnnnnnnnnnnnnnnnnnnnnnnnnnnnnnnnnnnnnnnnnggcacgaggagggagaggctatttggtagtgttgaaataaacattaacctttgtgtaattccagcatatcttggcctattgcataatctttgccttctaggagaaaggctgaaacattgtgtggagtcaaatttcagaccaaaatacatccttatgggatcttcagcaaagacctcaatttgaatatgacctcactttgagctactgccccctggtcaccaggctcgcgtgcctcctactgcccatagtgggtgtgagggaggagcaggcagataaggagaagacattcccagtgtcctgcttgtctcttctttcacctgaaaatgaaacagtttctaaataatgcccccctaaag

SEQ ID NO: 33921 - DNA, 461 bp, Homo sapiens
  misc_feature (1)...(461): n = a,t,c or g
gnagnntggngttntgnnnctgaatncaactnantacncttnnnnnnnnnnnnnnnnnnnnnnnnnnnnnnnnnnnnnnnnnnnnnnnnnnnnnnnnnnnnnnnnnggcacgagtgaatatctctccctgatgataatcatacacatgaagctgggattttctttccctttgtgaatgtagaaccaatataatcaaatatttgaagtgtaaaacatattttgtaagctgtgttgaaggaagaaaattggtaactttaagtgggacttatcatttgttgtgtgtgctttcctcatagtgagtctaattttcacaattacaccttggtctcattgaatgaagaatttaatcgtggacgaggactaaatgtgggtgcccgagcttgggacaagggagaggtcttgatgtttttctgtgatgttgatatctatttctcagccgaattccttaacagctgccggtt

SEQ ID NO: 33922 - DNA, 457 bp, Homo sapiens
  misc_feature (1)...(457): n = a,t,c or g
gnaggtgnngtnttntatttgatttntnnatatttttntaactgccnnnnnnnnnnnnnnnnnnnnnnnnnnnnnnnnnnnnnnnnnnnnnnnnnnnnnnggcacgaggnnnnnnnnnnnnnnnnnnnnnnnnnnnnnnnnnnnnnnnnnnnnnnntttttaaggaggaatgtgtattgaatgatcaattagaatttcaggtaatgggaagaatttagaggagcattgagggacagctcatagactgtatttaaaccgtcaatttcaactgttttcagtttagcaaaagaacttacagaaatttggtatatatcttatgaaactttgcagaccctaacctaacctaggtcaggcagtatcttttactacaaaattgggataatcattttctaaataatcatgaagaaaatgttctgagtaggcagtaaggatttctctggtaacatgatgatttaaa

SEQ ID NO: 33923 - DNA, 471 bp, Homo sapiens
  misc_feature (1)...(471): n = a,t,c or g
gngnntnnnnnttgaantntgaaaccctnnnnnnnnnnnnnnnnnnnnnnnnnnnnnnnnnnnnnnnnnnnnnnnnnnnnnnnnnnnnnnnnnggcacgaggacttgtttaaatgcagattgtgagagggaggaaaaatggcaagatgtgagatttttattgaatagtcttctaccttagcccagtcacccaactgcttttttgaatcttctctgatatggatgattaaatgtagttctattttgctgtgaaaagtttgggagttttcagttcttttgtctttttccatcttcttgcaacagatttggaaaacagattcttaacctgtgccattttcagagtcagtcacctagttttgttttatttgagaagcacctgagtttgaagcaatgcaaaatatgagatccttcatggttttgtattacatcgttggaaatggatgtaaattccaaagattcagcaaataagaga

SEQ ID NO: 33924 - DNA, 472 bp, Homo sapiens
  misc_feature (1)...(472): n = a,t,c or g
gagtgcttntgcctanagagannnnatgcctnacnacgaaccnnnnnnnnnnnnnnnnnnnnnnnnnnnnnnnnnnnnnnnnnnnnnggcacgagagtgttagtttcattaatgtgaattttccagcattcagtagttgtaatgttagaaacaattgctggtcaagttcaacttgttgctattgtttttaatttgcacaggagtagtatcagaaattagtgtcactgcttgtatctagctgaattttaaacaacagaacattagttttttatgttggtgccaccaactgtaaatgacataagttagttattacaaaacacagtaattagactgttgcaaccatctaaaaccttaggcttccagtctgtgctgttagtgttaagatgtaaagtgcaatcctaagctaacattatctgtgcaagcaccatagaaacatttgcatatctgcatagatcttacaactgnactcttt

SEQ ID NO: 33925 - DNA, 462 bp, Homo sapiens
  misc_feature (1)...(462): n = a,t,c or g
gngtgttgtgnancngagaactnctnnnnnnnnnnnnnnnnnnnnnnnnnnnnnnnnnnnnnnnnnnnnnnnnnnnnnnnnnnnnnnnnnggcacgagctggcgcttacgggtactggctacattcccctaccaacccttggcgaatcggctccttgaaatagttacgagacgagcagcagcatgggggaccctggacgagccctttgtctcgtcctcccacggggaaacgggccagagggaggagtgcctgtccccagctcacgcactgacctggaactgcagccaggaaaggagccagccctggaaggtccagggccctagctctccccactaggtgtcctggcccagcctgtggtgggagggagccgagactgcaggcgaggggcgtccccagtgaatcccacccagaagaggaccccatggggctccctcagggctaccaccagggcctgtgggttgc

SEQ ID NO: 33926 - DNA, 455 bp, Homo sapiens
  misc_feature (1)...(455): n = a,t,c or g
gtgttnnnanctaaanncgnatacccttangacatgccnnnnnnnnnnnnnnnnnnnnnnnnnnnnnnnnnnnnnnnnnnnnnnnnnnnnnggcacgaggccctaaattatttactctttggctcttgacataagtagtttgttgactcctgctttatggcaagattggaactccccttctatggactgtcttgatcttcttagccacagactttcacatatgccataccctccaagcaaaccttatttgtcctcatccagagaacattcctgctttccctttattggtatcttccttggtttcatttgacctctcatccccctcctgtccttctgccctctccagcctgtcatcaatggttaccgaaataagtccaccttctctgtgaaccgaggtccanatggcaatccaaagactgtggggttctacctgggaacttggagagatgggaacg

SEQ ID NO: 33927 - DNA, 413 bp, Homo sapiens
  misc_feature (1)...(413): n = a,t,c or g
ggntnnntnnnnctntgagaccgnttgnctganacgaactaatacgactnnnnnnnnnnnnnnnnnnnnnnnnnnnnnnnnnnnggcacgagacattgtgtaagggtttttttttgttttcgttgttgttttttgagatggggtcttgctctgtctcctcggcggtggcatnnnnnnnnnnnnnnnnnnnnnnnnnnnnnnnnnnnnnnnnnnnnnnnnnnnnnnnnnnnnnnnnnnnnnnnnnnnnnnnnnnnnnnnnnnnnnnnnnnnnnnnnnnnnnnnnnnnnnnnnnnnnnnnnnnnnnnnnnnnnnnnnnnnnnnnnnnnnnnnnnnnnnnnnnnnnnnnnnnnnnnnnnnnnnnncaggcttccaacagggttggaataacgggtgggaancncttgaacttggct

SEQ ID NO: 33928 - DNA, 419 bp, Homo sapiens
  misc_feature (1)...(419): n = a,t,c or g
agntnnntnnnnntttgagaccgttgcatgacacgaactaatacgactnnnnnnnnnnnnnnnnnnnnnnnnnnnnnnnnnnnggcacgaggaaatatacaaattaatgttaaacagaaccacagtggtcagtaacaggcacatccaaggatacactagtcctgcatacatacccactggcatgtttctaccttcctaataagagctgacagccgttttgctgcatgctgtacaggacagctgctgctgcaaactcagcctctgatgggcccatagtcgatctgcccactgcatgccttgaactcagggaattcagacgaaatcatcacacactccagccagaagctagagggctgccggccttgacatttnaatgcatttttgnggcagttgcccttactggattcactcaattttaa

SEQ ID NO: 33929 - DNA, 416 bp, Homo sapiens
  misc_feature (1)...(416): n = a,t,c or g
gntnnnttnnnnnttgaganngaatgcctgacacgaactaatacgactnnnnnnnnnnnnnnnnnnnnnnnnnnnnnnnnnnnggcacgagcaaagatacttgaagcagaagctgtatctgaggaagctgtatataaacccaatttaaagcaagtttaacctgctgattgggaagaatttttatgaaaagctgtgtgcttcctgataagaaaaaaggctttcctgtttcgatcaaaccagaaccagatgagaactcagcacaggcactgcagccacggaggtttccagatagaaaaattgacacccctgagatcccataacattttggggactcatctggaatctgcggaaggagcttgctctttcattgcaataannggcncccaanatggggccttaaaaaaaactnagggacc

SEQ ID NO: 33930 - DNA, 429 bp, Homo sapiens
  misc_feature (1)...(429): n = a,t,c or g
gggtgnnttnnnnntctgantcngaaaccgttangactgccnnnnnnnnnnnnnnnnnnnnnnnnnnnnnnnnnnnnnnnnnnnnnnnnnnnnnggcacgagctcatgcctgcgtgaaaaggacagtggtgctaacacatggctcatctcccccttgacattcagcctcctttaagtgattttacaaagccccctcactttctctttcgggtcctaaattagtatgtcaggaatcaacagcttgccttctcagccaagaagctggccgcctggggacttcattcttaaccgttgtctggagccccgaaaatctntgngttccttgcctcgngnnagaagccggttcccttnaaaggccnggntttcttaanaacnnggttacatgnctccnngtnttggttaggcnntttgaacccttggccaaagggg

SEQ ID NO: 33931 - DNA, 425 bp, Homo sapiens
  misc_feature (1)...(425): n = a,t,c or g
nggtgnttnnnntctgnancncgnanacncttccgactgccacgaatttaatacgactcnnnnnnnnnnnnnnnnnnnnnnnnnnnnnnnnnnggcacgagaaataagatcactaagatcccgtaatgtatcatagacttataaaagggttcattctattcatgttaattgcaagagagaataaatttgattctactttaaaaatatataggcaattttttttctgtgttctttggaagaaaacttcccaaaagaaatttaaaaaatagaaattggatccagttgaccctgagaattaactggggagtaaagaaatgttaaggctcttttcaaaccccactgaaacccngaatcatgnggtttaaaattatacntaggaatgcccaangttttttaaantnganntccgngaggntttngaaaaa

SEQ ID NO: 33932 - DNA, 413 bp, Homo sapiens
  misc_feature (1)...(413): n = a,t,c or g
gntnnntnnnnnttgnaatctgaanccatgacacgaaccaatacgactcnnnnnnnnnnnnnnnnnnnnnnnnnnnnnnnnnnggcacgagcggcacgagctggtatatttaatggcattgattctgctggctccttcatgtgccagaggaattttataaagaacactacattctctgctgttgtcattttccaggtagtaccagaggttcctgccatggaccgaaaagaatagtgatttgggactagaaactgcgaggtggtgaaccaatagcaagcagtgagggacaatttagaaggtataatagaaaacagataaaaccctgaaggcaacagttaatatcaggcaagtgcttggtttgaagggaagtcannattgcattaacagatatcccaccgatngggaatcccaat

SEQ ID NO: 33933 - DNA, 246 bp, Homo sapiens
  misc_feature (1)...(246): n = a,t,c or g
gaggttgtnnntntttgaaaccctttganaccgtttgacnnnnnnnnnnnnnnnnnnnnnnnnnnnnnnnnnnnnnnnnnnnnnnnnnnnnnnnnnnggcacgagnnnnnnnnnnnnnnnnnnnnnnnnnnnnnnnnnnnnnnnnnnnnnnnnnnnnnnnnnnnnnnnnnnnnnnnnnnnnnnnnnnnnttgctgcactttagcctaggcaatagaataagatcctgtctccaaaaaaaaaaaaaa

SEQ ID NO: 33934 - DNA, 456 bp, Homo sapiens
  misc_feature (1)...(456): n = a,t,c or g
gnngtngtnnntnttganaccgtntgacaccgnttgacnnnnnnnnnnnnnnnnnnnnnnnnnnnnnnnnnnnnnnnnnnnnnnnnnnnnnnnnnnggcacgagtactggttcggtgactttaggcaagttggagactgggtttccttaagtgtagaatgaagacagtagcatctaacttatagagttgtaaaaattcgatcagcacactttgcacagcatctggcacatattaagtgctcagtaactagttactactgttgcttttatttttttttccaattgcgcataaggaaagaaactcgttcagcggttttactattctggatacaggatacagagataaagcagttaaactttacactctaaaggtcattttcacatttagaggctgttattgccatatccctagattgtaaattatcatttacagagcacttactctatgttaagcact

SEQ ID NO: 33935 - DNA, 438 bp, Homo sapiens
  misc_feature (1)...(438): n = a,t,c or g
anttgaanacagntatgacnnnnnnnnnnnnnnnnnnnnnnnnnnnnnnnnnnnnnnnnnnnnnnnnnnnnnnnnnnggcacgagctgggagaaaggaggattctggtttcacatcctggaagaaggaaatattcggagagctgtcctggtggctggcgacacgcagcgggttagagtgcagatgagacgttagtagcagacatgctactttgcgagtctccagcaggggccagagagctcaggccctgagagtgaattaaacttctaccaggagaatcagcagaagataaaaaaaaaaancanaacctggaaaggcggggancagngggtgagtaagtcgacaganatgccccaananacatggtgtggaggcnttgacgtganctaaggtgaggggattttcagngaaggaaatcaggcctttccaaaggggccgg

SEQ ID NO: 33936 - DNA, 454 bp, Homo sapiens
  misc_feature (1)...(454): n = a,t,c or g
ggtgnntnnttnttgantctgaanccctttnnnnnnnnnnnnnnnnnnnnnnnnnnnnnnnnnnnnnnnnnnnnnnnnnnnnnnnnnnnnnnnggcacgagaacaaagcacccgggtgactagtccgaggtcacaaagagtaaagggcagactgagactggattcctcgtcctttgattcaggacatagtgagctagtgggtgaacaagaaccttatcagcccttaagcactgtgtgcccttacagagtgactattgaaagactgtagcatacacctcgaggaaagtcccctttctagagtccacctgtattctacgcggatgaggtgcataagagctaagatattctggcggtgggtgatggaaaggaggatactttggaggctgacacatccccagcccaactttggcgtgggtttccctgggtcttcctgcgacagccctaaatcaacatg

SEQ ID NO: 33937 - DNA, 451 bp, Homo sapiens
  misc_feature (1)...(451): n = a,t,c or g
tgnntnnnnnattgagaccgcttccatgattacgaatttaatacnnnnnnnnnnnnnnnnnnnnnnnnnnnnnnnnnnnnnnnnnggcacgagagacagttcccttatgaattacttggcattatgaagtttagaactggtctccaggagtaaatgtagtctctgtataggtttatgtataaaccaggagctggtaagccatggcctgcaggccaaatccgttctatggcctatttttttaaagcgtgagagcctcgaatagttttacatttttaaagagttgtaaaataaacaataagccaaacctaaaacatttaccgtctgaccctttatagaaaacatttactgactcttggtctaaactttcctaaattataagtactagaggaaaaaatatctactgtagcacatgatttagaactattaatgtacagtgtggtaacctttcagg

SEQ ID NO: 33938 - DNA, 448 bp, Homo sapiens
  misc_feature (1)...(448): n = a,t,c or g
ntttgaataccgtttgactcnnnnnnnnnnnnnnnnnnnnnnnnnnnnnnnnnnnnnnnnnnnnnnnnnnnnnnnnggcacgagctnnnnnnnnnnnnnnnnnnnnnnnnnnnnnnnccttactattttaaagtgtacaattccaggnnnnnnnnnnnnnnnnnnnnnnnnnnnnnnnnnnnnnnnnnnnnnnnnnnnnnnnnnnnnnnnnnnnnnnnnnnnnnnnnnnnnnnnnnnnntccataccctaggcaattaccaatatgttttctgtctctatagatttgcctgnnnnnnnnnnnnnnnnnnnnnnnnnnnnnnnnnnnnnnnnnnnnnnnnnnnnnnnnnnnnnnnnnnnnnnnnnnnnnnnnnnnnnnnnnnnnnnnnnnnnnnnnnnnnnnnnnnnnnnnnnnnnnnnnnnnnnnnnnnnnnnnnnnnnnnnnnnnnn

SEQ ID NO: 33939 - DNA, 458 bp, Homo sapiens
  misc_feature (1)...(458): n = a,t,c or g
tntttggannnccntctgaataccctnnnnnnnnnnnnnnnnnnnnnnnnnnnnnnnnnnnnnnnnnnnnnnnnnnnnnnnnnnnnnnnnnnggcacgaggggaaactctggagggccctgcgggggctgggagggccgttgtctaggagatgtttatgggggaaattgacacagtgaggggcatctctgccgagggcgcggaggcctgagcagggtgatgggtgggttcggtcagcagtttcacgggccttactgtgtgccagatgagagtagatggaagccagcgcgagagaccacgatgggccgggcagcgacatctgaccatagtcaccactgatactgttctatgtccccctaggcttgagaagatgctgccttgggagactgaccctccacccatcgtgagattttgtcctgatttcacatttcacatacattaacatgtaaaacaggttgg

SEQ ID NO: 33940 - DNA, 449 bp, Homo sapiens
  misc_feature (1)...(449): n = a,t,c or g
tttganacccgntttgactcnnnnnnnnnnnnnnnnnnnnnnnnnnnnnnnnnnnnnnnnnnnnnnnnnnnnnnnggcacgagctttttggtcttcatttcttgcccatcagaaccttttgcagggcactacaaaatgggacccttggccaagatgtgacccagatgcattttgctcaacttatacactgtgttcagcttttaaaattttcatctcacttagtggggcatttgtgcgagtttggccaaagactctgctgctccctattgtgttcctcctggtcggtcatacatttcatttatctgcctggcttctagagacaggtgagttggtgacctctgaactttggtatctcttgcttctcaaagcattcaccatgtggtgatgaccttgggctgcctattttattcatgacctgcactagttcancaagacattcttgccctggg

SEQ ID NO: 33941 - DNA, 447 bp, Homo sapiens
  misc_feature (1)...(447): n = a,t,c or g
aanacccntttgacaccctttgactgcnnnnnnnnnnnnnnnnnnnnnnnnnnnnnnnnnnnnnnnnnnnnnnnnnnnnnnnggcacgaggagcttcaataccctgtctgtggggggggaaaaaaaagaactgtgtgtgtctgtgtctatatagtctagaaatagaagaccaacaattctacagaaaaccaggctagacaggaagacagttcacacaaaaagaaatgcaaatgacttttacacctaagaagcttgatcacactcatattaaagacaggcaaattaaaatacattgagataccatttctcacccatcagactgacaaatacccaataatttgacattatacctttttaatcaaggctacagggaaactattacattgttggtgaggtcataaaatggcacaacccctatacggagagtaatttcaaatatacagcaat

SEQ ID NO: 33942 - DNA, 448 bp, Homo sapiens
  misc_feature (1)...(448): n = a,t,c or g
tttgataccgtttgactcnnnnnnnnnnnnnnnnnnnnnnnnnnnnnnnnnnnnnnnnnnnnnnnnnnnnnnnggcacgagnnnnnnnnnnnnnnnnnnnnnnnnnnnnnnnnnnnnnnnnnnnnnnnnnnnnnnnnnnnnnnnnnnnnnnnnnnnnnnnnnnnnnnnnnnnnnnnnnnnnnnnnnnnnnnnnnnnnnnnnnnnnnnnnnnnnnnnnnnnnnnnnnnnnnnnnnnnnnnnnnnagagcagtctcttccttttcctgttgggtctctgctcaaatgtcatgtcagagaggcagacctctggggcggtctatctgagggaatgcacccatctcccttcctctgaccagttagttaccttgcttattctttcaaagctcttaccaccacctgaagtcatctatctggtttggttattttattgtttagtagcagctttatt

SEQ ID NO: 33943 - DNA, 454 bp, Homo sapiens
  misc_feature (1)...(454): n = a,t,c or g
aancccntttgaanaccnntnnnnnnnnnnnnnnnnnnnnnnnnnnnnnnnnnnnnnnnnnnnnnnnnnnnnnnnnnnnnnnnnnggcacgagaaaacaataataaaacttcacctcctaatgtcggtgaaaagccgctctccctgttgagggttccaaaacaataataaaacttcacctcctaatgtcggtgaaaagccactctccccattgaggtggatcccagggccttcctccaccctgactcctcacacaaagcagccagtcttcatgaatgatgatgataatggtggcagcggtggtggtggtggtgatggtagcaatagtagctaacatttcttgaggtcttactgcaggcaacgcctagctctttgtatttgatctactaaatgtgatttaatttcctcagtggttctctgatggagcagtttaacaacatagcaacataacaagg

SEQ ID NO: 33944 - DNA, 450 bp, Homo sapiens
  misc_feature (1)...(450): n = a,t,c or g
tttgatacccgtttnnactcccnnnnnnnnnnnnnnnnnnnnnnnnnnnnnnnnnnnnnnnnnnnnnnnnnnnnnnggcacgagttttttcaagagaatccagaaatctggacttttatgagaaagacactaattttttttattattattgagatgaagtctcgctnnnactnccangctgnaangcncangcagtgagantccaaaaccntncanggccgnnnttntnttnnncnntnanttttnanaggcgcaaatancngnaaaaacttggccncnaaantgtttnccngnncccaaaccnnanntcccccacttacaaccngggganccctgnncaantnccttaatttttnagggnctnggnnaaacggggaaantannccctntttctnanatggcnntgnnnantattaanngagatntnncccntatagccntnaangcagt

SEQ ID NO: 33945 - DNA, 471 bp, Homo sapiens
  misc_feature (1)...(471): n = a,t,c or g
gnnnnngnnnntnnntttcccctttgaannntgataccgnttgacatgnnnnnnnnnnnnnnnnnnnnnnnnnnnnnnnnnnnnnnnnnnnnnnnnnnnnnnnggcacgaggtaagaaacatcttactactttatagcccactaacagaatttttaacaatttccttctgtattttagaaatcatgttaaataaacattcagttttaaagaagaaaattgtccacccccatcccctagtttctcatgctatttatatgggtagacagattcaggataccaaaaaaaaaaatcaaagtaccttatgtagcttctatttacatgttgtatgctaattataagggagtcttcaattaggaacttggttttgttttgtttctctgggtattcttaaagatataaagctaaattnatcttttttaagngttnggaattttaaaaataatttagagaaaatttcttgatncttttcc

SEQ ID NO: 33946 - DNA, 174 bp, Homo sapiens
  misc_feature (1)...(174): n = a,t,c or g
tttgaananctgaatacccgttnnnnnnnnnnnnnnnnnnnnnnnnnnnnnnnnnnnnnnnnnnnnnnnnnnnnnnnnnnnnnnnggcacgagaaaaactcttccttcttgtattgcttgtctatcaaagccaggaaagtgggggatcactgtagttaaatttttttttttttt

SEQ ID NO: 33947 - DNA, 447 bp, Homo sapiens
  misc_feature (1)...(447): n = a,t,c or g
nacntgnnnnnnnnnnnnnnnnnnnnnnnnnnnnnnnnnnnnnnnnnnnnnnnnnnnnnnnnnnnnnnnnnnggcacgaggtgcttaacatggtatatctctgactgggttgtaagatggcataaatgagcatgagttgctctaaattagagaagtcaaattgatgtcagcatctggatccttttgggggtgttttagaaagaccttcagatatttaccagggtgtgcgtggttgaaagaggttaactgatacttacaggatggcatccttttgatttgctatcttgcttagttccagactaatcctgacaaaggatgctggtgctgaaattcttaattcacttagcctgtcagctttgaaattacgattatagaattctaagaaactttgcatgctttatatcagatttgtacacttctaatttatatgctgtagctctgttctaa

SEQ ID NO: 33948 - DNA, 447 bp, Homo sapiens
  misc_feature (1)...(447): n = a,t,c or g
nattggaatnnnnnnnnnnnnnnnnnnnnnnnnnnnnnnnnnnnnnnnnnnnnnnnnnnnnnnnnnnnnnnggcacgagggtggaggagcccaaggtagtggttcaataaatattaattgatgggtattaaaacaatcgatgacccaagggcatgccacctcgtgtgccagagactttaatttgttaaatgaagtaaaccacactgagttgctcttggaagttatgaaaaatgattgtaaagggttttttttttctttttttaagctcaagcactttgagtgatagtagccaaagacaatagtcccagcagccgagtgtaaaacctccccatggccctgcaagcagtgtgtatgtagtaacagttttaagtgatatcctttntggggtccagccaattgttaaaagagaggaactagaataatatattgctggggattcanccctct

SEQ ID NO: 33949 - DNA, 455 bp, Homo sapiens
  misc_feature (1)...(455): n = a,t,c or g
tttganatctgaataccgtgtnnnnnnnnnnnnnnnnnnnnnnnnnnnnnnnnnnnnnnnnnnnnnnnnnnnnnnnnnnnnnnnggcacgagaactggattcaattaataattattttgaataggaaaactctgacctttgcaattcatgacttcttagccgatgtattcatcaccctaagagaagcattcatgggcctcttgggctattgaacaatgccattaaacaaaacaaaacctgtgtttaaaggaaatgaaaggactaggaaggaaacagggcccatcaattctgccatttgaatcactaaggacaattctgaaggcattaagttactaagatgagcagagaaataaggggatctccccctcatcaccctcccaacctcttttgagctggagacaattttctggccacctgaatccccagggagttagcatgccagttaatactgcatt

SEQ ID NO: 33950 - DNA, 447 bp, Homo sapiens
  misc_feature (1)...(447): n = a,t,c or g
aanncntttgaataccgnnnnnnnnnnnnnnnnnnnnnnnnnnnnnnnnnnnnnnnnnnnnnnnnnnnnnnnnnnnnnnnnnnggcacgagaaaaactgaacgannnnnnnnnnnnnnnnnnnnnnnnnnnnnnnnnnnnnnnnnnnnnnnnnnnnnnnnnnnnnnnnnnnnnnnnnnnnnnnnnnnnnnnnnnnnnnnnnnnnnnnnnnnnnnnnnnnnnnnnnnnnnnnnnnnnnnnnnnnnnnnnnnnnnnnnnnnnnnnnnnnnnnnnnnnnnnnnnnnnnnnnnnnnnnnnnnnnnnnnnnnnnnnnnnnnnnnnnnnnnnnnnnnnnnnnnnnnnnnnnnnnnnnnnnnnnnnnnnnnnnnnnnnnnnnnnnnnnnnnnnnnnnnnnnnnnncccaaaaaccaaaaactgaaccaaaatatacccagatgttgactaggac

SEQ ID NO: 33951 - DNA, 451 bp, Homo sapiens
  misc_feature (1)...(451): n = a,t,c or g
ttgaacaccttgatgaccgctnnnnnnnnnnnnnnnnnnnnnnnnnnnnnnnnnnnnnnnnnnnnnnnnnnnnnnnnnnnnnnnggcacgaggtattaagtatgttaccaggtattaatttcttttggagattctgggtaattttctaagatggtgatattcttatgaaatctataaattgtgttgaggttaatgaccatctttataaattatttttaaggttttagctgaaaaggttcatatgagagctatgtccattgctcagagagtaatgctccttcaacaaggtcttaatgacagatcaggtaagataaacaactttatatatacaaaactttagtagattttgaggtcagacttaacaaggtttaagaaacgagtgtcaaatcaggtcaagtaagcctgccagtcccatgaacctggtgaaatttatcttgatgtattatataga

SEQ ID NO: 33952 - DNA, 450 bp, Homo sapiens
  misc_feature (1)...(450): n = a,t,c or g
ttgaanacccgnttgacnnnnnnnnnnnnnnnnnnnnnnnnnnnnnnnnnnnnnnnnnnnnnnnnnnnnnnnnnnggcacgaggaaagtacagccggataaaactactttaacataactaaatctatcaatgtaattcattacttgaatcacttaaagaagggaacctatgccaaaaagtcatctgataaaattcaatagctgttctnnnnnnnnnnnnnnnnnnnnnnnnnnnnnnnnnnnnnnnnnnnnnnnnnnnnnnnnnnnnnnnnnnnnnnnnnnnnnnnnnnnnnnnnnnnnnnnnnnnnnnnnnnnnnnnnnnnnnnnnnnnnnnnnnnnnnnnnnnnnnnnnnnnnnnnnnnnnnnnnnnnnnnnnnnnnnnnnnnnnnnnnnnnnnnnnnnnnnnnnnnnnnnnnnnnnnnnnnnnnnnnnnnnnnnnnnnnnnnnnnnn

SEQ ID NO: 33953 - DNA, 439 bp, Homo sapiens
  misc_feature (1)...(439): n = a,t,c or g
tttgaacccctntnnnnnnnnnnnnnnnnnnnnnnnnnnnnnnnnnnnnnnnnnnnnnnnnnnnnnnnnnnnnnnnggcacgagaaaaaataaataaaatatacaatatgaaataactgccctattctttcttttaaaaattgacagatnnnnnnnnnnnnnnnnnnnnnnnnnnnnnnnnnnnnnnnnnnnnnnnnnnnnnnnnnggatgactaaatctagctaatatgtgcattacatcacattattgtttttgtggtgagaacactttacatcttactctcttactcatttttcaagagtacagtatatatatttttaaatttttttggctatatagtaggtannnnnnnnnnnnnnnnnnnnnnnnnnnnnnnnnnnnnnnnnnnnnnnnnnnnnnnnnnnnnnnggaaaatgacatatccataccttcaagcat

SEQ ID NO: 33954 - DNA, 449 bp, Homo sapiens
  misc_feature (1)...(449): n = a,t,c or g
aantccctnatttgaacaccntttgactgcnnnnnnnnnnnnnnnnnnnnnnnnnnnnnnnnnnnnnnnnnnnnnnnnnnnnnnnggcacgagggcacacttgctgtcggctccgctcatctgttgggaatgcgtcctgtgggcctagtcctccgctggaagaaacgcgctgttctccccaaccaccgtttatcattcttattcaccgtctccggaatgtccattcagtttccgctcctgagagacttagtgactgaggccaggcaaagatttcaccttggggagggggaacgttaaacctttcctccagcagctttcgtgttttaaattgtattcatccgccatggaaagacatcagaagcccaggatctaagagacagactgaaatgaagaaagtagataatattgtgagaataatgaacaagctggtcactgaacagcagaaccgt

SEQ ID NO: 33955 - DNA, 454 bp, Homo sapiens
  misc_feature (1)...(454): n = a,t,c or g
aaacccttnatttgacaccgntnnnnnnnnnnnnnnnnnnnnnnnnnnnnnnnnnnnnnnnnnnnnnnnnnnnnnnnnnnnnnnnggcacgagccaatgataagaaaatgtttaaacagtataccacagcatgttaatcatacagccattaaaaattgtttatgaagatttttatgaggaaaaacactaatgaaacattacatgaaaaaagataaaattacgtatatactgtgagcttacttaaaaaatagaaaatgattggaaataaaccaacatactgtatacaaatattaatggtctttgcttcaaaaatatttagttgacacattttaatttctttctgtattttccaaattttgtataattaccacatactattttacaaatagtatgtggtactattgaggaataaggagattaaaaacataaacctggtgtcaagtcatatgagcaa

SEQ ID NO: 33956 - DNA, 459 bp, Homo sapiens
  misc_feature (1)...(459): n = a,t,c or g
tttganacccgttatgttgngcctcnnnnnnnnnnnnnnnnnnnnnnnnnnnnnnnnnnnnnnnnnnnnnnnnnnnnggcacgagcggcacgagaactggaataagtacgttgaataattagggaatacttactaaaactgaagacaggtgttaatgtcttcatctgcatgcacatgtacactagaagatgtgtataagaacgtatataatactactattaataagtcacaaagtaaaaaaaattgaattgtccaccaacagcaaaatggataattgtggtgtaatcatacaagaggatactttacaacaacgatatgagccacagtgacatgcagcagcatggataaatctcaaacttacacagtgaaaaaaatcaccgttcagtgaaagaaaccagatcaagaatttacatataagctgatttcattttcataaagctctaaagcatacanggaagg

SEQ ID NO: 33957 - DNA, 462 bp, Homo sapiens
  misc_feature (1)...(462): n = a,t,c or g
aanacccntnnnttttgagcaccngtnnnnnnnnnnnnnnnnnnnnnnnnnnnnnnnnnnnnnnnnnnnnnnnnnnnnnnnnnnnnnnnnnnnnnnnnnnnnnnnnnnnnnnnnnnnnnnnnnnnnnnnnnnnnnnnnnnnnnnnnnnnnnnnnnnnnnnnnnnnnnnnnnnnnnnnnnnnnnnnnnnnnnnnnnnnnnnnnnnnnnnnnnnnnnnnnnnnnnnnnnnnnnnnnnnnnnnnnnnnnnnnnnnnnnnnnnnnnnnnnnnnnnnnnnnnnnnnnnnnnnnnnnnnnnnnnnnnnnnnnnnnnnnnnnnnnnnnnnnnnnnnnnnnnnnnnnnnnnnnnanaatntganttnanatactcatttgccnttngatcttaanccaaaagtcnttntgagccttattttccttatctttaaantagangagaantatctgtttaacangatagtttta

SEQ ID NO: 33958 - DNA, 457 bp, Homo sapiens
  misc_feature (1)...(457): n = a,t,c or g
tttganacccgntatgttntgatcnnnnnnnnnnnnnnnnnnnnnnnnnnnnnnnnnnnnnnnnnnnnnnnnnnnnggcacgagtgtactttaagacaatgggatgtacccctagaccatttacctagatttaaattacttccttgtgatgtggtttagagctctaagttccttgagttgtcttgaaaggctgaagggtgctcagagaatggaggggaattgaaaatggaacctaaggatctgggagtggtcatatgtgtgagtggtgaaatgtgccccccaacaccccgttgggtcgggtctggagttaaaagcagtggctgacatacattttgcaatataagggtaaagaaaggtaaagaaggaacaaacatttctagaggataaatgctttaattccagaagataggccacacagtttaggaactgtggtaagaggtgctttgccatatttatg

SEQ ID NO: 33959 - DNA, 460 bp, Homo sapiens
  misc_feature (1)...(460): n = a,t,c or g
gaannccnttnnnttgaccnnnnnnnnnnnnnnnnnnnnnnnnnnnnnnnnnnnnnnnnnnnnnnnnnnnnnnnnnnnnnnnnnnnnnnggcacgaggtaactattcattaattgaaaaaataattgtaccgtgtataaaaatttaacaatttttcacaatttaacaattatcttttttggatacctatatccaaaaaagactttgagttgctttttcaaaactactaaaggagaggctgccatgatggtagtggaagaatcatgggctttggagtgagaccgtacctcttcccctgccactaagggaccctgctaagtatcccaagccaccagccctggattaatgtaaatgaggttcattctgctgtatacctaataggctgttaaaaagtagaaatggannnnnnnnnnnnnnnnnnnnnnnnnnnnnnnnnnnnnnnnnnnnnnnnnnnnnnncgc

SEQ ID NO: 33960 - DNA, 419 bp, Homo sapiens
  misc_feature (1)...(419): n = a,t,c or g
caccgnnnnnnnnnnnnnnnnnnnnnnnnnnnnnnnnnnnnnnnnnnnnnnnnnnnnnnnnnnnnnnnnnnggcacgagcatagagctatgtttgagtcataataactgactagagtttacaaagacttattcacacagagtagctattcattcagaagtgttgaagataaaaagactgtactaaatgacctcttggtccctttattgttactattctgtgatttattgagaattatgtgtatatttaaactcattccatgatgtgcagagttaactttttagttacttttcttattggataaaattagtcagcatctgtgctttttttcattaggagggattttttttgttttttttttggatttttttnnnnnagggagnctcgntttgncnccaggntgnagtgcangggggcaaa

SEQ ID NO: 33961 - DNA, 433 bp, Homo sapiens
  misc_feature (1)...(433): n = a,t,c or g
acccnnnnnnnnnnnnnnnnnnnnnnnnnnnnnnnnnnnnnnnnnnnnnnnnnnnnnnnnnnnnnnnnnnnggcacgagcagccgcagactgttaccccacatgctcactatgcgacaatagtcgttttgtgtatgttatagattcagagctgcacagataaagtactgctgttttcattcgggcacccatctcagtgtgaggccgcctaattctcattccatgtatacccaagtaccacctagaaatggctcctgcccttaatgagcttctgttctacttgtggagatgaggcttggtcctgtgaaaggttaaatagagatgttgaggtctggcttgttgggttggaaggaatctgctctagctaagtcaaataaagggagagatgcagcagagactcgagccggctacatgcattcaaaccctggctctgc

SEQ ID NO: 33962 - DNA, 441 bp, Homo sapiens
  misc_feature (1)...(441): n = a,t,c or g
gntatgncgtgcccnnnnnnnnnnnnnnnnnnnnnnnnnnnnnnnnnnnnnnnnnnnnnnnnnnnnggcacgagctcatatatagatcaggacaagcaaatttgatttctagctttctaatgtggtaaaaaaaatcatagaggaaacttcatatgcaaatttaagtaactgacagagaatatatatggacacaaactcttgctattataatcatattgagacctcagccaccctttgtatagcccaagtaatgactgtttgatatttattataaagcatattaaattccttgattaactgaacctttcattcctcttttttgtttcatgcagcagtgaaaatagatagttctattatcatccttgccaggaaatttataaaatgtataaaattattcataaatgtattttaaactgaagatatattaatgtattattgggg

SEQ ID NO: 33963 - DNA, 462 bp, Homo sapiens
  misc_feature (1)...(462): n = a,t,c or g
tnnnntnccccctttgacacncnntnctttngccccctnatttaataccactcnnnnnnnnnnnnnnnnnnnnnnnnnnnnnnnnnnggcacgaggcataaaccatgtgacgtgcataagttgatttttaatccctcccctaaaatgaaaatatatgaataaaaaggtataaagccatgaggtcagagagaataggaaaggagacaacagtggatgaggtggtccgtaaacatggaagaaggaaaccgctgagggtgagatgagttagagctaatgcagccagacccgagttcctgcagaggacccagagtccagggggctcaggaggggcatggggcagttcgaatgtccatgggagggatttccactctcacctggctcagccagatgattaactcatccccacccactggaagatggggctttgnacgtgcagaaacctggtacaggggcaggtggggg

SEQ ID NO: 33964 - DNA, 445 bp, Homo sapiens
  misc_feature (1)...(445): n = a,t,c or g
aanaccnnnnnnnnnnnnnnnnnnnnnnnnnnnnnnnnnnnnnnnnnnnnnnnnnnnnnnnnnnnnnnnnnnnggcacgagaactggttttgcacgcataggctgagggagtaggaggcataggaagccttccctaggcgggacagaggaaagtcatgaggaaggctgattcaaaaagaaagagcttgctcatgagtgattctggcacattctcaacatttgtttgcttctgagtatgactatgagaaggctgtgactgtaaaacaagaggctgttagctttaaagagacaaagctctgcaaatgacaagagtaaacccctttattgtcccattgactcttgtcatttgcctccaggtctcctggtctctgtgaaagttatggggacaggggatgtaaatgctttcatatggccatanagaaatatgacacccacaaaagttaag

SEQ ID NO: 33965 - DNA, 430 bp, Homo sapiens
  misc_feature (1)...(430): n = a,t,c or g
caccgnnnnnnnnnnnnnnnnnnnnnnnnnnnnnnnnnnnnnnnnnnnnnnnnnnnnnnnnnnnnnnnnnnggcacgagcnnnnnnnnnnnnnnnnnnnnnnnnnnnnnnnnnnnnnnnnnnnnnnnnnnnnnnnnnnnnnnnnnnnnnnnnnnnnnnnnnnnnnnnnnnnnnnnnnnnnnnnnnnnnnnnnnnnnnnnnnnnnnnnnnnnnnnnnnnnnnnnnnnnnnnnnnnnnnnnnnnnnnnnnnnnnnnnnnnnnnnnnnnnnnnnnnnnnnnnnnnnnnnnnnnnnnnnnnnnnnnnnnnnnnnnnnnnnnnnnnnnnnnnnnnnnnnnnnnnnnnnnnnnnnnnnnnnnnnnnnnnnnnnnnnnnnnnnnnnnnttatagctttttttctgagagcaaacttttttttttatcagatactggc

SEQ ID NO: 33966 - DNA, 445 bp, Homo sapiens
  misc_feature (1)...(445): n = a,t,c or g
acccnnnnnnnnnnnnnnnnnnnnnnnnnnnnnnnnnnnnnnnnnnnnnnnnnnnnnnnnnnnnnnnnnnnggcacgannnnnnnnnnnnnnnnnnnnnnnnnnnnnnnnnnnnnnnnnnnnnnnnnnnnnnnnnnnnnnnnnnnnnnnnnnnnnnnnnnnnnnnnnnnnnnnnnnnnnnntaaaaacatttgtaaagaagtcagaaagaaaggaagaacgaaggaaagggagtgaaggtgggaaaaaagtgacaacggtgggagggagagaggaaagtaggaacgaaagaagaaaagcaaaaacagatctgtgtgcaaaaacacagatctgggtacaaatcctcactccactatccactagttgtgttagtcaagttatccaaagcttttctatcaaacttttcatatcaaacttttctaatattgcttacctcgtagaattgc

SEQ ID NO: 33967 - DNA, 432 bp, Homo sapiens
  misc_feature (1)...(432): n = a,t,c or g
caccnnnnnnnnnnnnnnnnnnnnnnnnnnnnnnnnnnnnnnnnnnnnnnnnnnnnnnnnnnnnnnnnnnnggcacgagcaaccaacagggcttccaaagaccaggcacttgaagaggatttgctcatcatttgacaagacacctcttgacaagacacctccagaaggattttgtttattgtaaaggatggaggaactggggtgaaaaagagccaacagcttgcccaagatcatatctgaagtccatgcttttggccacgtggctgtcctgggcttcggaaggctctggtgcagcctgtgttagagttttgtaatatattgttttataattattcactatagacattcactggtgggttgaagtgtgaggcagtgagctgtgggtattaataactgactcgtgtcagaagcttagcagtgaacaaagcactt

SEQ ID NO: 33968 - DNA, 463 bp, Homo sapiens
  misc_feature (1)...(463): n = a,t,c or g
nnnnnnnnnnnnntttgnnnncccnnncnttgancaccnnnnnnnnnnnnnnnnnnnnnnnnnnnnnnnnnnnnnnnnnnnnnnnnnnnnnnnnnnnnnnnnnnnggcacgaggactgatctgcagtgtcctatctacagttgggcaactgacatttattttatgatgttgtatgatttataaatccttgtatttggtaccctaacagatttatctgagtttcactgactcacctagaagttaacttggttttttacctaggctgaactggttaaaacatgcttctgctgaagccatagtggaaagttgggattcctttataaacctattgtcatcattatcttccaaagcttaagtgcatgtgtagctacagccaagcatctagatgtcattatcacaactgactaaaggtataaaagagagggatactcacccagttttcactactagaaagatcttccaa

SEQ ID NO: 33969 - DNA, 433 bp, Homo sapiens
  misc_feature (1)...(433): n = a,t,c or g
naccnnnnnnnnnnnnnnnnnnnnnnnnnnnnnnnnnnnnnnnnnnnnnnnnnnnnnnnnnnnnnnnnnnnggcacgagaaagaatgaagaggaacggctgaagaagcaactgagagctgctcagttacagcattcagagaaaatggcacagtatctggaggaggaacgtcacatgagagaagagaacttgaggctccagaggaagctgcagagggagatggagagaagagaagccctctgtcgacagctctccgagagtgagtccagcttagaaatggacgacgaaaggtattttaatgagatgtctgcacaaggattaagacctcgcactgtgtccagcccgatcccttacacaccttctccgagttcaagcaggcctatatcacctggtctatcatatgcaagtcacacggntggtttcacgccaccaac

SEQ ID NO: 33970 - DNA, 446 bp, Homo sapiens
  misc_feature (1)...(446): n = a,t,c or g
ncccccccnttgancacccgnnnnnnnnnnnnnnnnnnnnnnnnnnnnnnnnnnnnnnnnnnnnnnnnnnnnnnnnnnnnnnnnnnggcacgannnnnnnnnnnnnnnnnnnnnnnnnnnnnnnnnnnnnnnnnnnnnnnnnnnnnnnnnnnnnnnnnnnnnnnnnnnnnnnnttnnnnnnnnnnnnnnnnnnnnnnnnnnnnnnnnnnnnnnnnnnnnnnnnnnnnnnnnnnnnnnnnnnnnttttaaagagttagattaatgtggagttgacatttcatcattttggatcattctatgcaggagcataggtgccttttcatttgttcagattttctgttgcggggatggnnnnnnnnnnnnnnnnnnnnnnnnnnnnnnnnnnnnnnnnnnnnnnnnnnnnnnnnnnnnnnnnnnnnnnnnnnnnnnnnnnnnnnnnnntactg

SEQ ID NO: 33971 - DNA, 445 bp, Homo sapiens
  misc_feature (1)...(445): n = a,t,c or g
aanacccgctatgtcatgnccnnnnnnnnnnnnnnnnnnnnnnnnnnnnnnnnnnnnnnnnnnnnnnnnnnnnggcacgagggtgaggtctgggtctggtcacagctgtgtcatttagctactttcccttcagttcctgggcttcaaatttcacccgatgtaacatggggacagtaatacctgctctgcccacctgaaaaggttaatgtggaggttaaataagagaatgtacttggcagtgctttgagagccacaaaaaacgtttcgaacataaggcattattgtaaattcttgaaaatgattagagcctttttgaaaataattgattcaaatttggtaggaagaggcatttcccccccatgcatcagaaaattagagagcactctaaaggaagctcccaacatcttttttttaaaatttcgcactgcagcatggtttaatactg

SEQ ID NO: 33972 - DNA, 436 bp, Homo sapiens
  misc_feature (1)...(436): n = a,t,c or g
ancaccgnnnnnnnnnnnnnnnnnnnnnnnnnnnnnnnnnnnnnnnnnnnnnnnnnnnnnnnnnnnnnnnnnnggcacgagggctcggcgtgggcaggtagaattcagatgctgggaaaaacacaaacgcaatgctaggaaaaagggtcatgccttacaattcaggtgggacagatacaaatgaaatagtttcttaatgaggtagaaagaggaagttattaattcctgttcttgttggattctaacatacaagctaatttgaattcatcagcctaagcaaggttgccttggattttgaagttttcttaaggaataaactgtagagaaaccatagggccaaccagatggatgatgaaatggaaaaaacagcaattaaatacttttagaaagtattacaaattaataccttaaaaaccctgtatcttgagctagtagc

SEQ ID NO: 33973 - DNA, 484 bp, Homo sapiens
  misc_feature (1)...(484): n = a,t,c or g
gnnnnnnnnnccntngnnaccnnnnnnnnnnnnnnnnnnnnnnnnnnnnnnnnnnnnnnnnnnnnnnnnnnnnnnnnnnnnnnnnnnnggcacgaggaataatcttatagataattatattttgttaaaattctttataactagaagctatttcttgccattttgtcatcccaacaaatttttttactaaatctatcagtgtgccctttatttctcatattttgtctagtaaacttttaaaaatactacccttcttaaagcagcattccgatctatttttgtaggtggtttttgtctgataaaactataaaactgacctagttgcatcattcagaaacgtaaaaagtaattttccacctcagaatgaccaattagaggcatataaagagataatccaaaattccttaattagggttttattgntacataatgggtgcttctngctataanagnctagcttctanatttanttttcaggnctatt

SEQ ID NO: 33974 - DNA, 468 bp, Homo sapiens
  misc_feature (1)...(468): n = a,t,c or g
tatgacatgnttacnnnnnnnnnnnnnnnnnnnnnnnnnnnnnnnnnnnnnnnnnnnnnnnnnnnnnnnnnnnnnnnnnnnnnattcggcacgaggannnnnnnnnnnnnnnnnnnnnnnnnnnnnnnnnnnnnnnnnnnnnnnnnnnnnnnnnnnnnnnnnnnnnnnnnnnnnnnnnnnnnnnnnnnnnnnnnnnnnnnnnncaaatgaatttctgttacttcacagccttttgtcaaagcattatgccttaggccgaccccacacccccagggaaaggaaaaaagcctcaggcatccttagatgactgccctcagaaattgttctgtgctggctttgaaccctttcaagatgtcctataaaacaaggacatgccaattcttacttcaggtctgcctgcaatctaagtctagctcctaaagtaagagtttgttanatttcacactgatgatgcttggattgatgaaa

SEQ ID NO: 33975 - DNA, 488 bp, Homo sapiens
  misc_feature (1)...(488): n = a,t,c or g
gctgntnngcccccccttcncaaccnctatgacatgattnnnnnnnnnnnnnnnnnnnnnnnnnnnnnnnnnnnnnnnnnnnnnnnnnnnnggtacgagccataaatgtaagctgattaaatgtgtctattaaaaattggagaatatcagattagaatttttaaagtattcagttataagctattttcaaaagacccacttaggccaaaccacacaaataaagagatgacaaaagacataccacaaaatgctaaccaaaagaaaggtgggtggagtcacagtaaggcaaatggaatctagggaaatatatgttaatagggatagagagatatataatgatataagaaaagataatattcatgaacctatatgcccctaaaaacataaccttgaaattcaaaacatgtaaagcaaaaactangaaaatgtnaaaatgtnaaattgtggtanatttanatttatttttacnganntttattncnaacata

SEQ ID NO: 33976 - DNA, 464 bp, Homo sapiens
  misc_feature (1)...(464): n = a,t,c or g
ttgccncccttntnccccttgacaccgttatgacatgccnnnnnnnnnnnnnnnnnnnnnnnnnnnnnnnnnnnnnnnnnnnnnnnnnnnnnggcacgagcggcacgagactatattcactttaaagtaggtgtccctcataccacagagatcagctccactggacatagctgtgaatagtattggatcttccaagatggacacacagctctgagaatgagtccaggaaatttctagggagagcgccctttcagagaggtgggtgacaatggtatgaacatcttgctcataattggctaaagattcatggtttccaaaagatttggtgaggagggacaagcttgcacttgtcaagtagacatatttgtatgtaaagcctactgtgattctcacttgctgacatacttaggcntgttacntacntnnttttaccatgtattatgcactcnctgnggactaaacac

SEQ ID NO: 33977 - DNA, 468 bp, Homo sapiens
  misc_feature (1)...(468): n = a,t,c or g
anccnctatgaccnccnttgaacnaccgnnnnnnnnnnnnnnnnnnnnnnnnnnnnnnnnnnnnnnnnnnnnnnnnnnnnnnnnnnnnnnnattcggcacgagtgtagcacatgaaaatatatgtcatattaaaaaagagagataagcagagatgaggagaatccttgctcctcctaatggtgtgcttttcttccatgattctacctactgtaggcacctgctcccctttcaccctttatgcagggctggggtcaggaagggctggctggatgtctgagctgatgatgtgcagcaactgctgaggagctcttcattgcttccctagctctaaaaccaagtcttcttaggagtcagaagcaaggaacagcaggaatggaggaggcaggatctgggagcagcttctctaaggccagctataggcaaggcacaccagctcctgagagttggggaggggagctgtangcacc

SEQ ID NO: 33978 - DNA, 451 bp, Homo sapiens
  misc_feature (1)...(451): n = a,t,c or g
gncttcgantaccnnnnnnnnnnnnnnnnnnnnnnnnnnnnnnnnnnnnnnnnnnnnnnnnnnnnnnnnnnnnnnnnnnnggcacgagcttaattaggtttccaatatattctttgattctttactaattgatattggccttagcatgaatcaaagatgtgttctatttcctgttctgacaccagctgtgtggaaataggtaggtaattcaaagtctctaagtttgttttcttatatgcaagatggtaacacctgacctgccaacctgctggagctcttgaggatcaaaagaggtaatatatatgaaaatgttttgaaagtttaagtgactagtgtagttgatattcacttgtcccttggcacttatcagtctgtactatatcataattgcctttcttcctctggatctgaaacctttctggccttttaataggangtanttttggtctac

SEQ ID NO: 33979 - DNA, 469 bp, Homo sapiens
  misc_feature (1)...(469): n = a,t,c or g
accccnnnnnncccccnttcgncnaccgntatgacatgnttacgannnnnnnnnnnnnnnnnnnnnnnnnnnnnnnnnnnnnnnnnnnnnnnnnnggcacgaggtagcgtcagaacagagagaggatcacactgtcgggctcagcacgaaagactgacagtctgggcacagcacccggtcctccctcccagcgctgactgcaatcccggccagggctgaggaaaccgcaggaccatgcgtggatggaagggtagaagccttcctgtttcctggcaggtcaggagaaagggcaagttaggaaaaagggctgagcttccagagtatgaggcgccacactgggttttccagtaaaaggaaacctagttgctcagctcagactttgaaaaatattatttggtccctgagtagaaacagatgttgtttcctgttacagaaatgagctgtagctcttccacacacacacactggc

SEQ ID NO: 33980 - DNA, 454 bp, Homo sapiens
  misc_feature (1)...(454): n = a,t,c or g
nnnnnnnnnnnnnnnnnnnnnnnnnnnnnnnnnnnnnnnnnnnnnnnnnnnnnnnnnnnnnnnnnnggcacgaggaaagttgtataccaaaggagtcttaggactgtccatggatactgttatgtatcatttcacttatattggcttcagcttgcgatttctctactgtaagaggagagaattgatcagatagttaaggaaggtccttagataatgcagtatacttattaacatacagacatcaagaagcagaaatatatagacatcttcctttttggttctaatagggcttcgagggacacatatgcaacatgcctatgatttttacaagcctgatatgctatctgaatatcctatagtagatggaaaactctccatacagtgctacctcagtgcattataccgctgctattctgnctactgcaaaaagatccatgcccagtggcanaaagag

SEQ ID NO: 33981 - DNA, 424 bp, Homo sapiens
  misc_feature (1)...(424): n = a,t,c or g
acaacncttnncannncctttgaatanccnnnnnnnnnnnnnnnnnnnnnnnnnnnnnnnnnnnnnnnnnnnnnnnnnnnnnnnnnnnnnnnnnnnggcacgagctagcaccatgagcttcaataccctgtttttgttagtagtttcgatggaatatagtcatgtccattcatttatttatcgtgtatgactaattttgcaaaggcagggttgaatatctgaccacagactctatgccttgcaaaatatgtttttgctatctgnnnnnnnnntttcanagtntgctaggctaggngcaggtctnacaccngaannngtnnccatntgngaggctagnnaggncnatagtnanancnnnanannnnagatcangnnctannnnagnagnnanttnannnncntnnnnanntatgnnnnatntagg

SEQ ID NO: 33982 - DNA, 455 bp, Homo sapiens
  misc_feature (1)...(455): n = a,t,c or g
cnnnnnnnnnnnnnnnnnnnnnnnnnnnnnnnnnnnnnnnnnnnnnnnnnnnnnnnnnnnnnnnnnnnggcacgagcatttcctgaccttatatagccaagaatattgtttcctcaatacccctcatattatagattattgtagttagtagggtaaactgtaagaaatgctattctatggtatttcttgaaatagaggatttctctacgtcccattgccttcatacatgttttattgcactgtaattatatgcttgcaggaggcctctcctattaaaccctattctgtttgaggattattatccatcgccattgtattttgaagaacctgtcaaagaggaggtaatcaataaatgtttgcttgacacacagcaggtgtgttatgaatatttgttgaactaatgaataaacactttgcacatgacancatatntntntattagagacaggttcttg

SEQ ID NO: 33983 - DNA, 465 bp, Homo sapiens
  misc_feature (1)...(465): n = a,t,c or g
accncnnnnnnnnncctttgaanacccgctatgacatgattacgacnnnnnnnnnnnnnnnnnnnnnnnnnnnnnnnnnnnnnnnnnnnnnnnnnggcacgaggtggattaccatctaagaattttgcctgccacacatactgcagtcttacctagagccgctgacgttcgaactcagatctgcccatatagagctcaaatccagaactaaggggcacattgcttttggaatatcacatacctgccgttccttgtacaagctctggaaatggagctgttggtcaatgtagggtggcacatagaggccaggcagattactataagcagtagaggggatatgtgctactgactgctgcaaacctggaagtgtctggtgaggnnnnnccctgcatntgncaaagctgctnntggagnagnaacntcttgcnnnaangnngnaggtattgncnnannnangcnancttg

SEQ ID NO: 33984 - DNA, 454 bp, Homo sapiens
  misc_feature (1)...(454): n = a,t,c or g
cancnnnnnnnnnnnnnnnnnnnnnnnnnnnnnnnnnnnnnnnnnnnnnnnnnnnnnnnnnnnnnnnnnnnnggcacgaggtgaattgagnnnnnnnnnnnnnnnnnnnnnnnnnnnnnnnnnnnnnnnnnnnnnnnnnnnnnnnnnnnnnnnnnnnnnnnnnnnnnnnnnnnnnnnnnnnnnnnnnnnnnnnnnnnnnnnnnnnnnnnnnnnnnnnnagtgtaaattttaccatacttaagttttacctccataaacaggaaaaaaaatgaaggttgagacctattggcaagtcatgacatcaatacagttaagagggttgtaaccaattatatattgttgtgaaacttttgtttcagttgtgtgtctatgaactggatcatggtatcttcatactgtggctgacaaaacaatttttgttggaaaccactgcctagtttgtgagctgagagca

SEQ ID NO: 33985 - DNA, 463 bp, Homo sapiens
  misc_feature (1)...(463): n = a,t,c or g
cncccttnnnanncccccntngaatacccgnnnnnnnnnnnnnnnnnnnnnnnnnnnnnnnnnnnnnnnnnnnnnnnnnnnnnnnnnnnnntaattcggcacgaggagactaccataaaattttaaattacacatgtggctcgcatttgtagctcgcattgtatttttatcggacggcactggtctagagagctctttccaaccttttctcaccttccagaagagcatttcacagctgtaatcccctgtgtgacattgattacctgttttctcttccctaccccttcaaaatgtagggctaagagaaactcttgtaattgatggagaaggttgtctcctagaagatactgcctctgggatattccgggtatgttaggatagcaggttagggtcatttagctatgagagcctgtttacccatctgtgaaatgggtttaacagtccctgctctgtgaggangata

SEQ ID NO: 33986 - DNA, 450 bp, Homo sapiens
  misc_feature (1)...(450): n = a,t,c or g
ccgttatgacatgnccttnactancnnnnnnnnnnnnnnnnnnnnnnnnnnnnnnnnnnnnnnnnnnnggcacgaggagatttaatgagaggaagtatggtttactacagagggtctggctgggagaccttgcctgagagctgtaacttccctaattcattgtattcttagctgtagaatggagctggtttataggacctacttccagtgttgaggtcgtagccagtagcagttagtacagagtctagcacataataagcacttcataaatggaagctgttgttaatagtattttgttttgagttatgctaaagtacttgatacattaggtagttcatcatcattatgtgcccaatatgatgccaagtacgagtacttagtaggtactcagtttatattcattccctctccctttcctcattaattctggataagtatacctcttggcat

SEQ ID NO: 33987 - DNA, 497 bp, Homo sapiens
  misc_feature (1)...(497): n = a,t,c or g
gnnnnntnnnncattgaccttcgantaccgttnnnnnnnnnnnnnnnnnnnnnnnnnnnnnnnnnnnnnnnnnnnnnnnnnnnnnnnnnnnnnnnnggcacgagatctatctgtgcatgtgatggggttttttgagacaaggtnnnnnnnnnnnnnnnnnnnnnnnnnnnnnnnnnnnnnnnnnnnnnnnnnnnnnnnnnnnnnnnnnnnnnnnnnnnnnnnngtgatgggtttttgatatttgaaaatcaagcacatgggggctgagaatgnnnnnaatggaatgtnacagaagtaatgtaaggntccctttttaattnggnttctaatccttttagaancaggncttcccttctctncctaactactgncttcccgctaaccaacccctaccccannccctggctgggaatanccctagagancttgngncnttgttnanacccttaanggagaacccaggaagntncacctggaggaccacctgnggcaatggg

SEQ ID NO: 33988 - DNA, 466 bp, Homo sapiens
  misc_feature (1)...(466): n = a,t,c or g
accgntatccatgnttacgactttaatacgactcnnnnnnnnnnnnnnnnnnnnnnnnnnnnnnnnnnggcacgagnnnnnnnnnnnnnnnnnnnnnnnnnnnnnnnnnnnnnnnnnnnnnnnnnnnnnnnnnnnnnnnnnnnnnnnnnnnnnnnnnnnnnnnnnnaaacatagttacannnnnnnnnnnnnnnnnnnnnnnnnnnnnnnnnnnnnnnnnnnnnnnnnnnnnnnnnnnnnnnnnnnnnnnnnnnnnnnnnnnnnnnnnnnnnnnnnnnnnnnnnnnnnnnnnnnnnnnnnnnnnntaagggaacaacctaccctggagtttgttggggaaggctaagcnagaaaatgaaggggaatgggatagccntaggaaaaatantgcnngctngggttaanacctanggganggantgaaaggngcggnaaaccatttctgtggccaagttttctatgtaac

SEQ ID NO: 33989 - DNA, 464 bp, Homo sapiens
  misc_feature (1)...(464): n = a,t,c or g
ttgagacgntacccatgccacgacnttaatacgactnnnnnnnnnnnnnnnnnnnnnnnnnnnnnnnnnnnggcacgagcagaccccagccatacaaccctttctctagacctcagccagacaaacctctctccagaactcagtcagacaaacctttccccagacctcagagagatgcccctctttgcagatctcagtcaaattccccttaccccagacctcgaccagaggacactttctccagaccttggtgagacagatctttccccaaactttggtcagatgtccctttccccagacctcagccaggggactctctctccagacatcagtgacaccacccttcttccggatctnnnnnngatatcacctccttcagancttgnacngaaattntacccttntgnanctagcngtcnntgnntctttaagaanttaatggggcttttccttattcagacctt

SEQ ID NO: 33990 - DNA, 470 bp, Homo sapiens
  misc_feature (1)...(470): n = a,t,c or g
cgannactnnnnnnnnnnnnnnnnnnnnnnnnnnnnnnnnnnnnnnnnnnnnnnnnnnnnnnnnnnnnnnnnnnnggcacgagccaaggtattgctgtcatcattcagagcacagcctgaagagaccagtgagctcactgtgacccatccttactctacttggccaggccacagtaaaacaagtgaccttcagagcagctgccacaactggccatgccctgccattgaaacagtgattaagtttgatcaagccatggtgacacaaaaatgcattgatcatgaataggagcccatgctagaagtacattctctcagatttgaaccagtgaaatatgatgtatttctgagctaaaacttaactatagaagacattaaaagaaatngtattnttgccaagtaaccaccacttntgncttanataatatgactataaggnaatnaaataaaagngtggcttaacttttaaaaaa

SEQ ID NO: 33991 - DNA, 473 bp, Homo sapiens
  misc_feature (1)...(473): n = a,t,c or g
ttgaanaccgctatcncatgnntacgaatttaatacgactcnnnnnnnnnnnnnnnnnnnnnnnnnnnnnnnnnnggcacgagataatagttttttccttgaataaatgtcatttgttggatttgcactaaaatgtgcttttgtaggcttatctacagtaagaatattcttttaggcagtaggttgaggttcaatatgtaacacaatagtatattattttgttataaaattcattaggtaaatgctagagttctacttaagtgccaaaatcagtattttatgattctgaaataaattatctgaaaataacaaagtttagagagatacttaaaaacttacacgttgaaagacaaactagtctttgaaaaaaatatttttctgtaacnccnggtaaaatacttanttcctgnagttaatataaagctaaatgagggcttgancccngantcnttgtaaanngngctgngccctaa

SEQ ID NO: 33992 - DNA, 463 bp, Homo sapiens
  misc_feature (1)...(463): n = a,t,c or g
acccgctatccatgattacnantttaatacgactcnnnnnnnnnnnnnnnnnnnnnnnnnnnnnnnnnnggcacgagcagctctgtcttttagggcttagagtgttttctcacatggctgtaactccttgttcttaccttataagtaacttgggtcagggatggtagataagggggggatctgaaacagagctaatactaataggaggatgacaaagatacaaggcaaggaccaggactgagctaagattaacaatggaaaacagagcttgaagtagagcaagaatggaacttgagcccaccccannnnnaatcagtagntaactaaannanggncttttgaaactngngaaangngaatttaactannctaanngacctacctaccggggnttcnntggaaaaatcccttncttaaggnatgnaanctncacnggnnaaccntaatactngngactgngtaa

SEQ ID NO: 33993 - DNA, 462 bp, Homo sapiens
  misc_feature (1)...(462): n = a,t,c or g
acngctatnnnnnnnnnnnnnnnnnnnnnnnnnnnnnnnnnnnnnnnnnnnnnnnnnnnnnnnnnnnnnggcacgagtgcaggcggagctggctgggaaagtcagcatgggcatgtgaagttagggtgtacatgacatcaggctggcagaggtgggtgagaaggagtctggggttcgggccagagggtgggctggagatgtaggtttgtagggcatccgcacagatggagcctgggagtagctgatactccatggggagcacgaagatgagctgttgaaggcaatgagctctggacccttgcattaaaggtctaagaaattaagggcaacccgtaagacttgaaaagggaaccttgggaagaagaaaatccnagantgagttacactggcggccaaatnaaaccggggttcctggggggcngganntgtgtgtntngcnaggctgggntatcntanaccctt

SEQ ID NO: 33994 - DNA, 461 bp, Homo sapiens
  misc_feature (1)...(461): n = a,t,c or g
nnnnnnnnnnnnnnnnnnnnnnnnnnnnnnnnnnnnnnnnnnnnnnnnnnnnnnnnnnnnnnnnnnnnnnggcacgagcagaaaaacagcttctgtattcttccctgtttaccattctggcatcaatttcaagtgctcagtccctcaagctctttcctctttacaaaagcccggctactgcaacaaagcatcctgtctgctgtaagtttcaagagactctttgaaactactgaccatctttctcactgcattcatgctgcaacaacccaaatcctgcaagctcttgactgaatcagggaaaaagtgactttggagctaagtcttccaagaatggccacnnnnaaanttggctttctnggaaaaaaaatnaantccntggantnagaanaaaanngtaantnccttcccnngnanntangctggcntanagacnttnttgggccaanaatatagnnnaaggg

SEQ ID NO: 33995 - DNA, 464 bp, Homo sapiens
  misc_feature (1)...(464): n = a,t,c or g
nnnnnnnnnnnnnnnnnnnnnnnnnnnnnnnnnnnnnnnnnnnnnnnnnnnnnnnnnnnnnnnnnnnnnnnnnnnnnnnnnnnnnnnnnnnnnnnnnnnnnnnnnnnnnnnnnnnnnnnnnnnnnnnnnnnnnnnnnnnnnnnnnnnnnnnnnnnnnncaaaaattgaactggacagttcacttagggacatgttgcttgtttaacgtcttagagcttctgttgtgatggccatgacgtgtcattctactgcccctggagaccctgccacccccaacttctagcagaaagggcttgtaaaatggccagcttttttctnnnnngnccnngnncccttttngaattnctttacnccnaggaccttgggaaggccctgncaacctatnanacttggnttccaggtgagacccagagctttccttncaggggaaaccnnaattgctgactaaagctttggatgtaatg

SEQ ID NO: 33996 - DNA, 457 bp, Homo sapiens
  misc_feature (1)...(457): n = a,t,c or g
tnnnnntcgnntnnnnnnnnnnnnnnnnnnnnnnnnnnnnnnnnnnnnnnnnnnnnnnnnnnnnnnnnnnnnnnnnnnnnnnggcacgagtgggcgtggtggctcaccatgcctgtaatcccagcactnnnnnnnnnnnnnnnnnnnnnnnnnnnnnnnnnnnnnnnnnnnnnnnnnnnnnnnnnnnnnnnnnnnnnnnnnnnnnnnnnnnnnnnnnnnnnnnnnnnnnnnnnnnnnnnnnnnnnnnnnnnnnnnnnnnnnnnnnnnnnnnnnnnnnnntggaccgttgcttgagcccagaagttgaggctgaacgagctatgatcaggccaccgacttcaaccttggccacnnnnncagaacctngtttgnannaatnaataaatannccnngcgcnanggnttacacctntatcccacactttgggaggcttaaacnagaggancacttgaggca

SEQ ID NO: 33997 - DNA, 471 bp, Homo sapiens
  misc_feature (1)...(471): n = a,t,c or g
ttnanaaccgctatcacatgnttacgantttaatacgactcnnnnnnnnnnnnnnnnnnnnnnnnnnnnnnnnnnggcacgagggaaatgattcaggacgagagtctttgtgctgctgagtgcctgtgatgaagaagcatgttagnnnnnnnnnnnnnnnnnnnnnnnnnnnnnnnnnnnnnnnnnnnnnnnnnnnnnnnnnnnnnnnnnnnnnnnnnnnnnnnnnnnnnnnnnnnnnnnnnnnnnnnnnnnnnnnnnnnnnnnnnnnnnnnnnnnnnnnnnnnnnnnnnnnnnnnnnnnnnnnntccaacctgggcaacacagcaaggaccctgtcttaaaagctacttacagaaaagnnnnnnnnnnnnnnnnnnnnnnnnnnnnnnnnnnnnnnnnnnnnnnnnnnnnnnnnnnnnnnnnnnnnnnnnnnnnnnnnnnnnnnnnnnnnnnnnnnnnnnnnnnnnnnnn

SEQ ID NO: 33998 - DNA, 479 bp, Homo sapiens
  misc_feature (1)...(479): n = a,t,c or g
ttnacttcaatnnnnnnnnnnnnnnnnnnnnnnnnnnnnnnnnnnnnnnnnnnnnnnnnnnnnnnnnnnnnnnnnnnnnnnggcacgagnnnnnnnnnnnnnnnnnnnnnnnnnnnnnnnnnnnnnnnnnnnnnnnnnnnnnnnnnnnnnnnnnnnnnnnnnnnnnnnnnnnnnnnnnnagcccggcnnnnnnnnnnnnnnnnnnnnnnnnnnnnnnnnnnnnnnnnnnnnnnnnnnnnnnnnnnnnnnnnnnnnnnnnnnnnnnnnnnnnnnnnnnnnnnnnagtaatgggaaaaatgctataccagcttaataggctannnnnntggnaccggntangncnnaccaactaagntcgngngagtaatntctaatnaatgcttgcnntgantaaattgnctaacaaagcngttnttaaaacatggcctatcantaagngntgngaaactgnatttgaaactatcttcttttggggcttt

SEQ ID NO: 33999 - DNA, 462 bp, Homo sapiens
  misc_feature (1)...(462): n = a,t,c or g
aanacccgctatgacangantacgaatttaatacnnnnnnnnnnnnnnnnnnnnnnnnnnnnnnnnnnnnnnnnnggcacgnnnnnnnnnnnnnnnnnnnnnnnnnnnnnnnnnnnnnnnnnnnnnnnnnnnnnnnnnnnnnnnnnnnnnnnnnnnnnnnnnnnnnnnnnnnnnnnnnnnnnnnnnnnnnnnnnnnnnnnnnnggcataataggcccttaataagactattgccttgtatctgatgattgctattaccagattaccaccttcattgtaacacctcatagagtcaagcctattattttccttatatgtagtcaatacatgtaaagttgctttaatcagtgatgttccgttttaaacattttttctgattttaatggttacaggtaaatttggaacagaaatttggattacatttctgaataatagatatattgntggattgaatcntaaaaag

SEQ ID NO: 34000 - DNA, 468 bp, Homo sapiens
  misc_feature (1)...(468): n = a,t,c or g
ttnannnccttngannnnnnnnnnnnnnnnnnnnnnnnnnnnnnnnnnnnnnnnnnnnnnnnnnnnnnnnnnnnnnnnnnnnnnnnggcacgagnnnnnnnnnnnnnnnnnnnnnnnnnnnnnnnnnnnnnnnnnnnnnnnnnnnnnnnnnnnnnnnnnnnnnnnnnnnnnnnnnnnnnnnnnnnnnnnnnnnnnnnnnnnnnnnnnngnnnnnnnnnnnnnnnnnnnnnnnnnnnnnnnnnnnnnnnnnnnnnnnnnnnnnnnnnnnnnnnnnnnnnnnnnnnnnnnnnnnnnnnnnnnnnnnnnnnnnnnnnnnnnnnnnnnnnnnnnnnnnnnnnttaccaagaattagacgaacatggtggtgcatgcattgngggtccagcttcntgggaagcttaanccgaaanancgnttgacccnaatggntgaanttcnnnggnnatnnccgntgnnntccnncctggg

SEQ ID NO: 34001 - DNA, 457 bp, Homo sapiens
  misc_feature (1)...(457): n = a,t,c or g
ttgaanaccgtnnnnnnnnnnnnnnnnnnnnnnnnnnnnnnnnnnnnnnnnnnnnnnnnnnnnnnnnnnnnnnnnnggcacgaggagctgataatggcgccctccccacttaccccctttgaaggaggggctggtgggcttaactggggcaggacggagctttcagctgtaaagcagtgggtgctctcttccccacgcttcccgcactgagaagcccccgccctgtgccgcagcagaaaagcagcgtcggcaggtcatgagaaggtgatgcatttccagacactgcaaagctgcggccgaagaccggctcaccttggagctctcatcgtccatctgggccaagggctacaccatgccccttcgntgaatgcaaggaaggatgccaagaaaaccaggccttgcatttganaaagaaatganaccgacttgnaatgggctcacgttnccttctgggcta

SEQ ID NO: 34002 - DNA, 454 bp, Homo sapiens
  misc_feature (1)...(454): n = a,t,c or g
ttnnnnncctttgaannnnnnnnnnnnnnnnnnnnnnnnnnnnnnnnnnnnnnnnnnnnnnnnnnnnnnnnnnnnnnnnnnnnnnnnggcacgagggaagaaataagaaccaaaaaataaatcagttgatcagggtaaaaaatgtcttatgctctgaacttataactctatggagtaatttccactaatgatctcagtgtctacttaactaatcatgtacttttctagccagaaagacagtacttgtaggggtacgttccattttaatgcacaaatcattgtgcttttcaaaaggcatctttttttccctggncacacacagnaccccgangcctggccagccccatgccanttaagacntgactnttaccggaatgggttctggggggagtccaagcaaccttaatngcttgcattcaaacntacttgctaacgggaaaaaagacctntgccc

SEQ ID NO: 34003 - DNA, 476 bp, Homo sapiens
  misc_feature (1)...(476): n = a,t,c or g
ttgnanncctttgaannnnnnnnnnnnnnnnnnnnnnnnnnnnnnnnnnnnnnnnnnnnnnnnnnnnnnnnnnnnnnnnnnnnnnnnggcacgagattataaacaccctgtagttttacccaccagtagtcattaaagatacctcttttctgcctgtaaccatggaattttggtcattttttacattcattgaaatctaagattaggaatcacaaaatcaaatgttaataggcttcctggtcaatggccaactggaaagaagtgtgttgcatgtaaagagggcatttaagnggaccctgncntaaggttccattaancttggtgcccaaggaaaaggtaggcctaaangggnnaaaagctnccccnttttcgggaaacctttaaanncccnatttttaaaaggaaatttcnggttttncaaaaangggtttncntttnngccccnaggggggagngcccttntgcaatnttnaacc

SEQ ID NO: 34004 - DNA, 452 bp, Homo sapiens
  misc_feature (1)...(452): n = a,t,c or g
nnnnnnnnnnnnnnnnnnnnnnnnnnnnnnnnnnnnnnnnnnnnnnnnnnnnnnnnnnnnnnnnnnnnnnnggcacgnnnnnnnnnnnnnnnnnnnnnnnnnnnnnnnnnnnnnnnnnnnnnnnnnnnnnnnnnnnnnnnnnnnnnnnnnnnnnnnnnnnnnnnnnnnnnnnnnnnnnnnnnnnnnnnnnnnnnnnnnnnnnnnnnnnnnnnnnnnnnnnnnnnnnnnnnnnnnnnnnnnnnnnnnntctcaggaggcttaagcnaaanaatcgcttgaactcctaaggngaaggttcaanngagccnaaattttnccantggccttcaacctnggcgaatangcccanaacttgttntaagaaaaaaatttaaattnaaaggcctttaaaggganggttttgnanaaacggccttaaggcttccccttgggaaattntgaaaagggcccct

SEQ ID NO: 34005 - DNA, 469 bp, Homo sapiens
  misc_feature (1)...(469): n = a,t,c or g
ttgaatacctttaagaaccgccnnnnnnnnnnnnnnnnnnnnnnnnnnnnnnnnnnnnnnnnnnnnnnnnnnnnnggcacgagctgcacccgttcgcggcggacgacacctgccggaccagccagggctccccggctttccagccgcccgagattgccaacggcctggacaccttctccggcttcaaggtggacatctggtcggctggggtcaccctctacaacatcacnacggntctgtaccccttcgaangggggacaacantttacangntntttgaagancatcgggaaaggggagctacgccnttcccggnccnattgnggccccccgttttttnacctgntgaaaagggatgctttggntnccaanccgnccanaaggtttttcattccgggaaattccggnatanaaanntggttctngggaaanaaaatntnctncgggttnnaanntccatgggccattc

SEQ ID NO: 34006 - DNA, 454 bp, Homo sapiens
  misc_feature (1)...(454): n = a,t,c or g
tttgaanacccgntatgacangactacgaatttaatacnnnnnnnnnnnnnnnnnnnnnnnnnnnnnnnnnnnnnnnnnggcacgagctaattttgaacaattactatactagttcattctttagaggtacagtttttccaacctgagaaactaaacatttcagtgatttttactctcctgataatattgagtaaagaaagccattctttttcttgttatttatgtccaatggtgggggagcacaacgttttcannnnnnnnnnnnnnnnnnnnnnnnnnnnnnnnnnnnnnnnnnnnnnnnnnnnnnnnnnnnnnnnnnnnnnnnnnnnnnnnnntccactnctgagttcaagtgattccctgcctcanctcccgagtagctgggatatagcgcacaccattacgcccagctaaaggtttggatttaatananacagggtttnccatgtggca

SEQ ID NO: 34007 - DNA, 461 bp, Homo sapiens
  misc_feature (1)...(461): n = a,t,c or g
ttnannnccttgganacngctatgacnnnnnnnnnnnnnnnnnnnnnnnnnnnnnnnnnnnnnnnnnnnnnnnnnnnnnnnnnnggcacgaggtgatgcaagaacaaaatattgtgaatatgtttacatcgaaagtgttaaagaaaactcagcatctgccagcaagtttatggcgtgccacggtgggtatagtggattggcacttttgtgttgtgaaatgcaaaaccttgattccaatccaaaatggcaggggggggcntctttttgggganaacctgacctgcctttnggttggntttaatccggccncttgctggagncctttaacangggttaaccactgactcctgggatgcanngcatccggccaaaagggaacccccanttggcaannncctaagggccnaggaattgccttnggnttaccntttggccaaaaaattncccaaggggnaaagtgc

SEQ ID NO: 34008 - DNA, 451 bp, Homo sapiens
  misc_feature (1)...(451): n = a,t,c or g
ttgaanacctttgaanaccnnnnnnnnnnnnnnnnnnnnnnnnnnnnnnnnnnnnnnnnnnnnnnnnnnnnnnnnnnnnnnnnnnnnggcacgagtctgaattctgaaacacatctggttccaacagtttcagctaagggactgtgggctgtgcctcttctgagtactgaaggaaaaggtcttgcatacagcaggcactcaataaatgttagctgagatcagcagtagtcccagcccctagacagacagacaaactgatggaccctctcctctgtctccctctccgtctccctctccgtctctggctctgtctgtctgtctctgtctgtttctctgactctctccctgagcgactctggaagtctggcagggtgtgttctgggattgaagaccaggcgcattcctcttctgnggccctaccttaccctgnccctcagagatgaccaagcga

SEQ ID NO: 34009 - DNA, 172 bp, Homo sapiens
  misc_feature (1)...(172): n = a,t,c or g
ttgnnnncctttgaanacngctatgactgnntacgaatttaatacgactcnnnnnnnnnnnnnnnnnnnnnnnnnnnnnnnnnnggcacgagaaacaagactattaacagcaagcaagtagagaatggttttgcagaatgnnnnnnnnnnnnnnnnnnnnnnnnnnnnnnnn

SEQ ID NO: 34010 - DNA, 449 bp, Homo sapiens
  misc_feature (1)...(449): n = a,t,c or g
ttnannnnnnnnnnnnnnnnnnnnnnnnnnnnnnnnnnnnnnnnnnnnnnnnnnnnnnnnnnnnnnnnnnnnnnnnggcacgagaaacaaatgccatgacatcacacccctaaaaaggccatgggagtatggactactaactttaactcataatatgatatcaaattgcccttccatctcctaacgtgctgcttttacttccttttccatccccacttcccagtccactcattcttcagcactggctgtgggatataggccaaagcaggggttttatttaggcatctctaagcctggtgggatatagccaaagcaagggttttgcttaggcatctctaagcccgggactagacagaatacattttcccacttggtaagaactagctcttttattcaggaacacnactggaacttatactaagactttgaagttgggcagacctanattg

SEQ ID NO: 34011 - DNA, 443 bp, Homo sapiens
  misc_feature (1)...(443): n = a,t,c or g
gntgnnnnnntttnanacagntatgacnnnnnnnnnnnnnnnnnnnnnnnnnnnnnnnnnnnnnnnnnnnnnnnnnnnnnnnnnnggcacgaggaagacaccaagaagccaaaagacaaggccgagggcggggacgggaaagttgagcccgagaagacactggccttccccggcacagacagcatggaggtcagcacgtccagcagcctgacccccgccatgagcatcagcgcctccgcctccaccagccaggcctccatctgcagctcgcagggcatctcccaaaccgtcagcgacctctctgtggatccgctgcctgccggcctcgagctgccatccctccgggcctgttggagccccacgcggtgtccagccaggaaagcctggacatttcctgtgcagcaccggcagcctgggcagcctgggcagcctgggggagcccc

SEQ ID NO: 34012 - DNA, 449 bp, Homo sapiens
  misc_feature (1)...(449): n = a,t,c or g
ggtgnnnnnnntttganacctttganannnnnnnnnnnnnnnnnnnnnnnnnnnnnnnnnnnnnnnnnnnnnnnnnnnnnnnnnnnnnnnnnnnnnnnggcacgagaaaataataacacacagaacaaaaaaccttacaaaccacctggtcccctcacttaccatctggaagatggaacctagtagaagtagtgacgtccacatccattcacagggtggagtcaggcctggagattttgaaacgtgcaagataaaagtttccctgtaatgagtgtggactcagtgtccgcctgcgtttggattcacgcccaagggaggagagcagagagtggggagggctgggcaggcatggctggtgggagtgagcccactggtgtttgttcacctgctgtgtggtcatggacatctggctggggaagcacatggccagggctggtggtgctgtctcc

SEQ ID NO: 34013 - DNA, 445 bp, Homo sapiens
  misc_feature (1)...(445): n = a,t,c or g
gnngnnnnnnntttnnnnnnnnnnnnnnnnnnnnnnnnnnnnnnnnnnnnnnnnnnnnnnnnnnnnnnnnnnnnnnnnnnnnnnnnnggcacgagcgaatgagattaacaatggaatagctggatnnnnnnnnnnnnnnnnnnnnnnnnnnnnnnnnnnnnnnnnnnnnnnnnnnnnnnnnnnnnttttgttttcaaagactgacctccgatgagcaagagtaaattcagccagcaaactttctatggacttaaactgcacctcttccttgtgtctcccatctgctggcccaccgcaacagattttagactcaccagtcctccacaatttcatgggtcaactctttaaaatcaatcaatcnnnnnnnnnnnnnnnnnnnnnnnnnnnnnnnnnnnacagagtgactgattcttaaggaatttatatagagataaatgatagatca

SEQ ID NO: 34014 - DNA, 440 bp, Homo sapiens
  misc_feature (1)...(440): n = a,t,c or g
gngnnnnnnntttganacgtttgacnnnnnnnnnnnnnnnnnnnnnnnnnnnnnnnnnnnnnnnnnnnnnnnnnnnnnnnnnnggcacgannnnnnnnnnnnnnnnnnnnnnnnnnnnnnnnnnnnnnnnnnnnnnnnnnnnnnnnnnnnnnnnnnntgatggagtctcactccgtctcaaaggaaaccaaaaccaaccaaacaaaaagcnnnnnnnnnnnnnnnnnnnnnnnnnnnnnnnnnnnnnnnnnnnnnnnnnnnnnnnnnnnnncagctcccaagttgccaaagccaccgtgcccagcctaagggtacttcagttggcaggactggctacagagtttgtggggcccagtgtgcaaaatgtaaatgtgagctccttgttaaaaagttattaaaaattttaagacagtgacggcagagccttacaccaagctcaa

SEQ ID NO: 34015 - DNA, 440 bp, Homo sapiens
  misc_feature (1)...(440): n = a,t,c or g
gtgnnnnnntttganacngttnnnnnnnnnnnnnnnnnnnnnnnnnnnnnnnnnnnnnnnnnnnnnnnnnnnnnnnnnnnnnnnggcacgagcaataccctggttttccgtgttaccacaacactctggccagcccacccaacccccactgcttttcctctagcacctactttacttctacttggagaaattttatcctgctctgtgtaaaacttccagagctgcagggctcatagcagacttcctggatcaccaaacttcagaggtaaatctattacagttaggtcctaaatctcaacagcaagaggaaaaacgttcctggtggcttttgctctgtaatgtcggtctattttggcaagtagcctgaagtaaaatccctgctgggagaaattccacctcggagacccagctcaaagcctccctttccccttttcatatca

SEQ ID NO: 34016 - DNA, 435 bp, Homo sapiens
  misc_feature (1)...(435): n = a,t,c or g
ttganaccttttgannnnnnnnnnnnnnnnnnnnnnnnnnnnnnntnnnnnnnnnnnnnnnnnnnnnnnnnnnnnnnnnnnnnnnnnggcacgagaggggcttaaagcacaaagcaggctctcgtggtccccgattccaggctttgacacttggcttccatttctggaacttccctgggccagaggaaggcctgctgccctgaatgtagagacctgagtctggcagcatccactacaagcttactgaaatttcagcctttgggctttgggcannnnnnnnnnnnnnnnnnnnnnnnnnnnnnnnnnnnnnnnnnnnnnnnnnnnnnnnnnnnnnnnnnnatttagtcctctctctcccagctacaggcagctcagcatggaatgaggggctccattttttgagtgaaagtaagggaagggagcaagggtctctgc

SEQ ID NO: 34017 - DNA, 434 bp, Homo sapiens
  misc_feature (1)...(434): n = a,t,c or g
gagnnnnnntttaaacgtttgactgattcgaatttaatacgactcnnnnnnnnnnnnnnnnnnnnnnnnnnnnnnnnnnggcacgagggagaataatttgtcaagagggcagggctggaggcaggaagcccagttaggaggctggtgcagtaatccatgtgagacgtgttgaggccctaaatttacagtcccgacagtgagggtggagataagtagatagatttgagaggtgtcaaggtggaattgaaggaatttggccactgtttggattattagagtgagggatgaatgagaaggaaatgttatgatgcctcccaggtctctagcttgggtggacagtagtatttactatgactgggaagaggggaggaggaggagcaggtattggagaaacggtagtgagtttaatgtcaagtttaagcagttggattggg

SEQ ID NO: 34018 - DNA, 444 bp, Homo sapiens
  misc_feature (1)...(444): n = a,t,c or g
ggngnnnnnnnnttgganncctttggannnnnnnnnnnnnnnnnnnnnnnnnnnnnnnnnnnnnnnnnnnnnnnnnnnnnnnnnnnnnnnnnnnnnnnnggcacgagtttttttctgggggaagatgggaaccttgaaaacattcgtcttcactctgactcaggactcaatgctcttccttcctgtcctgggtccataaaactgcatgacccttttgctgagggattgggcactttctctgggtttagcttcttggtgatactatgtactgaatgatcaaaagcttgattattatttccatttttgctcatctctggtataattgtctactccaacacatgggcagctcatctctctttctctctcagctccattttacaagtgagaaatatgaggcacagaaaggttaagtcacttccctgggccacatagccagtaagtcat

SEQ ID NO: 34019 - DNA, 483 bp, Homo sapiens
  misc_feature (1)...(483): n = a,t,c or g
gnnnggnnnnnttgnnnttntgnntnctnaaaccctnnnnnnnnnnnnnnnnnnnnnnnnnnnnnnnnnnnnnnnnnnnnnnnnnnnnnnnnnnnnnnnnnggcacgaggcaaaatgatgtctgtatatgagtcctgaattaggggtaagttggtccaattagctgaaagtgaaggttagggtaatttcatgttactcaagggttagagtaagaattaggatacattgaattaggttgttatgaaggttgggaagttgtaaagttagattgtgtttggttctgagattagaagagcagatatatttaataatccctatatgcatatgatgttttaccacttcagagtgccttcacannnnnnnnnnnnnnnnnnnnnnnnnnnnnnnnnnnnnnnnnnnnnnnnnnnnnnnnnnnnnnnnnnnnnnnnnnnatctntgccnccngggttcaagcnattctccngcntnagcctcccaattacc

SEQ ID NO: 34020 - DNA, 464 bp, Homo sapiens
  misc_feature (1)...(464): n = a,t,c or g
ttganacccgntnnnnnnnnnnnnnnnnnnnnnnnnnnnnnnnnnnnnnnnnnnnnnnnnnnnnnnnnnnnnnnnggcacgagctgggaaacaaggtatgttaaagtgatagacatgatttaatagactactggaaacaatcactaaattggaatgacattacccagaattttgtccaaaaaaaagatattaatatcaaacaagtagaaagcttaactatannnnnnnnnnnnnnnnnnnnnnnnnnnnnnnnnnnnnnnnnnnnnnnnnnnnnnnnnnnnnnnnnnnnnnnnnnnnnnnnnnnnnnnnnnnnnnnnnnnnnnnnnnnnnnnnnnnnnnnnnnnnnnnnnnnnnnnnnnnnnnnnnnnnnnnnnnnnnnnnnnnnnnnnnnnnnnnnnnnnnnnnnnnnnnnnnnnnnnnnnnnnnnnnnnnnnnnnnnnnnnnnnnnnnnnnnnnnnnnnnnn

SEQ ID NO: 34021 - DNA, 465 bp, Homo sapiens
  misc_feature (1)...(465): n = a,t,c or g
acccgttnntannngnntttgaanaccngtnnnnnnnnnnnnnnnnnnnnnnnnnnnnnnnnnnnnnnnnnnnnnnnnnnnnnnnnnnnnnnnnnggcacgagtttttatatttaagtgtgtgagtccctctgggccaattcagcgttctattttccactgctaaatgtgagactgatgtgtacatgcttgtgcacttcatgtattcagaggaggttctcccattcagggcactgctgtatttagaaaagtgttaatggaacaaactcctctgccatttgccgtgtgtgtgtgtgtgtgtgtgtgtcagtatttaaacacaagtgtttctactctgacggccacagttttcacatgagagcgaggatgctgtccagttgtttgacaactcagaattctcaatctcataccttgactgtggtttcatcacacctccaccaacaggagtgtttgataaaactccaaa

SEQ ID NO: 34022 - DNA, 466 bp, Homo sapiens
  misc_feature (1)...(466): n = a,t,c or g
aancccctnnnnnnnnnnnttggannacnnnnnnnnnnnnnnnnnnnnnnnnnnnnnnnnnnnnnnnnnnnnnnnnnnnnnnnnnnnnnnnnnnnnnggcacgaggctggcagaatattcctggcatcaattgacgtttaaaaaatagtaataactgcatcttaaaaatctctgtgccattcacgtggttattattattcctgttttacagagaaggagactgaggctcaagacagccgaggggacttgctcagggcacccggctaagacttgacaaaatccagaatgtgctaccggtcttcgtggctcctcaggcctccccttcactgtgcttcactgtgtagtcatctcgcttcctccaaatgtggccgcacaatttggagaccacacaaagatcatcagggttctgcttgatagaaaatacagaatacnnnnnnnnnnnnnnnnnnnnnnnnnnnnnnnnnnn

SEQ ID NO: 34023 - DNA, 457 bp, Homo sapiens
  misc_feature (1)...(457): n = a,t,c or g
acccgnnnnnnnnnnnnnnnnnnnnnnnnnnnnnnnnnnnnnnnnnnnnnnnnnnnnnnnnnnnnnnnnnnggcacgagnnnnnnnnnnnnnnnnnnnnnnnnnnnnnnnnnnnnnnnnnnnnnnnnnnnnnnnnnnnnnnnnnnnnnnnnnnnnnnnnnnnnnnnnnnnnnnnnnnnnnnnnnnnnnnnnnnnnnnnnnnnnnnnnnnagcactactcagcaggctgagggcaccnnnnnnnnnnnnnnnnnnnnnnnnnnnnnnnnnnnnnnnnnnnnnnnnnnnnnnnnnnnnnnnnnnnnnnnnnnnnnnnnnnnnnnnnnnnngtatccttacctaaagctcagagatagttttagaaaaaaagtatctctaggttattctttgtcaaaacctgcctgaggtttggatcccttcttctaaaggggcacctctcagaatgagtgatgcatgag

SEQ ID NO: 34024 - DNA, 442 bp, Homo sapiens
  misc_feature (1)...(442): n = a,t,c or g
annacnnnnnnnnnnnnnnnnnnnnnnnnnnnnnnnnnnnnnnnnnnnnnnnnnnnnnnnnnnnnnnnnnnnnnggcacgagcggcacgaggagggtcaggggatgggaggtgaggtggctgtcggctgaggtttccattctgacccccacaggctcacgctgacaagcagagccacatcctatgggccctcacaggccacgtgcagcggcagaggcgggagatggtggcacagcagcatcggctgcgacagatccaggagaggtgagcctggcaggggtttggcaggcagggcagttggatggggggcgcacagggcagctggaaaggggccccctcacctgggctgagccatctccctccccagactccacacagcggcgctcccagcctgaatctgcctggatggaactgaggaccaatcatgctgcaaggaacacttc

SEQ ID NO: 34025 - DNA, 473 bp, Homo sapiens
  misc_feature (1)...(473): n = a,t,c or g
gnnnntttgnanacccgnnttnnnngnnttggaannnnnnnnnnnnnnnnnnnnnnnnnnnnnnnnnnnnnnnnnnnnnnnnnnnnnnnnnnnnnnnnnnnnnnnggcacgaggggttctccagccatagcagtagagtgtaaagttctttgtattggggtctctatttctgctactgaaggaggcggttcagatgtttctgctactagagggggtgacacaggccaattttcatcctcctgctcctgtttattatttttaattggcgctgttgagagaacagaaagattctttcaaattttttgactctgaacatgactcctgctgtctagcagaataagaaatgaataatggcaggatgaactaaactccaaatataaaaaagaaaatagccaaattcttcccccatgttaccctgattcagaaacttcccgttcccagtacctctttagggcactgaccttatattagct

SEQ ID NO: 34026 - DNA, 456 bp, Homo sapiens
  misc_feature (1)...(456): n = a,t,c or g
accnnnnnnnnnnnnnnnnnnnnnnnnnnnnnnnnnnnnnnnnnnnnnnnnnnnnnnnnnnnnnnnnnnnnggcacgaggctttccggcacttagtaaccattagagtttgcattcctgggcatatgacctattttaaacaaaaacaacacaacatgcacccacagtaagctatctggccccttcaaatcttggcaagtgagtccagagggacagaaattaatctaggcagttatctagaatgacctttcatttcccctctccttgctcacaccccaaaaccaaaagcaaataaataaacctagtctgaagaaaactggctggggggaaggaaggggaagtgtaggtatatcgaagaggtcttaaacaacataatctctgagatcagaaaactcctggaacacagatcaatttccctctctgtcccatctcacagcttgattcccctggaagccac

SEQ ID NO: 34027 - DNA, 456 bp, Homo sapiens
  misc_feature (1)...(456): n = a,t,c or g
naccngnnnnnnnnnnnnnnnnnnnnnnnnnnnnnnnnnnnnnnnnnnnnnnnnnnnnnnnnnnnnnnnnnnggcacgaggtcatccaagcacagtaaaaacgtgatcttgctgggtcaggttcagaattggttgctctggcctccttgatacagatgttcctcaacttataatggggttacatcctgatcaacctatcgtaaggtgaacattttgtaagttgaaaatgcattcaggccgggtgcagtggctcatgtctataatnnnnnnnnnnnnnnnnnnnnnnnnnnnnnnnnnngcctgaagatgtttttgatgagccacatcttgagctgggaaaataacaccatgaaagcagagttagagccaatcgatctaacaattgtggtcaattgattggtaacaaaggtgccaagaacacacagtgagaaaaaaacagtctctttatttttattt

SEQ ID NO: 34028 - DNA, 459 bp, Homo sapiens
  misc_feature (1)...(459): n = a,t,c or g
ttganacccgnnnnnnnnnnnnnnnnnnnnnnnnnnnnnnnnnnnnnnnnnnnnnnnnnnnnnnnnnnnnnnnnnnggcacgaggtggcatggtgcctgcataggtggtccggctaagctttgctacttaaagcccagagtggtatgagggggaggaatccaggaggaatccaggaatcccatctggaatctctggaaaacagatcagtgatcaattggtgatgtctgcaggggatgtagtaggggtgtggctgtgcatgtgctgtgtaagaactttctccttataggccagctgcacccctggaagcactgtatagtgatttctactgccatttctgcattggtgggaatgagaatagtgatgaagtagaaatgtctgccacagttccaggagagggaggtagcagtgtgtgtgttatgtgccactgaccctgaaaaatgtgccatagcccaagccaa

SEQ ID NO: 34029 - DNA, 475 bp, Homo sapiens
  misc_feature (1)...(475): n = a,t,c or g
gnnnntttgnanacccgnnnnnnnnnnnnttggannnnnnnnnnnnnnnnnnnnnnnnnnnnnnnnnnnnnnnnnnnnnnnnnnnnnnnnnnnnnnnnnnnnnnnnggcacgaggaagtttgaaattaaaccaggttgtatgcataataaaatcctaaaagatacttaattgatttcaaacatgttgacccaagctgttgcttaaacaattgcagatgcgagaagagagatgagtagtagtaagagatgagttcttacttggtgggactaagaactttgtccgaagtgagactgctatcaatttgaattctggttctgcctttctcttgctttanaaatggggaagtgattcagtcaccttcgaaaaccttggttttcacaagtttaaaatggaacaagttgacaccagttcatgctttaccaatttgtaaagttaagtgtctctcaaaattctctttcctctctttcaagagag

SEQ ID NO: 34030 - DNA, 455 bp, Homo sapiens
  misc_feature (1)...(455): n = a,t,c or g
acccgnnnnnnnnnnnnnnnnnnnnnnnnnnnnnnnnnnnnnnnnnnnnnnnnnnnnnnnnnnnnnnnnnnggcacgagaaaatgccaagcaatctacaaaaatttgggatactgtcnnnnnnnnnnnnnnnnnnnnnnnnnnnnnnnnnnnnnnnnnnnnnnnnntgagaacaactaaaaactattgttttacagttctataggtcagaagtctggtggagtctcattggagtaaaatcactcttagttccttgcatctgtaggactaaggtcccattttccaaaccactttcctgtcttcctcttccactgtgaggggttcacgtgattcactcgggccttcctggataattctgccttcctcttccactgtgaggggttcacgtgattcactcgggccttcctggataatgcaggctcatcgccccatctcaaggtcctcaaccttaatcac

SEQ ID NO: 34031 - DNA, 475 bp, Homo sapiens
  misc_feature (1)...(475): n = a,t,c or g
gnnnntttgaanacngttnttnnnnnnntttgantaccngtnnnnnnnnnnnnnnnnnnnnnnnnnnnnnnnnnnnnnnnnnnnnnnnnnnnnnnnnnnnnnnnnnggcacgagctggaccaagtgcaacgaactcaggagaaatactatgtcctttttcctggaaggtgcagtagtttagtgatgaaaagaatccaatggctgcagcacacatacagtggaattagctggggtgagacctcaggtaaatctagcatctgcctgttaattataaccccctgcttacatgggaccaatgggtgaaagccatggcatagagatagtgagctggaaggctggggcttcagccagaataaaactgctggagaaggtttccacatttagggaaagggctctggtcagtcttgaagggtgaagagcacaataggaaatgtcctaagcttgtaaagagctttcaagagtccctaactgaaat

SEQ ID NO: 34032 - DNA, 457 bp, Homo sapiens
  misc_feature (1)...(457): n = a,t,c or g
anacccgnnnnnnnnnnnnnnnnnnnnnnnnnnnnnnnnnnnnnnnnnnnnnnnnnnnnnnnnnnnnnnnnnnggcacgaggaagagagacagagacagagagagagagcgagaattcacagagggactgaatgaatgtccaagatcttgatataacgcaagggaaattgaactgataatcttcacctgtttgtcctgtcagtttacaaaaatataggctttgagctcaggcaccatggattgggatcccatctctaccttttacttactgtcatttaaccactataggtctcagttttcacaccttttaaatgcagagaaagtagtaattccatcataaaggcaaagatcttatgccttatttatcttttcctagaggtaagtactctatctagcatataatatgcatgaaataaacagcagttaaataactgaataaagggccgggcgtggtggc

SEQ ID NO: 34033 - DNA, 454 bp, Homo sapiens
  misc_feature (1)...(454): n = a,t,c or g
acccnnnnnnnnnnnnnnnnnnnnnnnnnnnnnnnnnnnnnnnnnnnnnnnnnnnnnnnnnnnnnnnnnnnggcacgaggttttctaactgtctgatgtttcaatgtcttcacagataaaaaagggggaattatctattatgttctaatgtggagctttcatggaactgttcatggatgtgcagactcagggaggtacctgaagattcagacagagagtgattgctgaacacaatctaatagtttggttaacccagcagcttcctggttattgctacagataatggtcaagaacagaatttgtcagttacctttagaactgaaagctgccaggatataaagatattttctttgctgattttgagaatttcttattctgaggcgctgagtagctctgcatggggcctttgggatcatggccattttgatcttgagaacaagacagaatattactt

SEQ ID NO: 34034 - DNA, 460 bp, Homo sapiens
  misc_feature (1)...(460): n = a,t,c or g
tttganacccgnnnnnnnnnnnnnnnnnnnnnnnnnnnnnnnnnnnnnnnnnnnnnnnnnnnnnnnnnnnnnnnnnnggcacgagnnnnnnnnnnnnnnnnnnnnnnnnnnnnnnnnnnnnnnnnnnnnnnnnnnnnnnnnnnnnnnnnnnnnnnnnnnnnnnnncatatgcatttattaaatatttctgtccagccctctcatgcttttggtgcattgagacagggccttatttaatctttgcatacctcagagaagaaagttttgtacgtagtaggacttgagagaagactgcttagggaagcttctgggaagctctgaagaacagtggtgaggaacccagctctgaagttagagctgtgattgaatttgagctgtgcaagtgcttcccttctctaagcactggattcctcatttggattgttgtttgagttaaatgagataatgcatatgaaatgct

SEQ ID NO: 34035 - DNA, 479 bp, Homo sapiens
  misc_feature (1)...(479): n = a,t,c or g
gnngttgnnnctttgnanaccncttgacnnnnnnnnnnnnnnnnnnnnnnnnnnnnnnnnnnnnnnnnnnnnnnnnnnnnnnnnnnggcacgagaactnnnnnnnnnnnnnnnnnnnnnnnnnnnnnnnnnnnnnnnnnnnnnnnnnnnnnnnnnnnnnnnnnnnnnnnnnnnnnnnnnnnnnnnnnnnnnnnnnnnnnnnnnnnnnctagagaagcctttccaagcaaggcgactcagttgaaaaaaaacctagagaagccatttaatatattattcttatcctttgaacactaaaagcgtttttctttaaaagatgcccttgtttacatggctagaagggtaatggaatatatctgtcattgngctcataaatcacaggtcttgaattcagtctgtaatattcaaaatgaaagaaagtgcgtttatcagaatttattagtagaacttgcatttgaaaaaaaaaaaaanaaaaaaaaa

SEQ ID NO: 34036 - DNA, 483 bp, Homo sapiens
  misc_feature (1)...(483): n = a,t,c or g
gnagtttncctttgaaaccttngannnctgnnntncccctttgaanaccgttnnnnnnnnnnnnnnnnnnnnnnnnnnnnnnnnnnnnnnnnnnnnnnnnnnnnnnnnnnnnnnnggcacgaggagaaagttgttagcaaagtttcacctttaccatcagaataacctttgtctacctgatgagtttagtgtttaaaagagatgaaaatatgagggaaaatttcataccctaagtgaaaaccagcagtgtgattttagtagagtggtaaagtcacatttaattggtattgttagtgctgcttttctggggtaacccttaatgtgtttcactcttaagtagtgtgacaaatctgcattgtaggcaaaatttaacattgtacatagtacaaaaatacctattattgtgatggggtatgttcacattttagntcatatgtttanctgntgctgtaaaaagtgtggngcatatatgnactacaaaag

SEQ ID NO: 34037 - DNA, 474 bp, Homo sapiens
  misc_feature (1)...(474): n = a,t,c or g
gnagtttncctttgaaaaccttatgacnnnnnnnnnnnnnnnnnnnnnnnnnnnnnnnnnnnnnnnnnnnnnnnnnnnnnnnnnnggcacgaggaggtagacaagattgggatttcaccagaggcggccagtggggcaggagatgaagccccaaggcagagtccaggctgggcctgtgggtccttgtccttttgaggggacacatgatagccatcactgcccagtgatgaatccggactctgctgatttctagtgttgagaccttggcctctgcacctcagtttgctcattcatagagtgctcgtccttacctccagggttatgggaggatgaggtgcagtctccagtgtggtgggcttggcctggactcctcctgctgtcagcttggggtctgggcactgtcagagttgttcccaagctgatgcctttgcctggcccaggcgcggttgacctgccctgctgtaacacccgcaa

SEQ ID NO: 34038 - DNA, 475 bp, Homo sapiens
  misc_feature (1)...(475): n = a,t,c or g
gnagtttccctttganaccttatgacnnnnnnnnnnnnnnnnnnnnnnnnnnnnnnnnnnnnnnnnnnnnnnnnnnnnnnnnnnggcacgagtgagaaaggactgaaggcagggtgggagagcaaagaagcctccctgcacagtgcaggcccaggaaagaggggcaacattgctgaaggaaaggcataaggctacagccacaccctcctcccacctaagccactggggagggacagtacagcctgttgcagtcagggcacaggtgaagacctactgcagcttggggaaggggaaagccaaaacacccttgatccctggggaacgggcaagaaacagtcctgagccccagatccagacattctctcctgcacatgacacaaggcagggttcagctgccacaggaggaggaggaggaggggcaggatttctgagaaagccttactcctaagatccaggcatacagggcctgncaaac

SEQ ID NO: 34039 - DNA, 428 bp, Homo sapiens
  misc_feature (1)...(428): n = a,t,c or g
tnnnnnnnnnnnnnnnnnnnnnnnnnnnnnnnnnnnnnnggcacgagctcatcctttgggtgaaacatccacacagcgaacatcattgaatgcttaacatgtgtcagatcttctactttcacacaaattctcccatttaatcctcacaacacaatgggatagatattatcattgcctcattttagatattaagaaaaagaaacacaaagggttaaagtgtcaggatcaaactctactgcagttggtggcaaagacaagacccaaacctagatctgtctgaactaagtccaggctgcacaacatttagaagaagagatagattatacactttctagagagagatagtaggatcctaggattctgaacaaaatactgacagaaaataaggccaagcttatagggcctgttttaanaagtttgctccccca

SEQ ID NO: 34040 - DNA, 475 bp, Homo sapiens
  misc_feature (1)...(475): n = a,t,c or g
gcngtgcntcccccctttgaaacccntnnnnnnnnnnnnnnnnnnnnnnnnnnnnnnnnnnnnnnnnnnnnnnnnnnnnnnnnnnnnnnnggcacgaggagacaggtcgcgtcctagagcaaacggttttttttgtaaacagacggcatcctaacaggggcggtgctacccagtctgcggggagtcgctcgggatcgaagcacctcagagctccttcgagcgtatcccttcgggaaagccccacgccttccccgaggcgcctcctccggcctgcagcacgccctcgtcctgcacttcctcctcggaatctgcannnnnnnnnnnnnnnnnnnnnnnnnnnnnnnnnnnnnnnnnnnnnnnnnnnnnnnnnnnnnnnnnnnnnnnnnnnnnnnnnnnnnnnnnnnnnnnnnnnnnnnnnnnnnnnnnnnnnnnnnnntgatatcctgagagaagatgggaaagggctgcaaggttg

SEQ ID NO: 34041 - DNA, 437 bp, Homo sapiens
  misc_feature (1)...(437): n = a,t,c or g
tttngnaanacncntnnnnnnnnnnnnnnnnnnnnnnnnnnnnnnnnnnnnnnnnnnnnnnnnnnnnnnnnnnnnnnnnnggcacgagnnnnnnnnnnnnnnnnnnnnnnnnnnnnnnnnnnnnnnnnnnnnnnnnnnnnnnnnnnnnnnnnnnnnnntctcccaacctctggtaaccactactttnnnnnnnnnnnnnnnnnnnnnnnnnnnnnnnnnnnnnnnnnnnnnnnnnnnnnnnnnnnnnnnnnnnnnnnngtgtctggcttagnnnnnnnnnnnnnnnnnnnnnnnnnnnnnnnnnnnnnnnnnnnnnnnnnnnnnnnnnnnnnnnnnnnnnnnnnnnnnnnnnnnnnnnnnnnncatattttctttatccatcaatgaacatttaagtttgtatatctttgaagaaatgnctattcaaatccnatagg

SEQ ID NO: 34042 - DNA, 433 bp, Homo sapiens
  misc_feature (1)...(433): n = a,t,c or g
ttganacngntnnnnnnnnnnnnnnnnnnnnnnnnnnnnnnnnnnnnnnnnnnnnnnnnnnnnnnnnnnnnnnggcacgaggaataaaattatcatgacatttatcaaatgtgctccctttccccccggtacattgcataataatgatgtttgtatatgttgttgtcacataagcaagaacgagagaagatcccctttcatgggatgctcacagatttccttaatatgaaattaactagcagtcctagataagtaagctagaactgtaatgggcacagtctgaaagagggcagagctttctttttgccccttggccaaggacaaaacatgggcaaggccagttgtcaacatgagacactggtttcaggtttgcagctacaaagaatacagttgtgatggatttcaatccgatatttgcagttccaatgctaga

SEQ ID NO: 34043 - DNA, 430 bp, Homo sapiens
  misc_feature (1)...(430): n = a,t,c or g
annnnnnnnnnnnnnnnnnnnnnnnnnnnnnnnnnnnnnnnnnnnnnnnnnnnnnnnnnnnnnnnnnnnnnggcacgagtcggcgtggagtggggtgggaagagaaacaagggagaggccgagaaacaggaaatgagaacgaaggcacgaatgtgagccagggccagctgggctccccatcggtgtggcggtttccagccacttcaggcgcggtgtgcgttcctaatgacaacaaaggcggcgtctgcctggtgcgttctctgcctcttgccactcctaggttctggggaaaatgggatgggtggtccaacctagaggaggggtcccacagcctaagatgcgtcttaggaaggcagcaggattcagaggaggggtctgtcctggtcttgagggttcgaaaaggaagaaatgtctgaaatttgtggagcct

SEQ ID NO: 34044 - DNA, 451 bp, Homo sapiens
  misc_feature (1)...(451): n = a,t,c or g
aacagctnnnnnnnnnnnnnnnnnnnnnnnnnnnnnnnnnnnnnnnnnnnnnnnnnnnnnnnnnnnnnnggcacgaggttagatttgagaggccaactagacagccaagtatatatgtctcttaggccacaggatgtatgagtctggagctccaagaagagattcaggctggaaattaaaatgtgtgagttgatgacatataagatagatagtgtcaagagccttgagattggacgagatcactgagagaggaaaagatctgaggaaaggcccgtggagttctgggaattgaggaggagctacagagaagcctgaaaaggccagtgagtggggaggaacaggagagcacattgtcctgagaatcaagggaaaaggagggagccattagctgggcgggttgctgcctaaaggtcgggtaagaggaggacaggtcgattactgngtctagcat

SEQ ID NO: 34045 - DNA, 449 bp, Homo sapiens
  misc_feature (1)...(449): n = a,t,c or g
nnnnnnnnnnnnnnnnnnnnnnnnnnnnnnnnnnnnnnnnnnnnnnnnnnnnnnnnnnnnnnnnnnnggcacgagtctttatctgactaaagcctcagggttagtgggtatagatagcatcagcgaggtagtggtatggggttttgtgatcactggggatgcatgaaagaatgctctggttggggtgagctgatgctaaaccccatctttagtttccctcagtttcatcagnnnnnnnnnnnnnnnnnnnnnnnnnnnnnnnnnnnnnnnnnnnnnnnnnnnnnnnnnnnnnnnnnnnnnnnnnnnnnnnnnnnnnnnnnnnnnnacatgagttcaacaccaaagacaatgaagtggtctacttgttcccaaacacaatgtcctacttcaccctctaaatcannnnnnnnnnnnnnnnnnnnnnnnnnnnnnnnnnnnnnnnnnnnnnn

SEQ ID NO: 34046 - DNA, 426 bp, Homo sapiens
  misc_feature (1)...(426): n = a,t,c or g
nnnnnnnnnnnnnnnnnnnnnnnnnnnnnnnnnnnnnnnnnnnnnnnnnnnnnnnnnnnnnnnnnnnnggcacgaggctgactgggggagttcgaggcggcgggcggcggtgaccccggcctggaactgccccggtacggaagtgttccggggtccgtggggagcaggagagggaggcggcggaccgtcccgcgcggggcacgatgttgaacatgtggaaggtgcgcgagctggtggacaaagccaccaatgttgttatgaattattcagagatcgagtctaaggttcgagaggcaacgaacgatgatccttggggaccttctgggcaactcatgggagagattgccaaggctacatttatgtatgaacaatttccagaacttatgaacatgctttggtcacnaatgttaaaagacaccaaaagaa

SEQ ID NO: 34047 - DNA, 423 bp, Homo sapiens
  misc_feature (1)...(423): n = a,t,c or g
gnnnnnnnnnnnnnnnnnnnnnnnnnnnnnnnnnnnnnnnnnnnnnnnnnnnnnnnnnnnnnnnnnnggcacgaggagcccactgagtccatcggaaatgtggaggtggagggagctgagcatctgcccaggccctgctctgtgaagcctaggtaggtagaaccggccagatgaagagaaaagctgagtgaaggatgggactttagaagcaattttaggagttgtaggtaataatatcctattttacagatgaagagccaggcttagagggattaatgttccccatatctcagggctaggtagtgagagggcttggatgggaagaaatttatacttgggagcttacatgctcagtggccgtggagtgtgagggagctttgcttttcttggcaagaaagcaaatcaaccgccggttcttccata

SEQ ID NO: 34048 - DNA, 425 bp, Homo sapiens
  misc_feature (1)...(425): n = a,t,c or g
annnnnnnnnnnnnnnnnnnnnnnnnnnnnnnnnnnnnnnnnnnnnnnnnnnnnnnnnnnnnnnnnnnnnnggcacgagccatattcaaaccatgttttcaaggtagatgcctgtgaagggacacctgaaaaaattcagatgaccaacgtccacacaggtagaaggaacatgttggctggaaagcaagaggccatgattgacatcatccagacaaatccctgccctgagggcccaaagctggccaggcactcccaaggccactgtgggcatctggaggttttggagtcaactaaagaaactccagacctaggggtctctaagacaagttccatctcggaggagatatatgatgatgtcgagtactccaggaaagaggtccgaagctgaactactctactacttgcctcaagtagtgaanaaaata

SEQ ID NO: 34049 - DNA, 427 bp, Homo sapiens
  misc_feature (1)...(427): n = a,t,c or g
aacacagntnnnnnnnnnnnnnnnnnnnnnnnnnnnnnnnnnnnnnnnnnnnnnnnnnnnnnnnnnnnnnnggcacgagaatagatgatgacaaagctatcaaacgttagttatggtactatacataaatgctttaaacttacctagtaaaaggcaaaaattattgactggctttatagacaatatccaactatatgcttcttagaagaggcagctaaaataaatgatgtagcttggtaaaaggattacagggacagcaactgtaatatcaagataatatacttcaaagaaaagcattgaaagaaacagagaatagccttgtatagtcataaaacattcagtttttcatagacatacaatagccttgaattttggcatgtaaaatctgtgacagcaaggagtttggctgcttantcattaatatatc

SEQ ID NO: 34050 - DNA, 435 bp, Homo sapiens
  misc_feature (1)...(435): n = a,t,c or g
tttgaanaccatnnnnnnnnnnnnnnnnnnnnnnnnnnnnnnnnnnnnnnnnnnnnnnnnnnnnnnnnnnnnnnnnnnggcacgaggaaatatgtgattttctctaatgtaacttcctcttaggatgtttcaccaaggaaatattgagagagaagtcggccaggtaggatgaacacaggcaatgactgcgcagagtggattaaaggcaaaagagagaagagtccaggaaggggcggggagaagcctgggtggctcagcatcctccacgggctgcgccgtctgctcggggctgagctggcgggagcagtttgcgtgtttgggttttttaattgagatgaaattcaaataacctaaaaatcaatcacttgaaagtgaacaatcagcggcatttagtacattcagaaagttgtgtaggcccacctttggcacgttttg

SEQ ID NO: 34051 - DNA, 448 bp, Homo sapiens
  misc_feature (1)...(448): n = a,t,c or g
ggtgnttnnnnatttgaaaatntggananccgnnnnnnnnnnnnnnnnnnnnnnnnnnnnnnnnnnnnnnnnnnnnnnnnnnnnnnnnnnnnnnnnnnggcacgagaaactatgaagaaagagttaaaacatcctgagaatgctagtaagtatgtatttttgaaaggacttccaaaatttgagtttaaagaggtaaactccttttacatgacaaagttacttagaaacactactgctgtttccctctcccttgccttctccctgtcccatgcatacccccagctgtgttccagaatgatggcacataaagtaaacattcatatttatttccctttttttgtttgtttttttttnnnnngctngttngtttggttttttngttnnaaacagnntnantnattcncccngncngnagnncaggggcannntttaagntnanngnaccctt

SEQ ID NO: 34052 - DNA, 435 bp, Homo sapiens
  misc_feature (1)...(435): n = a,t,c or g
gtgnttannanttttgataccnntatgacnnnnnnnnnnnnnnnnnnnnnnnnnnnnnnnnnnnnnnnnnnnnnnnnnnnnnnnnnnggcacgaggcnnnnnnnnnnnnnnnnnnnnnnnnnnnnnnnnnnnnnnnnnnnnnnnnnnnnnnnnnnnnnnnnnnnnnnnnnnnnnattggcnnnnnnnnnnnnnnnnnnnnnnnnnnnnnnnnnnnnnnnnnnnnnnnnnnnnnnnnnnnnnnnnnnnnnnnnnnnnnnnnnnnnnnnnnnnnnnnnnnnnnnnnnnnnnnnnnnntnnnnnnnnnnnnnnnnnnnnnnnnnnnnnnnnnnnnnnnnnnnnnnnnnnnnnnnnnnnnnnnnnnnnnnnnnnnnnnnnnnanttgcaanntcnatnttccgngtncaagtgattctttntgccttaanctcctagta

SEQ ID NO: 34053 - DNA, 431 bp, Homo sapiens
  misc_feature (1)...(431): n = a,t,c or g
ganntttgatnnnnnnnnnnnnnnnnnnnnnnnnnnnnnnnnnnnnnnnnnnnnnnnnnnnnnnnnnnnnnnnnnnnnnnnggcacgagcacagatgtttagctcctgactgaaatgagcaaaggtatgacaagatcgggggaaaatcatctgtatccttgctggaaaccaaggcagagcatatatgaaaagtgtggcattcattgggtgggaaggaagaaaatgggggaagagtatagtcaaagcacacaaacagccttaacgcagaggggacattgctggaagaaagggaaggccattgagtaactgtgtgagagaaatcttaacggtcatagcacaagtagtttgctagggctgctgtaacagagtactccaaaacgggtggcttaacacaaatgaagtttttaaaattctgttccggaggctgaaag

SEQ ID NO: 34054 - DNA, 445 bp, Homo sapiens
  misc_feature (1)...(445): n = a,t,c or g
ggtgnnnnnnnnntttgnannnnnnnnnnnnnnnnnnnnnnnnnnnnnnnnnnnnnnnnnnnnnnnnnnnnnnnnnnnnnnnnnnnnnnnggcacgagcgtgagccaccgcgcccggcagaagaaacatttctaatgaggtatcgatcagtcaaaacgatacagatgttttacacagagataatattttaaataagaatgattaaaataccttcaggagactaccaggctaggtagtttaattgtcataaggtctaaagcagtttgcatccagtggcctgatttgtgtggaaaagtaaatgtgcagtttcatgtaaagaaataagcgatgattcttgatgtgaaccaagcagcagctgtgttttgcatgttacattttctagctctgtaagtcatttaaacacacaattattcatattggaaaaaatcttttctttaggtgatgg

SEQ ID NO: 34055 - DNA, 430 bp, Homo sapiens
  misc_feature (1)...(430): n = a,t,c or g
ttnnnnnnnnnnnnnnnnnnnnnnnnnnnnnnnnntnnnnnnnnnnnnnnnnnnnnnnnnnnnnnnnnnnnnnnnnnggcacgannnnnnnnnnnnnnnnnnnnnnnnnnnnnnnnnnnnnnnnnnacnnnnnnnnnnnnnnnnnnnnnnnnnnnnnnnnnnnnnnnnnnnnnnnnnnnccattccattttgaactcacttcttgtattgccttggaagacatctagccattggtactcatttctgttccgggtcgaagggacctcaccttcttttccaccagcgatgagacaggaaggcctcaactggtatccctgaaagggggagagttggactcttgccacaagtcaggtatctcacctacttctctctcccctcttgtgaccttttctcaactactgccccctagtgtggttccaatggtaaatga

SEQ ID NO: 34056 - DNA, 426 bp, Homo sapiens
  misc_feature (1)...(426): n = a,t,c or g
annnnnnnnnnnnnnnnnnnnnnnnnnnnnnnnnnnnnnnnnnnnnnnnnnnnnnnnnnnnnnnnnnnnnnnggcacgaggtggggggttgtgaacctgcagcagatgtctaaaaatagtctcacctcccttgagagtaatcggttccccatgcgtggagagacgtgatggagggtttgttctgtgccaggcctggcccacggcttgttttctgctcacatgatcctgtgtggtagatgctgttcccaccctcattctatagaggcactgagaggagaagtgacttgttgaggtctcacagctcttgtatgacggagccagcattcagatgcaagatggcccaactgtgaacccttggtcctaactccagaatagctgatcaacagagatttcttgccattacacctagattcagacagaggaact

SEQ ID NO: 34057 - DNA, 418 bp, Homo sapiens
  misc_feature (1)...(418): n = a,t,c or g
gntatgacatgattacgaatttaatacnnnnnnnnnnnnnnnnnnnnnnnnnnnnnnnnnnnnnnnnnggcacgagcctgactctgcgacctaattggttatatgtccttgagcaacttatattaccaacctgagctctagttttaccatctgtaaaataaggatgatcacaggtttcttccagggtcataagggccaaacacacttggtagctcagagagatgctccagtgtccctcaggttttctagttactgagagtgcatggaaggggtaagctatggtacactctggctggcgagggaggcactttaagaactgttaaggagaagcagtgtggagcagcaggtttcatagagaggtgggcggaggctgagtcacaaagagaagacttgagctgggcctgaggtgtgagcagag

SEQ ID NO: 34058 - DNA, 425 bp, Homo sapiens
  misc_feature (1)...(425): n = a,t,c or g
nnnnnnnnnnnnnnnnnnnnnnnnnnnnnnnnnnnnnnnnnnnnnnnnnnnnnnnnnnnnnnnnnnnnnnnggcacgagcggcacgaggcatttaaagtttttaatttttgccacaataccattttctttattttacatttcctgaatgcttggaagggttgtgcacgttttcatgtgtttgctggtcatttgtactactgtgaattgcctactctggttcttagtccatttttcttagtagattgtcttttcttgtctgtttttcttagtagattgtcttttctaatttgtaaagctcctatgtatcctaaactttaattccttgtttgtttatacaccagagatgttttctttctgttacttaactatagggtggtggtttttttttagaaggagttttacacttgttgcccaggctgaaatg

SEQ ID NO: 34059 - DNA, 445 bp, Homo sapiens
  misc_feature (1)...(445): n = a,t,c or g
ggtgnnnnnnntntttnnnnnnnnnnnnnnnnnnnnnnnnnnnnnnnnnnnnnnnnnnnnnnnnnnnnnnnnnnnnnnnnnnnnnnnnnggcacgagcaccatctcaaaaaatacaaacaaaaaaaacccatcacccagtgnnnnnnnnnnnnnnnnnnnnnnnnnnnnnnnnnnnnnnnnnnnnnnnnnnnnnnnnnnnnnnnnnnnnnnnnnnnnnnnnnnnnnnnnnnnnnnnnnnnnnnnnnnnnnnnnnnnnnnnnnnnnnnnnnnnnnnnnnnnnnnnnnnnnnnnnnnnnnnnnnnnnnnnnnnnnnnnnnnnnnnnnnnnnnnnnnnnnnnnnnnnnnnnnnnnnnnnnnnnnnnnnnnnnnnnnnnnnnnnnnnnnnnnnnnnnnnnnnntccatctcaaataacnnaacaaanncaatccatgacccaactccta

SEQ ID NO: 34060 - DNA, 459 bp, Homo sapiens
  misc_feature (1)...(459): n = a,t,c or g
ggtgnnnntttgnacttgtatgnccttatgannnnnnnnnnnnnnnnnnnnnnnnnnnnnnnnnnnnnnnnnnnnnnnnnnnnnnnnnnnggcacgagctttaactggcacctcctttctctatctaacccactccctccagcctctggnnnnnnnnnnnnnnnnnnnnnnnnnnnnnnnnnnnnnnnnnnnncatgtggtgtttgcctttgtatgcctggcttatnnnnnnnnnnnnnnnnnnnnnnnnnnnnnnnnnnnnnnnnnnnnnnnnnnnnnnnntaattttctgcttgnnnnnnnnnnnnnnnnnnnnnnnnnnnnnnnnnnnnnnnnnnnnnnnnnnnnnnnnnnnnnnnnnnnnnnnnnnnnnnnnnnnnnnnnnnnnnnnnnnnnnnnnnnagatgctacagcgtagttcacctttgttttgagagagggagagagagagacagagac

SEQ ID NO: 34061 - DNA, 396 bp, Homo sapiens
  misc_feature (1)...(396): n = a,t,c or g
cctcgaggccaagaattcggcacgagggcaaagaggaaaagggccagatgatgattaaatgccttacctgccgcagtgagagcatacacacatgctctgatagcacttcttagacgggaattctgagggtcaaagcatgccatcctgggttggcccatggcagcaccagccatgaagagcagccagcctggcaggtgtggagaggccccagagaaccacagaagcagccgcagaagtgatgagtgagcaatctccagggaaatgccacaagactaggccgtgcaacattttcgcagtgctcctcgctacaaagacattcccctaaagctggtggtcaactcaacactcagctcagtacgtggtcagntngtccttcataggagccttatgccttgg

SEQ ID NO: 34062 - DNA, 457 bp, Homo sapiens
  misc_feature (1)...(457): n = a,t,c or g
ggtggtnntttgaacttntatgacnnnnnnnnnnnnnnnnnnnnnnnnnnnnnnnnnnnnnnnnnnnnnnnnnnnnnnnnnnggcacgagctaagggatgggggcgagggattgtaaagaaatacagaattttatttatttttttctaagtccaaaagagctcttatggcagggtatattctcatagtggaacaaaatggcctaagatggcattttaaagtaatcttcatgaagaatggtggttaccatttaaaaacattttatagacaaggataggagatagtttgtatgacaaggaaatattttatataaaatattggcagttcactgagagtaaattgaacagtgctagaatacaccatatatacaccatggaaattggaggtcttgtcagtaaaatgagaagacactgacatgcagtagctagatataaacccatttagttgtattctaaaat

SEQ ID NO: 34063 - DNA, 463 bp, Homo sapiens
  misc_feature (1)...(463): n = a,t,c or g
ggngnntnnttnnnnntttgaaanccgnnnnnnnnnnnnnnnnnnnnnnnnnnnnnnnnnnnnnnnnnnnnnnnnnnnnnnnnnnnnnnnnnnggcacgaggtctaatgaatacttagttttgtcatctacaaaatgaaaatagtaatatttgcctcaaagactattatttgggaggatctagtgcaaatgttagtaatgtggatattgtgtagtgtcccaggatattaatgtttttagcctcttggcttttattctgtattgttgccccaaaagatgatgctcacttatctttcatccagtgtaaggatatctggaaagacaacagaaagtatagctgttttcatttcaaaagtgatcagctgcttgagctagcaagcaaggcttgcactagcttccaggcgcagtcacgcagtttcacagcaggcgcggttccctcggagcacccagagctgccctgcggt

SEQ ID NO: 34064 - DNA, 465 bp, Homo sapiens
  misc_feature (1)...(465): n = a,t,c or g
ggtgnngatttgannntncnanacngctatgacnnnnnnnnnnnnnnnnnnnnnnnnnnnnnnnnnnnnnnnnnnnnnnnnnnnnnnnnnnggcacgagcagctcgtatccccctagtttagagcaatacctgcacatagtagttgggaatgagtgcgtggatgatcaaactctaggctgtaatacatgtgtatgtcatgtaacatatagtacggaatgaagattatacatgcaaactctaaattcactggatttttacaaattatatnnnnnnnnnnnnnnnnnnnnnnnnnnnnnnnnnnnnnnnnnnnnnnnnnnnnnnnnnnnnnnnnnnnnnnnnnnnntgggcaacatgacgaatccccgctctacttaaaatacaaaaattaagtcaggtgtcatggtgtgcaccttgtagtcctagctgctccaggaggntganatgggaggattgcttgagccagg

SEQ ID NO: 34065 - DNA, 465 bp, Homo sapiens
  misc_feature (1)...(465): n = a,t,c or g
ggtgnnnntttgngnanttggtatgacnnnnnnnnnnnnnnnnnnnnnnnnnnnnnnnnnnnnnnnnnnnnnnnnnnnnnnnnnnggcacgagggaagaattaattacatttagatagtctaataataactctaaggaccagactattaaaagaagacaaaagtagtctttcaatatttactggtcaccaacagttaagatataaatttccagtttaaaaaaatcacaaagaccttcctattgttgctttaccaaagaacaatctagtaattcaaagattacaggtgtaggcctacatattccacaagatggacaatggtaagtgcaaatgttttgccttattttatttggggccaaaaataaatcattttaaagcagtttaagttacacaaagagtccaatcttaaattctaatttttaacagcagtcaggtgaataaaaagttatttgtggtcaggggcagtg

SEQ ID NO: 34066 - DNA, 454 bp, Homo sapiens
  misc_feature (1)...(454): n = a,t,c or g
agtgnnnnnnttgantcgnnacagctnnnnnnnnnnnnnnnnnnnnnnnnnnnnnnnnnnnnnnnnnnnnnnnnnnnnnnnnnnnnnnnggcacgagtaagatgccttatatctcaagttattgcttaaaattggtctcaccctgaattaatgtaaatatataaaaaaaccatgttgtggtctttgaaaaagttttatgcatatatatataaaatgtctttcaaatttcagtgtagatgtgattaataaaaataccaattcattaaaacataactnnnnnnnnnnnnnnnnnnnnnnnnnnnnnnnnnnnnnnnnnnnnnnnnnnnnnnnnnnnnnnnnnnnnnnnnnnnnnnnnnnnnnnnnnnnnnnnnnnnnnnnnnnnnnnnnnnnnnnnnnnnnnnnnnnnnnnnnnnnnnnnnnnnnnnnnnnnnnnnnnnnnnnnnnnnnnnnnnag

SEQ ID NO: 34067 - DNA, 451 bp, Homo sapiens
  misc_feature (1)...(451): n = a,t,c or g
gagnnnnnnttgantccgttcacntntgacnnnnnnnnnnnnnnnnnnnnnnnnnnnnnnnnnnnnnnnnnnnnnnnnnnnnnnnnnnggcacgagaacagtagaggttagagaaagtgagtgaaaataatgtagaaaatggcctaaataaatatagttagatgagtcctttcctcctaatttttatttttaatactttggaggactaacaggtatcatcctttaacatggctgaatacaaagctttaggagaactggtcctcagctattcatgtcttgtcctttgatttgctgacattcttttataggttatgaatctcttatggtttactttgtttctagcaatatctagatacatttgtgtatgtattgatgtatgtatgttttgaaaacacggattctccttttggataattcatagataaaaatacatgtaaagattatatatatg

SEQ ID NO: 34068 - DNA, 454 bp, Homo sapiens
  misc_feature (1)...(454): n = a,t,c or g
gtgnnnnnntttganaccgtnnnnnnnnnnnnnnnnnnnnnnnnnnnnnnnnnnnnnnnnnnnnnnnnnnnnnnnnnnnnnnnnnggcacgannnnnnnnnnnnnnnnnnnnnnnnnnnnnnnnnnnnnnnnnnncccaccaccccatctcccccaaaaaatatatattctaggaatgaagcccgaatggccaatggacatgcaaggaatggggaaagatccaaattaaccaatggggcacatttggcaataactactgagtcctgattttataagccggagggaaagagctttattctttaccaaattttaactannnnnnnnnnnnnnnnnnnnnnnnnnnnnnnnnnnnnnnnnnnnnnnnnnngattgcttgaggccaggagttagagaccagctggggtaacatatcgagatcttgtcttgacaaaaaattttaaaaaatagcctggag

SEQ ID NO: 34069 - DNA, 458 bp, Homo sapiens
  misc_feature (1)...(458): n = a,t,c or g
ggtgtnnnnntttganttcgttnnnnnnnnnnnnnnnnnnnnnnnnnnnnnnnnnnnnnnnnnnnnnnnnnnnnnnnnnnnnnnnnnnnnnnnggcacgagcaannnnnnnnnnnnnnnnnnnnnnnnnnnnnnnnnnnnnnnnnnnnnnnnnnnnnnnnnnnnnnnnnnnnnnnnnnnnnnngacatttcttatagtttgtacaaatcactcagtatgttcttgccaaatagtacacactctgcaagagaaacacaaagagaagcatcctccaggagccaggataaggtgtgctggatagagagggttctgctttgctagtcaataattattgattataaggaaaaagttaggcagtnnnnnnnnnnnnnnnnnnnnnnnnnnnnnnnnnnnnnnnnnnnnnnnnnnnnnnnnnnnnnnnnnnnnnnnnnnnnnnnnnnnnnnnnnnnnnnnnnnng

SEQ ID NO: 34070 - DNA, 451 bp, Homo sapiens
  misc_feature (1)...(451): n = a,t,c or g
ggagnnnnnnnttgnnntcgntatgacnnnnnnnnnnnnnnnnnnnnnnnnnnnnnnnnnnnnnnnnnnnnnnnnnnnnnnnnnnggcacgagagtttctaaagacttttacctaatattctctcatttgatccctacaacagctcaatgagagctggaggccctgtgctattattatagtctaatcttacagagaactcagagaggctaagtgacttgcccaaagacacaaagtaagttgcagagcgaggaccagtggtgtgctagtaaactggctctctggaatttaataataaacaagtaagccctgacttgtagtgttggcccatttctgtggtgtaaatactctcaccatggccagtgacatcactcatccaggagtaggaaagagatgcatacacatggcccttggaaaccagtaggagccagctccaacacaccactgaaaacc

SEQ ID NO: 34071 - DNA, 454 bp, Homo sapiens
  misc_feature (1)...(454): n = a,t,c or g
ggtgnnnnnnntttnnnnnnnnnnnnnnnnnnnnnnnnnnnnnnnnnnnnnnnnnnnnnnnnnnnnnnnnnnnnnnnnnnnnnnnnnggcacgagtgtaatcccagctactggggaggctgacnnnnnnnnnnnnnnnnnnnnnnnnnnnnnnnnnnnnnnnnnnnnnnnnnnnnnnnnnnnnnnnnnnnnnnnnnnnnnnnnnnnnnnnnnnnnnnnnnnnnncattttttttacttcaacaattacatgtgtagtttataccacactattaaaagttgtttttttttctgtagttctttgcttatccgtggctatgatggagcatgataatgaacatgagtggttggagcttgataaaacttgttgaagtagattatatgtgtttcttgtgatctcatttgcagtaattacctataaagtctgccttttcccgcctgtaccttgtacaaaga

SEQ ID NO: 34072 - DNA, 457 bp, Homo sapiens
  misc_feature (1)...(457): n = a,t,c or g
ggngtnnnnnnttgannttcgaannnnnnnnnnnnnnnnnnnnnnnnnnnnnnnnnnnnnnnnnnnnnnnnnnnnnnnnnnnnnnnnnnnnnnnggcacgagccgtgcttccttctgctgcccccaccactcaaagtcccactgacccagccctctcccaccaaaggctgctcttagccagctgtgggttgaaaaagcaccaaatcatatgaatgcataggtggcagcctatggcttcatgtttcactctattttaggaatcggcgggatgctgctttatagctcagactctgcttagaaaagagagaagtgttaatggtaggtgtccagccactgcagtagattatgaggagatattttaggaatggtgtatcttcttcctgacatagggccatctctgagcctggccttggtgccatcggggcggaggcaagggtggcctgatgcctcctatgtc

SEQ ID NO: 34073 - DNA, 531 bp, Homo sapiens
  misc_feature (1)...(531): n = a,t,c or g
catntctaatntangtannangttcnnntcgnntntngtactnangntnnnattntanntaaccntanagtnatcntnagagtgtanattgaatcgttnacagntacgaatgatacgaatnnnnnnnnnnnnnnnnnnnnnnnnnnnnnnnnnnnnnnnnnnnnnnggcacgagnnnnnnnnnnnnnnnnnnnnnnnnnnnnnnnnnnnnnnnnnnnnnnnnnnnnnnnnnnnnnnnnnnnnnnnnnnnnnnnnnnnnnnnnnnnnnnnnnnnnnnnnnnnnnnnnnnnnnnnnnnnnnnnnnnnnnnnnnnnnnnnnnnnnnnnnnnnnnnnnnnnnnnnnnnnnnnnnnnnnnnnnnnnnnnnnnnnnnnnnnnnnnnnnnnnnnnnnnnnnnnnnnnnnnnnnnnnnnnnnnnnnnnnnnnnnnnnnnnnnnnnnnnnnnnnnnnnnnnnnnnnnnnnnncgcactaaactatcacaagancatanaaccatncacccgcatagnctcactcanaggtngggaattcg

SEQ ID NO: 34074 - DNA, 457 bp, Homo sapiens
  misc_feature (1)...(457): n = a,t,c or g
ggagnnnnnnttgannttnnnnnnnnnnnnnnnnnnnnnnnnnnnnnnnnnnnnnnnnnnnnnnnnnnnnnnnnnnnnnnnnnnnnnnnnnnggcacgagaaataaggtatattattgatgatgagccacaaagaaaaagaaaatatctgccaaagacatacctgataaaggactgttaaataaaatatacaaagaacttttaaaactcaacaatataaaaatgaattttaaaatgggcaaaaggcctgaacagacaactcatcaagaaagatatacagatggcatgaagcatatgaaaaaatgttgaatatgtcattagggaattgtaattaaaatgagataccactacacactgattaaattggccaaaatccgaaacactgacaacactaaatgctggagaggatgtggggcaacaggaattcttaatcactgctggcaggaacgcataatggt

SEQ ID NO: 34075 - DNA, 451 bp, Homo sapiens
  misc_feature (1)...(451): n = a,t,c or g
gngnnnnntnttggnatcnnnnnnnnnnnnnnnnnnnnnnnnnnnnnnnnnnnnnnnnnnnnnnnnnnnnnnnnnnnnnnnnnnnggcacgagcggcacgagttcagtgttaggtgttgacttactgatgtgttttatgagacatggatgaggattctggcctcagaaaaggctgcctacgcctctctctttctcagaatagtcacatttcannnnnnnnnnnnnnnnnnnnnnnnnnnnnnnnnnnnnnnnnnnnnnnnnnnnnnnnnnnnnnnnnnnnnnnnnnnnnnntgcaaaactctgtctctaccaaaataattnnnnnnnnnnnnnnnnnnnnnnnnnnnnnnnnnnnnnnnnnnnnnnnnnnnnnnnnnnnnnnnnnnnnnnnnnnnnnnnnnnnnnnnnnnnnnnnnnnnnnnnnnnnnnnnnnnnnnnnnncccctgtact

SEQ ID NO: 34076 - DNA, 456 bp, Homo sapiens
  misc_feature (1)...(456): n = a,t,c or g
ggngnnnnntnttnnntttgaanaccgtnnnnnnnnnnnnnnnnnnnnnnnnnnnnnnnnnnnnnnnnnnnnnnnnnnnnnnnnnnnnnnnnnggcacgagggcgccgcgtcgcacccagggtggctgggttggcagcctggcgggcggcgcggaggagagggcgcaggggtccttctggccgtcttccgctccccctcccggcctttacttctgtcaggccccgcctggcccaggcccgcagcctgtttccttccacctgggcgggtcgggggctgcgggcattggggccccttaaggaaacccaggcctccagggactccgccgctccaggactcggcgcggagggaatgactgagcgacgaccgaggcagggggtgatgtggtacctcgaatgctgtggaaatggcaggaatgatgacccggccggaccttanacccgagatcgatgagaggg

SEQ ID NO: 34077 - DNA, 452 bp, Homo sapiens
  misc_feature (1)...(452): n = a,t,c or g
gagnnnnnnttganttganaccgntatgacnnnnnnnnnnnnnnnnnnnnnnnnnnnnnnnnnnnnnnnnnnnnnnnnnnnnnnnnnnggcacgaggctcggcnnnnnnnnnnnnnnnnnnnnnnnnnnnnnnnnnnnnnnnnnnnnnnnnnnnnnnnnnnnnnnnnnnnnnnnnnnnnnnnnnnnnnnnnnnnnnnnnnnnnnnnnnnnnnnnnnnnnnnnnnnnnnnnnnnnnnnnnnnnnnnnnnnnnnnnnnnnnnnnnnnnnnnnnnnnnnnnnnnnnnnnnnnnnnnnnnnnnnnnnnnnnnnnnnnnnnnnnnnnnnnnnnnnnnnnnnnnnnnnnnnnctgtgtggtttccatgttcctgttctaatcggttctccgtgggaaagtcagaggtatctttttaaagcataaatcagaatcanacataataaaaatcagatcatat

SEQ ID NO: 34078 - DNA, 458 bp, Homo sapiens
  misc_feature (1)...(458): n = a,t,c or g
ggngnnnnnnntnnnnttggnnnnnnnnnnnnnnnnnnnnnnnnnnnnnnnnnnnnnnnnnnnnnnnnnnnnnnnnnnnnnnnnnnnnnnnnnggcacgagaactggagtgagctcataatgtgaagatttatattttgcaatagacggctttggcccagaaaatgaggcctagcaaataggtctaacaacagcctggagaaaatgtggtctccttaaaaatacttttttaaaaaacaaaaagtctttttaaaaataagacactctaattgtgccacggaaattccactggctagtctttcacttccccacaggcagccagactttttcccctttccaggaagtcccttccaaggctctgagtatgccaaggatctaccatttttgtgattgatcctctcctttctccccactcaagcacattgatgctgggacaaaagaaatccatgctctttcttt

SEQ ID NO: 34079 - DNA, 457 bp, Homo sapiens
  misc_feature (1)...(457): n = a,t,c or g
ggagnnnnnntttgnntttggnnnnnnnnnnnnnnnnnnnnnnnnnnnnnnnnnnnnnnnnnnnnnnnnnnnnnnnnnnnnnnnnnnnnnnnnnggcacgagcggcacgagcagaaactcttacccaggacttggaaattactagtatacagtcacgtttaatcccattgtttacttatgaagttttatgaagtgtgtgcaattgattgcctaacacttatttaataggaaacctttccctagtataggaaccatgagagttttgtttttttctggtgtattctgattatatataatatgtgtaaattggtacctctgtgtctgacttcataaaacttcttgaaagttgcctcatccccgtaagctaaaactgttaaacaaaatgaaaatatttagagcatataacagcctcttttgctggaaggttttatagaaataaagttgccagcatattttt

SEQ ID NO: 34080 - DNA, 447 bp, Homo sapiens
  misc_feature (1)...(447): n = a,t,c or g
ttgnacanngntnnnnnnnnnnnnnnnnnnnnnnnnnnnnnnnnnnnnnnnnnnnnnnnnnnnnnnnnnnnnnnnggcacgagctggatgcagtacacacacctgtgtgtatgtatacatgtgtgcaaggacccattcctatctgacctgtcactatctgaactctcactactatcaaaactcttactatccaactaagattcctaacagattcacgataaattatttttaggatagagctggtatccctcctgcagcagagaatgttggagcattcacatctgcaaccttctcaggactgcccctggccatggtagccctttgctgttttccttgctgctgtccctctcccaactactacagtaaccaatgactgaaaaagggcatgaaagcccagctcccttgcctncaaggcacaantaaactgtatgtaccatgtggtacacc

SEQ ID NO: 34081 - DNA, 450 bp, Homo sapiens
  misc_feature (1)...(450): n = a,t,c or g
ttnnnnnnnnnnnnnnnnnnnnnnnnnnnnnnnnnnnnnnnnnnnnnnnnnnnnnnnnnnnnnnnnnnnnnnnnnnnggcacgagctagcaccatgagcttcaataccctggtgagaagtctgtccgcacacacagcatcagccaagcagcagaggcagtggtgtctgggggctgggagtcctccacgcagatacccacccatgcactgcccagtccccagaccccaaagtctttgtcctcgcctcacgcaccttttgcaggctcacactgtctgtgtgcgcacggggtagtgacgggagacaatggggaagagctgaaggaggcaaacaaggccagggggaaagcctagctcgaggcagagaggggccccaagaatgattatggtgacgaaaaataaaaacaagcaactgggagagcatgtattttaggaacaaatgagcgttccatgc

SEQ ID NO: 34082 - DNA, 442 bp, Homo sapiens
  misc_feature (1)...(442): n = a,t,c or g
ttnnnnnnnnnnnnnnnnnnnnnnnnnnnnnnnnnnnnnnnnnnnnnnnnnnnnnnnnnnnnnnnnnnnnnnnnnnnggcacgagctcacagcaagtcaacctagacattcttgctataacctctgtggcccaagcattctgacctccactctctagccaaagtggggcaggggtcagctctgtgggctggatctgagcaaaggggagcacctcttcagccctgggagctggctttgagaaggcctagaatctgcagaggtccaggtctgagatacaaacaatggagcctcactggactttactctgtcctcctggtaaggtccctgtaccacacacaccagatctgaggcctgagctgtcctcctggtacccctcccctgagccaggcagtgtcaccttggcccttgctgctcttctgccctgggacacaatagtctctag

SEQ ID NO: 34083 - DNA, 431 bp, Homo sapiens
  misc_feature (1)...(431): n = a,t,c or g
gntnnnnnnnnnnnnnnnnnnnnnnnnnnnnnnnnnnnnnnnnnnnnnnnnnnnnnnnnnnnnnnnggcacgagaaaaaaagtatgcactgtgaaatcagttcttcctagaactgtttacccagagagtgaatttgaatctagtctttgtcatgtcttccccactttctgccaaagacttaacagctaaatataaatgtagattaactgtctactatcatctattctactcccaccatcatggaaggataaacagcactcctgggcatatgtctaagttaaagcaacatcacttaagtccagaatgtcatttgtaagtctcaggtagtaaagatgatttaagtatagagtctgggacagagaaggaggaaaactctctctctataattctgaatttcagaggatgatgttatgatgccatggacaaaaata

SEQ ID NO: 34084 - DNA, 450 bp, Homo sapiens
  misc_feature (1)...(450): n = a,t,c or g
tnnnnnnntttnnnnnnnnnnnnnnnnnnnnnnnnnnnnnnnnnnnnnnnnnnnnnnnnnnnnnnnnnnnnnnnnnnnnnnnnnnnnggcacgagctggtgccctctttacaggatctaaggatttagaatataccactgtggcatgtttgggatcttcattaaaattttggaaaaggaaaatcagagcaatacatcttacagtgtcttcaccttgggcttggacttcctcccaggcaagctgtgtgtcacatggacttagtagtaaactattaaagaaggtggcgtgaatgagacaagctcccggaaagtcaggataatggccaccatagccattaagggcaaagccgctgatgtctagtggtttcacaaaattccccatccagaggtttcccaaaagtgttagggaagtcttggggaggcttcagcagctcaaagtacattgagctgt

SEQ ID NO: 34085 - DNA, 447 bp, Homo sapiens
  misc_feature (1)...(447): n = a,t,c or g
ttgnnnacccttnnnnnnnnnnnnnnnnnnnnnnnnnnnnnnnnnnnnnnnnnnnnnnnnnnnnnnnnnnnnnnnnggcacgagggattgaggtctccaagaataaaaagggacttcatggaaaaagtaggcttgtggataattaatcacaggggcaaataatgcagttaaaataacaacatgacaatcaggtggaggaatgtataataaacccaaatgtnnnnnnnnnnnnnnnnnnnnnnnnnnnnnnnnnnnnnnnnnnnnnnnnnnnnnnnnnnnnnnnnnnnnnnnnnnnnnnnnnnnnnnnnnnnnnnnnnnnnnnnnnnnnnnnnnnnnnnnnnnnnnnnnnnnnnnnnnnnnnnnnnnnnnnnnnnnnnnnnnnnnnnnnnnnnnnnnnnnnnnnnnnnnnnnnnnnnnnnnnnnnnnnnnnnnnnnnnnnnnnnngga

SEQ ID NO: 34086 - DNA, 432 bp, Homo sapiens
  misc_feature (1)...(432): n = a,t,c or g
nnnnnnnnnnnnnnnnnnnnnnnnnnnnnnnnnnnnnnnnnnnnnnnnnnnnnnnnnnnnnnnnnnnnggcacgagagcagatgaggatatctgagtgaaggaaaatcagaggagctgaaacactaagttggatacgttcctcagggcagagctcgatcccagctcttggaaggggttgggtgggttccctccccctcccccaaatgctttttcttcctcatcccttgtctgtggtcatgggatgattctttgctttcttctttactcttctgaaagcattcaggaaactgaagatgagataatgtctataaagtggtcagcacagtgctgtcacatgcatagtaaacactcgataagcaggagcataaaaatcatcttaaagatgaagaatannnnnnnnnnnnnnnnnnnnnnnnnnnnnnnnnnnnnnn

SEQ ID NO: 34087 - DNA, 457 bp, Homo sapiens
  misc_feature (1)...(457): n = a,t,c or g
gnnnnnnnnntttganacngtttgacnnnnnnnnnnnnnnnnnnnnnnnnnnnnnnnnnnnnnnnnnnnnnnnnnnnnnnnnnnggcacgagcttatgagcagcgctcacaactgccatagtggcaatgcgaatggcatctatttttaatgtgactgagaaaataattggtcagatattgcaggatttttgtgggggagagggtggaaaagaacttacagattaaaaaaagaactggcatagcacctagattttaaacagaaggaaaagatgacattggggaccagagacagaaatttcacttctgtgccatgacaaataccagggagatgtaattgcaaaatgaagctgcaaatgtcttacccagggaactaggtgacaacctgcttggcttcatgaagaaggaataatatccaattaggctaagtgtattcggtgcctgagtgacaagccctgga

SEQ ID NO: 34088 - DNA, 464 bp, Homo sapiens
  misc_feature (1)...(464): n = a,t,c or g
gngnnnnnnnnntttgaanncctttnnnacngctnnnnnnnnnnnnnnnnnnnnnnnnnnnnnnnnnnnnnnnnnnnnnnnnnnnnnnnnnnnnnnnggcacgaggtctgagagaggttttgatgtgtgaagtgtccctcgtgcttgaaaagattgggaagcacacatctagtccaacccttccacttactttacaagatagaccaaagcccatgagggttccctttactgccttagggttgggaagattgtcagtaataaagtagggaccagatcctgattctttaggacccaaaagtgagtgctttgtttttttcttaagtatatcatattaatggttcccattaatccagaacatccctatgaattagaaaaatccannnnnnnnnnnnnnnnnnnnnnnnnnnnnnnnnnnnnnnnnnnnnnnnnnnnnnnnnnnnnnnnnnnnnnnnnnnnnnnnnnnn

SEQ ID NO: 34089 - DNA, 461 bp, Homo sapiens
  misc_feature (1)...(461): n = a,t,c or g
gngnnnnnnnnntttganaacagctatgacnnnnnnnnnnnnnnnnnnnnnnnnnnnnnnnnnnnnnnnnnnnnnnnnnnnnnnnnnnggcacgaggagaaaggacatatgacactgtgcgtcatggctctaactaattgtcctaacgtagacaggcttttggtgtctatgccctttgctccctgctgttatgcctgtgagtgctttatgttacatgaaaaagagattttgcagatatgattattgttatggaccctaaaatggaaagattatcctggattatctggtgggctcaatgtaatcttttgagcccttaaaagcagagaaatatctccgtctgggattattcagagagttgctgtggaggaagtcagagagggtagtgagattcaaagtgtgttaagggtatctagctggctttaaagatggagggggcaaggtggctcctagaaggtgaaatt

SEQ ID NO: 34090 - DNA, 441 bp, Homo sapiens
  misc_feature (1)...(441): n = a,t,c or g
anacngtnnnnnnnnnnnnnnnnnnnnnnnnnnnnnnnnnnnnnnnnnnnnnnnnnnnnnnnnnnnnnnnnnggcacgagctttggggttgtggatagaaagataaactgatctgcaaaagaaatgcacagaagtattgaaggctagaagttggcagacaagaaatgaaaagcatttagagaatgggaggcctgtgaaggtagccacaacccaggacttaaggagaacacaggctggagaggaactctccaaagcagagaatgggtggtgggttttccaggcaatggtgcctagtggccagttttaagttgttgcttgtactgtgctcagctacactcccttcatgttgccccaagccctctctaaagtctgataaatgatccaccactctgcagcagtggtctttgggacaatgaagacacctcggtggtgggtcactta

SEQ ID NO: 34091 - DNA, 481 bp, Homo sapiens
  misc_feature (1)...(481): n = a,t,c or g
cccnnnnnnnnnnnnnnnnnnnnnnnnnnnnnnnnnnnnnnnnnnnnnnnnnnnnnnnnnnnnnnnnnnggcacgagactaaaagtaaaagcattactacnnnnnnnnnnnnnnnnnnnnnnnnnnnnnnnnnnnnnnnnnnnnnnnnnnnnnnnnnnnnnnnnnnnnnnnnnnnnnnnnnnnnnnnnnnnnnnnnnnnnnnnnnnnnnnnnnnnnnnnnnnnnnnnnnnnnnnnnnnnnnnnnnnnnnnnnnnnnnnnnnnnnnnnnnnnnnnnnnnnnnnnnnnnnnnnnnnnnnnnnnnnnnnnnnnnnnnnnnnnnnnnnnnnnnnnnnnnnnnnnnnnnnnnnnnnnnnnnnnnnnnnnnnnnnnnnnnnnnnnnnnnnnnnnnnnnnnnnnnnnnggntnanctntannaantgtttttnnggcnggcccnantttttccttttanggggggataattttaacttgtccccggcc

SEQ ID NO: 34092 - DNA, 479 bp, Homo sapiens
  misc_feature (1)...(479): n = a,t,c or g
tttgganaccccnnnnnnnnnnnnnnnnnnnnnnnnnnnnnnnnnnnnnnnnnnnnnnnnnnnnnnnnnnnnnnnnnnggcacgaggcagaataagttggtgcatggcggaccctgcgacaagacatctcacccctaccaagctgccctctacacctcgggccacttgctctgtggtggggtccttatccatccactgtgggtcctcacagctgcccactgcaaaccgaatcttcaggtcttcctggggaagcataaccttcggcaaagggagagttcccaggagcagagttctgttgtccgggctgtgatccaccctgactatgatgccgccagccatgaccaggacatcatgctgttgcgcctggcacgcccagccaaactctctgaactcatccagccccttcccctggagagggactgctcagccaacaccaccagctgcacatcctggctggggcaagacagcagatggtgatt

SEQ ID NO: 34093 - DNA, 487 bp, Homo sapiens
  misc_feature (1)...(487): n = a,t,c or g
nnnnnnnnnnnnnnnnnnnnnnnnnnnnnnnnnnnnnnnnnnnnnnnnnnnnnnnnnnnnnnnnnnnnnnnnggcacgagaacggttcctctggaagggttggggaatgtttccttttatggtagcattgggccgttggctgctcacgacttgccagcactcgcaggtacattcttgcctgctagtagagccggtgactaaacatgcccacagctggggcagaccacagggagacgcagtgggggagggcagggggctgggatgacaaaaatgtttgttccaaacccttatcggttgccacactgtcgttaggggccagcaatgaaattgctctgtcttccccaggctgtggttcctgccgcctccctcccttctgtcttcccgtctgtctagtcgaggatgcaggtctctaatctctgtcctcgctgtgcaggcttgaaggactcgtgttttttgagaaaggcaagggggagtaaggctttgcctc

SEQ ID NO: 34094 - DNA, 472 bp, Homo sapiens
  misc_feature (1)...(472): n = a,t,c or g
cccctnnnnnnnnnnnnnnnnnnnnnnnnnnnnnnnnnnnnnnnnnnnnnnnnnnnnnnnnnnnnnnnggcacgagttgccaaaggaacttgtagcagtacagaagatgggctcagaaatgaaagaagtctattgatgtgactaatttctcaaccatttaatagaattatggattttctattaaaaataacttgacccttttcgatgcatttaataaaatgccaagttcattatttgttaattttttaaaaccacaaaattcaatatgtcttgtgtcagcatattttttcaaaggccactattttacttctcccccaaaacgtttttaaattaaacagagaactctcaaagcacctgagaattacttcagtttttcatttattcaaatagttgcttaaagtgaccaacttggttttctttgaaatagtaattcttgggaataagaataccttaaataatataataaagctta

SEQ ID NO: 34095 - DNA, 485 bp, Homo sapiens
  misc_feature (1)...(485): n = a,t,c or g
aacccnnnnnnnnnnnnnnnnnnnnnnnnnnnnnnnnnnnnnnnnnnnnnnnnnnnnnnnnnnnnnnnnnggcacgagactggctgcaacaaagtgactcttgtactgtgactgaaagagaaagagacatcaggagtaggtaagatagcaagttcaagaaacttgaatatacaacttggcaaatgatgaggtttacagaaactctgtgctatcctggcactgtgagtttagtgtcctgatggccccacagtatggtcccttttgttcttgtgctataaaggaaaacttgtggatctctgtggagagatggacccccagtgttctgaaatgtacttttatagcctgattggctagaataaagcatctatgtatttagcacatttatctgcattcaaaaccaaaaagttctgaaaacttaaaaaaaattttcatactgaaatttaagtttgacagcaaaacctgccttgaactcattctatcgattc

SEQ ID NO: 34096 - DNA, 476 bp, Homo sapiens
  misc_feature (1)...(476): n = a,t,c or g
ttggaaanccctnnnnnnnnnnnnnnnnnnnnnnnnnnnnnnnnnnnnnnnnnnnnnnnnnnnnnnnnnnnnnnnggcacgagccaatttcccactcctgtaattgtgctgaagagaatctctgcatccatgcatctctagagcaacagactcctagaagtgcgatgtctggatcaaagtgtgtacagatttttgaagtgttggtcacttttctctatcagaggtctctgtcaaaggtgagccttgtttgggaaatcagcgccttgcagagatgctggggtcgagaccccagggagaacaggcaggtgagctggtagtggagcagatcacagtgccttgcaaggaacccctgagccaggaagactccctgcaccaggccctaggaggcctctgctactctgcaactcggcttctgagccaggccaccgggccctgcattcatggcagaggagtgtacatgttacctgctgctctct

SEQ ID NO: 34097 - DNA, 486 bp, Homo sapiens
  misc_feature (1)...(486): n = a,t,c or g
tggaacccnnnnnnnnnnnnnnnnnnnnnnnnnnnnnnnnnnnnnnnnnnnnnnnnnnnnnnnnnnnnnnnnnnggcacgagttttttttttctgctgcaactgccaaaaaggtacagttacatatttttgcaaaaaacaaaaggaaaaatctctggaaactgggggacttggcggcttttgccaaatgtctaggttgcctttcacatcactgcttggaaacagcgtggttggtctgggtcacaccctacctggagttggcaggaaactaaattcattcccccaaagttgccaggacttcccagggaagctgcagcagctctcggtgccagcttcctggcggtggctcctctcccagtgacaggtgcgtggctccggcctggcaggaatggcagtgacatgcgatccaaaggccttcctgccatctgctttgcaccttggcttcctgcantcccactgccagcatctgtnaaaactgngggacaga

SEQ ID NO: 34098 - DNA, 490 bp, Homo sapiens
  misc_feature (1)...(490): n = a,t,c or g
ttggaacccnnnnnnnnnnnnnnnnnnnnnnnnnnnnnnnnnnnnnnnnnnnnnnnnnnnnnnnnnnnnnnnnnnggcacgagaggctataagataaaagctagtgcagtttaatgaggaagtagtcactttaggctaatctggtttccttggaagctccaaggttgtggcagatgaaggaggtggtagaggtaagcttacctgccttagcaagatatttgatttcatctctcnnnnnnnnnnnnnnnnnnnnnnnnnnnnnnnnnnnnnnnnnnnnnnnnnnnnnnnnnnnnnnnnnnnnnnnnnnnnnnnnnnnnnnnnnnnnnnnnnnnnnnnnnnnnnnnnnnnnnnnnnnnnnnnnnnnnnnnnnnnnnnnnnnnnnnnnnnnnnnnnnnnnnnnnnnnnnnnnnnnnnnnnnnnnnnnnnnnnnnnnnnnnnnnnnnnnnnnnnnnnnnnnnnnnnnnnnnnnnnnnnnnnnnnnnnnnnntcc

SEQ ID NO: 34099 - DNA, 442 bp, Homo sapiens
  misc_feature (1)...(442): n = a,t,c or g
nnnnnnnnnnnnnnnnnnnnnnnnnnnnnnnnnnnnnnnnnnnnnnnnnnnnnnnnnnnnnnnnnnnggcacgaggacaggagcttccttctttgtcttcagtgccatcttgtgaaaaaagagctacatctgtatattttttcagaaccataaaattctcacagaattttcaaaatgacctttttagcaatttactgtcacttcacttaacctcccttagcaaattatttaacttccattagtctttgtttcttcatctataaattgaggcagtaacagtacctactcacagggttgttgtaaggagttaagaatttacatattagaacacctggcacatattaagcattcaaaaaatgtgagttattttctattttaatgctgttattttgtgaataaggaaattgaagcctggtaaaaggtcactttctcaagttttact

SEQ ID NO: 34100 - DNA, 448 bp, Homo sapiens
  misc_feature (1)...(448): n = a,t,c or g
annaccnnnnnnnnnnnnnnnnnnnnnnnnnnnnnnnnnnnnnnnnnnnnnnnnnnnnnnnnnnnnnnnnnnnnggcacgagcgggcgtgccagcttcagggctccctgtgggtttggcggaggccttagctgaggctacatcagagcttcatttctccctctgcccagtgctgcctccaacctgccctcctgcctggaggacttgactcgaggaacccttcctaacaagcctgctgcccactgtactccatcccagagtctgcatcccaagaagaaaccctacctactttgccatttaataacttgcccaacaagttatgaaccttgtctgggcttcagttttcttatctgtcaaatggagataataacatttccttcctcatggggttgttgagacaattaaatgggaagatgcatgttaagtccctggcacagtacctggaaaaa

SEQ ID NO: 34101 - DNA, 440 bp, Homo sapiens
  misc_feature (1)...(440): n = a,t,c or g
anaccngnttnnnnnnnnnnnnnnnnnnnnnnnnnnnnnnnnnnnnnnnnnnnnnnnnnnnnnnnnnnnnnnnggcacgagcaagaaacaggctgaagatacaatatcaaatgcatcttcgcagctttcttctcctcctacttctccacagagttctccaaggaaaggtggcagtggcaatcagctgagatcttttggctccgggcagttggacttaaccagttcctcctcttctcttggaagtgagaacagtaacaagaataacaatgcaccacggacctatgggataggctatactttggctcccagtggtactgtggataatttttcagattctggtcacagtgaaatttcttcacgatccagtattggtagcaattcgtcttttgactcagtgccagtctcactgcacgatgagaggcgccagaggcattctgtca

SEQ ID NO: 34102 - DNA, 443 bp, Homo sapiens
  misc_feature (1)...(443): n = a,t,c or g
accngntnnnnnnnnnnnnnnnnnnnnnnnnnnnnnnnnnnnnnnnnnnnnnnnnnnnnnnnnnnnnnnnnggcacgagggttcaggtgagtccttatatggtacacatgatttcaggaagtcattgttctgagacatggcgtggtggcgtgctcctctgccatggaggagcgtggccagggtggtgtccgtctgctcacctgaggagctccctgggtctgccagcttcctgcctggccaagcccttcccctgcacttgtaagacgacgactgagcgtggctgatcctgcccggtttctgggtggatagtggaacctgggggaaccagggtagaatcccttatgggaggcagccattggcctggccaggctttgggcgctgttggagacagggctgaatttttagccctgagtgtaggcacaggcganagctggagcccacgc

SEQ ID NO: 34103 - DNA, 448 bp, Homo sapiens
  misc_feature (1)...(448): n = a,t,c or g
ttgganaccctttnnnnnnnnnnnnnnnnnnnnnnnnnnnnnnnnnnnnnnnnnnnnnnnnnnnnnnnnnnnnnnnggcacgagagctgatacaagcttgccctaaaattgcccatgtaactattcagnnnnnnnnnnnnnnnnnnnnnnnnnnnnnnnnnnnnnnnnnnnnnnnnnnnnnnnnnnnnnnnnnnnnnnnnnnnnnnnnnnnnnnnnnnnnnnnnnnnnnnnnnnnnnnnnnnnnnnnnnnnnnnnnnnnnnnnnnnnnnnnnnnnnnnnnnnnnnnnnnnnnnnntatggttcttaagccgnnnnnnnnnnnnnnnnnnnnnnnnnnnnnnnnnnnnnnnnncatcatataagtcacctggaagtgggggaaagctgatagtgaccagcctcacccagttcccacgcanccagcaaggccagtctcactnccaccacc

SEQ ID NO: 34104 - DNA, 437 bp, Homo sapiens
  misc_feature (1)...(437): n = a,t,c or g
annnnnnnnnnnnnnnnnnnnnnnnnnnnnnnnnnnnnnnnnnnnnnnnnnnnnnnnnnnnnnnnnnnnnnnnggcacgagtggacagatcattcctagggctcttctatcgactccctgagtatccatcactcacagaatgcttcattaattggtaagaaaacccactgaagaaatagaatagtggtactcattttcaagatttatcttatctgtatgcaacctctccctttcccttccttgtattaatccctaaaaacgcctgtaaacattttgttcatattgttaaatattaactcaggacgttgctcattatccgtaacacagctataggcttggccctgttgtttgccatgttctgccataaagtttcactgccttccttctggaggggcggatggcagttcctgtttgcgatgtggctgtgtgagaatgtg

SEQ ID NO: 34105 - DNA, 438 bp, Homo sapiens
  misc_feature (1)...(438): n = a,t,c or g
gctnnnnnnnnnnnnnnnnnnnnnnnnnnnnnnnnnnnnnnnnnnnnnnnnnnnnnnnnnnnnnnggcacgagaaattggaataattattatgatgatcacattataaaaggatttaaaatgcttgttttgcaagattacatggagtaaaacaattataaaaattcagctcctgtcattgttatatgctatattctgtaacttacttgccttccaggataacagtgaattagtgttacatattttattaatcacaagttaatcaaatgggaaggtagttttagaaatttagttatttgctttaaggcatttctagtacatccttttttcttttgggagaagttttaagaaggccttattattaacaagcctttttaaaggcatttgtagcgtggtgcattaatactaacaaaacctaaccacaataaactattttctt

SEQ ID NO: 34106 - DNA, 438 bp, Homo sapiens
  misc_feature (1)...(438): n = a,t,c or g
nnnnnnnnnnnnnnnnnnnnnnnnnnnnnnnnnnnnnnnnnnnnnnnnnnnnnnnnnnnnnnnnnnnnnnnnggcacgagcggattatccggagccaaggtccgctcgggggtcagcagattatgatccagaggccaagcccagcccgtctgcttttgtgtataaagttctcatggaacagagctgtgagcctgccgtgtgtggtctacggctccccctggacacagctgcagagctgattcccgcacagacctcggggcccgcagagggaggcgccttccctccatcatccccactgagcaccagccgccgcagccgctaaaacctgcggaactcactccatgccccttgttggctttcttcacataaagtggataaaactgggtgtttacagcctaaagcagcccatgccaaggcactcctcagggactgagcctt

SEQ ID NO: 34107 - DNA, 180 bp, Homo sapiens
  misc_feature (1)...(180): n = a,t,c or g
nnnnnnnnnnnnnnnnnnnnnnnnnnnnnnnnnnnnnnnnnnnnnnnnnnnnnnnnnnnnnnnnnnnggcacgagattaaatagctgtgtactcaagggccgagactgaataaaatgaataatcattctttctgctttatggaggacattcttatgtggaaaaggctttttttttttttt

SEQ ID NO: 34108 - DNA, 440 bp, Homo sapiens
  misc_feature (1)...(440): n = a,t,c or g
gnnnnnnnnnnnnnnnnnnnnnnnnnnnnnnnnnnnnnnnnnnnnnnnnnnnnnnnnnnnnnnnnnnggcacgagagttgtgtgaattagggcaaattacttaatctctgaggctctgatttttgccccataaagaggggattaaactattgtttatcttatttaaagttcacggctgggcttgttgggattacaggtgtgagctgccacacccggcctcacattttcttattcatagttggaatggaatggttagtaggtagaaatacctagaggaaacaaaggaaccaaactattcataaaataggagataagactcgagagtaaatcttctagttggatatgcagacagatcatgtgctggtatattctgactacttacctgttccaatattttatatatttttctgccatatctaaagcgaggaggagtaataagt

SEQ ID NO: 34109 - DNA, 438 bp, Homo sapiens
  misc_feature (1)...(438): n = a,t,c or g
nnnnnnnnnnnnnnnnnnnnnnnnnnnnnnnnnnnnnnnnnnnnnnnnnnnnnnnnnnnnnnnnnnnnnnnnggcacgagggactctggattggttggcttgcatttgaaaggcaaggtagctgggaaattgttgaccatctctaggaattggctaatcctggaaggggcagtccctctatggtcagtaagacccagatgtcaaagaaacagaagataaaaaagaagacacatggttaatatgctcgggatggatgagtttgggcatttggttccacacctcctcagttcttctctgggagatgtacttggaggtggtgaaataggaaatggacggttaatgaacagagtaggaagtgaaaggaaaggcaaggataattttcaagacagaaaatcaactgaaaagttctgaccagaatgtgcttttgagagtgaccct

SEQ ID NO: 34110 - DNA, 438 bp, Homo sapiens
  misc_feature (1)...(438): n = a,t,c or g
nacnnnnnnnnnnnnnnnnnnnnnnnnnnnnnnnnnnnnnnnnnnnnnnnnnnnnnnnnnnnnnnnnnnnnnggcacgaggagagaggcagcttcaataccctggaacataagacttttttttgttttaattgtagaaaaagcttatcttccccaaactccaccttaaggaaaagtctctcagattgaagaaacaaaagacagaaagaggaaggggttgggggagggattttaaaaactgaggtcaaggatgataaacagagatgctattatttcacaagactgatcacttagcaggctactgacttaatctttccctcaagctattacaatttttcactaagtgaactctgggctccagcaacttggacatttaaaatcatagcagccaggcgcggtggcttannnnnnnnnnnnnnnnnnnnnnnnnnnnnnnnnn

SEQ ID NO: 34111 - DNA, 451 bp, Homo sapiens
  misc_feature (1)...(451): n = a,t,c or g
ttggantcccnntttgaanacnnnnnnnnnnnnnnnnnnnnnnnnnnnnnnnnnnnnnnnnnnnnnnnnnnnnnnnnnnnnnnnnnnnnnggcacgagggaactccatggagagcagtttgcttgcaagtggggaatgtgagtcttctttccccgccccggtttcattgaagtataatcgacaaagacggaatatattcaaagtgtgcaccgtgatgttttgataatacatgtacataaggaatgattcccacaatcaagctagttaacaacatatccatcacctcacacagttgcccacccttgttttgtggtgagaacacttaagatctcttttagcanatttcnagtaaacaatacattgttactgactgtagtcaccacgctgtaggagagctccncaggacttactcaacgtggctggaggacactacgctaagtgaaataagcca

SEQ ID NO: 34112 - DNA, 439 bp, Homo sapiens
  misc_feature (1)...(439): n = a,t,c or g
nnnnnnnnnnnnnnnnnnnnnnnnnnnnnnnnnnnnnnnnnnnnnnnnnnnnnnnnnnnnnnnnnnnggcacgagcatttctgccattgtgaatcagggccactgctgttgacgcatctagcttttcaatgcctgcattaaccttnnnnnnnnnnnnnnnnnnnnnnnnnnnnnnnnnnnnnnnnnnnnnnnnnnnnnnnnnnnnnnnnnnnnnnnnnnnnnnnnnnntggttaggggaattaaaagaaaaacaaaaaaacatggcatgtgctaatgatccatagcctggacaccctctctccattatcctgcaatggatttggggcgaagataccaggagaggtccaatgcacgaagccttacatgggaagagtggagacggggtctatgcagttcgtttattgactgcctactaggtgtcatgttctggggcgctca

SEQ ID NO: 34113 - DNA, 452 bp, Homo sapiens
  misc_feature (1)...(452): n = a,t,c or g
ttgaanncctattgagtacagctatgacnnnnnnnnnnnnnnnnnnnnnnnnnnnnnnnnnnnnnnnnnnnnnnnnnnnnnnnnnnggcacgaggcttttttttcaaatcatcaggttgtagatgatatttaagaggctgtatgaggtcacctgggaaggtctagcacaatttcattttattaaagtatgtttctcttcttctcagctagcctatctcagntttagtntatgggtgcttaaggaatagttnctccggttggcnntttaaatggnnanngaannnncaaangagnctnattnanntcnggnntctntacntangttnnncanggntcatcatanatgtnnccgnnnggacnanntagcgtncttggntcnccnaccntccnnnnntngccctaggncgcgtcntcnttnanttcnactntntcngcntcnccnnannnctttt

SEQ ID NO: 34114 - DNA, 486 bp, Homo sapiens
  misc_feature (1)...(486): n = a,t,c or g
ccnctnnnnnnnnnnnnnnnnnnnnnnnnnnnnnnnnnnnnnnnnnnnnnnnnnnnnnnnnnnnnnnnggcacgaggtttttttttttacatagttttgctttgancctaccantncaaatttaaaaaaattganctatattctctnattgaangccctttatgngatattaaaaangttcatatggtaaatttctgaaaangttgaaacttacctacatggacttactgancaaggtancanctgtaaatngttttatancncanaaaacatnttccaccatggcagttnattnataatactttgnccaaaaaagctntaataggactgttctacnttaaaaataaatgancanagcntaaacctggattgnggttgancaaaatttgaattctttacttactgcaggttgttngtttgttngnnnnnnnnnnnnnnnnnnnnnnnnnnnnnnnnnnnnnnnnnnnnnnnnnnnnnnnnnnnnaa

SEQ ID NO: 34115 - DNA, 494 bp, Homo sapiens
  misc_feature (1)...(494): n = a,t,c or g
tttgnnnnccnnnnnntttgganaccnnnnnnnnnnnnnnnnnnnnnnnnnnnnnnnnnnnnnnnnnnnnnnnnnnnnnnnnnnnnnnnnnnggcacgagcaaggatttagaggcttctcccaggaactggggacaaagagcagccagattctttattcttagagggtagagtttnnnnnnnnnnnnnnnnnnnnnnnnnnnnnnnnnnnnnnnnnnnnnnnnnnnnnnnnnnnnnnnnnnnnnnnnnnnnnnnnnnnnnnnnnnnnnnnnnnnnnnnnnnnnnnnnnnnnnnnnnnnnnnnnnnnnnnnnnnnntcacgagatctgannnnnnnnnnnnnnnnnnnnnnnnnnnnnnnnnnnnnnnnnnnnnnnnnnnnnnnnnnnnnnnnnnnnnnnnnnnnnnnnnnnnnnnnnnnnnnnnnnnnnnnnnnnnnnnnnnnnnnnnnnnnnnnnnnnnnnnnnnnnnnagcttaacaggtgcgtgccccacc

SEQ ID NO: 34116 - DNA, 491 bp, Homo sapiens
  misc_feature (1)...(491): n = a,t,c or g
ttgnaaaccnnnnnnnnnnnnnnnnnnnnnnnnnnnnnnnnnnnnnnnnnnnnnnnnnnnnnnnnnnnnnnnnnnggcacgagctcaaagaaaggccaactgaagttttataccatgcagaaaggaatagagggttaagggtatcctggggttgtggggaaggggttgctgcagtgtatgagagtgagaggaggaaacatggnnnnnnnnnnnnnnnnnnnnnnnnnnnnnnnnnnnnnnnnnnnnnnnnnnnnnnnnnnnnnnnnnnnnnnnnnnnnnnnnnnnnnnnnnnnnnnnnnnnnnnnnnnnnnnnnnnnnnnnnnnnnnnnnnnaagcatgtcttacgctggggcaggcaaagagagaatangaaccaagggaagagggaaaccgctgaaaaccatcatatctcatgagactttttcactaccacaagaaacagtattggggggaaactgccctatgattcattatctcttaccaggtccctc

SEQ ID NO: 34117 - DNA, 482 bp, Homo sapiens
  misc_feature (1)...(482): n = a,t,c or g
ntttgnanaccnnnnnnnnnnnnnnnnnnnnnnnnnnnnnnnnnnnnnnnnnnnnnnnnnnnnnnnnnnnnnnnnnnggcacgagacttctttttctactttacatgattaagcaaagtaacttttgtcatcaagttattatcattgtcctctcatatattgttaactaatagttctcttgtactataaatcccatgacagatttttgtctgtcttgttcccctgggtttgccctggtatctgggcacatggaaggcactccataaaagtgtattgactaaatgcataaaggaaaatctttatttaaataaagtatctaatattccagcatgacactatcttcatgctgtcaggtatataattattgtctcagttttacaggtaaaagagagaaaaatctatgcaaatcacaatgtaagtctagaagtgattaaaattgataaaaagcaaagcaactatgcaaagtaagagctgagattcag

SEQ ID NO: 34118 - DNA, 474 bp, Homo sapiens
  misc_feature (1)...(474): n = a,t,c or g
anaccnnnnnnnnnnnnnnnnnnnnnnnnnnnnnnnnnnnnnnnnnnnnnnnnnnnnnnnnnnnnnnnnnnnggcacgagtttgtttccnnnnnnnnnnnnnnnnnnnnnnnnnnnnnnnnnnnnnnnnnnnnnnnnnnnnnnnnnnnnnnnnnnnnnnnnnnnnnnnnnnnnnnnnnnnnnnnnnnnnnnnnnnnnnnnnnnnnnnnnnnnnnncatagctttttttaaatacaagagcaacaacaataatataaacgaaagttattcttcaaacgtaacattaacctagatttatttgaagctgaaagtgaatgcaattgggtgtgccaaaggcaatgtgggaaaaacaattaattcctttttgttagaattggcatatgtattcgcaccaaatggaaccattgntagggcatattacttttctattaagttacttttctattaaaatcattcaagcnaatctcaaaggttt

SEQ ID NO: 34119 - DNA, 476 bp, Homo sapiens
  misc_feature (1)...(476): n = a,t,c or g
ggannncccttcggtttggaaancnnnnnnnnnnnnnnnnnnnnnnnnnnnnnnnnnnnnnnnnnnnnnnnnnnnnnnnnnnnnnnnnnnnggcacgagtgattattaacccaatcgctagaccctctctcctccctggagaatgaggggtaggggtgaaagttctaggcttctgatcatggcttggtcgttctggtgacaagctctcattcagcagcccagcaaaagtcacctacagacagtataacagatgctcctatcacccaggtcattccaagggatgaggagctctgagtccagaccctggcatctgggagaggtgcagctgcagctgtggagcaaggtgggtgggggtttgcgggngnnnnanccctttgtnnnttactcnntgnnnnnctagnnctnctancngctntgtnntcnttnatggcnnnnnggtttcantttctctntgntgncntnccntagtttngata

SEQ ID NO: 34120 - DNA, 479 bp, Homo sapiens
  misc_feature (1)...(479): n = a,t,c or g
tttgnaaancccttntgacatgaccnnnnnnnnnnnnnnnnnnnnnnnnnnnnnnnnnnnnnnnnnnnnnnnnnnnnggcacgagnnnnnnnnnnnnnnnnnnnnnnnnnnnnnnnnnnnnnnnnnnnnnnnnnnnnnnnnnnnnnnnnnnnnnnnnnnnnnnnnnnnnnnnnnnnnnnnnnnnnnnnnnnnnnnnnnnnnnnnnnnnnnnnnnnnnnnnnnnnnnnnnnnnnnnnnnnnnnnnnnnnnnnnnnnnnnnnnnnnnnnnntctattgtatagttttaaaaaacaaaaccaaaaggctaataaatggcacccctttgcaagctcttccccctcctttctttttcttcccagtgtctcctacttctctgacctagttgacagcattatacttttggatgttggtagcatgtataaagtacattattacataacaagntaatataacataanagnttcaagggttttgccact

SEQ ID NO: 34121 - DNA, 467 bp, Homo sapiens
  misc_feature (1)...(467): n = a,t,c or g
ccnnnnnnnnnnnnnnnnnnnnnnnnnnnnnnnnnnnnnnnnnnnnnnnnnnnnnnnnnnnnnnnnnnnggcacgaggccagaccagggtggagatgagggtattctgagcagcaggacctgcaggggcacaaggcaagggccgcatcctagaggagacccagtggccaggcacatcatgggaactgcaggctggccccaagcctctgccccgctcctcccttgcaggcagggcctcctggagccttgtgctcatcctgggctctgaggccccagccctgcacagagagcgcagacgtgccttgccttcaccccgtccgctctgtcctctttggtcctgatgtcattcccttggtggcagagtggagaaggaggagtcctgtctcctcatccctatctatctttttcccatagtagcagcccaggcagccacagtgggagtggtcctgcatggaggcgacaggctga

SEQ ID NO: 34122 - DNA, 479 bp, Homo sapiens
  misc_feature (1)...(479): n = a,t,c or g
ccnnnnnnnnnnnnnnnnnnnnnnnnnnnnnnnnnnnnnnnnnnnnnnnnnnnnnnnnnnnnnnnnnnnggcacgagtttgcacaagccacattaggaagcaggaaatggtggtgagagagttcttggttcaagcattgcaggatcagttgggctgtgcagaatactcttgctaaaatgttgttggaagcaagctgtttgtgctttgtgtgcttctggagagagtagcagctttattcttcactgttatacttgccacccaaaaaagagggtggagagaatgaagatgaaaccttggcttcttgggtaggtcctgaagaattggagagtaaaggagagctttgagaagcaggggctattttggggaggtaggaagacaatacctactgagtaggcaccctttaacatatcatcccatggaatccttccatcagcctcatcaaagtanctgntggtctcctcatttttctggnaagggac

SEQ ID NO: 34123 - DNA, 466 bp, Homo sapiens
  misc_feature (1)...(466): n = a,t,c or g
acngctnnnnnnnnnnnnnnnnnnnnnnnnnnnnnnnnnnnnnnnnnnnnnnnnnnnnnnnnnnnnnnggcacgagagagaagaaaaggaagacgtgataaagaagctgaaacataacatagtgttgggctctaatgagcctgtttatgttccccaagaaatgcacattttctccttcagtgaattaacagacattaaaggtatttcaaaaggaaatggcattatcaagtgaggtggggcagtggtttgtgttcatttcatttagtgtgttcttgttttcaactatctcttctctaagtggtgcgattacaggtgatttttattgacttcattttatgttattttcataatgaacgtatatttattttctggttaaaaaaagcatttttatctttaaaatataaacaatgatggaagagtaaaaagtagattgaaggaacaggaaaataaaaccaagaaactcttc

SEQ ID NO: 34124 - DNA, 473 bp, Homo sapiens
  misc_feature (1)...(473): n = a,t,c or g
annnnnnnnnnnnnnnnnnnnnnnnnnnnnnnnnnnnnnnnnnnnnnnnnnnnnnnnnnnnnnnnnnnnnnnnggcacgaggtctgtctcgatttctccagcggagtcacttcctagctgtgtagccttaggcaaggccctgaaccacacagttcccttctgtggcaggggacagtgtgcccttcacaggccgtcgtgaggactgaattcagtaatccaggggcagaaaaacactggcagatgttattgtccctccctcccctcccctaggcggccgtggctctgagggacatttcctggcagcagccctacccgatggacttctacgctggcagctccttggggccctggacggtgaaccacggccaggaccgccgtccccacgccccgggccggcccgcgcgggggaaggtgcaggaggggtccgcgcgtcccccttcggccgtggcttgcgaggactgcagctgcaggga

SEQ ID NO: 34125 - DNA, 470 bp, Homo sapiens
  misc_feature (1)...(470): n = a,t,c or g
anaccccttgactgattacgaatttaatacgactcnnnnnnnnnnnnnnnnnnnnnnnnnnnnnnnnnnggcacgagataggaaagctgccattaggggtctcatttttaaattttacagaacacctaagcctgatcttctccatccagttgtatagatctagctggagagaaagcagatgttttaagaactcgaaattgctgaactaatgtatacccttgtctctgtaatatgttccacaacatggaacaatccataccacctaggcttctctctgctagaccatcatgcctccatgtcttcttaatgtcacctggaaggagttgagacagtgatttaatttcccaggacacggaataactcttaaaatggaattgtgatgttggtataaagcaagtggccttaatgataaatgctattttaatatcttgaaattatgttatacaggcattcatttctaacgtttcttg

SEQ ID NO: 34126 - DNA, 489 bp, Homo sapiens
  misc_feature (1)...(489): n = a,t,c or g
tttgaaanccccttnnnnnnnnnnnnnnnnnnnnnnnnnnnnnnnnnnnnnnnnnnnnnnnnnnnnnnnnnnnnnnnggcacgaggggccacgctgtcaaacagaggtggatgagtgcctgagtgacccatgtcccgttggagccagctgccttgatcttccaggagccttcttttgcctctgcccctctggtttcacaggttcacaggggaggcattggaaagaactggcagaatattttattccatttgggttggggcagagttcattggtgggtgtttgatggttgggatgtgagaatagaatgagaatggtatcctttaaagttatttagtgtaaaacctgcataattgtacaaccatggggacaagggcaggggttaccgtagggcccacatgggcccagtgtaaatggtgtgattgcggcttgggagcanaggacggggctcaaagaaaaggcattcacttgcttatttancaagcacttacc

SEQ ID NO: 34127 - DNA, 471 bp, Homo sapiens
  misc_feature (1)...(471): n = a,t,c or g
aaccgctnnnnnnnnnnnnnnnnnnnnnnnnnnnnnnnnnnnnnnnnnnnnnnnnnnnnnnnnnnnnnnnggcacgagtggtttggtcagtttctccttaaaatcagcagtttttatgcttcatatatgccaaaactgtaataaagatactttagaacaagacaaaacttcgaaacgaatgaatgagaaaagtcagtctctaagagttggactgaataattgtagcaacctcccatacttaaaagtgtctcnnnnnnnnnnnnnnnnnnnnnnnnnnnnnnnnnnnnnnnnnnnnnnnnnnnnnnnnnnnnnnnnnnnnnnnnnnnnnnnnnnnnnnnnnnnnnnnnnnnnnnnnnnnnnnnnnnnnnnnnnnnnnnnnnnnnnntcggcgggctannnnnnnnnnnnnnnnnnnnnnnnnnnnnnnnnnnnnnnnnnnnnnnnnnnnnnnnnnnnnnnnnggcagaggtt

SEQ ID NO: 34128 - DNA, 444 bp, Homo sapiens
  misc_feature (1)...(444): n = a,t,c or g
accntnntttgaanaccgnttgacnnnnnnnnnnnnnnnnnnnnnnnnnnnnnnnnnnnnnnnnnnnnnnnnnnnnnnnnnnggcacgagctgcaagactacaatttgcaaattctgcttcgtgaaggctgcaagaagattctcgtagctgactctttgtccttactgaagaaaatgcaccgaactcaaatgaaaggtgttcttgttgatgaggagaacatctgtgagtcgtgcctttcccctattcttccatcagaataacccagtggagagaagtgttgtggcttccatcctgctcagtggaatgctggtgctgccattgcttagagctgaggttctcaagctctaggatgcagctaagcccttcagcgtggtggtcttccattgccggcacatgttccacaaggagtgcctgcccatgcccagcatgaactctgctgcaca

SEQ ID NO: 34129 - DNA, 438 bp, Homo sapiens
  misc_feature (1)...(438): n = a,t,c or g
gttttnnnnnnnnnnnnnnnnnnnnnnnnnnnnnnnnnnnnnnnnnnnnnnnnnnnnnnnnnnnnnggcacgannnnnnnnnnnnnnnnnnnnnnnnnnnnnnnnnnnnnnnnnnnnnnnnnnnnnnnnnnnnnnnnnnnnnnnnnnnnnnnnnnnnnnnnnnnnnnnnnnnnnnnnnnnnnnnncagccaaaattagcaggccatggtggtgtgtgcctgtagtcctgnnnnnnnnnnnnnnnnnnnnnnnnnnnnnnnnnnnnnnnnnnnnnnnnnnnnnnnnnnnnnnnnnnnnnnnnnnnnnnnnnnnnnnnnnnnnnnnnnnnnnnnnnnnnnnnnnnnnngggcctgcctcagccagcaggtgaggtctgccacnnnnnnnnnnnnntagcagcaggaacagcctccacccccacactgcaatcaagttttt

SEQ ID NO: 34130 - DNA, 445 bp, Homo sapiens
  misc_feature (1)...(445): n = a,t,c or g
nccnnnnntttgaannacnnnnnnnnnnnnnnnnnnnnnnnnnnnnnnnnnnnnnnnnnnnnnnnnnnnnnnnnnnnnnnnnnnnnnggcacgagctgggaggtgtcagggacaggtgtgtgtgtgttgtccaggggcctgagcccccaggaggccatggcccatgtctttccctgggcatccatgtgtaggtctgtgtgtgggccagtgcacagacaggtgcatccccgtgatgtgaaatttgcacgttgcacccgtttgttggaaactatttccagataactgagatgggggccaggcacgctggttcacacggataatcccannnnnnnnnnnnnnnnnnnnnnnnnnnnnnnnnnnnnnnnnacagaaagtctgagctggcacctgtgtggttctgtgtctgtatcaatgcctaataatcaaacattatgctgtgtgtggc

SEQ ID NO: 34131 - DNA, 440 bp, Homo sapiens
  misc_feature (1)...(440): n = a,t,c or g
anaaccgttnnnnnnnnnnnnnnnnnnnnnnnnnnnnnnnnnnnnnnnnnnnnnnnnnnnnnnnnnnnnnnnggcacgaggagtgagtggcctgagataaggtcttagagattggcagggaccagatcatgataggtcatgatagggagtctgtttttcagtcatagtgctgagaggtttcagtaggggaatgataggatttgatgtgaaaaagtctccctggccgctggatggcgattagactgttgggatcgagagcagaaggcctcagctttttattcataacatcatacggtggatctcaatcttgctgtacgttatgatcacacctcaaagcaattatatctgaaccactgagggctggacccaagtatcagcctttttttgtttgtttgtttgttttttaagaaaaagcattctaattgtagccagggttgaga

SEQ ID NO: 34132 - DNA, 447 bp, Homo sapiens
  misc_feature (1)...(447): n = a,t,c or g
ttgnnnnccntnntttgannnnnnnnnnnnnnnnnnnnnnnnnnnnnnnnnnnnnnnnnnnnnnnnnnnnnnnnnnnnnnnnnnnnnnnnggcacgaggtcatcaactcttgattggggtttgcaacttgatccaatcctgacattcactcagtggttgaaattgatggaaatcctgttagtgggactttaagagaatcggctggtctatggaaatgagcaaataagtgtgtgttgccagttgcctccctgccttagtgggtaaggacagaatcatcttggtttaggagagaagtacgtagtatatatcgaacagtctacatttgaaaacgcgttgtgcctcagagtcgtctggtatttgtggcagaatcataccccatttgatgtaacttgatttaacctgacccatgtaatgtgaaggcatttgcccagcaggccctctgttcct

SEQ ID NO: 34133 - DNA, 447 bp, Homo sapiens
  misc_feature (1)...(447): n = a,t,c or g
ttgnnnnccnnnnntttgnnnnnnnnnnnnnnnnnnnnnnnnnnnnnnnnnnnnnnnnnnnnnnnnnnnnnnnnnnnnnnnnnnnnnnnnnggcacgaggcgccatgtactttgtagagcgtgtgaagaacaggtaaggagttttctgaaagagtaggacgagggtggggccacttggagtatcccgttagtggggattggtggagaacagggaccttgagggcacctgatggttccttctggtttgagagtttgttttcattatggagagagtgtagccggtatgcccagactttgctttttgggtcacatagtggccacccaggaggcaatggagtgcaatgattaagaaccttggctagagttggacaaaactggattcaaatccagccctgtaaactgactagctgtgtgaccttggtaaagtgatttcaccggctttcccat

SEQ ID NO: 34134 - DNA, 430 bp, Homo sapiens
  misc_feature (1)...(430): n = a,t,c or g
anaacagntnnnnnnnnnnnnnnnnnnnnnnnnnnnnnnnnnnnnnnnnnnnnnnnnnnnnnnnnnnnnnnnggcacgagcggcannnnnnnnnnnnnnnnnnnnnnnnnnnnnnnnnnnnnnnnnnnnnnnnnnnnnnnnnnnnnnnnnnnnnnnnnnnnnnnnnnnnnnnnnnnnnnnnnnnnnnnnnnnnnnnnnnnnnnnnnnnnnnnnnnnnnnctcaccctacttttaggctgagcactgcttgtgagtaccgttcacactgacacacgaggctccactcgcatccgcagctgcgtggctttccctcgtggttattccacagtgtgtctatccgttctccagccagtggacatttagagtctccaagtttctgcattttcacacagcctggcagtgagcggtcccctgtggcatgtatctgaaa

SEQ ID NO: 34135 - DNA, 438 bp, Homo sapiens
  misc_feature (1)...(438): n = a,t,c or g
nnnnnnnnnnnnnnnnnnnnnnnnnnnnnnnnnnnnnnnnnnnnnnnnnnnnnnnnnnnnnnnnnnnnnggcacgagcatctctcccggaaggagaagtccacagaaacctcaaatgcctgcgagaggaaggaacaaagggaggactcacagattgacacgctgggctggcggctggccctcgaatctatagggtctgggcttttaaacttcttttttcaaagctccgcctcaaaataatggctagagaaagaagttttggaggtggccgatggaaggctgaggaattttcgagaaagggcccaggaccatctggtagctaggacggaggggaccaggtttttttttttaaacatccaccaccaattgctctcagcctgtaccggttaancntcaaaccctgcnagtgttngtttctaaaaattnggattancttatt

SEQ ID NO: 34136 - DNA, 436 bp, Homo sapiens
  misc_feature (1)...(436): n = a,t,c or g
ntttggannnnnnnnnnnnnnnnnnnnnnnnnnnnnnnnnnnnnnnnnnnnnnnnnnnnnnnnnnnnnnnnnnnnnnnnggcacgaggagtagagcatcatgtttttcaataatcacaagagctagcttttattaagggcttactgtgtccagtgctgttctaagcatgtcacatactgnnnnnnnnnnnnnnnnnnnnnnnnnnnnnnnnnnnnnnnnnnnnnnnnnnnnnnnnnnnnnnnnnnnnnnnnnnnnnnnnnnnnnnnnnnnnnnnnnnnnnnnnnnntatagctagagagtggcagagctggggggaaccctgtcggtctggctccagagcccattgtatagcagccacctctgcccaccctggcctggctaggcctcaatgccagaaacacaccattctctatctcctggagggtaacagagctgc

SEQ ID NO: 34137 - DNA, 437 bp, Homo sapiens
  misc_feature (1)...(437): n = a,t,c or g
gnnnnnnnnnnnnnnnnnnnnnnnnnnnnnnnnnnnnnnnnnnnnnnnnnnnnnnnnnnnnnnnnnnggcacgagcaaaccctgtttgcagttggataaatcaagtcccttttagccacttttgttcacactaacggaaaagacagtggagtcctcccaattaacacaattttgcaaatcggcacaagcaacaggccttttatgaaattagttgttaaatagctcttccctccacccccaagcaaatacatttttttgaggctagaaaaggcaatttatcagtctttgggtttctgatacctaacaatatcatactggaacaagtccagcattagacaaaaatctaccatcacctatgtgctagaaactttacaaatgcctcatacaatctgctcaattcttgtaaggcagatggcttatcaataaagtatactaag

SEQ ID NO: 34138 - DNA, 440 bp, Homo sapiens
  misc_feature (1)...(440): n = a,t,c or g
acccnnnntttganacngnttgacnnnnnnnnnnnnnnnnnnnnnnnnnnnnnnnnnnnnnnnnnnnnnnnnnnnnnnnnnnggcacgaggtattccagtctgccaatagtgcctctgtgctgacagaatctaacctgaagtcaaatgacaagacagacaggaaatttcagtttgcagacatagtttccaaaacatagctgagccgtaaaaagctgatatggagctgagtgcatatacaagattgcctgtacacaggttgttgagggagtcatctacatgaatggagactgagaccatataggagagttagtgaaatagggagcttagtgagctatagaatagggataatgatctgggttataatctgtaattttagactttgatggtgactaaagaaaatgagaggcatatggcaataatcatcaatatatttcatata

SEQ ID NO: 34139 - DNA, 441 bp, Homo sapiens
  misc_feature (1)...(441): n = a,t,c or g
anaccngnnnnnnnnnnnnnnnnnnnnnnnnnnnnnnnnnnnnnnnnnnnnnnnnnnnnnnnnnnnnnnnnnnggcacgagcaactactcacagctactacacagagacccgaacgagtcactgatatacacctggaccaccaccaatggatatacaaatggcaaacaattttactccgccctctgcaactcctcagggaaatgactgtgacctctatgcacatcacagcacggccaggatagtaatgcctctgcattacagcctcgtcttcatcattgggctcgtgggaaacttactagccttggtcgtcattgttcaaaacaggaaaaaaatcaactctaccaccctctattcaacaaatttggtgatttctgatactttttaccaccgctttgcctacacgaatagcctactatgcaatgggctttgactggagaatc

SEQ ID NO: 34140 - DNA, 460 bp, Homo sapiens
  misc_feature (1)...(460): n = a,t,c or g
ttgaaccctnnnnnnnnnnnnnnnnnnnnnnnnnnnnnnnnnnggcacgaggaagaatgtgcctgacaggcaatttacaaaatagagaccggaatggccagcagacctgtgaacccatggctgagctccctggtgagcatgaaggtggaaatggaaagactggggttggagtggagccttctgcagccaccgaggcctccaggcccgtgacacaaaacgaaagctgcctgccgtggggcagtgaccacggggtgcgagtccgtctgggtattgaaaatgtcatgcacattgtcgtctttttccttggaggaggccgagactggtggggattaagtagctcatacacagtccgccagcaaggctgagatcccatccccgggctgagatcccatctcaggccttcccgccaaggcctgcaccccacatctgctcccggtttccccaccactgntggtgcgga

SEQ ID NO: 34141 - DNA, 463 bp, Homo sapiens
  misc_feature (1)...(463): n = a,t,c or g
ttnnnnncnnnnnnnnnnnnnnnnnnnnnnnnnnnnnnnnnnnnnggcacgagtcttgatcagctcaaagtgtagttgtttagctctgtttatggttatgaacatattagcagaaataatttttaatagctaaattctaattggatatgcctccagttaagaaactttctatcagttagatcactgctactcaaagtgtgtttcatagactgtgtgaactgtttattactcatctatgataacatacatacagacaatatttagcttctagaaactattttaacaatttgacaatgccacaacacttttattgtactttataaaagtatcagtctgcaacatagtggaagttttgttgnnnnnnnnnnnnnnnnnnnnnnnnnnnnnnnnnnnnnnnnnnnnnnnnnnnnnnnnnnnnnnnnnnnnnnnnnnnnnnnnnnnnnnnnnnnnnnnnnnnnnnnng

SEQ ID NO: 34142 - DNA, 451 bp, Homo sapiens
  misc_feature (1)...(451): n = a,t,c or g
ttnatannnnnnnnnnnnnnnnnnnnnnnnnnnnnnnnnnnnnnnggcacgagcctccaaataaaacttattagacagatacgggttatggtgttggtggtggtggtggtggtgtttnggggntnanggcggtggtgctgccattcacacccnacanggtcnttncccacacctngnngatganngtgacctntnccngngctcanncctgnatctntctcnagaggaccnntntctnttnntatntnnngnttccctgancctnacatantgcacatnccancntatcacnnaatgacncncttccncttacaccttcaatgtatcncaacaccttnncacacacnncttactanaactctttctactttttnnncacntttnccnanncccncaantctgtttactnntncttcctntnataantccctncccntgnnntattntaacc

SEQ ID NO: 34143 - DNA, 455 bp, Homo sapiens
  misc_feature (1)...(455): n = a,t,c or g
ntacgactcnnnnnnnnnnnnnnnnnnnnnnnnnnnnnnnnnnggcacgagctggattgcaaagtaaaatgtacttcttactgtgtttgcagtcagaaactcttttgagtcactactttagagtatgctattgtgagataggtaaaatttcacccaataatatcaatatacgtgcaaaattctgtattgaactaccaccaacagtactggaagaaattaagagtctatgtaccgaatacagaaatatttatctgtgggagaaacagccaaagtaggtggtttaaataaaacaaaacatacacactgagctggaacgtgaacacagaatatggtacagactcagattcctactaaagttacaagcaagagttctcatctcttgatgggcactgaccccaacaacaggcctgggcacaggtccagcacttaactcagagggatgccgtgtgctgctg

SEQ ID NO: 34144 - DNA, 468 bp, Homo sapiens
  misc_feature (1)...(468): n = a,t,c or g
tgnanancnnnnnnnnnnnnnnnnnnnnnnnnnnnnnnnnnnnnnnnnnnnnnnnnnnnnnnnnnnnnnnnnnnnggcacgagtggaattacaggtatgcaccaccacaaatggctcatttnnnnnnnnnnnnnnnnnnnnnnnnnnnnnnnnnnnnnnnnnnnnnnnnnnnnnnnnnnnnnnnnnnnnnnnnnnnnnnnnnnnnnnnnnnnnnnnnnnnnnnnnnnnnnnnnnnnnnnnnnnnnnnnnnntcttatttaactattataatgagtgacaatgtttccatcataaggtaacatagccccaaattttcaacaagctttcatcgcttcccatatcttatgaaacagaatttaaagtccagcagtctgactgtaggcaggaatagtaacaaccaagtgccaaacaaactaaagtggcctaaccactttacatgggtctacgtgtgtgatccttatcgtaaga

SEQ ID NO: 34145 - DNA, 469 bp, Homo sapiens
  misc_feature (1)...(469): n = a,t,c or g
tgganaaccnnnnnnnnnnnnnnnnnnnnnnnnnnnnnnnnnnnnnnnnnnnnnnnnnnnnnnnnnnnnnnnnnnnggcacgagttactgttgacacagtaaagtgtcccgcacttgtatgctaggattattatcacaggtttgtgaatctttccataagaaacacatagttaaccttatgagaccattcagtctactgcatcagttaagtctgtattcctggttttattaaaactgttgtaacttagcaattctgattagagcttaatatagggtcatataatgttaaagctaaagaagaccttggaaaattctttcttcaaactctgaactacaaaggtccacagcttcagaagagagaacaggttgggtaagaggacaatacttttctaaacaatcttacttcatgtaagtctattgcaaaatctacattagtcattgagagctttccccatatgtatctctggga

SEQ ID NO: 34146 - DNA, 469 bp, Homo sapiens
  misc_feature (1)...(469): n = a,t,c or g
tggnnaccnnnnnnnnnnnnnnnnnnnnnnnnnnnnnnnnnnnnnnnnnnnnnnnnnnnnnnnnnnnnnnnnnnnggcacgagattcactacaacattgcgaccttaggtaagttccttatgcatccctctaagcctcagtttcctctggtctaaaataagaacagtaatatccactacatagggtgcttgtgaaaatcaatatgataatgcatgtaaagcacgtaacaaagtgtctaagaagaatcagttctcagtaaacgccagctgattttaaattagaataatattcaccaagatcagtctattgcttacaaaatgtagacatttgaggtctactgggggacccatttccagcagccagagacatttctggcaccagcacgtgagagctgcctcattgttgagtgctgacacatgggtgcacggcctgctcagcagtggggttgggggggaattcccgggatgct

SEQ ID NO: 34147 - DNA, 461 bp, Homo sapiens
  misc_feature (1)...(461): n = a,t,c or g
nnnnnnnnnnnnnnnnnnnnnnnnnnnnnnnnnnnnnnnnnnnnnnnnggcacgagaaagaatatgaaagcaagtcactagaggaacttcgtttagaggattatcaggctaacaggaagggcccacagaaccaggtgggagcaggtaccacaactggcttgtttgggtcttctccagccacttccagcgcaacaggactcttcagctcctccaccactaattcaggcttgcatatggtcagaacaaaactgcctttggaactagtacaactggatttggaacaaatccaggtggtctctttggccaacagaatcagcagactaccagcctcttcagcaaaccatttggccaggctacaaccacccagaacactggcttttcctttggtaataccagcaccataggacagccaagcaccaacaccatggtaaggaaacagacccttacttacctccatgtct

SEQ ID NO: 34148 - DNA, 462 bp, Homo sapiens
  misc_feature (1)...(462): n = a,t,c or g
nnnnnnnnnnnnnnnnnnnnnnnnnnnnnnnnnnnnnnnnnnnnnnnnggcacgagctgggggtttctacattctgtcttcttgtagcaaagcgggtagggaggcagggtggaaggaagcaagagaacagtgagttccagaaggccaagcctagggcgacatctgagctaagattccatcaaaaacccttccatttgctaagtgaaagaagtcagttacaaaagaccacgggccnnnnnnnnnnnnnnnnnnnnnnnnnnnnnnnnnnnnnnnnnnnnnnnnnnnnnnnnnnnnnnnnnnnnnnntaggactgtgggacttagggaaaatggggagtggctactaggagacacgggggttttgtggaaggtgatgaaaatgttctaaaattgactgtgacgatgctcgcacaactcctgaatctactacaaccactgaattgcatgctttaaatggatgaat

SEQ ID NO: 34149 - DNA, 460 bp, Homo sapiens
  misc_feature (1)...(460): n = a,t,c or g
nnnnnnnnnnnnnnnnnnnnnnnnnnnnnnnnnnnnnnnnnnnnnnnggcacgagatcactttttctcttattgctgaattatttaaagcaaatctcaaatatcatgacataccactcctttatatcacagtgcaactccaataaataaggacannnnnnnnnnnnnnnnnnnnnnnnnnnnnnnnnnnnnnnnnnnnnnnnnnnnnnnnnnnnnnnnnnnnnnnnnnnnnnnnnnnnnnnnnnnnnnnnnnnnnnnnnnnnnnnnnnnnnnnnnnnnnnnnnnnnnnnnnnnnnnnnnnnnnnnnnnnnnnnnnnnnnnnnnnnnnnnnnnnnnnnnnnnnnnnnnnnnnnnnnnnnnnnnnnnnnnnnnnnnnnnnnnnnnnnnnnnnnnnnnnnnnnnnnnnnnnnnnnnnnnnnnnnnnnnnnnnnnnnnnnnnnnnnnnnnnnnnnnnnnnnnnt

SEQ ID NO: 34150 - DNA, 466 bp, Homo sapiens
  misc_feature (1)...(466): n = a,t,c or g
gaattnnnnnnnnnnnnnnnnnnnnnnnnnnnnnnnnnnnnnnnnnggcacgaggttaaataatgttttaaaagtatttagcccagtgcctgggacatacaaccactcagtaaatgttggccgatttttaatgttctcaataggcacctttagagattcacacagctatgcttgccttggaccagtttcaggagaaatacagtcgcaagccaaatgttgggtaatgttttaagtttaaaaataagtattttcctttttataaaagtagtagttcagaaattataatttaaaaagtaactatgccctttgtaattacaataccaatagatataccaagctgtgcaaacatttattatgactttctggtccttttcctggtgggagtggagaaatttggtttataaaagtggaatcatactaaatgtgaatttttccactttgaagcctttaaaaattaaagcttctt

SEQ ID NO: 34151 - DNA, 478 bp, Homo sapiens
  misc_feature (1)...(478): n = a,t,c or g
gnnctttgannnnnnnnnnnnnnnnnnnnnnnnnnnnnnnnnnnnnnnnnnnnnnnnnnnnnnnnnnnnnnnnnnnnnnnnggcacgagnnnnnnnnnnnnnnnnnnnnnnnnnnnnnnnnnnnnnnnnnnnnnnnnnnnnnnnnnnnnnnnnnnnnnnnnnnnnnnnnnnnnnnnnnnnnnnnnnnnnnnnnnnnnnnnnnnnnnnnnnnnnnnnnnnnnnnnnnnnnnnnnnnnnnnnnnnnnnnnnnnnnnnnnnnnnnnnnnnnnnnnnnnnnnnnnnnnnnnnnnnnnnnnnnnnnnnnnnnnnnnnnnnnnnnnnnnnnnnnnnttctatnnnnnnnnnnnnnnnnnnnnnnnnnnnnnnnngagttcaagtctgttgggtagggttattccttctgagttgtctgaaatgacatgtgattgattgcatttctcagaaccgactaccacattcaagtaattttattccatct

SEQ ID NO: 34152 - DNA, 437 bp, Homo sapiens
  misc_feature (1)...(437): n = a,t,c or g
attggaannnnnnnnnnnnnnnnnnnnnnnnnnnnnnnnnnnnnnnnnnnnnnnnnnnnnnnnnnnnnnnnnnnnnnnggcacgagaatcagtgcttcctaacttttcaaatttgggcacatgtagaaagtattttttatacagcacactggggttaatggtggaggctgctgatggctgaaggtgactaatgcgaggggcttccttgagctaaggatgtgtgggtcagcatctctacagcatctgaggatttctgcttgtaatcactttggtagaagtaactcattaactttcaagcctttctcacaaaattctctttagtttctctaatcagagaaaaatatgagaagaatcaatgatgagacgatgcaaacccacaccatacactttcccgcgtcccacctcccttgcagttctttaacaggccatgtgcagga

SEQ ID NO: 34153 - DNA, 459 bp, Homo sapiens
  misc_feature (1)...(459): n = a,t,c or g
gnnnnnnnnnntttgganncccttnnnntttgaanaccngtnnnnnnnnnnnnnnnnnnnnnnnnnnnnnnnnnnnnnnnnnnnnnnnnnnnnnnnnnnnnnnnnnggcacgagagcagtaacagtagtttcagctttagagaaagggcttccaaatctactaatttactaatacttttatagctcaataaattgtcaccatttcatgtcatagctaggatagcttttttttttcnnnnnnnnnnnnnnnnnnnnnnnnnnnnnnnnnnnnnnnnnnnnnnnnnnnnnnnnnnnnnnnnnnnnnnnnnnnnnnnnnnnnnnnnnnnnnnnnnnnnnnnnnnnnnnnnnnnnnnnnnnnnnnnnnnnnnnnnnnnnnnnnnnnnnnnnnnnnnnnnnnnnnnnnntttagtaaanacggnatttntccaagtnggncaggctggctcnaactccgnacgt

SEQ ID NO: 34154 - DNA, 440 bp, Homo sapiens
  misc_feature (1)...(440): n = a,t,c or g
anaccgtttgatttgatnnncantttaatacgactcnnnnnnnnnnnnnnnnnnnnnnnnnnnnnnnnnnggcacgaggggacataagaaattcagactatagagtgagtgcttacttctaaagagagttaggaacttaaaaagattcacatactcaaactctgaggttctgggttcaatatatagaaagaaaaccatagaattgctctgtattaaaaaaaagttagctcaattgtgtcgtacagctgaaatacataaaaatcaaattcaaattttgatcctgaagctgccactatttctcagttaaattcactgccttgtcaggtctcttatgtgaaagttaggactttggaaagaaatctagatttagggacatataaacttgaaatggattgctcacatatagcgtgtncatttaccccctgtgtttcccaaaaggg

SEQ ID NO: 34155 - DNA, 430 bp, Homo sapiens
  misc_feature (1)...(430): n = a,t,c or g
anacnnnnnnnnnnnnnnnnnnnnnnnnnnnnnnnnnnnnnnnnnnnnnnnnnnnnnnnnnnnnnnnnnnnnnggcacgaggtgggaagcttcctgagatgtctgtggacacaggaaaaaattgttgtgttgtcctacagggagacatgtgagtgtaattcctgctattcagaaagatagagtccaaagtgacacgaccaaaagaccgccaatacaaaatctaatgccgcctgcccagtcctccttgtaacctggtcccactgacaggtttcccgctgtgaacagtaaagggaaaggcccaatctccaatagcaccaatagagtggaagccacaggattggctctgagccacctcaacatccgctcaggtgtttgcaggtatgcccagccagggagtctggggcagccctgccgaggttaagtttgcttt

SEQ ID NO: 34156 - DNA, 441 bp, Homo sapiens
  misc_feature (1)...(441): n = a,t,c or g
annnnnnnnnnnnnnnnnnnnnnnnnnnnnnnnnnnnnnnnnnnnnnnnnnnnnnnnnnnnnnnnnnnnnnnnggcacgagcagcaataaaactgtgtcctcattttgcttcccatttagctgccaataactattggcattaaaatctaggtcatagggaggtcttggaagaacagggctgaaaataagggagaagctacattttcgtcaatagaaacaatgctgcctcccatttcctaaagttttttcctagtaccagaaccattgccctttggagaattatataaagcacattagactttaggactaggcgaaatcattctccttcctatatttaattactccctgaaaccctccagtgtacatgatttataatggatttattttgttgtgttgttaatgaaccttgtgcctcttttaataatacccatcttaatattt

SEQ ID NO: 34157 - DNA, 428 bp, Homo sapiens
  misc_feature (1)...(428): n = a,t,c or g
anacagntnnnnnnnnnnnnnnnnnnnnnnnnnnnnnnnnnnnnnnnnnnnnnnnnnnnnnnnnnnnnnnnggcacgaggctatagcaaaatctgtatacctcatcataacaacaataataataaagctgtatttttgagagtcgtgtagtagatagaggtagaggtggaaaagagtaagctagaaacatgtcagtgagaataacattttgtctaaggaggatgggttttgggaaaggtgaaattagagattaggcaaaattgatgatagggccagcaaatacaacaggatatgccagtgaattctggagatatggaaatggatatgcatggtggttgtgtaaataggtttccctagatctcagccagtaatgattaaaactcgtgctttgtactttgggatgtggtatattaagaataaaaataatg

SEQ ID NO: 34158 - DNA, 442 bp, Homo sapiens
  misc_feature (1)...(442): n = a,t,c or g
ncccttnnnntttgannnnnnnnnnnnnnnnnnnnnnnnnnnnnnnnnnnnnnnnnnnnnnnnnnnnnnnnnnnnnnnnnnnnnnnnggcacgaggccaatctctatgtgaagcagctatgtacagcaacaacaggagattgaaaagagcaacagagattcatctgtagcaataaatccatataggatgagtttggatttgggaaagaattaagtggagtgccacgaataaaacttttggtggaaacatgttagtacatactgtgtacagtatgcatctaatttactgttcagaactgtttttctgagagcatgagaaaactcattattgtaatacttaacaccattttctactacagtctgaaataccctttgttgaattaagttgggctcatcctttggaaggaaagcaagtatatagatcaagctgtattaaaatgaaa

SEQ ID NO: 34159 - DNA, 434 bp, Homo sapiens
  misc_feature (1)...(434): n = a,t,c or g
acccgnnnnnnnnnnnnnnnnnnnnnnnnnnnnnnnnnnnnnnnnnnnnnnnnnnnnnnnnnnnnnnnnnnggcacgagacttctcctggggttattagcagggttgttattctcctctgctttgtgtagcttttcttttttgtatagtttcttgttattcatactagtagctttgtaaatttagattgctgtgattcttcatggttatgaagttatttaatagctttgctttttgtataccctcagttttattttgcactatgaactgcttcatcttttcagtatttttcaactcaaatttgggagaaaaagaatatgattaggttagcctggcccttcctgctaggccacaccatggttgttggtcagctactaaggctaaactgcctgctagttcaatcagctgtggcatcttgcttgtgggcctttgcat

SEQ ID NO: 34160 - DNA, 434 bp, Homo sapiens
  misc_feature (1)...(434): n = a,t,c or g
acccgntnnnnnnnnnnnnnnnnnnnnnnnnnnnnnnnnnnnnnnnnnnnnnnnnnnnnnnnnnnnnnnnggcacgagggcattttccccagaagagaggggtatgtagctgtccacttttttaaaaaggtatcttttctcatgataaaagcagcatgtgcttgtagaacatttggaaaatccagaaaagtaggaaattaaaatcaccataagaaatcatactattcttagaatttcgtaccttgcatattttcgcttatcataggcattttcccattttgttaaagtgtttccccaaatgtggcacagattgcttttgaaaggctctttggagatggggaagggagaagttttggaagagctgactttactgcaagggacagcagaggcaggggagaagctatacccatctcagggtgaggaggaagaaaggg

SEQ ID NO: 34161 - DNA, 431 bp, Homo sapiens
  misc_feature (1)...(431): n = a,t,c or g
nnnnnnnnnnnnnnnnnnnnnnnnnnnnnnnnnnnnnnnnnnnnnnnnnnnnnnnnnnnnnnnnnnnggcacgagnnnnnnnnnnnnnnnnnnnnnnnnnnnnnnnnnnnnnnnnnnnnnnnnnnnnnnnnnnnnnnnnnnnnnnnnnnnnnnnnnttttcttcatagttacccatagcaagtgtcagagagtgatttaaaactgtatttttggtatgaaggaaaagaaagtcaagctttgaacaaataccaattgaaaggtggatactggatgtctgaaatgagtcacttaagtgccaaaatgccttaaatttaagagtttcttccatgatttctgcctctaaaggactttgacatctatttttttaaccaaggttttttattttttaaagcttattttcttactggaagagattcagcagagtgatatt

SEQ ID NO: 34162 - DNA, 436 bp, Homo sapiens
  misc_feature (1)...(436): n = a,t,c or g
annnnnnnnnnnnnnnnnnnnnnnnnnnnnnnnnnnnnnnnnnnnnnnnnnnnnnnnnnnnnnnnnnnnnnnnggcacgagtttgttgggtctactcagtgttttaaaggtttttgtttgtttgttttttgtttttaagannnnnnnnnnnnnnnnnnnnnnnnnnnnnnnnnnnnnnnnnnnnnnnnnnnnnnnnnnnnnnnnnnnnnnnnnnnnnnnnnnnnnnnnnnnnnnnaggcacattttttttttttnaaanaactngncaatacgtattttaaaaccnggatattttaaaatttctnttgaaaaactaaancccaaaantanaanctntaacaacattgncctgcntcctcncaaaatatcaaaggtntttggttccccacctgtnatttttgggcnccttttgcncttggggttnaaaaancaccaa

SEQ ID NO: 34163 - DNA, 433 bp, Homo sapiens
  misc_feature (1)...(433): n = a,t,c or g
anaccngnttgacntgattacgaatttaatacgactcnnnnnnnnnnnnnnnnnnnnnnnnnnnnnnnnnnggcacgagatgatataaagaaaccaagagaggagagtgtcaaaaaattgggagtgcttaagaaacaagatgtattatagacagaagttaaaaaggcattagagaggaaaagtgttcattaactaaggtttctctggagaagccagagggaatggggactaaagtaccctgtggaaggattagctgtagcccacttccatcagaatagaggaagttaaggatggttgttgctgtcaatgaacatgtggagagagaaagttgagatagttcctgtttgatttctttgtttctctcttatgtaggagatgagatacgtaaatttgatagggctgctgtaagaaagtccatcagctgggcacggtg

SEQ ID NO: 34164 - DNA, 435 bp, Homo sapiens
  misc_feature (1)...(435): n = a,t,c or g
tttganaccgttnnnnnnnnnnnnnnnnnnnnnnnnnnnnnnnnnnnnnnnnnnnnnnnnnnnnnnnnnnnnnnnnggcacgagtctctgatgagtactaaggttgagcagccaagtgaacctcattatcctctgctttgtggccagagcggccccacaaaggaagcggggctcctagaacatcactgggggatgttaaaatagttctgtctgctgggctgagttaaccatgcagtgttgctgtgagatgatggaatcaaacataaaggacagtcagatggctgtctgcctcctctgtgtctgcttacccatgggagggggcagtaagaagtgggagctgctattttggctcctgtggccctttcagggtccagtcccctaggttgatccccaatgatgcttcctgtttcagagcaggtacataatcacttcagg

SEQ ID NO: 34165 - DNA, 437 bp, Homo sapiens
  misc_feature (1)...(437): n = a,t,c or g
tttgataccgtnnnnnnnnnnnnnnnnnnnnnnnnnnnnnnnnnnnnnnnnnnnnnnnnnnnnnnnnnnnnnnnnnggcacgagactttttccaaataaactgtcataagcacaggtcctgggggttagtatgtggacttgtctgttgggggcacaccattcaagccattcagcccactattcctcctcaccccaagagtacgctggcgtnnnnnnnnnnnnnnnnnnnnnnnnnnnnnnnnnnnnnnnnnnnnnnnnnnnnnnnnnnnnnnnnnnnnnnnnnnnnnnnnnnnnnnnnnnnnnnnnnnnnnnnnnnnnnnnnnnnnnnnnnnnnnnnnnnnnnnnnnnnnnnnnnnnnnnnnnnnnnnnnnnnnnnnnnnnnnnnnnnnnnnnnnnnnnnnnnnnnnnnnnnnnnnnnnnnnnnnnnnnnnnnnnnt

SEQ ID NO: 34166 - DNA, 486 bp, Homo sapiens
  misc_feature (1)...(486): n = a,t,c or g
ttgaanncctttgnaancctnnnnnnnnnnnnnnnnnnnnnnnnnnnnnnnnnnnnnnnnnnnnnnnnnnnnnnnnnnnnnnggcacgagctgaattgtcataagcagacttggtagacatacaggtgtttaaagtgctgacaaggtggtttagaaggaaatgaggaacatgttaccggaacctgaaggaaaagggatctttgtcatatagaagcagaactattaactcatttgtgtcctaaatatagaaagcagcacttctgctgtaatgaacttggatgtaatgaacttacatgtaatgaacatgtaatgaacttggatgtttagctgagatttccacacaaagtggtgaaagtacaacctgtctttttcttgctgcttatagtgaaatgtgcgaggaaagatataaattgagagaagaactgttgaaaaacaagcaatcagtgcttgtcaatttgtgaaattacctatccagatcacagaagg

SEQ ID NO: 34167 - DNA, 557 bp, Homo sapiens
  misc_feature (1)...(557): n = a,t,c or g
ntncngnnngtggacnnnncganantntanntttangggcngcnatcanaggagaggnnggatcngtgggntnganntttgaaaccttggaaacntagaatgatacgaattaatacgannnnnnnnnnnnnnnnnnnnnnnnnnnnnnnnnnnnnggcacgaggggaatttcagccaccacgttatctccgaattggccaattgatggtttcagcagagcatttcagcatcggggaagccaatacaatttgagttagttgtgatggctgccactttaaataccgcagtgaatttctgtcagcgagctaatgcgtggaatagggaattgcagaaaacttgatcatcagagtgcttcagtcgattctgaccccaagctacagaaaatgaacttaaatctagttgactgtcgccacatactttctttggtgttattttgctggcagcgtcttcttcagagagagctggaagagaagangactaggaggaaatcaggatgtttgccgcgggtccctgggattttagagagtgacagncttcatgggaggttgccattggga

SEQ ID NO: 34168 - DNA, 485 bp, Homo sapiens
  misc_feature (1)...(485): n = a,t,c or g
tggaaancntnnnnnnnnnnnnnnnnnnnnnnnnnnnnnnnnnnnnnnnnnnnnnnnnnnnnnnnnnnnnnnnnggcacgagcggcacgagggagctatggagcagaagggtgtgtgcatggaccagaccccggcacaagggccccaaatccccgaacccagcaccaggcatgggggtagacaggggacacgcagaaggaatagattctccgagtcctccactgtgcccggtcctcatctctgtcagggtggggttcttgagagcctggttgccgctcactctcagatggtatctcccgcttctcccctcagcttcagttccctcttaaggactctgttctccttccacttccgctgtgaagatccctcagcgtgatgaagatgcaggggcaagtcagaggttacacagtgggggctgccctgctagtgtgctgaagccacgccaactgttcagggcagctttctgcttccaggaagaacacatt

SEQ ID NO: 34169 - DNA, 516 bp, Homo sapiens
  misc_feature (1)...(516): n = a,t,c or g
gnngnnnnngnnnnnntgnnnttnnnnntntgaaaccnnnnnnnnnnnnnnnnnnnnnnnnnnnnnnnnnnnnnnnnnnnnnnnnnnnnnnnnnnnnnnnnnnggcacgaggactccaagcccccaccctcctccagcatgccactcattctgcaggaggagaaggctcccctaccccctcctgagtaccccaaccagagtgtgcccgagaccactcctctgaaccaggacaccatgggagagtacacgcccctgcgggatgaggatcccaatgcgcctccctaccagcccccaccgcccttcacagcacccatggagggcaagggctcccgtcccaagaacatgaccccataccggtcacctcctccctatgtcccaccttaacccgcaagcgcctgggtggaggcagggtagggcaggggcctggagacgacatggtgttgtctgtggagaccggtggcctgcagaccattgcccaccgggagccgacacctgacctagcacacactgacacag

SEQ ID NO: 34170 - DNA, 482 bp, Homo sapiens
  misc_feature (1)...(482): n = a,t,c or g
ttganacccttgnaaccctatgacnnnnnnnnnnnnnnnnnnnnnnnnnnnnnnnnnnnnnnnnnnnnnnnnnnnnnnnnnnggcacgagnnnnnnnnnnnnnnnnnnnnnnnnnnnnnnnnnnnnnnnnnnnnnnnnnnnnnnnnnnnnnnnnnnnnnnnnnnnnnnnnnnnnnnnnnnnnnnnnnnnnnnnnnnnnnnnnnnnnnnnnnnnnnnnnnnnnnnnnnnnnnnnnnnnnnnnnnnnnnnnnnnnnnnnnnnnnnnnnnnnnnnnnnnnnnnnnnnnnnnnnnnnnnnnnnnnnnnnnnnnnnnnnnnnnnnnnnnnnnnnnnnnnnnnnnnnnnnnnnnnnnnnnnnnnnnnnnnnnnnnnnnnnnnnnnnnnnnnnnnnnnnnnnnnnnnnnnnnnnnnnnnnnnnnnnaacnagaaagantctgngtcccgcacccagttncctnnagccacccccgtntttgatggcatt

SEQ ID NO: 34171 - DNA, 490 bp, Homo sapiens
  misc_feature (1)...(490): n = a,t,c or g
tttgaaaccctttnnnnnnnnnnnnnnnnnnnnnnnnnnnnnnnnnnnnnnnnnnnnnnnnnnnnnnnnnnnnnnnggcacgagagactgcatagggctcggcgtgggctcctaatccaacaggactggtatccttgtaagaacaggagattaggacacaggtaggtactgagggaagaccccatgtgaggaccttgagaaggtggcagtctgggnnnnnnnnnnnnnnnnnnnnnnnnnnnnnnnnnnnnnnnnnnnnnnnnnnnnnnnnnnnnnnnnnnnnnnnnnnnnnnnnnnnnnnnnnnnnnnnnnnnnnntcanngtgtggngncctgtcacggcagcccangctgaccagcacagtctcnaagtcaggagtgtggagaanaagaacaggtttgtttacaaatgggttagaaaacccatttagcacttaggaannaactcanaaattacgaagtanntnananagcattatcntcaggggaga

SEQ ID NO: 34172 - DNA, 493 bp, Homo sapiens
  misc_feature (1)...(493): n = a,t,c or g
tggaanncctttgnanancnnnnnnnnnnnnnnnnnnnnnnnnnnnnnnnnnnnnnnnnnnnnnnnnnnnnnnnnnnnnnnnnnnnggcacgagaactggtttcactagttcttccgtcactcaatctataagtgaacatgattttctgaaaagtcatcaagaatcaaacagaatattttaagcatcttgcaaccagggaccacatttatcctgcttaatttttattccctgccgagtaggacacctgctatgagctcagtaaatgtttgttgtttaaccaaattatccagtgattctgaatcatagccatgcctttataaaggacattgtagatttgtcttcccagcttcttcacaccaatccagcccctttgccctcataccacccatggtaggagcagtaataattgtaaaatatggttatatgctaagatttgatacctgatccaaactcagcaaatgagctcttcccctaagtaacttacagtcagaa

SEQ ID NO: 34173 - DNA, 489 bp, Homo sapiens
  misc_feature (1)...(489): n = a,t,c or g
aaancctttgnanancnnnnnnnnnnnnnnnnnnnnnnnnnnnnnnnnnnnnnnnnnnnnnnnnnnnnnnnnnnnnnnnnnnnggcacgagataccctgctttaccatttagtgtggattctgacaaaagaacaaattaagtactttgatttgattcttaatttttccttataaagacttgcaataaatattgtgggtacctagaaataatccaccatagtgcacaacacaatctgttgacttaccttagcttccattttccttcttggtctgacatataaattcaccttgctgctcaattctgtgacctactattttcagcatgtatgagcaacagtaaagtgcatgcccacagaactcagaaatgagaaaactaatattgctctgttatatgcataatggatcaatacagaggtatttaaacacacaaagaaaaaaanacaggtcagcaagacttgactttcaactgatagagaatattaacatgtt

SEQ ID NO: 34174 - DNA, 484 bp, Homo sapiens
  misc_feature (1)...(484): n = a,t,c or g
aaaccnctatgacnnnnnnnnnnnnnnnnnnnnnnnnnnnnnnnnnnnnnnnnnnnnnnnnnnnnnnnnnnggcacgagcataatttgtatgtgaggtgacagcgtgactgtcactgctaggggttggagaatagacaaccacaaggccagggtgcctggggcagatgggccctccagtctgaggcttttgccagcttcattgctttgtgtgggagaggggcattgcccgatgggtctcatgagaacagtgtttaaagagctgaatgccacctaatgcttaatagtgagaaagacagccaatgagattctgctctttctcaatcagcatattctgtcctgaaagctggccttacagagaagccaaaggcccatctcagagcaagtggttatcagagggtcttggctggggccacgtccaccctgggatacctgctgtgggaactgggttgtgaagtgtggggccagggcattctctgctcgggt

SEQ ID NO: 34175 - DNA, 522 bp, Homo sapiens
  misc_feature (1)...(522): n = a,t,c or g
gnnnnnnnnnngnntnnnnnnnnnnnnttttgaaancctttnnnnnnnnnnnnnnnnnnnnnnnnnnnnnnnnnnnnnnnnnnnnnnnnnnnnnnnnnnnnnnnnnnnnnnnnnnggcacgaggaattcaacacttccaaaataaactatcaatcttgcccagactggagaaaggactgcagcaacaaccctgtttcagtattctggaaaacggtttcccgcaggtttgcagaagctgcctgtgatgtggtccatgtgatgctcaatggatcccgcagtaaaatctttgacaaaaacagcacttttgggagtgtggaagtccataatttgcaaccagagaaggttcagacactagaggcctgggtgatacatggtggaagagaagattccagagacttatgccaggatcccaccataaaagagctggaatcgattataagcaaaaggaatattcaattttcctgcaagaatatctacagacctgacaagtttcttcagtgtgtgaaaaatcctgaggattca

SEQ ID NO: 34176 - DNA, 478 bp, Homo sapiens
  misc_feature (1)...(478): n = a,t,c or g
naancnnnnnnnnnnnnnnnnnnnnnnnnnnnnnnnnnnnnnnnnnnnnnnnnnnnnnnnnnnnnnnnnnnggcacgaggggtcggcgtggggggcaatctggcaacacttactcacttaaactcagcaatttcacttttgggcacgcagcccaaataaattcttacatacgataccataaacaatggtttatcagtcttacagtggtaggaagtgaaagggaatttagatgtctatcatgaggtaagtggagagataaaatatggcagatgtaaatcataagcagtgagaaacaactgactaaatggacacaaagcaacacagataagtcttcataagtgtcgagacctagtgatatctacagcacagtaccaattatataaatgaataaatattaatgatttacaagagtatatgcatcaaacatgttagaaagcaaagcggaaggagaacgtggagggaaatgcactctaaatgg

SEQ ID NO: 34177 - DNA, 441 bp, Homo sapiens
  misc_feature (1)...(441): n = a,t,c or g
tttgaanacctttnnnnnnnnnnnnnnnnnnnnnnnnnnnnnnnnnnnnnnnnnnnnnnnnnnnnnnnnnnnnnnnnggcacgaggaatgccctccacctggggtcacaggccaaccgcctcttctacctggccttgcccccgaccgtctacgaggccgtcaccaagaacattcacgagtcctgcatgagccagataggctggaaccgcatcatcgtggagaagcccttcgggagggacctgcagagctctgaccggctgtccaaccacatctcctccctgttccgtgaggaccagatctaccgcatcgaccactacctgggcaaggagatggtgcagaacctcatggtgctgagatttgccaacaggatcttcggccccatctggaaccgggacaacatcgcctgcgttatcctcaccttcaaggagccctttggcactg

SEQ ID NO: 34178 - DNA, 430 bp, Homo sapiens
  misc_feature (1)...(430): n = a,t,c or g
nnacnnnnnnnnnnnnnnnnnnnnnnnnnnnnnnnnnnnnnnnnnnnnnnnnnnnnnnnnnnnnnnnnnnnnnggcacgagaactgggtgggtcaggccatttgggatataacatcactaccaataataacaccattagcagcaataataaaacccactatagctttttcaacaattaatgtacacttccatgcatcatctctatacacaaatgcctgcgcctctcacacaggtaatttgtggacacacaccaaaatggtacctgttaccacctctgggattatagtggggagaggaataagaatggagggtccatcagtcaggtcccaaaagtaaagagatggcaaatacaaatcagaataatctgagaagggtttgtttataaaagaaataattacaaagtaggggaatagaggctacagaaaccatg

SEQ ID NO: 34179 - DNA, 436 bp, Homo sapiens
  misc_feature (1)...(436): n = a,t,c or g
nnnnnnnnnnnnnnnnnnnnnnnnnnnnnnnnnnnnnnnnnnnnnnnnnnnnnnnnnnnnnnnnnnnnnnnnggcacgaggttatgttgtcttttattagcagggaatgtcatcacagattggatagtacatccaggtgcaatgtcaccatcagcaaggtcagcttgacactcaagtggaagattagggaagaatgactaggataaaaaaaaaannnnnnnnccaagggaaagggatgatggggtganctggcaagtgtgggtggnaaatgaaatgttnattgaggatctgctttgngctgggcactttaatccacattttatcgttnacttttcaaacagatgcaccttacccccaccccaatgctctgtccctgcanatatcanaanacagngngattttcatgctctgaagttcagttttacatccaagcatc

SEQ ID NO: 34180 - DNA, 444 bp, Homo sapiens
  misc_feature (1)...(444): n = a,t,c or g
ttnnnnnncctttgannnnnnnnnnnnnnnnnnnnnnnnnnnnnnnnnnnnnnnnnnnnnnnnnnnnnnnnnnnnnnnnnnnnnnnnggcacgaggagactgcatagggctcggcgtggcagatgccctttgaaatgaaaacacaagcttctgtctgtccactctggagacatgagatgccatcatggaattccattcctgcagctcgctgctggccctcccattttccacccagctgaggttctgagctcgccacccaccgccaggtggtccaggtgaaaagagaggtagatcccccacccagaagggccttgttacaagggcctggctcaggcctgggcagctccagccttagttttcaaagattcctttctttattcacatcatttaaataaaaacaaacaacctccattgttgaaacagactgtgacagccagtgtcact

SEQ ID NO: 34181 - DNA, 435 bp, Homo sapiens
  misc_feature (1)...(435): n = a,t,c or g
annnnnnnnnnnnnnnnnnnnnnnnnnnnnnnnnnnnnnnnnnnnnnnnnnnnnnnnnnnnnnnnnnnnnnnnggcacgagannnnnnnnnnnnnnnnnnnnnnnnnnnnnnnnnnnnnnnnnnnnnnnnnnnnnnnnnnnnnnnnnnnnnnnnnnnnnnnnnnnnnnnnnnnnnnnnnnnnnnnnnnnnnnnnnnnnnnnnnnnnnnnnnnnnnnnnnnnnnnnnnnnnnnnnnnnnnnnnnnnnnnnnnnnnnnnnnnnnnnnnnnnnnnnnnnnnnnnnnnnnnnnnnnnnnnnnnnnnnnnnnnnnnnnnttgagaccacagacatgtaccaccactccttgctaatttttgattttttttgtagagatggnnnnnnnnnnnnnnnnnnnnnnnnnnnnnnnnnnnnnnnnnnnnnnnnnnnnnnnnnnnn

SEQ ID NO: 34182 - DNA, 424 bp, Homo sapiens
  misc_feature (1)...(424): n = a,t,c or g
nnnnnnnnnnnnnnnnnnnnnnnnnnnnnnnnnnnnnnnnnnnnnnnnnnnnnnnnnnnnnnnnnnnnnggcacgagacaaaaaggtattcacaagtttctttatgttttgaataattgtttcctgttttgctcagcagaacaagtaattaagatgacatttgtgagtactaatttggatcacacttatgtgtatgtgttataaagctgcaagccaaaacatgcaaacccagcctttcacggaggagaaaatgaaaaaataccgagtgaaatgggagcatgggaaactcggaggagctgaacatcggcgtgtaaattagaacctcagtgttgatagcagatctcattatagtcggtgcatttggctaccgacctgcagccagcagtgcccggggctagtgcatggggtctgctgtgccactgtg

SEQ ID NO: 34183 - DNA, 424 bp, Homo sapiens
  misc_feature (1)...(424): n = a,t,c or g
nacagctnnnnnnnnnnnnnnnnnnnnnnnnnnnnnnnnnnnnnnnnnnnnnnnnnnnnnnnnnnnnnnnggcacgagccagtgggaagagaactgtgcagaagtctatgggggaggctggtggtataataactgccaagcagccaatctcaatggaatctactaccctgggggctcctatgacccaaggaataacagtccttatgagattgagaatggagtggtctgggtttcctttagaggggcagattattccctcagggctgttcgcatgaaaattaggccccttgtgacccaataggctgaagaagtgggaatgggagcactctgtcttctttgctagagaagtggagagaaaatacaaaaggtaaagcagttgagattctctacaacctaaaaaattcctaggtgctattttcttatc

SEQ ID NO: 34184 - DNA, 433 bp, Homo sapiens
  misc_feature (1)...(433): n = a,t,c or g
anaccatnnnnnnnnnnnnnnnnnnnnnnnnnnnnnnnnnnnnnnnnnnnnnnnnnnnnnnnnnnnnnnnnnnggcacgagttgacagtgaaaatgctaccctttgtgggtgtaaattggagttcacggtgctccctgagctctggggccctgttgacagccagtaagatgagttatgaggtccttgccaacatgctgatgccagcctgtggcatgcttgtctggagtggggtgctgccttcttgcagacaggtggcaggatggaaggagagcagcagaactccatgaggatgccgctgcggggctgcagggttctgtccctgctgccgtcccccccaccctcccaccaccaccgactcctggtctctgctatccagcagatagcacccatgaggagcatgctgacccatgaggtcacttgggttaattcaaa

SEQ ID NO: 34185 - DNA, 431 bp, Homo sapiens
  misc_feature (1)...(431): n = a,t,c or g
tttgaanaccagttnnnnnnnnnnnnnnnnnnnnnnnnnnnnnnnnnnnnnnnnnnnnnnnnnnnnnnnnnnnnnnnggcacgagtttttttgaaatgggatatggtgctccctaggccctgggactcaccatggccttccggtcttcctcggccatcttgaggcgcttctgagcctcttcataagcctagaagaaaaaacaagaatggaggggtgtgaggccaaagagcccccacactgacagctgctcccctctagaatcacaaggatcattcagatgcgccctaacacaaaaaatgtcccctctcagtgaggaatctctctgattgcaggtacagcagacagttgtcttagccacaggatgcacagggcttctctcaccacagaggtgaacatctcactagagacagccccttgtcttcccagagatc

SEQ ID NO: 34186 - DNA, 432 bp, Homo sapiens
  misc_feature (1)...(432): n = a,t,c or g
nnnnnnnnnnnnnnnnnnnnnnnnnnnnnnnnnnnnnnnnnnnnnnnnnnnnnnnnnnnnnnnnnnnnnnnnggcacgagttaacattggttttttcttccttcctagttgggtctgaggggcctagaagaaagggtccnnnnnnnnnnnnnnnnnnnnnnnnnnnnnnnnnnnnnnnnnnnnnnnnnnnnnnnnnnnnnnnnnnnnnnnnnnnnnnnnnnnnnnnnnnnnnnnnnnnnnnnnnnnnnnnnnnnnnnnnnnnnnnnnnnnnnnnnnnnnnnnnnnnnnnnnnnnnnnnnnnnnnnnnnnnnnnnctggnnnnnnnnnnnnnnnnnnnnnnnnnnnnnnnnnnnnnnnnnnnnnnnnnnnnnnnnnnnnnnnnnnnnnnnnnnnnnnnnnnnnnnnnnnnnnnnnnnnnnnnnnnnnnnnnnn

SEQ ID NO: 34187 - DNA, 510 bp, Homo sapiens
  misc_feature (1)...(510): n = a,t,c or g
annnnnncnanngnnnnnnaannnaagnannnnnnnntnnnnannatcnnnnnnangntgnctngnatnntgngtcccctttganccttgagaccgntacgaannnnnnnnnnnnnnnnnnnnnnnnnnnnnnnnnnnnnnnnnnnnnnnggcacgaggctaaaatttgaaatcaagactgcagttctagagagtagaattccatgctttgcaactgacttaagccagccttcatttgtctcctagcaacccttgagcaatgacaagtacctgccaaacactgttgtgaaaacctctctcctgggaaaacaaaagtattttgctttctaaattctaggaataaagctgctttagaaaaggataatttggccaccaaggtagttgggagagatagttttctctttggagctgagctgagggtgcttataagaccctctggccaccgggctaggtccaggactgaccttgggaagtagggccagcaggaggcagagctttgcaaggtcttgg

SEQ ID NO: 34188 - DNA, 443 bp, Homo sapiens
  misc_feature (1)...(443): n = a,t,c or g
tnnntttgncccctttgaataccgtnnnnnnnnnnnnnnnnnnnnnnnnnnnnnnnnnnnnnnnnnnnnnnnnnnnnnnnnnnnnnnnnnggcacgagcggcacgagaattcaaaatataggaaaaataagatatgtaagattccataatatattttagatttatggaagggcccatttgacatctggtaattgcaagatggaatgagttttattctattaacaataaatataatttttgttttttggatgatccctaagaaagaataaaagtcctcaaatatcagtctttacaaatagttagaatggctcaaacaagaaattcaaaaactagaatttgatctcatagaccttgatggtattctaattaaatactgcttctgcatccctggaccataaagatattctacagtttctgttactaattttataggtttactatca

SEQ ID NO: 34189 - DNA, 439 bp, Homo sapiens
  misc_feature (1)...(439): n = a,t,c or g
ttnnnnnccnttgaannnnnnnnnnnnnnnnnnnnnnnnnnnnnnnnnnnnnnnnnnnnnnnnnnnnnnnnnnnnnnnnnnnnnnnnggcacgagctggtttttgttctggttttctcaggtgtttattctgaagaattttaaaatagttcaaaccctttccaaaatatatttttaatgaaaactgtattgaatttaccaatcactttagcaagcatttccttctttataatattgataatttgatattggatcatactgaataaagagttctaggcagtataatttaaactacactttgtcatatgacatgattttcaaataaggagcatggcaggaaccttcttctctgtctttctctctctctcttttctttcctctctttctgttgctctctctgtctcacacacacacagcccaaaacatagcttcatagtttt

SEQ ID NO: 34190 - DNA, 442 bp, Homo sapiens
  misc_feature (1)...(442): n = a,t,c or g
tttgnnnncctttgaannacnnnnnnnnnnnnnnnnnnnnnnnnnnnnnnnnnnnnnnnnnnnnnnnnnnnnnnnnnnnnnnnnnnnnnggcacgagcgaaaatctgggcacgtcgattctttttttctgtttacgttaaacattgaacattataaaaaattaagttacatttagctgaatttaattacacttaatgagtgaccctcattgaaaacaatacnnnnnnnnnnnnnnnnnnnnnnnnnnnnnnnnnnnnnnnnnnnnnnnnnnnnnnnnnnnnnncggnnnnnnnnnnnnnnnnnnnnnnnnnnnnnnnnnnnnnnnnnnnnnnnnnnnnnnnnnnnnnnnnnnnnnnnnnnnnnnnnnnnnnnnnnnnnnnnnnnnnnnctacttgaaaaaaatatgtatttccaaatatatgtcagttttgacaggatagta

SEQ ID NO: 34191 - DNA, 428 bp, Homo sapiens
  misc_feature (1)...(428): n = a,t,c or g
agttnnnnnnnnnnnnnnnnnnnnnnnnnnnnnnnnnnnnnnnnnnnnnnnnnnnnnnnnnnnnnnnggcacgagcgtgctgcagttagttcattgaaaactcatttgctcttggagcagtcaggcagtgactgccttcggctttttttctgctgactaagatctcctatagagagctacaacaatgcccaaaagaaaggctgcaggtcaaggtgatatgaggcaggagccaaagagaagatctgccaggttgtctgctatgcttgtgccagttacaccagaggtgaagcctaaaagaacatcaagttcaaggaaaatgaagacaaaaagtgatatgatggaagaaaacatagatacaagtgcccaagcagttgctgaaaccaagcaagaagcagttgttgaagaagactacaatgaaaatgctaaaa

SEQ ID NO: 34192 - DNA, 458 bp, Homo sapiens
  misc_feature (1)...(458): n = a,t,c or g
gagagtgnnttnncgttangnacacagcagatncnctnnnnnnnnnnnnnnnnnnnnnnnnnnnnnnnnnnnnnnnnnnnnnnnnnnnnnnnnnnnnnnnnnggcacgagctaggctccagctggatcgtgaccgccgcacactgcctccaccagtcactcgatccggaagatccgaccctacgtgattcagacttgctcagcccttctgacttcaaaatcatcctgggcaagcattggaggctccggtcagatgaaaatgaacagcatctcggcgtcaaacacaccactctccacccccagtatgatcccaacacattcgagaatgacgtggctctggtggagctgttggagagcccagtgctgaatgccttcgtgatgcccatctgtctgcctgagggaccccagcaggaaggagccatggtcatcgtcagcggctgggggaagcagttcttgcaa

SEQ ID NO: 34193 - DNA, 457 bp, Homo sapiens
  misc_feature (1)...(457): n = a,t,c or g
gtgttgtnttnttgcctnantagaanntctnnnnnnnnnnnnnnnnnnnnnnnnnnnnnnnnnnnnnnnnnnnnnnnnnnnnnnnnnnnnnnnnnggcacgagaaaaattcctattgtctctctttctgcttgggtggtatttcttaccaagggcatgtgcttgagagacctctgtttattcacttattgagtatctaccctgtgccagtcacagagcatatgcaactaaagacagagaagcttccttccctcagggaacttattgcccagtggaaattatagagaaggagtctggtcatttcaagctgtgctagaggaagaatggaggttctttgcactcactgttagagcatgagacacactggagggctcctgaaatgcttccttgaaaaagtgatacctaaacccaaaggatgagtagaaataagccagacagagaggtgaaaaagatgggat

SEQ ID NO: 34194 - DNA, 445 bp, Homo sapiens
  misc_feature (1)...(445): n = a,t,c or g
ggntgtgttctgcnaactaganttctatgccttacacgaaccannnnnnnnnnnnnnnnnnnnnnnnnnnnnnnnnnnnnnnnnnnnggcacgagctcaagaaaactcactaagatccgtttatacaaacatgtttgaatttgacctcacaatggactaggctttgtaggagactgaactcatggtaatgaatattagtaattttggtggaatttttctgtggtaaagaatgatacaaggaataccaggaggattgggccctaattttccccagaggggtccttcttttaggcctcactttatcttctagcaagacagctgtggtgttagacttctgctccttggcctaaaaaaagctggggccccgaccttcctgggcatgggcgtttgttgatggaaccatggtcanangaacaaggaaggaggtccatgaggtgggaaatgc

SEQ ID NO: 34195 - DNA, 446 bp, Homo sapiens
  misc_feature (1)...(446): n = a,t,c or g
ggatcntntgcctntgnaaantcgnatgcctgacnnnnnnnnnnnnnnnnnnnnnnnnnnnnnnnnnnnnnnnnnnnnnnnnnnnnnggcacgagagaactttcagctaccaagaaagaccgtgtgaatcattgtctgacaatatgtgaaaacatagtggcacagtctgtcagaaattctccagaatttcagaaacttctgggcatcgctatggaactttttctgctgtgcagtgatgacgcagagtcagatgtcaggatggtggctgacgaatgcctcaacaaagttatcaaagctttgatggattctaatcttccaaggttacagctcgagctctataaggaaattaaaaagaatggtgcccctcggagtttgcgtgctgccctgtggaggtttgctgagctggctcacctggttcggcctcagaaatgcaggccttacctggt

SEQ ID NO: 34196 - DNA, 443 bp, Homo sapiens
  misc_feature (1)...(443): n = a,t,c or g
gggtgntntgccnanaaatctnatgcctnacnnnnnnnnnnnnnnnnnnnnnnnnnnnnnnnnnnnnnnnnnnnnnnnnnnnnnggcacgagggatgtgaaggctatttctagaaatctcttcctttgcagaaacacccgaaaccctcctgccaggaagaccagggcctgggaagagggtcgctctccggccattctcccctcaccctcctcaccttcctcacatcctgtgccctgggggaccagcagctgcttccacccagaacaagcgggagcctgtgtcaggaaagcatgtcagagcagagctgccagatgtccgaactgcggctcctcctcctgggaaaatgccgctcgggaaaaagtgccacaggaaatgccattctgggcaaacatgtgttcaagtccaagttcagtgatcagacagtgatcaaaatgtgccagaga

SEQ ID NO: 34197 - DNA, 353 bp, Homo sapiens
  misc_feature (1)...(353): n = a,t,c or g
gggtgnntntgctcgnaactcttatgnctgacnnnnnnnnnnnnnnnnnnnnnnnnnnnnnnnnnnnnnnnnnnnnnnnnnnnnnggcacgagtcatctcggaggaaactttctagaagtaccaatattcttttcaaaacatagcttacannnnnnnnnnnnnnnnnnnnnnnnnnnnnnnnnnnnnnnnnnnnnnnnnnnnnnnnnnnnnnnnnnnnnnnnnnnnnnnnnnnnnnnnnnnnnnnnnnnnnnnnnnnnnnnnnnnnnnnnnnnnnnnnnnnnnnnnnnnnnnnnnnnnnnnnnnnnnnnnnnnntaccctgatcatttttatttttttgtttttttttttttt

SEQ ID NO: 34198 - DNA, 451 bp, Homo sapiens
  misc_feature (1)...(451): n = a,t,c or g
gngtnantttnnnttttgantcccgnaaaccctnnnnnnnnnnnnnnnnnnnnnnnnnnnnnnnnnnnnnnnnnnnnnnnnnnnnnnnnnnnnnnnnnggcacgagtttgaagctctgttgttagttgtatacacattgaatatcttcttggtgaactgacccttttgtcaaggtctctcnnnnnnnnnnnnnnnnnnnnnnnnnnnnnnnnnnnnnnnnnnnnnnnnnnnnnnnnnnnnnnnnnnnnnnnnnnnnnnnnnnnnnnnnnnnnnnnnnnnnnnnnnnnnnnnnnnnnnnnnnnnnnnnnnnnnnnnnnnnnnnnnnnnnnnnnnnnnnnnnnnnnnnnnnnnnnnnnnnnnnnnnnnnnnnnnnnnnnnnnnnnnnnnnnnnnnnnnnnnnnnnnnnnnnnnnnnnnnnnnnnnnnnnnnnnnnnnnnnnnnnnnnnnnnnn

SEQ ID NO: 34199 - DNA, 446 bp, Homo sapiens
  misc_feature (1)...(446): n = a,t,c or g
gggtntntgtgccnatagaatcnnnaagcccttacacgaacnnnnnnnnnnnnnnnnnnnnnnnnnnnnnnnnnnnnnnnnnnnnnnggcacgagcagaactctgtggaggagctcttcagtttgttaaattttctggagccatcacagtttccttcagagaccgctttcttggaggaatttggagatctgaaaacagaggagcaggtaattagggacccaaagaattgaggagacagtgtgatcgttatcttcatcaagaaaagagcaggatgctatggggccaggatttagcaagttctcacgttcctggtaaaatgagcgttacctcctttattttatgtgtttgtgtatgttggggcgggtacgctgattattagcagttcttattgccccagaggatagatgggtccatacccaaaatatcttatgcgcccaaaatatttt

SEQ ID NO: 34200 - DNA, 453 bp, Homo sapiens
  misc_feature (1)...(453): n = a,t,c or g
gagtagtggnttggtntctngactnagtagatctttnnnnnnnnnnnnnnnnnnnnnnnnnnnnnnnnnnnnnnnnnnnnnnnnnnnnnnnnnnnnnnnnnggcacgagnnnnnnnnnnnnnnnnnnnnnnnnnnnnnnnnnnnnnnnnnnnnnnnnnnnnnnnnnnnnnnnnnnnnnnnnnnnnnnnnnnnnnnnnnnnnnnnnnnncnnnnnnnnnnnnnnnnnnnnnnnnnnnnnnnnnnnnnnnnnnnnnnnnnnnnnnnnnnnnnnnnnnnnnnnnnnnnnnnnnnnnnnnnnnnnnnnnnnnnnnnnnnnnnnnnnnnnnnnnnnnnnnnnnnnnnnnnnnnnnnntatgcgtctaaagataccattaacttaaaaaaacaaaaaaggncacttcacctgattgtctgagggggaaaaaattaaaaaaataataattttaantggcc

SEQ ID NO: 34201 - DNA, 455 bp, Homo sapiens
  misc_feature (1)...(455): n = a,t,c or g
gagagttnnnttntgccnnacnaaantnncgaatgcccttacnnnnnnnnnnnnnnnnnnnnnnnnnnnnnnnnnnnnnnnnnnnnnnnnnnnnnggcacgagcggggcccgtcccatttgagcctgtcaatgtcaccactgaccgagagggtgagacttgggggctggggcggctggtggtctggcgggagagatgtcactgagggcctgaaggggagaggcaggggctgtgaagttgggtaccccggaagtgtgaggggctaaggctttgggggcaagaggcagaaagagggcnnnnnnnnnnnnnnnnnnnnnnnnnnnnnnnnnnnnnnnnnnnnnnnnnnnnnnnnnnnnnnnnnnnnnnnnnnnnnnnnnnnnnnnnnnnnnnnnnnnnnnnnnnnnnnnnnnnnnnnnnnnnnnnnnnnnnnnnnnnnnnnnnnnnnnnnnnnnnnnn

SEQ ID NO: 34202 - DNA, 453 bp, Homo sapiens
  misc_feature (1)...(453): n = a,t,c or g
ngtagtggctttgtnttttgacttnttttaattnctnggaaatgccnnnnnnnnnnnnnnnnnnnnnnnnnnnnnnnnnnnnnnnnnnnnnnnnnnnnnggcacgagaactgggagttaaataatttgcctgaatcacaaagttaaaagtggcagagctgagatgtaaacccaggcagtctgggtccagagctatgctgttcatcaaccagagcagactgtctctctcaggttcaaatctcacccccggtttccattgaggaagatcattttgaatgagtcttacatgtggatctgaacttcagaatggtcatttcacaaacacacagaaaatggtgaaaggctctcatgcagaacaggtggttgaaacaattctctcttcattctgaactcctctcaacctgatcagtgactccagggtagggtcaggcagttttaaaatcaggagatgaga

SEQ ID NO: 34203 - DNA, 450 bp, Homo sapiens
  misc_feature (1)...(450): n = a,t,c or g
gaggtngnnttgtgctcnagaatcnngatgcccttacnnnnnnnnnnnnnnnnnnnnnnnnnnnnnnnnnnnnnnnnnnnnnnnnnnnnnggcacgagatggttttgatgaacagcgcgttccttcacctcgggcagaataactttgcagaagcccacaggttcttcacagagatcttaaggatggatccaagaaacgcagtggccaacaacaacgctgccgtgtgtctgctctacctgggcaagctcaaggactccctgcggcagctggaggccatggtccagcaggaccccaggcactacctgcacgagagcgtgctcttcaacctgaccaccatgtacgagctggagtcctcacggagcatgcagaagaaacaggccctgctggaggctgtcgccggcaaggagggggacagcttcaacacacagtgcctcaagctggcctagctgc

SEQ ID NO: 34204 - DNA, 484 bp, Homo sapiens
  misc_feature (1)...(484): n = a,t,c or g
ttgaanccttgaaancctatgacnnnnnnnnnnnnnnnnnnnnnnnnnnnnnnnnnnnnnnnnnnnnnnnnnnnnnnnnnnggcacgagcagagagtggggagctagacagggctgtggtgagaacagtcaggggcctggctaatgaaaatagacagcgaggtctgccctgcccgaggactctgtggtgaggctccctccggcctgctctgaacccttcccagctgcagtagaacagcccacagaagtcctcatgggcctggctcacccttttcatgggcacgtggctcccacaggcacgcagccgatcagaagaggccggagttggtggctcgcagtgggggctgggcatgttcagcaggaggctgctgctaaggggagctgggtctcctcaccagccctagcgggtttctctcccacactgtggccctgctgagctgccagcactcagaagcgactaccctgtgtcctcgaaggctgtgctt

SEQ ID NO: 34205 - DNA, 485 bp, Homo sapiens
  misc_feature (1)...(485): n = a,t,c or g
tntgaatcccttnnnnnnnnnnnnnnnnnnnnnnnnnnnnnnnnnnnnnnnnnnnnnnnnnnnnnnnnnnnnnnnggcacgaggtggtataaaacaacatttgnnnnnnnnnnnnnnnnnnnnnnnnnnnnnnnnnnnnnnnnnnnnnnnnnnnnnnnnnnnnnnnnnnnnnnnnnnnnnnnnnnnnnnnnnnnnnnnnnnnnnnnnnnnnnnnnnnnnnnnnnnnnnnnnnnnnnnnnnnnnnnnnnnnnnnnnnnnnnnnnnnnnnnnnnnnnnnnnnnnnnnnnnnnnnnnnnnnnnnnnnnnnnnnnnnnnnnnnnnnnnnnnnnnnnnnnnnnnnnnnnnnnnnnnnnnnnnnnnnnnnnnnnnnnnnnnnnnnnnnnnnnnnnnnnnnnnnnnnnnnnnnnncattgctcatggtaaaaatgacctctgacatgtagactgcctctggcttgaaagtctgaataatcttaaaacaccta

SEQ ID NO: 34206 - DNA, 512 bp, Homo sapiens
  misc_feature (1)...(512): n = a,t,c or g
gttnggnngntgtgnnntnttnnntcnnnaancccttnnnnnnnnnnnnnnnnnnnnnnnnnnnnnnnnnnnnnnnnnnnnnnnnnnnnnnnnnnnnnnnggcacgagctggaagagagaacttgcccttatctgaagtacctagagtaggcagattcatggagactgtaagtaaaatagagaggttcccaggggttggaacggagggagaatagggagtaattgtttattattaaggtnnnnnnnnnnnnnnnnnnnnnnnnnnnnnnnnnnnnnnnnnnnnnnnnnnnnnnnnnnnnnnnnnnnnnnnnnnnnnnnnnnnnnnnnnnnnnnnnnnnnnnnnnnnnnnnnnnnnnnnnnnnnnnnnnnnnnnnnnnnnnnntatagacacacagattgttggatgagctgaatgagcanaagacagggttccactactggacattgatgtgggcacatccctgtgatccanaggtcancaagttgctgctgcttcacagcctaagccctgg

SEQ ID NO: 34207 - DNA, 490 bp, Homo sapiens
  misc_feature (1)...(490): n = a,t,c or g
tttgaaatccttnnnnnnnnnnnnnnnnnnnnnnnnnnnnnnnnnnnnnnnnnnnnnnnnnnnnnnnnnnnnnnnggcacgagaaatcctgaactaccttttggaagtagttatcttagaatgtgatggtgaaggatggtaatggcaatcaatttgtcagacagatttcttagggtacgtgaggttggagaagtataagacctatggccaggaactcatcacatctgtgctgccctttccctgaagagtcagtagggtattgtagcataaaagtnnnnnnnnnnnnnnnnnnnnnnnnnnnnnnnnnnnnnnnnnnnnnnnnnnnnnnnnnnnnnnnnnnnnnnnnnnnnnnnnnnnnnnnnnnnnnnnnnnnnnnnnnnnnnnnnnnnnnnnnnnnnnnnnnnnnnnnnnnnnnnnnnnnnnnnnnnnnnnnnnnnnnnnnnnnnnnnnnnnnnnnnnnnnnnnnnnnnnnnnnnnnnnnnnnnnnnnn

SEQ ID NO: 34208 - DNA, 445 bp, Homo sapiens
  misc_feature (1)...(445): n = a,t,c or g
ttgacttgganaccgttatgacnnnnnnnnnnnnnnnnnnnnnnnnnnnnnnnnnnnnnnnnnnnnnnnnnnnnnnnnnnnnnnnnnnnnnnnnnnnnnnnnnnnnnnnnnnnnnnnnnnnnnnnnnnnnnnnnccttccccagtggtcagggccccaaatctgctggcttcccagttgagtcctgcacacattaaagtctgagaaccactaggctaggatctgactctgcttggcaggcccagaaatcgttgttgggcagccttttcagctctgtttgacagaagcacctggagtgacacgggccagatttgactgaagatgagttgtgtatttgagttgtgctgcctgacccatgcagtacacctaacatgcctgttgacccatttcacaggagcttgagaagctggcttctcgaaagttgagaataaatgctaaagaaaccc

SEQ ID NO: 34209 - DNA, 442 bp, Homo sapiens
  misc_feature (1)...(442): n = a,t,c or g
cttcganacccgtnnnnnnnnnnnnnnnnnnnnnnnnnnnnnnnnnnnnnnnnnnnnnnnnnnnnnnnnnnnnnnnnnggcacgaggctccatgtagatcacaagatattgatgctgatggacagggattttgtcaaggaggattcagcattgattttactaaagctgacagagtacttcttggtggtcctggtagcttttattggcaaggtcagcttatttcggatcaagtggcagaaatcgtatctaaatacgaccccaatgtttacagcatcaagtataataaccaattagcaactcggactgcacaagctatttttgatgacagctatttgggttattctgtggctgtcggagatttcaatggtgatggcatagatgactttgtttcaggagttccaagagcagcaaggactttgggaatggtttatatttatgatgg

SEQ ID NO: 34210 - DNA, 456 bp, Homo sapiens
  misc_feature (1)...(456): n = a,t,c or g
ggtnttnnnccttggactttgaanaccgtttgacnnnnnnnnnnnnnnnnnnnnnnnnnnnnnnnnnnnnnnnnnnnnnnnnnnnnnnnnnnggcacgagcagacaatgagcattagagcttataactgtgtgattatactgttgcactcttataagtgtttataataaaagtaaagtcagaatggaatgcttggccatttggtaaagaacatgaaaagagatggaaacaaaaagaagtattgatgtaagtaataaagatagctcattgagatgtatttcaggagttcaagaggaaaagccatttgctttaaacttttctacagagttgtccatgtatatatagacatgtgtgtatatatatatatgtgtgtgcgtatatatataatgtgtatatctatatgtgtgtatatactgattgcctgttttacttttaacacaaaatgctacgatgggaa

SEQ ID NO: 34211 - DNA, 456 bp, Homo sapiens
  misc_feature (1)...(456): n = a,t,c or g
ggtgnttccccctttgantncgtnnnnnnnnnnnnnnnnnnnnnnnnnnnnnnnnnnnnnnnnnnnnnnnnnnnnnnnnnnnnnnnnnggcacgagnnnnnnnnnnnnnnnnnnnnnnnnnnnnnnnnncagaactcttagaagtagaatctcagggttgaaagagtttttaggattttcgacagttatggtagagtattattggtcactataagttgttagtgggaatggaactactggctgttttccaactgactgttccgtcagggtggggagaggtctcagcacgaggccccgccgagatgttggtaagtggtcagccaagtgggccgctcgctcccggttcacccactgtgttcctgtcagtgaagtaaacatccccatttggcaggagaagaagctgccggaggtcacactgctagtgattggtggcccaggggtagggcagccttcttt

SEQ ID NO: 34212 - DNA, 326 bp, Homo sapiens
  misc_feature (1)...(326): n = a,t,c or g
ttgganaccgttatgacnnnnnnnnnnnnnnnnnnnnnnnnnnnnnnnnnnnnnnnnnnnnnnnnnnnnnnnnnnggcacgagnnnnnnnnnnnnnnnnnnnnnnnnnnnnnnnnnnnnnnnnnnnnnnnnnnnnnnnnnnnnnnnnnnnnnnnnnnnnnnnnnnnnnnnnnnnnnnnnnnnnnnnnnnnnnnnnnnnnnnnnnnnnnnnnnatctgatttcatctgttcccaatcactccctccatttaaccctaggtgttttttggaagcaaaccccagatcatttgatctttatattagcatgtatctcaaaaaaaaaaaaaa

SEQ ID NO: 34213 - DNA, 436 bp, Homo sapiens
  misc_feature (1)...(436): n = a,t,c or g
ttgactttgaanaccgttatgacnnnnnnnnnnnnnnnnnnnnnnnnnnnnnnnnnnnnnnnnnnnnnnnnnnnnnnnnnnggcacgagcagggagggtcactgcatgctacacaggggaagcaccaggttttagtcagaaagcagaagacaggagccacggaaaagtccaggccagagtattgggatttcctgggaaaggcaagggagggcagagtaaacagttgaggattgaagagtttggatgattcctccaggctttgagctgtagaggtggtctctaattgcctggtacctgactctggaatgatttagggcaggaaatactggcttcgtatgtgagcgttagataaggaggtggatttggctgtagactcaggattggttggtttgtatatggaagacatgctcctgtgagccctcttatctctaagaaa

SEQ ID NO: 34214 - DNA, 452 bp, Homo sapiens
  misc_feature (1)...(452): n = a,t,c or g
ggggnnttgnnnttttgactttgaanaccgttnnnnnnnnnnnnnnnnnnnnnnnnnnnnnnnnnnnnnnnnnnnnnnnnnnnnnnnnnnnnnnnggcacgaggtatttcaactataaataaaatttgtgggaggccattgttttggattgagctcctgcaccaagctccaacagaccagaccaaaccagaatggagttactggtgctaggcacccgtacaaattgaacttaaaaacaggccagttttccaaaaagcaaaagattcatgcaaccaatcaaaagggacccaggcaacctgaaccggcatgataaggaagccccctctgccttaacccacactaggaaagtaatctgaagtaacttgatgttaaccaatctgctgcttctactatattgtttccttgttcctgctcaagcgatttcacaaaaatctactgttctgccattccca

SEQ ID NO: 34215 - DNA, 430 bp, Homo sapiens
  misc_feature (1)...(430): n = a,t,c or g
actttgaanaccgtttgacnnnnnnnnnnnnnnnnnnnnnnnnnnnnnnnnnnnnnnnnnnnnnnnnnnnnnnnnnnggcacgagaaacagtgtaaatttattgctcatagttctggagggcaaggtcaaggtactggcagattcagtgtccgatgagggcccattccttataggcggcaccttgttgctgtgtccttatgtggcggaagggtctaaggtgctcccttcatcctcttttataaaggtactaattccattgatgagggcaatgccttaataacttagttacctcccagaagccccacttctttatactatcacattcggtattcggttccaacaaatgaattttggggaggacaccgacattgagactgtggtactctgtaacccaaacctttaccaggagatatactatgtaatgctact

SEQ ID NO: 34216 - DNA, 449 bp, Homo sapiens
  misc_feature (1)...(449): n = a,t,c or g
ggtgnntnncccctttgaaanccgtnnnnnnnnnnnnnnnnnnnnnnnnnnnnnnnnnnnnnnnnnnnnnnnnnnnnnnnnnnnnnnnnnggcacgagnnnnnnnnnnnnnnnnnnnnnnnnnnnnnnnnnnnnnnnnnnnnnnnnnnnnnnnnnnnnnnnnnnnnnnnnnnnnnnnnnnnnatcacacttaaccaatttttttctctttaacttgctttttacttaaaaggctctttttcccatcattctttcattcaaccagtattccaccatgtgccatgccctccctgcgttaggaaccagggccaccattgtgatcagggcagccacgtgctttgcactcattagcttacggtctagccagggaggcagtcagttaccaaatcgacaaatagatatcaacaaaatgctcactgcaattagggctcttaagggaagttacaggat

SEQ ID NO: 34217 - DNA, 431 bp, Homo sapiens
  misc_feature (1)...(431): n = a,t,c or g
ctttnnnnnnnnnnnnnnnnnnnnnnnnnnnnnnnnnnnnnnnnnnnnnnnnnnnnnnnnnnnnnnnnnnnnnnnnnnggcacgagtgaaattattgggatgatttttattggaccactaactttgatgtctttggcggatagatgataacaagaagagattggcttgtcttaaacagacctcctgccttagtcctagcggtaaagataactttaaaaacaaagtctagatcctttgccttctttttttaagaattcataacctggccaggagcggtggctcacacnnnnnnnnnnnnnnnnnnnnnnnnnnnnnnnnnnnnnnnnnnnnnnnnnnnnnnnnnnnnnnnnnnnnnnnnnnnnnnnnnnnnnnnnnnnnnnnnnnnnnnnnnnnnnnnnnnnnnnnnnnnnnnnnnnnnnnnnnnnnnnnnn

SEQ ID NO: 34218 - DNA, 447 bp, Homo sapiens
  misc_feature (1)...(447): n = a,t,c or g
ggtgnntnncccctttgaaaccgttatgncnnnnnnnnnnnnnnnnnnnnnnnnnnnnnnnnnnnnnnnnnnnnnnnnnnnnnnnnnnggcacgagctcagttcaggcatgtttaacctccagattacctcatccttgagaaatttaggaataatcccagtgtcagtctttggaggtgtggttctttgatgttagtcatgggaataaggaatttgcattaagcctcaagaattgtggaaagtcctaatgagaaatgtcacgggcagaaactgccacccgctttagtggtgcaggtgatggctgtgccggagagctgcgcgtagccggctgctggaggagaggacgtggcctgtacaggcagcttcgctctggggggtgactgttggagggcagcggggacgaaagggacacatttgtatgatgctcagttgtcagcaggatgtccag

SEQ ID NO: 34219 - DNA, 453 bp, Homo sapiens
  misc_feature (1)...(453): n = a,t,c or g
ggtgnnntnnnntctttgactttggaanaccgtnnnnnnnnnnnnnnnnnnnnnnnnnnnnnnnnnnnnnnnnnnnnnnnnnnnnnnnnnnnnnnnnnggcacgagcacatctttcaggcgaggctctaagagccaggtgctggctctttcccgcgctgcagagacaccaggcatctttggtctgatcctctcccgtcgtgtcactgataaatgaaagaagaatgttatccaagggaatggtcccaagaagttgggaagttcagagccagaagttctgtgaagagagcatcgtgacactgagggagctcaggtctgttcagggagcccttggaaggtctcagcatggggaagttgttgagccaggcccagaagcacagcttccagatgctgtggaggaagccaggtgtgaggtggaagcccactggaaaaggctggccctgattggacctcct

SEQ ID NO: 34220 - DNA, 449 bp, Homo sapiens
  misc_feature (1)...(449): n = a,t,c or g
ggngnnttnnnnttttgactttgannnnnnnnnnnnnnnnnnnnnnnnnnnnnnnnnnnnnnnnnnnnnnnnnnnnnnnnnnnnnnnnnnnnnnnnggcacgagatatttttactgaatgtgtaagcatcagtcatttcttttctccttccttttattgactgggcactgcagatcttttggaaatatattcttaaataaattaagacttttaaagctttaactttttaaaactattttgtgagttagagttgttgaaaacatgcttgtacttcctactttaagctgttttgtgggccatagttttactttaaagtgtttctcctttctaaggagtttagctggatagtagaaatgtgtctgattatctgatttgaggagtcactgattctaatggtagcttcctgtagttttaaggtactgcatatttctgtagttgagtgtgttgat

SEQ ID NO: 34221 - DNA, 454 bp, Homo sapiens
  misc_feature (1)...(454): n = a,t,c or g
gcggccctnccctcttcgactttngnaaacnctnnnnnnnnnnnnnnnnnnnnnnnnnnnnnnnnnnnnnnnnnnnnnnnnnnnnnnnnnnnnnnnnnggcacgaggtgtatcctttttattgtaatcctactctcactgctttaatttcagacactctttttggtaggagaccactagttggtctttctctggggccttagtccctatcaatttattcttcatactactgtctttaacttacctacctagcctctacttagttcagtttggcaagaatgtaatccttaactatattattaattgtattttcctaattacacattctctctcttgccggggaaacttcatatatattattccccatccttggaatgtcttttgtcctattttcctggcaaacctctatttcttcttctaaacttancttttgctttactaaccctctgacataa

SEQ ID NO: 34222 - DNA, 439 bp, Homo sapiens
  misc_feature (1)...(439): n = a,t,c or g
ttgactttgaaaccgttatgacnnnnnnnnnnnnnnnnnnnnnnnnnnnnnnnnnnnnnnnnnnnnnnnnnnnnnnnnnnggcacgagcttgcaagttctagccaggcggaaatctcgggagattcagtctaagctgaaggtacggggcccctgccacctggcctggcctgcccagcaccctcctgggtgcaggcctgtcgctgctctgtggctccagcctgggacaggcaaggggctgagaagctgtgagggggtccagaaagaaacacaagtggcagcaggaagcccaagggccctgtcagtgagggagagggagaccatctgggggccactaaggcccacccctcctcttctctgtttttctttttctccttcttcctgactgctgcttactaactgcatggggacttccgtgggcagggaggaggccccggggct

SEQ ID NO: 34223 - DNA, 446 bp, Homo sapiens
  misc_feature (1)...(446): n = a,t,c or g
ggtgnntccccctttgaaancgtnnnnnnnnnnnnnnnnnnnnnnnnnnnnnnnnnnnnnnnnnnnnnnnnnnnnnnnnnnnnnnnnnggcacgaggctttcttcttattaattccaataggtgttcaatattttacttcctctctttattatgtctaacatttttgtccattctctgccagtcttcacttaacttctatataccattctgccctcattttcctttctttcctgtgttcattctaattatccttcttaaatgcttcttttgcctgtcccttcactacctgcttctaggttgccttctttttccattatacacatcccgcctgggtgattatatctgcgccaatggcctttttttgccacatatgggatggttactcccagtggcaacgctggctattctcagttctgtgtcatcagcccacatctctnttctgatg

SEQ ID NO: 34224 - DNA, 470 bp, Homo sapiens
  misc_feature (1)...(470): n = a,t,c or g
ttgaanntntgaatacccnnnnnnnnnnnnnnnnnnnnnnnnnnnnnnnnnnnnnnnnnnnnnnnnnnnnnnnnnnnnnnnnnnggcacgagcttttttatttttgccattctagtgggtaagtggcttnnnnnnnnnnnnnnnnnnnnnnnnnnnnnnnnnnnnnnnnnnnnnnnnnnnnnnnnnnnnnnnnnnnnnnnnnnnnnnnnnnnnnnnagaaatggttattaaaatcctttgctcaatttttattggcttacttgtccttttattgtttgagctgtaaagtatctttatatattgtggatacaggttgcttatcaaatatatgcttgaaaatattatctcccactctggtagtttttcactttcttgatcatgtcctgtgaagcacaaagtttcttccttttttnttttnttttggnntcncctaacnncngnnntctccntnagggcctanaaattgtggg

SEQ ID NO: 34225 - DNA, 478 bp, Homo sapiens
  misc_feature (1)...(478): n = a,t,c or g
tttgaaaacnttnnnnnnnnnnnnnnnnnnnnnnnnnnnnnnnnnnnnnnnnnnnnnnnnnnnnnnnnnnnnnnnnnggcacgaggcaccccagagccctggccccctcgccacctgccgagttcatctattactgtgtagacgaggacgagctacagccctacacgaaccgccggcagaaccgcaagtgcggggcctgtgcagcctgcctacggcggatggactgtggccgctgcgacttctgctgcgacaagcccaaattcgggggcagcaaccagaagcgccagaagtgtcgttggcgccaatgcctgcagtttgccatgaagcggctgctgcccagtgtctggtcagagtctgaggatggggcaggatcgcccccaccttaccgtcgtcnaaagaggcccagctctgccgacggnaccatcttggccctaccttgaagcccaccttggctacacgcacagncaaccagaccata

SEQ ID NO: 34226 - DNA, 246 bp, Homo sapiens
  misc_feature (1)...(246): n = a,t,c or g
ctancngtcgtaanggcnnnngangnnanannccatnnnnnnnnnnancnatatctcnnnnancnattncggtggattagtanacntttgaanccgnanaccgttagactgatacgaannnnnnnnnnnnnnnnnnnnnnnnnnnnnnnnnnnnnnnnnnnnnnnggcacgagaaagagctgagattacaggcatgagccactgtaccaggctaaacttcatttggggattntttttttttttttt

SEQ ID NO: 34227 - DNA, 477 bp, Homo sapiens
  misc_feature (1)...(477): n = a,t,c or g
ttnanacnttnnnnnnnnnnnnnnnnnnnnnnnnnnnnnnnnnnnnnnnnnnnnnnnnnnnnnnnnnnnnnnnnnggcacgaggtggggttgtgcttccagctggcccccatagcatgtggttgacctgagtgggcatagtcagtggtgaccaagcttgaactttcctgggagaaaggagagttggtataggagcccttatgggggtgcagggtgatttgaataagcttttttacctcagagtgtctaatcatggtgattgcctcacatttttcatttttagtttcctgtttgaagcacttcatttaatcttcccaacaaccttatcaggtaggaaactatgggtgtagattatgcctattacttactttttttagaccatgttgggttgattgaaatgcattcttaatcactttgccatgtctccagtgtgttccattaaaatgtgaattcacccataggaaggtctgaccagact

SEQ ID NO: 34228 - DNA, 497 bp, Homo sapiens
  misc_feature (1)...(497): n = a,t,c or g
gnnnggngnnntnnnnttttgantctngaataccctnnnnnnnnnnnnnnnnnnnnnnnnnnnnnnnnnnnnnnnnnnnnnnnnnnnnnnnnnnnnnnnnnggcacgagcacaaatgcagaaagttagaactaatagaaatcacgcaatccatcttgttctgatgtaaatgtgaaaactgcagtctagagagtgtaagttatttgttcagagaagcacagcctgctctgagccgagttggcactcaagtcttttccctctaactctagagttacccaaaccttgtactatattctaatggcaaactgttctttactaccccataccctcatgcattgcctacaattcttatgacaatgtgttttttaatagatttgcttgtatatgcacctgtcttctctagcggagtctgaactttgagagtcaggggctgcctgactcatgccttttccctcaacagcacctagcaggatacctgacacatactaggaactcaat

SEQ ID NO: 34229 - DNA, 477 bp, Homo sapiens
  misc_feature (1)...(477): n = a,t,c or g
gaantntgaaaccnntnnnnnnnnnnnnnnnnnnnnnnnnnnnnnnnnnnnnnnnnnnnnnnnnnnnnnnnnnnnnnnnggcacgagcggcacgagattgctatggggcagcctggatttgtaaccttcattctctaggggctggggtctgccccttcttgcttggccccctggcctgcagtgtccccgcctccaccgccaccttctcacccttggagggagcccccttcctgctgatgtgcttcctttgagttagcagcaaagactctgtttggaggaacaggagaggggctagggagagaagatggactaggacagcttgtcacggcttgtcactcagagagacccgagtgtgggcaggaccccagagctcattgagaattaatcagggttctgcactgctggctctggaaagtccaggtccaaacctcttggagaacaatggacctcgggagaagatacaccgtgtctgggtcc

SEQ ID NO: 34230 - DNA, 499 bp, Homo sapiens
  misc_feature (1)...(499): n = a,t,c or g
tggtgcnttatatnttgcnttntagancncnttgacctttcccnaatanaatacgactcnnnnnnnnnnnnnnnnnnnnnnnnnnnnnnnnnnggcacgaggataaatgaatagataactaaatgaatccattaacacggacagagaattttacaaggacattctaaatgtgagtcaccaaatgtacaaacaggttggagttagagatgaagacagagcatttgagagacaataatcatcaccaaaattcagtaataatagcaatggttactgtaatgttgtttgtggaggtcttttctcttcaatagtacctgaacgttaatgtcattcaatgtcaacttttgaatgactgtggtatgatattttaatagatacgataaataataattcattgctcatattcttaaaagttctaacaattgtgacaaaccttagcctgaggttgaatttctagagggatcattanatactannaatattctctnanatgacanaaaaa

SEQ ID NO: 34231 - DNA, 495 bp, Homo sapiens
  misc_feature (1)...(495): n = a,t,c or g
gnnggnttnnntntgnnataaactctttgacnnnnnnnnnnnnnnnnnnnnnnnnnnnnnnnnnnnnnnnnnnnnnnnnnnnnnnnnnnggcacgagctctacttctctacttcctccctaaatttgcgatctaaaggtagagaaagaaagaggtcttggtcaatcagcaggtgttcatcctataccttctgagtactcagcactgtgccagtgctgtgaggggtctgaatgaaacatatgggagtttcaatggtactggccctcttctgattcaaagtttgtcaacnnnnnnnnnnnnnnnnnnnnnnnnnnnnnnnnnnnnnnnnnnnnnnnnnnnnnnnnnnnnnnnnnnnnnnnnnnnnnnnnnnnnnnnnnnnnnnnnnnnnnnnnnnnnnnnnnnnnnnnnnnnnnnnnnnnnnnnnnnnnnnnnnnnnnnnnnnnnnnnnnnnnnnnnnnnnnnnnnnnnnnnnnnnnnnnnnnnnnnnnnnnnnnnn

SEQ ID NO: 34232 - DNA, 498 bp, Homo sapiens
  misc_feature (1)...(498): n = a,t,c or g
gnnnngnnnntnnnnnttggannntttganaacnnnnnnnnnnnnnnnnnnnnnnnnnnnnnnnnnnnnnnnnnnnnnnnnnnnnnnnnnnnnnnnnnnnggcacgagggagaaggttctgggaaagatcaggagttcagttttagacctgtgttcttttaactttaaaatagccttttattattataaaaaaagcatannnnnnnnnnnnnnnnnnnnnnnnnnnnnnnnnnnnnnnnnnnnnnnnnnnnnnnnnnnnnnnnnnnnnnnnnnnnnnnnnnnnnnnnnnnnnnnnnnnnnnnnnnnnnnnnnnnnnnnnnnnnnnnnnnnnnnnnnnnnnnnnnnnnnnnnnnnnnnnnnnnnnnnnnnnnnnnnnnnnnnnnnnnnnnnnnnnnnnnnnnnnnnnnnnnnnnnnnnnnnnnnnnnnnnnnnnnnnnnnnnnnnnnnnnnnnnnnnnnnnnnnnnnnnnnnnnnnnnnnnnnnnnnnnnnnnnnnnnn

SEQ ID NO: 34233 - DNA, 505 bp, Homo sapiens
  misc_feature (1)...(505): n = a,t,c or g
gnnngnntnnnntnnnnnatttgaannttgnanaacgctatgacnnnnnnnnnnnnnnnnnnnnnnnnnnnnnnnnnnnnnnnnnnnnnnnnnnnnnnnnnnggcacgaggatcaggccttcactctggcggggtggggcggcggggggtgacacaggaacaaagggctgctgaaggccaggagtggaggctgtggcacccggcctgtgaatgaggggtctgcaccatgacctgtgagatgttccctttaaaatctggccagtagatcacccacggagagaaaaggcagagctttgggcccagggctgccatggtacctgactttaggtcatcacgtgtggtctagtgaataatacccctggagttgtgcagtgcacagcctgagcagcaggtcatggctgtgccagatttgtggcatggcttgtgtcggacaagagctaaaaggaggcagtgaaaggactcttacactgccaggagaatccaggtacaagagaaattgttatcg

SEQ ID NO: 34234 - DNA, 485 bp, Homo sapiens
  misc_feature (1)...(485): n = a,t,c or g
tttgaaaccttnnnnnnnnnnnnnnnnnnnnnnnnnnnnnnnnnnnnnnnnnnnnnnnnnnnnnnnnnnnnnnnnnggcacgagagggcatcccgctggagagcaccgacggcgagcgcctggtcaaggctgcgcagtgcggtcacccggtcctgtgcgtgcagccgcaccacattggcgtggccgtcaaggagctggacctctacctggcctacttcgtgcgtgagcgagatgcagagcaaagcggcagtccccggacagggatgggctctgaccaggaggacagcaagcccatcacgctggacacgaccgacttccaggagagctttgtcacctccggcgtgttcagcgtcactgagctcatccaagtgtcccggacacccgtggtgactggaacaggacccaacttctccctgggggagctgcaggggcacctggcatacgacctgaacccagccagcactgcctcagaagaacgctgccat

SEQ ID NO: 34235 - DNA, 487 bp, Homo sapiens
  misc_feature (1)...(487): n = a,t,c or g
tttgaaannctgnnnnnnnnnnnnnnnnnnnnnnnnnnnnnnnnnnnnnnnnnnnnnnnnnnnnnnnnnnnnnnnnnggcacgagaactggatgggctttacagaaggatagagatgactaaacagttagtaactgtgaccagtggaaattctccaatctgaagaaaaggtcagtgggtcaatccaaagatccaactgacctgtaactggaaatcaattagtgagttgaatagttgcacgaaagcatgttattatattatatgctgacacagctataggctgagaggttaagcatgttgttcatggccacagatccaggatggaaacctagacttcagagcctatgatcccatcgtgttctgtcagactaatacttatatttgaatgttttaaagtaggcctttttttaaaaaaatgatagggctggccannnnnnnnnnnnnnnnnnnnnnnnnnnnnnnnnnnnnnnnnnnnnnnnnnnnnnnnn

SEQ ID NO: 34236 - DNA, 423 bp, Homo sapiens
  misc_feature (1)...(423): n = a,t,c or g
ttgaanatccgnnnnnnnnnnnnnnnnnnnnnnnnnnnnnnnnnnnnnnnnnnnnnnnnnnnnnnnnnnnnnnnnnnggcacgagtgggtgtatacctaagaattgactgggtcatgtggtaattatgtttaacttgaggaatcatcagactggtctccaacatggctgcgnnnnnnnnnnnnnnnnnnnnnnnnnnnnnnnnnnnnnnnnnnnnntatgacccctccagtacttgttttcctgtnnnnnnnnnnnnnnnnnnnnnnnnnnnnnnnnnnnnnnnnnnnnnnnnnnnnnnnnnnnnnnnnnnnnnnnnnnnnnnnnnnnnnnnnnnnnnnnnnnnnnnnnnnnnnnnnnnnnnnnnnnnnnnnnnnnnnnnnnnngtttctctcctaaccaagttgtcactttccacgtttgag

SEQ ID NO: 34237 - DNA, 428 bp, Homo sapiens
  misc_feature (1)...(428): n = a,t,c or g
tttggantnnngnatacccgtnnnnnnnnnnnnnnnnnnnnnnnnnnnnnnnnnnnnnnnnnnnnnnnnnnnnnnnnnnnnnnnnnggcacgagcaccagagaagcatttctctgtatctattgcacacgatctcctcttggctgtgaggaaggaaggaaagaagggagagaggatttccttctttggttcccatcatcctaagttcaaaagccaaaggccatgagagctttcccttagctactcctccagcccacccctgacatctttacacagcaattaaaaagactacccctaccttcctggggaccctatctcactccctccagcccttgcacatgtactttcttcttcgtggaaagaagaatgttctgtcttactgttgcctggaaaattctttcttcatgtaaactccctttagaaattatc

SEQ ID NO: 34238 - DNA, 512 bp, Homo sapiens
  misc_feature (1)...(512): n = a,t,c or g
annnnnnnnngnannanngntntnnnntnnnnctnnnnnnnnnnnnnnnnnaanaggagntnnnnnnnnnncaggnnnnntcnnannnnnnntttggaaatcggaagcctgantacgaannnnnnnnnnnnnnnnnnnnnnnnnnnnnnnnnnnnnnnnnnnnnnnggcacgagattctctgaatgtatttattcttcttggggctactgggcccaagaagtaaaaactgagaggcaatttggagacacccgatgcaaaagagcccaccacttgtggagcacaatagaatctgatcgtcatttcacaggccttagagcttcactgcagagttggagcgcaggcaccagctctaacccaaactccttgcccttttctttgcaccctgctgcctttcactgacatggagaatgagggaaagaaaggatggggtgtggcttccctgggatcagaggcttgcttttctttctggctcctccttggctgatgaatcccatacctgggattggtccca

SEQ ID NO: 34239 - DNA, 516 bp, Homo sapiens
  misc_feature (1)...(516): n = a,t,c or g
ggatnngnnnnnannnnannnctannnnntnncgnacgnatnancnngantanagganatnnnanancgagnacntgnngacatgngntntcnantntgaaancgtaangccatgactacgaannnnnnnnnnnnnnnnnnnnnnnnnnnnnnnnnnnnnnnnnnnnnnnggcacgaggacagaacagttgcagtctcagccctaatccctgcagctgactggcggctgttaggagagtgtggggaggcgggagtgggggcggggaggtgcattccccaggaggttactgtgacaggcagggcctaaggaggctcttgtcccagggtgctgtgcctctcttcctttattctgctgctcccatgggccattcccccanagggaccccctaaacccaaggagaaaggtcttctcagtccagccccagtcctgatctcctgacctgccagaaggacaggcatgttaatgacatctggggttgctcgacttgcctgcccangctggaggcanctcaaaag

SEQ ID NO: 34240 - DNA, 426 bp, Homo sapiens
  misc_feature (1)...(426): n = a,t,c or g
ttctnggaaatccngnnnnnnnnnnnnnnnnnnnnnnnnnnnnnnnnnnnnnnnnnnnnnnnnnnnnnnnnnnnnnnnnnnnggcacgaggggcaaggagcccgtggtgtacccctggatgaagaagatccatgtcagcgccgttaaccccagttataacggaggggagcctaagcgctctcgaaccgcctacacccggcagcaggtcttggagctggagaaggagttccacttcaatcgatacctgacccggcggcgccgcatcgagatcgcccacacgctctgtttgtctgagcgccaggtcaagatctggtttcagaaccggaggatgaagtggaagaaagaccacaaactgcccaacaccaagatgcgatcctccaattcggcctcggcctctgccggcccaccagggaaagcacaaactca

SEQ ID NO: 34241 - DNA, 460 bp, Homo sapiens
  misc_feature (1)...(460): n = a,t,c or g
gcgcnccctcncccttttgaacactctnnnnnnnnnnnnnnnnnnnnnnnnnnnnnnnnnnnnnnnnnnnnnnnnnnnnnnnnnnnnnnnnnnggcacgagcggcacgaggtgtttaataaccttcagaagtttcccacaaaggctcagactctgggcaagaaaatgagaaccaggccccagggctgttccccttaccttccccccaccccaccagggtctggggcttccctggactgatggggagggggtggagagagaagagggtgcctggagctgccctggccccccaagtcacagcccaagagtgaggccttcccccatgccagcaggatgacggggagctgagggggcactcctagggcgggaagaggacatgtgaggacctggagtggctctggggagggtgtgaatgatggtatgagggtgacagtgctcagggatatccacccctccaccgc

SEQ ID NO: 34242 - DNA, 437 bp, Homo sapiens
  misc_feature (1)...(437): n = a,t,c or g
ctttgaataccgttnnnnnnnnnnnnnnnnnnnnnnnnnnnnnnnnnnnnnnnnnnnnnnnnnnnnnnnnnnnnnnnggcacgagcagaacggggttccctgggagtcccaaagacccttgcttatacaatgccaagccatgtgaaggcagagccaaaagacagttacccagggcctcataggcacagctttttggacttaaaacactttactagtggtatcagtggatttctggctgatgaatttgcaataggggccttcctcaggcttctccaagagcaactggatgagatcagtagccgcagccctcctgagaagccaaagcaagaaagtcagagctgctcaggaagcagagatggactgcagagccgcctgcatcgactttccaaggttgtctctgaggcccagtggagacacaaggtggtgacaagcaacca

SEQ ID NO: 34243 - DNA, 441 bp, Homo sapiens
  misc_feature (1)...(441): n = a,t,c or g
ttggacactttgnnnnnnnnnnnnnnnnnnnnnnnnnnnnnnnnnnnnnnnnnnnnnnnnnnnnnnnnnnnnnnnnggcacgagagaatgcaaaaatcagtgctttaaaaatctttttgtgcttaattgactgtcagagaaaaatggagtccatataatatttatctctcaaggatatattattacagtctaaatttacatatacaatgtacttgttttattttttttttaaatcagggtttgtctgatcaggacatgatgacacaaaacagtaacagcagtagtctcccctttgcagtagagcaaagaggattatttatcataagcagattaaacagtcatttctagaagtctgcattctccaaccaagtttttattagttatttggatattatgtttttctctgaaataagaagtagtanagcctgagcatctctactt

SEQ ID NO: 34244 - DNA, 436 bp, Homo sapiens
  misc_feature (1)...(436): n = a,t,c or g
aanncttgaanaccgtnnnnnnnnnnnnnnnnnnnnnnnnnnnnnnnnnnnnnnnnnnnnnnnnnnnnnnnnnnnnnnnnnggcacgagggaannnnnnnnnnnnnnnnnnnnnnnnnnnnnnnnnnnnnnnnnnnnnnnnnnnnnnnnnnnnnnnnnnnnnnnnnnnnnnnnnnnnnnnnnnnnnnnnnnnnnnnnnnnnncaagaaatgccatttcttttatttatttatttattttattcctaaagatccgtaaaacctagttgtggaactatgaaggtcatggcttcctgtgatatcagggttactttgggatggggatagtaatggtaggtttgtggtctgtgacactgtgtcatcaagagagacaacaggaggtactgggtaaaatcattgactttgcagaacactgcttgggcttgggcttgggtcctg

SEQ ID NO: 34245 - DNA, 454 bp, Homo sapiens
  misc_feature (1)...(454): n = a,t,c or g
gcccgccnnctcncctttgacccannagacactctttatgactgcnnnnnnnnnnnnnnnnnnnnnnnnnnnnnnnnnnnnnnnnnnnnnnnnnnnnnnnggcacgagcggcacgaggagttgttctgtgacggtggttctcatgtgtggtagctggggcagcaccagcagcagtggcggccnnnnnnnnnnnnnnnnnnnnnnnnnnnnnnnnnnnnnnnnnnnnnnnnnnnnnnnnnnnnnnnnnnnnnnnnnnnnnaatgactaggcaaactattttcatgagccctgtaggtgattctgaagcttgttcaagtttgagagtcactgacctatggattaaggtgagtgagtgcacctgtgacagaacaagtgctcactgctcttggtttccttattaaaagagggagggagttgaaatggggtagctcttagattgcctctctcctgtttt

SEQ ID NO: 34246 - DNA, 456 bp, Homo sapiens
  misc_feature (1)...(456): n = a,t,c or g
gccngccctctcccctttggacctnatnnacacncttnnnnnnnnnnnnnnnnnnnnnnnnnnnnnnnnnnnnnnnnnnnnnnnnnnnnnnnnnnnnnattcggcacgagcagcattctgcctatccacactcaggccatgaggtccttgaaacttctacataggaaggaaggaagagtttagaaggctgcagttgaggcgaaaggaaagttctctttattattctcatatctgaagccataatagggcctccttgtttgtgaaacgacatcacattctgcagccttggcaagtggtccacaaagcttacctctgaaggtctgagttcctctttatcactataatttgaccccagttttagtcgaaggaactatcactgnatactctcattccccactacgtgtagatcactcatttacttaattcaattattcagcaagtatttctagagtgcct

SEQ ID NO: 34247 - DNA, 296 bp, Homo sapiens
  misc_feature (1)...(296): n = a,t,c or g
gcnagccnnctcccttngngccancnagagactcttnnnnnnnnnnnnnnnnnnnnnnnnnnnnnnnnnnnnnnnnnnnnnnnnnnnnnnnnnnnnnnnnnggcacgagaaaggacttttcaaatgtaagtgggggtttttcttgtgtggtttcatctggggaatagaataatctagagacttagagaaagatcaggaggtcttagctaagtgttaaccacttttagacactgtgaaggcattgagtctaacttaaatagaacttgggtatagaaatttatctttttttttttttt

SEQ ID NO: 34248 - DNA, 516 bp, Homo sapiens
  misc_feature (1)...(516): n = a,t,c or g
atgnnntnngnnnntnnnnnntnnnnncncnnntngcnncctccgttnannnnngattnannnaggngtccctccccctttgaacacttnatgacctgagacgaannnnnnnnnnnnnnnnnnnnnnnnnnnnnnnnnnnnnnnnnnnnnnnggcacgaggagggagtgaggggcagtggtgcccttcctgcagaagagacatgcagcagtagcgctggcgccatctgcaggagctggccgggctggccttctggaccctggcttctccccactgtaacgcctgttacacacaaactgttgtgggttcctgccaggcttgaagaaaatgatctgaattttttcctccttttggttttattttgttggttaattttgtgttttcttttctcctttttggggggtattcagagtgggctgggcccctgggcgagacacagctacctctgttggcatctttttaataccaggaacccagcggctctagccactgagcgggctaaatgaaataaaggggg

SEQ ID NO: 34249 - DNA, 450 bp, Homo sapiens
  misc_feature (1)...(450): n = a,t,c or g
gagagtcncttctnctngttnctacntngaccntccnnnnnnnnnnnnnnnnnnnnnnnnnnnnnnnnnnnnnnnnnnnnnnnnnnnnnggcacgagcgcatgtctcactgcccaagggtacacacacagacactcacatacgtatgtcttcccaggcaccggcacacacaaatacaaattagttaccggttcgaattctttgcttaaagaaaacttgtgactgtattaaaaatgtaggacacatcagccaaataattaaagcgaggagggaggcagtgggacttctcgccactctctcggggctgcctgtgctgggctgtgctcaacgtgccttcctcctatatatttgaggaagaggcactttattacagtaatttatcacccccataaatgtggctcctnggtaacgtggaataatttgggaagaaatatgttttaaaaattaaaaa

SEQ ID NO: 34250 - DNA, 467 bp, Homo sapiens
  misc_feature (1)...(467): n = a,t,c or g
gnnnnnagnggtnnttgnnttntggnatacnggagacnctnnnnnnnnnnnnnnnnnnnnnnnnnnnnnnnnnnnnnnnnnnnnnnnnnnnnnnnnnnnnnnnnnggcacgagatgtttggtagaaaatctaaaaatctctaagtttgatcccaagcctttagactacaaagtccacgatttcttcccctgccatatacatatattgctttgcctatacagagtggctggagtaatgagattcagcgaaggattcaggggaatagcttttagggtggccagaggtaactaggatagtagattgcccaagaaaggcaaagtaaagaagaattctttaaaaggagggtactgtcagttatttcaaatgaagcagagagatgggaaagtacgtggactgagaagagcaaacgagctggacttatccattaagtccagctgtgacttttaagagattgtttcaattgagta

SEQ ID NO: 34251 - DNA, 441 bp, Homo sapiens
  misc_feature (1)...(441): n = a,t,c or g
tttggantntcgaaaccctnnnnnnnnnnnnnnnnnnnnnnnnnnnnnnnnnnnnnnnnnnnnnnnnnnnnnnnnnnnnnnnnnggcacgagctgacttctttgtatctgaccacaccataccagttgcaggagaatgtccctgtaaaactgctttagagttacttttatacaaagaattattagatacaaatgctttcaaatgaagatcagactgaaagatggtagactatcctattttcctttctcgttacatttgtgtcttggtgattgggtgctgactgcaatggtgtggttcatatcttataattagcttctttcttttggtgtgagcaactaaaaatatggaagggggcattcagcagtttacctgatgtttttccacattttattgcagatatgattctaggatttgatattaacacaatttactcgagttgta

SEQ ID NO: 34252 - DNA, 469 bp, Homo sapiens
  misc_feature (1)...(469): n = a,t,c or g
gntnnagnggnnntgnnttntnnnatctggaagtcncgttaaccgtnnnnnnnnnnnnnnnnnnnnnnnnnnnnnnnnnnnnnnnnnnnnnnnnnnnnnnnnnnnnnnnnnggcacgnnnnnnnnnnnnnnnnnnnnnnnnnnnnnnnnnnnnnnnnnnnnnnnnnnnnnnnnnnnnnnnnnnnnnnnnnnnnnnnnnnnnnnnnnnnnnnnnnnnnnnnnnnnnnnnnnnnnnnnnnnnnnnnnnnnnnnnnnnnnnnnnnnnnnnnnnnnnnnnnnnnnnnnnnnnnnnnnnnnnattcttaattttaataacatgcaatttatacattttttcttttatgaagcatacatgtgtttgtgttgtaaataaaaaatgtttgcataacccaagatcacaacgattttctcctgaaagtataattttttatacattttggtctgtacttcattttgagttcatttcccaa

SEQ ID NO: 34253 - DNA, 439 bp, Homo sapiens
  misc_feature (1)...(439): n = a,t,c or g
ttgganttncgaanaccgttatgacnnnnnnnnnnnnnnnnnnnnnnnnnnnnnnnnnnnnnnnnnnnnnnnnnnnnnnnnnnggcacgannnnnnnnnnnnnnnnnnnnnnnnnnnnnnnnnnnnnnnnnnnnnnnnnnnnnnnnnnnnnnnnnnnnnnnnnnnnnnnnnnnnnnnnnnnnnnnnnnnnnnnnnnnnnnnnnnnnnnnnnnnnnnnnnnnnnnnnnnnnnnnnnnnnnnnnnnnnnnnnnnnnnnnnnnnnnnnnnnnnnnnnnnnnnnnnnnnnnnnnnnnnnnnnnnnnnnnnnnnnnnnnnnnnnnnnnnnnnnnnnnnnnnnnnnnnnnnnnnnnnnnnnnnnnnnnnnnacattctttataattgttaactcatttcatccttatgtcctcccatcagagngcatactgttatttagcccatt

SEQ ID NO: 34254 - DNA, 434 bp, Homo sapiens
  misc_feature (1)...(434): n = a,t,c or g
ttganatcgtttgncnnnnnnnnnnnnnnnnnnnnnnnnnnnnnnnnnnnnnnnnnnnnnnnnnnnnnnnnnnggcacgagggcagctacagcatggcacttaaagagttagagctggggtagatacagtggagaagaggagcaaaagaccctcccagtattctcattgttgagccgggtaagcaaaaaccactccattatggggaacctctgtggtccagtaggtgttttaagacctcctccacactgcagagtttccaaggctgggaggaggccaagccaccttttctaactataaaacaccaagtcttacctacttcactccttccccttagctgtcaccctctgtgggatcctgcagtttctgtctgccattgggcctaagaatcaggaaatggttatgtagagtcctgatagtctaaccccttagcaca

SEQ ID NO: 34255 - DNA, 465 bp, Homo sapiens
  misc_feature (1)...(465): n = a,t,c or g
gnntnggagnngttgntattgtngttntggagtntnnaaaccctnnnnnnnnnnnnnnnnnnnnnnnnnnnnnnnnnnnnnnnnnnnnnnnnnnnnnnnnnnnnnnnnnggcacgagaactggactcataaaatgctaacctaacatcaagcagaagaattaattacatgaaactgaactaatgcaaggcaaatgattttaaagttttcactttaaaacattactggttctnnnnnnnnnnnnnnnnnnnnnnnnnnnnnnnnnnnnnnnnnnnnnnnnnnnnnnnnnnnnnnnnnnnnnnnnnnnnnnnnnnnnnnnnnnnnnnnnnnnnnnnnnnnnnnnnnnnnnnnnnnnnnnnnnnnnnnnnnnnnnnnnnnnnnnnnnnnnnnnnnnnnnnnnnnnnnnnnnnnnnnnnnnnnnnnnnnnnnnnnnnnnnnnnnnnnnnnnnnnnnnnnnnnnnnnnag

SEQ ID NO: 34256 - DNA, 453 bp, Homo sapiens
  misc_feature (1)...(453): n = a,t,c or g
gnnnagggnnttgtnttntgnnaagnagnnctttcctgacnnnnnnnnnnnnnnnnnnnnnnnnnnnnnnnnnnnnnnnnnnnnnnnnnnnnnggcacgaggggatgttttgtggcatatatgtcttgccccccacagggtggactctagaaaatggtgtgtaatacctgttcgtggaagctcactggtaggtgaagatgctttctgagtgataacatatgagctattgcaaacatggttggggattccacatgccatttagcaataacttggggataatgtggtacgtggagatagaaatggaaagcttgttttcctggggcaatctccccatttgtcatcaggacagaaaattacccttgaaagagccagtcttccccatttgatgttgctcttctttggggcccatttccaggtcctctgtttttctgaatctgtgtgcctgcttgcaca

SEQ ID NO: 34257 - DNA, 463 bp, Homo sapiens
  misc_feature (1)...(463): n = a,t,c or g
gtgnnnnagtggnnnttgnnttgtngcnatactaganntctttnnnnnnnnnnnnnnnnnnnnnnnnnnnnnnnnnnnnnnnnnnnnnnnnnnnnnnnnnnnnnnnggcacgagaaagtatgtatgtgtgtgagtggaattttaagtatatccaactgtgtgtaactatgggcatgcatgtaggtgtggatgtgtgtggacgtgaacacggatgtggtaagaataaatgagggtgtgtgtgtgtgtgtgtgtgtgcacgcgcatgcatgagcatggatagggtagagtcaggtctgacctctggttcactgagttgtgaactccttaactttcagggagcaatcacatagacgaccactttattttacacgtgaggaaaaaggcatgtgtaacgagacctacacnctttgnnnnnnnnnnnnnnnnnnnnnnnnnnnnnnnnnnnnnnnnnnnnnnnnnnnnc

SEQ ID NO: 34258 - DNA, 437 bp, Homo sapiens
  misc_feature (1)...(437): n = a,t,c or g
aantttcgannaccgtnnnnnnnnnnnnnnnnnnnnnnnnnnnnnnnnnnnnnnnnnnnnnnnnnnnnnnnnnnnnnnnnnggcacgaggtggggccacctgtatgcaggcccctcctcggggccaacagggagtcagggccttctgcctgggtacccggtgccccagaggtggagccactgggatccctgtctccaggcttctcgcctgcccagctgtgggtcaccgtcactccactgcttgaagcagtgctcctccccaggcaccacggccaaagttcagtaaaccctgggctggttagcacgtggcactagggagtcatggggctcagaggctgcctctcggaagcctctgggaggcttcggaaggccagacagggcaggagacacacatctgcctgcacacccacctccgcgtcacgagcacatgaactagct

SEQ ID NO: 34259 - DNA, 429 bp, Homo sapiens
  misc_feature (1)...(429): n = a,t,c or g
atcgtttgccnnnnnnnnnnnnnnnnnnnnnnnnnnnnnnnnnnnnnnnnnnnnnnnnnnnnnnnnnnggcacgagaactgaatcactggtagaaattagctgagtgaagaaaggaatgctattccagcagaggaaatagctgcacaaagcccatgaagcaggtaagacagcctagtattttggaggaactttaagaagttcagtgtagttgtagtgatgtgggggaaaggggtaggaaataagactagaaaggtaagcaagggccagatcccaaagggccttgtatgcctttttggggagtgtgacttcatcctaagagtagtgagggagccagtgaagtgttttgtcccatttgtgctttggagtgcttactgtggggtgctgtgagaatggattgaagcaggagagacaggaggcagggataccgg

SEQ ID NO: 34260 - DNA, 470 bp, Homo sapiens
  misc_feature (1)...(470): n = a,t,c or g
gagnnnnatnaggnnnagggagttgnnttgtgcnaagaagtttnttngccatgacnnnnnnnnnnnnnnnnnnnnnnnnnnnnnnnnnnnnnnnnnnnnnnnnnnnnnggcacgaggcgtgggaatgtaaaatnnnnnnnnnnnnnnnnnnnnnnnnnnnnnnnnnnnnnnnnnnnnnnnnnnnnnnnnnnnnnnnnnnnnnnnnnnnnnnnnnnnnnnnnnnnnnnnnnntagtgaactgaaaacttacattcacctgaaaatttatattcaaacctatatgcagatgaatgctttattcaaaactgctaaaaagtggaacaattaagatgtccttcaataagtgaatggatagagactgtggcccatccatacatgggatcatattcaagggaatcacacgccaagaaaaaggaagaaactaccgataagatatgaatgaatctcaaaggnatgctaagtgagaaaag

SEQ ID NO: 34261 - DNA, 438 bp, Homo sapiens
  misc_feature (1)...(438): n = a,t,c or g
tttganattcgaatncnnnnnnnnnnnnnnnnnnnnnnnnnnnnnnnnnnnnnnnnnnnnnnnnnnnnnnnnnnnggcacgaggggctcggcgtggggagttatggtgccgcaagtgtctttttggaaagctgtgaggggcctggtattaggacacaggattggcagatgaagttctacctggagcgaagggctagagtccagtaaatcagctgccagtcctaagaggggtcctttagaaaaggcttttcttaggaaaccggccctgcctgcccctgggcccttcaggtttgagggatatgtcttgggtctccgctagccagggccacaaaacctccctgtggttaacagtgacatggcgggcccagtgggagacagtgttttccttgatgggacagacctgtccctgtgggtccctgcacatgtttgtacatacatg

SEQ ID NO: 34262 - DNA, 463 bp, Homo sapiens
  misc_feature (1)...(463): n = a,t,c or g
gttntagtggnattggngtnttggannangnataccctnnnnnnnnnnnnnnnnnnnnnnnnnnnnnnnnnnnnnnnnnnnnnnnnnnnnnnnnnnnntaattcggcacgagatgcactagcagacaataaagaaatgagcagggaagcagaaggaggcggggggtgagttattaggacaggaaagtcaagaaatggtcgaagtcagaggaaacaacacaacactctccaggacaaatggcaggaactgccctgaatatgtaagagattttgtgagctcattcattattctccattaaagagttcggctaattttcccctgtcctttcagtcacattaaaacttggggcttaagcgttgtgtaacgctctgcacagacttggtttaggccccatggagcttccataatgaaaaacaacatgtgcaattggatccacatgcgttccgcccacaggttgagctca

SEQ ID NO: 34263 - DNA, 444 bp, Homo sapiens
  misc_feature (1)...(444): n = a,t,c or g
tttgaantttggaanacccgtnnnnnnnnnnnnnnnnnnnnnnnnnnnnnnnnnnnnnnnnnnnnnnnnnnnnnnnnnnnnnnnnnggcacgagaaaatgaatgtttgcatagcaccttacatttttataaaaatataaatctcatatgattaatcttcctcatctttccccagatcatccctagcggcccaccagcataagcatatcctcatattgaagcccttgcactctgaagcctgacttacctaatgatttcctgagacaaaataagctctcttagctagtgactcctatagtgcactttccaaaaatttgaaccctacccttaggacaacctcttaatgaaacctttctcaaatgctccagcaaactttgaatttatttggtagccatttggatgttagaaaaaatgttaatttgtagaaactatattcacatccttc

SEQ ID NO: 34264 - DNA, 441 bp, Homo sapiens
  misc_feature (1)...(441): n = a,t,c or g
tttgaanttcganaaccgttatgacnnnnnnnnnnnnnnnnnnnnnnnnnnnnnnnnnnnnnnnnnnnnnnnnnnnnnnnnnnggcacgaggaaaaaggtgcctaaacgtcgccaggccgcccgagagctgtccattcagcgccgttctgccctcaatgtgaggctcttcctcagagacttctgctctgagttcctggagaactgttacaaccggctcatgggatcagtaaaggtgagaacctgtgaaggatatggagataatcaggaatggaatagacaggtgatgatgcagctgttggtgggtaagaagtggggaggagctcggggaggctgcccctggaatgtggactcgtaggtgggaaggatatacagttaggatgtccctgagagatagtgaaaatgccaggaacgagtgggctcctggcatgacaaaagaggct

SEQ ID NO: 34265 - DNA, 441 bp, Homo sapiens
  misc_feature (1)...(441): n = a,t,c or g
tttgaaatcgannnnnnnnnnnnnnnnnnnnnnnnnnnnnnnnnnnnnnnnnnnnnnnnnnnnnnnnnnnnnnnnnggcacgagagatggtattaggcttatccctatttttacagagaagacagcaaccaagactcacagaggtgaggtgactcgatctagagaggaacaaaactgagatttgaacctgggtatgccacaatctgacattcattttcttgttagtacatacctttacctggaacggttctcagatctactccaactcaacaaatttcagaaaaatgattgtccaaggtttagagacagacaggtcctcttggatcttttctctggcatcactttcctcttgtctaaatataatggacagggtaagcggaaatagtggtttacaactctttatgccacatggcccccctcaagttgcaagttaccatcggg

SEQ ID NO: 34266 - DNA, 439 bp, Homo sapiens
  misc_feature (1)...(439): n = a,t,c or g
tttgaantttgaanacccntnnnnnnnnnnnnnnnnnnnnnnnnnnnnnnnnnnnnnnnnnnnnnnnnnnnnnnnnnnnnnnnnnggcacgaggctcaagaccattcaataaatgactgtaatccagaattggctgtatgttttctgactgctgatacatgatttttctgctattcagtcctatattatttcaagttaagtattatttgtaactgcaaatatctataaagatcttcaggctatatagtttaatcagcttggttcactgagtttctgtttatttagcatttgcattttacaaattactgtgagaaaccttatcaaatcatattaatttcagacatgaaaatatatatggttttacgctaaataatgaaatttttatgtccatcctttggtaattttgtactttttttttttaatttnnanacggancccc

SEQ ID NO: 34267 - DNA, 467 bp, Homo sapiens
  misc_feature (1)...(467): n = a,t,c or g
ttgaaaccctttgactgatnacgaatttnntacgnctcnnnnnnnnnnnnnnnnnnnnnnnnnnnnnnnnnnggcacgaggtctgtatnnnnnnnnnnnnnnnnnnnnnnnnnnnnnnnnnnnnnnnnnnnnnnnnnnnnnnnnnnnnnnnnnnnnnnnnnnnnnnnnnnnnnnnnnnnnnnnnnnnnnnnnnnnnnnnnnnnnnnnnnnnnnnnnnnnnnnnnnnnnnnnnnnnnnnnnnnnnnnnnnnnnnnnnnnnnnnnnnnnnnnnnnnnnnnnnnnnnnnnnnnnnnnnnnnnnnnnnnnnnnnnnnnnnnnnnnnnnnnnnnnnnnnnnnnnnnnnnnnnnnnnnnnnnnnnnnnnnnnnnnnnnnnnnaagagactagggggtggggggaatagggagatgatggtcaaagggtcaaaatctcaattaggcaggagaaatatgggattttcttagatct

SEQ ID NO: 34268 - DNA, 451 bp, Homo sapiens
  misc_feature (1)...(451): n = a,t,c or g
ttttgaaacccttnnnnnnnnnnnnnnnnnnnnnnnnnnnnnnnnnnnnnnnnnnnnnnnnnnnnnnnnnnnnnnnnggcacgaggtaagtaagtaaataaagagctgccatttaaaaagtttctactctatgctgcattctttacctctatccccaggaatccccaccttaatccttctgactccatcttgaatgctcatcttcagagttgtgctgactctgagtaacagcacctctctgtgtgctggtgggaggtgaacttggctccgttatttaggctccttcccttgatttttgcatgagctaaataacttttaagnnnnnnnnnnnnnnnnnnnnnnnnnnnnnnnnnnnnnnnnnnnnnnnnnnnnnnnnnnnnnnnnnnnnnnnnnnnnnnnnnnnnnnnnnnnnnnnnnnnnnnnnnnnnnnnnnnnnnnnnnnnnnnnnnnn

SEQ ID NO: 34269 - DNA, 446 bp, Homo sapiens
  misc_feature (1)...(446): n = a,t,c or g
tttgaancccttnnnnnnnnnnnnnnnnnnnnnnnnnnnnnnnnnnnnnnnnnnnnnnnnnnnnnnnnnnnnnnnggcacgaggtgttcttactcttttcctcctcacaataaccctgtgaggtcggctttagccccatcttactgataaggaaactgaagcacagagaagataaggaactcaccctagctcatacggcttctaagaggcagggtaggattcagatgcacggctgtttgaccaagagcctggtgtccttctacacctctatgccatcaagcttatgaagtccagagacagaatgcttgtggagaagaggaactagactttggacactggatagaattcaagttnnnnnnnnnnnnnnnnnnnnnnnnnnnnnnnnnnnnnnnnnnnnnnnnnnnnnnnnnnnnnnnnnnnnnnnnnnnnnnnnnnnnnnnnnnnnc

SEQ ID NO: 34270 - DNA, 461 bp, Homo sapiens
  misc_feature (1)...(461): n = a,t,c or g
aaaccctttgaagtgancacgaattaatacgactattttngancccctggccctcgaggccaagaattcggcacgagagacataattgacaagtataaagaggcgatttcctattacagcaagtataagaatgcgggagtgattgagttggaagcgtgcatcaaggctgtacgtgtccttgcaattcagaaacggagcatggaagcatcagaatttcttcagaatgcagtttacattaaccttcgacagctttctgaggaagagaaaattcagcgctacagcatcctctccgagctctatgagctgatcggcttccatcgcaagtctgcgttcttcaagcgcgtggccgccatgcagtgcgtggccccaagcatcgcggagcctgggtggagggcctgctacaaactcctcctggaaacgctgcccggctacagtctgtcgctggatcccaaagaattcaa

SEQ ID NO: 34271 - DNA, 431 bp, Homo sapiens
  misc_feature (1)...(431): n = a,t,c or g
tttggncaccttnnnnnnnnnnnnnnnnnnnnnnnnnnnnnnnnnnnnnnnnnnnnnnnnnnnnnnnnnnnnnnnnnggcacgagggccttctgcctgcccctcttgatcctgttagtccctcccctttttccaactcttttacctgcttcctgacttatctacacgttcctcagtattttcttgctctttctagctttagctgtgatgtattgctgtggtagacgaggattacattcccttgcatagacaccccatcactttcgcacccttgttcatccattgtggttaatagaacaatttttattaaactagtttcagtgtttacatttttataggtataagcattcattgctaatctgaatggtagaataggattgaatttctgttcttagagtacagttgtttactttttcttaatgacataatggc

SEQ ID NO: 34272 - DNA, 424 bp, Homo sapiens
  misc_feature (1)...(424): n = a,t,c or g
acnacccgnnnnnnnnnnnnnnnnnnnnnnnnnnnnnnnnnnnnnnnnnnnnnnnnnnnnnnnnnnnnnnnnnnggcacgaggaggtggaacagtgggagactggggaaggggcctgttgcctcagctagtttcaaagactgcgaccctgttttgaattggcttgtttatgttgcgacggtggctggaagccaggccaacccagggtcagctttcccaaatcagtcgccaaggcccacgagaacagtagtttcagaactcccagaaataggttcaaagatgcctgtcctgtaccagtcctgcccagcctcgtttttccttaccaccctgactgcagtcttaactcctgcaaactaatttgatcgctctaagtttaaccgcgcccagaatttcacttttgcttgcttggcctttgctgagggtca

SEQ ID NO: 34273 - DNA, 341 bp, Homo sapiens
  misc_feature (1)...(341): n = a,t,c or g
caccnnnnnnnnnnnnnnnnnnnnnnnnnnnnnnnnnnnnnnnnnnnnnnnnnnnnnnnnnnnnnnnnnnnggcacgagcggcacgagtgaacttaggttggaagaaataagtgtggcctgactgcaatgtatgtgaactttaattcactccaagttccatatgagctacgaccctaagacaaatgttaaaatcattaattaggctgcatgaatggaattatgtgaccttactgagggcaggtacagagtcttactcatttttaagagcctggcacatgttgggcacttagcaaatatttgcgtannnnnnnnnnnggnnntnngncnannannctccctg

SEQ ID NO: 34274 - DNA, 404 bp, Homo sapiens
  misc_feature (1)...(404): n = a,t,c or g
nnnnnnnnnnnnnnnnnnnnnnnnnnnnnnnnnnnnnnnnnnnnnnnnnnnnnnnggcacgagaagaaatattaatgacagttagtctttagaggaagtctttccttctctaaactagcatactgacaagacatagttcagccacaagttacggtaggagatgcacttgggtcatacagcctcccaatgcacagatggtgacttttcagtaccatctgttcactgtttctgtacagccatttacaatttctccccctctatgagggctgaatagaaaaaaatagaaaagtagtcagacctagttttagagttcctggaaattagctattctttcccctcactttttcctaccatccaataaaggttatggctcttcattctaaatatttcagtcattagtttac

SEQ ID NO: 34275 - DNA, 381 bp, Homo sapiens
  misc_feature (1)...(381): n = a,t,c or g
ttngccccnttgncaccgnnnnnnnnnnnnnnnnnnnnnnnnnnnnnnnnnnnnnnnnnnnnnnnnnnnnnnnnnnnnnnnnnnggcacgagaactcttacaactcnnnnnnnnnnnnnnnnnnnnnnnnnnnnnnnnnnnnnnnnnnnnnnnnnnnnnnnnnnnnnnnnnnnnnnnnnnnnnnnntgtcttagtccattttgtgttgctgtaaaggaatacctgaggctgggtatattagtccatttttatactgctgataaagacatgcccaagactgagcaatctgcaaaataaagaggnnnnnnggacttnagnnncagtggcagnngaagccncctnntcntggnggnnngtnagnangantnnnncncggnttct

SEQ ID NO: 34276 - DNA, 434 bp, Homo sapiens
  misc_feature (1)...(434): n = a,t,c or g
ttnnccccctttgacnacccgnnnnnnnnnnnnnnnnnnnnnnnnnnnnnnnnnnnnnnnnnnnnnnnnnnnnnnnnnnnnnnnnnnggcacgaggtgttccctcatcagcaaagtgggaagcagctcctcaaaagcccttaggtcacagcttgcagcggaatcagctctcgttaaacggaagctgccatcgccatagctgttatcatcactggaaggacagagaggaggaagcaggtggcagacgggcttgcacccacagggataaagcatacctggcctcctgctgagaatccctgtccctgctgaggtggagagagaatgcgaagaggagcaagcttttcacagcaaggatgcaacttctcaagagtctgagctgctgcttcaattaaaggaaaaatctgcaatttanaaaaccaaaaggcatattgctcc

SEQ ID NO: 34277 - DNA, 424 bp, Homo sapiens
  misc_feature (1)...(424): n = a,t,c or g
accacccntnnnnnnnnnnnnnnnnnnnnnnnnnnnnnnnnnnnnnnnnnnnnnnnnnnnnnnnnnnnnnnnnnggcacgagcattttttttatccattctttagtcactggacatgtaggttattttcacnnnnnnnnnnnnnnnnnnnnnnnnnnnnnnnnnnnnnnnnnnnnnnnnnnnngtgaacatgcccattttaaaattggggttttttggttaaggggttgtaagagtttgttatctcttctatatgagttccttgaatatgattatatgtatatatgtatatgatttataaatttttttcccattgtgtgggtttttttcannnnnnnnnnnnnnnnnnnnnnnnnnnnnnnnnnnnnnnnnnnnnnnnnnnnnnnnnnnnnnnnnnnnnnnnnncctggaacccctgggctcag

SEQ ID NO: 34278 - DNA, 417 bp, Homo sapiens
  misc_feature (1)...(417): n = a,t,c or g
caccgnnnnnnnnnnnnnnnnnnnnnnnnnnnnnnnnnnnnnnnnnnnnnnnnnnnnnnnnnnnnnnnnnnggcacgagggannnnnnnnnnnnnnnnnnnnnnnnnnnnnnnnnnnnnnnnnnnnnnnnnnnnnnnnnnnnnnnnnnnnnnnnnnnnnnnnnnnnnnnnnnnnnnnnnnnnnnnnnnnnnnnnnnnnnnnnnnnnnnnnnnnnnnnnnnnnnnnnnnnnnnnnnnnnnnnnnnnnnnnnnnnnnnnnnntatgcatatacagggagaatgccctgtgaactgaaggcagccatctacaggccagcctcacagccctagaaactcatatatgagaagcagggaatgaagatgaggtggaaaggaaaggttgaagtcacactgtgaagggcctgaggaattagggcga

SEQ ID NO: 34279 - DNA, 432 bp, Homo sapiens
  misc_feature (1)...(432): n = a,t,c or g
ttnccccccnttgaacacccgnnnnnnnnnnnnnnnnnnnnnnnnnnnnnnnnnnnnnnnnnnnnnnnnnnnnnnnnnnnnnnnnnnggcacgagtctttctctcnnnnnnnnnnnnnnnnnnnnnnnnnnnnnnnnnnnnnnnnnnnnnnnnnnnnnnnnnnnnnnnttccttcctttatagcaaaacaaaaaagacaaacacagtcatacatgcctcaaagtttagtgttacaacactgctaatcccatccataaactgaggctggaggaaaggacctttcctgcttctaagcctcagcctaactggaaacagatttttatctcatctggccaggcctctttccccatgcaaggatccttcctaaagaggaaaacaaaaccaaaacaaataccccaaacaagagttttccacaagtagtttaataattcc

SEQ ID NO: 34280 - DNA, 422 bp, Homo sapiens
  misc_feature (1)...(422): n = a,t,c or g
acctttnnnnnnnnnnnnnnnnnnnnnnnnnnnnnnnnnnnnnnnnnnnnnnnnnnnnnnnnnnnnnnnnnggcacgaggctgacaattttgccaatgctgctgtatttctgggaaagatgtcacttcatgttgggttataatcccacagaatttactttaaatgtcacgtaaaaacaaattcacctaagatagtcttgcttattttgttgcgaaggccagtggaatataaaagtcaatggcattaatgaggagcacattctttgctgagggaaataacagtttttccaggccctagggtttatttagttcaacattgaagattgaaaagactaatgagaagataacatgacaatataaaaagacagaaactcaaaaagtatattcactanaagacagtggagccaaagaaaagcaagttga

SEQ ID NO: 34281 - DNA, 424 bp, Homo sapiens
  misc_feature (1)...(424): n = a,t,c or g
cccttggnncaccgtnnnnnnnnnnnnnnnnnnnnnnnnnnnnnnnnnnnnnnnnnnnnnnnnnnnnnnnnnnnnnnnnnggcacgagaattctcaaggctctcaaatctgtagttccaatctgatgctgtttccagagcttcagattcacatttttagttgccttctggatgtcaccttgaaatcattcaaaacttcaaattcagtatttgcaaacaaaactgatcatcttctcttcttcctccaagcttacccattttttctttttatcaatatgnnnnnnnnnnnnnnnnnnnnnnnnnnnnnnnnnnnnnnnnnnnnnnnnnnnnnnnnnnnnnnnnnnnnnnnnnnnnnnnnnnnnnnnnnnnnnnnnnnnnnnnnnnnnnnnnnnnnnnnnnnnnnnnngngntgnnattctgngccc

SEQ ID NO: 34282 - DNA, 419 bp, Homo sapiens
  misc_feature (1)...(419): n = a,t,c or g
tnnnnnnnnnnnnnnnnnnnnnnnnnnnnnnnnnnnnnnnnnnnnnnnnnnnnnnnnnnnnnnnnnnggcacgaggaacaaactagataaatttggaaagattcattcatgcattcaaaaagtatttaatgagtgcctaaatgtgctagggtagggctgggtattgaggattccgtgatagacaaagcaaacatggtccccctccttggcagagaggatgtgctccaggaaggtaggtgtgaatattaacaaatgaacaaaatgtaaatgtgatcagccctctgaaggaaataaaatgctatgagagaacaaaataggagacttgaactatcataaatttaaccaatttcctttagaaacnnnnnnnnttganaaacnaagtttgagtttaaaatctgaaggatgactaggaatgacct

SEQ ID NO: 34283 - DNA, 425 bp, Homo sapiens
  misc_feature (1)...(425): n = a,t,c or g
acacctttnnnnnnnnnnnnnnnnnnnnnnnnnnnnnnnnnnnnnnnnnnnnnnnnnnnnnnnnnnnnnnnnnggcacgagcaggcaatgaatgaaagtttggctaatttttccactgttccttggagctgggatgaagttactttctttggcttggggaaggaagaattcctgtgtcctgagcctcagaaggtctacctggcctggggctgtggcccaaaccatagatggagtcagagagctgaacttttctgctgaggttggcttccgttccccagctcgctggccgggttcctgccctgttcttcccttctgtagagggattgacattcaaggacatttcgttaagctgaggctcacactgaggagaaaaataaatgtgtgggtggccccagaccttccctttccatattttcctttccaaa

SEQ ID NO: 34284 - DNA, 424 bp, Homo sapiens
  misc_feature (1)...(424): n = a,t,c or g
acaccntnnnnnnnnnnnnnnnnnnnnnnnnnnnnnnnnnnnnnnnnnnnnnnnnnnnnnnnnnnnnnnnnnggcacgaggcgacatgcgctccctctggaaggccaatcgggcggatctgcttatctggctggtgaccttcacggccaccatcttgctgaacctggaccttggcttggaggttgcggtcatcttctccctgctgctcgtggaggtccggacacagatgtgagtccgccatgttggtcccctcattccagctagtgagagagtaccacagggctccccgcagctttccccacatctctggggacttcaggctccttcggacccctctgttatcccctttttctgccccctcttcgtgcattctctctctccttcacaggccccactactctgncctggggcaggtgccagacac

SEQ ID NO: 34285 - DNA, 413 bp, Homo sapiens
  misc_feature (1)...(413): n = a,t,c or g
anaccnnnnnnnnnnnnnnnnnnnnnnnnnnnnnnnnnnnnnnnnnnnnnnnnnnnnnnnnnnnnnnnnnnnnggcacgaggagactttctaaacatgcttaatctctgcatactattttaataataatgtaagtttttgactttttgctattataatgggcagtgaatatatttgtgctgaaatctgtgtggaatttttttgaacatcattttcttactgtatattattagaggtgaaatgtttgggtcaggagttacaaacatatatatttttaaaaaactactctaaagatccttgatacattttgtcaaattgatttcttgtaaaaatgggaccagtttgcacctctgttgnggnatgagagagtgcccatctncttggggacctaccccttganggntncngcactcc

SEQ ID NO: 34286 - DNA, 426 bp, Homo sapiens
  misc_feature (1)...(426): n = a,t,c or g
ttgaanacttngatgacnnnnnnnnnnnnnnnnnnnnnnnnnnnnnnnnnnnnnnnnnnnnnnnnnnnnnnnnnnggcacgagaaagaatataaaattgatgagaaaaactttgtggtggttatggggaccaaacccaaagcagtgtccacaccagcaccagctacaactcagcagtcagctcctgccagcactacagcagttacttcctccaccaccacaactgtggctcaggctccaacccctgtccctgccttggcccccacttccacacctgcatccatcactccagcatcagcgacagcatcttctgaacctgcacctgctagtgcagctaaacaagagaagcctgcagaaaagccagcagagacaccagtggctactagcccaacagcaactgacagtacatcgggtgattcttctcggt

SEQ ID NO: 34287 - DNA, 426 bp, Homo sapiens
  misc_feature (1)...(426): n = a,t,c or g
anantttggatacccgttatgacatgattacgaatttaatacnnnnnnnnnnnnnnnnnnnnnnnnnnnnnnnnnnnnnnnnnggcacgagaaatggttaactcctacactaacatctcaacttggagacatattctatactctcatagtaccttggacactcatcacattttaccactgtacttaatgccgttcttctctgctacactagaagaattatgttttcattatctactccatcataaaaaatgaccaaatagtggcttaaaacaatattgattttattaactctcatgattctgcagggtgactgggctaggctgggtgattcttctcctctaaatgatgtttggagcttcagtcatctggggactggaccagctggtgtgtctaagacagcttatccataaagctgttagttgatgc

SEQ ID NO: 34288 - DNA, 423 bp, Homo sapiens
  misc_feature (1)...(423): n = a,t,c or g
tgganacttnnnnnnnnnnnnnnnnnnnnnnnnnnnnnnnnnnnnnnnnnnnnnnnnnnnnnnnnnnnnnnnnnnggcacgagaactggaagaactttaaaaataagaatcacaaagaaaagttcattcaccttgtgtatttgggtggttctgggagaggaaaaaagaggaggcactctgctgcaggtacacacccagggcgtctgtctgtctggttagccatcccaaatcctgggaaagtccagctctgacttcctgccctccaagagatccgaatggaattccctaggttcaggggctttagtggcagccactttggcccttagccatcctttcttatcactcttgttttgaaattgctttgagttttatanccactccctggggtttnctaagaccctgnnactgagcntcantangggg

SEQ ID NO: 34289 - DNA, 423 bp, Homo sapiens
  misc_feature (1)...(423): n = a,t,c or g
nnttggananccgttatgacatgattacgaatttaatacnnnnnnnnnnnnnnnnnnnnnnnnnnnnnnnnnnnnnnnnnggcacgagactaagcagagggatatttaaataaatgctaagaagagaggcaggtgaagctccaggggagccatccttcccaaatgttcacttaaattttcagcggtttgggtatgccagatggtgaacctaggtagctatgtctttaaactcttgaggactcttgaggatatcagatgcctgaaaatcttgccttcttagctgtctgaatagatgtaacactagggacaggagctgctcattatcccccactatccattttcttctgtagtaatagaagtttcagttgagccttggccactctgccactgggtgggccctgggactgagttccagctgagggg

SEQ ID NO: 34290 - DNA, 423 bp, Homo sapiens
  misc_feature (1)...(423): n = a,t,c or g
ttgganntttggataccgttnnnnnnnnnnnnnnnnnnnnnnnnnnnnnnnnnnnnnnnnnnnnnnnnnnnnnnnnnnnnnnnggcacgaggaaatattaaattcaccccaagatgtgaattaattttggttcttacatggtaaccctaagaggggagaaaaagggtataaaagtgacagaaggatgtatagtagaggaagcacgaccatgcatacattacagtttgccagctgtcctggttatcataccttttcaaaaaccttttttctttgagattccagacacttatgatcggangatcctattgnntctcttaatactcangntctnnttnttnancccatnntaatanctgtncatcnccnttcnttatgttncctttcttatttgggatatggatgctttatntgtaaaatttaaaa

SEQ ID NO: 34291 - DNA, 412 bp, Homo sapiens
  misc_feature (1)...(412): n = a,t,c or g
acttnttgacnnnnnnnnnnnnnnnnnnnnnnnnnnnnnnnnnnnnnnnnnnnnnnnnnnnnnnnnnnggcacgaggaaacatccctcagcccacaggcacgatctgttcctcctgggaagatgcagaggctcatgatgctcctcgccacatcgggcgcctgcctgggcctgctggcagtggcagcagtggcagcagcaggtgctaaccctgcccaacgggacacccacagcctgctgcccacccaccggcgccaaaagagagattggatttggaaccagatgcacattgatgaagagaaaaacacctcacttccccatcatgtaggcaagatcaagtcaagcgtgagtcgcaagaatgccaagtacctgctcaaaggagaatatgtgggcaaggtcttccgggtcgatgca

SEQ ID NO: 34292 - DNA, 416 bp, Homo sapiens
  misc_feature (1)...(416): n = a,t,c or g
tttgataccgttatgacnnnnnnnnnnnnnnnnnnnnnnnnnnnnnnnnnnnnnnnnnnnnnnnnnnnnnnnnnnggcacgaggggctggccatatggagactgaacaaagtcagtgaagcttggctcctgtgcaaatcagagatgggctcaacatgtattccatgtagctgatcttgcatgtccacggtggtttctgatgcctcccccgtaagggcagcttcatccactcctgtgagaaatgcagctcacagatgtggaggaccatctggagaagggatgtgagtgaaggtgggtgactgacagtgggtggagctggagctagggactcaggcggcagacctactgggttagaattacgactgtgccacttgctaactgagtggnttnggcctanccactatctttctgaggctc

SEQ ID NO: 34293 - DNA, 419 bp, Homo sapiens
  misc_feature (1)...(419): n = a,t,c or g
cnnnnnnnnnnnnnnnnnnnnnnnnnnnnnnnnnnnnnnnnnnnnnnnnnnnnnnnnnnnnnnnnnnnnnnaaagatcttttgttagattaattcttggatgctttatattcctgangctattataaatgttatcttttaaaatattacacctttgctggtngctgacaaatataaataaaacatnnnnnnnnnnnnnnnnnnnnnnnnnnnnnnnnnnnnnnnnnnnnnnnnnnnnnnnnnnnnnnnnnnnnnnnnnnnnnnnnnnnnnnnnnnnnnnnnnnnnnnnnnnnnnnnnnnnnnnnnnnnnnnnnnnnnnnnnnnnnnnnnnnnnnnnnnnnnnnnnnnnnnnnnnnnnnnnnnnnnnnnnnnnnnnnnnnnnnnnnnnnnnnnnnnnnnnnnnnnnnnnnnnnnnnnncc

SEQ ID NO: 34294 - DNA, 422 bp, Homo sapiens
  misc_feature (1)...(422): n = a,t,c or g
nttttgaanacccgtnnnnnnnnnnnnnnnnnnnnnnnnnnnnnnnnnnnnnnnnnnnnnnnnnnnnnnnnnnnnnnnnnggcacgaggtctgcacagctcccaatgaggagggctgccccctcttttcgtacaggctctaactctccttcccaaggccactgcagccttcctctgcttgatttccatgtagcctccagttggttgaaattcagcatttgctggggagctcagggctatgccctctgctctcccactcagcagtttattgagggcttggcagtgtgcacagaactctcactggcctgtcaggagcccactcaacagcagagcccagatggcactgtgtctttctaaggtccttgctgaccactggaagttatgagaaggggaaaattattcagcccaagcggcaagcgtttg

SEQ ID NO: 34295 - DNA, 496 bp, Homo sapiens
  misc_feature (1)...(496): n = a,t,c or g
atntnnnnnnnannnnnnnngnncnnnnctnancnngnannannannnncnncnnggancgngnntnnntnccccttggaaacttgatgacctgatacgaannnnnnnnnnnnnnnnnnnnnnnnnnnnnnnnnnnnnnnnnnnnnnnggcacgagtgtttattgttttaaatgggagtttattctaagatcagtaataatgctattacaatgtgttagcttgaatcatatgaaattgccatgttgagactgagaaaaaatcaaaatcagcagtcttatatattatatagttaaaccactctcaactcttactggtttcttttggtatttacctttatacttatttcatttttaatgtttatactgctatttcttagctcttcacttttggatattctctgtggacttctattttggaagttgaagacttaactgtctcacataactatccttccatttcccactcatacttgacagttaggncggcattcaggaa

SEQ ID NO: 34296 - DNA, 418 bp, Homo sapiens
  misc_feature (1)...(418): n = a,t,c or g
ttgaanaccgttatgacnnnnnnnnnnnnnnnnnnnnnnnnnnnnnnnnnnnnnnnnnnnnnnnnnnnnnnnnnnggcacgagaggaagttgagggaggctgaggctgaaggaggctgaaggactctgctctttgggtagaacttcctgtttctcatgtttcctctctgtagaccacagtgcccagccctgccccaaagcagagccagagcttgtgtccatttcttgggtgtgtagtgtgcctttggcttctctttagttgtgccttggaatggcacacggggctgggtgggattctggaggcgcttagtgggtggcttctcagagctcaggccacagcccttgtgagtgggaagagtctgtgtgagtgggaggagcctgtgtgagtgggaggagccttgcgagagggaggagccttt

SEQ ID NO: 34297 - DNA, 431 bp, Homo sapiens
  misc_feature (1)...(431): n = a,t,c or g
gnannttttggataaccgtnnnnnnnnnnnnnnnnnnnnnnnnnnnnnnnnnnnnnnnnnnnnnnnnnnnnnnnnnnnnnnnnnggcacgaggataaaaagacctaaccatgtgctctatctacatgagatgcatttaaaatataaagaccaaacccatataaatacaggttgaaagtggataaaaagacatacatagtaagcataagaagtagctatattaatatcagagtagaatttaatatcactgtattagtatgcaaagaggcattgcctattaataggatatcaaatcaacaggaagatataacagtcataaatgtgtatactacaaaatacatgaagcaaaaattgacagaatataagggagaaagaaacaatttccatatgagaatttccattctcagagatggatattttaacagacctctt

SEQ ID NO: 34298 - DNA, 495 bp, Homo sapiens
  misc_feature (1)...(495): n = a,t,c or g
gnnnnnnnnnnnnnnnnnnnnnannnnnnnnannnnnnnnnngnnnaggnnggnnnntggnntcnccctttggaaacntgtatgactgattacgaannnnnnnnnnnnnnnnnnnnnnnnnnnnnnnnnnnnnnnnnnnnnnnggcacgaggacagggccaagacttaaagccagtttgtctgagtgtgagtctaattctctttgctcatatcctaacaccagagagcctcacaagttcttgaaaaatgacaggtgaagaaatcaagcataatacctattagctaacctaacacaaactcccagtgtagaaaatattgttaacatttagtaaaaaattttgttttgacttaagggattctgacatacacatatgcatatatatttatatctatatcatatatataggacatatgcttctatgttattccatatatgtacatatatatgaatgttcatgtgtgtacgctgggctgccataacagaaaaccatagac

SEQ ID NO: 34299 - DNA, 425 bp, Homo sapiens
  misc_feature (1)...(425): n = a,t,c or g
nttttgaanaccgttatgacatgattacgaatttaatacnnnnnnnnnnnnnnnnnnnnnnnnnnnnnnnnnnnnnnnnnggcacgagagaaaggaccatctcttccaaatatgaggaatctggatcaagtgcagtggctggtcnnnnnnnnnnnnnnnnnnnnnnnnnnnnnnnnnnnnnnnnnnnnnnnnnnnnnnnnnnnnnnnnnnnnnnnnnnnnnnnnnnnnnnnnnnnnnnnnncccaaatttcagaaatctgtgctccggtcggaattgatgcttcnnnnnnnnnnnnnnnnnnnnnnnnnnnnnnnnnnnnnnnnnnnnnnnnnnnnnnnnnnnnnnnnnnnnnnnnnnnnnnnnnnnnnnnnnnnnnnnnnnnnnnnnnnnnnnnnnnnnnnnnnacacgcctatgatcccagct

SEQ ID NO: 34300 - DNA, 416 bp, Homo sapiens
  misc_feature (1)...(416): n = a,t,c or g
tcttgacnnnnnnnnnnnnnnnnnnnnnnnnnnnnnnnnnnnnnnnnnnnnnnnnnnnnnnnnnnggcacgagtgttgttattgttggaccagatattaattatactatcacctggcctggaatccaaaaggttcagaaaaaaggaggggtcggacannnnnnnnnnnnnnnnnnnnnnnnnnnnnnnnnnnnnnnnnnnnnnnnnnnnnnnnnnnnnnnnnnnnnnnnnnnnnnnnnnnnnnnnnnnnnnnnnnnnnnnnnnnnnnnnnnnnnnnnnnnnnnnnnnnnnnnnnnnnnnnnnnnnnnnnnnnnnnnnnnnnnnnnnnnnnnnnnnnnnnnnnnnnnnnnnnnnnnnnnnnnngaggtgcaggctgctgtgagctgagattgcaccattgcatagcagtctgggtaa

SEQ ID NO: 34301 - DNA, 423 bp, Homo sapiens
  misc_feature (1)...(423): n = a,t,c or g
anacctctatgacnnnnnnnnnnnnnnnnnnnnnnnnnnnnnnnnnnnnnnnnnnnnnnnnnnnnnnnnnnggcacgaggtagacagattttctgtttcttttgtgtcaattttggtaatttttgtctttcagagaatttgttttgttgttgtttattggcataaagttcatagtagtcccttatgttagttttctgttgctggataacaaaataccataaacttaaaacaacatttacttactagctcagcaatctaggtgtactttggctgcactcctttttgaaagctctgaaagagtctgcttctgaactgattcaagttgttggcccagttctgttccatgtgattgtaggcctgaagtctccaattccctgctggctgttggctggggtcttctctctgtaactagagacagctctc

SEQ ID NO: 34302 - DNA, 433 bp, Homo sapiens
  misc_feature (1)...(433): n = a,t,c or g
tttggannatttgaataccgtnnnnnnnnnnnnnnnnnnnnnnnnnnnnnnnnnnnnnnnnnnnnnnnnnnnnnnnnnnnnnnnnnggcacgagcccctctgccttccaggggccctgcaatgcgctttcaggcccagcctttcctcacaggccaggctttgttctccatctcggcctgtctgctgcccaccttccctttctctcccctcctgtggctttcaggaacatctctggtttggctcctgtgacctttgacctgctgatgccccttccttggctgcatttcctggagacccacagtatgatcccccctactgctatccagggacacagtgctgggtccctggagagggaatgctcctgctgtctcagaccctctgcctaggggagcaggtgctgctgggggcctggctggtatgggggcccagccgg

SEQ ID NO: 34303 - DNA, 424 bp, Homo sapiens
  misc_feature (1)...(424): n = a,t,c or g
ttgaanaccgtnnnnnnnnnnnnnnnnnnnnnnnnnnnnnnnnnnnnnnnnnnnnnnnnnnnnnnnnnnnnnnnnnggcacgagcaaggcttgtgtccaccgtgggtggctgtgacattcagtagaggtgggtgggtaggcccttgcagagagccacttgagtggtattccacaaagcccaaaggggcatactgcttgctgagctgtaccccagtgggtcagctgggcacagcatcgaaccaaagacaattactnnnnnnnnnnnnnnnnnnnnnnnnnnnnnnnnnnnnnnnnnnnnnnnnnnnnnnnnnnnnnnnnnnnnnnnnntancatcgaactnttggccccaagngactcctntgcctnagccccccaagtagcagngactccaggtatgcncgtccacacatggctaattttaaaa

SEQ ID NO: 34304 - DNA, 440 bp, Homo sapiens
  misc_feature (1)...(440): n = a,t,c or g
ananccgnnnnnnnnnnnnnnnnnnnnnnnnnnnnnnnnnnnnnnnnnnnnnnnnnnnnnnnnnnnnnnnnnnggcacgaggaaaacttggctattgatagagttaaattgttaaaatcagttgaaaatcttggagtgagctatgtgaaaggaactgaacaataccagagtaagttggagagtgagcttcggaagctcaagttttcctacagagaaaacttagaagatgaatatgaaccacgaagaagagatcatatttctcattttattttgcggcttgcttattgccagtctgaagaacttagacgctggttcattcaacaagaaatggatctccttcgatttagatttagtattttacccaaggataaaattcaggatttcttaaaggatagccaattgcagtttgaggctataagtgatgaagagaagactcttcg

SEQ ID NO: 34305 - DNA, 436 bp, Homo sapiens
  misc_feature (1)...(436): n = a,t,c or g
ctnnnnnnnnnnnnnnnnnnnnnnnnnnnnnnnnnnnnnnnnnnnnnnnnnnnnnnnnnnnnnnnnnnnggcacgagaacaacaacaacaaaaatcaggattcagttttcctctctgttttgggttgaactgtgactcccaaaaggatatattgaagtgttcacccctagaacttgtgaatgtgaacgtatttggatagttcacattcctataggatctttgcagatgacttaggatctttgccgatggagtcaagttcagataaggtcatgctggattgggctgggcccccacccaatgactcctgtcctcataagaagagggggaatctggacacagggaggaaggcccggtgctgacacaggcgggactggagtgatgggtgcacaagccaaggactgctggccactcacgaatgaaggagaaaggcaaggag

SEQ ID NO: 34306 - DNA, 442 bp, Homo sapiens
  misc_feature (1)...(442): n = a,t,c or g
anaatttgaataccgtnnnnnnnnnnnnnnnnnnnnnnnnnnnnnnnnnnnnnnnnnnnnnnnnnnnnnnnnnnnnnnnnnggcacgagctttgtagaacattttcatgtaaggctgctttaaatggagagcacaggtcattatctatttgatagatctgttcgggagaataaaatagctataggattctgcatcaataaagacatttgaaatgaatgtggaaatccctttgttgcttttattagattttgtcgcaatatttttatggaaagataggtctaaataataatataaagcaacagaaaaacatgattcaagctattaatatttaataccatagttttcaaggctgcctcactatacaatgaaagatttgtcactaaacaattgcatttttaaggtctgcagaaagaataggtggaatgagtaacattctttttcc

SEQ ID NO: 34307 - DNA, 445 bp, Homo sapiens
  misc_feature (1)...(445): n = a,t,c or g
ttgganatttgaataccgtnnnnnnnnnnnnnnnnnnnnnnnnnnnnnnnnnnnnnnnnnnnnnnnnnnnnnnnnnnnnnnnnnggcacgaggtctccattatatagttgagaaaattaaggcccaaataagccatatgaatggttcataatagcagaactaggaaggaatagatccagagctcccagtgtagtctctgaaagtatgaaattattgtgggtgcttagtttccttagctgaaatgaatgtcatggtgtcacatagactctgggcttttaggccttgagatttatatgagatatgtttttaagtgaaaaagtagtaacattaaagaagaaaaaattattagatttcttttgaatgttgctacttgggaaggaataggccaacagaaatgtaatgaaaaggtagatacaatttctataagaactaaatgaaattctta

SEQ ID NO: 34308 - DNA, 380 bp, Homo sapiens
  misc_feature (1)...(380): n = a,t,c or g
ggccctcgaggccaagaattcggcacgagcaccatcagggaaacgcattggccaagcacctgtttacctgtgttggatgctcacagggtgattaccccacctgagccctgctccctaagggtgcagtctgactcagacagctccaaggcacatgtactttcagacaaaccagatgtctgctgagcttctaggaaccaagcctctttgagacactttcacaaccactgcaattatatgaagaaatactgtattctaatccccatttagagggaaagaaagtgttatgggttgaattgtttccttcaccccccaaatgtaccnnnnnnnnnnnnnnnnnnnnnnnnnnnnnnnnnnnnnnnnnnnnnnnnnnnnnnnnatgg

SEQ ID NO: 34309 - DNA, 438 bp, Homo sapiens
  misc_feature (1)...(438): n = a,t,c or g
anacttnnnnnnnnnnnnnnnnnnnnnnnnnnnnnnnnnnnnnnnnnnnnnnnnnnnnnnnnnnnnnnnnnnggcacgagagacttgaatcattcttcttgtatggcatagttagttgtcctttcctatgcaaggaatacaaacatggctttcggtctgagagcctgttgcttgctgagatgttcccagctgttcttcagtgctgagcattttttgggggtaggggttttctattcccaagcaccatcactgcccctctctgaggtgtaacagctgtgaaagtgatgtccagaaggacagggagggaaagagagattagtatccaagcccacagagaataatttataatgaagctttgaagttaatagctcttgttttgttttctttgtttaaactggtagactggtactgaaggcagatctaaagaatgttttgaat

SEQ ID NO: 34310 - DNA, 435 bp, Homo sapiens
  misc_feature (1)...(435): n = a,t,c or g
anacntnnnnnnnnnnnnnnnnnnnnnnnnnnnnnnnnnnnnnnnnnnnnnnnnnnnnnnnnnnnnnnnnnggcacgagactttttaatggaattannnnnnnnnnnnnnnnnnnnnnnnnnnnnnnnnnnnnnnnnnnnnnnnnnnnnnnnnnnnnnnnnnnnnnnnnnnnnnnnnnnnnnnnnnnnnnnnnnnnnnnnnnnnnnnnnnnnnnnnnnnnnnnnnnnnnnnnnnnnnnnnnnnnnnnnnnnnnnnnntgtttttgtcacaattgcttttgacatcttcgtcatgaaatctttgacagggtnnnnnnnnnnnnnnnnnnnnnnnnnnnnnnnnnnnnnnnnnnnnnnnnnnnnnnnnnnnnnnnnnnnnnnnnnnnnnnnnnnnnnnnnnnnnnnnnnnnnnnnnnnnnnnnnnnngagcagtttc

SEQ ID NO: 34311 - DNA, 443 bp, Homo sapiens
  misc_feature (1)...(443): n = a,t,c or g
ganaatttgaatacccgtnnnnnnnnnnnnnnnnnnnnnnnnnnnnnnnnnnnnnnnnnnnnnnnnnnnnnnnnnnnnnnnnnggcacgagccnnnnnnnnnnnnnnnnnnnnnnnnnnnnnnnnnnnnnnnnnnnnnnnnnnnnnnnnnnnnnnnnnnnnnnnnnnnnntctcagtcctccatcttttaatgttaccctctccatgaggcacagccagagtgggaagccccttatgggtcccaccttctcatctcggattctgtcctgcctgtgggaggaacagttacacccacagccccagagaaaaaggggcagggaaatagcaagagcatcccagtgtcctcaccaggctcagctgccacccgagatctgctctggccaagccctgggtggcggccacatgggagaagaggaagagggcaggctccaggccaaatgggg

SEQ ID NO: 34312 - DNA, 438 bp, Homo sapiens
  misc_feature (1)...(438): n = a,t,c or g
nnttgnannnnnnnnnnnnnnnnnnnnnnnnnnnnnnnnnnnnnnnnnnnnnnnnnnnnnnnnnnnnnnnnnnnnnnnnggcacgnnnnnnnnnnnnnnnnnnnnnnnnnnnnnnnnnnnnnnnnnnnnnnnnngtataagtgcactggctttttttagtttataannnnnnnnnnnnnnnnnnnnnnnnnnnnnnnnnnnnnnnnnnnnnnnnnnnnnnnnnnnnnnnnnnnnnnnnnnnnaacaaaaccactagcgggaagtcaaagtcatatgatgtcaaaataactgagtcaaaaattcttactttagcatatatatttcttacttccatgccttatttaggctgttgtatccagtcctagccccacacctgtccttcaggactccctctgctcagtactcacccactttgggaagcttcccttggcctctgcg

SEQ ID NO: 34313 - DNA, 440 bp, Homo sapiens
  misc_feature (1)...(440): n = a,t,c or g
tttgnanaccttgnnnnnnnnnnnnnnnnnnnnnnnnnnnnnnnnnnnnnnnnnnnnnnnnnnnnnnnnnnnnnnnggcacgagaaagattatatatttgtgagtaacatcttttaagttggtatatcctaaagttgaaatactctgctgtgtgttactttctcattatgtttgggctcttttcttcactgtcaatatttggattacctgaagatgatatcccaattctctgtaaacacattttagatgtttctttaagagataagaattaggtcaaactttttaacatctaaataacaatgactttgattctcaagagttaggggaggataaattgttataagcttggacaaaattctaattggatttgaaaagcagaagaaacttactattgcttggattatggagccctgtttgggagtctaacacagaacanagaa

SEQ ID NO: 34314 - DNA, 439 bp, Homo sapiens
  misc_feature (1)...(439): n = a,t,c or g
ttgganacttggnnnnnnnnnnnnnnnnnnnnnnnnnnnnnnnnnnnnnnnnnnnnnnnnnnnnnnnnnnnnnnnnggcacgagacctcagtgggagcactcatgctgttcttggggaaccttcataggactgtgccctgccttgagctggaagtctctgcagtagacatccttccatattttgttcttcatcttctgaacgccttcaaggtttttcaattggaaaaattctatctgcataatcaacaatgtgctaaggaactctacttttagatcttcttagaattcatagttctttgtacatgaggattaaagcattcttctgtattctccacttgtgaaatagatttgaggttggtggagtcaggattggaaacacatacaggtgggcaggggcatgaaagggactgggacccagatcagagctggaggctgaact

SEQ ID NO: 34315 - DNA, 439 bp, Homo sapiens
  misc_feature (1)...(439): n = a,t,c or g
ttgnanacctctatgacnnnnnnnnnnnnnnnnnnnnnnnnnnnnnnnnnnnnnnnnnnnnnnnnnnnnnnnnnnggcacgagggctcggcgtggtaaaagaagcattgcaggtctgaaggcagaaaagaaaatgggatgatgtgaaacccagcaccccacacctgactccccaccaagtgcaccatgaagcaaaggcaatttctggccatcacatgacctccctttataaagacagctttagagtttggctcaggctccctacccagaatgccaagaggctgctcttatttcccatggtacctccttacgggacacttgagtgggaatcactggtactaactaaatgactactggaaatgtacccaggacatggcaagctaagctctatacccctctacacaatgaagagttacacatttgctcatccttagacatta

SEQ ID NO: 34316 - DNA, 435 bp, Homo sapiens
  misc_feature (1)...(435): n = a,t,c or g
nnttgaanaccngnnnnnnnnnnnnnnnnnnnnnnnnnnnnnnnnnnnnnnnnnnnnnnnnnnnnnnnnnnnnnnnnnnggcacgagcctgggtggtgactaatgtgcccccatgcagggtgttggtggcaggggggttccaagggggacgggaactccctgtaccttcctctcaattttgctgtaaaccttaaattgttctttaaaaagtctaatttttttaaaagactggggagcctagtgcatttttgcactatggtgagagggagggacagcctggaccggaggtagggcctgtggggagagggtgcccctggaggctgcagccgtgggagggggctggtgtggaccgggcctgggtgggatggggagggaaacacttcggccctatgggcctctcaggcacctgtgccacctggggaaccagggtgcccg

SEQ ID NO: 34317 - DNA, 511 bp, Homo sapiens
  misc_feature (1)...(511): n = a,t,c or g
tnnnnnnnnnnnnngtatnnnnnntnnnnnnnnnnnattanannggagttnngntnanagttnatgnnntatnnnttggaaacntnntgactgatacgaannnnnnnnnnnnnnnnnnnnnnnnnnnnnnnnnnnnnnnnnnnnnnnggcacgagaggcaggatgatcagaagcaggacctggccagctgttcgcttatttcagtctgtatgaaatcatctgatatgcccataagagagatgtgtcaattggctaatgggtcagagtattgattttatgttttcagattgctgacagagagattaggcttccagatacaagcagttccacaagtctctgttttcagacaggcacataattaaagtaaccacacagttctctgaggttagagttccatgctgtgatgcaagcctctctatttggtatttaaaagcagtttgaagctgttgtgtaagtatcactgaacttggagtcaactgacctaagttctagccttggcccttctactgtt

SEQ ID NO: 34318 - DNA, 425 bp, Homo sapiens
  misc_feature (1)...(425): n = a,t,c or g
anttgganacccgnnnnnnnnnnnnnnnnnnnnnnnnnnnnnnnnnnnnnnnnnnnnnnnnnnnnnnnnnnnnnnnnnnggcacgagcttttgtcaggtttttggaataactgcgtcaaaactgatataaatgaacttactgtgtcaagtcgtgtgaaatatacagaaagcattatctagcattagggcattagaattataaactttaccacatatcagtacgtcctatggttctttaaaattttaggctttcccctccaattttaatgaaagcatttttttcttacatgatcaagtcttgtttctaaagtttaaaagatgaaaatgaggtaattttacattactgtacccttaaatggtagatggaagctttttaaaaagatgagtgtctttaatttcagaaatcaaattcaaaaaaaaaaaag

SEQ ID NO: 34319 - DNA, 439 bp, Homo sapiens
  misc_feature (1)...(439): n = a,t,c or g
nttttgganacccgnnnnnnnnnnnnnnnnnnnnnnnnnnnnnnnnnnnnnnnnnnnnnnnnnnnnnnnnnnnnnnnnnnggcacgnnnnnnnnnnnnnnnnnnnnnnnnnnnnnnnnnnnnnnnnnnnnnnnnnnnnnnnnnnnnnnnnnnnnnnnnnnnnnnnnnnnnnnnnnnnnnnnnnnnnnnnnnnnnnnnnnnnnnnnnnnnnnnnnnnnnnnnnnnnnnnnnnnnnnnnnnnnnnnnnnnnnnnnnnnnnnnnnnnnnnnnnnnnnnnnnnnnnnnnnnnnnnnnnnnnnnaaagtctatattctgcaagaggaagaagttctaagatctgtgtcacaacataaatatacttaacacaatagaacgctacacttaaaaatggttaanatgnnnnnnnnnnnnnnnnnnnnnnnnnnnnnnnnnnnnnnnnn

SEQ ID NO: 34320 - DNA, 431 bp, Homo sapiens
  misc_feature (1)...(431): n = a,t,c or g
nanaccgctnnnnnnnnnnnnnnnnnnnnnnnnnnnnnnnnnnnnnnnnnnnnnnnnnnnnnnnnnnnnnnnggcacgaggttctgtgaagttaaagagcaagtattgtgggaatgagacatgaggaagctggaagaacaggaggttatagccagagactgaactagttctgagtggcacagttccatcgtgtgcccccggggcaggtagcttggagtagagagcatgacattcgggaaagagacctagaactgagattccccaagatagatggtgaggtcactcaaggtaatggcaggagtgagggtggagaggaagcccaaagctgatgccagagtcgtcaggaaatcaaaggcagtgaggtggcagtcagaagatgacagcatccagcagggaagaggatgggataactggaaggcatcatcattcaa

SEQ ID NO: 34321 - DNA, 438 bp, Homo sapiens
  misc_feature (1)...(438): n = a,t,c or g
ntttggannacccgnnnnnnnnnnnnnnnnnnnnnnnnnnnnnnnnnnnnnnnnnnnnnnnnnnnnnnnnnnnnnnnnnnggcacgaggaaacccaggacaggccctcaggaagggcttcctggatggacagatggggtgataaagtgaaggggtggtcaggcaaggtccccagttctcaactgttgattagctgtcagctttctcagtttccagagaccttgaaaatatttaaaagaaaatagttcccaagaaatgaaactggctccagaaagctgacagctcatcctgtccatgacacttacccacttccagggtcacctgcaaacaccaacttcctagccttacagtatgtgatcttctttgcctggaacccgagggtgcatccagctgctgctatttttgtccctggctttgggctgaactaataatgttatga

SEQ ID NO: 34322 - DNA, 427 bp, Homo sapiens
  misc_feature (1)...(427): n = a,t,c or g
ntttgganacnnnnnnnnnnnnnnnnnnnnnnnnnnnnnnnnnnnnnnnnnnnnnnnnnnnnnnnnnnnnnnnnnnnnnggcacgaggtatgtgtctctctctgtgtgtatgtgtgtgtgtgtgtgacagagnnnnnnnnnnnnnnnnnnnnnnnnnnnnnnnnnnnnnnnnnnnnnnnnnnnnnnnnnnnnnnnnnnnnnnnnnnnnnnnnnnnnnnnnnnnnnnnnnnnnnnnnnnnnnnnnnnnnnnnnnnnnnnnnnnnnnnnnnnnnnnnnnnnnnnnnnnnnnnnnnnnnnnnnnnnnnnnnnnnnnnnnnnnnnnnnnnnnnnnnnnnnnnnnnnnnnnnnnnnnnnnnnnnnnnnnnctnggcctggtagggagttatnttaattaagnggccgnangctnattccntttagggagggt

SEQ ID NO: 34323 - DNA, 430 bp, Homo sapiens
  misc_feature (1)...(430): n = a,t,c or g
anacccgntnnnnnnnnnnnnnnnnnnnnnnnnnnnnnnnnnnnnnnnnnnnnnnnnnnnnnnnnnnnnnnnggcacgagcgagctgggctcgggcgccctgctgaggacaccaagcagccacgttgcctgtgctccagcagctccgaggtctcttcctggaagtctgttgggtgtcatcctgcagctcagagccagggaaatggcagtggggagggggcttcctggggtgacagcaaagctctgtgtccacaggcaggcaggacgcatgctgcagccctgtggggtgggcacggtggaagccttcctctgtgtggcagaaaatgtgtctcagatctctgggaactgggacaggaaagttcccagaggggcatgtatggggaggctacagaaagtgtccccccatttcatgtttgtgatagcagctcagg

SEQ ID NO: 34324 - DNA, 431 bp, Homo sapiens
  misc_feature (1)...(431): n = a,t,c or g
nntttgnanacccgtnnnnnnnnnnnnnnnnnnnnnnnnnnnnnnnnnnnnnnnnnnnnnnnnnnnnnnnnnnnnnnnnnggcacgagaaaaaccacaacttggttaaatccagatcaccattctctatgtctataattctgcagctaaacataggtagagatcaatacacaaccatcatttctcatcttaaattcataaccacaaacctcatagagatctgttaatgctagtcaggcaattacactgtttcccattcctttaattccttcactatcctgtttcaatttcacacctttttctgctttcttatatgtaaaacacctcctccctgtccttactttcaagtgatcactgtacatcttatttcatgaagaatattcaaatgattaaaagaaaacatcacagattcccatcaccacgtctgcccca

SEQ ID NO: 34325 - DNA, 433 bp, Homo sapiens
  misc_feature (1)...(433): n = a,t,c or g
tttgaanaccgtttgnnnnnnnnnnnnnnnnnnnnnnnnnnnnnnnnnnnnnnnnnnnnnnnnnnnnnnnnnnnnnggcacgaggcaaagagcagtgcttcatgtgacagataacatcagatgatcctaggctggaaggtggaaatcctagagaagatttttttgtgttgtaagttcagtctttcaagatgtggaattctgtctgaggaaagtatatcacctagttaacaattgttactgtaatttataaaatttgtactttggagagcataagaattcatgaaaagtttttaataattttacttaaacagagcttaattatgtaagtattgtcagcactttataaagaatcgtaaaataaaatagtggcagaaaatataaactagatgtagaatgttaaggaactttcggaagttctctggttttcatttca

SEQ ID NO: 34326 - DNA, 429 bp, Homo sapiens
  misc_feature (1)...(429): n = a,t,c or g
ntccgnnacccgttatgacnnnnnnnnnnnnnnnnnnnnnnnnnnnnnnnnnnnnnnnnnnnnnnnnnnnnnnnnnnggcacgagatacagtaaaggtttcttgaattcctctgagctttctggacttccagctgggcctgacagagaaggctcactcaaggatcagttggctttagcaattggaaaactgggagaaaacatgattcttaaacgagctgcatgggtgaaggtgccatctgggttctacgttggctcttatgtccacggagcaatgcagagtccctcacttcacaagctggtgctggggaagtatggggccctggtcatctgtgagacgtctgaacagaaaacaaaccttgaagacgttggccgccgccttgggcagcatgtggtgggcatggcccccctctctgttggctccctggacg

SEQ ID NO: 34327 - DNA, 434 bp, Homo sapiens
  misc_feature (1)...(434): n = a,t,c or g
tttgaaaacccgtnnnnnnnnnnnnnnnnnnnnnnnnnnnnnnnnnnnnnnnnnnnnnnnnnnnnnnnnnnnnnnnnnggcacgagaaaaataagcggatttcttcgtccgagtgtatcttgccacccgccggagtacctttgtggttgtgacttcatttattagaaggtgccttttgctcaagaaccctgtgcttaggctgcaaagtatctaggaggtgggcaaagagtggtccttagtaccattatgtaatgatgatgcctgaacatacatcgccaaatgtcattggctttaaaatatttgctattctgataagaactttcaaaacagataatggtacagtcagtacagtagagtccttggccttagtaaaagaagttactgcaagagatcgtttagccaagtacatatagaaccttttaaaatatgttttt

SEQ ID NO: 34328 - DNA, 428 bp, Homo sapiens
  misc_feature (1)...(428): n = a,t,c or g
ttgnanaccgnttgactgattcgaatttaatacgactcnnnnnnnnnnnnnnnnnnnnnnnnnnnnnnnnnnggcacgagaatgtatggcactaaatgaatatgttagaaaagaggaaaaaaatcaataatctaagcgtccagttaggaacctaggaaaaaaagagcaaaataaactgaaagccagtagaatcaaggaaataataaagagtagaaatcaatgaaattgaaaatagaaaaataatagagaaagctgtattagtcttttttacattgctataaagaaatacccgagnnnnnnnnnnnnnnnnnnnnnnnnnnnnnnnnnnntgctcatggttctgcagaccgtacaagaagcatgcatggtaccagcatctgcttctggtgaagaccttaggaagcttataatcatggtggaaggcgaag

SEQ ID NO: 34329 - DNA, 426 bp, Homo sapiens
  misc_feature (1)...(426): n = a,t,c or g
tttgaanaccgtnnnnnnnnnnnnnnnnnnnnnnnnnnnnnnnnnnnnnnnnnnnnnnnnnnnnnnnnnnnnnnnnnggcacgaggtggaacccacggatagagagggccaactatatttacagcacagtagtcaaagggtaaagacaaaactcaaagccaggtctgtataatgccaaagtttatgtccttcccaaggcattaaagaaaaaggaacagaagaaaggttggaaagagaaaggtgatggcataaaaggaaactgcacttaagttcatatataggctgatgcatctatgcttatgtggacgaagtggctgaaagtccctaatggcttcggtgataaaaatctataaagggagtacacagttgctcccaaacatgtaggcatgcaaagcctcattccactttatggccctgtgattgcag

SEQ ID NO: 34330 - DNA, 426 bp, Homo sapiens
  misc_feature (1)...(426): n = a,t,c or g
aaatntgaanaccntttgacnnnnnnnnnnnnnnnnnnnnnnnnnnnnnnnnnnnnnnnnnnnnnnnnnnnnnnnnnnggcacgagnnnnnnnnnnnnnnnnnnnnnnnnnnnnnnnnnnnnnnnnnnnnnnnnnnnnnnnnnnnnnnnnnnnnnnnnnnnnnnnnnggccttttaatctcttgagggcaaatggctttctttttattagatgcaaccagggaagtctagtgtttggatgccgttaaaaatacagttattcagcggnnnnnnnnnnnnnnnnnnnnnnnnnnnnnnnnnnnnnnnnnnnnnnnnnnnnnnnnnnnnnnnnnnnnnnnnnnnnnnnnnnnnnnnnnnnnnnnnnnnnnnnnnnnnnnnnnnnnnnnnnnnnnnnnnnnnnnnnnnnnnnnnnnnnncctgtaatctt

SEQ ID NO: 34331 - DNA, 430 bp, Homo sapiens
  misc_feature (1)...(430): n = a,t,c or g
tttgaanacccgnttgacnnnnnnnnnnnnnnnnnnnnnnnnnnnnnnnnnnnnnnnnnnnnnnnnnnnnnnnnnnggcacgaggtgggacttcatgaaaataattaaacaagatatttgcatacaaactttctttttaaatttattttaaaacatttcctcaacctcctcactggtagagaaaaggatataaaggtaaaaatgtcacatgtggtaaaaataattcctagtgtccataatgtaacaggttattacatagcacatttttatcttatatgatctgatcaatactaaccttatgattccacttcctcaccaaaccaaagtgaagaaattgataagctattttaattctcattaccctctgacaatacacagcatatgtgttaatataaattcaagccatcttctctgcctaaaaggaagatgg

SEQ ID NO: 34332 - DNA, 429 bp, Homo sapiens
  misc_feature (1)...(429): n = a,t,c or g
tttgaanatncgnnnnnnnnnnnnnnnnnnnnnnnnnnnnnnnnnnnnnnnnnnnnnnnnnnnnnnnnnnnnnnnnnggcacgaggtgtcctaagggccccccctcaccaggacggagtcgccgtggcaagacccgtcaccgcaaggccagcgccaaggggagctgtggggacctgcctgggcttcgtacagctgtgccaccccatgaacctggaggaccaggaagcccagggggcctaggagggggaccctcagcctgggaggcctgccctcccgccctccgtgggcttcatcatgacctcctgctccgcaaaatgtcttcatcgtccccagacctgctgtcagcagcactagggtcccggggccggggggccacaggcggagctggggatcctggctaccaccttcggcccggggtgacaccccact

SEQ ID NO: 34333 - DNA, 397 bp, Homo sapiens
  misc_feature (1)...(397): n = a,t,c or g
atttaatacnnnnnnnnnnnnnnnnnnnnnnnnnnnnnnnnnnnnnnnnnggcacgaggatgatgcctagtcccccgtgccaccgcctctatggtctcagtacaggtgccagactgggggactcagtgtcacaaagcagcaggcagtggcttcttctccctaccactcccttacccagctcggaagctgctcatgggcctctgtcaaggtcctgaggggtgacagggtcttatgttcttgcttctaagctggtgaccgacatagcccccttcacagcatgacagttgggtgtctctggccctggtagaatgtgnnnnnnnnnnnnnnnnnnnnnnnnnnnnnnnnnnnnnnnnnnnnnnnnnnnnnnnnnnnnncttcanatttttagaatatctgg

SEQ ID NO: 34334 - DNA, 426 bp, Homo sapiens
  misc_feature (1)...(426): n = a,t,c or g
tttgaaaaccgnttgannnnnnnnnnnnnnnnnnnnnnnnnnnnnnnnnnnnnnnnnnnnnnnnnnnnnnnnnnnggcacgaggaagatttaaagtttataagtttagaaattcagggataaaaataacccactgagtgtcaggcctgattgctaagtgctgttcaggtgtgatctcacagctctctcagcattttcatcactgccaccacttcacaggtgagaaaagtgaggcagacaacagacaagttactggtctaagtggtagaataaaaatataaccccagctccagagcctctgcactcagccatcatcgtgtactgccccgcggtgaatttcatctaggatatgccaagacctgctgatttttcgtcacttgcttttcttattaatgtctgttccttggcgacaatggcatctgctgac

SEQ ID NO: 34335 - DNA, 424 bp, Homo sapiens
  misc_feature (1)...(424): n = a,t,c or g
anacccnnnnnnnnnnnnnnnnnnnnnnnnnnnnnnnnnnnnnnnnnnnnnnnnnnnnnnnnnnnnnnnnnnnggcacgagctccatcgatggttatgtcctcccatcctcgacgacccgagagatgaccccgcatgagatcaagtttgctgtccatgtcgaatcggtgctgaaccgcgtgccgcagcccgagtaccggcagctgctggtggaagccatcatggtgctgacgctgctctcggacacggagatgaccagcatcgggggcatcatccacgtggaccagatcgtgcagatggccagtcagctgttcttgcaggaccaggtgtcaattgggtgcctgggacaccctggagaaagaccaagccacaggaatctgccacttcttttatgacagcgctccgagtggggcttatgggacgat

SEQ ID NO: 34336 - DNA, 466 bp, Homo sapiens
  misc_feature (1)...(466): n = a,t,c or g
ngagnnnnnattgganacccctatgacatgattacgaatttaatacnnnnnnnnnnnnnnnnnnnnnnnnnnnnnnnnnnnnnnnnnggcacgagtgcctgcctgggcacaggggaaaagccacttagttaagtggcctctggtcattcttgtggtgtccactttctttctatgggattgagtaggtggcaggtgttttcaggggaaaccatcctacttgtttccccgaactctttgttgctctgaggacacagctttgctcagaaatgcagcgcagatccttacggctgatgctactctgctctgttctggggaaagcacaatataaagaaagaattnnnnnnnnnnnnnnnnnnnnnnnnnnnnnnnnnnnnnnnnnnnnnnnnnnnnnnnnnnnnnnnnnnnnnnnnnnnnnnnnnnnnnnnnnnnnnnnnnnnnnnnnnnnnnnnnnnnnnnnnnnnnnnnn

SEQ ID NO: 34337 - DNA, 451 bp, Homo sapiens
  misc_feature (1)...(451): n = a,t,c or g
ggagnnnnattgganatttgaanaccnttatgacnnnnnnnnnnnnnnnnnnnnnnnnnnnnnnnnnnnnnnnnnnnnnnnnnnnnnnnnnnggcacgannnnnnnnnnnnnnnnnnnnnnnnnnnnnnnnnnnnnnnnnnnnnnnnnnnnnnnnnnnnnnnnnnnnnnnnnnnnnnnnnnnnnnnnnnnnnnnnnnnnnttttgtacttatatttatatgtgtatgagatggagtctcnnnnnnnnnnnnnnnnnnnnnnnnnnnnnnnnnnnnnnnnnnnnnnnnnnnnnnnnnnnnnnnnnnnnnnnnnnnnnnnnnnnnnnnnnnnnnnnnnnnnnnnnnnnnnnnntatcttttcacacttgtaggaacatataaaagtcttagtctttcttcatttccttttcattctttctttttttttttttcccnnaaaggggnaaancccc

SEQ ID NO: 34338 - DNA, 462 bp, Homo sapiens
  misc_feature (1)...(462): n = a,t,c or g
ggtgnnnattgnaaacncgnnnnnnnnnnnnnnnnnnnnnnnnnnnnnnnnnnnnnnnnnnnnnnnnnnnnnnnnnnnnnnnnggcacgaggttatggcagttacagtttattgattccagctaataattgcttgttatattttgttcaactttatcatttttaaaaactcttttatgtatccgggcataannnnnnnnnnnnnnnnnnnnnnnnnnnnnnnnnnnnnnnnnnnnnnnnnnnnnnnnnnnnnnnnnnnnnnnnnnnnnntcagttgttgcannnnnnnnnnnnnnnnnnnnnnnnnnnnnnnnnnnnnnnnnnnnnnnnnnnnnnnnnnnnnnnnnnnnnnnnnnnnnnnnnnnnnnnnnnnnnnnnnnnnnnnnnnnnnnnnnnnnnnnnnnnnnnnnnnnnnnnnnnnnnnnnnnnnnnnnnnnnnnnnnnnnnnnnnnnnnnnnnnnnn

SEQ ID NO: 34339 - DNA, 460 bp, Homo sapiens
  misc_feature (1)...(460): n = a,t,c or g
ggtgnnnattgaancttgnnnnnnnnnnnnnnnnnnnnnnnnnnnnnnnnnnnnnnnnnnnnnnnnnnnnnnnnnnnnnnnnggcacgagaccctgtgcttgtccttcatagtgtgtaaagatctgtatgtggggtgatttgactaacggttctctccccttaagtataagtaaacctatgagggcaaggactgcttaccttagcatccttggttcctggtaggatgcccatcccataacaggctggagctcctgggtgtgtgggagggagtaggaaggaagcaacagctgccaatcaaaggcccatttgggcatgtgacccttagctagccaatcagaatcctttccagggttgtagcagttgaagctgtgagcagctcagttggttgggttgtctgtcttgcttggcttggattctcccagaaggagatcctgagtcaatgattcgggtgcaagtaga

SEQ ID NO: 34340 - DNA, 392 bp, Homo sapiens
atttggccctcgaggccaagaattcggcacgaggaaaggatatggcatttaataaaagagaaaatagatgattttatatgtatgagaaaatacatcgctttaaatttactcgtgagattcaccaatgatttctgaacaccaaacattggggtggcccagtgacttaatcggagaaacacagacactttgaaaagaaatgtgggatttaaaaacctgcaaaactgagtctgtcattctttaaaatgccatctcaagtcacaaaataatgatgttaaaatctgaaaccatatgtgttttgaatggtttaggttctaaagaaaggtcaataatgccagtcttttgggtttgtacatgatttgtttctttctcacataatctgtcaaaactttaaa

SEQ ID NO: 34341 - DNA, 463 bp, Homo sapiens
  misc_feature (1)...(463): n = a,t,c or g
gtgnttntnnctttgaaacccttgtgaacnnnnnnnnnnnnnnnnnnnnnnnnnnnnnnnnnnnnnnnnnnnnnnnnnnnnnnnnnggcacgagctcccctgctcccaggaggaagcgacaggaggagccaaggacaccaggatggtccaccaaacccgcgccagcctcaggtcagttctctttggccttatgaactcaggaacccctgaggattctgagtttcgggcagatgggaagaatatgagagagtcctgctgtaaaaggaaactggtggtgggaaatggaccagagggtccaggtctgtcaagcacaggcaagaggagggccacaggccaggactcttgtcaagagagagggcttcaagaggccgtccggagagagcatcaggaggccagtgttcccaagggccgcattgtgccaaggggaatagacaggctggagagaactagatcaagccggaag

SEQ ID NO: 34342 - DNA, 466 bp, Homo sapiens
  misc_feature (1)...(466): n = a,t,c or g
gngnnnnnnnnnttggannccttggaaaaccgntnnnnnnnnnnnnnnnnnnnnnnnnnnnnnnnnnnnnnnnnnnnnnnnnnnnnnnnnnnnnnnnggcacgagctggatgaaggtggcaattttaagaaaagtaaatacttcatgcctttctcagcaggaaaacggatttgtgtgggagaagccctggccggcatggagctgtttttattcctgacctccattttacagaactttaacctgaaatctctggttgacccaaagaaccttgacaccactccagttgtcaatggattgcctctgtgccgcccttctaccagctgtgcttcattcctgtctgaagaagagcagatggcctggctgctgctgtgcagtccctgcagctctctttcctctggggcattatccatctttcactatctgtaatgccttttctcacctgcatctcacattttcccttccctga

SEQ ID NO: 34343 - DNA, 432 bp, Homo sapiens
  misc_feature (1)...(432): n = a,t,c or g
anantcgnnnnnnnnnnnnnnnnnnnnnnnnnnnnnnnnnnnnnnnnnnnnnnnnnnnnnnnnnnnnnnnnnnggcacgagggaaccgctgtgtgttagcaagaatgtccatacctgatatgaaagagtcatgttggcttcagttcctactgccctgtggacttcccattccctccttacttgagtcaaccatccactcagtaccttccacaaatctaataatgaggtgctctctgtaggtaaatcctttcactatggcttgtcctcaaacctcccaagaaaaggttcaactgctcaatctcttaacctttttaattccattcccttgcaggtatcccggccctgcataacaagatgatcccaactcaaggaaaggggtttagcagtgttggatcttggcgtatgtgggatttaaccaggcagaaaggcaga

SEQ ID NO: 34344 - DNA, 426 bp, Homo sapiens
  misc_feature (1)...(426): n = a,t,c or g
ggannnnnnnnnnnnnnnnnnnnnnnnnnnnnnnnnnnnnnnnnnnnnnnnnnnnnnnnnnnnnnnnggcacgagcaacacagactccatgatttgaaaactctgcacagaatgcagaaagggaaaagcatcacttgcctttccacttagtcttttgaggtctataaaaaggagacaatactattaattttacatttgaaaatactagttattgccaggtctaaaagaaaactttgctaacataacttttgtcatcagtatttattaagaaatctatcctttcatgggtttctactttaaatagttttatatttcctatgtcctctgcatggggcagaagatccagagcttaaccagtgaagccatattctattgtgaacacaagttctctgaaaaggaatttgagagtaaagagactttgtttca

SEQ ID NO: 34345 - DNA, 420 bp, Homo sapiens
  misc_feature (1)...(420): n = a,t,c or g
atccgnnnnnnnnnnnnnnnnnnnnnnnnnnnnnnnnnnnnnnnnnnnnnnnnnnnnnnnnnnnnnnnnnnggcacgaggtttgtgtnnnnnnnnnnnnnnnnnnnnnnnnnnnnnnnnnnnnnnnnnnnnnnnnnnnnnnnnnnnnnnnnnnnnnnnnnnnnnnnnnnnnnnnnnnnnnnnnnnnnnntgggtttcgcatgatgagattagtgtccttataacaagagacagcagagagcttgctttctccaccatgtgagtatgcaatgagaaggcagccatctccaagtcagaaagagagccctcaccaggggctgaatgnnnnnnnnnnnnnnnnnnnnnnnnnnnnnnnnnnnnnnnnnnnnnnntttcagttgaataggccccccagtctgtactattttgttatagcttgagc

SEQ ID NO: 34346 - DNA, 425 bp, Homo sapiens
  misc_feature (1)...(425): n = a,t,c or g
ttgganttccgtttnnnnnnnnnnnnnnnnnnnnnnnnnnnnnnnnnnnnnnnnnnnnnnnnnnnnnnnnnnnnnnggcacgaggacagtttttacaccagtaagaatgccaagatcttcaggtacagcttagcttccacctgcgaagcctgcgtgagcagtggctgggcgggacatgtctgaatggtgaaggtgttgccacctcccaatatggccctttctttatgaacagctctaatggtcagttgttattttaaagtcaaagccttccttgagcctgaaaccatgaattaaaatatccagttagtctttattttcaagttcaaaaccttattgcgtactgaaaatgcatgaactactggacacttttacaagcttactttcacaggagtctggtaagatacgtgctattctcatatttttct

SEQ ID NO: 34347 - DNA, 428 bp, Homo sapiens
  misc_feature (1)...(428): n = a,t,c or g
ttgganttcganaccgnnnnnnnnnnnnnnnnnnnnnnnnnnnnnnnnnnnnnnnnnnnnnnnnnnnnnnnnnnnnnnnnnnggcacgagnnnnnnnnnnnnnnnnnnnnnnnnnnnnnnnnnnnnnnnnnttgactgtaagagttcagtcatatcatctgttatcaaattcttcagtcaaaatccagacacagagttggcaaggggttggggttcacagtggaggcgtggcgtagtcttctggtggcacagcacagcccagcaacaggcacgctggagagaatacccagaaatccaggcaggtggcaggcagtgtgcaggtgccttctcagtgagtagcaaggtcccagcttccaggttggagtcagtgtcacagttctaacccctggaagagtagtaggccaaggaagggtgaccttagatttagg

SEQ ID NO: 34348 - DNA, 439 bp, Homo sapiens
  misc_feature (1)...(439): n = a,t,c or g
ntttgganaccgtttgacnnnnnnnnnnnnnnnnnnnnnnnnnnnnnnnnnnnnnnnnnnnnnnnnnnnnnnnnnnggcacgaggaaataacctgctctccaaaatgtccacaaaagtgacttaagtcaggttcccccaaaccagacaccaagacaagaatccatgtgtgtgtgactgaaggaagtgctgggagagccccagctgcagcctggatgtgaactgcaactccaaagtgtgtccagactcaaggcaagggcactaggctttccagacctcctactaagtcattgatccagcactgccctgccaggacataaatccctggcacctcttgctctctgcaaaggagggcaaagcagcttcaggagcccttgggagtcctccaaagagagtctagggtacaggtccgaaagtagaagaacacagaaggcaggccag

SEQ ID NO: 34349 - DNA, 446 bp, Homo sapiens
  misc_feature (1)...(446): n = a,t,c or g
tttgaaaatncgtttgccatgattacnaatttaatacnnnnnnnnnnnnnnnnnnnnnnnnnnnnnnnnnnnnnnnnnggcacgagtaaaaacatgttcctgtaataaaactatctcaaagcaagaaagtgcttactatctttacattgagatagttctattacaggaacatgtttttaacctatctaaaatataaacttctgttgtgtacataaatctgaattattaaatgtattttagatactttttaaaaaggttcataaaacatgattagtataagggatactaaaaatcatgaattgtgcttctgaattctatgctgaatagcatgaacctccatgaattttaagatttgtgtcaaaaaagctatttgttctctaaagcatagaacgccatgacatcctctagtttttganatggttgatntaattcanntgatcccttcc

SEQ ID NO: 34350 - DNA, 442 bp, Homo sapiens
  misc_feature (1)...(442): n = a,t,c or g
ganttnnnnnnnnnnnnnnnnnnnnnnnnnnnnnnnnnnnnnnnnnnnnnnnnnnnnnnnnnnnnnnnnnnnnnnnnnnnggcacgagnnnnnnnnnnnnnnnnnnnnnnnnnnnnnnnnnnnnnnnnnnnnnnnnnnnnnnnnnnnnnnnnnnnnnnnnnnnnnnnnnnnnnnnnnnnnnnnnactccgcacagaaagtggctctagggggaaatcaatttgttcccgctcatcagtgttacaacaaaacgacattgaacaaaacaacacaattgagacaagtgggtggaaaaggtgaaatcatatataagaatcttggggaaacagggaaagcagatacagaagtaacatacatagtttaaaaacaacatagcacctttctccagtattttcacctgttttagttatagtagttaatgttttgaaattccaaataatatt

SEQ ID NO: 34351 - DNA, 433 bp, Homo sapiens
  misc_feature (1)...(433): n = a,t,c or g
annnnnnnnnnnnnnnnnnnnnnnnnnnnnnnnnnnnnnnnnnnnnnnnnnnnnnnnnnnnnnnnnnnnnnnnggcacgagcatatagaatcctaaaaactaattaagttccttggacaccttatctcacataacccacatctctaatgtctccccattgggaaaagagtccattgataaatcaggtgaattatgcctagcgggcccaaatctgctacttttctttaagttgtttaggagttacattcagaccatggtgacatggagcaccaagaacttagaatcagatttcattttacttgacaaactcttgaaaggtcactgccacagtctctcttgagtgcaaggctatggctatgctttgtagcacagggacgcgatatttctctgctatctttgggtagcagaggttaacacagctcccttgtgcttt

SEQ ID NO: 34352 - DNA, 441 bp, Homo sapiens
  misc_feature (1)...(441): n = a,t,c or g
ttgganatcgattgccnnnnnnnnnnnnnnnnnnnnnnnnnnnnnnnnnnnnnnnnnnnnnnnnnnnnnnnnnnggcacgagctaggcgtgagtcacctcaccagtccagatctcccattgtattcatgactcctcatttgccctatataatcaatggccagagtttgcaagcccactggccaggattctctgccatggattgcagccagccactggtccaaaggagggtagtctttgttaaattgaggaacgaggtacacaaccctccctagggatccttcctactggtttaaaggaattagaataaagccttatccagagaggggtggtgacaaagcatgcagcacaggtaatttgaagcccaagagctcaaacataactagactgttttgccagccttggacaaagagagtgtagtttttgaggaaaacaccactgtc

SEQ ID NO: 34353 - DNA, 417 bp, Homo sapiens
  misc_feature (1)...(417): n = a,t,c or g
nnnnnnnnnnnnnnnnnnnnnnnnnnnnnnnnnnnnnnnnnnnnnnnnnnnnnnnnnnnnnnnggcacgagagcaccatgagcttcaccctggttctattcttttttaatttctcacacttccgcattcccactaagaattcccttaggattttaatattaacatcaaaaattttgccttctagtagagacaaaggggctgaagctgtcctaggtaagccactnnnnnnnnnnnnnnnnnnnnnnnnnnnnnnnnnnnnnnnnnnnnnnnnnnnnnnnnnnnnnnnnnnnnnnnnnnnnnnnnnnnnnnnnnnnnnnnnnnnnnnnnnnnnnnnnnnnnnnnnnnnnnnnnnnnnnnnnnnnnnnnnnnnnnnnnnnnnnnnnnnnnnnnnnnnnnnnnnnnnnnnnnnnnnnnnnn

SEQ ID NO: 34354 - DNA, 388 bp, Homo sapiens
  misc_feature (1)...(388): n = a,t,c or g
nnnnnnnnnnnnnnnnnnnnnnnnnnnnnnnnnnnnnnnnggcacgagactggaagaaaacaccctgctggagtctctggcttgtgatacacaatgagcagcacaccacacacactcagcacgccagtaacaaggacagacagacagacggtccacggaaaacacattgcagctgcagacccacatatgctaacccataattagaaaaaaaatcannnnnnnnanactgatgcacaaataancaggtgatatgagtnantatataagancattanaagttaatatgggtcggntgcagnggctnacgcntataaccccaacactttaggaggctnannnnngaggactgntccaggccanganttcaagattaanctggnaacatatt

SEQ ID NO: 34355 - DNA, 382 bp, Homo sapiens
  misc_feature (1)...(382): n = a,t,c or g
nnnnnnnnnnnnnnnnnnnnnnnnnnnggcacgagcttcaattttctaaaatgacaatagtaaattttcactttctaaacagtttacataatcagtttcactatatttgcatatattttgttaactgatactaacaatgatgccacaattnnnnnnnnnnnnnnnnnnnnnnnnnnnnnnnnnnnnnnnnnnnnnnnnnnnnnnnnnnnnnnnnnnnnnnnnnnnnnnnnnnnnnnnnnnnnnnnnnnnnnnnnnnnnnnnnnnnnnnnnnnnnnnnnnnnnnnnnnnnnnnnnnnnnnnnnnnnnnnnnnnnnnnnnnnnnnnnnnnnnnnnnnnnnnnnnnnnnnnnnnnnnnnnnnnnnnnnnnnnnnnnnnnnnnnnn

SEQ ID NO: 34356 - DNA, 435 bp, Homo sapiens
  misc_feature (1)...(435): n = a,t,c or g
ttgacacttgatgacnnnnnnnnnnnnnnnnnnnnnnnnnnnnnnnnnnnnnnnnnnnnnnnnnnnnnnnnnnggcacgagggaagcaattgttacttctgaagagctgggccaggatctggagcatgtagaggttttacagaagaaatttgaagagtttcaaacagatatggctgctcatgaagaaagagttaatgaagtgaaccagtttgctgccaaactcatacaggtaaatagcaaagtgctgtatgcttctcacaacattcttatgttaactttttagtatattcaggataaaattttgatgattggtcccctaatttctgagtgagcaagtttttgtaagcatgtctgagagttttgtttagatgtgaggcacaatactgattactcctaaattggaaaatgcttttcaatgtgttgccttgggcagga

SEQ ID NO: 34357 - DNA, 435 bp, Homo sapiens
  misc_feature (1)...(435): n = a,t,c or g
ttganacctntatgacnnnnnnnnnnnnnnnnnnnnnnnnnnnnnnnnnnnnnnnnnnnnnnnnnnnnnnnnnnggcacgagctgtgtatttcctggcaggtcaggtcagtagtcagtggctacatgtttgtatttattgatggtagagttttgttatcttttgatttctgaattacagaaatcaattgttggcttagtttgtgttgtgtgtctttctagagatgcattagttttatatacaagtgaactttgttcaaaacaagaacgatgtatgaatatctttaagtataggtcctttattttccaaactagtgaaccatgtgttctctttaaatataagcgaggaaaaaatattctgccaggcatagggagtgctgggttccagatctgtcaataattcacaggagtgaccttgaatgagtcatattcttaac

SEQ ID NO: 34358 - DNA, 438 bp, Homo sapiens
  misc_feature (1)...(438): n = a,t,c or g
ttgacactttnnnnnnnnnnnnnnnnnnnnnnnnnnnnnnnnnnnnnnnnnnnnnnnnnnnnnnnnnnnnnnnnnggcacgagccggatatctttggtgacttgtccactccagtgtggcatcatgtggcagctgctcctcccaactgctctgctacttctagtttcagctggcatgcggactgatctcccaaaggctgtggtgttcctggagcctcaatggtacagggtgctcgagaaggacagtgtgactctgaagtgccagggagcctactcccctgaggacaattccacacagtggtttcacaatgagagcctcatctcaagccaggcctcgagctacttcattgacgctgccacagtcgacgacagtggagagtacaggtgccagacaaacctctccaccctcagtgacccggtgcagctagaagtccatatc

SEQ ID NO: 34359 - DNA, 441 bp, Homo sapiens
  misc_feature (1)...(441): n = a,t,c or g
ttncccctttggagaccgtnnnnnnnnnnnnnnnnnnnnnnnnnnnnnnnnnnnnnnnnnnnnnnnnnnnnnnnnnnnnnnnnnggcacgagctcggcgtggtctggatcaacaggagcaggggctgtatcaaggcatggtccattccctgctccgcatttggctgggaaagacttggtccttggctggatctaaaaagtgccctaaaaaaaaagccctactttatagcagtgaatagtaaactggagatagcatgttggaatacaagtcttgagagaaggtggaatcctctatgaaaaagagagagcctcagagaggggagacaagaacccaagaatcacaaatgttttgtttctctgcaagaaagaatgccaaggtgcaagactatcccgttctcttattccaagctgccctcatgtaatgaatgctctcagccctcac

SEQ ID NO: 34360 - DNA, 441 bp, Homo sapiens
  misc_feature (1)...(441): n = a,t,c or g
ttgganacnttgnnnnnnnnnnnnnnnnnnnnnnnnnnnnnnnnnnnnnnnnnnnnnnnnnnnnnnnnnnnnnnnnggcacgaggtcatgctttatgccttagtcacatataatagctttttaaaatatgatttcaatcggactccctcatgtgaactgtatacagagttcaaatatacttctggaaattcaaccacatttccattttttaataaccaccagtgagtgtattaaaggcagaagcttttagctgaaaaaaaaaaaangtngntnanntttancaataaaaancnggttccaaanatnaanttngctaatngggtncatnnatatnggggccaanggtatagggnntaaaagtncatatgattaaancaatcgnnngaaaaacnttttttataaccngaaangggattttcncttccccnaggagggattttt

SEQ ID NO: 34361 - DNA, 445 bp, Homo sapiens
  misc_feature (1)...(445): n = a,t,c or g
ttngannctttgaannacccgtnnnnnnnnnnnnnnnnnnnnnnnnnnnnnnnnnnnnnnnnnnnnnnnnnnnnnnnnnnnnnnnnnggcacgagcacgtttatttccgcagctgtgtcattagccttgcgttgttatgtttaagtgtctacaccaggctccaagaaatgccaggatttaaagacaatttaccctacagtttaacacagagaaacataaaaagggagttctatgcgtgcaagagagtgatgccatagttgaaatatcaccagcctctggaatgggccggggctgtctgtgctcagattttccagcaggtcgcgtgtgggtcgaatgctgagcagtaacctgggagcaatcagccaagccccctggctcctgcactccttcacatccagtatgagcccggtgaaatcatccaggcaatcaagtgacaatgccgcct

SEQ ID NO: 34362 - DNA, 441 bp, Homo sapiens
  misc_feature (1)...(441): n = a,t,c or g
ttnganactttgnnnnnnnnnnnnnnnnnnnnnnnnnnnnnnnnnnnnnnnnnnnnnnnnnnnnnnnnnnnnnnnnggcacgagcagattctctatgtcacaatctctcatgagatggtttcagccagggttaggggctcatctgaaggtttgactggggaggtatccacctctaagatcaggtgggtgttggcaggatcgaatttcttgagggatgttttgaactgaaggcctcagtaccttgctggctgttagttgggggctcccctcagttcttagccatgtgggtctctccactatgtgagcttgctttatctaagccagtaagagagtatactagcaggatggaagtcagaaccctttgtaacctaaccatggaagtgacagccctgcaatgtcaccatattttcttagaagcaaattactcaagagcaagagggg

SEQ ID NO: 34363 - DNA, 428 bp, Homo sapiens
  misc_feature (1)...(428): n = a,t,c or g
ctcctanttggaatccggccctcgaggccaagaattcggcacgaggcagaatgaaacatctcaaactagaggctgtaatggaaaaagcaatttatttttaaatgaagatgatgaggttggtgtactgtattacttgaacagtgagtgaatttaaaagagtgagattacatcaaattcagccaagatttttgttccatttgaatggagtatctgtaattgaagatgggtgttcaactaagaaaaacacatgacatgtacatttttatcagttttcttgcactctgtttccagtttctttgtgcatgtgtgtgtgtgtgtgttcacaaagccattgcatcatattgacaatttttttttttaaactgacgcgttcttgggcaacaaatgagaatacaagcttaattttactagcttcactttttttttga

SEQ ID NO: 34364 - DNA, 432 bp, Homo sapiens
  misc_feature (1)...(432): n = a,t,c or g
tttgaanaccgtttgacnnnnnnnnnnnnnnnnnnnnnnnnnnnnnnnnnnnnnnnnnnnnnnnnnnnnnnnnnnggcacgaggcgggagagtccgcccaactcaggctgtgggaggacccaggagctcctggtgcctctgccagtgactggctcccatggctgtgagcaaccacaccccctttctgtgcctcagtttcctctcgtgtatgtgaaataaacaagagagactggataagctctgacacgaagccttaggcttgggggcatggaggtgactgtcagctgggattggagaattggggtggagggcagaggctggtagcgaggggccgacttagagccaggagggcannnnnnnnnnnnnnnnnnnnnnnnnnnnnnnnnnnnnnnnnnnnnnnnnnnnnnnnnnnnnnnnnnnnnnnnnnnnnnn

SEQ ID NO: 34365 - DNA, 429 bp, Homo sapiens
  misc_feature (1)...(429): n = a,t,c or g
annanccgntnnnnnnnnnnnnnnnnnnnnnnnnnnnnnnnnnnnnnnnnnnnnnnnnnnnnnnnnnnnnnnnggcacgagattccacaggtccataaagagagatgcatgaggaagttgatcagtgttctttgtggtggtggggagaggaggcagcctgggtatccaccccttgggagagtatgtgtgctgtggagccctgcacagcagttcggggctgccagatgggacctaaaacccagtgctgaggggaaaaagtctatcaagaatgtatacacaaaagnnnnnnnnnnnnnnnnnnnnnnnnnnnnnnnnnnnnnnnnnnnnnnnnnnnnnnnnnnnnnnnnnnnnnnnnnnnnnnnnnnnnnnnnnnnnnnnnnnnnnnnnnnnnnnnnnnnnnnnnnnnnnnnnnnnnnnnnnnnnnnnnnn

SEQ ID NO: 34366 - DNA, 435 bp, Homo sapiens
  misc_feature (1)...(435): n = a,t,c or g
tggaanaaccgttatgacatgattacgaatttaatacnnnnnnnnnnnnnnnnnnnnnnnnnnnnnnnnnnnnnnnnnggcacgagctcggcgtggatgtataaaacagttggtgacttaaatgaaaaagaaggccacactcccccctttaggcaggcggcctaattctttaaaagccagcacagggtgcctttctgaacccaggcacacagtaggtgttcaatggacagcagcggttacttgtactgctcatgacaccctgtctgtggcctctgcagctggctccagcctgacgcatggctgcgcccctccgcaaggccaccccggtatacatggaaactctgtggagaaggccttgggggccggccaggacgccaggcccagatcccatctgcgcccttcctccatagacctcagcgagctctcggcaccatg

SEQ ID NO: 34367 - DNA, 331 bp, Homo sapiens
  misc_feature (1)...(331): n = a,t,c or g
atttnggcccncgaggccaagaattcggcacgagtagcaatattaaagattaattgattctaaatctgaaaaatcataggtacatttctgtagttttagaacagttccataattagagaagctacccaagtaacacactacattgagtctcataggacttaaaaattatgaagaaataatttcaattgatggccccaaaagtcaaatttatnnnnnnnnnnnnnnnnnnnnnnnnnnnnnnnnnnnnnnnnnnnnnnnnnnnnnnnnnnnnnnnnnnncagcaaaatagctgagattcttgcatgaaagaattagggtttttttttttttt

SEQ ID NO: 34368 - DNA, 430 bp, Homo sapiens
  misc_feature (1)...(430): n = a,t,c or g
ttggacaccgntnnnnnnnnnnnnnnnnnnnnnnnnnnnnnnnnnnnnnnnnnnnnnnnnnnnnnnnnnnnnnnnggcacgagggataagtctggtctgttcctgttatctggacttggcagattaatgcaacattctgtgggactttgcaatagctaaagaacttaaatatcctttgtttactaaaggcttcattattatggaagtagtaactgatgtttattatctgagatggatagatacttgtgcttttcttgttgagctataaaatagaagtgacttacaatttccttccctcctgtaaacactgaatttgagtgattttgatagattcatcacacatggagttttgtttgtttgttttatgttttaaatccacgtaaggcatgaaagggtaagcaaatggccttgactggggtgganaggcttg

SEQ ID NO: 34369 - DNA, 427 bp, Homo sapiens
  misc_feature (1)...(427): n = a,t,c or g
anatttggaataccntnttgacnnnnnnnnnnnnnnnnnnnnnnnnnnnnnnnnnnnnnnnnnnnnnnnnnnnnnnnnnnggcacgagaaaaattcctttcacctagtcatgtcgtagcctttataacgtcttagtgcagtgcatttctcatgtgtttgtggggatgctggtgtaaattaacnnnnnnnnnnnnnnnnnnnnnnnnnnnnnnnnnnnnnnnnnnnnnnnnnnnnnnnnnnnngtaataactgtgttacttgtttacatatttactatttatcattattttagaatgtactattacttataacaaatnnnnnnnnnnnnnnnnnnnnnnnnnnnnnnnnnnnnnnnnnnnnnnnnnnnnnnnnnnnnnnnnnnnnnnnnnnnnnnnnnnnnnnnnnnnnnnnnnnnnnnnnnnnnnnn

SEQ ID NO: 34370 - DNA, 378 bp, Homo sapiens
tttggccctcgaggccaagaattcggcacgagcagctggtgatagaaggagctgggacacgcgcttgggttgactggcttctggttttggttctctggcttctagtgctggaagaagccctctctttcccttctctttcctcagtagcatctgactcttttcataagcaaacagctgcataaacaaagcccccattttggtcaagcacagggtgaatgtgatattgttcccacaaccttattctccactcaacagccgcctggctttggggaagaggcccgcttcaggtgacagtgcagctgtccaggtggccgtgcactgaaccaggctgagggagacaaaaaccccgcagacccgctgctttcagcgtcagttaat

SEQ ID NO: 34371 - DNA, 424 bp, Homo sapiens
  misc_feature (1)...(424): n = a,t,c or g
cttganaccgtttgacnnnnnnnnnnnnnnnnnnnnnnnnnnnnnnnnnnnnnnnnnnnnnnnnnnnnnnnnnnggcacgagcgtttgaccttaaaaaaggcatttccaaacatgaatatatgaacacaccatacttctcaaaggacaacaaactacaactggttgtttagaagtgataatggcctttagggttcccgaaccctctgaaattatgtgtaggggcaggctcatgtggggcttggggacatgggtctcagtagaggcccatagggcccatagctttcattagattctctgagggttcctgccctctgctttgccaagtttcttactatatgatgttctctttcccagaagaatctctttgggaaaagacagtgtacagttgtggaagagtccccttgcgcaaaacaaatgttctct

SEQ ID NO: 34372 - DNA, 430 bp, Homo sapiens
  misc_feature (1)...(430): n = a,t,c or g
ttganatttgatacgttnnnnnnnnnnnnnnnnnnnnnnnnnnnnnnnnnnnnnnnnnnnnnnnnnnnnnnnnnnnnnnnggcacgagggaaggtctgcagggagcagctgagccatttgttcttgaactctgggaggcagaagtccccgcacccatcatgcgtggactgataggacatcttttcgtggtgtgcaccagtgctttccacacttgacagtggttggctttgatgaaccctcatgctgcaccttcagagccagtcctctagtttggaataaaaattgcagaggtggtttttgggtctttaccacctgcggctggtggacagcagccagtgtgtctggacacccaggggcattgagactgcatgttgtcacatgaccacttctcttcacacatctgctttcagtgcctggtgaaaaatagacc

SEQ ID NO: 34373 - DNA, 425 bp, Homo sapiens
  misc_feature (1)...(425): n = a,t,c or g
acttgatgcctgattacgaatttaatacgactcnnnnnnnnnnnnnnnnnnnnnnnnnnnnnnnnnnggcacgagttctatttagaattgttgtcatttggatcttctggagcccttgacagtagatttgtttggattttagaaaagccaaacattatttaatcatacaaagcaaaatagtggataatggggccaaaaatttattttggtcaaaaataagcattgactaagttaatggacttttttttttnaggggctganncnctgaangcaanccttttgcangggcttntttgacatganctntaagggnattngagnaattaccantantanactaggatatnctttntagggggaanatttnaaaggtnaatcttcnggctgaanaaaangtttnggttngaatcaaattngttttattt

SEQ ID NO: 34374 - DNA, 410 bp, Homo sapiens
  misc_feature (1)...(410): n = a,t,c or g
gcggcacgaggtggtggctnnnnnnnnnnnnnnnnnnnnnnnnnnnnnnnnnnnnnnnnnnnnnnnnnnnnnnnnnnnnnnnnnnnnnnnnnnnnnnnnnnnnnnnnnnnnnnnnnnnnnnnnnnnnnnnnnnnnnnnnnnnnnnnnnnnnnnnnnnnnnnnnnnnnnnnnnnnnnnnnnnnnnnnnnnnnnnnnnnnnnnnnnnnnnnnnnnnnnnnnnnnnnnnnnnnnnnnnnnnnnnnnnnnnnnnnnnnnnnnnnnnnnnnnnnnnnnnnnnnnnnnnnnnnnnnnnnnnngtgtgcataaattctcctgattggcagagctattgggtttggctatatagtagtatcagtatcactttttnctaaaatatattcaagtagcatccatactttttcctttggtgg

SEQ ID NO: 34375 - DNA, 489 bp, Homo sapiens
  misc_feature (1)...(489): n = a,t,c or g
aannctntgaaatcnnnnnnnnnnnnnnnnnnnnnnnnnnnnnnnnnnnnnnnnnnnnnnnnnnnnnnnnnnnnnnnnnnggcacgagatggatatgtgtgnnnnnnnnnnnnnnnnnnnnnnnnnnnnnnnnnnnnnnnnnnnnnnnnnnnnnnnnnnnnnnnnnnnnnnnnnnnnnnnnnnnnnnnnnnnnnnnnnnnnnnnnnnnnnnnnnnnnnnnnnnnnnnnnnnnnnnnnnnnnnnnnnnnnnnnnnnnnnnnnnnnnnnnnnnnnnnnnnnnnngcagatgnnnnnnnnnnnnnnnnnnnnnnnnnnnnnnnnnnnnnnnnnnnnnnnnnnnnnnnnnnnnnnnnnnnnnnnnnnnnnnnnnnnnnnnnnnnnnnnnnnnnnnnnnnnnnnngatgtatatatttaaaatgtgtacatttaaagcagtggttctcaaccaaggacaatttttgcctccctccactccaccccctaggacat

SEQ ID NO: 34376 - DNA, 488 bp, Homo sapiens
  misc_feature (1)...(488): n = a,t,c or g
ttganaccttnnnnnnnnnnnnnnnnnnnnnnnnnnnnnnnnnnnnnnnnnnnnnnnnnnnnnnnnnnnnnnnnnggcacgagaaagacctcagaaagcgagccggccacatggaacacacatttaggtaagctgggtgcattttatgggatgaggccccccagtagagggaacaagaagtactggcaggttccagagcatccaggaggccagtttggctggagccaggtgaattaaagagagagtaatggataaagtcatagaggtaaaacaggtgatctcacaggccattgtgggactctggctttgatcttgagtgagatgggaggtcactggggcttttgagccancgaggaggcatgatggtcacttccaccctaaaagaacccctgaccactgtgtgtggaagcagggagtccggtcanggggctgctgtgatgatctaggtgggagctgatgctggcttgnactacggtggtgnangtgga

SEQ ID NO: 34377 - DNA, 488 bp, Homo sapiens
  misc_feature (1)...(488): n = a,t,c or g
aantttgataaccctnnnnnnnnnnnnnnnnnnnnnnnnnnnnnnnnnnnnnnnnnnnnnnnnnnnnnnnnnnnnnnnggcacgaggatagcttggatgagggtggtagccggtggaggtggaagaagtggctaaattataggtatattttgaagatagaaccaacagattttgctggtagatttaaggtgggcataagagagaagttaagcataactgaaaggtttgaggcctaaacaacgggaaggattggagttgccatcagctgaaatatggaaatctatgggtggagtaggatattttttggtggggggaggggctatggctgtggaggtgagtggcattagctgctgagttttgcatacgttaagcaatctttattagacattcaagtggaggcatcaagtaagcagttagatacctgagtcaagttcaggaaagaggctggactgaaatacacaattgtgagtcatctgcctgtggatagt

SEQ ID NO: 34378 - DNA, 494 bp, Homo sapiens
  misc_feature (1)...(494): n = a,t,c or g
aaacccnnnnnnnnnnnnnnnnnnnnnnnnnnnnnnnnnnnnnnnnnnnnnnnnnnnnnnnnnnnnnnnnnnggcacgagatgtactttacatagttaactcatctgatgcagaatcatggaggaattagggtccaagatgaacaaattaaatttcatgctttaaatacgcctagctttcccaggctgttactttaactcagctgttctcactctaaacctagagtccccctgcttcattcatgcccagagggttggcacagtaaggaaatgcttaggcttagaatgcctttattttggtgccggcccctatcgcgcagcagtaacttctgaaagtgagacacagtatggatcactgggaaaggatacagtctcgcatgggggataatactacaaggctggaccacactctacttgccaaggattgttgtcaactggaagcgtgcttgccccatgaaagcctgtgttcaaggcagaggcctagatcccaggatc

SEQ ID NO: 34379 - DNA, 496 bp, Homo sapiens
  misc_feature (1)...(496): n = a,t,c or g
aancttgaaanccnnnnnnnnnnnnnnnnnnnnnnnnnnnnnnnnnnnnnnnnnnnnnnnnnnnnnnnnnnnnnnnnnnggcacgagccagctgcagtttaggcagatatcttgttcaatctctgtcttcttgatccctgtcaaaataatttttctactcatatagtggccagttggctcaggcaggcatttcaagaggaatctgcttgttcctcacttttccagcataggacagtggtccagcccgcacagtcagcattgttctcagggacgatgtggcagccccacacagaggccaagagcaacagagcaactccaggatttatgagttgggacagtcgtcctctcattcatgatacatggagggactcaggggactcagcaggtccccctattgttttttaggnnnnnnnnnnnnnnnnnnnnnnnnnnnnnnnnnnnnnnnnnnnnnnnnnnnnnnnnnnnnnnnnnnnnnnnnnnnnnnnnnnnnnnnnnn

SEQ ID NO: 34380 - DNA, 545 bp, Homo sapiens
  misc_feature (1)...(545): n = a,t,c or g
annnttnttnnnngcgnnnnnnnannnnntatantnttgnannnnagggggngttannttgaaccttgaacgtncgaattaaacgatcnnnnnnnnnnnnnnnnnnnnnnnnnnnnnnnnnnggcacgagcggcacgaggtggcttggacaaggaggtggtagcagagatagggcagagatggccagattccagatgtattctgaaggtagagctgacagatttgctgagcaattggatgcagaataggagggaaccagaggcagtcaaggatgactccagacttgtgagctgaacaatgagaagaatagattgagatggggaagtctggcagaggaaacaagaagttctgctttggccatgttaagtttgagatgcctattagatattccaagtggagatgtcaaatatgcagttggatatatgagttctgggaagagggccagccttgagctataatttggagagtcatcagcttataggngacatttaaagcaatgggactggatgagatcaccactganggcggagtacgtgtaaatggaa

SEQ ID NO: 34381 - DNA, 491 bp, Homo sapiens
  misc_feature (1)...(491): n = a,t,c or g
cttgaacnccttgactgattacgaatttaatacgactcnnnnnnnnnnnnnnnnnnnnnnnnnnnnnnnnnnggcacgagagaaagttagagaaaacactgtaccagcctcaaaacaaacatcctatagatgttttgagagaatggtaccaccgcaggtaacagaaattacaatatggtcattgtttaagtctggtacgacacaggccctggaggtcttagaaagaagagagcttatttcctgattagtgttgggacagagctggaccttccgtcatacagtcaggaaatgtagttattggaagactgctgttggcaaggcgttcagtagtatacatagaatccagtgctgctcaaggttggtgggatttcttacagttacataaccactcaagttatatgcgatcattgtagaaaaattagaagatccagataagcatgtttgaaagactccccatttgaggtatgatcgttagatgtatgctctataat

SEQ ID NO: 34382 - DNA, 575 bp, Homo sapiens
  misc_feature (1)...(575): n = a,t,c or g
tctnannnnnnnnnangccnntcncntgnntgnaannngnannnncncngnannanacnanggggggangtgnnntttgaaacntggaaancctttgaatgatacgannnnnnnnnnnnnnnnnnnnnnnnnnnnnnnnnnnnnnnnnnnnnnnnggcacgagactgcacctggcccaaagtctctttaaaaaacaaattttaagtcactccagtttgaagtttaggacacagagacaaactgtgactttcctcaaggtcagtcagaagtgattctgaaaccacctttcagtactttaaccctgtccaaaagcagccattttagtgcttttatcactagatgttcccatgcaggttgagagagattatttctgttctgttaggttatgcattgttgcagtgtcccaagagataaagtcccaagatattaatgtaagtattagcttctgtaagatgttaccccaatccatattaaccatgtctggctgaggcatgaaggatctattaaantatatccaggttcctattaaatcactacactggcagtaatacctgggctcaccttctccttaaccc

SEQ ID NO: 34383 - DNA, 574 bp, Homo sapiens
  misc_feature (1)...(574): n = a,t,c or g
aacnnnanntnnannngnannnnantnnncnantncnntnnngntnngnnngcnnnnnnaagagngggtgntntnnnttgaaaccttgagaaccttacgaattnnnnnnnnnnnnnnnnnnnnnnnnnnnnnnnnnnnnnnnnnnnnggcacgagggagagataagtttgattcttatttcccacagtttagtgaggaatgagtggaacaaactatggaaggttttagttagggaagtaacacagttctgtagagaaatcaccacctagttgcatttaaggagctgtcagccttgaaagttaaaagagcggannnnnnnnnnnnnnnnnnnnnnnnnnnnnnnnnnnnnnnnnnnnnnnnnnnnnnnnnnnnnnnnnnnnnnnnnnnnnnnnnnnnnnnnnnnnnnnnnnnnnnnnnnnnnnnnnnnnnnnnnnnnnnggttaaaanagggngggaantntaagggcttccgnatggtgaggantccccttgtttatcctcacncaaaaangntctcgaccctccttttaanggactntganagctaccngaccaaaanaattgcccttatgcc

SEQ ID NO: 34384 - DNA, 493 bp, Homo sapiens
  misc_feature (1)...(493): n = a,t,c or g
aancttggaacncnnnnnnnnnnnnnnnnnnnnnnnnnnnnnnnnnnnnnnnnnnnnnnnnnnnnnnnnnnnnnnnnnnggcacgaggatatagcccctaataaactgagtaagttaacttcatttactaaaattggcgatttaaaattttatcatttaaatgttaggatgnnnnnnnnnnnnnnnnnnnnnnnnnnnnnnnnnnnnnnnnnnnnnnnnnnnnnnnnnnnnnnnnnnnnnnnnnnnnnnnnnnnnnnnnnnnnnnnnnnnnnnnnnnnnnnnnnnnnnnnnnnnnnnnnnnnnnnnnnnnnnnnnnnnnnnnnnnnnnnnnnnnngttgggtngnnttnaaaatnngannnccttttnaaaattntgggcngnaaatntcncccccagttttttncaagggntntacctaatnggcnnancnggggacccnnntttngngttntcnctnaanaancntttnanncntttantaaaancttgaa

SEQ ID NO: 34385 - DNA, 435 bp, Homo sapiens
  misc_feature (1)...(435): n = a,t,c or g
ccnnnnnnnnnnnnttggaannnnnnnnnnnnnnnnnnnnnnnnnnnnnnnnnnnnnnnnnnnnnnnnnnnnnnnnnnnnnnnnnnnnnnnggcacgagccaccccaatataccaatatacctctggcatattgattatttcaggcctagcatggtagctcacacctgtaatcctagtgcttcgggagcccaggagttcatcagcaggctgggcacataaggagtcccatctctacaaaagtattnnnnnnnnnnnnnnnnnnnnnnnnnnnnnnnnnnnnnnnnnnnnnnnnnnnnnnnnnnnnnnnnnnnnnnnnnnnnnnnnnnnnnnnnnnnnnnnnnnnnnnnnnnnnnnnnnnnnnnnnnnnnnnnnnnnnnnnnnnnnnnnnnnnnnnnnnnnnnnnnnnnnnnnnnnnnnntagggctgggaactgg

SEQ ID NO: 34386 - DNA, 434 bp, Homo sapiens
  misc_feature (1)...(434): n = a,t,c or g
anacccgnnnnnnnnnnnnnnnnnnnnnnnnnnnnnnnnnnnnnnnnnnnnnnnnnnnnnnnnnnnnnnnnnnggcacgaggcaactaaagcttaagaatcactgctctggagtaaagaaacatactctgttcctgtgtctctataaaaaaatggaaaactgtaaaattaggtgtacagggccatgggcatgtagagggccagtttggcccatcacctgagtcctatggacattgcagtccatgcccagaaccacctgaaacagctctgtgttctctccccaggtggaggggtggagggactcagatctgggcggctctgcatcactaggctcacatttccagtctgatctaatcagattttatgtgaccacaaacagcaggcactattttggtagagatatacaaagtctgggctcanctgaacagacacagg

SEQ ID NO: 34387 - DNA, 518 bp, Homo sapiens
  misc_feature (1)...(518): n = a,t,c or g
gngnggtngnnttgtgnnctncngaannncctgananccnnnnnnnnnnnnnnnnnnnnnnnnnnnnnnnnnnnnnnnnnnnnnnnnnnnnnnnnnnnnnnnnnnggcacgagtacatgccagccagggtggtggtgtttgggggtgacagcaccagctgcatcggcactgagctcaacacggtgaatgtgatgccctctgccagccgggtgatcctcttggagaacctgaaccgcttctggcccatcatccagatccgcataaagcgctgccagcagggcggcattgacacccgggttcggggtgtggaggtcctgggccctaagcccacattctggccactgttccgggagcagctgtgtcgccgaacatgtctcttctacacaattcgggcacaagcctggagccgggacatagcagaggaccaccggcgcctcctccagctctgtcccagactgaacagggttttgcgccacgagcagaattttgctgaccgcttctccctgatgatgaggccg

SEQ ID NO: 34388 - DNA, 514 bp, Homo sapiens
  misc_feature (1)...(514): n = a,t,c or g
ggaggntgnnntntgnnntttgaannanaaatcccttnnnnnnnnnnnnnnnnnnnnnnnnnnnnnnnnnnnnnnnnnnnnnnnnnnnnnnnnnnnnnnnggcacgagccttagagaccttcaccttttagacctcagagctttgctgcctttaaacaaagacaccttgtggtgaaaacccccaggcccagttgcgatttcctggcttcctcaccttgatggcacagaccaggggcagattctggagtcctggcagctcaactgggaacggggatttggctccaggaagtgttcattatttatgaacctccaaatcctaaatccatcagtggccgtgtgtggccacagtggggcaggctggccggcagcccagctgctcctggaatgagcttagagtcacccctcccggtggaggcagaaggtcgctgggcccccagcgcggctccacgcccctcctccaggtggcttgggtgagagcctctgtcctgtgaagtaactgccaaaaactgccaga

SEQ ID NO: 34389 - DNA, 494 bp, Homo sapiens
  misc_feature (1)...(494): n = a,t,c or g
ttnnaanctctgangaccctttacgaatttaatacnnnnnnnnnnnnnnnnnnnnnnnnnnnnnnnnnnnnnnnnnggcacgaggttggggttctattgtggaaagagaaatatgctaaggaatttgccatttatcttagcatcaggataagaattgtatgagcaggggagtgacatggttggggaaagactaattctggtaacaccgtacagagcagcagtaggtagaacctatggcaggaagactaggagtacattatttacctcttttgaaatgagtttgtcatttgccttggaagtttttggtacattgtaattaacaaagtgaattgtttattttgttcaagatccatgcttggtttgccagttgttataaatgtagaaaatataccagataccaacttagaaaccattcactctccttgttatttacagatatgcaaggtttttttgttgtngntttgttttgttntgtttttaaagggtatggttcg

SEQ ID NO: 34390 - DNA, 509 bp, Homo sapiens
  misc_feature (1)...(509): n = a,t,c or g
gngngntgnnntntnnnatntgaaccttnnnnnnnnnnnnnnnnnnnnnnnnnnnnnnnnnnnnnnnnnnnnnnnnnnnnnnnnnnnnnnnnnggcacgagaaaaaccaagaagaaaaattgaagagggcgttaatttctcaagtaaatcgttgaacgtcaaatcagtcaggggagaaagtgctgattttgttaaagcatctttttaacttacagtgcgtattgtaattgtcaatcttaatgtaagaggacaggatctgtttcttgagtgtgtattgaaaaccaagaataaaattggatcacaattgggcttataattatcaataaccaggcagaattagaaggtagaccaatttggagctccccacggtcatcctttatggaaaactttagaactatattgtctgaaaagttgtctcaatttttcaagccttttgttagcattaatgcttggttttccatagtaatgatgggttcgttcctctgcatatcttctcttttatagacaga

SEQ ID NO: 34391 - DNA, 502 bp, Homo sapiens
  misc_feature (1)...(502): n = a,t,c or g
ggagnggnntgtgngtttgaacncctgaactcttgaatgacnnnnnnnnnnnnnnnnnnnnnnnnnnnnnnnnnnnnnnnnnnnnnnnnnnnnnggcacgagccttagcacctgtacagcttgggaagaagaatgtggagctctgagaagtgaagaacatgccccaaatatattgcctgtgctgaagacaaagagggtttgatgacacgaggatttgccccccttttctgttaggaccacctggctgcctccaaacactctctgacttgcctcctagttgctcgcctcacgttttctcctcctccgcttttctagaaaatatgctctcttaagaaccaagtctgaagcgaaggctgtacttgaacttcgggctggctggaccactcagaccgattgaggtgctctatctccctaacacctgcactctaagaaccacataaaggactcgctggtttgcggctgggtggggttgggtggggctgggtgagggcgtgtgagtcag

SEQ ID NO: 34392 - DNA, 499 bp, Homo sapiens
  misc_feature (1)...(499): n = a,t,c or g
gnggngnngtgtgttgannanaagaactttttgacatgacnnnnnnnnnnnnnnnnnnnnnnnnnnnnnnnnnnnnnnnnnnnnnnnnnnnnnggcacgagcatgtctttccccgattgagatacatttttctaattatgttgttagacatttagtcacagccttctgtgatggaatgtgtttacacttcaaggttaaggttagttctctcttctcttcgcttactgtgtaaggagttttatgacagttgtttttgactgaaacttgacattgtcagtggcctaaagtgatttttctcagcttttcctttgtgtcccagtgctcttgaattatgccagcagtgacagtgcccctgcatagcagtgcttcccagttggcagtggagtagggccttgtaaagagttaaaagatttttgaatcatactcttgttctacaccctcccttttcccatggatacacaagcactgggactcactggataaaagcaattggtgtgaa

SEQ ID NO: 34393 - DNA, 487 bp, Homo sapiens
  misc_feature (1)...(487): n = a,t,c or g
ttgannntntgaanccnnnnnnnnnnnnnnnnnnnnnnnnnnnnnnnnnnnnnnnnnnnnnnnnnnnnnnnnnnnnnnnnnnggcacgagtaaacttctaatcactaagggtttgtatattatatataatctgtgccattcctactgggaagttgaaacaatgaaaataataaatcattttctttcagatgagccataattgaaacttttaagattagcataattgtatcgttgaataataaagagaaaaattacctcctttgttaattttatcatatgtgaattagtaactaatggtttctttgaaatcctttggtttagctgcaatggctcctgctctcatgtagctaaaaagaacatgttggaaaaatgcaaatgactttataactcttgggattgatgtttatacccttcagctatttccagttaatttttaatgccataatcattatgnattatgattatcattaccataccaactctgctg

SEQ ID NO: 34394 - DNA, 487 bp, Homo sapiens
  misc_feature (1)...(487): n = a,t,c or g
aaanctttnngacccgattacgaatttaatacnnnnnnnnnnnnnnnnnnnnnnnnnnnnnnnnnnnnnnnnnggcacgaggaatgatgaccttgaatctaaaagaccaaaaaatacttggcaaataagaaaatttctgggtggggttggcagcagtaatgtaggagtccaagaaccatattcaaagaatggcataaactttaaaaaacattcagagaagggtgaaattcatgactcaaagtctaaaccacaaagcttgaagagtagtacaagcctcagtaagtctctggataaaagtgatatttctagtatcccaaaacttcagaagccagctgtaagaaagcattccagtctccaaaaacaggtttcgtctacggaaaaaactgcaattagtactctggaaaacttctgtgaagctatcagtaaacttcaagaaaattacattgcagcagaagaacttcagtctattttgccttcaacaggaatt

SEQ ID NO: 34395 - DNA, 505 bp, Homo sapiens
  misc_feature (1)...(505): n = a,t,c or g
ggngnnnnnntgnnntttggtaatncngataccctttgacatgancnnnnnnnnnnnnnnnnnnnnnnnnnnnnnnnnnnnnnnnnnnnnnnnnnnnnggcacgaggaaagacaaaaatcgtatgatcacatttttatgtgaaatctaaagtagtcgaagtcatacagagaagaatggtggttaccaggggttaggaggatggggaaatgagatacaaagtttccgtgacacaagatgagtgagttctgcacctccaacatgtaagcatggcaactacaggtaatagtactgtacttgaaatttgttaagagggtcggtcctaagtgttcttaccccccaaannnnnnnnnnnnnnnnnnnnnnnnnnnnnnnnnnnnnnnnnnnnnnnnnnnnnnnnnnnnnnnnnnnnnnnnnnnnaannnnnnnnnnnnnnnnnnnnnnnnnnnnnnnnnnnnnnnnnnnnnnnnnnnnnnnnnnnnnnnnnnnnnnnnnnnnnnnnnnnnn

SEQ ID NO: 34396 - DNA, 486 bp, Homo sapiens
  misc_feature (1)...(486): n = a,t,c or g
ttgaaccttnnnnnnnnnnnnnnnnnnnnnnnnnnnnnnnnnnnnnnnnnnnnnnnnnnnnnnnnnnnnnnnnggcacgaggaagcatcagacatcagacagagggcagtcggtttgtttgtattaacatttgctctgggattttgcaggaaactcagatgccatttatctgggtttctgagctgcacagcttgacactggaagaaagtatcttaagccacatatgtgaagaaaaggctcttttctaaaaatctgaactcgaattcaatatgaaaagaacaggtcgcagtgggccctgtcgggatcccagggagccgcaattcagggctccctgaatgattcatctctgcagcccacaccgacagaccaggattgctcttagcttgtgaaaaatgagtaccctgtctaggctatcctgagctaaccctcctattcttgccctttttgctgaaaggaattattgntaatacagctatttaattcagg

SEQ ID NO: 34397 - DNA, 487 bp, Homo sapiens
  misc_feature (1)...(487): n = a,t,c or g
tttgaacccttnnnnnnnnnnnnnnnnnnnnnnnnnnnnnnnnnnnnnnnnnnnnnnnnnnnnnnnnnnnnnnnggcacgagaagaacctcaaaaaagctatacattccttctgggccttcatatgcatcaaatagcaaaatgttgactgtaacagcacaagcggaaagaactctaggttaccctattgtttgctaaaaggaatcactctgttcccttctttgcatgcctaacttgatccacgaaataagaccttctgcccttgcagaaatgtcaggatcgtaacttctactgcttctagttcactccttctacctccaaccatgcttgatggttggtcaattttggagaaggaactgaagctgcctcaacaagccctctctgaattccttgaagttgcctctgtgcaggacacgtgcattctcctcttccaccaatcactgagctgccctgaataggaggccagagtggttcagctgtgcctgtga

SEQ ID NO: 34398 - DNA, 486 bp, Homo sapiens
  misc_feature (1)...(486): n = a,t,c or g
nctttgnaaacccntatgacatgattacgaatttaatatnnnnnnnnnnnnnnnnnnnnnnnnnnnnnnnnnnnnnnnnnggcacgagtatataaatgcttgttatactgtatttctaaaaatttatattacttttattgttgtgtcatcattttttttccagaatatttttgatcctcggttggctgaatctgcacacgcgtaacctgtgaatttggagggctgactgtataaatcagttaggtctagttgatttatagcattgttcaagtcctcttggttttaacagatcttttttctagtcattctattattgaaagtggggtattgaagtctctaatattgtagacattttttctttctttaattctgttgatttttgcttctcatatattgccctctgctttaggttagtatatgtttataactgtgatatcttactgagagattggccctttcacagtgtgtaagtgttgnttgttcctc

SEQ ID NO: 34399 - DNA, 486 bp, Homo sapiens
  misc_feature (1)...(486): n = a,t,c or g
aaccctttgacncgattacgaatttaatacgactcnnnnnnnnnnnnnnnnnnnnnnnnnnnnnnnnnnggcacgaggaatatataaagtatgaagtttaattattaaatcaaacatattatattactgtagtctacaaatttaaaatattttttgtctacttcatctggccaaaactgagagaggtttgtggatgttcctgctatggttttgattttgtcgattctgtctggatttctttgaatgtgaactttcttttagtttttgatgctgctgttgtataatatggtgccttcttatgcctagtctttgtatgagacttttttttcttttctctctctctttggaagccataaatactaaatttcagagaagattctgaatgtcacaagaatataccttggtgggatcttttttcattcatcattttggacctttgatggacattctcaatctggagactcacatctttcaattctcagatat

SEQ ID NO: 34400 - DNA, 494 bp, Homo sapiens
  misc_feature (1)...(494): n = a,t,c or g
nntttggaaanccctatgacatgattacgaatttaatacnnnnnnnnnnnnnnnnnnnnnnnnnnnnnnnnnnnnnnnnnggcacgaggcatattttaactttaaagggaagtttggcagcaccccacaaaagaggttgcccccactgtctgtttcagccacaggatgtaaaagtacctgttgcctgaaccctcatctatgctgcgtggctgctgaacttggccatccacaggtagactttggtagcttggtgtcatccttaatttgatgtatcctatcatgagtgtgatcaaactgctttctgaaaggcttttcctggttttggagcccagtgggtctcttgtggcacagagccagagccctgctttggaactgcccatgtggaggtggccatcttccctcttgactgtttgcattggccggctccacccccaggtggcccagaaacctgttgcanctggggtggcaccctcccttccccacaacgggtggag

SEQ ID NO: 34401 - DNA, 497 bp, Homo sapiens
  misc_feature (1)...(497): n = a,t,c or g
aanctttnaganncctatgacatgattacgaatttaatacnnnnnnnnnnnnnnnnnnnnnnnnnnnnnnnnnnnnnnnnnggcacgagagaaaatggttataatataatagtaagtgtaaaaatcaagccagtaaaatagcgtatatactttggttgcagctgtgtgaaaactatgtcttcttatgaataaaaactcaaaggaaagatgaatacatgaaagctgctttgttatgatggtatcatagattgcctttttatgttttcaaaatgtctttaatgttataacagtaaaaagttaaaaagaaatatatagatagaagaagaaatcttgacttgcctttgaagatgagaaagaggtttctgagcacccaccccaaaacaaggtaggctctgatatagaagtgtcangacatggtngctcaccacgattncttntcagtgaaggatccctggtgggtatcncttctttatgataaacatctttgctttgtctcc

SEQ ID NO: 34402 - DNA, 493 bp, Homo sapiens
  misc_feature (1)...(493): n = a,t,c or g
ncctttnnnnnnnnnnnnnnnnnnnnnnnnnnnnnnnnnnnnnnnnnnnnnnnnnnnnnnnnnnnnnnnggcacgaggaaaaacaaaattcaagctgaacctagccgctgtctcaaggatccttcaatttttcaggttgcaaggcaactaagactgatagcagctaagccagatcagttgattaagtgtccccgtcggaaccagccagtcattgtgttaaaccaccctgatgtggactcgccagaagtgaccaatgtgatgaaggtaataaataaatacaaaggcaatgtcctcaaagttgttttatcagagaggactaggtgtcagctaggcatcagacggcatcatgtacgcctgacctaccagaatgcggaagaagccagtcaaattaaaaggcaaatgatgttgaaaatgaaactcaaaaaagttcataaaaacaactaccaggtagtggattccttgcctgatgattcttcacagtgtgtatttaagg

SEQ ID NO: 34403 - DNA, 433 bp, Homo sapiens
  misc_feature (1)...(433): n = a,t,c or g
ttgnnnacnnnnnnnnnnnnnnnnnnnnnnnnnnnnnnnnnnnnnnnnnnnnnnnnnnnnnnnnnnnnnnnnnnnnnggcacgagaagacaataaacagatgatgcagaggtcagaacttccccctctgagggtgtcaactctaggtctgaagtatgaaagacgtaaagaactttgccaaacaaagagctgcattccaggcggagggaacagcatatgaaaaggtgggaaagagcnnnnnnnnnnnnnnnnnnnnnnnnnnnnnnnnnnnnnnnnnnnnnnnnnnnnnnnnnnnnnnnnnnnnnnnnnnnnnnnnnnnnnnnnnnnnnnnnnnnnnnnnnnnnnnnnnnnnnnnnnnnnnnnnnnnnnnnnnnnnnnnnnnnnnnnnnnnnnnnnnnnnnnnnnnnnnnnnnnnnnnnnnnnnnnnnnnnnnn

SEQ ID NO: 34404 - DNA, 436 bp, Homo sapiens
  misc_feature (1)...(436): n = a,t,c or g
acnnnnnnnnnnnnnnnnnnnnnnnnnnnnnnnnnnnnnnnnnnnnnnnnnnnnnnnnnnnnnnnnnnnnnggcacgagggggagcgggtttggggaaggtcccctacaagagaaacgtgcatcatcttgggattactggagccctcagctataccttcctctgcaaaacggagcacagaaactggagtcacgtggtttggatggagaatgttgaagccaatagagtaattgctgcctgaagggcccatgtgaggaatgtcggagccggcctgtcccggaaatgctttttcctatgtgtcctctgtacactgttgctctagcttcccggcagaaatggggtgtggatgaaaacaacgttggtcctgacggctgtgagcacagaactagagtgacagccacatgcctcccgtaggacattttcaggcttgcagtgct

SEQ ID NO: 34405 - DNA, 446 bp, Homo sapiens
  misc_feature (1)...(446): n = a,t,c or g
ttgnnnnccnnnnntttgannnnnnnnnnnnnnnnnnnnnnnnnnnnnnnnnnnnnnnnnnnnnnnnnnnnnnnnnnnnnnnnnnnnnnnnnggcacgaggaacatctctggagagttctggctgggcaatgaggccctgcacagcctgacacaggcaggtgactactccatgcgcgtggacctgcgggctggggacgaggctgtgttcgcccagtacgactccttccacgtagactcggctgcggagtactaccgcctccacttggagggctaccacggcaccgcaggggactccatgagctaccacagcggcagtgtcttctctgcccgtgatcgggaccccaacagcttgctcatctcctgcgctgtctcctaccgaggggcctggtggtacaggaactgccactacgccaacctcaacgggctctacgggagcacagtggac

SEQ ID NO: 34406 - DNA, 431 bp, Homo sapiens
  misc_feature (1)...(431): n = a,t,c or g
nnnnnnnnnnnnnnnnnnnnnnnnnnnnnnnnnnnnnnnnnnnnnnnnnnnnnnnnnnnnnnnnnnggcacgagcaattaatgacccaaatgccaaggtaattttaaatttacatttttaataaaagcaacatgttgaaacaagagagggtgagattaacctttttgctaaagtaatttacaagtcaaagacaggaagagatcagagtgaatgtgccttcttaaccagagctacagaatttagtgaataattaaagtacaaactgctttgacctccttgaacttttccaagcaatttctctgtacttctatatatgaatgtcttagccaattttcnnnnnnnnnnnnnnnnnnnnnnnnnnnnnnnnnnnnnnnnnnnnnnnnnnnnnnnnnnnnnnnnnnnnnnnnnnnnnnnnnnnnnnnnnnnnnnnn

SEQ ID NO: 34407 - DNA, 513 bp, Homo sapiens
  misc_feature (1)...(513): n = a,t,c or g
nnnnnnnnntnntnntnatnnnnnnttcngnnnnngctnnnnnnncanagngggnnnnngnngnngtnngtnnngnttgaanccttngnttgacacactatgaatgatacgaannnnnnnnnnnnnnnnnnnnnnnnnnnnnnnnnnnnnnnnnnnnnnnggcacgagcaatttacatgtgttagatagacaagcataaaaaaatttgtatcagtagtattcctcagtgtggaatgacaggtattctcatatattgctggcagtactatgaatggtacagccttaacggagagcagcttggaagtagttaataacagtaggctgactaggagagaaaaggtagtgcttgaggggagaggagcttgcccaaaatccatcctgctgccccaaaagcctgtatctctggccttggggataaaacagaatttgcctagctggttgtcccatctatatttatgtggcatgttcaaagtggacaaggatcaatacaagggaaatggaggcaattttaat

SEQ ID NO: 34408 - DNA, 437 bp, Homo sapiens
  misc_feature (1)...(437): n = a,t,c or g
tttgaataccgtttgtnnnnnnnnnnnnnnnnnnnnnnnnnnnnnnnnnnnnnnnnnnnnnnnnnnnnnnnnnnnnggcacgagnnnnnnnnnnnnnnnnnnnnnnnnnnnnnnnnnnnnnnnnnnnnnnnnnnnnnnnnnnnnnnnnnnnnnnnnnnnnnnnnnnnnnnnnnnnnnnnnnnnnnnnnnnnnnnnnnnnnnnnnnnnnnnnnnnnnnnnnnnnnnnnnnnnnnnnnnnnnnnnnnnnnnnnnnnnnnnnnnnnnnnnnnnnnnnnnnnnnnnnnnnnnnnnnnnnnnnnnnnnnnnnnnnnnnnnnnnnnnnnnnnnnnnaacatatacacatattatagatactccatttttgtctgtggctggtatttcaaatatttaaagtctttgattcttcagtttatgtttcttttacctctcactcatgg

SEQ ID NO: 34409 - DNA, 436 bp, Homo sapiens
  misc_feature (1)...(436): n = a,t,c or g
aancccttnattgaanacattatgacnnnnnnnnnnnnnnnnnnnnnnnnnnnnnnnnnnnnnnnnnnnnnnnnnnnnnnnnnnggcacgagagctactggggggcttaggtgggaggatcacctgaacctagactnnnnnnnnnnnnnnnnnnnnnnnnnnnnnnnnnnnnnnnnnnnnnnagcctaggaggtcatggctgcaatgagcaatcattgtgccattgctctcctttttgagatggagtcataccnnnnnnnnnnnnnnnnnnnnnnnnnnnnnnnnnnnnnnnnnnnnnnnnnnnnnnnnnnnnnnnnnnnnnnnnnnnnnnnnnnnnnnnnnnnnnnnnnnnnnnnnnnnnnnnnnnnnnnnnnnnnnnnnnnnnnnnnnnnnnnnnnnnnnnnnnnnnnnnnnnnnnnnnnnnnnnnnnnnnnnt

SEQ ID NO: 34410 - DNA, 429 bp, Homo sapiens
  misc_feature (1)...(429): n = a,t,c or g
tttgaatacctttnnnnnnnnnnnnnnnnnnnnnnnnnnnnnnnnnnnnnnnnnnnnnnnnnnnnnnnnnnnnnnnnggcacgaggtgctgtgaccctgaaatcaccaatgtcactcagacttgctttgaccccgactctccacacagagcctacttggatgttaatgagctgaagaacattcttaaattggatggatcaacacatctcaatattttctttgcaaaatcctcagaggaggagttggcaggagtagcaacttggccatgggacaaggaggccctgatgcacttaggtggcattgtcttgaacccatctttctatggcatgcctgggcacacccacaccatgatccatgagattggtcacagcctgggcctctatcacgtcttccgaggcatctcagaaatccagtcctgcagtgacccct

SEQ ID NO: 34411 - DNA, 435 bp, Homo sapiens
  misc_feature (1)...(435): n = a,t,c or g
ttgaanacngtttnnnnnnnnnnnnnnnnnnnnnnnnnnnnnnnnnnnnnnnnnnnnnnnnnnnnnnnnnnnnnnggcacgagcccgtctgcccacagcgctccgcccccatcctgcatcgccgacttcctgcacctgggggatctgccaggagagcccagcaagatgacagcctcgtccagcaacccagacctgctgggaggatgggctgcctggaccgagactgcagcgtcggcagtggcccccacgccagccacagaaggccccctcttctctcctggaggtcagccggccccttgtggctctcaggccagctggaccaagtctcagaacccggacccatttgctgaccttggcgacctcagctccggcctccaaggctcaccagctggattccctcctgggggcttcattcccaaaacggcaccacgccca

SEQ ID NO: 34412 - DNA, 432 bp, Homo sapiens
  misc_feature (1)...(432): n = a,t,c or g
accngntntttnnnnnnnnnnnnnnnnnnnnnnnnnnnnnnnnnnnnnnnnnnnnnnnnnnnnnnnnnnnnggcacgaggaggatgacagggaacaaacagaagaactggatccaaaagagaaaagctagaaattgaggaacacatccctcagcctcatttcctcccttccctcaggagaagttgagccttgctggcctgaggtgcctggttatagccatgcctgagcccctcccatatgccagactctgcctcaatgccccaggtgcaaggtctctgagctgcttaaccacccttcagggagggcacctgtcccaccaacaggtgacgaaattgaggctcccagggctttgaagcattgcagctaggactccagccagtctgctgggctccagaccctgttcttttctcaaaccacagcatcttttattta

SEQ ID NO: 34413 - DNA, 423 bp, Homo sapiens
  misc_feature (1)...(423): n = a,t,c or g
aannnnnnnnnnnnnnnnnnnnnnnnnnnnnnnnnnnnnnnnnnnnnnnnnnnnnnnnnnnnnnnnnnnnnnnggcacgagggaagtgtggatgtatgtaatggggtgagaaacaggatttggagtaaaaactacactggcattctggctctgccaattactcaccaggacctgtggcaaattaacttttttgagcctcagttcttatttgtaaaataagaagacggtaatacctgcctcctatgactgtttgcaggactaacacggtacatggcatataaaaattgttcaactagctgttattcctagactatagagaggagggcctactatatgtctattgcttagttatacccatgctttcaaatatggtacctatttcaaaaatagaagaggtatttgttcaaatatttattgaatacc

SEQ ID NO: 34414 - DNA, 427 bp, Homo sapiens
  misc_feature (1)...(427): n = a,t,c or g
tttgataccannnnnnnnnnnnnnnnnnnnnnnnnnnnnnnnnnnnnnnnnnnnnnnnnnnnnnnnnnnnnnnnnnnggcacgagcgtggggaggagatatacctatagattatctcttaaagtatactactaacacaggtggcttccaggaggaggaaatgaacagcagggcaccaggagacatttccccctatacgctcgtgtatcttttgaattttgaaccatatgaatgtcttacctaaagannnnnnnnnnnnnnnnnnnnnnnnnnnnnnnnnnnnnnnnnnnnnnnnnnnnnnnnnnnnnnnnnnnnnnnnnnnnnnnnnnnnnnnnnnnnnnnnnnnnnnnnnnnnnnnnnnnnnnnnnnnnnnnnnnnnnnnnnnnnnnnnnnnnnnnnnnnnnnnnnnnnnnnnnnnnnnnnnnnnn

SEQ ID NO: 34415 - DNA, 456 bp, Homo sapiens
  misc_feature (1)...(456): n = a,t,c or g
gnngntnnnnnnnnnnnnttgnnnnnnnnnnnnnnnnnnnnnnnnnnnnnnnnnnnnnnnnnnnnnnnnnnnnnnnnnnnnnnnnnnnnnnnnnggcacgagtgcattcagaggttaataattaaattttttgaagttcattttaaaacattgcttattttaacatgtaaacgtatgttgggtgggaaaagtacaaatgggagattgaaactgttttaatcatgtaaatgatcagccctacaatttttgtttttttaataatctggaatgcttattttatatgctgggatgctagttgttttttctattaatacacttaacttgcattctagcttcgccattcagagacaggcatcgtgtggtgggttgtgtgacagtgtctgtcaatagtgaagacaaatagtgccagagacacttaacccatccaatctcacccagggtataggtcggtctcgt

SEQ ID NO: 34416 - DNA, 446 bp, Homo sapiens
  misc_feature (1)...(446): n = a,t,c or g
ttgganacccttnngnntttggannnnnnnnnnnnnnnnnnnnnnnnnnnnnnnnnnnnnnnnnnnnnnnnnnnnnnnnnnnnnnnnnnnnnnnnggcacgagtagggctcggcgtgggtgaaacagagtgaggaagaggaggaggtcagagaggnnnnnnnnnnnnnnnnnnnnnnnnnnnnnnnnnnnnnnnnnnnnnnnnnnnnnnnnnnnnnnnnnnnnnnnnnnnnnnnnnnnnnnnnnnnnnnnnnnnnnnnnnnnnnnnnnnnnnnnnnnnnnnnnnnnnnnnnnnnnnnnnnnnnnnnnnnnnnnnnnnnnnnnnnnnnnnnnnnnnnnnnnnnnnnnnnnnnnnnnnnnnnnnnnnnnnnnnnnnnnnnnnnnnnnnnnnnnnnnnnnnnnnnnnnnnnnnnnnnnnnnnnnnnnnnnnnnnnnnnnnnnnnnnnnn

SEQ ID NO: 34417 - DNA, 388 bp, Homo sapiens
  misc_feature (1)...(388): n = a,t,c or g
acttaacgtgagacctaccttcttccacaaatnnnnnnnnnnnnnnnnnnnnnnnnnnnnnnnnnnnnnnnnnnnnnnnnnnnnnnnnnnnnnnnnnnttcatcttgcatgactaaaattatacccattgaacagcacctcccaattttcgtctccctctgannnnnnnnnnnnnnnnnnnnnnnnnnnnnnnnnnnnnnnnnnnnnnnnnnnnnnnnnnnnnnnnnnnnnnnnnnnnnnnnnnnnnnnnnnnnnnnnnnnnnnnnnnnnnnnnnnnnnnnnnnnnnnnnnnnnnnnnnnnnnnnnnnnnnnnnnnnnnnnnnttttaaggatacataatatttggttgtatgtatattaccacatttattttatccattcaactgcc

SEQ ID NO: 34418 - DNA, 391 bp, Homo sapiens
gcatattttaacagctacatgtgctcccaggttacgggttaataatggatacaaaatttggcattatactggctctatcttgcacaagtatgatgtgccatcaaatgcagaattatggcaggtttcttggcagccatttttggatggaatatttccagcaaaaacaataacttaccaagcagttccaagtgaagtacccaatgaggaacctaaagttgcaacagcttatagacccccagctttaagaaataaaccaatcaccaattccaaattgcatgaagaggaaccacctcagaatatgaaaccacaatcaggaaacgataagccattatcaaaaacagctcttaaaaatcaaaggaagcatgaagctaagaaagctgcaagcaggaag

SEQ ID NO: 34419 - DNA, 391 bp, Homo sapiens
  misc_feature (1)...(391): n = a,t,c or g
nnnnnnnnnnnnnnnnnnnnnnnnnnnnnnnnnnnnnnnnnnnnnnnnnnnnnnnnnnnnnnnnnnnnnnnnnnnnnnnnnnnnnnnnnnnnnnnnnnnnnnnnnnnnnnnnnnnnnnnnnnnnnnnnnnnnnnnnnnnnnnnnnnnnnnnnnnnnnnnnnnnnnnnnnnnnnnnnnnnnnnnnnnnnnnnnnnnnnnnnnnnnnnnnnnnnnnnnnnnnnnnnnnnnnnnnnnnnnnnnnnnnnnnnnnnnnnnnnnnnnnnnnnnnnnnnnnnnnnnnnnnnnnnnnnnnnncacaggcttttgaatggtctccctctccccancccaggtacatgangccnaggtgaactgtgcatnctgagaccttgtgtccctgagnctcctttct

SEQ ID NO: 34420 - DNA, 394 bp, Homo sapiens
catttgctggagatattgcaaatccattgcctccaagtatctgcacagcatcagtagctaactgatttgcaatatctccagcaaatgcctttgcaatagaagcataataggtatttcgacgaccagaatcaacctcccaagctgctctctggtaactcattctagctagtgatgctgtgcagatacttggaggcaatggatttaatacagaatatcctgtggaaaaactaatgagggatgccaaaatctatcagatttatgaaggtacttcacaaattcaaagacttattgtagcctgtgaacacattgacaagtacaaaaattaaaaaaattactgtagaaatattgtataacttagaacacaagccactgtttcagctccagaaaaaagaag

SEQ ID NO: 34421 - DNA, 389 bp, Homo sapiens
ggaaaaggttgtaacaataatacccaaaatctgattggtcatatttttccaaagagtaatgcatgctggatataaatgtattttctgtcttccttataaggggattctcccagctgctaaatttaaacagtaaatatcacattttgtcattaacacagctataacttgccgtggttctcagatttattttggactattttgatgccaagtgaatataagagcttgtactgaaaccatttatttctttctattttgctatttgcaaatgcttgttatcttccctacatgaagtggcagtaacctttttcacatttaagctacccttctaccttttgaagtgatttgcagttactcatctgagacagcatcagtatttgactaaatcattg

SEQ ID NO: 34422 - DNA, 389 bp, Homo sapiens
cccacgcgtccgattgcagctgggctcacccagggccacaggagttgatgaagaggacgtagaagtgtttgattcctttgaaaacatgcgagttttcctacagctaagaccagaataccgtgttcacagctataatgcatctgagacttctcagctcctgtctgtttcagaaggtgaactaattttgcacaaagtcagagttaatcaaaataatctccaggctcaagtcattgttgattatttgtgtaagctgagctctttgcctgcagagcagcatcctggcttgctgggcagtaccagctttgctctgctctgccagctgagtgtgaagaagatacagctctttgatacccaagatctgatcaatgttttgaaagcttttgtcattt

SEQ ID NO: 34423 - DNA, 418 bp, Homo sapiens
  misc_feature (1)...(418): n = a,t,c or g
agatgataaagatgaatcagctacaaatagtggcacaggtgccactgcttcttgtggcctgggatctgaattctccacagataaaggaggccctttcactgcagtacaaatcactaataccactggactggcccaggctcctgggttagcctcccaaggcatcagctttggcattaagaataatctggggaccccattgcaaaaattgggagtgtcattttcttttgccaaaaaggctcctgtcaaactcgaatcaatagcatcagttttcaaggaccatgcggaggaagggacctctgaagatggaacaaaacccgatgagaanagttctgaccaaggactgcanaaggtaggagactctgatgggagcagtaatcttgatggtaaaaaagaggatgaanaccctcaggatggaggg

SEQ ID NO: 34424 - DNA, 391 bp, Homo sapiens
cgccagatcagaaaagggagctcaggtaccttccagagagtgagacccagcgcccttgtctcgcacccagtaggctttcatccccgccatggcggagctgatccagaagaagctacagggagaagtggagaaatatcaacagctacagaaggacttaagtaaatccatgtcggggaggcagaaacttgaagcacaactaacagaaaataatatcgtgaaagaggaactggccctgctggatgggtccaacgtggtctttaaacttctgggtccggtgctagtcaaacaggagctgggggaggctcgggccacagtagggaagaggctggactatatcacagctgaaattaagcgatacgaatcccagcttcgggatcttgagcggcagtca

SEQ ID NO: 34425 - DNA, 395 bp, Homo sapiens
agcgccctgagggtgctgagcggagcccggaccggcaccctcaacggcgagatcagcgccctgacggccgaggcggcatgcgttcctgcggacgatcgcatcttgtgtcgctgaagcgcctcccccagggaccggcggaccccagccatccagggggcaagaggaattacgtgctctgtgggtctcccccaacgcgcctcgccggatctgagggagaacaagaccgatcggcggcactgcgcccttaactgcatccagcctggggctgaggctgaggcactggcgaggagagggcgctcctctctgcacacctactagtcaccagagactttagggggtgggattccactcgtgtgtttctattttttgaaaagcagacattttaaaaaatggtc

SEQ ID NO: 34426 - DNA, 399 bp, Homo sapiens
aatttacaaagaagtcatggattgggaagaaagaagcaagaatggtgttgtaaaagatcagccttcagattcagcagtaagtagcaacgccactccttctcagtcttcatcgatcaatgacatttcatccatgtccactgagcagacgctggcctcagacacagacagcagtcttgatgcctcgacgggaccccttgaaggctgtcgatgataggttagaaatagcaaacctgtcagcattgaaggaactctcacctccgtgggcctgaaatgcttgggagttgatggaaccaaatagaaaaactccatgttctgcatgtaagaaacacaatgccttgccctactcagacctgataggattgcctgcttagatgataaaatgaggcagaatatgtctga

SEQ ID NO: 34427 - DNA, 383 bp, Homo sapiens
  misc_feature (1)...(383): n = a,t,c or g
ggaaaagcattttaatgaaagcaggggctatgagatacacatgtttgatagtgccatgaatatcacagcttaccttgggaatactactgacaatttctttaaaatttccaacctgaagatgggtcataattacacgttcaccgtccaagcaagatgcctttttggcaaccagatctgtggggagcctgccatcctgctgtacgatgagctggggtctggtgcagatgcatctgcaacgcaggctgccagatctacggatgttgctgctgtggtggtgcccatcttattcctgatactgctgagcctgggggtggggtttgccatcctgtacacgaagcaccggaggctgcagagcagcttnaccgccttcgccaacagccact

SEQ ID NO: 34428 - DNA, 390 bp, Homo sapiens
  misc_feature (1)...(390): n = a,t,c or g
atcaattggaatcaagtctcagtcctgtggaagtgtttgctaaaacatctgcctccctggagatgaatcaaggcgtttcagaggaaagaattcaccttggctctagccctaaaaaagggggaaattgtgatctcagccaccaggaaagacttcagtcgaagtcccttcatttgtctcctcaagaacaatctgccagttatcaagacaggaggcantcctggcggcgagcaagtatgaaagaaacgaaccggcggaagtcgctgcatcccattcaccagggcatcacagagctcagccggtctatcagtgtcgatttagcagaaagcaaacggcttggctgctcctgctttccagtttccagttctctattcagaaacttgaacctttcct

SEQ ID NO: 34429 - DNA, 399 bp, Homo sapiens
ctccatagtgggaccctgaagatgtgaacctcgaaggcagcaaagaaaatgtggagcttttgtttgggtcaggggttatgacagatgagaagcatctatccgttccacccagctaccctttgcatcttttctccatagtgggaccctgaagatgtgaacctcgaaggcagcaaagaaaatgtggagctactgggatcccaggtgcaccaggactctgtgaggacagcacacctgagtgatgatgattaacaccttctggagccagctcatcagctcagagcccagggtcaggagttcgttcagtaacgcagcgggaatcaatctgcactgacaccgcggcaggaactgaagctgccctggcaagtgaggaaccaggagccgtcactgagtgtggctggc

SEQ ID NO: 34430 - DNA, 401 bp, Homo sapiens
tagaatcaaagatggatacaaagtgaactcacacatagctaagctgcaagagttatggaaaactccccaaaatcaaacaatccacctctctaaatcaatgatggaggcgtcctttttcaagcatccagacctcaccacaggccagaagcgttacctgtgcagcattgctaaaatctataatgcaaactatctgaagatgttaatgaagaggcagtacatgcacgtacttcagcacagctcacaaaagccaggtgtcctcactcatcacagaagccgccttagctcccgttactcacagaaacagcattacccttgcactacatggcgacatcaactggagagagaggactcggggtcttctgatatcgcagctgcatctgcacctgaaatgctcatacagc

SEQ ID NO: 34431 - DNA, 406 bp, Homo sapiens
gggagtggaatttcgtcaaccggtacttttaaggttaggatgggacgggaaaagtgaagcaggatattagctccttataccttctcccttccatttctgagatctcacattccatctatcacagggttttcaaagagatgctgagggtaacaaggaactcacttggcagtcagagcatcatgctttgaggtttggggtgctcaggctgggagggtagaatgccattccagaggacaagccacaaaaatgccttaatttgagctcgtatttacccctgctgataagtgacttgagagttcccggttttttcctcttgtccttccctcccttctgtccttccatgtgtggggaaagggtgtttttggtagagcttggtttccaaagcgcctggctttctcacttcacg

SEQ ID NO: 34432 - DNA, 406 bp, Homo sapiens
gaaagaactcatggaaatagaagaagtgagtgaaaatgtattacaagttcacttaaatggactgctgcagatcaatgacaaaatcgccctaaaggaaatcacaaggcagttaaatctggaaaatgtagttggagataaagtttttggaagctttgctgaaaacctttcatttcttctggaagctttaaaaaaaggtgaccgaactagcagttgcccagtgatcttcatattagatgaatttgatctttttgctcatcataaaaaccaaacacttctctataatctttttgacatttctcagtctgcacagaccccaatagcagttattggtcttacatgtagattggatattttggaactcttagaaaaaagagtgaagtcaagattttctcaccggcagatcact

SEQ ID NO: 34433 - DNA, 416 bp, Homo sapiens
  misc_feature (1)...(416): n = a,t,c or g
gcctaagtgatttttgaatgcttacatcaatgctaaaagacctacagagaagagaactggtttcctggtagttcttccgcaaaagcaggctgattgattgcggattgcaaccaggtccaactttctatcccaaatgacaaatgaagagctcttaaaaacagaataaaatatcccatattcagagaagtatctctgccaggccaggcatgaaaggcagtgagcaatgagaactgtgtgtaattcctgacccatccatagcctgtcacatttctacactctcagaaccagtgtcagtagggttggctggactccctggctttgccttcaggtcctacaccatccagcctaaaaccctgataacttcagcatctgcctttctgtactctgggtggtgcanaagaatggttcattttctg

SEQ ID NO: 34434 - DNA, 374 bp, Homo sapiens
agaaataataatttgaagatatttctgctattctctttatttcctgtattacactcatctttctgcttactctaaagcagtacagggtaaaaattctagatgctacagtttcaaatgactccacactatattctttcttgctgttgctgattcctaaaaggtttgatgagctgaactacatctaaactaaaaataaattttctggaaacattttattattaattatttagaacctttacctggtaaaatacagcagagttagcaacagagactaaatatcctgttgataaaatcctgatgatcttacaggctaaacaactgaaaactcaaacgcttgtaagagccaggcagagtgtaatttcttaacagctggg

SEQ ID NO: 34435 - DNA, 369 bp, Homo sapiens
cggacgcgtgggcggacgcgtgggctcttgcaatgggaatgatggaacttggggcccaaggatctacccagaaagaaatccgccactcaatgggatatgacagcctaaaaaatggtgaagaattttctttcttgaaggagttttcaaacatggtaactgctaaagagagccaatatgtgatgaaaattgccaattccttgtttgtgcaaaatggatttcatgtcaatgaggagtttttgcaaatgatgaaaaaatattttaatgcagcagtaaatcatgtggacttcagtcaaaatgtagccgtggccaactacatcaataagtgggtggagaataacacaaacaatctggtgaaagatttggtatccc

SEQ ID NO: 34436 - DNA, 411 bp, Homo sapiens
aattttcctgctactttatcattttcaagatgtcctctaggaattttttttctagtaattttgcaatctacctaataagtacctaaatacgctgaaatggaggttgaatatcctactgtgtaacaggtcagaatttcaagctctgggtaataactgctgatattttttctaatttcaaatttacctcttttggctatgtcttgccaagtgtgtatgagactagactttacaactgtctttgatggcattttcagaacaataaatgtcacaatcccttctatagccccctacagtgatctcttcaaggtcaactgcagtgttgcttccctccccctatagggctggaatctgtctaggagccctctctcggaggccacagaggctgggggtagccattgtgcagtcatggcc

SEQ ID NO: 34437 - DNA, 262 bp, Homo sapiens
cagaatcttatcaatacataagaaatttaggaagattaggtgccaaaatacccagcacaatacttgtatatttttagtaccatacagaagtaaaatcccaggaactatgaacactagaccttatgtggtttattccttcaatcatttcaaacattgaaagtagggcctacatggttatttgcctgctcactttatgtttacatctcccacattcataccaatatacgtcaggtttgcttaaccattgatttttttttttttt

SEQ ID NO: 34438 - DNA, 368 bp, Homo sapiens
  misc_feature (1)...(368): n = a,t,c or g
caaaagagaagataaataaggaagcagtgtggttcctttccaacataacagcaggcaaccagcaacaagttcaagctgtaatagatgctggattaattcctatgataattcatcagcttgctaagggggactttggaacacaaaaagaagctgcttgggcaatcagcaacttaacaataagtggcagaaaagatcaggttgagtaccttgtacagcagaatgtaataccaccgttctgtaatttactgtcagtgaaagattctcaagtggttcaggtggttctagatggtctaaaaaacattctgataatggccggtgatgaagcaagcacaatagctgaaataatagaggaatgtggaggnttggag

SEQ ID NO: 34439 - DNA, 366 bp, Homo sapiens
gagagaacagcaacccctttgacaacgatgaagaagaggttgtcacctttgagctgggcgagatgttgcttatgcttttggctgcaggtggggacgacgaactaacagactctgaagatgagtgggacttgtttcatgatgagctggaagatttttatgacttggatctatagcaaccttgcgtggcgtgtgaactggtctgctgacctcagacagcagctgtcccctgtggtggtgtggcagtgcctgtgttctctcctaggcaggcctctcaactccaggtgctgtcctaagaatttttacccagggcctgtcttctcaacccctcacctttccctgaggagtgtgttgtttccctgttgaaag

SEQ ID NO: 34440 - DNA, 368 bp, Homo sapiens
cgcgtctcgggggaggagtctgtaccctcgtgatgtccccgccccggttcccaggcaagtttagggaagtgaaaggcgccaggtgccagtcctggcctctgatgtaacccagcgccccgcagtcccgacacagattcctggatctcagccccatagcagctatgatcccgctgctgctggcagcgctgctgtgcgtccccgccggggccctgacctgctacggggactccgggcagcctgtagactggttcgtggtctacaagctgccagctcttagagggtccggggaggcggcgcagagagggctgcagtacaagtatctggacgagagctccggaggctggcgggacggcagggcactcatcaac

SEQ ID NO: 34441 - DNA, 362 bp, Homo sapiens
  misc_feature (1)...(362): n = a,t,c or g
cgctcttccttcccagcctgcctgcatgcatgtgcacccttggtcttcgctccatcgccttgaaagctctgaagaggccctgggttgccgcggcagcagtggtctgtttgatgctgccgtttgccgctgccggcccctcctcagactccgcctttgggagcacacctgctttgccttgctgcctgtgcaaatgttggacaagcagacacactcacactcgtccccagcttagcacaganctggagcgcccatttctggaattttccgtttgggaatctccacttctggggtttacctgttcggcctcctgtctatcaatgaggcatctctgactggatcttctactgcttttcaagntccct

SEQ ID NO: 34442 - DNA, 358 bp, Homo sapiens
  misc_feature (1)...(358): n = a,t,c or g
nnnnnnnnnnnnnnnnnnnnnnnnnnnnnnnnnnnnnnnnnnnnnnnnnnnnnnnnnnntngnctcattgtatgntatganttcacggttnnncantattctactatctnantttttattgnntgtnttttttaacctgtanatnnnnnnnnnnnnnnnnnnnnnnnnnnnnnnnnnnnnnnnnnnnnnnnnnnnnnnnnnnnnnnnnnnnnnntgnanactannatagacntccgatnccnnttcnannttgccgaatgnganttctaactantnttangctttaacatctaatactcttnaangtccntttnatctattgttcatagacnaatactnaatcattnttttaataaaa

SEQ ID NO: 34443 - DNA, 340 bp, Homo sapiens
  misc_feature (1)...(340): n = a,t,c or g
cggacgcgtgggnnnnnnnnnnnnnnnnnnnnnnnnnnnnnnnnnnnnnnnnnnnnnnnnnnnnnnnnnnnnnnnnnnnnnnnnnnnnnnnnnnnnnnnnnnnnnnnnnnnnnnnnnnnnnnnnnnnnnnnnnnnnnnnnnccccntactctttcaaacttacanacctaanntgcnttnatggggtagngatgaggtttaaaacntatncatatttngttaaanttccccaaatnatnntnggnatgaacgactatnttataaattttaanangtncttaaaaatcnttaanacntntancccngntttaatagacaacccntttattttgcanatttt

SEQ ID NO: 34444 - DNA, 349 bp, Homo sapiens
gtatggaagaatataaatgatggtgtggatgtcagggtgagggaggagacaaaaccacgatgacccctagctttgtggcctgaactgtgggtggctgaggggatcgttaattgaatggggcagactgaggcttgtgaggaagatcagagtctggttcttgacatgagatgcccttcagacatctcttcactcaggtccaactagggatacagaaacactgaatatttcaacagcagaaattgaatggggggattgatagccgctggcgagggaagcagctggaaagagacagatggcaccctgagacagcccagaggtgaataggacccccaggctgcagggataaagc

SEQ ID NO: 34445 - DNA, 343 bp, Homo sapiens
gtgactttggaagtccgtagtgtctcattgcagataatttttagcttagggcctggtggctaggtcggttctctcctttccagtcggagacctctgccgcaaacatgctccgccagatcatcggtcaggccaagaagcatccgagcttgatccccctctttgtatttattggaactggagctactggagcaacactgtatctcttgcgtctggcattgttcaatccagatgtttgttgggacagaaataacccagagccctggaacaaactgggtcccaatgatcaatacaagttctactcagtgaatgtggattacagcaagctgaagaaggaacgtccaga

SEQ ID NO: 34446 - DNA, 351 bp, Homo sapiens
  misc_feature (1)...(351): n = a,t,c or g
gatgcccgaatcgggcgcgggcagtgagttcaaccgcaagcttcgggaggaggctcggaggaagaagtacggcatcgtcctcaaggagttccggcccgaggaccagccctggctgctccgggtcaacggcaaatcaggcaggaagttcaagggcatcaagaagggaggcgtaacagagaacacgtcctactacatcttcacccagtgccccgacggggccttcgaggccttccccgtgcacaactggtacaatttcacaccgctggcccggcatcgcacgctcactgccgaggaggccgaggaggagtgggagaggaggancaaggtgctgaaccacttcagcatcatgca

SEQ ID NO: 34447 - DNA, 346 bp, Homo sapiens
gaaggctcgatcctgcgagaaggaagtggtctctgcccagcctgccaccttcctggcccgtagccctcacgtgggtgtgaaggacgtggagtgtggggaaggacacttctgccatgataaccagacctgctgccgagacaaccgacagggctgggcctgctgtccctaccgccagggcgtctgttgtgctgatcggcgccactgctgtcctgctggcttccgctgcgcagccaggggtaccaagtgtttgcgcagggaggccccgcgctgggacgcccctttgagggacccagccttgagacagctgctgtgagggacaagtactgaagactctgcagccctcggg

SEQ ID NO: 34448 - DNA, 364 bp, Homo sapiens
tgaagaagaggaggaagattaggagagctcctcggagggcttggaggctgaggactgggcccagggagtagtggaggccggtggcagcttcggggcttatggtgcccaggaggaagcccagtgccctactctgcatttcctggaaggtggggaggactctgattcagacagtgaggaagaggacgatgaggaagaggatgatgaagatgaagacgacgatgatgatgaggaggatggtgatgaggtgcctgtacccagctttggggaggccatggcttactttgccatggtcaagaggtacctgacctccttccccattgatgaccgcgtgcagagccacatcctccacttggaacacgatctg

SEQ ID NO: 34449 - DNA, 319 bp, Homo sapiens
gcccatggggcctgaaaggcatctgtcaggcgcccctgcccggatggcaacagtagttctaggaggagacaccatgggccctgagcgtatcttccccaatcagactgaggaactgggacatcagggcccttcagaaggcactggggattggagcagtgaggagcctgaggaagagcaggaggaaacggggtcgggcccagctggctactcctaccagcccctgaaccaagatcctgaacaagaggaggtggaactggcaccagtgggggatggagatgtagttgctgacatccaggatcgaatccaggccctggggctt

SEQ ID NO: 34450 - DNA, 321 bp, Homo sapiens
gaagactttctgggatctgaaagaagaatttcataaaatatgcatgctagcaaaagcacagaaagaccacttaagcaaacttaatataccagacactgcaactgaaacacagtgctctgtgcctatacagtgtacggataaaacagataaacaagaagcgctgtttaagcctcaggctaaagatgatataaatagaggtgcaccatccatcacatctgtcacaccaagaggactgtgcagagatgaggaagacacctcttttgaatcactttctaaattcaatgtcaagtttccacctatggacaatgactcaactttctt

SEQ ID NO: 34451 - DNA, 317 bp, Homo sapiens
gggcattcgcggggtgcgctgccctggagtcactggggaacgacccgactccagaggcctcgacctgacctgtctcctgttttgtctccccttaggtccggcgccagctgccagtcgaggaaccgaacccagccaaaaggcttctctttctgctgctcaccatcgtcttctgccagatcctgatggctgaagagggtgtgccggcgcccctgcctccagaggacgcccctaacgccgcatccctggcgcccacccctgtgtcccccgtcctcgagccctttaatctgacttcggagccctcggactacgctctggcc

SEQ ID NO: 34452 - DNA, 318 bp, Homo sapiens
atctaatttgaccttatgttctcacaattaaaggtttatattctagataacaggtagctgatagctcctgggttctcagctggtgtaattaacataattatgaaagccccaactttttcttttttttaagttcttagaggtagaacacagaacaatgagccaaaaaccctgtaatttataagattttgaaaaacaaaggataaaagtttagtcatgttgagtagctcaatagtattttgtttaaaagaatgttgaaattgtgtataggaacagttaaaccctgatgcccttttagctttttatttggagtaatactct

SEQ ID NO: 34453 - DNA, 354 bp, Homo sapiens
cagcaaagcactggctctgccgtctgacccctgatccaggcagccccctctgcagagaaaagggttggggagaagcctctgcagtcctggaagatgtggggtgctgggtgagaggcatcagcccccacaagtatgtttttgtgttttaagatagcagtttactttgaaaaagtgaaaaaggcttccgggctgtcctctgcccagtgagatggaggacgctagagaaagtgctgagtgtcccgagagaggcccccgagccagtgcatggaggtccttcggcctggctcagctgggctgcaggatgcccactttgaggagggaggcacagggcttgggcgaggggcagaggccatc

SEQ ID NO: 34454 - DNA, 353 bp, Homo sapiens
cgcagaccttacaaagacgggctttgttgccagctgggagtgtccactcgccttccaccagcatggcaacgtcttcacagtaccgccagctgctcagtgactacgggccaccgtccctaggctacacccagggaactgggaacagccaggtgccccaaagcaaatacgcggagctgctggccatcattgaagagctggggaaggagatcagacccacgtacgcagggagcaagagtgccatggagaggctgaagcgcggcatcattcacgctagaggactggttcgggagtgcttggcagaaacggaacggaatgccagatcctagctgccttgttggttttgaaggatttcc

SEQ ID NO: 34455 - DNA, 359 bp, Homo sapiens
gtttgaaatactattttttttaaatcaagttttataaaagtgtagaattttggcttttttaagttatgttgttagcacacaggacacttccttgttgtcttttgtggaaagggcaagtaccactaatagggtgtatctcagaaactgaattgaaataagggaaaataggattttctgtcctggtttttgaagattgttcttgattcccttgattcccaggagagattctctgacattcacgtgtcagccactttggcacggaagccttacagtgtggggaaccaaaacttcgtgtctcctctttccccgatgccatcagcatagacttgacttccttaaaccgagagttttgatgtggc

SEQ ID NO: 34456 - DNA, 372 bp, Homo sapiens
cctctctgcacgccagcccgcccgcacccaccatggccacagttcagcagctggaaggaagatggcgcctggtggacagcaaaggctttgatgaatacatgaaggagctaggagtgggaatagctttgcgaaaaatgggcgcaatggccaagccagattgtatcatcacttgtgatggtaaaaacctcaccataaaaactgagagcactttgaaaacaacacagttttcttgtaccctgggagagaagtttgaagaaaccacagctgatggcagaaaaactcagactgtctgcaactttacagatggtgcattggttcagcatcaggagtgggatgggaaggaaagcacaataacaagaaaattgaaagatg

SEQ ID NO: 34457 - DNA, 379 bp, Homo sapiens
caaaaatttctcccaaagaagaagagagaaaagatgagtctcctgcaacttggaggttaggacttagaaagacgggcagctatggtgcacttgctgaaatcacagcatctaaagagggtcagaaagaaaaagatactgcaggtgttacacgttcagcttcaagtcccagactttcctcctctttggataataaagaaaaggagaaagatagtaaaggaactaggcttgcatatgttgcacctacaataccaagacgactagccagtacatctgacattgaagagaaagaaaacagagattcttcaagtttgcgaacaagtagttcatatacaaggagaaaatgggaagatgatcttaaaaaaaatagctcagttaatga

SEQ ID NO: 34458 - DNA, 373 bp, Homo sapiens
  misc_feature (1)...(373): n = a,t,c or g
aaagacagtggcttctccaggtgtaagtgttgaggaggctgtggagcaaattgacattggtggagtaaccttactgagagctgcagccaaaaaccacgctcgagtgacagtggtgtgtgaaccagaggactatgtggtggtgtccacggagatgcagagctccgagagtaaggacacctccttggagactagacgccagttagccttgaaggcattcactcatacggcacaatatgatgaagcaatttcagattatttcaggaaacagtacagcaaaggcgtatctcagatgcccttgagatatggaatgaacccacatcagacccctgcccagctgtacacactgcangcccaagcttcccatcacagttct

SEQ ID NO: 34459 - DNA, 373 bp, Homo sapiens
aatttcttaaatctgaaatgcctcctgttcagttcaaacttctgggaacattaagaatgttaatagatgcacaagcagaagctgctgaacaattgggaaagaatgttaagttagtggagcgtttggtggaatggtgtgaagccaaagatcatgctggtgtgatgggggagtcaaacagactgctgtctgcccttatacgacacagtaaatcaaaagatgtaattaaaaccattgtgcagagtggtggcatcaagcatctagttaccatggcaactagtgaacatgtaataatgcagaatgaagctcttgttgctttggcattaatagcagctttagaattgggcactgctgagaaagatctagaaagtgctaa

SEQ ID NO: 34460 - DNA, 377 bp, Homo sapiens
gattatctcaaatcaaatcactttgatggagataaataatcaaaactgttttatagtcattgatttggtgagaacagtaatggaaaatggtgttgaaggacttctcatttttggagctttccttccagagtcctggctgattggtgttcgctgttcatctgagcccccaaaagcattattactgatacttgcacacagtcaaaagcgcagactggatggatggtcttttataaggcatttaagggtacactactgtgtttcactgaccatacatttttcttagcccctcaagtaatatagcacagagttatgaatgacaattcccctaaccattcctcttcatatctgcctcttccccttaccatcgtaattctcca

SEQ ID NO: 34461 - DNA, 343 bp, Homo sapiens
  misc_feature (1)...(343): n = a,t,c or g
gccatgtactcaagtaccaccaagggatctgccattgggaccctccagtgctggatttgatgagttaactgtgaaataccacaagcctgagaactgaattttgggacttctacccagatggaaaaataacaactatttttgttgttgttgtttgtaaatgcctcttaaattatatatttattttattctatgtatgttaatttatttagtttttaacaatctaacaataatatttcaagtgcctagactgttactttggcaatttcctggccctccactcctcatccccacaatctggcttagngccacccacctttgccacaaagctaggatggttctgtga

SEQ ID NO: 34462 - DNA, 397 bp, Homo sapiens
cgaggacaagaacccagactaccggaagcgcgtgtccgtggagctcaccaactccctcttcaagcatgacccggctgcctgggaggctgcccagagcatgattcccatcaatgagccctatggagatgacttggatgccacctaccgccccatgtactccagcgatgtgccccttgacccgctggagatgcacatggacatggatggagactaccccatcgacacctacagcgacggcctcaggcccccgtaccccactgcagaccacatgctggcctaggcggcctggccccagtgcggttcctcatctgagaggctctccgtgcaggcgatggggcaagacagaaaagtgcctgagctggggaagccggggtgtaacttcctgctgcaccctgcg

SEQ ID NO: 34463 - DNA, 389 bp, Homo sapiens
ataaatgttgctctaatcagattgcttaaaagcatttttattatatttatgttgttgaactaatatatgaaataagtaaatgtagctcccacaaggtaaacttcattggtaagattgcactgttctgattatgtaagcatttgtacatcttctttggaaataaaagataaaagagcgatacacaaagctttcttttctaacttttccaagcaaaatctaaaatgttttatgacatttttctggctgtgatcttaaaataattcatatctaaatagtattttgtctaggagatgctctctctctagtagttacaaattaaatctgtgtcagcattcctattaatgtctcactttactttcaagtaatattggtgctatttaacattttac

SEQ ID NO: 34464 - DNA, 390 bp, Homo sapiens
attaagttgtctcctaaaaagacttgggaaggattcattggtggtttcttttccacagttgtgtttggattcattgctgcctatgtgttatccaaataccagtactttgtctgcccagtggaataccgaagtgatgtaaactccttcgtgacagaatgtgagccctcagaacttttccagcttcagacttactcacttccaccctttctaaaggcagtcttgagacaggaaagagtgagcttgtaccctttccagatccacagcattgcactgtcaacctttgcatctttaattggcccatttggaggcttctttgctagtggattcaaaagagccttcaaaatcaaggattttgcaaataccattcctggacatggtgggataatggac

SEQ ID NO: 34465 - DNA, 329 bp, Homo sapiens
attttgatatcattaactttttcaaaagatccaactttttctctatgcctttgccacattctcttcagggtctctttccacagtggataaatgttttttctgtattatgacagtattgttgtgatggccatctgctggaaactcctgaagagcattatgtattacagtgagcagttgtattgcctgtttggtgcccaatggttaagtcattgtcacttagctttatattgtcagtttgatatttattttaaattgtggaactagatgcataaattcacatttctgcctttcctttgcatcttctcatatattgtgtttttttttttttt

SEQ ID NO: 34466 - DNA, 395 bp, Homo sapiens
attttaattgatctgtgaaaaaacctaagaaaatcacaatttcagctaacagcaattgtgtcccaaagatgaagatactataacctcaaatgatgcagatccagaactgggctggatgacatccctactgtgccatgtcctggggcatttggaagggactggacctctttcccctcatcaaaggaaacagcagtctttgcctctttctgttggttgtgcccaagggctacagtagctctgaaataacaagagctctgtaataacagtaataaatagctctgaaataacagtcctaagaactcctaaagtcctgagaacttttcttgtaatgcagctttttctcttcctgagaaacagtgtgttctaatgggattcccaggcagttcctacacctg

SEQ ID NO: 34467 - DNA, 409 bp, Homo sapiens
cccacgcgtccgaaaataacatgtataaaaacccctgaagtattgtgtgggtgtgtacgtgtgagtgtgtgtttgtataccgtctggcaattaaagctttgtcttctggaacttagtgaattcttttctctttttcctccagaagtatttgttacaagatttgtaaataagagctctacttagtttgtttaccatgaacatgttgcagcaaaccttatgcatctaattcctacaaggttaaagaaaggcttttagacttgccaggttaagcaacagccaagttctcagtaattgtttgccttgatttatcttttagacttcattttgccagctctaaaactcccagtcttccttgattttagtccttaatcttttatgttctgagcaggaagggtaaaagacaggaacc

SEQ ID NO: 34468 - DNA, 412 bp, Homo sapiens
cagatcgatctaagatggcgactgtcgaaccggaaaccacccctactcctaatcccccgactacagaagaggagaaaacggaatctaatcaggaggttgctaacccagaacactatattaaacatcccctacagaacagatgggcactctggttttttaaaaatgataaaagcaaaacttggcaagcaaacctgcggctgatctccaagtttgatactgttgaagacttttgggctctgtacaaccatatccagttgtctagtaatttaatgcctggctgtgactactcactttttaaggatggtattgagcctatgtgggaagatgagaaaaacaaacggggaggacgatggctaattacattgaacaaacagcagagacgaagtgacctcgatcgcttttggctagagac

SEQ ID NO: 34469 - DNA, 412 bp, Homo sapiens
  misc_feature (1)...(412): n = a,t,c or g
ccctgtgggaggtgctgatgctctgtagggcccagccctttgggcagctcaccgacgagcaggtcatcgagaacgcgggggagttcttccgggaccagggccggcaggtgtacctgtcccggccgcctgcctgcccgcagggcctatatgagctgatgcttcggtgctggagccgggagtctgagcagcgaccacccttttcccagctgcatcggttcctggcagaggatgcactcaacacggtgtgaatcacacatccagctgcccctccctcagggagtgatccaggggaagccagtgacactaaaacaagaggacacaatggcacctctgcccttcccctcccgacagcccatcacctctaatagaggcaagtgagactgcaggtggctgggcccacccanggagctgg

SEQ ID NO: 34470 - DNA, 412 bp, Homo sapiens
cccggacattgccatcaacagctgaacagcctgcccaccatggaaggacccccaaccttcaacccgcctgtgccatatttcgggaggctgcaaggagggctcacagctcgaagaaccatcatcatcaagggctatgtgcctcccacaggcaagagctttgctatcaacttcaaggtgggctcctcaggggacatagctctgcacattaatccccgcatgggcaacggtaccgtggtccggaacagccttctgaatggctcgtggggatccgaggagaagaagatcacccacaacccatttggtcccggacagttctttgatctgtccattcgctgtggcttggatcgcttcaaggtttacgccaatggccagcacctctttgactttgccatcgctctcggcttcagagggt

SEQ ID NO: 34471 - DNA, 392 bp, Homo sapiens
ctccccagaaagagtccttaccttggagagggtcctggagagaatttcctcttccccagctaaataccctgcctgcaactgaagcagacccgggggtgtcctccctgccctctgcccagaggccacctccactcctacaaaatcaaagtattgtccagacaagagtcactggcccctgctccagcttctgggtatccagagagcactgcacttccccaaaacggaaggggcccctgggcagtgggttttgggcaaattccctttctttgcatccacaatgtggggtcggagcttgggggcaggtcctgggagtgggaagcctcttccttgagtctttcgctccacttttagctcatcgcaccaatattgcagacttggaaggaagcataaac

SEQ ID NO: 34472 - DNA, 397 bp, Homo sapiens
gtagatgcttattctttgctttagaaaacttctcacttaaaaagatggcatgcacctaggggaataaaaggtcacctcagacaccaggtgtcattcctggtgaggcctgcctcgtcggtggcctggggtctgccggcaggttctggctgcacctgaaggctgcgtgcaccttgtcccctggacaggtctcctttcctggccctgctccagcccagcccttcttctagtggtagctctggctttgcaggcccagctccaggccctgctcctcagagagactcttcgagagctggagctgggcacagccataagacaggactggaccagatgctcctgtaaacatccaggggtgtgccaggcccaccctcacaactgcttgttcaggtatcgtgatggg

SEQ ID NO: 34473 - DNA, 405 bp, Homo sapiens
gcggcggccaccggaccctcgttatggctggggaatgaaaccctgaaggtgccgctggcgctctttgccttgaaccggcagcgcctgtgtgagcggctgcggaagaaccctgctgtgcaggccggctccatcgtggtcctgcagggcggggaggagactcagcgctactgcaccgacaccggggtcctcttccgccaggagtccttctttcactgggcgttcggtgtcactgagccaggctgctatggtgtcatcgatgttgacactgggaagtcgaccctgtttgtgcccaggcttcctgccagccatgccacctggatgggaaagatccattccaaggagcacttcaaggagaagtatgccgtggacgacgtccagtacgtagatgagattgcagcgttctgg

SEQ ID NO: 34474 - DNA, 402 bp, Homo sapiens
cgaggaattggaaactttaaatggaattatctaatttaaattcttagttttttctttgtctttctcagctgatacttgtagttttgttttgttttttaaccaccaagaacacttgcaagtttgttactgaaaacatcactaaaggaaaagaagagtttcaaaatgcttgaaaagtagtatgtggttgggaattgtttttgttcaagtccctggaagtcctcttggcttagctcccttgttcctgttcccacttcatttccttacttaacattcccctattttgagcatgtcaataagtgcatgatgaatggcacagttgaatgatcatgttaactttaattgcttcctttgttgctgtaaacagtttcttgttaagtttcagccaagtctgtgacaatctca

SEQ ID NO: 34475 - DNA, 400 bp, Homo sapiens
  misc_feature (1)...(400): n = a,t,c or g
aaacatactaccttgatgtgacatttttttcttaaccttgttgagctggttttgttcagcttaatttactgttcaaaggcattatctgttggtcacaccagtgggtatatgattgaatttagggaacagggttgacacagcagggctagtcctgcatattttttcttaaatatttcccaattgtgtttttcattatttcttttcaatatataacttttataacaaattattagctttgatcttgtagtttaaaattgcagggaactggggtaatcttttactgagctggatcttagagaaaatgaatatttaaattttaaagtttgcacatttcatctttgtcctaacatgagtgcttgtaacaaaataaacaacanaaacaaagccaaaaactaccttt

SEQ ID NO: 34476 - DNA, 398 bp, Homo sapiens
  misc_feature (1)...(398): n = a,t,c or g
aatttctgtacattcacattcaacatacatttttcaaagtgtttcttggtataataaatatgttgattttatggcttccaaaaattcctttctatcactgttcaaatatttccttctaagttatctttacaatgatggatataaagagaagaatggggaggtatttatcaagtaatttctttatcagtatcctaaatgaaataagactgacctttgagcaaatgtgtagtagcagccataggtgctggcatgtttgcattcttgcatacagtaagatttcttgcttccctttatcatcatctaaatggcttcattggcatcacactcatcagatgaaatgcagnactggattcttctctaaaagcagngattctgngactgctgctctaaactctagg

SEQ ID NO: 34477 - DNA, 388 bp, Homo sapiens
tttgtgctgtgatttgggcaaatcattccaggtctttgggcctccacccccttgtctctagtggacatttgagatcagagagcaccacagggctggctttgtgccctaacccctgggatgcagcctgcctttccataaagtcacctaggtgaggataggcgcgggagcctcggcatgacaccatggagatcggggccctcttcccagtgggttcactccttttcacacctgctgggtccctcctcacccagcaggcctggtccacctctcattgcaagccccaagcactgagccagcaggtgccagggagccacccgcccccatcgcttctgcacacctcagactcaccccatcaccttggcagcaaagcactggctctgccgtctga

SEQ ID NO: 34478 - DNA, 401 bp, Homo sapiens
ggccatttactgcaaggatgttctggacattgaacagttctctacggtcaagggcgtggagctggagcctaccgaccaggacttctaccagaagtttgccacaggcagtgtgcccatcccctggcagaacgagatggtggagaccgagtgcttccaagagctgaatgtctttgggctggatggctcagttcccccagacctggactggaagggccagccacctgcacctcctaaaaagggactgctgcagagactcttcagtcgccaagattgctgtggaaactgcagcgacagcgaggaagagctccccacccgcctctagcccccagcccgaggcccccaccagcagttggcggtagcagctactccgagcgccgtttacagttttgcacagtgatctt

SEQ ID NO: 34479 - DNA, 401 bp, Homo sapiens
  misc_feature (1)...(401): n = a,t,c or g
ggcacactggccaaaacgtttgtgcatctgtcactctcgtgtagtttacaaaaatcgtgtctcttattcagtaagatggttactcagccaccaaaatatatttcactcaaggcttgtacatctgaagtttgctcttcaaggaatgggaaccttcctgttaaattcggtgtatggattttaagaaaggaatctagccaatgaggtccaagaagttctcacccattgaatttttaaatggctgttcagttcatgttgtacgtgatggagatttgacttttgttttatttgcattttacagatttggtataacattttggggagccacctgaaggttgatgtataaagtacggattagagaaagaggtcgttggcnaccattantntctgtcctgccccactta

SEQ ID NO: 34480 - DNA, 412 bp, Homo sapiens
tgaaaacaagccaaaggtgcagtgctgtcagaacatctaaggcatttctcttctcccctagaaggctgtgtatagtccatttcccaggtctgagatttaaatatatttgtaattcttgtgtcacttttgtgttttattacttcatacttatgaatttttccatgtcctaagtcttttgattttagctttataaaatcatccacttgtcccgaatgactgcagctttttttcatgctatggcttcactagccttagtttaataaactgaatgtttggattcctcagttattgtttacttttcatcatggaagcctgtcactgtatgtaggacataatagaacttgatcacttgaagctcagacctattggtcttgatcaaatcaaactaagaagaccttagaaataagctacc

SEQ ID NO: 34481 - DNA, 412 bp, Homo sapiens
tccaattgcaaaatgtatttttaaaaacctttatactttaaagtgaagagattttttttcaaggggataaaatctcttcactttaaagtataaaggtttttaaaaatccaattgcaaaatgtattatttttacaactatcgaaaaggcataaaagagaacatactatttatggctgaagggtatagccaggctaatgtgcacagagggaatcaataaataaaactctttttcatttcagtaagaaatcagattgtaagtttaatggctccattatagataccaccgtgtaatagaagacttaagtcaatgaaatctaatcagtgtgtcatttctcagcggccattggtgacttaaaattaagatgaggcagagccaaaatggaaaacagtcattttgttgtaggtataaacg

SEQ ID NO: 34482 - DNA, 409 bp, Homo sapiens
  misc_feature (1)...(409): n = a,t,c or g
cctgtgtggtgttcaccgggcacccttccctccgcttcggggacgtggtccacttcatggagctctggggaaaatctagtctcaataccgtcatattcacggaaccagacttctcctacctggaagccctggctccttaccagccgctggccatgaaatgcatctactgccccatcgacacccggctgaacttcatccaggtgtcaaagctgcttaaagaagtgcagcccctgcacgtggtgtgtcctgagcagtacactcagccgcccccagcccagtcccacaggatggacctcatgatcgactgccagccccccgccatgtcctatcggcgggctgaggttctcgccctgcccttcaaacgtcggtacgagaagatcgagatcatgccanagctcgcagattcact

SEQ ID NO: 34483 - DNA, 416 bp, Homo sapiens
ttcagcagtggtggtgaagttaaatgtgaatttgaacacaaggtcataaaagaaaaggttcctccaagacctattctgaaacagaaatgttctagcctagagaaactaagactgaaagaagacaaaaaattgaagagaaagatccaaaaaaaagaagcaaaaaagttagcacaagaaagaatggaggaggacttaagagaaagtaatccacccaaaaatgaagagcagaaagaaactgtagacaatgttcagcgttgtcagttccttgatgacagaattctacagtgtataaagcagtatgctgacaagattaaatccggcatacagaatacagccacgcttctcaaagaattgctttcttggaaagttttgagcacagaagactatacaacctgtttttctagcagaaattttct

SEQ ID NO: 34484 - DNA, 390 bp, Homo sapiens
cggacgcgtgggcatttcccctctgtcaattggctcatcagctacagcaagtatatgcgtgccttggatgaatactatgacaaacacttcacagagttcgttcctctgaggacgaaagctaaggaaattctgcaggaagaagaagacctggcagaaattgtacagcttgtgggaaaggcttctttggcagaaacagataaaatcactctggaggtagcaaaacttatcaaagatgatttcctacaacaaaatggatatactccttatgacaggttctgcccattctacaagacagtagggatgctgtccaacatgattgcattttatgatatggctcgtagagctgttgaaaccactgcccagagtgacaataaaatcacatggtccatt

SEQ ID NO: 34485 - DNA, 391 bp, Homo sapiens
aattggaagccgagatggaccgcagaccagcaacagtagtatgaaactccaaaatgcaaactgaagcagcaaacccacaaagcatcaaaagactcactcacaaacttctgaacacaaactccatggatgaaagctgtttattttgtttcctttatgtgtaaacaagatgatatctgaaaccagagagacttggaatgtctgactgacttctatttaacagcttgagtattgcatttccttggccaaacaaaaatagctacaaatccacaaaaatttactattccagtaaggcagagtccaaccattgataatacaacttaaacatgtttgctataaaataccatcacaagtaaatgagcttggtgtgaacaactctcctttgtgatgcctt

SEQ ID NO: 34486 - DNA, 294 bp, Homo sapiens
aacgggctggagggtctgggcaacgacagccgagacatgtacatggagtctgagggcggcgacggctacctggctccggagaatgggtatttgatggaggctgcgccggagtgaagaggtcgtcctctccatctgctgtgtttggacgcgttcctgcccagccccttgctgtcatcccctcccccaaccttggccacttgagtttgtcctccaagggtaggtgtctcatttgttctggccccttggatttaaaaataaaattaatttcctgttgatagtgaaaaaaaaaaaaaa

SEQ ID NO: 34487 - DNA, 370 bp, Homo sapiens
gcgaggcggagcaggcccgggcctccatgcaggctgagatggagctgaaggaggaggaggctgcccggcagctgcagcgcatcaaggagctggaggagatgcagcagcggttgcaggaggccctgcaactagaggtgaaagctcggcgagatgaagaatctgtgcgaatcgctcagaccagactgctggaagaggaggaagagaagctgaagcagttgatgcagctgaaggaggagcaggagcgctacatcgaacgggcgcagcaggagaaggaagagctgcagcaggagatggcacagcagagccgctccctgcagcaggcccagcagcagctggaggaggtgcggcagaaccggcagagggctgacga

SEQ ID NO: 34488 - DNA, 361 bp, Homo sapiens
  misc_feature (1)...(361): n = a,t,c or g
caaccataaaaattaactnnnnnnnnnnnnnnnnnnnnnnnnnnnnnnnnnnnnnnnnnnnnnnnnnnnnnnnnnnnnnnnnnnnnnnnnnnnnnnnnnnnnnnnnnnnnnnnnnnnnnnnnnnnnnnnnnnnnnnnnnnnnnnnnnnnnnnnnnnnnnnnnnnnnnnnnnnnnnnnnnnnnnnnnnnnnnnnnnnnnnnnnnnnnnnnnnnnnnnnnnnnnnnnnnnnnnnnnnnnnnnnnnnnnnnnnnnnnnnnnnnnnnnnnnnnnnnnnnnnnnnnnnnnnnnnnnnnnnnnnnnnnnnnaagaagaagananctagaaaaagancnagaanaagataaaacttttgatgccagta

SEQ ID NO: 34489 - DNA, 415 bp, Homo sapiens
gcaaggagaaataaaaatgaaagaaaaaagagagaacagaatatccaagaactgtgggacaatttaaaaggatgtaacacgttatttgaataccacaagaattagaaagcagcaggagagatatttgaagtagtaatggccaagaattttccgaagttgttgacagatgcaaaactacagaaccaggaaactcagaggacaccaagaagaataaataccaaaatatatacatctatgcacatcatcttcaaatgcaggaaaagaaagacaaatagaaaatactgaaagaagccacaaggaaggaaaatactagaggaataaaaataagaaatcttatcagaaaccatgcaagaagagagtggagtgagatataaagtgttcagagaaaaactactaacctagtcttctgtatccg

SEQ ID NO: 34490 - DNA, 418 bp, Homo sapiens
  misc_feature (1)...(418): n = a,t,c or g
gtcagtggttaaaagtatttaacactctactgttaatgacagatgttctgtttttataacctaccaaaaggaaactagaggcttcttggtgaagagcatttttgtgaagtgggttctgcaaggagcctataaagccaagggtggtgtccatttctgggaatggttaaacacaaaaggctgatagctggtatcacatagttggagtcagtgcataattccaagtggctttttttttttnggcncgggnnctgntcagnaaaanatntncnngcnnaactnantntnanccanggnttgnagttnantttnccncctngcnttccntttngggnnaccnacccnttggccaaaaaaaaccaaaaggcaaaaaccaaaaccntnccntgttngggttttttncctccnttaantccccccc

SEQ ID NO: 34491 - DNA, 407 bp, Homo sapiens
ctcacatactgacttcagtgggactcggtgagccggggccgtctgtgtggtgggaccccctttagcgggactcagtgagctggggccgtctgtgtggtggagccagggcctctccctttagtggagccaggttgtcgggccccgaatgtcactggtggatctaagaagggctgagtggtctgacaccaaaacatgccgcagggagggctgtggtgccggtgcttccaacaaggacagccctccttgaccctgaaaggaacactggcttgaaggactgcagacaggctctgaggggcacgccctcctcagcgagaggcagcaaggtggccacagtgtcactggtcaggtgcttctcaccacgggaaagccgccgacctgtgactcgcttgagatgggaaagcggcgcc

SEQ ID NO: 34492 - DNA, 395 bp, Homo sapiens
ggcctccagcacctacttggtcccgcgcgctccctcgtgtcgcccctcggagcagcagccgccgcggtcgccgctacccggaaagaagtcagagacgccgcgaggtcgccgccaccgccatgcccaagaataaaggtaaaggaggtaaaaatagacgcaggggtaagaatgagaatgaatctgaaaaaagagaactggtattcaaagaggatggtcaggagtatgctcaggtaatcaaaatgttgggaaatggacggctagaagcaatgtgtttcgatggtgtaaagaggttatgtcacatcagaggaaaattgagaaaaaaggtttggataaatacctcggacattattttggttggtctccgagactaccaggataacaaagctgatgtaatt

SEQ ID NO: 34493 - DNA, 412 bp, Homo sapiens
  misc_feature (1)...(412): n = a,t,c or g
nnnnnnnnnnnnnnnnnnnnnnnnnnnnnnnnnnnnnnnnnnnnnnnnnnnnnnnnnnnnnnnnnnnnnnnnnnnnnnnnnnnnnnnnnnnncttttcaaagcagaactacaaagatgagaaattaccagaagcctcgccttttcctaagcaccagcggaaggagctgtgccccgggatggagtgagggtggagggcgcgtcagccacgggtgggccttgtgtcgccttgtatcggcccaggtaggttgttggcctcttacttgggctgacctgacccccgaaagagaaacagacaactctgttctcaggattggggatggacggcttcggccaagcgttttagcctcattcactcangccccactcaggcactctgcagccaagaccattgatttggaaaatccggtcccg

SEQ ID NO: 34494 - DNA, 390 bp, Homo sapiens
ggtacacaaggtgggagaggcctgctgtagcagaggtgtgtgttagagaaagcaggggcctgatttagtagcagagaactgggtgagaaaaatggccagagaaagtgacctgccagctaccagtgtttccgaaaatgagggtgggatgggcccatttgcagagcaggacagcagtcatccccatagccctctgaggaggggagggatgcttagagcaggcagttctgtcagttctgacgtggcaggtgccattgcaacttgtgcggaggagtcttaggaagtgctgtcataattcataaggtcaagagcaacatctggatgaatgagccacctgaaatgtgtgtgggctgagccacaggaagggtgagtcctcttgcttgtggtgcttta

SEQ ID NO: 34495 - DNA, 397 bp, Homo sapiens
ggtaaggatagtggcaccacgtaagaagtctcatgtttgttaacggtgtgtgatggtgcttgttgatggtctagtgttagaccctgcttagccaggacagcagtgggctccgtttgagggaatttggtcacccctccttagctcaggctttgatgtgatgatttataggacagtgcatggtgagagggtctgggaatgggattccaacaatgtgtttggatgcccttcctcccagaaggctgtatctaatactaggcacaagctccctaaacccaagtcctaaggcagttttaagctaaaggacagaaaaacatcattcctgagatacagacgggcagttcttccagaccagtgtaatttagcctaagtccttacagttatcctccactgtcactgg

SEQ ID NO: 34496 - DNA, 489 bp, Homo sapiens
  misc_feature (1)...(489): n = a,t,c or g
gnngnnnnagtngntnngtgtctgatacctangagactcttatgacatgacnnnnnnnnnnnnnnnnnnnnnnnnnnnnnnnnnnnnnnnnnnnnnnnnnnnnnggcacgagaaattgaaaatggtgtgaatttagattaaaggtgaagcttattacttaattttccttttaacatacggttcttggcaacaggcagaaaataaatgcaatgaagtcagtgtttcagtacgtgaaactgtacaaacagtagcaagttactggagctgacagttttcaaatgatagtagcgggttatgtaagtcacccaagatggctcaatgtactattatttccagacagagttggaaatagcacgtgccaaggcaacaggcagtcagacaaaaacataacaatttactttccaataattatcatcacttcttgccaggctggaactcaattgatctgatacagcagaatatctttttgtatggatntctttcaagcta

SEQ ID NO: 34497 - DNA, 490 bp, Homo sapiens
  misc_feature (1)...(490): n = a,t,c or g
gnnnnnnnnagnnngnnnnntgntttgataccnntgacaccgtnnnnnnnnnnnnnnnnnnnnnnnnnnnnnnnnnnnnnnnnnnnnnnnnnnnnnnnnnnnnnnnnnggcacgagcggcacgaggaaagacctgaagattttcctgaagatggccctagaatttttggtcagcagcttgtccaagcaatgtccattccccacactgcggtcccctgccccctcatactgtaagaggacctcgctctcacttgggaagagaagagggaattcatgttgggcttatgcttctcaagggactaggaatatatagaactggctgtgaactaagaatggctaagttgtttttggaaaagctcagcaagctagttatggaatgaatgataaaagttgtnnnnnnnnnnnnnnnnnnnnnnnnnnnnnnnnnnnnnnnnnnnnnnnnnnnnnnnnnnnnnnnnnnnnnnnnnnnnnnnnnnnnnnnnnnnnnnnnn

SEQ ID NO: 34498 - DNA, 482 bp, Homo sapiens
  misc_feature (1)...(482): n = a,t,c or g
gnngnnnnngtgnntntgnctatgagaccgttngactcnnnnnnnnnnnnnnnnnnnnnnnnnnnnnnnnnnnnnnnnnnnnnnnnnnnnnnnnggcacgagttgggctgaatccctaccctggcatcctggtgaacagcaagttctataaactggtgaaggatggataccaaatggcccagcctgcatttgccccaaagaatatatacagcatcatgcaggcctgctgggccttggagcccacccacagacccaccttccagcagatctgctccttccttcaggagcaggcccaagaggacaggagagagcgggactataccaatctgccgagcagcagcagaagcggtggcagcggcagcagcagcagtgagctggaggaggagagctctagtgagcacctgacctgctgcgagcaaggggatatcgcccagcccttgctgcagcccaacaactatcagttctgctgaggagttgacgac

SEQ ID NO: 34499 - DNA, 468 bp, Homo sapiens
  misc_feature (1)...(468): n = a,t,c or g
gnnnnccccccntngccacccccccnttggncagcgnnnnnnnnnnnnnnnnnnnnnnnnnnnnnnnnnnnnnnnnnnnnnnnnnnnnnnnnnnnnnnaattcggcacgagcgtgggctttttgggtgcgtcctcatttcttgggtggggccagagccccccatgggctgtgaggacacaaggcgccctccaagcatgagctctgagagtgggtgagagggaccccgatggagggaagcccactacaggtcacgaagctctttcagatgtcagctcgttcagggctcactgccactctaggaatagtaagacccgggactctgagggtcacatggcagagccaggattcaaacctacatctgctgttttcagtgcctgagccttctggaaaatggattaggctgctgctgggtctccaccccatttcacagatggaaaactgagcagggagggagagtaanactctgt

SEQ ID NO: 34500 - DNA, 467 bp, Homo sapiens
  misc_feature (1)...(467): n = a,t,c or g
ggccccnnngnncnccccnttnacccccnnccntgagtaccgtnnnnnnnnnnnnnnnnnnnnnnnnnnnnnnnnnnnnnnnnnnnnnnnnnnnnnnnnnnnnnnnnnggcacgagacgaaactcattataagtgtaggaacgtaaatattattattatactataaaaatataaagtaatacttctaaaatacatatactcttcatttgttaatcttccttaatcctgaactattttcattttctgcttaggtaatcttagttttctgtagattcagatggatttaaatgttttttgtaaacctgcttgtggcttcaaaaccactaggcactatgccagctattaaaagtagatttttattctacagcttanttgtccataataaaacttggccannnnnnnnnnnnnnnnnnnnnnnnnnnnnnnnnnnnnnnnnnnnnnnnnnnnnnnnnnnnnnnnnnnnnnnn

SEQ ID NO: 34501 - DNA, 458 bp, Homo sapiens
  misc_feature (1)...(458): n = a,t,c or g
gcgccncgnncgcccttgacncctccnatgagaccgtnnnnnnnnnnnnnnnnnnnnnnnnnnnnnnnnnnnnnnnnnnnnnnnnnnnnnnnnnnnnnnnnnggcacgagctacctgaacggcgacggcaccgggcgaggaacacacctgtccctcttctttgtggtgatgaagggcccgaatgacgccctgctgcggtggcccttcaaccagaaggtgaccttaatgctgctcgaccagaataaccgggagcacgtgattgacgccttcaggcccgacgtgacttcatcctcttttcagaggccagtcaacgacatgaacatcgcaagcggctgccccctcttctgccccgtctccaagatggaggcaaagaattcctacgtgcgggacgatgccatcttcatcaaggccattgtggacctgacagggctctaactgccccctactggngcnggggg

SEQ ID NO: 34502 - DNA, 513 bp, Homo sapiens
  misc_feature (1)...(513): n = a,t,c or g
gnnnngnnnnnntnnnnntnnnnnntctgaaacctntgactgattcgaaccnnnnnnnnnnnnnnnnnnnnnnnnnnnnnnnnnnnnnnnnnnnnnggcacgagccttggtgatgaggcaggtattgtcacccctctgaataaatccttaggcaaagtacaaaaacaccagccggctgaacaatgcctggccactctggccttaggattgcagtaccttacgggtaagtttagaaatgagtttcctgttcaggttttaggcctgtcatactgttgagtggctgtctaacctttgaactttctgtgtttttgacatcaaaaggaactctaagctttaccaaaaaggttttattcgagtaattaatactcttcatgcacagagggaaattagcctccaacttgtggacatggtgaaaaattagtatcttcccatttgctcggcttgtttgaactatagttgattatttttaaagataaggagatcaaatttccttaatatttcagtatgttgctt

SEQ ID NO: 34503 - DNA, 480 bp, Homo sapiens
  misc_feature (1)...(480): n = a,t,c or g
aaacccttgacnnnnnnnnnnnnnnnnnnnnnnnnnnnnnnnnnnnnnnnnnnnnnnnnnnnnnnnnnnggcacgagggattttgttggctatcagttttccctgggtgacttagctctgtccttactctggtgctggctggggttgatggggaaatatccacactgtacgtcttgctggcagaagaacagaatcttttcaggtcccaacgcatgtgccaacacacatgcatgcatcctgtgacttgtctgggcgtgttcatctgtgtgctgatatgtgtaaagcctgggtgtgctgtgtagtgatgccattgggctgctctctcctaatccctggatgcctgcctgtcagggcttgcctgtttggggtcaaatggtcccattggtgtttgtcagcgtgcatctatagaagtctctgtgtgcccaagtcacctcctgcctcttccccagatacagcttggatcgagcttcctgcagtctg

SEQ ID NO: 34504 - DNA, 486 bp, Homo sapiens
  misc_feature (1)...(486): n = a,t,c or g
tttggaaaccctntgactgattnnnnnnnnnnnnnnnnnnnnnnnnnnnnnnnnnnnnnnnnnnnnnnnnnnnnggcacgaggggaagagagaaatgcatgggaaaagaacacctccttttctcctttctcttaaattcaaagacgtttgctttggaatgccctcacttctccctattcacaggcttctaaaatcattaatttactcaaggcacatgtgccttctttgccccaaatgcatcactttccttttagttatggctgattttgggtgtgtgtgtgtaagacatgcagtcaacaatgagatgaaggccattgcatagatctcatgcagatagtgatggattcagaaagtaggttccagtggcgtcactaccttcttgtaagccagtatacactggctatttgtggaaatctctttgggagatcaaatagagtattatgccactgtgagtgtttataaactggaaggaacaagtacctgtgg

SEQ ID NO: 34505 - DNA, 524 bp, Homo sapiens
  misc_feature (1)...(524): n = a,t,c or g
gnnnnggnnnnnntnnnnnttnnnnnnnttngganaaccctatgtnntgattacgnattcctaanacncttatgacatgacnacganccnnnnnnnnnnnnnnnnnnnnnnnnnnnnnnnnnnnnnnnnnnnnnggcacgaggggaagttgttaattatttcccattgtatggaaagaaactaaggaccacaaagggggatggtcccagagctggggcagagtcaggcaccaggagcctggtccccatctccccagctgccctctgggcatgtcctcctcccagccagatgatgtccccagtggataacagctaaggggcagtctgtgggttctgcacctgttatggtccctgcgggggcaccacccagatcaaggcccccgactgagcgcgagtggctctagtcagctttctcgaggtgcacaccacttaaggtccccagctcatgctcctgaggcctggggatgtgtggcttgtttattggagaagtgcatttgtacagaatggagttgttggcggggaggg

SEQ ID NO: 34506 - DNA, 464 bp, Homo sapiens
  misc_feature (1)...(464): n = a,t,c or g
atttganaccnnnnnnnnnnnnnnnnnnnnnnnnnnnnnnnnnnnnnnnnnnnnnnnnnnnnnnnnnnnnnnnnnnggcacgagcggcacgaggattgaaattatattggccacaataacattttctggtctgagtttacttttttagagatctcaacttatttatctattactatttattatttgtgagatagggtnnnnnnnnnnnnnnnnnnnnnnnnnnnnnnnnnnnnnnnnnnnnnnnnnnnnnnnnnnnnccagcttcaggtgatccaatgacctcagcctccccagcaggggaattacaggcacgaactgtnnnnnnnnnnnnnnnnnnnnnnnnnnnnnnnnnnnnnnnnnnnnnnnnnnnnnnnnnnnnnnnnnnnnnnnnnnnnnnnnnnnnnnnnnnnnnnnnnnnnnnnnnnnnnnnnnnnnnnnnagctgtgcttggcctatggtttcaa

SEQ ID NO: 34507 - DNA, 475 bp, Homo sapiens
  misc_feature (1)...(475): n = a,t,c or g
ccnctnnnnnnnnnnnnnnnnnnnnnnnnnnnnnnnnnnnnnnnnnnnnnnnnnnnnnnnnnnnnnnnggcacgagtttttgctggagattacccagagctattcactaccatgttgtcattatgaacagaaaaactgtaaacaaataccaagcctaaatatccatttttggcacttaaaagtgaaatagagagcctggaggaagacttggtcaacagtaactttagttatatatatatatatatatatgaacatatatatgaatgttatatttatatatataaatacaaaaaaacaggagacagaaatttaaaataaagttagaaaatcttaattttttgtagtaaagcatttcaaacattatgtttgccaacagtaggagttctaacattcgtttattgcttttactgctgtatatgtaattattaagattttcaaacatattcaaaagttgagggtatactacaacaatcct

SEQ ID NO: 34508 - DNA, 483 bp, Homo sapiens
  misc_feature (1)...(483): n = a,t,c or g
nnnnntttgnnnnnnnnnnnnnnnnnnnnnnnnnnnnnnnnnnnnnnnnnnnnnnnnnnnnnnnnnnnnnnnnnnnnnnnnnggcacgaggcattatggaggatgccagcatctttcgcacaagctcagacctacctgccctttcatctctcactacaccagcctgacctgcaactttagacacagaaggaagattttcctttgtggtctaagacctgcctttgcaaatccttgttttctgcaccccatcaccccagaggattgacaaagcaaatatgaatccctattggggaaacaccattctcacccacaggaatgtgttttagcccagtaacccccataaggcaagccaagacaatcacacgcttgtatgaaattgacacctttccaaaagatacgcttattctagttgcatttgtccatatactttcaattcacaaacattgaacttcagtgattgaatacttaagtgacgccagagct

SEQ ID NO: 34509 - DNA, 450 bp, Homo sapiens
  misc_feature (1)...(450): n = a,t,c or g
ccnnnnnnnnnnnnnnnnnnnnnnnnnnnnnnnnnnnnnnnnnnnnnnnnnnnnnnnnnnnnnnnnnnnggcacgagctgacatgtcatgtaatttccttatcagcctgcttgtcgttctgtccaggtatgtccgtctgtccatctatttttgcaagtcggtcctctggtcatccatctctgttccttcatggttgttctttatccctgggtctcagagaccatcctgcttccatccttagtccttcatatccctaaaaatctatctgaaaagcctgtagtggaacacattttcaaagaaaatatttttatttttgcatctcttaaatatnnnnnnnnnnnnnnnnnnnnnnnnnnnnnnnnnnnnnnnnnnnnnnnnnnnnnnnnnnnnnnnnnnnnnnnnnnnnnnnnnnnnnnnnnnnnaccatggccaacatggtgaaatcccgct

SEQ ID NO: 34510 - DNA, 446 bp, Homo sapiens
  misc_feature (1)...(446): n = a,t,c or g
tgnnttnnnnntttgaaaccctntgactgacacgaatttaatacgactcnnnnnnnnnnnnnnnnnnnnnnnnnnnnnnnnnnggcacgagattgaaacaagtattttgttaaattttaaattagtttctttatggtactcttttatattaccagtaagaaatcattttttaaaatggtgtgttggtagattatgactatcctttgatgttgatgaagaggtatcacaaaatatttgtcataagaaagaggtactgggtttgatatggttgagaactactggtccgtgttctatactgtggtacccagaagtttggaagtgatggtagtataatcatgtatcagattgagtggtagatattgctaatgatgtgtgaaattagaaaaagtaaagattgttctggacttgggtagccatgaaatcttcagtgggaggagaggattgtt

SEQ ID NO: 34511 - DNA, 439 bp, Homo sapiens
  misc_feature (1)...(439): n = a,t,c or g
anacccttttgaanaccctnnnnnnnnnnnnnnnnnnnnnnnnnnnnnnnnnnnnnnnnnnnnnnnnnnnnnnnnnnnnnnnnnggcacgagatttaataaatgtttacttagcatctactgtgtgcttactcttatactggacaccagagacagagagataataagatgtttttgctcccatgcaactcccagtctgcttgtctttcaagccattttctccagaaagccataactcattttctcaggtggaagttatcccttaatcttataataaggccacagttccttgatggcagtgcagttggtggcaggggttggggaggtccaggaatcaactccctctaccaatttcacatgcccacctgccccaccaggattgcccagtaaaaagccctgcattcttcaaatctttctggaccttagctttctcacttgta

SEQ ID NO: 34512 - DNA, 461 bp, Homo sapiens
  misc_feature (1)...(461): n = a,t,c or g
anacccttttgannaccgcttgacnnnnnnnnnnnnnnnnnnnnnnnnnnnnnnnnnnnnnnnnnnnnnnnnnnnnnnnnnnggcacgagtagagaaatttgaaaaccaggcaaaagaaggcatggttgtataattgtggagaattcattctatggggcattcagcagccatttacaatacttcccttccctaatatgaaaagatttctcnnnnnnnnnnnnnnnnnnnnnnnnnnnnnnnnnnnnnnnnnnnnnnnnnnnnnnnnnnnnnnnnnnnnnnnnnnnnnnnnnnnnnnnnnnnnnnnnnnnnnnnnnnnnnnnnnnnnnnnnnnnnnnnnnnnntaggcttagtggcacacagctggcacannnnnnnnnnnnnnnnnnnnnnnnnnnnnnnnnnnnnnnnnnnnnnnnnnnnnnnnnnnnnnnnnnnnnnnnnnnnagcaccactgcctcta

SEQ ID NO: 34513 - DNA, 455 bp, Homo sapiens
  misc_feature (1)...(455): n = a,t,c or g
nnnnnnnnnnnnnnnnnnnnnnnnnnnnnnnnnnnnnnnnnnnnnnnnnnnnnnnnnnnnnnnnnnnnnnnggcacgagcttatatttgaatttaaaaagtctagtgagnnnnnnnnnnnnnnnnnnnnnnnnnnnnnnnnnnnnnnnnnnnnnnnnnnnnnnnnnnnnnnnnnnnnnnnnnnnnnnnnnnnnnnnnnnnnnnnnnnnnnnnnnnnnnnnnnnnnnnnnnnnnnnnnnnnnnnnnnnnnnnnnnnnnnnnnnnnnnnnnnnnnnnnnnnnnnnnnnnnnnnnnnnnnnnnnnnnnnnnnnnnnnnnnnnnnnnnnnnnnnnnnnnnnnnnnnnnnnnnnnnnnnnnnnnnnnnnnnnnnnnnnnnnnnnnnnnnnnnnnnnnnnnnnnnngtctagtgagttgaccaatttcatgttcccaaagtgtttggtgctctaggagtaa

SEQ ID NO: 34514 - DNA, 456 bp, Homo sapiens
  misc_feature (1)...(456): n = a,t,c or g
tttgaanaccgttntgacnnnnnnnnnnnnnnnnnnnnnnnnnnnnnnnnnnnnnnnnnnnnnnnnnnnnnnnnnnggcacgnnnnnnnnnnnnnnnnnnnnnnnnnnnnnnnnnnnnnnnnnnnnnnnnnnnnnnnnnnnntttcagnnnnnnnnnnnnnnnnnnnnnnnnnnnnnnnnnnnnnnnnnnnnnnnnnnnnnnnnnnnnnnnnnnnnnnnnnnnnnnnnnnnnnnnnnnnnnnnnnnnnnnnnnnnnnnnnnnnnnnnnnnnnnnnnnnnnnnnnnnnnnnnnnnnnnnnnnnnnnnnnnnnnnnnnnnnggcatgatccacagacctgcccctacccatctttgatgcagtcagaggccctgcctcttgacatgccaatcagaggcctagttgcgtaagcaaccagtcctagctctgcagtgaaaacctgaaagggtcgaaggccg

SEQ ID NO: 34515 - DNA, 450 bp, Homo sapiens
  misc_feature (1)...(450): n = a,t,c or g
anacccttttgannacctttgactgantcgaatttaatacgactcnnnnnnnnnnnnnnnnnnnnnnnnnnnnnnnnnnggcacgagtaatgagtcataaatatagtgtcatgtcaaatctgtctatacattatcattttaaaaacaaatgaccttttgaaaggttaaatagctgctcattacaaatactacagaaatagagtaaaatgtgaaagcccccccttaagtatttttttgtatatcatcgttttcaataacggcatggtattccaaatattgannnnnnnnnnnnnnnnnnnnnnnnnnnnnnnnnnnnnnnnnnnnnnnnnnnnnnnnnnnnnnnnnnnnnnnnnnnnnnnnnnnnnnnnnnnnnnnnnnnnnnnnnnnnnnnnnnnnnnnnnnnnnnnnnnnnnnnnnnnnnnnnnnnnnnnnnnnnnnnnnnnnnnnnnn

SEQ ID NO: 34516 - DNA, 453 bp, Homo sapiens
  misc_feature (1)...(453): n = a,t,c or g
ttganaaccgntnnnnnnnnnnnnnnnnnnnnnnnnnnnnnnnnnnnnnnnnnnnnnnnnnnnnnnnnnnnnnnnggcacgaggtcaccttccaaaggcccctcttcttgatatcatcaccttgggggttatgatattcaacatgagaattttgtggggacacagatagtgagattatagtggttgttcatctcttccctgccatgccatgcacacacgtggcaccttgggtttgtctggggggagaatgatgttcccgttatcccgatggtgtccagcttttgtatttgtcatgtcagctgctgggcctgtcttagaagttgctaataacttccactttaatattactcttattgatgcattgggtttttttattgaccaataaataatttaggcattggcaatgttaagaccataacataaaccttttctaagtaatttttccatattgag

SEQ ID NO: 34517 - DNA, 452 bp, Homo sapiens
  misc_feature (1)...(452): n = a,t,c or g
tganacccttttgacaccgtttgacnnnnnnnnnnnnnnnnnnnnnnnnnnnnnnnnnnnnnnnnnnnnnnnnnnnnnnnnnnggcacgagcggagacaccttgccgcatattgtttcacctttaattcttgaataaactctgattcttacttataacttttcccatgtttgttgccaataaaatttcccatctcatttgaagagttgctatttctgtcacctgttcaaaggatagcacttcttttattactacctctttctttttccttttccaactatttctcctttgactttgtttttcccaataatgatttgtttttatcttctttcctagtaaccaaaaattaaaacaggacagagtttccaaaggaaatgtctgtagatgttaaccaaactgattgaatcactggttattctttgcttactttaaggctgtaaatctgcaaaaaga

SEQ ID NO: 34518 - DNA, 446 bp, Homo sapiens
  misc_feature (1)...(446): n = a,t,c or g
nnnnnnnnnnnnnnnnnnnnnnnnnnnnnnnnnnnnnnnnnnnnnnnnnnnnnnnnnnnnnnnnnnnggcacgagccgtctagcatagcctgtatcctaagtggtccatcctacaaagttcctgccgaagcctgactgggctggcccacctgcccagtgatgagtgagtcatccatatctacatctcctgctcaaagagaactccaccatcccagatgtgagcagcctggaggtggtgacattatcaccgtgtaacatacaattttgttttgccttgatctccaggcatgaggatgacgttcaacacttcaaggtcatgcgagacaacaagggtaattactttctgtggactgagaagtttccatccctaaataagctggtagactactacaggacaaattccatctccagacagaagcagatcttccttagagacagaacccgag

SEQ ID NO: 34519 - DNA, 452 bp, Homo sapiens
  misc_feature (1)...(452): n = a,t,c or g
acccttttgaannnnnnnnnnnnnnnnnnnnnnnnnnnnnnnnnnnnnnnnnnnnnnnnnnnnnnnnnnnnnnnnnnnnnnnnggcacgagcaaacagattttatgctgcttgtgtagttcttgggttgcagtatttacatgaacacaaaattgtttataggtaagttaatttttaattttttctaatggcttgctttggtatgatttagaattaaagatagtattttgtttttcttaaacattttatgtttaaccagtttcttagttttctccttcacctgtaagtcaaaccccaatgttgaaagacgtggttagcactatgattatatgatgaactttttgtttcctaatccatagcacattttctaattaaaatagtcaaattatgagttggtctatgatagtgcatttctcaacaatattcatcctagtgaatattttgcattcaaac

SEQ ID NO: 34520 - DNA, 444 bp, Homo sapiens
  misc_feature (1)...(444): n = a,t,c or g
anaccctnnnnnnnnnnnnnnnnnnnnnnnnnnnnnnnnnnnnnnnnnnnnnnnnnnnnnnnnnnnnnnnnnggcacgagaatacgcatttcctgccataggatagggaaaatgtaacaagctggttgctcttgaggttagaaaattgtctgtttctctgtggatgaagctggatttacttgaaaatggagagttggcttattgtttgaatattgggacatcaagctatctatagccaagtttcattcgcaaccagttttccctttgtctggggtaaattcgatacaaaatgattctttttgaatcctgaatccataaattacacttttttttttcaaattcacaaaattcacaggggggctgactgtgtaatanccnctattgggaaacatcccgtaaacctgcctgttgccatgccaatggagtgactgaactggngacatc

SEQ ID NO: 34521 - DNA, 434 bp, Homo sapiens
  misc_feature (1)...(434): n = a,t,c or g
anaccgtnnnnnnnnnnnnnnnnnnnnnnnnnnnnnnnnnnnnnnnnnnnnnnnnnnnnnnnnnnnnnnnnnggcacgagggacaggcaggtgatgtttaatttgctttgtagagcatgtagcccaagctcaggtggggaagggtgtaaatattatgcgatgttttatttcagctaaaaaatctccttgagctggatgacaagagtctgggttgcttccagctcctttcctcttgctgtttgcccttgggtgaagaacttcctctttctctgactttttttttttcagggctttttgggngngtnatngnnangggncctnancattaatnatnanccttaaaattttccttggggatncctntgnaaaactnacatgtngccttctntttgaaaccttgcctgacagcccnttttcnttaccaggnccngggg

SEQ ID NO: 34522 - DNA, 442 bp, Homo sapiens
  misc_feature (1)...(442): n = a,t,c or g
anaccctnnnnnnnnnnnnnnnnnnnnnnnnnnnnnnnnnnnnnnnnnnnnnnnnnnnnnnnnnnnnnnnnnggcacgagctgaaacatggtcttttcaggctttctgcaacacaacatcctcttggatttccttcttcttggtcttctttgctggcttctttttctctaccatgttttacatgttagtgcttcagccataccctctctcctgatgacctcatccagtttgagttttttaaatcactgatacacagatatctctaaattgttctcgccagctcagtctgcaactaaggtccagacctttaaatctaactgccaaactggtatctctactagaattcgtaactctaaactgacatgcaaaacagagctgtttgtttttgtcaaacgtatctcccccttgccccaaagcaagcttttctcttttcagcaaatgg

SEQ ID NO: 34523 - DNA, 436 bp, Homo sapiens
  misc_feature (1)...(436): n = a,t,c or g
annaccgnnnnnnnnnnnnnnnnnnnnnnnnnnnnnnnnnnnnnnnnnnnnnnnnnnnnnnnnnnnnnnnnnnggcacgaggaatggctgctgccatggtgccggggcgcagcgagagctgggagcgcggggagcctggccgcccggccctgtacttctgcgggagcattcgcggcggacgcgaggacaggacgctgtacgagcggatcgtgtctcggctgcggcgattcgggacagtgctcaccgagcacgtggcggccgccgagctgggcgcgcgcggggaagaggctgctgggggtgacaggctcatccatgagcaggacctggagtggctgcagcaggcggacgtggtcgtggcagaagtgacacagccatccttgggtgtaggctatgagctgggccgggccgtggcctttaacaagcggatcctgtgcct

SEQ ID NO: 34524 - DNA, 468 bp, Homo sapiens
  misc_feature (1)...(468): n = a,t,c or g
gnnnnnnggnnnnnntgnntttggtnanctcttganaccgtnnnnnnnnnnnnnnnnnnnnnnnnnnnnnnnnnnnnnnnnnnnnnnnnnnnnnnnnnnnnnnnnnggcacgagaaaaccaaccggggctcccagctgcacaaatactacatgaagcgcaggacgctgctgctgtccctgctggccactgagatcgagcgtctcatcacatggtacaacccgctgtcagccccggaactggaactagaccaggccggagagaacagcgtggccaactggagatctaagtacatcagcctgagtgagaagcagtggaaggacaacgtgaacctcgcctggagcatctctccctacctagccgtgcagctgcctgccaggtttaagaacacagaagccattgggaacgaagtgacccgtctcgttcggttggacccgggagccgttagtgatgtgcctgaagcaatcaag

SEQ ID NO: 34525 - DNA, 440 bp, Homo sapiens
  misc_feature (1)...(440): n = a,t,c or g
accntttgannnnnnnnnnnnnnnnnnnnnnnnnnnnnnnnnnnnnnnnnnnnnnnnnnnnnnnnnnnnnnnnnnnnnnnnggcacgaggaacgtcgtcctctcagcatgggggtcccgcggcctcagccctgggcgctggggctcctgctctttctccttcctgggagcctgggcgcagaaagccacctctccctcctgtaccaccttaccgcggtgtcctcgcctgccccggggactcctgccttctgggtgtccggctggctgggcccgcagcagtacctgagctacaatagcctgcggggcgaggcggagccctgtggagcttgggtctgggaaaaccaggtgtcctggtattgggagaaagagaccacagatctgaggatcaaggagaagctctttctggaagctttcaaagctttggggggaaaaggtccctac

SEQ ID NO: 34526 - DNA, 433 bp, Homo sapiens
  misc_feature (1)...(433): n = a,t,c or g
gttnnnnnnnnnnnnnnnnnnnnnnnnnnnnnnnnnnnnnnnnnnnnnnnnnnnnnnnnnnnnnnnggcacgagcttaaaaccggcccattggacctgtacagataaaaaatagattcagtgcataatcaaaatatgataattttaaaatcttaagtagaaaaataaatcttgatgttttaaattcttacgaggattcaatagttaatattgatgatctcccnnnnnnnnnnnnnnnnnnnnnnnnnnnnnnnnnnnnnnnnnnnnnnnnnnnnnnnnnnnnnnnnnnnnnnnnnnnnnnnnnnnnnnnnnnnnnnnnnnnnnnnnnnnnnnnnnnnnnnnnnnnnnnnnnnnnnnnnnnnnnnnnnnnnnnnnnnnnnnnnnnnnnnnnnnnnnnnnnnnnnnnaagaatcgcatgagcctaggaggcagag

SEQ ID NO: 34527 - DNA, 469 bp, Homo sapiens
  misc_feature (1)...(469): n = a,t,c or g
gnnnnnnnngaggnntngnnnnnntgntttgatnacncnnataccnttnnnnnnnnnnnnnnnnnnnnnnnnnnnnnnnnnnnnnnnnnnnnnnnnnnnnnnnnnnnnnnnggcacgaggatagaggtccagcgcccgccgcgagcagcggacagtcctcctgttgtgtccgaccgagagtcctggtgactttgaacatgctggtgccgctagccaagctgtcctgcctggcatatcagtgctttcatgccttaaaaattaagaaaaattatctacctctatgtgctacaagatggtcttcaacttctactgtgcctcgaattactacccattatactatttatccccgggataaggacaagagatgggaaggagtgaacatggaaaggtttgcagaagaagcagatgttgtaatagttggtgcaggccctgcagggctctctgcagctgttcgtctaaaacagttggc

SEQ ID NO: 34528 - DNA, 462 bp, Homo sapiens
  misc_feature (1)...(462): n = a,t,c or g
gnnnnnngnnnnnntnntttgannnnctttgnannnnnnnnnnnnnnnnnnnnnnnnnnnnnnnnnnnnnnnnnnnnnnnnnnnnnnnnnnnnnnnnnnnnnnnnggcacgaggtgtcccctaaaattttactcaaccttggtgagattgtgatggagctagtatttctgactccaaagtatattcctttcctctgtaactctcatcactggttcaattgctaatcaaagtcagatgtacttacatttcctaagtaacagccaggactgggggatgggggttctgggggagctgtgttggtttgtcttatgtatataaatttgcctgtctgcagcagtagtttnnnnnnnnnnnnnnnnnnnnnnnnnnnnnnnnnnnnnnnnnnnnnnnnnnnnnnnnnnnnnnnnnnnnnnnnnnnnnatagagagacctccatgtctactaaacatgaaaaaagtagct

SEQ ID NO: 34529 - DNA, 499 bp, Homo sapiens
  misc_feature (1)...(499): n = a,t,c or g
gnnnnngnnnnnntnnnntnnnncctctgaaaaccctttgactgacnnnnnnnnnnnnnnnnnnnnnnnnnnnnnnnnnnnnnnnnnnnnnnnnnnnnnggcacgagcttaatttgaatgtaagcaataatgattgcattcagaaatgcaagttgtttaaagtgccagtcttttacatatccccatggtgcccaggaaacctattgcatatgtagaggaagtagtggaagcatgttatacatcactgcctcacgtgtttcatgcatcgctttattttaagagctatggatctactccaaaaatgctatgtatttaattcctgactgccaaaggtgttgtgaccttgcattttaaaacactttcatattttttcttgctttatctacgtgttaaatttagagacccttcctgctatttttcattgctggaaatttggttgaaaccaatgcttaaatgaatgggccagtgatgattcatctgggcttcttttctttggtgc

SEQ ID NO: 34530 - DNA, 482 bp, Homo sapiens
  misc_feature (1)...(482): n = a,t,c or g
gnnnnnntnnnnntgtttgtntnccctntgaataccgtnnnnnnnnnnnnnnnnnnnnnnnnnnnnnnnnnnnnnnnnnnnnnnnnnnnnnnnnnnnnnnnnnggcacgagggccgctggtccggaggtagcggtgccggccgagggggtcggggcggctggggcggtcggggccggcgtcctcgggcccagcggtctccatcccggggcacgctggacgtagtgtctgtggacttggtcaccgacagcgatgaggaaattctggaggtcgccaccgctcgcggtgccgcggacgaggttgaggtggagcccccggagcccccggggccggtcgcgtcccgggataacagcaacagtgacagcgaaggggaggacaggcggccgcaggacccccgcggaagccggtcaggcngcggcggnggntggtgctggatccgggggaggctccgctgttccggtgtactcggggaagggtaaaagca

SEQ ID NO: 34531 - DNA, 457 bp, Homo sapiens
  misc_feature (1)...(457): n = a,t,c or g
ggatttgaaacccttatgtctgctactnatacccttnnnnnnnnnnnnnnnnnnnnnnnnnnnnnnnnnnnnnnnnnnnnnnnnnnnnnnnnnnnnnnnggcacgagccaaggaaaaggctaatattagtcactactgttatcacatccctttgtataagttttaaaaagagatggagggagatcttcatttctttgaggagatcagtattgtaacgtatgtgaatagatgataacaattaatattactaaaagtcccacatgagagtcctgacgccctctccatgccccacagtaatgtggcttctttcatgggtttttttttcttctttttagctgatctcatcctaagcatgctttatttttccttgaaagctaggtatttatcaactgcanatgttattgaaagaaaataaaattcagtctcaanagtaaaccctgtgtcttgtgtctgtagt

SEQ ID NO: 34532 - DNA, 451 bp, Homo sapiens
  misc_feature (1)...(451): n = a,t,c or g
ggntttgaaacccttnngttnngnatcngataccctnnnnnnnnnnnnnnnnnnnnnnnnnnnnnnnnnnnnnnnnnnnnnnnnnnnnnnnnnnnnnnnnnggcacgannnnnnnnnnnnnnnnnnnnnnnnnnnnnnnnnnnnnnnnnnnnnnnnnnnnnnnnncctctggagcggaagccacccnnnnnnnnnnnnnnnnnnnnnnnnnnnnnnnnnnnnnnnnnnnnnnnnnnnnttggctttttttttttananactaggtttnnccntgttgctgaggctggncttgaacttggggcntcnagngatctgcccntntnggcctcctaaagggtnggnattacnggcgtnanccnccntgccnggncnaaatttttttttaaanacaaancctnnttntgtngcccaggnttgagngtaggggngcaatcanggggnncngnaccct

SEQ ID NO: 34533 - DNA, 472 bp, Homo sapiens
  misc_feature (1)...(472): n = a,t,c or g
ttgaaaaccctatttgnnnnnnnnnnnnnnnnnnnnnnnnnnnnnnnnnnnnnnnnnnnnnnnnnnnnnnnnnnnggcacgagggcagcggcacgcgcagctctgccggcgcatgctcacgcccgagatccagtacctgatggacctcggcgccaacctgtgggtcaccaagctctggaagttcattcgcgatttcctgcggtggtgacgtcccaccgcccagcggcttgcctgcctgctcgctccctgcagaggggctgagcaggacgccgctggtgctggccgcccccagccccctcctggtgccacctcagaccccggggtgagggggggctccctggggggaggcagccagccaagactgggcccatgaacacagagagggcctaaccgagatcagtatttaactaattataccagtttttattaaacccctttccctccccgataaagaatgttctatttctgcctc

SEQ ID NO: 34534 - DNA, 474 bp, Homo sapiens
  misc_feature (1)...(474): n = a,t,c or g
ttgatncccttatttggaaaccntnnnnnnnnnnnnnnnnnnnnnnnnnnnnnnnnnnnnnnnnnnnnnnnnnnnnnnnnnnnnnnnggcacgagtgaaaatgttctggaattacattttgataatggtggctcaactctgcaaatatagtaaaaatcactatacactctaatannnnnnnnnnnnnnnnnnnnnnnnnnnnnnnnnntaggctatttaaaaaaaaaaangaaaanaaaaangtncntgccncaaataggccancanancanantaaaattntgaacaggttcacncaacctntgatttatgacaaagggggtatnttacagngcancaggaaaaaggatggcttnttcaatatacatccngggttcattagctntccntncagaanaaaaatncntttgactcctgtgtcacnccacagactgatttntgacaaaggnggntgacagtgcagtggaaaaggat

SEQ ID NO: 34535 - DNA, 465 bp, Homo sapiens
  misc_feature (1)...(465): n = a,t,c or g
aaacncttttcnnnnnnnnnnnnnnnnnnnnnnnnnnnnnnnnnnnnnnnnnnnnnnnnnnnnnnnnnnggcacgagctcacctcgacctttgtagcatgaaagcagccacagatagcaggtaaacgaatatgattgtgtttcaataaaaccttatttgtggacactgaaaatagaatttcatactgttttcaccagttatgaaatatacatttgattttttttccccaaccattaaaaaatcnnnnnnnnnnnnnnnnnnnnnnnnnnnnnnnnnnnnnnnnnnnnnnnnnnnnnnnnnnnnnnnnnnnnnnnnnnnnnnnnnnnnnnnnnnnnnnnnnnnnnnnnnnnnnnncctatctccaaaaataaaaataagttagctgggcttggtggtgcacactgtattcccagctactnnnnnnnnnnnnnnnnnnnnnnnnnnnnnnagactgcaatgacctat

SEQ ID NO: 34536 - DNA, 477 bp, Homo sapiens
  misc_feature (1)...(477): n = a,t,c or g
gnncccccnttgacnaccnnnnnnnnnnnnnnnnnnnnnnnnnnnnnnnnnnnnnnnnnnnnnnnnnnnnnnnnnnnnnnnnnnnggcacgagcggatctcttctacattaaagtacctgccatacaggtaacagtggcttggaggaaacatggtctttcctctaatgggacattttagagtcttgaggttgccactggctgagggagcattctctgcccactgaacgcttgagtaatcgacgccctggaatggtctcagcaaatgggctgagcaggattttgctactagtaggggttttcctgtatgtgttcctagcaggatgtgtttcctttcatatgaaccatagaagtacatctgctggaatctttaaacagatagcttttcaataaacaggaaaaatgtcaaaattgtcattttttatgagatggaagtagaatagagaaaatgtaacttttactcaggtgttttgagtgta

SEQ ID NO: 34537 - DNA, 465 bp, Homo sapiens
  misc_feature (1)...(465): n = a,t,c or g
cnnnnnnnnnnnnnnnnnnnnnnnnnnnnnnnnnnnnnnnnnnnnnnnnnnnnnnnnnnnnnnnnnnnggcacgagtgaagacaggggctcacggtgttgctcaaggcaggtagcagagtgatattattctccagcgatgatgggggagggacgagagaagaaaggggagggagaaggaggggaagggagggggaattccttttgtgaacagcagcaattctggctcagtttgtttcttagccctcctccatggctgtgtgtggggaaaggtgcatttcctggacctaaagaagctggcagtcagaaccttgccatgggctgcgcagagtaactccatggggttgactggagaaggcactgagttttcttcaattagttaagattttgttttccaaatcagttagattggccatgagcaactggctattacaatcctgtataaaaacanagattttgaatttaaa

SEQ ID NO: 34538 - DNA, 466 bp, Homo sapiens
  misc_feature (1)...(466): n = a,t,c or g
anccnnnnnnnnnnnnnnnnnnnnnnnnnnnnnnnnnnnnnnnnnnnnnnnnnnnnnnnnnnnnnnnnnnnggcacgagcaagtagatttctctgaattcttgaatttgaaaacaattggggttcctaaacagagaatatggaatattattggggatgatgtctttaataatacatttcaagataggagaaactttttctatatagttgactttaataaaagcctagggcaaaactttcaatatattaacagtatttatgaggcagttaagaatttgggtcatctnnnnnnnnnnnnnnnnnnnnnnnnnnnnnnnnnnnnnnnnnnnnnnnnnnnnnnnnnnnnnnnnnnnnnnnnnnnnnnnnnnnnnnnnnnnnnnnnnnnnnnnnnnnnnnnnnnnnnnnnnnnnnnnnnnnnnnnnnnnnnnnnnnnnnnnnnnnnnnnnnnnnnnnnnnnnnnnnnnnnn

SEQ ID NO: 34539 - DNA, 465 bp, Homo sapiens
  misc_feature (1)...(465): n = a,t,c or g
caccnnnnnnnnnnnnnnnnnnnnnnnnnnnnnnnnnnnnnnnnnnnnnnnnnnnnnnnnnnnnnnnnnnnggcacgaggctcggcatggtgatgccccctccttggggctgttgtgaggatctgatgggagatcatgtgtgttgggcatagggcacaaatgaactcctgcttctgcgtttggagcatctttaccatctgattgccacatttccctgggttaagttcagaaatttctttggatccacagcaaatctgccctttctctctggggttattcttctttataattatggtttgacagctacccaggcacctgaaagcatgactagttcataaccaacttgaacacttctgcctcagaaaatcgaattcaggttagagaatcgtggctggtttgactcctgggcaatatgagggtctggatgcctaattgaagtaggaggacatctagggctatttgaca

SEQ ID NO: 34540 - DNA, 476 bp, Homo sapiens
  misc_feature (1)...(476): n = a,t,c or g
ttngncnccccttgnacanccgnnnnnnnnnnnnnnnnnnnnnnnnnnnnnnnnnnnnnnnnnnnnnnnnnnnnnnnnnnnnnnnnnnggcacgaggaaagatctacattccctctcctgcccagatgccctttggaaagccattgaccacccaccatattgtttgatctacttcatagctccttggagcaggcaaaaaagggacagcatgccccttggctggatcagggaatccagctccctagactgcatcccgtacctcttcccatgactgcacccagctccaggggcccttgggacagccagagctgggtggggacagagataggcccaaggtcccctccacatcccagcagcccaagcttaatagccctccccctcaacctcaccattgtgaagcacctactatgtgctgggagcctcccacacttgctggggctcacggggcctccaacccatttaatcaccatgggaaa

SEQ ID NO: 34541 - DNA, 473 bp, Homo sapiens
  misc_feature (1)...(473): n = a,t,c or g
nttgaccccccttnnnnnnnnnnnnnnnnnnnnnnnnnnnnnnnnnnnnnnnnnnnnnnnnnnnnnnnnnnnnnnnnnnnnnnnnnnggcacgagccgcagctcctccggctctgcagggtcacggaggaagccagctcccctagaccaggccgagcttgcacttgcgtattgtctgctgctgctgaaccaagatttagctgtgcgccctccttgcagtctcctggaaccagcaggaggaaacatgggggatactggcctgagaaagcggagagaggatgagaagtcgatccagagccaagagcctaagaccaccagtctccaaaaggagctgggcctcatcagtggcatctccatcatcgtgggcaccatcattggctctgggatcttcgtttcccccaagtctgtgctcancaacacggaagctgnggggccctgctcatcatatgggcggcttgcggggncctcgcgacc

SEQ ID NO: 34542 - DNA, 463 bp, Homo sapiens
  misc_feature (1)...(463): n = a,t,c or g
cnttggacaaccgntatgacatgattacgaatttaatacnnnnnnnnnnnnnnnnnnnnnnnnnnnnnnnnnnnnnnnnnggcacgagccaagttgtaatttttaataaaacttaagaagtaaacattttacttatgtttataggtatttgatcctaaatttgacacatcattgcccatgaaagaatcctcttaggctgctcagcttcactcttcctgcttgcccaccggggtttttcactgcttctgttagcactaagtacttagacgatcctaagatatgtgcttgagccgaatttcatctttacttgtaggaaactttaaactatttcttttcttttctttttttttttnnnnntngaaagggngtttggntttngnccccnaggtngnagngcanggnagggatntnggtnnanngaancnttngcntccggggttaaaaggattntcnggcntnaccc

SEQ ID NO: 34543 - DNA, 478 bp, Homo sapiens
  misc_feature (1)...(478): n = a,t,c or g
ggntnnnnntttganancnttnnnnnnnnnnnnnnnnnnnnnnnnnnnnnnnnnnnnnnnnnnnnnnnnnnnnnnnnnnnnnnnggcacgagaccccatccaccttcgatgcaagaaagaggaggacagagcctgtcgggaaagcccaacctggctctagaaggctccttgcaagcccagtggctggtccttccagcctgcctggaactaccccttcacagaaccgcaggcctctcccaggaagggatggccaatggctgcgcctccccttggggatagtcctgggggatggtggctctcctgctggtcctctgtgtgtggtctggtgtcggtgccctacagaatagatccatgcggtgttgcttcatgtacaatccctcactgtgcatgtcggcttcctgctggggggaactgatgggagtggccaggcacccctgctcctgctgacagntgcacaccacagggtgnacccacccca

SEQ ID NO: 34544 - DNA, 473 bp, Homo sapiens
  misc_feature (1)...(473): n = a,t,c or g
gtgttnntttganaccttngaatcttnnnnnnnnnnnnnnnnnnnnnnnnnnnnnnnnnnnnnnnnnnnnnnnnnnnnggcacgaggactcgtcgcttcaggcccgcctgtttcccggtctcgctatcaagatccaacgcagtaatggctctcttgagtaggggggaatccttatcccatgcagctcagtttaaaaacctgtccccagcccacctcactgtggatattctaaaggtttaattcacagtgccaatgtaaggactgtgaacttggagaaatcctgtgttccagtggaatgggcagaaggaggtgccacaaagggcaaagagattgattttgatgatgtggctgcattaaacccagaactcttacagcttcttcccttacatccgaaggacaatctgcccttgcaggaaaatgtaacaatccagaaacaaaaacggagatccgtcaactccaaaattcctgctcca

SEQ ID NO: 34545 - DNA, 475 bp, Homo sapiens
  misc_feature (1)...(475): n = a,t,c or g
gtnnntnnatttgaaaacnttnnnnnnnnnnnnnnnnnnnnnnnnnnnnnnnnnnnnnnnnnnnnnnnnnnnnnnnnnnnnnnnggcacgagagtggtggggttgtagtgagggggctcccccagcctaagggagactgtgaagtggaggttgtagtaagagggcttccacagcctgagggaggcttctgggggagagaagatcttaccccagatcttaagatctgctccctcttcaggaaggatcctccccttgcagccgtgaccactgctgtccaggaactgctgcgtctggctcaggcccacccagccggacctcccaccctcgaccctgtcaatgacctgcagctcaaagatatgtcagttgtagagggtgggctccgggcccggaagctggaggagctgatccagggggctcagtgtgtacacagcccccgttttcctgcccagtacctgaagctgcggnagcgaatgca

SEQ ID NO: 34546 - DNA, 481 bp, Homo sapiens
  misc_feature (1)...(481): n = a,t,c or g
gnnnnntnnntttgannncctttggannnnnnnnnnnnnnnnnnnnnnnnnnnnnnnnnnnnnnnnnnnnnnnnnnnnnnnnnnnnnnnnnnnnnnnnggcacgagctgtacccaaactgaaactctaaattggggccctaactaattttccttttgaggttgtgggcataagtgctgatctagaatacagtctgggtcccacactgtgtctcagtgagactgttgatgccttgagatgaccatttcagatctgaatcccatgggtgtgagggtgatgggtactccaggactggcctatgctgtgttgtgggctttggttcggctttatcaggggccaggcatatgggttctagagtacctaccatgacctagaagcatttatgatttatttgaagccacactgtttgcatgggtgttacttgtctgtacctcagagtctgaggatgttaactttggaactcgcagtcctctagaacagct

SEQ ID NO: 34547 - DNA, 478 bp, Homo sapiens
  misc_feature (1)...(478): n = a,t,c or g
gtnnnnnnnttgganancgtttgacnnnnnnnnnnnnnnnnnnnnnnnnnnnnnnnnnnnnnnnnnnnnnnnnnnnnnnnnnnggcacgannnnnnnnnnnnnnnnnnnnnnnnnnnnnnnnnnnnnnnnnnnnnnnnnnnnnnnnnnnnnnnnnnnnnnnnnnnnnnnnnnnnnnnnnnnnnnnnnnnnnnnnnnnnnnnnnnnnnnnnnnnnnnnnnnnnnnnnnnnnnnnnnnnnnnnnnnnnnnnnnnnnnnnnnnnnnnnnnnnnnnnnnnnnnnnnnnnnnnnnnnnnnnnnnnnnnnnnnnnnnnnnnnnnnnnnnnnnnnnnnnnnnnnnnnnnnnnnnnnnnnnnnnnnnnnnnnnnnncatccaccctacccccagaaagaaactatgctgagacagagactgcacttgactctaccatggaaactaacagatagtggtgagaaaaagcctaaaatcacgaagtctag

SEQ ID NO: 34548 - DNA, 481 bp, Homo sapiens
  misc_feature (1)...(481): n = a,t,c or g
gntgntnnatttganacctttgaaaaccntnnnnnnnnnnnnnnnnnnnnnnnnnnnnnnnnnnnnnnnnnnnnnnnnnnnnnnnnnnnnnnnnnggcacgagcttggctcttctggcgccaaaatgtcgttcgtggcaggggttattcggcggctggacgagacagtggtgaaccgcatcgcggcgggggaagttatccagcggccagctaatgctatcaaagagatgattgagaactgatgcaaaatccacaagtattcaagtgattgttaaagagggaggcctgaagttgattcagatccaagacaatggcaccgggatcaggaaagaagatctggatattgtatgtgaaaggttcactactagtaaactgcagtcctttgaggatttagccagtatttctacctatggctttcgaggtgaggctttggccagcataagccatgtggctcatgttactattacaacgaaaacagctgg

SEQ ID NO: 34549 - DNA, 437 bp, Homo sapiens
  misc_feature (1)...(437): n = a,t,c or g
anaccnctnnnnnnnnnnnnnnnnnnnnnnnnnnnnnnnnnnnnnnnnnnnnnnnnnnnnnnnnnnnnnnnggcacgagccacagactcagagagaacccaccatggtgctgtctcctgccgacaagaccaacgtcaaggccgcctggggtaaggtcggcgcgcacgctggcgagtatggtgcggaggccctggagaggatgttcctgtccttccccaccaccaagacctacttcccgcacttcgacctgagccacggctctgcccaggttaagggccacggcaagaaggtggccgacgcgctgaccaacgccgtggcgcacgtggacgacatgcccaacgcgctgtccgccctgagcgacctgcacgcgcacaagcttcgggtggacccggtcaacttcaagctcctaagccactgcctgctggtgaccctggccg

SEQ ID NO: 34550 - DNA, 431 bp, Homo sapiens
  misc_feature (1)...(431): n = a,t,c or g
ttggaaacccttgacatgattacgaatttattttnnnnnnnnnnnnnnnnnnnnnnnnnnnnnnnnnnnnnnnnnggcacgagatggttctacctttaagaaaacttggtatctgaaattatgaacacagggaacgaagaggtgattttatatataagtatatatacatttatacataaatgtaatatttatatataaatatatgatttatgtaaataataacaaaataatatatatgaatgaatttatagaaaaatactggctttggagagatgtggtgactgctattccttatagtctcaaaatgaggataaagctttacataaaattatgtattaatggaaaaataatggaaaaataggatacaaatatattggtacacgcacatttttagaaatgtatctataggagaaaatgagactcttctatga

SEQ ID NO: 34551 - DNA, 426 bp, Homo sapiens
  misc_feature (1)...(426): n = a,t,c or g
gaaacnctnnnnnnnnnnnnnnnnnnnnnnnnnnnnnnnnnnnnnnnnnnnnnnnnnnnnnnnnnnnnnnggcacgaggattcaccaagtggaccatgcatagcatctcttaaatctgtatcatggaattcgtgattgggcctctctttcatatcaggcaacatacatgtgatgtacatacctgtagcttccaggaaagggaaggaagtagagatgacattgtctgttactcgtttgtatgtgtgtgtgcgtatttaagtaaatatgtgtgtgcatagggacatgtcacatgcatgtgtggcacatttataggatgaagaggtgtctaaaagacattgaggaaactcagtgaaggagttctgccggcgggcgtgaggaccacgctaaaagatgccggttgtgctttgtgtctaagctgaaagcatg

SEQ ID NO: 34552 - DNA, 433 bp, Homo sapiens
  misc_feature (1)...(433): n = a,t,c or g
tttgaaacccttngantgaccttnnnnntntgaaacctttgacnnnnnnnnnnnnnnnnnnnnnnnnnnnnnnnnnnnnnnnnnnnnnnnnnnnnnnnnnnggcacgagggggactaacccctcagggtgagctctgatgtgctcttcttgggcagggaactccctgaattctctaacttcctctttatctctgagcttcggtttgctcatctgctagacggggggtttctgtgagtcccaggaccgccacagggatcacgagaagtactgaatgtccagattgatgtggacatcttcgagccccaggggatcagcaagctggatgcccaggcctctttcctgccgaaggaactggcagcccaaactatcaagaagtccttctcaggaaaaaagggtcatgtgctgttccgtcccaccgtgagccagcagcat

SEQ ID NO: 34553 - DNA, 427 bp, Homo sapiens
  misc_feature (1)...(427): n = a,t,c or g
gaaancnnnnnnnnnnnnnnnnnnnnnnnnnnnnnnnnnnnnnnnnnnnnnnnnnnnnnnnnnnnnnnnnnnnggcacgagggcactgctggttgcacagattcttaagaattcagacacaggagctccttacagggttaacatccttccatgattgctccagtggtcctcaaactgctccagnnnnnnnnnnnnnnnnnnnnnnnnnnnnnnnnnnnnnnnnaggcaagttcttgggccccatcccaggcccactgaatgaagactcctgcaggtaagcacagcagtgtggttcggcaaacctgccctgcgactctgagaactactggccaacactgccctgccattttgaagacaatgaatgagcttcactgtcttgggctggggttcaaacaactcccaagagcagggagaagcaaaaacgctg

SEQ ID NO: 34554 - DNA, 405 bp, Homo sapiens
  misc_feature (1)...(405): n = a,t,c or g
tttgaaatccntttgacnnnnnnnnnnnnnnnnnnnnnnnnnnnnnnnnnnnnnnnnnnnnnnnnnnnnnnnnnnggcacgagcggcgtgggcaagtggggtttagagccaaggagcagggtgggggtcagtggatagaaacttactacgaggcgccatgaggggtaaggggaattctggctaaaccgatctaataggactctccctgaagactggccaaagtgaccagacatcacctgggggctggtggaggctgaggaacctgataagataccaagggtgaggagttcatgccaaaatgacttatcaggggcctttgctaagattgggttttacaaggaagtgcacaggaggtcctgggagaaggttcaggaggcggactgaagtttggtcaagcaaagaacc

SEQ ID NO: 34555 - DNA, 429 bp, Homo sapiens
  misc_feature (1)...(429): n = a,t,c or g
ttggaaancccttgacnnnnnnnnnnnnnnnnnnnnnnnnnnnnnnnnnnnnnnnnnnnnnnnnnnnnnnnnnnggcacgagccctgaagggcagggcaataaaaacaaaaaggagccaagatatttatcttgttaaatactattatgaaaacggcaacaacaacaacaaaaaagaaatgtgcttcagatgttctgtgcagccgggcgtggtggcttacatctgtcatcccagcctcctgnnnnnnnnnnnnnnnnnnnnnnnnnnnnnnnnnnnnnnnnnnnnnnnnnnnnnnnnnnnnnnnnnnnnnnnnnnnnnnnnnnnnnnnnnnnnnnnnnnnnnnnnnnnnnnnnnnnnnnnnnnnnnnnnnnnnnnnnnnnnnnnncagcattcttgattaaaaaaagagtaaacagctgtgtcctcaccc

SEQ ID NO: 34556 - DNA, 484 bp, Homo sapiens
  misc_feature (1)...(484): n = a,t,c or g
tttggaacccnnnnnnnnnnnnnnnnnnnnnnnnnnnnnnnnnnnnnnnnnnnnnnnnnnnnnnnnnnnnnnnnnnggcacgagggtataggaagacctagtgagggtccattagcccttctgggggtgtgtttccaggcaggtttttgagaggttaaactgtgaataaaggacaaatggggactagtcacagaaaaggcagctctggggatttgaagaaagcttctgcaaacgtggggaggtgagagggaacatggtccactcaggccaacgacaatttgtgtctggagcttagactagagtgcgttcgagaagagagaagcctgcagaggcaggcaaggaccagagtacaccttgtcaatcatcatcaagctcctgttgggaaaagttgaatgaataactcagtatcttctagggcaaccactttcaattttagaccaactgtactttgttagaagagttttccattgngtcctccctgagc

SEQ ID NO: 34557 - DNA, 480 bp, Homo sapiens
  misc_feature (1)...(480): n = a,t,c or g
ggaacccnnnnnnnnnnnnnnnnnnnnnnnnnnnnnnnnnnnnnnnnnnnnnnnnnnnnnnnnnnnnnnnnnnggcacgagggcaggcacaccccagtagggagctctgacttgctttctcaggggaatcgaattaatatccgttagagtgtggctaggtgttttcagacaccacgtcccgctgtttcaacatcagaatgtgcagggcagccactacagatgtctggaagagagagccccattccgctgtcctctgatacagtgctgggggtggagagttggccctttggccttccagctgaacaagcctcttctgaagctttctctgcaggcattggacattccaaccgtgatggctgccttgccaggcaagactagttgccaaggcaaaacctcccttcccccatgtcagcagtcagcctttcctaatttgagtggaataacaatgaatcctgcatcactttattcatttttttttat

SEQ ID NO: 34558 - DNA, 464 bp, Homo sapiens
  misc_feature (1)...(464): n = a,t,c or g
tttggananccnnnnnnnnnnnnnnnnnnnnnnnnnnnnnnnnnnnnnnnnnnnnnnnnnnnnnnnnnnnnnnnnnnggcacgagccaaaccagtttgaagaaactcaaaaagctagaaggcagaggttncaataaaaaatctgatctgaaactgccggtggcaataattgggcagagtaatcaagacaaatgttgacaaaagggccagggtcctttggcttaatccttggctggggatttttgcacaaagctttttgcacacaagaaggtaaaatagtctgaaggtggagaagctactgaaactagaaaattaaaaatgcaaaagttgatgggcttctgaaagttggtgtatttgaacattgtatctgattagatgtttcccccacctggtactgtaaaacagatggcatgtaaatctgcccttcaagcagtattaattggacatgctaaatgagaaccagta

SEQ ID NO: 34559 - DNA, 478 bp, Homo sapiens
  misc_feature (1)...(478): n = a,t,c or g
tgaacccctnnnnnnnnnnnnnnnnnnnnnnnnnnnnnnnnnnnnnnnnnnnnnnnnnnnnnnnnnnnnnnnggcacgagcagatagaaatggaattgcaagtacacttatctctggggagaaggggcctcctgattccaaggctgacctatgcatgcagccttgtgagtatgcaaacacatgccagaaagtgtggttggctcccacgtcatctattgaccaccttacttgaaagtaattggaatgaattactcctttctcctttggctgtaggttttagatgagctatgaagggtagaacctagtatgtgcaaagtaatttggctcacagcatttgggctgtgatgtagaaggaatcggggtgagatgagagaaggggcacaaatggcctatgggatgcagcagggaatactgatcctgatttaacagtgataataacttttcacttggggcctcagtactgcttatcaganaagcc

SEQ ID NO: 34560 - DNA, 457 bp, Homo sapiens
  misc_feature (1)...(457): n = a,t,c or g
nttggannnnnnnnnnnnnnnnnnnnnnnnnnnnnnnnnnnnnnnnnnnnnnnnnnnnnnnnnnnnnnnnnnnnnnnnggcacgaggaaagctaaaaaaatagaaaacctcactagctagaaattaccttcacaggaataacgaatattgttctagtcatttctccttggatacgtacagacttgcagacataagatggaaggaagaaagtaaaggagcaaagaaaaagaagtgaaggaaactataagaagaaaaagaagcaaacttttttgttttgtgttgtttttgaaagagtgttactctgttgtccaccnnnnnnnnnnnnnnnnnnnnnnnnnnnnnnnnnnnnnnnnnnnnnnnnnnnnnnnnnnnnnnnnnnnnnnnnnnnnnnnnnnnnnnnnnnnnnnnnnnnnnnnnnnnnnnnnnnnnnnnnnnnnntttcattatgttagccttg

SEQ ID NO: 34561 - DNA, 453 bp, Homo sapiens
  misc_feature (1)...(453): n = a,t,c or g
accnnnnnnnnnnnnnnnnnnnnnnnnnnnnnnnnnnnnnnnnnnnnnnnnnnnnnnnnnnnnnnnnnnnggcacgagcagtaggagcccagagacttcacatctcctagttttcccattctgagcacttgtgagaccccagaccagtcactagtcacttgatctcaacttcttcctcctcacacccacattttctcagttgcacagctgaggtaatatggtcctgggcatgattttaggttctgacgttctatgcttctggtctcgttcccctctggttcattatctactgtggctatagtgacttttctaaagagcaaatctagcattgttcttcttcttaaaactcttcagtggctccttatggctcccaggataggtccctctgaagtcctgttcaggagtctgaagtgtcatctgtgtcctgctcagtgatctgctttcactctcaca

SEQ ID NO: 34562 - DNA, 458 bp, Homo sapiens
  misc_feature (1)...(458): n = a,t,c or g
tgnanaccttnnnnnnnnnnnnnnnnnnnnnnnnnnnnnnnnnnnnnnnnnnnnnnnnnnnnnnnnnnnnnnnnnggcacgagtcnnnnnnnnnnnnnnnnnnnnnnnnnnnnnnnnnnnnnnnnnnnnnnnnnnnnnnnnnnnnnnnnnnnnnnnnnnnnnnnnnnnnnnnnnnnnnnnnnnnnnnnnnnnnnnnnnnnnnnnnnnnnnnnnnnnnnnnnnnnnnnnnnnnnnnnnnnnnnnnnnnnnnnnnnnnnnnattggaagtcctagccaaagcaattgggcaagaaaaagaaataaaacgcatctaaattggaaatgaaggagtaaattgcctttttcctcacatgacaagatcttatatgtagaaaaccctaaagannnnnnnnnnnnnnnnnnnnnnnnnnnnnnnnnnnnnnnnnnnnnnnnnnnnnanctacattagatcttggcca

SEQ ID NO: 34563 - DNA, 456 bp, Homo sapiens
  misc_feature (1)...(456): n = a,t,c or g
nncttgganaaccgntatgacatgattacgaatttaatacnnnnnnnnnnnnnnnnnnnnnnnnnnnnnnnnnnnnnnnnnggcacgagactgtatctgcatactctatgaaaggaccactcatacacatttcctatgtacatattttttccatgtttcctactgatctcactgacagtattttgatggcttcttgttggctgaggaactggccatggcacagatgatggatgggggcaacagccttgaatattctccttccagcaactgtcaacacctgaaggagggagttagctgcctgttaccatacttgatattgacttggtgtcctaaaaaggaaaatgtcaattgtttcaaatttgtaaagggttaagaaaagaggcagactaccactagtcatcttgttagatttaatcatgtgttaaaatgtgatagctgtttacaatgcacatctca

SEQ ID NO: 34564 - DNA, 482 bp, Homo sapiens
  misc_feature (1)...(482): n = a,t,c or g
aanccctttannnnnnnnnnnnnnnnnnnnnnnnnnnnnnnnnnnnnnnnnnnnnnnnnnnnnnnnnnnnggcacgagccatgacaatgtttgctagtaaaacaacccaaactcaacctcccttctcttctgtccttgaaatttctagtgagtgcatctggttggtggaacttaaatcacatttacaactgtagccacaagagaggctgggaaatgtattttttaactttctcttctctgcagcacaggaagacatacactgaaggaggttgaaatggatgtgaacagtaatctaccatatttactgcaggtttagaacctggttctccttaaggctggctgtcattaaacgggctatagataagttgagaaagtttataaataataccgtcaaacaatgctgagaaactcatttgtttctttgtatatttttattggtttataatgactacattaaaaaaaaaactagaatttgccttccc

SEQ ID NO: 34565 - DNA, 510 bp, Homo sapiens
  misc_feature (1)...(510): n = a,t,c or g
gngngnnnnnnnngnggnttttganaccctatttgaaganccnnnnnnnnnnnnnnnnnnnnnnnnnnnnnnnnnnnnnnnnnnnnnnnnnnnnnnnnnnnnnnnnnnggcacgagcaccggatgcccaggaatcaccacctggtaccagaagcggtgccagccagcaggtcctatgcccaaacacttggtgaggaacacagggctgcccagcttcattcgttggcacagcaactgcagggtagcccgagccccttggaaccctaacttgtcccttgccaaagccaactggctgccctctggctgtggggaccgcaagaagggacccacaagctgctggcgaagtcgctgcttcaggtctggcttgagccactccacagccacctgctctccacagaggtgtgactgccctgtaggaaaaatgcaaagacaagggcaggtctaaaccctgggcccaagcctncaggtggtgagccctttggagctacacagtcctgttatttgtagcctt

SEQ ID NO: 34566 - DNA, 481 bp, Homo sapiens
  misc_feature (1)...(481): n = a,t,c or g
ttgaaacccctnttnnnnnnnnnnnnnnnnnnnnnnnnnnnnnnnnnnnnnnnnnnnnnnnnnnnnnnnnnnnnnggcacgagggctggcggccggggagctgcgtagctcccggccccgcggccatgcccaagcggagctgccccttcgcggacgtggccccgctacagctcaaggtccgcgtgagccagagggagttgagccgcggcgtgtgcgccgagcgctactcgcaggaggtcttcgagaagaccaagcgactcctgttcctcggggcccaggcctacctggaccacgtgtgggatgaaggctgtgccgtcgttcacctgccagagtccccaaagcctggccctacaggggccccgagggctgcacgtgggcagatgctgattggaccagacggccgctgatcaggagccttgggcaggcctccgaagctgacccatctggggtagcgtccattgctgttcctcatgcgtgcgag

SEQ ID NO: 34567 - DNA, 474 bp, Homo sapiens
  misc_feature (1)...(474): n = a,t,c or g
natttgaaaaaccnnnnnnnnnnnnnnnnnnnnnnnnnnnnnnnnnnnnnnnnnnnnnnnnnnnnnnnnnnnnnnnnnnggcacgagaaggggggttgggatttgggggtggggggtcccactgccacactcagcacctatcagcctatcactgatatttgatctacaaatcctttagaaagaagttccttttccacaaagcggcccttgttaaaacatatacatatcctcataccaataacaccgcaggctgtattcacaaatcagttagagaaacacaagcattgctgaaattaaaaccagcaaaactcatgaagagatcattcataaagaaagaatataaaaacacaattaaccaaaaaaataaacttcactagtaaagaaagaaatgtaaactataatgacaacatttttcatccatcaaactggtactttaaaaatatttctggctgggtgcagtggctcatgcctgta

SEQ ID NO: 34568 - DNA, 476 bp, Homo sapiens
  misc_feature (1)...(476): n = a,t,c or g
gnngtnntnntttgaaacctntgaacaccnnnnnnnnnnnnnnnnnnnnnnnnnnnnnnnnnnnnnnnnnnnnnnnnnnnnnnnggcacgaggtaaaactgaaaaaaattagagtcagcttaatgcccacctatgaaggaatagataaattatggtttcattgtgctatggaatacaatgcattatcaataaggatgaagtaagatgaagcagattatagtagtgtatacttactacaaaagaaatgtatgatacatcatggagttagaaaattgttgcataagtgtgtgcagtaaatagcttgattatattttattttcaaaaactcttgttaaaggaggaagatttttaccttttattttataaacttgtatattggttcaaattcattactannnnnnnnnnnnnnnnnnnnnnnnnnnnnnnnnnnnnnnnnnnnnnnnnnnnnnnnnnnnnnnnnnnnnnnnnnnnnnnnn

SEQ ID NO: 34569 - DNA, 481 bp, Homo sapiens
  misc_feature (1)...(481): n = a,t,c or g
gagggtnntnnttgannctcggataccttatgacnnnnnnnnnnnnnnnnnnnnnnnnnnnnnnnnnnnnnnnnnnnnnnnnnnnnnnnnnnggcacgagnnnnnnnnnnnnnnnnnnnnnnnnnnnnnnnnnnnnnnnnnnnnnntnnnnnnnnnnnnnnnnnnnnnnnnnnnnnnnnnnnnnnnnnnnnnnnnnnnnnnnnnnnnnnnnnnnnnnnnnnnnnnnnnnnnnnnnnnnnnnnnnnnnnnnnnnnnnnncaatggcaaagttaagtagttgcagcagagaccaaatgatctgcaagcctaaagtacttactatatgggcctttaagaagtttgcctactcctgttctagaatattcgtagaaaattgtgttcccaagtcaagttgcactggcatcactgcaggaattttttaggaaagcaaaatctcaggaccacaaccctgccccagacctcctaaatcattatctgtagt

SEQ ID NO: 34570 - DNA, 480 bp, Homo sapiens
  misc_feature (1)...(480): n = a,t,c or g
gagtgnnnnnnnnttggaaaccgttggactcnnnnnnnnnnnnnnnnnnnnnnnnnnnnnnnnnnnnnnnnnnnnnnnnnnnnnnnnggcacgaggacacatgtaagctcggtagggccagacgccagagaagaaaaagctggagcatggcttatggatggtgagcacaacctgaggtggatagctgctgaaccacagcttcgctcagtgatgaccttgaaagaaacacaaatacttctgatgggcagagcttcaggcaatgcacctggccctccgctgtgtgtgggaagaggagcagcctgaggtcaaaacaccggggctgagaggcagcagtgaatggcttggccagctcatcaggggcccggaaggagaaagatgagggacaagaggcctggagcagaggttgatggatgggcgtacaggagtgggaattaaagaggaaggtctttgcgctccttccaggaagcatctgcaccaaac

SEQ ID NO: 34571 - DNA, 473 bp, Homo sapiens
  misc_feature (1)...(473): n = a,t,c or g
anagtgttntttancngaactcntnnnnnnnnnnnnnnnnnnnnnnnnnnnnnnnnnnnnnnnnnnnnnnnnnnnnnnnnnnnnnnnggcacgaggtgcaggttgtggtgagggtgtaggttgtggtgagggtgtaggttgtggtggtgagggtgtaggttgnngtgagggtgcagcttgagccnaggntgcangttgnnttagananngcctatncannacaaaaanccagatnctgcnctaatnctttgtgacttacnaccatacttttcatntntggaatnntattaancanacttnncntnncnttntaatgctaaaacattnaccttncatncatatntatnctcactttctnaaaagnatatanttntnaagactcaaactganctngacnaccncgatnatcacatgccctatccccnctcttanccctgaaaaccttatnantnattctcnacntttgttaccaa

SEQ ID NO: 34572 - DNA, 483 bp, Homo sapiens
  misc_feature (1)...(483): n = a,t,c or g
ngagtgntnntgntctgaanccnnnnatactctnnnnnnnnnnnnnnnnnnnnnnnnnnnnnnnnnnnnnnnnnnnnnnnnnnnnnnnnnnnnnnnnnggcacgagcggagtgacaggcgccgtggtgacgatggtggtttctttcctcgaacactggaaatccattggttgtccatcatcaactccatggtgcttgtgtttttactggtgggttttgtggctgtcattctaatgcgtgtgcttcggaatgacctggctcggtacaacttagatgaggagaccacctctgcaggttctggtgatgactttgaccagggtgacaatggctggaaaattatccatacagatgtcttccgcttccccccataccgtggtctgctctgtgctgtgcttggcgtgggtgcccagttcctggcccttggcactggcattattgtcatggcactgctgggcatgttcaatgtgcaccgtcatggggccat

SEQ ID NO: 34573 - DNA, 483 bp, Homo sapiens
  misc_feature (1)...(483): n = a,t,c or g
agagtgttnttnnananatacnctntgnacatccnnnnnnnnnnnnnnnnnnnnnnnnnnnnnnnnnnnnnnnnnnnnnnnnnnnnnnnggcacgagnnnnnnnnnnnnnnnnnnnnnnnnnnnnnnnnnnnnnnnnnnnnnnnnnnnnnnnnnnnnnnnnnnnnnnnnnnnnnnnnnnnnnnnnnnnnnnnnnnnnnnnnnnnnnnnnnnnnnnnnnnnnnnnnnnnnnnnnnnnnnnnnnnnnnnnnnnnnnnnnnnnnnnnnnnnnnnnnnnnnnnnnnnnnnnnnnnnnnnnnnnnnnnnnnnnnnnnnnnnnnnnnnnnnnnnnnnnnnnnnnnnnnnnnnnnnnnnnnnnnnnnnnnnnnnnnnnnnnnnnnnnnnnnnnncgccaacttttaatttttaaaagttatttaaaacaaaaagacccagctagtatcactattctaaaagagaaagtttacagaaatacacacacacat

SEQ ID NO: 34574 - DNA, 481 bp, Homo sapiens
  misc_feature (1)...(481): n = a,t,c or g
gagagnnnntgnttgtnncnnnnatactcttatgactgacnnnnnnnnnnnnnnnnnnnnnnnnnnnnnnnnnnnnnnnnnnnnnnnnnnnnnggcacgaggtcaaaatctgcttctgtgaccgctgctataggcgtggagctgaggctcggcttttccttttgttctgggtggaagcagcggtgccgcggagggccagccagatccggacccttcccttagggtccagtctccccacaccccagcagggtgtcttctagccataaggccaagggagtggcagaactgggccgcctctctggttgacaagcaaaccacatgctaaggcttggagcaagagagaatttgtgtctattggcaaagaactaagccaggaagacatgggccatccctccgctttagggaagcatattttaaacctaaacgttgaacttcttctttggcctcaccagtgaaaacttgttgtctttagttcctaaag

SEQ ID NO: 34575 - DNA, 404 bp, Homo sapiens
  misc_feature (1)...(404): n = a,t,c or g
gnggngtnnnntnnnntntttgaaatgaaaactctttgacnnnnnnnnnnnnnnnnnnnnnnnnnnnnnnnnnnnnnnnnnnnnnnnnnnnnnnnnnnggcacgagcggcacgagtagaatttctatattttagctcttacatttaggtttgtgatcattttaatttttgtgtatgttgtgaggtaagggtataagtttgtttttttccttttggcatttggatatcaaattgtttcacatggtatgttgaaaatactctcnnnnnnnnnnnnnnnnnnnnnnnnnnnnnnnnnnnnnnnnnnnnnnnnnnnnnnnnnnnnnnnnnnnnnnnnnnnnnnnnnnnnnnnnnnnnnnnnnnnnnnnnnnnnnnnnnnnnnnnnnnnnnnnnnnnnnnnnnnnnnnn

SEQ ID NO: 34576 - DNA, 488 bp, Homo sapiens
  misc_feature (1)...(488): n = a,t,c or g
nggnngtngnnttntgtnnctgganctccaatccnnnnnnnnnnnnnnnnnnnnnnnnnnnnnnnnnnnnnnnnnnnnnnnnnnnnnnnnnnnnnnnnnnggcacgaggaaatattgagctttgnnnnnnnnnnnnnnnnnnnnnnnnnnnnnnnnnnnnnnnnnnnnnnnnnnnnnnnnnnnnnnnnnnnnnnnnnnnggggttgttacttctttcttgtaatttgtttaagttccttattgattcaggatattagatctttgttcaatacannnnnnnnnnnnnnnnnnnnnnnnnnnnnnnnnnnnnnnnnnnnnnnnnnnnnnnnnnnnnnnnnnnnnnnnnnnnnnnnnnnnnnnnnnnnnnnnnnnnnnnnnnnnnnnnnnnnnnnnnnnnnnnnnnnnnnnnnnnnnnnnnnnnnnnnnnnnnnnnnnnnnnnnnnnnnnnnnnnnnnnnnnnnnnngcatccagcgtttttatagagttt

SEQ ID NO: 34577 - DNA, 486 bp, Homo sapiens
  misc_feature (1)...(486): n = a,t,c or g
gtagggngtnngttntgtatannacananaactctttnnnnnnnnnnnnnnnnnnnnnnnnnnnnnnnnnnnnnnnnnnnnnnnnnnnnnnnnnnnnnnggcacgagtggagtactctgcttccctgttctaaggccagggaaaggtaaaaaggataggaaaggcaacaaggatataaaaagagccttttgagtctaaaggactcaactctagattcagcccaagaactgggaaaggtccagttcccattccctaatcttgccaataaaactgccccaggccaaggaatttttggcagacaaggaggctggggaggatggctggagtggagggaggcaggctcataagccatgttcttgagcctcacctcaggctcctctccccctgaagtttctctttcaacatcttgcttctctcagtcagttctggggacatcagagtttgaagatttcatcctcctggtcccgtaatgtccgggtccgaaag

SEQ ID NO: 34578 - DNA, 480 bp, Homo sapiens
  misc_feature (1)...(480): n = a,t,c or g
gtnggngngttnnnttntntatntgatctnatatccctttgactgatccnnnnnnnnnnnnnnnnnnnnnnnnnnnnnnnnnnnnnnnnnnnnnnnnnnnnggcacgagaccctgtgcatggtgcttccctctaatttattgattactcataataatcaagcagctttgtagaagagaagcgtgatgaggcaggttaaatgggaagtaggcaaaatagtgtaatgtgctaagattttctaaatcatattttacaacaaaaatggaatgagtaatgaaaccttggtagatactttgtaatattctctattgagtgtccaattcagtgtcatataagatatactggatatagaatgacaaggttctgatcagctgtgtaaccaaaaatggaatgagtaatgaaaccttggtagatactttgtaatattctctattgagtgtccaattcagtgtcatataagatatactggatatagaatgac

SEQ ID NO: 34579 - DNA, 476 bp, Homo sapiens
  misc_feature (1)...(476): n = a,t,c or g
gnngnnnntnnnntntttgattttnatanccttatgacnnnnnnnnnnnnnnnnnnnnnnnnnnnnnnnnnnnnnnnnnnnnnnnnnnnnnnnnnnggcacgagttaatgttaaagaagcaaaataagaggaatagatagagtgttatggaacaaggagggaaagattagtcctaactattgaacatcttggaaacttctctgagaagttggccttgagtgtttcaaatcacattttgtattaagannnnnnnnnnnnnnnnnnnnnnnnnnnnnnnnnnnnnnnnnnnnnnnnnnnnnnnnnnnnnnnnnnnnnnnnnnnnnnnnnnnnnnnnnnnnnnnnnnnnnnnnnnnnnnnnnnnnnnnnnnnnnnnnnnnnnnnnnnnnnnnnnnnnnnnnnnnnnnnnnnnnnnnnnnnnnnnnnnnnnnnnnnnnnnnnnnnnnnnnnnnnnnnnnnnnnnnnnnnnnnnnnnnnnn

SEQ ID NO: 34580 - DNA, 469 bp, Homo sapiens
  misc_feature (1)...(469): n = a,t,c or g
gngtgttnncctcttgatctaacnnnagactctnnnnnnnnnnnnnnnnnnnnnnnnnnnnnnnnnnnnnnnnnnnnnnnnnnnnnnnnnnnnnnnnnggcacgagaattagaaagctgatacaggcacattttaaaccacataatgaaaggctgatttgtatctctagcaaactgagtttttgagtttctagtacctaaagcgaactggggatatgagggtgagcaacacacagggcttttggagcttatagcggtggaagctttatccgtttgtttttagcgccacactacaacctcccaagcagagattattctaaaaaaaatgattgcgcatatacttgcaaactcataggaataaaatgattttggtctcaagcaatgaccaaagaagtgatttttttttttcttttttttttttnnaaanaaantntcnttttgnccccnngnntgaannnnaggggcccaat

SEQ ID NO: 34581 - DNA, 465 bp, Homo sapiens
  misc_feature (1)...(465): n = a,t,c or g
gtgttcccctttgaacnntgagaccntttgcnaanntcnnnnnnnnnnnnnnnnnnnnnnnnnnnnnnnnnnnntnaattcggcacgagcnnnnnnnnnnnnnnnnnnnnnnnnnnnnnnnnnnnnnnnnnnnnnnnnnnnnnnnnnnnnnnnnnnnnnnnnnnnnnnnnnnnnnnnnnnnnnnnnnnnnnnnnnnnnnncaacaacaacaacacaaatnnnnnnnnnnnnnnnnnnnnnnnnnnnnnnnnnnnnnnnnnnnnnnnnnnnnnnnnnnnnnnnnnnnnnnnnnnnnnnnnnnnnnnnnntcctgtgaattccatttttaagagaataccatggggcatgtcttggtcacttgtcaaactgggtcccttagaggtacacgaagacactctaagtggngtataagtggnaggataacttgcaaggactacncttccagacccccagggtgtangtatc

SEQ ID NO: 34582 - DNA, 471 bp, Homo sapiens
  misc_feature (1)...(471): n = a,t,c or g
gtgtgtntncctcttgaaaanctnatganccnnnnnnnnnnnnnnnnnnnnnnnnnnnnnnnnnnnnnnnnnnnnnnnnnnnnnnnnnggcacgaggacgctggtgctggcccagaggagggacccctccatccactacagcccccagttccacaaggtgaccgtggcaggcatcagcatctactgctatgcgtggctggtgcccctggccctgtggggcttcctgcggtggcgcaagggtgtccaggagcgcatggggccctacaccttcctggagactgtgtgcatctacggctactccctctttgtcttcatccccatggtggtcctgtggctcatccctgtgccttggctgcagtggctctttggggcgctggccctgggcctgtcagccgccgggctggtattcaccctctggcccgtggtccgtgaggacaccaggctggtggccacagtgctgctgtccgtggt

SEQ ID NO: 34583 - DNA, 472 bp, Homo sapiens
  misc_feature (1)...(472): n = a,t,c or g
gggnttgnnntttgaccataggnaaactcnnnnnnnnnnnnnnnnnnnnnnnnnnnnnnnnnnnnnnnnnnnnnnnnnnnnnnnnnnnnnnnnnnggcacgagactggaagttggtagttaaaaactaaatatttcacttaagttttctacagttgttaagccattgcaaaagggggatgaatgttagttattagcattttaaaaggttctacttcagcataaaggtcatttccaatcaatgggaggtccaatataattaaaaggtgcctaaattattattgaggaatcactttctttatgtcagaggaagtactgcaagcctttnnnnnnnnnnnnnnnnnnnnnnnnnnnnnnnnnnnnnnnnnnnnnnnnnnnnnnnnnnnnnnnnnnnnnnnnnnnnnnnnnnnnnnnnnnnnnnnnnnnnnnnnnnnnnnnnnnnnnnnnnnnnnnnnnnnnnnnnnnnnnnnnnnn

SEQ ID NO: 34584 - DNA, 470 bp, Homo sapiens
  misc_feature (1)...(470): n = a,t,c or g
gggnttnnntttganntanngnatactcnnnnnnnnnnnnnnnnnnnnnnnnnnnnnnnnnnnnnnnnnnnnnnnnnnnnnnnnnnnnnnnnnnggcacgagtgggatctctcttttgattcattggtagaatttttacatgttagtgacttcatgaagatttataactgtttagcagatacatgagctacttcaattttcatataattttttttaattttaaaataataatggcatagttctgcatgatagaaaaccagcttttgtttttaaggaaatctcacaatattttttcattatgaaaacatgccatttttcagtaaagtcacgcaaaaggatgttttccttcatgtgattttttaataactaagtataatttatgaaatatacagacaattactggtagttgctaagaaactcttctgaaagccataagcctgtattcttgctaagcacataacaggtgttcc

SEQ ID NO: 34585 - DNA, 506 bp, Homo sapiens
  misc_feature (1)...(506): n = a,t,c or g
ggggnnnttgnntnntgnnnaactgaancncttgtntgaatcccnttnnnnnnnnnnnnnnnnnnnnnnnnnnnnnnnnnnnnnnnnnnnnnnnnggcacgagaactggatggggaaaagccacctcttcctgaaactgcattaaaaaaggcgtgtgaggctagggagtgggtgtctaggaaattaaagagactctcacatgatgtcctcaacttgtgcagaaaagtaggaggcagggttttctcctgagaggaatggggtgggcggggaagcatcaggtgcgggactgggagcttgaaaatacgtgatacatgtgccacattttcttaatccnnnnnnnnnnnnnnnnnnnnnnnnnnnnnnnnnnnnnnnnnnnnnnnnnnnnnnnnnnnnnnnnnnnnnnnnnnnnnnnnnnnnnnnnnnnnnnnnnnnnnnnnnnnnnnnnnnnnnnnnnnnnnnnnnnnnnnnnnnnnnnnnnnnnnnnnnaaaagaaaatacgtgatact

SEQ ID NO: 34586 - DNA, 507 bp, Homo sapiens
  misc_feature (1)...(507): n = a,t,c or g
aggggnntttgnnttntgntanacnnaanctcttgtntgaatncccntnnnnnnnnnnnnnnnnnnnnnnnnnnnnnnnnnnnnnnnnnnnnnnnnggcacgagtttttttttaaagaaaaaattatataaaaatttaaaaagaagattagagaagaaataaaatgtgaacacatgtctnnnnnnnnnnnnnnnnnnnnnnnnnnnnnnnnnnnnnnnnnnnnnnnnnnnnnnnnnnnnnnnagngantcctatacatcantacatatanatttaacaactgangttcaaatgattttcagagcgtanncnttanttttttggtataatanttattgactgttatcananatacagangtagggtgttnatgagtntagtttgnnacatacagagtttgaggtgcctgtaananntccaactgaanatacccanccanctnnngggtttgnggtntaaaaganaaggttganactcanggtntacactcaggctttgtntgctcaca

SEQ ID NO: 34587 - DNA, 507 bp, Homo sapiens
  misc_feature (1)...(507): n = a,t,c or g
nggggnnnttgnnttntgnntactgaaaccctttgttannnnnnnnnnnnnnnnnnnnnnnnnnnnnnnnnnnnnnnnnnnnnnnnnnnnnnnnnnggcacgagagaagaagtgattaagctcacagcaatcaatgacatagaaaatggaaaaacaaggaaaatggagcaaccaaaagttggttctttggcaacgtcgagaatgnnnnnnnnnnnnnnnnnnnnnnnnnnnnnnnnnnnnnnnnnnnnnnnnnnnnnnnnnnnnnnnnnnnnnnnnnnnnnnnnnnnnnnnnnnnnnnnnnnnnnnnnnnnnnnnnnnnnnnnnnnnnnnnnnnnnnnnnnnnnnnnnnnnnnnnnnnnnnnnnnnnnnnnnnnnnnnnnnnnnnnnnnnnnnnnnnnnnnnnnnnnnnnnnnnnnnnnnnnnnnnnnnnnnnnnnnnnnnnnnnnnnnnnnnnnnnnnnnnnnnnnnacctctagccaggctgatccagaaggagaaaagagaagc

SEQ ID NO: 34588 - DNA, 505 bp, Homo sapiens
  misc_feature (1)...(505): n = a,t,c or g
aggngnnttgnnttgtgncntacnnaacnctttgtntgaatcccatnnnnnnnnnnnnnnnnnnnnnnnnnnnnnnnnnnnnnnnnnnnnnnnnggcacgagctggagatggatggtgatgatggttacccaataacaatgtgggtttcctaaatgtcactgaactgtacacttcnnnnnnnnnnnnnnnnnnnnnnnnnnnnnnnnnnnnnnnnnnnnnnnataagagaaaaagagaaggtggagctgacattcagacttaggacttcctgatgacgcctcctttccctatgctgcatccagacttcttctgctgattttaaagggaaaatctccctgcctaaaagcctctaagaaaccatttttaatcttcgcagtgggggcgggggatgtacagactcctttgagaagctaatgaaaagttatcatcgcctatcatctccccttcctattccctcccccataccttcacatacactttacatttttgtttacagttctggag

SEQ ID NO: 34589 - DNA, 508 bp, Homo sapiens
  misc_feature (1)...(508): n = a,t,c or g
aggggnntttgngttntgntanaggaaacttcttctttgaacccccttttaaatacnnctcactataggggnatttngccctcgnggcnnngaattcggcacgagccctccctccctcttcctcccttccttccttccctnnnnnnnnnnnnnnnnnnnnnnnnnnnnnnnnnnnnnnnnnnnnnnnnnnnnnnnnnnnnnnnnnnnnnnnnnnnnnnnnnnnnnnnnnnnnnnnnnnnnnnnnnnnnnnnnnnnnnnnnnnnnnnnnnnnnnnnnnnnnnnnnnnnnnnnnnnnnnnnnnnnnnnnnnnnnnnnnnnnnnnnnnnnnnnnnnnnnnnnnnnnnnnnnnnnnnnnnnnnnnnnnnnnnnnnnnnnnnnnnnnnnnnnnnnnnnnnnnnnnnnnnnnnnnnnnnnnnnnnnnnnnnnnnnnnnnnnnnnnnnnnnnnnnnnnnnnnnnnnnnnnnnnnnnnnnnnnnnnnnnnnnnnnnnnnnnnnnnnnnnnnnnnna

SEQ ID NO: 34590 - DNA, 503 bp, Homo sapiens
  misc_feature (1)...(503): n = a,t,c or g
gggnnnaggnggnnnntttgaatccgtnnatgaaacctttgacnnnnnnnnnnnnnnnnnnnnnnnnnnnnnnnnnnnnnnnnnnnnnnnnnnnnnnnnnnggcacgagtagggctcggcgtggcgggatggnggtgnnnnnnnnnnnnnnnnnnnnnnnnnnnnnnnnnnnnnnnnnnnnnnnnnnnnnnnnnnnnnnnnnnnnnnnnnnnnnnnnnnnnnnnnnnnnnnnnnnnnnnnnnnnnnnnnnnnnnnnnnnnnnnnnnnnnnnnnnnnnnnnnnnnnnnnnnnnnnnnnnnnnnnnnnnnnnnnnnnnnnnnnnnnnaagctctggggatgcannnnnnnnnnnnnnnnnnnnnnnnnnnnnnnnnnnnnnnnnnnnnnnnnnnnnnnnnnnnnnnnnnnnnnncagtgccatggactggtactngnctgtggcctgntggtggggacccctggtttaccagtntaagaattattctttttcataanntntacct

SEQ ID NO: 34591 - DNA, 504 bp, Homo sapiens
  misc_feature (1)...(504): n = a,t,c or g
gnnnggnnnnnnttngnntcccnnntnttganaaccnnnnnnnnnnnnnnnnnnnnnnnnnnnnnnnnnnnnnnnnnnnnnnnnnnnnnnnnnnnnnnnnnnggcacgagcccaggaatggtaatttcacctccctacatctatactccactccctcagtaaataagtgaaaattgttaacccatgtgcccattcctgagtagggcagactcttcacaagaggcccatgacaagaattctagggtccagattgaactttaatatagacctttgtctgtgtagaccagtttgtcttgtaaactgtcttacttatgtgtgtaaacattttacattcacatgaaaagttattttcctttatataattggattcagaatcataagggacaggactgaaattattctacagtaaccagtaagaataagattnnnnnnnnnnnnnnnnnnnnnnnnnnnnnnnnnnnnnnnnnnnnnnnnnnnnnnnnnnnnnnnnnnnnnnnnnnnnnn

SEQ ID NO: 34592 - DNA, 484 bp, Homo sapiens
  misc_feature (1)...(484): n = a,t,c or g
gnngaggnggnnntntgnntctgaanntagtnatactctnnnnnnnnnnnnnnnnnnnnnnnnnnnnnnnnnnnnnnnnnnnnnnnnnnnnnnnnnnnnnnnnnggcacgagctccttgaaagttgtgtcatttctatgctttatgaataggattatcttctttatgcagcagtcatttgatgttgaatagaagctgaagatacagttcctctgtaaagatttcatcattgtttgattggtaaaggtggacattttcccccctttccaggtgaggtatacgtgcgttcaaagagggatggggcaggaaggtggttggcggtggtcagaaagccatctgtaactcaggtgattttcctgtaccggtcacctagctgaatctgaatgagagttttttgtaaagttgtggtagaagataaattagcctgatgatggattatgcactgtttctcttctgctataaggggtatgaggccggaggttaag

SEQ ID NO: 34593 - DNA, 489 bp, Homo sapiens
  misc_feature (1)...(489): n = a,t,c or g
gnnggngnnnngnnnntntgnnatntgaaanncngataccctnnnnnnnnnnnnnnnnnnnnnnnnnnnnnnnnnnnnnnnnnnnnnnnnnnnnnnnnnnnnnnnnnggcacgagccctctctctaaaacaaagaaaaagaaagagaaagaaatgcgagtcctgtcttctagatctttctttgtagccatagtcatgtgctttgaatgaccctgggaggtagcatctggacgtagtgggaaggacttgtagcccctgggggtgcccatctcggagcagtccagcagcctgagccccctcttctctcttgctccttcccagggcgtccctggtgcccgtgtactcctttggggagaatgacatctttagacttaaggcttttgccacaggctcctggcagcattggtgccagctcaccttcaagaagctcatgggcttctctccttgcatcttctggggtcgcggtctcttctcagccacctcctggggc

SEQ ID NO: 34594 - DNA, 487 bp, Homo sapiens
  misc_feature (1)...(487): n = a,t,c or g
gnnnnnggnggnnngnnntgnnttggannnacngatacncntnnnnnnnnnnnnnnnnnnnnnnnnnnnnnnnnnnnnnnnnnnnnnnnnnnnnnnnnnnnnnnnggcacgaggcccagctctaggtggcaaacgcggaggaggagcaacagctgtggcagccacagagctgcagctccatcaggctgccttagaatcccagctcagccaaggcctccgggtgcaccttgggcatgtcgctcaccctctcccagcctgttttcttatctccaaaatggggataatcatgatatcttctgtgttgtgggctgtcctgaggatgccgcagtggtgagcgctggcacctcaagcacagaggagcaactcgatgggcattagccattgtctcttccagaatgatcaaatacctcctcacggtgtttattctaacattataaaagacagtttgggtgggataagaatagtcccatgaacagaagaaaatgac

SEQ ID NO: 34595 - DNA, 486 bp, Homo sapiens
  misc_feature (1)...(486): n = a,t,c or g
gnnggnngnnntgnnnttntnnnntctganactntnnnnnnnnnnnnnnnnnnnnnnnnnnnnnnnnnnnnnnnnnnnnnnnnnnnnnnnnnnnnnnnnnggcacgaggcatctgtctcttctgtttctcattcttgaggtcctcagctggcactgccctcttggatgtttgtccatggcctcctgcctctgcagtgaaagccctccaccttcctgttctattctctcctctctgacttggctggaagtcttccagctctatgaatttatacactgagtcttgtcttgtgtcctcttttcctagcaaacaatatggcatctaaaacccagttctactctgataattttttttttacaagatgctacagtatgatacaccatgcccacctggagagaggataaaggtgatggtggtaggacagaatttccatccgcaatctccgttttgagcaaagaagcatggaggatggaagtcattgctgggac

SEQ ID NO: 34596 - DNA, 480 bp, Homo sapiens
  misc_feature (1)...(480): n = a,t,c or g
gagnnnnnnttnagnttngggatactgaaccctttgatactgacaccttatgactgacnnnnnnnnnnnnnnnnnnnnnnnnnnnnnnnnnnnnnnnnnnnnnnnnnnnnnggcacgagctttgtaggaacaggaaagttcatttcttcacacaagatcacaaaccaagtaatccgctggagaaagaacgaattcagaatgcaggtggctctgtaatgattcagcgtgtgaatggctctctggctgtatcgagggcccttggggattttgattacaaatgtgtccatggaaaaggtcctactgagcagcttgtctcaccagagcctgaagtccatgatattgaaagatctgaagaagatgatcagttcattatccttgcatgtgatggtatctgggatgttatgggaaatgaagagctctgtgattttgtaagatccagacttgaagtcactgatgaccttgagaaagtttgcaatgaag

SEQ ID NO: 34597 - DNA, 472 bp, Homo sapiens
  misc_feature (1)...(472): n = a,t,c or g
gnnnnnnttnnnnttgngctantgaaacctntgacttgaaaccnnnnnnnnnnnnnnnnnnnnnnnnnnnnnnnnnnnnnnnnnnnnnnnnnnggcacgagggcgaaaagaggagagagagagaatcctgtctaaggcagcctggtttcgaggctttccagattgtcttattgttcccatcactggcttacgtctgtctcctgttcttggtgtttccttctctggcacacctagcaaagctggacgttttctcaacctttccccagtgtcttccctggcttagggtaccatgtccttagacagtgtaagtaaaattttatattaccttatgtttaccctattttctcaggcatattcaaaatatttcctatcagctaaactcataatagttttcttaattatgaagctgtaagtttttactttaacttaacctttctggtagattgtcagntcaaaatgngntctatgacat

SEQ ID NO: 34598 - DNA, 463 bp, Homo sapiens
  misc_feature (1)...(463): n = a,t,c or g
ggnnnggnnnttttanacccttgnntctgaaacccttatgacnnnnnnnnnnnnnnnnnnnnnnnnnnnnnnnnnnnnnnnnnnnnnnnnnnnnnnnnnnggcacgagactgtttgttgaaactggcantgtttnagaactttctaagggtgnnacacttcttcaagttcatcagagcgtgttgcatgtaacagtgagataagctgtatcattggctgactgatgctggtgaattcacagctaagcctcccaagcctgctggcttcagctgacaaagggttggaagccaggcgtgaacatgcagctggagctgaagctctgcttggcatctgcagagtgagctttccttgtcaggcctggcctggcaggtgtctggagggtctgagaggagagacactctggagggacgggttggcaggtgggagctgtctgccaaggacatccanaaggcagcagatgtggg

SEQ ID NO: 34599 - DNA, 493 bp, Homo sapiens
  misc_feature (1)...(493): n = a,t,c or g
aaccccnnttgganancnctnnnnnnnnnnnnnnnnnnnnnnnnnnnnnnnnnnnnnnnnnnnnnnnnnnnnnnnnnnnnnnnggcacgagcataaacagatatgctatcttggagagtccaaagctatgaacttatatgaagcctgccttactttgttgcaagtgtattctaagaataatttagggcggcaaagaatagatgttacagcagaagaagagcaataccaagacctgcttctcattatggaacttcttactaacctgctgtcaaaagaattcatagatttcagtgatacagatgaagtgtttagaggacatgagccaggtcaagcagcaaacagatctgtgtcagcagcggatgttgtgttgtatggagtaaacctaattctgcccttgatgtcacaggatctcttgaagtttccaaccctttgtaatcagtactacaaattaatcacatttatctgtgagatttttcctgaaaaaataccacaa

SEQ ID NO: 34600 - DNA, 495 bp, Homo sapiens
  misc_feature (1)...(495): n = a,t,c or g
naccnnnnnnnnnnnnnnnnnnnnnnnnnnnnnnnnnnnnnnnnnnnnnnnnnnnnnnnnnnnnnnnnnnggcacgannnnnnnnnnnnnnnnnnnnnnnnnnnnnnnnnnnnnnnnnnnnnnnnnnnnnnnnnnnnnnnnnnnnnnnnnnnnnnnnnnnnnnnnnnnnnnnnnnnnnnnnnnnnnnnnnnnnnnnnnnnnnnnnnnnnnnnnnnnnnnnnnnnnnnnnnnnnnnnnnnnnnnnnnnnnnnnnnnnnnnnnnnnnnnnnnnnnnnnnnnnnnnnnnnnnnnnnnnnnnnnnnnnnnnnnnnnnnnnnnnnnnnnnnnnnnnnnnnnnnnnnnnnnnnnnnnnnnnnnnnnnncctgctgctcagatagggtaagaaataaaaacagcataatcatctgaaagaaacgaaattgtgtatcttttagacttcagacaaagtaaatattcaacatctgataactgttaaggacacaaacttgagcata

SEQ ID NO: 34601 - DNA, 494 bp, Homo sapiens
  misc_feature (1)...(494): n = a,t,c or g
ttgaaaaccnctatgacatgattacgaatttaatacnnnnnnnnnnnnnnnnnnnnnnnnnnnnnnnnnnnnnnnnnggcacgagcattgacagtccaaggactcaatgataccatcagatacctactctgctcttctctctgttacacattcagccagtttgtgatatctttcctaagggttttaaaagggcttcagcagttccagaggtcacatgtagccataactaagttctatggagaaacagcagtttcctcctgtgcatatcccggtattagtgaagaaaccttttccaaaggcctgccagcnnnnnnnnnnnnnnnnnnnnnnnnnnnnnnnnnnnnnnnnnnnnnnnnnnnnnnnnnnnnnnnnnnnnnnnnnnnnnnnnnnnnnnnnnnnnnnnnnnnnnnnnnnnnnnnnnnnnnnnnnnnnnnnnnnnnnnnnnnnnnnnnnnnnnnnnnnnnnnnnnnnnnnnnnnnnnnnnnnnnnnnnnn

SEQ ID NO: 34602 - DNA, 494 bp, Homo sapiens
  misc_feature (1)...(494): n = a,t,c or g
anaccnnnnnnnnnnnnnnnnnnnnnnnnnnnnnnnnnnnnnncgnnnnnnnnnnnnnnnnnnnnnnnnnnnnnnnnnnnnnnnnnnnnnnnnnnnnnnnnnnnnnnnnnnggcacgagtatgaggtcaactaccaacccttggatgaggaactggacagccacctgtcctacatcaagatcttcgacgtgggcacacgctacatggtgaaccgagtgcaggatcacatccagagccgcacagtctactacctcatgaatatccatgtcacacctcgctccatctacctttgccgacatggcgagagtgaactcaacatcagaggccgcatcggaggtgactctggcctctcagttcgcggcaagcagtatgcctatgccctggccaacttcattcagtcccagggcatcagctccctgaaggtgtggaccagtcacatgaagaggaccatccagacagctgaggccctgggtgtcccctatgagcattggaag

SEQ ID NO: 34603 - DNA, 449 bp, Homo sapiens
  misc_feature (1)...(449): n = a,t,c or g
tttganaacgtttgtgacancgattacgaattgattacgaatttantanaagnaantanancnnnnnnnnnnnnnnnnnnnnnnnnnnnggcacgagcagaccaaactttggccatttaacggatccatttgacacaccagcatttaacaaactttatagagttgttccaatcagaaaaattcatgctctgaccatcacatgggcacttcctcctcaacagcaacattacagggtgaagccacttcattatatatcctggctggttggacatgaaggcaaaggcagcattctttctttccttaggaaaaaatgctgggctcttgcactgtttggtggaaatggtgagacaggatttgagcaaaattctacttattcagtgttcagcatttctattacattgactgatgagggttatgaacatttttatgaggttgcttacactgtcttt

SEQ ID NO: 34604 - DNA, 436 bp, Homo sapiens
  misc_feature (1)...(436): n = a,t,c or g
ttgaanannnnnnnnnnnnnnnnnnnnnnnnnnnnnnnnnnnnnnnnnnnnnnnnnnnnnnnnnnnnnnnnnnnnnnggcacgaggaaaggcagaagcatgtttggtgtgtttaaggnnnnnnnnnnnnnnnnnnnnnnnnnnnnnnnnnnnnnnnnnnnnnnnnnnnnnnnnnnnnnnnnnnnnnnnnnnnnnnnnnnnnnnnnnnnnnnnnnnnnnnnnnnnnnnnnnnnnnnnnnnnnnnnnnnnnnnnnnnnnnnnnnnnnnnnnnnnnnnnnnnnnnnnnnnnnnnnnnnnnnnnnnnnnnnnnnnnnnncangaatagtttgaactcacnatacntaggttgcagtgntacagtctcanntcactgcaaactntgcctacnnnnnnnnnnnnnnnnnnnnnnnnnnnnnnnnnnnnnnnnnnnnnnnnnn

SEQ ID NO: 34605 - DNA, 482 bp, Homo sapiens
  misc_feature (1)...(482): n = a,t,c or g
ttgnnnaccgctttgctnnnnnnnnnnnnnnnnnnnnnnnnnnnnnnnnnnnnnnnnnnnnnnnnnnnnnnnnnnnnnnnnnnnnnnnggcacgaggtaaaaatacagaatnnnnnnnnnnnnnnnnnnnnnnnnnnnnnnnnnnnnnnnnnnnnnnnnnnnnnnnnnnnnnnnnnnnnnnnnnnagtacaaannnnnnnnnnnnnnnnnnnnnnnnnnnnnnnnnnnnnnnnnnnnnnntggattttggtggccatgggaggtcctagaactaatccctgatggatacctagggacagctgtacatatacactgtccaaagaattcattgaggatttcctactccaggattaaactcctgaagtgaactgttttgaaaggcaaaaggattttttcttttttgtcaaagtttanatgttgtaggtgtgaattnattagtataaagtanttacagccctntgctttatataaagtatatgctc

SEQ ID NO: 34606 - DNA, 455 bp, Homo sapiens
  misc_feature (1)...(455): n = a,t,c or g
nnnnnnnnnnnnnnnnnnnnnnnnnnnnnnnnnnnnnnnnnnnnnnnnnnnnnnnnnnnnnnnnnnnnnnnnnnggcacgagcttgttttaagcaagattaaaagtgaattttctattagcagtaattttatattactccctgtcttgcttcttttgcactcactgaattgaagagaacgatatgaaattgcctggaaataaaaatgaaagtgcttctcagagccaaacaacactactcgtgtgaaagaatatagaatgaaagtttgaagtgtccatcagtcctgaacctgggatgatcctgtcctgatatccttaacgagaatgcatctaccaagaccctattcgcaaatcagttcacattcacggtgtttgggggttaggacttgggcatgtcattacgggaaatagctttgttggcttttctggttttacatagaaagagcaataaaggtca

SEQ ID NO: 34607 - DNA, 469 bp, Homo sapiens
  misc_feature (1)...(469): n = a,t,c or g
cngctnnnnnnnnnnnnnnnnnnnnnnnnnnnnnnnnnnnnnnnnnnnnnnnnnnnnnnnnnnnnnnnggcacgagaaacttggggcaagtcttcagaatcatgagttccctgatatccacactgactgggttaacatactaaagagaaagtcaggaaaggggtgggtagagaaaagctacagcttgacttgcagggcctgcacatgcccagacctatccctgagtctctagtagcaagatggtctgcagggtgaagatgcactgctcagaaatggcccacacactaggtagtaaggacaatgcaagctgggccaccatcttctttggtcacattaaagaagccaatagttttggaacaggaaaacattgacacctaaagaaggcagagccaaaaaatgcagaaaaggggacagccctggtgatcagtggagcctatggacttggactcatctaaagccagctgcaccc

SEQ ID NO: 34608 - DNA, 462 bp, Homo sapiens
  misc_feature (1)...(462): n = a,t,c or g
tgnaaacncttgacaagnagacnaacnnnnnnnnnnnnnnnnnnnnnnnnnnnnnnnnnnnnnnnnnnnnnnggcacgagcaggattgtgcctaggctctcaggctccaaggcctatgctcctcacctctgtgctgggttccttctacttctaaattctctgtttacacaagcatgggactgggtagaaaaactggatggagggtgattcagattgagatgttttcttggtgtaaacatgagatgtctgggtggtaagcttatatgaatggtttttacttttttctttgtactttcatataattccctaaatttcctacaatatttatgtgttactttcctaataatgaaggggcatacgcagaaaacacattggctctagtataggatttcagcctttatagatgttgatgctgacttattagcacctatttgttagcagcacatgcgtgcgtgaccatgc

SEQ ID NO: 34609 - DNA, 476 bp, Homo sapiens
  misc_feature (1)...(476): n = a,t,c or g
cncctatgactgattacgaatttaatacgactcnnnnnnnnnnnnnnnnnnnnnnnnnnnnnnnnnnggcacgagaataattcaaatatgcctcatagaaataattaatactttttcttaccccgagagtagccagagatgatgacactattttttagtacccacggggtataaattaagaagattaatgctccctgcatgttcttagacagatgtgagaaagatatatgtataaagtattattttccatgattctctcttgatcaaataattctcttcctcttctttcattttgagagctctaagattgcttgcaattatctgcttttgggggaaatgggagaatattgttttttatatacttgctgagatccacaaagtaggaaaatattctttatagagtcctgtaacaattcctaattttatcagatagtctggagcaatggctcccaaacattttttgaccttgaacttca

SEQ ID NO: 34610 - DNA, 477 bp, Homo sapiens
  misc_feature (1)...(477): n = a,t,c or g
nnnnnnnnnnnnnnnnnnnnnnnnnnnnnnnnnnnnnnnnnnnnnnnnnnnnnnnnnnnnnnnnnnnnnnnnggcacgagtttttcttttacatcttccccccaccattgctctgcccatccgaaggctgtggctggcacaggacagaacagaacctcctagcctcaagttccaaacccacactctccaatagccaggctctcagatgggaagcttcaaagccttgtgacagcctggctgaacctctccagcctgggcgctccctccatttcctgccccggaaacaggcatctcctctggccacctcccaaagcctgtctggaagcctcaggcacccgctcctggaagcctgtacgattcacaacaaagggcccgtcacccagtcgtgctgagcacacccctattcccccgagctctgaattgcctttgnccaggctaggacaacatcttanagccttntgnctgctgcagactcgg

SEQ ID NO: 34611 - DNA, 466 bp, Homo sapiens
  misc_feature (1)...(466): n = a,t,c or g
nnnnnnnnnnnnnnnnnnnnnnnnnnnnnnnnnnnnnnnnnnnnnnnnnggcacgagagtgtcctcagcgaactccagattcctaggggaaacctacgtgcccagagcaggaaacgcacaagtcaattcaggttccggtgccatccgcagtaaattcccttccttttgctccaaattcctcctctgcgtccaggagagggacccccgggactcccgcacacccaggaccgggagcggcagagcagagggcgggtgcgagggcgcgagggaagggaggcggcctgcggacctggggcgcgcagtttcccggctccgtgggaacctccaaccccggggcgcgcggcctaggctccgccctgccaggcctggggccgagcggtccacctagtgtgtcctgacctggggaagccgatccgcgcgcgggtcggccgcgacgagggaagctcgctgggcaagtgccgcgcgg

SEQ ID NO: 34612 - DNA, 487 bp, Homo sapiens
  misc_feature (1)...(487): n = a,t,c or g
ttngnnaccnnnnnnnnnnnnnnnnnnnnnnnnnnnnnnnnnnnnnnnnnnnnnnnnnnnnnnnnnnnnnnnnnnnggcacgagnnnnnnnnnnnnnnnnnnnnnnnnnnnnnnnnnnnnnnnnnnnnnnnnnnnnnnaaaagttagactgcttgggtataaatgggagccctgtcattgagtagatgcatgatttttaataaatttttaaatttctatgctttggttttattgtttataaacaattgtataatcacacctttgcagagtttgcaaaaaaaacatacacagaaagcctcgatagctcagtgtctgccacagagctgagagaaacagatgtctactcccattttacaaacagaggtagaggaagtgccttgcctgaggccagggttgaattctgccttcacccattttgtcagcaacacactggtggagaagagagctctggtgggcactgttctctcaggcaggctcanaagtggcg

SEQ ID NO: 34613 - DNA, 473 bp, Homo sapiens
  misc_feature (1)...(473): n = a,t,c or g
tnganaccnttnnnnnnnnnnnnnnnnnnnnnnnnnnnnnnnnnnnnnnnnnnnnnnnnnnnnnnnnnnnnnnnggcacgagggtggctagtgggtctgggtttattgtgtcggaagatggactgatcgtgacaaatgcccacgtggtgaccaacaagcaccgggtcaaagttgagctgaagaacggtgccacttacgaagccaaaatcaaggatgtggatgagaaagcagacatcgcactcatcaaaattgaccaccagggcaagctgcctgtcctgctgcttggccgctcctcagagctgcggccgggagagttcgtggtcagccatcggaagcccgtttttccttcaaaacacagtcaccaccgggaatcgtgagcaccacccagcgaggcggcaaanaacttggggctccgaacncaaacatggactacattcanaccgacgcctcattaacttatggaacttcggaag

SEQ ID NO: 34614 - DNA, 480 bp, Homo sapiens
  misc_feature (1)...(480): n = a,t,c or g
ttnnnnnnctttgnnaaccgntnnnnnnnnnnnnnnnnnnnnnnnnnnnnnnnnnnnnnnnnnnnnnnnnnnnnnnnnnnnnnnnggcacgagctattttgagggaaaagacagtatccttattaccttttgtttgtttaatagcacaaatgcttatttgttatccaaaaacaacctccttcttatctgtgataaatctatagaaagaatttagctgcaagtggacaaaggaacaagcccccagaaaagaaagggaagaactgccttcttatactacagaacatgcattagtgtgggctatatagctgtggctcatgctacccaattccagatttctttgtcctctaagagttgattgctgtatattaaaattgaacatcagaggatgggaagagggctctgtaagccagaaccttactaaagtagagggcacaatcagtgtgaataaattcacttcagaatctcaagtcaaggccaggc

SEQ ID NO: 34615 - DNA, 462 bp, Homo sapiens
  misc_feature (1)...(462): n = a,t,c or g
gntatgacatgattacgaatttaatacnnnnnnnnnnnnnnnnnnnnnnnnnnnnnnnnnnnnnnnnnggcacgagcagccagtcgccaagaatcatgaaagtcgccagtggcagcaccgccaccgccgccgcgggccccagctgcgcgctgaaggccggcaagacagcgagcggtgcgggcgaggtggtgcgctgtctgtctgagcagagcgtggccatctcgcgctgcgccgggggcgccggggcgcgcctgcctgccctgctggacgagcagcaggtaaacgtgctgctctacgacatgaacggctgttactcacgcctcaaggagctggtgcccaccctgccccagaaccgcaaggtgagcaaggtggagattctccagcacgtcatcgactacatcagggaccttcagttggagctgaactcggaatccgaagttgggacccccgggggccgagggc

SEQ ID NO: 34616 - DNA, 471 bp, Homo sapiens
  misc_feature (1)...(471): n = a,t,c or g
acctttnnnnnnnnnnnnnnnnnnnnnnnnnnnnnnnnnnnnnnnnnnnnnnnnnnnnnnnnnnnnnnnggcacgagattcccaagcacatcaaccccgtggccgcctccctcatccagaagatgcttcagacagatcccactgcccgcccaaccattaacgagctgcttaatgacgagttctttacttctggctatatccctgcccgtctccccatcacctgcctgaccattccaccaaggttttcgattgctcccagcagcctggaccccagcaaccggaagcccctcacagtcctcaataaaggcttggagaaccccctgcctgagcgtccccgggaaaaagaagaaccagtggttcgagagacaggtgaggtggtcgactgccacctcagtgacatgctgcancagctgcacagtgtcaatgcctccaagccctcggagcgtgggctggtcaggcaagaggaggctg

SEQ ID NO: 34617 - DNA, 472 bp, Homo sapiens
  misc_feature (1)...(472): n = a,t,c or g
nnaccntnnnnnnnnnnnnnnnnnnnnnnnnnnnnnnnnnnnnnnnnnnnnnnnnnnnnnnnnnnnnnnnnnggcacgagggaggggaagggggggaaggggctgaggctcggggactccagcctgaagtccaagcatgtgcggaagcctagaccctcccaccttaccacaaacttggctccaagtcccctctatgctgacgcatccttgccctcctcctcctccccactgccctccactagcccatcctccctcctccctcctcccctcaacacacatttatcactagtgacatctcagccccccctaccccaatccagggacacaggagggacacagtggggttagactgagggccactgatgtggcttcaccctcagtgcttgggcaattcccaagttacagcatctcagtccccagagaaggccatgctgcactgtagccgcaagggccccctggagtgcagggcaca

SEQ ID NO: 34618 - DNA, 479 bp, Homo sapiens
  misc_feature (1)...(479): n = a,t,c or g
ttgnnnnctttgaannnnnnnnnnnnnnnnnnnnnnnnnnnnnnnnnnnnnnnnnnnnnnnnnnnnnnnnnnnnnnnnnnnnnnnnggcacgagcgtatgactctgacgaagggggtggccacttctgacttcttggcctttgtcttagttaagatgcagacccatataacagaggccctgctaatgnnnnnnnnnnnnnnnnnnnnnnnnnnnnnnnnnnnnnnnnnnnnnnnnnnnnnnnnnnnnnnnnnnnnnnnnnnnnnnnnnnnnnnnnnnnnnnnnnnnnnnnnnnnnnnnnnnnnnnnnnnnnnnnnnnnnnnnnnnnnnnnnnnnnnnnnnnnnnnnnnnnnnnnnnnnnnnnnnnnnnnnnnnnnnnnnnnnnnnnnnnnnnnnnnnnnnnnnnnnnnnnnnnnnnnnnnnnnnnnnnnnnnnnnnnnnnnnnnnntannaantactggcatggtggcacacgcctgta

SEQ ID NO: 34619 - DNA, 455 bp, Homo sapiens
  misc_feature (1)...(455): n = a,t,c or g
ttgnnnaccnnnnnnnnnnnnnnnnnnnnnnnnnnnnnnnnnnnnnnnnnnnnnnnnnnnnnnnnnnnnnnnnnnnggcacgagggctgtgagtttctcagactcctcttggttttaatgaccttgactgttctgaggaagctgcctgtcagctgagatctgtctgatgtttttctaatgggtacaggaagggactgggtttggggaggaagcccccagaggcgannnnnnnnnnnnnnnnnnnnnnnnnnnnnnnnnnnnnnnnnnnnnnnnnnnnnnnnnnnnnnatttttttaagtgtgctgaagtagttcactttcagaatgaagaaacaaaataaaaaacacagtacatagagacattaaaatagaatctttaaaaaaggacnaaatagaatattcttccagntttttttaactttnattaaggaaagnttttaaatttccttttgaatt

SEQ ID NO: 34620 - DNA, 458 bp, Homo sapiens
  misc_feature (1)...(458): n = a,t,c or g
ttggnnacngcttgacatgattacgaatttaatacnnnnnnnnnnnnnnnnnnnnnnnnnnnnnnnnnnnnnnnnnggcacgagctggatgggattaatggcagaagaaaagattcgtgaatttaaagacagaaatagcaactactcaacatgaaatagaaaaaaaggaattttttaaaaatggaaaagagcatcagtgagctgtggggcaatttcaaacagtttaatatacatttgactggaatatctgaaggagaagagagggggtggaagagaaaaattagttagaaaataatggctgaaaaatatccaaatttgatgaaaagagtatagtcacagatccaaaaagctcaatgaacaccaaacataagaatcatgaagaaaaccacacaaaggctcatcataatgaaattgttgaaaccagtggtaaatagaaagccttaaaagcagccagagaa

SEQ ID NO: 34621 - DNA, 463 bp, Homo sapiens
  misc_feature (1)...(463): n = a,t,c or g
ttgnnaaccgntnnnnnnnnnnnnnnnnnnnnnnnnnnnnnnnnnnnnnnnnnnnnnnnnnnnnnnnnnnnnnnnggcacgagaagttcccattttctacatttgggagcacttgctattgtattttacaaatttactaacattacttgtaccagtttggttcatttgggcttagaaattatttgaattggtaagtaggggtggcagttttgtgattcctttgaggtgattgtggactgataactttcaggctacatccctttgtggtttttctgagaagaaaaaagaaaatcaaaggctgannnnnnnnnnnnnnnnnnnnnnnnnnnnnnnnnnnnnnnnnnnnnnnnnnnnnnnnnnnnnnnnnnnnnnnnnnnnnnnnnnnnnnnnnnnnnnnnnnnnnnnnnnnnnnnnnnnnnnnnnnnnnnnnnnnnnnnnnnnnnnnnnnnnnnnnnnnnnnnnn

SEQ ID NO: 34622 - DNA, 484 bp, Homo sapiens
  misc_feature (1)...(484): n = a,t,c or g
gngtgnnnnnnnnntttganaaccttgtgnnnnnnnnnnnnnnnnnnnnnnnnnnnnnnnnnnnnnnnnnnnnnnnnnnnnnnnnnnnnnnnnnnnnnnnggcacgagcccctttcaaggggatcagaggtccctggagtttctgcttcctccagagccagactactcactgctgctcaccttcatctacaacgggcgcgtggtgggcgaggcccaggtgcaaagcctggattgccgccttgtggctgagccctcaggctctgagagcagcatggagcaggtgctgttccccaagcctggcccactggagcccacgcagcgcctgctgagccagcttgagaggggcatcctagtggccagcaacccccgaggcctcttcgtgcagcgcctttgccccatccccatctcctggaatacaccccaggctccacctgggccaggcccgcatctgctgccagcaacgagtgcgtggagctcttcagaa

SEQ ID NO: 34623 - DNA, 481 bp, Homo sapiens
  misc_feature (1)...(481): n = a,t,c or g
gtgnnnnntngnntttgananctttgannnnnnnnnnnnnnnnnnnnnnnnnnnnnnnnnnnnnnnnnnnnnnnnnnnnnnnnnnnnnnnnnnnnnnnnggcacgagccaggcaggagtgcannnnnnnnnnnnnnnnnnnnnnnnnnnnnnnnnnnnnnnnnnnnnnnnnnnnnnnnnngaactccagcaggaggtggttcgagtagctggaaccactgttcctggtgctcatcgtggttttgttttgcatttttctattnnnnnnnnnnnnnnnnnnnnnnnnnnnnnnnnnnnnnnnnnnnnnnnnnnnnnnnnnnnnnnnnnnnnnnnnnnnnnnnnnnnnnnnnnnnnnnnnnnnnnnnnnnnnnnnnnnnnnnnnnnnnnnnnnnnnnnnnnnnnnnnnnnnnnnnnnnnnnnnnnnnnnnnnnnnnnnnnnnnnnnnnnnnnnnnnnnnnnnnnnnngtatatcttctttggag

SEQ ID NO: 34624 - DNA, 443 bp, Homo sapiens
  misc_feature (1)...(443): n = a,t,c or g
ggtgnnnnnnnnntttganacngtttgacnnnnnnnnnnnnnnnnnnnnnnnnnnnnnnnnnnnnnnnnnnnnnnnnnnnnnnnnnnggcacgaggcgtggcatagttttaagatgttttgacatgtcacacgtaaacgatagtaaacatgtcttggaagaggggctaagatgtgggacgaacgtgattattcaatgggcatgcgcttccggccacgcatcacacgcacatacaccaccgcggttatccataactctaccatttcaagtgagccgcaagagactgtnnatcgnagtgaactgggccntgaggcaatgattactaaanaatcatgggaancntctaatattancagtnatganngaanatncnttnncnntgganttcnngtgacnngnnattntgnncccnntccctntgngatttncnnttngnnntgctga

SEQ ID NO: 34625 - DNA, 321 bp, Homo sapiens
  misc_feature (1)...(321): n = a,t,c or g
gggnnnnntgnnttgtnnnntntganaacgnttgacnnnnnnnnnnnnnnnnnnnnnnnnnnnnnnnnnnnnnnnnnnnnnnnnnnnnnnnnnnggcacgagggagggaccccgggtccttttcaaggggctggtactcaattgctgccgcgccttccctgtcaacagggtggtcttcgtcgcctatgaggcagtgctgaggctcgcccggggtctgctcacatagccggtccccacgcccagcggcccacccaccagcagctgctggaggtcgtagtggctggaggaggcaaggggtagngnggctgggntnggnacccc

SEQ ID NO: 34626 - DNA, 455 bp, Homo sapiens
  misc_feature (1)...(455): n = a,t,c or g
ntttganacngtttgacnnnnnnnnnnnnnnnnnnnnnnnnnnnnnnnnnnnnnnnnnnnnnnnnnnnnnnnnnnggcacgaggccttgggggtggggaggccaccagaaagctccgccagacagaggtgctggggctgtgcaggaaacgaagtgattagaaatcccggaaaaacacacaagcaggcgttgtcatggtgactgggaaaaacacacaagctggcgttgtcatggtaatggagtgtaggacaggcctggagcccctcggtctcttgctggcggctggcacagagacgggctgccgtgggctctgaccttaataccgggtcacagtcgcttctaggaccaagaggacaganaccccatcaccgtatgcaggggcctgtttncaggcanactgnccanngcccantgacctcnnntgcanngnnacnnngnanngnntntnnanacccc

SEQ ID NO: 34627 - DNA, 477 bp, Homo sapiens
  misc_feature (1)...(477): n = a,t,c or g
anactttganaccgcttgacnnnnnnnnnnnnnnnnnnnnnnnnnnnnnnnnnnnnnnnnnnnnnnnnnnnnnnnnnnggcacgagggctcggcgtnnnnnnnnnnnnnnnnnnnnnnnnnnnnnnnnnnnnnnnnnnnnnnnnnnnnnnnnnnnnnnnnnnnnnnnnnnnnnnnnnnnnnnnnnnnnnnnnnnnnnnnnnnnnnnnnnnnnnnnnnnnnnnnnnnnnnnnnnnnnnnnnnnnnnnnnnnnnnnnnnnnnnnnnnnnnnnnnnnnnnnnnnnnnnnnnnnnnnnnnnnnnnnnnnnnnnnnnnnnnnnnnnnnnnnnnnnnnnnnnnnnnnnnnnnnnnnnnnnnnnnnnnnnancctggncaacaaanccanactccntttnaaaaaaaaaaccaaacccccaaaanttcccnagnggggggnacnntccttgnagtcnnagttnttnggaatctaaggtaggagg

SEQ ID NO: 34628 - DNA, 486 bp, Homo sapiens
  misc_feature (1)...(486): n = a,t,c or g
ttgaannctttggnnnnnnnnnnnnnnnnnnnnnnnnnnnnnnnnnnnnnnnnnnnnnnnnnnnnnnnnnnnnnnnnnnnnnnnggcacgagcacatatattaggccttttgatcacatctgttatgtcctgttctgttttttccattctttcctctctgtaatccaactgggaagttttttgttcacttgtctatgagttcaccacttatgtcttctgttgtgcccagtgtcctgttgaccccatccgttgagttcttaatttcagatatnnnnnnnnnnnnnnnnnnnnnnnnnnnnnnnnnnnnnnnnnnnnnnnnnnnnnnnnnnnnnnnnnnnnnnnnnnnnnnnnnnnnnnnnnnnnnnnnnnnnnnnnnnnnnnnnnnnnnnnnnnnnnnnnnnnnnnnnnnnnnnnnnnnnnnnnnnnnnnnnnnnnnnnnnnnnnnnnnnnnnnnnnnnnnnnnnnnnnnnnnnnnnnnnnnnnnnn

SEQ ID NO: 34629 - DNA, 483 bp, Homo sapiens
  misc_feature (1)...(483): n = a,t,c or g
ggnacctnnnnnnnnnnnnnnnnnnnnnnnnnnnnnnnnnnnnnnnnnnnnnnnnnnnnnnnnnnnnnnnnnnggcacgagcgannnnnnnnnnnnnnnnnnnnnnnnnnnnnnnnnnnnnnnnnnnnnnnnnnnnnnnnnnnnnnnnnnnnnnnnnnnnnnnnnnnnnnnnnnnnnnnnnnnnnnnnnnnnnnnnnnnnnnnnnnnnnnnnnnnnnnnnnnnnnnnnnnnnnnnnnnnnnnnnnnnnnnnnnnnnnnnnnnnnnnnctttgcttgtatattatttttgccttacagtggatcattctagtaggaaaggacaataagattttttatcaaaatgtgtcatgccagtaagagatgttatattcttttctcatttcttccccacccaaaaataagctaccatataagcttataagtctcaaatttttgccttttactaaaatgngattgttctgntcattgngtatgcttcatcac

SEQ ID NO: 34630 - DNA, 391 bp, Homo sapiens
  misc_feature (1)...(391): n = a,t,c or g
ttgaaancnnttgntnnnnnnnnnnnnnnnnnnnnnnnnnnnnnnnnnnnnnnnnnnnnnnnnnnnnnnnnnnggcacgaggggctgggtgctgttgtggaagacacagtaacagtaggaaccatggacagctgctagagtaacaggtgggacactgtcattgctgtaaaccatcaaaacagtggcaggagctgtattgggtagggcagctctgaatacttctccagggaatctcaccataatagcaacctaaagtaatcaaaagaagaaaaaattcttttccgtgtaatattaaatgatacagggtctatagaatacagtttttaaaaactagaatcagtggtggtgctcaataaatgtagtgtggcagttaaggctttttttttttttt

SEQ ID NO: 34631 - DNA, 450 bp, Homo sapiens
  misc_feature (1)...(450): n = a,t,c or g
ttgaanccttatgttnnnnnnnnnnnnnnnnnnnnnnnnnnnnnnnnnnnnnnnnnnnnnnnnnnnnnnnnnnggcacgagattaaaactgcaaacattatctgtttttgttgatcgggaatctgagtgcagcttaactgagtcctctggctcaggatctctcacaaagctgcacctaacatatctgctaggcctgtggtgtcatctgaaggtcctgggggaggatctgcttccaattcaatgatgtgattattggcagcatttagttcttcactgattgttgaactaagggacccagttccttagtgggctgtttttgagaagctaatttcagttccttgccacttgagcctttactgtagggcaggtcacaacatggcatcaacttccattagtgcaagctaacaagagacggtgagcangatgaaaggcccagtgtttttgtaatag

SEQ ID NO: 34632 - DNA, 485 bp, Homo sapiens
  misc_feature (1)...(485): n = a,t,c or g
tntnacnnnnnnnnnnnnnnnnnnnnnnnnnnnnnnnnnnnnnnnnnnnnnnnnnnnnnnnnnnggcacgagctctgctcacttggtgctctcaacctggaggcgggggtttgtcccacttggagacctcgactttgctcattgcttctccaaccctgtcggtactgttgctgcctttacaccggcataagccatgctgaccccacaggtgagccttggcacatctttggcctggaatgttgttttctccttggagaagtggtcggtctgtggaaccctgctcagggtgtctcatcagtgaagttctgttcaattgacattggttgagccctgggttggacatcttaatctgtccctcggggccctctacccttttccaccctgcctgtgccccaggaggctgacctgtatggactgcatcagcgggctcccattctgcagggctgaccacacttcttagtcatatgtacaagccctcnagcagg

SEQ ID NO: 34633 - DNA, 438 bp, Homo sapiens
  misc_feature (1)...(438): n = a,t,c or g
atttggccctcgaggccaagaattcggcacgagctggtctagcataggataaatcaacaagcctagtttctgcctgggggcacagagttgctggtaaaagagttgccatggcttgtgggtagtaacccacagtgtctgtaccctcctgctagaggtgatgagagctgagttaaggctgtggtagtgatattgcacaatgtctttaaagtcccctgcaaatcataatgggctctataaatggttaatgttacaaacaggtagcagccaagcaaagttaaccaaaacaaacactgaacccagagatgggcctcaaggtctgtttgtgaatcagcatttcttgccaagttttcatcaccttgaaaggaaatgattccaacagtaatattgcccagagtagatcattgcgtttttccagcctanaagagtcataaaaagaac

SEQ ID NO: 34634 - DNA, 456 bp, Homo sapiens
  misc_feature (1)...(456): n = a,t,c or g
aanccctntnacnnnnnnnnnnnnnnnnnnnnnnnnnnnnnnnnnnnnnnnnnnnnnnnnnnnnnnnnnnggcacgagcagatcagaatcagagatctcagaggggaataagttcatcctcatgggatggtgaggggcaggaaagcggctgggctcttggacacctggttctcagagaaccctgtgatgatcacccaagccccaggctgtcttagcccctggagttcagaagtcctctctgtaaagcctgcctcccactaggtcaagaggaactagagtacctttggatttatcaggaccctcatgtttaaatggttatttccctttgggaaaacttcagaaactgatgtatcaaatgaggccctgtgccctcgatctatttccttcttccttctgacctcctcccaggcactcttacttctagccgaactcttagctctgggcagatctccaagc

SEQ ID NO: 34635 - DNA, 537 bp, Homo sapiens
  misc_feature (1)...(537): n = a,t,c or g
angnngnnnnnnnnnnnnnnttnnnnctnnnnntanntntntnnnncnnntngnnnnnngnagnnanntgnnttganncttgaaaacctttgaatgatacgaannnnnnnnnnnnnnnnnnnnnnnnnnnnnnnnnnnnnnnnnnnnnnnggcacgagctagaagtgaaatctcagactctagaaaaggaagccaaggaatgtcgacttcgaacggaagaatgtcaattacagttaaagactcttcatgaagatttgtcaggtagattagaggaatccttatcaatcatcaatgaaaaagtaccttttaatgatacaaaatatagtcagtacaacgctctgaacgttccactccacaataggagacaccagctgaagatgcgagatattgctgggcaggccctggcttttgttcaggatcttgtgacggctcttctaaactttcatacctacacagaacagaggattcaaatttttcctgtngattctgccattgacactatatctccattgaatcagaagttctcacaataccttc

SEQ ID NO: 34636 - DNA, 469 bp, Homo sapiens
  misc_feature (1)...(469): n = a,t,c or g
anacccttttnacancnnnnnnnnnnnnnnnnnnnnnnnnnnnnnnnnnnnnnnnnnnnnnnnnnnnnnnnnggcacgaggggacattgaaaaagacttattgaaggaaagtgaagaagaaaagagttataatacttacactcaaaaatggctatctacatgtccggccctgttttaaatgctttacatgcattcatgcatttaatcttcacatacagactatgaattaagaatnnnnnnnnnnnnnnnnnnnnnnnnnnnnnnnnnnnnnnnnnnnnnnnnnnnnnngacagtgaagatggtaggacgagttttaaaaaaggaaggacagagcaagaaagaggaaggaaaagtgggggaggaagggaagaaggaagacaggcaggtgtgtattaggtttcttaggacagatattcatggccctcctcctggctggtattgggcccaggaatgatgcatgtcaactctg

SEQ ID NO: 34637 - DNA, 439 bp, Homo sapiens
  misc_feature (1)...(439): n = a,t,c or g
nnnnnnnnnnnnnnnnnnnnnnnnnnnnnnnnnnnnnnnnnnnnnnnnnggcacgagctggtttccaaaaatatcattagtaaccatctgaagctttttctgaatgcttgagattgtcttcatctctcaaagcaaagttcctacaaagctagattgtatttaccatagtgaaacccctctcataaaagaaacttcacaatataagctttgtgtcagtatacgtttttagagatctgttgataattacgtaagtatgctatttatcaatccctgacttgaatttcacccagaaatataaaatattcagtgtaactgtcttgtaattgtttctgagtgttctagctatgacccaattgctaatttaagtattgatagcagtcacttctctttttccattccttacatgcctataagangctatagaaatagggcaacaacg

SEQ ID NO: 34638 - DNA, 444 bp, Homo sapiens
  misc_feature (1)...(444): n = a,t,c or g
nnnnnnnnnnnnnnnnnnnnnnnnnnnnnnnnnnnnnnnnnnnnnnnnnggcacgagtgggtggctggagcatggggagcaaggggacagtggtgtgagatgaagctgcagaggtaagcaggggccagatgctgtagggccctgtaagagttaggttcctattatactgtgaatagagctttgttgaaagatttttaactggaactgggtggtgggcaacatagtctaatgtgcctttaaaaaaatcatcctggctgttggatggagaaacggattatagaggaataagagtggaagctgggaggtgtgttgggacatgatttatgttatccaggtggcagtgttaaactgattcgtttcctttttttaaaaaaacaattcatattgtgaccatctgcagcacaactgaagataactggccaagtttactccatggaaaagtta

SEQ ID NO: 34639 - DNA, 447 bp, Homo sapiens
  misc_feature (1)...(447): n = a,t,c or g
tnnnnnnnnnnnnnnnnnnnnnnnnnnnnnnnnnnnnnnnnnnnnnnnnnnnnnnnnnnnnnnnggcacgagaagggatagaggactatagatggggttctctatctttctagccaaatgatcattaggtttcagaactagaaagaagtgtttggttgtgctgttgtttatgacatacctgggtctgtattgttgttagttcctgaaaaaattaaatagagtggataaaatagcaggctttttgagaaaggaaaattcgctttattggaaagacaacattttaattttggtttgtattttggcttaagacacagaaattgcaaatggctctgcaataatggtgaacaagtcttttctatttatgttctatggggagtacataaaacatactgtattttccagtgtactttttcagtaggatagagctgtggagtggagttcctgtgg

SEQ ID NO: 34640 - DNA, 458 bp, Homo sapiens
  misc_feature (1)...(458): n = a,t,c or g
aantcctttngtttgaanaccntttgacnnnnnnnnnnnnnnnnnnnnnnnnnnnnnnnnnnnnnnnnnnnnnnnnnnnnnnnnnnggcacgagctctgatcccaagtggatatttagcagggatatttggagcaaaaaaaaatgcttggtgctggtttgctgatctcttcccttctcaccctctttacaccactggctgctgacttcggagtgattttggtcatcatggttcggacagtccagggcatggcccagggaatggcatggacaggtcagtttactatttgggcaaagtgggctcctccacttgaacgaagcaagctcaccaccattgcaggatcagggtcagcatttggatccttcatcatcctctgtgtggggggactaatctcacaggccttgagctggccttttatcttctacatctttggtagcactggctgtgtctgctgctccc

SEQ ID NO: 34641 - DNA, 466 bp, Homo sapiens
  misc_feature (1)...(466): n = a,t,c or g
ttgnnnnccnntttgnanaccgctnnnnnnnnnnnnnnnnnnnnnnnnnnnnnnnnnnnnnnnnnnnnnnnnnnnnnnnnnnnnnnnggcacgagaagtaataagttgtgctgtgacataatgacggctatgatnnnnnnnnnnnnnnnnnnnnnnnnnnnnnnnnntgtaatcttcctggaccactattgtatatgtggttcctcattgaccaaacgttgttatgtggtgcataacagtatatttaaaatacataataatatataatattatagtggtgcatgaatgtggcaaaagccatgaaggtggtttgagaatgactaaagtttgagtaacagtgatctagtctaaatcatcctttttagatgaagaagtgagtttagcaattgtgactgtttctggggttttctaatttcaagttccctttgccttctaggaaaagcttataacatcagtatttcccacc

SEQ ID NO: 34642 - DNA, 402 bp, Homo sapiens
ggccctcgaggcctagaattcggcacgaggaaattctggaagttctacgccatccaagggactgggtgcgttgatgcaggcagaatggctgtgcaggggtttggagggcacacgatgtgtgctccccatgccactggtcggcactttgccactgtgtggcagttacccgtgccttagtcttctccactctgcaccctacctcgtgggcagatgataacatgttttggatgctgtcagtgatgaatggtgagatggcagattgtcagagtcaattgattaaacctcatttatacttctagtgtcattttatatgactagtttacaaaataggacattgagtttccaagtattgagataagggaatataaatagtattatatgtatcaggaaatctctcatctt

SEQ ID NO: 34643 - DNA, 468 bp, Homo sapiens
  misc_feature (1)...(468): n = a,t,c or g
ataccannnnnnnnnnnnnnnnnnnnnnnnnnnnnnnnnnnnnnnnnnnnnnnnggcacgaggataagtttaggccagacatggaggaggaggaagccaagaatctggtgagcgaagccatcgcagctggcatcttcaacgacctgggctccggaagcaacattgacctctgcgtcatcagcaagaacaagctggattttctccgcccatacacagtgcccaacaagaaggggaccaggcttggccggtacaggtgtgagaaagggactactgcagtcctcactgagaaaatcactcctctggagattgaggtgctggaagaaacagtccaaacaatggacacttcctgaatggcatcagtgggtggctggccgcggttctggaaggtggtgagcattgaggcccagtaagacactcatgtggctagggtttgccgaatgaaactcaactcaatanaaaacanaataa

SEQ ID NO: 34644 - DNA, 423 bp, Homo sapiens
  misc_feature (1)...(423): n = a,t,c or g
tttgaanatttgaataccnnnnnnnnnnnnnnnnnnnnnnnnnnnnnnnnnnnnnnnnnnnnnnnnnnnnnnnnnnnnnnnnnnnnggcacgagcagaacagcaactgctgaggctgccttgggaagaggatgatcctaaacaaagctctgatgctgggggccctcgccctgaccaccgtgatgagccctttggggagtgaaagacattgtgggtggaccattgttgcctttaacgggnaaaattggaccnancctanggnncctttnggcngttcanncntgaatttgattgngaccaagaggtntatngggacctgganaggaagganactgggttggcaattgcctttgttccgaanatttanaaaatttgacccgcaatttgcactnacaaacatcggtgggctaaaacataaacttga

SEQ ID NO: 34645 - DNA, 409 bp, Homo sapiens
  misc_feature (1)...(409): n = a,t,c or g
ttggannacnnnnnnnnnnnnnnnnnnnnnnnnnnnnnnnnnnnnnnnnnnnnnnnnnnnnnnnnnnnnnnnnnnnnggcacgagctaaattagtttttgtgaaccagtgatgttttgtgtaattaggaactgtgaaaaatatagtatataacatcactagtctgttactcaaatactagccatgcaggcctccttagacttaggaaaccactttatttatagttcctgtgttttggtggactagcagttatagccaatgatagggaaaataccgtatttactattcatcatgggggtgattgcaatacgttatactactagaggcctttctgagcagccctggatatcaactggtatttctttgggcttcggttaaaaaaaaaaacttggcccgttcaagnagcaaat

SEQ ID NO: 34646 - DNA, 411 bp, Homo sapiens
  misc_feature (1)...(411): n = a,t,c or g
ttggannatttgaaanaccnnnnnnnnnnnnnnnnnnnnnnnnnnnnnnnnnnnnnnnnnnnnnnnnnnnnnnnnnnnnnnnnnnnnggcacgagagaccttaagtgctaaacttagtggagtttgtgaccagagaattggcattttctacaaatgnnnnnnnnnnnnnnnnnnnnnnnnnnnnnnnnnnnnnnnnnnnnnnnnnnnnnnnnnnnnnnnnnnnnnnnnnnnnnnnnnnnnnnnnnnnnnnnnnnnnnnnnnnnnnnnnnnnnnnnnnnnnnnnnnnnnnnnnnnnnnnnnnnnnnnnnnnnnnnnnnnnnnnnnnnnnnnnnnnnnnnnnnnnnnnnnnnnnnnnnnnnagtaaaaacggggtttcnccaggttanccaggatggcctcnatnncctgact

SEQ ID NO: 34647 - DNA, 400 bp, Homo sapiens
  misc_feature (1)...(400): n = a,t,c or g
ttgannctncttgactgattnnnnnnnnnnnnnnnnnnnnnnnnnnnnnnnnnnnnnnnnnnnnnnnnnnnnggcacgagggaactgaagacaaggttgtggacgtggtgcggaacctcgtgttccacctgaagaagggttacatgattgtcaagtgccggggccagcaggagatccaggaccagctgagcctgtccgaagccctgcagagagagaagatcttctttgagaaccacccatatttcagggatctgctggaggaaggaaaggccacggttccctgcctggcagaaaaacttaccagcgagctcatcacacatatctgtaaatctctgcccctgttagaaaatcaaatcaaggagactcaccagagaataacagaggagctacnaaagtatgg

SEQ ID NO: 34648 - DNA, 416 bp, Homo sapiens
  misc_feature (1)...(416): n = a,t,c or g
nnnctttgnnnnnnnnnnnnnnnnnnnnnnnnnnnnnnnnnnnnnnnnnnnnnnnnnnnnnnnnnnnnnnnnnggcacgagaaggctgagaagcttaaggtatttcagtctgttttatgttactcatttgcgaaaagcaggctcatcgaatacaggtgagtttcaacgcgtcttgaatatggcagcatttaaaagtnnnnnnnnnnnnnnnnnnnnnnnnnnnnnnnnnnnnnnnnnnnnnnnnnnnnnnnnnnnnnnnnnnnnnnnnnnnnnnnnnnnnnnnnnnnnnnnnnnnnnnnnnnnnnnnnnnnnnnnnnnnnnnnnnnnnnnnnnnnnnnnnnnnnnnnnnnnnnnnnnnnnnnnnnnnnnnnnnnnnnnnnnnnnnnnnnnnnnnnnnnnnnnnnnnnnnnnnnnnn

SEQ ID NO: 34649 - DNA, 405 bp, Homo sapiens
  misc_feature (1)...(405): n = a,t,c or g
nncctnnnnnnnnnnnnnnnnnnnnnnnnnnnnnnnnnnnnnnnnnnnnnnnnnnnnnnnnnnnnnnnnnnnggcacgagggatgtcaaagttgactcaggtggatcaacaagccattattcctctcatttgtactcatttttaatgatcagcacctgagctcaacagtatttttgtgacaatttcaatctgcaggactgagagagctgctgtttatctatttctcactggagacattagcattaatgagctgactcctgcactgtctggtgctaactatgggtcacattggtataaaggtagttgcctcttgaggtggcccatgccatctctattttctggacaacagctggcagataaatcttccactattaacatcagtgtgaactgaatgccagctacctg

SEQ ID NO: 34650 - DNA, 422 bp, Homo sapiens
  misc_feature (1)...(422): n = a,t,c or g
ttngnnnacntttgatnaccngnnnnnnnnnnnnnnnnnnnnnnnnnnnnnnnnnnnnnnnnnnnnnnnnnnnnnnnnnnnnnnnnnnggcacgagggaaggcgacgtagcccagtaggaaggctggcgggtggcaagatggggattctctttatgcccacctctggaccccagaaatctcccccagcccaagcccttcacttctggggagggggacggctctcacccccagtgaagatcagcagggccgtcaggaccaggtagggggcagccctccgtcctgctgccgcccagggaatgaggtttggctgcctgggtctagagcccaggggctcagggcccctcagctccatggggcaaaagtgggccaatgtctccgccccctcctccccgtcttcctcttcctcctccaggtgcccttt

SEQ ID NO: 34651 - DNA, 421 bp, Homo sapiens
  misc_feature (1)...(421): n = a,t,c or g
nnnnnnnnnnnnnnnnnnnnnnnnnnnnnnnnnnnnnnnnnnnnnnnnnnnnnnnnnnnnnnnnnnggcacgagaactggagttctttatttcttcatattacttcaagtaactgccaaatgtcctttcactgcagtatgcagggttctctgacttgcactgtatttctttattttaatttaaannnnnnnnnnnnnnnnnnnnnnnnnnnnnnnnnnnnnnnnnnnnnnnnnnnnnnnnnnnnnnnnnnnnnnnnnnnnnnnnnnnnnnnnnnnnnnnnnnnnnnnnnnnnnnnnnnnnnnnnnnnnnnnnnnnnnnnnnnnnnnnnnnnnnnnnnnnnnnnnnnnnctttagagagatgggctcctgctgtgttttccaggatagtcttgaactcctggcccaagcagtcctcctgcct

SEQ ID NO: 34652 - DNA, 428 bp, Homo sapiens
  misc_feature (1)...(428): n = a,t,c or g
anaccctttnnnnnnnnnnnnnnnnnnnnnnnnnnnnnnnnnnnnnnnnnnnnnnnnnnnnnnnnnnnnnnnggcacgagacacaatcagagtgctgagtacagaaagttatccaaaacaaaagttggtagataactaatagtgaacaagtttttggcagaggtatatttacattcagagtacacttttctttggaaaaaattacaggttttttgaaaagtgaataatgtaattcaactctcaaattcatggttntttttttttnggntttggttttngggttttttttggcngttgntgggttttgnaaccggngtttccnnnttnggccccaggctggaangnaaatggnngnanntnaanttancnaannnttngcnttccaaattaaagcaatttntccgcctnaaccccccnaaannngggga

SEQ ID NO: 34653 - DNA, 411 bp, Homo sapiens
  misc_feature (1)...(411): n = a,t,c or g
ctgattcgaattcnatacgactcnnnnnnnnnnnnnnnnnnnnnnnnnnnnnnnnnnggcacgagagcatctgtatttccatagaaagatatgtcaatactagtaagggattgtggacattcctatgtgcctaaaggagttccaaggagatctgtggatgtttgtttagtaagtagtttttataatttggcatccacatttgtttagagattttttaggtgctaatgataccttgaagtgattgtctctctgtaggatatgacagacatatgtggaagcatcttcaagaactgattagaaaatgaaactctnnnnnnnnnnnnnnnnnnnnnnnnnnnnnnnnnnnnnnnnnnnnnnnnnnnnnnnnnnnnnnnnnnnnnnnnnnnnnnnnnnnnnnnnnnnnnnnnnnnn

SEQ ID NO: 34654 - DNA, 429 bp, Homo sapiens
  misc_feature (1)...(429): n = a,t,c or g
tgganacngctatgacatgattgngaatccantacnantngctancgngaatntncnnnnnnnnnnnnnnnnnnnnnnnnnnnnnnnnnnnnnnnnggcacgagcaatttcttctattttctaataattatgaaagcattcagaataaataataaccattcctgtcaaatgagcctttataataggttttagaacccagcttcccttgacatttgtttgaaaaggctcaccgaggtttgaattgttttgaattgagggtacaagcacttggtttctctccttcttatataattttgtggtgatgaaaccatagttgaatgtggccttttaggatggccatggcctgagaatccacacttggcttctatctaaagctgattcagattctgaaaatggctgttgaaggcaacactaaaacccatggggaat

SEQ ID NO: 34655 - DNA, 403 bp, Homo sapiens
  misc_feature (1)...(403): n = a,t,c or g
ttnaaatccatcttnnnnnnnnnnnnnnnnnnnnnnnnnnnnnnnnnnnnnnnnnnnnnnnnnnnnnnnnnnnnnnggcacgagccacagaactgtttgtttgtttgtttttgttactttgttgagttggggaccagggctgccctgtctctgaggcagtttgagcatctccctatagttctcacccatttgaggtggaattttttctgctttattcagttgtatctcagtagctcattttaagctgtaagagtgttacaactggaaggtaccttagaggtctttttagagacctcacactttattgatgccagaaacaaaaagtgacctgcctaaacatccacagctggttggagacaggttcaagtctaaaacaggtctcctgaccttcattctttcttct

SEQ ID NO: 34656 - DNA, 406 bp, Homo sapiens
  misc_feature (1)...(406): n = a,t,c or g
cttgacnnnnnnnnnnnnnnnnnnnnnnnnnnnnnnnnnnnnnnnnnnnnnnnnnnnnnnnnnnggcacgagaaagaaatgactattttgcataattatgctcaaagagttaagtcaaatttaaattaataactttaaaatatcgcaaccatagtaagaatggctctaggcttaggacacatttataggtaataaaaagaatattcaccagttatcggttatgaagcaggtatttaataatgttagatgaatgaacttgttcagtcacaatgccatatcctgtctgattttcctgtttgtaattagaagcaggctgggaagaagaaaaagctagtacaaagcggcaaagcattttgtaaagtttcaagggcaatgggtatgctggtagagcctgccgaatggtatc

SEQ ID NO: 34657 - DNA, 407 bp, Homo sapiens
  misc_feature (1)...(407): n = a,t,c or g
ctnnnnnnnnnnnnnnnnnnnnnnnnnnnnnnnnnnnnnnnnnnnnnnnnnnnnnnnnnnnnnnnggcacgagaagtctcagatttggaaggtcccttgttttaccaatgaacagaggggccatgaggggatgggttgcagaatcaagagattaaggtcatgcagtctgttaagtggctaaccacccccttggaattccctggtcactgaactgagactgagtgtttcatggagaagctgaggcttcatggagaagctgcagaacttggtgggatgggtttgggatgaagaagttgtgaatgcctaggagcagcacagaccatggaaatcccggaagatctaacctggatttcccttcctgcggtttctggggccttgttctggtgggctctagacagtggcgaaag

SEQ ID NO: 34658 - DNA, 414 bp, Homo sapiens
  misc_feature (1)...(414): n = a,t,c or g
ttganncctcttgacatgattnnnnnnnnnnnnnnnnnnnnnnnnnnnnnnnnnnnnnnnnnnnnnnnnnnnnggcacgagtgtaagaaaaataatttggaaaataacaatgttttttataagatcctgatgaatcaggaaggataaatagtttacttttttttgatagagagagactcactatgttgccgaactccatctgnnnnnnnnnnnnnnnnnnnnnnnnnnnnnnnnnnnnnnnnnnnnnnnnnnnnnnnnnnnnnnnnnnnnnnnnnnnnnnnnnnnnnnntatgttttaaagacttcctttaagggtccataaggaggtagctgtaagggaaggggaactaaaaaggccagaggataattttctctaaaaggcaaaaatgttaggttattcaaaaactatttttt

SEQ ID NO: 34659 - DNA, 450 bp, Homo sapiens
  misc_feature (1)...(450): n = a,t,c or g
annnnnnnnnnnnnnnnnnnnnnnnnnnnnnnnnnnnnnnnnnnnnnnnnnnnnnnnnnnnnnnnnnnnnnnnggcacgagaacatcagtcctgtaattggcctgtgtttgtcttttgggtgtgcagtattccaggaactccctaaaactttggaccctcagggataaggagtggctgctggaaccaggagtatgatgaaagagtatttctagagctaagttttaatgttctgatattggtggttacattttttagattgtccagaatgcctgtttctcaatcttctgcccttgtataaggtctcagaaacacgcctttggtgtccagcacaagcctgctgtgcccatctgtgttcataggtgggagatacttccagaactgtccaggagaggccaggtagtatggtaaaacgtcttttgaaattcagttagaagaccggggtcttccaa

SEQ ID NO: 34660 - DNA, 457 bp, Homo sapiens
  misc_feature (1)...(457): n = a,t,c or g
nnnnnnnnnnnnnnnnnnnnnnnnnnnnnnnnnnnnnnnnnnnnnnnnnnnnnnnnnnnnnnnggcacgaggctctctgggcttttggtttgggggcgccctctctgctccttcactgttccctctggcttcccatagtggggcctgggagggttcccctggccttaaaaggggcccaagccccatctcatcctggcacgccctactccactgccctggcagcagcaggtgtggccaatggaggggggtgctggcccccaggattcccccagccaaactgtctttgtcaccacgtggggctcacttttcatccttccccaacttccctagtccccgtactaggttggacagcccccttcggctacaggaaggcaggaggggtgagtcccctactccctcttcactgtggccacagcccccttgccctccgcctgggatctgagtacatattgtggtg

SEQ ID NO: 34661 - DNA, 423 bp, Homo sapiens
  misc_feature (1)...(423): n = a,t,c or g
anncctttgannnccnnnnnnnnnnnnnnnnnnnnnnnnnnnnnnnnnnnnnnnnnnnnnnnnnnnnnnnnnnnnnnnnnnnnggcacgagaactggaagacagaagggtgtgaggtaagcagtaagtggaattttgggaaccaagtcaagaggggaataatcaagcatcaaatgatgtcaacaggtctagataagaactgaaaacagacaatgcacctgatgacatggggttcactgagctttataagcagttccagtggagcggtaaagatgaaagtagattcaaaaataattcatgttatcttgcatggatggattcactcatctcccctctcttctccctcccaccaatgcctatccctgatcctatctcagcttagagtgaaactgtaaaatgacaatgtctcatgtaaagctctatg

SEQ ID NO: 34662 - DNA, 440 bp, Homo sapiens
  misc_feature (1)...(440): n = a,t,c or g
gngnagttgnntntnccacggaagcccttgatnccnnnnnnnnnnnnnnnnnnnnnnnnnnnnnnnnnnnnnnnnnnnnnnnnnnnnnnnnnnnnnnnnnnnnggcacgagagggacttgtgggggagtgtgtgggcagcatttttcctcccctcagtacttcagtgcatgagacctagatttaagctaaatattgactaaattttgaagaggaggtgtcacaaaaatgcatttagaaaggaatgtgcagaaagggctgttcttccttgagagaggggggtgtgtgtgtgcatggacatggtgggcaatgctgtttgtgtgtaatattcaggtcggctttactggcctacagagatacctgcttctcttctacttccccttctcagtttctaacatcagtgagtcattttgatgtttactttatgaggcctctttaagtg

SEQ ID NO: 34663 - DNA, 441 bp, Homo sapiens
  misc_feature (1)...(441): n = a,t,c or g
gnnnnngnnnngnnnnnnnttggannccttggannncctnnnnnnnnnnnnnnnnnnnnnnnnnnnnnnnnnnnnnnnnnnnnnnnnnnnnnnnnnnnnnnnnnnnggcacgaggagactgcatagggctcggcgtggtaattacttacaagaaaattttgagtactgtctttattaatcacccaaggtgaatggtaagaactagaaaatgagctnnnnnnnnnnnnnnnnnnnnnnnnnnnnnnnnnnnnnnnnnnnnnnnnnnnnnnnnnnnnnnnnnnnnnnnnnnnnnnnnnnnnnnnnnnnnnnnnnnnnnnnnnnnnnnnnnnnnnnnnnnnnnnnnnnnnnnnnnnnnnnnnnnnnnnnnnnnnnnnnnnnnnnnnnnnnnnnnnnnnnnnnnnnnnnnnnnnnnnnnnnnnnnnnnnnnnnnnnnnnnnnnct

SEQ ID NO: 34664 - DNA, 394 bp, Homo sapiens
  misc_feature (1)...(394): n = a,t,c or g
anncccnnnnnnnnnnnnnnnnnnnnnnnnnnnnnnnnnnnnnnnnnnnnnnnnnnnnnnnnnnnnnnnnnnnnggcacgagcggcacgagctaaattggacccatgttttaaaacaggcaattgctataagaaaattccttcattaggcttgtgtttttactcacataatcagttatataaattagcttaattgctctttttttttngagttnactaagncctnngncantaaaaganatctngnattttttngngaatngtatgaccnggaatttncttngtttttttttttttgnttnggttttgnaannaaantttgnnttngtncccangnnnggntnccggggccnnattntaatntnnnggaaccnnggccnnnggggntccnaccc

SEQ ID NO: 34665 - DNA, 478 bp, Homo sapiens
  misc_feature (1)...(478): n = a,t,c or g
cntnnannnttnnnnnngtnnangtgnnncnnnttnnatnnnnnnnnnnnnnnagngnannngtgnntcgnccttgaaanccttgangccatgattacgaannnnnnnnnnnnnnnnnnnnnnnnnnnnnnnnnnnnnnnnnnnnnnnggcacgagaaaagattcagggagattctgtacaagtgaatgatgtgtacaacacccttaaaattcgggtttcatagaactgattctaaggaagcccattaacatttgcaaaattcatcattttctaaccaactgtagttctctagactttatttactcgtgtgtttgatgtagaggagaactcaatcactagaacttgagtttatttattgacttttatctttcagacatgatgtagttaatgtgcaccaagaaccttacacataagcacacacaggtagattaacagacatcaagaggagacctgcttctgctctagaatgcttctttg

SEQ ID NO: 34666 - DNA, 411 bp, Homo sapiens
  misc_feature (1)...(411): n = a,t,c or g
anccttggannccctnnnnnnnnnnnnnnnnnnnnnnnnnnnnnnnnnnnnnnnnnnnnnnnnnnnnnnnnnnnnnnnnnnnggcacgagcttaaatgtcatgacctttcaatgccctgcattgccctttatccaacttagaaacggagtaaaaataaaatcttaccactgtaagtcacaataggattgtcacaaaattagcatgtgaaagaatgatacggaagtcactgtcaccaaaaaactgtccctagacttggctaataattataataatacctagcatttattactaagcactttctgggagctggtctctaggtgctttacatgtaaccttcacaaccatccactgacccagtggatagatattcttgtcctccacttaataaaggaggacatggaggcaggtta

SEQ ID NO: 34667 - DNA, 494 bp, Homo sapiens
  misc_feature (1)...(494): n = a,t,c or g
gagntttnaancntnnnnnnnnnnnnnnnnnnnnnnnnnnnnnnnnnnnnnnnnnnnnnnnnnnnnnnnnnnnnnnnnggcacgagtgggaatcctgaatccagcccagggatttctcttgtctttggccttctacggctggacaggatgcagcctgggttttcagtctcccaggaaggagatccagtgggaatcactgaccacctcggctgctgagggggctcacccatccccactgatgccccatgaaaaccctgcttccgggaaggtgtctcaagtgggtgggcagacttctgacgaagccctgagcatgctgtctgaaggttctgatgccagcacaattgaaattcacactgcaagtgaatcctgcaacaaaaatgagggtgaccctgctctcccaacccatggagacctatgaaggggatgtgctgggggtccagaccccatattcctcagactcaacaattcttgntctttaaaactgngtctcacct

SEQ ID NO: 34668 - DNA, 486 bp, Homo sapiens
  misc_feature (1)...(486): n = a,t,c or g
gcttgaaannnnnnnnnnnnnnnnnnnnnnnnnnnnnnnnnnnnnnnnnnnnnnnnnnnnnnnnnnnnnnnnnnnggcacgannnnnnnnnnnnnnnnnnnnnnnnnnnnnnnnnnnnnnnnnnnnnnnnnnnnnnnnnnnnnnnnnnnnnnnnnnnnnnnnnnnnnnnnnnnnnnnnnnnnnnnnnnnnnnnnnnnnnnnnnnnnnnnnnnnnnnnnnnnnnnnnnnnnnnnnnnnnnnnnnnnnnnnnnnnnnnnnnnnnnnnnnnnnnnnnnnnnnnnnnnnnnnnnnnnnnnnnnnnnnnnnnnnnnnnnnnnnnnnnnnnnnnnnnnnnnnnnnnnnnnnnnnnnnnnnnnnnnnnnnngaggtgtgtgcacgtccagctaattttgttnattttttgtacagattaggtcttantatgttnnnnnnnnnnnnnnnnnnnnnnnnnnnnnnnnnnnnnnnnnnnnnnnnnnnaaagtgcta

SEQ ID NO: 34669 - DNA, 439 bp, Homo sapiens
  misc_feature (1)...(439): n = a,t,c or g
nnnnnnnnnnnnnnnnnnnnnnnnnnnnnnnnnnnnnggcacgannnnnnnnnnnnnnnnnnnnnnnnnnnnnncagcccttgacnnnnnnnnnnnnnnnnnnnnnnnnnnnnnnnnnnnnnnnnnnnnnnnnnnnnnnnnnnnnnnnnnnnnnncaccccaagaaatattaaatggtagttccttctgcaagagcatcaacatcgaactatgttccagggaaccctggggtttggaggaggtaccctggggactgggcaggtagaggaaagtaggaagctcatgtctcagggaaactcttctactcattggagaaccgtgaaggggtccagttgaaaggaatgatctatggctaaccactnnnnnnnnnnaaagtcaatgcccttgagggaaggacaatttaaatatatttaaatacacacncncacacacacacacg

SEQ ID NO: 34670 - DNA, 493 bp, Homo sapiens
  misc_feature (1)...(493): n = a,t,c or g
gncttgaancctttgnnnntttgganancncttgacnnnnnnnnnnnnnnnnnnnnnnnnnnnnnnnnnnnnnnnnnnnnnnnnnnnnnnnnnnggcacgagctgaataattatgtggtcacttaaacagagaagctgggcaaagctggtcaaagatggcagatgaccaatacagtttcaacttcagactcagaaaccgacaaagctcaactccttatacctttcttgatagcttctagaaggcattcctctaatcatttttgttacttttctctggatccttgcctgtgtctggatacctttctgatgcatggcatataaaactggacactaactcttaccagaggtccagcctacaccaagcagagaggaagtatttttttcccagtcttttcatgccttgcacctgttaatacaactcagcttgcttttaaataacagtatgttgctggcccctactcagtggatgatccacaagctcacagaattttta

SEQ ID NO: 34671 - DNA, 427 bp, Homo sapiens
  misc_feature (1)...(427): n = a,t,c or g
tttgnnnncccnntttggaanacnnnnnnnnnnnnnnnnnnnnnnnnnnnnnnnnnnnnnnnnnnnnnnnnnnnnnnnnnnnnnnnnnnnnnggcacgaggatacacagagataaggactttttttttctctctctatttaggaagtttgcatctgttactgacagtgctcaaattgttctgggtatataggataaagttgagctagcaaaaaaggtaacattaagtttttggataggcataaaacctctacattatctttgtggaagatcttaatgggactgaagtatggattaaaataagttaatgaagtgttgtaattgcagtgtgacccttaatgtttaacttttaagctttattttttgtttattttttaacctttgaaatttcccttctctatagcaaagtttgtgggctctgtccagctt

SEQ ID NO: 34672 - DNA, 492 bp, Homo sapiens
  misc_feature (1)...(492): n = a,t,c or g
nnnnnnnnnnnnnnnnnnnnnnnnnnnnnnnnnnnnnnnnnnnnnnnnnnnnngnnnnnnnnnnnnnntnnncctttgaannctcttgactgcttacgnnnnnnnnnnnnnnnnnnnnnnnnnnnnnnnnnnnnnnnnnnnnnnnnnggcacgagcggcacgagctgggagtaagatgctgccgagtccgggcgaaaagcaacgcatgctgttggacaggatacgagcttgaaatccgggtcttcctccagcagctcaagggccgcgtagcccgggaggccattcagaaagtgcatccgggtggccttcagggaccaaggcgccgggaggcacagcccccagcccccatagaggtctggacggatctggctgagaagataacagggccactggaagaagccctggcagtggctttctcgcaggtgctcaccatcgcggccacggaaccggtcaccctcctgcactccaagccccccaagcccacgcaggccc

SEQ ID NO: 34673 - DNA, 493 bp, Homo sapiens
  misc_feature (1)...(493): n = a,t,c or g
aannnnnnnnnnannaannnnnnnnnnannnanaatnnannnnnnaaannncggngnanatnnnnnnnncnncntttggagccccttgggaanccntcgtnaatcatacgaannnnnnnnnnnnnnnnnnnnnnnnnnnnnnnnnnnnnnnnnnnnnnnggcacgagcactctagttattcagccaaaccttggaatatccttgtttcttctcatccctgtgaccaagctcttagcaaatcctgccagcttaagcatcacatagatagagaacccagctccgtctcactgcctttagctcccctgcagctggtggggattctagaaactgggactagggggtcagcttcctcctctgccctttccacaccaacagccagtagaatccttttaaatagacgtcagacccttcagtggtcctggcttcccattgtggtgtcagctcactgtgccatgtgtgccccccatctgctcctcactgtgctagcccagtc

SEQ ID NO: 34674 - DNA, 460 bp, Homo sapiens
  misc_feature (1)...(460): n = a,t,c or g
tttgaaacctnnnnnnnnnnnnnnnnnnnnnnnnnnnnnnnnnnnnnnnnnnnnnnnnnnnnnnnnnnnnnnnnnggcacgagaaagttcattcctctttcccaagggcatcctccttgaaagaggaggacagacctctctggaagcagcaagaggaaccagtagctgtgggaaaggaatgggcacctctgaacccaggcactttaaacttctatagaaaagatatcgtgtacataggaactggtgtagataagcatgcaattatggcatcatttaggcctgtatttctatggaaagatacaaaaaggatctcagtttggggcctgtcctaatgccttcttccctaacatcaccacacacacccctgtcggcatcctggagcaattgagaccggacacccacagagctgttgtcctcccagcaacaagatggtgtggttatcttgggtcatttggatgtt

SEQ ID NO: 34675 - DNA, 479 bp, Homo sapiens
  misc_feature (1)...(479): n = a,t,c or g
gtngngnnnntnnnttntccctnttgaaacctttnnnnnnnnnnnnnnnnnnnnnnnnnnnnnnnnnnnnnnnnnnnnnnnnnnnnnnnnnnnnnnnggcacgaggtgctctgcaagagtgtgctagaggcaggcttcctctatggccagtggcgcctgtacggctggaccatggagcccgtgtttgtgtgccagcgagcaccctgcccctacctcgtggactgctttgtctctcgccccacggagaagaccatcttcatcatcttcatgttggtggttggactcatctccctggtgcttaacctgctggagttggtgcacctgctgtgtcgctgcctcagccgggggatgagggcacggcaaggccaagacgcacccccgacccagggcacctcctcagacccttacacggaccaggtcttcttctacctccccgtgggccaggggccctnattcccaccatgccccactacaatggg

SEQ ID NO: 34676 - DNA, 484 bp, Homo sapiens
  misc_feature (1)...(484): n = a,t,c or g
gtggnggnnttgncttcncccntantnaaacnctttggacancattacgannnnnnnnnnnnnnnnnnnnnnnnnnnnnnnnnnnnnnnnnnnnnnnnnnggcacgagtttggatagaaaaataacatctcgttgtttttctggtcatagttgcccattgtgcatcttcacgacaaatcatctctcattggaagaactgcacacgacatgactgtcctgtttgcctccctttgaaaaatgccagtgacaagcgaaaccaacaaagtaagtgagcacgggggcagagaagcttggagatgagaatagaagttgtttctaaagaaaattcagagagtaggtagggagtgggcaggggttatgagccatggagtgcagggtgaggtagggcggacagcagcccaaggtacagccaagctcagagggcaggcgggctctccgtgtcaggaacggctgtgataatgttggaccctgactcactcactgc

SEQ ID NO: 34677 - DNA, 442 bp, Homo sapiens
  misc_feature (1)...(442): n = a,t,c or g
gnnnnngggnnnnnntnnnnttggnnncnacgggannctcnnnnnnnnnnnnnnnnnnnnnnnnnnnnnnnnnnnnnnnnnnnnnnnnnnnnnnnnnnnnnnnnnnnnggcacgagaaacattgctattttgccagtctgatcaaatcatattaaaatttagtttagactttgccaaacattttatttttgacagagtagtcccatttactgaagtggtttataattaatggcactgcattcagccattcctaggtctttcttgaaggacattagctacccagagctaatgtgtatctctatactggcaaatttaagctactcctccctagaagaaatgagatgattaaaatagttgcttttcttggcagtatcacattactgtgagggaaaagggcaaacaagagtctgcaaggtgtattgagtagttacagctctgccac

SEQ ID NO: 34678 - DNA, 440 bp, Homo sapiens
  misc_feature (1)...(440): n = a,t,c or g
gnnnnggnnnnnntngnnttgnnnnctctggaatnccctnnnnnnnnnnnnnnnnnnnnnnnnnnnnnnnnnnnnnnnnnnnnnnnnnnnnnnnnnnnnnnnnnnnggcacgagctggagagttaaatgcagatagacttaactctcctaagtcaggtgagactgagagctgactgctacaataattacggagcccaaatgcagtaaaacagcctgtttttcaggcaagggttttgtgggggtttttcctaaattaaaacggatcgcctcctacctgctcctatttattgaattaactagtgaattagaaagcattttcaattctaaattcattcaccagttctgagtggtgtgcaacacagtgggtgttttggcttttctcttttactcgctgatagatctacgtgccacttgcctacaacatacttttggcacatagt

SEQ ID NO: 34679 - DNA, 419 bp, Homo sapiens
  misc_feature (1)...(419): n = a,t,c or g
tttgnannacttggnnnnnnnnnnnnnnnnnnnnnnnnnnnnnnnnnnnnnnnnnnnnnnnnnnnnnnnnnnnnnnnnnggcacgagggtttttccatgttgactggtctcgagctcctagcctcaagtgatctgccnnnnnnnnnnnnnnnnnnnnnnnnnnnnnnnnnnnnnnnnnnnnnnnnnnnnnnnnnnnnnnnnnnnnnnnnnnnnnnnnnnnnnnnnnnnnnnnnnnnnnnnnnnnnnnnnnnnnnnnnnnnnnnnnnnnnnnnnnnnnnnnnnnnnnnnnnnnnnnnnnnnnnnnnnnnnnnnnnnnnnnnnnnnnnnnnnnnnnnnnnnnnnnnnnnnnnnnnnnnnnnnnnnnnnnnnnnnnnnnnnnnnnnnnnaaaaaaaacacaaaaaaacaaaaacaaanacaa

SEQ ID NO: 34680 - DNA, 419 bp, Homo sapiens
  misc_feature (1)...(419): n = a,t,c or g
ggannctttgaagaccctnnnnnnnnnnnnnnnnnnnnnnnnnnnnnnnnnnnnnnnnnnnnnnnnnnnnnnnnnnnnnnnnnnggcacgagccaccatggtgctgtctcctgccgacaagaccaacgtcaaggccgcctggggtaaggtcggcgcgcacgctggcgagtatggtgcggaggccctggagaggatgttcctgtccttccccaccaccaagacctacttcccgcacttcgacctgagccacggctctgcccaggttaagggccacggcaagaaggtggccgacgcgctgaccaacgccgtggcgcacgtggacgacatgcccaacgcgctgtccgccctgagcgacctgcacgcgcacaagcttcgggtggacccggtcaacttcaagctcctaagccactgcctgctgg

SEQ ID NO: 34681 - DNA, 507 bp, Homo sapiens
  misc_feature (1)...(507): n = a,t,c or g
cannttnncggnnnanncnttgcnnnnggnaannnntnnnnnntaaannnngnnntnntctctcgagaaagtnncngncatcgtcnngtttgaatncctggnnnnnnnnnnnnnnnnnnnnnnnnnnnnnnnnnnnnnnnnnnnnnnnnnnnnnnnnnnnnnnnnnggcacgagagctttctttgggtgatgctttgacaggtttgcttgcagggtagaggagtcccttataccatgagaccatccagaagcttgcatgcaagggccacatccagagtaggaggagaggaaaggaactctccaagatcatagaggaggctcatgtgtcttggtgatgttgctcagcatcacacaggggggagtctggggtcagagacctatgaagagccccagtggcttgaggtctacctagccatagggtttatcctatccgcggttggaaaatgccaacagttttgaagggtttgcaaagttggcaaggctctaaatgacaaaaagtctgattat

SEQ ID NO: 34682 - DNA, 424 bp, Homo sapiens
  misc_feature (1)...(424): n = a,t,c or g
gggggnntgnnttntnnaagnanctntgatcctnnnnnnnnnnnnnnnnnnnnnnnnnnnnnnnnnnnnnnnnnnnnnnnnnnnnnnnnnggcacgagaactgctaacattttggcttatttgcttgcagatttctgaattttttacataatttggatcatattatttatgtaatgttacatcttgcctttcgtttaacacttgccacatgtaagttctaacatctgtaaataattttttggaaatcattttaatgactctattatggctcataatttacttaaatattcccctaacagtggatatttagggtgtcttcaattttttggcactctaaataattttttttttttttnnnnnnnnnnnnnnactttgtnacccgggcnggatngcgtggggccnntnnnagctnattatancctag

SEQ ID NO: 34683 - DNA, 419 bp, Homo sapiens
  misc_feature (1)...(419): n = a,t,c or g
tttgaanccttgaatgccatgattacgaatttaatacnnnnnnnnnnnnnnnnnnnnnnnnnnnnnnnnnnnnnnnnnggcacgagtctgtgtaagtcatggctggtgacaccactcagattccaccacattcatctctctgagcctgaagacacaattggtgacatttgtcctgagggtaaattaaagaaggcccccctggatgttttggaaggcctaattagtttctcctcaaacaatccagttcccctaaagaggccaggaaagcttttgggggttaggatgaggacacgattctgcaccgttacctcccttcctccctcacccagtcccttcctcagagcatgcaccagggcagatcttgcttgaggatttccacgagggtctttttcagttgagattgcattttagtgagtaat

SEQ ID NO: 34684 - DNA, 435 bp, Homo sapiens
  misc_feature (1)...(435): n = a,t,c or g
gnnatgnattntcgntttgaancntggnagcncttcgnnnnnnnnnnnnnnnnnnnnnnnnnnnnnnnnnnnnnnnnnnnnnnnnnnnnnnnnnnnnnnnnggcacgaggttatgcttcccttatgttttatttaaaaatcattgtcctcaggctagatgtagaagttacaggccgtcatcatgtatctgtgtatgttaatattcaccctattgtaattagagtagggttctttaacctccgttcctcttttcctctgtattgatgatctctgagcaaaggtaacttgccaggcattctttggctgattcagaaaattttcaaaagtgaacaaaacaaagctatttacactttagggacgatggcggtaatgcaataagagtgaaaatttgagattatttactctttcttttttttgggaaatncctttaagggg

SEQ ID NO: 34685 - DNA, 468 bp, Homo sapiens
  misc_feature (1)...(468): n = a,t,c or g
tgnnnttnnnnnatntgaaacnttgagacncnnnnnnnnnnnnnnnnnnnnnnnnnnnnnnnnnnnnnnnnnnnnnnnnnnnnnnnnnggcacgaggtaattcttctttgcacttatgtaatacttttcttcctaagagacctgagccatgtttaccttagccactgttcacattgagatgaagtgaagtgagggagggagatgaaaactccagagaaaggaggagcccctgtgggcagctgccaacatgttttataggtgagacacttgtctttgccaaaagttgtgtgccagccacaaacttttctttctgatcaggaataacatgtaagcctgtgcttacaattgccttctgatatggacgtggagagtgtcacagaggtgccatgctgggtttttgaccctgatggtagtagacttcttgctcagtgccctgctgtatgacaagcctgacccattcccttatta

SEQ ID NO: 34686 - DNA, 442 bp, Homo sapiens
  misc_feature (1)...(442): n = a,t,c or g
tnnntttggaaanctttgaaanccgtnnnnnnnnnnnnnnnnnnnnnnnnnnnnnnnnnnnnnnnnnnnnnnnnnnnnnnnnnnnnnnnnnggcacgagaacacagatgaggtgttacatgttactaaagaattaccattcnnnnnnnnnnnnnnnnnnnnnnnnnnnnnnnnnnnnnnnnnnnnnnnnnnnnnnnnnnnnnnnnnnnnnnnnnnnnnnnnnnnnnnnnnnnnnnnnnnnnnnnnnnnnnnnnnnnnnnnnnnnnnnnnnnnnnnnnnnnnnnnnnnnnnnnnnnnnnnnnnnnnnnnnnnnnnnnnnnnnnnnnnnnnnnnnnnnnnnnnnnnnnnnnnnnnnnnnnnnnnnnnnnnnnnnnnnnnnnnnnnnnnnnnnnnnnnnnnnnnnnnnnnnnnnnnnnnnnnnnnnnnnnnnnnnnnnnnnnnnn

SEQ ID NO: 34687 - DNA, 478 bp, Homo sapiens
  misc_feature (1)...(478): n = a,t,c or g
gnnnnnnggnnnnnntnnnntttgnannctactgananccgtnnnnnnnnnnnnnnnnnnnnnnnnnnnnnnnnnnnnnnnnnnnnnnnnnnnnnnnnnnnnnnnnnggcacgaggagctagcaccatgagctggaggctctgagcatggccgtggagagcaccgggactgccaaggcggaggccgagtcccgtgcggaggcagcccggattgagggagaagggtccgtgctgcaggccaagctaaaagcacaggccttggccattgaaacggaggctgagctccagagggtccagaaggtccgagagctggaactggtctatgcccgggcccagctggagctggaggtgagcaaggctcagcagctggctgaggtggaggtgaagaagttcaagcagatgacagaggccataggccccagcaccatcagggaccttgctgtggctgggcctgagatgcaggtaaaactgctccagtc

SEQ ID NO: 34688 - DNA, 477 bp, Homo sapiens
  misc_feature (1)...(477): n = a,t,c or g
ggnnnngtnnnntgnntntnnntactnatacnnttgtgaacnnnnnnnnnnnnnnnnnnnnnnnnnnnnnnnnnnnnnnnnnnnnnnnnnnnnnnnnnggcacgaggaagaattacataactcagtgaaccattattttctaaatgggtgatgcatggtgttatatagtcatgcatgggtaaaagatccgttcacgtataagatagaccaatggattttaatgtacagagagaacaaagtccattgatagaattctagattccatatcacacctaatattcaagaaatgactacttgtcaagctctggtgtagtgtcagagaatacccaaaaccatctgaggctacgactaaaatactcttttcaactatgtatctgcgtacggctggattttctttatatacttccaccaaaacagcatgttgcaacagattgaatgcagaatattttaatgttttccattaacttagatattaga

SEQ ID NO: 34689 - DNA, 480 bp, Homo sapiens
  misc_feature (1)...(480): n = a,t,c or g
ggnnnnggnnnnnntgnnnttgtngnatnacngaaaccctnnnnnnnnnnnnnnnnnnnnnnnnnnnnnnnnnnnnnnnnnnnnnnnnnnnnnnnnnnnnnnnnnggcacgagnnnnnnnnnnnnnnnnnnnnnnnnnnnnnnnnnnnnnnnnnnnnnnnnnnnnnnnnnnnnnnnnnnnnnnnngccggnnnnnnnnnnnnnnnnnnnnnnnnnnnnnnnnnnnnnnnnnnnnnnnctcaataaagattattaaagccctactctatgtcaggctcaagtgtagagccctgggatgcagcagtaaacaaaaaaagtccctgttcagctgcatctcgcaggctggtggggaggcttccagaatccaatgaagaagagggcagatgacctcagacgggctgagcaccatggatgagaacccgccgacccactaccaggctcacctgcgagtccctgcctgccacagactccgtaggctgcc

SEQ ID NO: 34690 - DNA, 481 bp, Homo sapiens
  misc_feature (1)...(481): n = a,t,c or g
ggnnntngggggaantgntgttgttgacnnantagaacccnttatgaaacnatcnnnnnnnnnnnnnnnnnnnnnnnnnnnnnnnnnnnnnnnnnnnnnnnnnnnnnggcacgaggccctgtgcaattgtgattaaaatcctgctgtgtgggaaccgtggaggtttggcttagagcaggaacacgaggctcccgtttggggaacaaggagcctcaggaggccctttcagcactagacaggccagagatgctgaaaagattgcttttgtttttgaggcgggtttgggattagggttgcctttttctttagactagggctttgtctttgctgccttctcctcatggcactagcgatctttctgtcctctgcctcctcgtccctctcatttctccttttccacctgtttctcctgctatcgctctgtccccgctctcccgggccttgccagtttgcctgtctcgtgtgtttcaggcctcatggc

SEQ ID NO: 34691 - DNA, 479 bp, Homo sapiens
  misc_feature (1)...(479): n = a,t,c or g
gnnnnnnggnnnnnttgnnnttnttnnatncnganaccnttgtgaccnnnnnnnnnnnnnnnnnnnnnnnnnnnnnnnnnnnnnnnnnnnnnnnnnnnnnnnnnggcacgagggaggggtatatggaaacacggctatgaccaaagggagatcccagcctgggcaggctgcgctgctgaccaccctccctggggcccgggctctgtaggaaagttggtccttgactgtggcattgcactctgcactgtttctctctgcagacctaggggaaaactgcaggtggaagtgcttttctactaaggcctcttactttgggggggatgtgccctacagaagacatagaagatggggaaatgccaatgggcaaagagctactttgaatacataattctcttcaaagacttcagcagcaaaccaaaacagcaggttaaaaaaaaagatgcttttttgggtgcaagtctaacctgtctagcatgaga

SEQ ID NO: 34692 - DNA, 466 bp, Homo sapiens
  misc_feature (1)...(466): n = a,t,c or g
gganttnntnaattttganactacntgaaaccctnnnnnnnnnnnnnnnnnnnnnnnnnnnnnnnnnnnnnnnnnnnnnnnnnnnnnnnnnnnnnnnnnnnnnnnnnnnnnnnnnnnnnnnnnnnnnnnnnnnnnnnnnnnnnnnnnnnnnnnnnnnnnnnnnnnnnnnnnnnnnnnnnnnnnnnnnnnnnnnnnnnnnnnnnnnnnnnnnnnnnnnnnnnnnnnnnnnnnnnnnnnnnnnnnnnnnnnnnnnnnnnnnnnnnnnnnnnnnnnnnnnnnnnnnnnnnnnnnnnnnnnnnnnnnnnnnnnnnnnnnnnnnnnnnnnnnnnnnnnnnnnnnnnnnnnnnggtcgatgttgcacaggtgaatacagaggctttctaaagaaattgatgagaggtaggtgtctcatttgcataaggtgtgaatttctggnccccgnnctcctnnngtgcatgcggnccct

SEQ ID NO: 34693 - DNA, 439 bp, Homo sapiens
  misc_feature (1)...(439): n = a,t,c or g
gnnnntngtngantttgaattcctnctctntgatcncttcnnnnnnnnnnnnnnnnnnnnnnnnnnnnnnnnnnnnnnnnnnnnnnnnnnnnnnnnnnnnnnnnnggcacgagcnnnnnnnnnnnnnnnnnnnnnnnnnnnnnnnnnnnnnnnnnnnnnnnnnnnnnnnnnnnnnnnnnnnnnnnnnnnnnnnnnnnnnnnnnnnnnnnnnnnnnnnnnnnnnnnncacctactatgaggtatatgagtaggtatatatctactacgcacccacgaaaattaatacaaaattattttnnnnnnnnnnnnnnnnnnnnnnnnnnnnnnnnnnnnnnnnnnnnnnnnnnnnnnnnnnnnnnnnnnnnnnnnnnnnnnnnnnnnnnnnnnnnnnnnnnnnnnnnnnnnnnnnnnnnnnnnnnnnnnnnnnnnnnnnnnnnnn

SEQ ID NO: 34694 - DNA, 491 bp, Homo sapiens
  misc_feature (1)...(491): n = a,t,c or g
nnnnnnanannnnnnnnnnnngnnnngngnnnnnnannnannnannnanngggnggagngnnnnagaggngnngngnttgatccttcttggaaccnntagaacgatacgaannnnnnnnnnnnnnnnnnnnnnnnnnnnnnnnnnnnnnnnnnnnnnnggcacgagcttccccaaggatttcttgtctgtgatgcttgaaaaaggtgaagagagtgggatgtagacagggtatccagtgaaaaacacagaagtcggagattgagggattgataggatggaggggctgcgggagactaaagcaagtgaagcctgccttgggaaacctcaggatcagccttgagcgagctgaaggttgccgggcatgaaagggaagaagagcaggcaaataggtcatgggaaccttgggtgagaggctgagggcggaggagctctgggggatgtcagnnnnnnnnaagagctattcctccaccaggaaagcagcaagaggagc

SEQ ID NO: 34695 - DNA, 435 bp, Homo sapiens
  misc_feature (1)...(435): n = a,t,c or g
gnnnggnnntgnntnntnctttgannctttganncccngctnnnnnnnnnnnnnnnnnnnnnnnnnnnnnnnnnnnnnnnnnnnnnnnnnnnnnnnnnnnnnnnggcacgaggtgttggtgagaagaaaatgtaaaatgaatcttcattgctcctggccaaaggcatatgctccttcgaacaactgcagtatnnnnnnnnnnnnnnnnnnnnnnnnnnnnnnnnnnnnnnnnnnnnnnnnnnnnnnnnnnnnnnnnnnnnnnnnnnnnnnnnnnnnnnnnnnnnnnnnnnnnnnnnnnnnnnnnnnnnnnnnnnnnnnnnnnnnnnnnnnnnnnnnnnnnnnnnnnctnnnnnnnnnnnnnnnnnnnnnnnnnnnnnnnnnnnnnnnnnnnnnnnnnnnnnnnnnnnnnnnnnnnnnnnncactccatcctgggc

SEQ ID NO: 34696 - DNA, 419 bp, Homo sapiens
  misc_feature (1)...(419): n = a,t,c or g
ccncnnatcccttctatgacatgatntttgaattccctacnnnnnnnnnnnnnnnnnnnnnnnnnnnnnnnnnnnnnnnnnggcacgagtggaggtggaaagacaagctcaagtgttcacaacctggaagtgcttcgggaagaaggggacaatggcagaacaggtgttggtgacaattgtcaccaattggataaagcagctcaggttgtagtgggccattaggaaactgtcggtttgctttgatttccctgggagctgttctctgtcgtgagtgtcacttgtctaaacgtccattaagctgagagtgctatgaagacaggatctagaataatcttgctcacagctgtgctctgagtgcctagcggagttccagcaaacaaaatggactcaagagagatttgattaatgaatcgtaatgg

SEQ ID NO: 34697 - DNA, 398 bp, Homo sapiens
  misc_feature (1)...(398): n = a,t,c or g
tttgaannccctnnnnnnnnnnnnnnnnnnnnnnnnnnnnnnnnnnnnnnnnnnnnnnnnnnnnnnnnnnnnnnnnnnnggcacgagcttgggtgacagcaagacaggtgtccacactcccagacccagggcttgtacaccatggagaaagtgtgcattgctctacagagacaatggcagcaatccagagcaggcaggaatgctgtgcatcatagcctagaatttgtgtgataacatcagggttgacacgttctcacactaaggacaggaaattaagtccaggccctttcatggaacaccagtgttccatggtgttcctgattaagtgtaggaatcaggaggcattcctgggactggagctaatcagagtcaacacggcaggtttgcagcccaaatgg

SEQ ID NO: 34698 - DNA, 438 bp, Homo sapiens
  misc_feature (1)...(438): n = a,t,c or g
tgnnnttncccccttttgganncccncttnnnnnnnnnnnnnnnnnnnnnnnnnnnnnnnnnnnnnnnnnnnnnnnnnnnnnnnnnnnnnnnggcacgagcacnnnnnnnnnnnnnnnnnnnnnnnnnnnnnnnnnnnnnnnnnnnnnnnnnnnnnnnnnnnnnnnnnnnnnnnnnnnnnnnnnnnnnnnnnnnnnnnnnnnnnnnnnnnnnnnnnnnnnnnnnnnnnnnnnnnnnnnnnnnnnnnnnnnnnnnnnnnnnnnnnnnnnnnnnnnnnnnnnnnnaattaagcatttagtttaggaggaaatcaagagagcactaaagaatttcctaccttgtattaaaattgtttcccataggtttatctcaagtattttgtagatgaaaattggttaggtgcatacagaataattcttgagggatttggttctataga

SEQ ID NO: 34699 - DNA, 427 bp, Homo sapiens
  misc_feature (1)...(427): n = a,t,c or g
tgtntnanntcnaatcccttgttgacctnnnnnnnnnnnnnnnnnnnnnnnnnnnnnnnnnnnnnnnnnnnnnnnnnnnnggcacgaggagaaacagaaccaataagagaggcttataaaaggatatgaatatataaaaggagatttatttacacgggnnnnnnnnnnnnnnnnnnnnnnnnnnnnnnnnnnnnnnnnnnnnnnnnnnnnnnnnnnnnnnnnnnnaaggttggtggtttagttcagtgtgagtctgaagggctgagaccaggggagccaaaggtgtaagtcccagtttgaggacaggtcaggagatggggtaagatgtctcagctcaaccaggcaagcaggaagcaaaaggtatgaatttctcctccttccactgnnnnnnnnnnnnnnnnnnnnnnnnnnnnnnnnnnnnnnnnat

SEQ ID NO: 34700 - DNA, 450 bp, Homo sapiens
  misc_feature (1)...(450): n = a,t,c or g
gnnnnggnnnnnttgnnttntnnnntctngaancccttnnnnnnnnnnnnnnnnnnnnnnnnnnnnnnnnnnnnnnnnnnnnnnnnnnnnnnnnnnnnnnnnnnggcacgagctggattccaaaatctagcaaggatctgagctggttaactcagagggtggagcatgatgctaacaagacggtttatcattttggacccctcacaaacacacttctctttagcagaggtgacattccttaggctaaataattggatccagggacataacagatttgttgagagaaaatgtggcagtgccttcacccgggacagtggtcaggaagccctgagcatccctgatggatttatccatcctcttctgaagtgctctgctctaggctgggtcctgttgccacctgcctgttctctggttggcttttgcaggagggcagcttacgtgtttgtcaac

SEQ ID NO: 34701 - DNA, 471 bp, Homo sapiens
  misc_feature (1)...(471): n = a,t,c or g
tttgaaaaccnttnnnnnnnnnnnnnnnnnnnnnnnnnnnnnnnnnnnnnnnnnnnnnnnnnnnnnnnnnnnnnnnggcacgaggcagaaccagagccagtcatttcaggagccgaaatagtagctggagttgttccagccacaagtatggagccaccagaactcaggagtcaggacttagatgaggaactgggaagtactgcagctggagagattgttgaagcagatgttgccattgggaaaggcgatgagactccacttacaaatgtgaagacagaggcatcccctgaaagcatgttgtctccatcacatggctcaaatcccattgaagatcctttagaggcagagactcagcacaagtttgaaatgtcagactcattgaaagaagaatcagggactatttttggaagccagataaaggatgccccaggtgaggatgaggaggaagatggtgtcagtgaagcggccacc

SEQ ID NO: 34702 - DNA, 479 bp, Homo sapiens
  misc_feature (1)...(479): n = a,t,c or g
ggntnggngncttgnttttatgaccncnngaacnctnnnnnnnnnnnnnnnnnnnnnnnnnnnnnnnnnnnnnnnnnnnnnnnnnnnnnnnnnnnnnnnnnggcacgagnnnnnnnnnnnnnnnnnnnnnnnnnnnnnnnnnnnnnnnnnnnnnnnnnnnnnnnnnnnnnnnnnnnnnnnnnnnnnnnnnnnnnnnnnnnnnnnnnnnnnnnnnnnnnnnnnnnnnnnnnnnnnnnnnnnnnnnnnnnnnnnnnnnnnnnnnnnnnnnnnnnnnnnnnnnnnnnnnnnnnnnnnnnnnnnnnnnnnnnnnnnnnnnnnnnnnnnnnnnnnnnnnnnnnnnnnnnnnnnnnnnnnnnnnnnnnnnnnntcacaaatttgttctaagagaaatttcttcatgtatctttgatacaaaacttgcaattcctccacaatacactgagaataaagtccaaaatcctcagcataccattttagtt

SEQ ID NO: 34703 - DNA, 459 bp, Homo sapiens
  misc_feature (1)...(459): n = a,t,c or g
tnnntttgaaaactttganaccnnnnnnnnnnnnnnnnnnnnnnnnnnnnnnnnnnnnnnnnnnnnnnnnnnnnnnnnnnnnnnnnnnggcacgagnnnnnnnnnnnnnnnnnnnnnnnnnnnnnnnnnnnnnnnnnnnnnnnnnnnnnnnnnnnnnnnnnnnnnnnnnnnnnnnnnnnnnnnnnnnnnnncaataggtgacttgtttggtatgtaaagtgtatattaataaagttgttttaaaaattaaaagtgaaataaagacatgttcagacatgtgaaaggggaaataattcacaacaagcagaccccaatataagaaatgtttaaagtaagtccttaaggcggaagtaaaaagaaggaacagagataaagatgatgtcttatttttcattggaaacaatacaagcaagaagacagcagagtaacatttttaatttcttttaaaaaattgtcaac

SEQ ID NO: 34704 - DNA, 480 bp, Homo sapiens
  misc_feature (1)...(480): n = a,t,c or g
ngtgnttgaaancttggnnnnnnnnnnnnnnnnnnnnnnnnnnnnnnnnnnnnnnnnnnnnnnnnnnnnnnnnnnnnnnggcacgagcatttccaaacctgtgataaataacctataatttgttcattctggaaccattagtgctttataaatgtaaatttgttttacaatgatagttgaatttatttaaattatttctaaaacccaagcaataaattctcctgtcttgctcaaatgaataacatgacaatatatataaccactttcaataacaatataatgaaatctttgcttgtgtttttgataaactataagttttcttaagtgttatggaaatgtttacaagataccgaataaccaacatcagatatagtataaaggttttaaaagttttaaaatggacatagtttgctaaaaatatcataatatggttgtttttcaagctattaatgggtttttattaagattatatttaggagc

SEQ ID NO: 34705 - DNA, 474 bp, Homo sapiens
  misc_feature (1)...(474): n = a,t,c or g
ngngcccnttgacaccctttgacgnccnnnnnnnnnnnnnnnnnnnnnnnnnnnnnnnnnnnnnnnnnnnnnnnnnnnnnnggcacgagccttaagagggaatggtgcggcgaatagctgtgagttcaaagtcctgactannnnnnnnnnnnnnnnnnnnnnnnnnnnnnnnnnnnnnnnnnnnnnnnnnnnnnnnnnnnnnnnnnnnnnnnnnnnnnnnnnnnnnnnnnnnnnnnnnnnnnnnnnnnnnnnnnnnnnnnnnnnnnnnnnnnnnnnnnnnnnnnnnnnnnnnnnnnnnnnnnnnnnnnnnnnnnnnnnnnnnnnnnnnnnnnnnnnnnnnnnnnnnnnnnnnnnnnnnnnnatccgtctaggaagtgaggagcatctctgcccggncgnnnnnnnnnnnnnnnnnnnnnnnnnnnnnnnnncgcgcccgtctgggatgtgaggaagtgcctntgccgccgcgac

SEQ ID NO: 34706 - DNA, 487 bp, Homo sapiens
  misc_feature (1)...(487): n = a,t,c or g
ggcgctgctttnancccctntgnaaagccntnnnnnnnnnnnnnnnnnnnnnnnnnnnnnnnnnnnnnnnnnnnnnnnnnnnnnnnnnnnnnnnnnggcacgagctggtctttaatgagtcttttgcaatgacttgggaaaaacaccctccctcactacaggatcttcatgttgttaataatataaacaaacctttgaaattagcattgcaaaagaatcccatttttgtttcgtaccacactgtttaaaggaaaattgtttatctctcttcctttctctctctctcttatttgacagaatagcaagtgtttagataatttcagatatattctaagtattttaccagctgtggaataagttgtgtttgtccattactgtgtaactaccgttcacatgttctggctctgtactccacgctnatcgcgtgaancntcacatgtnggactttcacagtgtgatctntcacctgtcttggaaactccttcat

SEQ ID NO: 34707 - DNA, 472 bp, Homo sapiens
  misc_feature (1)...(472): n = a,t,c or g
anaccnnnnnnnnnnnnnnnnnnnnnnnnnnnnnnnnnnnnnnnnnnnnnnnnnnnnnnnnnnnnnnnnnnnggcacgaggccttcctatgttgaaagaataggaaaggagaacaaatataaaactattctttatgtgggatttaaaattgttgaccatgagccaccacgcctggccaaaaaaatatgttttaaatgtcccatttcaccattgccaggcaggcattcttccttcagggagaggatggtgagaattaattggttctttgcactgttctcctcatgtggcgatttcactttcatgacagcctttctatattaaaggctcaggatgtcacggagaatctatctaatcccactgtattaagaggggnnnnnnnnnnnnnnnnnnnnnnnnnnnnnnnnnnnnnnnnnnnnnnnnnnnnnnnnnnnnnnnnnnnnnnnnnnnnnnnnnnnnnnnnnnnnnnnnnncc

SEQ ID NO: 34708 - DNA, 482 bp, Homo sapiens
  misc_feature (1)...(482): n = a,t,c or g
ggngtgcttgacaccgtttgacagnnnnnnnnnnnnnnnnnnnnnnnnnnnnnnnnnnnnnnnnnnnnnnnnnnnnnnnnggcacgagtgaatgaatgccttgtacattgatttgcacgtggcagatttcacctgtatcttataactcctttctacaactaacttcatcacttaacataattgactttgatagttatagtgttggacctagcagtacagagatctgtaagattccattgtttaagacccttgaaatattaaatatataaaagttattccgaatataagccatgaattacatgtttgtttctgttttatacctaggcactttttaaaaggaggaaagaaaatttagtatctggaacaaaaggaagatgtgaatatacttccaatctaggaatattaaaaatcctgagatatcagaaaggaaaaatatgcatcttcaataattttttgcatttattcttcctcttcatctaaac

SEQ ID NO: 34709 - DNA, 475 bp, Homo sapiens
  misc_feature (1)...(475): n = a,t,c or g
gtgttgaaccctnnnnnnnnnnnnnnnnnnnnnnnnnnnnnnnnnnnnnnnnnnnnnnnnnnnnnnnnnnnnnnnggcacgagggtcatctcccgcaggtcacgggagaagctgagcatgcggtccctgcccgaggtggacagaaggtgaacgctcttgagaaagaaacccagcgggtcttaggagagcccggccccccttgtaatgagagaaatcaaaccacagcgcacagcgacttcatgtccaccgttggcttagtgaggccccacgctcagtgcgctgctgtggggcgagaggggacagccccgctctccctgtcctgggcggcttcaccagcgccacctccccacacactctgtgcactgctgtggggcaagaggcgacagccccgctctccctgccccgggcagcttcaccagcgtcacctccccaggggtgacgcatgcccgaggccatgagccacggcagcatctgt

SEQ ID NO: 34710 - DNA, 421 bp, Homo sapiens
ggccctcgaggccaagaattcggcacgagaagaccactacttagtctacctaagccaagtctgttgacttgttacaatgagggagaacacacaacagagaaactggtggcagggtggtgggaggagggtgctcaccaaacaagaggaaaattagagttatcattgattttgggggacgagtggagtgtagttttcataggctcaaagcaaagcagggctgtgtgaaagggtaggcataggatgggactttgcagtggatccagggtcttgtttcctcagaaactacaaagttgagatagaggtggaatgctgtgttcagaaaccccttacttgaagtttttgcacctgggttgaaaattactgctggttttttgtgtcaaggtggcttaggtcctccagacaggagggggatactgcattg

SEQ ID NO: 34711 - DNA, 478 bp, Homo sapiens
  misc_feature (1)...(478): n = a,t,c or g
gngnttnnnnncnttnnnnnnnnnnnnnnnnnnnnnnnnnnnnnnnnnnnnnnnnnnnnnnnnnnnnnnnnnnnnnnnnnnnnnnnnnnggcacgaggcagacggctgcgaggcgctgggcacagttgctgtcccctttgacgatgatgacaagattgttgggggctacacctgtgaggagaattctctcccctaccaggtgtccctgaattctggctcccacttctgcggtggctccctcatcagcgaacagtgggtggtatcagcagctcactgctacaagacccgcatccaggtgagactgggagagcacaacatcaaagtcctggaggggaatgagcagttcatcaatgcggccaagatcatccgccaccctaaatacaacagggacactctggacaatgacatcatgctgatcaaactctcctcacctgccgtcatcaatgcccgcgtgtccaccatctctctgccaccgccc

SEQ ID NO: 34712 - DNA, 474 bp, Homo sapiens
  misc_feature (1)...(474): n = a,t,c or g
gngttgaaaccnttgantgcnnnnnnnnnnnnnnnnnnnnnnnnnnnnnnnnnnnnnnnnnnnnnnnnnnnnnnggcacgagcaagagttgttagtggttttgtttnnnnnnnnnnnnnnnnnnnnnnnnnnnnnnnnnnnnnnnnnnnnnnnnnnnnnnnnnnnnnnnnnnnnnnnnnnnnnnnnnnnnnnnnnnnnnnnnnnnnnnnnnnnnnnnnnnnnnnnnnnnnnnnnnnnnnnnnnnnnnnnnnnnnnnnnnnnnnnnnnnnnnnnnnnnnnnnntagcatgggctaccaagcccagctggtatctgagattaatgataatttatttctttttttccaactttaagatttttagtttgttttcctgctttattgccaaacattccattatatatttaatgtctttaagattcatagtgctttctctctctctcttttttcttattctttttttctcttttttcttga

SEQ ID NO: 34713 - DNA, 475 bp, Homo sapiens
  misc_feature (1)...(475): n = a,t,c or g
gnngnnnnnnnntttnnnnnnnnnnnnnnnnnnnnnnnnnnnnnnnnnnnnnnnnnnnnnnnnnnnnnnnnnnnnnnnnnnnnnnnnnggcacgagctgaaggcttaaaactatgtatatgatnnnnnnnnnnnnnnnnnnnnnnnnnnnnnnnnnnnnnnnnnnnnnnnnnnnnnnnnnnnnnnnnnnnnnnnnnnnnnnnnnnnnnnnnnnnnnnnnnnnnnnnnnnnnnnnnnnnnnnnnnnnnnnnnnnnnnnnttnnnnnnnnnnnnnnnnnnnnnnnnnnnnnnnnnnnnnnnnnnnnnnnnnnnnnnnnnnnnnnnnnnnnnnnnnnnnnnnnnnnnnnnnnnnnnnnnnnnnnnnnnnnnnnnnnnnnnnnnnnnnnnnnnnnnnnnnnnnnnnnnnnctatgtgtgctttgacccaattgtcccacttttggggatttattccacacaggttactgaggataaaat

SEQ ID NO: 34714 - DNA, 443 bp, Homo sapiens
  misc_feature (1)...(443): n = a,t,c or g
nnnnnnnnnnnnnnnnnnnnnnnnnnnnnnnnnnnnnnnnnnnnnnnnnnnnnnnnnnnnnnnnnnnnnnnnggcacgagccctgtactccttcccactctattcttgtttcattctccctggccactcccatcccaaccttcccatcttcctgaggactcctcatggagccctgactttaatgctctctactgctgttgctcaaaaaggtttacttgttctaaaagtatcccatgaccccttttcctaatttaaatttccctcttcatctactccattctcccaccagcctggaattagaaaaaggagactcctctatgaagtgctacttcctttcagtagaccttagactggataagatgacctccaagtttcatccaattaaaagtgtattattaaaccaacctatactaaatagtgaatcacaatcaacttgatctaaa

SEQ ID NO: 34715 - DNA, 468 bp, Homo sapiens
  misc_feature (1)...(468): n = a,t,c or g
ggngtnnnngtnnncctttgananccnnnnnnnnnnnnnnnnnnnnnnnnnnnnnnnnnnnnnnnnnnnnnnnnnnnnnnnnnnnnnnnnnnggcacgaggagagtttaagtaacttcctggaggtccgacgcgtaacatgtggaggtgctgggattcaaaaccaggcaatgtgggtcccgggcactcttgaccagtgcctgtacttcttccaaggaatagagcaagggaggtcataccgaatatcacagtgtcacctaggaagcccaagggaggtattcccgttaatctgcagcnnnnnnnnnnnnnnnnnnnnnnnnnnnnnnnnnnnnnnnnnnnnnnnnnnnnnnnnnnnnnnnnnnnnnnnnnnnnnnnnnnnnnnnnnnnnnnnnnnnnnnnnnnnnnnnnnnnnnnnnnnnnnnnnnnnnnnnnnnnnnnnnnnnnnnnnnnnnnnnnnnnnnnnnnnnnn

SEQ ID NO: 34716 - DNA, 482 bp, Homo sapiens
  misc_feature (1)...(482): n = a,t,c or g
ggcctcccccgtccgcctttnaaacccgtatcctangagactctnnnnnnnnnnnnnnnnnnnnnnnnnnnnnnnnnnnnnnnnnnnnnnnnnnnnnnnnnnnnnnnnnggcacgagaatacacttttgcaatagggaagagagtccagtatgaaatgaagtcaatgttgatttgcagagatgactgggagttttaaagggagaatggcaggggacttggcagggtggataaacggaatctgtacactcaaagaagtgaagaatttaaaaagattggtaaaatatggtgattaggccagctgtgcctgttagctgacactgtgactggggaatagataccctatttttcctgatggttacatttttaaaggaatggctttcaggtccttgagaaagacactcctgagttgtaggagtacagctcaaagggacagaggaaggattcacagttgtaagccctttttagtaaatgatctaagagg

SEQ ID NO: 34717 - DNA, 480 bp, Homo sapiens
  misc_feature (1)...(480): n = a,t,c or g
ggngnnnnttganaccgtatgacatgattacgaatttaatacnnnnnnnnnnnnnnnnnnnnnnnnnnnnnnnnnnnnnnnnnggcacgagccatgcctccgctgcctctggaagccacaggacttgcactttccagcttgcgcctacgcaacgtgtcgtgggcgacagggcgttcttggctcgccgagctgcagcagtggctcaagccaggcctcaaggtactgagcattgcccaagcacactcgcctgccttttcctgcgaacaggttcgcgccttcccggcccttaccagcctagacctgtctgacaatcctggactgggcgaacgcggactgatggcggctctctgtccccacaagttcccggccatccagaatctagcgctgcgcaacacaggaatggagacgcccacaggcgtgtgcgccgcactggcggcggcaggtgtgcagccccacagcctagacctcagccacaactcg

SEQ ID NO: 34718 - DNA, 478 bp, Homo sapiens
  misc_feature (1)...(478): n = a,t,c or g
ggtgnncnttnnnnnnnnnnnnnnnnnnnnnnnnnnnnnnnnnnnnnnnnnnnnnnnnnnnnnnnnnnnnnnnnnnnnnnnnnggcacgagtgagtcatgtgtcccggggcaggcaagcacatgtagccacccactgagtagtctgtccatctgtgtctgcccatccatccatccacttggtgaccaggttctgttgaacagatcgttgttgaataaactgtgtcttttgccctcacagagcctaaggtctagtttgtggggtgtttgaaatcccgaattggctattgttgtcctcttcagtgtctctaaagacaaaccagggatctatttggggacctatattctggtaccactggtagcttgaggaattttcccattttggttaaggtaattaaaagcagtaggcnnnnnnnnnnnnnnnnnnnnnnnnnnnnnnnnnnnnnnnnnnnnnnnnnnnnnnnnnnnnnntcgcttgac

SEQ ID NO: 34719 - DNA, 479 bp, Homo sapiens
  misc_feature (1)...(479): n = a,t,c or g
gngnncnttganaccgtnnnnnnnnnnnnnnnnnnnnnnnnnnnnnnnnnnnnnnnnnnnnnnnnnnnnnnnnnnnnnnnnggcacgagccagagcccagctgcccagcttaaccatatccatgctcaggttcacataatggctatctgtggtcagacttgctctctatccgcctgagcctctgtgagtgagggctgactgggaaacaacagccttcctgtcctgtttcagtgctgtcccactcctcaagtctggaagcgacacacccgagcctgtcctttctccagcaaggactttcattttctttagaatcatttgctactgtttacacaggtgaagattaaacacccagtaagcttctaccattgttaggagcattcataactcagaatttcttcttgtagctctgtgtaagcaggtggatgaggtcagatcacctttggtaaactggacctcaggaacaaggatgaggttttgaa

SEQ ID NO: 34720 - DNA, 480 bp, Homo sapiens
  misc_feature (1)...(480): n = a,t,c or g
gtgnncnttganacnnnnnnnnnnnnnnnnnnnnnnnnnnnnnnnnnnnnnnnnnnnnnnnnnnnnnnnnnnnnnnnnnnnggcacgagggagccagattccaggcacacatggagcagggaggctgagcatggggaggctggcggctgaggcgtgtcgttgcttcctacagccggtgcagctgtacaagggcatgggactggatgtcagccagacaaggctgggggacaggtagaggaaataggctggcaaggtggaggcagttgtccaagaggggacacctgaagcagaaactctggagaacatgcagttactgagagtgacaagtctcagccttggccaggactccgtgaagatttgaggaaattgaagtgcactgcctggcacccactttacttctgaaacaatacatgtggtaacagtattaagtgctcactattttgcaaacattgttcaagaaccctaggaaagacagtacag

SEQ ID NO: 34721 - DNA, 483 bp, Homo sapiens
  misc_feature (1)...(483): n = a,t,c or g
ggnnnnnnttgnnnccnnttgganancnnnnnnnnnnnnnnnnnnnnnnnnnnnnnnnnnnnnnnnnnnnnnnnnnnnnnnnnnnnnnnnnnnnggcacgagcctccttgttttctttggtatgagaactcctgggcttttgttggttccttccgttttctccggtgtattaccatttcacatcacagtgatattatccagataacacccatgannnnnnnnnnnnnnnnnnnnnnnnnnnnnnnnnnnnnnnnnnnnnnnnnnnnnnnnnnnnnnnnnnnnnnnnnnnnnnnnnnnnnnnnnnnnnnnnnnnnnnnnnnnnnnnnnnnnnnnnnnnnnnnnnnnnnnnnnnnnnnnnnnnnnnnnnnnnnnnnnnnnnnnnnnnnnnnnnnnnnnnnnnnnnnnnnnnnnnnnnnnnnnnnnnnnnnnnnnnnnnnnnnnnnnnnnnnnnnnnnnnnnnnnnnnnnnnnnnnnnnnnnnnnn

SEQ ID NO: 34722 - DNA, 477 bp, Homo sapiens
  misc_feature (1)...(477): n = a,t,c or g
ngagccctttgacacccttgncgtnatgnnnnnnnnnnnnnnnnnnnnnnnnnnnnnnnnnnnnnnnnnnnnnnnnnnnnnggcacgagatggcttcccccaggcaagggctaggagggagaaaggggctgcataacaaagaggagacgcaggagctctcccggagaaagcgagcctggaaatctgtatctccgccgcagcttttggtgccaatatggaaccaatacagcatttctctttcccttttgggggcagtttaaaataggctgtgcctccccagttttgggagctggagccagtgagccgagccgagcctgcccggaggatgcgccagcttcgtcagcgcggatcaagagcccccggagccccggcctggtgcatctttttttcaggcaattggaatggagaatctggacgccagcagctgctgtaaaccaccctttggaaggcaaaatccgtttctcgcangagaaagcg

SEQ ID NO: 34723 - DNA, 477 bp, Homo sapiens
  misc_feature (1)...(477): n = a,t,c or g
gagnnntttgaanccnnnnnnnnnnnnnnnnnnnnnnnnnnnnnnnnnnnnnnnnnnnnnnnnnnnnnnnnnnnnnnnnnnggcacgagggatttttataaagtttcgaggaatggcagcatcattgggatactgatcgacttcccaaatgatgtaactggacaaacggtcatttaaacctgtgcttcttaagcggggctcataactcccctgaaatatattcttattttcttctgccattagaaggactttagtagaaaataccagagaagcattgcttttatttaaggtaaaccaggggtcagcaaacccttttctgtaaagagccagacagtaaatattttcagctttgcaggctgtacagtttgttacactatttaactcagctgttgtagcatgaaagcagtcatagacattacataaactaacaagcacggctgngtttataaaatgnatttactaacacaggcagtgggc

SEQ ID NO: 34724 - DNA, 479 bp, Homo sapiens
  misc_feature (1)...(479): n = a,t,c or g
gngnnnnttnnnnnnnnnnnnnnnnnnnnnnnnnnnnnnnnnnnnnnnnnnnnnnnnnnnnnnnnnnnnnnnnnnnnnnnnnggcacgagaactacatataaagacttttttttaagatacattttggaacaatacaagaggaactttcaacaattagctcaattttttaaatgggatgggaaaaaagtattgtggaagggcaaaggagacacaaggggctgatcaaaaaaaatatgggatgggccgccttgaaaattagttctctttccttgatgttaagagccactgcacccggctctggtagggtctttatatccttttataacctccatgtaggtatctttactatagtcagaatactcttggacaccttttttggttttggggattgtttcatgtcttcatagctattaatttagtaatctacttttagggtaattgacttttttttgtttgtttgtttgtttgcttttttgaa

SEQ ID NO: 34725 - DNA, 412 bp, Homo sapiens
ggccctcgaggccaagaattcggcacgagctgacacccagccttgtgctcagtgggacctcatggtccagaatggcttggaatcgcagcactgagagattcatttcattgaagccatctgagaggccaggacagggaagtgcctggaagctgtggctactgagaataaaagtttggaaatgttcagctgggaggaaagaaggtagagtcttttccagccgtaagctcccaggattctgttgtcctgggtttgattgtgagggagacagaagcaaagctcaggaccctggattgaggagagatgggtagatctgtgaggaggtgtggggaaccagagaccatgtgatgaacgcaccaggtgcctgggagagggaactatgagtaggatgacaggcatctgcctcatgggtttt

SEQ ID NO: 34726 - DNA, 488 bp, Homo sapiens
  misc_feature (1)...(488): n = a,t,c or g
gtgnnttgaaanccntttgaaanccnnnnnnnnnnnnnnnnnnnnnnnnnnnnnnnnnnnnnnnnnnnnnnnnnnnnnnnnnnnnnnnnnnggcacgaggccaaaannnnnnnnnnnnnnnnnnnnnnnnnnnnnnnnnnnnnnnnnnnnnnnnnnnnnnnnnnnntgggcaaaagtcgcagaagaaaaaaacatccatggctcgtaaatacctgaaaacatgctcaatctctttaaaaatcagagaacacaagttaaaacaacagatccaattctgtgccccacagcgtggtaaagatggccaggtcggattcggatccttgcatgggacgggcgggggtcctcatctcctgctgcggcaccaggcagcagcacagtctggagagcagcccggcgttttctggcaaaggcgaagatgtgcgttcctgctgacccaggagcctcctgttgacttccccttgagaaacgtgtgtgcgcgcagccagaga

SEQ ID NO: 34727 - DNA, 492 bp, Homo sapiens
  misc_feature (1)...(492): n = a,t,c or g
gtgnntttnnanccntttgannacccttttgacatgattacgaatttaatacnnnnnnnnnnnnnnnnnnnnnnnnnnnnnnnnnnnnnnnnnggcacgagctggaagaattccttgggaaagtctttcctaaccaatggagccagtccaaggaccgcacccagcaggcctgaatgtgtaagccgagcccctgcaggaaggatgcagagtttttcaggattcgctggcatctctgtgatgttacaggggaaggaggcagagaaaaggggcaagccaaggcaggctgtctcacccccaacccctgagctagccacataaaatgtgggtgagaccacaggctacagctccagtacctctgcaagggggtgactggacacgacagctctgaatcagggagccaacccgaggtaaaagggactgataggtcccttttgttatggagggcaagtgggtatttgggggattcatttcctgacaaagaatattgaacta

SEQ ID NO: 34728 - DNA, 484 bp, Homo sapiens
  misc_feature (1)...(484): n = a,t,c or g
gngnattgaacccntnnnnnnnnnnnnnnnnnnnnnnnnnnnnnnnnnnnnnnnnnnnnnnnnnnnnnnnnnnnnnnnggcacgagggccttagcagtagttagtgtgggaggctgggaagactgggagcagtctcttaaacaaaagcaaaagaataagcttcgggcgctgtagtacctgccagctttcgccacaggaggctgccacctgtaggtcacttgggctccagctatgtggctgcctcttctgctgggtgccttactctgggcagtgctgtggttgctcagggaccggcagagcctgcccgccagcaatgcctttgtcttcatcaccggctgtgactcaggctttgggcgccttctggcactgcagctggaccagagaggcttccgagtcctggccagctgcctgaccccctccggggccgaggacctgcagcgggtggcctcctcccgcctccacaccaccctgttggatatcactg

SEQ ID NO: 34729 - DNA, 488 bp, Homo sapiens
  misc_feature (1)...(488): n = a,t,c or g
gngnnttgannnccattggaaaaccnnnnnnnnnnnnnnnnnnnnnnnnnnnnnnnnnnnnnnnnnnnnnnnnnnnnnnnnnnnnnnnnnnggcacgagggtaaagtcaaagcaaagttgaaatgtcagtttaagacaaatagtttctccattttcccatatgtgtgcacagggttcagtgaggctgaggggttctgtggaggtgcgggagaggtgctctatggtatttctatgttgcactgtgtgggtttgaaatcagatacatgtaataggtgataaggtaagtgcctgctcttttctatcctcagcattggcatttaatctttccatgtgaacttaaagctcattttatccagtcctttaagaaaaaagccacaccattagggattccagttagaaatggactaaataacatactcatttggggaaaataaaaatgatttgatttatgtaggacctgttttctagtttggccctacttgtttgga

SEQ ID NO: 34730 - DNA, 476 bp, Homo sapiens
  misc_feature (1)...(476): n = a,t,c or g
ggngnnntttganntttgaanancnnnnnnnnnnnnnnnnnnnnnnnnnnnnnnnnnnnnnnnnnnnnnnnnnnnnnnnnnnnnnnnnnnnnggcacgagtctgaactaatttattatcaggttggtgcaaaagaaattgtggtttttgcaattatttgtagttcttataattttccacatataagatcatgtaatctgcaaaagaatgtggtcctatttctcccttttaaatctgtctgggttcctttttttttttttnnnnnnnnnnnnggnntntcccntnntttngnntnntttngcccccnnggtngnannncaggggccntttttgggttannngaannnnccccctnggagggtnnncccntttttcnggcntaaccnccccgagnacttggaaaaangggcccccgccncnnngccgggtaanttttttttggnggganttttnaanaaanccggtttcccnttttta

SEQ ID NO: 34731 - DNA, 427 bp, Homo sapiens
  misc_feature (1)...(427): n = a,t,c or g
gtgacccccttgcnaccgcttgacnnnnnnnnnnnnnnnnnnnnnnnnnnnnnnnnnnnnnnnnnnnnnnnnnnnnnnnnnnggcacgaggaccttgagggtaaatagggccttgtagagctgggctggcagtgtggaataccctgatcctagtttgagctccatgagggaagtactttgttctatttgctgttgcagtcacagtaccaggcccacaagtagataatagagctacaagaagaaccaaggtatgaaccttgcctttaaggtctactggagtgagacagacatgtaaacagtcaatttaaatgcagtgtaatgaagcctacgactggggaaagaaagggaaagacacctgacccgtgcttgggactcaggaaaggcattntagagtaaatgacacctcaactgggactttaaatgatta

SEQ ID NO: 34732 - DNA, 177 bp, Homo sapiens
  misc_feature (1)...(177): n = a,t,c or g
gcccgcntcggccccctttgtgacccccactacncactcnnnnnnnnnnnnnnnnnnnnnnnnnnnnnnnnnnnnnnnnnnnnnnnnnnnnnnnnnnnnnnnnnnnggcacgagaataacttattcttgaatgagtacagagtttcagggttttttgtttttgtttttttttttttt

SEQ ID NO: 34733 - DNA, 454 bp, Homo sapiens
  misc_feature (1)...(454): n = a,t,c or g
nnnnnngnnnnnnnnnntnnnnnncctntgnnanccgctatnacatgannnnnnnnnnnnnnnnnnnnnnnnnnnnnnnnnnnnnnnnnnnnnnnnnnnnnnggcacgagtttaatttagtgtgggctgcctgaatcgtcatagggtaatgttaataagcttttgtttttgcatttctctggaagaatattctagaagctaagagggtcttttctttaagttctcatataaaacttgagccaaggtatggctcagcattcattaagaaaccagnnnnnnnnnnnnnnnnnnnnnnnnnnnnnnnnnnnnnnnnnnnnnnnnnnnnnnnnnnnnnnnnnnnnnnnnnnnnnnnnnnnnnnnnnnnnnnnnnnnnnnnnnnnnnnnnnnnnnnnnnnnnnnnnnnnnnnnnnnnnnnnnnnnnnnnnnnnnnnnnnnnnnnnnnnnnnnnnnnnnn

SEQ ID NO: 34734 - DNA, 432 bp, Homo sapiens
  misc_feature (1)...(432): n = a,t,c or g
ttntntncccctntcccaccgctnnnnnnnnnnnnnnnnnnnnnnnnnnnnnnnnnnnnnnnnnnnnnnnnnnnnnnnnnnnnnnnggcacgagaaggaaagaaagagagagagaaaacactataacagagatgatgaaggcatttgatgggaccatcagtagactggacatagatgaggaaaaaatcagcctgaaggtatgttaatagaaccttcccaaactggaatgcaaagaaaaaaatggggaaaaaaacagattatacaagaactgtgggatattttcaaaaggtatatgcacaattgaaacaccacaaggagaagaaagggagaacagagcagaaaaatcgtgaaagttataatggctcccaattttccaaaagtaaaggcagaccccaagccacggatccagtagcttagagaacncaaatgggg

SEQ ID NO: 34735 - DNA, 488 bp, Homo sapiens
  misc_feature (1)...(488): n = a,t,c or g
gnngcccnctttgatncccttcccccctttgaaaacccnnnnnnnnnnnnnnnnnnnnnnnnnnnnnnnnnnnnnnnnnnnnnnnnnnnnnnnnnnnnnnnnnnggcacgagggcttcactattaagacaacaattaggtctgcttttcttaggtatacacaaaaatagaaacagtccttatgatggattatttacagatatatagtattttggtgggtagaggcatggggaactatttagctcagctggcaaaaagtccaagcaaaacaatccaaatgcctagagtggtgacagttgtgcaatgggtacttcaaagctgtacaacattcaaatacttaaacattgaaggcagtaggtagaataaacatcaagagtttctgcctttatgctgaatagcattagctttctcatctgggaaatgggagatggtagtacctgctctatttatctcataaggattaagtgaatcaaggtgctctgcaccctg

SEQ ID NO: 34736 - DNA, 488 bp, Homo sapiens
  misc_feature (1)...(488): n = a,t,c or g
gngngnttnnntntgccaatnnnnnnnnnnnnnnnnnnnnnnnnnnnnnnnnnnnnnnnnnnnnnnnnnnnnnnnnnnnnnnnnnnnnnnnnnggcacgaggggaggctgaggcaggnnnnnnnnnnnnnnnnnnnnnnnnnnnnnnnnnnnnnnnnnnnnnnnnnnnnnnnnnnnnnnnnnnnnnnnnnnnnnnnnnnnnnnnnatagtttgttttttctaacgttgagagacatttgagttatctcacatttttcctgttacatcaatactagcatgagcattgttacatgtgtctgttggtagacctgtgcatttctgttaggtatgtatctagcagtggtagagggaatcaggtcgatgcatcttcacttttgctatgtaaaacaaaactttgccggagagattttatccccttgttcatagaaatggattagaatttcagcactctgcatcttctaatacttggtatcagacttttaaatttc

SEQ ID NO: 34737 - DNA, 494 bp, Homo sapiens
  misc_feature (1)...(494): n = a,t,c or g
gcgccngtcccgtcncctctttgantcccctntgananccctnnnnnnnnnnnnnnnnnnnnnnnnnnnnnnnnnnnnnnnnnnnnnnnnnnnnnnnnnnnnnnnnnggcacgagcttagcagaccagagattttatttttttaaagagaaatcagtttacctgtttttaaaaaaattaaatctagttcaccttgctcaccctgcggtgacagggacagctcaggctcttggtgactgtggcagcgggagttcccggccctccacacccggggccagaccctcggggccatgccttggtggggcctgtgtcgggcgtggggcctgcaggtgggcgccccgaccacgacttggcttccttgtgccttaaaaaacctgccttcctgcagccacacacccacccggggtgtcctggggacccaaggggtgagggggtcacaccagagagaggcagggggcctggccggctcctgcaggatcatgcagctggggcgcg

SEQ ID NO: 34738 - DNA, 490 bp, Homo sapiens
  misc_feature (1)...(490): n = a,t,c or g
ggcccgtnccgncccctctttgaccccctttganacctnnnnnnnnnnnnnnnnnnnnnnnnnnnnnnnnnnnnnnnnnnnnnnnnnnnnnnnnnnnnnnnnnggcacgagggataaaattcaggagcaagtttccaaagagactcataagaacccagagagaggaaaatctttttcagaaaattcataaaagttaatgagtcgccattctgatgtaacggagagaacttcagtaatatgaccagtgatggagttggtgtgaaatgcatagactccactatgacctgaccgggtatttcctcagcaaatatttgggtatatttaattgaaatgcatttgtggcaaaagtcaactcctacaaaaaaattgttaaaatattcttcctggaagttgtctcccaaagtgactcacatcaagtagtctgaataaatatggtgagacttggcaccctctgaggcatcatttgctaggaagaaaatgcttttgaata

SEQ ID NO: 34739 - DNA, 493 bp, Homo sapiens
  misc_feature (1)...(493): n = a,t,c or g
gnnnnngnnnngnnnnntctttgnntcccctttgaaanccnnnnnnnnnnnnnnnnnnnnnnnnnnnnnnnnnnnnnnnnnnnnnnnnnnnnnnnnnnnnnnnnnnnggcacgagtatgtgtgagagtagaatgcagggtgaactcagcgggggctaccagagggaatgattgggagaatgatgttctattctggaagtgagagccatggtagcagcagaatggaatgaagtattaagtgacactgtaatcaaagggtggacaggtttggtaacagatgatatgttaaagataaaggagaccatnnnnnnnnnnnnnnnnnnnnnnnnnnnnnnnnnnnnnnnnnnnnnnnnnnnnnnnnnnnnnnnnnnnnnnnnnnnnnnnnnnnnnnnnnnnnnnnnnnnnnnnnnnnnnnnnnnnnnnnnnnnnnnnnnnnnnnnnnnnnnnnnnnnnnnnnnnnnnnnnnnnnnnnnnnnnnnnnnnnnnnnnnnnnn

SEQ ID NO: 34740 - DNA, 461 bp, Homo sapiens
  misc_feature (1)...(461): n = a,t,c or g
anaccctnnnnnnnnnnnnnnnnnnnnnnnnnnnnnnnnnnnnnnnnnnnnnnnnnnnnnnnnnnnnnnnggcacgagttagaatctcagcatagaataaatccattctgaactatggtatgtagggccaccatacacactcgtgtcttaggaattttaagcgtttgtaatatgttctttctctggatcctcagtgtgttatcagatgttgagtgttttaaccctttatttccccaagcattttttttttaatgacctgtttgcttcatagcgaacagtctagtttctgttttatttacnnnnnnnggaattgatttttaagcagttanccccttagtttttcagttcagcttcttggnncttttaccttttagctgtcaaagataaaatngagatcacctatcttanatttaaaaagataccanaggccaggcnctgtggctcatccctgtaatcccaac

SEQ ID NO: 34741 - DNA, 459 bp, Homo sapiens
  misc_feature (1)...(459): n = a,t,c or g
ccntnnnnnnnnnnnnnnnnnnnnnnnnnnnnnnnnnnnnnnnnnnnnnnnnnnnnnnnnnnnnnnnnggcacgaggaatggggcaactgtggagcctgacttacttcttttaattgggtttttattcagaagggaggggcaggagggaatgacaagtgactcaccttgaattcttcctctaagaaactcacacctgagctttgagctataaagaaatctgatgctgtttctggtgctgtcttagaatcacttcaggagtattgacaagaggggtaggaacccttagaaataatattagtgataaataagaaggcaggaagaaacttttggaggtgatggataggtttatggtatagattgtggtgatgatttaatgagtgtatgcctatccccagactcatcaaagtgtatacatggaatatgtaaagcttttatatgtcagtcacacctcagtaaag

SEQ ID NO: 34742 - DNA, 428 bp, Homo sapiens
  misc_feature (1)...(428): n = a,t,c or g
ttgnnnnncntttnnnagccnnnnnnnnnnnnnnnnnnnnnnnnnnnnnnnnnnnnnnnnnnnnnnnnnnnnnnnnnnnnnnnnnnnggcacgagggtttttgagatgtaagcttaggtgattgacctgagagcttttcaaagataagcacttgaaattataaatttccccttgagtactaatttggttacatcctacagattgtatgttttattttttttttcaatcagttcaaaatatttctaaatttccctttataatacctctatgnnnnnnnnnnnnnnnnnnnnnnnnnnnnnnnnnnnnnnnnnnnnnnnnnnnnnnnnnnnnnnnnnnnnnnnnnnnnnnnnnnnnnnnnnnnnnnnnnnnnnnnnnnnnnnnnnnnnnnnnnnnnnnnnnnnnnnnnnnnnnnnnnnnnnnnntttaat

SEQ ID NO: 34743 - DNA, 420 bp, Homo sapiens
  misc_feature (1)...(420): n = a,t,c or g
nancngnnnnnnnnnnnnnnnnnnnnnnnnnnnnnnnnnnnnnnnnnnnnnnnnnnnnnnnnnnnnnnnnnnggcacgagtggaggaccccctgccccctgtgttctcaggcacaccaaagggcagtggggctggctacggtgttggctttgacctggaggaattcttaaaccagtctttcgacatgggcgtggctgatgggccacaggatggccaggcagattcagcctctctctcagcctccctgcttgctgactggctcgaaggccatggcatgaaccctgccgatattgagtccctgcagcgtgagatccagatggactccccaatgctgctggctgacctgcctgacctccaggacccctgaggcccccagcctgtgccttgctgccacagtagacctagttccaggatccatgg

SEQ ID NO: 34744 - DNA, 430 bp, Homo sapiens
  misc_feature (1)...(430): n = a,t,c or g
ttgnnnnncctttannnagccnnnnnnnnnnnnnnnnnnnnnnnnnnnnnnnnnnnnnnnnnnnnnnnnnnnnnnnnnnnnnnnnnnnggcacgagctaaattatctcagtagaaggagttaactaaaacaatattgatgggtttcagttttattctaccttagtagaatactggagaccatttttttgatggctatctccactggtttcccataccttggaatgatttattttggaataaacatatacaacctactctattgtttgatttcttttccccagaaacactagtctctaaaaatagctgaatccaaaaaattatttcagatgcctgggatccctctcttcattaacaaatacttgagtgccccccatgtgtcaggcactgttctgcaagttaaaatacagtgtgattttaaaaaattacagg

SEQ ID NO: 34745 - DNA, 429 bp, Homo sapiens
  misc_feature (1)...(429): n = a,t,c or g
ttgnnnnccnttannnaccnnnnnnnnnnnnnnnnnnnnnnnnnnnnnnnnnnnnnnnnnnnnnnnnnnnnnnnnnnnnnnnnnnnggcacgagattgctgtaggggcatctggcaccatgagcttgttacagagcccttctccccgaagcaggaatgatgtgatttaattggaatcgtgctaaacctataaaactatcaccgaggaatggtgtagtcatggaaacaagtaattcagtgaaagctgctcctagggagcaccccgagaagtgggaaagataacatgtgtttctcaggttttccagaaagatgccttcctccatttagctagagtgactgtgtctgtccacgttcatgactgtctttcctgcgtgcctcaggaggaatcttctagggttgaaaatagggactgtgtgaattggatgcatct

SEQ ID NO: 34746 - DNA, 394 bp, Homo sapiens
  misc_feature (1)...(394): n = a,t,c or g
nnnnnnnnnnnnnnnnnnnnnnnnnnnnnnnnnnnnnnnnnnnnnnnnnnnggcacgagaaagaattctacgccatgaccaagtagggattattccagggatgaaggttggttccgtatttgagaatcagtcgatgagatccacacgttaccagctaccgaagataactcacacgatcacatctgtcagtgttgggaaggcccgtgacaagtttaacatctattcatgatttaaacttggaaaaacagagaaggagaggaacttcctccactggataaagagcatctgtacaagccctgcagccagcattctcctcgagggcaaggaatcacccttcaccattcagatccggaacaagaaaggacgtctgctctaaccatcggatccggcatgg

SEQ ID NO: 34747 - DNA, 499 bp, Homo sapiens
  misc_feature (1)...(499): n = a,t,c or g
gnnngnntngggnnngngnnnnnnnnnannnannnnnnngnngnnnnngnngannnnnnngggnagngnngngngnncncttannacctnagaaccatacgaattaannnnnnnnnnnnnnnnnnnnnnnnnnnnnnnnnnnnnnnnnnggcacgagaactggaagacatggagttctccaagggtactttggtctagcccatagacagagaggagttatgaagcagattggtcctcattccaacagggaccctacaaatgctcccacaaccagctcaaggcaacagcacagtcacttttttaaagtacagagaataaacagcgagactcgagataaaaactactagtgcaccttctcttgaacccctagcagtaagatgactgcagacagaaaacaagtatttttaatctttattggttaaaaacaattactaaaacaaactttttaaattttttttgaactacttaattcaaatcttatttacatttcaccagatca

SEQ ID NO: 34748 - DNA, 482 bp, Homo sapiens
  misc_feature (1)...(482): n = a,t,c or g
ttgnnnnctttgannnnnnnnnnnnnnnnnnnnnnnnnnnnnnnnnnnnnnnnnnnnnnnnnnnnnnnnnnnnnnnnnnnnnnnnggcacgagattttgtgtgttagagaatcttgtactctcaaagtcatgtactctaatatctcctcccacataaccctcccctaaaaatgacaccagaaattccatatgagacaattcttgacatttaattattaacctataaatttccttagtaactgggatctttttttttactacttgatacactttggtgttgatttacttatgtgttaacatttgctagattatgctgcactaagaaacaagccaaaatatgagtagcttacaataagaagggtttatttgtttttcacgttataggcttcctaggaatcagctatggttctgctctgtgattctttctcatttgaggatccgggctggaggagcagtccctatttgtgacatattgnctcttg

SEQ ID NO: 34749 - DNA, 476 bp, Homo sapiens
  misc_feature (1)...(476): n = a,t,c or g
anaacctnnnnnnnnnnnnnnnnnnnnnnnnnnnnnnnnnnnnnnnnnnnnnnnnnnnnnnnnnnnnnnnnnggcacgaggacaaggtattctatgtctggtttgatgccactattggctatctgtccatcacagccaactacacagaccagtgggagagatggtggaagaacccagagcaagtggacctgtatcagttcatggccaaagacaatgttcctttccatagcttagtctttccttgctcagccctaggagctgaggataactataccttggtcagccacctcattgctacagagtacctgaactatgaggatgggaaattctctaagagccgcggtgtgggagtgtttggggacatggcccaggacacggggatccctgctgacatctggcgcttctatctgctgtacattcggcctgagggccaggacagtgctttctcctggacggacctgctgctgaagaataat

SEQ ID NO: 34750 - DNA, 471 bp, Homo sapiens
  misc_feature (1)...(471): n = a,t,c or g
cntttnnnnnnnnnnnnnnnnnnnnnnnnnnnnnnnnnnnnnnnnnnnnnnnnnnnnnnnnnnnnnnnnnggcacgagtatctactggccagttgagcatacaggtacagtatgccaacatcataaagtattaacaaaaacataagtttatatataatcccatccccccaaccccacaaaaccaaaaggaaatgaaaaccctgcaattcattatgtctgagtaatatgcattttgatgagtaagtagatggacagtttaggtcagaatcgctccctgtgaaatcgttgctctttccccttcccatgctgtggaaccttttcttagggacccaagctcggttctgtttgaggcctacctagctcagtctgttcatttcaacctgtcagtgtcatatctcatcccctatgggagaacacccatgtcagactgcagaagtagctgactgctctgctgatattttgatctcctct

SEQ ID NO: 34751 - DNA, 474 bp, Homo sapiens
  misc_feature (1)...(474): n = a,t,c or g
anctttgaanancnnnnnnnnnnnnnnnnnnnnnnnnnnnnnnnnnnnnnnnnnnnnnnnnnnnnnnnnnnnnnnnnnnnggcacgagcgtgggggggacagtcctgttggtggccctggggtgtctgcagcaggaaacgggtctctctctgagtcagggtccccgtagtaccttggtgtaaagcctggtctgtggcagaggtgccccagaaatgtacatttgtaccttaaagagccacagtgctcactttaaacccaggggacaagtctctgcagtgacttctaatatcacagccaggcctggtgtcttgggaacgtaacacagggaacgccttgggatatgaggggcccctcccaccaccatggctgcccaagggctggctttctggttctgcgattacccgattaccccgtgcaccaattatccatgcatagaggctgctcccaggcccggtgacctcacgcgtctggtat

SEQ ID NO: 34752 - DNA, 473 bp, Homo sapiens
  misc_feature (1)...(473): n = a,t,c or g
acnttgnnnancnnnnnnnnnnnnnnnnnnnnnnnnnnnnnnnnnnnnnnnnnnnnnnnnnnnnnnnnnnnnnnnnnnnggcacgagaagaaatggcttctatcttcaaaattgccaacttaagaaaccacgcccggcctcaaaaagagacattttcagctttcattatcattttataaatatgtctagcattgaagtgnnnnnnnnnnnnnnnnnnnnnnnnnnnnnnnnnnnnnnnnnnnnnnnnnnnnnnnnnnnnnnnnnnnnnnnnnnnnnnnnnnnnnnnnnnnnnnnnnnnnnnnnnnnnnnnnnnnnnnnnnnnnnnnnnnnnnnnnnnnnnnnnnnnngttaagcagttcacctgccttggcctcccaggtgtgagccacctcacctggcccaaaaactcttcattatttgagcttatgtgtactataggttattaagtcttcaggttctagaaacagtgggtc

SEQ ID NO: 34753 - DNA, 474 bp, Homo sapiens
  misc_feature (1)...(474): n = a,t,c or g
ttganacnttgaanaccnctnnnnnnnnnnnnnnnnnnnnnnnnnnnnnnnnnnnnnnnnnnnnnnnnnnnnnnnnnnnnnnnggcacgagctgaatttcaaaagggttctgataaatcaaaaccagtgtggtactaattacattnnnnnnnnnnnnnnnnnnnnnnnnnnnnnnnnnnnnnnnnnnnnnnnnnnnnnnnnnnnnnnnnnnnnnnccannnnnnnnnnnnnnnnnnnnnnnnnnnnnnnnnnnnnnnnnnnnnnnnnnnnnnnnnnnnnnnnnnnnnnnnnnnnnnnnnnnnnnnnnnnnnnnnnnnnnnnnnnnnnnnnnnnnnnnnnnnnnnnnnnnnnnnnnnnnnnnnnnnnnnnnnnnnnnnnnnnnnnnnnnnnnnnnnnnnnnnnnnnnnnnnnnnnnnnnnattacattcttttaaaaattggctttcatganaaacaccnatggatgatttatga

SEQ ID NO: 34754 - DNA, 439 bp, Homo sapiens
  misc_feature (1)...(439): n = a,t,c or g
cnnnnnnnnnnnnnnnnnnnnnnnnnnnnnnnnnnnnnnnnnnnnnnnnnnnnnnnnnnnnnnnnnnnggcacgaggctgcttgttaacgagaaagccagactctgtaaaatgtttgaagagatttatccggagtcaaatgtgaggaccaaggcctggaggccctgaggacatgtgccccagggggtgggccacagctggagttcatacctcctacaaggacagaagttacaggcagacatcagtcagtacatgaaagtgctgctcacggccgtgaactgctacagcgtgaaggccgccacccgggtccaggatgcctttgccgccgccaagctcctggccctggccctgatcatcctgctgggcttcgtccagatcgggaagggtgatgtgtccaatctagatcccaacttctcatttgaaggcaccaaactggatgt

SEQ ID NO: 34755 - DNA, 419 bp, Homo sapiens
  misc_feature (1)...(419): n = a,t,c or g
ccnnnnnnnnnnnnnnnnnnnnnnnnnnnnnnnnnnnnnnnnnnnnnnnnnnnnnnnnnnnnnnnnnnnggacgagagggggttggggtgtggtgggggggtacccttatttcctcgacacgcaactggctcaaagacaatgttattttccttccctttcttgaagaacnnnnnnnnnnnnnnnnnnnnnnnnnnnnnnnnnnnnnnnnnnnnnnnnnnnnnnnnnnnnnnnnnnnnnnnnnnnnnnnnnnnnnnnnnnnnnnnnnnnnnnnnnnnnnnnnnnnnnnnnnnnnnnnnnnnnnnnnnnnnnnnnnnnnnnnnnnnnnnnnnnnnnnnnnnnnnnnnnnnnnnnnnnnnnnnnnnnnnnnnnnnnnnnnnnnnnnnnnnnnnnnnnnnnnnnnnnnnnnnnnnnnnnnnnn

SEQ ID NO: 34756 - DNA, 440 bp, Homo sapiens
  misc_feature (1)...(440): n = a,t,c or g
ccgctnnnnnnnnnnnnnnnnnnnnnnnnnnnnnnnnnnnnnnnnnnnnnnnnnnnnnnnnnnnnnnnggcacgagtgaaaaccgctctgttacacagaatcctcaaactatctccaccagtcccattagtcataatctgagtgtttctgccccatgtaaaaagtgaatttaatgtgcaaaagaaaagaatgttgtcaattctatttttaaaaaagtaacatttatttacattactatttcattatgtcagtagattcagcttctcagtggtagtattgagtattagggataaattggcacacaaccaaaaaaaatttaaaaaattataatgaaacacaatatttctgtgtgatgttttaaaataattttccagtctggaaacagccaagcatagcttctgttttgtgccttagttccttgcattcttgctgtgcaggaa

SEQ ID NO: 34757 - DNA, 428 bp, Homo sapiens
  misc_feature (1)...(428): n = a,t,c or g
tntgnnnnnnnnnnnnnnnnnnnnnnnnnnnnnnnnnnnnnnnnnnnnnnnnnnnnnnnnnnnnnnnnnnnnnnnnnggcacgagattttgggcgccgaccagacgcggcattttcggaaaatagcgccctgtgcagctgaagcgctttgtgtgtagcggggccgcgtcagcccggccgggtacgaggcgcctcgggtccccgcaccacctcctgctgccttcccgtcgccgctcccgaagcttttccagatgtccctggtagatttgggaaagaagcttttagaagcggcacgagcaggtcaagatgatgaagttcgtattttgatggcaaatggagctccctttactacagactggctgggaacttctccacttcatctagcagcacagtatggtcattattccaccacagaggtactgctgcgag

SEQ ID NO: 34758 - DNA, 326 bp, Homo sapiens
tcctagtccagacgccatgggtcatttcacagaggaggacaaggctactatcacaagcctgtggggcaaggtgaatgtggaagatgctggaggagaaaccctgggaaggctcctggttgtctacccatggacccagaggttctttgacagctttggcaacctgtcctctgcctctgccatcatgggcaaccccaaagtcaaggcacatggcaagaaggtgctgacttccttgggagatgccataaagcacctggatgatctcaagggcacctttgcccagctgagtgaactgcactgtgacaagctgcatgtggatcctgagaact

SEQ ID NO: 34759 - DNA, 384 bp, Homo sapiens
ctcgaggccaagaattcggcacgagattgaggttatgagtcatttttaactcttatttttccaactttttatagcataattattaaaataaaattataagtcgaggaaaaatgcatacatagaccgtaaagtcttacagtgacacccttgcttccccattgcctgcagagtaaaaacttcagctacttccagcttataacctgtgctccgtctatatgagaaatttgcatacttagattaccatgcagtttcctgtttttgtgctcttgctctggctgttccctctgcctgtaagctccctttccatctctgcctatgagcaagtcaacttttgtccttaaaaacggtctcacctttctcacactcccaaggctaagattcgtt

SEQ ID NO: 34760 - DNA, 445 bp, Homo sapiens
  misc_feature (1)...(445): n = a,t,c or g
tttnnnaaccnctatgacatgattacgantttaatacnnnnnnnnnnnnnnnnnnnnnnnnnnnnnnnnnnnnnnnnnggcacgagggcattttgaataccangtttttgaatatctgagcacattttttgacctctgagaatcaactttagtaagtgaaggaaaccatcaaattttgccagatggaagtaatggtatggaaatagactttagggctgtctatctccatgtctaaactgtttcagagaccataataatgaccattagtctaagtttggggtagattaagattatctagtaggcgatgagtcacagcatctcataaacaaaacattacgtctttatttattagaccattgcctagaaagttctctctggaacctgagtgctgatgacagaatattctgccatcagtcagtcagagggtacccaactgtggatatca

SEQ ID NO: 34761 - DNA, 440 bp, Homo sapiens
  misc_feature (1)...(440): n = a,t,c or g
tttnnnancnnnnnnnnnnnnnnnnnnnnnnnnnnnnnnnnnnnnnnnnnnnnnnnnnnnnnnnnnnnnnnnnnnnggcacgagtcaggaaagaggtgttttactttttaaatcacaaagtaaacaaatacagagaatacatattttgaagtgtaggattttgtgattgcctctgtttgtaacctgatgcaattgtaaataagaatgcaggctaggccaggnnnnnnnnnnnnnnnnnnnnnnnnnnnnnnnnnnnnnnnnnnnnnnnnnnnnnnnnnnnnnnnnnnnnnnnnnnnnnnnnnnnnnnnnnnnnnnnnnnnnnnnnnnnnnnnnnnnnnnnnnnnnnnnnnnnnnnnnnnnnnnnnnnnnnnnnnnnnnnnnnnnnnnnnnnnnnnnnnnnnnnnnnnnnnnnnnnnnnnnnnnnnnnnnnnnnnnnnnnn

SEQ ID NO: 34762 - DNA, 438 bp, Homo sapiens
  misc_feature (1)...(438): n = a,t,c or g
nnnnnnnnnnnnnnnnnnnnnnnnnnnnnnnnnnnnnnnnnnnnnnnnnggcacgaggcttgaaaaatgaagacattagcaggacttgttctgggacttatcatctttgatgctgctgtgactgccccaactctagagtccatcaactatgactcagaaacctatgatgccaccttagaagacctggataatttgtacaactatgaaaacatacctgttgataaagttgagattgaaatagccacagtgatgccttcagggaacagagagctcctcactccacccccacagcctgagaaggcccaggaagaggaagaggaggaggaatctactcccaggctgattgatggctcttctccccaggagcctgaattcacaggggttctgggccacacacaaatgaagactttccaacctgcttttgggacttgnataaag

SEQ ID NO: 34763 - DNA, 464 bp, Homo sapiens
  misc_feature (1)...(464): n = a,t,c or g
aaaccctttngaaaccgntatgacnnnnnnnnnnnnnnnnnnnnnnnnnnnnnnnnnnnnnnnnnnnnnnnnnnnnnnnnnnggcacgagaaagctttctagtttatgtgaagtttagttagttatgtataacttagtccttcaaatttaggtttttgcgtcatctagacttcagttttttaagtgtgaaaagtccttcagtttttcttgattgtacaatgaccccattagcatatatcaagtaaccctttacaggagagtctttttctgggttctctattctgctaattggtctcttagatggaaagctaactttctnnnnnnnnnnnnnnnnnnnnnnnnnnnnnnnnnnnnnnnnnnnnnnnnnnnnnntatggtgcagatcttgannnnnnnnnnnnnnnnnnnnnnnnnnnnnnnnnnnnnnnnnnnnnnnnnnnnnnnnnnnnnnnnnnnnnnnnnnc

SEQ ID NO: 34764 - DNA, 473 bp, Homo sapiens
  misc_feature (1)...(473): n = a,t,c or g
tnnnnnnnnnattganaccntttgacatcnnnnnnnnnnnnnnnnnnnnnnnnnnnnnnnnnnnnnnnnnnnnnnnnnnnnnnnggcacgagttctcctcaagaagaagagtgagatccagaccttgaaggaggagattgaacaaagcctgaccaagagggatgagttcgagtttctggagaaagcatcaaaactgcgaggaatctcaacaaagccagtctacatccccgaggtggaactgaaccacaagctgataaaaggcatccaccagagcaccatagacctcaaaaacgagctgaagcagtgcatcgggcggctccaggagctcacccccagttcaggtgaccctggagagcatgacccagcgtccacacacaaatccacacgccctgtgaagaaggtctccaaagaggaaaagaaatccaagaaaccttcccctgtccctgcttacccagcaagcttccacgtttgga

SEQ ID NO: 34765 - DNA, 472 bp, Homo sapiens
  misc_feature (1)...(472): n = a,t,c or g
gagnnnngtgnttgatanctttganaccnttgacatgannnnnnnnnnnnnnnnnnnnnnnnnnnnnnnnnnnnnnnnnnnnnnnnnnnnnnggcacgagctggaagggtatacttatctttattgaataagtataaatggtaactgctagcaaatggcaccaaacttaacataaaatagaactacccccacctctctcctcctctccagtgcagaagagaggcagtgaaaagggtggttatggttatgtaggtgtagagggctctaggaggctcttgtgacttgattggtgttcagtctccctgttgagcccatcaacatggcctcaaggaggggagctattgcaaaggttttgcctgctgtttgttaagccacagcttgtagttttggttgcacatgacaaagcaaggtgctctccttttttgaccttgttcagaggcttaatacaattatttggattaagcactagccc

SEQ ID NO: 34766 - DNA, 461 bp, Homo sapiens
  misc_feature (1)...(461): n = a,t,c or g
ttgacnncatttgaaanccctatgacnnnnnnnnnnnnnnnnnnnnnnnnnnnnnnnnnnnnnnnnnnnnnnnnnnnnnnnnnnggcacgaggacaacacaaaatcagaatctggtgtgtgaccaaatttcaaaataaattgctcttctctagcaccttctagaagacaacctgttaaaaagctgaccttgagctaaagagcggagaaactcttcagagtttctggctgggtcatcatcaagcattgtgttttgggcttttcatacatagacgctcagttgagtggtgactctgtgggatctctgggaatgactttagcccagaaggggcactcaagattttctggcttggctttccttatcaggtgaatctctcaagtgtganacaagcctgaagatgnatcttacccatacctcattctggatgngtgngctggccccnntttctacccgttttctccc

SEQ ID NO: 34767 - DNA, 445 bp, Homo sapiens
  misc_feature (1)...(445): n = a,t,c or g
acnctatgacatgattacgaatttaatacnnnnnnnnnnnnnnnnnnnnnnnnnnnnnnnnnnnnnnnnnggcacgaggaacatagagatttataaaacataaaaatgaatccattatagtgaaacaccatcgtttaaggatttcctcctgaaaacttaagacctggcaacaccgggccttctgccttcccatgggacagttgactggggctagcggtggctgagtgtctacctgagaccaggcggcattttgcttaacattaaacccgtctgggtcttgggggcctttgtgcagctcatgacttggcccattacttagagtagttcgtaacacaggtgaagtgttgttagttaccaggcactgttaaagatgctttacatgtagtgacctgngnaatttctcacattaatccttaatgagatggcngggggnanntggaggacc

SEQ ID NO: 34768 - DNA, 420 bp, Homo sapiens
  misc_feature (1)...(420): n = a,t,c or g
tttnnnnnnnnnnnnnnnnnnnnnnnnnnnnnnnnnnnnnnnnnnnnnnnnnnnnnnnnnnnnnnnnnnnnnnnnnnggcacgagggtcattaaatcttgattggttggttgattgatctaaactttaagctnnnnnnnnnnnnnnnnnnnnnnnnnnnnnnnnnnnnntttaaagcttatcagatgattccattatatagccagattgagaaattgctgaactaaactgatttgaactgtaatagtagtgccaaatttaagataccaatgagaaagttaaacctaagatcagtttgacagcaatgaggatccactggccctcatgtctgcctgacctgtgttctagaacctgcgtttcttctttttttcctccttctctcccttccttctttgctttctcttttgaaatctggattgat

SEQ ID NO: 34769 - DNA, 424 bp, Homo sapiens
  misc_feature (1)...(424): n = a,t,c or g
tnnnnnttttnnnancnnnnnnnnnnnnnnnnnnnnnnnnnnnnnnnnnnnnnnnnnnnnnnnnnnnnnnnnnnnnnnnnnnnnggcacgagtgataagaacacttgaaatctattctactgtcttagannnnnnnnnnnnnnnnnnnnnnnnnnnnnnnnnnnnnnnnnnnaaaaatgnnnnnnnnnnnnnnnnnnnnnnnnnnnnnnnnnnnnnnnnnnnnnnnnnnnnnnnnnnnnnnnnnnnnnnnnnnnnnnnnnnnnnnnnnnnnnnnnnnnnnnnnnnnnnnnnnnncaaaatgtaacaagtgttgataaggatatggagaaatagaaatctttgtgtgccttgtacactgttgcaagagcattagtagaactactttggaaaactctttgtaattatctactaaagatgaatatat

SEQ ID NO: 34770 - DNA, 409 bp, Homo sapiens
  misc_feature (1)...(409): n = a,t,c or g
nnnnnnnnnnnnnnnnnnnnnnnnnnnnnnnnnnnnnnnnnnnnnnnnnnnnnnnnnnnnnnnnnnnnnnnggcacgaggactggtagcccgagttgaaacaaaagtttgcagtgactgtatatgaaacatgttgtataatgtattgaagaatttggacattttcctatgggcatttgggagccagtggaagtttttaagtaagttgaggataaggaagagagaaaagttcagaactttagaatgacagttggtagtaccgttagccaataagggaaggcagaaggaagtagatttaagggaggtgagggtaagaaaagtcattttgaagctgaaaaagtataaggaaagaagtacaggagactattttgcaatattaccatcatagacataaatactattctgttaaa

SEQ ID NO: 34771 - DNA, 404 bp, Homo sapiens
  misc_feature (1)...(404): n = a,t,c or g
cnnnnnnnnnnnnnnnnnnnnnnnnnnnnnnnnnnnnnnnnnnnnnnnnnnnnnnnnnnnnnnnnnnnnggcacgagcattttttaatagttgaaaataatccttctacactgcaactttatttgagccttcttcagtttctttgtaacaccacaactttatagtagcttctttagtttccttaatcatcttcctgacgagttcataagtaattctaatatatattcctcataaatgttgaacctcttcaggagtgaaaggtatttatttcttactaatcactttcataaatctccttttagaagataagcattaaatggtttatatgtttatttcttccccctaagtttgcaaagcagagttcagcatgcaagattaggccaggtgtgcctgtaatcccagca

SEQ ID NO: 34772 - DNA, 391 bp, Homo sapiens
  misc_feature (1)...(391): n = a,t,c or g
nnnnnnnnnnnnnnnnnnnnnnnnnnnnnnnnnnnnnnnnnnnnnnnnnnnggcacgaggtggaggaaaggggaagagtgggatgcgtgggaaggaagaggagtcattggaagttgcctttatcagtggagggattccaggggatcataggagctatgcttcttcttttctggccttccctggtcttgattccccagagggataccaggaaggggctggaatgtgggtgcggatgacctctgaactaggcgatcctgtttaatgcaagaaactgtattccctgtccagccattcacgataccgtttcattcgctctatcagagctcagtgaggcgttgaaattccattgttcttctttttaatttaattttttatgcaggaagatgaaaag

SEQ ID NO: 34773 - DNA, 408 bp, Homo sapiens
  misc_feature (1)...(408): n = a,t,c or g
nancnnnnnnnnnnnnnnnnnnnnnnnnnnnnnnnnnnnnnnnnnnnnnnnnnnnnnnnnnnnnnnnnnnnggcacgagaaggatcgaggcatggggcatgtcctttccatctgtccacatccccagagcccagctcttgctctcttgtgacgtgcactgtgaatcctggcaagaaagcttgagtctcaagggtggcaggtcactgtcactgccgacatccctcccccagcagaatggaggcaggggacaagggaggcagtggctagtggggtgaacagctggtgccaaatagccccagactgggcccaggcaggtctgcaagggcccagagtgaaccgtcctttcacacatctgggtgccctgaaagggcccttcccctcccccactcctctaagacaaagtagatt

SEQ ID NO: 34774 - DNA, 408 bp, Homo sapiens
  misc_feature (1)...(408): n = a,t,c or g
nnnnnnnnnnnnnnnnnnnnnnnnnnnnnnnnnnnnnnnnnnnnnnnnnnnnnnnnnnnnnnnnnnnnggcacgagggaacgtctgaggttatcaataagctcctagtccagacgccatgggtcatttcacagaggaggacaaggctactatcacaagcctgtggggcaaggtgaatgtggaagatgctggaggagaaaccctgggaaggctcctggttgtctacccatggacccagaggttctttgacagctttggcaacctgtcctctgcctctgccatcatgggcaaccccaaagtcaaggcacatggcaagaaggtgctgacttccttgggagatgccataaagcacctggatgatctcaagggcacctttgcccagctgagtgaactgcactgtgacaagctg

SEQ ID NO: 34775 - DNA, 408 bp, Homo sapiens
  misc_feature (1)...(408): n = a,t,c or g
nnnnnnnnnnnnnnnnnnnnnnnnnnnnnnnnnnnnnnnnnnnnnnnnnnnnnnnnnnnnnnnnnnnnnnnnggcacgaggagagagctagcaccatgagccaggacaggccaggcagtcccagtggctctgaggacaagggcaacccggcgccggagctgagggcctcctttctgccacgtaccttgtctctgcggaactccatcagcaggatcatgtcggaggcgggcagtgggaccctggaggacgagtggcaggccatctcggagattgcctctacttgcaacaccattctggagtcgctgtcccgagagggacagcccatcccagagagtggagaccctaagggaactccaaaatctgatgctgagccagagcctgggaacctctcagagaaggtctctcact

SEQ ID NO: 34776 - DNA, 455 bp, Homo sapiens
  misc_feature (1)...(455): n = a,t,c or g
nnnnnnnnnnnnnnnnnnnnnnnnnnnnnnnnnnnnnnnnnnnnnnnnnnnnnnnnnnnnnnnnnnnnnnnnggcacgagaaatataaaaaatgctctactaagtagcccaagaaatgggagaaaagaagacaaaaagcaagataatggtagcttttaatccagtcatataagtaatcacattgaatgtggtgagaaagcgtcagttaaaagattgtcnnnnnnnnnnnnnnnnnnnnnnnnnnnnnnnnnnnncttaaaaagcannnnnnnnnnnnnnnnnnnnnnnnnnnnnnnnnnnnnnnnnnnnnnnnnnnnnnnnnnnnnnnnnnnnnnnnnnnnnnnnnnnnnnnnnnnnnnnnnnnnnnnnnnnnnnnnnnnnnnnnnnnnnnnnnnnnnnnnnnnnnnnnnnnnnnnnnnnnnnnnnnnnnnnnnnnnnnnnnnnnnnnnnnnnnn

SEQ ID NO: 34777 - DNA, 461 bp, Homo sapiens
  misc_feature (1)...(461): n = a,t,c or g
ttnnnnannnnnnntttgnnnancnnnnnnnnnnnnnnnnnnnnnnnnnnnnnnnnnnnnnnnnnnnnnnnnnnnnnnnnnnnnnnnnnnnggcacgagannnnnnnnnnnnnnnnnnnnnnnnnnnnnnnnnnnnnnnnnnnnnnnnnnnnnnnnnnnnnnnnnnnnnnnnnnnncnnnnnnnnnnnnnnnnnnnnnnnnnnnnnnnnnnnnnnnnnnnnnnnnnnnnnnnnnnnnnnnnnnnnnnnnnnnnnnnnnnnnnnnnnnnnnnnnnnnnnnnnnnnnnnnnnnnnnnnnnnnnnnnnnnnnnnnnnnnnnnnnnnnnnnnnnnnnnnnnnnnnnnnnnnnnnnnnnnnnnnnnnnnnnnnnnnnnnnnnnnnnnnnnngtccttccattttagagctaaggaggggtacacagggaggcagtagctgtggtgacagctgtgatctgaaccagg

SEQ ID NO: 34778 - DNA, 451 bp, Homo sapiens
  misc_feature (1)...(451): n = a,t,c or g
anacnnctnnnnnnnnnnnnnnnnnnnnnnnnnnnnnnnnnnnnnnnnnnnnnnnnnnnnnnnnnnnnnnnggcacgagcggcacgagcagggcatcagctttctggagacagagagcaccttcatgaccaaccagctggtagacgccctcaccacctggcagaataagaccaaggtgggcctgttgtggtcagcaggctcacatccggttcaagccaacactttcccagcagcaaaagtccccagagcagcatgaaacagtcctggacggcaacctcattatccgctatgatgtggaccgggccatctccgggggctccattcagacccgggaagccctaatcaagatcctggatgacctcagccccagagaccagttcaacctcatcgtcttcagtacagaagcaactcagtggaggccatcactggtgccagcctcagccgagaacgt

SEQ ID NO: 34779 - DNA, 427 bp, Homo sapiens
  misc_feature (1)...(427): n = a,t,c or g
ttntnnnnccnntttnnnnnnnnnnnnnnnnnnnnnnnnnnnnnnnnnnnnnnnnnnnnnnnnnnnnnnnnnnnnnnnnnnnnnnnnnggcacgagagaaagttctctgagatcctgagcaacagagtgctgtgctggctaggatgggaggaaatcttccagaggaaacttggcttctgggtgtcttggagtgatgcgaggaggctggagctgaagattttattttctttcccctcacagtgattggagatacttgagcttttctgaaaaatagagacgtccttgggtttttcttgtcgttttttttgtttgtttgtttttttgttaaatgtgggttgattgagagggggaaatgctgatgggtggatctgaaagcagccttaggaacccgagaaaataaaaacacgtttgaaggactctggaagat

SEQ ID NO: 34780 - DNA, 423 bp, Homo sapiens
  misc_feature (1)...(423): n = a,t,c or g
tttnnnnanccnnntttannnancnnnnnnnnnnnnnnnnnnnnnnnnnnnnnnnnnnnnnnnnnnnnnnnnnnnnnnnnnnnnnnnnnnnnggcacgaggcnnnnnnnnnnnnnnnnnnnnnnnnnnnnnnnnnnnnnnnnnnnnnnnnnnnnnnnnnnnnnnnnnnnnnnnnnnnnnnnnnnnnnnnnnnnnnnnnnnnnnnnnnnnnnnnnnnnggggggtnnnnnnnnnnnnnnnnnnnnnnnnnnnnnnnnnnnnnnnnnnnnnnnnnnnnnnnnnnnnnnnnnnnnnnnnnnnnnnnnnnnnnnnnnnnnnnnnnnnnnnnnnnnnnnnnnnnnnnnnnnccaggcatgagctcaggtggtagtagtgctcactcacctgcagctctcctcctgctgtgtggcccagtncccaacag

SEQ ID NO: 34781 - DNA, 423 bp, Homo sapiens
  misc_feature (1)...(423): n = a,t,c or g
ttgtgaaccnantttgnctaccnnnnnnnnnnnnnnnnnnnnnnnnnnnnnnnnnnnnnnnnnnnnnnnnnnnnnnnnnnnnnnnnnnnggcacgagggctgaaaagccacagccaaattcgctatgaatctcctactttggggattaggctcactcagctacttcatagcccacttggaaattcggccatttttccagttgctctttgttggagggaaactttcttaacaagattctgaggactccataaaaaccgtaaggtgggaggaattgggatctgaaggtccttggcaaacatgtccactgcggctgctggaggcaaagcatcggaagttgaagagactttgcaacagctgcaagagtttcactcccggtgcggagaagggtagcggagctaggctaccccacccgggcggcgtcca

SEQ ID NO: 34782 - DNA, 471 bp, Homo sapiens
  misc_feature (1)...(471): n = a,t,c or g
gnacagctnnnnnnnnnnnnnnnnnnnnnnnnnnnnnnnnnnnnnnnnnnnnnnnnnnnnnnnnnnnnnnnggcacgannnnnnnnnnnnnnnnnnnnnnnnnnnnnnnnnnnnnnnnnnnnnnnnnnnnnnnnnnnnnnnnnnnnnnnnnnnnnnnnnnnnnnnnnnnnnnnnnnnnnnnnnnnnnnnnnnnnnnnnnnnnnnnnnnnnnnnnnnnnnccanaannaaaanaaaaannantttgagtatcanttntccnntttaaannactaantttccntngttntnaccnggccantttactcagncncnttacctgcctgattntgtnacctgtngagncaaaaactantcnntaaaancagngngttaggatnaattgnggacntgggagtncagtnntacaatcctgattntttcncatcngttnctatncaatcccccaagaaaaaggaagattgcattggacc

SEQ ID NO: 34783 - DNA, 477 bp, Homo sapiens
  misc_feature (1)...(477): n = a,t,c or g
ttnnnnnnncnnnttngnnannnnnnnnnnnnnnnnnnnnnnnnnnnnnnnnnnnnnnnnnnnnnnnnnnnnnnnnnnnnnnnnnnnnnggcacgagcttgtatatattgagtgagcctggacttaatatatacaaatgtatgagtatacacttacatgagtatacactaagtaaccaaagtatttgttagtatattatacatttatagttggccctcataagggcccagtaaatttgggggaagggtcaacttcaggttcattgtcaaactctaagtagaatgtaaatcaaaggattaatacatatgttatgggaggagggagcagatttattgtcatgtcttccaaacaaaaaatagacttaaaatttttaggcctcagattactttaaaatcttatagaaggaattaagaactgctacttgaattgccatgcatttaaataaaagttgtgtgtaaagaccaactttgatatata

SEQ ID NO: 34784 - DNA, 465 bp, Homo sapiens
  misc_feature (1)...(465): n = a,t,c or g
aaccccttttgatgacnctnnnnnnnnnnnnnnnnnnnnnnnnnnnnnnnnnnnnnnnnnnnnnnnnnnggcacgaggagagctgcaccatgagcttcaataccctgcatgccagcctaggtaactccgtgtcaaaaaaaaaaaaannttaaaaaatccnaatggggttnngggnaaanccannncnaantanaatnnaaantttgganccnntcnnanttnannacnttgnanaattggaangggnctttaaaatannnaaggggcccaggcccannanntantnccggaatttncagcttttnggaaacntnaggnggnccctncttttgnggtcnggagttcaaaaccnccntggcnaannnggnaaaccccctttttantataaaatnccaaaaatnnccccnggcttnnnggnanncncnttgtaanccnnacttttttggnangcttnagccnagcaaa

SEQ ID NO: 34785 - DNA, 464 bp, Homo sapiens
  misc_feature (1)...(464): n = a,t,c or g
anacncctatnacatgattacgaatttaatacnnnnnnnnnnnnnnnnnnnnnnnnnnnnnnnnnnnnnnnnnggcacgagcaccactccctgctctaaccagggtattccaggagaaacctcatgcagctaaggtctggagccagaatgtaccaccagggcccgaggggacaaagtctgccttcaggtcctgctccagcgccccctcattccccactctcagaggtggatgagctggccctccccattgtgaggactcccaggccatgccctgctcagtctcctgcgtgcatcaagtgggcctgggagacgggatttgtccaaggaattgggtgaccctccgagtgccaggcatctagctgaagcctgccaggctgacagccaaatcntaatacgaacnaagtcactgtgcttntngnncnntcnttttgnactctnnaacttggcaataaaaactgggacaa

SEQ ID NO: 34786 - DNA, 475 bp, Homo sapiens
  misc_feature (1)...(475): n = a,t,c or g
tttgnnanncnnntttggnaannnnnnnnnnnnnnnnnnnnnnnnnnnnnnnnnnnnnnnnnnnnnnnnnnnnnnnnnnnnnnnnnnnnnggcacgagaccttctgttctatgataatctttcatattttctcttgttttctcaaactcttcataactcttaggtcaaatttcatgcactatatagttcccttccttttgtatcacctttatgtagctaagattatagtaagctcttaacaagaatttatagatttatcggtcaaattattaaccgttcaaacaggaagaccaaagccaatgcaatattttaaaaagtatggattaggaaaattacctttggtattatccttaaagagagttttagtcctcattttccaattcatacactcaactatacctcccagtttgtaagaaaaccagctgcatttgggaacatttcttaaattgttgaagtcttaacattgatcatttaa

SEQ ID NO: 34787 - DNA, 464 bp, Homo sapiens
  misc_feature (1)...(464): n = a,t,c or g
nnnnnnnnnnnnnnnnnnnnnnnnnnnnnnnnnnnnnnnnnnnnnnnnnnnnnnnnnnnnnnnnnnnnnggcacgagctgnnnnnnnnnnnnnnnnnnnnnnnnnnnnnnnnnnnnnnnnnnnnnntgtgtgtacnnnnnnnnnnnnnnnnnnnnnnnnnnnnnnnnnnnnnnnnnnnnnnnnnnnnnnnnnnnnnnnnnnnnnnnnnnnnnnnnnnnnnnnnnnnnnnnnnnnnnnnnncaagtggccatgctcagctagaaatttcctgcctgcctgcctgcctgcctgcctgcctccctccctcccttccttcttccctccctccctccctcctcttccccccgccagggtgtgactgtcatccaggttanagtgcagnggcntgattatggntnactgnagccttaaccccccaaaaccaagcgatnttncancttancctcccaaganctaagacccaa

SEQ ID NO: 34788 - DNA, 472 bp, Homo sapiens
  misc_feature (1)...(472): n = a,t,c or g
ttnnnnnnnnnnttnnnnacngctatgacnnnnnnnnnnnnnnnnnnnnnnnnnnnnnnnnnnnnnnnnnnnnnnnnnnnnnnnnnnggcacgagctttcttcatgtaatggatgaagnnnnnnnnnnnnnnnnnnnnnnnnnnnnnnnnnnnnnnnnnnnnnnnnnnnnnnnnnnnnnnnnnnnnnnnnnnnnnnnnnnnnnnnnnnnnnnnnnnnnnnnnnnnnnnnnnnnnnnnnnnnnnnnnnnnnnnnnnnnnnnnnnnnnnnnnnnnnnnnnnnnnnnnnnnnnnnnnnnnnnnnnnnnnnnnnnnnnnnnnnnnnnnnnnnnnnnnnnnnnnnnnnnnnnnnnnnnnnnnnnnnnnnnnnnnnnnnnnnnnnnnnnnnnnnnnnnnnnnnnnnnnnnnnnnnnncctggatgtagtatttaaagaaaaaaccaaaaactctttactgggaaaactttcaacataa

SEQ ID NO: 34789 - DNA, 469 bp, Homo sapiens
  misc_feature (1)...(469): n = a,t,c or g
nnnnnnnnnnnnnnnnnnnnnnnnnnnnnnnnnnnnnnnnnnnnnnnnnnnnnnnnnnnnnnnnnnnnnnnnggcacgagcgccatcccatcatgaggattgcgcttggggggctgctcttccccgcttccaaccttcggttgccgctggttcctgccctggatggctgcctgcgccgggattcctggctggacaaacaggccgagatctcagcatctgcccccactagcctcagaagctgtgatgtagaatcaaatcccgggatatttctccctccagggactcaggcagaattcaatctccgagacattccccagcctcatgcagagccctgggccttctctttggacctgggactcaagcaggcagcaggctcaggccacctccttgtcttgggacaccagagaacccatcttggctcaatctccaccttcaagatcaaaaggnggnggtgcttctgggtcggggc

SEQ ID NO: 34790 - DNA, 468 bp, Homo sapiens
  misc_feature (1)...(468): n = a,t,c or g
ttgaaaancnnnnnnnnnnnnnnnnnnnnnnnnnnnnnnnnnnnnnnnnnnnnnnnnnnnnnnnnnnnnnnnnnnnggcacgagattggttgggctctgggacagggaaatgaggaacaagaggtgagaggcagggtcctctggtcctccctgaggctaagccaccttgatctccctgggcaaggacaggcaggtatagctggcctgggcaagggtgagtgtgtgtgtctgtgagtgcccatatgtgctcatgagccctgaccccagactgggggcttttctgaggggaacaggaaaagcttcaagaggggctaggatgacctactctggttcttccctttctctgcacccagaatcaggactgatctgtaacagatgtcacggcatgtgaattaactgtatgtgtgtgtgcgcgtgccccgtttgtgtatactcacaaaaacatcttctttgccccaccccgagtct

SEQ ID NO: 34791 - DNA, 428 bp, Homo sapiens
  misc_feature (1)...(428): n = a,t,c or g
ttnnnnnnnctttnnnnnnnnnnnnnnnnnnnnnnnnnnnnnnnnnnnnnnnnnnnnnnnnnnnnnnnnnnnnnnnnnnnnnnnnnnnggcacgagccaccatggtgctgtctcctgccgacaagaccaacgtcaaggccgcctggggtaaggtcggcgcgcacgctggcgagtatggtgcggaggccctggagaggatgttcctgtccttccccaccaccaagacctacttcccgcacttcgacctgagccacggctctgcccaggttaagggccacggcaagaaggtggccgacgcgctgaccaacgccgtggcgcacgtggacgacatgcccaacgcgctgtccgccctgagcgacctgcacgcgcacaagcttcgggtggacccggtcaacttcaagctcctaagccactgcctgctggtgacc

SEQ ID NO: 34792 - DNA, 410 bp, Homo sapiens
  misc_feature (1)...(410): n = a,t,c or g
gttnnnnnnnnnnnnnnnnnnnnnnnnnnnnnnnnnnnnnnnnnnnnnnnnnnnnnnnnnnnnnnnggcacgagtagccttgggacctcagtttccgtatatgtgtaatgatgagatgatttctaacatttgttgcattatacaactgaaagcagtgtgggatggaaaaagaatatgagcttcaaagtcagacagactatcagataataggaagcatactactattaaagtctcttactattttttgcttaaagttgaggttatacactttcaataagaactagaaccaaaatcaggtccctccttttctggtcctgtttgatacttactactttattgacaatttgattttttgtttcctaatttgttaatattggcataagatgtaaatagtggccaacaagtgtatt

SEQ ID NO: 34793 - DNA, 410 bp, Homo sapiens
  misc_feature (1)...(410): n = a,t,c or g
nnnnnnnnnnnnnnnnnnnnnnnnnnnnnnnnnnnnnnnnnnnnnnnnnnnnnnnnnnnnnnnnnnnnnnnnggcacgagcagggatggggggaggaggaaaggggaagttcagttttgtttcagttttgtaagatttaaaaagttctaaagctctgttgcaccacagggtggatgtagttactactactgtactgtacacttaaaaatgttaagatggtaaatgttttctaccacaataaaaaaattnnnnnnnnnnnnnnnnnnnnnnnnnnnnnnnnnnnnnnnnnnnnnnnnnnnnnnnnnnnnnnnnnnnnnnnnnnnnnnnnnnnnnnnnnnnnnnnnnnnnnnnnnnnnnnnnnnnnnnnnnnnnnnnnnnnnnnnnnnnnnnnnnnnnnnnggttggtgcat

SEQ ID NO: 34794 - DNA, 420 bp, Homo sapiens
  misc_feature (1)...(420): n = a,t,c or g
tttnnnnnnnnnnnnnnnnnnnnnnnnnnnnnnnnnnnnnnnnnnnnnnnnnnnnnnnnnnnnnnnnnnnnnnnnnnggcacgaggaacacggcaggccctgctatcacaccttgggcttggaggtcattgggagtgagcagatgtgggggtggccagccaggctggccgcactccatcactggcactgcctgccttgggacccgcttcccacctgctgcggtcaccatggtggcgagcacagcaaccccaggtgtccagagcactgccccatgcccaccctgtgtacccaggtccagagggtccgtccaccacagcagccccaggtggagggctggtctccctgggggctccccagtggctctgccctggctgtgggggtggagggaccttgccaggatgaaccccccagtcccaggca

SEQ ID NO: 34795 - DNA, 192 bp, Homo sapiens
  misc_feature (1)...(192): n = a,t,c or g
tttnnnnacctttnntnnnnnnnnnnnnnnnnnnnnnnnnnnnnnnnnnnnnnnnnnnnnnnnnnnnnnnnnnnnnnnnnnnnnnnnnggcacgaggggtttttcttagttgaagaggaaagggttgtgcaaggagagcaggaggctgtttccaaaaaccagtgtagtaggatagggatttttttttttttt

SEQ ID NO: 34796 - DNA, 375 bp, Homo sapiens
  misc_feature (1)...(375): n = a,t,c or g
nnnnnnnnnnnnnnnnnnnnnnnnnnnnnnnnnnnnnnggcacgagagattccttttgagaggcctttttcaggcatagttactctcaacaagaacctcctataaattatattgtcacaagaagtctcttatttttgccataattgccccatcatggcataatgcaggtatttcagctgccaacacaccaggccaaactgccttgttggagtgctgtgtttctagaccctttggtttgtctgcagagatctatctttagtggcctcttccacaatattttgtatgagcactggtctgttttctcatcccccactgtgggatgcagctgcctcctatgcccctccttcccttaggatgcggaagggagagctgttt

SEQ ID NO: 34797 - DNA, 417 bp, Homo sapiens
  misc_feature (1)...(417): n = a,t,c or g
nnnnnnnnnnnnnnnnnnnnnnnnnnnnnnnnnnnnnnnnnnnnnnnnnnnnnnnnnnnnnnnnnnnnnnnnggcacgaggctcaataccctgttaaattcaactcttcacataatcgaagttattaccttaatgtgaatatgggtggagaaaaacagagaatcatgctacccagtctcacattatacacctacccacaaacctcaagcaggtcctgatgcttcctactccattcactctcccgttctgaaagacaactgcaccctttctcctctgctcaagcctccaacactgcttactccaccttcactttcagccaatgcttttgcttcctactgcactaaactggacaaaatcaaaagaaaacttctgcaatttttcccacccacatctgtctgcctccacctttgtgccaca

SEQ ID NO: 34798 - DNA, 431 bp, Homo sapiens
  misc_feature (1)...(431): n = a,t,c or g
tnnnnnntttnnnnnnnnnnnnnnnnnnnnnnnnnnnnnnnnnnnnnnnnnnnnnnnnnnnnnnnnnnnnnnnnnnnnnnnnnggcacgaggtgcctgggagtttgtctggcatcccgggggctttgataggagttgtccgggaccccagggaggtgagggttcagagggtggtgagggcacataggaggggagtggaagcctggctctcaggcctaggcccctatcctgccccagggcaggtccaggccctggaccccgcctagcgtaggctagtgtgtatccctggaaccagaagagagtaggtgggctctggaggcctcaaaggacccccgctagactctgtgatccccacgccccagaacatgcgtgggcgctatgaggcaagccaggacctgctgggcaccctgcggaagcagcttagcgacagcg

SEQ ID NO: 34799 - DNA, 424 bp, Homo sapiens
  misc_feature (1)...(424): n = a,t,c or g
ttnnnnatttctnnnnnnnnnnnnnnnnnnnnnnnnnnnnnnnnnnnnnnnnnnnnnnnnnnnnnnnnnnnnnnnnnnnnnnnggcacgannnnnnnnnnnnnnnnnnnnnnnnnnnnnnnnnnnnnnnnnnnnnnnnnnnnnnnnnnnnnnnnnnnnnnnnnnnnnnnnnnnnnnnnnnnnnnnnnnnnnnnnnnnnnnnnnnnnnnnnnnnnnnnnnnnnnnnnnnntnacaattttcacaatggacacaattnacggcacttgagtacggtnggctgggccacccacccgtcanngnnccagntgcccntctggcctanganccgcctcttnctaactacancatccanaangaccnaccctgcacctngtcctgcnnctgatangtgnnnttcanatcttcnngaaaaccctgnccggca

SEQ ID NO: 34800 - DNA, 389 bp, Homo sapiens
  misc_feature (1)...(389): n = a,t,c or g
annnancnnnnnnnnnnnnnnnnnnnnnnnnnnnnnnnnnnnnnnnnnnnnnnnnnnnnnnnnnnnnnnnnnnnnnnnnnnnnnnnnnnnnnnnnnnnnnnnnnnnnnnnnnnnnnnnnnnnnnnnnnnnnnnnnnnnnnnnnnnnnnnnnnnnnnnnnnnnnnnnnnnnnnnnnnnnnnnnnnnnnnnnnnnnnnnnnnnnnnnnnnnnnnnnnnnnnntgacaattttcacaatggaaacaatttagggcacttgtgtacggttggctgggcaacccacccgccacaggcccagctgccnctctggcctganatacgcnttttaacagcgatnnggntggctggcacannggctcacgcctgnggtcccnacgctntnnnangctga

SEQ ID NO: 34801 - DNA, 431 bp, Homo sapiens
  misc_feature (1)...(431): n = a,t,c or g
tnnnnnntttnnnnnnnnnnnnnnnnnnnnnnnnnnnnnnnnnnnnnnnnnnnnnnnnnnnnnnnnnnnnnnnnnnnnnnnnnggcacgagccgcctggacgaggtgaaggagcaggtggcggaggtgcgcgccaagctggaggagcaggcccagcagatacgcctgcaggccgaggccttccaggcccgcctcaagagctggttcgagcccctggtggaagacatgcagcgccagtgggccgggctggtggagaaggtgcaggctgccgtgggcaccagcgccgcccctgtgcccagcgacaatcactgaacgccgaagcctgcagccatgcgaccctacgccaccccgtgcctcctgcctccgcgcagcctgcagcgggagaccctgtccccgccccagccgtcctcctggggtggaccctagtttaat

SEQ ID NO: 34802 - DNA, 431 bp, Homo sapiens
  misc_feature (1)...(431): n = a,t,c or g
tnnnnatttnnnnaccnnnnnnnnnnnnnnnnnnnnnnnnnnnnnnnnnnnnnnnnnnnnnnnnnnnnnnnnnnnnnnnnnnnggcacgagaacccaaacttaaaggcagcttctaaaggggagcaatgctgaccactctgtagtttgtatatttggtcaacacactttattgagtgatgagtctgaatttcatgcttgattgatgatgattggtgacagagtagacaaggtccctgcttcatggagtctatggtctagttggggaaatatacctttattgaatcaaggcagatgtgattacagattgaacaatggctgtagaaggaaagggatttccaagagagaattagaggggcttctcaaattgagtttgactttctctttggtgggggttgagtcaggaagaacctttttgaagcaggaaaaatct

SEQ ID NO: 34803 - DNA, 421 bp, Homo sapiens
  misc_feature (1)...(421): n = a,t,c or g
nnnnnnnnnnnnnnnnnnnnnnnnnnnnnnnnnnnnnnnnnnnnnnnnnnnnnnnnnnnnnnnnnnnnnggcacgagtgagtttattccatggaggcagttctaattgttcaaaaggttatgttgatataaaatcaaccttcccataattttaacccagcatcagctatgtttggtacagttttggtaattagtagcattaataatagtatctatcaattttataattgaaagcacctgaacaattttataattaaaagcacctgaataaatgatggtgatgagtcatttccacaaatatgcattgagcacctttaatgcaccaggttctgtgctgggtgtcgaggtctaatgatgaatggggagaggtttcagtccttgaatcttctggagtagatgttgggcaggtgcagttctagaaa

SEQ ID NO: 34804 - DNA, 428 bp, Homo sapiens
  misc_feature (1)...(428): n = a,t,c or g
nttttnnnaccnnnnnnnnnnnnnnnnnnnnnnnnnnnnnnnnnnnnnnnnnnnnnnnnnnnnnnnnnnnnnnnnnnnggcacgagaggcttgtgaacggcgtttctgcgtctgccgtggacagcgaagctgctgcggttcctgagccggaggtttgcgccggagtgcctgtgaagaaaacggggtattgccctgaggcttatattctgcttcagttgtcttttcttgaaatattataaatcagaatgtctgcacagtcagtggaagaagattcaatacttatcatcccaactccagatgaagaggaaaaaattctgagagtgaagttggaggaggatcctgatggcgaagagggatcaagtatcccctggaaccatctcccagacccagagattttccgacagcgattcaggcagtttggataccag

SEQ ID NO: 34805 - DNA, 425 bp, Homo sapiens
  misc_feature (1)...(425): n = a,t,c or g
aancnnnnnnnnnnnnnnnnnnnnnnnnnnnnnnnnnnnnnnnnnnnnnnnnnnnnnnnnnnnnnnnnnnnggcacgaggaaggctctggtaggccttcctctggccaggagactccagcagggaatgcccttcactctgtaggtgctcgagccccaatcgaggatacagtgtgggtggtggtgctgggctggactagcaggtagactgctgtaggatttcaaattacgtttttgattcctgtacattttacagtcgcacagcaagcagtctcacagaaggcaggctagtccattcacagcctgacacgttctaataggtagaagctttcagtgtggttattttttctttggttggtttttgtgcccccattctacttcccaccctcctgccccatctccatcccttcttttacccaatgctgta

SEQ ID NO: 34806 - DNA, 469 bp, Homo sapiens
  misc_feature (1)...(469): n = a,t,c or g
tnnnnannnttgganaacgnnnnnnnnnnnnnnnnnnnnnnnnnnnnnnnnnnnnnnnnnnnnnnnnnnnnnnnnnnnnnnnnnnggcacgaggctcaaccttcccccagacctgttccgtctgttcaggaccaagacctggaaggaccatgtggctgcatgggacgtgattttcagtaaagctgacatatacacccagaacttctactgggaattgagacagaaaggaagtgttcaccacgattaccgtggcatcctctacagactcctgggagacagcaagatgtccttcgaggacatcaaggccaacgtcacagagatgctggcaggaggggtggacacgacgtccatgaccctgcagtggcacttgtatgagatggcacgcaacctgaaggtgcaggatatgctgcgggcagaggtcttggctgcgcggcaccaggcccagggagacatggccacgatgctacag

SEQ ID NO: 34807 - DNA, 452 bp, Homo sapiens
  misc_feature (1)...(452): n = a,t,c or g
gannannnnnnnnnnnnnnnnnnnnnnnnnnnnnnnnnnnnnnnnnnnnnnnnnnnnnnnnnnnnnnnnnnnnnnggcacgaggccaagcccaccaaggccgacatcacgctctcgggatgcgcctccggcctcgtccgcgtgttcctgacgtcgcccactgaggtggccaaagtccgcttgcagacgcagacacaggcgcagaagcagcagcggcggctttcggcctcggggccgttggctgtgccccccatgtgtcctgtgcccccagcctgcccagagcccaagtaccgcgggccactgcactgcctggccacggtagcccgtgaggaggggctgtgcggcctctacaagggcagctcggccctggtcttacgggacggccactcctttgccacctacttcctttcctacgcggtcctctgcgagtggctcagccccgctggccacagc

SEQ ID NO: 34808 - DNA, 448 bp, Homo sapiens
  misc_feature (1)...(448): n = a,t,c or g
nancnnnnnnnnnnnnnnnnnnnnnnnnnnnnnnnnnnnnnnnnnnnnnnnnnnnnnnnnnnnnnnnnnnnnggcannnnnnnnnnnnnnnnnnnnnnnnnnnnnnnnnnnnnnnnnnnnnnnnnnnnnnnnnnnnnnnnnnnnnnnnnnnnnnnnnnnnnnnnnnnnnnnnnnnnnnnnnnnnnnnnnnnnnnnnnnnnnnnnnnnnnnnnnnnnnnnnnnnnnnnnnnnnnnnnnnnnnnnnnnnnnnnnnnnnnnnnnnnnnnnnnnnnnnnnnnnnnnnnnnnnnnnnnnnnnnnnnnnnnnnnnnnnnnnnnnnnnnnnnnnnnnnnnnnnnnnnnnnnnnnnnnnnnnnnnnnnnnntggctgtttaattttcacatatttgtgagtttttttagttttctattattgatttctggtttcattctatgtgatcagaaaatat

SEQ ID NO: 34809 - DNA, 464 bp, Homo sapiens
  misc_feature (1)...(464): n = a,t,c or g
tttgaaaccgctnnnnnnnnnnnnnnnnnnnnnnnnnnnnnnnnnnnnnnnnnnnnnnnnnnnnnnnnnnnnnnnggcacgagctggctaaatatttggtgagggaggagagttagattccctatcttaaatcttatactgaaataaaatccaaaccatgaaatacagagaaaaatgtaaatgaatgaatgaataagcaaattaaaagaaaatgaaaaagcaagaaaatacaagcaaatatttacctgatctcagaataagggaaattattctaagcaaacaaaccacagaacaaaccaaaaaggaaaagatatttagatctgattccgttcaaattcaaaacttgttcattaatatatattagtagcaaattgaaaagtaaataaaaaactgggaacaaatacttgagccatgtaactgtaggttagtagctttagtatatgaggaaaactcacttatcaacc

SEQ ID NO: 34810 - DNA, 444 bp, Homo sapiens
  misc_feature (1)...(444): n = a,t,c or g
nnnnnnnnnnnnnnnnnnnnnnnnnnnnnnnnnnnnnnnnnnnnnnnnnnnnnnnnnnnnnnnnnnnnnnggcacgagattaatatataaaaatgtagttgtctttcatttattgataacgatctaggaaccctactaaaattttcattaatgctaataacctttctattaattgtctaatcattctcagtttttctgaaaagttaatcatatctatgagtaataatttttttctttttaaatatttatgggtttttttcttgttttattgtgttgactgagaactcccagaaaatccttaaatagaaatgatgataacaggtgtcctattggttcatgattttaaagaggacactttttaacttttcacattgagtataatatttgctaaagattttgtttacaaatatcctttatctggctaaagaagtttcctatgtctgg

SEQ ID NO: 34811 - DNA, 455 bp, Homo sapiens
  misc_feature (1)...(455): n = a,t,c or g
cnnnnnnnnnnnnnnnnnnnnnnnnnnnnnnnnnnnnnnnnnnnnnnnnnnnnnnnnnnnnnnnnnnnnggcacgagggctattgtctttatcatttgacgtaaaaaggcaaatgcggcatgtcctaacttacaagaggggctaaataataggtacacatggacatagaatgtgannnnnnnnnnnnnnnnnnnnnnnnnnnnnnnnnnnnnnnnnnnnnnnnnnnnnnnnnnnnnnnnnnnnnnnnnnnnnnnnnnnnnnnnnnnnnnnnnnnnnnnnnnnnnnnnnnnnnnnnnnnnnnnnnnnnnnnnnnnnnnnnnnnnnnnnnnnnnnnnnnnnnnnnnnnnnnnnnnnnnnnnnnnnnnnnnnnnnnnnnnnnnnnnnnnnnnnnnnnnnnnnnnnnnnnnnnnnnnnnnnnnnnnnnnnnnnnnnnnnnnnnnnnnnnnnnnnnnnnn

SEQ ID NO: 34812 - DNA, 455 bp, Homo sapiens
  misc_feature (1)...(455): n = a,t,c or g
gnggnnnnggnnnnnnngtgntttccnccncnactccctttacacgaccnnnnnnnnnnnnnnnnnnnnnnnnnnnnnnnnnnnnnnnnnnnnnnnnnnnnnggcacgagggaactcaccggtaatagaggacacatctcttaactgggttgctctaagaactgatgtctaaaccgtctcagcatggcctgtagaggaggagctgggaatggccaccgtgcctcagctacactctctcgggttagccctggaagtctttacacatgtagaacccgtacccataatatatgcatggtatctgactttttctacccaaatatgggaggcgtggaaagccacatttaccagctctctcagtgcctgattgaaagagggcataaggttataattgtcacccatgcttatggaaatcgaaaaggcatccgttacctcaccagtggcctcaaagtctatta

SEQ ID NO: 34813 - DNA, 453 bp, Homo sapiens
  misc_feature (1)...(453): n = a,t,c or g
gccccgccgngtcgtcccctntgtgncccccngcnctnatctnnnnnnnnnnnnnnnnnnnnnnnnnnnnnnnnnnnnnnnnnnnnnnnnnnnnnnnnnnnnnnnnnnnggcacgaggcagcacatgagcttcaataccctgctatcaaagaccatgacccccaccagacacccattagcccagctactttctcctctggcatctattatctgctcttctccttcacccgttcaggtcccggggggatggaagttccctgggggtagcctgccatcctcatcctgggggagtgcacccccggctttgctagtttctcgcatccctgcctaccactgagaactcatcctctccccacagtttcttctttctgagtgtgccatctgtcttctgccaggaccgtgactgacaaaataaaaaacggaattgattatcccagaatttcattcttggaa

SEQ ID NO: 34814 - DNA, 443 bp, Homo sapiens
  misc_feature (1)...(443): n = a,t,c or g
gnngnnnngnccccttgtnagccgctttnnnnnnnnnnnnnnnnnnnnnnnnnnnnnnnnnnnnnnnnnnnnnnnnnnnnnnnnnnnnnggcacgagcaaccactgttcaaaagctgtgatttttgtctccccttcccaccctccagccaaggagcagccctgcccagggggcattaggtgtgggtacccggggagcaccccgttcctggaccccagtgttgcatttcctggctgaggaagggtggtcatcccagctcctgccctaccctctcacttaactggagctttgggacgcaccctccacagtgggaggtggtggtgggtggcggtggcggggcctcacgacagcttggtgctggtaagaggaagcccgtggttctggctaggctctcatgtccagacagcggggaccaggggaaaacccagccccttctgtaatccc

SEQ ID NO: 34815 - DNA, 474 bp, Homo sapiens
  misc_feature (1)...(474): n = a,t,c or g
aggtgnntnntgtnangaatcctatngactcctnnnnnnnnnnnnnnnnnnnnnnnnnnnnnnnnnnnnnnnnnnnnnnnnnnnnnggcacgaggaaactagcattcgaataggttatgactcatcccctgtcacataacagtaactggcagagccagatgtaccagtcaggactctcctggtgacaagaaatagacccatctcaatctggcttaagaaaaaaggggaaacttattggttcacataactgaaaaccaagagtaatggtttcaggcatagctggatctaggggaccaaatctgtgtctcttaagccctcagctttgctgtcttttctgttgacttaattctctgataggcttcccccaggtggtaacagagatacataaagatgcttcctagcagcttggggcttggcatttatgagttagcagctgtagagagagaacacatctcttcctggtagttccagcag

SEQ ID NO: 34816 - DNA, 459 bp, Homo sapiens
  misc_feature (1)...(459): n = a,t,c or g
nnngnncntagtngtancccnngtngncnaccacngangnacccgannnnnnnnnnnnnnnnnnnnnnnnnnnnnnnnnnnnnnnnnnnnnnnnnnnnnnnnnnnnnnnnnnggcacaagcggcgcagaaccctgaggaggtggcggaggtcttcctcaccgctttgcgcgccccgaagccgaccctgcgctacttcaccaccgagcgcttcctgcccctgctgcggatgcgcctggacgaccccagcggctccaactacgtcaccgccatgcaccgggaagtgttcggcgacgttccggcaaaggccgaggctggggccgaggctgggggcggggccgggcctggggcanaggacgaggccgggcgcagtgcggngggggaccctgagctcggcgatcctccggccgccccgcagtaaaggcttcctcagccgctgtctcccgcgcccttctttgtcc

SEQ ID NO: 34817 - DNA, 438 bp, Homo sapiens
  misc_feature (1)...(438): n = a,t,c or g
ggnnnngnnnnnnnnnnnnttttgnntttccnnnnnnnnnnnnnnnnnnnnnnnnnnnnnnnnnnnnnnnnnnnnnnnnnnnnnnnnnnnnnnnnnnnnnnnnnggcacgaggcgtaaggaaagaatgactatggtgaaggtaatagaaattatagaaggattaggaattacaaaactcaggaatgggaagcagtggggaggaacaaaacagtaactcaggaatcctataaggattaatgattctttaagaaactataggtcatttccttcccagcaaagcttagctttaggaacaacaatagcatgagccacccacttattgaggactagaatttctaaacggtaattaaacattttaaataaagaacagtttgatggttaaggagacacccagacattatccaagtgctatacagagctacaataaaaaaaaaaaa

SEQ ID NO: 34818 - DNA, 421 bp, Homo sapiens
  misc_feature (1)...(421): n = a,t,c or g
ntttgnnnntnttnnnaccnnnnnnnnnnnnnnnnnnnnnnnnnnnnnnnnnnnnnnnnnnnnnnnnnnnnnnnnnnnnnnnnnnnggcacgagatcatgctccagatcctaccccaaattaggaaataccagtctcaaaatagccaagcagatagtgatgaatgcccccctcttctctttacccaatccagtggttcccaaacttgtctacacatatagaaacatccatggatcttttaaaatttccaaagcccaggccatacttcagaccaattaaattgcagtcaatataagtgggatagaggtgttaatattttttgaagcaccctggtgattcgaacgtgcaggcaactttgggaaccactgctctaatcgcaaaataaaccacaatcagagaggatccctcttttaggttcccta

SEQ ID NO: 34819 - DNA, 444 bp, Homo sapiens
  misc_feature (1)...(444): n = a,t,c or g
nnnnnnntnngnnnnntttgtgnaccnnnnnnnnnnnnnnnnnnnnnnnnnnnnnnnnnnnnnnnnnnnnnnnnnnnnnnnnnnnnnnnnnnnggcacgaggggaatgatggctcagctttcgtggaggtgctggtgggcagttcagctggaggcgctggggagcaagactatgaggtccttctggtcacctcatctttcatgtccccttccgagagccgcagtggctcaaaccccaaccgcgttcgcatgtttgggcctgacaagctggtccgggcagccgccgagaagcgctgggaccgggtcaaaattgtttgcagccagccctacagcaaggactccccctttggcttgagttttgtacggtttcatagccccccagacaaagatgaggcagaggccccgtccnagaaggtgacagtgaccaacttgccagttccgtgta

SEQ ID NO: 34820 - DNA, 493 bp, Homo sapiens
  misc_feature (1)...(493): n = a,t,c or g
gnnnnngnnngnnnnnntctttgtnancccctntgataaccnnnnnnnnnnnnnnnnnnnnnnnnnnnnnnnnnnnnnnnnnnnnnnnnnnnnnnnnnnnnnnnnnnggcacgagcaacatagaggaagctcacagtccccaggaggatcagagaatcaggcttggaaactatacaactaggaatgattctgagtcatattagaatgggctgttctcatggagaacccagtgtattttcctagtaggcacagttactacagctcataatcctggcactaggcacaagtcattgccgctaggacctctgcaatctaaaagctacgtgtgactggcccccttcaccagaatgaattctatgcaatacccacatcttttgttagtagtttccatgctgaagtctcacaagtgtatctgactggtggagcttgggtcacacgcctgcagcctaaccccaagagaggctgcttccttggggaggtcagactcaatgat

SEQ ID NO: 34821 - DNA, 492 bp, Homo sapiens
  misc_feature (1)...(492): n = a,t,c or g
gcgcccgtcngnnccctctttgaaacccctatnnnatgctcnntagtttaatncgactcnnnnnnnnnnnnnnnnnnnnnnnnnnnnnnnnnnggcacgagatgaagaacaatgagtgggaacttcttcagccaggaattataatatagagttatattaagcattaattgaaggaacattctgggtaaagaaatatatattcagataagtgaaatataacaattcatttgtaaattcaaatacatgtaataatttagtgtcatgaagaaagcagctttcaaatcaatataaaaagatagattgtttaccatattcagaaaacttgtcagatactcaagaagaaaaaaatggatctctactactcattctttacaacataaaatatttcacataattaaggttaagatactaaaataaaaacaggaaagcactaaaagaaaatatggataaagtcttttagttttagcaattaaagactcccttggcagacac

SEQ ID NO: 34822 - DNA, 488 bp, Homo sapiens
  misc_feature (1)...(488): n = a,t,c or g
gnngnnnaggtggnttnnntnctctgatacctntgaacncccnnnnnnnnnnnnnnnnnnnnnnnnnnnnnnnnnnnnnnnnnnnnnnnnnnnnnnggcacgaggttgtttcatgtgcataattgttacacaaatggtgttacatagcaaatttccttctatctacttttctgactccacactgttctggaaatccagccattttacaatgtgtgcatctagtccatggctctccagggctgcctagcctcccataggctgcatccatcccttgtggttcctccattccaccggtgatagaaccactagccaattcccattccttggcgctacagtgagccttcttgtacatgccctaggtttagcttcctgccatctgagaggcttcaagaggcttccctgattgtgaaagttgttacctattacaatgagttattccatcccatctggccttggccttttgtatcatctgaccctcgtgaaaggca

SEQ ID NO: 34823 - DNA, 490 bp, Homo sapiens
  misc_feature (1)...(490): n = a,t,c or g
gnngnnagnntagngtntgtncnacngataccntnnnatactcnnnnnnnnnnnnnnnnnnnnnnnnnnnnnnnnnnnnnnnnnnnnnnnnnnnnnnggcacgagatgaccaataaaataattgagtcactttctctcggtttcagtttaattcaatacatttgtatagtagtcaactatgtgctgtgttctgaacaagaagggctctcaagataacaaatgtagcaaggtaaataaaacatgctatcttaccatctggcaccagaactcctccttgcttggcaaaggacattaagccacttggggcagaaggtaaggccctaagggcagaagggttggcagagactgaaacaacaaagggagagggttgtgctgtcctgctgagaaaacgagacaaatgtattctctgttcctgagaggggagaactaagggcaggggaaagcaggggagggagagaagccagaggccaacaaaaactaagtctctgtg

SEQ ID NO: 34824 - DNA, 496 bp, Homo sapiens
  misc_feature (1)...(496): n = a,t,c or g
gnngnnngnnttngnntnngtctantgataccnngngatacttctnnnnnnnnnnnnnnnnnnnnnnnnnnnnnnnnnnnnnnnnnnnnnnnnnnnnnnnnnnnnnnnnnggcacgaggcctgctcatccaccctgaannnnnnnnnnnnnnnnnnnnnnnnnnnnnnnnnnnnnnnnnnnnnnnnnnnnnntcataaatccctctctctctnnnnnnnnnnnnnnnnnnnnnnnnnnnnnnnnnnnnnnnnnnnnnnnnnnnnnnnnnnnnnnnnnnntanatgtgtnccaataaaacttnatttagagacattgaaatttaaatttcangggctgggcatggnggctcannnnnnnnnnnnnnnnnnnnnnnnnnnnnnnnnnnnnnnnnnnnnnnnnnnnnnnnnnnnnnnnnnnnnnnnnnnnnnnnnnnnnnnnnnnnnnnnnnnnnnnnnnnnnnnnnnnnngtanccacgtgcagtggctcatgcctga

SEQ ID NO: 34825 - DNA, 439 bp, Homo sapiens
  misc_feature (1)...(439): n = a,t,c or g
gnnnnnnnntttgnnnacctntannagccnnnnnnnnnnnnnnnnnnnnnnnnnnnnnnnnnnnnnnnnnnnnnnnnnnnnnnnnnnnnnnnnnnnggcacgagtatataagaaagttgcaattgacaaacaatttggaatttgtacatgcttagacagtgaaaacagtatagtgaattcaaaagtagacctnnnnnnnnnnnnnnnnnnnnnnnnnnnnnnnnnnnnnnnnnnnnnnnnnnnnnnnnnnnnnnnnnnnnnnnnnnnnnnnnnnnnnnnnnnnnnnnnnnnnnnnnnnnnnnnnnnnnnnnnnnnnnnnnnnnnnnnnnnnnnnnnnnnnnnnnnnnnnnnnnnnnnnnnnnnnnnnnnnnnnnnnnnnnnnnnnnnnnnnnnnnnnnnnnnnnnnnnnnnnnnnnnnnnnnnnnnnnnnnnnnnnnnn

SEQ ID NO: 34826 - DNA, 440 bp, Homo sapiens
  misc_feature (1)...(440): n = a,t,c or g
gnnnnnnnttnnnnnntntgnnacctnnnnnnnnnnnnnnnnnnnnnnnnnnnnnnnnnnnnnnnnnnnnnnnnnnnnnnnnnnnnnnnnnggcacgagcggcacgannnnnnnnnnnnnnnnnnnnnnnnnnnnnnnnnnnnnnnnnnnnnnnnnnnnnnnnnnnnnnnnnnnnnnnnnactccatttcaaaaaagaatattaaaaaataatgataagggtcgggtgtggcggctcatgcctatatatnnnnnnnnnnnnnnnnnnnnnnnnnnnnnnnnnnnnnnnnnnnnnnnnnnnnnnnnnnnnnnnnnnnnnnnnnnnnnnnnnnnnnnnnnnnnnnnnnnnnnnnnnnnnnnnnnnnnnnnnnnnnnnnnnnnnnnnnnnnnnnnnnnnnnnnnnnnnnnnnnnnnnnnnnnnnnnnnnnnnnnnnnnnnnnn

SEQ ID NO: 34827 - DNA, 439 bp, Homo sapiens
  misc_feature (1)...(439): n = a,t,c or g
gggnngtnnnnnctgtattaccagcactactcncnnnnnnnnnnnnnnnnnnnnnnnnnnnnnnnnnnnnnnnnnnnnnnnnnnnnnnnnnnnnnnnnggcacgagactggaagctgataaatttgtttcattttaaactgttatgtttgtggttatctattacacagcaatatgggcttattccaaacaggctgtatgaattcaggtccctgaccaaatctggttgactgtaaaaatgaaaaaggacaacctgagtgccttaccttacgtaaatatttcctaactcctgccctgtgtctgtggcagacaccctgctccgctgagtttgggtgctattactccggaaaatctagtcatctgcagaaaccatttcagctaccttctgtcctgggatacactgtaacaaaccatttcacccaaggcattgtttcctctggt

SEQ ID NO: 34828 - DNA, 480 bp, Homo sapiens
  misc_feature (1)...(480): n = a,t,c or g
gnnnnngnnnnnnggtgnnnttntgnnnaactgatanctctatannnngaccctnnnnnnnnnnnnnnnnnnnnnnnnnnnnnnnnnnnnnnnnnnnnnnnnnnggcacgaggggtagaagagggtgggtgtgggatggggaggggagagtggaaaggccctgggcagaccctggcagaaggggcacggggcagggtgtgagttccccactagcagggccgtgctgcacctggccacctctgctctctctctgctgacccaccccgtcctggtgctgctgctgcgctgtcccctctgtacctgctcagcccggcctgaggccacgcccttcctggtggcccacactcggaccagaccacccagtggaggggagagagcccgacgctcaactcccctgatgtcctggccttggtctccctctgctctgcgcctgctgcagaggcctccggaggaaccggctgccatgccaactgccacaga

SEQ ID NO: 34829 - DNA, 469 bp, Homo sapiens
  misc_feature (1)...(469): n = a,t,c or g
gtnnnntgnnnnnntntgaaanccctatntntgacccnnnnnnnnnnnnnnnnnnnnnnnnnnnnnnnnnnnnnnnnnnnnnnnnnnnggcacgagcannnnnnnnnnnnnnnnnnnnnnnnnnnnnnnnnnnnnnnnnnnnnnnnnnnnnnnnnnnnnnnnnnnnnnnnnnnnnnnnnnnnnnnnnnnnnnnnnnnnnnnnnnnnnnnnnnnnnnnnnnnnnnnnnnnnnnnnnnnnnnnnnnnnnnnnnnnnnnnnnnnnnnnnnnnnnnnnnnnnnnnnnnnnnnnnnnnnnnnnnnnnnnnnnnnnnnnnnnnnnnnnnnnnnnnnnnnnacaaaagatttatgtgtatatagctcatatttattcatatgtaggtacatatatactcaacacatacaacaatgaaaatggaattatactgttcattgtgttggtaagtttttcccacttggtaatgngncataa

SEQ ID NO: 34830 - DNA, 504 bp, Homo sapiens
  misc_feature (1)...(504): n = a,t,c or g
gnnnngnnngnnttgnnttntgnnnttgngaaacttttggacatccnnnnnnnnnnnnnnnnnnnnnnnnnnnnnnnnnnnnnnnnnnnnnnnnnnnnnnggcacgaggaggggaaggaactggttacttcgtggacttctctgtgcggaactgctccagacaccatttccccagacaccccaatgtctttggattctgcagagcagatttgttctatgatgtagaagccttggacttggaaagcccgaaaaaccttgtcataaactgtgaagtcttcgaccctcaggaacatgagaacatcaatggtgtaccgcctcatttgggacatcccttccactggggtgggcatgagcgttcttctaccaccaagcctccattcaagccccatggatctagagatcatcatcatccccacaagccacacgaacatggacccccacctcctccagatgaaagagatcactcacatggacccccactttcacaaggnccttcttcactat

SEQ ID NO: 34831 - DNA, 436 bp, Homo sapiens
  misc_feature (1)...(436): n = a,t,c or g
ggtngggcagtctnccgtggtttcagngctattccttgacnnnnnnnnnnnnnnnnnnnnnnnnnnnnnnnnnnnnnnnnnnnnnnnnnnnnnnnnnnggcacgaggaggacagcttcgaaggatgatttgaaaagtaatctatggaatttagctttaaagcaggatcttgggctgtagactactttattattattattttttaagagacannnnnnnnnnnnnnnnnnnnnnnnnnnnnnnnnnnnnnnnnnnnnnnnnnnnnnnnnnnnnnnnnnnnnnnnnnnnnnnnnnnnnnnnnnnnnnnnnnnnnnnnnnnnnnnnnnnnnnnnnnnnnnnnnnnnnnnnnnnnnnnnnnnnnnnnnnnnnnnnnnnnnnnnnnnnnnnnnnnnnnnnnnnnnnnnnnnnnnnnnnnnnnnnnnnnnnnnnnnnnnnnn

SEQ ID NO: 34832 - DNA, 436 bp, Homo sapiens
  misc_feature (1)...(436): n = a,t,c or g
gnnnnnnngtnnnnnncnntnnnacctttnnnnnnnnnnnnnnnnnnnnnnnnnnnnnnnnnnnnnnnnnnnnnnnnnnnnnnnnnnnnnnnggcacgagnnnnnnnnnnnnnnnnnnnnnnnnnnnnnnnnnnnnnnnnnnnnnnnnnnnnnnnnnnnnnnnnnnnnnnnnnnnnnnnnnnnnnnnnnnnnnnnnnnnnnnnnnnnnnnnnnnagattttactttttcagctaattttggttatttacatttatttagagacagggtctcactgtgtagccaggacctccnnnnnnnnnnnnnnnnnnnnnnnnnnnnnnnnnnnnnnnnnnnnnnnnnnnnnnnnnnnnnnnnnnnnnnnnnnnnnnnnnnnnnnnnnnnnnnnnnnnnntttttaaatgtgaatatctttaggtggggcatgctctctttgat

SEQ ID NO: 34833 - DNA, 486 bp, Homo sapiens
  misc_feature (1)...(486): n = a,t,c or g
ggnggnnnnnnttngnttgggnntagaaactcttngatntganacccnnnnnnnnnnnnnnnnnnnnnnnnnnnnnnnnnnnnnnnnnnnnnnnnggcacgagcaagactagcctgggcaatatagtgagacctcatctctacttttttcttttttaagagatggaatcttgttctgcactccagcccaagtgacagagcaagactctctgtctcaaacaacaacaacaacaacaacaaaacaggtgcagtggttcagnnnnnnnnnnnnnnnnnnnnnnnnnnnnnnnnnnnnnnnnnnnnnnnnnnnnnnnnnnnnnnnnnnnnnnnnnnnnnnnnnnnnnnnnnnnnnnnnnnnnnnnnnnnnnnnnnnnnnnnnnnnnnnnnnnnnnnnnnnnnnnnnnnnnnnnnnnnnnnnnnnnnnnnnnnnnnnnnnnnnnnnnnnnnnnnnnnnnnnnnnnnnnnnnnnnnnnnnnnnnnnnnnnnn

SEQ ID NO: 34834 - DNA, 424 bp, Homo sapiens
  misc_feature (1)...(424): n = a,t,c or g
gggnggnntnnnngtnctttgcnctcctnnnnnnnnnnnnnnnnnnnnnnnnnnnnnnnnnnnnnnnnnnnnnnnnnnnnnnnnnnnnnnggcacnnnnnnnnnnnnnnnnnnnnnnnnnnnnnnnnnnnnnnnnnnnnnnnnnnnnnnnnnnnnnnnnnnnnnnnnnnnnnnnnnnnnnnnnnnnnnnnnnnnnnnnnnnnnnnnnnnnnnctgaccagtgttcttaacctggtccgtggacctccagagagtccatgtacctcctagagttacttctaaaagctctgtgagcannnnnnnnnnnnnnnnnnnnnnnnnnnnntttcctgganagagggttcccagaaccctcagacacagacaaaggggtcaataacccactaaggattaagaatcattattctagtccaagcattcatgtg

SEQ ID NO: 34835 - DNA, 434 bp, Homo sapiens
  misc_feature (1)...(434): n = a,t,c or g
gnnnngnnnnnnnnntnntttgnnnttcccnagccnnnnnnnnnnnnnnnnnnnnnnnnnnnnnnnnnnnnnnnnnnnnnnnnnnnnnnnnnnnnnnnnnnnggcacgagaactggaccagtggtcacagaaaaggaaagggaaagaaagaatttgagattaaagaattgtcttgaaacagaaatgaatgcctaatggatagccagcgaacaggcctgtggcagcctcccagtgtggtatttggtcgagtatctgccactggccctcaggacatcaatattctcatccgattgtggctgtagttgtgggtggctgaaaaccgtggtgctaaaatactgaatgccagtcttagtctctctcatggttggagacaactgactagagacaccatgagcagccattttcttctctgatgtctcagtactgcatgcaga

SEQ ID NO: 34836 - DNA, 428 bp, Homo sapiens
  misc_feature (1)...(428): n = a,t,c or g
gnnnngnnnttnnnnncctntgnctnncnnnnnnnnnnnnnnnnnnnnnnnnnnnnnnnnnnnnnnnnnnnnnnnnnnnnnnnnnnnnnnnnnnggcacgagcataacaagatttctgtcaacaatagaccacttatataatgatggtcccataagatagaaggtggtatttttactgcctcttttctgtgttgcagatacnnnnnnnnnnnnnnnnnnnnnnnnnnnnnnnnnnnnnnnnnnnnnnnnnnnnnnnnnnnnnnnnnnnnnnnnnnnnnnnnnnnnnnnnnnnnnnnnnnnnnnnnnncgnnnnnnnnnnnnnnnnnnnnnnnnnnnnnnnnnnnnnnnnnnnnnnnnnnnnnnnnnnnnnnnnnnnnnnnnnnnnnnnnnnnnnnngttggaggaaaaaaattgaaaggagagtatta

SEQ ID NO: 34837 - DNA, 430 bp, Homo sapiens
  misc_feature (1)...(430): n = a,t,c or g
gnggnggnnnnnngtgnttgctannntactncttgacnnnnnnnnnnnnnnnnnnnnnnnnnnnnnnnnnnnnnnnnnnnnnnnnnnnnnnnnnnggcacgaggctccacctgcagaaaagtagggaagctccaggaaagctatctcgaaagcatgaagaggaccacagtcagttttatctgaatcaacttctagaatttatgcatatttggaaagtatccagacaatgtctcttaacactcatcagaaaatatgacttccacctgaaatacctattgaaaacccaggaaaacgtgtataatattattggaagaaagttaaaaaaatatgcagtgttctagggtgtgtggaaaccaaacaaattacagatgcagtaaatgaactaagtctaattcttcagagaaaaggagagaatttttatcaaagttca

SEQ ID NO: 34838 - DNA, 384 bp, Homo sapiens
  misc_feature (1)...(384): n = a,t,c or g
gngnngnnnttnnnnntnctttgnntttcnnnnnnnnnnnnnnnnnnnnnnnnnnnnnnnnnnnnnnnnnnnnnnnnnnnnnnnnnnnnnnnnnnnggcacgagctggaagtgggctgatgtggctctgggctgtctacgcctccagctggtagataggagtcagggaagtcaccaaaagatgaataggcattagtaagtactggtggaaacccaggagcgggaatgccatgctcaaaggctctgaggtnnnnnnnnnnnnnnnnnnnnnnnnnnnnnnnnnnnnnnnnnnnnnnnnnnnnnnnnnnnnnnnnnnnnnnnnnnnnnnnnnnnnnnnnnnnnnnnnnnnnnnnnnnnnnnnnnnnnnnnnnnnnnnnnnnnnnnn

SEQ ID NO: 34839 - DNA, 427 bp, Homo sapiens
  misc_feature (1)...(427): n = a,t,c or g
ggnnngnnntnnngtgnttgcnntccnacccttgacnnnnnnnnnnnnnnnnnnnnnnnnnnnnnnnnnnnnnnnnnnnnnnnnnnnnnnnnnnggcacgagcaaaaaagctcccataatgtggtggggaagacacagaagactttctgaacagctggaaatgaactggagacagctcctcctgcttggggtgaccagccatgatcatatatgtggagtaagtctgtggttttgtggggaaaacaaaacaacaacaaaacaaaaaaagtaactattcctccctcattctttcctgcctcctctcttctttgaagagaccactcttgacccctggtcatttgtgagcctttgccacagtgctggccctgaaaggagatcaatttcacaatcctgcttggttggcatgggctgagtcactgaccagccc

SEQ ID NO: 34840 - DNA, 439 bp, Homo sapiens
  misc_feature (1)...(439): n = a,t,c or g
gngnnnngnnntnnnngtnctntgnctatccnnaccnnnnnnnnnnnnnnnnnnnnnnnnnnnnnnnnnnnnnnnnnnnnnnnnnnnnnnnnnnnnnnnnnnnggcacgagnnnnnnnnnnnnnnnnnnnnnnnnnnnnnnnnnnnnnnnnnnnnnnnnnnnnnnnnnnnnnnnnnnnnnnnnnnnnnnnnnnnnnnnnnnnnnnnnnnnnnnnnnnnnnnnnnnnnnnnnnnnnnnnnnnnnnnnnnnnnnnnnnnnnnnnnnnnnnnnnnnnnnnnnnnnnnnnnnnnnnnnnnnnnnnnnnnnnnnnnnnnnnnnnnnnnnnnnnnnnnnnnnnnnnnnnnnnntttattgctgatcacaaggacagacagttttttcccgaccatactcatcaaagatttacgtttgtatattagtaactagtgcattactagag

SEQ ID NO: 34841 - DNA, 434 bp, Homo sapiens
  misc_feature (1)...(434): n = a,t,c or g
gnnnnnnnntnnnnntnntttannnttcnnnnnnnnnnnnnnnnnnnnnnnnnnnnnnnnnnnnnnnnnnnnnnnnnnnnnnnnnnnnnnnnnnnggcacgaggcctgctcatccaccctgaaannnnnnnnnnnnnnnnnnnnnnnnnnnnnnnnnnnnnnnnnnnnnnnnnnnnntcataaatccctctctctctnnnnnnnnnnnnnnnnnnnnnnnnnnnnnnnnnnnnnnnnnnnnnnnnnnnnnnnnnnnnnngagtgtanatgtgtnccaataaaanttnatttanagacattgaaatttaaaattcnnggnctgggcatgggggctcannnnnnnnnnnnnnnnnnnnnnnnnnnnnnnnnnnnnnnnnnnnnnnnnnnnnnnnnnnnnnnnnnnnnnnnnnnnnnnnnnnnnnnnnnnnnnnnnt

SEQ ID NO: 34842 - DNA, 496 bp, Homo sapiens
  misc_feature (1)...(496): n = a,t,c or g
gnnntnnntnnnnncnantgaaagcttgnnnnnnnnnnnnnnnnnnnnnnnnnnnnnnnnnnnnnnnnnnnnnnnnnnnnnnnnnnnnnnnnnggcacgagagggtctattatgcttttatatatgatgtcagattcagtggttctgcagcggcttgctaaacggagaaaaaagtccagtcattactaatgaagaaaactgtgatctctgtcccactggtcttatgaaagataataatgttttctccctaatatctacttatgtactttaaaaagaattttattgataaataatgccatgatacactttcatgggcagagaaaattcctaatgggccaattacatccaagtcgatttatatattttaggataccaaattctgtctaatgtcaatgagggtgtgtgtggccagggtagcacaagacaaggatttgggaataagagaaaaacaaacataagtttactgaggtttttttttggggggggcgtgggggca

SEQ ID NO: 34843 - DNA, 443 bp, Homo sapiens
  misc_feature (1)...(443): n = a,t,c or g
gggggnnggnnnnnnngtgtttnnnngnttntactnnnnnnnnnnnnnnnnnnnnnnnnnnnnnnnnnnnnnnnnnnnnnnnnnnnnnnnnnnnnnnnnnnnggcacgaggtgagagtggggaggggccacgtacttctaaacaaccagaacaagatccctgggtgnnnnnnnnnnnnnnnnnnnnnnnnnnnnnnnnnnnnnnnnnnnnnnnnnnnnnnnnnnnnnnnnnnnnnnnnnnnnnnnnnnnnctaaccacannnnnnnnnnnnnnnnnnnnnnnnnnnnnnnnnnnnnnnnntcagaaaattttcagattctcagccagtcttcttgtgtggagccatatctgtttccagtgatacttgattcttgcagttcctgggatttgtcttgaaattggcatgctgctgcttgtcatctccctccacagccttcagtttc

SEQ ID NO: 34844 - DNA, 447 bp, Homo sapiens
  misc_feature (1)...(447): n = a,t,c or g
gngnnngggnnnnnngttnttgnanttntttatnnntnnnnnnnnnnnnnnnnnnnnnnnnnnnnnnnnnnnnnnnnnnnnnnnnnnnnnnnnnnnnnnnggcacgagggaaagtgctagctcaggtgccttccttccccatttcttctttgtcctccttcactctttctgcaattagggacccaagtcaggtttctaatccagttatctctgacctgaaacaagacctgttaggagcgagtgtccccccgcccccccgcaagcaggctgggaggtctcctgtgtgtccagagcctttaggagcagcagggcttgtgtgcaaaggagctcccgtgggctgccccttgctgggacagttgccatgctgtgccagaaacaggaaacacccagggcttcaaaacccctatcgatttgcaatgatggtgtgtgcagcctctgcccaattag

SEQ ID NO: 34845 - DNA, 442 bp, Homo sapiens
  misc_feature (1)...(442): n = a,t,c or g
gggngnnggttgnnnnnttatgnnnangnnnnnnnnnnnnnnnnnnnnnnnnnnnnnnnnnnnnnnnnnnnnnnnnnnnnnnnnnnnnnnnnnnnggcacgagaactgaaagaatggtcagcagagaactaagagacctgtgtctcgtttgtgccctgtctgcagggcagcattggcacatatccttgccaatcccagtttttgtcattaaagtaaaaatgatgcattccttttgcttgtttcacagggggtttgaagaggacaaataagtttttgttggttaattaccctgtcccttttttttttggacccaatntaanaattttatgcatcctgcaatatgngngcataactgatgatgtgttggnggngatnattnttgtcagggataacagtncaagtncaaggattnttgtcggggataacagnggaaagcaggctc

SEQ ID NO: 34846 - DNA, 445 bp, Homo sapiens
  misc_feature (1)...(445): n = a,t,c or g
gngnnnngnnnnnnnngtgtttntnnntgttntacttnnnnnnnnnnnnnnnnnnnnnnnnnnnnnnnnnnnnnnnnnnnnnnnnnnnnnnnnnnnnnnnnnnnggcacgagattaagagcagccttcccttctccccagataccgcagcgggatccgcggctatatgaaaacagtggtgttggatctcctgagaagatacttgcgtgttgagcaccattttcagcaaggcaagagatgctgatgccaacaccagtgggatggtggggggcgtgaggagcctgagctttacctctgtgtggtgttttgtctcccccagcccactacgacaagtgtgtgataaacctcagggagcagttcaagccagacatgtcccaggtgctggactgcatcttctcccacgcacaggtggccaagaagaaccagctggtgatcatgttgatcgt

SEQ ID NO: 34847 - DNA, 448 bp, Homo sapiens
  misc_feature (1)...(448): n = a,t,c or g
gnnggnnnnnggnnnnnngtgnnnnncnagtgnnactcnnnnnnnnnnnnnnnnnnnnnnnnnnnnnnnnnnnnnnnnnnnnnnnnnnnnnnnnnnnnnnnnnnggcacgagaactgggatgagtgttttatctggaaaaatatgtaaagatattgattcaatttctgtaagttaaataacctatttaatttttatatttcttcgggagtcaactttgctaagctattttcttctattttgccttagttttcaaatgctggcataaagttgctaacagtattttcttactattttaaaaattcctgctgcatctgttctttgtgtttgtagatttattcctttatttcattttagttttgggaggaagcagaaataattttgtgtgtttaatccaccacatttatgagagcaaaatcacacagaaggttcattcttccttatctataa

SEQ ID NO: 34848 - DNA, 443 bp, Homo sapiens
  misc_feature (1)...(443): n = a,t,c or g
gnngnnnnngnnnnnngtgtnnnnnntnnacttcttgactgattnnnnnnnnnnnnnnnnnnnnnnnnnnnnnnnnnnnnnnnnnnnnnnnnnnnnggcacgaggccagaatgtccctcattgggtgaatggttaaaaaacagaggaacctttaaaggtctgtaccatggaatcctacccggcaataaaaagaaacaagctatggatatattaaaaatcatggatggctctcatgacattgtgtcgactgaaaaaaggcccatctcaaaaggacacttactatgaataaattgtatctcaataatttagtttaaaaaagaacacataactatgtgattctgtttctataacattctcaaaatgacagcattttagagacggaaaacagatgagtggtcaccagagattaggaatggtagagggcagaggtcggcgtgaatgct

SEQ ID NO: 34849 - DNA, 482 bp, Homo sapiens
  misc_feature (1)...(482): n = a,t,c or g
ggggnnnnngtgnntntgncnngtnaaactctttgnnatgacnnnnnnnnnnnnnnnnnnnnnnnnnnnnnnnnnnnnnnnnnnnnnnnnnnnnnggcacgagcacaatttagcccatcagtctttttattactagacgtttggagatttttatttccaattatcactcggtacttccaacattcagtgtttgcacgaaccagagataaatacctttgtgtggtcaaagtaatataatttttgataacttagtgaaaggagaattctagactccaaggatatggccctttattttcacatagctagtttacaaatagctgtcccnnnnnnnnnnnnnnnnnnnnnnnnnnnnnnnnnnnnnnnnnnnnnnnnnnnnnnnnnnnnnnnnnnnnnnnnnnnnnnnnnnnnnnnnnnnnnnnnnnnnnnnnnnnnnnnnnnnnnnnnnnnnnnnnnnnnnnnnnnnnnnnnnnnnnnnnnnnnnn

SEQ ID NO: 34850 - DNA, 482 bp, Homo sapiens
  misc_feature (1)...(482): n = a,t,c or g
ggggnnnnnntgnnttntgcntcggaactctntgactgacnnnnnnnnnnnnnnnnnnnnnnnnnnnnnnnnnnnnnnnnnnnnnnnnnnnnnggcacgagaacctagcctggattacatggtcaccaagattccccgctgggatcttgaccgttttcatggaacatctagccgaattggtagctctatgaaaagtgtaggagaggtcatggctattggtcgtacctttgaggagagtttccagaaagctttacggatgtgccacccatctatagaaggtttcactccccgtctcccaatgaacaaagaatggccatctaatttagatcttagaaaagagttgtctgaaccaagcagcacgcgtatctatgccattgccaaggccattgatgacaacatgtcccttgatgagattgagaagctcacatacattgacaagtggtttttgtataagatgcgtgatattttctgaactctttcta

SEQ ID NO: 34851 - DNA, 475 bp, Homo sapiens
  misc_feature (1)...(475): n = a,t,c or g
gggggnnngtgtgtttgnnagggaactttttgaatgacnnnnnnnnnnnnnnnnnnnnnnnnnnnnnnnnnnnnnnnnnnnnnnnnnnnnnggcacgagcctgatgcagccacatgtgagacctcaacctgtgccccacccctgggctgaccagtggtgttgcctgccctccggaggagaaagtggccagaatctgtgatgactccagcctatgaatgtgaatgaggcagtgttgagtcctgcccgcctctacgaaaacagctctgtgacatctgactttttatgacctggccccaagcctcttgcccccccaaaaatgggtggtgagaggtctgcccaggagggtgttgaccctggaggacactgaagagcactgagctgatctcgctctctcttctctggatctcctcccttctctccatttctccctcaaaggaagccctgccctttcacatccttctcctcgaaagtcacc

SEQ ID NO: 34852 - DNA, 476 bp, Homo sapiens
  misc_feature (1)...(476): n = a,t,c or g
gagnnttgaancnttnnnnnnnnnnnnnnnnnnnnnnnnnnnnnnnnnnnnnnnnnnnnnnnnnnnnnnnnnnnnnnnggcacgagttgtgatgacactttgtgattaataatagtctagnnnnnnnnnnnnnnnnnnnnnnnnnnnnnnnnnnnnnnnnnnnnnnnnnnnnnnnnnnnnnnnnnnnnnnnnnnnnnnnnnnnnnnnnnnnnnnnnnnnnnnnnnnnnnnnnnnnnnnnnnnnnnnnnnnnnnnnnnnnnnnnnnnnnnnnnnnnnnnnnnnnnnnnnnnnnnnnnnnnnnnnnnnnnnnagannnnnnnnnnnnnnnnnnnnnnnnnnnnnnnnnnnnnnnnnnnnnnnnnnnnnnnnnnnnnnnnnnnnnnnnnnnnnnnnnnnnnnnnnnnnnnnnnnnnnnnnnnnnnnnnnattttttnntaagnggnccgaagnntantcccttttaggggggntaattt

SEQ ID NO: 34853 - DNA, 482 bp, Homo sapiens
  misc_feature (1)...(482): n = a,t,c or g
ggngnnnttgannnccattggaaaaccctnnnnnnnnnnnnnnnnnnnnnnnnnnnnnnnnnnnnnnnnnnnnnnnnnnnnnnnnnnnnnnnggcacgagacaagatggtaaagtaacatggtctttacctaaaggactctcatctgaaggctgtaagcctggctgtcactcttagggtactgcctggtacaagagagctgtaatattttgctagtctttgtccctgcgtgaagtacagaaaccctgtcaccaaggatgccatcaacctgaacaccatcgtgaaaggctcttcatcatctttcctactcaaagaaaattcatcttttccttgtctgtatattttgaaaagtataccaacgtattagaaataaacctgtatgtaattatggtataacagagacgttatctttttcaaatagatatatagatatagatacttatagatttttgttgttgtttaggagaactcatccagattcat

SEQ ID NO: 34854 - DNA, 406 bp, Homo sapiens
  misc_feature (1)...(406): n = a,t,c or g
cctcgaggccaagaattcggcacgagagaagagttagatttcaagacagttcactttccttactggtggtggtggtgttgtagagggataagacttcttcctaaagcaattcattgtgagttttttatcttggctgtccttttttcttttttgaaatgtttgtattctttcatgagttttgggaacattctttgcttgtagaaactgaaatagtggatattttttgaagaaagactgaaagcctttgtgcttcttttacattaaaataatggagcggagcctattctgctcattgggccccagggagccaatgtggtgtatgatgctgacagattccacaagagccctagcaaacagccgggacacaacacagatgggcacagcacagggccanccagaagcacta

SEQ ID NO: 34855 - DNA, 477 bp, Homo sapiens
  misc_feature (1)...(477): n = a,t,c or g
gnnttnnnnnnnnnnnnnnnnnnnnnnnnnnnnnnnnnnnnnnnnnnnnnnnnnnnnnnnnnnnnnnnnnnnnnnnnnggcacgagcagagaggttgagtaatttaccaaggatcacacagggattactgtcagagctgggatccaaactcgctgagtctgggtccagggcctttgctctgaacaaccatgctatgttactcctcgtgtattcatgagtgtctcctctgtgccaggcactgttctcagtgtaggggacagagcaatggaaaaaactgacaaaaccccaccctcgatgagcttatggtcttatgggaaggcagggacaataaacagaagagtaaaataccagggctgctacctgtgacaagtgccatagagaaacaccaatggggcgggagacagggagtaggaggaatgttaaataaggccatcagggaaggtctccctgaaaaggtgccactggaaccagaactga

SEQ ID NO: 34856 - DNA, 482 bp, Homo sapiens
  misc_feature (1)...(482): n = a,t,c or g
gngnnnttgannnccnttgganancnnnnnnnnnnnnnnnnnnnnnnnnnnnnnnnnnnnnnnnnnnnnnnnnnnnnnnnnnnnnnnnnnnnggcacgagaatgtattatccagctgttatattcagtgaaacattctagagagcctatctttatttctaattgactgtaatttttgaagtttcttttttttgtagtttttaattccttgattctaccctatgaagcagtttggtgtcctgttcatttttttttcatttttttgtttttaatttctgttaagacaatgttgctttatatatacattttgtaatttataaagnnnnnnnnnnnnnnnnnnnnnnnnnnnnnnnnnnnnnnnnnnnnnnnnnnnnnnnnnnnnnnnnnnnnnnnnnnnnnnnnnnnnnnnnnnnnnnnnnnnnnnnnnnnnnnnnnnnnnnnnnnnnnnnnnnnnnnnnnnnnnnnnnnnnnnnnnnnnggcgg

SEQ ID NO: 34857 - DNA, 480 bp, Homo sapiens
  misc_feature (1)...(480): n = a,t,c or g
gtgntttgaacccntnnnnnnnnnnnnnnnnnnnnnnnnnnnnnnnnnnnnnnnnnnnnnnnnnnnnnnnnnnnnnnnggcacgagagcagccacatctgtctcattaaacagcaccatatctctagtgcttggcatagtgtctggcacatgccagatagtcaaggatatttgttgaatatttacaagttaatcattgatattaaacatgatgtttgtaatcaaggggttgaaactctacttggctagggaaaatctgaaacaagggtcatgtgctgcccattttcattaaaaagttgaaacttctcctggtacagacatatcttcatctggtgcaactcctttgtcataaattcaagaaatcgaaacccagagaggttgcatgacctgcccaggatcacatggcaggtccacagaagacccaagaccagagaccagctttcccatctacagccatgttgcatcgtcggtgtctgcaaag

SEQ ID NO: 34858 - DNA, 481 bp, Homo sapiens
  misc_feature (1)...(481): n = a,t,c or g
gngnattgaanccctnnnnnnnnnnnnnnnnnnnnnnnnnnnnnnnnnnnnnnnnnnnnnnnnnnnnnnnnnnnnnnnggcacgagctgggtgtggtgnnnnnnnnnnnnnnnnnnnnnnnnnnnnnnnnnnnnnnnnnnnnnnnnnnnnnnnnnnnnnnnnnnnnnnnnnnnnnnnnnnnnnnnnnnnnnnnnnnnnnnnnnnnnnnnctctgtctcaaaaataattagctggacatggtggtataagtgtgtgtttccagctacttgggggcagatggcaaccggcagtcctggggtgggagcatcatttgagcccnnnnnnnnnnnnnnnnnnnnnnnnnnnnnnnnnnnnnnnnnnnnnnnnnnnnnnnnnnnnnnnnnnnnnnnnnnnnnnnnnnnnnnnatttaaaaatagaaataaaatgcaggaagtaattttcttaaattcacaaagtatcactgcaactcgtggagttcag

SEQ ID NO: 34859 - DNA, 479 bp, Homo sapiens
  misc_feature (1)...(479): n = a,t,c or g
ttgaanccntttganancnctnnnnnnnnnnnnnnnnnnnnnnnnnnnnnnnnnnnnnnnnnnnnnnnnnnnnnnnnnnnnnnnggcacgagcggcacgagggcagatctatcctacaccagtgaattctaaaatgtaaaatgcttcccaatgtatgccgctgaagagtgaagtgagagcaatcattatttcctagacggtttttgagctgggcaacctgggagtcacagaggtgagcaagaacttggggtgggtgggagagagatattaaggaactaaaaaaacctcagaggcaggaaaatgcaatggaaaggcccagcaccggcgcaggtgggagatctgggggaaagagcagagctggggaaaggtagttttggagtcacctccaaaagtaaggcagctcatgcagccttgagaaggctttattccagggagttagagggcccatggaaggtgtctgcaaaggaaagaaatcttgt

SEQ ID NO: 34860 - DNA, 410 bp, Homo sapiens
  misc_feature (1)...(410): n = a,t,c or g
ctcgaggccaagaattcggcacgaggggatataaattctcatttaggactgtgggctcaggctttttggcttgagggggtggtgtttcgccagggaccacccttttctgcctagaattttgtgccccctgtccctaataatatctcagaagccaaatgttaaaagtgtttataaaagggaaagaagaggtgtatcaaaggataacgtggagaaagatgaagactgagaattnnnnnnnnnnnnnnnnnnnnnnnnnnnnnnnnnnnnnnnnnnnnnnnnnnnnnnnnnnnnnnnnnnnnnnnnnnnnnnnnnnnnnnnnnnnnnnnnnnnnnnnnnnnnnnnnnnnnnnnnnnnnnnnnnnnnnnnnnnnnnnnnnnnnnnnnnnnnnnnnnnnnnnnnnnnnnnnnnnn

SEQ ID NO: 34861 - DNA, 464 bp, Homo sapiens
  misc_feature (1)...(464): n = a,t,c or g
anacctnnnnnnnnnnnnnnnnnnnnnnnnnnnnnnnnnnnnnnnnnnnnnnnnnnnnnnnnnnnnnnnnnnggcacgagctatattcactataatttggagcaagaagggagaagaggctctgctgttgttattcacagttgcttgtcagagttcacatgcctacttagaaaaatctatattnnnnnnnnnnnnnnnnnnnnnnnnnnnnnnnnnnnnnnnnnnnnnnnnnnnnnnnnnnnnnnnnnnnnnnnnnnnnnnnnnnnnnnnnnnnnnnnnnnnnnnnnnnnnnnnnnnnnnnnnnnnnnnnnnnnnnnnnnnnnnnnnnnnnnnnnnnnnnnnnnnnnnnnnnnnnnnnnnnnnnnnnnnnnnnnnnnnnnnnnnnnnnnnnnnnnnnnnnnnnnnnnnnnnnnnnnnnnnnnnnnnnnnnnnnnnnnnnnnnnnnnnnnnnnnnnnnnnnnnnn

SEQ ID NO: 34862 - DNA, 465 bp, Homo sapiens
  misc_feature (1)...(465): n = a,t,c or g
tgaanannttnnnnnnnnnnnnnnnnnnnnnnnnnnnnnnnnnnnnnnnnnnnnnnnnnnnnnnnnnnnnnnnnnggcacgagcttttttttgtttttaaacagaagttttgctgccaattagcatttagagaattttcttaggtcagaaaacttacaatttgcagtaatcaaaagaagttagtaaattctatttgtgactctgcttatggaaattctaatttaaaaacacagtaagaaatacaggctagatttattgattctatgatgttcagttaaggtagtaaacctagaagtattcgcctaaagagaaaaacattcttgagtttgcagattgccatcttggtaatatagaaggcatgccatatgcacctgatgacactttattgtatctgtttctatctaaaaagccttgcacatttgcagttgtaacctaattcagttctcatgggttcttcacagtagt

SEQ ID NO: 34863 - DNA, 464 bp, Homo sapiens
  misc_feature (1)...(464): n = a,t,c or g
anaccnnnnnnnnnnnnnnnnnnnnnnnnnnnnnnnnnnnnnnnnnnnnnnnnnnnnnnnnnnnnnnnnnnnnggcacgagtgaagatcagatagttactttgtaagtggagtctggtcagaacagtggcatttaggtgatcttaagggatgctgtcatcaagctctggtagcatagaacagagcattttatattttctaggttattactgatacatgcgtgtcattcagaaagagcactttccttaccatatggttctctagacagaaggagcacttctttgtgtttgttcttttgtattgaatatttttttatccgtctaaaaacagcagttattatatttctatattgaagaaactaacgtataagaccagtttgttttatctcaccatttatattcttaagaagctttttaggattacttacttccttctgtgctttgattaaacagtcaaaacccattt

SEQ ID NO: 34864 - DNA, 475 bp, Homo sapiens
  misc_feature (1)...(475): n = a,t,c or g
gagttgaacctttgacacgattacgaatttaatacgactcnnnnnnnnnnnnnnnnnnnnnnnnnnnnnnnnnnggcacgagnnnnnnnnnnnnnnnnnnnnnnnnnnnnnnnnnnnnnnnnnnnnnnnnnnnnnnnnnnnnnnnnnnnnnnnnnnnnnnnnnnnnnnnnnnnnnnnnnnnnnnnnnnnnnnnnnnnnnnnnnnnnnnnnnnnnnnnnnnnnnnnnnnnnnnnnnnnnnnnnnnnnnnnnnnttgaaaatatttgtgcatcaaaggatagtatcaacagagtgaaacgcaacccacagaatggaagaaaatatttgtaaatcatatatctgataagagannnnnnnnnnnnnnnnnnnnnnnnnnnnnnnnnnnnnnnnncccaattaaaaaatgtgcgacatttgagtagacatttcccaaagaagacagaccaatggccaacaagcagatataagatgaacat

SEQ ID NO: 34865 - DNA, 465 bp, Homo sapiens
  misc_feature (1)...(465): n = a,t,c or g
gtgttgaaacnntnnnnnnnnnnnnnnnnnnnnnnnnnnnnnnnnnnnnnnnnnnnnnnnnnnnnnnnnnnnnnnnggcacgannnnnnnnnnnnnnnnnnnnnnnnnnnnnnnnnnnnnnnnnnnnnnnnnnnnnnnnnnnnnnnnnnnnnnnnnnnnnnnnnnnnnnnnnnnnnnnnnnnnnnnnnnnnnnnnnnnnnnnnnaatattaaaannnnnnnnnnnnnnnnnnnnnnnnnnnnnnnnnnnnnnnnnnnnnnnnnnnnnnnnnnnnnnnnnnnnnnnnnnnnnnnnnnnnnnnnnnnnnnnnnnnnnnnnnnnnnnnnntggccaaaaaggcaaaagngggcagttatagtctttttgtttgtttgaagcagggnnnnnnnnnnnnnnnnnnnnnnnnnnnnnnnnnnnnnnnnnnnnnnnnnnnnnntntgcctcccaggtacaagtgatcctccc

SEQ ID NO: 34866 - DNA, 466 bp, Homo sapiens
  misc_feature (1)...(466): n = a,t,c or g
gtgttnannttgaaaacgctatgacnnnnnnnnnnnnnnnnnnnnnnnnnnnnnnnnnnnnnnnnnnnnnnnnnnnnnnnnnnggcacgaggtctatataaaatatttttccattagtataatttcacgagcattcctcatcgcagacattttttatatttttcaatgcttgcattttgctatgtcatgttgagttattggatctcttgactttttaaaaatatatttggctctttttgataatgttacattgaatttctgcatacatttatacatggccacatctttcctgggaaggaattaacctggtaatcagtgcgtatgaacttctagaatggctgtatctggacccagctagatatttcttcgtatttcctagaaatgaaactcctgggtcagagtacgagaagccaggttctttgtgtgttgcttattgattggtttgagctcatcagtaaggttttac

SEQ ID NO: 34867 - DNA, 527 bp, Homo sapiens
  misc_feature (1)...(527): n = a,t,c or g
annannnanaannnngnnngngatnnanntganaannnnnnngnantaanngtgnntannngnnagnnnnaaggttgaacctttgaagatacgaattnnnnnnnnnnnnnnnnnnnnnnnnnnnnnnnnnnnnnnnnnnnnggcacgagattttctagtagattccttaagagcacagtattccttgagttcttggatatttagaattgtatctgtatagccttgatatttgaaaggtagcttggctagatataaaaatcttaattcacactttcttggtttgagtgtcttaaaaagattcagttcttttcttgccttgctttctatgtagcttttgagaagtctgatgcagcctgattcttttgcccttggatgttatgtttatttctttgagtgaagaccctgaggatttcttcctttatctttaaaatctaatagttttacttggatacattttggggttgattgttgtgggtcagatttcacaggtacccagtgtatccctttagtatttctactcaggtctc

SEQ ID NO: 34868 - DNA, 470 bp, Homo sapiens
  misc_feature (1)...(470): n = a,t,c or g
agtgtannaacccttnnnnnnnnnnnnnnnnnnnnnnnnnnnnnnnnnnnnnnnnnnnnnnnnnnnnnnnnnnnnnnnggcacgagnnnnnnnnnnnnnnnnnnnnnnnnnnnnnnnnnnnnnnnnnnnnnnnnnnnnnnnnnnnnnnnnnnnnnnnnnnnnnnnnnnnnnnnnnnnnnnnnnnnnnnnnnnnnnnnnnnnnnnnnnnnnnnnnnnnnnnnnnnnnnnnnnnnnnnnnnnnnnnnnnnnnnnnnnnnnnnnnnnnnnnnnnnnnnnnnnnnnnnnnnnnnnnnnnnnnnnnnnnnnnnnnnnnnnnnnnnnnnnnnnnnnnnnnnnnnnnnnnnnnnnnnnnnnnnnnnnnnnnnnnnnnnnnnnnnnnnnntaaaaataatcaaagaaccatccataggtctagatggcattttcaagattttattatccagttcctcattttgctaaggagaagccta

SEQ ID NO: 34869 - DNA, 471 bp, Homo sapiens
  misc_feature (1)...(471): n = a,t,c or g
gtgnttgannntttganaaccnnnnnnnnnnnnnnnnnnnnnnnnnnnnnnnnnnnnnnnnnnnnnnnnnnnnnnnnnnnnnnnnnnggcacgagcagtcccctcctgccttgtggagcctgttactgggacacagagaggctggcaaacttgacagttgatgctaggagaagcagagggtgactcacaggcttgtttataacttggtcaatatgtttcgagtgttctataaaagattctgacaaccctgtaagacagtggcctggattcccaaggctggtggagacgttgtgaagaatagcagttccaagacaacatataaaaatgttgggcgtttgcaagccagacagctctgggctgtaactgctgcagcgggagccaggattcttaaacatgagtctggaaacctcgtctgacaagggaactgatgtgtggtttgcagactgtcagctgtggagccgagtgttcagg

SEQ ID NO: 34870 - DNA, 424 bp, Homo sapiens
  misc_feature (1)...(424): n = a,t,c or g
gtgnttgagantnggnagaccnnnnnnnnnnnnnnnnnnnnnnnnnnnnnnnnnnnnnnnnnnnnnnnnnnnnnnnnnnnnnnnnnnggcacgaggacagaatagtcacnnnnnnnnnnnnnnnnnnnnnnnnnnnnnnnnnnnnnnnnnnnnnnnnnnnnnacgtactttactcaccagtttcctgaccatggttgactatggggaactataatcctgtaacacaaaactgcagataaggtggggactatagtcaccaactcctgttgatcctgcacagcagttttgcttgaattggtattctgtacatccttagtcttttcgttattggaatacttccttttttttttttttttttngaaanaaantntcnntntccanccngggnnanaaancaanactttntntccaaaaaaaaaaaaaa

SEQ ID NO: 34871 - DNA, 562 bp, Homo sapiens
  misc_feature (1)...(562): n = a,t,c or g
gnntannnannnnnnnnnnnnnnnannannnnnnnnnnnnnntnnnanannnnannnnnnannnnnnannnnannannnnnaannnnntnagtgtnggaaaccttntgacacgnnnnnnnnnnnnnnnnnnnnnnnnnnnnnnnnnnnnnnnnnnnnnnnnnnnnnnnnggcacgagcatgaatgtcatgagcccactatcagggaccttacaatttggagggttaggtcagatccacaaatttcttgtatctcatggtaaaggaaacctggcgtgcagcaggagatggtgtgataacaataacatgttgcatgatcaatatttgtattcttcttagcaatattaaactttttgaccccctccattgtgtcatcaatttgcttaatacagtttcttcctcagcgtcggtttttaggcctggcataagctgtttgaaacccaggaaggtaccccacccatcatctttggcctagttaacacctcccctccgtgtgtggtggtttggagaacctgctttttcctcatcccactgatcccaaacccaggacaccccacagctgct

SEQ ID NO: 34872 - DNA, 470 bp, Homo sapiens
  misc_feature (1)...(470): n = a,t,c or g
agtgtntgaacnttntgaacnnnnnnnnnnnnnnnnnnnnnnnnnnnnnnnnnnnnnnnnnnnnnnnnnnnnnnnnnggcacgaggacagacaaaaaacaaaaacagaaaccatcttagctggttagaaaccttagtgagaaaataaagtacagtaagaggatggaggagagtgatcaaatccgggagaagttcgctgttcctgagagcgatcatttgacctacctgaatgtttacctgcagtggaagaacaataattactccaccatctggtgtaacgatcatttcatccatgctaaggccatgcggaaggtccgggaggtgcgagctcaactcaaggacatcatggtgcagcagcggatgagcctggcctcgtgtggcactgactgggacatcgtcaggaagtgcatctgtgctgctatttccaccaagcagccaagctcaagggaatcggggagtacgtgaacatcc

SEQ ID NO: 34873 - DNA, 483 bp, Homo sapiens
  misc_feature (1)...(483): n = a,t,c or g
tttnnnnncctttgaannnnnnnnnnnnnnnnnnnnnnnnnnnnnnnnnnnnnnnnnnnnnnnnnnnnnnnnnnnnnnnnnnnnnnnnggcacgagcttgctgttcatgtttgcagaatgataccagggatgggactgttaactggtatgatggataaccttattgggatccaggaggatctccatgagctaatgaaaccaacagagtaaaggttcataggactccaccttgaggatcaggaaaagtcatttacagcatttggttggcctttggggacatgattgctgccatcaaatggccagcagcggctcacaggcctggcaggcaggctggtggggtggtaggagcactaactggggttcagatcacctgggttctgatcttgaccctgtcccaaaggtgtcttttcctttccagaccgcaatttcttcactcttaacatgagagctttgaaggaagtgattctaatgctttctagcaat

SEQ ID NO: 34874 - DNA, 474 bp, Homo sapiens
  misc_feature (1)...(474): n = a,t,c or g
aaaaccnttnnnnnnnnnnnnnnnnnnnnnnnnnnnnnnnnnnnnnnnnnnnnnnnnnnnnnnnnnnnnnnnnggcacnnnnnnnnnnnnnnnnnnnnnnnnnnnnnnnnnnnnnnnnnnnnnnnnnnnnnnnnnnnnnnnnnnnnnnnnnnnnnnnnnnnnnnnnnnnnnnnnnnnnnnnnnnnnnnnnnnnnnnnnnnnnnnnnnnnnnnnnnnnnnnnnnnnnnnnnnnnnnnnnnnnnnnaagtgggtcttaagatgagtaggaatggagaatttgtgcaaaagcattgggggaaatttgggctatttcctctcactccattttctcagtccagattagtagtaataggattttggaaactctggaggtattgtgaacacctgtagtgagatttggaaggtgtgacagggaaacattccagatgatcaggagtctgtgctgctccttagaatcctttcttttcttgtgag

SEQ ID NO: 34875 - DNA, 558 bp, Homo sapiens
  misc_feature (1)...(558): n = a,t,c or g
gntnnnntnngnngnnnnnnnncannantnnngnngnnnnnntaangnancnaggggntgnnnnnnnnggntnnngnnnnnantttggaaaccttgtgacaccntacgaannnnnnnnnnnnnnnnnnnnnnnnnnnnnnnnnnnnnnnnnnnnnnnggcacgaggtgagtccctgctgacaccttgattgcggacttctggtttacagaactgaaataatccatttccactgttttaatcccccagtttgtggtcatttgttaccaaagcaaactcatccagaacccaagggatataggctcagaaatgtgcacctcatggtaaagaaacactacaagccactgcaaagctgaaggagacagggaatggggaggaagtccccaggctcaatctcaaagatcttggctgaagcccggttgctcctcggctccagnnnnnnnaggtggacntggnatgcctcatatcctcaggtgaatacttggcatcggtcagaaggatatcctgagatgctgngagggatctttgaaaatatttactctccagcatgtaaatatacc

SEQ ID NO: 34876 - DNA, 442 bp, Homo sapiens
  misc_feature (1)...(442): n = a,t,c or g
gngnntttgannnccnnntttgaannnnnnnnnnnnnnnnnnnnnnnnnnnnnnnnnnnnnnnnnnnnnnnnnnnnnnnnnnnnnnnnnnnnnnnnggcacgagggtggcagtcctggtcatgggcaggatgaagcgtgagatcaccacgctggtgagccgggtgggccatgagcccaagaagtggcccatctcgggtgtcctgccgcactccggccagctggtgtggtacatggactacgacgccttcctgggatgagggcgcctgtgccccttgcccgcttcgctcctgtgctttccttcgcccgtgtcttccctcccttctcggccccgccacctgcccagcgtgccctggctctccagaaccttctatcccacagtcaggccccagagagggcaggacaagccttgtcccgatgcctttgaccggcagctctgtgtat

SEQ ID NO: 34877 - DNA, 438 bp, Homo sapiens
  misc_feature (1)...(438): n = a,t,c or g
gnnntttgaanaccgtntttgangacanctnnnnnnnnnnnnnnnnnnnnnnnnnnnnnnnnnnnnnnnnnnnnnnnnnnnnnnnnnnnnnnnggcacgagctggcnnnnnnnnnnnnnnnnnnnnnnnnnnnnnnnnnnnnnnnnnnnnnnnnnnnnnnnnnnnnnnnnnnccttgatctcctgccttggcctcccaaagttgctaggattacggatatgagccactgcacctgnnnnnnnnnnnnnnnnnnnnnnnnnnnnnnnnnnnntgtgtatgcatatatgtatacatacagnnnnnnnnnnnnnnnnnnnnnnnnnnnnnnnnnnnnnnnnnnnnnnnnnnnnnnnnnnnnnnnnnnnnnnnnnnnnnnnnnnnnnnnnnnnnnnnnnnnnnnnnnnnnnnnnnnnnnnnnnnnnnnnnnnnnnnnnnnnn

SEQ ID NO: 34878 - DNA, 433 bp, Homo sapiens
  misc_feature (1)...(433): n = a,t,c or g
gaanaccngnttnnnnnnnnnnnnnnnnnnnnnnnnnnnnnnnnnnnnnnnnnnnnnnnnnnnnnnnnnnnnnnnggcacgagggcaggcttggccctgcagccaggcactgccctgctgtgctactcctgcaaagcccaggtgagcaacgaggactgcctgcaggtggagaactgcacccagctgggggagcagtgctggaccgcgcgcatccgcgcagttggcctcctgaccgtcatcagcaaaggctgcagcttgaactgcgtggatgactcacaggactactacgtgggcaagaagaacatcacgtgctgtgacaccgacttgtgcaacgccagcggggcccatgccctgcagccggctgccgccatccttgcgctgctccctgcactcggcctgctgctctggggacccggccagctataggctctgg

SEQ ID NO: 34879 - DNA, 505 bp, Homo sapiens
  misc_feature (1)...(505): n = a,t,c or g
atgnnnnntnannnatnannnnnnanntnnnntngcntnatnntnannnngnnngntnnnannnatnnnggnnccncttgaanccnttttgaatgcntacgaannnnnnnnnnnnnnnnnnnnnnnnnnnnnnnnnnnnnnnnnnnnnnnggcacgagatataaacagttcagagactatggaatatttgcacgaattggttgtatacttggaaaatggtagcccccttttattttacataacatgcacccctccctagttagaatactgtgtcttgatgtgagcatatggactatggagtgtgttgaatagcatttgctgtaaaactagaactataaactctgaatttggtgtcttattctcccaaatgggttctgtaaagggagcactcatatagggaaggatttaatgtactgtcaattaaaagtttttgcatagtanaatgttnctatttgnnttaaaacanctttaggttggtctcanccttgtgatgtttggagcataa

SEQ ID NO: 34880 - DNA, 442 bp, Homo sapiens
  misc_feature (1)...(442): n = a,t,c or g
gtgtnnnccttganacagctnnnnnnnnnnnnnnnnnnnnnnnnnnnnnnnnnnnnnnnnnnnnnnnnnnnnnnnnnnnnnnnggcacgagcggcacgagagagcatggttcctgagtgctaagcgttcccaaaggatgagcggagaggcttgctctgcctgcgtccccatcagcggtgaccagcagatcaccacgcctcaggggccccacacccgcggtctcttcctagagctgcagtcccaagcctgcctgcgctctctggaaccctccagagtgttctcagcgcagcccactttggtagcacaggaggagagccctccagctagaaagctccagtagaagctggcgaagtgaggtgagggcattgtcctcagtgactttgctggactcaatattcccctctgttaagggcctactgccttggtaggcatttggattaca

SEQ ID NO: 34881 - DNA, 462 bp, Homo sapiens
  misc_feature (1)...(462): n = a,t,c or g
anacccttgganancncttgactgattacgaatttaatacnnnnnnnnnnnnnnnnnnnnnnnnnnnnnnnnnnnnnnnnnggcacgaggaccgttagagtccatctaggccaactctcttcaaagattggtagattaagggacaaagaagctaagtgatttgcctaagggtcatacacctgtttgaagacagaactgagactaatctccagatactctcactcctagtcaactattttttttaactcatgacactacctcattattctagtagaccagcacttggctgtgacagataaaaagagaaattagccacattagccaaactgatttaaattaactttaaaataccagataaaatgtgttattaggtttaaatgtcccagaccctagtctcatggaatttacattctatttggaaagaccaaataanattgnccgggcacaatggctcatgcctgt

SEQ ID NO: 34882 - DNA, 468 bp, Homo sapiens
  misc_feature (1)...(468): n = a,t,c or g
ttnnnnnnctttgnanancnnnnnnnnnnnnnnnnnnnnnnnnnnnnnnnnnnnnnnnnnnnnnnnnnnnnnnnnnnnnnnnnnnnggcacgaggagaaataccctgcttctatttctttctcnnnnnnnnnnnnnnnnnnnnnnnnnnnnnnnnnnnnnnnnnnnnnnnnnnnnnnnnnnnnnnnnnnnnnnnnnnnnnnnnnnnnnnnnnnnnnnnnnnnnnnnnnnnnnnnnnnnnnnnnnnnnnnnnnnnnnnnnnnnnnnnnnnnnnnnnnnnnnnnnnnnnnnnnnnnnnnnnnnnnnnnnnnnnnnnnnnnnnnnnnnnnnnnnnnnnnnnnnnnnnnnnnnnnnnnnnnnnnnnnnnnnnnnnnnnnnnnnnnnnnnnnnnnnnnnnnnnnnnnnnnnnnnnnnnnnctgctatttcaagagccacagagagcctgtgaacaagtccagtaagtaccata

SEQ ID NO: 34883 - DNA, 467 bp, Homo sapiens
  misc_feature (1)...(467): n = a,t,c or g
ttgannnctttgganaacnnnnnnnnnnnnnnnnnnnnnnnnnnnnnnnnnnnnnnnnnnnnnnnnnnnnnnnnnnnnnnnnnnnggcacgagaaaatgttcagatgtgtgagtttgaaggttgttctgttcccctcgtttgagagtcttctgtgaccttccttaacaaccagttcttcgattcttttatttttttttctacccacggacatttacctgtttaataaagacaagtctgttctcagagcagggtatgttttgttgccttcttatccattaaccacctccccacaaccctagtctgctattttgagtgtgctttttagtcattctgtggcatttttagaaagcacagaattttttttttttnnnnnnnatnaanggattttagggtaatctagtccnccttttnaaaanagctanttaccannggancaggtccaaaaacccnggtctcntgattgctg

SEQ ID NO: 34884 - DNA, 449 bp, Homo sapiens
  misc_feature (1)...(449): n = a,t,c or g
nnnnnnnnnnnnnnnnnnnnnnnnnnnnnnnnnnnnnnnnnnnnnnnnnnnnnnnnnnnnnnnnnnggcacgagattgtcttgggtcacacataaaatacacttacgatagctgatgagctaaaaataaataatgaaaaggtctgtgtatnnnnnnnnnnnnnnnnnnnnnnnnnnnnnnnnnnnnnnnnnnnnnnnnnnnnnnnnnnnnnnnnnnnacacgtgtccctgggccatgggttggacaagcttggggtatacagtatggatatgctgcacaaagggttgattcacaacctttaggcaggacagtatgagattttatcactttacccagaacagcatgcaatttacaacttaggaattgttcatttgaattttccatttaatattttcagactacgattgaccacaggtatttgaaactgcagataaaagggggaaatactg

SEQ ID NO: 34885 - DNA, 459 bp, Homo sapiens
  misc_feature (1)...(459): n = a,t,c or g
cngtttgactgattacgaatttaatacgactnnnnnnnnnnnnnnnnnnnnnnnnnnnnnnnnnnnggcacgagggcccacaaaacctaaaaatactgcctgccttttacagagaaagtttgccaaccccttgctagaagtatctttatttattcaacattagttaagcagcacctactatgtgccagccttttgttttgtttcaagactgtctcaaaaaaaaannnnnnnnaactttgccanntttnnttngtncccaaannctatatngnntnaaaaataggnaaangnggntggncccagggcctttgcccgnannnnnnnnnnnnnnnnnnnnnnnnnnnnnnnnnnnnnnnnnnnnnnnnnnnnnnnnnnnnnnnnnnnnnnnnnnnnnnnnnnnnnnnnnnnnnnnnnnnnnnnnnnnnnnnnnnnnnnnnnnnnnnnnnnnnttanttggga

SEQ ID NO: 34886 - DNA, 458 bp, Homo sapiens
  misc_feature (1)...(458): n = a,t,c or g
cngtttgacatgatacgaatttaatacgactnnnnnnnnnnnnnnnnnnnnnnnnnnnnnnnnnnnggcacgagcacggggaccctgaattacttggaaccttgtgctttcagctttggagggtgcgatggggtgggggggcctctcttttagcaagattttaagctcatgagaggcacgtcctgccctgtgcctcattgccagcaacctctgtaaccctctagaacctgaaacttaatgataactgtgtggggagggcctgccagagggcttggctttgacacttgtttatggagcaggcaggcgtgttgcacccctgtttgcaaaaatggggctgattttattcttactgtgaaggtctttagctattttcttccagagaagtactacctttctgttctctctcttttctaaacgtttctttgaaatataatacataggcagaaaagtgcatagga

SEQ ID NO: 34887 - DNA, 474 bp, Homo sapiens
  misc_feature (1)...(474): n = a,t,c or g
ancntttgnnnnnnnnnnnnnnnnnnnnnnnnnnnnnnnnnnnnnnnnnnnnnnnnnnnnnnnnnnnnnnnnnnnnnnnnggcacgagccgacctggcacatcctggagaaaaacctgaaatccgcctccaacattgacgacgtccttggccaccacacaggcttcctggacacctgcctgaaggactgcatgctcaccaaccccgagctgctgaaggtcttctccaagctcatgtctgtgtgcgtcatgttcaccaactgcatgcagaaatttacacagagcatgaaattagatggcgagctgggcgggcagacgctggagcacagcaccgtcctggggctgcccgcaggggccgaggagcgggcccggaaggagctcgccaggaagcacctggctgagcacgcagacactgtgcagctggtgtccggcttcgaggccaccatcaacaagtttgacaagaacttctcagccca

SEQ ID NO: 34888 - DNA, 323 bp, Homo sapiens
aaaagtttgccaaagtctcccacaattacaaatgcaccatttgacacagcaattctacttccaggaatatagcccacaggtagactagcatgtgtgctatgcaacagatgtaaaggttattcactgcagcattgtttgtactgccaaactactgggaaaaacctcagcaggagactacacccattcaataaaatcttgtacagctgaaaaataaataaggaaactatgtgctaatatagaacaatcttcaacctatatttttaaatgaaaaatgcaagttttgaaatattttgtggactatcattgatgtaatatatttcctg

SEQ ID NO: 34889 - DNA, 320 bp, Homo sapiens
caaaaaagttaaaaattattcaaagctatagtttatacatcaggtactgccatttactgtaaaccacctgcaagaaagtcaggaacaactaaattcacaagaactgtcctgctaagaagtgtgttaaagatttccattttgttttactaattgggaacatcttaatgtttaatatttaaactattggtatcatttttctaatgtataatttgtattactgggatcaagtatgtacagtggtgatgctagtagaagtttaagccttggaaataccactttcatattttcagatgtcatggatttaatgagtaatttatgtt

SEQ ID NO: 34890 - DNA, 320 bp, Homo sapiens
ttatggtccatctaagaatattatggagccattaaaaagaatgaggtagctttgcatgtagtaatacaaaacaatatcctaagcacactgtaaagcaaaaagaaaaatcagggtggaacggtttttatggtttgctgtcatttgtgcaaaaataaaaacaacatttacttttatatgcataaaatatcactagaaggagaggtacaaaataggtgcagtggttgctagtgagggggcctgaaatgggagggagatttctttttcatgttctaccttctcttattattttttgagacagagtcttgctgttgcccaggctg

SEQ ID NO: 34891 - DNA, 324 bp, Homo sapiens
  misc_feature (1)...(324): n = a,t,c or g
attttttcaaatctccttaatgtctggcttcacttaaggcagttgagttcccacagctccatgttcccattgcatctgttacaatatgactcatccagcagcctctggaaaactctattgtatattcctatgaaaatgagagaggaatagcactgggtagtccaggagaatggaaaaacccaaacgacaactaaaacaagcagtaggcaaagaaaccacagaataacaaaacccaaaataagggagagaagacagccaaaaccctggtcagggtgacaggtccatgactcttccaggcaaaccnaantaagggagaaagggggt

SEQ ID NO: 34892 - DNA, 324 bp, Homo sapiens
  misc_feature (1)...(324): n = a,t,c or g
tgggaaagtgttaatattttatttttaagtaactggggcaaaagactagattttctataactgcaatagaataggactagaaaggcatccctacaagtccccaaagtatatggatggaatatttttgatggttttataaatgacaattgtaatttagctctctgaagaaaatgtccaatcagattcaatcacacaaagcatttactattttcaatcacttgcccaataacaaaatgtttactaagaaattattcacatcattaagtggtttatgaaataagtgactaagcaacatcaagaaatgctacaatanagcagcttact

SEQ ID NO: 34893 - DNA, 315 bp, Homo sapiens
  misc_feature (1)...(315): n = a,t,c or g
atttactagcagtcacacaatacaaacggctgcctcgacttgcactttcagaagggcccatggcaatctgttggagaaacactaaatttatagactnnnnnnnnnnnnnnnnnnnnnnnnnnnnnnnnnnnnnnnnnnnntgtatatcatatgtctttatttattcagattttttatgtccttcaatcgagtttgaatatttttcttttgttcatcgttaggttaatttctagaaaagatagagctattttnnttttgcaaangacttnntatattatgntgtattttctttctggctttngatggtatanaaag

SEQ ID NO: 34894 - DNA, 315 bp, Homo sapiens
gtttccctattcacaagcaaatgtgaatttcattggatactgttggagttcatagaaatattaattcatttaatggatatgtattgagcccatcagttatgtagcagccattgtgctgtggatacagaagtgaggaaaacagaaaatgtccctgccttcatggaccttacatgagggagagggacaacataataaataataaatgagcaatataatgttaagtgctatgatgatgatcctgtcatgggtctgtgcctgagaccccgtggtgagtaatacagatgtatctttttctggactgcctcctaactctgt

SEQ ID NO: 34895 - DNA, 314 bp, Homo sapiens
cagatggaagacccccgggtatctctgttgtgtccccttccatttcaaagggaataataaatacatagaattcacaaggtggtaaaagctggaagactcttgtgtcgctgttctctctgcacacaaccattggattatcccaatagttaggcactgtagcaaggccagtcctggccatatggtcctctagcattgggtaatgtgtatgaaaaggggcaaaagttactgtctggttcccagagagaataagtgggcgtgtaggcgtaagaacgtgaaagatgcaacctgttgtagaagagatggacaaacgatgg

SEQ ID NO: 34896 - DNA, 326 bp, Homo sapiens
  misc_feature (1)...(326): n = a,t,c or g
caggttcgtaagctttaagtaagcaagacttgatgacctatatattgaaaaagaagaaacacaggatcagatttgtaattgtgaaaagtcttgctctgccttcttccctcttccatgctcacacatacacactataactgaaaacatatacttgctttttttttttttaanaacccnnggnanntngnnccantttnaaagggnnnaaancagnanngnncaaanggaaanagnccnanttnntnggatnnntnaaancnganaaanaannantnttttttttcnanggggttnngtngggggcccgnattttttttttttgggcg

SEQ ID NO: 34897 - DNA, 381 bp, Homo sapiens
aatgcaaaatacctatttctaaaaagatttcataaagaattgtttgttttagagtcatctagaaaatacatagttaaccagaattttcaagtaagagataacaccagtggggtaaactatcttttaatcaaatattttagttaatacaagattatgacatcaccatttttctttacattataacagatatacaagtagaccgatactgtcacaaaacaactgacagagccgaaagatccctcagaaacaccagtaacagcttctcccctacctttccctaaacatgtatgaaagtctaatgaagatagcaatatatttcagaggtagagagagagtagataggaaggtcgacgcggccgcgaattccagatctatgaatcg

SEQ ID NO: 34898 - DNA, 390 bp, Homo sapiens
cttcaaaaacactttggggtactcatagagaagggaaagaacatctttccaatatgaaaacataattttccaagtgtttctgattcatgattaaatctttattggcatgacttaattagcattccccactgtgttaattcagggctgtctttatgccttggggaatcagctcagtggtgatttggagaagctatgggaaggaggacttccaacagctgaagtttaaaaaactaaacaaaacaaaacccagcttacatccatccgcgtatcccaacactaagcacagccttctcaccctttccaaacaactccctatgctgcccccttgtgatttctttcccctttgaggaccccaggggagaaaagtcttctccgcagtcctcccaactg

SEQ ID NO: 34899 - DNA, 388 bp, Homo sapiens
cagcaccgaagaaaacagcaggtagtcaaatacagtcttgacttctatttctgcatctttcctaaaaataatactgttttaccctgtgggccctgtacagacaattagagcgtttgctacccacctgttgcacatttgctggtctacttgatagattaccaagcaatagcctggttttagcaatcaagatatacaatcttacagaacacgaaaagctgtagtttctggagtatttgataaaatgtggcattcttttcaatagtgctctgctgagtcttttttgcctgagacagagaaaaaaaatcagtcatactgatcctgtctttatttactatcttgacattttgtttactgtgaatatttccattcatttcaatttcaaaaatac

SEQ ID NO: 34900 - DNA, 389 bp, Homo sapiens
  misc_feature (1)...(389): n = a,t,c or g
ctttgaggtacttattagacaacttaatgaagatgtcagattacactcttctgaaggtctcatgagcttcgggctggagaagatacctatgggaatcattagagtatagatgggcctggataagatcaccttagggataagtgagtgtgaagggatgagtgagtatgagtgtagataaagaagaaagatggggggactgaactgttgtatccttcagtatgtagatgtctgcaggaagagaaggctttatcaaaggctgttgacaagtggctagggaaatgggaggatgtggtatcccagaagtgaagtgaaaaaaaaggagattcaggtcgacgcggccgcgaattccnnnnnnnnnnnnnnnnnnnnnnnnnnnnnnnnnnnnnnnn

SEQ ID NO: 34901 - DNA, 379 bp, Homo sapiens
aactgcaaacatttattgaccatctgttatttacagagttctctgttcaacctacaaatacaaatagaaaatatattctctaaattcaaggaatttatattctgtttacttggtttaagttttcttatacttaatggaaccaatagtttctttacagtttatcttctaggattccttctcactatcattactgatttcttggtatttgaggtcttttagtctcacctgcctagctttggaatcgaaatgcagattacctgttcaccttgtctactggtttcctttaaataatcacagagttactttagtttcttagtttatccagctatcttctaaagttattttaacttcagagttatggaaaaacacccttttattg

SEQ ID NO: 34902 - DNA, 283 bp, Homo sapiens
gtcggattcaaaaatcaccttgtgatgtcagtgaagattcctccaccccaattttttttagtatagtatctgctatatgggaaaagactataacccaaagggctgtgaatggagaataaaattatatatgtgtttctttcctattgcagttatttattctacaacaaaaggatccaggccacacagcagaaagcagtagcctgcctggttccatgcaagccataaagacttacactagcatagccttaactatctttcctggagacctgaaaaaaaaaaaaaa

SEQ ID NO: 34903 - DNA, 378 bp, Homo sapiens
  misc_feature (1)...(378): n = a,t,c or g
attatctctgttccttcctctggaactgttaatagatatacattaggttttcattctattcttaatgtctcttaatctttccttttgtaccatttcttaataattttaagcaaatttactttagttctttaatctgcttctgtatctggtatatgtgcccactcctccatgatggtttgtttcttcatgtagtttatattttttattgtgaacttattatcttcagtagttactttttttaattttggagtatttcctgtaaaattccatgagccctaagttgtgaaagaggtaaagtgctttgggtatgttgcaaaatagggcctcacgtaagttaaaacnatgattttttaaattaagtantacatgctcaaaata

SEQ ID NO: 34904 - DNA, 388 bp, Homo sapiens
  misc_feature (1)...(388): n = a,t,c or g
ctcaagtgtttagcataacaattataaagcattgtcattaggaaaaaaagctacaaattgctcattatgtacaatatgaactctagttgcaaaacataccaggagctatccatgaatatatgcattctatatacacagatgtatagtctttcgagtgtctcttgaatgccaaagtaaatacttaaaatctgatacacagtataacaatatgattatacaaaacacatgcaaatatatcaagtacacatctgtaaaatgtatttcactctcttatctaagacctagctgataccaacctagctgatcagtctgggacttaagggaagactgaagcaactaagcacaaactgctgagcatatcgcagaggttttgntatcatcttcaatg

SEQ ID NO: 34905 - DNA, 498 bp, Homo sapiens
  misc_feature (1)...(498): n = a,t,c or g
cccctntgacgccngttgtagacngcnnnnnnnnnnnnnnnnnnnnnnnnnnnnnnnnnnnnnnnnnnnnnnnntctcgaggatcccgaattngcggncgcgtcgactttnnnnnnnnnnnnnnnnnnnnnnnnnnnnnnnnnnnnnnnnccagacaatcatgatgtttgtgaatgaagacagttttacttctttctctccactttagataccttttatggtcatgtgtctcttaattgtgaggatgcattcagagaaatgcattgttaggcaatgtcatcattgtgctaacatcatagagtannnnnnnnnnnnnnnnnnnnnnnnnnnnnnnnnnnnnnnnnnnnnnnnnnnnnnnnnnngtaagtagaaaaggtatagtacaaatataatcttatgggaccctcattgtanatgtggnctgtcatcgactgaaatgttgngttacgtcngtataactgtatttcttttctcacatgattgtactggttagactct

SEQ ID NO: 34906 - DNA, 391 bp, Homo sapiens
  misc_feature (1)...(391): n = a,t,c or g
tgacannnnnnnnnnnnnnnnnnnnnnnnnnnnnnnnnnnnnnnnnnnnnnnnnnnnnnnnnnnnnnnnnnnnnnnnnnnnnnnnnnnnnnnnnnnnnnnnnnnnnnnnnnnnnnnnnnnnnnnnnnnnnnnnnnnnnnnnnnnnnnnnnnnnnnnnnnnnnnnnnnagttttatcctgaaaccatcccctgtnnnnnnnnnnnnnnnnnnnnnnnnnnnnnnnnnnnnnnnnnnnnnnnnnnnnnnnnnnnnnnnnnnnatttagagaagacatgctttaagttttatgtanaatataggcaaggtagtaaaaacagacatcattctgcatcatgtaagtatgtgtagtaagaaaaatttgctacagtttgcccaagtaatcccaaagga

SEQ ID NO: 34907 - DNA, 384 bp, Homo sapiens
cacctactcaattctgccattgtcagacaaaagtagtcacaaggaaatgagcatggctctactccaataaaactatatttatgaaaactgaaattttgatttcatatcattttcatgcatcgtaaaatattaatctcttgacttttctccaaccatttaaaaatgtaaaaaccgtttttagctggcaagtcataaaaaacagcagtggctggatttggaccatgggctatgatttgccagcccctgacctacacggctgcctgaaatacagcagtagcaccagggcagagaggaaggacaaagaaaacatttcagaggtggaatcagtaaaacttattgatgagtggcacattaagagcaaagtcggcaaaaggagctccctag

SEQ ID NO: 34908 - DNA, 390 bp, Homo sapiens
  misc_feature (1)...(390): n = a,t,c or g
gnnnnnnnnnnnnnnnnnnnnnnnnnnnnnnnnnnnnnnnnnnnnnnnnnnnnnnnnnnnnnnnnnnnnnnnnnnnnnnnnnnnnnnnnnnnnnnnnnnnnnnnnnnnnnnnnnnnnnnnnnnnnnnnnnnnnnnnnnncatgggtttctgtaagcagtgagggttaggaagggccttgggtgaggttggccagggtggttgagcctctcagtggcaggacttctgagccctgcaggtactgaggcttcagggcccttctcaggcaaagagctcagatgggtgcagaatctctatttttagccctttttggattaagcttttgtggaaaatgaggtctcttccaggtgagaagtggccctgaggtcctgcaggtcagggacagcccactg

SEQ ID NO: 34909 - DNA, 391 bp, Homo sapiens
  misc_feature (1)...(391): n = a,t,c or g
nnnnnnnnnnnnnnnnnnnnnnnnnnnnnnnnnnnnnnnnnnnnnnnnnnnnnnnnnnnnnnnnnnnnnnnnnnnnnnnnnnnnnnnnnnnnnnnnnnnnnnnnnnnnnnnnnnnnnnnnnnnnntaatttttaaaaagatgaaaatagaaaaacataccacattcatacattagaaaattctacagttttaagatggcaattctctctcccaattaatctacagcatcaatgcaatctcaaagaaaatcaaatgagcttttttaaaaaaaactgatgagctgattttaacgtttatatagaaaggcacagaatctgtactagataaaccaattttgaaaaagaaaaacaatattgtaggacttaaaatatgtgattttgagacttactat

SEQ ID NO: 34910 - DNA, 339 bp, Homo sapiens
gccaagaatgctctcagaataaagatactaagaatttttatattatgctttattattactttattagtattcattttcatttgccattaatttattgttataattaagattatgatataaagaaataaagatcttgcatgctgtagtttaaggaggctttattcgtgcaacatgagtttgacacaggtactctcaactccccattctgtctgttcttcaatttgaataaaacattgataatctacatttttatttgataaaagcattaacattgtttcaaaaaaccgctggtataaatgttctttgagagagggcagtgagtatggccattaaagatgg

SEQ ID NO: 34911 - DNA, 339 bp, Homo sapiens
  misc_feature (1)...(339): n = a,t,c or g
gggcannnnnnnnnnnnnnnnnnnnnnnnnnnnnnggtgatgctaagtgaaattatttaagttgactaatacactcccactattcttggacagaagagtatagaagagatttggctttagaatttaactatcagtagcagcatcactaaaaaataataacgtataatgatgtatctataataatctataatatagcatagtttttctattaaaaaataaaaattcaaaataagccaaaggcatattgtttggaaataaatgtttgtgtgctaaattccattcctttgcaataaaactaatctagtggtagcgctgtgtgttggctttacaaatgagtct

SEQ ID NO: 34912 - DNA, 350 bp, Homo sapiens
tctacatgttgaaaagaataagggaattttctaggtagaaggggttatgaggcagaaaatggtgtgtcaaggaaatgaaagaaggctcttgcagctggatctgggcacaaagaaaaatggtaccagctgagtctaaagaggtagctagggattagatcatgcaagaccttttagacaatgttaagcattttagacttcatcctacatagttataactatttgtattggttgatatcctaatgactttaagtccataaaagaaactcaaagtgaaaattgggcttatctggaccctaatagtatataaggattaagaataccattgagaatatatgaattcaggtctttgt

SEQ ID NO: 34913 - DNA, 342 bp, Homo sapiens
cgctgtcctgcgcccccgacgaggagggaaacgagactgatgcaaatgatactctaaggccaacagacagaaccatatttaggatcctatcgggctagctccaaacgctgccttcccacctattcacctgaagttccttgtaatttgttagtgtgaattaaatgacatctcggaaagtgttgcttctgactagtgagaaagttttatgtcaagagaagatgaattgctccaaggagaaaaatatgccaggcaagtccaaacacgtctgcctacctacaagtatgattcccacaagcacgtcctcctcttgccaacccatcttcaaccttatagggtgcagag

SEQ ID NO: 34914 - DNA, 335 bp, Homo sapiens
cttcagtccaagcccatggcgcatcttgcgtctctgttgcatgtgtgtctcggcgcataaatcccttttgcctcagaactctgatatcgccatcatgacatccacctccagcaccctgcacaagggtgagcgtgggcctctaaccatcagctgtttcaccatgtcagtatcacagggagcaggacacacattccagagctgggtagattaacctccaagacgacactcagttttagctttagcctccctaaatcctcaacaaaagctttaacagccagaactgatttaggaccttaactgtaaatctcctctcttctcatgcactcactaaaggg

SEQ ID NO: 34915 - DNA, 337 bp, Homo sapiens
  misc_feature (1)...(337): n = a,t,c or g
ctttgctgattgtggggggaagggagaaacnnnnnnnnnnnnnnnnnnnnnnnnnnnnnnnnnnnnnnnnnnnnnnnnnnnnnnnnnnnnnnnnnnnnnnnnnnnnnnnnnnnnnnnnnnnnnnnnnnnnnnnnnnnnnnnnnnnagactttcctgatttaaatgagagtactgcatcattccctacttcatggcccaaaacttaatcctgggccaaatgcaggagcatctctcgacctctgggcagattggtgggtgcccaggcactagtcacagccttccagcccagccatgattgttggatgccccatccctccaagagcaatttgggcatcta

SEQ ID NO: 34916 - DNA, 395 bp, Homo sapiens
  misc_feature (1)...(395): n = a,t,c or g
ccatgtcattgcaaatgacaggattttcttctnnnnnnnnnnnnnnnnnnnnnnnnnnnnnnnnnnnnnnnnnnnnnnnnnnnnnnnnnnnnnnnnnnnnnnnnnnnnnnnnnnnnnnnnnnnnnnnnnnnnnnnnnnnnnnnnnnnnnnnnnnnnnnnnnnnnnnnnnnnnnnnnnnnnnnnnnnnnnnnnnnnnnnnnnnnnnnnnnnnnnnnnnnnnnnnnnnnnnnnnnnnnnnnnnnnnnnnnnnnnnnnnnnnnnnnnnnnaccccatactgttttccataatagctgtactgcaaacactgattcttaatctggggtccatggatgaccttggagggaggttatgaaactgctgaaatggaatgnaattttttacatgnacctttttt

SEQ ID NO: 34917 - DNA, 396 bp, Homo sapiens
gttatccccattttacagattgagaaatggaagattaaaaatggagtgatgagggttcaaactcaggactccagtttcgcccaaatgccctttttcaatattattagatccttggggcaaataaaaatgaactgctctcttgcctcccatatatgtttgcaactaagtaaacacaatgttgttttaatacatttttgcccataagaaagcctctgttactgagcgtatggcttccactgtcagaaacatactaactagaagtagaagttatgtaggagtaggaataaatatccatagatgctaacagaaatgacataaaatatgacagaaaacactaaatatgtatagttgactcttgaggcaaagaaagcttaccgaatttggttgcattacagg

SEQ ID NO: 34918 - DNA, 395 bp, Homo sapiens
  misc_feature (1)...(395): n = a,t,c or g
nnnnnnnnnnnnnnnnnnnnnnnnnnnnnnnnnnnnnnnnnnnnnnnnnnnnnacgtgtagtacctttgaacaaattaggaaaaatgtcctctctggtatatgtagcaccatgccagtggcaagcaagtgtgcaatggattttaacctcctctagtctccttgactggtggcctcatgcagtatgcaacctgcacaatagtatgctgtggtcatttgtgtataaatatatatgcctgcctatgatgcttctggttggatatatgtaaaactagaaagaaagactgcttctaggaagggaagacagagagcttggtagtaggaggtggaaaggaggcttatctccataccccatttggagagtnttaatgntgntactatgttcacaaactgcttt

SEQ ID NO: 34919 - DNA, 398 bp, Homo sapiens
  misc_feature (1)...(398): n = a,t,c or g
gaatcactggattaatcctcacatgttagcacctcactaacttcgtttttgattgtgttggtgtcatgttgagaaaaaggtggaataaaccttactacacattaaaagttaaaagttcttactaatagtagtgaagttagatgggccaaaccatcaaacttatttttatagaagttattgagaataatctttcttaaaaaatatatgcgctttagatattgatatacgcttgagaaattttattaaagttagtcaagtgcctaagtttttaatattggacttgagtatttatatattgtgcatcanctctgttggatactgagaacactgtanaagnggncnatttgntctagcacctttgagaatttactttatggaacgtatgtaagtgatttata

SEQ ID NO: 34920 - DNA, 331 bp, Homo sapiens
  misc_feature (1)...(331): n = a,t,c or g
ggcagatgataatttgtcagatgttacagaagaatgtgttgggctccttgattctttgaattaaaaagtctgtgtttctaaaccaagagatgacatgtatcaatatgtttgagtcatttttctggactctcatctgtacattgtcctattttagttttggtaaagcagctcattaagtaaagctcacgtagttgttataggcatgctttgtcactgggtaccttttatgtgtgtgtggtgaattatnccttaaaaaaggttaatatttgggcnctttaaaaganaaccttanntttanagnncanatttttttttttgcaccggnnaaaaa

SEQ ID NO: 34921 - DNA, 342 bp, Homo sapiens
ttttaactatagtgttccatattatattaccctactccatggaattaatacatttctatatctaagtttatatattatttaattgctaatgataaaattgaaatccctatgagattttgaatgattcccttattcttttgtgatagttacgtttttgagtttataaagagtaggaccaaagccactctaatatttattaatggtaatcagtttgggattatttttaaaaacaccaagtatgaaaagcatttttactactagtattttaagagattaaaattttcaatatgataagttactcttggctggcttatgttctatttaatttttcaggatcttttc

SEQ ID NO: 34922 - DNA, 151 bp, Homo sapiens
cacatgaccatgaggatgggaacagtggacactggggcctactagagggcggagaaagggagggggacaagggctggaggactgcctgttgggtacggtgctcattgcctgggtgacaggatcattcataccccaaatttttttttttttt

SEQ ID NO: 34923 - DNA, 340 bp, Homo sapiens
  misc_feature (1)...(340): n = a,t,c or g
aacagtttgaggttaagctaaagagacacaataactaaatacatatattagattggnnnnnnnnnnnnnnnnnnnnnnnnnnnnnnnnnnnnnnnnnnnnnnnnnnnnnnnnnnnnnnnnnnttaatacattctgacttaaaatgtataagtacatttatacattttaagtcagaattaaaatgggagccccaaaggacttttggctatttacacattaatatgaattggtttaattagattccttctttgacaggctcaaatgagattactgacttagaaaaaaaatgggacgtctgacgtcgacgcggcgcgaattccagatctatgaatcgtagata

SEQ ID NO: 34924 - DNA, 336 bp, Homo sapiens
  misc_feature (1)...(336): n = a,t,c or g
cactcctatatttattgtagcactagttatcatagccaagatatagcgttaacctaaatannnnnnnnnnnnnnnnnnnnnnnnnnnnnnnnnnnnnnnnnnnnnnnnnnnnnnnnnnnnnnnnnnnnnnnnnnnnnnnnnnnnnnnnnnnnnnnnnnnnnnnnnnnnnnnnnnnnnnnnnnnnnnnnnnnnnnnnnnnnnnnnnnnnnnnnnnnnnnnnnnnnnnnnnngactagaaagagctggtctcaaggaggtggagagtagaacgggggttgccagaagctgtgaagggcagggggatgaagagaggctggtaatggattcagaaatacg

SEQ ID NO: 34925 - DNA, 319 bp, Homo sapiens
gggattacaggcatgaaccacaatgcctagcctcacacatacagttttaaaaaatggaattgtactgtgtatttttctttactataacttttgacttaatatgtggtgaacattttctcctgacagcttttattttttgtgccatgcattcgttggcctcatagtatttcatagtcagactgtagtgtcatttgattaactcttcactcttggatatgtccacttaaattatgaattaggtcccttagcttcattagtattgttctaaaagccatctgattatttttgtcaatctttgtcattgtactcagcgttccat

SEQ ID NO: 34926 - DNA, 316 bp, Homo sapiens
ctttgtttttcagaagagatgctggcttagccttgtaaacatcgcagttgcataaaagtatttatgatagtccttaaaatgctgtaattatctttgaagttttataattttgcagtgtttaacttatggcagcaatagcattggtattttaaatcaaaacagaacactgtcaagggttacataacttattcatgatattaacaagatataaagcaccatgtttttgtgtgtaactgtttaacagtagatgaagttaatgattgcccactttcagctaatcatatgattgctattgaaataagtacttgctagacag

SEQ ID NO: 34927 - DNA, 316 bp, Homo sapiens
gtttcttactcttggggaggccaagacgtcagttagtttctgaaagcatcatccaagcaagtaggaagcaccagcccagagtgtgtctccatcttcatatacagcctttgctgctttcagagcagggctaggctttcccctggcccccttcccacaacattgctactgtgggaagtgggcttattaattcctagttcaactgcatgtatgtgaacaaaatataaacacatctctaaaggtatatttttatgactgctatttattgagcccaaagtaacttttttgttttcttaaaatctgagattttactactctt

SEQ ID NO: 34928 - DNA, 329 bp, Homo sapiens
  misc_feature (1)...(329): n = a,t,c or g
ctcagcctcccaggtagccagannnnnnnnnnnnnnnnnnnnnnnnnnnnnnnnnnnnnnggtggngntgggangngttaacnggggcacccgggnngncaaggtgnnggntnnncctggtttaancccctgggnttccaaatgggggncnancggncgcgaattcccnnnnnnnnnnnnnnnnnnnnnnnnnnnnnnnnnnnnnnnnnnnnnnnnnnnnnnnnnnnnnnnnnnnnnnnnnnnnnnnnnnnnnnnnnnnnnnnnnnnnnnnnnnnnnnnnnnnnnnnnnnnnnnnnnnnnnnnnnnnnnnnnnnnnnnnnnnnnnnnnn

SEQ ID NO: 34929 - DNA, 316 bp, Homo sapiens
ggaactggggacaatgaacaaatatttattattataccacagctgaaatgccatcttgtagagtcctttcctggccaccgtttttgaagtagcacagatactgatcactcatagcagcctgtcatattgcccaagtttgacattttcttgcatctgtgtgtgttcagtaggctttttcttcaactcgaacgtaagttccgtgatcctaggtttgggtctgtcccgctcaccacgctatcccagcacctggcacatagtagatgtacagtaaatactacgtgaataagcatgtgcatgactcagtgatgctgagggg

SEQ ID NO: 34930 - DNA, 317 bp, Homo sapiens
tgtttttgtaatactgaaaatttggaaataatctaaacatccttcaatagagagctaagttgaacaaattattaggaagataaaatgtgtggtcactctaatatagaataatgcttatgacatattgagttaaaaaagtaaatgcaatatcatatatgctgtgtgacataattaccctaaaaaccttaacacatatgtatttttcatgagttcacttaacaagcatttactgagtatactatttgacaggtaccttgacagatgttgaatatgtaagtgattttaaaaataacaaaaacaaaaaacaggaatcctgg

SEQ ID NO: 34931 - DNA, 322 bp, Homo sapiens
gtcaaagggaaaagagggcatttgagaacctgcatgcatttatacagttaaaaaatcttttctttccattgatcacttcatcagatgaaaggtgtcacagaccacctgtctacatgtctgcttggctccatgaaaaatctaccttacagcccatttcctatgttgaaaaacattacctagattcatttttgtgttttgcaaacattggtttaatctgtagtggaatttagaaactacgatcatatttgtgttttacttaactttcgactattccgcatgccccgtggagcagcactgtccagcagaactttctgcagtgaca

SEQ ID NO: 34932 - DNA, 317 bp, Homo sapiens
aagtacaaagattgtcttgaaaccacaaaaaaccagggtgaatactgcccaaaacactctgaagtgaaagcagcagatgaagatgtatttcgtaaacctggcttgcctcctcctgcatctaaacctttgagacctaccactaagatttttagctcaaagagtacttcacgaattgctggtctttctaaatctttggaaacttcttcagcactttcaccgtctctaaaaaataagtcaaaggggatacagtcgattttgaaagtaccacagccagttcccctcatagctcagaagccagttggtgaaatgaagaattc

SEQ ID NO: 34933 - DNA, 378 bp, Homo sapiens
  misc_feature (1)...(378): n = a,t,c or g
taaaaaaataataaaatctgacaattgaatgcaatacctgacctaaaactggatcctctaatggagggaaaagaaatactgtcaagaacattattgnnnnnnnnnnnnnnnnnnnnnnnnnnnnnnnnnnnnnnnnnnnnnnnnnnnnnnnnnnnnnnnnnnnnnnnnnnnnnnnnnnnnnnnnnnnnnnnnnnnnnnnnnnnnnnnnnnnnnnnnnnnnnnnnnnnnttattgggtcaagtcacaaaattggaatacaaatggtagagaaaataaaatgattgaattagtttacatttactgaatttgataactgtccatggtcataagagaatgcattttcttgggaaatcncattaagtatttaggagtaaaaga

SEQ ID NO: 34934 - DNA, 383 bp, Homo sapiens
  misc_feature (1)...(383): n = a,t,c or g
gtggattcctctaaccagacatactcatatatagatgaatataaaaggtacaatgttaagtagaataaaatctcaaaattttatttatttattttttttttgtttttgttttttctttttctggannnnnnnnnnnnnnnnnnnnnnnnnnnnnnnnnnnnnnnnnnnnnnnnnnnnnnnnnnnnnnnnnnnttnnnnnnnnnnnnnnnnnnnnnnnnnnnnnnnnnnnnnnnnnnnnnnnnnnntctcaaaattttaaaagtcgacgcggccgcgaattccnnnnnnnnnnnnnnnnnnnnnnnnnnnnnnnnnnnnnnnnnnnnnnnnnnnnnnnnngcnnnnnnnnnnnnnnnnnnnnnnnnnnnnnnnnnnnnnnnnnn

SEQ ID NO: 34935 - DNA, 375 bp, Homo sapiens
  misc_feature (1)...(375): n = a,t,c or g
nnnnnnnnnnnnnnnnnnnnnnnnnnnnnnnnnnnnnnnnnnnnnnnnnnnnnnnnnnnnnnnnnnnnnnnnnnnnnnnnnnnnnnncttttactttcatatccagttcttcaacaaatcttattagctttacctccagattatattcagaattcctctacttctcagcatacccactactccaccctggtcagaggtactatcttttttggactgaattattgcagtaacattctaactgatctccttgcttctatacttgcccttcccatctattttttcttctcagtggagtgattctttgagttataagtcaaatcatattactcttacgaggttttggttcactcagagnaaaagtcaaaatccttataa

SEQ ID NO: 34936 - DNA, 377 bp, Homo sapiens
  misc_feature (1)...(377): n = a,t,c or g
nnnnnnnnnnnnnnnnnnnnnnnnnnnnnnnnnnnnnnnnnnnnnnnnnnnnnnnnnnnnnnnnnnnnnnnnnnnnncttatttcccttttgcagtgggagctgctctctccttgcacttctggcccctgcagtggtctgctgggtggagtgggtttgatgtgattcacgattccctggggactcagtggggattccataaggatcacttcctatacttttctttcagtactacttccctcactcctcccatgttccctgagctccttcctgccctgaacatatagtaagtatcatggacttttcagccacagtcaacgccgttccctctgcatgggtccctgcttcactcatgcagacatcntactcatccttcaa

SEQ ID NO: 34937 - DNA, 381 bp, Homo sapiens
  misc_feature (1)...(381): n = a,t,c or g
atcatggtgnnnnnnnnnnnnnnnnnnnnnnnnnnnnnnnnnnnnnnnnnnnnnnnnnnnnnnnnnnnnnnnnnnnnnnnnnnnnnnnnnnnnnnnnnnnnnnnnnnntactacaannnnnnnnnnnnnnnnnnnnnnnnnnnnnnnnnnnnnnnnnncctaaacattgaaaaggtacagtaaaaataagannnnnnnnnnnnnnnnnnnnnnnnnnnnnnnnnnnnnnnnnnnnnnnnnnnnnnnnnnnnnnnnnnnnnnnnnnnnatacttcagaagttggaaactggcaacttctctagaccccagttgccagctaagaaatacgcgtgtgcgtatacacacacactcaatttatttgcaaaattcttcaagccaaac

SEQ ID NO: 34938 - DNA, 383 bp, Homo sapiens
  misc_feature (1)...(383): n = a,t,c or g
gctacttgaaatgttatttggttctttgtccccctcattgcagagtatagataaggatgctcttaggtaaaatgcagccacaagttttccgagttcctttagtctgtagggtaggctatgaggtacagaatgattagaaactgaaatcctcattatttttctctcaaatacatttcacatacattgaaacagaaataggcaaaatttatgagggaaatctgatttcccaattctgatgaatagatatactaagacagtagccttgtttaaccagtgcctgtagaaggcactagaataaatagcatgtccaagagtataacaactttttttgnaaatttaattactagcctaatcaaactgnaaatataactcactaattggac

SEQ ID NO: 34939 - DNA, 384 bp, Homo sapiens
tgaaacctcccttaaatttcttcttccctttctgaatcatcacctaccaagcacagtgcctggcacctaacaggtacataatgtctgtcaaagacaaagcccactttatactattactttgatcattctacctcttctactcttcaatagccatctttgaaaccctaccctgtaccatgctgagggggcaattttggaaatgaccactaatacatatctctgggaatacaattgcaatgcttcttgagctttgcccaaagagcagtaccagatctttgagacacagatatgttttaggtaaaaatcagtatgcctgggcaacacaagaccctgtctccacaaaaactaaaagaaaatttgccgggcgcagtggcttgtgcctgt

SEQ ID NO: 34940 - DNA, 249 bp, Homo sapiens
  misc_feature (1)...(249): n = a,t,c or g
nnnnnnnnnnnnnnnnnnnnnnnnnnnnnnnnnnnnnnnnnnnnnnnnnnnnnnnnnnnnnnnnnnnnnnnnnnnnnnnnnnnnnnnnnnnnnnnnnnnnnnnnnnnnnnnnnnnnnnnactaccctnnnnnnnnnnnnnnnnnnnnnnnnnnnnnnnnnnnnnnnnnnnnnnnnnnnnnntgctgttttaaatgatttgtaatttttaggttccttaggtttaaggaacctaagtttttttttttttt

SEQ ID NO: 34941 - DNA, 383 bp, Homo sapiens
ctcgcggtcacctcttgttactgttttcattttccctttcaatgaaatggtgtgaagatgggaggcacaagagagggatcctgttttttctgcgggacacgtcttaatcccatcatgcgtgtttcttcagctatgtattctaataatctgctaaagtagaaagtaaaagacctgctattttatctcattgggaccgtacgttttagagatcgggaagtaaacagtccactaaccctgccgataactatcatctggcccggaggagaaccctgcaggtggttgtgagctccttgctgacagaggcagggtttgagagtgcccgagaaagcatccgtggaaacgctgacagaaatgctgcagactcatttcagaaattgggagaa

SEQ ID NO: 34942 - DNA, 379 bp, Homo sapiens
  misc_feature (1)...(379): n = a,t,c or g
cacaatttatgtatttattttcctgttaaggaatatttagtttgtctcagctttttacaatgctgttgttacaaacattacagtagaagtctccaggtgggcaggagcagtagcctttccagagtacatacctactagtgggcttgctgtgttataaacttaagatctttatcatttgttgtttaactttattgaaaggagaggcccagtttctataacagaacaacaaaggaggaggactgctaagggctaagcttagtgtctttcttatgtcccaaacctttcagctttgatccaaaatgtggataatgaaagcctataggacgttgacttgagccatgttcccttgaggncttacccctgngctcactctatattc

SEQ ID NO: 34943 - DNA, 386 bp, Homo sapiens
cactgatagatatcctagtggttggctcatagatacaagcattttttatggttgtgttgatttgaacacgtgccatttctatgcaaaccttgacctttgtaattgacctgatgtgtacagatgacagcaaatagatcaatcagggtgatgtctcattaccatatggccagtgatttctctaggactaaagtatgttttttctctttagggattgagggccatttttgtcttctgttaaaattctaggtctagtcacaaaactggaaaggatgggaactaaagtgcaatactcttctgctagtttggcaccaagtttccaatgctgaaaagaatgattttccattgccagactcttctttagaggggcctatgtccccaacttaaag

SEQ ID NO: 34944 - DNA, 378 bp, Homo sapiens
  misc_feature (1)...(378): n = a,t,c or g
ctataatttaaaatttaaatattttaaaatgtaaaacttgtacatttgttatcagcttaccttttaaatcatatttcactgtcaagaaatcttacttgagggctttctattagtatatattatgtcaattttttaaaggactatttataaataagctgtacaactctgttggaggtactgggaaacaattttaagtatgatctgttcatttcttctccagagttaatgttctcctcagaggtggaagaatatcctgataaagagaaagaaatcaaagcctcttcataataccagctcacctttggaggaataatgacccagtatttgcccatttttgnttttaaatgnatttttataagatgnatacatgngnatttg

SEQ ID NO: 34945 - DNA, 390 bp, Homo sapiens
gagacttaagggattgctaagatttggattttgaaagaggtgagaaaagaacgtcctagtgcaggacaatgagggaaaaaggaggtgggagcggaagtacaggtagtgaaagatgtctttgaggaatggtggttagaatacaaattttgtaaatgttttgggctgagttgtgtaagatcaaggggtggaaagattgtagaaagctttgaatggtagcttaagaagccaggcagtaggagaaggaagaggtggtttagatgggaagtagtggtagcatataggatgaattgaacgggaagaaaatagggatgaggagaacagttaggaggctgctttttgaagaaaacatcttgattgagacatggttcacatacccgtaccagttcaccc

SEQ ID NO: 34946 - DNA, 380 bp, Homo sapiens
  misc_feature (1)...(380): n = a,t,c or g
gttctttcatttgctgcttctgtttaagctcaagggtcagtcaccatgaaatgaatttgcacctcggtttctctttaggctccaagattcccaagaactccagggttcccgctttccccattccgtgggactccttggggcccaggagagtgtgctgagcaaagctggctcttgagaaaactctggctagcttacttgctggctgctccacttccctctccaaaacttcagaattcaccacccattgtcccaccagaaatcccctagaattttagggtcatgctaactcacaaagtcgacgcggccgcgaattccnnnnnnnnnnnnnnnnnnnnnnnnnnnnnnnnnnnnnnnnnnnnnnnnnnnnnnnnnnnnnnnnn

SEQ ID NO: 34947 - DNA, 391 bp, Homo sapiens
  misc_feature (1)...(391): n = a,t,c or g
aaatggcactgttgtcattcattcactcattcaaaagtattgattaagcactcactacactatgctaggtgtggggatggagagatgaatatagtcttgctccgaagcagaacaaaagcgagacaaacatgaaaataaacaataatatgacctggtaagtgctataatggaagtatgtgccgtgtgcaaaaggtcgacgcggccgcgaattccnnnnnnnnnnnnnnnnnnnnnnnnnnnnnnnnnnnnnnnnnnnnnnnnnnnnnnnnnnnnnnnnnnnnnnnnnnnnnnnnnnnnnnnnnnnnnnnnnnnnnnnnnnnnnnnnnnnnnnnnnnnnnnnnnnnnnnnnnnnnnnnnnnnnnnnnnnnnnnnnnnnnnnnnnnnnnnnnnn

SEQ ID NO: 34948 - DNA, 309 bp, Homo sapiens
cgggctttgaatttgagcatgggctttaaaatctggcctctgttactcaccgatggcatgacaatgggcaaagcacgtaatctttgtgagtcttcagttttctcatctcttaattaagggttgcaatactcacctctgagtttcagtgaaggtcatatgaaattgtgtatgtaagtcattttgcacagcacctggccactgcaaatgctcagcaaatagaagttatagtgatagtaattgctagtaaaaataatccttactaataagttctaggtaggtataactttgagaaagtgcagaattgctggg

SEQ ID NO: 34949 - DNA, 312 bp, Homo sapiens
tcttccttttcttctggtgtcatctgggccactagctctggccgttggctcacttcactgtaggagaacggacggccagccaccatgacaatggggtcatctgctacttcttcaaactcgtcatcttcctcttcatcctcttctcgtttatgcacagccacagctgccggacggggtgaagaatcatcatctgactcactggtctcgctttctgagtcactgccattggcagcggtcactggagcagctgccccactgaaccagccatggcagaggaagtctttttctcgtgaatgagcagtgctcgcatga

SEQ ID NO: 34950 - DNA, 314 bp, Homo sapiens
gattttacagatttatttttaaaaaacaaaacaaaggttaaaaaagtccttcatttccaaccctgcctgggggtgtgggtggggaatagaataagctcagaaaggtgcctacctccttcctgcaaaggacacggcaggtcagaggcaggcccttgccctttctgccctgcctcctcctcaggtagctcaaattgctgctaggaagatttataggcaaagaagtgtgggagtgggaggccaagagctgccttcttcacatcaacagatactccagctgtcttagaagttctctgagcctcaccactgggactccc

SEQ ID NO: 34951 - DNA, 315 bp, Homo sapiens
ctggggtctgtgggccagtgtggccgtctctacgaagactggcacgacccctaaagttaggtcggaagacctgtgggcagcttgagcgccgaggagtgccctgaacgctcaactcgccctggaaacgtttttccgtacagcaacatggcggcgcccatagactcttagaaaaggagaaagctttttttctgtggactgaaaggggcgtttttcatgatcactatttagatgggtgctgttttcctgaggagaagtctggcgtccgcttttctgacaagggaagaggctacttttgtccttttaaggattcaatga

SEQ ID NO: 34952 - DNA, 321 bp, Homo sapiens
aaggaaggaaaaagaaaagagaaaagaaagaaaacacaaaacctactgatatggtagctagtatttcctgagtgataggcactactctggatactttactattctggttatttaactaagtcattacaagaaccttgtgaatgagtgtccattattatttccatttaatagataagggagctaaagccactgagtggttaaggaccttggcagaggtcacacacggtaaacaccagagctgggatttgaacctaagaggcctgcttcccacacacactcttttgactgctgtacacttttgtaccatagtggcatcattca

SEQ ID NO: 34953 - DNA, 308 bp, Homo sapiens
  misc_feature (1)...(308): n = a,t,c or g
ttcccttcagcaaatataaactgaatgccgtttatttggttgaaactaagctagatcatgggagtatagaaattttataagaagacatagtcacttctgtcagtgagctcaagaagaattagtatgcggaatgtaatcatacctacagggggcttgtgccacttaagtaaaatgaaacattattttgagtacaatttagcaataaatgtactacgagatcattaaaaatcatgtttgaatgttattgtggggaaaaagacttttgggttgtagacttgataattatagntaaaaacagtttttattcg

SEQ ID NO: 34954 - DNA, 322 bp, Homo sapiens
  misc_feature (1)...(322): n = a,t,c or g
aaccaaaaagtgaggaagtggtgactacgaaatgtagaattctttcaagtgagtataatagctagtttgacaaaaccaactccttccccatttttaaatttcagtaaaactaacactcagcaacagctggtatgtagacacatcagaaaattatgtaactagaatataaaagaagcctatttattgactttgccttgcatttgcatatatttaccccagttttctagatctgtatgtaaaacactcaactatcattgttggtatttacagtgatttttgaaatacataagccgttccaaaataactttgnatattgatatgc

SEQ ID NO: 34955 - DNA, 322 bp, Homo sapiens
gtttaattcacaaaaatgttttaatagccaactgtgaggggagggagaccagaagttcattagtgaggcacagtaaatgtgatgctgaggtatggcacctgtactgctaaaggagagcactggcatggataaaacatttggcatttcctaaaatcacctcctggcctgtctttcaagcaagtgaaaaggaagaagttgtggattgatttgggaagtacatttggaaaatgacctaatgtgataagctggaaccaatagggttaaaaaccctggtgaggtatacagccttgattctaaaagtggaaagtttgagtgaaggcta

SEQ ID NO: 34956 - DNA, 309 bp, Homo sapiens
ctcaagtctctgtccacatttcctatcctcagaaaaaccttcttaatcgtgaatataaaatgaccccttccccacccatctctctatttccccttaacgtactctatttttctccatagcatttaccactacctgcttttttactgttatctgggccctctgccacttatttaaggtctgagggaaaacaggttttgtttttattcactgctgcttcctccctgcatagaatagtatctgcttagtaaaaacttatggaatgaatgaatcaagttctctataaacaatgtatttaatggaaaaaatatt

SEQ ID NO: 34957 - DNA, 315 bp, Homo sapiens
ttttcctaaaaaataaagatttaaaattattttctctagtgagaataaaagttgtttttcctttaatttggctaaaatttggagttctttccaacattaatagtttagaataatttatttcagcttctcaactcattgataatgtcatgtaaattgttagaattattgacaaatttggagaaatctctgccaagtgtttttcatataggagctataaaatctggaaaaatacctgcagactgctggttctatatatttcaaatgttcctctactacctacatactgccaatgttaggctctgcaaaaagtgttct

SEQ ID NO: 34958 - DNA, 324 bp, Homo sapiens
gtgatttcttttacagcagtaagtagactggattggaggaactcatagtagaggaacttggaagacattcagtctcaggaaaaaggaggctctcaaaggaattaattataagcaggggatataggggtattgtgaaagaagaacagataaatcccattgtatgaaacagtatgtagaacaagtgaaaggaaaagatgagacaagacaaaacattaaggttttaaacttacatacctcagagaatgaggtcattatcataaagaggaaacattaaaggaagagcaagtatcaagatatgatgagcttgctttgaagcactcagag

SEQ ID NO: 34959 - DNA, 315 bp, Homo sapiens
  misc_feature (1)...(315): n = a,t,c or g
ctgggggtgggaatgaatgggggaaagaaatagggagagaaggaacacagacagaagggagagagacaatcaagatgatttcaaaataaaaaagagagnnnnnnnnnnnnnnnnnnnnnnnnnnnnnnnnnnnnnnnnnnnnnnnnnnnnnnnnnnnnnnnnnnnnnnnnnnnnnnnnnnnnnnnnnnnnnnnnnnnnnnnnnnnnnnnnnnnnnnnnnnnnnnnnnnnnnnnnnnnnnnnnnnnnnnnnnnnnnnnnnnnnnnnnnnnnnnnnnnnnnnnnnnnnnnnncttgaacctgggaggcggggcttgc

SEQ ID NO: 34960 - DNA, 380 bp, Homo sapiens
ctcagtgcattccatattcaattagtcatccaaccaaaccctgtcaattaaatactccattcccactcatattgtcaccatcttggatattccacagtcaaaaactgcatcagcttttctataagctaatagctcatgccagccttattaataaaacatctaggtctttttcacatgaactgcaggtcttacatcataattttgtaggacataattataataaaatattttacatttcctcaaaaaaattcactttattaatttcagtccattattccagcctatatattaactcttccttccagatatataccaaacacaaattggataggcaaaactttaaactaaaagaaatcaatcacatttcctattcaaaagaa

SEQ ID NO: 34961 - DNA, 378 bp, Homo sapiens
gccagaaggtagattgctcagttcttcagaaattaaggatcccattttcaccttgaatcttggctttggctctcatatttccttggtaaacttaaccagtgatttttctctacttaaatgtgcaagaagaagaattgaagagggcaggacacaaaaaaccctgtgaatttccaaaagccaaaatttgcacccccaccccctgctgttttgccatttactgtgcttctgcccgacccagtcaggcataagaggtctttagctagatccaaggcagttggatcctggacccagtccagtttttgttgcgacttctgaattcagttcagatagaaaatgtgttcaaaaaaacttggatagctcaaaacacaaatgcgcaga

SEQ ID NO: 34962 - DNA, 383 bp, Homo sapiens
cagggttgcactaccgtacagcgcataacctgcggccacaatattgcggccacactgcagggcatccttttcagaaggctcatcctctgaggtctttctatagatggcaaagatggttccgatggaggccaggcagtcaatattggaagatccatccagtgggtcaaagcagaccacgtatttcccccgcttctccttggcggtgatgatggcgtccttattctcttctgagaccaggacgcaggtactataggaggattggagcatgttgatcaccagggaattggatagcacatccagtttcttcacctcatctcccgtcacgttaacgcttcctgcgattccatacaggtgggccagaccggccttgcgcacagccgacg

SEQ ID NO: 34963 - DNA, 372 bp, Homo sapiens
  misc_feature (1)...(372): n = a,t,c or g
atgtgatgtgtgtgtgtacgcacatgcctgcatttcaagacattattgacaccaaaggttaagaatcactaatgcagtggttctttcattttaaatccggcagcccccaggatcacagcagattcagaagactccttgtaattgttctttatccttgtgtcccactttatgaaattctttccctgggtatttgcctgagggccttttctagccacaaagtactgttggcctccacaaaagaaaatttcaaaatatggaagcctagcccgacgaatattggagtgtcttttttttctgtttcagtgncatcagatgtatcatgaccctacagattttgcacgttctggcatttgngcattcttgtgtgcatat

SEQ ID NO: 34964 - DNA, 377 bp, Homo sapiens
ctcaattgagtctttgtggcgttgtattacagagagtcacagaaaatgttctatgtaaatgactatgtgctctgattagagcctcaatgggcaccattgtgtcatattgctattattggcgattgcaggatactaaatgatattctcatcaggctgaaaaacttcagtgttagcagtgaaactcggggttaattatactgctctgaattagagcatggaattaagttgtagggagagtaagcctattgctttcttccccctctgtcttcctcttcaagattcttgctgggggtttgatcagaatagtttttaacccatgttctatatctgtactactggcattttgttctccatgagttactaccccatttggggtt

SEQ ID NO: 34965 - DNA, 328 bp, Homo sapiens
  misc_feature (1)...(328): n = a,t,c or g
nnnnnnnnnnnnnnnnnnnnnnnnnnnnnnnnnnnnnnnnnnnnnnnnnnnnnnnnnnnnnnnnnnnnnnnnnnnnnnnnnnnnnnnnnnnnnnnnnnnnnnnnnnnnnnnnnnnnnnnnnnnnnnnnnnnnnnnnnnnnnnnnnnnnnnnnnnnnnnnnnnnccaaaaacaaaactgaggatatcttacatttggaccaaaaggacaatcatgagggattttttttttcttttttaaatttgagacagggtcttgctatgttnnnnnnnnnnnnnnnnnnnnnnnnnnnnnnnnnnnnnnnnnnnnnnnnnnnnnnnnnnnnnngca

SEQ ID NO: 34966 - DNA, 320 bp, Homo sapiens
gtgaatgggtcctgaggtttcttttcatgtctgtgtaccggagaccatgggatatcatgagtagcatgactataagctaggtgagcagactgactgtgtatttttcacttttctaagcacctgacgtagtcctggtacttagtaggtattcaagaaatatacgttgacagattgaatgacataccgtcagatatatccagagcctttccagttcctcttaaacgaactggtaatatctttaagcaaaaacatataggctttaatatttttccaggaagagaaaatcaatgaactcaatatttttatcaagaatgtagagg

SEQ ID NO: 34967 - DNA, 320 bp, Homo sapiens
actaaatccaaaatggtattgtatctgattgtttcattagttctgagagtcaggagcaccaaaattaaattttttctcttcttattgcttcttcccactctttgataacggtgttaaagatcactgaaaagaccaaaaggttggcagcaggtggggggaaggaaaaacaaagcaagcagccaggggatctgaaaactcaaccatcagcctttgaataatagagtgaaaaatgtaaagctatttgggagacttaaaaggtagacactatgaaaatcttgacagtgagttttaaatatgttcctctttataagagtctgatg

SEQ ID NO: 34968 - DNA, 314 bp, Homo sapiens
  misc_feature (1)...(314): n = a,t,c or g
gcggagtgatcgtgtggaatcgcgggtcgcggacgctcgccgccggccatagctcagcctagcgccgccaaggccgacggccctcagcctctgccatggacttcgaggacgattacacacactccgcctgcaggaatacttatcagggctttaatggaatggatcgtgattatggccctggatcttatggagggatggatcgtgactatggccatggatcctatgggggtcagagatccatggattcctacctaaaccagtcatatggcatggacaatcacagtggnggtggnggangtantaacatgatcctg

SEQ ID NO: 34969 - DNA, 327 bp, Homo sapiens
gcgagaccaggggacccgccacattccctgaggaccctcaatggactggctcaaaggaatgtggactgtggggtctgaatggctgcgcctgcatctagggtccaccgctttctagctgtgtgaccccttggcaagttacttacccccagctacagtttccttttgcataaaataggcttctaacagggccatctgaggagtcaagtaagatgaagtacttaaagcctctggcatggtgcctggcatacagaagatgcccaagacacattactttctcttctcttcatctgtctatcctgatgctacccgggcagggaggcccagact

SEQ ID NO: 34970 - DNA, 316 bp, Homo sapiens
gtttgggctggtgtagggctcttgttggcccggggatgggaaaggccattggggagggcttcgttgggtacctcgtgaacagaatgggcagcggtcaggacaggtgttcagacgccaactccaagttctaggcagtggtcttgaccctcctcatctataaaacgatgtatgacatttgaaaccatgtgcgtaatgtatcctggcacggggtaagcacccgggaattggaagctgtgattcttatttgggggtcccttctctcttttggggtcatttgctttttggggaacatcatggtggaacattgaactccgcg

SEQ ID NO: 34971 - DNA, 260 bp, Homo sapiens
catgagacacatctcctccatactcaggactcctctccgcagttcctgtcccttctcttaatttaatcttttttatgtgccgtgttattgtattaggtgtcatttccattatttatattagtttagccaaaggataagtgtcccctatggggatggtccactgtcactgtttctctgctgttgcaaatacatggataacacatttgattctgtgtgttttcataataaaactttaaaataaaatgcaaaaaaaaaaaaaa

SEQ ID NO: 34972 - DNA, 325 bp, Homo sapiens
ccgcataattatttgccctatttcacaaatgaggaaactaaggccacctatcaagtcactggaaagtccaggactccccacaaactagagttaagtccagagcctatgcttttaatctctgtgctagatttcctccataattaggaaattaagtttgagtgagttcatttatttataccattgccttgttccagaaaggatttcaggcaactggttaagtaaattgtccaagatcacccagacaataagtggcagtgccaagaatcaaaactctttcttgaaggaactgtataaactaagtgagctaacacagatgtagactcac

SEQ ID NO: 34973 - DNA, 319 bp, Homo sapiens
ccaagaacagtgcacctgcgtggtgcagggtgggctagaagaggggagagggttgccaagaccaatcagcatccctaaacaggagggcctgaggtaagccctaacaccttgccctcccagggctaaccatttatacaaataaaaaatgatttacacaaatagacctggattcccaaagaactgagagaaccaaagtccccaaaagaatgcatgctcattgtttcccccaaaataaaaattctgaaatttcagagtagctggcggacttccccatctacagaaagtatgcgtatgagcatgttggggatggtgagatagg

SEQ ID NO: 34974 - DNA, 317 bp, Homo sapiens
  misc_feature (1)...(317): n = a,t,c or g
cacaggactaattagaaatcatgtaagaaaaggattcttggacaaaagctatactttactaatctaaagaaacaatcagtgttaaatgatacaacaatactgataattctaaggctaaaattaccctataaaatcatttatagnnnnnnnnnnnnnnnnnnnnnnnnnnnnnnnnnnnnnnnnnnnntacttttgcaccagcctaataagtctatagtagaaccagaaatatattataagaatcttaaattacatttaggaagatttccatttagagaggtaaaagaaagtggcaacacttacacaggcagattttc

SEQ ID NO: 34975 - DNA, 326 bp, Homo sapiens
ataatagcaaattttctatattgtcttccaatcgttggaacactttcaaatataacgtatataatctttccgaaagctcagagaaggatcttattattgttggcatctcctatatacaattcaggaaggtaatgctcagggagattaattgacatgactagtaaatgatgaagtagaaatgtgaacctaattgtctagtattagaatttctgctctttatacaagaaatatcagtttttcattaatagtttttaatttcacattcttaatgacaaacatatctatttggcctaaaatttttagttagattgacaaataaattccta

SEQ ID NO: 34976 - DNA, 308 bp, Homo sapiens
ctcctttgaagccaggaacgcccttgggtcctgggaatccaatggggccttcgatgcccgggtctccctgtcttcccttctggccaggctctcccggctcacccatgttgcccttggcacccttctgtccacggtagcccttggggccagagggcccagggatttccaggcagctcaccttgtagcactctccgtaggcttcgtgtttcatgaccttgatgatgcggttgatggtgtcctggtcgatctcggtggagtcgggcagcatggtggcgtagtcgttgcggtagagctcgtgccgcggtcga

SEQ ID NO: 34977 - DNA, 317 bp, Homo sapiens
gggagactgaacttaatctaaccttactgacgcatgatgaaggatgtgactcatcatacgtgctagatacaatataagggacaactagaggaggtactgataaagaattacaaaatcagagtgagccagataaagaatgatgaaaaacaggatgtcagagtaagtgccatgtagctactgatgcaaatgaactatctgttgactatttactaaaaaaaggaccatagctttaattgcttataaatagagaacattcaccatagctctatagccacttatgggctatctgcatggatgcaggggttttctgctcagta

SEQ ID NO: 34978 - DNA, 315 bp, Homo sapiens
gtttgaagtacaatacaaggtatgctctatagatgatgcagaaccaagagttctgtatttgtgctttgacttgctataaaattcaagcattacatgtttcagagctctcttaattcttctggctacatcattgtgtagtcttcatttgagacattggcatcctgtatatttgatctcctttgatctcctttaactaaggaggaatgcaggagtaactcctttgaacacgtcaggcattttcagaatcagttgaaggtactgagggaccaaattgtaactgaggctagggtgatgccaggtgaagggaggcagagg

SEQ ID NO: 34979 - DNA, 325 bp, Homo sapiens
ggtgaagctataaaggatcaaaatacattttactcctttattcaattcacaaaatgctaaactttaacttgctaccttcaacaaagtatcggtatgggccaaaaagatatttttccattgaaattctaatgtgtttctagatttttttggactgatttcccaacatattaaatattagattacatcccaagctttaattgattactgtatggcatgcaagaaaacaactctaaactgtactattggttattaataagtttaacttcactcacatcaagtgtcacacgaacactacctaactaactagctaagacccgaaattaac

SEQ ID NO: 34980 - DNA, 318 bp, Homo sapiens
caagaagccaggtattctgaaggtgaaagataccagagattctcaaagatgcgagttttctgtgtgggactactccttttcagtgtgacctgggcagcaccaacatttcaaccacagactgagaaaactaagcaaagctgtgtggaagagcagaggcaggaagaaaaaaacaaagacaatattggttttcaccatttgggcaagagaataaatcaagagctatcatctaaagaaaatattgtccaggaaagaaagaaagatttgtccctttctgaagccagtgagaataagggaagtagtaaatctcaaaattatttc

SEQ ID NO: 34981 - DNA, 113 bp, Homo sapiens
cccagatgttctaaaacccagtccaagtcaataagccacttaatatcacatatttattaagttaaaccattacccctagcatccagtttaacattcaggaaaaaaaaaaaaaa

SEQ ID NO: 34982 - DNA, 352 bp, Homo sapiens
attgagagttgtggcaggaagagagggcactagtctcttcattaagattataaatttataaaacaaaaacaaatggagatctggaattggagtaaatgcagcttaagacttctcttgttctagtcatatgacaaactaagagaaggcaggaatgtacccttagttaaaatataaaaatcaaaacctcatgattttttaagggatacatacataacaaactacaaagcatttggctttggctcctgatcaatgtgatcagctgatctgaacactcacagttaaagctagatagataaaacaaaggcagctgtaaggtgcaagtccaaaaccataggcctcaacactctgtgca

SEQ ID NO: 34983 - DNA, 348 bp, Homo sapiens
gtttcttgatgaaaagacttttcatgaatatgaatgccttaatcttttgctttatgagtgctttcagtatcttacattaaaaaaatagtttctgccctcagcgtcaaaaagagatgctattgtttttttttaaagtgttaaagttacttctacttctaacaaaaacagtaataggggcctgattcgccctcacaccttaagtaactaagggaaagaacaaaacacacaccctcacacatcacagggtggtttccacaacactgggcccggccaatgactgacagccgtgccagccagtgacagctgtgcctgagggcgggaaggagccgtgagagggcgccctgggct

SEQ ID NO: 34984 - DNA, 337 bp, Homo sapiens
ccagtgtaaaactgatgaacgcagtcactttgacagcccctgagcatcactcactcccttccctcccccaccctaaagtattcatgaggagattcacagaacaccctgaaagccactcatctagtccaaaccctcactttctaggtgaagaaaccaagactcagaataggagtggctgttttcatgagtacatttggcttccaactagaaagagggaaggagggctaaataaaacggtttaagaaattcactaaaaacacaatttgtcaagaaggaagtcttccatcttaactccttcccgacgtggaggcagccgtcaacagcctggtcaatttgt

SEQ ID NO: 34985 - DNA, 330 bp, Homo sapiens
  misc_feature (1)...(330): n = a,t,c or g
nnnnnnnnnnnnnnnnnnnnnnnnnnnnnnnnnnnnnnnnnnnnnnnnnnnnnnnnnnnnnnnnnnnnnnnnnnnnnnnnnnnnnnnnnnnnnnnnnnnnnnnnnnnnnnnnnnnnnnnnnnnnnnnnnnnnnnnnnnnnnnnnnnnnnnngtgcatggcacctcctccgttgctctcccccaacctcgttgctttcttgctctggctgtcaccatgtgacaggaggcactcccttcaccttcaaccctgaggcccttgccagtagcagttgctggtcannnnnnnnnnnnnnnnnnnnnnnnnnnnnnnnnnnnnnnnnnnnnnnnnnn

SEQ ID NO: 34986 - DNA, 330 bp, Homo sapiens
atgagaactatggctcagacaagtaataaatgagagtcaaatcctgccaccaggtttgtacaacttcaaagtctatgctatttctattatatgacacagcctctaaattagaaatacaagcagtgtaatacagtgaggcctacacagcagggcctagagtcagagaacctggatacaaggtacctgtgtgaacttgtctaggttaccaatgcttcctgaactttggtttcctcttctgtacctcaaagagaagaagattactgaccggaacataataaggagagggaggaataggaggacgtgagctagagaaggggcaacagctagatc

SEQ ID NO: 34987 - DNA, 348 bp, Homo sapiens
cggaggcggcgaggttcactttggtcccggcaggggctctgaccgcgacccactgctcgctgccggggcttgttccgaggaggagaaggcggcggtggccgtcgcgtcctgagtcaccgcagcggggaagagtcccggccgggggttcggtgcgtgccccgacggggcgcgcgcgaagcgagcgagaaggcacggagtcgccgcggagcgcaggttgctttcctgttgcatctttgatatcatttcctagactctactccatgatttaacttgaaattctgaaatgaagatggaggaggcagtgggaaaagttgaagaactcattgagtccgaagccccaccaaaagc

SEQ ID NO: 34988 - DNA, 348 bp, Homo sapiens
  misc_feature (1)...(348): n = a,t,c or g
ctttatttagcatcttttagatcatggtgtctggctcttaaatgtcccccagctctggtgcacatttaacattatgataaggaactgggatgttccagacaactatccctaacttccttttaagagtttcagggggcagagaaagagaaagaaaaaggaccaaatactttgactgcttaaagtatatatgtcannnnnnnnnnnnnnnnnnnnnnnnnnnnnnnnnnnnnnnnnnnnnnnnnnnnnnnnnnnnnnnnnnnnnnnnnnnnnnnnnnnnnnnnnnnnnnnnnnnnnnnnnnnnnnnnnnnnnnnnnnnnnnnnnnnnntaanaataaaacaaaattagtc

SEQ ID NO: 34989 - DNA, 330 bp, Homo sapiens
gaattattgaaatcaactttttttctaaatgtaataaattaaaatagcatttgaacagaaaatgcatagtttccacacaatccaaagcaccataaatgtcccctccatgatcataatacctcttattcaactaacggaaattagtcaaatgtggttgctatagaaacgtggaactgtcctgttcagatttttccaagcagcatacttccagatccatatagacaaaaacattctctgtagcttaaatattaatcactgaggtatttgcttttagtctccctttttaaaaacagtagcttccaaaaggtctttaataccgatggtttattg

SEQ ID NO: 34990 - DNA, 347 bp, Homo sapiens
aaagaagtagcaatctatattttaagaagagattactgtaatttctttcagaagcctgttcccagaacattgacgtctatactagaatgcctgattattgctcattcagttggagtggaaagtctttttgctgactgcatgaagtggattgtaaagcattttgcaaggttttggtctgagagaagctttgcaaatatacctcctgagattcagaaaagttgtcttaatatgttgattcagtccttaaatgataagaatgctgcttttcttctgatggaaagtgacaggctaatcatcagtttacccagagtgaagtggacggaagcagcactgaccatggcgtctca

SEQ ID NO: 34991 - DNA, 329 bp, Homo sapiens
gtagaaattaagtagaaagaactgctgatttcttaaagagatgggatgcactcagattgtcaaatattgacatagaccttctgttaatttaagagtaacaattctggttttggtgaaaaaattttaaaagttaatttcatgatatgctttatatcaaaaataaaaccttaaatttattttaaatttaatttttttgctaaaaaaagggccgaccttttattcttcagaagattcgttcctcttaaccgcatgatgaaactttactaataaaaagaattcatgcatgtatatattcatacacacacactttatacataatgcctagcagt

SEQ ID NO: 34992 - DNA, 349 bp, Homo sapiens
tgcagcataacggtaagaatattcataccaagtaggataaataaaaaccatagtctcaagttagttcagattaggctttctggtcatgagagcaggttatgacaggtttttccaccaaacaaataacttaaaaacattcagttttcagagctttttgtatataagaattgggggtaagaaactgctgacttctgcagacatatgcataaccacctctcctgcacccaactatccttcagcaaagcataatattgcctcttcgggtcaaaaaagtttttgcctatgtgggtgaaataacagaaccaaagtttaggtgatgctgctaatcttttgggactcccagccttgc

SEQ ID NO: 34993 - DNA, 331 bp, Homo sapiens
gtttgagtttctcctatctgcagtggatataataatcatgtttcttcccccaacaccctcccacctctccctgcttccagtctgattggttggtttgtccctgagtgcatttcagtggactccgccctctctttctttccaaggtgagctgtttggtccaagtatcacatttccaggtgaggagaccaaggcccaaggcacttaaggaacttgcccaaaatcacactgtcaggtaacagagccagtatagtaacctaaacacctgactcatggtgcacgggtttttatatcagtgttttgtagtctaagtcctcctccaggtaaaccagag

SEQ ID NO: 34994 - DNA, 348 bp, Homo sapiens
  misc_feature (1)...(348): n = a,t,c or g
gcgaagtatctttgactgtgttggtcaccgttgaatcaaatatctaaataaagtgaatctggaacatcctagtgtccacatcaaaagcactcaatgaagttggatgggggagtggaagtggtggtacagcaacagggtagcctagttaggttgcacaagcccatctaaacacgtgtgattatctgattagaaccaggaaactgnttactagaannngtaatttantgaactgtacanagaanatattncatattgnagcgtngacgcggncgctaattccnaannnnnnnnnnnnnnnnnnnnnnnnnnnnnnnnnnnnnnnnnnnnnnnnnnnnnnnnnnnnnnnnt

SEQ ID NO: 34995 - DNA, 358 bp, Homo sapiens
aatttataaaaccatcactggtccatattaaaataaggtataaatgataaccactacacataaataaccaaatcatcttttattgttttgttttcattttctctctcctggtaatctcctgcataccaggtacttatctatttaccaacatagtttagaaagtgcaatagtaagagtgcaattccatacctcacacttgaattgttcaccctgaggggtttcaactttttaagttgtttctactgatgtttgcctgcatgttttcaaacagcatgcttacactttgttatgactgtttaattttacatagtatataacatagaccttatttccacatcacttagacttctaccatatt

SEQ ID NO: 34996 - DNA, 348 bp, Homo sapiens
ctaagtactatgatttttattatttttgatattatcctttgtctttttttgcaaatatttttcccattccgttcatcgcttccactggttacattatgacatgagttattttttcatgtaatttaattataatttatcatgttttatactcttcccaacaatgtctcataaacattaagacatattgtgttccaaattagctgtggcttgaaattcctctccagatatgttaatacccttatctaactagtatttactttgatggatggtgttagcagaggttctaaaccaattctttttccaagctgctagtcagcattctatcatcaattttggaataattttacc

SEQ ID NO: 34997 - DNA, 357 bp, Homo sapiens
  misc_feature (1)...(357): n = a,t,c or g
ctttcatcttcagctggttttgtacttggaactgctaaggagggagatgtactgggtgcagtttccgtggtgggctcaagctcaaccgcaggttctgtgtttcctcgagaagtagcattttcaggactgtcctcgctgggcttgacagcttcaactggtgaaggagaaggagcactttctgtatcagaactattttctgcaccttcgctgtcttctggattttcttcttcattggaggcttcaatatcttcatcctcctgagcagaaacagtggaagcgacactttcacattgagacacatctcgctcttcacgaggttttcgtgaagttttctgtttatgctgctgtaagangttg

SEQ ID NO: 34998 - DNA, 358 bp, Homo sapiens
atttttgaaatgggaaaagtggagaataaacagtcacacattaagttgaccttgaaataatgattcactgtccaagcagtgcttacagatctctggagccaagggaaagccatcagtagtgggagggccctggggtttcaccagagaggatgcctgaggtgggggggcatcttggatcagcactccatggttggtacttctgctcaaacttaatctccagttcggtaaaactattaatgttttaacttagtaaaatcaagtcaacagtgtaggaggaaaggctttaaagtggtttacaaacaaaaaggactaattcatattgataaccactcagttactaattgaggtagcttaacca

SEQ ID NO: 34999 - DNA, 357 bp, Homo sapiens
gtcaggaagaggggccagatatctgagtgttcctctttagtttcttcaattgcaggaaagacagtggttcctgactcaggaagacagtctcagaaacatgtggaatgatattgagctgctaacaaatgatgataccggaagtgggtacctgagtgtcggttcaagaaaagaacatggaactgctttatatcaagtagatttgctagtgaagatctcttctgaaaaggcctcattaaatccaaagatacaggcatgcagcttaagtgatgggtttattattgtagccgaccaatcagtgatattgcttgacagtatttgtagatcacttcaattgcatcttgtctttgatctgaagtg

SEQ ID NO: 35000 - DNA, 349 bp, Homo sapiens
  misc_feature (1)...(349): n = a,t,c or g
nnnnnnnnnnnnnnnnnnnnnnnnnnnnnnnnnnnnnnnnnnnnnnnnnnnnnnnnnnnnnnnnnnnnnnnnnnnnnnnnnnnnnnnnnnnnnnnnnnnnnnnnnnnnnnnnnnnnnnnnnnnnnnnnnnnnnnnntaacatctctttttaaccctgataatattcttgccttaagtgttttttgtctgatattaatatagctactccagctttcttttgattagtgtttgcatggtatatccttttgcatccatttacttcaacctatgtatttctttgtaggtggcataggtctttgttgttttatatatacaatatgacaatctctgcttttaaattgtttttttt

SEQ ID NO: 35001 - DNA, 357 bp, Homo sapiens
  misc_feature (1)...(357): n = a,t,c or g
nnnnnnnnnnnnnnnnnnnnnnnnnnnnnnnnnnnnnnnnnnnnnnnnnnnnnnnnnnnnnnnnnnnnnnnnnnnnnnnnnnnnnnnnnnnnnnnnnnnnnnnnnnnnnnnnnnnnnnnnnnnnnnnnnnnnnnnnnnnnnnnnnnnnnnnnnnnnnnnnnnnnnnnnnnnnnnnnnnnnnnnnnnnnnnnnnnnnnnnnnnnnnnnnnnnnnnnnnnnnnnnnnnnnnnnnnnnnnnnnnnnnnnnnnnnnnnnagaaactttggagacacatacactcctagcttcaggaaggagacgacttcctccaacaacatcctcaccaagtggttatctatacttggagctttgcacatc

SEQ ID NO: 35002 - DNA, 358 bp, Homo sapiens
  misc_feature (1)...(358): n = a,t,c or g
ccaaaatgtcttagagttgcttgtgctcctcctagacaaaagagataactgaactatctcaattaaaagtaagaaatggaaaaacaagcaaggtgaatacnnnnnnnnnnnnnnnnnnnnnnnnnnnnnnnnnnnnnnnnnnnnnnnnnnntgcccctannnnnnnnnnnnnnnnnnnnnnnnnnnnnnnnnnnnnnnnnnnnnnnnnnnnnnnnnnnnnnnnnnnnnnnnnnnnnnnnnnnnnnnnnnnnnnnnnnnnnnnnnnnnnnntgagaagcctcacggtagaaggtgaaagggaagcaggcccgtcttacatggccggagaaggaggaagcggggggtaagatgccacaca

SEQ ID NO: 35003 - DNA, 352 bp, Homo sapiens
cttccatcgaacagtgacctagacatttgcagcctctaaacggcccaacctccccaggcttccactctcagggacccacatctaataagagctccgacctcccgataaaggatatcttctcatagagatcccagccgtggaaaaccaagagatctcccctcccttctgacaaggagcctaaactcttagcggcctcctcctctccctaccccccaccttggagattagcaaccttcactctcagtctaactcccacctgagatttaggactggagtactgcaacccaaaaaagctagtttgagcctccccctccacactcctgcatactgagtccatctacctccaccttct

SEQ ID NO: 35004 - DNA, 283 bp, Homo sapiens
  misc_feature (1)...(283): n = a,t,c or g
nnnnnnnnnnnnnnnnnnnnnnnnnnnnnnnnnnnnnnnnnnnnnnaaaatacaannnnnnnnnnnnnnnnnnnnnnnnnnnnnnnnnnnnnnnnnnnnnnnnnnnnnnnnnnnnnnnnnnnnnnnnnnnnnnnnnnnnnnnnnnnnnnnnnnnnnnnnnnnnnnnnnnnnnnnnnnnnnnnnnnnnnnnnnnnnntattttgtaaagccttgtattttcttgccattaagcactttcagtttttttcttgacaacttctcatgtctactttttttttttttt

SEQ ID NO: 35005 - DNA, 351 bp, Homo sapiens
cagactcagagagaacccaccatggtgctgtctcctgccgacaagaccaacgtcaaggccgcctggggtaaggtcggcgcgcacgctggcgagtatggtgcggaggccctggagaggatgttcctgtccttccccaccaccaagacctacttcccgcacttcgacctgagccacggctctgcccaggttaagggccacggcaagaaggtggccgacgcgctgaccaacgccgtggcgcacgtggacgacatgcccaacgcgctgtccgccctgagcgacctgcacgcgcacaagcttcgggtggacccggtcaacttcaagctcctaagccactgcctgctggtgaccctg

SEQ ID NO: 35006 - DNA, 351 bp, Homo sapiens
ctacttcagatccaagttgaaagtctcacatgactcgtacttctgactgaccagctataaatcggggttcccacaacccttcttcaggttcaatgtgctggaatgactcccaagattcagggcaatggtttacttaacatgtatagctttatgataaagcacacacagctcaggaagcaccagatggaagagatgcatagggcaagatacggcaagcccttgccatcctcccaagaggatgctctcacccagctgcctcgtggttcatgccctgtcctctgccctcccttattccctattgaattgcttccctcttgcttccctccgatccacatgctgccagagtccagc

SEQ ID NO: 35007 - DNA, 358 bp, Homo sapiens
caaagctgaaaaaagtacttgaagaaacaatagctaaaaatttctgtgggtttgtctggagtgagcagttattttgttaaagttttctgtcttgctaggctgtcccttttctggtcaaaactaggtaaaacatgcttttgttggggcttcttccccctcccacccaacatccattcatatttatggtactatgaacacccagggaattcactatcatgtcattccttgggtcgcacggtctctagctggtctgccttcctctagtcatctttcagagtctatgattgttttatatataatgtccagtgttttcaattatgcttagtgggaggaatacagaaagcacatctactccatc

SEQ ID NO: 35008 - DNA, 359 bp, Homo sapiens
tgacgcttcagaagagaagagtttaacgacattgatattttgaaatattttgtgactcaaattatagcaatacgatgagttttcgagggaaggtttttaaacgggagcccagtgaattttggaagaagagacgaactgtgaggagagtaaaccaagaagaaatccacagatttagttctcaagaaaagcctaggcttctcgagcctttggattatgagactgtcattgaagaacttgaaaagacctaccggaatgatcctcttcaagatctcttgttcttccccagtgatgacttttcagcagccacagtttcctgggatatccgcacgttgtactcaacagtacctgaagatgcagag

SEQ ID NO: 35009 - DNA, 250 bp, Homo sapiens
gagccctgtgttttttggaaagggtgagccctttttttggatgttggttgtgagtgggaactgagccccctacgtgtccagggagctacttcgagggagatgtggcttgtctgcctaccccgacttcctggtgactgatgatcacacacctctcatgatactaagttttcctcttattttcagcttatttactaatcaggatatatgtctgggtgactgttatttttctatttctatttttttttttttt

SEQ ID NO: 35010 - DNA, 359 bp, Homo sapiens
gttctttaaatattacggaacacgagaagctgtgattgcccagatatccagtcatgttaaagcgattgatacaatttaccagaccacagacttctccggaatccgtaacatcagtttcatggtgaaacgcataagagtaaggaacttaaatagttaaaaacacttaaaaagtgaaacagtccagactatgtttacacacacacacaaaagcttgcttttaattttatctttatgaattaagtagtttagtttaattgtatctgttgatgcagttttttactcctggcatttacacacccacacacacacagatacttgggtttatgatttaagaattaaatgtataaggtcttaagtcg

SEQ ID NO: 35011 - DNA, 350 bp, Homo sapiens
  misc_feature (1)...(350): n = a,t,c or g
ctggagaaagagggtgggggtggtgatccacatagctgggctcaggaggaaagagggctgggagtctggaccgggggaacctcgggtcaagatgccacagtttctaactatnnnnnnnnnnnnnnnnnnnnnnnnnnnnnnnnnnnnnnnnnnnnnnnnnnnnnnnnnnnnnnnnnnnnnnnnnnnntcgacgcggccgcgaattccnnnnnnnnnnnnnnnnnnnnnnnnnnnnnnnnnnnnnnnnnnnnnnnnnnnnnnnnnnnnnnnnnnnnnnnnnnnnnnnnnnnnnnnnnnnnnnnnnnnnnnnnnnnnnnnnnnnnnnnnnnnnnnnnnnnnnnnnnnnnnnn

SEQ ID NO: 35012 - DNA, 341 bp, Homo sapiens
ctcctccccccgattctgtgattcacgcagaggactcacagaactcagcatagtcttacttgtggctatgatttattacagtgaagggatacaaagcaaaatcagcagagggaaaaggcatatatggggtaaagtccagaggaaaccaggctttccagactcccaaattttcccagtggagtcacacaaggtgcacatacttccagcagcaaattatgagaatacatgtgaaatgtccactggcaaaagttcattagataccctgtgtccaaggtttttattgagagttggtcatgtaggtaccctctgcttagaatgtcctaaatcccaaactcccagaa

SEQ ID NO: 35013 - DNA, 332 bp, Homo sapiens
  misc_feature (1)...(332): n = a,t,c or g
agctggtaataatagctaacacttgtgggtttactgtgtgccaggcattttctagtggctttacatgaataggctaatcctcacaaaagccataaaaggtaggggccagtatgatccccactttatagacannnnnnnnnnnnnnnnnnnnnnnnnnnnnnnnnnnnnnnnnnnnnnnnnnnnnactagaaggcctaggtttggaagccaggtagccatgctcttaactggagatgaggtttgaatcagggtctgaccccaatgtccaaactctttccactctgctgatgaccatatgaatttttcacccccaccctnagtaacttacctgt

SEQ ID NO: 35014 - DNA, 283 bp, Homo sapiens
ggtgactggaagatctgggtgctggttattgggtgtttactttgtgaaaattcatcaaactgtggacatttatgacctatgcattctctttatgtagattaaatgtaataaaacattccccccaaatgatacagatactacacttatacattaccatgtcagtattcactgagatgtgtatgactacatgtatttgactctacagaaaaataatatacagacatggttattcacttggtactttttaaattgtctagaacagactgagagtgacgcgcatatt

SEQ ID NO: 35015 - DNA, 342 bp, Homo sapiens
atgtaacaattcttctctttcaactatatcttttgcatggtcatttagtctattttatctattgggattctatctaaaacttctttgtaaaaagattccttctgctacagcaccgaaaccccttttcccctaagtacgtgaagcctgaaagtctcataaaaggagtcaatacacatgtaagtaggataaaaacatcaacaggtcacgaactggatgtcatacatgtaaccgtgttaagttgtcgggcagcaacaatattttcataaacaaagcccatagtaccaccaaattcgaaaccatcctgattcttcatatcttttacaattaagagttctgctaaaa

SEQ ID NO: 35016 - DNA, 333 bp, Homo sapiens
  misc_feature (1)...(333): n = a,t,c or g
catcaccaccgcccccaattcttctattagtatttaatatagtttacaatgaatcctcccagcatttgtttatcagaaaatgtcttttttgttttcatttttgagaaaatgttagaannnnnnnnnnnnnnnnnnnnnnnnnnnnnnnnnnnnnnnnnnnnnnactgcttcggcagagnnnnnnnnnnnnnnnnnnnnnnnnnnnnnnnnnnnnnnnnngtagctgagaccccatctctgaaaaaggnnnnnnnnnnnnnnnnnnnnnnnnnnnnnnnnnnnnnnnnnnnnnnnnnnnnnnnnnnnnnnnnnnnnnnnnnnnnnnnnnnnnng

SEQ ID NO: 35017 - DNA, 335 bp, Homo sapiens
  misc_feature (1)...(335): n = a,t,c or g
caaaggaaaaatgtaagaggtttcccatatgaaaatccatacagtgtttgtgttctgtttgattgtaggcttttacttctgattgattctaccaacttaagaattcttgccttttaactttaggaattaataatcagtggcttttgttaacgggaagacatgagtgtggtttgtttttagtagacttccttcttgagcagaagatacaagagagttcccatatgctccctccccccacacatgcacagcctcccccgttatcactgacccccaccagagtggtagtcgacgcggccgcgaattccnnnnnnnnnnnnnnnnnnnnnnnnnnnnnn

SEQ ID NO: 35018 - DNA, 339 bp, Homo sapiens
tttcattctagataaattatatttttggttactattacgaatgacattatagaattttgttctctaactggctgttgctagttattttatatacctctgttaaattgttaagaatccttgtttttatttttcttaaatccactgataatagaaactattttcatgatcattacatttagcattgtgccccacccacaatagatggaaagtgaatatttaacaaatggtagataatactgataatgggccacccactaaactaggcaatttataatctctggtcttcacaactctttaaggtagtgttttgtttaggccactgggcagactaatcagcta

SEQ ID NO: 35019 - DNA, 341 bp, Homo sapiens
  misc_feature (1)...(341): n = a,t,c or g
nnnnnnnnnnnnnnnnnnnnnnnnnnnnnnnnnnnnnnnnnnnnnnnnnnnnnnnnnnnnnnnnnnnnnnnnnnnnnnnnnnnnnnnnnnnnnnnnnnnnnnnnnnnncacgacagtgaaaccctatctcttaaccagccgtggtggcacacgcctgtagtcctaggtggcannnnnnnnnnnnnnnnnnnnnnnnnnnnnnnnnnnnnaagaccctctctcaaaaaagaaaaaagaaagaaaaagaaagaggtgacacatgtatgcatatttgcttttgttacctactactgtaatgcttattgacatggttaaaggaacctattactaccttgcctgaa

SEQ ID NO: 35020 - DNA, 340 bp, Homo sapiens
  misc_feature (1)...(340): n = a,t,c or g
atgcaatatacaaatagtaaacaatatttgaaactannnnnnnnnnnnnnnnnnnnnnnnnnnnnnnnnnnnnnnnnnnnnnnnnnnnnnnnnnnnnnnnnnnnnnnnnnnnnnnnnnnnnnnnnnnnnnnnnnnnnnnnnnnnnnnnnnnnnnnnnnnnnnnnnnnnnnnnnnnnnnnnnnnnnnnnnnnnnnnnnnnnnnnnnnnnnnnnnnnnnnnnnnnnnnnnnnnnnnnnnnnnnnnatcttgttttctttaggttcaattactgtatttgtatcaatggtccagagtttgtcccgtcattactcatcctgtttcctgtttggatcctggatgt

SEQ ID NO: 35021 - DNA, 331 bp, Homo sapiens
  misc_feature (1)...(331): n = a,t,c or g
nnnnnnnnnnnnnnnnnnnnnnnnnnnnnnnnnnnnnnnnnnnnnnnnnnnnnnnnnnnnnnnnnnnnnnnnnnnnnnnnnnnnnnnnnnnnnnnnnnnnnnnnnnnnnnnnnnnnnnnnnnnnnnnnnnnnnnnnnnnnnnnnnnnnnnnnnnnaccaaattttcnanctcnttccnaaggggnatgagnccntcanntntggngaaaaanagggagggatcntaaatnanccccaggntggggnaagggatnatgccncaaatnggggnaggcggncagngggtaaancaggggttnggnctatgnggnggnatnaacancaggggtaa

SEQ ID NO: 35022 - DNA, 335 bp, Homo sapiens
gtggaaaaaagccaatataaattttacccaacgttaaatactaagaataaagtaaatttaattaatgggatagagagggttggggaagctactttatctagagtagtatggaaactgaaggcagctttttgaactacaacttatagctgggaaagaggctgagcctctttagcttgataaggtaggacaattgtaccagcaagagattaacctttgtgatttaacctggtgtccctcagagaccacattgttgagaggaacccttcccccagcacctccacccacagacatcttaatcttccccatctagcaacagaaccatgtggagcagataa

SEQ ID NO: 35023 - DNA, 334 bp, Homo sapiens
  misc_feature (1)...(334): n = a,t,c or g
attatctggtgtttgggaccttgcctgatagctttccatttcattatgacagtacttaaatattctctcttgttgaattatatatttaggtccgttgaccatttatttattgttaaagagcacagtctctacagataagtagattgcttggctgaacccaggctaccccattctgtggtcttgtgcaagttacctaaaccctctgtgtctcagtttctacacctataaaatgagacaataagaatactatcctcctcataggttgttgtgtaattaaattagaagctatctnnnnnnnnnnnnnnnnnnnnnnnnnnnnnnnnngacagagtcg

SEQ ID NO: 35024 - DNA, 340 bp, Homo sapiens
  misc_feature (1)...(340): n = a,t,c or g
taggacatcaaatgaaaaagatttgtataatcaaagttggagggtgggggaaaaagaacagcccctttatagaatctgaaccatttgctgtccacttacgtagcaggtaagttagagaaaaagtcgacgcggccgtgaattccnnnnnnnnnnnnnnnnnnnnnnnnnnnnnnnnnnnnnnnnnnnnnnnnnnnnnnnnnnnnnnnnnnnnnnnnnnnnnnnnnnnnnnnnnnnnnnnnnnnnnnnnnnnnnnnnnnnnnnnnnnnnnnnnnnnnnnnnnnnnnnnnnnnnnnnnnnnnnnnnnnnnnnnnnnnnnnnnnnnnnnnnnnnnnnnnnnnnn

SEQ ID NO: 35025 - DNA, 336 bp, Homo sapiens
  misc_feature (1)...(336): n = a,t,c or g
ttnnnnnnnnnnnnnnnnnnnnnnnnnnnnnnnnnnnnnnnnnnnnnnnnnnnnnnnnnnnnnnaggttagccgacaggatcctggtgatgcggcccaacaggaagcatagcacagggaagcataaatgagaaacagtatcttagcccaagttctggatcagacggcccgggccagggtaagtaacttagcacttgtaaagcctgaaaaactaaagcagnagagaattaccttatacngatggnnagatatggacnnctaagnganaaggtatcagaacaaggtttantanaaatccttananaagtaagccaacnaacaganaagacaacaacag

SEQ ID NO: 35026 - DNA, 355 bp, Homo sapiens
  misc_feature (1)...(355): n = a,t,c or g
gttggctgaatcgagatggttactgtcattggaatcataaaaaaaggacgattgaattctgactgaacatgaacatctgggatccatgttaatagtctgtagnnnnnnnnnnnnnnnnnnnnnnnnnnnnnnnnnnnnnnnnnnnnnnnnnnnnnnnnnnnnnnnnnnnnnnnnnnnnnnnnnnnnnnnnnnnnnnccnnnnnnnnnnnnnnnnnnnnnnnnnnnnnnnnnnnnnnnnnnnnnnnnnnnntttacaaannnnnnnnnnnnnnnnnnnnnnnnnnnnnnnnnnnnnnnnnnnnnnnngacatatgaatgggcaaagatttcacgacaaagacgtcaaaagcaattg

SEQ ID NO: 35027 - DNA, 361 bp, Homo sapiens
gaaagatgctccagatagctgctatttggccccctagggaagcagaggcccaatatacccagaagcaatttccaaacactgaggagggcctctctgaaacttctggaactgagaaagcaccatcctaagaaaaacaaaagcggctgttacaaacacaaaacgtaacaaactcacatgacaaagtgatggggttccctagccaaaggacagctcaaggacaaaatgtgaaatataacttgacttttaaaaaaaagatgccaactctcagaaacaagttaaagttgcttttggcaccttctcctcctcctcttctccttcccctcaagttgctccaagaacctggttgcccccaccctacacc

SEQ ID NO: 35028 - DNA, 359 bp, Homo sapiens
  misc_feature (1)...(359): n = a,t,c or g
cacagatcgactgaaagtgaaggggtagagaaaaacatgctacacaaacagaaagcaaaagcagtaagaatagctattcttatgccagataaaacagacgttatgtaaaaaataaaaattaaaaaacgtaaatagataatagtgaagggatcaattctgcaggaggatatgacaattcaaaatatttatacacccaacaccatagcacccataaataagtaaagctaatattactaggcctcaagggatagatacactccaatacaataatggttgggaaattcagtatccggcnnnnnnnnnnnnnnnnnnnnnnnnnnnnnnnnnnnnnnnnnnnnnnnnnnnnnnnnnnnnnnntg

SEQ ID NO: 35029 - DNA, 351 bp, Homo sapiens
ttcatcaccaatgataacaggatggggcaaaattgtagccattactgtaaaaagaaaattatctggatattgttgtaaacaaatacctcattcatataaaaggtaccacagaatagtttctctcatctcaactctcacggcctctggagcttccagggatttaagagggaacagatcccctctgatgttcttctttcaatctagtttttatcctctctccacgaggttacggaatctgacccgcacccactccagtctcaccagacagaaggcaactctgcacacagatcccagaccaatgactggcattagacataagtatcaacagcacggatttaaagtcatttttta

SEQ ID NO: 35030 - DNA, 347 bp, Homo sapiens
  misc_feature (1)...(347): n = a,t,c or g
aaaatatgtaaagaaaatatcagtacagatggggtttgtctcaggaatacaaggttggttcagtattcaaaaatcaatgtaattcactacattaacatgccaaaaaaacccatgtgattaattccaatagacatagagaaataacaaaacacccattcaggaaaaaatttaaaaaacaaaancaaaaactcagcaaactggccaggtgcagnggctcgtcnacgcggccgcnaattccannnnnnnnnnnnnnnnnnnnnnnnnnnnnnnnnnnnnnnnnnnnnnnnnnnnnnnnnnnnnnnnnnnnnnnnnnnnnnnnnnnnnnnnnnnnnnnnnnnnnnnnnnnn

SEQ ID NO: 35031 - DNA, 356 bp, Homo sapiens
ctcacactagaaggaaagtctacttgggaagacaatttaggatccgaattttggtagttgaggatggagctaggaaaagcggatacaggaggtagccaagttctgcttggacctgcagggagtgaggctggccgggctccaggtggaaatgcccaggtgaaaagggagacttggagttcaggaaagtaacctggactggagccataggtttaggtgtcagtggctcagagacagaagctcagcgtgtaggtgaaatcacccaggaggagaatggggatggaaaactgaggattgaattttgcaaaatgttcatacttccggggaaaacaaagaataaccagtgaataagaaagggg

SEQ ID NO: 35032 - DNA, 349 bp, Homo sapiens
agacattgcaggaagaggcttttctttctagctccagtgtactcctcctgacaggataaacagaatatcaacaagttctctattctgatgtcctatggagtcctagtaaatttattttaaaatattttataatttgaggaaattgggaagacaactgaactaagctaatacaacttgtatgttttcacacgtaattgttttcctatatatataagaatttgggcatagtattctgtccattcatcctgttttaaagctaataccatactgctttgaatacagtaactttagaatctgttttaatatgtggtaaggccaagtatcacctcactattccgtttctaaattt

SEQ ID NO: 35033 - DNA, 350 bp, Homo sapiens
tttttaactttataaattatcctaatgttcccaacatgggaatagtggagaaattctggaatcagaagagtgacaagattgggatagagaatgtggtcctgctagataaacacatgacaaagtacagcaggtgacaggctgtggctctggcatctgtgcaggcagaggagaggggcaaaggcaggccagcacatacccctgtgtccagaggcttcactgtacgtccactgacccagctactccacctctagcaatttatcttaacaaaaatagccacgtgcgtaaagatgttcattacagctttattcagagtcgtgaaaaactggaaatacactagtcctacaataagg

SEQ ID NO: 35034 - DNA, 348 bp, Homo sapiens
ctctaacaaacaccttcttcccaatcctcactcttgacctatgaccttgtttccttttcactgagaaacagagaaaaaattagatgagaatgtgtacaagctctcaccacaagatcttcctacctcctctaactgcacctatatactattactatcaaagatccctctgtgtccctaacaaaggctatttcctctccttttgcactaaattccatatactcatgcctatggggagacattgttccagtaattatctcctttcctctgcttgggtcagcctctaggatggacccccatgatccccacctcctggtatccgcgccatgatgcaatctgcttacagcctaa

SEQ ID NO: 35035 - DNA, 354 bp, Homo sapiens
ctgaaataacataagatgcataagattattggcataagaagataattaaacacaaaccaaaatattataaggtcataatgtaagtgctgcagggtgagattttcttactccatcaccgtctgtcatttttcaccactctacttctggggagagggctctgaaggtgtctttcaaatatcttctggatgtgttctgtctggtcactgttttgtggatgacaaatgatgaaaaaatgcatttgtagctggagcaccttaaatagctctaccaaaactctctattatatggctgagaataccagtgaggcaggtgacttccttgaggcatttcttcggtgaaataaactggtttaag

SEQ ID NO: 35036 - DNA, 346 bp, Homo sapiens
gtttaaatcacattttttgatgaggggatgagagaagcctcgtgaaaacccttttaataaagagtatattttaactgacaaatgatctagtttaaaagcatttattttggtattgaggcaatatttttagttggttttctgctgggagtgtttttaacctactgaggcctcttgaaccccttgccaattaagaagttggaggtagattactatcaaattgctgatcatttaggaaggaaaaataatcacattaatacgcagacttagtagctttgtatttaggaattcttagtgttgtctcagatagctaagggaaacaaaccagctctttcagtaattgatggag

SEQ ID NO: 35037 - DNA, 350 bp, Homo sapiens
gcctcctttttttcatatctttatatttttatatctttatatataatatatctttataaagatatcttcatatctttataattgttcctatctttataattgaaacatacttcattgttattctggacctaatttcttattcattatcaccttacagaaatattcatcttacagaaatatttctgagcttaggaccaacttcttttggtgctgcctgtctctagtggtaggtcttcagagtagatttagggaatacttaacatctacatttctggtattaggagaatctccctgccacacacacctacttaaaggttgtagtgtagtagcagttctctccacaactctag

SEQ ID NO: 35038 - DNA, 352 bp, Homo sapiens
cctacacatttctgaataaatgcattcctaagtgttttataggttttgttgctactgtgaataagatttctttttattttccactttattttctaattaatttttgctgacttctaagaaagttaagatttgaacctgcctgtcttatggcaggttcaaaatttattggttgtttcagaaatacatttaagaaaaaatctatttgcctgtccttagaaggttaaaatatcactcaaagtcaaatcaaaatgaagactccaggaaatgatatacatagtatttgctggacgaaggaacaaagcccagaaactcaccttggcgggagacatcacagataagcttccaagctttt

SEQ ID NO: 35039 - DNA, 352 bp, Homo sapiens
  misc_feature (1)...(352): n = a,t,c or g
nnnnnnnnnnnnnnnnnnnnnnnnnnnnnnnnnnnnnnnnnnnnnnnnnnnnnnnnnnnnnnnnnnnnnnnnnnccatgtatttttataaccaagctgccctcagaattatgaatagtatttctgacatgtagtgtcttttctcatttatcttagaatatatggttaccactctataaacagtttgtctattattctggtactgtgcttagtttaagacacctaaccattaactagttttcagaatggttttgctttttagtgatagttgtgtgagcgcactgttgctctggttgtttttaaatctcactgaggtaggcttcaggttgttaatgtaaatctttatagctttg

SEQ ID NO: 35040 - DNA, 349 bp, Homo sapiens
aagaaatttaaaattaataagggtaagaaaagtcctgtaacaactagatggatttaggaaagtaccaaacagaaaatacaatatatttaaacaggaagggagtcaaagatgggagaggccaaatttatttgggaaaatcaggaaaaactgtggagaagatggaatttgatataggttgggaagactggatagcattttgaaagacttaggggagccaggcttgtagaggaagctacggaaatgaagacactagaatatgcttggcttatttgggaaggagcagataatcctgcttttgggaatcgttcagaaacagtagaccataaagcttcatattgtagacaacctt

SEQ ID NO: 35041 - DNA, 353 bp, Homo sapiens
  misc_feature (1)...(353): n = a,t,c or g
nnnnnnnnnnnnnnnnnnnnnnnnnnnnnnnnnnnnnnnnnnnnnnnnnnnnnnnnnnnnnnnnnnnnnnnnnnnnnnnnnnnnnnnnnnnnnnnnnnnnnnnnnnnnnnnnnnnnnnnnnnnnnnnnnnnnnnnnnnnnnnnnnnnnnnnnnnnnnnnnnnnnnnnnnnnnnnnnnnnnnnnnnnnnnnnnnnnncactttagttttaattcacattttccttgtaataataaggttgagtgccattgcatctgtttattagctgtttgggtttcatcatctgtgaagtggctattcaagtatttttgcccgtttgtctgttgtatttcctgccctcctctcactggctgta

SEQ ID NO: 35042 - DNA, 354 bp, Homo sapiens
  misc_feature (1)...(354): n = a,t,c or g
nnnnnnnnnnnnnnnnnnnnnnnnnnnnnnnnnnnnnnnnnnnnnnnnnnnnnnnntaaactgaaaaccatttggaaaaaattcatcagtttagatgccatgaggaacattcacgattcataagagaaagtcaaaatgtcaatattttggaagatgattccaactcccagggatgactttgaggannnnnnnnnnnnnnnnnnnnnnnnnnnnnnnnnnnnnnnnnnnnnnnnnnnnnnnnnnnnnnnnnnnnnnntcgnnnnnnnnnnnnnnnnnnnnnnnnnnnnnnnnnnnnnnnnnnnnnnnnnnnnnnnnnnnnnnnnnnnnnnnnnnnnnnnnnnnnnnnnnnnnnnn

SEQ ID NO: 35043 - DNA, 333 bp, Homo sapiens
ttcactttcgttacttgttaataattgtccatcttcaacagaatgacaggatttatgcagatacattggaccactgcttttagacttttctagagaaaattctgaataatcaaaagttgaattcaatgcttctttgaatctttgtaggtttactttttccttactagaatctggtgtcttaagtatttcctttcttatcttagaaaatgagttcaatgtgtttgatttagagagtggtgtactcataacttttttttgcactggtaaagaaaactgagaataaccaggagataacaattcttcattttttgctgcactcagtggcaaatgtac

SEQ ID NO: 35044 - DNA, 330 bp, Homo sapiens
gaacaaatatatacctgttagattcagagcactgaactagctatgtcttgaggctgcagagagaatgatcttgtttttgctctcaaggaacttgtagtcaagtcattaactttcctaagagcatggaatgtgccatggagaggtcccaaattagagcttgattgtgataatctataggacaaagatagattggacattatttctgaccctgtgtcagatgtgtggattacaacacagctgggttatgttaacataactttcatgacaagaagtgtctttcagtaatagtcactgcagcagccacatagtcgttttatccctggcaaagac

SEQ ID NO: 35045 - DNA, 336 bp, Homo sapiens
cttatatcaagaacgttaggcactggttaagaccctgtccccttgcagcagtagagaaaacaggaggaaggagacgggaggtagaaatttggaagctagcagttgaaggccaactcagaaagcgtcaggtggaattccattcctaattgacatcaccatcctctaactgcagcaattctctccagcccttttatgtgctccctacagaaccaagcttccacacagctgaaggaacctgtctgctctcaccccagcttcacagaagatggcagggactggttattactaacctgcctcctagtcttctgaggctccaaatggttttgtcagcaagct

SEQ ID NO: 35046 - DNA, 347 bp, Homo sapiens
  misc_feature (1)...(347): n = a,t,c or g
taagtctgcagcatgacttaactagagacaaacctggatacgagaacttgaaagcttttgtgaactcaggaatgcatatgatgtttgtactacaaactcaacctcatcatcttaatctctttgcctagaagagatgaataagagtacaggttatatttatgaaactgaaatctataaaggcatggagctcttttcctcaagtgggaattcttgtgtgtttatttgaccctttagcaaattagtggaagtaaaggagggagagagggtatagctgtatggaaataaagctggtgaagcattctgctcttcngctcntcntantcttgatggngaaccntgcctncact

SEQ ID NO: 35047 - DNA, 338 bp, Homo sapiens
cttagttttaaaaatgattatctcatgcagcactttcagtataaatgtaataaaaccttatgattctttcagcaaaatgccagcaacaaagcaggttgggggaatacagccattagcaaaatagatgaaaaatgcctgcctccccgtacctttccccgactgtgccgctgacatatcattcatgtactggtttgcagctgtgctaggggactaaacggttaccttttctttccataacttgcctgtataccattactttcaatccatgtgaataatttcatgactagctagtgagtttatattaatacttaaaagtaactgcaagttacctatcttta

SEQ ID NO: 35048 - DNA, 348 bp, Homo sapiens
gaggtgtgggaagctcagggagaaagactggagaccactcttctagcacactgggtggcagagaagctcaattccatggagaatggagctatattaacagaaagtaaatattggaggccacttagcccctttaattcctagatgtgttgtctttgctgtacagatgacactgatgcagtctgtttccataagaacttggtggtagaagatcagctcagattttgcgcttaccttggctttgctcagggcagtgcctacccagagagtgaacctcaagaaggagaggagcaggacaggcagctgggtcctgaaagagctagcccaagcagtagacctgtttccttttcc

SEQ ID NO: 35049 - DNA, 338 bp, Homo sapiens
ttataatatctcacttatcttgaagtcagcctcaactaacaggaacagaaaacccacattttatgatacacacacaagtaaatccttaataccattcaagtcaaaacagctgtcatgatatccaagtattaaagcatctacacgtaacttcatggatcacagaaaagatcccggctcattcagagtgattcattttacatcccagtctgacaaattttattttctatctctcagcctccagcagattagaagcaacaatttagatgaaaggcgattggggtaggggatacaactgatagctgctagaaggaaacacacgaccacagtatgacaataaa

SEQ ID NO: 35050 - DNA, 351 bp, Homo sapiens
  misc_feature (1)...(351): n = a,t,c or g
gcttattagaaaatatcaacagattttgactacagccgtaactcaattttttttttttacagattcctataaatttttactcctcacaatattttttccccaagatcatcattctccccaagactctaagcaaagagtagataaacgatatatatttgttgaatgagaagtctcataacaacccccctctttaactattctctaattttaagaatcaaagtatccctctcttactggtctaagctaatctttccattctgcattctcaatttcatttttttcccttctctggtcatcctcggttccctcttcattcaatctttatcattggttccctcttcattngaatct

SEQ ID NO: 35051 - DNA, 345 bp, Homo sapiens
  misc_feature (1)...(345): n = a,t,c or g
ggcagttccctaaaaaattaaacagaattttcatatgatccggcaattcctattcttattcctatttcttcaattcctattttggtacatatctgaaataactgaaagcaggttcacaacagccaaaaggcagaagtcactcaggtgtccaacagannnnnnnnnnnnnnnnnnnnnnnnnnnnnnnnnnnnnnnnnnnntagtattaaaaagcaattattacatacagaattaaattattcagataaaacattaaagtattaaatgtataaacataaaatattaaaattatgttgttttatgattatataaaatttacataaaaacatatattacatattattt

SEQ ID NO: 35052 - DNA, 337 bp, Homo sapiens
  misc_feature (1)...(337): n = a,t,c or g
cacaagttcatagaaaagaaaggttgtgtgtttatctgtggctgggatgatcacgaaatgcttcatggataaagagcctttgagccagacattgaaagaaaggtaatgttggacttgaggtcttggagtatcctcgttgaaggaaacatgagcaaaggcataggtagggatgggaaatgccggggtgcagagtgggcaggaatcgatttgtagttgctgggcaatgatgtgtgtnnaccactaaggngangatcaggtagcaaaggtccttggaggccanaacccanagggccttgaatggcacgtgactaaatgatttaaacgtcacgcggcgcta

SEQ ID NO: 35053 - DNA, 347 bp, Homo sapiens
tgctaatccacaccccaccctcatatcaagagagtgctaagagaaggggactgtagacttctatacacagctggaggatttagtccccagaacagtatttttcaaaggggaggtataaaatctccttagcagagcagaacagaataaaatggaatgaaatacgcaagatacactgccagaaaaagagcaagctctgttttgtgaaactgccactatgcaggtacgtgcatacctggaagccttgttaacatgtatttctcactataactacaggttgcagccaaagtttaaaagccactggccataaaaacctatcacattcatagaaaaggaggtaagaacagaag

SEQ ID NO: 35054 - DNA, 339 bp, Homo sapiens
  misc_feature (1)...(339): n = a,t,c or g
nnnnnnnnnnnnnnnnnnnnnnnnnnnnnnnnnnnnnnnnnnnnnnnnnnnnnnnnnnnnnnnnnnnnnnnnnnnnnnnnnnnnnnnnnnnnnnnnnnnnnnnnnnnnnnnnnnnnnnnnnnnaaatcgccactcagcaccttttccagaagtcttcccttagcaaaccgtttgtttttcattgcatgtgtggtatattagtttgactgattttgttctcaaaaagattttgttttcactaagtgagaataataactcttaggttgggtttttttctgttctaagaataattaatttgacatagtatgtaatctcttgagttccatagttatggtcttg

SEQ ID NO: 35055 - DNA, 346 bp, Homo sapiens
  misc_feature (1)...(346): n = a,t,c or g
gcttttcctattattttttaaaannnnnnnnnnnnnnnnnnnnnnnnnnnnnnnnnnnnnnnnnnnnnnnnnnnnnnnnnnnnnnnnnnnnnnnnnnnnnnnnnnnnnnnnnnnnnnnnnnnnnnnnnnnnnnnnnnnnnnnnnnnnnaaattttttaaaatcaaagaaacttgaggaatactgggtgaaacaaaagctctgacattgtctacttttaaaaagcaaaaggcattagagggtctacaatgcaaatttgcatggcagcagatttctaagcaaaaggcatttagagggtctacaatgcaaatctgcatggcagatttctaagtattggcagggtattat

SEQ ID NO: 35056 - DNA, 339 bp, Homo sapiens
cttgtcttaaatatgcatctacagtccctagctttcttctgagctgtaggcctgatttttgaatctgaatattttatcctcctccagaaacactgcctctcttcctgtcttttcttacacttccagtctctcaaggaggtagcctcaatcttttattaggttttgttcgttccttatcttccagtttactcccttatttcctaaccattaaagattcctcagatcctgcaccttatctatacccctactgctactatcttcattgaaaccgtcaacctttctcagttatattatttctggaataacctaatatgtgtcctggtccctaatttcatctcc

SEQ ID NO: 35057 - DNA, 335 bp, Homo sapiens
  misc_feature (1)...(335): n = a,t,c or g
gttaacctttgttttattttatggttannnnnnnnnnnnnnnnnnnnnnnnnnnnnnnnnnnnnnnnnnnnnnnnnnnnnnnnnnnnnnnnnnnnnnnnnnnnnnnnnnnnnnnnnnnnnnnnnnnnnnnnnnnnnnnnnatctccacaaaaaggaaaaaaagacaaaaagtattttatgatgaggtttaattctttaaaatatgttattttctattaagctcaatgaatactttgcaactaatttcttaaatagccttgttagtagtaccactatccataccatattttctgaatagaatataaagactattttggatttctgagaccatatat

SEQ ID NO: 35058 - DNA, 232 bp, Homo sapiens
ttttaacttgacctttgctaaaattgagagagaattctaaacatagttcggggaagcaagtaactttgaccctgctttatgtttcagatttctaaaaatgattggatatcaatatggaagccatgtaccttcttactttcttgaattatttattcctccaaactatttgtttattctatagctctatagttagtatatagattttctaaaaattattctttttttttttttt

SEQ ID NO: 35059 - DNA, 316 bp, Homo sapiens
tgaagatggaatcaacaggattagctgatggattggtggtgtgctgtgagagaaaggaatcgaggatgatacaacaaggtttttgctctaggggcgggcacctggaaagatggagttactgcaatgaggaagttactgcaatgaggaagatctggaaaagaacagatttggttgttgtgagcaagggtgatcaagtttggttttggaaactgttaagtctgagatgtctgctagatggtctatatcttacaagatggtctgagatcaccagaacaaagcacaaggctactccgaattctggccagtaaagtaggaa

SEQ ID NO: 35060 - DNA, 318 bp, Homo sapiens
tgatctttcatccacaggcatatatctggtggtatttttgtgatctaaggcagccatggatgcccaatgcataattcaccaggagctagaaaatgctgatataattctatcagccctttacttattagagtacttccataaaaagaaaattctctatgtctactacttgattgctcaaatatatgtagtttgtataaaaaaaatatgtatctttctgtcaagtgttgattccctagcttcgtccaatggtgctattactttaacatcaccatttatttataatctttaaggagctcttattcttttatgttcttttag

SEQ ID NO: 35061 - DNA, 320 bp, Homo sapiens
  misc_feature (1)...(320): n = a,t,c or g
ctgaatctacgtgccagtctaagtggacnnnnnnnnnnnnnnnnnnnnnnnnnnnngtatgtgcacaatttagttttcttcttttaaactttttttaatttttaatttttatggatatataatagtcatatatatttataggggacatgtggtttttatataagcatacaatgggtaatgacctttgtgttggaaacattccaaatctacgtcgacgcggccgcgaattccnnnnnnnnnnnnnnnnnnnnnnnnnnnnnnnnnnnnnnnnnnnnnnnnnnnnnnnnnnnnnnnnnnnnnnnnnnnnnnnnnnnnnnnnn

SEQ ID NO: 35062 - DNA, 343 bp, Homo sapiens
  misc_feature (1)...(343): n = a,t,c or g
nnnnnnnnnnnnnnnnnnnnnnnnnnnnnnnnnnnnnnnnnnnnnnnnnnnnnnnnnnnnnnnnnnnnnnnnnnnnnnnnnnnnnnnnnnnnactgtttctttttcttaccgcgctctgctcccatttttgccttcccatttgtgcgccaccattattaaatgctttatattctctcttttgattgggttacacattcttttattcttcctattcttaatcctttgtgttttctctgttactttgtttttctaatttcctctctctttgttatctttttctgttttcttctccatgttcacttcctttttttattatctttcaactctcctccttttttcact

SEQ ID NO: 35063 - DNA, 345 bp, Homo sapiens
  misc_feature (1)...(345): n = a,t,c or g
atccacactgcttccccgcttcactttacccagaaaaggaatgttctaggccacttcctcttcagcacacatccccagggaactaaaataggttcacagtcacccccatcttcctcattcccatcacctcttacccacagaggcatctctggtcctacagatccagccctgccttcaagaggcacaggtccaacccatccagtgtccctgctagtcacacacagcactcagggtacaatggagggcttctgtgctttggacttcttcgccagaggnctcacattcccncacctgagaagccaccagggtcctctctgcctgtcctcacactcatgtntagggctg

SEQ ID NO: 35064 - DNA, 339 bp, Homo sapiens
  misc_feature (1)...(339): n = a,t,c or g
nnnnnnnnnnnnnnnnnnnnnnnnnnnnnnnnnnnnnnnnnnnnnnnnnnnnnnnnnnnnnnnnnnnnnnacaagtcttaatttaatgggtaaaaacattaaattattacaacattttttccaataaagcataataaatagaatccatttcttttaaaacgctgtacaagagactggaaaacaagcttccaacagaatatgaataactcataactcattctaccttcttattgatttgggacgctccccccaccccccatgcctgaagcaacgtgcacacttcaggtctctgagcacagccggccaaggccaccagcttctaggctccctggaggtcat

SEQ ID NO: 35065 - DNA, 339 bp, Homo sapiens
gaaaaatataagtaattttaatttatgtctggtgactcctaggctctataattgtcttggcaagcctttggtgtctagtaaattcctcctatattttgggtgcagaagacattttaattgaatgaaataatgaataactggtgtctagtaaattcctcctatattgtaggtacaaaaaacattttaattgaatgaaataatgaaatatatccacatttgcttggcaacattttgcactttctaagcttgtacttaagtagtaaataaactggattcaaaattaagtttacatgtattaacgcacatgtagacactcattaatgtatctggcaatacatt

SEQ ID NO: 35066 - DNA, 332 bp, Homo sapiens
  misc_feature (1)...(332): n = a,t,c or g
nnnnnnnnnnnnnnnnnnnnnnnnnnnnnnnnnnnnnnnnnnnnnnnnnnnnnnnnnnnnnnnnnnnnnnnnnnnnnnnnnnnnnnnnnnnnnnnnnnnnnnnnnnnnnnnnnnnnnnnnnnnnnnnnnnnnnnnnnnnnnnntaaaataaaataaatagttaatgaatggagttctgcaggctttgctttaaagaacagatctacagtattttattggggaatgtaatctcagtgtcatctctgaggcatgtttactgctatatctctatcgagcacctgaagtaagtagtgcctggaacagaggaatgactcagggtgtggtgactggac

SEQ ID NO: 35067 - DNA, 334 bp, Homo sapiens
  misc_feature (1)...(334): n = a,t,c or g
atcacacccccaaacttctctggagctttgcatttacttgcttgcttttgaaacttactcttgttttagatggcggaaaggtggaagaagtgcaggccgctgagatcattttcataagtgtctgttttgcttttccttcaattctttttgagaacatgaatagcaatattgtgtgatgtgtaggaatacatacgtcacagtcatattataaaaacatgtctggaaaaggcaaacccaaattcaaatgaaagtaacctcctacnagggttaaggaaaaagagtttatgagatattngaatttattaaaattntagntcataaaatcattgcctgg

SEQ ID NO: 35068 - DNA, 332 bp, Homo sapiens
ctaaacttcatgagggcaggaacaacatctatcatgttcatctctgcattctcagtgctgataacagtacctggtacacagcaggtggcccctaatacttttaaataaataaatgaaggtgagggaaattaaagcacagaataaactctgtcaacaaacaaagaatctttgttcagtaagtagttacaaagttacaaaaatgactgagaagacactaagtctcggggctcatgacagatactatttgatggcttcagtcactattagaaggaccagaaccctcccacttactggcaaaaggttaaaaaaaaacaatcccagcttctcagaac

SEQ ID NO: 35069 - DNA, 332 bp, Homo sapiens
aaaataatgagtaatagaatatggacaagattctacaggtggggtttatcagctacagcaacaactaaaatgtgacgtggagtttttagtttctcgagttgaatagtggctaagctagaatgaattaaggtaccttcagattaaaagtcaatgaattcctaagtgtgggagatgttaaaaaaatataaaaataaataaaaacccctgaatactactacatgtggaagagaagattaagagatgaagacactcagaaagttttacagatacatttacaccaagttatttttgtgtgataattttgtataaagatatgagatgtcttttaagat

SEQ ID NO: 35070 - DNA, 330 bp, Homo sapiens
  misc_feature (1)...(330): n = a,t,c or g
nnnnnnnnnnnnnnnnnnnnnnnnnnnnnnnnnnnnnnnnnnnnnnnnnnnnnnnnnnnnnnntatgtgcnnnnnnnnnnnnnnnnnnnnnnnnnnnnnnnnnnnnnnnnnnnnnnnnnnnnnnnnnnnnnnnnnnnnnnnnnnnnnnnnnnnnnnnnnnnnnnnnnnnnnnnnnnnnnnnnnnnnnnnnnnnnnnnnnnnnnnnnnnnnnnnnnnnnnnccatcctgtttcttatttaacactatatatagacatctatagatctatatcgttagttttgatnnnnnnnnnnnnnnnnnnnnnnnnnnnnnnnnnnnnnnnnnnnnnng

SEQ ID NO: 35071 - DNA, 331 bp, Homo sapiens
ggagtaagtccaattttcccaaagaaacgctggtcactggcgtggcagctccgccctagccaggccaacgtgaaaggagaggggttgcacaaaagtacccgctttcgccatggctggaaagcagggctcacagtttccgctctccctttccaaggcatcaaattccttttaccgtagagtcttcaccctagagggaaggagcagtcagatgaacctgctttgaagcccagccgtctgccatgctcaggtggatccgatgaggtctgagaggcagtccctgcagtgccacagcctgggctgtcgctgcagcaggccacacgggagcaagatg

SEQ ID NO: 35072 - DNA, 336 bp, Homo sapiens
cgcaccttcaacgccagttggtggaatatgagagaaccaagttccaggaaattttggaagaaactccaagtgctcttgatcagactacagaatggataaaagaatctgtaaatgaagaattattttctctttctgagagtgctagtttggggcctgcttggagatcaattcctctaatttctgtgtttgtgtcattcaaaagaattgataattaaaaaaaaaatgcaaccaacagaatctctataaaatcatatatgtttacaattaaatcattcttacaagtaatgagatggtatggatttgttctcaagttattggatggaaatgcaatggatt

SEQ ID NO: 35073 - DNA, 438 bp, Homo sapiens
  misc_feature (1)...(438): n = a,t,c or g
tttganngtnnnnnnnnnnnnnnnnnnnnnnnnnnnnnnnnnnnnnnnnnnnnnnnnnnnnnnnnnnnnntctcgaggatccgaattcgcggccgcgtcggttgtaatgaaaatggttatagggtattttatctannnnnnnnnnnnnnnnnnnnnnnnnnnnnnnnnnnnnnnnnnnnnnnnnnnnnnnnnnnnnnnnnnnnnnnnngtgattcttccgtctcagcctcccaaatagttgccggtaccacaggcttgtatcaccatgccctgtctaggttattgtaaaacatatttgtagcatttatatttgtcgaattttctttactttgctcaatgaagtaaccaaattaggtatccatagtgatcagtttgtgctttcagtatttaagtaatctctgttatactttagcaactggttttgttaagtctgtgcaa

SEQ ID NO: 35074 - DNA, 332 bp, Homo sapiens
cggaaacctggagacttgccatgctaaaaaagtttgtgggagccagcaaaatctgctcgactacccctgaggtgaggtttttcaaagggaacgctatctaaagcaaatctttcatttctaatcatcttagtcctaacccatttttatgagaaaatcttcattactccaaaccactaatcaactgtagttagccttcattagggcacttaattacggatactttgcattcttggttgtatttttcatgtgtatatttcttattcttcacaactagattatcaagtcctggaggaagggaaatgcttcttttgtgttgctatcgtccagcactg

SEQ ID NO: 35075 - DNA, 332 bp, Homo sapiens
cacttatttaatattttatgagcatctacaatatgcatagtccctgctttcagggagtttacacttctggggcatgagggtggagacagatgagtctacaaataactatgccattataattaagttttaatgaaatactaaaatgggaaattggaggattttgactatggagtttgaggtagacttcgtgttctttcattctgaaaatcaagggaaggtcattttagacaaaggaaaagtattgagccaagacaaatatctggattgcatgatataatagagactgggttggctctgaagtcagactacctaagctgaatctggctcctcct

SEQ ID NO: 35076 - DNA, 334 bp, Homo sapiens
ctgataccgatttccaatttgtacttaaaattcaggtaaacacagcaaatgcagagacagacgaaccaattctcaaactgattttacacagaaaatcatttcaagcactaaacaataaataaacctacatgaaatcaacatagtgatacttgctaaaactttaaagtacttgtcaacagaaagaacacaaaaaagtcctggagaaatatggaatttaccacaaaagttccaaaaaacattcaaataattccatgattgatatggtgcatcatatttacaataaatcaaatccttatgccagcactattctaaaagcaagtttgaggaacatgaa

SEQ ID NO: 35077 - DNA, 442 bp, Homo sapiens
  misc_feature (1)...(442): n = a,t,c or g
ctttgangccnnnnnnnnnnnnnnnnnnnnnnnnnnnnnnnnnnnnnnnnnnnnnnnnnnnnnnnnnnnnntctcgaggatccgaattgcggccgcgtcgacgttaacaaagtgtacattcctaaatctaataaacccctcctttagaaaagcaatcaggctccaatcataatgttctatttgcattcaaggaaagccaataaaaatgtcccaatgaaacatttataataaaagatccttctggataatcctaaagaccaccattcttgtttaaatatgaatttgtatgttacttgaagttgttaaatagtacagaatgactgtattcccggccaggcatggtggctcannnnnnnnnnnnnnnnnnnnnnnnnnnnnnnnnnnnnnnnnnnnnnnnnnnnnnnnnnnnnnnnnnnnnnnnnnnnnnnnnnnnnnnnnnnnn

SEQ ID NO: 35078 - DNA, 333 bp, Homo sapiens
atatttgaaaaattctgttgtaccagaataaatttaggtcctcctagcatggtttataaggccagtcacaaccccttcttcttatctctccttaattctctctaatcacctacttttgtttcttgtactttatgacccttcagcaatattaaatgttctctatttgatatactactcctcttttaaaaaaaaaattgttttaaccttcaccatttctttatccttaatgacatagatcaggtttctcctagaagccttgctcttacttaggctactccctaatctctgagctcctacaaaatacagcatttgctgtattattttgttttcaca

SEQ ID NO: 35079 - DNA, 341 bp, Homo sapiens
cacatacattttgttaaaccatttgaaacattttaagacactctaacacttcattcctaaatgcttaagtatgcaaattaagacagtcttttataaactacaacacccttctcacagctcataaaattaccaataattatccaatatcattcaaaatctaatccacattcaaattttctcaactgcctcaccaccgtgctggcctcccacccccacctcagtcttttacagatggtttttcaaaatagagtccagtaaaatatttcacattgcatttggttattacataacttttaatcaagaagagttacccattccacttccttttttctttcccaaca

SEQ ID NO: 35080 - DNA, 318 bp, Homo sapiens
  misc_feature (1)...(318): n = a,t,c or g
gtgattttaaaactcttgcttttgacctctgtgctatacttagtgcttgtgtattgcactcttaaaagttgattgattgttgatggccattactaccctataagtttactgggtaaaagagattttggtcttattactcttaaatatttgctaactatattccgaggctgatttttaattttttttttaaccatggtcatgctaatagagttttgtgtttctttgtttggacggctggttcttttcttcccctggttgctttggataggatactgtggagcagatattaaatcaatatgtgctnnncctnnnccatgg

SEQ ID NO: 35081 - DNA, 319 bp, Homo sapiens
  misc_feature (1)...(319): n = a,t,c or g
gttacttgaacacaaaccctgtaatacttcagcagtcatcataaccaggatggtactaagtgagtaacaggtgggcagatagcatacacattgtggattcactggacaaaggagtgatttctgtccgaggctggatggagtggtgacagnnnnnnnnnnnnnnnnnnnnnnnnnnnnnnnnnnnnnnnnnnnnnnnnnnnnnnnnnnnnnnnnnnnnnnnnnnnnnnnnnagatctgaaggcacagaaaatgaaactgtgggtaaaagaggacaactgtaatttattctacaggttcccaagtaaatgcttggcttgta

SEQ ID NO: 35082 - DNA, 321 bp, Homo sapiens
  misc_feature (1)...(321): n = a,t,c or g
attttttattccttaatgttgcttttaaatgccaactgtctttaacatagtaccttttgttgtgttgtttagtctaacttaaaatgttaggctctaatgtgtgaagataactggcttagaaatcaccaataagtgattattttatttattaaacatctatagtcagatacattatgctaagcagtggagacagaaagtttataaagcttgcagatatataaaacatggtttttgctttcaatctggttgaagtgtaagcatatatgcagatacattctttcttttttctttgagacagggtctcattctgntgcccaggct

SEQ ID NO: 35083 - DNA, 316 bp, Homo sapiens
gacaagtgtgaggatatttgtgtgtacagaaaggaggaattacctgccattttaaatagccaaggaaggtctcactgaggtgaccatggaacaaagactggaaagggaggggaaatgccatgaagtgatcacgggatgactagcgcaggcactggggccaaggagtgtgtgtcctggccggaagaaagactgaagacaccaaggggttaatcccagctgagataaagagaattatggagctcttaatgacgggcttttactgaatgagagaaactactgtggttcgagcaatgtacaaaggatatgactttatata

SEQ ID NO: 35084 - DNA, 313 bp, Homo sapiens
ttctcccttatccaatcttcagcaaatctgattactccactttcaaaatgtatccagaatctggtctcttctcactccttccaccattaccatctggaacaagccaccatcatttcttgcctgagcaactgtaataccacctaattggtacctctgtttccctctttgttcccacatgacctattctgtagccaggaacaagaatattcttcaaaaatgaaaatcagatgttgctcccctgattaaaactctctgatgagtttccaccgcacatggaatgaaatccaaactcctctcatttactaacaatgct

SEQ ID NO: 35085 - DNA, 312 bp, Homo sapiens
tttagtttctgtatagtttggtgttattaggaaaattagaccaaattcagcaagcactaagcgcttactttgcactatgcaaaatttatgattaatcagtataaattcttaatagctttcataaaatatggaagaaccatagaaagtcaaacgagtgtggttccaataaacaatatttgttgaacaggatcaggcaaaatgaggaaactttacaatgagtaatcaagttggactaaagaaaacagagaggggggtttagatctaaaggtacttttagatggaatatttttcttgtgggacaaagtgtttatt

SEQ ID NO: 35086 - DNA, 316 bp, Homo sapiens
gatggctcgagcagtttctttcaataatatgaactaatgagttagttacagatgtctgcccattttctacagtctcccatgccctgttcctaaatggccaactgcaagaatcttatgtcttctttttgtgatttacctccagttgactgcctgcccaaagccattctggtttctttcggagttgaagagagactcagagatgtgggttgcccttagctaagtgcagtctttcttgatctggcattgctgtaaagataacttacccgtctcacctcacatcccttagcccagctcttcccacagtcacaggagcctt

SEQ ID NO: 35087 - DNA, 317 bp, Homo sapiens
attaacacccatgttgaacagaatccctgttcagtttcctgtttactacagggtccaaatctctgagctgagctgtgcagcagataataggagaagaaaaaaagatacctgctcctctttcaaggacgtggacttttctgttttgtgaagtgatacttggataggctactggatattttctcattcttgactcatcaaccttataattggtctaagtttttcccaaatttgtagctctggatttcctgtcactcctagttttctgtgttaaagttttccattttgatatgtatgatattgacaactgggagaggcag

SEQ ID NO: 35088 - DNA, 310 bp, Homo sapiens
gaaaaatttatggctgttgaactgctaggtcaagaagggccaacattgttatggtttttgataggcattgtcttgtggtttaatcaacaaagggtcataacaaggcatgagcatccatgaggacaggtgagcctgtttactgctacctcagtggcattggaccttctttttaaacttttagttccttttcatttattttattagtgatattaatgttgttccctgttaattttgtgtttaatgtccattaattgttaatttggaattttattattctcaatttgtttttctgtacctatttctcatagcc

SEQ ID NO: 35089 - DNA, 346 bp, Homo sapiens
  misc_feature (1)...(346): n = a,t,c or g
caaaatgattcttctcataaaactagaattcggatgctttccctgacaccccaccccagaacatatctgaatacaagatgtcatgactctactattttatgtttataaaacattttggagaaagttagagattaatctaactgttgaaaccaccagatctggcattgagttcattctgatatattttataacttatttttttaaataaattatccctttggaggtgaactgtccatatgggggttctccttgcatcacttttctgcatttcatttctaatacatgtggttgatgaggcagaaagaagatgagttcaaatctaatgtttaattacagcttantagcc

SEQ ID NO: 35090 - DNA, 338 bp, Homo sapiens
  misc_feature (1)...(338): n = a,t,c or g
nnnnnnnnnnnnnnnnnnnnnnnnnnnnnnnnnnnnnnnnnnnnnnnnnnnnnnnnnnnnnnnnnnnnnnnnnnnnnnnnnnnnnnnnnnnnnnnnnnnnnnnnnnnnnnnnnnnnnnnnnnnnnnnnnnnnnnnnnnnnnnnnnnnnnnnnnnnnnnnnnnnnnnnnnnnnnnnnnnnnnnnnnnnnnnnnnngatatctttaatacatatggaaagtaattatttactatgatggaggtaaggaatgtaatggtggttcaaagaagggaagagcacattcagttctggggatctgggagggacatgtgatgcagctggatcttggagggttttgca

SEQ ID NO: 35091 - DNA, 344 bp, Homo sapiens
gaaattttatgtttccattgaattcttatatgcacttgagtttatgtctaaatttctttcatctgttgatccagtgttatttcttaccactttcttcttccataatttttcatgataatcatgatttctgtttttcctggataaactttggaatcactttgtggagtcctcctggtctctgtgctcaaagtgaccctgaacccactcctctcccctaaaataatctgttggttgttaattggtctcggtatgaacccactcctctcccctaaaataatctgttggttgttcattggtctgggtatggttttctgttccccttgcacgtagggaatttgtttcta

SEQ ID NO: 35092 - DNA, 339 bp, Homo sapiens
ctattactttacacctaaactttcttgtctgtcaaggtcctagatgtaactacaagattttatattccttctaatctgatccactcaaaaattggttcaagcttctcaacattccacaaagacaccatgctgacataataaaaaacactttcagtttttactatatttcacctcttttgaattcctacaatatgcacgaatttgcagaaaactgggaagataagattatctctcaaaagtacaaggaacagatgttaagaagcagaaggaaaattttgcctgaggggagcttctaaaagaaaagtaaagaaaaatgaataattggtcatagtaatcaac

SEQ ID NO: 35093 - DNA, 346 bp, Homo sapiens
attaggtaaagttttatagaaaactttgagcctagtcttgaaggatgaagcaggggaagaggatttcacatcaggatgaggcaaagcagagctgcaaaaagtactaggcatgttcgtgagtcgttgtcacaactggtgggactagatcaggacatggaaggctccggtgagacaggcagaaaggtaattggtttgaggagggctgcatttggcacttggctttcctacccccagtctccctcttggtcagattgaccaggaatcacaatggggccatctgaaaaatatgtcctagagatacttgagtggaatatttaagagtggaatatgtaagctttttagactt

SEQ ID NO: 35094 - DNA, 345 bp, Homo sapiens
gccaaataaaggaacaatttgaaatactggtgttgatattgaaaaagcaagggactctaatgtcagaagagaaatccttttgcagatgaggtggtgatgaattctttgtttcaacacaactgaaggaggaactgaaggaaataccagctgatgagtgatgagaagggattcttgataatagagtactaggtgatttttggcatgtaatgcagaagttgcaagaagtggtaaccgatgcaattgttttacctgccatttatttacttttatgtgagccattcttcttagcacttatagctacacaaaacaaaaatagtaacagaattaatgttgtttaattcttgc

SEQ ID NO: 35095 - DNA, 345 bp, Homo sapiens
atctttttgagggacacagttcaaccccataacaattcatgggttcattcagcaaatattcaagtctcttctatgttccagactgttttctagatcctagatattgaatattattgttatgtcaaacacagtccctgtctctaaagaacttaccaagggaaggggaacaaacaaataaagcaaacagttacaatacaatagaaaacacttattttagggataggtacttaatgaaagcatgtaagagtggtacctaatcaagtttggacaggttagggatatggtgttaaagaattagggaaagactaagatagtgttatatatgaagatgcatgattttgagta

SEQ ID NO: 35096 - DNA, 333 bp, Homo sapiens
  misc_feature (1)...(333): n = a,t,c or g
gggaatgaaagtgatttaaattattttagagacaagagtcnnnnnnnnnnnnnnnnnnnnnnnnnnnnnnnnnntgtctctaaaataaaataaaacctgtagagatttctatgggaatgaaagtgatttaaattattttaaattgccatattctgggagtttgtttacttttacccttttgggggagtttttgttggtacatggtcnataagtaataanacgagatagtgtttttttnaatncngganantntcnanttggatntttttnnagtggctgttnaactgangtgntnannttgncttanntgttnnnagcanntttntgntggcc

SEQ ID NO: 35097 - DNA, 347 bp, Homo sapiens
  misc_feature (1)...(347): n = a,t,c or g
ttttattatgtgaataatttgatcatttagatttggtaattaaattaaaccatttttctgaaacaaaaaggccttttaataaagttagacagaaacaacatatttatagataatttgctagcatttcttttaaaaataattttaaaagcatattttcctaagttttgaatatataaatttctatagaatatctttcagtagacttataggaagatgggaaccagcattttgaaagcgactaagatgggagtttggtgttgtgaaggaacagaaatgtgtgactgtatgtcaacaggatgatggtagtgatgatctaaataatcactattgntataaccaccacttag

SEQ ID NO: 35098 - DNA, 340 bp, Homo sapiens
  misc_feature (1)...(340): n = a,t,c or g
tccacgtgtatctgattatgtgcaaagaccttgccatcaacttactattgcttttgcattttgtggattcaattccaatcagaattgttatcctctcaaacttgcattgtgttgccttgcttggttcatgagacaggagaaacccaagaatactaaaatatcacttatgttatattagcctggaaacctccacacagggttaaacacatcaaaacttaaatatacttttccaatgttaatcttattataggtctgaaatannaactgactatcataacattttaacactttagaaaattaactaacatactgataanacatgagatcagctatttctggg

SEQ ID NO: 35099 - DNA, 62 bp, Homo sapiens
gaaactgaaatatccaactgcgtgatactttatttcctttcatatccatttttttttttttt

SEQ ID NO: 35100 - DNA, 340 bp, Homo sapiens
  misc_feature (1)...(340): n = a,t,c or g
nnnnnnnnnnnnnnnnnnnnnnnnnnnnnnnnnnnnnnnnnnnnnnnnnnnnnnnnnnnnnnnnnnnnnnnnnnnnnnnnnnnnnnnnnnnnnnnnnnnnnnnnnnnnnnnttacccattaataaacaatcacttttatttttaattttaagcatatgtagcaagggtatcttttctctttgacctcttttccagagtacactcatttcattttatttcttaaactcagtagttatccagtttgttttcaacatagaaagaatccctttcaactcagtggtcatcagatttagacacagaccagtgttttgcgtagctgtgtctggtgtcatggtagagc

SEQ ID NO: 35101 - DNA, 340 bp, Homo sapiens
acacgatccagtaatgtcactcctagagaaattaaaacttatgttcacagaaaaacctgtacaggagttctattcataattgccaaacactggaaactattcaaatgtccttcagtgggggagctaataccaactgtagcacagccatacaacagaatacttctcagcaacaaaaaggaacaaactgtcaatatatgcaacagcctgaatcaatctcaaagacatgatgctgagtgagaagaagccagtttcaaaaggttacataccatatgatcccattttatttgacattctcaaaaaaagacaactgaccaggcgtggtggctcacgcctgtaatct

SEQ ID NO: 35102 - DNA, 341 bp, Homo sapiens
ctcagcaacatcagagccagtaaaccctctcaccattttgaccaccgcctctctttactttttaggcttgtcagatagacctaaggtccagaattcactgtgtgtattttagaggaacaattatgtgtcccactttcccattaagtataatccttacaatgactagtctatgtgtaattcaacagtcctatccataataactagtcaaattaaatcagtatttacaatatataacgtatattaataagaataaatattatgtattattttaagtataatgtaccactgaaccagcatgggacaaaagaataagcaaataaaagcttttatgtttagatata

SEQ ID NO: 35103 - DNA, 349 bp, Homo sapiens
atcgaatacaagattacatttagcttagtttaaataatggagatggagtgaaatgaagtaataggctataggccataggggaatgcagaaaaacagaggagggtactgatcatttcagactcgggaaagactcctactgctgtcctgtaagctacagatgacaaataagagggtccgtcctaggcaaacctgcaagataccacagacagactcatccacagctaggcttaatttcaaaacatttctccaaggatgtcctgaaactgcaggggctcttgggtttcctgggctccttctcggaaaggtgcctttcactattgtttacggttcaaagtggtatcctttcttt

SEQ ID NO: 35104 - DNA, 347 bp, Homo sapiens
  misc_feature (1)...(347): n = a,t,c or g
gttcattgcagccttgacatctcaggctcaagtgannnnnnnnnnnnnnnnnnnnnnnnnnnnnncccaagcagcatgcggcactattcctggctacttcacnnnnnnnnnnnnnnnnnnnnnnnnnnnnnnnnnnnnnnnnnnnnnnnnnnnnnnnnnnnnnnnnnnnnnnnnnnnnnnnnnnnnnnnnnnnnnnnnnnnnnnnnnnnnnnnnnnnnnnnnnnnnnnnnnnnataaaatttatttttttaaagcatcaaaatcttttggctaagcaaattttacataggtagaaatgtgtacaaatcttttggttaaataaagttttatgtgaacatatttttaaa

SEQ ID NO: 35105 - DNA, 360 bp, Homo sapiens
cttaagaatccaatccggtctgacttctgaaacaggtttgttctatggtgtcctcataatgtttgtttttcatatgttgtccagaaattgtagttactatttgtgggaggatttgttccatagcagccactactccatttgtggaattataactctctactattcttctgagcacacttgttcaacactgtaattggcctacttttttggtgttccccccaactttcaccagctagattgagccagtttctttcaatcaaaaaatcgaaactaaatcagaaaaaacgaggcctccaggaactgaaaagcataagaataaatccctaagagagagctgaagtggatcctgcaattcttcta

SEQ ID NO: 35106 - DNA, 358 bp, Homo sapiens
  misc_feature (1)...(358): n = a,t,c or g
aagtaccagagctttatagtcaaactaggttcaaactttgccttcctctgaggaggcctgtttcttccttggtaaaatggattaatgttttttataaagcagcttggaagattaaatgagctcacccagtatattatatacccaggagagtttctgatgtgacatagcaaaaaagtacaattggtctctgttcctacctcttagtttaagaaataaaacattacctatttagttgaagcctcccaggtactcttcctcatccctttctcctctccagagctaaccaccagtttgaaagtgtttgttatttcttttttttnnttttttttttnnaaanngggtnnggttnggcccccca

SEQ ID NO: 35107 - DNA, 283 bp, Homo sapiens
tcttcttcgccgcctcttcctcctccctatatggggctgccccagcctccaggggtggcaccaggtcctcagaggaggcctccgacatggaggcctctgactctgcctctgatgtggactgcaacttttgggggcctctaggcaagtcgagggtgcctggcacaggctgatggctctagaggccttggaagaaggtcatcatcttcagcatcaccctggttcaggcctgcaggctccgtgtccctttttaacatgtcattgaagcttttgtatttattttctg

SEQ ID NO: 35108 - DNA, 338 bp, Homo sapiens
  misc_feature (1)...(338): n = a,t,c or g
ctcnnnnnnnnnnnnnnnnnnnnnnnnnnnnnnnnnnnnnnnnnnnnnnnnnnnnnnnnnnnnnnnnnnnnnnnnnnnnnnnnnnnnnnnnnnnnnnnnnnnnnnnnnnnnnnnnnnnnnnnnnnnnnnnnnnnnnnnnnnnnnnnnnnnnnnnnnnnnnnnnnnnnnnnnnnnnnnnnnnnnnnnnngtttctagctttttttgaatacaaataatgctcctttgaacattttgtaatacttttgttggtgcagatatacaagagtctctctctggaaaatataacccagttagaattcagaantnnnnttanngnatgnanaatgnnnctagatta

SEQ ID NO: 35109 - DNA, 276 bp, Homo sapiens
ccctcatccaccttcaatacagtgtgtctttgcttttctcctgcttgcagaacactgccagaaaaaacagtaaaatatgctgattacaaatttatgagttccaatctcagatgagcctctgatgctgctcagcaattctttcacttatttatcttgaaacacttctcttctccattccccacaatatgtggaacattttcatcactctcctcaagtcccctagcctacttccaacaacgcaaggctcaaaaagtaactgtttaaaaaaaaaaaaaa

SEQ ID NO: 35110 - DNA, 358 bp, Homo sapiens
  misc_feature (1)...(358): n = a,t,c or g
attacataacaccttctctctgtaatccaaaaatcaggcacactagtgtgaatgggtaggggagtggaagaaaaagtattacttagagttcttttattaaatgcggcttttataccttaattttggctattcaagatacttgtcaaattattccacctttacttcaggaaaatgagaaacaaacacactgaatatgtcagcgatacattaaaaagtgtacaataatacagtcttgagatgtgaaatgctacaacttctacagataatactaaaagtaaatgctgcttaaggtacactgtgacagaagacacngtataaaaaacatgcacccaagaatcagcattaagtgcttttaatt

SEQ ID NO: 35111 - DNA, 363 bp, Homo sapiens
ttgggccccgattagccagtcaacaggtcacacagtctgtctgaaatgtgttccaagttctttctataaagaatccttccagagggaagccactgtgagtgaaaattttgaggctcctctgcccagaagttggcatgtcctgtggaattgcacaaattctacagagaagggaaatctaaatcgtcttcagatggagcttgtgttgcgagctctggagagggggttgtctttctacactgcatctcccatccttcctaacgagtcacggagctgtcgactccgccttcttggctttagttaacaggttcttcttgtgtagtcacatcaacgtcgggtcacatgggaatgtggtaaagcctcatt

SEQ ID NO: 35112 - DNA, 358 bp, Homo sapiens
gtgagggctgtttcttcagttacagaggttggcgaccagttacccagcggtcaccataatgaaaacacacagatgtttccacctgtacagcaagagacacaagacgcaatggcaagacctacaatcttcttaggaaccacacggcacctactgagccagtcatctagctcacaaataatgacatcactcctctgtccacaatgtaagggctggctaaggtgagggctaatggggaaaacagcacacatttatttcattagattcccaagatgaaaggctcaggttattattttttatttatgcaaagtttgtggcatgctgttgcttgataaaaaggtaacaatctctgggctctttt

SEQ ID NO: 35113 - DNA, 366 bp, Homo sapiens
ggttaccaaagcaccaagcttgcagtggcacttcacagacgcttgctgaatgaacataaacaagtgaatgtgacacttgaaaggcagctctacatcagaaagttaagagttgtgggttctagttccaagcatgtcacaaaagaactgggcaaggaaatattaccgtccctttctggacttctaggtccttatctgtaaaacaaagtgcctgagctaagtggcttctggtatccctccaaactcacaatgttttgattctctgatgtgcattaagagttattttcccatgacattgtagaatcaaagatgacatcatttcaatttaatgagagagtcagtagatctcccttaattatcaaaagaatt

SEQ ID NO: 35114 - DNA, 359 bp, Homo sapiens
gggatttgaacagcatcttgctgaggacattttggttgagcccagaatctatcaaccattagtgagaatagcgtgccctggacttattagaggaatgtattatttaaaaagtgttagtaatgtcaaagagccatttttcaaatgcctctttttcattaggaaaaaatggttggaaaaagcatttggttatccctgcaatcagaagataatggcttctttctgccatggaatggaggagttgctgagacttctaaaagctgccccacccagggaaagaaagaggaaggatgctctctgtgctcttgccctcttttttctttaaggaagacaacagtcaagacagctccacaagccccagc

SEQ ID NO: 35115 - DNA, 365 bp, Homo sapiens
atccaagtactttatagtagattgataattctgtgaaggaaatgaaggcgtgagtatcagggtaaccaaatgaaagtttcctgactaaaggtagctggtttaaacctacaaacatttacatgtgattggtatgatgggtactgaatgaattgggttggatcagtataagttgatcatgtcatgtagaaagttattaaagtagagaaaagagtttttactccagactggtttagggcaggtctttctgatttaaaaacaagtgtccaggaagctgcacagatgagcagtactaggtcatgctggtggctgagctggagtttggacctgaccctcaaacacaggtgcatgtgcacatttcgtggctc

SEQ ID NO: 35116 - DNA, 365 bp, Homo sapiens
  misc_feature (1)...(365): n = a,t,c or g
ttaaaaatgannnnnnnnnnnnnnnnnnnnnnnnnnnnnnnnnnnnnnnnnccaagtcttattctcctatgtttaaattgttcccattctgagaccacttctattcagcctttcaggttttccatgtataacatatttttcagacctagtttaattctcagctctttcaataatcagaaactctatagtgttttcatatccatcttcacttaattctaattaaaatcctgtgtaggtaaggagaagctagctaggattatcagctttattttacagatgaggaaactaaggctctgaaattaagggacctgcccaaacttacatagtaaatgtcagagctaggatttgaacctacgtcttctgat

SEQ ID NO: 35117 - DNA, 366 bp, Homo sapiens
  misc_feature (1)...(366): n = a,t,c or g
gccagggcttttttgttggtggtgcggtcaccatggttgccacatctcaaggacatggttatttccttgactacctatgctgccttacctnnnnnnnnnnnnnnnnnnnnnnnnnnnnnnnnnngtggctatatttggagactgggcttcgagggaaataattaaggttaaatgaggctataagggtggggccctgatcccatagaattagtgtccttataagaagagacannnnnnnnnnnnnnnnnnnnnnnnnnnnnnnnnnnnnnnnnnnnnnnnnnnnnnnnnnnnnnnnnnnnnnnnnnnnnnnnnnnnnnnnnnnnnnnnnnnnnactcctcccaccgagccctgaggaaaggccacat

SEQ ID NO: 35118 - DNA, 320 bp, Homo sapiens
cttccagtgagccggacgaacctcaccaggcacggagtggcccaaaccctcctggcatggagagcatgggaatggtgtacagtgtccccagttcttgcaatggacctacagaatcaaccttctccacttcctggaagggagatgcttttacctacatgactccaagtgccaccagccagagcaatcaagtcaatgaaaatgggaaaaatccttcctgtgggaattcttgggtctctctaaacaaagtcccacctctggttcctaaggaggctgctaccctccttgtcgctcgtgataacccagcaggatgcagtgggtca

SEQ ID NO: 35119 - DNA, 328 bp, Homo sapiens
  misc_feature (1)...(328): n = a,t,c or g
nnnnnnnnnnnnnnnnnnnnnnnnnnnnnnnnnnnnnnnnnnnnnnnnnnnnnnnnnnnnnnnctttctctntaaaatgcncacatgcccccggatattaaaatcgggaggacgcccccttaaaatccatncatagcccctnttacagggaattcaccatccccaagtaaaaacctcttactgaggaatttatttatgttttaagaaattttcctttgaagtactaaaagaaaatttctcgttttaaaaacactgtcctttgaggaatttacacttatcaatttataaaaattttacttacaacttcacattaaaaggacacatcttc

SEQ ID NO: 35120 - DNA, 325 bp, Homo sapiens
  misc_feature (1)...(325): n = a,t,c or g
gctgagcccaacttggggttgacaatccagaagcagaggcacctgataatagaatcagtaacacaataggtgccagtgatcgaaggcttacattctgccaggccctgtggacacctgaacttgcactgaattctcaaccccgtcccaatataattcccactaaacagatgagaaaatttaggcttaaaaatgaagtagtcnnnnnnnnnnnnnnnnnnnnnnnnnnnnnnnnnnnnnnnnnnnnnnnnnnnnnnnnnnnnnnnnnnnnnnnnnnnnnnnnnnnnnnnnnnnnnnnnnnnnnnnnnnnnnnnnnnnnnnnnnnnnn

SEQ ID NO: 35121 - DNA, 319 bp, Homo sapiens
  misc_feature (1)...(319): n = a,t,c or g
gcacacacctacaaaatggcattaaacccagaatggcactagacccaagggtctgctctgtctctgaactctactgggtctctttatgtgacccagtgattgcagatggaagcttcagtgctgcagaggagcgggtgtgtgtagagttggggtgggagttccaatagggcaaccaaggactgaggccttcctttgccttccagtgaaagagaaattcgtggaataagtatagatgcatcttggatgaactggatagtccnnnnnnnnnnnnnnnnnnnnnnnnnnnnnnnnnnnnnnnnnnnnngtgcagtggccgtga

SEQ ID NO: 35122 - DNA, 316 bp, Homo sapiens
  misc_feature (1)...(316): n = a,t,c or g
atttgctaatagtttcctgttccttggtttagctattttggtaaaagtgactaatggtgcagcaaccatttcttcaccagcccttcctcagctctcctctccactccctcctcctcaggattatagggtccttcttgctgctgtatcaggtctcagctcattagttgtttgaggaaagggcctgccatgccatgttcatcacttcagccacaaaggatggcttttactcagcaatcatgtgctgaacatctgctacattccactcttagcactagtgaaacaaacgcgtgagtggaatggacgcagacganggctt

SEQ ID NO: 35123 - DNA, 313 bp, Homo sapiens
  misc_feature (1)...(313): n = a,t,c or g
cctagcctaacattcatctaacatttatgtagagcttactttgtgccaggcactgttccaggcatatattacatatattactaattcattaaatcttcacaacaactctatgagataaaaacaattatttccattttacagtcaaagaatnnnnnnnnnnnnnnnnnnnnnnnnnnnnnnnnnnnnnnnnnnnnnattaattggcagggccaggaatcaaaccagttagtaaggcttcaaagtaggtgctcttaactgtattctagactgccatgtaattcatcatcattgtatatttaaaatattctagtga

SEQ ID NO: 35124 - DNA, 177 bp, Homo sapiens
ggggaagaaaaaaaaaggaaaaaaaaagaattgagattccagaaataaacccatacatctatgacctatttattttcaacaaaggtgccaagaccatctaatagtaaaacatatcttcaacaaatggtgctggaatctgaatattcacatacaaacatttgaatttttttttttttt

SEQ ID NO: 35125 - DNA, 348 bp, Homo sapiens
gtaaaaccttgtgccttcttaacccaagtggactccattgaatattggaataaggacacatcaggaaatcatgcatttgcacctctgccttacgcttaatcaaggtccctccattttttctcactttcctactttcttgacctgttttgggaacagcaaagggaggttagcatgtaacttggatttatccaaattgctttaaaggatctgtttctatataacaaaattgatgaaagtcataggaaggaaaacccattaatgtaatatctttgtcctcctccctcctctgtccctccagtgccactgccttgtgtgtgccaggagcccctcttcactctgtcccagggg

SEQ ID NO: 35126 - DNA, 369 bp, Homo sapiens
  misc_feature (1)...(369): n = a,t,c or g
tgtgatttcagtgcaaattacttaatctcagtaggcctcagttctctctttcaccaaatcaggagaattatttttttaatcatcaactgtacattattatatgcaaaacatactggtaggcattatgtggaccaaaaaatatgacagcaggtggtccttcccttttaagaaactaagatatacacacatgaagactgctggtggtgcaaggtgtggagtcattggtgccgtgatagcagtgtgcaggtcagagctagagagtccagagaagggactttgctgtgggctgaagtgnccaggaagggctccgtggagnaagtggngccaagganggcnttnttatnttanntatgcngnnncntgtnggtt

SEQ ID NO: 35127 - DNA, 364 bp, Homo sapiens
gaataaacaaaattctttaaattgaatgcattttgttctacaaggagccattgactttatttgcaatttaccatggacgagcactggccctcacaccgctactgcaagtgtactgatctattatacttcctgtctgtctctccagtaatgctgatctaaaccatttttggcccaatatgattgcacatgaaatgctttatagtgagagatgcagaatcaactcaagggcaatgggagtgaggaaggagttgccatctacatccggctagcctctttatgtgtgtgctttgatttggggacagtccttttccttttcttggtccctgtctagggttccagtgtcaatatcttccctgtctattat

SEQ ID NO: 35128 - DNA, 364 bp, Homo sapiens
cgactatagaagccatggtaaggtatttaagggctttcttcttttgtttgtctattttctgcttatgatgggaaactaagtggtaaattggcaatccaagaggggagacatttaataaataagtacttacataaatattcaagtgatagattaaaatttggggagtatagaatgactaaacttggttggaagcctcagggaagattcttgttcctggaaagtgtcttttaagctgagatttaaggagtaagtgtgaatttattaggaaacaacaaaggaaagagtactctaggcagaggaatattaaagcagagtctagaaagagcttaacagcatgaggatctgatgaaaggttagtttggct

SEQ ID NO: 35129 - DNA, 369 bp, Homo sapiens
  misc_feature (1)...(369): n = a,t,c or g
cggtaggaccgtgatgcccacctgaacttcaaaaccagcaggctttcattaaggacttcaaaagcannnnnnnnnnnnnnnnnnnnnnnnnnnnnnnnnnnnnnnnnnnnnnnnnnnnnnnnnncaagagaacaaagatcacatgattttgaggaaacaggaccagggcaaaatcannnnnnnnnnnnnnnnnnnnnnnnnnnnnnnnnnnnnnnnnnnnnnnnnnnnnnnnnnnnnnnnnnnnnnnnnnnnnnnnnnnnnnnnnnnnnnnnnnnnnnnnnnnnnnnnnnggatnnttnnctcctattnnntctnagttntcggnnntnttgnttnngtgtnttngncttgtttctgtnnttntnaatt

SEQ ID NO: 35130 - DNA, 370 bp, Homo sapiens
  misc_feature (1)...(370): n = a,t,c or g
ctcagggtaaaatgcatgtgacttggactgtgcccactccaggaagaagataaagagtttaaaatttgggggtattatttaaaaaataaaaaaggatccttctcccacaaatagaaagtttggttgaatcatcaaactgattatataggggaaaggtggtctattctttggnnctctgatgngnnnataanatatntcngtnttggnattgtttgttactnnnncagcttctgaacngtntgntagattttattntnttnttgtctnatnttantntnngtnttatangnnntcnnnttntntntntnctatnnnaattaanncgnnnntnttctcnnttngntantnntngnntngntcncctnttttt

SEQ ID NO: 35131 - DNA, 379 bp, Homo sapiens
  misc_feature (1)...(379): n = a,t,c or g
ctccccatgaagaaaataaagtcattatgcttacgagtgagactgagcaaaccaaacctaattttcattctaaaataaattgttacaatctaaatataattcctcactcaggaaagagttatatgaagttaaattttttattttgaaaacaaatttttagatatgaaaccaaatcaattctatctttttaattaatgtgctgaaattttgcagaaaaatataaagaactgatcaccacttcttagaagtatttcatattatttaacccacttgtcatattgggtcaaataatatgaaatacttctaagaagtgggtcgacgcggccgcgaattccnnnnnnnnnnnnnnnnnnnnnnnnnnnnnnnnnnnnnnnnnnnn

SEQ ID NO: 35132 - DNA, 382 bp, Homo sapiens
ggtaaaaatatgctaaatctctgcccaggtgccatagtgaggacctaggaaacccctaaagaaaagataccccaggctaaggaaagcaacctctcacgatgcctagacagggagttctgcccaagcagccccacagactttcttggcattctctcaaaaaaagaaaaacaaaagaaagatctagtctataaggcacctccgtggggcagagtcaacctctctccagtcccttgggcacagtcaacaaccctcaccggtccctttgtaatgcttggcagtttgcacaccaaattgaatacaaaccaagagggatggaaaaattatacttggttaaaatgttttgtgtataatctttgatcataatctgcctatagtctcggaa

SEQ ID NO: 35133 - DNA, 383 bp, Homo sapiens
  misc_feature (1)...(383): n = a,t,c or g
gcacatgataaattataataattattacatgttaataattattatcttcataatcttctaatggtctgaatcatattctcttatattttgaaaaacgataatgataacccatgtaaaacaaactcagataaccagaaaattcaattaaccaaacacagtcttaagctatacttcaatgatgactgctaacatttctaagattctccacatagtagagactactatgaagttaaagctatcaggatttatatttcaatagacataggaaagttgtaactaaaatacaataagtactacaaaaaaaaacgcaagtaaattaagctttttagtattttctggcaagttttttcacccccaaggacatttgtaatgntgttatcttc

SEQ ID NO: 35134 - DNA, 367 bp, Homo sapiens
aacacttccaaagattaatcaaacataaatattcattgtctgaaaatgtctttaagatacaattcagaggtccctatttcctttgtacatacacacttagaaagaaaagacagaaaaggaagaggaaggaaggaaatattttgagaatatattgagaagaattaagaaaactcttcaatgaagtgttaacaaccaaaccctacagacggtatcagaaacagcaaatagatattcctctaccctttcacagtgagtgagtgagtacagaagaatgctcatgatagttttgccttcattctactttctgtggacacagagtaatgaatatttaatgggacattaaatatgcccttcaaatctataattt

SEQ ID NO: 35135 - DNA, 375 bp, Homo sapiens
  misc_feature (1)...(375): n = a,t,c or g
tttcaaaacaaaaatgcaaaaacaaattgtagctatgcttcaaagcaattaaattaaggaggattccaattctttgggccctcttagcaatatacagtcgttcaattccaaatattcacaatagtgtaaaaatgatagttctagatatatttaatcactacatccacgatgttgactggaaagactaggaataataaagaagataactctagaaaaagatgacaatatttgtaataatacaaactcattttacatctccatgtctgtaccgtaatgtttatttccttccagcctccatattcttgaaaccagtgctttagaagaatcacattgaaaagttggtctcaagtataaacagnaaaagtaaagtaacaa

SEQ ID NO: 35136 - DNA, 376 bp, Homo sapiens
  misc_feature (1)...(376): n = a,t,c or g
tctggtgcaacagcagggaatacaaacatcttaaagttaacaaagcaccacaaatatagctgataagacaggtttataacaaagctgaatcattactgactcaggtaagacctgctttgagtgcaactccatcatgcccacaattattgatgtaacattttccatacagagatcctgctagaaagttatatcaagcaagggcagtggcaaaagtctaagcatcaactcttcattacttaaatctctgggtacaaaggaaatattcacatctgatcaagattcatgctcatccttacagngaaatcnnccttagtgttgcnnntgacatttnattctacatatgaantctgatttttcnntanaatgnngaggggtg

SEQ ID NO: 35137 - DNA, 387 bp, Homo sapiens
  misc_feature (1)...(387): n = a,t,c or g
cttttttgtaagccaaattattctttggtcattaatgccattaatgccataggaattagggagaaaatgtacagtaagagacacttgttcaaacagattaagtcattaccataaatataaaaacattttgatatatattaattcacagtaataaaaatgacaaaattaaagaaaagcttaggtaaaagcatgattcaatcagaatggaaggaaaaagactgtcatgttccagggtctaaaaaaattagttattattaaaaaggaatactgactctaagtagaaatttgagcagacaagatttttacaagtaaaatcgttttgatttatttcaaggtatattcatataaaaattgnttcatcttgatatcgatctgtgtccaacagtg

SEQ ID NO: 35138 - DNA, 375 bp, Homo sapiens
  misc_feature (1)...(375): n = a,t,c or g
gtcactttctatggcctcccatgtcactttctatggcctcccatgtcactttctatggcctcccatgtcactttctatagcctcccatgtcactttctatagcctcccatgtcacttggaggcacaacagtggtctcatttctcaagccatgagcccgggaatcaccctgcattctttttcccacactgtcacgttcagtcaccacatcctgtccactgtaaagtccagatttctcctgaatcccgtgcccacttcctatcctgatgatgactgcctagtgaggccttcttcgtcgacgcggccgcgaattccnnnnnnnnnnnnnnnnnnnnnnnnnnnnnnnnnnnnnnnnnnnnnnnnnnnnnnnnnnnnnn

SEQ ID NO: 35139 - DNA, 324 bp, Homo sapiens
  misc_feature (1)...(324): n = a,t,c or g
ctccttctcagcccaccctcggcagcagtaacatcaatggttccatcgactaccccgccaagaacgacagcccgtgggcacctccgggaagagactatttctgtaatcggagtgccagcaatactgcagcagaatttggtgagccccttccaaaaagactgaagtccagcgtggttgcccttgacgttgaccagcccggggccaattacagaagaggctatgaccttcccaagtaccatatggtcagaggcatcacatcactgttaccgcaggactgtgtgtatccgtcgcaggcgctgctnccaaaccaaggttcctgagctc

SEQ ID NO: 35140 - DNA, 312 bp, Homo sapiens
  misc_feature (1)...(312): n = a,t,c or g
tttctttcccttttctagaaattttcctgatttctctatcctggaggtaatttggtttggtgagaaagacaacgggctttggacttcttcgccagaggttagcgctagaccgtgacagagctgtgtgagcatgtggaggtaatttaacttgcctgaattttagnttgcctataaaacangggagtaccagcctactaccttcagagaatggtaaaggagctgncctatatantggatgtgaccctcctttctantttaagccgnattttgtacanttcttantcggagttaaccccnctttcctcttnggaa

SEQ ID NO: 35141 - DNA, 329 bp, Homo sapiens
caggagcatcaagctgggctgggcggggcggcgggcggggggggcgcgcggggaggtagaggaaaagggctggcaccccagcgtggtcagaagctgacactagacactcgcttccggaatcccagggtctcctaagggctcctcagcacaaactgccagggcaaatgctctcagattcccacacccgaggtgctcactccaaacgaaatctcatttcccaccactcaccttggcacaccttatgctgtacccatctccctaaatacaccaggtgtctaaaagtctgggcctcattcgtggtcttctctctgcctggaatgccaaccact

SEQ ID NO: 35142 - DNA, 345 bp, Homo sapiens
  misc_feature (1)...(345): n = a,t,c or g
tacattttcactattctctgttttcagtcatagtgggctgtcacttattcattctatgtcttgaacactttaaaaaaaaaaactttattccctttagtttgttcatgaacactgtaagctggaggaaaagaaatcttaaagtctcactcttgaccacagtttctctcaatttgcaaatctggtaccttgaaaaatatccaaaaagacaagagagctgggcagaagattaagtcgtagtaagggacaatattcaggtttaggggtcaacgttatttgtctcaacatgtaaatgtcctaactgaagcatgggaaggcataggctatgcttacccccaagcanaccat

SEQ ID NO: 35143 - DNA, 326 bp, Homo sapiens
  misc_feature (1)...(326): n = a,t,c or g
ctaaactaaactcttgattttctaccccaccacacctgatcttcccccattcacaaaattgcccaggtccaaaattttggtatcttcttgactctttctcatatctcaaacccaacgtagtaataacttgtcagccctacttccagaatgtttcctgaatccagccatgtctttccacctccattnnnnnnnnnnnnnnnnnnnnnnnnnnnnnnnnnnnnnnnnnnnnnnnnnnnnnnnnnnnnnnnnnnnnnnnnnnnnnnnnnnnnnnnnnnnnnnnnnnnnnnnnnnnnnnnnnnnnnnnnnnnnnnnnnnnnnnnnnnnga

SEQ ID NO: 35144 - DNA, 328 bp, Homo sapiens
cctcaaatggactcaagcccttttgagcttgtctttgactagaaagcgaaactgaacctatattatcatctttcttcactagtgggagcaagttcccactagcaagtgggagtgagttccactcagccaggcctcaggatctccttaaatgtattcctccagagaaaagatagttttcaggttcactcattggttcaggttggccactccttttctctttggaaggaacattgaagaatctgtagtaggggataattgcactgcaattttaattttgctacatactgaaaaaacgtatgcacggctacttacgtaaaccatttccgct

SEQ ID NO: 35145 - DNA, 377 bp, Homo sapiens
  misc_feature (1)...(377): n = a,t,c or g
aaagaaaccagaattgtttttatgaaactatctaaaaaacttcacactttaactttccagagcagttactctaattcctgggaattctgacttccaaagttagtcaactctcaattatccaggcagaaataaatatctttttcttgtggtcatccatgggtcagaatcgacaacatccttacgatcagactgtttcttaacccagctacgcttcgatgattaaatctgagactcagatttaatatacaaggtatatgtatttctggcaaagggttccacataactgatacaattctctgcttagaaatcaccctctcggnccgnnnnnnnnnnnnnnnnnnnnnnnnnnnnnnnnnnnnnnnnnnnnnnnnnnnnnn

SEQ ID NO: 35146 - DNA, 386 bp, Homo sapiens
  misc_feature (1)...(386): n = a,t,c or g
cagaaccaaaaagagaagcaataaaattcattcatttaacaagcaattactgagcacttaccacatgccaaggcaatatgctaggtattggagagaccaaaaagacaaaatggtgccttttctcaaggagttctatgtaatataatgattttttacattaatatttcacattagaaaccccaatggaattttttaaaatactgtttcccagaactctccctagacttagtgaatcagaatttccaggagtggagctgggcatacttgaatgtggaaaagctttgttgctgatgctggtgtacattctctgctaagaaccactgaactggaatgtagcatanaagatttcaaaacccaaatgaatntcatcttccaggattcatagg

SEQ ID NO: 35147 - DNA, 351 bp, Homo sapiens
tttagccctctctaatatctccataaaagccaaggagttgctaaagacgtgcttactcagactctaagaccctaaagctgcccagtggcctatttatctaagatgctagatcctgtggcctgtagatggccaagttgtctgcgagccgtagcagctacagcaagcctggcccaagaagatgataagttaactctaagccaaaatttaacccttacagctcctcatgccgtaaagaccttactacaaaatgcttcggcaaatagatgtcaaatgctcgcatcttgcagtatcaaaatttactgttagatcagcctcgtttgactttctctcccacaaagtgtttcaatctag

SEQ ID NO: 35148 - DNA, 352 bp, Homo sapiens
cagctatcatattcaagttttcaaatgcctacagataaaatgtttaaatatctatgttgtccataatgaagatctgagaaagaaaatatggatatttgaaggttttgtgcttccctcctttactcatcacatccaattttatctttgtagtggaaaatttcaaatttttaaatgtcaaactaaaaacaaaatcttgtcagtgataaatgacagctggccaaacagactgcatttctttcagcgcttaaaaaactatcttaggttatactcttgcacaggggtcagcaaacttctagtgtaaattgccagaaagtaactatattaggctttgcgtcgacgcggccgcgaattc

SEQ ID NO: 35149 - DNA, 325 bp, Homo sapiens
  misc_feature (1)...(325): n = a,t,c or g
ctcattttaccacttagaccaggattcattcattcagggtaacttcagttgctgtancngtgcctgncattttcttttatttatacatatggtgtgccttcttttatgtatnnnnnnnnnnnnnnnnnnnnnnnnnnnnnnnnnnnnnnnnnnnnnnnnnnnnnnnnnnnnnnnnnnnnnnnnnnnnnnnnnnnnnnnnnnnnnnnnnnnnnnnnnnnnnnnnnnnnnnnnnnnnnnnnnnnnnnnnnnnnnnnnnnnnnnnnnnnanggtttntgnancctggngnntttttntggngngntcnnganttntntnnntnngttt

SEQ ID NO: 35150 - DNA, 359 bp, Homo sapiens
cgcggccgcgtcgacttcactctttcacctttctgagtgtccattttccatcattccacactctatgttcatgtatcacaacagtttaaagctaaattgggagcagtaagactggtcaagattgattggatttgggatatattttacagatagaattgacagaatttgatgatagattgggaattcatagaatgcaggaagtactatcagatgagtagatttctatgaggagactagaggacaagaatttaggagttagctaattgcacatcctatgttttagaagttcaaatcaatatgtatatagagtgcatatatatatatatatgcacattatatatagttttttacatttactc

SEQ ID NO: 35151 - DNA, 354 bp, Homo sapiens
  misc_feature (1)...(354): n = a,t,c or g
cgcggccgcgtcgaccaaacgtgcaagaaaacgctatgaaggggctttaaaaaagatatcatcaaagcaaacatgcaagaaaacgctatgaaggggtttcagaaacgagaaaccgttaaagaaaagatgcaaggaaacaacactgtgaggggtttcagaaaagagaaatcatcaaagcaaacatgcaagaaaatgctatgaaggggcttcagaaaagaaatcatcaaagcnaatgtgcaagaaaacgctgaagccccttcatagngntgtcnatcngncgngaatnacanatttntgatgcgtnnatacttgannnacccttnaagntnacttnactgnncttnntncaccatt

SEQ ID NO: 35152 - DNA, 72 bp, Homo sapiens
gaagcacaacatagccaggagtgaagagatggcagatgttaatttcttaaaattttcctttttttttttttt

SEQ ID NO: 35153 - DNA, 348 bp, Homo sapiens
aattaattatccccagaaagtgaaggaaaagagacctttagggatgttgctggtcaagtcttgatttgaccggagtcaaatcaatcttcaagcaatcttggaatcctcaactgcagtaagcatttcaaaatgcaaacaaactgcttaacaactgacaagacaccagcccatacgctgctcttccaacagtgggttctagctttgaacaaaagtgctaaacatttccttgaatatattcttcctctttttgtcctcatcactcaatactggtgctcttgtcacaggtagaacagcttgtttcttttccatctattcaagtgtgtttctaattctaaaatgctgatcttc

SEQ ID NO: 35154 - DNA, 339 bp, Homo sapiens
  misc_feature (1)...(339): n = a,t,c or g
ctcagatcaaaatttcaagttgacaaatttggatttgaaaactcattcactttttcaatttttttaatgaggcataacatgcatatggttaagtgcacaaatcttaagtgtacagtcagtgaatttttgcatgtatgtatgtacctgaagcaagatatagaacttatttacttgtaaataacagctatattgatatgtcacataccaaaaaatttacccnnnnnnnnnnnnnnnnnnnnnnnnnnnnnnnnnnnnnnnnnnnnnnnnnnnnnnnnnnnnnnnnnnnnnnnnnnnnnnnagaaaccccatactcactaatagtctctcattcccttctac

SEQ ID NO: 35155 - DNA, 347 bp, Homo sapiens
  misc_feature (1)...(347): n = a,t,c or g
tttttatttacaatggaatcatgaatctcttgcattaggttccgatgaagttttacaagttcctaagaaaagaaaacaatgtgaaaggaaagtaggaataacaaccaaaaaatacaccccaaacccagaatccttttagttgctagacttgccactcaggatatgctgaatgctctcaatatataaaactgcttccaccaataaagagagagggaaaaggagagtggggagagaaagggggaggaaggggaggaagcaacggnagaggacngggnagaagaggaggaggnagagcnngggaaggaanggagaaacttanccttttgatttgcgatgcanaanaataa

SEQ ID NO: 35156 - DNA, 370 bp, Homo sapiens
ctcccccaaagctctcctgccctttgcagaaagactgttggtgacaactgatgctaactaaatagcatgtggttgagcttgccaaatccttccacctcctcccataggcaacagggtgacttggcttaaaggcattgagtaagcaagtaggttatcagagaacagagggaagattccattgtagataatttccaaatattacaattgatgaactcagagttcaactgctcagttccttcttctgctgacctgatacagatataatcacaatggatctcagatctttggtccatttagacatcagggtaatgtactcagttcctttaattaaaatgtgttggaaaagccatctctgggtggagaagagaag

SEQ ID NO: 35157 - DNA, 196 bp, Homo sapiens
acagaaatagcgacttgtgcatagatatggataagggtggttgttgcggtttttttggtggcaatggaaaaatggaaacaacctaaatgtctcactaattgatggatggttaagttatgatacattggggtataatggaatactgaactgccatatgtatatactgacagagggagactctcaaaaaaaaaaaaaa

SEQ ID NO: 35158 - DNA, 378 bp, Homo sapiens
  misc_feature (1)...(378): n = a,t,c or g
caagcaccggcccgacctgatcgactttgataagctgaaggactccaatgcccggcacaacctggagcacgcattcaatgtggctgagcgccagctgggcatcatcccgctcctcgaccccgaagatgtctttacggaaaaccctgatgagaaatccatcatcacctatgtggtggccttttaccactacttctccaagatgaaggtgctggcagtggagggcaagcgtgtcggcaaggttattgaccatgccgtcgacgcggccgcgaattccnnnnnnnnnnnnnnnnnnnnnnnnnnnnnnnnnnnnnnnnnnnnnnnnnnnnnnnnnnnnnnnnnnnnnnnnnnnnnnnnnnnnnnnnnnnnnnnnnnnnnnnn

SEQ ID NO: 35159 - DNA, 336 bp, Homo sapiens
tgcaaattcatctggagttctgacttgaaagtccatcatcaatttacagcaaagtaaaatgtttgcttgagtgtgatgaacaataaatttattaggataattcaaatgcagtttcttcacgttcctgcaaaccctctcttcatcaggctaagtgctttctgtgattatgacatatatataggaatgaaggagcagttgcctccaaatgagaatgtttcctattaagcatatgctaagtcaacaccactctctatctgagcataaatgaagataaaacactctacattatgattcaattaaaaacctccaagatacgttacctgccgcctcgagcac

SEQ ID NO: 35160 - DNA, 340 bp, Homo sapiens
gcaagatagaaattggatttgttctcagatatggtgctgtcagcgtgggcattgttttgtttctaatcatgatggcaaccaaagtagactattgttctaccctggaacagatggtcttacccctggctaaagttaaccaaatcacaggtactctttgatgtgaactgacggagtaccttagtcctctaaccattgtgaccctgcaagataaatgacctgggccctgtttcttcctttggctggcgactcgtctccatggggaagccccgcagtcaccatgatgtttgtcgatggcatgtcttccaagcccatgctggatcacattctctcgtgttctctc

SEQ ID NO: 35161 - DNA, 340 bp, Homo sapiens
tcttaataaaggttgaacacatattcttaaatgatctagagacagatatctttataaaaacacagtaagcagtgagctaatttcataatcaactggttggggggaaaaaacaaggtcagaagaaaacagtaataggcacctttccaatttgtgttcttgttaaggtatttgtaagtaagacaatagtgccttaagtgtcttttctccttatacagaaagaacaccaaaatgtgtctattatatatccattctttaaaactgtaagtcagttattctctctgcgaatttggctctcctgctatagattaggaagaattagaacatcctgatctatctcatt

SEQ ID NO: 35162 - DNA, 365 bp, Homo sapiens
  misc_feature (1)...(365): n = a,t,c or g
ctctcattcattgcatgaccttagaaagattatttaactttaccgagtttcaatctctgtatttgtaaaatagaagaataaaacttatcttacaaggatactggtaagataaaaggagtctacagagagatccagcacagcaatttcttgacattaagttctttccttttaactctttttacatctttaatgttaaggtcttagaaggcatggtctctttatgtcttatcactgagtgtacaattcatggcacaattctggctttaagtggaataatttgtgagtgtttgctaaacttgacgtcgacgcggccgcgaattccnnnnnnnnnnnnnnnnnnnnnnnnnnnnnnnnnnnnnnnnnnn

SEQ ID NO: 35163 - DNA, 358 bp, Homo sapiens
gttagttgatagctatgtgagcagtatagtggtgaatggagctcacactgaagtgcataatgatccttattagacaactttgtaagtttgaaaatgtcatcaaaggagaattaggatcatctgtcaaggctaccctattgtggggaagagaggtgtgggtggaggcagagttctcatcgttaatcgttgacacttggagaggtttgcatcgagccttctggacttcattctaatgacagtagagctgtctctacatttcagtgttggaagaagggtggaggatgactttaccatatcccccttttaagatcacttttaccagtgggtggaagctagagtggaattagggagaccaaac

SEQ ID NO: 35164 - DNA, 368 bp, Homo sapiens
ctcaattccaagctttatcttgaaatcctgaaattctcatgggttccccccaacccccccaaacagtctattattctgatttgctatactgttcatcctgtctgcggcatgacttaaaattcttctggactttaggttcagactctgtattgttagaatattagttaaaattttaatataaatttcccacaccaaatgagaaaatctaaacaagcaattattcagaagtgactttctagattaagaaaaaatgtgaatgagcatgttttaaacagcacagttgcttaaatttaggcaactgaaatgatttaacaaatacttgcccacgtatgtacaacagtctaatatgtaagtttctctaataatca

SEQ ID NO: 35165 - DNA, 363 bp, Homo sapiens
attttagccatggatgaaggacaatatgatggcaaagtagatgtgtggtctcttggaataacatgtattgaactagcggaaaggaagcctcctttatttaatatgaatgcaatgagtgccttatatcacatagcccaaaatgaatcccctacactacagtctaatgaatggtgagtattgttaatatatatattgctcagtgttgaataaatgaaatgctttttcataatctgttatcaaagtgatttaatttcagttaggtaaaatgtatcaccttataagatattaaaatagatgtattttacccttttaaatatatttattctttatcatgtttccatttcatggcataccgtataactg

SEQ ID NO: 35166 - DNA, 347 bp, Homo sapiens
  misc_feature (1)...(347): n = a,t,c or g
agtgaacctataagcctgcatngatttttcctggttttggtatttggtcatggtcctgggagaagccggatttactcctggataatctgaagcatgctgtggttcttcccttatgactctcatgtttcttctacggctctccttctgattcacttgccttgatataagaggacccccctccacttctgctctgtagtctgatttcattgcctggattataatctcatgacagctctgggtgccccagaaagtagcccccaaaagtgtgtttgctggagtggggttnnggggntgcagcatggcctttcccccacacccctgggtggcttgggctatgttgtggtggg

SEQ ID NO: 35167 - DNA, 359 bp, Homo sapiens
  misc_feature (1)...(359): n = a,t,c or g
gctgatcaccaagtggaaatggcttggaatccagggctaaggcacctctctgagagctccaaattcttgaaaagattcctttgactttgttgttttcagganggactgnnngaggtaccttctganttttttgtttganntgtgggnacagtcctgctgnnttacttttccantgnnncagctacanntgtnntcncataanctngnngnattcagncagcctntaaccagtnattctggttntggnncatanncaagncaccntacntagnactgctttccattagncgcngaaaaagccttncancancatnacttactttgntaaaaagcnttaaaagcttcttaatggnntgaaa

SEQ ID NO: 35168 - DNA, 356 bp, Homo sapiens
ctccactatacaagagaaaaggggattccaagtcatgcgggcgggactagccttggaaggcagaggggcatgagtatatctgaagctgaggagaggagaaaaggattcatgcaaatgcagagcaagttggctttggaagagaagtgaggaatgcatactgtagtgtgtgtgatgacaggctagctgggaggcggcaggagggtggattgggtgacctttggtggggagtagaggagtttcgaacattgcagcttaatgggtggatgtaggaacaggagtgtgaaatggcctatgtgccccactgtggctggccacataagaagcatgctcttcctcttcctttttcagggctctta

SEQ ID NO: 35169 - DNA, 247 bp, Homo sapiens
  misc_feature (1)...(247): n = a,t,c or g
ctttactctgttgattgttttccttgctaggcagattcaccgttttgggtctttctttttgttggtttgtttgtttgttttgcnnnnnnnnnnnnnnnnnnnnnnnnnnnnnnnnnnnnnnnnnnnnnnnnnnnnnnnnnnnnnnnnnnnnnnnnnnnnnnnnnnnnnnnnnnnnnntcgggttnaagcnantntcttgnctaaaacttcnnannaggtttannnanannntntgnactnnntctca

SEQ ID NO: 35170 - DNA, 348 bp, Homo sapiens
gtccctgtctctaaaaactaaataattaactacataaataatctatagatgattgcttcattgacctagaaatacagatacatttttacatggcagaatgtttgatatgatgttttcagttgtgccaagccttttcagaatatccaagatttaaaaagtttaaatcagtgttctatgaataaaatgctaccattttactccgctgtttgaattgctttcattgagctggtgataagccaaatttcagactttcatcactggaaagaattttgaatgaaaatatctacaactagtcacactttttatagtcagtgtgggagaaggtcaaacttagtacaatctgaagct

SEQ ID NO: 35171 - DNA, 345 bp, Homo sapiens
  misc_feature (1)...(345): n = a,t,c or g
cttanggttcatgttttctatattactggcccacagagaagagcagagagctaatctggggattgttttcagttgcctgttttatattatgcattcaggaactggggaagtaactattacacaataaggatttacagacccatagaactctctgagacagctttgggctgaaactttattaatcgcttgaccatcctacgtgccctctttcttggaccacagtgatgttttaggtcagttcagtgccatgtttttgtaatgcctgaaagatcttttcccccatgcacagtcactgtagtgaatgcccataggtctttctgagggaaggtttggagtatgatttac

SEQ ID NO: 35172 - DNA, 189 bp, Homo sapiens
  misc_feature (1)...(189): n = a,t,c or g
caaaatatgaaaatccagaatnttacaacaacagcaacaactaataccaaaaaccaaatcaagccaaacaaaactcttccaaaataacaacagcacaacaaataacccaacagaaagatggacaaaagatgcaaattaggcaacacagaagagaaaatcccaatggcttacaactaaaaaaaaaaaaaa

SEQ ID NO: 35173 - DNA, 358 bp, Homo sapiens
ctttaatccacttttaagtctttccccaccagcattgcagtcacgggatgcatgcttgctttgtgctcttggtaggttcggacagcttgatcatgggatttgtcaaaggcagcaagatccttgaataagggccgggtaaacttcattcttccttgttcagttgccatctttagcgccaaaggaattgcgtcctcccacttggattgaatgcagagccgcagccatctaaaaggaggatttggggggagcatggagtagaaaatgaggaaggggcaggatatgacaggtatatcttaatattacttctgtagtgatatgaataaccccactatagttatactgtacaccactttatggt

SEQ ID NO: 35174 - DNA, 357 bp, Homo sapiens
gtctgcttgcttatgtaccattttgacatttatttttcctgactcttccctctgagcatgatgcatgaagcaggcagttggaattatgtgaagagctgcattctgcttggctgccactcttggcagatacttttcatcttggatttttataccaatttccaaagaacagggttgttggaataaggagcaaagctcctgttttatttcatgtctagagcaattattcaacttcctaaaatggcctgtttagaacatttgatgaaaacatttgatgaagtgaagaagaggtagagagagcaggatgtgacaggagacgagagggagagagagagatacatggaaggaagaaggtttact

SEQ ID NO: 35175 - DNA, 357 bp, Homo sapiens
cttcatcattgctattgcctcacagtggcaggcagctccttggatttgaaagaattcaactttgggaccacacactttgaattcaaaatggaaaacccattccctggaattagactgcttcattgcaaaagaatgatgttgtttctttgtatgtccttgcttcttttttcattgatgtaaatttttttaacttaatatgaaaactctccaagtcttgatcatcagccaggattttgccacagcaatttcattctcttatcggaacttgtatgtgtcaaagtatacttcagagtgcaaacattaagcaagtaatatattttacctacagatacttatgaagacattctttcgctatcg

SEQ ID NO: 35176 - DNA, 359 bp, Homo sapiens
aatatatataaagtaaaaatcatccaaatttctagcattcagggataaccacatattgtttgtactttaaaaatataatgtacctgtggggacaatcagctagggggggtctggataagtggtatatttgggagacatgtgtaaaattgtactagaacttacaaataggtaagtagcacaatctggtttcctcactgtagaattttttatcttagtccccttttagatataatatgtcaagagaattctaaagtgatgatgataaatgataacatttattgaagacctaatatgtgtcagacactgggctaagcatgtacatgcatttttccatcgaatcatcatgtaactcattaagg

SEQ ID NO: 35177 - DNA, 340 bp, Homo sapiens
tcctactctgttttgagaatatgatcattgattcatgatagctttaaaatatgtataatttcacattgtgtcattgattaataacatataatatctgaaaattttttgaagttgagagacatggtaaaggacttagttggtgaggagaggttgttattactgttttgatgtggttgtctgagatttctttgctcttaagtcagccttgcttacctgttgggacttctgatgctaaattgttcaaggagaagtttctgaaagaccacatgtcaatcttctgaggcccagcaacagttggactatctgccttccaggaacagtaaaaactgatgattccttt

SEQ ID NO: 35178 - DNA, 241 bp, Homo sapiens
gaactactgatcatcctagagataacccactgaaaagtcttctctaatccagttttacaaaaggaaagtctttttaacatttggtttgataaaatgttttccgaagaaatactttacttgcctgttttcatttctggcccacccgttctacttcacgttttcttgaagggttcatcttctatgagttgaggcatagcaatctaatcatttttaaaataaatggtttctttttttttttttt

SEQ ID NO: 35179 - DNA, 345 bp, Homo sapiens
taataagtgtcaattgactgaatgattggtctacatgaaagtggctgttccacatcctgtactcgaataatactcactgagcaatatattttgggcacttaaccatttttgccttccttttggtatatcctattagctctcagaatggagaatcctccacttcatctttcttctgccctcagatcttacaacagtgctagtcagtatctattgaataaagagtgtatggtttaattccctaccctagatgtcctttaattgattttataatcttcaggaaacttaataaaacctctttgatacttacctttgcttcccttatagtttgctttcttcctttttaat

SEQ ID NO: 35180 - DNA, 346 bp, Homo sapiens
ctctgggaggagggcattttaaaaataaaaaaagtcactgcagagtaacaaggaagacacaaatcttatcaggtgtttaggatattctgcaaatttaaccaaaatgtatgtgagaaaattggaacatgtgtcaggcaatgttttcttccaaaactcctactaacagcaagatttgattagcaactgtatattgctttaatttatttggttcacacagaagtcttatgagttggtattactctacccattttacaaaagaggaaacattccaaaatgtgaatacattttcctgaaatgatacagctagcaagccttgccttttccaatcaaagcctatggctccaac

SEQ ID NO: 35181 - DNA, 346 bp, Homo sapiens
  misc_feature (1)...(346): n = a,t,c or g
tcgnnnnnnnnnnnnnnnnnnnnnnnnnnnnnnnnnnnnnnnnngaatttaattagctgggcgtggtgttacctgcctatagtcccaactacttgcaagatagaggtggaaggatcgcttgagctcagcagtgagnnnnnnnnnnnnnnnnnnnnnnnnnnnnnnnnnntttaaagcaaaacaaaagcaaaacttaagttttgaagtttactatatacccacctagggatattttggagctgatactaatatattaacttacattttaaagttgatgcattatgaaaattacacttgagctgattaataatacatataaaaggcaaacagctatcttagtatattt

SEQ ID NO: 35182 - DNA, 338 bp, Homo sapiens
ataatgttaaacttattttcaacaaaattacctatttagtagccataatcaatactactgaagttttctacatacatgggcccttcgtagccctgatgaaacatatggagttagttctgcgactacattttcttacagaaacaaagttctcaatgatggttgaattcgcaaatcagctttaaaaaaccttattaaaatcctataaaaatctataatacaccttcagagtcacactggtagtaagtagtattccaactccattctcctttgaaacagtttctgtagaaaatacccattctaacacgaggtgtaaaaaacttgatttttcctttctatag

SEQ ID NO: 35183 - DNA, 347 bp, Homo sapiens
  misc_feature (1)...(347): n = a,t,c or g
tgaaggttcatattaaaaataactgtccatttctagattataaggtatttggtaaggacagcctaaattttgtttacattatttgaatccaacgcacatgaaaagtttacagcctcaggaaaaaaaaaatcagtatcataccttaaaatttattttgaaaaaaacactttggtatcactaacaataagctgcattctgatgtgaatacccacccacaccctctttggaaacactttactatacttactgaaccatctgatgcactggctccaactttggtcgacgcggccgcgaattccnnnnnnnnnnnnnnnnnnnnnnnnnnnnnnnnnnnnnnnnnnnnnnnn

SEQ ID NO: 35184 - DNA, 348 bp, Homo sapiens
  misc_feature (1)...(348): n = a,t,c or g
atttaggattctgttagacccaatcaaatataataaaaagagaagggcctttcctaccagacatctacnnnnnnnnnnnnnnnnnnnnnnnnnnnnnnnnnnnnnnnnnnnnnnnnnnnnnnnnnnnnnnnnnnnnnnnnnnnnnnnnnnnnnnnnnnnnnnnnnnnnnnnnnnnnnnnnnnnnnnnnnnnnnnnnnnnnnnnnnnnnnnnnnncctaaaaaactgcaacgtcaatccttccctgagtttctagcctgccagcctgctctagacatttcagacttgctcctggcacaattgtgtcagccaattccttaaactaaacctttctctctatatataagtct

SEQ ID NO: 35185 - DNA, 338 bp, Homo sapiens
ggatgtctgagatttgctttataatctcgaggtagattggggaatgggttaggggtatagaagaaacaaaacgagagtttaaaaagttagagtgagtaaagatacgaatagaatactgatgaaattaaaatttaagtcatgaaattagcagtttttcactggaagtatgattttaattaaatattgaaagaagtttaaatttgcagtcaatacttaagtgttttggggaaatttaatttcacttttaaagtttttatttgagtaaatgggatgtaaatattttgagaatgttggtttaatatttaaaggaatgttaattgtttatgacattcataaga

SEQ ID NO: 35186 - DNA, 344 bp, Homo sapiens
tgtccttttaaatttccactgtttagatattattcagacagcagtggtatttttctgtatataatgtggcgctgtaattagtttgagttcttttggggttgtgtcttaaacagcgagaatggcctgattgatgtgctttttgaagtcttactacctttttgatgagaaggatgaaagtggtgtggagatgagtttgtctggcttactgtaaatctgatctgtgaggcttttctgcgttcactaaggcaccagagtcggactctgctttttttcttgtttgatgttactttattacacttatgaatgaaatactaatgctgttattttatagaagatcataaaat

SEQ ID NO: 35187 - DNA, 372 bp, Homo sapiens
gaattattatatatgagctcttctgacttcagagtaaaatttgtgttgctcattcctagcttccaaaagtgaataaatacataaaagattaaaggaaaataatttcacttaaggtgatcttttcatataaactataatgaaaagaaacaaacttggccaaagtaggattttatatattcttaactgatttttaagataaaaattaaaccatttgctcaagtcaaagtgatcacgttataatgaaatgttccatttgtaacagctaataatttttagactccatctttcaatttattctgaattctctcagtggccataaagcacaactcttagaaacggtaaccttacaagaaactcatcaaatcataaaaa

SEQ ID NO: 35188 - DNA, 370 bp, Homo sapiens
  misc_feature (1)...(370): n = a,t,c or g
agctatttgcataacatagcaacataaattaaaaatactttgaagaaatgaggtaataaaaatggtacaaaactctggatttcaaacttcttttgactagcacccaaagtaagaaacacataatattgcaagacagtacataaaaacagacatacagcaagtttaacaaaacaatatttaccttatagcttgtgatttactctggtacttgtattttattttttttcaaaaaaaaaaaacgtctnnngaaatnggncacattacccactaanggataangattctcaaagggagtcactagngcgganaaaagtgaangggacttggccagcttggacaacacagngaggccccatttctttaaaaaaaa

SEQ ID NO: 35189 - DNA, 378 bp, Homo sapiens
tgataaaggccttttcccccctagttttccttctccttgtgccactagccctacatacccatagacaatcatgttctccctttctgggtctctgtttccaaagagttttggtctcagtggttctcaaccctggctacatattaacaacacatgaggagcttggaaaataaaacaccaatgggggcaagaggtgtccatacacccagatatccagaatccactggtctggggagggagcctccaactggtattttccaaaagcttctcaggtgcagccccagttgagaagagcccacttaaaggggcttctaaggcctttctacctcagtggtctaagttctaattgggagaattgccaaaagacagaatgtgctcttt

SEQ ID NO: 35190 - DNA, 324 bp, Homo sapiens
ctctggtagctgaaaaagacaagcagaacctaagaattttgacaagcggaatcgaagaattttatttactaaatgattgacaaacctcctactatatccaggcaaattgaaaatatcattccatttactgacattcatttactgcacaccttttaggagtgtgtagggatcactggaagggagctgttgtctctcgttgcatctggtgatagtttgcacccttcggggctctgtagtctgtatgcttcttgtaatttaccacggtagaggaaactgtggttttagcaatcatgagaagagagcttccattagtccttatggcaa

SEQ ID NO: 35191 - DNA, 378 bp, Homo sapiens
  misc_feature (1)...(378): n = a,t,c or g
gtttttttannnnnnnnnnnnnnnnnnnnnnnnnnnnnnnnnnnnnnnnnnnnnnnnnnnnnnnnnnnnnnnnnnnnnnnnnnnnnnnnnnnnnnnnnnnnnnnnnnnnnnnnnnnntgtattccaccatctgccctcttagttcattgccacttaacctataatgcccagctcttgtgtagaaattaatacactgataacatagaggaaaacattaagctcattgaatgtaataagtccagatgacttgtacattaaacacagctttttgaggtcacagctgatctctaagaatgtaaactgatttcctctggcactaaaaagcattttcaaagactgttaagagagtttctccaacattctcttcagatttttctg

SEQ ID NO: 35192 - DNA, 365 bp, Homo sapiens
  misc_feature (1)...(365): n = a,t,c or g
ctggcttgagaaatagagtgattaaatattcactaagacaagaaattcatgaggtttgttttgctttgagtggttgtttcaaatgaagttcatttttggttggatatgtggggcataaattaaacaaatatatcaggaggtagaaacaaagacttagagaagatcagtatgcaggtggaagatggggtctaatttcctaattaaattaattaaaacaagttttcttcaagtatcagaatcaaaatatttttaaattaccatttaaaagctgcttttctattttcattgctatattgcatgatgctattttgntttataatattccatatttcagtacaaaatagaagaataatcntattccgctc

SEQ ID NO: 35193 - DNA, 375 bp, Homo sapiens
cctgtttattagcaccctccatctccaaagggtatctaaaatacaggcacttcataggcattactttcagataccctttggagatggagggtgctaataaactgaagtatgagtcaggtcaaccctaggtccttgtagtttgcttggcaagcatttgataactaggaaatagtgaagtttctgctgtgtgttggtgggagacatcagttcaaacggaaacatctagctgtcaagtggtcttttttttcttcccatgggccctccctaaacagcttagccttgtatctttaataatctctctttgtgttttatctgcttgaaaccaggcaacttaaaatagttacctagtaatggaagacttgaccctgtgaacat

SEQ ID NO: 35194 - DNA, 366 bp, Homo sapiens
cacagtctctgataaaatatgttatgatttgcctaaattgtctcttacacttgaaattacttttaaaaaatccatgaaaaatcaaagttaaaagtagcagaccattaatgttataaaacaacagctttcctagttttcttcttactaataaaagtcctgattggtgtttgttaagttgcatcagctagagattaaaataattattaactattttgctaagattcaaacagatggaaaatgcttgaaatatctcaattttgtacttaaaataaatgcttataaagtgatatattttaggttattaaggacaatttgttgaatacttgtcgagttagtgtttggcttgcctattcttttaaaacaaag

SEQ ID NO: 35195 - DNA, 369 bp, Homo sapiens
  misc_feature (1)...(369): n = a,t,c or g
ctattttacaaggacattgaggattaattaaatttaaaagaaagtagtgcagttaactcccaggagacagagggagatgtttatcatttttctcatcattcattccttattcattcattttacaaatgtttgttgaatagtaattataatgaagatactataccagcttcctgaattgggaatacaaagatgaaggatgagagtgacttctgccttcattatgttatgtgttcatattttctttttaaaattctcattataatatgagtaattgtgcagggatttaatattgctggtctcagcaatagttgatctttgattaacatctcactgacacatattttcactgngtatatttatttttccttc

SEQ ID NO: 35196 - DNA, 362 bp, Homo sapiens
  misc_feature (1)...(362): n = a,t,c or g
tccaaattacatatctgaaaagggcttaatatctagaatatacaaaggactcctacaattagcccctttccccccagaaannnnnnnnnnnnnnnnnnnnnnnnnnnnnnnnnnnnnnnnnnnnnnnnnnnnnnnnnnnnnnntcaataaatacatgannnnnnnnnnnnnnnnnnnnnnnnnnnnnnnnnnnnnnnnnnnnnnnnntgagataccacttcatacccattagggtggttgttataatgnnnnnnnnnnnnnnnnnnnnnnnnnnnnnnnnnnnnnnnnnnnnngcattgccgatgggaatgtaaaatggagccaccttggtgaaaatcatttgatggtttctcaaaatttta

SEQ ID NO: 35197 - DNA, 361 bp, Homo sapiens
gttaaccttcttgtagtgtcacatttttattttaaacttatacagacaaacatcagatgccatgtggtttgtctctgaccctttgcgctacttcatgacagctttactgagtgaagcctgaatacccaatcgggaaggcaagatgttcttgtcttttcccaactctcttcaaagtttaacagccttggaaggagtcttagaacagcaacaaaagcacaatttacagaaaaatggaggtgctgctatctgtttcctcgcaggtacttggaaaatgtatagcactaagatagagttgaaacatgttatgtagagccttgaatgtcggtgcttcaaagaggagttgctctgggtttacatgata

SEQ ID NO: 35198 - DNA, 371 bp, Homo sapiens
acgagatacggtacataagattggaaatgctacataagccatggtatgctcatctctaaaatgagagtgttagcagttgccacagaatagaagtggtgtgagaatcaaatgaggcaacacaggtaaatcgacttgcatttttccttagcattttgtaaatgatcaataaatggtagctattaacagatatcctcaaccagcagtatgtcttttttgctttgcacgaagggacctacttcattaaattttgttgttactgttttccaagaatgctccatctaatcctattttaaaatttcaaatgtaaacataaaaagagctaaacatattcacaaagagaggacagcattgaaggtcgacgccggccgcga

SEQ ID NO: 35199 - DNA, 357 bp, Homo sapiens
  misc_feature (1)...(357): n = a,t,c or g
atcttcaacaccaggttccttgctttcttcaatttctttctttcgcttctttgttattgtttttgctttcaaacctccattctccacaacactgaggtccaatttgccatcatccttacttcctatagcttttagtccttgcaaaagaatgtcacgtaaattttcataaagaggtttttcagtgtagtctagtaatttcactgtttccatgtatttggcaatttcacctggtttgtttttctcaggaaaacatttgtccatcaaacttgcaatattttctctgtatctaattttggaatctctaacatatttaggatctttcatattatcctcccaaggaagatggccagtangcct

SEQ ID NO: 35200 - DNA, 156 bp, Homo sapiens
  misc_feature (1)...(156): n = a,t,c or g
cctcagtaatttctcttaaacatatacatacatacatgagaccactttattacatctctagaacacccacaaatcacacaattttatgttttaactgaaagggaccttaaaatatcttgcctacatagaaagaanatatcanaattcagganatct

SEQ ID NO: 35201 - DNA, 230 bp, Homo sapiens
caaacaccaacaaaactgggaaactaacataattactaggctgaaaaagctacaagtcaaatatgatatattagttttcttctcccacaggaatatgtctttgcatctcaagattcacccggggctgcctatcaattattcacaaaccaagatcttttccacccaaggcattcatacatattgtacctactaccaaaattgcccttcttcctcatctttttttttttttt

SEQ ID NO: 35202 - DNA, 374 bp, Homo sapiens
ttgtattattatattgtttctggtttaccatctggtaaattcttatttctggtttaagtcaatttctagaatattctgttaagtttaccgttttcagtgtaaaaacctatagtgttgatgttaaccatttttaatatgtaaacgattttatgaactatttccctttaatgctaataaaacttgtccatgatgtctggctttgtgggctatgtgatctctgttacagctactcagctctgctgttgtagtgtgaaagcagccacagaaaatatttaaattagtgagtatgaatgtgttctaataaaattttacttacagacactggaaatatcattgcaaatattacccatgtttcagagttagcaagtagggag

SEQ ID NO: 35203 - DNA, 376 bp, Homo sapiens
tatctcttatattcacctacacaaaaattacttcccagtttcccatatggattcaaacttactttcttgaggaaatgcttccaatatgaatttccttttcagttgaacataccttctcgggttttggaaatctgtattatagttactatggtcatttacgtattgtttggcaagtactatttcatgtgtatgttctgaatcctcaactaaaatataaacttgaagaacaaacaatgaagttaaatgtccaaggaaaaagagtagcttgtgatatcaaaaaagcaagttcaacttctactttcatcatttcctattagcttgaaaatggacaatttacttaatcttcccaaaccttaacttcctcatttgtaaaatg

SEQ ID NO: 35204 - DNA, 370 bp, Homo sapiens
caggctacattttggtgtcctgttaagtgtgttcacttagattactctcagacactgaagccttataagggactggttgtgtctataaagtggattactcaaaggaagactctgcccttggcacgccctgtcccagctcaaaagcacaagttcttatgactctggattttaccagtagtctagacctcagtggaccttgggcagaagccttcctgcctgagaggctggaaggaattcttttgttttgttttaaaggaagttacttgtttaaaacacaaataaaggtgtggtagacatcattttggattatagcctttaaaaaaaaatctgattaacttgattcattagagtgtgattttctttcttttgg

SEQ ID NO: 35205 - DNA, 376 bp, Homo sapiens
cttgtgtctgggaagcaactgcctcatgagtaatcacatttcctagcccctggaccagccatagccatataactggttccctccagcggaatgtcagtggcatcaccatctccaccctctttcctttcctcagactggatgcagatgatgatgtggccatcgaggatggcagaagcgaaagatgaaaggagccagtggttcactgcataaagaaagccacccactgaccaagaacacacattttagactgtgataaaagtgagaaataaagctctattatgtgtgagacattacacacctttaggtttgtcagtagcactaatgcagattccatagaggaaacttacatgaaaaaagatttaagaccagttgagat

SEQ ID NO: 35206 - DNA, 369 bp, Homo sapiens
  misc_feature (1)...(369): n = a,t,c or g
cttttcttctcaactgctaaaagccagtgctatgaacattacaggtatccatttgcctaagttaataataatcaatatatactaagtatttactatgggacagtcactatactgatttacaaaggttttcactatttcttagaagaaattctaagtatgtaaacaaataggaaaattaatgttaactttattttgctttcaagaaaatctgtatttgtgggatgaagttagacctttaaaatgaacagaattactgagggctctagaaccaggctctccaggatcaaaccccagtaccacttcttaccagctgngttgctctggaaccagtgcttagcctctctgtaaaatgaggatgataacgtggga

SEQ ID NO: 35207 - DNA, 376 bp, Homo sapiens
cccagtagaatgtaaactctaaccactgtccttgtcttcattacacaaacatatttctgagaaatccatcataaggcagaattctagaggctgagaagtcatcagtggatgaaataaagaaggtgctctgccttcatggaacaaaaatgagaacttggcagaaacaagtggacttgaagacatttgaagtctattccactccttggaatcggaattcaagcaggcaaagtgagcacagtggtttagtcccagctctacctctttgtatattcagtactgattaggcacctctcaccccagggcctttgcacacactggtccttctgtctggaatgctttcccccaacacatatacaaccttttcatttgcatgact

SEQ ID NO: 35208 - DNA, 377 bp, Homo sapiens
  misc_feature (1)...(377): n = a,t,c or g
ttctgccctacannnnnnnnnnnnnnnnnnnnnnnnnnnnnnnnnnnnnnnnnnnnnnnnnnnnnnnnnnnnnnnnnnnnnntaaaattatgcaacaagtggacttttgtccctgatcaatttaaaattacaaagttataactaattattttcgtatatatgaatgcacaaaaaaaacctggttactaaaaatctagtcattcaattagacttctaaaatgatttaaatatatggcactgtgtaagcaaccaatggtcagagacaaccttttgtgaaagttagccatcataatttctgaattaaattaccgaatttctatttcaaaatttctgctttacaaaaggaaaaaaaaatgaccaaaggaggaccatactag

SEQ ID NO: 35209 - DNA, 376 bp, Homo sapiens
  misc_feature (1)...(376): n = a,t,c or g
cannnnnnnnnnnnnnnnnnnnnnnnnnnnnnnnnnnnnnnnnnnnnnnnnnnnnnnnnnnnnnnnaaagaaagtccataaattgagactcctagagatactaaatggtagaatgggaatttgaatttaaatttataagatgttcactctcggagatcataggtcattgttgtcctcctccttttcatgacaggaactagcaatgaagagctctgactatgtgctaggtactactctgagaacctaacatttgtatctccttattaactctattactgccccatcctacagatgagaaaattgaggcacaggaagtttaagttggccaagatcacacagccagtaaggggcagacattgaaaggtcattttgcctg

SEQ ID NO: 35210 - DNA, 368 bp, Homo sapiens
  misc_feature (1)...(368): n = a,t,c or g
nnnnnnnnnnnnnnnnnnnnnnnnnnnnnnnnnnnnnnnnnnnnnnnnnnnnnnnncttgaagtttgttttctcagtggcccctaaacaacaaatgcatattgctgtttttgtaatagactttttataatagattcactcatgtagatcttataacttcctaataaatacctctgtaaaagtttcttgtaacttctacataaatactgttagaagatgaagtgtgtcctttgattcctaggctttctgaaattcaggttacaaatttacagagattatggagttggggttgaactctttgatgctaacactacccctctttgacttccttgcctcctgtagccggagaaaacacctattttctcgtga

SEQ ID NO: 35211 - DNA, 368 bp, Homo sapiens
  misc_feature (1)...(368): n = a,t,c or g
cgacagaatgcatttaaaagatacacacccaagtgcacacacaatccaaaaatgtgctttgtttaagagacactttagactcaaagacataagttggaagtaaaaggacagaaaaagatacaccaagcaaatggtagcaaaagtactagggttggggggagggtctatgttaatatcagaaaaagactttaagacaaaaattgttactagatccaaaagattttataaaattgagaagatcaatccaccaaaaaaaaaagattacncnttancntacntaacgagnccaaatatntaangcaaaaccanacncantngantncngaantagatanttcancantaanngttaccanttntattaccag

SEQ ID NO: 35212 - DNA, 395 bp, Homo sapiens
  misc_feature (1)...(395): n = a,t,c or g
annnnnnnnnnnnnnnnnnnnnnnnnnnnnnnnnnnnnnnnnnnnnnnnnnnnnnnnnnnnnnnnnnnnnnnnnnnnnnnnnnnnnnnnnnnnnnnnnnnnnnnnnnnnnnnnnnnnnnnnnnnnnnnnnnnnnnnnnnnnnnnnnnnnnnnnnnnnnnnnnnnnnnnnnnnnnnnnnnnnnnnnnnnnnnnnnnnnnnnnnnnnnnnnnnnnnnnnnnnnnnnnnnnnnnnnnnnnnnnnnnnnnnnnnnnnnnnnnnnnnnnnnnnnnnnnnnnnnnnnnnnnnnnnnnnnngccccaatatganattntttnttttcctttnttntcttttntttttnctttgaggnctaccggccngnanttncagnatctntgaatcgtaaatcnnggaa

SEQ ID NO: 35213 - DNA, 389 bp, Homo sapiens
  misc_feature (1)...(389): n = a,t,c or g
ttcctgtacttgtcctcagactcagggctgtgacctacggaatcgtccgcatcggggtctgggctgtcacagccattaaggcccttctttctcaacgtctccacgatgtctgagtttgtccggctctcatgcggctcgttgtactccgtgtacttgagaagcactttgtccatgtcggtgctggcatactggaacagcttgttggtgctgttgaagatgatcagcgcaatctcacagtcacacagcacgctcagctcataagccttcttcatcaacccaaatttcctctttgtaaatgtcacctgtctgttacgttcatccataatcctcgtaatctgaatcttttttctccccatagtccccgnttttcttctctctctcgtccttga

SEQ ID NO: 35214 - DNA, 378 bp, Homo sapiens
  misc_feature (1)...(378): n = a,t,c or g
gagatattattgttttagctactattaggggttctgctacttgcagctgcaagcatttctaactatatgggaagatgtttttatttacttttggcagataagaaaacagcagtagaaaaaagataagattttcttagggcctcacagcagtgagtggcaaggccagggttgggtttgnnnctnantggnngacnnggccnggaagtncacntctantgagcntngannnngatannccntgcannaantnatncactgngnagcntgcnnntatgtnacnnntctcctttatncntnnntttggnctatntaangtgnctatccntnctctaggnttnagncntngnntgtnaccntngnncnnttaggncgttcgct

SEQ ID NO: 35215 - DNA, 391 bp, Homo sapiens
  misc_feature (1)...(391): n = a,t,c or g
aaaaaagcccagagaagtatgtgcaagaaactaacagtatgtggttgtgggcgtagtttttcaaaggaagaagtagtcaaatgctgtaacaaggacaactcatcttgaaacacttacgcagtggtgtgtggagctggcttggaccagcttttgctagccagttattgtgtagtagctcttcccagcccatgttcagtgataccatgttggtaacttgaaactggttaccatggaaatagtcatgccatggaagtctgcaaatgatacaaaacttattttgagctgatgattatatggtgatgtggtcgtaaatatttaacactcattagaagacattgctaagtaggatgttgaaggntgctgaaaccagaggtgtttggagaaaagtaat

SEQ ID NO: 35216 - DNA, 382 bp, Homo sapiens
  misc_feature (1)...(382): n = a,t,c or g
gaacattcttctgctcactgacctttaaatcaagatgagaaatgactcctttggtttgaggttttgttctctgttcagagatctcccagggaagtctttattttaatctatggccatcaccttcccttcaacagaaatctgcttgttaaattctatcctgagaagagatttaataagggataaatggggagagtataaattcaagggaagggtatctaagggagtgagacaggtggggaaaagaccctgaagctattaaaaagggtagttctgacccacctcaagcccaccttgctgctcccaggctgggatacatactcccggccttctctctctgctcccatctcttctgntcttccctatcatctctccgtgcctacat

SEQ ID NO: 35217 - DNA, 391 bp, Homo sapiens
gttcaaatcaaagatcaaggtggttgctgctttgattctggatggttttactttactccttgcatagattcccccaccccagtaaaaaagtagcttgttgagagacacctgggtttgtttccatctctggaagccagcacaggtaaagcaatataaactattgatgattctttgctggagatggataaaactagctatcttcaaaaaccatgattgatgacaatgaaccaatattggagggaaacatgcaatgagaggaaaacaagggaaaaccctgaattgttacagcccagcttcttgagcaaaacgtggtatgagaggaagagagggccttcgttggtccctttctgaaaatttgaaatctttcaagcactttcttttctgccatcct

SEQ ID NO: 35218 - DNA, 229 bp, Homo sapiens
caccaatccagtgagaagttctcagtcttcatctctttgatccatcattaccatttggcacagtttaaccactccttccttgaaatgctttcttcaattgaccttctagtacttccttgcagttgacttctagtacttccttgctggtagttctccttttaccttactggattgtttctgcctcctttgctgattccccttaatccctccagttctttttttttttttt

SEQ ID NO: 35219 - DNA, 390 bp, Homo sapiens
  misc_feature (1)...(390): n = a,t,c or g
gtaaaactgagaaaaccatatgtgttatttcatgtaacacccgagtttgagaaaatcatattattttcacaaaatgtaaaaaataacaaaagctagaaagtatatgggatagttaatgtcgggggctgcagagagctcaaagaagactcaaaatgggccattctttttagcaactggttatcactggtgatctgtggaagacagttttaaagtgaccaagggtcgacgcggccgcgaattccnnnnnnnnnnnnnnnnnnnnnnnnnnnnnnnnnnnnnnnnnnnnnnnnnnnnnnnnnnnnnnnnnnnnnnnnnnnnnnnnnnnnnnnnnnnnnnnnnnnnnnnnnnnnnnnnnnnnnnnnnnnnnnnnnnnnnnnnnnnnnnnnnnnn

SEQ ID NO: 35220 - DNA, 384 bp, Homo sapiens
  misc_feature (1)...(384): n = a,t,c or g
ctagatttaaaaaatgtttattatcattaggacttcatatgatctgaaacttctggagaacaatataaaattaggacttcatatgatctgaaacttctgaagaacaatataaagctgtcagagatataatataaaactggagaacaatataaaactgtcagaactctggggcaagaattataattgagacccccaatagaagacaatgaaactaatgaaaacagacacataatagataaataatcgtcaattatcttcaagatagaaataagcaacacaattcagtacagtctctttaacagcanaagacaatggagtggatacngttcaggacaatgttcagaaaaaaaaaccttaaagcagtttcaatggaaggaaagtttt

SEQ ID NO: 35221 - DNA, 389 bp, Homo sapiens
  misc_feature (1)...(389): n = a,t,c or g
taatcttggtatgagctgttctggataattttgcccaacacccaaattcgtgctctttcaacatttagatttaagtcttcttttagatcatgaaagccttcctaatattaaaaatatgttccattgtgtgtgttttctgtgtgtctattttttatgtctgttattttttgttttctttcaagaactaaaattatgcttctgctggctctccactgcctgtcttctatgtcaatcattttctctctaatctttattaatgcttcccttatttatgtttcatttattcacctttcatctatgttccacactgcattttccacagtgnctattttcccttgagattcttccaacttcatcttcatttctgagaccaatttgcctttttttct

SEQ ID NO: 35222 - DNA, 391 bp, Homo sapiens
gagacccggggtcggaagtgagtagtcgagtgagggtcctggcgttctcagaggcgaaccgcgaagggtttgtgttttctgcggtctgaggcctggtgctccgtcgcagcctcggggcgatacctcttcagtgtcttgggccgagcccagctctggggcctggtgcgtgtctgagcgaggaacccgcagcaacaatggccgcccggccccccgcacgggccctggcgttcgttgtggccgcggctgggccagtgggagcgacgttttaaggcaggattgcccttcggtgttgagcttgcgttcctcctggagtagataaggggaattgtgagaggctggtaactaacgcgttttcagcgttgggtccctgcaacttccgcacactctgtgg

SEQ ID NO: 35223 - DNA, 386 bp, Homo sapiens
ctttattctgtatgcatatgaaaaaaaatgctagatctgtatctagattatacatgggtaaacacaacatatagaattatatgactttgcctatgtagatatttatgtatacaatagatattaatcaacattttaaattccccagcctacactgcggatgcagatataaacttactctcacctatatggatccataccatctcagactggaaaacagccatacaaggttatgtttaaacatcaataaagcttcacatataggtgcatggcctgggaagtatgtttttggtaaagccatcttagactctagttccagcttagcatttcagggccctgcttcctttctcactgtatgcctgtgtgattcacatttgccatttgggtcg

SEQ ID NO: 35224 - DNA, 384 bp, Homo sapiens
  misc_feature (1)...(384): n = a,t,c or g
cagaaacctctcttgtgatctctgtcaccattcaagccaccttcctgggcaccagggccaggcactggatgggaccgtgtcagcaggagagggacagagggagggattggaagtgtcccaacatagacttgccaggacgtcgacgcggccgcgaattccnnnnnnnnnnnnnnnnnnnnnnnnnnnnnnnnnnnnnnnnnnnnnnnnnnnnnnnnnnnnnnnnnnnnnnnnnnnnnnnnnnnnnnnnnnnnnnnnnnnnnnnnnnnnnnnnnnnnnnnnnnnnnnnnnnnnnnnnnnnnnnnnnnnnnnnnnnnnnnnnnnnnnnnnnnnnnnnnnnnnnnnnnnnnnnnnnnnnnnnnnnnnnnnnnnnnnnnnnnnnnnnnn

SEQ ID NO: 35225 - DNA, 376 bp, Homo sapiens
  misc_feature (1)...(376): n = a,t,c or g
cacatcttgtgtaataagacaaaaacaaagtcgcagtgcaaagcacaaaatactaaatatgagtgactgctgcttctttacaaattacggctttcacttagcttcgtgtctcccacctcctaaatgagatctattcagaccaatcataaaattaccccacttccttacagaatcgaaatccagtgcaaactcttgcttgaatccttcccaaatcactcatcacaagcccaaatcctgaaagaaggcctttccagcactcaggaatccctacgatgtatctctagtttcaacaaacaaaaaaacccaactttgttcaactccttgtgngttcctagtggtctcctgngttgagtggcattaccaggtggaatatatc

SEQ ID NO: 35226 - DNA, 373 bp, Homo sapiens
tcttggtccacctaacattttcatgcttcattacttaaataagaatgttggttttgagaaatagcattttaaacaaattgtggatcttctccttccaaaaaaaccattaggaccacatctgcaattaagatttaatattggtgagaatgagtggttttatttaattttcccttaaaagcaaaggagacagtaatcttaataaattcataggggccgtggccacatcaggtaatggggttatgatgtccaagattgcatggatcacattggtgatgagagcagacccagatgtttagtcctcactctgtcaccatctgaggaggtgaccttggacaactcccttctctctctgggatttaatctttttcggcgg

SEQ ID NO: 35227 - DNA, 379 bp, Homo sapiens
caatcttaagtaatgttaatgcatatcctatagttgtctccaaataagtagacttgatttgcatataattgaagcaacatatatttcacatacttatgcctagattcagtatctagccagcagcttggtatcctggcacttagaagatactcagtaaatatttgctgttatgacaggtttgcataacatgtctatactgtattgtttgtctaaatgaggaatttattgtctgtctaattaaagatcatcttggcagctttcagatgccatgcaaacattaaatgttgagtttagatttgcttccatcccctgtggaacctggcaagttgttttaatttctctgtgcctcagtttctcatctgtaaaatgtaagtggaaa

SEQ ID NO: 35228 - DNA, 375 bp, Homo sapiens
  misc_feature (1)...(375): n = a,t,c or g
nnnnnnnnnnnnnnnnnnnnnnnnnnnnnnnnnnnnnnnnnnnnnnnnnnnnnnnnnnnnnnnnnnnnnnnnnnnnnnnnnnnnnnnnnnnnnnnnnnnnnnnnnnnnnnnnnnnnnnnnnnnnnnnnnnnnnnnnnnnnnnnnnnnnnnnnnnnnnnnnnnnnnnnnnnnnnnnnnnnnnnnnnnnnnnnnnnnnnnnnnnggattacatttccttcactacagatctaatctgcaacactcccccacccccctggctaaatgaagattaagattcctattccaagcctgaaggtgaaataacctttctttccttaatatatgagaatttgacagctggaacctgcatgcttctctcagctccatcatcagtac

SEQ ID NO: 35229 - DNA, 376 bp, Homo sapiens
aagaaaccatggcatttatgatgaattcagggtaattcagaatggaagtagagtaggagtaggagactggtgagagaagctagagtgataaacagggtgtagagcaagacgttctctcaccccaagatgtgaaatttggactttatcttggagataatagggttaattaagcacaatatgtattagctagggtaaagattagtttgttgtaacaaagacatccaaagatacagtagctgaataagatagagaatttttctctcaaagaaagtctaagtaggcagctcagaagtagtatggctggaagcaacctgatgatattgggacccccaactttcttcagtcttgtacccatcatcccctagttggtgatctc

SEQ ID NO: 35230 - DNA, 309 bp, Homo sapiens
actttgcattggccagggtgtcttgggagcccggctggcctccgcggccggcgtcccctgcctccaccctgtgcccgagggggtgtccggtcctgcccatccgatactctggtggaaatgtggctctttgcagcatgtacgtttctccctgattttggttgatgcatatttccccgtttaagtagccgttagggcgcagtatcggcagcttgacacccaccaagcaaaagtttcagcctggaaaaaaaatgggggggaagggtggatgaaaaggagggagagaaggtggaaatggtttttttttttttt

SEQ ID NO: 35231 - DNA, 391 bp, Homo sapiens
  misc_feature (1)...(391): n = a,t,c or g
nnnnnnnnnnnnnnnnnnnnnnnnnnnnnnnnnnnnnnnnnnnnnnnnnnnnnnnnnnnnnnnnnnnnnnnnnnnnnnnnnnnnnnnnnnnnnnnnnnnnnnnnnnnnnnnnnnnnnnnnaccaantaaaagggaaaaaaaaaaaangcnatnntttngganaatntaaaacccaaacccntntccttanngaaanttngntncccnttnaagtntnccanggtntccaaanttnaggggttntnaggttgggnaanggcaacangggggaaaaanggntttgacacctaancgtcaacccggccgnaanttccaaatntntnaatcgtaaancctgaaaanccccgnaggttcnnttaaanngggcntngggccccntntnaattttttt

SEQ ID NO: 35232 - DNA, 385 bp, Homo sapiens
  misc_feature (1)...(385): n = a,t,c or g
atctgcannnnnnnnnnnnnnnnnnnnnnnnnnnnnnnnnnnnnnnnnnnnnnnnnnnnnnnnnnnnnnnnnnnnnnnnnnnnnnnntcctacannnnnnnnnnnnnnnnnnnnnnnnnnnnnnnnnnnnnnnnnnnnnnnnntaaaaaaaattattattcagaatgacagaaaaggattatttccaaagggcgtgagtaccccgtttactatttttgagtattcttgttcctatttgccaaaaatgttttaaacgattaaagccttggtttttaaggtttaatagtaaaattttaattattcactggcaatcttttaaagcactgttaacttcctgggcaccaaatgcattttttatttaggcagtctctagaaatagttgaga

SEQ ID NO: 35233 - DNA, 391 bp, Homo sapiens
  misc_feature (1)...(391): n = a,t,c or g
tattgagtcccctgtgttgggtaaggcacaaaaaatttaatttaaatgcatacctataattattttaattttaaaaattactgtttcaaactttgagttacctaaacatattggctaccaacttcaaatcagatgaggtgttgctcaagcatggcaaaatcttccttataaatgtacatacttacatgaaaactctctaaattcagactcgagtatttttaatattatttaaatacaggtttagcattactnnnnnnnnnnnnnnnnnnnnnnnnnnnnnnnnnnnnnnnnnnnnnnnnnnnnnnnnnnnnnnnnnnnnntggaaaatttacacttgatctcatgtgatggagcacggtcaaaattttcatgcacacaattactganagta

SEQ ID NO: 35234 - DNA, 384 bp, Homo sapiens
  misc_feature (1)...(384): n = a,t,c or g
cctcgctattcttttaaatgattttagttacaaccagaagtatgtaaaaccccattctctttcagcaacttagaaatctgatatgaaagatcttttcaagcagacacaatttatattataaaaaccttaatgaaaagatatttagagctaagctgtggggatggaaaggcataagaaggatgcaatggactctggggacttggggggaagagcggannnnnnnnnnnnnnnnnnnnnnnnnnnnnnnnnnnnnnnnnnnnnnnnnnnnnnnnnnnnnnnnnnnnnnnnnnnnnnnnnnnnnnnnnnnnnnnnnnnnnnnnnnnnnnnnnnnnnnnnnnnnnnnnnnnnnnnnnnnnnaatanatgtacngatatttanatcata

SEQ ID NO: 35235 - DNA, 384 bp, Homo sapiens
  misc_feature (1)...(384): n = a,t,c or g
nnnnnnnnnnnnnnnnnnnnnnnnnnnnnnnnnnnnnnnnnnnnnnnnnnnnnnnnnggacatttcttttgccatcctctgcctcctcaagcctggtgcagttcagtgctcactcactaatgttctttttgttcccatttccagagggttttcaggctgatttctgttgttccttcaaacttgataaagctgctcatgagacacagtttggccggagtgaccagcatggcagtaaagcaagcagctctctgcaaccgccagccaaggcccaaggcagagaccgagccaaaaccggtgtgacggaacccatgaatcatgaccagtttcatctagtgcctaatcacatcgtggtctctgcagaaggaaacatttctaaaaaaacag

SEQ ID NO: 35236 - DNA, 383 bp, Homo sapiens
cttacagtgtcttacaggggactatattatctgactactcgttaagcctctgaaatcattttttttatgattctcctcccattcacaatatagcagccacactgggctcttcctctctgagcaaacatacaggatcagactgtcaaatctgataaacatgcattagagatcttgcccagtatcaaactctattaattaatgtcaaagatacaggcattctaacagcttagacaaatgagagagaggtccaggatatccagggcagcttccaaggtcctttccacattggacaggattctctggctcagagcagatgaagtctccatatgatgttcatgggattacttcacatagcaggaatatttaaattatgaaacatctcc

SEQ ID NO: 35237 - DNA, 414 bp, Homo sapiens
  misc_feature (1)...(414): n = a,t,c or g
gttggcattgcaaagacactgcacttatctgaggttagaaaaaatgtagtcttaatagccctcttaatgtgtagcaaggcaaattaccatttcctaaaatgtccagaatatcatagtagttagttattcgttaagcagtaagtcatgaaactccacttatagaagacaatagcaacagaggaccactaagtcctaaatataccaaagaaaaacaagtttacaaatattcaaactgtctgtcttctctacctctaaaatggtttaaccacatcaagtgagagtaacatcagccgattagaaagggaaaaagtaaactgtgctagcgtccggcattcagcgtcgacgcggccgcgaattccnnnnnnnnnnnnnnnnnnnnnnnnnnnnnnnnnnnnnnnnnnnnnnnnnnnnnnn

SEQ ID NO: 35238 - DNA, 403 bp, Homo sapiens
ctccttcctaatttacacataggtagatattggagaactactcatgttgaagctcaaatggaagagtgattcatactttagctggtcagactggtggagcagtcccggcttcgccattcagaagatcagagtaaaagcaggagagactcagaaaaaggtgatcttctgttctagggagaaagtgtctcatttgcagaaaggaaaggcacctgcggtatttgtgaaatgccatgacaagtctctgaataagaagtcaggctgaaactgggcgaatctacagaacaaagaacggcatgtgaattctgtgaagaatgaagtggaggaagtaacttttacaaaacatacccagtgtttggggtgtttcaaaagtggattttcctgaatattaatcccagccctaccc

SEQ ID NO: 35239 - DNA, 397 bp, Homo sapiens
  misc_feature (1)...(397): n = a,t,c or g
nnnnnnnnnnnnnnnnnnnnnnnnnnnnnnnnnnnnnnnnnnnnnnnnnnnnnnnnnnnnnnnnnnnnnnnnnnnnnnnnnncatatctgcctttctagcactccatcccattcctgtctcaactgaaagtccaagtccatcacagaagatatttccatcttttccctgagctttctaatttgccacttctatcaaagaatgtgtcctgaacctattagaagtcttttctctcaggccttctcttagagtccnnnnnnnnnnnnnnnnnnnnnnnnnnnnnnnnnnnnnnnnnnnnnnnnnnnnnnnnnnnnnnnnnnnnnnnnnnnnnnnnnnnnnnnnnnnnnnnnnnnnnnnnnnnnnnnnnnnnnnnnnnnnnnnnnnnnnnnnnnnnnnnng

SEQ ID NO: 35240 - DNA, 402 bp, Homo sapiens
aatgggaccaaggaatatactgtaaaatgtttcaaaataattaggcaaaatgcaggaggaaattgaagagaaattattctgatatctctttggtataaagcaggcatttatctacggtaacactagtaccagtctgtcaagacatttaagaaaatggtttgaaaagacagtttgaatttgttattaaaacctgaaatagagacaaggtaatgtacatcaggtagcattttcagtggcaaggaaatgtgacattactccagaggtcctggtgggggactaggatagtgtgatcattctcaccctgctgtgtgagattgatgtaaacctcaaatgtatcccctatgcaaccctgccatccctcatctcacaggatgaaggaggaaagcagggaagaaaatgtgt

SEQ ID NO: 35241 - DNA, 399 bp, Homo sapiens
  misc_feature (1)...(399): n = a,t,c or g
ctcagatcctcataatcctcctatcagggccggatcctaccttctcagacatggacaacccagagcctcatacaggggccagatcctacttcctcagaccctgatagacccagaccctcatacctgtacccgcagctagatcccacctcctcagatactgacagactcaaatcctcataagcctcataccagggccagatcctacctcctcagacactgacagaaccagatcctccaacctgtaccagattcctacctcctcagacatagacagacctagatcctcacacttgtagtcgacgcggccgcgaattccnnnnnnnnnnnnnnnnnnnnnnnnnnnnnnnnnnnnnnnnnnnnnnnnnnnnnnnnnnnnnnnnnnnnnnnnnnnnnnnnnnn

SEQ ID NO: 35242 - DNA, 409 bp, Homo sapiens
ttcagagtttgcttcatctttatccacaatctcaaccccacacaatggttataaaaaataaattttatatttaattgttcaatattatatgtatcttctgtgttgtcagccttcagaaatgattttttaatgtttgttcctaaagactgcacctgcctaatttacttggttatttcccagtgttataatttggttcacggtttcttctgaattatttcaggtaaattttcagaagtggaattatagtgccctagagaatagacttcttttggttcttgatcctatagctaaatcatttcctgaatgagctagtccaatttacactgccacaaggaatataaggatgtacttgattcatatcactcttgaccacagcgatttctaaaaatcttacagaagacaagacaga

SEQ ID NO: 35243 - DNA, 405 bp, Homo sapiens
  misc_feature (1)...(405): n = a,t,c or g
atcagggtggaggaggttctatgattcttatattagggaacagtaagattccgagggtggagcggtgctgtgttggaacactgagattgcaggaacctgagttcccagaattctgaggcaggatctcctacggttctagaattctgggttttagaacatctacaggctacctaggtggttgcaagcctcaggcatttcatgacaaaccccaccattatatcccaaacctggttatcaaagggggaacattcaccaaaaggtcgacgcggccgcgaattccnnnnnnnnnnnnnnnnnnnnnnnnnnnnnnnnnnnnnnnnnnnnnnnnnnnnnnnnnnnnnnnnnnnnnnnnnnnnnnnnnnnnnnnnnnnnnnnnnnnnnnnnnnnnnnnnnnnnnnnnnnnnn

SEQ ID NO: 35244 - DNA, 402 bp, Homo sapiens
  misc_feature (1)...(402): n = a,t,c or g
cagaaatcttgaaaagtaaatttattatctgttggttttatgaaaactgagtcctaacctaaatagagacttctgttcttacattatctgagtccttcctgtgtagcataggtatggtgtgaaagacttgtgtatttcaacagataaaaacnnnnnnnnnnnnnnnnnnnnnnnnnnnnnnnnnnnnnnnnnnnnnnnnnnnnnnnnnnnnnnnnnnnnnnnnnnnnnnnnnnnnnnnnnnnnnnnnnnnnnnnnnnnnnnnnnnnnnnnnnnnnnnnnnnnnnnnnnnnnnnnnnnnnnnnnnnnnnnnnnnnnnnnnnnnnnnnnnnnnnnnnnnnnnnnnnnnnnnnnnnnnnnnnnnnnnnnnnnnnnnnnnnnnnnnnnnnnnnnnnnnnnatgacc

SEQ ID NO: 35245 - DNA, 384 bp, Homo sapiens
  misc_feature (1)...(384): n = a,t,c or g
gtgagtcagatgatgttactctgctcagaatttactgcagtggctaaagcctttatcatagccaacaaggctctcatggccggccctccccatctctcagatatcctcgccattgcctgttctgttccacataggaacatgccaaggagacttcctccttaggactcttggacatatcttccctcgcctggaatgctcttcctacagttatgtgagtaactagctcccttacctctttggggttttttcccccaaaatcatctcagtgacctgcgtatctaaaatttcatagaacaggctctaaccacccacctncagacttggaagcaagcacaccacccgactgtgacacgcagacagttgacgtatctaaaatttcaaccc

SEQ ID NO: 35246 - DNA, 380 bp, Homo sapiens
agaattagtaataatccttttacataaataccaaaaatcatggcataacaactccccaaaaaggaaaggtataaaagaaatggatgaggagaaagctaataaagaaaagtaggcaagatgtctcagattctccctggggtagatcttctcagggcgataaagaaaacgtcttcccaaaaaacccctttagacagaatctgagatggcttaaaatagctgctccagggcaaagcaatgcctgcttaaccaggaataacatactacttctaagtcctgtatagaggtgctcctgcggcagcagacagctcgtctaccatctgactaggtaccacaagagtttttgcttttttattttaaagaaaagatctgcccatcaccta

SEQ ID NO: 35247 - DNA, 378 bp, Homo sapiens
agaaaatcctgcggtcatcatgcagacctatctagaaaaggcagtagaagttgctggaaattatgatggagaaagtagtgatgagctaagaaatggaaaaatgaaggcatttctctcattagcccggttttcagatactcaataccaaagaattgaaaactacatgaaatcatcggaatttgaaaacaagcaagctctcctgaaaagagccaaagaggaagtaggtctccttagggaacataaaattcagacaaacagatacacagtaaaggttcagcgagagctggagttggatgaattagccctgcgtgcactgaaagaggatcgtaaacgcttcttatgtaaagcagttgaaaattatatcaactgcttattaag

SEQ ID NO: 35248 - DNA, 390 bp, Homo sapiens
atccaaagttacaaaatctacttttaagaagttaaaacatgctccgaagctctgtatgaggttgttagctataagccaattaagtataggaatccatctgccattatcagaatagttaatattactccattcttcttggcaataattaaatatcatacatccgctcatctagaagagcgatcaactcattaagacaggttaaaaagaaaaggggttaacaattatcctttccaagaggatttgcattttaaatagaactgtgagaaaaagagtgacacgtggccccaagaaaagtatctccaatggaaaagtttcagatattgtatgcctaataagacaatcttccccttctcttaccctgtaggtaggacagaaagaaaaggggacttg

SEQ ID NO: 35249 - DNA, 382 bp, Homo sapiens
ggatttccctgcatcgacacatagaggataaaagaatgtatgagtgtaagtcccagaagttcaactataggacacttcctaccacctctgttatcattgctttctataacgaagcctggtcgactttgctccgtaccattcacagtgttttagaaacttctcctgcagttcttttgaaagagatcatcttggtggatgacttgagtgacagagtttatttgaagacacaacttgaaacttacatcagcaatcttgatagagtacgcttgattaggaccaataagcgagaggggctggttagggcccgtctgattggggccactttcgccactggggacgtcctcactttcctggattgtcactgtgagtgtaattcccgggg

SEQ ID NO: 35250 - DNA, 388 bp, Homo sapiens
  misc_feature (1)...(388): n = a,t,c or g
gtttaatgcaacttaatgagacattgaattttatgcagctaacccaagttatctatagtgtgtgccctcctgagtaccccaggaaatagaagtaaagaactgacgaacatcagatccaactggcccatttgggtttggactctaggagagagcaaggaggaggcaggagaggaagtggtggttctcttttggctgctgtcctgggaagatgcccagtagtccttagcaagggtcgacgcggccgcgaattccnnnnnnnnnnnnnnnnnnnnnnnnnnnnnnnnnnnnnnnnnnnnnnnnnnnnnnnnnnnnnnnnnnnnnnnnnnnnnnnnnnnnnnnnnnnnnnnnnnnnnnnnnnnnnnnnnnnnnnnnnnnnnnnnnnnnnnnn

SEQ ID NO: 35251 - DNA, 387 bp, Homo sapiens
atcacagctcgtttggctggctggaccaaatgctacttgtttctttctggagtggggaaataacttcaaccaggtgcagtcagtgtgtattcttatctcagctgcaaaagctgttctaaatgcccttctagggaacttttgcggtgtgaatttagtggttgtgctgcgtgttagtcctgcccaacactaggcccaggcagctagagttaagtcgttgggcattggtagggcactgtgagcaaagactctcttacctcgggccaggcagagaaggacacagtggctgagctcacctgctccttggtcatccttcaaacctctgagtgtgtgtggttccttggggagagaaagcagttttctcgtgggtgccaagacagcagctacctg

SEQ ID NO: 35252 - DNA, 364 bp, Homo sapiens
  misc_feature (1)...(364): n = a,t,c or g
gtttttaaaaaaaaatgtgaacagtgaacgtttcggttgctgtgactgggaagttgttgggtgtgctttttcagccagcttctccttccactgcttaaagagtccatgattctttaaggggagctgcagtttatagccccaggtcatacctaggaggggagcataatgagctcagggcctccccaaagtgacaaggttagggagtgcttagcggttttgtgttcagccttaactttgtttatagagggaggnttttctgnattgcntngaanaattctnactnctannanncccatngttgtgtcttgaataagttataggtacattatanangatctggcntaaatatttganatcntgagag

SEQ ID NO: 35253 - DNA, 390 bp, Homo sapiens
cccgtgtattgaaggaggaataagctaaaggctgaggcttttaaacaggtaacgactgactttgaaacactcaagactttagagtttgagtcaaaatcatcatatatacttattagatgctggaatcaatgaggccaaatttgccagggctgcaacatggataaaatgtcaagtacagatgaaacattattttgtttatacatgtctaaattttaacagaaccctttaaaaatcaggaacaaaatgctatgttcacacaaaaatccttgtgcttaatttgcaggaagatatcagaacagttgaaaacaaattgtttcagtctttaacttcacttgatgaagctgctcagcaactgtgctgttagtggtgaaaactgcagaaacacaattc

SEQ ID NO: 35254 - DNA, 384 bp, Homo sapiens
  misc_feature (1)...(384): n = a,t,c or g
gttaaatccacagaatcatagagtgttaacattggatgtgatggtaaagattccccggtgtctaatttacctttaaaaaatggactttctgagagagcacagtgctagtgagtgacagaaatttggaccataacctggattttccctcttcagttccagtgttctcgggctaatatttttagggttcatggaaaatgagaaccttccagaatgacaagttatttatatagtttcttgtacttctgcttctccgtgacttgtgatgtaatagaagagttaggaattgaaataaaaagcctgagaggaaacagatcaaatggctaaggaagacttgggaaagatacagttaatcctttgctctttttgagtaatattttgntgggt

SEQ ID NO: 35255 - DNA, 391 bp, Homo sapiens
  misc_feature (1)...(391): n = a,t,c or g
gtcacccccatagtgttctttgaaaattgcaaatgtataccatcagctctccatatccacagattcagccaaccatggatggaaaatatttggggggaaaaaagatttcacgaagtgccagaaagcaaaatttgaatttgccacacgtttcaaatactgtattgactccacacaaatgaagtgatatgtgggnnnnnnnnnnnnnnnnnnnnnnnnnnnnnnnnnnnnnnnnnnnnnnnnnnnnnnnnnnnnnnnnnnnnnnnnnnncacctacagcacannnnnnnnnnnnnnnnnnnnnnnnnnnnnnnnnnnnnnnnnnnnnnnnnnnnnntcaatcccacatggatactaaggaacaactacatttagttatctctctctgccttag

SEQ ID NO: 35256 - DNA, 356 bp, Homo sapiens
  misc_feature (1)...(356): n = a,t,c or g
atgacatcctagagaaattagtttagaggtctggggacaacctgtaagagtttcaagtaggagtaggactatgaactttgtcctgaaagctggttctaatgtaggggccagcatcttggttctgaaggccagatgggaggtgcanctttgnnagctttanggttnctgnngcatnnattcagcnccactgggaacctgacagtgctccagngagactctgtntncaaaccnagaggncgacctgtaanngntnnancccttangtctantgggntccnngntnnactcnantncagngccgnccnccacctggaaaanattntntnngnctatacanctnacnccnaagcaggact

SEQ ID NO: 35257 - DNA, 383 bp, Homo sapiens
ggaatgggtatggagttttgggaggaggtgttgaaaatattttaaaatttattgtggtgatgcttatacaactctgaatataaaatgtaaacttcacactttacatatgtgaatggtatgcgaataatattgttaaaaatcagtattgtttttaaaaattcaaatatacaaaagattataaacttgcacctgttcatataatggattttttagaaattatacatgtctctgctttaaaatgttttaaactataaacagaatgctagtttatttaccaaatggaaatggttgctagtcatcagtattttctgagaggcccaatctttctagcatctaggtccctgaagatagctagaaagtgtgcagagggtcgacgcggccgc

SEQ ID NO: 35258 - DNA, 380 bp, Homo sapiens
  misc_feature (1)...(380): n = a,t,c or g
caattttaaaaaatcacctaacaccttgtctttcgattcagatctcccaggtgcctcaaaatttcttttcctgttatccttttattgttgaaaattttaaacatatacaaaaatagagaaaaaagtataatatgtatatatctaccagttcagtaatgtacttacccatgaacaatctttacctactctacccaactcccactctagattattttaaagcaaatctcagatacattttctattttctccagatgtagtttatncttttacagnttgnatnnnaattcaaaactagagccccanncgcgnacttagttnggtctcngaagtctncnttatnctattnncntngtcctgccatcttcaaacacacacncttt

SEQ ID NO: 35259 - DNA, 394 bp, Homo sapiens
  misc_feature (1)...(394): n = a,t,c or g
ctttaatgaactgctaaactactttgtaatctatcagcaccttgaaaatgaggaagataaacaacatatatgaaaaaaatgacaaaatggcatttaagtctataatggcagaaagttgtcttacttggtttaaattgtatagattaatggtttaagcaactctgagagttaacataaaagtgcgtaacacaagaaagataatttgatatagaatagcagtgtgtcacaatggccagagaagtctgccacctgctgatggaaaaactgaattgtatagatttccctactgctgtttttaaggagagaaaanaaacctatcaggtatggtttaatgacattacatgtcaagttgttaggctgaagatataaactacaacctctaatttanagagaa

SEQ ID NO: 35260 - DNA, 387 bp, Homo sapiens
  misc_feature (1)...(387): n = a,t,c or g
ccacctcgcccagcctaatctgaacttttttaatgtagagcctgtttccctgtaatagagactgtttgccatttgtcttgataaatccaagatatagcatgatattggatgcataatagtcaccactaatagttttgtttaatgaatatatatacaactaatttgggggaggagagagatttttgtaaattgtgttctgcttgattccgttattttcaactagtggaataaagatgtggttctgtgatctcttcattttgaaagattttttttcagtaaggcaaaagcgattaagcataatatattcctgngtacanaattttctttanaagcaaagacttttggaggaaaaacatntcanattatgtgtnatagcttatanaacaa

SEQ ID NO: 35261 - DNA, 298 bp, Homo sapiens
gtttgtaggaaactcttgtgtattttcacgcgggatgtccttctgcagagggggatggttttagataatgactgttgtgctttttggggataccacctgcagagatgtgtttattttgagtgtttatagattgcagaaagctggtgaaaccaccttgagagaggtgatcctttgattgaatgtttttttcatccaacaccaaaaaatcacaggccatgattggattttggagctgattcttgctttgtaagactgcatggttttggtgaacatccatctggttgtttttttttttttt

SEQ ID NO: 35262 - DNA, 357 bp, Homo sapiens
gtggacaagtcaggttaatagatctaaacacattaatagaagtaatctcatccttcagatagtctaggaattaatactcagtgaggattcagagatagttctgagattggaagtgaactatagaggccctgaagggcaaaacataaatactcttagccaaggtatctttcaagcgaaagtatgcttgcagctgctgaaccatgagtctatccaagaaggaggacaagcaatggcagaagagctccaggtgtcatcaagtgggaagctgtggaggcgctgcagcagcagatattgggagcccagctgcgggaaagctgggggctcaggaagctaagacgaggccaatgggtcatgctt

SEQ ID NO: 35263 - DNA, 365 bp, Homo sapiens
  misc_feature (1)...(365): n = a,t,c or g
catgacttaactaaatttttgtgctaaaataagcgtatcttttccagattgtttgcctgctaacagttaagcttcagaatataaaagttgatcaacaaagggagggctcatttgagaaaggggaaatgttagatttgttcaaaagtactattttacttacagttatatagggcgtaggaagataaatttcatggcatgagtatgtgtgtttgagcggaatttgaaaatgtaacagtagtctatagtttggcttacacgtggtcgacgcggccacgaattccnnnnnnnnnnnnnnnnnnnnnnnnnnnnnnnnnnnnnnnnnnnnnnnnnnnnnnnnnnnnnnnnnnnnnnnnnnnnnnnnnnnn

SEQ ID NO: 35264 - DNA, 355 bp, Homo sapiens
attaagttggtttagaagacgtctaaagtccctaataacggtagcccagttagagattcacagtgtactgtagtatattaaaggttctgctatagtatagaaacctatataacttgaacattatttcccaagattttgtagccatgggcctcaccttatatgaaactcccacatcatgtggcactagttagggaacagatccattaccacctttaggacataggtgatctattactagccaacaaaagggtctttgaatactagatacagtctctatgagcttactgctgatgtacattagagtctctgaattgttagatagtagttggaaaaacattttcccactcaaactgtc

SEQ ID NO: 35265 - DNA, 392 bp, Homo sapiens
  misc_feature (1)...(392): n = a,t,c or g
atttatttttatatgagcatcctttataccaagagtcataaaacattttacagtgatacataagctaatggtccttgtagaatgctgatttttcaatgtttatttaacttgcgatgaaaaattggttggtttattttctgtcaggtaacagccaactttccaacaattctgttaaagaaaataatctgagagattaaaaaagaccatagacccagaacgtcatgatttatcctttcctaatgcctcacagaaaaccaagaaaatgcaacattgtggagaaaatnanaggagagaganataatgaggaaaaaaaatcagccctnaccaacaggaaaattgnctaccaattacatttannaaanaantgagnaatactntnccattcttttcta

SEQ ID NO: 35266 - DNA, 390 bp, Homo sapiens
  misc_feature (1)...(390): n = a,t,c or g
gcaatttcctaaaaaacatctagtaaaaagtttaaaatatgtacttttagaaaaaaattaagtggcatttaatataattaaaagggtaatatggtcaccagttttgcattaaaagaacactttctgataagttttaaagatttcagacctcctttccctaagtattaatatcaaatattttccaaagtaagaggcttctcaaaaanaaaaanatcntntaaatnngnncangcncggggnnncncccntgnaatcccanccttttgggngnncatggnggnnngnacnccnngggnggnnantnnnaanccnagcctngccaacnngganaacccctttttatttagttntncaaatttncccctgccgnnatgggnnttccttnatccg

SEQ ID NO: 35267 - DNA, 383 bp, Homo sapiens
  misc_feature (1)...(383): n = a,t,c or g
gtttaaatggatacaaaattgctgtgtaaaataagtgttttcaaaatacatttctataggtagagactatgtcttagtaaaagagcaggtatctattatcaaaagtatctatttagatttgggtagtaaaaccaaaggggatcagaagtgtagcagtgtgggtcctccctccctgcatagctgttaccaggaggcagcgtgcctgaagtactttcactcncatatgcggggcttagtcnctagcaaactngtnttnctattttacagattttccngcnnngttntttaangtnnanannangatactaggactccncntggatgttctntgatgtcactggancaancnnttctttagttnccttgncnnnanttgatccttt

SEQ ID NO: 35268 - DNA, 389 bp, Homo sapiens
  misc_feature (1)...(389): n = a,t,c or g
nnnnnnnnnnnnnnnnnnnnnnnnnnnnnnnnnnnnnnnnnnnnnnnnnnnnnnnnnnnnnnnnnnnnnnnnnnnnnnnnnnnnccctgctcttgaaatgtctaaatcttttcctcactagcatatacaattcaaatgcacaggcctccatgacttctttggaatttaaaagaagccttcatttcaaggatagaaatatgtaaaattttaccaaccatggataagtttgntatgggagtantggaaggacagtggaaaagaaaatangttntttcatgatacttttanttntccttttttaaaantaatatttagggggtacaagtacagtttananccatgantatattgcgtacactaaaagtctggncttctagtgtaaccatccc

SEQ ID NO: 35269 - DNA, 384 bp, Homo sapiens
aaaacaacagatgtagtaactgtcatatcaatgaataaaattgaaatccatatatcagatgctagtgagtaaaatgatttatttgtgacacagaaagcatcccagcttaatggagaaaggattgattgttcaacaaatggtgatgtaaaatcttcttatttggaaaacttgaaatttgctcctcatatgtatatcaaactttcaatttcaatcaaaaatttcaattgggataaggaattaaataaggaaaatatcaataaaaacaaagaaaaatgtagatgtctgtatatataatcttggcatagagaagacatatctaaacaaaactacaaaaacagaaagtataaacttttgataaatttgatcctttagaaagagaaaact

SEQ ID NO: 35270 - DNA, 337 bp, Homo sapiens
agagtattttatgaaactacttctttctttaccaactgtaactgtattcagattccactaatatggaatttggcagttaggatatgtaacaaacttaacatgtgtacctgcatactactttaaaacagaaggtagtgctaagcaaatcagctgtgtaagccagactcttttttttggagtggagttaaggaagatatttagcttactgaagaaacaaaactattatcaattatttaaaaatccattttgcacagttaataaataaaacatgtactgttgaaagcaaaattgccaattttttacaaggactctgccactattttattagaaaataatg

SEQ ID NO: 35271 - DNA, 343 bp, Homo sapiens
tttgaaactattaaaaaacatacttacagaaggaaatattatactaatagctattacattaggttggcataaagtctttttcctccacttctaatgtttctgtaacatggctatatcacttttgtaataataataaaatcagatatacttgactttctgctaaatatataaggcaagtgaaagtgtcctgtaaattgtacactgttgtacaaatgtcatatattattttgcaagttattacgatacttgctttaagaaaaccaatataccaaaaagttaaggtatagaataggtaaatttaaaatgatcatttgttttataaaagaattcacaccaggcttcc

SEQ ID NO: 35272 - DNA, 349 bp, Homo sapiens
  misc_feature (1)...(349): n = a,t,c or g
cctccctctcagtacacacaccggccctttgaattttattttattttgttttgttttgttttgcttcctttttctttctttaagtactagagataactgtagagagaaggttaaagacattttataaagtttaaaactnnnnnnnnnnnnnnnnnnnnnnnnnnnnnnnnnnnnnnnnnnnnnnnnnnnnnnnnnnnnnnnnnnnnnnnnnnnnnnnnnnnnnnnnnnnnnnnnnnnnnnnnnnnnnnnnnnnnnnnnnnnnnnnnnnnnnnnnnnnnnnnnnnncgacgcggccgcgaattccnnnnnnnnnnnnnnnnnnnnnnnnnnnnnnnnnnnnnnnnnnnnt

SEQ ID NO: 35273 - DNA, 353 bp, Homo sapiens
  misc_feature (1)...(353): n = a,t,c or g
caggaaggctcttaggatgctgctgcccaccatagaggccagtggccgccagggaagctggacctagactccaacccagagccacaggcaaagttgctgagactgaggtcaaggtagaatcagccttaacagctggctgcttatcagatatgctcattgcagacagcaagctcaggcccaggataaggaaaggtttccaaagggacccccgggcagggtgaaagaggtcaccaaaagtcacgcagagctgtgccgggagacctggttagacatctttgggtgccagatgatggttttccttangtggaaatggcttaatttccaagaagtgaaagaccaaagcgtgtgtctgg

SEQ ID NO: 35274 - DNA, 366 bp, Homo sapiens
caacagttgagtattaaaacagaatcatgttaccattagattaattaaacttcctttttaacccatatctcatagcacagttaatccaggcggaattactttctgtcagttactaccaaaaaagagctgaatttagccttttaaaaaatgacttgaatgaaataggaccttcttactgcagtgccttcttaagtgtctccaacgtagttttcataatatgctgtcacactcacctacattcttaaatcgaatgaaaaaaggtcattgttcttttatggattttttaaaaactactatgtttagtacattttgggttctttttcagtttctttactgggtttattttgggtgaaaaaagcagttatt

SEQ ID NO: 35275 - DNA, 364 bp, Homo sapiens
agaagcagaaggtcttggcctggccctccagggtaattttttacacactttatgtgtaaaaaatgtgtaaattttacacatttttgccatttgttttggcatagtgtgaagtaggaatctaaatttcttttacaaatagttaaccagtttttgcaatatcatcatgtaatatattttttctactaatttgaaattccacttttatcatatgtgaaatatccataatatgcattggtttatttctggactcttctgttgtaaatctgaatctgtgttcctatgccagtgacacattcttttaatgactggagccagatagtatattctagactctggtagttaagcgcctgcctactctgctgta

SEQ ID NO: 35276 - DNA, 350 bp, Homo sapiens
gtcttgtgacaattatgttttatagacctacactagtgccaggtcactattgtaagatgttaaaatctcaagaaaatttcacagagctaaagaaatgatgtcaaattagtcacattaagctatagtagaaggaattggacacttctccagatatttggcttcaaaggagtacctttacttacatgtgctttatggtaagtacattgaattttactttaaatgcattttactacaaagcacaattcatttgtaatgcatatccatcttggattcaatccaaggtgctttagctatcagtagtaccaaaggatctttttacaaggcttcctgtggtattgactctgagaata

SEQ ID NO: 35277 - DNA, 352 bp, Homo sapiens
gtaaagtgtgtataggtacatatggagctggttttggttgacacaaattaataggaattggaaattattacataactcttccattcttcactgggagctgcagttacaatgctggcactggctaattaacaggctcaaccctgtcttttcagtgagactagtaagtgaaggatttgatactttctttcctgaaacaaacaaaaacagctttggaactgtcagaaacaacagcggctcttgaaggctaatcattaccagcttttgtcatgtggttgtaattgttgcatgaattctgcttcaatcagggaaaaatacgcttaaggttttaaagaagcatcttgtaaacatagga

SEQ ID NO: 35278 - DNA, 347 bp, Homo sapiens
  misc_feature (1)...(347): n = a,t,c or g
tagaaatggcacatgtaaggcaaggaaccaatttattacactgataaatggttgaacagttaatgctagaattacaatttatttttataaaaatatgtacttacaaaaatttttaattcagcttatttaaattaattttgaatatttaaaagaaaaataacttttaaaagaataaaaaacttccattttttacgctttatatttttgatgagaatatattcaaactttgtactctgtggatataactacgtcttatttttaaatcctacagatcactgaaaatgagtacgttgtgatcccaacatagacagnaaaataagacagtggancttagaagaggaanaaga

SEQ ID NO: 35279 - DNA, 382 bp, Homo sapiens
  misc_feature (1)...(382): n = a,t,c or g
cgcggccgcgtcgaccaggaggcacaacccagagaaaagccagctaaagcagtggggaggggacagttgtatgtgtatgtgtttaaaattggggcatgtgagtggaaagaggtcagtaaaatcagagattgagaacatcagtgaaggaattgtaaaggaaagtggcccataaaacacccacacatgcagtaatgttaggataccacttgtgtattctcttatctcagcccgagtagaatgtcttcttttacaaagcagtggcttagttttgtgagtcaagaagaatctggaggaagctggcttggaaaatcggacgtaagatggagagagttggttaggaaaaatttgtagtgatgaaacagtngagaatgacacagggctc

SEQ ID NO: 35280 - DNA, 383 bp, Homo sapiens
  misc_feature (1)...(383): n = a,t,c or g
cagtattgtccttcgagaagataacagaaattaatcatccttttttcttttttcttttctttttgacagtttcgctcttgtcacccaggggagaaggggggtcacaaaaagaaagatcctannnnnnnnnnnnnnnnnnnnnnnnnnnnnnnnnnnnnnnnnnnnnnnnnnnnnnnnnnnnnnnnnnnnnnnnnnnnnnnnnnnnnnnnnnnnnnnnnnnnnnnnnnnacgtcgacgcggccgcgaattccnnnnnnnnnnnnnnnnnnnnnnnnnnnnnnnnnnnnnnnnnnnnnnnnnnnnnnnnnnnnnnnnnnnnnnnnnnnnnnnnnnnnnnnnnnnnnnnnnnnnnnnnnnnnnnnnnnnnnnnnnnnnnnnnnnng

SEQ ID NO: 35281 - DNA, 354 bp, Homo sapiens
  misc_feature (1)...(354): n = a,t,c or g
acggaacatgagccgtgtgcggtggctcagaagtataatttatgttcatggtcagaattgtgactgtgagtttaggcactcaaggcttttcagttgggaatttatcacctgtatcattagattagcatcatccaatagaactttcagggcatcttttactgtgtgttatccaatatggtaccaagtgggaaacannnnnnnnnnnnnnnnnnnnnnnnnnnnnnnnnnnnnnnnnnnnnnnnnnnnnnnnnnaatgtaaataaccgcgtgtggccagtggctaccataactggacagcacagcattanaagaaagcccaggacatggtgatctagcagagaagaagaaaaaata

SEQ ID NO: 35282 - DNA, 351 bp, Homo sapiens
gcaaaagatagatgtttgtgatgatacaacaatgatttcctacagtaaggattggtctttactgaccaactgagatagggcttaaaagtcaaatacatgacattctggaacaggttaagtttatttagaaagttctgttaccaagttgcttgcagtttttagttgctgctatggccagaatgtttcacatatggtacattaaactacatgataattaaatatgagaaaggcaaattctatttcactcgttacgtttgaccaaaacacggtaaacagcattagcttgccttttgctctcccataccacctgtgaactcttcatcagcatcagaccaaagatccttatgtaaa

SEQ ID NO: 35283 - DNA, 339 bp, Homo sapiens
  misc_feature (1)...(339): n = a,t,c or g
nnnnnnnnnnnnnnnnnnnnnnnnnnnnnnnnnnnnnnnnnnnnnnnnnnnnnnnnnnnnnnnnnnnnnnnnnnnnnnnnnnnnnnnnnnnnnnnnnnnnnnnnnnnnnnnnnnnnnnnnnnnngattatgcttntaaaaatatggnctattgcntatggacnctggtttttaaagcttgantttaaaaanaattttttgtaataggttttaaagctttttctttttctttttnatnatttttttgaaatggagtctnactccagcctgcgcnacagcganatgccntttcaaaancancancaaaaaaactccntactaanccanaaaagtgatgggg

SEQ ID NO: 35284 - DNA, 341 bp, Homo sapiens
gtttgagacagctgacatttcaaggagaaatcagatgtccaaaagggcgcatttttgtgatggagcgtgcagtgatggagcgttagaacaccttggcatcaagctgttcgttgagtgtgtcgtggtcttctgtctactaatagatgacaactctggaagcctagtaccactcttaacagatgaataagtacagcatggactagactgccacaggccatgctttcttttaataattctagcaccagtgattgatttaggaaaaacaaaatactgatgattacttttaggctaaagcctgctgacacttctgtcttaaagatactgaaagagtagttgttgca

SEQ ID NO: 35285 - DNA, 281 bp, Homo sapiens
caaacctgttgaaaaatttatcttccttgccttcatttactttttaacccactttaatctgggttccacctgcaacacaccactgaagctattcctactaagataggaactgccactcaaggccttcttggctctaaaagcccatgagcctttatcagttcaccttacaatttctcaataccattctaaagtttatgagttttttaactttaattccagtgactctttctactttatcccaatccaagtattctcctccttctttactttttttttttttt

SEQ ID NO: 35286 - DNA, 345 bp, Homo sapiens
  misc_feature (1)...(345): n = a,t,c or g
aatacctaagagtagaatggctggatataggtaggtatatgcttaactttttaggaaacggctaaactattttccaaagttgtactattttacattcccacaaacggtatgggagatccagtccttccatttccttgtcaacatgggggtcagtgttttagccactttaacgggactgtggtggtatcnnnnnnnnnnnnnnnnnnnnnnnnnnnnnnnnnnnnnnnnnnnnnnnnnnnnnnnnnnnnnnnnncacgaagtgttcatgagtttttgtatatggtaagagagacanatnaaantnctttgcatgttantanccaattgatctatcacatttaaaaa

SEQ ID NO: 35287 - DNA, 341 bp, Homo sapiens
atttcagtgaattatgtgaatagactttaagagtttaacgtcagtactcttgatattgtgacatcctaatctttttgtttgttttcctgacagaagagtgtataccaattaaagaagagtcaaaatcctctacttgctctttttcagctgcttaaaaacccaccagattttttcttaatttaccaattataaagctaaatttaaatttttgtcagcttctatttctaaaaaatgcttagtatcttagatccaattaatcttgtcttagctcaaagtataaataaatctctgtagcaaatatctcttacgtcatgcagaagatgtgagtgcttggttttttg

SEQ ID NO: 35288 - DNA, 343 bp, Homo sapiens
tagattccaagcactcttgaggctataggattatcactgtagcttgtctgttttataaacaaactttaatttagttttgtaagaaactgccaaaggagctttctttaactaaataacaactctgccacttgaaagacatcattcatcaactttctttgtgggagtattgttattatgaaactaaaagcaggcattctttcttgagtgcttctggattttaattatcaaattttaatgtcaccagatatttactgaaaggaaaacatcaattttaataagctacctaagactgaaaaacataaaaggtattccactgcaaagccaagttcacttgagtcttgtg

SEQ ID NO: 35289 - DNA, 342 bp, Homo sapiens
  misc_feature (1)...(342): n = a,t,c or g
tctccttcttccagactaggaaacaaatagtacaaatggacgctggtcagaaattcaacaacagcatcacccaggaattccaaccgttcattgtggttaatcctcgagggagttgggtcatcttggccaaggcgtgacatgatatttatcaaggtgttaatccctttcttccgcatgtgcatgtgatgaacttttctgtctccgtatttgggctgccgaattccacagttagataatgaattcctggcatgatcaggattcattccaaaatttaaatgatgacttggatgagtcatggccagctgcccgnnaccntgtntnnacanggtnccnggcagctgg

SEQ ID NO: 35290 - DNA, 336 bp, Homo sapiens
  misc_feature (1)...(336): n = a,t,c or g
cacgtggtgagcaaaggctttcttgtgatgcagatgaagtctggcaggcagcagccctgagagaatagaagcacctctggtaacggtttctctatcatccctttaaagtatcagactttagcctcctcttcctgggagttcatctttcctaaatctggataaggcagataagggggtctcagagaaagcctgtttgcatctgctgtttccttcactgacatacgattcctctgcagatgcaaatattccctgcaaaaggactgcttttcagagctactcctatgtctgctgtccctctgaatagcatctcaaaatatgccaaagaantnnnttttg

SEQ ID NO: 35291 - DNA, 350 bp, Homo sapiens
gttttgtagaagagcaaatcagaaattgggaaataggatactttagtggtaatatagtttaataccatgtattagtggtttcctgaaatgtgcaatgatttattcattctccaagagtctactgtgcataggtctctgaactaggtgctataacttagaaaatttagacccacagtctgatttcaaagaaccttcagttaaacatgtggttgtgtgtttggagaaaacaaaatgatataggtagttatagtacgaaacacagtagtttaagtactgccacagaacttagcattgggccaatggctgtggtgacacttcactaaggcttgaggacacagatggcagcttat

SEQ ID NO: 35292 - DNA, 339 bp, Homo sapiens
agaaaatctagtatgtggtgaatgagcctgagagggtgggagagagtgacaggcctcatagagttttcagaagaggcatggcacttgattcatagttaatggtctttttgcttgcttcttggataattaattgtagggtggcaagaataaaaacatggaaaagggtgaggaggcttttcagtagggtaaggtggtagtaatggagataggaagatatagactatttcagggtgtgtttggaacatagacatgttttgccctcaggaatggactacaccagtagatgtgttttgtttgacaacagtgtattgaatttaactagttttaggtaaagcctgt

SEQ ID NO: 35293 - DNA, 338 bp, Homo sapiens
gtttgagatctttgtggtttagtgtgccaagggattttttagtgagatgcaagcattttgggtatgatgtaatttcagcatcctgttgtggctgacgcaactcctgcaggtcaagcggggtgtgcacctcgctacaggcaggtggggtggaagtccaggctctcactcagcctttgtgacacctgagggagggtgggtggctgggtgggggctccttcttgttgccaggcaaggatgggagtccagctcccctcgtggcccccttgatgcccctggggttgggacattctcattattgctgggtagatgaaagtctggactccccgttgaccttctct

SEQ ID NO: 35294 - DNA, 321 bp, Homo sapiens
ttttaaaactcaaatataaagacatttttagattactactcaccttcctcaggacaagctcttctcttaagagactgtacatccagtgttcttaataggataattcattgtaacaagaaatgctaactgttctctctgcggcttctccctagatctgcacaagggaatgaacaacatggcctttccctgtcttaccatttcccagagttgtagccagccaaatagtttagtgaccctgttgttccctaccatcgcccctgggtgggatcatttaaacaaagcctaagctgagggaacacttgaggtctttttttttttttt

SEQ ID NO: 35295 - DNA, 350 bp, Homo sapiens
  misc_feature (1)...(350): n = a,t,c or g
ctctgagacttgctggctttaggtaccaacactgccacagggagttaaagcatcaagtgagctctttgagtccccagttctaggacttgactcttggatggcatttctgggcttgccctgttccagaggggagcccactgccctgaaggctttaggtggctcagaattgagacagagactgtgcannnnnnnnnnnnnnnnnnnnnnnnnnnnnnnnnnnnnnnnnnnnnnnnnnnnnnnngatctgtgnnnnnnnnnnnnnnnnnnnnnnnnnnnnnnnnnnnnnnnnnnnnnnnnnnnnnnnnnnnnnnttggggtgctccgtaaaagagaaatgacttagatcataa

SEQ ID NO: 35296 - DNA, 349 bp, Homo sapiens
ctgaacccacttgcttgccttctcccaggggctgccccgtgcaccccttgttcctagggtggggatggggttggatgcctggggttgcagaggggactagcagagggtgacccttttctctatgctattacttcagatcttggcttttgctttcttccaaatacacagcaatcttggcttccagcctaggtgggaaagggagaaagaaccgatttcctccagctcctctctgaaagtagcccaactggcactgtttaggaacaaggagttcctgagagtgttggcaccccacggtgttgatgtccggtagttccctgctgtgaaccctgtctctgcccacttcaatcca

SEQ ID NO: 35297 - DNA, 466 bp, Homo sapiens
  misc_feature (1)...(466): n = a,t,c or g
gtgtgnnnnatttgannccctttcatttggaagagcnnnnnnnnnnnnnnnnnnnnnnnnnnnnnnnnnnnnnnnnnnnnnnnnnnnnnnnnnnnnnntctcgaggatccgaattccnnnnnnnnnnnnnnnnnnnnnnnnnnnnnnnnnnnnnnnnnnnnnnnnnnnnnnnnnnnnnnnnnnnnnnnnnnnnnnnnnnnnnnnnnnnnnnnnnnnnnnnnnnnnnnnnnnnnnnnnnnnnnnnnnnnnnnnnnnnnnnnnnnnnnnnnnnnnnnnnnnnnnnnnnnnnnnnnnnnnnnnnnnnnnnnnnnnnnnnnnnnnnnnnnnnnnnnnnnnnnnnnnnnnnnnnnnnnnnnnnnnnnnnnnnnnnnnnnnnnnnnnnnnttaccanttnttagntnnntgagaaagctccnaactgnnctncatanngngngttctaattnacnttcccncancggngtac

SEQ ID NO: 35298 - DNA, 339 bp, Homo sapiens
cctgattttatcatggctttcattaatttcacttacaggtaaaatatgaccattcgatacattgttgctattatcttgaataaagtgatatttcttaggtcagttaagaataagaaaatagaaagttttaattttacctccacttttctaatgctcatcctttatgcagatttgagtttctgacctacatcattttccttctttctgaagaacttcttttaacacttcttacaaggcagatctaccaccaaaaaattccttcagccttcacttgttttcaagcctcaataatcacagctattttaaccttccctcacagctcttatttttcaaaccctt

SEQ ID NO: 35299 - DNA, 341 bp, Homo sapiens
  misc_feature (1)...(341): n = a,t,c or g
caatcattaccctctcaccactcccaagaacactttcccagcgctggcttctccccttctttccaggtgctatgttactataatctctagccactatctgaaatccaaagagctcaccagcctagatacgacccgtaacaagtccttttgtaccgactctctaacccatgtctgtcacttcctcatggcctaactcaaaccagcaggcaccagttttgccgtcgacgcggccgcgaattccnnnnnnnnnnnnnnnnnnnnnnnnnnnnnnnnnnnnnnnnnnnnnnnnnnnnnnnnnnnnnnnnnnnnnnnnnnnnnnnnnnnnnnnnnnnnnnnnnnnn

SEQ ID NO: 35300 - DNA, 351 bp, Homo sapiens
  misc_feature (1)...(351): n = a,t,c or g
gggacatgggtttaattacaggctgacctgagggacaggctgggttggtcctagtggattgggaaaggatttggagttgatccaagaatgcttcctggagagcggttttaggacttttttagggagttgtaggatgaggagtcgacgcggccgcgaattccnnnnnnnnnnnnnnnnnnnnnnnnnnnnnnnnnnnnnnnnnnnnnnnnnnnnnnnnnnnnnnnnnnnnnnnnnnnnnnnnnnnnnnnnnnnnnnnnnnnnnnnnnnnnnnnnnnnnnnnnnnnnnnnnnnnnnnnnnnnnnnnnnnnnnnnnnnnnnnnnnnnnnnnnnnnnnnnnnnnnnnnnnnnnnn

SEQ ID NO: 35301 - DNA, 347 bp, Homo sapiens
ctcaaataacagttggtaggcccaaaagaccaccaaaagaaaaaaaaattcctttgcttctgataagaatgtaattctcttcctaccttttctctctaatttggttgaactcagttgtggtgcatttagaaactttttggtaaatgctgtttttttgtatgacagtttgtagctgcctaatatgcctgcctgacttgcagtccatttttttcaggtcactgaagatgtgtccctcacaaagaatttttaagtggtactggatggcttagttttgcatcctcctattatctgagctagccagctaaatcagattcccacagtaaaaaaatctcatcaatcttccattg

SEQ ID NO: 35302 - DNA, 341 bp, Homo sapiens
cgactggacagttccatttgaattatttctctctctctctctctctctctgacacattttatcttgccaggttctaaacctttaggaaaaatggagcaatttccaaaggaaaccgttgtggagagcagtgggccaaaggttttggaaacagcagaagagatccaggagaggcgtcaggaagtgttgactcggtatcaaagtttcaaggagcgggttgctgagaggggtcagaagcttgaggattcctatcacttacaagttttcaagcgagatgcagatgatctggggaagtggatcatggagaaagtcaatatcttaaccgataagagctatgaagaccc

SEQ ID NO: 35303 - DNA, 338 bp, Homo sapiens
  misc_feature (1)...(338): n = a,t,c or g
nnnnnnnnnnnnnnnnnnnnnnnnnnnnnnnnnnnnnnnnnnnnnnnnnnnnnnnnnnnnnnnnnnnnnnnnnnnnnnnnnnnnnnnnnnnnnnnnnnnnnnnnnnnnnnnnnnnnnnnnnnnnnnnnnnnnnnnnnnnnngatcttcttgaggaggtgtcactcttttcagaaatatgtccatagcatcttgcttagttgtttctttttttcatcacagatttgtttgtaaacagataatgcaccacgaacattcctctctattaataaaaacctttcagtgtcgggggtcactttcaaactttttaaagaaaaagttgaggtctgcaaaagcttct

SEQ ID NO: 35304 - DNA, 338 bp, Homo sapiens
tttggtatgaagggagcttccaccttcctctggtagatggcaatccagtcagttgtggcaaaccacttgtggttcttgatatcgttgaccccattcttgaggttcccaaagcgcttggtgagatctacctgcaggaggttccgcagcaggtccttcaagtcagagctgaagtgggaagggaagcgcaccttcccagagacgatcttctcatagatctggatgggctggtctgcgaagaagggcgggtagccagcggccatttcatagataagaacccccagggcccaccagtccacggctttaaatgggggaggttcacctgaaaaaacccatagttt

SEQ ID NO: 35305 - DNA, 355 bp, Homo sapiens
  misc_feature (1)...(355): n = a,t,c or g
gccaagtggcttgtctctccttctatgtaataaacaccttaaggtggaatnnnannnaagnnttatnaacctannncntcgtnttnctganagcgaatncccaattctnnatgatcccaannncgctttgttaananctanntgttanatgtntncncagangttanttntcnncatannttnnannagaaatnaanctctnttttcccaagactattttgctcatanancngnatgtgcctgtnctgnntataatggcgcnnagnctgnggncattttatactntataatncatgngaacntacngtcnctagcttttanatggcngaggtcatcntnanaanncnntatatct

SEQ ID NO: 35306 - DNA, 356 bp, Homo sapiens
cttttgatcaaaacaatatcaacttatgcatttattgaataatccatcaatctgtatcatcatccatccatccattccattaaacacagatatgatgaacactgaattgtgggttaaagttagaaaacagaagagtaattaatatggagggtagggcatgagggagccaatggatctcatctgtctccttttgaaattctaaactaatttagaaatacactggaatcagaaagggatccagatatcccttgcactaagggtaaaaccagacggcagaatgccacttgaacccaagaccagatggtttcctattccatttctcacgaattaggttccccatctagacataagctaag

SEQ ID NO: 35307 - DNA, 360 bp, Homo sapiens
aagggttctgcacattcttatttgaagcatgaaaaaagagggttggaggtggagaattaacctcctgccatgactctggctcatctagtcctgctccttgtgctataaaataaatgcagactaatttcctgcccaaagtggtcttctccagctagcccttatgaatattgaacttaggaattgtgacaaatatgtatctgatatggtcatttgttttaaataacacccaccccttattttccgtaaatacacacacaaaatggatcgcatctgtgtgactaatggtttatttgtattatatcatcatcatcatcctaaaattaacaacccagaaacaaaaatctctatacagagatcaaa

SEQ ID NO: 35308 - DNA, 354 bp, Homo sapiens
  misc_feature (1)...(354): n = a,t,c or g
gccaggtcttttgctgtagacagactaagcacatgataatacaccgtaatttatagtgggtgctacaggagctcatcaaagagagcctactggaacagcaaagctagggaaagtaagaaaagtaaatattaggtgaagaagaggtaaagaactatttaggcaaaactagttaggataggcccttgggcaaaagaaaacgtaacatggcaagtcgacgcggccgcgaattccnnnnnnnnnnnnnnnnnnnnnnnnnnnnnnnnnnnnnnnnnnnnnnnnnnnnnnnnnnnnnnnnnnnnnnnnnnnnnnnnnnnnnnnnnnnnnnnnnnnnnnnnnnnnnnnnnnnnnnnnnnn

SEQ ID NO: 35309 - DNA, 360 bp, Homo sapiens
gttaggttttgggggataaaagatgaataaggaagtgcacagtaatttttcacaccgtgagggaaatgtcaacagagacatgtagcttgtgctggaatgacagggacacagtggtgcactgtgtttgggggcagtagggactccacagtgcttctcctacagcactgtttatctcccctctccctccttgaccagactttgaggtctaattccatgctcatctctgaatcatcactggctaccatagttctcaacacatggtcccactcctagccactctttgaggaggtctgcagtttaaactcattttcatagtcaggttaatacagtatttgcctctttgaccgtgttgacattgca

SEQ ID NO: 35310 - DNA, 362 bp, Homo sapiens
  misc_feature (1)...(362): n = a,t,c or g
gatgacctccaactctcacccaccccctctaccatcacctctaaccaggcaagccagggtgggagagcaatcaggagagccaggcctcagcttccaatgcctggagggcctccactttgtggccagcctgtggtggtggctctgaggcctaggcaacgagcgacagggctgccagttgcccctgggttcctttgtgctgctgtgtgcctcctctcctgccgccctttgtcctccgctaagagaccctgccctacctggccgctgggccccgtgactttcccttcctgcccaggaaagtgannggtcggctggcccaccttccctgtcctgatgccgacagcttatggaagggcagtgaactt

SEQ ID NO: 35311 - DNA, 365 bp, Homo sapiens
  misc_feature (1)...(365): n = a,t,c or g
atttaagtcctcttcctcctgtttctgcatgctacgtaatactccatgggtgcatcagccaattgttaatctgtctcctctctcagtaaaaacacacagatggtctccaaactcacatcatgacaaaacacaccagtcaatatccttgcaaaagttcatttacgaccaagagctcagcggacacagaagatgtctgtgtttgcccaagtgctgccagcgtgctttacagaatggctgcattggtctacattcctaccagcaatgcacaaggattcccataccctatgttccacccgtacttaacactatatggctgccagtttttgntagtctaaacggtagatccatatcatgggttgaacatc

SEQ ID NO: 35312 - DNA, 360 bp, Homo sapiens
  misc_feature (1)...(360): n = a,t,c or g
aaaataataatacattaaaaatataaaaatgcagattctgattcaggaaatctgggatgggacctaaaactgcatttcttataggcctctcatgttagagctgctgctctgcagccttactttaagtaacaaggcactaaaacacaggttctaactcaactgcacactaaattgccggaaggcactaaaaaagagtccccctactaaataaactatatttaaacaaacatttgttttcttacttgaattaatcaaaacacacgaagttgctaattcgacttcctgatcactgtgggctcactggngctggcacactgagttggcataagctccangaaggcccagagcggantccttcac

SEQ ID NO: 35313 - DNA, 346 bp, Homo sapiens
  misc_feature (1)...(346): n = a,t,c or g
taatgcctcacctcagggcaattcgtgtcatgtagctacatctccaggtttaaatcctatgactcctgtacacaaaggtaagaggtagatattcttgttttttgcttttttaatcaggctttgttgacctagaagcatagttttgaagtaggaaaaaaaaaggctttgagaggttttgctcagtgtttttcgtttgaaatgaagcacttcataatttttaggttcattaccaaaaaatccattatcatgtttttctgttttttggtntttttttttaaaaatnncggntnnnngngnnaaccccnttgttggggttaaaaaaancggaggttttttnagnacttta

SEQ ID NO: 35314 - DNA, 349 bp, Homo sapiens
  misc_feature (1)...(349): n = a,t,c or g
cttttataaaacagtgatttcatctcatttgcccatcttaccatgccttacatattatttaaaaaatcacataaaactgggctttatcacttaacatctgtgaaactgaataaaatgtttaacctcttctagtcagtttcctcatctgtaacatataggtaatgataattatgctacaaagattgttgtgagaactgcaatgaaataataagtaacctagcagtgtatgcctacccataggaaggcactcaataatcatttttgggtttgtttccccttaattaaactcaggaatgagcaaaccaaactcttatcatgctgnttttcttaatacccaaactagtggtaa

SEQ ID NO: 35315 - DNA, 335 bp, Homo sapiens
  misc_feature (1)...(335): n = a,t,c or g
caagactctgtacttggccgtgacagtcactgggagcatagcctttctccaatgacatcgccctgaacatccactctaaaaatgcaggtgaatttatgtgatggcctttgtgccttgggaaaaatatcttcagaatgagagctatctatagtagcatatatacattatccatggattatagagatattgttgtatttgcttctatgtaaatatcaaaggagtattattctgatatgatctatggaagatgaatgtgactttggagaaaaacttaagctttcggtacagattttcaagatcaacattcnggaaaaagtctaacnnagggatattga

SEQ ID NO: 35316 - DNA, 349 bp, Homo sapiens
  misc_feature (1)...(349): n = a,t,c or g
caccagctcagggaacacagtgagaccccatctccattgctattaaaacaaaattttttaatgggaaaaaaaataaaaaagagacattatttctactgaccctttatctatcacctcccacccaagtacttgagcttcctcaaaggtatctttagcccctctgcctgtaacgtcctcaaagagtcttgctgacttgatttctgcagaaatagtgccttgaaaatattaataaaatacagagcctctggacttctgaatacatactgttcaactaatattttagggaggtgactatgcccccctgccnnnnnnnnnnnnnnnnnnnnnnnnnnnnnnnnnnnnnnnnnnn

SEQ ID NO: 35317 - DNA, 348 bp, Homo sapiens
ctggaatgtaagaaattacatatattagggtgaattaatggtccagctatttcagaattatattacagtagaagttttgtgagaacgtgtaaccaaaatatcccttgtttcccagaaggcaagtgtattttgcctaatttagagattcaacacagttcagtctttccatgatttctatatggactaatacaacacagttcaatctttccatgatttctatatagactaatacagtcatgtcttgtcttttggtatgctgttctgaatttgtcatttagaatgtactagtgggcaccaggaacttgaataacttaaatatatgaacttgtttacatgttggacagatgt

SEQ ID NO: 35318 - DNA, 338 bp, Homo sapiens
ggaacattgtcatggtatgatagtgctgtatagtgactgtggtggtatttacactagtgtgtgtgtgtgtgtgataaaatggcacactgcaacaatgtcaatttcctggttttgatagtgtaccagagttacatcagatgcaactattgaggaacactggctgaagagtacaagggacttctctgtactatttttgaaacattatgtgaatccatagttatttgaaaatgaaaggtaaaattttaaaaagccatttggcagtgaagaataaattgacaatataatcacaaagtatgtagaactcagaaatggatccaaatacagttgagaaattagaa

SEQ ID NO: 35319 - DNA, 339 bp, Homo sapiens
  misc_feature (1)...(339): n = a,t,c or g
gtggaatggtagagagagatgacaggagagaagtaagccactgagattttaaagagtttgtatgtcgtgctaaggagcccttgagaacaacacagatttatatgaacagataacctatgaaacatccaactggagatttctgataggcaggtggttataagaacattaaaaactnnnnnnnnnnnnnnnnnnnnnnnnnnnnnnnnnnnnnnnnnnnnnnnnnnnnnnnnnnnnnnnnnnnnnnnnnnnnnnnnnnnnnnnnnnnnnnnnnnnnnnnnnnnnnnnnaaaccctatctcagccaaaaacacaaaaatcagccaggcatggtagcgcatgc

SEQ ID NO: 35320 - DNA, 346 bp, Homo sapiens
  misc_feature (1)...(346): n = a,t,c or g
tttaataatctgttgtgtcatctctctctacacactcagatcaatatgtggtaaagcttacactctgaaaaagtaatgtacatggccttttcttttttttgagactgagtctcactcnnnnnnnnnnnnnnnnnnnnnnnnnnnnnnnnnnnnnnnnnnnnnnnnnnnnnnnnnnnnnnnnnnnnnnnnnnnnnnnnnnnnnnnnnnnnnnnnnnnnnnnnnnnnnnnnnnnnnnnnnnnnnnnnnnnnnnnnnnnnnnnnnnnnnnnnnnnnnnnnnnnnnncgacgcggccgcgaattccnnnnnnnnnnnnnnnnnnnnnnnnnnnnnnnnnnnnnnnnnnnn

SEQ ID NO: 35321 - DNA, 336 bp, Homo sapiens
ggagtgtgttcctttactattgctatactcatttggaggcttaaaacaacatctgtgtattatttcatagtttctatggctcaggaatctgggcaggcatactgaattctctgcccagaatctcctaaggctgatatcggggtgtcagccggggctgtgatctcatctagggcttgtgggggttcctcttccaagctcctgtggttgctggcataattcatttccttgcagctgtggagctcatggcaccttgcttcctcaaggccagccagagagtctctctgatccctctttaaggagctctcctgcttagaacgggcctacccacgataattt

SEQ ID NO: 35322 - DNA, 348 bp, Homo sapiens
  misc_feature (1)...(348): n = a,t,c or g
nnnnnnnnnnnnnnnnnnnnnnnnnnnnnnnnnnnnnnnnnnnnnnnnnnnnnnnnnnnnnnnnnnnnnnnnnnnnnnnnnnnnnnnnnnnnnnnnnnnnnnnnnnnnnnnnnnnnnnnnnnnnnnnnnnnnnnnnnnnnnnnnnnnnnnnnnnnnnnnnnnnnnnnnnnnnnnnnnnnnnnnnacaatctttttatcttttaaataaccatatactgattcctgcttcagtctataatggaagagttttaaaattaaaacaaaatccaaaataattcaaggtttgtatcaaactacaaataatttctagatgaggaagagtagctggactagttggacttaaagtgg

SEQ ID NO: 35323 - DNA, 338 bp, Homo sapiens
ctaggcagggtgacagaggcagaccctgtctcaaataaattaataaataaataaaagtaacgatttaggaaatggctgagaattcccatgaccctcgtgtcctcgggcctggtgttttcacaggggtgggggcgggagaaggggagaaagaaggacgtgctgtctgtggcttccttcttcccaggcattcatttaacaccagctgaacacatttgctttattgattggttgattcatttatttttggcaaacttggcaacttccacctggccccatgctgttaaaaataaagtcttcttggtcgactgaatgcttttgcaattcattctttccatgta

SEQ ID NO: 35324 - DNA, 348 bp, Homo sapiens
ggcttcctgatgatcaaactgaaaaatctgcagttttcttgcagaaaaacaaacaattccaatggaacaaccattcaaaacataataactcagccctttaacctcctaccacagtctaatgcctggcattacgagttggggtaaagaagaaggcaggaacaatgattgtggagagctctatctgcctcagaaataatgccagtcggcaaaggctgccggcaggttttgtgctcatttcaaaacttcacattcctcaggcacttagtggcatttttgaagaacactgtgtcaaggacagtgggtgacccaggagagtgatgtgagcgaggtcattctgaatacacagca

SEQ ID NO: 35325 - DNA, 289 bp, Homo sapiens
aagacattttccccagatttcccccagagctttttttatgatggtcttctacagttttaccaggctttgtctgggtgggcatttcttttatttaacatccttgggatgcatttggctttctgaatttgatgattactagttctgaaaaatctcagaaaaaaaaattattttgaatgctgcctttcccacattgtctgttttttccttcacattctgccctttacatctctaaatatttcttttatattttccttctgtatgttatgtataatgtctttttttttttttt

SEQ ID NO: 35326 - DNA, 337 bp, Homo sapiens
  misc_feature (1)...(337): n = a,t,c or g
ataaactttaacataattatcagtcacttcccttggttcactggcagtagcataattttagatacatttctagttttcaaatcataacagaaaaatttggccctnnnnnnnnnnnnnnnnnnnnnnnnnnnnnnnnnnnnnnnnnnnnnnnnnnnnnnnnnnnnnnnnnnnnnnnnnnnnnnnnnnnnnnnnnnnnnnnnnnnnnnnnnnnnnnnnnnnnnnnnnnnnnnnnnnnnnnnnnnnnnnnnnnnnnnnnnnnnnnnnnnnnnnnnnnnnnnnnnnnnnnnnnnnnnnnnnnnnnnnnnnnnnnnnnnnnnnnnnnnnnnnnnnnnnnnaa

SEQ ID NO: 35327 - DNA, 346 bp, Homo sapiens
  misc_feature (1)...(346): n = a,t,c or g
ccaaggcctccaaggagactcatgtaatggattaccgggccttggtgcatgagcgagatgaggcagcctatggggagctcagggccatggtgctggacctgagggccttctatgctgagctttatcatatcatcagcagcaacctggagaaaattgtcaacccaaagggtgaagaaaagccatctatgtactgaacccgggactagaaggaaaataaatgatctatgtcgacgcggccgcgaattccnnnnnnnnnnnnnnnnnnnnnnnnnnnnnnnnnnnnnnnnnnnnnnnnnnnnnnnnnnnnnnnnnnnnnnnnnnnnnnnnnnnnnnnnnnnnnnnnttt

SEQ ID NO: 35328 - DNA, 346 bp, Homo sapiens
  misc_feature (1)...(346): n = a,t,c or g
gtcgacgcggccgcggtttttaaaatgatcagcaatatacttcacatttctacctgaagaaggaatgtaattttggagaagcttatacatgggagaattatctccacttgtcattttctgctgaaaagatataatttcgtacttctccctctgggcccacaggatagttccatggaggagacttagagtggggatgggctcctagagtagctgcagaagaccttgctttttttnttttttttnttttttttntnaaaatgggngtttttntnttccnnnttnggnntttganntngggtttttntttnttnaannnttnnnggnnnntannntgngggttnttttt

SEQ ID NO: 35329 - DNA, 346 bp, Homo sapiens
cacctgctgtgtgctaggtacttttctaagcaatagagatgtggtgatgaacaaagcagatatttccaccaccatggagcctacagtcaagtggaaacataaatgaagatagttacaaatccgttaattcgtaatggagtgctatgagagagaataccaagagaaatctattgtggtatggaatggtaagaaaggcccctctgtggaagtgacatgtgtactgaaatctgaaggacaagtgaacattagccgggagaatactccaggtaagggaagagggtgtgtaatggtcccaaggcagaaaagaatttggcctgtggctggtgactcttcaggcagttaagtc

SEQ ID NO: 35330 - DNA, 345 bp, Homo sapiens
  misc_feature (1)...(345): n = a,t,c or g
nnnnnnnnnnnnnnnnnnnnnnnnnnnnnnnnnnnnnnnnnnnnnnnnnnnnnnnnnnnnnnnnnnnnnnnnnnnnnnnnnnactacaaatattttttaaaagaagttgcaagcttaattgtaaaattatatcttttttgcaaacttaattttgaataaaaacataaataaaaccaaaaacacacacacaaacagtggtcgtttctgggtggcgaaactgcaggtgccatattttcttctttgtatttttacatagtttccaaatcacctctataagtaatttaaaaatcaataagaactatatatttttaaatacagtttaatcaatagaaggctgctaagaaa

SEQ ID NO: 35331 - DNA, 344 bp, Homo sapiens
atttttccttgttagctttcatttctcagccctttacaagattaaaatagtctgcagtttaatctctccaaagctttacggacagtgattctgtcctaaacaagacagtgactccaggatttctgaagactattgtggaagaagcatccattaaggccaagctataacatcagaaatggtgaatgaatacaagaaaattcttttgctgaaaggatttgagctcatggatgattatcattttacatcaattaagtccttactggcctatgatttaggactaactacaaaaatgcaagaggaatacaacagaattaagattacagatttgatggaaaaaaagttcc

SEQ ID NO: 35332 - DNA, 334 bp, Homo sapiens
gggcaagggaagtactaagcatgtataacattagcattgctttattgatggcagtacaaatgctacagatgttgttgattccattcagtttggtctttacttttaatctagtttactcacttctacatataaatgagaattaatattttccaggttaatttttcataaaacaaccctccaaacctgcagaactgggctcacttactagctacatgatcttgaacagattaatctctctattcgcagtttcctttcctattaaactactatgatgtatggaatgcgcaagatttgggaagagcaaagcacagaatgtaggtaaactggtaagcag

SEQ ID NO: 35333 - DNA, 345 bp, Homo sapiens
  misc_feature (1)...(345): n = a,t,c or g
cttgaatttcgtgcttgactgtgagcattataagcagaagagctgtgtctgttgtgtatattgaagtactcccagcctgaaacatagaaggcacttaataaatacttcttgaagaggttaagagtgatttgtagctcttaatggggaaaatagtctccctcataagatgttgattattttgctctccttcttttccctatctccaatgaaaaaattacatatagatactanaattctcccataaatgtccccaanatggtnttcattctgaatatgagaatctggtgcttaagtgnganatntagacagatgtgggatgctttaangtanctttagntctttgtt

SEQ ID NO: 35334 - DNA, 348 bp, Homo sapiens
aacatctcctgcagcagataccagcgcttacatctgccgccccctaccaccccgcctcccatttactgatgagtcatttttaagactcctgagaaaatagacccaaaaagtattcactacgtgttcctttccctcagagctgttatcaattaaggtagaagaataaatttctgattctgtcctattggtgaaagtggtataagattatatggaagaaagtaaatgttatatttcacttattcaacaggtttcgttgagccctactgagtgtcaggtgctgcagaggtgcagagctagggccagtaagataacacagtcctggtctgggttatctgagtagagaatgtt

SEQ ID NO: 35335 - DNA, 340 bp, Homo sapiens
ccataattcgctgtatcactggcttgctcccggtacctagcaatatctccttggcatatcatgcatcgctgggcactgatcaaggcatattttactgtcttgcgtaatggcttgctgcgaatggcaagaccatccatgtagtcttccagtttgaacttgtaagtaacctgcagcttctgaagcaaactatcaaagaagtcactaccctcatccaagagctccaaaagtctgttccgaatctgttctgggttctcaacattcggatccttgacaagttgcctgaacttctcaatcacctgatagaaagcattcttccacaggatctgatccacattctgat

SEQ ID NO: 35336 - DNA, 341 bp, Homo sapiens
gcgaacccttacaaactggcttcccctcaaggtgatcagccagtgattcttgaagctgtgtcttattctcttaggatacaacaggacttcttctgcagtaaggataagtaacacctaagtgtctgttacgtgcagatgaagaattctatagatggacagatggaaagatggatggatggaagaattacaaacagatatggctcactcatttgattaaacaggcctagccccaaaatcagagtatcatttagagtcatttgagatcaccaagggtcatcaagttatgtatgaccagagatgaaaatatagtataaacaaggttggagcctcaatgtttaacg

SEQ ID NO: 35337 - DNA, 348 bp, Homo sapiens
gcagaggtaaaacaagaggtaggtgaggatggaaagcagaggagaacaggaaacagaacccacgtcaggtcaccagccccatctgtaccaggtggcccaggtgcagcgggatgggggttgggagacaggaagaacaaaagctgctcaagggcaagcccgtcacaggcttcttctggcagcctgcacagatggctggcactcacatagcccctggtgacagcatgacagaatacacaggccaaagcactagaggtcaaaatcacagcacagaaaacagaacacccacacatggtaagttcaccaaggactatacgccagcatgttacctgtccgttgttaaaagataat

SEQ ID NO: 35338 - DNA, 340 bp, Homo sapiens
  misc_feature (1)...(340): n = a,t,c or g
gggagcttctttgccagggggtgggtgcccgtgggtgtgatgcagcgggtgtgaaccaggtcgcagaaggcaccgtgcggacagcagtgcaccctgtcttcacagcaggaagcctggggcatggggcagcacccccaggagccatcgaccataacacagcacgtggagaagtccgggcattcgaactgactatcagggcactggatggcacgtcgacgcggccgcgaattccnnnnnnnnnnnnnnnnnnnnnnnnnnnnnnnnnnnnnnnnnnnnnnnnnnnnnnnnnnnnnnnnnnnnnnnnnnnnnnnnnnnnnnnnnnnnnnnnnnnnnnnnnnnn

SEQ ID NO: 35339 - DNA, 346 bp, Homo sapiens
  misc_feature (1)...(346): n = a,t,c or g
ataactcctaaaacttaacaaaagaaaacaagtccattaaaaaatgggaaaagatctttaacactcaaagaatatacccaaaagataaacagatggacaataagtacatgaaaagatacttaacnnnnnnnnnnnnnnnnnnnnnnnnnnnnnnnnnnnntgaagagacacgacttcacacctgacagaataaccattatttttaaaaagaaagaaagaaaataactgttggtgagaacatagagaaactggaatccttgtgcattgctggtagcaattgtggaagcagnnnnnnnnnnnnnnnnnnnnnnnnnnnnnnnnnnnnnnnnnnnnnnnnnnnnnnnnn

SEQ ID NO: 35340 - DNA, 340 bp, Homo sapiens
aaaatacaatcacttgtgcatatatttggaggtggggtggccttgacaattcgatttttacctttaagtggaaaggcaaagtgttaaacataggtaaacactattgaaaaaaaacaaagtgggaagactagctctatcaggtcttaccatgaacctactgtaattgaaacagtgtgatactgataaacggttaaacaataaaaccaagagaaatccagaaacaaacccacacatatctggaccttaatttacatcagaggtgacactgcagaacagtgtattttcaataattagctctggaacaactggatacccttatataaaatatcaaactggaaaa

SEQ ID NO: 35341 - DNA, 346 bp, Homo sapiens
ctctccctcccctttcagattccctcttattctctgcagcacacaaacccaggcctggagggcccctccagggccagccaccccacaaaaccgcagcctgcattctggattcaagcttcagagcttgtgtccccgctccccggctctctggctcactggcttgggagcctgggcacacactaatgctgggactcccattcttcttcacgttggggagcatatgtacctcataagctttgaggagaatctgtggcaggcgcctacctggtgtctggcccacagtaaaaatcctatgaaagtcagatttggtgctgtgctgctactcccatatccgtcagcgtcatac

SEQ ID NO: 35342 - DNA, 344 bp, Homo sapiens
  misc_feature (1)...(344): n = a,t,c or g
caaaatgaacaaaattaaaacctttagctaaactgaagggaaaaaacaaaaatatcttaggactcaaatgactgaaatcaggaataaatgcaggaacattattactttatcaaaagaggaaataaaatgattataaggaaatatgtacaattgcacgccaacaaattagacagcttagataaaatagacaaattccaagtcaaaaaccaccaaaactgactctaaaagnnnnnnnnnnnnnnnnnnnnnnnnnnnnnnnnnnnnnnnnnnnnnnnnnnnnnnnnnnnnnnnnnnnnnnnnnnnnnnnnnnnnnnnnnnnnnnnnnnnnnntggctaacatgttg

SEQ ID NO: 35343 - DNA, 348 bp, Homo sapiens
ggaactaaaaaaaagtctatagatttgatcatcacagttttagatcattgtggatgttatactagggccatggaaaatgcctgttcacagatctgtaactacattcttgggagttcaagttgtaatataagctacccaaagccaaaaatttaaatctgtggattgatgcttggccatgtgactcacatatcatgggtattgtgactacaagtgctgaatattctagaaaggaacagacctaatgttaaatatatgttctgtaataaccatgtgaatgcttctacacttcttctttccttgtatcctaatttccaataggaaaaatacagttattactgtaactattgg

SEQ ID NO: 35344 - DNA, 343 bp, Homo sapiens
gaaatagtggaggggcagaaactgtaaaacaacaaaaggggactgacccctggggctggttgtcacacagactagtctgctctgtcctgatcaaggaattcttcttctcaaagaagtggctaattccactgatgaaaaatctattaggattaatcaacctaattaaaattgtaaatgccgtccataaccaccactgagagtacctacataacaagggaaacgaagttttcaagtgaggaggagggaaggtaggaagtttcgggaggttgagagtggaagcctcaaaacagcttgggagcagggtctgctagagaggggagaacagatcaagtgagtgagagga

SEQ ID NO: 35345 - DNA, 347 bp, Homo sapiens
  misc_feature (1)...(347): n = a,t,c or g
gtttcctttagctcttcaaccttttgtgtcatatttgactgtgagagattattgaaaataaaagcaattttctcctggatattttctgggggctccacaattctctcagtttgatctgtggccacaagcaacgtatctatatttgtagtattaatagaaggtggcacatctttcttaaagctgactccagttggcctggtgaccgtaaccgttttagcaacagtggtagttgttgaggnggttaccatagtgctaacttgaccagcaagaggagcttttgctggaacctgggcctgagcctgggcctgagccagtgcaatacttccaggggttgtgatagagccttg

SEQ ID NO: 35346 - DNA, 344 bp, Homo sapiens
ggagcaggcacccgatacttcgtagaggtaggaggcttagagtaacagcaggcaggaggccctggaggagcaagtacctgatgcttcataaaaggagactcagagtaaccacaggcaggtgactcattatagcatcatgcttgtgggcactgcaggtgaaagacatcttgattcctgtggatattagaaaaagaatttcatgagtgttcttttgtttattggacaatgttcattgcctattctgtgctaggtgctaggaaggtaatacccataaaatatgggattagaaacatgtcaattgctctgatacaataaaattctgaatttatggtagataaaaattt

SEQ ID NO: 35347 - DNA, 322 bp, Homo sapiens
  misc_feature (1)...(322): n = a,t,c or g
cttcgttcttctgaagatctgccccggtctcctgttagttcatgtctctgtaaaaccaagactgaattcattctctcatcctgcctgggaagaagacctttactaatgatattagtctgcatctgtgggaacagctagcctttgtccagagaccagatagcagagcagctaagataactcctttattttcagattttagttgaagctttattccatcacttataagcattctgtgtgttttatttttgttgatgttggtttctttttttttttanttcaattnatntanccnagttttttanctgtaaaatagngaaaatag

SEQ ID NO: 35348 - DNA, 328 bp, Homo sapiens
attttcaactgcactgggggtgggtcagctcccctaatgctcatgttgttcatgggtcaactgtattataagcattttaaattttattaccatctccttactatttgatgccattttttttgtctccttactttaaatgtttatagcagataggggattgtcattacatgatgtaccatctctttaagtctgtggaataactttatgtatttttttgtttttaataaaatgatcttgattttgtaaccagaaaaaaagctatttctgttttgaaaagtattgattgtgtactttgaatttatttacagatgatttttaaatgttttct

SEQ ID NO: 35349 - DNA, 327 bp, Homo sapiens
cctagatttttctctctgttgcctaatgtacatatttcatattcagactttgtcatttttcatatgctgttcatatgtcttgattttgaaagttttgagtgctgttaacatggttaatgtatgttttcctattaaataacatgtgactctgctaatatatgaattgttttaattctgggttgccttaccactctatataatatcattggtggtttaatatatgttttgaagtgatttatttgtttctatctgactaggtaaaatgttcaggaatggttatgaattgagatccgtgaaatgacccagagaaggctgatgaagtgtttg

SEQ ID NO: 35350 - DNA, 329 bp, Homo sapiens
  misc_feature (1)...(329): n = a,t,c or g
ctaaaattgatttnnnnnnnnnnnnnnnnnnnnnnnnnnnnnnnnnnnnnnnnnnnnnnnnnnnnnnnnnnnnnnncacataattcatatacatgatacgtggatatcatgtatgagtatatagtatcatgtaactatcacatatgtaaatgttaattattcctcaataaatctgttttaaaaatagatatgatgtgatacttctgagacaaaatagctactttcacaaagtctaaaatagggaatcccaactggttcctctattttattagtaagcaacaccaagctgactattctcaatcaacatgacatagataaatgacatatat

SEQ ID NO: 35351 - DNA, 338 bp, Homo sapiens
gtccatacccttttggaattcaaagtttacattctaattttatattgtttttcactctcactcccagactgatgtcttgatggagaaggtggaccagagattcaagcatgctttctagaaccctagcagggttactgaattatctccattacaagttcagttacagattcaggccttctgctatagacattctgttagactatgatctaagaagggtcaacttgtgcctgaggggaagatacctccagatagttttatgtcctgacttggaaagcgtttaccagccaccttatagctatactctgtctccaaagtatcaggggaccatacacccctag

SEQ ID NO: 35352 - DNA, 335 bp, Homo sapiens
  misc_feature (1)...(335): n = a,t,c or g
nnnnnnnnnnnnnnnnnnnnnnnnnnnnnnnnnnnnnnnnnnnnnnnnnnatgtttttaatacttttctataattttttaatggctgcatactggtgcactgtctagctgctctatagttatttgattgtttccagggatagttattgaaagcatttggccagtaaggggtttatcgttggaatctgttggttacatataattatatatacttgcatagggccttataatcttttttcctcctgaatatgtgcaccattaaagttttagtatgtgctttttaaaaagttgtattatcaaaatgacattttcttaatatctttcagattcaattag

SEQ ID NO: 35353 - DNA, 328 bp, Homo sapiens
gttataatctgcttattttacaatatacacgtttccctaagaaatcatggcagagatgtgagggcagaatatacacaacagatgctgaaggagaaggagggtagtgttttgcaaaagaaaaagaaaagaaccaacagaattttaactctattaacttttccaaattttcctatgcttttagttaacatcattattgtatcctaatgccactaggggagagagcttttgactctgttgggttttatttgaatgtgtgcataacagtaatgagatctggaaacacctattttttggggataaaggtttgttggtctccttcctgtgttcg

SEQ ID NO: 35354 - DNA, 336 bp, Homo sapiens
caacttctgtgatgcctctccccggatgaactcagcactttccaggggctgttcctgtggcagagccatacagtggaggcatccctgctagaatcggtcacggagccttacacacaggaaaggcttgcgcagattatcagtaacctagtaatgtcttggctccctgatatgttctagttggttgacatagctagtgtcctcagctgactggagaggtaggggtgcacatctcaacaaaaggggttccctttccttactctgcagctgttcatttatattgctcctgacaaaatcaaaactgaaaaatgaaaagacttctatggtagaatctggaga

SEQ ID NO: 35355 - DNA, 328 bp, Homo sapiens
  misc_feature (1)...(328): n = a,t,c or g
nnnnnnnnnnnnnnnnnnnnnnnnnnnnnnnnnnnnnnnnnnnnnnnnnnnnnnnnnnnnnnnnnnnnnnnnnnnnnnnnnnnnnnnnnnnnnnnnnnnnnnnnnnnnnnnnnnnnnnttaacgccactgcccnnnnnnnnnnnnnnnnnnnnnnnnnnnnnnnnnnnnnnnnnnnnnnnnnnnnnnnnnnnnnnnnnnnnnnnnnnnnnnnnnnnnnnnnnnnnnnnnnnnnnnnnnnnnnnnnnnnnnnnnnnnnnnnnnnnnntttttattattacttttaaaattatccattaaaaatgtaaaaatctgtttgttcattttgtt

SEQ ID NO: 35356 - DNA, 167 bp, Homo sapiens
ctgcacttccctctaaggaagacactgttcatcgtctcaatttgtagattggaaaactgagtctccaagagattataaattgggcccagtcacacagctagcaagtgtcagagctggactggaaacccaggcctctctgactctagggccttccctctgcgatggtc

SEQ ID NO: 35357 - DNA, 337 bp, Homo sapiens
ggttctttgaataataatgcagagaaattagtagataccggacagaattacctgtgtttaccaataaccgatcaaagagttattttcttgcccagaggtaaaattataacgtgcaaaaacatcaaatatgctaacagtcatcattgaagactcacatgttaagtatctgctatgtgcccagtcatctcattgtaccttaaaatcgtctgagaagtagattttttaatcactgatttacaaacgaggaaactaagactcggaaattaagttgcttaaggttactcagtaaaatggtggggttagggtttgacttcatcattaactttgtaaaataatg

SEQ ID NO: 35358 - DNA, 336 bp, Homo sapiens
ggagcccaggactcaagtgcacttcttcaataaacagttttgttcatctggaacgttttacataatggctgctgtaattccggattatctttagtaagatttttccacttctgtaaatatttgcaggttacagggccaaatatacatgaaaaaggcaggtctgctagaaggcaagtatttagagcttgagaaattagggatccaatttttatgtcggatattgggtttctcagggccgggatgactttacctctgagattgccttgaccaactcagccaatgattttccattttctgtctgacccaggcacccaaggcttctcttacgtgtgtgtg

SEQ ID NO: 35359 - DNA, 390 bp, Homo sapiens
  misc_feature (1)...(390): n = a,t,c or g
ggaaaaggctgttaatgattttaagtctttggatacagactgttaagttgctttccaggaagtttctgccaatgatagtctgatactttctgtgtcctcacaccaccctttgtcaacactgagtgttttttgagggttaattatttctatgggagaagttaaaaaanaaaaaganncnccnaaaaanttgnttcagggggggcatgctggttnacccctgaaancccanccntttgggnggctnaaatganaaaatnncttaaccctangagggggaggttncantgaccctaaatnggnccnttacnctccancctgggcaacanagggnnacnccntttcantaaanttantcaatngantcaancgngnccaantttnanaacttcc

SEQ ID NO: 35360 - DNA, 384 bp, Homo sapiens
  misc_feature (1)...(384): n = a,t,c or g
taaatattacatttatttgttataaacaaatacctaaaagtttgaatcttattctaaatacaaaggaagttattagagaattttaagtagaaaaaaattattctaagatctcaatgactatatttgggaactggcagtatcatccatactacagtaataatctagagattagtacagtaatttcaaacaggaacccctgggtccttaaaagtccatgtagataataattgggagtccattaattgacattaagatttcaaaatgcttcttaaaaattgtagctttcggccaggcacagtgnnnnnnnnnnnnnnnnnnnnnnnnnnnnnnnnnnnnnnnnnnnnnnnnnnnnnnnnnnnnnnnnnnnnnnnnnnnnnnnnnnnn

SEQ ID NO: 35361 - DNA, 384 bp, Homo sapiens
  misc_feature (1)...(384): n = a,t,c or g
nnnnnnnnnnnnnnnnnnnnnnnnnnnnnnnnnnnnnnnnnnnnnnnnnnnnnnnnnnnnnnnnnnnnnnnnnnnnnnnnnnnnnnnnnnnnnnnnnnnnnnnnnnnnnnnnntancgtatgtnttgaaggcanattntcaaacttgactntttactcacagtttntactcagccntacaacgtttnatactgtttttttctgttaataananaataggcccaggngttgnggccatcntngcaccaccgcagntggggtgacntgagtgaaaccctgcctcaaaataacaaangaaaancaaanaattangatantangaaccagactatattgnatgtattctagtaggtaaatacctttttagggctcaaattacacgggt

SEQ ID NO: 35362 - DNA, 377 bp, Homo sapiens
  misc_feature (1)...(377): n = a,t,c or g
caaatttttacctattacatacttctttcttgtgaataaccaataatagggtggancgggcaccatatcnnggnnnnnnnnnnnnnnnnnnnnnnnnnnnnnnnnnnnnnnnnnnnnnnnnnnnnnnnnnnnnnnnnnnnnnnnnnnnnnnnnnnnnnnnnnnnnnnnnnnnnnnnnnnnnnnnnnnnnnnnnnnnnnnnnnngactaaangcntcntgaanttatntcacnagggcttnntcaganntnnggncttnttcgncanaggttacttgnagngccaananaananctnanctnnangntcntnttaannaaaccatnttgtanncnttcnaatanggagtntgnttttggganngnaaagatttnttgg

SEQ ID NO: 35363 - DNA, 382 bp, Homo sapiens
gaaattcatcccaatatgtgaataataagttttagaaatacaacaaaggaaatgaaataattcaacaaaacactccagaatcgaaaggacatgacttttcagattgaaagggtcacgaatggccaggacaataggtgtgtcattgtaaaatttcttaatgctagggacaaagaaatcccgcaaggtcgcacacacagagtgaggaatcagaatggctttggccttcttaacagcagactggaagctagaagacgacagggctgaggaatctaagttctgaggcaaaacgatttcttacctagaattccacactcaattaaccaagtgttagacattttcagacacacaagattttgaaaaaaaattatctcttgtgtactcc

SEQ ID NO: 35364 - DNA, 385 bp, Homo sapiens
tttccctgttctgatgccccagccccgcgtcacagcccgttctcagtctcctctgccttctctagtagatattgttagccaggattccattatcctcaatgctcccttccttcctgccacagtccttgggaaatctcatccacacacttggatttttgctgataattcacaaatatatgtcagctttcaaaaaccgcacagatgagtttatgaatatgggtatgcagccgtatataaaatctccttaccgactatcaatgtctcagatcagcctgaaatttgacttgtctcaaactgatcttattttaccccacaaattctactctccttcctccttccctactgcatgttattctattcattcggtaggttaagccataagcct

SEQ ID NO: 35365 - DNA, 378 bp, Homo sapiens
  misc_feature (1)...(378): n = a,t,c or g
gccaaattatattagattgtttggatatgctctgttgttacatatttatcctccccaacccccagtttttagtgattataaaaaacaatgctatgatcattcttttaacctaatatttgtccaaccctttatcatctttggagggattctggaaatgtctggagggtctgggttaaaaggtatcacgtttgaagactttttttttttttaaataanncttnangttntaggncaacccggccgnaantnccaaatntntnaatcgaaaatccngaaaanccccgnaggttcnnttaaanngggcntngggccccntntnantttntttnnttaanncatngtttggccttttttnangnaccnanncncctnnaagtt

SEQ ID NO: 35366 - DNA, 381 bp, Homo sapiens
ctggaactgagcagcaacttcaagatcatctcttccaacagattcacatgacaggtgggggaaatgtggagaatggggtatttcagagcaagaaactgaaatttaaaagaataaaaatcttaaagttaaaacaatagcaagatcacatacagtcaaaggcattgtcctaattagctcatggattcaacattaaggataaataaaattgaagaattaaatgaaaagaattaaaggatgaaaataactcaaaatgtaaaagatggatcacactcatctataaacatggcccaaaagactgtctttgatattacaagtaacaagatgacttggactcaaaaccagttatgcttattcataataatagttatcatgtacttactg

SEQ ID NO: 35367 - DNA, 382 bp, Homo sapiens
gtttgacccataataagtacccagcatctttggaatggttatatgagtgaataagtgaatgaaatgatgaaggtattatcatggagattacgtaccatagatagtgaaggcttggaactccagatggtctaaaagcagtagttgctaagtccaaagatggcttctcttttcaaaattggatgtaactgtgatttcaaaataattggccaactcaatattgcagttcctgatgattaagtcactttttaaaaagagtgaaatttgtggaatttaattaacataggagagagaaatactttttacaaggttgctagtaacctactctctgggatggcgtgagtggagagtgaaattttgttaatgaaaagcattgccatcagca

SEQ ID NO: 35368 - DNA, 101 bp, Homo sapiens
atttacaaaaatttatgaaaagtccttcattctacttctcccacataatattatcctaatttaatatatttcatcctggtgagttaatttttttttttttt

SEQ ID NO: 35369 - DNA, 382 bp, Homo sapiens
  misc_feature (1)...(382): n = a,t,c or g
attctttgcttattgtaagcaacatgcagataggttagacagaaagtggaagagaaaaaactacttggctctacagtcctattgtaaaatgtctttgcaagagagagagaagcaactatcaccagaagcacaggcaaggatcaatgcccggcttcagcagtatcgtgccaaagcagaactagctcgatctaccagaccccaggcctgggttccaagggaaaaattgcccagaccactcaccagcagtgcttcagctattcgtaaacttatgcggaaagcagaactcatggggatcagtacagatatcttttcagnggcnaattcanatnctagttctagngtggatggaaggagaaaacntaagcaaccagctntnactgca

SEQ ID NO: 35370 - DNA, 377 bp, Homo sapiens
  misc_feature (1)...(377): n = a,t,c or g
taaagattgaattaatttggttcagaagtttgaaactcatttgtaaattttatttacatgtttgttggcagtattttgcaaaggtcagcattaacaaatgttttcagccacatgcaatgcnnnnnnnnnnnnnnnnnnnnnnnnnnnnnnnnnnnnnnnnnnnnnnnnnnnnnnnnnnnnnnnnnnnnnnnnnnnnnnnnnnnnnnnnnnnnnnnnnnnnnnnnnnnnnnnnnnnnnnnnnnnnnnnnnnnnnnnnnnnnnnnnnnnngttttcntaannccntntgnaantnttaantccattnaaaccanngattttnanttcannataattaaaaggttataatttcntttttaagggccccgtataancttgg

SEQ ID NO: 35371 - DNA, 383 bp, Homo sapiens
tagaaatgagacggggagaatctgggcgatgagaaagaagaccagaactggggagtacagtctagaattgcaaggggttgagtttgctatgtgaagcagttagttttggactgttgcacttactatttctgagatttgagcatctgacttttcctttaagcttttgttttctcatttgtaatatgggagtgagagtgcctagttcacagggtcattgctggggttaaatgagataatgtatgtaacctgcttagtataatacctagcacagagtaaacactcattaaattttcattgttatcgttgttatgatttggcagcgaggagtcaaaagagcctattttcttaaactcatcaatggtataatcagagctttgcatctc

SEQ ID NO: 35372 - DNA, 387 bp, Homo sapiens
ttctcctccagaagaagcagagttatatggagctcctaccatgctaccatgaggtctatgctgtaaggcacagtatatggatgctacagaggggatgcaggcttcccccgagacagagcagaagccaacacattcatttgaagaaatctctcttgtgcttcagctttggatttaccaaccttccagcagcattgcgcaagtcaaagtgctggagttagtgggctttactcatctttgtctgtgacgtctgatatgatgacagacttgccaatttcattctccttttctatctcagggccatcatccttaaattctagtctgcaagtttcacctacttaagtttttgaagggtttcaatacagtggtaaacaaaatagactgaacagg

SEQ ID NO: 35373 - DNA, 347 bp, Homo sapiens
ctggatcaaagattggttaaagaaaagttttccataaagttcagaattacaggcatatctgtatcttacttagtcagctgggaagaaccacccatatacaaggcagagctcccatccacgggaatatactcttccaccagtccaaccaataagactccagcctgatggaaaagctataaatctcagccttaaaccagtatctaccccacatgcctatttacttgttctaccttagaacaaaggaaattagcaaagatagcaagtaacctatgaaacagaaatgaagaagaaattactttccaatatctgagtactcttatgctacaaaaattacaagataaagtatg

SEQ ID NO: 35374 - DNA, 345 bp, Homo sapiens
ttttgccagttatacatttatagaaagataatcccctggctttaaatagtcatgtacatacaaatatgaacaaacttaaaaaaaaaatacaaacccttggatcacatgggggcttctgggaacccccgtattcttccccctcacccaagggcagtgggcatgaatctactttttaaaaatgattaattttggccatccttgcagaaaagagcctaaaattgggtgatttacccacaaagtgaaagtcgagggaaaattcagtttccagtctctgaactctatgcgataatctcctatcattagggctacatgctttcttgttctgcttttaaatattatatcagg

SEQ ID NO: 35375 - DNA, 336 bp, Homo sapiens
  misc_feature (1)...(336): n = a,t,c or g
ctagagtgtaatacagtgcagcagtgatgggctgaaggcctaatgcaccagcacacatgcctggaagacctaacgttgagaatccacatttttttcatcactcacatttattttgcatctccctgttttgattaccttcagagacccaagcacttgcttttgtatatttgagtctgggttttattttccttttagaaatagtccaaaatccttttagagcctagacctttgaataaaggtcgacgcggccgcgaattccnnnnnnnnnnnnnnnnnnnnnnnnnnnnnnnnnnnnnnnnnnnnnnnnnnnnnnnnnnnnnnnnnnnnnnnnnnnnn

SEQ ID NO: 35376 - DNA, 345 bp, Homo sapiens
aaagaaatggctctcacttcctggattggcaccagacatcctaccagctgcaattacatcattttttatctatcttctgcttttactttgtgtagggtagggatggggacttacaaatgggccaaagacacttcaacctcaaaaccaaagagaaatctctgcttgcagagatacaaagaaagtaactctccctcttatgaaaagcaaccaggaactctactccagttatgagggccactgatggtgtgggagagctatcaagaagattcttcctagacgtggtgcaaagacagtgagaacccaggaaatcacattcatgggacacttgctcttaccgtcatcacc

SEQ ID NO: 35377 - DNA, 336 bp, Homo sapiens
  misc_feature (1)...(336): n = a,t,c or g
tgatcatgggggcatttcaggcactgtctgctgtggccactcgtgagaccagtcctggtggtcatgatacttatacatctctcctgggcagagaaagggacaggggtctgggtccttgagctaggaagagatactcacacaaccttaagggctggcagctcatcaaagaccccaggttgcagactggagaagatgtttccagatatgtttagtcggagaagcctggggaggccctggaaggtctcggaggtgagacagccaatccggttgttggagagatctaaagtcgacgcggccgcgaattccnnnnnnnnnnnnnnnnnnnnnnnnnnnnnn

SEQ ID NO: 35378 - DNA, 345 bp, Homo sapiens
ctcacaactacccaatgataaccactattacattttggagtaatccctctagactttttttcctctcaatgaaaacgttttctgtagaattactaaaactagaattaaagtatgtcctgactacgtaccaccagacaccagtcaaaaaggcagagataatgaaacaaagaacagcagtaaaccaagaacataaactaagtgaaacactgggatgccccacaggaataaaaactccagcaagttgcaaagcagcatgaaggtacttactgccactgacctttacactttaaaaaaaatggttacttatgtattttatgtcatgtatattttgccacaaaataaaag

SEQ ID NO: 35379 - DNA, 335 bp, Homo sapiens
  misc_feature (1)...(335): n = a,t,c or g
aaaaaatcctaggaaatctaagaaactattagagctaatatactagttcagcaatgttgaaagatacaagatcatttttcctttttggacannnnnnnnnnnnnnnnnnnnnnnnnnnnnnnnnnnnnnnnnnnnnnnnnnnnnnnnnnnnnnnnnnnnnnnnnnnnnnnnnnnnnnnnnnnnnnnnnnnnnnnnnnnnnnnnnnnnnnnnnnnnnnnnnnnnnnnnnnnnnnnnnnnnnnnnnnnnnnnnnnnnnnnnnnnnnnnnnnnnnnnnnnnnnnnnnncactatatttctatatatgagcaatgaacaattcaaaggtgaaatagaga

SEQ ID NO: 35380 - DNA, 333 bp, Homo sapiens
caaaaacaaccacaaaaaacctcttaggaaacctcaggcagattccctagaggtcctggaagaggagaaaaatacttgtaagttataggtagtgccagcagaatattatataagtaggttcatttttagattgtttgcaagaaaaggatatgggtgaatgagatcatgaacctgagcaacctacttggcttttataatctctcttacccttctggagcaagtaacttatcccacttcattggggagaaagagttaaagaaatgttaggtggattcttcacattccaaattggaacttttaaatgcatttttctttccgtcgacgcggccgcga

SEQ ID NO: 35381 - DNA, 334 bp, Homo sapiens
  misc_feature (1)...(334): n = a,t,c or g
gtttttatcattaaagcaacatatgttaataaatttaattgttagagatatgcatggcttagaacatgaaggttctttaatggttattaacagggcatatatttgccagatattttctaaacctatagtgacatacatatcatatcattataatataaatttttacagaggtgagatcaccctatacttacctggcaggggagataccatgatcacgaggtgagatcaccccacataatttattctaaaatgtatttacttacatgtcttacatactgatatatgtcattatttttaataagtgttgtatattcagtcnacgcggccgcnaatt

SEQ ID NO: 35382 - DNA, 333 bp, Homo sapiens
aaagcactatgttctttttcttattgtacttataataaatgctaatgacttgtttgcttgtttactgtctttcaactggattgaaaagcagaaaaccatgaatattttaatcaccaaagaatcaccagctcctgttcagattactggtattaaaaaaggtgcccctaaaatattaatgtgtttgatagtttttcaagacaccctagaaacaaggtccactagcagctgaatcacaggacgtaagttcctacttacacaaacttagtttgttaaaacaatcaacatcatctaaaaagttttgttttttagtctattgatatggttaattacatt

SEQ ID NO: 35383 - DNA, 331 bp, Homo sapiens
ccataattgtttaaacttagttctacagttaaattaatttcatccttatcactaatcattttgccttgattttctccatttctcagccaattaatctcttaatgcctggattaaatacttttccccaaaggacttagtgtgaaatgttgtcggaactttttcatatttcaaaatgtttgtccttaagatgatgttttggttaggcataatatttttgggttacactttgctttggtaactttgtaaatagcatctcagaaccttgtaaataaccactattctattttcaaatgctctataacattttattgtggccaaaatatattttgag

SEQ ID NO: 35384 - DNA, 338 bp, Homo sapiens
gcttggcaagggcaacactgagtgcacgcgtgcctgtgtgcgaaggtgggtgaatggggttgagtaggagagaagactagattagctatcctcttccaaaaaaggatattatgactcagatcttcttgaagaaaaggcttatcccaagtttatcccagttttagtgagagctgaggactcaactgaaacaaatctcttttgtgtcctctctatattaacaaaactaaaaatcaacctaccctcaaggattcggccatactcctggctagggaaagtttacagcttattgtaaattactcttgggtcttgcttcttctgtggtgatcctcccatatcac

SEQ ID NO: 35385 - DNA, 330 bp, Homo sapiens
ctttgttgttactattagcttatccactcacgtagagagactatttttgctgcgtggagtctaccctcctgaaccattgtcacagcactcaaggaaggatgcttcggcgtgatggaaacaaaatgtgtgaattccaattctgccacctagttgcagaatgaccatgttagattagttgtttcatgtctaagatcctcattatcttcatttgaaaaataggaataataatagcttcttcttagacctgatgagattactaaaatagatcagcagttttcaaactttctggtttcagggtccctctgtactcttaaaaattattgagaaccg

SEQ ID NO: 35386 - DNA, 330 bp, Homo sapiens
caaaaacaaaacctgcaaaacttacctaataactaaactcacataagacacacaaaaaacctctctttggtaacagagaaaataagaattgaaatactaaactgttttgaaagtaaacagtagggcaatatttattaaaatctttaagatatagccaattccttcactattcaaaggaatatgttaaggccttacgtgatacattgtcactttagaaataaatacggagaatgaagtgtttaactgaaagaaaaaattgatgaaaatgcaaacttaatgaaataggaaacaaagcaattgatttaggacaattaaatctgatagctggtt

SEQ ID NO: 35387 - DNA, 330 bp, Homo sapiens
  misc_feature (1)...(330): n = a,t,c or g
aatcatatagccttatgaaatgtatttctagcacaggagaactagatacaggcagatatatttcttnnnnnnnnnnnnnnnnnnnnnnnnnnnnnnnnnnnnnnnnnnnnnnnnnnnnnnnnnnnnnnnnnnnnnnnnnnnnnnnnnnnnnnnnnnnnnnnnnnnnnnnnnnnnnnnnnnnnnnnnnnnnnnnnnnnnnnnnnnnnnnnnnnnnnnnnnnnnnnnnnnnnnnnnnttgattccaaccctcatgggtaactctgnnnnnnnnnnnnnnnnnnnnnnnnnnnnnnnnnnnnnnnnnnnnnnnnnnnnnnnnnnnnnnnnnnn

SEQ ID NO: 35388 - DNA, 331 bp, Homo sapiens
  misc_feature (1)...(331): n = a,t,c or g
nnnnnnnnnnnnnnnnnnnnnnnnnnnnnnnnnnnnnnnnnnnnnnnnnnnnnnnnnnnnnnnnnnnnnnnnnnnnnnnnnnnnnnnnnnnnnnnnnnnnnnnnnnnnnnnnnnnnnnnnnnnnnnnnnnnnnnnnnnnnnnnnnnnnnnnnnnnnnnnnnnnnnnnnnnnnnnnnnnnnnnnnnnnnnnnnnnnnnnnnnnnnnnnnnnnnnnnnnnnnnnnnnnnnngataacatgagaggcaagatgtgttgttgcacttttagtaggtattctttgtaactcttgtgctgatcctagatttttgctgcttctataaattccactaga

SEQ ID NO: 35389 - DNA, 146 bp, Homo sapiens
  misc_feature (1)...(146): n = a,t,c or g
tgtaagtgctggttctgggcaatggtgacggcacagccagaaataggagaagcaggaagaagtgcctctgggaggctgtggcgaaactccttcctcgcttcatttgtaaactttgttgntccttaatttttctttttttttttttt

SEQ ID NO: 35390 - DNA, 377 bp, Homo sapiens
  misc_feature (1)...(377): n = a,t,c or g
ggttaacctctgtttgctttggtgtgggtttataagaagttactaatgcactcttagaaatatgcattatctataaaatttagaacgaagtgcaactgagtttgaaggctttggcactggccaaacaaaaaggacctttgttaatttttaaggaggggtgttagagtttgctcattgctttggctcgggtgacttgtctgagaaaagatacttctcattttcaaagtgagctcataaagtcctgcccttcaagagctgaatgacctccagttttgtgtaatattaaaatgtatcttgaaacttcaggggtgacattttagatggcaagtacagttctctgcatagccccaaaacccatgtngncggngnnaaaccgg

SEQ ID NO: 35391 - DNA, 387 bp, Homo sapiens
  misc_feature (1)...(387): n = a,t,c or g
gtaggttccagtactaatgaagtgggctccagtattaatgaaataggttccagtgatgaaaacattcaagcagaactaggtagaaacagagggccaaaattgaatgctatgcttagattaggggttttgcaacctgaggtctataaacaaagtcttcctggaagtaattgtaagcatcctgaaataaaaaagcaagaatatgaagaagtagttcagactgttaatacagatttctctccatatctgatttcagataacttagaacagcctatgggaagtagtcatgcatctcaggtttgttctgagacacctgatgacctgttagatgatggtgaaataaaggaagatctagttttgctgaaaatgacattaagncggtctgtaccc

SEQ ID NO: 35392 - DNA, 377 bp, Homo sapiens
  misc_feature (1)...(377): n = a,t,c or g
tctcgatgaagcttttgtcatccaagaacagaatgttgcactaaatttcattggttcaagaggagcaaagcctggtgttactaaagagaaaagaattaaatatgcaaaggaagttttacaaaaagaaatgctccctcatgttggtgtcagtgatttttgtgagaccaaaaaagcctatttcttgggatacatggttcataggttacttctggcagctttgggtagaagagaactagatgacagagatcactatggaaacaagagattggatcttgctgggccgctgcttgcattcttatttagaggtatgtttaagaatttgcttaaagaagtgcggatctatgcacagaaatttattgtngncncantctcgttga

SEQ ID NO: 35393 - DNA, 392 bp, Homo sapiens
  misc_feature (1)...(392): n = a,t,c or g
gggaaaacaagaataaaggctgctctgcattttttagaaacttttttgaaagggagatgggaatgcctgcacccccaagtccagaccaacacaatggttaattgagatgaataataaaggaaagactgttctgggcttcccagaatagcttggtccttaaattgtggcacaaacaacctcctgtcagagccagcctcctgccaggaagaggggtaggagactagaggccgtgtgtgcagccttgccctgaaggctagggtgacaatttggaggctgtccaaacaccctggcctctaaagctggcctgtctatttgaaatgccggctctgatgctaatcggcgaccctcaggcaagttacttaaccttacatgccgnnggggtgngcattgtg

SEQ ID NO: 35394 - DNA, 358 bp, Homo sapiens
tgggctcctgtctgactttaccaataactaggtatgaattttttttcctgttttctgtgaactgaggagactggactattgtgcagattctagggtccctttcagatctgaagtttcatgattctgagcatgtgtgaattgaacctttgaagtaaagaaggaatcattttgtcaagtaaagacactgtcttttaaagttctgatttcccgttgacttcatctcctccccagactgctgcggtgagaatggtgacatgcttgtgtgtaatcttcagactttatagtttcagtctttggggtgaatggcaaggtccccactgtgcagtgccattgctttcggacattagcctgggaactg

SEQ ID NO: 35395 - DNA, 389 bp, Homo sapiens
  misc_feature (1)...(389): n = a,t,c or g
cttaccactatttatttcagtacaagaaaataaagggtatggttgactcagtctagaattctgaatggaaggctgatttgggaatcaatattgtccactatgtgcaaaatatgttaaaactctttgggtccatttccaaccataaattaactgatttttgcatcctcttcctctggaccatctcagcttcttttgggaaacccccatgggaagctgtgtgactttggggccctttcagcccctgtgcacatgcactctgatgacgtgcagcgataggtctagcagatctcgtcgatcatagcctacttgcagcctgctttctgaaagtgttttgcttggtcccacccgtgaaggttgtgaacttntcagcgncgnnngaggcttgggcg

SEQ ID NO: 35396 - DNA, 378 bp, Homo sapiens
  misc_feature (1)...(378): n = a,t,c or g
tttttttcctcaataatgtgcctcaggtagtctcagtagcaccccccaaaaaaagaacaaagggctcacaatactatgaatgcactgggactccccagctgaaacatcttgttcacttttaagaacttccccatccctggtcacctgagcagagagtagtgtaaatacctgtaaatataaacagctatttgcccacctacacaggccagggtgcccccacactcaacccttcctttttattacaccttccaccacacaatatactggcttattctcttatgcctacttaacccaaccctagctagaaagcaggttgttcagaattcctcagtggttctcatggctgtaggaaccaagaagncggngnggnnnnngggc

SEQ ID NO: 35397 - DNA, 381 bp, Homo sapiens
  misc_feature (1)...(381): n = a,t,c or g
nnnnnnnnnnnnnnnnnnnnnnnnnnnnnnnnnnnnnnnnnnnnnnnnnnnnnnnnnnnnnnnnnnnnnnnnnnnnnnnnnnnnnnnnnnnnnnnnnnnnnnnnnnnnnnnnnnnnnnnnnnnnnnnnnnnnnnnnnnnnnnnnnnnnnnnnnnnnnnnnnnnnnnnnnnnnnnnnnnnnnnnnnnnnnnnnnnnnnnnnnnnnnntacttgttcttatatagtttctggtaattactaaattttctttgctgaatgaattaaacctataactacataaatattttaaaattaaaagagaaataaaaggttacctaagacagaattagtcagatagtttccttagtaattctttgttgtggagggctgcgncggtgtgttc

SEQ ID NO: 35398 - DNA, 376 bp, Homo sapiens
  misc_feature (1)...(376): n = a,t,c or g
ctggaacaaacatggccgctctggcgcccgtcggctcccccgcctcccgcggtcctaggctggccgcgggcctccggctgctcccaatgctgggtttgctgcagttgctggccgagcctggcctgggccgcgtccatcacctggcactcaaggatgatgtgaggcataaagttcatctgaacacctttggcttcttcaaggatgggtacatggtggtgaatgtcagtagcctctcactgaatgagcctgaagacaaggatgtgactattggatttagcctagaccgtacaaagaatgatggcttttcttcttacctggatgaagatgtgaattactgtattttaaagaaacagtccnnnnggngngngnggngggg

SEQ ID NO: 35399 - DNA, 371 bp, Homo sapiens
  misc_feature (1)...(371): n = a,t,c or g
gcgctgaggcgggcgtggaccgcgcgggagttaagaagcaggtcccggatcgccgtataccgccgggttttctcccaacgtcaggcccgatggctcggcttccccagttagaaggggaagataaaagactttgattcatgaagaatctgctcactgagaagtgtatatcaagccacaatttccatcaaaaagtgattaagcagagaatggagaagaaggttgattccaggtattttaaggatggtgcagttaagaaaccttattctgcaaagacactgtccaacaagaagtcttctgcatcctttgggatccggagggagttacctagtaccagtcatctagtgcagtatcgtggcacgnngggggggggc

SEQ ID NO: 35400 - DNA, 389 bp, Homo sapiens
  misc_feature (1)...(389): n = a,t,c or g
gagttagaggattcaaaaccatttgtttttaaatttaatactactggagggtatctacatgtaaactatttctaaaaagacctgcaaatgaagactaggtaatttttaaagctgggcagtaaaaattgggaaggcaaacagaggcttgctgggtaaaacagactaaaaaaactcagaatgcaaattactagtattcacttagcagtcgtagaacaggcacagggattactcatcatgtcatctgtactacaccctcaaaatgaggtcgacgcggccgcgaattccnnnnnnnnnnnnnnnnnnnnnnnnnnnnnnnnnnnnnnnnnnnnnnnnnnnnnnnnnnnnnnnnnnnnnnnnnnnnnnnnnnnnncgncggggggggggggggg

SEQ ID NO: 35401 - DNA, 318 bp, Homo sapiens
  misc_feature (1)...(318): n = a,t,c or g
caaaacctgtccccggcagccagtgctctctgtatagggccataatggaattctgaagaaatcttggggagggaaggggagttggaacaaatgtctgttccctggaggccagtccagtgctcagacctttagactcattgtaagttgccactgccaacatgagaccaaagtgtgtgactagtcaatgaagtgcgacagcattaaagactgatgctaaacctcaaaaaaaaaaantcnnncnngncngaaantncnaantnttnaattngaaaatcnnnaaaacccccnnaggtnnntttaantnggccttgggncccc

SEQ ID NO: 35402 - DNA, 342 bp, Homo sapiens
  misc_feature (1)...(342): n = a,t,c or g
nnnnnnnnnnnnnnnnnnnnnnnnnnnnnnnnnnnnnnnnnnnnnnnnnnnnnnnnnnnnnnnnnnnnnnnnnnnnnnnnnnnnnnnnnnnnnnnnnnnnnnnnnnnnnnnnnnnnnnnnnnnnnnnnnnnnnnnnnnnnnnnnnnnnnnnnnnnnnnnnnnnnnnnnnnnnnnnnnnnnnnnnntgctttaccgtaataaaagtgttgccatatgagatgggcagttttcacatagtagaaggtatttcttttttcacgtttagagatccactgtcttccttgattttaaaaatgtaattagtgtgattatggaggttgtggtaggtggagaggctggact

SEQ ID NO: 35403 - DNA, 312 bp, Homo sapiens
  misc_feature (1)...(312): n = a,t,c or g
atttcccactattcctgtggggccctggggtctctactgtaggggtcatctcaacatattttacgtcaagcagcaggtaccatttaaacaggtcttggcaatatttttttcttctcagtgaatgaaaagatatgctgatgttctaacacccagtatctatgaatgtgatttctgtttctttctttctctttttttttttttgaaaaagggncccccnttngcnttnanncnaaangnccngnnnggggccnnggnttnnnannnccnnanccnanggggcnnaagnnanccncccntttaanccccccaagg

SEQ ID NO: 35404 - DNA, 310 bp, Homo sapiens
  misc_feature (1)...(310): n = a,t,c or g
catgaacccgtctctataaaaaaatttaaaaaaaatatgccaaagtgaaataaagaatcaggatgacagaaactctttcactgtnnnnnnnnnnnnnnnnnnnnnnnnnnnnnnnnnnnnnnnnnnnnnnnnnnnnnnnnnnnnnnnnnnnnnnnnnnnnnnnnnnnnnnnnnnnnnnnnnnnnnnnnnnnnnnnnnnnnnnnnnnnnnnnnnnnnnnnnnnnnnnnnnnnnnnnnnnnnnnnnnnnnnnnnnnnnnnnnnnnnnnnnnnnnnnnnnnnnnnnnnnnnnnnnnnnnncctntgctaaagt

SEQ ID NO: 35405 - DNA, 323 bp, Homo sapiens
gctttctagattggactccggaggtaacttcaacagatttaggtggttcctcagtttccattccatctcctgctcctcggattggggatgaagtaacggtgactttggtttctaaatttttagtagtcattttttcaccttaaccactgaaaatgcactccaagacttctgctgaacaacctctaagattcttattctccgtatttcagggggcttcacttgataggctcttcggatcggtatcaccaggttaacttctcacagacctcttccattcggaagccgacccgcccagtccctccgcatatccagcgtcgacgcgg

SEQ ID NO: 35406 - DNA, 321 bp, Homo sapiens
  misc_feature (1)...(321): n = a,t,c or g
agaagattcaacgagagtagtttcagaaccagtgccattggagccccttaggaccactggggagtgatggcctagggaagttgaaaggagtccctctcgtcgagtgagtcaaggctctgtgtgatggtagaaggaaaagagacaaggaaaagctgaagaagagagaatttgatggtggntnntgcnnnancatnangcttgngtttgnnntnnngnatangaacanngnntgnnangantgnnnacntattntancatgccnnntattggnttanatttttactttatnatnnnnngntnntnattannnactannaccat

SEQ ID NO: 35407 - DNA, 340 bp, Homo sapiens
caatttcagactgtttcagcagttttggcatgacataacatgaatctaatgtgataagaggtattttgaggtaaattagactagaattggcaattctatgatgcataaaggaaaaataggtatcaaatatgatttggagtgatgacgtcatttataagaacaggaagtataaaaatagaggcaggtttataaagaaatgatattgttcattttggataacatcttaaataataaagggaaagcaagcttaacctaattaattcatgtcataaataagggtcctagaattttttgtgactctcatttctgaagtccctactgtttctcatattcagatgca

SEQ ID NO: 35408 - DNA, 341 bp, Homo sapiens
ggtcaaagtacagaatagaatacattgatacaaagtacagaaaaatactttgatttttatccatttcttttactctgtgtaaagactttagaagtctaattcacaggcaaaccaatacagaattgactgcagttgaacagactagaagtatttgtgggaggagtgacatgaagcatgagttatctgattttttttgtagctgctatatattttaagccttcatttgcaattcatgtaacagttgtgtcataaattacacaataaagcagtcctgttcaaatttttttttaacgtggcttgtagaatttttaaaaaagtgatcttaggtttgttttttcatg

SEQ ID NO: 35409 - DNA, 198 bp, Homo sapiens
gttttattgtttttccccaacttcttttttttaacagctatctttgagacataactgtggatatctaacaaattctaatataaatcaacattttgatgctcctcgaacaacctaaaaacctcagaacattaattttaaacactgctgcatctaacattttcttcatgttctagttttatcctagtttttttttttttt

SEQ ID NO: 35410 - DNA, 341 bp, Homo sapiens
tgggcattggatatctttcaaataggtttctgttatagtgttgctgaattttttagggtttgactactatatggaaatatgtaattttacctttctaaagcagagcgatttgattaatatttattttacaaattaatatgaaataatgtataatgaaatatatgtgttggccctaacagtaatttttaagaatgatttatcaaaattatagaatattattaaggaatatgtatgtgtgtatgttgatgtatatttataaaatgttagaaatttactaagctttgcaaaattgccaagaatgtaattactacttagcaatatatcttagatacattattatg

SEQ ID NO: 35411 - DNA, 187 bp, Homo sapiens
tatgattccagtgcttagaaccgagcttggcctgtagcaagcactcagtatttactgggagggcacagggctgagaatgggtcttgagttatcagttctgctgcagctcactgcggaagttctgggtgactgcatgcaggtactgaatgctaggccccagccctctttggggagggatttagtgatt

SEQ ID NO: 35412 - DNA, 343 bp, Homo sapiens
gtgaagaaagacacatatataaataactagactggaataagcacttacactcaagtataaataatggtgatgcagtttaataaagagttattaataccaaaagagagattaaggaggattttcaattccaactggaactgagatttaaaagaagaatgcaatttagaaagatgccttgcaccaagaaatttgtaattaacaataactttggggagtgctgagtatttgctaaaaatacaaggtgagttcagatttggggcaaataaagctaataaggagaggccagttagtaaaggcctcttaaagacaggcaaagtctgacaatttttgcttagaaggtatt

SEQ ID NO: 35413 - DNA, 342 bp, Homo sapiens
gagcagcactgccggcgggggcgggtgccagggacttggaggtggaggggacgcggcggtactctggcgtcttccgacttcgactccttaccttaaaagatgctggagtcatatgtaactccaattttaatgagctatgtgaatcgctacatcaagaacttaaagccgtcggatctacagctttcactatggggtggagacgtggtactcagcaagctcgagttaaagttggatgtgctggaacaggaactgaaattaccattcacttttttaagtggacatattcatgaattgaggattcatgtaccatggacaaaactgggttcagaaccagtggtaatt

SEQ ID NO: 35414 - DNA, 118 bp, Homo sapiens
  misc_feature (1)...(118): n = a,t,c or g
gtctttttcactagttagttccaagggtcagtctcataattttgttcttatactttgatttcctttttctttttttttaaananagtgggggganntttntttntttttttttttttt

SEQ ID NO: 35415 - DNA, 332 bp, Homo sapiens
cttgagtttacatttcttatctcttgccaccattacattggtagctttatagtaccagatcaggggcaagtcttgggggaaaaaagcgagatgatttcccctgcgttttggtctagatgctagatgttaggctaggcaggaatatttcagactggaacactgaagtagtaggctacttggagatttggaaccaaagctacagctaatcagtactgagttttgtgtaactttgtgtggtatatggacttactaggagtggaagtggccacagtagatgaatgactgaagatttaatattttgggattctgatcatctttctgaagatagaaat

SEQ ID NO: 35416 - DNA, 336 bp, Homo sapiens
gtcaaactgtagaactaaaatttgacttcagtctagcgtttccttggtgtttttaggttgctttggtaagtttaggtttgctatatttctgattgcttagaattttgttttagccctttaaaatcagatcataaatatgaattcatacttctaaggaattttcttgctataagctggagtttaggtgatgtataggttcagttgagacatttttggaacaggcaaatccttagttaacataagatatttaacagttgaagatagtgtcatggatttttatcttttttagcaagtaatgctaagaaccactggcctgagctactactcttcagtata

SEQ ID NO: 35417 - DNA, 332 bp, Homo sapiens
gacatcctgtctgctcttgagaagcctgcagttcagttagaaatgagctgaggacaaacagctgggattacccccactgaggggtaggttccgacaagacacagtttctctaatacgtgttacagataagaaaaccgaaggtttgagagattaaatcaccaaggccacctaactttccgcaagtccacgctctgtcctcgccccttcaaaccggcacctcttctttgtttattgtataatttaaggtacatgacacgatgttttgttatacatatacacagtgaaatggctactacagtcagaagtaatacatccatctccttacatagctt

SEQ ID NO: 35418 - DNA, 336 bp, Homo sapiens
  misc_feature (1)...(336): n = a,t,c or g
cagaaactacatttcccatactccctttcagctaagtgtgacatgtaataatctctggtcaatgtgattgagcagatgtgccatatacaatgtccatgtcacatcttttaaaaaaaaggaaactgcttgccttccatttacttcctatctacatttccactggctagaaaatggtgacagtgagtacagactcattgtacacagagacggaagccacattttgaagataacagagctgacctactgacctgagccccttgatgacatcattgagtctagctgcccaacaactcaggctacccccctgtccatatgcaggaaagaccaanagttggc

SEQ ID NO: 35419 - DNA, 332 bp, Homo sapiens
caatagtggcattcaacaagcaccgacagatgattaatttagcagaatcaaaagccagccttgctgcaattctggaacattctctgttttccacggaacagaagttactggcagaacttgatgctattataggcaagaaggggacgaggatcatcatttggaatcttagaagctacaaaaatgcaacagagttcgattttgaaaaggataaatatgatatcagaattcccgaggatttagatgagataacagggaagaaggggtacaagaagcaggaaaggatggaccagattgcccctgagagtgactattccctgagggcttattgcagt

SEQ ID NO: 35420 - DNA, 338 bp, Homo sapiens
  misc_feature (1)...(338): n = a,t,c or g
ttcaaataaaaatattatccaccatttaactgcaagagtgtattttcaaaataatataaaaactagatgccctagtggctataaaagatgatagaagagtcattttaagaaaatttaaatgtgaacatttaaataaggtttatcnnnnnnnnnnnnnnnnnnnnnnnnnnnnnnnnnnnnnnnnnnnnnnnnnnnnnnnnnnnnnnnnnnnnnnnnnnnnnnnnnnnnnnnnnnnnnnnnnnnnnnnnnnnnnnnnnnnnnnnnnnnnnnnnnnnnnnnnnnnnnnnnnnnnnnnnnnnnnnnnnnnnnnnnnnnnnnnnnnnnnnnnnnnnnnnnnn

SEQ ID NO: 35421 - DNA, 333 bp, Homo sapiens
  misc_feature (1)...(333): n = a,t,c or g
tcggtnnnnnnnnnnnnnnnnnnnnnnnnnnnnnnnnnnnnnnnnnnnnnnnnnnnnnnnnnnnnnnnnnnnnnnnnnnnnnnnnnnnnnnnnnnnnnnnnnnnnnnnnnnnnnnnnnnnnnnnnnnnnnnnnnnnnnnnnnnnnnnnnnnnnnnnnnnnnnnnnnnnnnnnnnnnnnnnnnnnnnnnattcaatgttttgatacatatccatgttgcataatgatccaatcagagcagttagtgtatccatcacctcctgcatttctcacttgtgaaagaacattcaaaagcccctcttccagctattttgtaataatatattactcttaac

SEQ ID NO: 35422 - DNA, 338 bp, Homo sapiens
  misc_feature (1)...(338): n = a,t,c or g
cttctggatacatcagcaactcactctgctatgatcctgcaatacatctcatgttagaattagacacatctnnnnnnnnnnnnnnnnnnnnnnnnnnnnnnnnnnnnnnnnnnnnnnnnnnnnnnnnnnnnnnnnnnnnnnnnnnnnnnnnnnnnnnnnnnnnnnnnnnnnnnnnnnnnnnnnnnnnnnnnnnnnnnnnnnnnnnnnnnnnnnnnnnnnnnnnnnnnnnnnnnnnnnnnnnnnnnnnnnnnnnnnnnnnnnnnnnnnnnnnnnnnnnnnnnnnnnnnnnnnnnnnnnnnnnnnnnnnnnnnnnnnnnnnnnnnnnnnnnnnnnnnnnn

SEQ ID NO: 35423 - DNA, 338 bp, Homo sapiens
gggatgtccctgtgacttgctttgatcaacaaaatgtggcagaagtgatggtgtacaatttctgaaggctggcacagtgatatcttgtagcttctacctccaatcttttggaacagtttcctgaggctgcctaggatgaaagaaaacatggagaaaaaggctgagccattagccagagccaattgacagacttgggagtggaaccatcttggggttcacagctcagccagccctccaggtgaatgcagctcagacaaaaccagccaattcatagaagtgagaaaagataatagattgttattgttttaggccactaagtttttgtgtgttttattaca

SEQ ID NO: 35424 - DNA, 331 bp, Homo sapiens
taaaatatgccgttcagatttgtaaggtaaaaaataaagacatcatgttacagattaagacatcaggcactctgtcctgggtaattggtttgtaatttgactctaagtgggtaagtttatgataattatactgtttgtttttctctgcattatttagatgaaaagttagcttctactaagaaagtaaacggatttaaatatggttattttaatgtgtatttatttgaatcagtttgttcttaatattcttgcataaaagtcagaaccaaaaaaattgtcagtgatatgtgaatgaaatgacatttctattttttctgatgaagtgatagat

SEQ ID NO: 35425 - DNA, 337 bp, Homo sapiens
ctaaaagaagtaccttcaacttcttcataattgtagccaaagcggaaatggaatatttaataattcttacatctcactaatgtagtcttctgagataacaattaagcagagagattattttctatgttcaaactttaaacactttgtaaagataattgggatttcataacaaatgataataagtggttttgtgcattaattttcttgatacccaataacatgccaattaaaatccagacttcacattggcacctaatgaacacagcagaatgaccaaagttgagtgctagtcattgtcatagatgcagccatcagcaatatcatcatagatctctcc

SEQ ID NO: 35426 - DNA, 331 bp, Homo sapiens
ccctcttataagtagagtgccttcaagagtcatcataccattgtgtagttgaagccaattgtattgtccttgacatgttcattaatttaatggaatctctttctcttcatcagtacatagaattaatattgattctgaagatctttgcctggcttggttttcccccatgggtgtcctcagagctccagctgccatgtgcaaactcatgtgtgctgggtctgcctgtggtacttcagtcactcaacataatggcccctgcctagccattcaaacacatcttcccttgtgaaaaatggatccactcactagacatattcattccttggctttt

SEQ ID NO: 35427 - DNA, 337 bp, Homo sapiens
caaaatactgttttccaaacttagttggttcttccccaactctttaagtatggttatgatattcatttgtagtacagttagatccacttgttaccctttgcattctaactgggctcctcccatatcctgtagattttaattatttggacagggtagggggcactttgtggttcattccctggttctaagagtcagagatatacaagaagtttatctagtccatgtcaccccacaaccactaccccattccacttcttctttccatctcattctcaaactctgaataaccaaatctcactgcacctatttttgtaaacagttattttccataagtgag

SEQ ID NO: 35428 - DNA, 60 bp, Homo sapiens
cctgggggaaaaaaataaacctgacactgaacagtatagaactgccaaaaaaaaaaaaaa

SEQ ID NO: 35429 - DNA, 342 bp, Homo sapiens
gacgctcccaaacctgggaacaaatcaaatgaccatctatgacagaatagataacttgtggcatattcataaaatggaattcgaaatagtaatgaaagtgaataaactacagtcactcataggatgactctcacaaacacaatgttgagaaaatgaagcaaaacccagaagaatgcatgataaaaatatgacacccatagtgtcaagttcaaataagtttaggaatgcatacacatggagtaaaagcataatggtaagcaaggaaatgatcacagaagtcaagattatgcttacttatgcagaagagagatggttataattggaaaaggtatggggaaaagg

SEQ ID NO: 35430 - DNA, 341 bp, Homo sapiens
agatgctggtccaaacctattatagcagcttctagagcaagacatggcagaaagaggacttgactggttcataaaaggcatttaatacaccttttatttagtttgttgtgtgggtctcttgtttcttcagcaggactctaaatgtctcagtgacatatatccattcagtagaattaagacacttgctaaacgaatcattcaatcattcacattcaattttctcatgatgttaaaatcttaaatatttccagttctattttctcaataaattgcctaatttagtaaaattcatgtcatatagttaactctctggaattttaccaacaactaccaccagccct

SEQ ID NO: 35431 - DNA, 343 bp, Homo sapiens
aatacatcagtgataaattcattcaatggactgggcacagcagagaaattaacaagtttgaagacagcttaacagaaatgacccaaatcgaaacaaaggaaaaaaagtgggaataaagcagtgtctgagattctggaacaattttatactaacatgtcttattggagtatcagaaatagaggagaaaaagaatggagcagaataaatctttgaggagataatgtccaaaaatttccccaaattgataaaatatatcaacccacaaatccaagaagcttagtgaactccaagcaagataaatacagagaaaaccacatttaggcattagataatcaaaggtaga

SEQ ID NO: 35432 - DNA, 340 bp, Homo sapiens
atcctcatgaatcctcttttagctatggtaattaacgttttacagtaaggtcttaatactgtgaatgttcttgacttgataaactcagctctttgagttctacctccaatttgcatgtcctccagcaccttgcagcaagtcatccccctgcaggagctctcacctgatgcaatctctcctgaggcatccttgctttaaagttgaacaattctggataggcctcccaatgacatcctccctagttatttttgacaccatgcccctttcactcactcatcttttaacacctgtttactaagcatctgtttactggtgccgtaccaggcacaatggtataaca

SEQ ID NO: 35433 - DNA, 346 bp, Homo sapiens
catagatttaaatcctatatttgaatttgataattgatcatgagctgctcagagtagcgtgttacaactctgcgttataaggtaaaatgacttagagtgtagcagtagtccccaatgtcaaatagacagtggtaagtatagattgctcttctccttgcatcacaaatgttaattcaccctgcccccacacgcattaaaactcagcatatttcacaaattgagtgtttcatttctatttgagatagacttatggtaagtcagctttgctccccaaataagttagccatatagtacttctatatgcaaaatttgaatctcaattttactactaaagctggaagtaaaa

SEQ ID NO: 35434 - DNA, 347 bp, Homo sapiens
  misc_feature (1)...(347): n = a,t,c or g
ctccagtgcagggattggccggacgggctgcttcatcgccacgcgaattggctgtcaacagctgaaagcccgaggagaagtggacattctgggtattgtgtgccaactgcggctagacaggtgggtctgtgggtgtaaacaaggccaacaacgttaacggatggcatcagtgcctctgggccccagagttctgctaggcccatcaccatcaagcactcctgcaagaaaggaagaaaccctttctgcttagagctgtttattttacaactaacaaccaggaaaaaatatctatctggnnnnnnnnnnnnnnnnnnnnnnnnnnnnnnnnnnnnnnnnnnnnnnnnnnn

SEQ ID NO: 35435 - DNA, 340 bp, Homo sapiens
  misc_feature (1)...(340): n = a,t,c or g
ttcatgtaatcaatataaaaatattaatgtgatattttgcatttgtttttttacctaagtcttggaatctagtatctattttacacatacagaaaatcccaattcctactagctgtgtttcaagtgcttagtagctatgtgtggccagtgactgtcattgaatagcacaaatgtagagggagtaactgtacaaccagctgtcaaattgttgatacttgttgtgatccatttttccctcccgcaagagacaaaacctgggtagctataagtttcgcttttcaccaccaggtttcttgatatacagntggtaaattgcagaatgatattattataaactaaa

SEQ ID NO: 35436 - DNA, 347 bp, Homo sapiens
gagaaactcatgcttatgtacaccaggatacgtgttcagcaacacttgttagcagaattacttgtaatagtgaaaaaacctgctatgtaggatagataaaacatagaatagataaattatggaatgttcatacagtgcaatatttcacggcaatgaaagagcaactcaaccatatggatgagtctaataaacagaaggttgaagaaaggaataaagccacacagtaattaatacaccttgattacattaatgtaaagttccgaaatgggcacagctggtttctgggatgttacttgccgtgtattattttttacctgggtactagttacacaggtgttcacattgtg

SEQ ID NO: 35437 - DNA, 348 bp, Homo sapiens
  misc_feature (1)...(348): n = a,t,c or g
ctcagtatcacacacattgagtgtgtcatcctccccaatctactgacagcaggaggtggagagacaacaaagaaataggagcacctcccctactccgaacaactcatttgttccttggctatacatgggattatataattcaaattatacttaaatgcaatataaatatatttatgtatgttttttgaaagtctagaatagtctttggccacattatctcttatattgaanaaacntaattggtttatgtncgaaatcacttaaagcanatactcttcagtggcaaaggcaagaatgttttcnagacaatccactagtaattgcatagcacagtgacacagcctgtgt

SEQ ID NO: 35438 - DNA, 346 bp, Homo sapiens
cttacttacatgatcatttcgagagatgtaatgttgattgctgctgttttttatgtcagataccgaactcttccaacaccacgaacacttgccaagtatttcaatccttgctatgccactgctaggttaaaaccaacattcatcagcaaggtgaatacagcagtccagttaatcttggtggcagcttctttggcagctccagttttcaactatgctgacagcatttatcttcagatactatggtgttttacagctttcaccacagctgcatcagcttatagttactatcattatggccggaagactgttcaggtgataaaagactgatgaaagtcatccctcactg

SEQ ID NO: 35439 - DNA, 332 bp, Homo sapiens
  misc_feature (1)...(332): n = a,t,c or g
tgannnnnnnnnnnnnnnnnnnnnnnnnnnnnnnnnnnnnnnnnnnnnnnnnnnnnnnnnnnnnnnnnnnnnnnnnnnnnnnnnnnnnnnnnnnnnnnnnnnnnnnnnnnnnnnnnnnnnnnnnnnnnnngcagtgttggtctgcaagcttcaagagccagtgaccctgactgccaagtgatttgccgaaggtaattatggttttgcatttgatggtttccaggaactgctaatagtgngatnattcntgaagcagtgactgtnanaggaannnnngngnnntatggtngnnttactggtgantntnatgtcttagagagcttctatttctg

SEQ ID NO: 35440 - DNA, 389 bp, Homo sapiens
  misc_feature (1)...(389): n = a,t,c or g
gagaatatatgtatgtatatataatatcctcacagtaattctgccagggattttatgggggagggagttggtactccaaatggctaggtggtagagccagagttttatacttggtttatctagctctgaaggcaatgctccttgttctttgcactgaaacattgtgcagatacgagaagcctgtagtttacgtatttcattggccttttattattttaaaaaataaaacctgaaaaaaaaggtcgacgcggccgcgaattccnnnnnnnnnnnnnnnnnnnnnnnnnnnnnnnnnnnnnnnnnnnnnnnnnnnnnnnnnnnnnnnnnnnnnnnnnnnnnnnnnnnnnnnnnnnnnnnnnnnnnnnatgtactatactcctctaagtttc

SEQ ID NO: 35441 - DNA, 313 bp, Homo sapiens
  misc_feature (1)...(313): n = a,t,c or g
ctgatattatcagatcaggcccttctcactactccttccaatgtgaaatgctccttcctctagagctttatgtcatttctctgcatgaaataagtcctggtagctgctgattaaagaaataaacaagcctcaaacggaaggtnnnnnnnnnnnnnnnnnnnnnnnnnnnnnnnnnnnnnnnnnnnnnnnnnnnnnnnnnnnnnnnnnnnnnnnnnnnnnnnnnnnnnnnnnnnnnnnnnnnnnnnnnnnnnnnnnnnnnnnnnanggnnnnnntgtntgnnnnnnnnntnnntngctntngcanttttntgtt

SEQ ID NO: 35442 - DNA, 391 bp, Homo sapiens
gcggaagctgttcgggcacctggagcgcggggtgctgctgcacagcagccggcagggcgtgttcgtcaagcggctgtgccagggccgcgtgttctgcagcggcaacgccgtggtgtgcaaaggcaggcccaacaagctggagcgtgatgaggtggtccaggtcttcgacaccagccagttcttccgagagctgcagcagttctataacagccagggccggcttcctgacggcagggtggtgctgtgctttggggaagagtttccggatatggcccccttgcgctccaaactcattctcgtgcagattgagcagctgtatgtccggcaactggcagaagaggctgggaagagctgtggagccggctctgtgatgcaggcccccgaggagccg

SEQ ID NO: 35443 - DNA, 386 bp, Homo sapiens
tccttcctcattttaccaatttccaccttaaaatgtggctttaaatttaatactgggggtaaaatataccttgagcataacctccatcttggcaataaagacttttgaagtggaaaaagctaaagaaaacattaattttgatggtcaaaatccataacggggaaaatgcatatcacagtagggttgagtgcaaaatgaccataacagcaactgtaaccatgagacaacagcaggctgcagaggaaagaatcagttatcttgagtcagaagtccctggatcaagtcccagcaattccgcatactagctcagtaaccttggccaagtccaagtttacctcgttatctgtaagaggtactaaacaacaaaatatatgctttcaaggctg

SEQ ID NO: 35444 - DNA, 383 bp, Homo sapiens
cttactcctctggcctctgttaacctcttatcctcttctcctggcttcaagtatcacctattttctgctttttctaagatagtctgcctggatatctcatcataaatccaactttgcaagcacaaatgcttacagggtaagtccatttagatatcccacagatacctccagcctacccttccaaaaccatccaggctctcattccaacttcatttctaccagtgccacagtcattaatctgtcccatccaggtttaaagtcaccttttagtcctccctctttcatttttcattgcaagccccgtccattgacacttttttcttaacagttggcaccctttttcatatccatagatcccaccaccctaggccggactcactcta

SEQ ID NO: 35445 - DNA, 385 bp, Homo sapiens
cagaaacctaaatgagatcaatgcatttccaaaatggaaatgcactgtggccaccttctgtcctttcaacccctgcagtttgcctcccctctaggggaccacaaagggaagttgagtaccccttttgaagcattatgcaagagacttccaagcggcccaagcatctgccccactgtcagtctggggagggattaggtttactgctgcccagtctgctttaaactgctgtcaagtactgctttaaaggactgtcactcccacttcagacaggggtgccttccaagctatggctccctgccagctctgacagtgatgtcaccaggccacccttaccaaggcctggctccagtcaggagaccaaggtcataataacctttcagcagaa

SEQ ID NO: 35446 - DNA, 387 bp, Homo sapiens
  misc_feature (1)...(387): n = a,t,c or g
tttttttttnnatntttctntttattctgacaacattangacnttaaataaaatccaanaggtntngnattagcccttgttgggnctntggggatttaaataaggcaaaactgancccctngnaangnatnatnncaaanagntagtagcagntgntatgcaaagttntaaggcccgagtcaaanccngggcatntccacanatgtgnggtagggcacgggctcnanntnttgggtaanaaanaacaggaatganaacagntttattttgtaccgccaaggtctnactatgctcacacctgtaatcccagctttgaaaaaaggatntggccccaaaagggtcnggtanaaaaaagnggnaaaggngaaggacaggaattttttcttt

SEQ ID NO: 35447 - DNA, 383 bp, Homo sapiens
gttaaatagtcccagagcctcacctacaccactttttgatactctggcatttaagtaattattgaggagggcatcatttaaaagattaattagacataggggggtaggctactaaaatagcttgtgtttctagttagaaaataacatgtaacaggtgtttcaggtgttgtcatagcgttgtaattaatgttcttataaattttacctctttttttttaacatttttatggatgggatggtaaatgaaatttatgcaagtaagtaattttatccccaatacaacatgtgttttaggtaaatatatataaaattttatttaatcaagtccaagatataaaggaaaagtgacacaagttgttggaaaaattaaaaacaaaaattgg

SEQ ID NO: 35448 - DNA, 334 bp, Homo sapiens
  misc_feature (1)...(334): n = a,t,c or g
accgnnnnnnnnnnnnnnnnnnnnnnnnnnnnnnnnnnnnnnnnnnnnnnnnnnnnaacagaaaaacaaataggacaatgatttcccaccgactccaggccagggtctcgagttgccggagcctgtcccggcagctcagcctgtcctgcgaggcagcccccatcctggccaggacatcatcccagnnnnnnnnnnnnnnnnnnnnnnnnnnnnnnnnnnnnnnnnnnnnnnnnnnnnnnnnnnnnnnnnnnnnnnnnnnnnncacaggtaaaataccgtattatactcttatgggaccaccttcagatgtgcggtctgctggcgaccaaaacgt

SEQ ID NO: 35449 - DNA, 331 bp, Homo sapiens
gttttcttttggtacttagctggagtaggatgggttttgccagaagggtttcctttgttaagcttacccttttcccagccttttgactaggaggaacaggcttttcttggaatttttttttctctgtgacagttggtgatactgtattggggtcttctgaagcagcatcctgtcttggaaatatgggtggcaatacgaaaacccagggatctcattgccttattactcctcaaattatgaagtctttaggaaatctgctgctttctttccacttttcagatactttctatgcttgtttgttgtattatgttcagggttttttagttgttaa

SEQ ID NO: 35450 - DNA, 336 bp, Homo sapiens
  misc_feature (1)...(336): n = a,t,c or g
gtgcctatggtttcaactnnnnnnnnnnnnnnnnnnnnnnnnnnnnnnnnnnnnnnnnnnnnnntcatcctgggcagcatatagtgagaccctttctcttaaaaataaataaataaatgaaattatttaaaaaaatatgcatttgaagttaacttgatttgatgtgttacacattgatcgttttttcaattccataattttctcactgttacatatataacactgacagttacaaatggaacctcccaaagttggtctcagccttattttgatgcatctaaaaatagggttnnnnnnnnnnnnnnnnnnnnnnnnnnnnnnnnnnnnnnnnnnnnn

SEQ ID NO: 35451 - DNA, 333 bp, Homo sapiens
  misc_feature (1)...(333): n = a,t,c or g
atcnnnnnnnnnnnnnnnnnnnnnnnnnnnnnnnnnnnnnnnnnnnnnnnnnnnnnnnnnnnnnnnnnnnnnnnnnnnnnnnnnnnnnnnnnnnnnnnnnnnnnnnnnnnnnnnnnnnnnntttaaaaaaaattaataatgattagccaccttgccttcctcagaaatgagacttttccctccagaaaaatctctgtaaatgatacagccaggcctgaattttgaggccagggctacctcagattccattcctccctgttttctgcagctgtaaatgcctctgccatctcctgctccaggggctgccctgagacagaacatgaatacaagtcc

SEQ ID NO: 35452 - DNA, 332 bp, Homo sapiens
caaattttctttcaggtgtatagaaactcataattaggcattgaaactattctttattctgtggagatgaaaactgagaaatagtaagaaggatttattttccagcaactgtcttattagtaaagactaaatgtgacattgaaaatgggtttttgttgcatcatcataattattattgaaatatttccaaattaaccagatctactactcacattagagtttgctgagaaaaattactataagcatttattttatgtattataagtgtggataaagaaaaagaataataataaagcctgttattaaagaattccagagtatacgcattcaga

SEQ ID NO: 35453 - DNA, 335 bp, Homo sapiens
tcaaaacatacgttaatgatataaaaacctaaattaacacctgtgatggtcttttatatgctaactgtttaatgtttagggcaccaacgctaaacccatgtcaatggtatcctttataaatgaagatgacttacctttcatagtgctcaaaagtgtgaaaacagagatatgtctcaatactctttataaacttacaaaacagattctttcttcagtaagtgaccacataaatttttttctgccaagtactatcaaatgcctatcataaatgctgctacaatagcaattactaaaattacaagggaggaagatgagcccttggcttacgtagctta

SEQ ID NO: 35454 - DNA, 336 bp, Homo sapiens
atgattttctgccctaaacttagatttgtgaatatgataatatatcatgccctgattatgtatgacaaagatgaaactaaggctactgataaattgattttaaattaatcaaaagagagggatttttggggaaaaatttaattatactcttgaagaacacagggttttctctgtctggtaacagaagaggatgtctcagagattccaagcttaagaagtattccatgtggcatacttataagattgagggaggaaatatatgtgacaaggaatgtgggcatcccgtagaagctaacagccagcaacaggaaactcagtcgtaacctcaaggaactg

SEQ ID NO: 35455 - DNA, 337 bp, Homo sapiens
  misc_feature (1)...(337): n = a,t,c or g
ttttaaaggggtattgaggggaaaagacatttatggaattcattcaacaaatggctgttgaacaagtcactatgctaggttgtcaggtgctaaagatagaacacaaaaaggtatcttgtcactgccttttcatgacaaaaagcctctgagggcttattctatgggggataagagtcaatataatgttgcctgtgattaagtgttatgtaagaggcatgtacataagtatccattggttttaatgctattgggcagagtagaaacaggagtagtaacttggtttccttttattacattccttattgggnacttttggcgacagagtgagaaccttaaa

SEQ ID NO: 35456 - DNA, 326 bp, Homo sapiens
  misc_feature (1)...(326): n = a,t,c or g
aaaaatacattgcagaatgggcatttttttttgtctccctaggtttccttgttttcctttggggaattcagtccctcctccactctagtgtggtctgggagcagctgatctagccccagctccagggttgggggtgtcctatctggcccaagccagtcagcatgggcagcccctgatgccaaccctgtccctgggcttctcttgtacatgaaccaataatcccccccttctgcttaagtgagtttgggttggatttttttttttnatnacttgcaactgaaaanaanccanngatnccacacccattttatccaaagaaaaaacaa

SEQ ID NO: 35457 - DNA, 332 bp, Homo sapiens
tgatcattgaataaaaactagaaaaactgagtcagataaaatccagaacatctctgagaaacattttcagtgaaaaaattttataaataacatagaaactcactttttgaacatatacaataaatatttagataatgaatgctaagatagacactaaaataacttttgccactatttcctactgattgaacatgattcggttataaaatgataaattattatatttttagtgccttataatgcaaatgttgctgacatcaatttacaatgttaaagtaataaatagttacccgaattctaactcgggcagattctactcctgctggttgtcc

SEQ ID NO: 35458 - DNA, 331 bp, Homo sapiens
  misc_feature (1)...(331): n = a,t,c or g
aaaaatttaaaaattagccgggtgtggtgtgtgggtgcctgtggtcccagctacaccacgagtggaattgtgacgtgcacagcctgggtaaatggggttagctatattcacccttaagggggcacataccctattatttctaacaccactgaactcagaatcgggacccagattcgccggggcagcgcgggacggaggcctctcccgggctccgtcttccctggtcgacgcggccgcgaattccnnnnnnnnnnnnnnnnnnnnnnnnnnnnnnnnnnnnnnnnnnnnnnnnnnnnnnnnnnnnnnnnnnnnnnnnnnnnnnnnnnnnnnn

SEQ ID NO: 35459 - DNA, 328 bp, Homo sapiens
gtggactagagccagggtaaggggatctgctagaagttggtcttccgccaggactagagtttcctcgcggtatatgcctccgtggcctccggaggaccatgtcattagactttggcagtgtggcactaccagtgcaaaatgaagatgaagagtatgacgaagaggactatgaaagagagaaagagttgcagcagttactcacagaccttccccatgacatgctggatgacgacctctcctctccagagctccagtattcggactgcagcgaggatggcacagacggacaaccacatcatcctgagcaattggagatgagctggaatga

SEQ ID NO: 35460 - DNA, 338 bp, Homo sapiens
cagaaactgattgtggtctatttaaaaaaacaaaaacaaaaatggtatccggtgctcctagcattggcaggaagactagaaataaggtgttaagggagctgggtgccctgcatcacagtaaggccacatagcagggataggctggtgagaccaaccttccccatccctgaacttgctgccgctcaaataatatcaggaatatgttgttttcccacttttcttcattggtttcccctgtagtgtcttcattcttacatgcattgttcccatgtggtagtaaagacagcaagaatccatagtcttaccattttagcatcccagaaagaaagaaggcgctt

SEQ ID NO: 35461 - DNA, 337 bp, Homo sapiens
  misc_feature (1)...(337): n = a,t,c or g
cagttacatatgcacactcttctaactcataaaagactaaaaactaaagagtcctgacaaaattatcttcgaaaccctacactcaaccaacccagggcactccaggcacagtggggaaacttctagttcagccctttctgacaaccctggaaaaactgccctagcatcactgtttatccatactctgcacaatgagaatcctttccagggtcccnnnnnnnnnnnnnnnnnnnnnnnnnnnnnnnnnnnnnnnnnnnnnnnannnnnnnnnnnnnnnnnnnnnnnnnnnnnnnnnnnnnnnnnnnnnnnnnnnnntcgtaagcgtagaacactaatg

SEQ ID NO: 35462 - DNA, 226 bp, Homo sapiens
  misc_feature (1)...(226): n = a,t,c or g
ctgcattctaacaacagcctcctcactcctctctgcttctgcccttgcccccaggtctattctcaacagagtagccagagtgattctactcagcacaagccagccagatnnnnnnnnnnnnnnnnnnnnnnnnnnnnnnnnnnnnnnnnnnnnnnnnnnnnnnnnnnnnnnnnnnnnnnnnnnnnnnnnnnnnnnnnnnnnnnnnnnnnnnnnnnnnnnnnnnnnn

SEQ ID NO: 35463 - DNA, 327 bp, Homo sapiens
gttagcctcaccagagggaggcagtgtagattctcagtatggacctgcagggaaaaaaagatacaggcagaagtccacagaacactgcctgatgaacacagttctataagacccaataaagtcggcaaagcactgcttgataaacaccgttctgtaagacacaatataggactttaaatcgttgtaacatgaaggactaagaaaggcaaatgaagtaaaggaggaaaaacaaatacttgaaaatactgcatttcttttaaagaatcatgacaacattagacagaggtgaaattgcagcattagcccggttaccagtttgagcaggac

SEQ ID NO: 35464 - DNA, 325 bp, Homo sapiens
  misc_feature (1)...(325): n = a,t,c or g
gagaaaatgcaacattggtcaactaatcacacaaataaaaatatactgtcttaagtactgcaaaagaaattgcagtaggccataagagtatgtaacaaagagatttgatccagtctaagtaatcaaggaagtattccctgaaaaaaaaagggnnnttaaacttnaaatcannttnntgaaannntttcnagggnnatngngngggnnttnnggtnaaanctcnaaaatnttttnnaaagggnnnntcnatttaaanggnnttnaanggcantccnnnngggnnnntttttngggggganngnnccngggnagnnaaanttttttt

SEQ ID NO: 35465 - DNA, 327 bp, Homo sapiens
gttctgagtgtgaccacctgcccctccaggtacccccttcccttgtctgtctgtgcagtggccaaaacccaaatgagaatgtcgctgttaggtaaacatgcctccagagcccacttcggggccggtgattcattattaagcagctgcgcattccctcacctcccacccaccccctcaccccctcctgtctagaaccagggcataaatcccaggcctttaggatggtgacagtgtagtcttccctagtgccacttacaggcacctcccaggccagacccgccccagggggtcagtctctacgtgcccctggcttctgtggccgctggg

SEQ ID NO: 35466 - DNA, 160 bp, Homo sapiens
cagctataaaacttccaaagacatgacattaaaaagacttagagaaataacgccttgactcagaacttgcccgacctcccttcatgttgagaactttcataagcatttagatatacgatcctctaaaaatacaacaaacttaaaggaaaaaaaaaaaaaa

SEQ ID NO: 35467 - DNA, 332 bp, Homo sapiens
  misc_feature (1)...(332): n = a,t,c or g
ttctgcttttcttctcagtagtgattcttaaatttttacggagagatctttcattctttttttttttttcaatcngtngtngaaattcancaaancaaatnttttaaaanccaagtcagntttntaccgtttngatcngaanattnaaggctttataaaataaanccctgggtttaaattttanctagttnnattctttttttnatnaaaggattngcggnattaaacngncnttgggttncaatattaatatatancanganctacgngggggtcantnattttcagtagnaaanaacngntnanccgatnactttactttancanagttc

SEQ ID NO: 35468 - DNA, 337 bp, Homo sapiens
ttcagaaacaacagagtctattctttctgaaagcctggctgtaacagagagaatagactctgttgtttatattttaatttcttttttctcttcagtcttttgcagtctcacttctgcctccatcgttctactcaagtgctcttactaaggtaataacgtcctaattgctaactccagtagatagctcttagttttcatcctacccagcttctctagaatttggttttaactgtctcctatgctagaccctagaaatacataattaactaaagttcctgttcctaaagagctcttattcttgtatctcttgaacttcctattagttttcctttatctg

SEQ ID NO: 35469 - DNA, 324 bp, Homo sapiens
  misc_feature (1)...(324): n = a,t,c or g
nnnnnnnnnnnnnnnnnnnnnnnnnnnnnnnnnnnnnnnnnnnnnnnnnnnnnnnnnnnnnnnnnnnnnnnnnnnnnnnnnnnnnnnnnnnnnnnnnnnnnnnnaactcctgacctnaagcaatccactgcannnnnnnnnnnnnnnnnnnnnnnnnnnnnnnnnnnnnnnnnnnnnnnnttgccaaaagttacctttttaacncttgaatttnnggctcctcagnttccctatccatataggcccaaaaaggcagcntttgttttccagttaaaactntaccncattgggattnttntccnatacaattgttncaaaaaaaga

SEQ ID NO: 35470 - DNA, 331 bp, Homo sapiens
ccattttcagctttagtttccttgtgtatagaatggggctagaattaatgttgttagaaactaaatgagatgtctgtaaagtccttagcaaatataagcattcaataaatattagctattgtgagtgccataattatctttctgcagtctcctaaacaaagtgaatcatcaggtatttgatagataagagccaagtgatataataccagagaggatagaaagacatgcttattgcccactcactgtatccttttcctcggccagaagccctgagatgggtgtgaaggagcaggaaatagaaagagaaggaaatacatagaagatcaagtat

SEQ ID NO: 35471 - DNA, 380 bp, Homo sapiens
  misc_feature (1)...(380): n = a,t,c or g
acagcactgaatgttgtggaatgtaannnnnnnnnnnnnnnnnnnnnnnnnnnnnnnnnnnnnnnnnnnnnnnnnnnnnnnnnnnnnnnnnnnnnnnnnnnnnnnnnnnnnnnnnnnnnnnnnnnnnnnnnnnnnnnnnnnnnnnnnnnnnnnnnnnnnnnnnnnnnnnnnnnnnnnnnnnnnnnnnnnnnnnnnnnnnnnnnnnnnnnnnnnnnnnnnnnnnnnnnnnnnnnnnnnnnnnnnnnnnnnnnnnnnnnnnnnnctcaaattgctgacctcaagngatccacccgcctnatgcctnagccttacaaagggctgggattacaggcntgacccantgcncctgccggggaatgtntttaaagatataacncaag

SEQ ID NO: 35472 - DNA, 379 bp, Homo sapiens
gcctaatataccttcttaatgacctggaaggttgggttcaaatagaaaatactcaggctccttagagttctatgtcagtagttccggcagagcagaccttcagcatagtgctcttcccttcccagccacagcactatccatgtgttgagagcttgagcacgtgtgtggcctcctgcctgcacaatgtatgtgcaatacacgccagcaagcagctgcccctttgaccaccacctcaagtgcacctgctgggtacagacctacacttttccagatgcagggaattcccgggcacctgaggagcattttccccgaccccaataaccttctctcatgggcatgggcatgtctgggtgagggttagtggcagtgaccacagatg

SEQ ID NO: 35473 - DNA, 377 bp, Homo sapiens
  misc_feature (1)...(377): n = a,t,c or g
nnnnnnnnnnnnnnnnnnnnnnnnnnnnnnnnnnnnnnnnnnnnnnnnnnnnnnnnnnnnnnnnnnnnnnnnnnnnnnnnnnnnnnnnnnnnnnnnnnnnnnnnnnnnnnnnnnnnnnnnnnnnnnnnnnnnnnnnnnnnnnnnnnnnnnnnnnnnnnnnnnnnnnnnnnnnnnnnnnnnnnnnnnnnnnnnnnnnnnnnnnnnnnnnnnnnnnnnnnnnnnnnnnnnnnnnnnnnnnnnnnnnnnnnactttaggtttcttacctgaactgtttgtgttaaatcctagggcacctgcctctttaaaatcctataacttctctaaaatgtaataaaattctcctcagtgccttcctcagtgttggtgtggctcttca

SEQ ID NO: 35474 - DNA, 384 bp, Homo sapiens
  misc_feature (1)...(384): n = a,t,c or g
gttagaggttattatattctctactttgtagatgagggagctgaggttcagagagtcctggtcatttgcccaatatcataggactagcagatgtcaggctgtttttccttctggagtctcccttattgttgtccttagttgtcccaaactctggtttttattattaaatatttttagaagacctactggaacctaattttaaacagnnnnnnnnnnnnnnnnnnnnnnnnnnnnnnnnnnnnnnnnnnnnnnnnnnnnnnnnnnnnnnnnnnnnnnnnnnnnnnntcctggccaacatggtgagacccccatctctnnnnnnnnnnnnnnnnnnnnnnnnnnnnnnnnnnnnnnnnnnnnnnnnnnnnnnnnnnnnnnnnnnnn

SEQ ID NO: 35475 - DNA, 378 bp, Homo sapiens
  misc_feature (1)...(378): n = a,t,c or g
caaatgtagacagaaagaaagacaaggaaataaaacagctaaagcatttttgaaaaaagaagactaaggggagaggaatcagtctattcaatgtaaggactcatcatagcctaatcaagacactgattggttttagcaaaaggatagacacataagtcaatggaacaaaatgaagaacccagaaatagacccacacaaataagcataaatgatttttgagaaatgtgcaatcctttctcaatggagagagtatatggtcttttcaacaattagtgctggaccaatgggacatccataggcaaaaaaattgaatcttgatcttaacctcacacacaaataannactcacagnggatcatgaacttaaacttaaaatgca

SEQ ID NO: 35476 - DNA, 386 bp, Homo sapiens
  misc_feature (1)...(386): n = a,t,c or g
nnnnnnnnnnnnnnnnnnnnnnnnnnnnnnnnnnnnnnnnnnnnnnntcctcccttcttccagaaagccttgcctgatttccattcccattgttgtatacagccaacactcggtactatcttattctgtgaccaatttaattttacatgtcaaaatattcctccattgtcagtaacccaaaggaaaatgtatttcctttctttaaaaaaagaaatattctgaacctacaaaaagatggatagcataataggacaaacactgatatacctatgacccagtccaagaaataaaacactgcaaaacaggagaagccctgaggcacccattcccaatcacatcctccctcttcccatcacaggcaaccactacctggaaaccagagctca

SEQ ID NO: 35477 - DNA, 375 bp, Homo sapiens
ataattttaagggtctaaacctctcttaaagctacataaagtcattgtgagatgtattacttttcttcctatcatttgaaaatgctacatgagaagacccttgcacagttgagtttgactgacttggtagagatgactgtctgaagagagtgggagtacacacatacatcttggtcccatatttcatatattcatttacaacttaaacacaaactacttccccaagaggacaagagcttctaccttggcgccatataaatccgagttcttcattagaaactctgctgatgtccgcactgtgactccggtcgtctcacactgcagcacacagttttccagcgtagtcttaccacggtgaacaactgggatgaaaat

SEQ ID NO: 35478 - DNA, 383 bp, Homo sapiens
  misc_feature (1)...(383): n = a,t,c or g
gatnnnnnnnnnnnnnnnnnnnnnnnnnnnnnnnnnnnnnnnnnnnnnnnnnnnnnnnnnnnnnnnnnnnnnnnnnnnnnnnnnnnnnnnnnnnnnnnnnnnnnnnnnnnnnnnnnnnnnnnnnnnnnnnnnnnnnnnnnnnnnnnnnnnnnnnnnnnnnnnnnnnnnnnnnnnnnnnnnnnnnnnnnnnnnnnnnnnnnnnnnnnnnnnnnnnnnnnnnnnnnnnnnnnnnnnnnnnnnnnnnnnnnnnnnnnnnnnnnnnnnnnnnnnnnnaactcttgttagtatcaccaaccatgtaaggtattatagcatttcattttcttgagaaaatttctcctggaacattctaaccctttccaattttgcattggtgnacacca

SEQ ID NO: 35479 - DNA, 95 bp, Homo sapiens
ctgcagttttactttccatgatttcaattacccattaatatttccaaaatattaagtggaaattccagaaataaacaattctttttttttttttt

SEQ ID NO: 35480 - DNA, 376 bp, Homo sapiens
  misc_feature (1)...(376): n = a,t,c or g
tagacttatcccaagaacacatatttggcttaatgttagcatatctattgaggtaacttgaccaattaacagatttgggggaaagctatataatataatcatctaaacagatgcagaagagcacttaataaaataatgtccatttatattctaaaaaatagtcttagcaacctgtaatacagaatcttctttcacttgctaaaaaggccccagcaaatattgcaagggtgaaatatttgagattgagcatctatcatcacttttattcaacaatgtcccagctggtacattaaggtcagaaaaagacatcaaaatgtattanaanagaaacanaattgtaaaaccgttatttacnaataatataattgagtatgta

SEQ ID NO: 35481 - DNA, 380 bp, Homo sapiens
  misc_feature (1)...(380): n = a,t,c or g
caggcatgagccaccgcacctggcctgttgtatttataagcaccacctcttatatggcaagccctcttctgggtaccagggacagcgagatgcagaagatgaggccatgtcctcaaaaaggggagagacagatgcatattgattacagtggagtcagaggagttttagtgcaggcgtgcacagtaaccacaatggggccagcctggtgaggacagtcatggaatccctgtgaatgaactcttagaagggtcatggaggaggtgagctggggtgtagatgaaggaggtgagctggggtgtagatgaaggagtgtgagctggggtgtagatgaaggagtgtgttctgggtcgacgcggncgnnaattccatatctatgaatc

SEQ ID NO: 35482 - DNA, 381 bp, Homo sapiens
ctgatcttaatgaactcatgtataaaataataatcttctcatttccccaattactacaggatttaaaataaaatacccttaacctattaattttggttagcatagttctatactgcatttattctattttatgcacatagtttggaaatgtgaaaggtaactaacagttttaatctacaactgttttgagacttttgaaatccataaaatagctaatgttatgtgctctaaaaatcctaatatttaaaatcgtcataaccctctgcatgccacaatgacatatacctaaggccaacttaaaaagagaaataatgcactcattaaataacagcaacaatgtaatgatacatgaaatgggctatacaatgacgtttcatgaag

SEQ ID NO: 35483 - DNA, 340 bp, Homo sapiens
  misc_feature (1)...(340): n = a,t,c or g
gtaggcagtgagattgaaatgatgaagtggaatttgaattctccctcctgggaggattgccacttcccaaatgacaagactgacaagcagatgttgtataatttcacaggtggaatcttgtgcatttaaaactgatgcttcataagccttgctgtttacagactcttggaattcattgactctgtaatgatgaactctgggaaagaatgaaagagctttctcatcagttcgtgcattgcaaagtagttgctgcatttccctaattgggatgagaaattgcctgtggtactctgaaatcaagggttataatcaattacagaattgctcactttnctttaat

SEQ ID NO: 35484 - DNA, 252 bp, Homo sapiens
ctttgatattcttgatggtgtttgcaagctcctttgtaagcagctgcttcagctcacccttagagagggtgtcaaaatgccccttccgaactgagtattggtggaagatattgacaattccctccagatgctcttcaagttttgtcatcttcccagcctaatgttaacccctcaatgcacaggaatgtggagctacagcaaaaagccagcagtggtgaagggcactgagccaaggaaggttttatgtcgacg

SEQ ID NO: 35485 - DNA, 339 bp, Homo sapiens
  misc_feature (1)...(339): n = a,t,c or g
agaatactggcaaggttaagcctttcaaccgaaatgacgaacagtttctggaagcttttgtcatcttttgtggcttggggatccagaacacgcagatgtatgaagcagtggagagagccatggccaagcaaatggtcacattggaggttctgtcgtatcatgcttcagcagcagaggaagaaacaagagagctacagtcgttagcggctgctgtggtgccatctgcccagacccttaaaattactgactttagcttcgtgacttttgaacttgctgatctggaaaacagcactgtgtacaattcggatggttactgacctcaaccttngcanaaatttc

SEQ ID NO: 35486 - DNA, 334 bp, Homo sapiens
  misc_feature (1)...(334): n = a,t,c or g
cttnnnnnnnnnnnnnnnnnnnnnnnnnnnnnnnnnnnnnnnnnnnnnnnccatgcacgacnnnnnnnnnnnnnnnnnnnnnnnnnnnnnnnnnnnnnnnnnnnnnnngtatctttatagcagtgtgaaaacgaactaatacactcatctttacctctcagcaggtattgtaatatcctagttgtaggccaaactgagtttttttaaaacatgttaatcatagtgcctataaaagtgacactttagatatataagatttccttctttgtctacaaaacaaatgcagaatctgnttgnataactanacctcttaattttttttaaccagnaagtc

SEQ ID NO: 35487 - DNA, 338 bp, Homo sapiens
gtccttccttcctccccaaaagcttccttggtgcaatccagtacagaaaacgccaccactttctgatgccaggagaaaagcaaaataaaaaaactgcttgcacacattagcactgataaaacaatgacaatttcactaaaagaatgtttaaagactaccggatgctggagcaaaccaacttcatgactgcattaacataagctaagttacatacacttcaaatgcagtatagaattaacactgcatatctaaatggctcatatataaaatgtgtaattaaaacccaaacatacacactatgttattacattccctactttgaaggactgagacaatta

SEQ ID NO: 35488 - DNA, 342 bp, Homo sapiens
  misc_feature (1)...(342): n = a,t,c or g
caaggtactannnnnnnnnnnnnnnnnnnnnnnnnnnnnnnnnnnnnnnnnnnnnnnnnnnnnnnnnnnnnnnnnnnnnnnnnnnnnnnnnnnnnnnnnnnnnnnnnnnnnnnnnnnnnnnnnnnnnnnnnnnnnnnnnnnnnnnnnnnnnnnnnnnnnnnnnnnnnnnnnnnnnnnnnnnnnnnnnnnnnnnntgtttttttttttngaaacanagtnngtcncccaggntgnagngcagttttttatncatttaaccttccngnattttccccntaacccannngagggntaaaanncagncaacncgccgnaatttccaaatctatgaatcgaaaacct

SEQ ID NO: 35489 - DNA, 348 bp, Homo sapiens
  misc_feature (1)...(348): n = a,t,c or g
cgagcctctaaattaaaactttatatgaacttttcatatacagcattgttaggtggtctctctccccaatattattgtggatatatttggaaatgttagacatttgaaatagaatcactacttagctacataggtatagtttctggtaaaatcacataatataaacaacacccaagggctctgtttctccaaaccccagggatttgtttctctttctcacacccatttatcatgttctgnnnnnnnnnnnnnnnnnnnnnnnnnnnnnnnnnnnnnnnnnnnnnnnnnntgctgtgcttgtgttaaagtatactagtgaaagttcaccaacaacagcaagggtcatat

SEQ ID NO: 35490 - DNA, 349 bp, Homo sapiens
aaatttatcactactcaggatcagtttctatattttgagattcctgaaacacaacagtggcaggaattcagatttcaagctcatagacagagctgacttggtatgtcagcttcatgtggccatattttttccccctaccaagagtccttgaaggagacagactctcttatcacctatattggataaaaggtctactaggctctctcttactcaccattaagataaccttcttagagattcaattaccatctgtttgctgaaaactctccattcttttcctctacataactaaaatccaacatgaccttaattcaagtcattaacttcccatatatattttatataatcg

SEQ ID NO: 35491 - DNA, 355 bp, Homo sapiens
taaacttctgtcattaagcatccatgagcatgcccctatatggaacaaatatagactgtgggtggcaagttcttaagtccaaatttccacacacttgaactagctctcaccatatacatacctcccaagtaagatatgttggagatataagcaaaatacctcaatgctaatttaatcccaccccttccaggaaaactgccccatcttcatgttgacagtggattttacatgcagcaatgtgatcagacacttacttatgcattgtcagtcacaaacatgcaggcaacataaaagttattgaaaaaaattaaagtcagctctgctgtgttgtaggactgttggctctctaagtgct

SEQ ID NO: 35492 - DNA, 348 bp, Homo sapiens
ataagaacttacattttataatttaatttctgtgtatatcccatagagaaatgaatgcttggaaagcctcaacttcaaaatgtaaacttcctcttcatcaaagggaattctaagccattgaagaaagaatgaaccactaatatacataatatagatgaatctcaaaataactttgctgagtgaaaaatgccggaaaataaaagaacacattgtgtatgattttagtgatacaaaatttcagaaaaatgctaacaagactattacgacaaatcagatctgtagtttaatggagacagggataacagattgaccctacaaaacttttggaatagtcattattttgattat

SEQ ID NO: 35493 - DNA, 339 bp, Homo sapiens
  misc_feature (1)...(339): n = a,t,c or g
tgatgatgccatgggtgatgaggaagatgaagaggagagtgatgctgtggtgtcccaggttctggatgagctgggacttagcctaacagatgagctgtcgaacctcccctcaactgggggctcgcttagtgtggctgctggtgggaaaaaagcagaggccgcagcctcagccctagctgatgctgatgcagacctggaggaacggcttaagaacctgcggagggactgagtgcccctgccactccgagataaccagtggatgcccaggatcttttaccacaacccctctgtaataaaagagatttgacaaaaaaaaaaaaangtnnnccnggccngtat

SEQ ID NO: 35494 - DNA, 350 bp, Homo sapiens
gctgaggctgtcccctcaccctgctccacgggcagtgttgaggtgggcatctgggtgtgtctggggtatcccgaggaagggtccttttcgtcatgtcactctgttgggggcggggcacaggagcagggagccctttctctcccgagctcctcagactcccagcttccctgggtctcatctcagagctttgcctatgacctgggagccctgtgggtccaggggaggggactggacgcagccccatgacaatgctcagacctgggctaggaactggaagcctgtggttcctctgggctgtaggggttggggccccacagtgatggcagagccaggacctcatacacagcagc

SEQ ID NO: 35495 - DNA, 353 bp, Homo sapiens
gtaatgcaccatgacagaataggaaataggaaggcagggcaaggccacttatagaaatcctaacctttattcttaatagtcaaatatagagaaagctaaggagtagggaggagaaaaacaagatcaatcctggctctctcagcagccaaaagactgaaactcatttgaaatgtccaataaggagggtgagatgaacctagtaagacaacaggctcaacccccttctgggctgggaagtgcctctcacaagaggcagtgacatatttgttgcaaaggattggatgaccaacaaaatcctcttccaaaaacagcaataaaattcaaactccttctttcttgtactaatcaaaatg

SEQ ID NO: 35496 - DNA, 345 bp, Homo sapiens
ccagtattgtttagcttacttggcttaatcgccccgcggggaagggcgagagggatggggaagggaatgaaaaaaaggtctctagactttttgatcagattttaacagctgccccaaagtaatattataatcagtttattcgtattcaaactctatttttacattttattaagtggaaacgttaggtgagatgcttctgtttgttcactacaaatgaattaaaattgctgagctgtgcaaatgcatcgggactgaaagcggagatgaatatggtaccgtttttagtcaacatctctaaatacggttcactttgggattgttctttctacatttttttttaaaaaa

SEQ ID NO: 35497 - DNA, 298 bp, Homo sapiens
  misc_feature (1)...(298): n = a,t,c or g
nnnnnnnnnnnnnnnnnnnnnnnnnnnnnnnnnnnnnnnnnnnnnnnnnnnnnnnnnnnnnnnnnnnnnnnnnnnnnnntatctcaatcaatcaattaagcagatggcgtcacacacaccaagcccactccttacagaggaagactgcagtgctgcacacagcatcccgggccgtcacgcagcaccgagcatgaacagtgagctgtagctctgagaagccagggggccctttgacccctctgggctgcgttttctattgcacacaatgaaacctcacaatgcagaaaaaaaaaaaaaa

SEQ ID NO: 35498 - DNA, 354 bp, Homo sapiens
cgtagttcgagggtgcgccgtgtccttttgcgttggtaccagcggcgacatgacggggtacactccggatgagaaactgcggctgcagcagctgcgagagctgagaaggcgatggctgaaggaccaggagctgagccctcgggagccggtgctgcccccacagaagatggggcctatggagaaattctggaataaatttttggagaataaatccccttggaggaaaatggtccatggggtatacaaaaagagtatctttgttttcactcatgtacttgtacctgtctggattattcattattacatgaagtatcatgtttctgaaaaaccatatggcatagttgaaaagaagtc

SEQ ID NO: 35499 - DNA, 353 bp, Homo sapiens
attttttaaaagggaagggcatttaggtggtagatacagtttgagcacaggtataaaggtaaaaaatatgttttatgtcccagtcagtgagttatgtgacttagctagagtataggatataggaaaggaaatagaaattaacctgagaagataggttagagtcatttcctggaagactttccatatcagcataagaaacgaggtatgtactctttccttgctccccagttttgtttttgttttttgagcagtaaagtggtagtaacagaattgtactttaggaagattaatctggagacctagtatttgaatcggttccaacctatagaaaagtaaatcagagagaagtgatc

SEQ ID NO: 35500 - DNA, 347 bp, Homo sapiens
aatttgaatgaggggattggcacgatttgcctgtgtaacagcatacttgctgttaatactctttgttgtgtttagacctccctgcattccactgttttaatctacttaatgatggatttaatcaatttatgaagttccgtaagggagatgagaggagactttgagtgtctagggctggaagccttttgtttttggtgggccttaatgagtgaagagggcttgtcccagcatttgaggaggaggtgggactctaaggacttctcagggcctagaccttactgtaccacgtaactgaactgtaccttttagatttggttgtgattattattttttcattcaaaatgaga

SEQ ID NO: 35501 - DNA, 352 bp, Homo sapiens
tttttatgtgttgtcgtgcaggtagaggaatcaacaaaaaataggagaaaatgaagccagagctgattaaattcaggaaaaaaaatagaagaaaatcacgaaactttatcagtaataaagaacagattacaaggtgccctgaagagaatgggttcaaataaaaacttaataaagggtattgaataaaagaaggatagccaagagaatgaaaaggagataaaataaaaaggatcagagaagatagttgaaatggaagccagacaaaggaggttgcatatttgtattattggtgttcctgaagaaaagaaaaacaatataacagaatatttaaaactctaatccaagaaaaagt

SEQ ID NO: 35502 - DNA, 354 bp, Homo sapiens
cttttgaaaaactttatctacaatggaatccatagcacataccctcttgaacaggctccttttgctgccatgtttgtgagactcatgctccttgtgtgtaggtgtcactgtgtaattgtcatggctgtatggcgttctacccaatggctatccttgcattttttaacatccattctcttcctgatgggtatgtcggctgattccagtttggtgctatggtgagtatttggctgtaaagattcctggccatgctccctggtacacatgacggccatatccaggccctgatgtgggactggcaggttagaggactgtgtgtcttcttctccaacagttgatgccaagccattttcc

SEQ ID NO: 35503 - DNA, 336 bp, Homo sapiens
ggcaaggcgaggcgaaagctgcacagggccctacgcggccgcctcagcatgtcggacttcgacgagttcgagcggcagctcaacgagaataaacaagagcgggacaaggagaaccggcatcggaagcgcagccacagccgctctcggagccgggaccgcaaacgccggagccggagccgcgaccggcgcaaccgggaccagcggagcgcctcccgggacaggcgacgacgcagcaaacctttgaccagaggcgctaaagaggagcacggtggactgattcgttccccccgccacgagaagaagaagaaggtccgtaaatactgggacgtgccaccc

SEQ ID NO: 35504 - DNA, 333 bp, Homo sapiens
tggaactgagacttttgtctagaattgtatagaggtaaagagcatggatttacgtaggcttagtagaagaactaattttaaaataaatggtcacatcataaaacctaagtcaggttatcaataaatatttataagtgtctgtaacttgcaaggccatgtcaggtaatgttcagcagtccccaacttcaatctagaatggaggtggctaccaaaaagtatctttggattcctaggacccacagagattgactcagtgggtttgattgttaccctggattcatgggtaacactaaatggttacccatgggtaatctaaagcacagctagatttct

SEQ ID NO: 35505 - DNA, 332 bp, Homo sapiens
gtagatggtaaaggcaaaagtgtggacacagggagactagtgcggaggctgctatggaagtcctgagagaggatggtggcttgaccaataatggtagcagtggaggtggagagaaagggccagaatttgctgatagactggatgttggggtaacagagagagtagtggggttgagggaagagattggtcaaaggtgatgctttggtttttgccagagctcctggatagatgaggatgccttttgctaaggagagaaagactagaggaatgagtaggttgtggggaaggggtatttggaatccaaactcttcacttctaaaatttccctgaaa

SEQ ID NO: 35506 - DNA, 331 bp, Homo sapiens
  misc_feature (1)...(331): n = a,t,c or g
cctatgttgcgcaggctgaacttgaacacccaggcccaagcgatcctcccatctcagcctcccaagtaggatggtgtgccatcgtgcccatcttggcctcatctagttttgacaatcaagagtcagnnnnnnnnnnnnnnnnnnnnnnnnnnnnnnnnnnnnnnnnnnnnnnnnnnnnnnnnnnnnnnnnnnnnnnnnnnnnnnnnnnnnnnnnnnnnnnnnnnnnnnnnnnnnnnnnnnnnnnnnnnnnnnnnnnnnnnnnnnnnnnnnnnnnnnnnnnnnnnnnnnnnnnnnnnnnnnnnnnnnnnnnnnnnnnnnnnnnnnnnnnnnn

SEQ ID NO: 35507 - DNA, 327 bp, Homo sapiens
aaaagcataggatctccaatggaagagagagagaaattacttaagcagattaaagatgataatcaggaaatagccagcatggaaagacagttaacagatacaaaagaaaagataaatcagtttattgaagaaattagacaacttgacatggatttagaggaacatatggacacttttattgagacttttgaggaaacaaagaatcaggaactgaaacgaaaggcacagatagaagccaacattgttgcactcttggagcactgcagtcgaaatataaatcgtatagaacagatatcctctatcaccaatcaagagctaaagatgatg

SEQ ID NO: 35508 - DNA, 327 bp, Homo sapiens
  misc_feature (1)...(327): n = a,t,c or g
cccgccttccttttattaatatttttagtatactatctagatcccaccttcttaagtctgataggctctatctgttctttttcatattttaaaaaactcccaaattgtttctgacaaggcacgacatctcagaactacagccctatggggatggggattaagcaaaatgggtggagttaagaaactcaaaccccaagcttcctcctcactaggggtttggtggntgccatggnggttgagcgccggtaaggaggaaaagaacaaattatggctataaaaaattccataaaatgctgataagacacagaataatccacctagatagaa

SEQ ID NO: 35509 - DNA, 331 bp, Homo sapiens
tgaaactgatgggacatccatcatgggactggtttccatgttctgcagagatggcactgagatggcactttgatctgggctgatttgggcgtagctgttttccagagcagggacacttgggctgttgacagaacgtacggactggccaggatgggagtggacggatgaaactgggctactgtggtccgactgttggcaatcgtcgagcgtggtggcaatctgtggactttggtctgcacgggtgtagttctgtaggcttctacaggcctcttgagtctcggcacaatcctgaaaggtgtcgtcctgttcgctgctctcctgggtcaaagac

SEQ ID NO: 35510 - DNA, 329 bp, Homo sapiens
  misc_feature (1)...(329): n = a,t,c or g
gaaaaaatagatacatttgacttcattaaaattccatttctagggagggctggattacagcaggcactgggagaccgcacaactacctgccccctccctggcactaccatcccctggagggtctgccttcagttcaaaaaaaaaaaacngganctttttggnccnntttaaaaaaaaaanaaaatttaaaanntngnnnncttnaaaaanccntttnnnnaagggnaaanaacacccnnnaaanggaaaaaannttttngnaannnnnnnacttnncaagggggtaaannnccaaantttttaaannaaanntngnncanttnaccacc

SEQ ID NO: 35511 - DNA, 331 bp, Homo sapiens
  misc_feature (1)...(331): n = a,t,c or g
nnnnnnnnnnnnnnnnnnnnnnnnnnnnnnnnnnnnnnnnnnnnnnnnnnnnaaacttgtatatacatctcatttccagaacttagtcatatggttgcatctcagctgcaagtggtagactgggaagaggagtcttttctgcagccatgtgcctgtttcaaaatgtcttcttaaggaggacaggaaaacagctactgggtttggcagctagcattctctttgtcacagtgaaccttattagtatactcaatcctaggcttctgtaaggtatcatttattctgactctttgggagttaacacgaaggatcattgatatattaacttgtgcgt

SEQ ID NO: 35512 - DNA, 326 bp, Homo sapiens
  misc_feature (1)...(326): n = a,t,c or g
ggtgattcttacaacatttcaaactttttcnnnnnnnnnnnnnnnnnnnnnnnnnnnnnnnnnnnnnnnnnnnnnnnnnnnnnnnnnnnnnnnnnnnnnnnnnnnnnnnnnnnnnncaaagacagtgaactaaatcgataaatgttgtgtgtgctcctcctccacctgctccatcgaccagcattccccatctctcttcctctctttctcttctttnnnnnnnnnnnnnnnnnnnnnnnnnnnnnnnnnnnnnnnnnnnnnnnnnnnnnnnnnnnnnnnnnnnnnnnnnnnnnnnnnnnnnnnnnnnntacaggtctttactttta

SEQ ID NO: 35513 - DNA, 332 bp, Homo sapiens
gaggaggactccttctccaggccaaggggagcagcaagtgcaaggcccgagctgagtagatgaggctgggagccagaccagtctcaggctgaccagtgctctgtcttgagaggagctgctggtcagctttttgtcttgggattcagaacgaggagacatgaagactttttacttggcagtgggagctgaagctgaaaggtccaggggctgatgaggccacgtgtaagcgaaagtttgggataagcagaaaccgagtgcgctgagggagtgagattgtggctgtatccggcgcctggctgagcaggagagtgaaccccgtgggtgtgtgtttg

SEQ ID NO: 35514 - DNA, 313 bp, Homo sapiens
  misc_feature (1)...(313): n = a,t,c or g
aaaatttcttgtatatttttgtatttcactgtttctaaggccccatttttttcaacctgtaatgtctttgaactgggaagctccttactcttcatgatactgtagaagtataattggcagtgctgtttttccttagtggaatagaaaataatggtgcatcttatagtagatggcatcttagatttgatgattacagtattttgagttgcaatagtanctgacagtangctaannataatggaaaaacgagtannaattggnagggagtanncaaaggcatctaagtaaaataaatcatctttttttttttttt

SEQ ID NO: 35515 - DNA, 335 bp, Homo sapiens
gcacttccctgtctggacttcagcccgtattccgaggagtagagaggcagaagagatgtcagcaaagcaagtgatgaagcagagtggatgtccactgtcaccaagctggatggcaagctgcggcccacaaaacagccagtcaggttggctttcctggtttcagacatgctcataccattcccattttctcagcctcttctcactgcctccagagaggtgggtgcctgggttgagagacacagctgctacgtgatagatgttgagagacagaagccaacgaaggaggtcattcatcaacaaatatatttattggagaccgactttgtgcaaagcaa

SEQ ID NO: 35516 - DNA, 317 bp, Homo sapiens
  misc_feature (1)...(317): n = a,t,c or g
ctgagttcatccatgatggctctcacctctgcctctgccttctacttgagtaactcctacccatccagtcacctcttctaggaacctccttggatattcccatgaaatttcacacctgcaccaccaaccccagctgcccatgcttccatgtcccaggcacctctctggccttctccttcctatgtatcattttagtgtctgtctgtgtgtttttcttaactctttgaactcccaagggcaaggatcatatttatcttcaggtgtgtgtgtgtggtgtgngtgtgtgtgngcgnntgnctaacnnnacnnacnncact

SEQ ID NO: 35517 - DNA, 339 bp, Homo sapiens
  misc_feature (1)...(339): n = a,t,c or g
cttgaacgctaatgaagngcattttagcccatgtagaatgaaagaaacggaagggataagttcctctggaacaggctctataatcattattctttttttttcctaaaatcaaaatgatctaaacagccatgggtcaaagagtgaacattcaaatacttcagagcactagagacctaagcagcctggagttgtttcaaatctactttaactctgcttctgacaagtggcccctaatgtgtanagtaacgatatctcctaatgctgcaatttctgtgccaatgcttattttacatagctacaatgaaggagctaaatgnttccagtatgnattaaatattt

SEQ ID NO: 35518 - DNA, 344 bp, Homo sapiens
ctataacttgctatgggtaccctgcagcatgcgttaatgtgcactggtatctggaacctcggtttttcccatcaatgagcagaagtggcattttcctgaagtagtcaataatatctgacacagacagaaagtcctctttccctcggagtccagttcccaacaagtaaacttgactttccttctgataacggatctggatgttgtaaactttatctttgtacaacaccatgaggacatatggattggttgttgtttttttagagctgtctctgaccagaaatgtgccatcctggtttatctttctaagagcagcttctgcctctggtcgggtaatataagaaacg

SEQ ID NO: 35519 - DNA, 346 bp, Homo sapiens
  misc_feature (1)...(346): n = a,t,c or g
nnnnnnnnnnnnnnnnnnnnnnnnnnnnnnnnnnnnnnnnnnnnnnnnnnnnnnnnnnnnnnnnnnnnnnnnnnnnnnnnnnnnnnnnnnnnnnnnnnnnnnnnnnnnnnnnnnnnnnnnnnnnnnnngcccagcacccaagcagctctggtgccagcttctccttccctggtgttctgttagtgtccaggtggggcgccattccccttcatcctgccgccaccatcttgtttggatccatgctcctccttccatctccttcgtttctccgtagacgtttaaattattttttctttgatcgctaaaggtgaggtggtaaaagggaacattccttcctcctccctac

SEQ ID NO: 35520 - DNA, 346 bp, Homo sapiens
caagaataaaagtaggaaaaagttgaaaacatccaataacaacacaggatagtgctgtgatatttattctcaaagaaaggcactactggattggtttttttctttttttacagaatgctgatatggaaaataaaaataatttcatcattctgtgttccttcgacttacagcatatacatcaacttgatgtcaatttgaagtcggtttggccactatgataactcccattccaagacagatgtttcagcattttagaaaaactctggggtttggagctacagaattattccttgtgaaaaaaaatcatatcttagactccactaaatgatttataatgcttattttc

SEQ ID NO: 35521 - DNA, 347 bp, Homo sapiens
  misc_feature (1)...(347): n = a,t,c or g
tattaataagattttatatgtttgtgggagtgtatagcatatatgtaatatttaagttttgaatagatatttcaaaactcaagagccacaagggactataatataaaaatccaagggatacagaaacttataatgtaaacgttcaagaaatacaaagagctataatacattcaagagctacagagagttataatgtaagagcctttcttttcccacctcagactccctgctgtcaagttcctctctttagaagcagtggtagtaccaatttattggtgtatccttccaaaatactcccagtgctggaacatcttaggaaagcttaagcttttatttagtngaagccc

SEQ ID NO: 35522 - DNA, 369 bp, Homo sapiens
cgatagcaagaaggcttcagagaagctcctggggtccattgacattgaccacacccagtataaatttggtcacaccaaggtctttttcaaagctggtcttctggggctcctagaggagatgcgagatgagaagctggcccagctgattacccgaacccaggccatgtgcagagggttcttggcaagagtggagtaccagaaaatggtggaaagaagagagtccatcttctgcatccagtacaatgtccgtgccttcatgaatgtgaagcactggccctggatgaagctgtatttcaagatcaaacccctcctcaaaagtgcagagacagagaaggagatggccaacatgaaggaagaatttgagaaaac

SEQ ID NO: 35523 - DNA, 378 bp, Homo sapiens
cataatcctctttaatgaaaatatacacctcagccgaaatgtgagaagggcaacaacagcatacacttttgagcccttatgtgcaagacagtggcattgcaaggcatggatggaaggagtggtccactcagagtgcaggcaatagggagggccttgtcagtagggaatttaaaaatagtaataaaccgaccaagagtcagtttgctttttattatcaccctacaccggcaattccagacaattctaactcctgcctgctggggctgacagctcccatcacagccctcttctccttaatccaccgctagtgcccaacaacgtattaaatgctttacagagactctcttttaaccctcattttacagacaagaaaacaga

SEQ ID NO: 35524 - DNA, 371 bp, Homo sapiens
  misc_feature (1)...(371): n = a,t,c or g
tgccgttgctacaaaaggatgnnnnnnnnnnnnnnnnnnnnnnnnnnnnnnnnnnnnnnnnnnnnnnnnnnnnnnnnnnnnnnnnnnnnnnnnnnnnnnnnnnnnnnnnnnnnnnnnnnnnnnnnnnnnnnnnnnnnnnnnnnnnnnnnnnnnnnnnnnnnnnnnnnnnnnnnnnnnnnnnnntaaaaatccaagccctccaaacactcacaaaatggaaggctacttttatttagataatatttaaagttccactgtaacaaagagctgtgcactgtacccaataaaatgtagaacctcaatgctgaatgatttaaaaagtacagcctaaaatattagttcctacaaactgtcattttatagttctgtgg

SEQ ID NO: 35525 - DNA, 377 bp, Homo sapiens
  misc_feature (1)...(377): n = a,t,c or g
attttaaaatttcacttacagggctgcctcccacccccgtcatatttactggccagtaatgtttctttttctgtgagttgcagttagtcttttctttaaatgttagcaaagtagtacatgcatatagtttagagtcaaaaaaatcctataaagtttacaaaaagggagcccttatctcccttcagtagagacgcaaccttccttttttatttcctgaatattttcaatatgcagttggttgagtccatggatgcaaaacccattgatacggagggaaaactatatataaaacaatagcaatctgaacatcaaatgactaaaggataacattatagctgctgaagctgcanngttggcaggggcaatcataagactag

SEQ ID NO: 35526 - DNA, 357 bp, Homo sapiens
  misc_feature (1)...(357): n = a,t,c or g
cgcctggggcagagaagcatgcagcggtgctgggcacaggccaaggccaggagtccttctgggcacgagagatgggaatggacggtggggagcctgttcccctgaagggccctagacctcgagtctgaggaccagcaggaggccatggagtccccagagatagggaagggcagacagaggcaaacttgggccctggggcttctgctccacagggctgtccttgcgccaggcacacagtccaggaggcacaggtgagacccagggactcagtgctcgctgccctgagaagaatcctaaatctgaggtccccacctncatnccttccacaccggcaccacccaggctcattccccagcc

SEQ ID NO: 35527 - DNA, 356 bp, Homo sapiens
cagccacatactttccttccactggccagcattctcctctattagactagaactgtggataaacctcagaaaatggccacccagcagaaagcctctgacgagaggatctcccagtttgatcacaatttgctgccagagctgtctgctcttctgggcctagatgcagttcagttggcaaaggaactagaagaagaggagcagaaggagcgagcaaaaatgcagaaaggctacaactctcaaatgcgcagtgaagcaaaaaggttaaagacttttgtgacttatgagccgtacagctcatggataccacaggagatggcggccgctgggttttacttcactggggtaaaatctgggat

SEQ ID NO: 35528 - DNA, 366 bp, Homo sapiens
  misc_feature (1)...(366): n = a,t,c or g
tttctctaaactctacatatgtagtattaactctaccttcaaaatatgcccagaatctggtaacatcaagccacccgcagcacgtgcctctggcccaaaccatcattgtctttcacctgggttactgtgataatctgggccaccactcatgtctcccgtgatatacactcaattcagcagccagaaggccatcagggcaggtcactcttctgctcaggtcctttaaatagcctcccatttcagtgagacaaaagccaaagtctttgtgatgttctaccaaattctacctgatctcatcccatgctcactcactctcatcttctgccgntctcccctttgctcactcctctccagggatagaggcaa

SEQ ID NO: 35529 - DNA, 357 bp, Homo sapiens
ctatagtctggggtaaaacttcctttccttgtattaattcagctgagccttcactgcatgctctgagagggtgcatttttctcagcccacccgttttcagtgtttcctcattcacttgctccaagttcactttactttgagaagagcccttatcactgtgttgctagtacattgagccaaaactctagccactatttacttggaatgccattgaaatactttcttatttttgttttcccaaagccttctttctctttcttatctgaactttctatgtcatcactgtggagctgaggagattttgtttttgtttttgtttttgttttcgtcctctgctccttttgatggaaggagtaa

SEQ ID NO: 35530 - DNA, 359 bp, Homo sapiens
attttggatagtttagatttgaatgaagatgaacgggaagtactcattaataatattaataggcgcttgaccccacaggctgtcaaaattcgagcagatattgaagtggcttgttatggttatgaaggcattgatgctgtaaaagaagccctaagagcaggtttgaattgttctacagaaaacatgcccattaagattaatctaatagctcctcctcggtatgtaatgactacgacaaccctggagagaacagaaggcctttctgtcctcagtcaagctatggctgttatcaaagagaagattgaggaaaagaggggtgtgttcaatgttcaaatggagcccaaagtggtcacagatac

SEQ ID NO: 35531 - DNA, 358 bp, Homo sapiens
tgtgctggcatttgttgagaatcatgtgaaaattaagcttccaccccatcacactaacgttccagccctccacggttttctccctaggctaagatagagaggaagaacatgaaatgtgcagaaagcattctcttaagcaaacgtgtataacttgcataaattgtaattatttcctggaacaggatgcacctctaacctctacaggcaaatcatagattccattgtccagctgtataatgaaaacagagttctcagagaagaataccggagactcccccgacttgcctgaatcaaatttccagaggtaagtggtgaaaggccacaatatgaagtcactctcagatgggctcttctcttg

SEQ ID NO: 35532 - DNA, 361 bp, Homo sapiens
tggaaaatgggaaaaagatgagagtggaaaaaggaaggaggggtagcacgaatggcgggcaggtggacagaaaagtaaaattcagccatgttcaaaagggaacaaataaaagcaccgaaaggtaagacagacctagtatatttatgacttgaatcccaagctacgaaactggaacataatttagcagagagactccaaaagttttacagcaaaaagtattagaatcatttatatactgggaaaaaatagcctcctcattttaataatccagattgggaaatcagatctaaaacagatgttcaatggacatcccatttcttttgtaaaagcaacttgagtgtcgacgcggccgcgaattcca

SEQ ID NO: 35533 - DNA, 354 bp, Homo sapiens
ggctcagttgccttccgtctaagggtcaagctgtgcagctgggcgtaggtcacatcctgggaggcttcagatgcagcagcctcagtgtccatctgcctgtcctcttccacctgtctgtcctttgtgtccaggaattccccagacagtgaggagggaggagaggccatttctctcctaggactggagtgtttcaccggggcatacgtcactgcctgggggtcttcatcgtgtgggctctgactgtccagctccaccctgtcctcagactgtgtgtccttcacagcagcatagaggttttcttcctggacgtcagcagctgggctggacctcctcagcaggcccctgccttgggct

SEQ ID NO: 35534 - DNA, 251 bp, Homo sapiens
tagagttgtcccatagggcagctccgatatggagcctttaataaattctccccaactacctggagatagtcacacattgagggtgaaactaataaaaagtatcttaccacgaataaaatggacgatttgcaaaattaacacacccttggagagtttcaaaatctgttgcgtagatttgtgaaagattatagtttaattatagttactaaggtggatgaatgactttttttccctctctttttttttttttt

SEQ ID NO: 35535 - DNA, 343 bp, Homo sapiens
  misc_feature (1)...(343): n = a,t,c or g
tttcctcttttaagtaattactaagccaaaagtatgagactgaaaacttccctttcaaagannnnnnnnnnnnnnnnnnnnnnnnnnnnnnnnnnnnnnnnnnnnnnnnnnnnnnnnnnnnnnnnnnnnnnnnnnnnnnnnnnnnnnnnnnnnnnnnnnnnnnnnnnnnnnnnnnnnnnnnnnnnnnnnnnnnnnnnnnnnnnnnnnnnnnnnnnnnnnnnnnnnnnnnnnnnnnnnnnnnnnnnnnnnnnnnnnnnnnnnnnnnnnnnnnnnnnnnnnnnnnnnnnnnnnnnnnnnnnnnnnnnnnnnnnnnnnnnnnnnnnnnnnnnnnnnnnnnnnnnnn

SEQ ID NO: 35536 - DNA, 349 bp, Homo sapiens
ctttgtccatgctctgtcctcccctccccactgtaaatactcttcttttgggctagggggctgtgccctccagggtattgttttccttcctgttcagtgcccatgctcttgcctgtgtttctcctgtacctttcccaggacctagcagacagccgagcacctgcccactgctctgtaaatactgacctgcatctcaagtggggtagcctttgtgtactttcccatttccaagttgatttgcctgtgaatcccatatgtgaacacatatgcagatgtccctgatgtgctctttcctgcttggaggcacatgcaaggatgtggcactttttctaattgcttgaacagtcaa

SEQ ID NO: 35537 - DNA, 345 bp, Homo sapiens
tacagaagcagacacatgtaagaattcaccattagatgaattagaagaaggagaaattagaagtgatagtgaaacatctaaaccacaagaaagttttgaaaaaaattccaaacgtagagtgtcagctgatgtgcggaagtcaaagactatcccacgacgtgggaaaagtactgtgtgtttagataaagacagtaggaaaacacatgtaagaatccatcagaccaataacaaatggaataaaagacctgataaatctagtagatcttcaaaaacagagaagaaagataaagtgatgagcacttccagcttggaaaaaatagttccaattattgctgtaccctcttc

SEQ ID NO: 35538 - DNA, 352 bp, Homo sapiens
ttgaaaagtcctccctttcgaataatgagtgtggttctcttgacaaaaccagtccagaaatgtcaaacagtaataatgatgaaagaaaaaaagctttaatttcatcaaggaaaacatcaactgaatgtgcatctagtacagaaaattctttcgttgtcagcagtagttcagtttctaataccactgttgctggaactcccccataccctacaagtcggaggcaaacctttattactttggagaagtttgatggttcagaaaatagaccttttagtccatcccccttgaataatatttcatcaactgttacagtgaaaaataaccaggaaaccatgattaaaacagattttct

SEQ ID NO: 35539 - DNA, 352 bp, Homo sapiens
  misc_feature (1)...(352): n = a,t,c or g
gtgttggttgaatctatggatgcaaagggctgactaggatatgtaaacctagatcactttagaaataataactacaactactgtcagtggagtcttactctctgccagacatgttctaaagatattgaatgtattgagtcaactgatcctcaccacaaccctatgagggaggcactgttttattccctttctnnnnnnnnnnnnnnnnnnnnnnnnnnnnnnnnnnnnnnnnnnnnnnnnnnnnnnnnnntagtattacagccaggattcaagaacttgtgcacttgatcttaactactgtgtagtagttaattgctatctctcccagattttataatcaggttaactattt

SEQ ID NO: 35540 - DNA, 345 bp, Homo sapiens
  misc_feature (1)...(345): n = a,t,c or g
cgnnnnnnnnnnnnnnnnnnnnnnnnnnnnnnnnnnnnnnnnnnnnnnnncaagaattctttatgtattctgcaaacaagtcccttatcagacacaagatttacagattatcttccaccattccgtgaattgttatttaactttcatgatggtggcctttgaacaagtttttaatttttatgacgtccgatttcttttgttgcttgtgcctttggtgtcaatcctaagaaatcattgctaaattcaaagttgtgaaaatttgcccccttaattctgagttttgtcctttatatttagggctttgttccattttgagtaaacttatgtgtatggtgtgaatggagg

SEQ ID NO: 35541 - DNA, 236 bp, Homo sapiens
tgccatgcagcctctcttgtgctgtgcctgaggctagtcttcgatcctctctgtaaactgagggcttccattcactagtggctatagagcttggcagctccgttatgtgcccagctctttgcaagggcatactgggaaatgagtggagataaaggacccaatcataagcattttacagtatggataccccattttaaaaaggtaaactgaggcacaatgcaatttttttttttttt

SEQ ID NO: 35542 - DNA, 358 bp, Homo sapiens
tactctttcaagcagcaaaaagtggtttttttacttccaaaataagtatccttgaaactaccaatctacataattcagctttctaaaatctgcagacttaaaggatattggcatatttgccaaaatagccaaatctctgaattaataaaggtttcaatcgtttttacttttatccctagtcctagttcttgtccttatctttctttctacctctgctgttttctgtgtggatgaaagtatttttcttacaggcaatgttcctcccaccctactccaaaagctcttgggtctagagcagctcaccacagaaagagaggggtgggaacggaacttcaggaaaaagcctctaaatgcaaca

SEQ ID NO: 35543 - DNA, 358 bp, Homo sapiens
  misc_feature (1)...(358): n = a,t,c or g
cccagttaaaatggcttttatcaaaaagacaggcaattgagaatgctggtgaggatgcagagaaagggaaatgctcacagtgttggtgggaatgtaaattagcacagccactacagacactacagtnnnnnnnnnnnnnnnnnnnnnnnnnnnnnnnnnnnnnnnnnnnnnnnnnnnnnnnnnnnnnnnnnnnnnnnnatccaaaagaaaggaaatcagtacatggaagaggtnnnnnnnnnnnnnnnnnnnnnnnnnnnnnnnnnnnnnnnnnnnnnnnnnnnnnnnnnnnnnnnnnnnnnnnnnnnnnnnnnnnnnnnnnnnnnnnnnnnnnnnnnnnnnnnnnntattattcacc

SEQ ID NO: 35544 - DNA, 342 bp, Homo sapiens
gccatctcttctagtttcctctgagttgactggaaacaaaacttgccatctggactgacagattgtagaggaaaagtatttaatcccattttccattaaaaaaaagttaagcagaaaatattttatttacctagatgtttttttagtatcatctgcagaagtgatttctaagtagctggatgattatttttttggtgctgagtttggggagcagcgcacaaaattggcctcctctgcactgttagcagaaattgtgaatttggaatcattgtgggtttttattgtttaggtaggggagagtgtgattggagggggcagggattggagccatggtcgacccgt

SEQ ID NO: 35545 - DNA, 354 bp, Homo sapiens
gctgtacttgcttatacttgaaaatacacatacaaacattgtttttaactctttcctgatccctaatccaactcctatttctatagctaacaactgtggtgtacccttccagtctttttctctgtgcttacctgtgtgttaggttttctgggattggttgttatgtaagtgaaatcacatacactgcttttgtgtattgtattttttttgtgtgtgtatgaattgtgtctttgtgtatgtattatattgtatctcgccctttcatgtaaaatatcttaagaagtacatctatgtctatttcatgttttttcataagtatctaatattatagtgtaagggcacaccataatttaa

SEQ ID NO: 35546 - DNA, 355 bp, Homo sapiens
ctgttttgttattgttttttaatttcattaaatatttgtcaaagaatacagtttatatgttgttatttggtatttcctgaaacaatctttagtggcctagaatgtgctaaagttttgtacatactaatgttttcttaaaataaagtgaattattttttcaggtacaagatgatatgtaagtacaataaataaattcccttaagtgcttcgttgaaataatctatattctaatagttttatactttacctattatttctggtagaagcatgttaccaatctcaatatgattattaactttgcaagttctctttgtaattcggtccagtttttaaaaaatccttatgatgcaagaat

SEQ ID NO: 35547 - DNA, 344 bp, Homo sapiens
tctgtctgtggaattttggtaggttcatgttatataaaagttaagaaaccactgtcctatgaccttactaacaatgctttacctgagtctaaggtaaggaagaatcagagacagaagagctttaagatgtgatcctttagtttggttccaagtttctaagacagacctttactctaaattctttttacagagaacagaatcatactgtaaagttccttttaatatctttcccaaagccagggaaaatattattccccattaaaattttacatcaatatggggtattccttaagctcttcacgttctctattgaaactattcaataattaacactttaaaaatct

SEQ ID NO: 35548 - DNA, 363 bp, Homo sapiens
  misc_feature (1)...(363): n = a,t,c or g
caaggtactannnnnnnnnnnnnnnnnnnnnnnnnnnnnnnnnnnnnnnnnnnnnnnnnnnnnnnnnnnnnnnnnnnnnnnnnnnnnnnnnnnnnnnnnnnnnnnnnnnnnnnnnnnnnnnnnnnnnnnnnnnnnnnnnnnnnnnnnnnnnnnnnnnnnnnnnnnnnnnnnnnnnnnnnnnnnnnnnnnnnnnntgtttttttttttngaaacaaancnngncncccaggctgnagnncantttttnatncantaaaccttncnggnaattccccctnaanccanctganggntaaaaancantcaacncggccgnaanttccaaatntntnaancgnaaatcntgaaaancccgnnaggttc

SEQ ID NO: 35549 - DNA, 319 bp, Homo sapiens
  misc_feature (1)...(319): n = a,t,c or g
caaggtactannnnnnnnnnnnnnnnnnnnnnnnnnnnnnnnnnnnnnnnnnnnnnnnnnnnnnnnnnnnnnnnnnnnnnnnnnnnnnnnnnnnnnnnnnnnnnnnnnnnnnnnnnnnnnnnnnnnnnnnnnnnnnnnnnnnnnnnnnnnnnnnnnnnnnnnnnnnnnnnnnnnnnnnnnnnnnnnnnnnnnnntgtttttttttttngaaacaaantttgtcncccnggntggagggcagtttttnatncantnaaccntncngnattttccccntaacccannnganggttaaaanncagncaacncggccgnaaat

SEQ ID NO: 35550 - DNA, 328 bp, Homo sapiens
  misc_feature (1)...(328): n = a,t,c or g
gtttaccaagtgtacagtagcgttgggtctgagaaaacacagtatatatcttaattttaaaatacgttattactaggaaatgctaacaatctannnnnnnnnnnnnnnnnnnnnnnnnnnnnnnnnnnnnnnnnnnnnnnnnnnnnnnnnnnnnnnnnnnnnnnnnnnnnnnnnnnnnnnnnnnnnnnnnnnnnnnnnnnnnnnnnnnnnnnnnnnnnnnnnnnnnnnnnnnnnnnnnnnnnnnnnnnnnnnnnnnnnnnnnnnnnnnnnnnnnnnnnnnnnnnnnnnnnnnnnnnnnntcacccacagtaaaacatcttttttattt

SEQ ID NO: 35551 - DNA, 321 bp, Homo sapiens
tgaagctgcaggtcacccaaaggagtctcgaagagtctcaagggaaaatagcccaactggagggaaaacttgtttcaatagagaaagaaaagattgatgaaaaatctgaaacagaaaaactcttggaatacatcgaagaaattagttgtgcttcagatcaagtggaaaaatacaagctagatattgcccagttagaagaaaatttgaaagagaagaatgatgaaattttaagccttaagcagtctcttgaggagaatattgttatattatctaaacaagtagaagatctaaatgtgaaatgtcagctgcttgaaaaagaaa

SEQ ID NO: 35552 - DNA, 395 bp, Homo sapiens
  misc_feature (1)...(395): n = a,t,c or g
nnnnnnnnnnnnnnnnnnnnnnnnnnnnnnnnnnnnnnnnnnnnnnnnnnnnnnnnnnnnnnnnnnnnnnnnnnnnnnnnnnnnnnnnnnnttttttttaancaaaaangaaanngtntttagtataattnagttnantanttnatcaancanttantatgnnccaagggcccaagttntggnactgcaaaaaaaaaaaancaanggnttcntaaaaaaaaaaaancaanggnttcnttacttttaggacctgnctaaatanaagtantccaanaaaaaaaggtttttcaggnaaagggnccnctaaaanagtaaacaagggggcanggacntacncagngngngcaaggacnntaaaaacagttgggngttgctggattatcancaggangatg

SEQ ID NO: 35553 - DNA, 212 bp, Homo sapiens
ggtgtttgccccctcactggcctggaggaaggttctgatggcagaagagtctcttagattccctggagggcttttcccatgctgcctgaaacatcctttgatgctctcttcatgctgtctagcaacaaatgaatgacattccctcgcgaagcctgcttacttttcactccatctagcctttgatttgcctggaaactcaaaaaaaaaaaaaa

SEQ ID NO: 35554 - DNA, 307 bp, Homo sapiens
agaatattgaaattacagcatataaaaatccttagaaaaccttactttacaaagaaaactgagccaaaaaagccaactgggggggtgtgggcagaggggtggggcggacttagtcagaaggctactgacaaacatatctggttctgacctgggatctacgtctcttgggtctatgtctgaccctccatggtacatgctacagcaatacctaccctagcaaggcttgtggccttaacccaactgtgacggagcaaaggaacctgactttcaactcattttcttttttgaacaaaacagaattaaatct

SEQ ID NO: 35555 - DNA, 309 bp, Homo sapiens
gaatatttacctgcctctgaacatctgaagacataatccattgcaagccttaatgtgagtagaagggaagccatcatgcctagagtggttctgtttgttgccaactgatccatctgagacaataggaataatagtgcaggttgtggggccaagcttggggcccatcaaagcagcactgtgatttcatcaagaaattgaaaacattcagcaccagaaattgttaggcattcagttgtgactagctactttttagttgtccacgggaaggtcggctagtaataatttttgcagacaaatttctccttttca

SEQ ID NO: 35556 - DNA, 266 bp, Homo sapiens
ctggctaattttgtattttaatagagatttagtgctgccaatccccatgctgttgaaaatacatatttggtatgttatatatattatatattgtattctgagtacaagaaagtaagctagagaaaggaagattttgcagtagttaaagctgtagtttccttgtagttcgatgcttgaactactatcaatctagtgtaaggtgttcacccatccacggtaaaataaagtaaatttactccatttactcattttaaaaaaaaaaaaaa

SEQ ID NO: 35557 - DNA, 397 bp, Homo sapiens
  misc_feature (1)...(397): n = a,t,c or g
taatttcaaagcttcagctatatataatggatatatagacaacactgagcatccacctctctcctgagctttaaagcagagtttcagtatgatataggtggggagagtaaattgttttcatatcctttcatactactactaatagttttaggattttgactggggagagataatgacaaacagaaagggaacatggaggttcttcctacttttgctacctaagtttgcattttctgacttccttgcagtgttgcactctttgtcccattgggataaaaagcataagtttgaaattttgctttaagccctgtgttcctggggaagttaaacaactaagagagctgatttgtaaaaattattttttatatgacattaatattcatcaagccttgngtag

SEQ ID NO: 35558 - DNA, 303 bp, Homo sapiens
gagcatgcaggagttctacgaggacaacgtgctctacatggagatcagagccaggctgctgccggtgtatgagctcagtggagagcaccatgacgaagagtggtcagtgaagacttaccaggaagtagctcagaagtttgtggaaactcaccctgagtttattggaatcaaaatcatttattcggatcacagatccaaagatgtggctgtcatcgcagaatccatccgaatggccatggggctccgaatcaagttccccacggtggtggcagggtttgacctggtggggcatgaggacactgg

SEQ ID NO: 35559 - DNA, 301 bp, Homo sapiens
ttttcataaagattaatcacacatgagagaaaaaaattgggactactggatagagaagcttcataaatctctatatatttcttgtttatttcagagaatgactttttctgtgatatgtatttaatgtaaatttcaattaaaatacatgatatagacagtttagaaaatcatcctgaaattctcaacagaaaaaccaattatcatgtacttataaacataatcacaaacatctcttatgaatatatatagtaagttaggggcagccagcaaggcaagtaggtagaaagactgacaaaaagaa

SEQ ID NO: 35560 - DNA, 309 bp, Homo sapiens
aaagcaggtgacttcatgcaagtcagcattttcaactcctttccccatcctgctttcagaatacctgcagcctgactcacagcctcagacaggagattggaagatttttctctggataaacaatggcctggggaaaaaaatactttaggtaccttgcatgcatgctgtccttatctttagtgttaaggttggcttaactcccagttagctttttaatactttctatatgagtagacagtacaggatcacccgacatttatgaaaaaccctttataaatgagagggagagtccaaaacaatagggataaa

SEQ ID NO: 35561 - DNA, 305 bp, Homo sapiens
  misc_feature (1)...(305): n = a,t,c or g
ctcaggagctggggcatgggcacttggaacggggattgctctcccgcccccactattgtacggacgacaacgcggaggcctagcattctctcccagcctagaaactgatccctagtcagccttctaccatctgttgaatgggaagcttagaccgtgatcgggccgcgaattccnnnnnnnnnnnnnnnnnnnnnnnnnnnnnnnnnnnnnnnnnnnnnnnnnnnnnnnnnnnnnnnnnnnnnnnnnnnnnnnnnnnnnnnnnnnnnnnnnnnnnnnnnnnnnnnnnnnnnnnnnnnnnnnnnnnn

SEQ ID NO: 35562 - DNA, 308 bp, Homo sapiens
  misc_feature (1)...(308): n = a,t,c or g
nnnnnnnnnnnnnnnnnnnnnnnnnnnnnnnnnnnnnnnnnnnnnnnnnnnnaannnnnnnnnnnnnnnnnnnnnnnnnnnnnnnnnnnnnnnnnnnnnnnnnnnnnnnnnnnnnnnnnnnnnnnnnnnnnnnnnnnnnnnnnnnnnnnnnntacagacaccnnnnnnnnnnnnnnnnnnnnnnnnnnnnnnnnnnnnnnnnnnnnnnnnnnnnnnnnnnnnnnttgattggagaccattatctaaatgaagtaactcaggagtggaaaacaaaatgtatgttctcactcatacatgggagctaagcg

SEQ ID NO: 35563 - DNA, 298 bp, Homo sapiens
ttttcagtgattctgtattgagttctttggtagtattttttccccccagtgtttcaccaagtgtttttcttgtgttaagaaatgcactaattacaaacttttcctaggttatacaatatgaaatgtatttaatggaaaatcacagtaatttaatgagctaatagagtgctcataatagagaacacagtgctgggaggtgctgtttgcttagtaccctgctatgtgccaggtgtccttgcaagatacagtgacatttgtgatttcagtctttaataataggctgtaactccattttttt

SEQ ID NO: 35564 - DNA, 306 bp, Homo sapiens
  misc_feature (1)...(306): n = a,t,c or g
ctctgcacgagnnnnnnnnnnnnnnnnnnnnnnnnnnnnnnnnnnnnnnnnnnnnnnnnnnnnnnnnnnnnnnnnnnnnnnnnnnnnnnnnnnnnnnctattggctacattagtttatggttacagtatttacatataacctcaattacaaggaaaattaaatgattacggaggcaactgaactagagtatccagattcttttatactaggagtcactaagtatatagtatttattgctaaattagaaataaatgttatggcccatctgtagacaataaggcaaattcagaggagcaattaagagc

SEQ ID NO: 35565 - DNA, 307 bp, Homo sapiens
cttctcttaaatgtcacaaaagaatctcaaacttagtatgttcaaaacaaactcaagatttcttcccaaatctggttctctttcagcacttcttgaacaaaaccccaaatccttccagttgtacaagaagtcatgtttaacatctccttctcttttatcccagcattcagccattaccaacatccagtctattttgcctcctaacaactctcccagagttgttcattcctcttcatctacatgagtactattttaaggcagatgaagaattcatctaattcatactagtgagtatgaagtattcatg

SEQ ID NO: 35566 - DNA, 302 bp, Homo sapiens
  misc_feature (1)...(302): n = a,t,c or g
tgccactgccccttggcatatgcatttcagtcaccttttcatggggctgaaggtgacagtgggcagaatggggacagataatcttggcatgggtttttcttgggtggccatattttctcaggtacggacaggctgtgagaaggaaaaaagggtgctctgtgcattctaaaaaattgtaacaattgacaataatggatgtagcagtaatgctgctccgatttctcgtcgacgcggccgcgaattccnnnnnnnnnnnnnnnnnnnnnnnnnnnnnnnnnnnnnnnnnnnnnnnnnnnnnnnnn

SEQ ID NO: 35567 - DNA, 303 bp, Homo sapiens
  misc_feature (1)...(303): n = a,t,c or g
cagaactgtattttcaatttaaatgatattcctacccagtctacttgcttcttcatattttcctctgttggaaatgcagcctgtatnnnnnnnnnnnnnnnnnnnnnnnnnnnnnnnnnnnnnnnnnnnnnnnnnnnnnnnnnnnnnnnnnnnnnnnnnnnnnnnnnnnnnnnnnnnnnnnnnnnnnnnnnnnnnnnnnnnnnnnnnnnnnnngtcgacgcggccgcgaattccnnnnnnnnnnnnnnnnnnnnnnnnnnnnnnnnnnnnnnnnnnnnnnnnnnnnnnnnnnnnnnnnnnnnn

SEQ ID NO: 35568 - DNA, 297 bp, Homo sapiens
gggggaaattatatggtttggttttgcatagtgagacataactggaaaaaagtcaaagaagtatttggaaatgatgttccaagagaaaaaggaaaaggctagggcttgagacaagcttgggattagcaacaagggaaggtagctgaagatgagagacattttattagtataatttttttaaatgcgcctgtcattacagacagagctgggtaaaggaatttgcctggtatcaagtgtgagccagatggcagttgtacattttggtgaaaatgccttaagtgaatgtggattgcagtt

SEQ ID NO: 35569 - DNA, 306 bp, Homo sapiens
  misc_feature (1)...(306): n = a,t,c or g
gaaaggctggatatgagaattaaacatctaatcaaaacaaatcagttaagtcaagcaactgctctagcaaagctgtgttctgaccatccagagattggcataaaaggtagttttaagcaaacttaccttgtctgtctttgtacatcatcaccaaatggaaagttaatcgaagaggtgagtatgttttctttcattagtaattattttttaagttgagaaattaatttttaattanaatgtctttgatttccttttntntgtgatngctaananattntgngtttnttncatttttngttngggccc

SEQ ID NO: 35570 - DNA, 308 bp, Homo sapiens
gcggctttgtgcaggatggtacaaaacagaagagggaacggaaaaagacagtctcattcagcagcatgccaacagagaagaagatcagcagtgcaagtgattgtattaattcaatggttgagggttcagaactcaaaaaggttcgctccaactctagaatttatcataggtactttctactggatgctgacatgcagagcctaaggtgggagccatctaagaaggattctgagaaagccaagattgacattaaatccatcaaggaagtgagaacaggaaaaaacacagacatattccgcagcaatggg

SEQ ID NO: 35571 - DNA, 296 bp, Homo sapiens
  misc_feature (1)...(296): n = a,t,c or g
cgggtagacccaggacaggtggctggaaaccgggggtgaggagtgatgtctacagtggagacaagactgaaaaagcaagtactagggaagcctaagtccatctccctagagaagggttcagatggtctgaggaaaagggcacatgcagggaagctgtgtgaaatanagatggaggaggntancnttnantggnttnnccnananattttgatggtttccctntncgngtnttnctntattnntntttnttttttttcntnttnnactnncntttttattttntttttttttttttt

SEQ ID NO: 35572 - DNA, 305 bp, Homo sapiens
gccacattcaaacttcaaataatatttattacagttaatgaaaaaaaaatcaatgtttcttttagaaaagtaacgcaagcactaagctggtaataccaataaagtatttatagtaatattctatagattatttataaactctgccattacagaactaaaacaaaatgttctgaaacattcaagaatttgtaaacaactgacattagccctcaccatatcaccagattggatgctgttcaaatgagctgcgactagaattagtattcccaattccttagcaagccattattacaaaataggatttc

SEQ ID NO: 35573 - DNA, 304 bp, Homo sapiens
  misc_feature (1)...(304): n = a,t,c or g
nnnnnnnnnnnnnnnnnnnnnnnnnnnnnnnnnnnnnnnnnnnnnnnnnnnnnnnnnnnnnnnnnnnnnnnnnnnnnnncagtggtttcttgcatcttatcatcatttgagtttgtcttcccttgctctgnnnnnnnnnnnnnnnnnnnnnnnnnnnnnnnnnnnnnnnnnnnnnnnnnnnnnnnnnnnnnnnnnnnnnnnnnnnnnnnnnnnnnnnnnnnnnnnnnnnnnnnnnnnnnnnnnnnnnnnnnnnnnnnnnnnnnnnnnnnnnnnnnnnnnggaccaccatgtcttatgcacttca

SEQ ID NO: 35574 - DNA, 313 bp, Homo sapiens
  misc_feature (1)...(313): n = a,t,c or g
gagatattcagcagtggatcagatcaagcagaagaaagaattactaaacttaaagataggtcttttgaaataactcagtcagacatacatgaatgaatgaatgaatgaaaaaaataattaaaaaagaaagcctaaatggcatctaggataccatcaggggaacaaacattcaagtattgtgaatgtctgggccctctattttgttccactggttttttgtttgttctttcaccaataccacactgtcttgattagattatagtaagttgataatgtcattcctccaactttgntcttcagtattggattgacc

SEQ ID NO: 35575 - DNA, 304 bp, Homo sapiens
ccggtgtttgcgggtggttgttgctctcggggccgtgtggagtaggtctggacctggactcacggctgcttggagcgtccgccatgaggagaagtgaggtgctggcggaggagtccatagtatgtctgcagaaagccctaaatcaccttcgggaaatatgggagctaattgggattccagaggaccagcggttacaaagaactgaggtggtaaagaagcatatcaaggaactcctggatatgatgattgctgaagaggaaagcctgaaggaaagactcatcaaaagcatatccgtctgtcagaa

SEQ ID NO: 35576 - DNA, 312 bp, Homo sapiens
  misc_feature (1)...(312): n = a,t,c or g
cgaagtttagctgagaaaatatgtatgtatgtatttgtttatagtagaagaaataatcaaaaagctaacctgtgaatggagatattttagcaaataggactattattttggtggaggagtgaattttttctagatcaagaggtagagaaagttgggggaagttatcagagagaataaaaagaattaatgggagatacaataggataaatttgatcatcacagaatgaagacctcattatcattatctgtgaccttcttccataggacctaacacaatttcttcctcatagtaggnccttttttatgntaaaa

SEQ ID NO: 35577 - DNA, 298 bp, Homo sapiens
  misc_feature (1)...(298): n = a,t,c or g
agaaaatacatttttcttcttaaagttttttgttgttttttgagacaaggtctctgtcannnnnnnnnnnnnnnnnnnnnnnnnnnnnnnnnnnnnnnnnnnnnnnnnnnnnnnnnnnnnnnnnnnnnnnnnccattacgggtgtgcannnnnnnnnnnnnnnnnnnnnnnnnnnnnnnnnnnnnnnncttgntngtttttgtttttgaaacggagtctggctntgtcgntnaggctggttgcagtganctgaaatcggctactgnactccantctgggcaacanagtgaaactttgt

SEQ ID NO: 35578 - DNA, 312 bp, Homo sapiens
  misc_feature (1)...(312): n = a,t,c or g
cagggtttctttttggggtgaaaaatattttggnnnnnnnnnnnnnnnnnnnnnnnnnnnnnnnnnnnnnnnnnnnnnnnnnntgaattactcactttgaaatactggattttatgttaggttaattttatctcaactttttttaattacaaaaaagaggaatacattgaagtgtatttaaaaattatctgannnnnnnnnnnnnnnnnnnnnnnnnnnnnnnnnnnnnnnnnnnnnnnnnnnnnnnnnnnnnnnnnnnnnnnnnnnnnnnnnnnnnnnnnnnnnnnnnnnnnnnnnnnnnnnnnnnnnnnn

SEQ ID NO: 35579 - DNA, 312 bp, Homo sapiens
  misc_feature (1)...(312): n = a,t,c or g
nnnnnnnnnnnnnnnnnnnnnnnnnnnnnnnnnnnnnnnnnnnnnnnnnnnnnnnnnnnnnnnnnnnnnnnnnnnnnnnnnnnnnnnnnnnnnnnnnnnnnnnnnnnnnncatttcttaaaagctgttaaaatccatgtgactgtcttgggctcctttttttaaatggatgaattgtgttttgggtgaatttggttgtgacttttggagtaaaaggcaaaaatccannnnnnnnnnnnnnnnnnnnnnnnnnnnnnnnnnnnnnnnnnnnnnnnnnnnnnnnnnnnnnnnnnnnnnnnnnnnnnnnnnnnnn

SEQ ID NO: 35580 - DNA, 314 bp, Homo sapiens
  misc_feature (1)...(314): n = a,t,c or g
ggactctgccaggtggtgggggggtgggaggttgagtaagacctggcccgtgcccatgggcacttaggggagaactgagacaaatctgtagatnagtctaacgtgaggtanagatgacagggacccnggaaaggtactgtgantcatggggattnngagaangnanccagactgncctgtgaaatccccggggccctgcctctgcccttggggagtttacagtcctcaaggggaaagtggcatnaaccagtgaaatncnaangcagtctgtgatgtgtgtnccaagtntgncatanannnnnggantnnngaat

SEQ ID NO: 35581 - DNA, 301 bp, Homo sapiens
  misc_feature (1)...(301): n = a,t,c or g
nnnnnnnnnnnnnnnnnnnnnnnnnnnnnnnnnnnnnnnnnnnnnnnnnnnnnnnnnnnnnnnnnnnnnnnnnnnnnnnnnnnnnnnnnnnnnnnnnnnnnnnnnnnnnnnnnnnnnnnnnnnnnnnnnnnnnnnnnnnnnnntttactttctgactctgacctctagaaagaggcagggttgctctgctctgtgatattccttttctatacttcccatttaatcccatgatgccatagcaacatgcgaatcacatagctgtcaccgtgtggccacatttctgccactgnggctctccttc

SEQ ID NO: 35582 - DNA, 294 bp, Homo sapiens
tttttttgcattgtaccttttaattgcatgggtagttttaaataaatggagaaagcacctttcagaagctacactagcaggaaaaaattccatcaagcatttacatagtaaatttctataatttcacaaaagattcttgatcttacttgaagtatacatgagggaaagagccccctcagcaggtgttcccgttgcttacagaagcaaactaaaggacctaaaactggaggcaagccaggatgccaaaaagggggaagagaaatgataaagaaccattcataaattccatgtcta

SEQ ID NO: 35583 - DNA, 292 bp, Homo sapiens
tcattttctataactaatctcaaggtttttcttatatttggatttcagaaatttggctttgatgggctcacatgtgattttctttgtatttctcatgctaggggtttattaagcctcttggatctggaaattggtgagtttcatcaaatttggtaaattttcagcctttttttttcaaaatttttattggtttattttttctttgttttcttctgaaacttcagttacacatatgctagactacttattattatcctataggtttctgcaagtctgatatttatcttcagtc

SEQ ID NO: 35584 - DNA, 292 bp, Homo sapiens
cttttgcaattgtatgttgcaacaaggcaaatttccatttctgtaccaattttctcaagagtccagggatatgggaaaaattatgttttacacacatactgaaatctgaaatctaagtttgaactttgaggagcgtttttaagtgtactgccatcagctccctgttttggttggaattttcaacagtgcttcccatccagtgactaggaggctttggaagaacactaggagaaggtggatcactaaactttgccccagcataattttccttttggctcacttcagttagaaa

SEQ ID NO: 35585 - DNA, 297 bp, Homo sapiens
caattttctataaacacattgatattccatccaacccattaaaatgcaggaataatatagccgaatctaagcactaccattatttactgcagatctgcaaaaaatgtgctaacatatgttgatttcctgccattagaatggaaatcccacgccttcccaccagcagagaaccatcttaccctttaatttgtcatcacatttccattttaaagttttaccacaaaactaaattgctagcatctagttcaggacgtcgacgcggccgcgaattccagatctatgaatcgtagatactga

SEQ ID NO: 35586 - DNA, 296 bp, Homo sapiens
  misc_feature (1)...(296): n = a,t,c or g
tctgactcttttttgccttctcctactacttttaaggattcttctgattacgttgggttcacctgaataatctaggatcatctccctatttcaaggtcagctgattaggaatctgaattttcctttctgttgtaatatgacatgttcacaggtcctgaggtttagcnnnnnnnnnnnnnnnnnnnnnnnnnnnnnnnnnnnnnnnnnnnnnnnnnnnnnnnnnnnnnnnnnnnnnnnnnnnnnnnnnngttcccttatattcttttaaggatgaattgtgcacataaattgactat

SEQ ID NO: 35587 - DNA, 293 bp, Homo sapiens
  misc_feature (1)...(293): n = a,t,c or g
gtnnnnnnnnnnnnnnnnnnnnnnnnnnnnnnnnnnnnnnnnnnnnnnnnnnnnnnnnnnnnnnnnnnnnnnnnnnnnnnnnnnnnnnnnnnnnnnnnnnnnnnnnnnnnnnnnnnnnnnnnnnnnnnnnnnnnnnnnnnnnnnnnnnnnnnnnnnnnnnnnnnnnnnnnnnnnnnnnnnnnnnnnnnnnnnnnnnntaaaagttgacttttcagatgggttggaaaacaccctatgttattgaccaccttaatttcaaagtagtatgtttcccaggcccaataattcggttt

SEQ ID NO: 35588 - DNA, 296 bp, Homo sapiens
  misc_feature (1)...(296): n = a,t,c or g
gtcaattttcagacaaagcccattaagaccaaccattcattttggtccccttaggaattgcaatgttacttcaaaaacacgttaaattattgtatagccttacatctttataaagtgatctcccatacattatattttggttatcatcatttgcttcatccatgtgattcttcnnnnnnnnnnnnnnnnnnnnnnnnnnnnnnnnnnnnnnnnnnnnnnnnnnnnnnnnnnnnnnnnnnnnnnnnnnnnnnnnnnnnnnnnnnnnnnnnnnnnnnnnnnnnnnnnnnnnnntgtcc

SEQ ID NO: 35589 - DNA, 293 bp, Homo sapiens
  misc_feature (1)...(293): n = a,t,c or g
gnnnnnnnnnnnnnnnnnnnnnnnnnnnnnnnnnnnnnnnnnnnnnngtttgatcataccacaccataccctcagccacgagnnnnnnnnnnnnnnnnnnnnnnnnnnnnnnnnnnnnnnnnnnnnnnnnnnnnnnnnnnnnnnnnncctgggcaacatatgaagacacacccccatctccaaataaataaataatgaaattaaaaagccannnnnnnnnnnnnnnnnnnnnnnnnnnnnnnnnnnnnnnnnnnnnnnnnnnnnnnnnnnnnnnnnnnnnnnnnnnctgcaac

SEQ ID NO: 35590 - DNA, 293 bp, Homo sapiens
ccgatgtgtgcagtttactttgaaatgcatcaagaaaataaagtagaataagggatcgctagaaggatggacaaatggatagaaaggtgataaagcaagtagagtaaaatgttcatggggtaaactcaaagtgctatgtatatagctgcacacagtaaaattatttcagctttgttgtatgttttaaactttttatagtaaaatcttgggaaaacattgattgaaaaaagaggaatcgagatctaagaaaaaataatgacacaccagaatgggaaacggctgcagactgtcat

SEQ ID NO: 35591 - DNA, 297 bp, Homo sapiens
agattaggtaccttagccaaggtcacccaactaataagcgacagagcaaggctaggaacccaggcagtgctgcctaaacttctctattgcttcgaagagtcagagaaggaatcggagggatggatgcctataaatgtggaagtgactgaggtacagaaaataaaagagggtcagggtgttaggaggctctccctccacccctgattctcaagggaatcttcccacttgctttctgcatcctgaggttgctttggttagattctgctcccctgggatgctagcctgaggttggcatct

SEQ ID NO: 35592 - DNA, 212 bp, Homo sapiens
agttagcacaacttgatgggggaggggagagaaggtaaaagtcaagtgtgagctccaacaaatgggatcctgtagaccagggcttctcaaatgtcagcgtgcatacgaatcgcctgggtgtctggttaaaatgaaatgcaggttctggtccactaggtctggggtctagggtggggcccaagattctgcatttgtttgtttttttttttttt

SEQ ID NO: 35593 - DNA, 292 bp, Homo sapiens
tccacatttatatgcaagtggatggggtctcgtccaaaagctctttcagtaaaaaatatattaaacccaacaatttgcttttctatgaccattctctttgtacttgagaagcaacttttcattaaaaatatgtgcatataaaagtcactctgaagataaagaaggtgggaggaaacctcttgagtgttttgggttcagcagttttatttcctgatacactgcgtttttggccctctgtgggattttacacccatgagttattacctcacataagcacattgttcatgtgagt

SEQ ID NO: 35594 - DNA, 296 bp, Homo sapiens
  misc_feature (1)...(296): n = a,t,c or g
gttgaattacctaaactagggattggcaatttttttttctgtaaaaagtcagattgtaaatattttaggctttgtgagctatatacagcctctgttggaactattcaaccctgttgccatagtgttaaaaaaaaaaancagttnaaanataatattnaatcaaatnttcanggccgggtnccagnaaaangttatttataaaancnggtanctanccaaatcagnancattttttcataacncaangnaattaataaaatngctnccntntgancancntgtaatttnttgaacaa

SEQ ID NO: 35595 - DNA, 334 bp, Homo sapiens
  misc_feature (1)...(334): n = a,t,c or g
gtttttgttggtttgtctgttggattttggtgggggttttttggagaggggttctgtttggctggtttggtttggtttggtttagaagacacagaaacaaatgccaaacaataagggcttatgtttaaaaataacccatgttaactagaggaccaagaaccctggtcgcatattaaagaggaccagataattgtgtcaccattaggatcatttgaaggtcgacgcggccgcgaattccnnnnnnnnnnnnnnnnnnnnnnnnnnnnnnnnnnnnnnnnnnnnnnnnnnnnnnnnnnnnnnnnnnnnnnnnnnnnnnnnnnnnnnnnnnnnnnnn

SEQ ID NO: 35596 - DNA, 337 bp, Homo sapiens
ctccctcaacccacatgcaatcaatccatcagcaaagcctgttggcgatacttaaaatatatccagaatcaaagacaactactagcaccttagttcaaatcaccattccatctcatccagatcactgtcccagcctcttgtctccatgcttctgcccttggcccactacagggcactagcacagcaagcagtcaaccctttcatcacaatggaccaaactagcctctgggactggctatttcctatgcaggcaacactttgtaaccccaggtttccacaagacctgtctcctctccttttacgtctttgcacaaaagtaacttccctgaccatctca

SEQ ID NO: 35597 - DNA, 333 bp, Homo sapiens
  misc_feature (1)...(333): n = a,t,c or g
cgaaacagtccctaaccataagggacaattaatgatgctataaaattctatctaacattcctagtctacttgttgttttggagggcaggctgccattcctgcctattttaatctttcgaaggtggtctctgctcccatttaaaggtataagcaattaagagatacagaaccctcagaactaccttctataacttacctaatttctaagcttaaaatgtaatctaggctgggcannnnnnnnnnnnnnnnnnnnnnnnnnnnnnnnnnnnnnnnnnnnnnnnnnnnnnnnnnnnnnnnnnnnnnnnnnnnnnnnnnnnnnnnnnnnnnnnnnnn

SEQ ID NO: 35598 - DNA, 333 bp, Homo sapiens
  misc_feature (1)...(333): n = a,t,c or g
tgtcattgagggagtagaggctttacaattacatctgacttcagaaccaaaaaagtcacagctcttatcttctatatcaatacattctgtatttatacagctgatatctttgacagtcaactgaggtgggtcagtcactaactgaaggggaatatcatctgaaattacttcataatcactatcaccgggcaccagatccacaagtaccacctttggaaggtgggtttcttgtcgacgcggccgcgaattccnnnnnnnnnnnnnnnnnnnnnnnnnnnnnnnnnnnnnnnnnnnnnnnnnnnnnnnnnnnnnnnnnnnnnnnnnnnnnnnnnn

SEQ ID NO: 35599 - DNA, 341 bp, Homo sapiens
agagaacccaccatggtgctgtctcctgccgacaagaccaacgtcaaggccgcctggggtaaggtcggcgcgcacgctggcgagtatggtgcggaggccctggagaggatgttcctgtccttccccaccaccaagacctacttcccgcacttcgacctgagccacggctctgcccaggttaagggccacggcaagaaggtggccgacgcgctgaccaacgccgtggcgcacgtggacgacatgcccaacgcgctgtccgccctgagcgacctgcacgcgcacaagcttcgggtggacccggtcaacttcaagctcctaagccactgcctgctggtgaccct

SEQ ID NO: 35600 - DNA, 340 bp, Homo sapiens
gcagaatgtaaaattggtaactaaaaaatggcacaaacaccttaagcaatatattttcctagtagatatatatatacacatacatatatacacatatacaaatgtatatttttgcaaaattgttttcaatctagaacttttctattaactaccatgtcttaaaatcaagtctataatcctagcattagtttaatattttgaatatgtaaagacctgtgttaatgctttgttaatgcttttcccactctcatttgttaatgctttcccactctcaggggaaggatttgcattttgagctttatctctaaatgtgacatgcaaagattattcctggtaaagg

SEQ ID NO: 35601 - DNA, 334 bp, Homo sapiens
ccagaagtcaagagaagaatggatctcaaaagataagaatgtcaggtgagtgcccttccctggaaaagaaaaaagataagaatgatcagttgtgtcaaatactaatgtgagagttcgaaagagataaaaacacactggatttgacagcagtcttactggagccattggccaaaaggccagcgagaatgagggtgataaaatggagagactacagacatttagtttaagaaatttggcctcaaagggagcagagaaacggggaagtttttggagggcgatgtgaggtcaactgagggtttcaaagagatgtaagagtacttctgtgtgttggtgg

SEQ ID NO: 35602 - DNA, 339 bp, Homo sapiens
cttgtctgaattcctaaggcttatgggagaggaaagcttataaataaatcatttgtaatgtgatggaatctatctaataatggaagtgtgttaaggccacaatgagagaataaagaagtgattaattcattttgctgaggtcaagggaaacttatcggaggaggtaatgtctgaactgcgtttggagggagaataggactacttaggtaagttcgggaggggaagacgtcttaggctggataacatataaaggagtagaatcatgagacagaatagcacatgagggtattgtaaataaccctgtattaaaatataaatccaaggggtaagtggtgagtg

SEQ ID NO: 35603 - DNA, 328 bp, Homo sapiens
  misc_feature (1)...(328): n = a,t,c or g
caggcataaatgctctttctctcttttgtttttacttcttccaatttagtgatttgtgaagtgaatgagggagaggccctctttttcctattataaccactgatttttcccctacggtgacttcattttgggttgaattttctgaggaagaagaatgcctttttagcgtaggttggacttgccctggtggtgtgggacagganagagctggggttgggagtatggactctgcagacttcattcccctcctgactttgcccgtcgntagctgtgtaacctcgagccaattacttaccttctcagtgcttctctttcctcatttgtaaag

SEQ ID NO: 35604 - DNA, 338 bp, Homo sapiens
ctcagttgtgctttcaagacaattttgcattagaatctctaagatatttctcagtacttacttagactatgatggatcctgaagtgaatgtagccagagctgataataatgagttggctttgtgaagcacctactctgactgctctggtcagttctttacatgctttaataacaactccttaaggtgatactggtatcttcattttacagataaagaaattgaggcacagagagattaatttgactaagatgatacaactagtaaattggggaattgggaaatgaattcaatctaccactcagaccattaatctattgctctcctagattaatgatga

SEQ ID NO: 35605 - DNA, 348 bp, Homo sapiens
  misc_feature (1)...(348): n = a,t,c or g
gtgagatacaggtggatgtggtaatgatgacctgaggcaggagatttttgtctaacctcaaggtagggtagtagctcagtggctaaaagatatgcttggnnnnnnnnnnnnnnnnnnnnnnnnnnnnnnnnnnnnnnnnnnnnnnnnnnnnnnnnnnnnnnnnnnnnnnnnnnnnnnnnnnnnnnnnnnnnnnnnnnnnnnnnnnnnnnnnnnnnnnnnnnnnnnnnnnnnnnnnnnnnactgcaggcacttgccaccgtgtctggctgattttaaaatattttttgtagagacaaggttnnnnnnnnnnnnnnnnnnnnnnnnnnnnnnnnnnnnnnnnnnnnnnnn

SEQ ID NO: 35606 - DNA, 345 bp, Homo sapiens
  misc_feature (1)...(345): n = a,t,c or g
ctgttcatttactgctatgttgtcatttttgtggacaataagatgccatataaaacatttctaggaatccataatgcaggaatatcatcccagctatatatggagtttcaagaaaagcataatagttgctgattttttcttccccctcaagagattccataaaacaaagaggaaacaaatattacacaacttacatatgagtaagtgcgcttggggcagtagggtggtgaatgtcgacgcggccgcgaattccnnnnnnnnnnnnnnnnnnnnnnnnnnnnnnnnnnnnnnnnnnnnnnnnnnnnnnnnnnnnnnnnnnnnnnnnnnnnnnnnnnnnnnnnnnnn

SEQ ID NO: 35607 - DNA, 344 bp, Homo sapiens
  misc_feature (1)...(344): n = a,t,c or g
ccagtcctggtgtttagtgctctgcaaacaaccaacagcaggggaatgaagcaaacgaaagatgtcttaacagcaaggaagcaatgtttcagcaccagaaaggccaaaagagggttacaatagccacagatcaaaaaggaaggttgggaaacttcagagttcagttattagcttttttgttgttactaaatacattctaccactcacttccagctttaaaagcagagttttttcagtcttaacacagctgtaaattatattaattaaagcaaataaatggctctatatcaaagatgtacgtaagaattgccgaagaacttttncaaaatgcatatgtctactgc

SEQ ID NO: 35608 - DNA, 341 bp, Homo sapiens
  misc_feature (1)...(341): n = a,t,c or g
cttgtgtttagtttgtttagtgttcacaaaactttatgctataagctacttaaagaactagcatatgttaggaatacagttatatctattatctagacagtagcttttaaaaagtaggaggtgggccaacnnnnnnnnnnnnnnnnnnnnnnnnnnnnnnnnnnnnnnnnnnnnnnnnnnnnnnnnnnnnnnnnnnnnnnnnnnnnnnnnnaactcaannnnnnnnnnnnnnnnnnnnnnnnnnnnnnnnnnnnnnnnnnnnnnnnnnnnnnnnnnnnnnnnnnnnnnnnnnnnnnnnnnnnnnnnnnnnnnnnnnnnnnnnnnnnnnnnnnntgggaggg

SEQ ID NO: 35609 - DNA, 342 bp, Homo sapiens
  misc_feature (1)...(342): n = a,t,c or g
caaaatgtatgagataaatataaaatacggcctttatgttaaaaatatgttcactcannnnnnnnnnnnnnnnnnnnnnnnnnnnnnnnnnnnnnnnnnnnnnnnnnnnnnnnnnnnnnnnnnnnnnnnnnnnnnnnnnnnnnnnnnnnnnnnnnnnnnnnnnnnnnnnnnnnnnttttttttttaaaaaaaccagatgttcatttaaatatttattaaagtcttactatgcaggaccctaataatttttagnnnnnnnnnnnnnnnnnnnnnnnnnnnnnnnnnnnnnnnnnnnnnnnnnnnnnnnnnnnnnnnnnnnnnnnnnnnnnnnaatagtcatgg

SEQ ID NO: 35610 - DNA, 341 bp, Homo sapiens
ctcccaatggccaaaactggaactaactcaggtactgttggattataactcagtacatagttatccatgagtctatactgatataaacaactgaatgaataaataaataaatgggagatgggagacagaagacaatgcttctttacagaagaatttcaaatgtttaatgtagatattccctggtgaagacgattccgcctccaacgccttcttgaatgtgggctacacataatgacttgcttccaaaaagtagagtatgggaaggggaaaacgaagcgactttacagtggagaagcctgttggatgctgccatggccagtaattgttcacatcctcagtgg

SEQ ID NO: 35611 - DNA, 329 bp, Homo sapiens
  misc_feature (1)...(329): n = a,t,c or g
ataaaccaaagatgaagatgtgacccccccaaggcccttgtcgtcaaggaatttattgcctgttcagtgagatgaatgaatgaatatcactattaattttaccaagcacttaaaaaaacattttctgcacccatgaaagttatgcaaaatagtttggatgataaaatgatgacgaagataaatattctagcacccaagttaagggtgtaaagacagtatcgcactggcctcttctaccttattaggcgacactggagacatctacgtctacagtcacttgagaaattttttacctacgggttgaatttgaantttctgggtgttcgctt

SEQ ID NO: 35612 - DNA, 339 bp, Homo sapiens
  misc_feature (1)...(339): n = a,t,c or g
aatttgttcactgtatgcacatcacgtaataagtgggattggggaaataagaggtacctctcagacaggcatgtggagagctatgctgtagcttctctgacatgactttcttcttgtatttccctccaaagagcagtgatgggagacaatctgttatgtagactgatgcaccacgtagaaactgcttagtttttaaatttaaatttagcactagtgagagctgtcagaatcctttgacccacatctattctttatgtcgacgcggccgcgaattccnnnnnnnnnnnnnnnnnnnnnnnnnnnnnnnnnnnnnnnnnnnnnnnnnnnnnnnnnnnnnnn

SEQ ID NO: 35613 - DNA, 377 bp, Homo sapiens
  misc_feature (1)...(377): n = a,t,c or g
atttacagtcatttctgaactcttagctcatcatgctaacactgcacagagaggctggtttcccttctcctgactctgcaaaggagactgatttattctgagtagcccttttaaagaggcagaataaaactcaaatgccgtcgacgcggccgcgaattccnnnnnnnnnnnnnnnnnnnnnnnnnnnnnnnnnnnnnnnnnnnnnnnnnnnnnnnnnnnnnnnnnnnnnnnnnnnnnnnnnnnnnnnnnnnnnnnnnnnnnnnnnnnnnnnnnnnnnnnnnnnnnnnnnnnnnnnnnnnnnnnnnnnnnnnnnnnnnnnnnnnnnnnnnnnnnnnnnnnnnnnnnnnnnnnnnnnnnnnnnnnnnnnnnnnnnnnnn

SEQ ID NO: 35614 - DNA, 353 bp, Homo sapiens
gtaaatatccatctggtgagagagtacgttatcaatgtaggagcccttatgaaatgtttggggatgaagaagtgatgtgtttaaatggaaactggacggaaccacctcaatgcaaagattctacaggaaaatgtgggccccctccacctattgacaatggggacattacttcattcccgttgtcagtatatgctccagcttcatcagttgagtaccaatgccagaacttgtatcaacttgagggtaacaagcgaataacatgtagaaatggacaatggtcagaaccaccaaaatgcttacatccgtgtgtaatatcccgagaaattatggaaaattataacatagcattaagg

SEQ ID NO: 35615 - DNA, 356 bp, Homo sapiens
  misc_feature (1)...(356): n = a,t,c or g
nnnnnnnnnnnnnnnnnnnnnnnnnnnnnnnnnnnnnnnnnnnnnnnnnnnnnnnnnnnnnnnnnnnnnnnnnnnnnnnnnnnnnnnnnnnnnnnnnnnnnnnnnnnnnnnnnnnnnnnnnngaaattcaagtttttcttgaaaatttctccaaaaagatgatgaattccctgaagaccatgactataagagctatttttaaaaactcccccacaacattgggttttatacaactatgtgatgaattagtctgtcttttctggttattgtaacttactagcacatagattgagaagtatttgtgaaaagaaanaagaanaaccactaaagcccatagcttactagcagattaagag

SEQ ID NO: 35616 - DNA, 350 bp, Homo sapiens
gcggccgcgtcgaccatttgctgtgttgtaggcaattcatgtcaggagcagccccagaccaaaagtcaggaggaccactcaccgtggagctgtgtggcctggggcctcatttcttcatccacatgtcaaggtgggcacacttggctctctctcagatcctgtccaatttgaagtctctatcattctttgggccttactcaatttccttatttagctgctcctatgaccactgactgagatttgctaagtggcagccagggtcaagattaattctatggtctctcaataggtcagaactaaggactcacagggatcaaagctgagacctttggctttctgcttggcactat

SEQ ID NO: 35617 - DNA, 359 bp, Homo sapiens
  misc_feature (1)...(359): n = a,t,c or g
nnnnnnnnnnnnnnnnnnnnnnnnnnnnnnnnnnnnnnnnnnnnnnnnnnnnnnnnnnnnnnnnnnnnnnnnnnnnnnnnnnnnnnnnnnnnnnnnnnnnnnnnnnnngtctacatccacatatatgttgttcctatttacatgtttgtatatacaaatgaaataaattatacataggagttctgtgattttttttatttatattttgttcatttaaaaaagaatttatagcaatnnnnnnnnnnnnnnnnnnnnnnnnnnnnnnnnnnnnnnnnnnnnnnnnnnnnnnnnnnnnnnataggtnnnnnnnnnnnnnnnnnnnnnnnnnnnnnnnnnnnnnnnnagccctgcagcatttt

SEQ ID NO: 35618 - DNA, 347 bp, Homo sapiens
  misc_feature (1)...(347): n = a,t,c or g
gcgnnnnnnnnnnnnnnnnnnnnnnnnnnnnnnnnnnnnnnnnnnnnnnnnnnnnnnnnnnnnnnnnnnnnnnnnnnnnnnnnnnnnnnnnnnnnnnnnnnnnnnnnnnnnnnnnnnnnnnnnnnnnnnnnnnnnnnnnnnnnnnnnnnnnnnnnnnnnnnnnnngagngtatngggcttatagtnngtcttctgggaatagctaggnnatatcctttgcctactntntaaaatgnggcaaaatanccataacataaaatttaccattttcagcanatagtctgagtagattaaagtacagcccactgnnngngcannagtcacgggcatccctntntanaactctt

SEQ ID NO: 35619 - DNA, 347 bp, Homo sapiens
tggcgagggattagggaccacagatgctcctccacttttcttggtactcgtcgtgggagggagggtggtgctgatttgggaaatagaaggtttggtttggttttcatgtgttaaagcattcacatttggggtagaaatatgtgagttgagtacggttgggctcggtgaatcagtccgtgatacaacactggatagagcggcggacacaagcaggagcgccaagaccagcggccgcgccaaccccacaagggcttggatggccgacccgggcagcagtttcgcttgtgctggccccctcatcctcttcgggacggcagcgggtcgacgcggccgcgaattccagatct

SEQ ID NO: 35620 - DNA, 358 bp, Homo sapiens
ctgaatatatggtcctgatgtgaactaagctattcaagaatgtctgttatacaaattgttgtatactgatgttttataggttcatcaaggattgctttggaggatttatcagaggattaattagacatttagctatttagcctggtaaaacgcttgttgaacaaggttaaaacgtttcctgctaacttgtttcataatgtattctgctatattgtgttattggaacatttgctgtcctgctattttaattttatttcagatatttttgtcctttattaagtcgctgtcatttttaagtgtatagattttacttaggtgtttcctctttggcctcttgagcaacttttcctttatagca

SEQ ID NO: 35621 - DNA, 353 bp, Homo sapiens
  misc_feature (1)...(353): n = a,t,c or g
gttaagtccactccatgatccagataatagtaattttaaaattggcttcaccgaggtgagcagaatatagacctgttatatcaaagagtatttcttgcttctcactttctgctggaggtaccagagagtacccagactgaaatatgtttctagtgaaataataatagctactctttaatgaatgtttgctaagtgtcaggtattggtgtaggcatacattggttcattttatctttaaaataaccctgtgaggagatattatctccattctatgggtatgtaacagtcacaaggtcgacgcggccgcgaattccnnnnnnnnnnnnnnnnnnnnnnnnnnnnnnnnnnnnnnn

SEQ ID NO: 35622 - DNA, 355 bp, Homo sapiens
  misc_feature (1)...(355): n = a,t,c or g
cggagctnnnnnnnnnnnnnnnnnnnnnnnnnnnnnnnnnnnnnnnnnnnnnnnnnnnnnnnnnnnnnnnnnnnnnncaattttaattaaaaaaaattttgttgaagaaatcatctgcagtggcactttaaactgttccaagacatacacagtacaatgtttattcagcttcagagctgtgaggttctatctttaattaactatttgaagttgttttcagactggcttaaccaacaatgctctgtaagaacttacagggtcttttcataattttcatttacatgaaggcctacttcctcaccattgtttgtggatattancattgtcatactgcctaatatgacttttttttttt

SEQ ID NO: 35623 - DNA, 346 bp, Homo sapiens
  misc_feature (1)...(346): n = a,t,c or g
ggaagcactgtgactcatcagtgtggggttcgagcattgtggctgcctcaggaatgtagggagaaggtttcccaatctctctttatttgttgccaaatctgtccggaagctgttgggcccagtgaaattaaaagtcattgagtgttttactggctttccccagagtgtaaagcccttacaggagaagctgactgcccctagatgaagagaccagaatgagaaggaggccatttatggtttgcaattcagaacaaggacaccatgaaaagaagatgatgggcaggattctgaaatgaaaccatgacacacacttgtaaggtgaaactgcaggcacttttcanatccc

SEQ ID NO: 35624 - DNA, 343 bp, Homo sapiens
ggtatggtgaacatttttggactattgccacaggaaactctcattagtgtatcttatagctaagagatcaaaatctcttaagccatatgttaatcagtttctgattcactggccagtcactttacctataccagataacactcatagaatgacctgttcatttagaaagctggataattatgctgcctgttttactatgagctcagtgttatttgtcacatgcaaatgagcttggtgagactaagcttagtgagcttcgtgattcccctctggctacagctggtctaaatgctgcctctgggggcaccagctgagttctgcccagggttgctttccactgtga

SEQ ID NO: 35625 - DNA, 371 bp, Homo sapiens
  misc_feature (1)...(371): n = a,t,c or g
tttatttcaggcagcagattcattgtcaaatatcttactttttaaggtctgtaggttatgctgaataaaattctctgcaccatgaacttcagagaatctgaagtcacttctcctgacagaccagtttttcatttttattgaattctgaattgtgtccgatgtaaagtagtaaactatagggtcaaaacaacagttggaaacagcaatacagagagtgattgggtacattgtccttactgctgccactactgagcaattaacaaatgtttgtgttctcacaagagaatataaaataagattgatattgtaaggaacaaaacagaaacagaatatgatcaaatgtcaaaaatcatttttaaaaccttangttt

SEQ ID NO: 35626 - DNA, 356 bp, Homo sapiens
  misc_feature (1)...(356): n = a,t,c or g
ctaatttgaaagagcatcatggcttttatgttagaaaatatatttgtattttccatattgggcagtcactcactgaaaaccaagaaaattatgcattttcaattttaaatgtaagattttgtgtcaaatagatggggagagggaggcaagtagctcttggtcttatttgtttccaggtatacccgaagttatgcaaattatctaagacgtgattaccctattctgaaatactttaaagtaaaatcctattctcaataacctactccaatgtctagaaattatattcttattgttcaacaattaaatgaagctcttatttgaattgatctcgtnccttccattnttnctctttaggg

SEQ ID NO: 35627 - DNA, 342 bp, Homo sapiens
gtattttcaaaacaatacttatgtttagatatacttttgctaatgtttgtttttctaagtcaatatatattgtactcactcatttatgaaactgacatttgcaaattgttttgctattctgacaatttttcatacagtaaatattaattttacaagaacataatttatttcaattaatttaaaatcaaagcctgattaaattttgatgttttctcagtgtatcaatttaaaaaatcatctttatacctaatcataacctgttgtatgatgtttcataatgatatattaagctgtattccttcaaaatagatacattttattataaattaaaaatatccttta

SEQ ID NO: 35628 - DNA, 353 bp, Homo sapiens
cctgcttctactcctccttcaataggaagaaatacaaacacctttagaaactagtattaagccactctatctaattcgtacagcgtgtaaacaccaatatttctaggatctactacttcctacctatcgagtgagtaggatttcctcactaaattattcatgtcttaaatttctttccagactttcagtttacacttcacatttttatttaatcttcacaagaatcttgaaaaataggcacaacagattgtttaatctccattttacaaatcatgaaagggaagctcaggaaggttgattttccaaactaacaatcattaacattgcggagatcagaacccaggtttcctaat

SEQ ID NO: 35629 - DNA, 360 bp, Homo sapiens
gaaactgtaagctcatgtgagtggggaatccgacttgttttattgcatgtgagctgagcactgtgccttgtgtcagtagtcagtggtgttcctttagtccttgttatgttaataaaaaagctttggtttttgcaagactttgtttttagagattctggaaaggaacatattaaccaaaaagaagagctgacttcaattttacttgtcttgaaaataactgactactaaagggatgtcagggaacattagtgaaaatggagaacttaaggagttaaagttttagctgtttttttcaaaggatattgtccttcaaaatctttaccttgcatttttgttactgtgatttaagatggttgtaag

SEQ ID NO: 35630 - DNA, 347 bp, Homo sapiens
  misc_feature (1)...(347): n = a,t,c or g
gggatatttccaccccatcctcaccctcagattctagatgacaccaataaacccttctttgtgctagtaagccgcctcagcagttgtctggtggcatccctccacttgaacatgagaaaattaaatctaaagagatcaagtgactccatccgggtcacacagcacgttggtggtggggccagaactggagcccgggtcccgttactccaagccttgttttctaccgcattaccttgctcctctgcattgctccagtgtttgcatctgctgatgttgggggcactgtggtgatgtattaattaattcttgnnnnnnnnnnnnnnnnnnnnnnnnnnnnnnnnnnnnnn

SEQ ID NO: 35631 - DNA, 347 bp, Homo sapiens
  misc_feature (1)...(347): n = a,t,c or g
cagaaatgtgcatagaatatgagtgaaaaataaaatggaccaactagacctaggcattgaggactatgagtttgaataatcatagatgtattaaagcannnnnnnnnnnnnnnnnnnnnnnnnnnnnnnnnnnnnnnnnnnnnnnnnnnnnnnnnnnnnnnnnnnnnnnnnnnnnnnnnnnnnnnnnnnnnnnnnnnnnnnnnnnnnnnnnngtgaaagagcagacgcgtcgacgcggccgcgaattccnnnnnnnnnnnnnnnnnnnnnnnnnnnnnnnnnnnnnnnnnnnnnnnnnnnnnnnnnnnnnnnnnnnnnnnnnnnnnnnnnnnnnnnnnnnnnnnntt

SEQ ID NO: 35632 - DNA, 344 bp, Homo sapiens
  misc_feature (1)...(344): n = a,t,c or g
gctgggtatggtggtgcacacctgtgatnnnnnnnnnnnnnnnnnnnnnnnnnnnnnnnnnnnnnnnnnnnnnnnnnnnnnnnnnnnnnnnnnnnnnnnnnnnnnnnnnnnnnnnnnnnnnnnnnnnnnnnnnnnnnnnnnnnnnnnnnnnnnnnnnnnnnnnnnnnnnncagaaatttcacttcaaaccaaaaaaataaaccactgacaaccaatgagtgaaaatgaggttttaaaaaagggcccagtcatcatgcccaaagtaacatgtgactttgaaatatctgtgaggaacttctggcttcaaggaaatacttttattctcttggcatctgttacagtgt

SEQ ID NO: 35633 - DNA, 356 bp, Homo sapiens
cgcccggcctctttgctattatcatgctgcgttgggaggttttcttaaaaggcacacaacaattttgacagtaatttctatagtttcattttttatttttattttttattgtttgagatgtttgaaaaaccaagagaaaaccaatgtaagaagactaggcttttaacgtttttttgtttttgttattgtttttaatgtacagtcaactgtatattttgtgtttcaggaaactgttaatgacttgggctttggaagtagctgttttaatgaagaagtccgaaacatatgcacctttattctgtcttccgtctttccataaattttgcaaaggccttttagccaacagtaagactctg

SEQ ID NO: 35634 - DNA, 355 bp, Homo sapiens
ggaacccccagggatcttctcagatgggtcagaagctgctctccatgggggcagggggctgagggagcccccaggggtcttctcggatgggttggaagctgctctccagtgggggcaggaggctgagggaggctgcagctgcttggctcccagaaccttgttggctcacaccttcgtcaggcttgtctctgtcattccaagagctcaggcccaaagcccagagcctctgactctcaactgtgttcagtctgtgtgcaaaccccacagctctccctgcagagcacctgaaaatctgctcagcacccagctggcagtcgacgcggccgcgaattccagatctatgaatcgtagatac

SEQ ID NO: 35635 - DNA, 343 bp, Homo sapiens
gggagtccctgcttctcgttgaggagcagggaccctctgcactttggggcatgtgagcaggttaacaggtaaggattgatgaaccaagtggatatgaatcagcccataggagctaagaggagcctccttctgaaaataggttggaatgctggaaatgtggctgcttttagcacaaagctcatttttacctaatcaccatctgtagatttcctcttttaaggtgcaaagcaagtctcttggatttcctggaatggggaccaggaagatattaccctgcattcctcttcactcttcacaagcccattttccacctctctcgtaggcttgatgctatggcgacagt

SEQ ID NO: 35636 - DNA, 352 bp, Homo sapiens
tctaataataaatgcctttctgattttagtaacgtcactcatctcatctcttggacaaggaaattgtactgcatggctgcttttgtctcatctcattctaaaattctactatttcctgaatcagctgatcaccaccacagaatgttgtgaagctaccatttgatgaatgtttatcatgtttactacaagtgttattaacagctcaagtatacatttaagctaccttttggcacacttttacattcactttgggtttttttgtggattcatggctctttaacatatccaatgtgatttgattgccagtatcatgttttacatttcagccattcctccaaagtaggaaccctct

SEQ ID NO: 35637 - DNA, 352 bp, Homo sapiens
ctggagcaaaatgaattttttttattgtacttcagggcaacaagtcatcagctgcaggaaaacaaaaccaggtccaatctatgatctaagaggaagtcaggaaaggcttggaagagagatccaaaggccggcctggcaaggggaatcccacatgagaattcctgggagagagcaggccccaggcagcaaggtcatcttgcctgcttctctgtaagttaatccttcacagggagccaaggcttctcttgactgcttggacaagagggtaagggccctggttgcaggatttgccagtgaagtcatccatgtcaatagaccagatcatggctcctcccaggtttaaattctttaa

SEQ ID NO: 35638 - DNA, 337 bp, Homo sapiens
caattctactcatctgctttcaaagattactactgtccttttaacagccaaagtgatttttttctcatttcttgtcttctctatagaataactagttactttctgaatgtttttctcttttgccttggcaaagcaccatcctcatttacctgctatgtattaacctactcattctctgacactttcttttgatttccctcctttctgactgctggttatagagagatgcgccaaggtttgtctttagattccttcttcttactgtacattctctctgggtattttcttcctatcacagcactatcagtctgtgtaagagggtttcagatgtttttcc

SEQ ID NO: 35639 - DNA, 338 bp, Homo sapiens
  misc_feature (1)...(338): n = a,t,c or g
nnnnnnnnnnnnnnnnnnnnnnnnnnnnnnnnnnnnnnnnnnnnnnnnnnnnnnnncaagtacttttaaaagtatgatggaagatacatactttgtaatatacatacatacaaaatttgttctttgagcaaatttattcagttttactggcaatgaaactcataatgtttactcctcagaaattttaaaacatttgtttgttgaatgtatttattgtttctatcggcagtctttggaaatctgtcttgtgatagttctaataatatggtttgaatacagcattgtcatatgtcttatatgttggtcgacgcggccgcgaattccagatctatgaatcg

SEQ ID NO: 35640 - DNA, 350 bp, Homo sapiens
  misc_feature (1)...(350): n = a,t,c or g
cacaggttggatctacatatgtccacttatatgtggatttttttttcaataaaacttggattacaaataaattgtaggctgggcagtnnnnnnnnnnnnnnnnnnnnnnnnnnnnnnnnnnnnnnnnnnnnnnnnnnnnnnnnnnnnnnnnnnnnnnnnnngtcgacgcggccgcgaattccnnnnnnnnnnnnnnnnnnnnnnnnnnnnnnnnnnnnnnnnnnnnnnnnnnnnnnnnnnnnnnnnnnnnnnnnnnnnnnnnnnnnnnnnnnnnnnnnnnnnnnnnnnnnnnnnnnnnnnnnnnnnnnnnnnnnnnnnnnnnnnnnnnnnnnnnnnnnnnnnnnnnnnnn

SEQ ID NO: 35641 - DNA, 349 bp, Homo sapiens
tcattttgtagtacagatccacttttcttcagcccatcttaaaggttcacatgagttttaaacaacaggaactaatgatcctataataaaagtcaacaacttaaataacttgaagttcaacctcatcatgcccaactgatttttttaagtgagccttttaaacaactcacttaaaaaaatttttatccacgcattgtacaaatttgtgtggcaatcttgtaaaaaggccatattaatcttcatcatcaaaattttagcacatgtcctatgagagaatgtacataccttctcactgaaatttctgacagaaaaagattttaggtccatagaagacagtattctaaatcaa

SEQ ID NO: 35642 - DNA, 345 bp, Homo sapiens
  misc_feature (1)...(345): n = a,t,c or g
ccatgatagggggctgccatggaagtcagggatttgcaccccaaatttcaggtggtatctgagctctgtgtgtccttcctacccacctctcaggtaagtggctttcctggtatcatggggttggaatagggggagggaacagttttattttcttcttttgctgctctgttttttcccagtcctctacactgggcaagtacgacctttgttatcgcagaaaatggcacaggctgctgttgatgttttttaaagaacattttcaggatgggtttcctagaccttgcaaaaagtcagngntncaaaatcctgcaacttacaggtatccagggagatatanccnatgta

SEQ ID NO: 35643 - DNA, 362 bp, Homo sapiens
  misc_feature (1)...(362): n = a,t,c or g
nnnnnnnnnnnnnnnnnnnnnnnnnnnnnnnnnnnnnnnnnnnnnnnnnnnnnnnnnnnnnnnnnnnnnnnnnnnnnnnnnnnnnnntctttgatgaactttattcaaattggttcccccttttcttatggggttgantttcnantcttgnntnacaattctttatatgnnttanatactcnnnctcngananacacacnttatgnnaatantcnntcccattccacgntntactttntcnttntcttaaangtatcnttcaannanaaaaagtnnttaacttgntangnatacccatttannttnntnnctacccttnagtnttnnnngcnnatgtntnccttcnnctaatttgntccccc

SEQ ID NO: 35644 - DNA, 339 bp, Homo sapiens
atttgagagatttagtagtaaatttatgacttttgcagttactttgcaaaaaattgaggaaggaagaagtgaatttcactttgagtcaaatgtgtaggttccagtgtaattaaacctaaaaatctatatattctggtcttgctacttggtattacactttgccatatcacataatgctattagctacattttaccttgtttgcagggtgatgccattttgtatctctggtttgttgaatttcctagaagatgttatgttcatgtagataatggcatactcattgaattctttacctcagacatgaaaatatgtggaaaagtggggaaatgaatctgatc

SEQ ID NO: 35645 - DNA, 356 bp, Homo sapiens
  misc_feature (1)...(356): n = a,t,c or g
gggacacaacattaaaaaacttcaatgacacataagacaggaacctaataaaaatggcaacacagttttacacaatctaaatgatttggttttaatccataattgctacaacaaagacagtactttaccttgaaaaaaaacctgaaggttgcttatggaagtgggagtcaaaatggttgtagtttgtgaattattgtgcaagtggtaggagggttacttgaaatcanatgaaaagntttaacaccatatatgtatggttcatancatacagtgaattgaggtanctgctacatgtttganatgtgntgtgcnctnanttnatctgggncattntgttttgctgacanaaatcatac

SEQ ID NO: 35646 - DNA, 256 bp, Homo sapiens
cccttatcccacggggacaagggagtactgtggtcttaccatacaatccagcaacctcaatctttggtaatgacctaaatgagataaaaatgtatggccacgcaaaaacctgcatatggatgttcatgacatcttcattcattattgacagaactcggaagcgacagtgatgttcttcagttcgtgaatggataaacaaacagtgatgcattcagacaatggagttagtgtttggaagaaactttttttttttttt

SEQ ID NO: 35647 - DNA, 338 bp, Homo sapiens
aaaatttcatgtttattcatatttttcaaaatatatgtacattaaaaaaggaagatttacaacaggaaagattgccttacatgcaacacaaattccaatgaattcatgatgggatcacacatgattatgatctaattcaagccaatcttctcaagtccatttcccagccatactttaggctacagaagggatcccaggagacaaaagtggaatgaataagaaacaaacatcttttgcctctggcagtactcaaggggccagaagatgtacttcaaaaactttaagacaattaaaatgtcaagtgccacagggaagagaaatgataaccagaaatttgt

SEQ ID NO: 35648 - DNA, 337 bp, Homo sapiens
  misc_feature (1)...(337): n = a,t,c or g
cccagtctaggtcagtacaacctattctttgcctactcagcatattaacttccccttgatagtacttatgacattatcattaaataataattcactgtaatgagttgttgaaagcctctccaccagaatgtcaacgtgtgaaggtagagattttgcctacttcactgctgtaaactcgcacaagttctttaacatagttggtgcttaacacgtatttgttgagtagatcaatcaatcgatcaatcaatcagtaatacaatagataaataagcgaagccattcaatatgtagtaatcatttcatgtgtgccatttactgntctaaggtctttcatgca

SEQ ID NO: 35649 - DNA, 337 bp, Homo sapiens
  misc_feature (1)...(337): n = a,t,c or g
ccttgaaccattgtcatgtttagctcttatttctgctttgccacacatattcagactgtattaatcctcgccgtttctttcttctgggtaccacattaagaaagaaaagctaaagtgcaattataggtacccctggctatttttgaatttgcatttgtaactataccctctgatgtttattccgtgtttgtttggggtcgtannnnnnnnnnnnnnnnnnnnnnnnnnnnnnnnnnnnnnnnnnnnnnnnnnnnnnnnnnnnnnnnnnnnnnnnnnnnnnnnnnnnnnnnnnnnnnnnnnnnnnnnnnnnnnnnnnnnnnnnnnnnnnnnnnnnnnn

SEQ ID NO: 35650 - DNA, 325 bp, Homo sapiens
  misc_feature (1)...(325): n = a,t,c or g
nnnnnnnnnnnnnnnnnnnnnnnnnnnnnnnnnnnnnnnnnnnnnnnnnnnnnnnnnnnnnnnnnnnnnnnnnnnnnnnnnnnnnnnnnnnnnnnnnnnnnnnnnnnnnnnnncaacatggtgaacccttgtctcnnnnnnnnnnnnnnnnnnnnnnnnnnnnnnnnnnnnnnnnnnnnnnnnnnnnnnnnngaggcaggaggctgaggcaggaggcaggnnnatcacttgatccccggaggcagaggctgnntntactcgggaagttnaggtgngagaanggctngtnctctnggttgtctnggtcgnnanttnctnntntgtt

SEQ ID NO: 35651 - DNA, 336 bp, Homo sapiens
  misc_feature (1)...(336): n = a,t,c or g
tgacattgatgatgtttggctagaatactgatgaatgaatgggaggtagcaagaccgacactgagggaagggcatcccaggcacagggaagagcatttaggaaggcttgaaacagttggatccattctgggaactccaagtaattccattcttaagttgagccagggctggaaatcgtcaaaccacaacacattccagccattggtctctttttctccctctgttccatcccatatagctcaatactatagctagatttatcttccttccttcctttctttcttttttaagatgggnnnnnnnnnnnnnnnnnnnnnnnnnnnnnnnnnnnnnnnn

SEQ ID NO: 35652 - DNA, 348 bp, Homo sapiens
  misc_feature (1)...(348): n = a,t,c or g
agagactgagagaaattatatgaaaactacatatatgacatagaacttggatccaaaatagatacattcttacaatttgataagacagtacnnnnnnnnnnnnnnnnnnnnnnnnnnnnnnnnnnnnnnnnnnnnnnnnnnnnnnnnnnnnnnnnnnnnnnnnnnnnnnnccccctacatcactcatcactactgaactacaaattaacatcacagtaagacactgttaaatatacaccagaatggcaaataatataaaagactgtcaataccaagtggtggtcagaatgtaaaatggtacagtcattttataaacaatttggtcttttcccaagaagttaaacatgg

SEQ ID NO: 35653 - DNA, 331 bp, Homo sapiens
tttttaaataaattaacaaatgtttttagatttctaacacactaaatatcgagataaaccacatcaacacgagctcttggggtcttcaattattttaagagtataaaggtgtcctaaggccaagaaatctgagaactgatgtagaagaataaagcaggtcctcaaacatggctgcacatgcccaagttatgtaaacttactaaattccatactcagggtagcagagtgcctaggaaactctcccaagtatttgaatctcctcaaacttggaatacgtgaagttttgattgtcttggacaagcaatacaatataaaaatcttaactgatata

SEQ ID NO: 35654 - DNA, 338 bp, Homo sapiens
  misc_feature (1)...(338): n = a,t,c or g
gttttgtcttaagagaaagaagcatttttatttagaaccaacacaataagaactggaatatgattttttaaaaaattctatattgacaaattatagttatatatatttacaggaaacaaactgatattctgttataggtatacaatatggactgatggaaacaagcctattaccatataagtcatctcaaaaacctatcatttactcctaatgttttcacccagnnnnnnnnnnnnnnnnnnnnnnnnnnnnnnnnnnnnnnnnnnnnnnnnnnnnnnnnnnnnnnnnnnnnnnnnnnnnnnnnnnnnnnnnnnnnnnnnnnnnnnnnnnnnnnnnnn

SEQ ID NO: 35655 - DNA, 339 bp, Homo sapiens
gtgaagaaacatttctttctgtgtcatacaagacgcgtcatttttgtagttttaattccctcttgagtcctacagtaatactaaaatactcacagtgactacagtatcctttgcagggaaaaaattgtaaattaaccatttaaatatagtcactaagttatgtggcattcactgactcagagttgaaaaagactccaaaattcttatccagtattagagtatacaaggacaaaaggagaggccaaactaagtctaggacgcacaatacaaagaagaaaatgagaagaccaaagttacagtctcaatactatgacatgatactaaaccatacagtcagtc

SEQ ID NO: 35656 - DNA, 332 bp, Homo sapiens
  misc_feature (1)...(332): n = a,t,c or g
aaatttcctctcttaaagccttctccaaaattggcatctcttataggtaagatttattcatagcttgagtgtaccaaagttatagaattatcccatttgctaacatatttacaattgtattttcacagatggttcatctcctgttagtattttggtctggaccacacaaccttggacgattccagccaatgaagctgtttgctatatgcctgaatcaaagtgggtatattattgcattttttgttttatacacaaatagaatgtattccattattaacattattttgaatttattttatcctgnttattattgtaaaatttaatgaattata

SEQ ID NO: 35657 - DNA, 343 bp, Homo sapiens
tattattccaaattgagctcccttccctttgcacatattttttcctccccttattgaagtcagctctaaccccaaattctagtatccaaaagtatttttatttgtataatgctatctgaaaaatgtgtttatattatattttcagagctgcaattcttattcgccatttcaatacctagagatagagagtcttgtatttgaagccacacacactggtgtaatatgcttagtactctaggtcaaggatttgttggtaaatggaacattttagcatagtcatgatttttggttgcctagacatcaggtaaacattcagtacactaaagaaactatcctggacact

SEQ ID NO: 35658 - DNA, 164 bp, Homo sapiens
cgataaaatagaaaaacttctaaaaaccagtgcctagatcaaagccttaataaaaattctcccatcaaagaaaagcccaggacctgactgctttactgctgaattctaccaaacatttaaagaattaatgccaatcctattcaaactcttaaaaaaaaaaaaaa

SEQ ID NO: 35659 - DNA, 299 bp, Homo sapiens
  misc_feature (1)...(299): n = a,t,c or g
tgacagaattgagacactggggaaatctgaatgtggcctgtatattaacattaatactgttttaatgttaaatcccaagtatgattgtatcacaatcataaaggagaatgtccttgtaaagagatataggctgaagtattttaggggcaaaatgtcatgattgcaacttcctctcagatgatacagatgaacaaacagtacacaacaaacaaataaaaaagaacgagagagagagagagaaagaaaatggggcaaattttccgtatgcttgnaatttttaaaaataaaaagggaagaga

SEQ ID NO: 35660 - DNA, 345 bp, Homo sapiens
  misc_feature (1)...(345): n = a,t,c or g
cnnnnnnnnnnnnnnnnnnnnnnnnnnnnnnnnnnnnnnnngannnnnnnnnnnnnnnnnnnnnnnnnnnnnnnnnnnnnnnnnnnnnnnnnnnnntaagcatcttctgaacagctcccagtgctcccaagatagaagaactttaggagaaaaggatcaacttcctttcttctcaactaaacatcccagctcttaaacctgccactacctattattaaagctatatttggaaatggtaaatttaactctaaacggttnggttgncaggntatctgaaaacattccaaagcacagagctatgtatacctggattaccatgcaaggaaacatnaaacatgaaagggg

SEQ ID NO: 35661 - DNA, 355 bp, Homo sapiens
  misc_feature (1)...(355): n = a,t,c or g
nnnnnnnnnnnnnnnnnnnnnnnnnnnnnnnnnnnnnnnnnnnnnnnnnnnnnnnnnnnnnnnnnnnnnnnnnnnnnnnnnnnnnnnnnnnnnnnnnnnnnnnnnnnnnnnnnnnnnnnnnnnnnnnnnntatattctaatccagtgaagactccaaagagctccttactgaccactatgtgtggagtancctcatggnctcttttnacttgcatcctatgattaccatctgtcttttccctgncatngtgtctgcntcttatganccttataactttngcttnggantcntgganncnggngnntannncaggtnttttnnnnntgattttntnnangcncntttaantagaat

SEQ ID NO: 35662 - DNA, 363 bp, Homo sapiens
  misc_feature (1)...(363): n = a,t,c or g
tttttctccaagatgtaaaccacccacactcaaagaaaaggccttgaccccttatccaaaggcaggaagatggattcgtatttatatgtttaaagttttttttttttaattcacnnnnnnnnnnnnnnnnnnnnnnnnnnnnnnnnnnnnnnnnnnnnnnnnnnnnnnnnnnnnnnnnnnnnnnnnnnnnnnnnnnnnnnnnnnnnnnnnnnnnnnnnnnnnnnnnnntggagnanctggaactacnggcncacnccaccntgtccagccaatattttacgtcaacncggccgcnaattccaannnnnnnnnnnnnnnnnnnnnnnnnnnnnnnnnnnnnnnnnnnnnnnnnnnnnnnnnnnn

SEQ ID NO: 35663 - DNA, 374 bp, Homo sapiens
ctgggatccctgctcctagcacagaaacagaattagacgttttacttcccacggcaacatccctgccaattcctcgtaagtctgccacagttattccagagattgaaggaataaaagctgaagcaaaagccctggatgacatgtttgaatcaagcactttgtctgatggtcaagctattgcagaccaaagtgaaataataccaacattgggccaatttgaaaggactcaggaggagtatgaagacaaaaaacatgctggtccttcttttcagccagaattctcttcaggagctgaggaggcattagtagaccatactccctatctaagtattgctactacccaccttatggatcagagtgtaacagaggtgcct

SEQ ID NO: 35664 - DNA, 361 bp, Homo sapiens
  misc_feature (1)...(361): n = a,t,c or g
nnnnnnnnnnnnnnnnnnnnnnnnnnnnnnnnnnnnnnnnnnnnnnnnnnnnnnnnnnnnnnnnnnnnnnnnnnnnnnnnnnnnnnnnnnnnnnnnnnnnnnnnnnnnnttanacttggtttttatgatacctcctttaagatagcagacatccaatcatgtttctcttgggtcttgtactattgcctgcaaagtgctgagctttaacttcatgaagtttcagcctgactttataaaatgctgcttcttttttcccctcagcttatttgaagctctccaagggtgttgngtatctctagagtttttcagggattctacatttcgtgaaataacaactgatgagttccttgggctaccaaag

SEQ ID NO: 35665 - DNA, 361 bp, Homo sapiens
aaaagttttagttcttgtaaagtaggtgtgttcaacccagaaagatatcttaaagatttttattcaaatttcccttataaacaatgactaatcaccatggaatcttaatataaactgtaacaaaattattttttattatggtttattaaatacacctgcatctgtaatattctagaaagtattatggaaaatttttacctttaatctctacgatattaaatgccaggtgtcatttagatacataatccagtatatatgcaaaatgttttagaatgctttcagagctgctgggtgcaaacaatgcaaattaaaatggtgcaaactatacaaaaataaggaggattcaagcctaaaaagtaaa

SEQ ID NO: 35666 - DNA, 357 bp, Homo sapiens
  misc_feature (1)...(357): n = a,t,c or g
gcggttgtacctctgagctacctaatgctgttataagcctgagagcagtgctctcgacacaaagatggagctggttctggtttgtttgtgcaactgcagccaaagtatgaagatgactcaggagctgaactctgtaatgaggctgaatatgatgcatccggtagctaaacatctcaaggagtgtgtgtaagatcccccatgcatgtgatttgaaaacagttggcaaaagctgactgataaatcctttgatgcccaaagactctatttccatatagaccaataaacgactgtaagtttccactagggctgganccaaggccacactggactttgcatgagcaagctttatcaccctgg

SEQ ID NO: 35667 - DNA, 360 bp, Homo sapiens
  misc_feature (1)...(360): n = a,t,c or g
ctttcctcatatgtttttgcatcatcttacctctgcgtctgtgttcaagttttcttctgcttatgaggacatcggttatatttgtttaggagcctaccctattccagtgtgatctcatcttagttacatctaccatgaccttatttccaaataaggttacattttcagacatggtagttaagactttaacgtatatttttggggttgagaggacacaattcagttggtaacagctatgacaaaattgggtaaattgatgaacatcttaaaaaaaacacagtggaagaggcaggcactgtanagtgacaaaatacatntttatagaaattccatgttaaaattattttgngttataataat

SEQ ID NO: 35668 - DNA, 371 bp, Homo sapiens
gtcgaaactgctcaactcagtcacttccacttccttgtactcctcatctcccagttcctgctccatcttgatcaacacagactccacactggacttgtaagaaccaacactaattaacactttaggaattgggcattcttctagagaactggaaggcggcctgtcttgactgggcttagagggtatgctttcttgtttctccaccatcctgtcatcgacctccacaaagtcttcaaagagaaagtttgttatatgctgttgttttagaagtgctctatcaatctgactggtcaggaggtaacacaggtctcctctgaacatgtgttcaatgtggctgagctgagcaaagtgtcaccggatagttttaattg

SEQ ID NO: 35669 - DNA, 361 bp, Homo sapiens
  misc_feature (1)...(361): n = a,t,c or g
tctgtttttacctgttagccactgacagtttaatttttttttctctttgctgtgatttgaggctgttgtagcagttaggtgaaaaaaattggtagccatgttgataatcaactagagtagtatataagataaacatttgtgtcacagtttaaatagcagtagttaattcagcattatgtgaaagcttccatttcctgactcttactgttcaccatagagttaataaattaatgggtttatatatgagttaatatattaaggagattggttgtccgcacccttagttcccctcctataatcttgatgtcttatttctcaaatactccttgtgaagtgagtttaattgtaataccnnacataa

SEQ ID NO: 35670 - DNA, 373 bp, Homo sapiens
  misc_feature (1)...(373): n = a,t,c or g
gaaagatctttcacagtttgatttcattaccatatatcctcacccccatccctgttcatagccattgataggccaacaggtgtcctaccttgaaatatcttatgagccttctcaaggtaaaattttcacctaggtaatctaataaaccagactcagacagattcatggttttcacacgaacagttaaattggggtcctcaggataccaccccctcctccaatctttttatataaccgagtgctttttgactctggctgtacagatgaatcaactggggagttttaaaaaacgcagatgcattggctccattccagacccattgaataaaaatttctgnatttttaaaaagcttcaaatatgattctgagacaa

SEQ ID NO: 35671 - DNA, 374 bp, Homo sapiens
  misc_feature (1)...(374): n = a,t,c or g
ctttaaattatttgtagtctaggttaaaagtggaaagattcagaaacgctagcagaagtagatttggagtcttatttgtgttacagactttgatttgaaggcatagttataatacttcatcattttggttgataggaaaagatcaacttctgtgtgagaaaacactgaggattatttccgaaaatgagttctgaaagtaaaagtggaaaagcaaagttttatactttatgtatttagcatattacagaattaataagaagcttccgggggtgggccatatattatctgtctgtttagctatctatatgaattattttttttcttggngcctttttctttccaaactttaaacgttttgnttcttttgttttttt

SEQ ID NO: 35672 - DNA, 364 bp, Homo sapiens
  misc_feature (1)...(364): n = a,t,c or g
gtttgttattaggtaaactcactgtgacatgatctttcaactttttggatcatatgtcccatcagaaaaaaagtaagcataatcgatacacacttatttataagttacatatatgtattactatagtactgagttgcccacattattgaacataagcagaagaaagttctaaaataggggataaataaaagtaaatctgatttctggaattttcctccacatcctagtagattgtttgggtactcccctgaaatgtgcacaccctttttgaaccccctgccctggtcttttgccagtgtggtgactcagccgttttcgttgcttgggcggtgttaactanctgcgtgatcttgagcagatatct

SEQ ID NO: 35673 - DNA, 393 bp, Homo sapiens
ctcaaagacccgtcttaggtttcacaatgctatttataggggcagttgaggaagttacaaatcttatgaccactgggtagtgactcctgagtagtatgcaattacagacaggcaagttagaaaacaatgactagtttttatttaactatgcctacatgttagcaaaattcagatccctatcataattctaagcttgtggcttttcattagttttataaaggtgattttggcccctgaataaagaggtagttatttttgggaaggaactattagcatcctttctttaaatttaaattacaaaccaaattcctcccatagttagcctggtctacctgcagagatgagcaaaggcaagttagcatgtaaggttagaagcaagatggagtcagctgt

SEQ ID NO: 35674 - DNA, 394 bp, Homo sapiens
aaaaatatgtgcattttaaaatataaatttacatttcaattaaatctaagaaacataataatatggtaaaacagagatttttaaaagaaacataataatatggtataagagattctttctcaagtggggaaactagaggtaatcttttttctttcttctaaatgtaatttccaaaattttgtcatgaggaaaacattaaagcttattaaacatacagcagcgacatctgaaagtggtagcgtttactttaaaagagattaaaataataaataactatgcccccaaaagaatgtataaagatatgtaaacttgtatccagcttataaatactaaactaaacatcactgagcatttggaagagcagaattgatactgcagaacacaaagtcaggaa

SEQ ID NO: 35675 - DNA, 398 bp, Homo sapiens
ttcacattggtccagggactctcttcaatgtgaggactcagggaagctccaaggttaagtgctaggtcctctgggggctccatgccacagtttgctgtcactggagcctgccgagggatccaatggggacagagcaggcagtgagcctcttagtgtttctaatgcagcccgtggccatctcagacacctgtcactagagtctatggtcttcagactcacactggtcacacgctctcagatgtttgacccccacacatgagtgccctttggcttgtctatgtgtcctgtgggtgctcgtgtgctctgtgtgtcctcgtgcatgcacaaacatgcacatccttttctattcttgtgcacgcacaagcccatgtactcagctgtgatcatatcacacgagc

SEQ ID NO: 35676 - DNA, 387 bp, Homo sapiens
  misc_feature (1)...(387): n = a,t,c or g
cagcaatcttttatcatttactgaaaaagaatgaagcacttaactaagcccaatgttagggacaaaattaaaattaaaatataacaataaatgtttcgggaggactgtgatatccagtgtctacagaagaacttctcaataaatcaatatacatattttgctacgattactactttgagtctcaaatgccaaaaaaaaaaaaatnattctntttngacnctaattntaaaagttaagggtnggnnctttaangctngggtncttaagtaaancncanngnccantaccgactntntancntgaaaaanaatncctgggaancccaancntttttcttatttacntttngttnattacnttanctacnggcacttcnttcaggacggt

SEQ ID NO: 35677 - DNA, 395 bp, Homo sapiens
gctgccagaggtctcaccatctttctccttttctttttcttctttcttgctctttttagtggaagacttggactggcttatcacttggccaacttccttttccttgagtctcagctcaaatgccatataagacaagtctttcataactaccctaggtaaagtcctctttcctttttcttcttgctgaaattttattctcttctatataaccctgtttattttgtgaaaagcaattataaaaatttataattttcttttactatgataagctctcttgaagacaggatattgtctatcttgttgtctctgagtaagcatcttttttccccaacaatattcaccctctaaagatacgattaaaagtgtgatgagacattttgttatctttaagctga

SEQ ID NO: 35678 - DNA, 187 bp, Homo sapiens
gattactacatacattttcataaattttctcaatggtggggataagcttatactagtccatacttctttatttagctctgtgactaaccatatgtatcattaagacacctagggctagggcagccaaagtaccaaatctatgactttgatctcatgaaacctcatcacatatctttttttttttttt

SEQ ID NO: 35679 - DNA, 390 bp, Homo sapiens
cggccctgcccctgggagggtgggggcagacgtgtggagagtgggtgtacaaggccagggtttgccaggcccaggacagcctggcacctgtcaatggatgagcgcctctcccttagcctgatgtcagggtgggcatgagggtgggagcagagggtgcctaactgaggaaagggtctgtgcaacccccttctcctaccagttctcgtttctgaagtctcctcaagcacactgcggtgtccacaccattggcagcaggctccttctcttcaggtggtcttaggaacttctcagaactttttgagttatccttctggtctcttcctcctgagcacggttctcctggttgagctccaggccatgccattcaacgccctccaggacaggccgaag

SEQ ID NO: 35680 - DNA, 399 bp, Homo sapiens
  misc_feature (1)...(399): n = a,t,c or g
nnnnnnnnnnnnnnnnnnnnnnnnnnnnnnnnnnnnnnnnnnnnnnnnnnnnnnnnnnnnnnnnnnnnnnnnnnnnnnnnnnnnnnnnnnnnnnnnnnnnnnnnnnnnnnnnnnnnnnnnnnnnnnnnnnnnnnnnnnnnnnnnnnnnnnnnnnnnnnnnnnnnnnnnnnnnnnnnnnnnnnnnnnnnnnnnnnnnnnnnnnnnnnnnnnnnnnnnnnnnnnnnnnnnnnnnnnnnnnnnnnnnnnnnnnnnnnnnnnnnnnnnnnaccacaacaaaactttaaatcccattcgaatgatttgttcttcctgaaaattcaaacaagacatttagctacaaagggaattacttaagtttctttttctctaccgatttctctaaaaatttagctgagtcaa

SEQ ID NO: 35681 - DNA, 396 bp, Homo sapiens
  misc_feature (1)...(396): n = a,t,c or g
gaaaatcccacaataaggcagatgataacttcataaactcctcctcacctatctcaaaaggacttcttgtttctctaagaagtgttgtctcatttgtaatgattctttcattcattcttcagttagttgggcgtgaaacttctcatgtccaaactctctgcaagtgaccttgttttgtactttatggaaaaaatagccatttggtagcaactctcagctttttgtcatgaagcccacaaacccgtttgtactgggcaccccgtcgacgcggccgcgaattccnnnnnnnnnnnnnnnnnnnnnnnnnnnnnnnnnnnnnnnnnnnnnnnnnnnnnnnnnnnnnnnnnnnnnnnnnnnnnnnnnnnnnnnnnnnnnnnnnnnnnnnnnnnnnnnnnn

SEQ ID NO: 35682 - DNA, 389 bp, Homo sapiens
aacaggtagggttttccttagataaatacattaaagttttaacttttacagggtttgggcagaagagttctaaaatgtgcattcaacttagtgagaaccttttaacagtgacaagtctgatgttttcaacctataaccacagctctgttgaaaacctcaggcactttttcacttcaattggtagtgcataaaattgttttaaaagtaggtgtcttctgactgggggaattgcaaatatccatttttattcaaaaacttgaattgtaggttatatcttacacatatgagaaatatggcttaattcaaaaaatttcctgaagtattcaaactcagaaagtagagaatatcactaaaattcagggacattagggatggaaactagttggaag

SEQ ID NO: 35683 - DNA, 395 bp, Homo sapiens
aggcagcataagcatagggcaaggcctaactattgccttctttttctttatattcctgctacagtgctagtatcactgtacttttagggattcttaagggcaagggctttagctttttaattttacattctcatttgcctgtcacagtgcctacccaacacatggtgactactcaatatatgtttgttgaattaagtaataaatgcatagttaccattttataattattttatttcctttattatcattttaaagaggttatggtaatgttcatatgattttatgatgtcttagggtcaatatttttccagaaaaaatgtatctctaatttgcattcctattaaatggaaaaattagacttaatgtataaagcagaattttatttttacatatct

SEQ ID NO: 35684 - DNA, 390 bp, Homo sapiens
aaacagtgcattccgggatgtcatttacttataacatgtgacatcatcggttatataaacattaaaccatccaagaagttattaccatactggaaaaccgtgcttgaagataacttcaaataaagtagaatattgtataatatccagtgcatgcaataaatcctttgagctaaaggaagaggtatatggcttttagtaataggaaatcagtttctccccatcctcaccaaatacacgctgaacaaagacataaagagttttgatttgaaggagcatcatattatggcttgcccagcagcagtcacttctcattttctcccaagaagactaagctggcagctttgtcttctacccacatgtacataaaaactggtgcagaatgtttgtata

SEQ ID NO: 35685 - DNA, 383 bp, Homo sapiens
  misc_feature (1)...(383): n = a,t,c or g
gtaggaccannnnnnnnnnnnnnnnnnnnnnnnnnnnnnnnnnnnnnnnnnnnnnnnnnnnnnnnnnnnnnnnnnnnnnnnnnnnnnnnnnnnnnnnnnnnnnnnnnnnnnnnnnnnnnnnnnnnnnnnnnnnnnnnnnnnnnnnnnnnnnnnnnnnnnnngctctatttagctggcttttaaaaagtgatgcttagataaatattctctcagaaaacagaaactaatgtcttttacttcaggtgatctgagataatctttggtaaataaagctagttttaaaattattggtaaaaatgtttttggaattgctaacatcaattataatgcaagcatactttctttaaacctagttttactagtcaaacaggcttgntatctcc

SEQ ID NO: 35686 - DNA, 380 bp, Homo sapiens
cttgagtataagatggacctagtgacttacttctagtagataaaataaagcagaagtaatgacatgcaattttggagactaagccataaaaaggcaatatggcttttgacttagtcacactgtttcttgaattacttggtccagaggaagccaactgccatattgtatgcagagctatagagaagaccatgtgctgaggaactgagaccatctatatgctagagcttagaagcagattctttagttccagtcaggccttcagatgactgaagcctcagccaacggtgtgactgcacctcatgaaagaacccaggttagcaccttccagctaggctgctcctgaatttctgacccccagaaaccatatgcgacaatatatg

SEQ ID NO: 35687 - DNA, 380 bp, Homo sapiens
cactgattgccctttacctcctcgtgtttgcagttctcatccctctcattggaatagtggcagctcaactcctgaagtgggaaacgaagaattgctcagttagttcaactaatgcaaatgatataactcaaagtctcacgggaaaaggaaatgacagcgaagaggaaatgagatttcaagaagtctttatggaacacatgagcaacatggagaagagaatccagcatattttagacatggaagccaacctcatggacacagagcatttccaaaatttcagcatgacaactgatcaaagatttaatgacattcttctgcagctaagtaccttgttttcctcagtccagggacatgggaatgcaatagatgaaatctccaag

SEQ ID NO: 35688 - DNA, 378 bp, Homo sapiens
gaaaatgtgtgtttatgtctgcatataaacgtgtgcatatctacctctttatcttatttcattccatatctgttcatattaaaaactacaagtttgtgctggtaacattaattccacttgaacagcacagtgtacattcatgtctttatcttttttatacttgtaactactttctccaacaatgagaaacctggtttcagttatactcagtgtatatactcatttgctcaagtctagaatacatggaaattggtttcagaattgttggcccataccactgcagaaagcaaacctactaactagggttctgtatttggttacttttttgaggtacagtgtacatacaatcagatgcacaaatgttaagtgtacagtttc

SEQ ID NO: 35689 - DNA, 375 bp, Homo sapiens
aacgaagtgagaaaaagacattttcggatgaaagaaaactcagagacttcattgccagcagacttgtgtaaaaaaggaagttcttcagacaaaaaatgatgacagaagggaattctgctggaacatcagaatgaagaaagtacaaattaataggtatagggaattgcctaatcttctcctgttgagtttttaaaatgttgggtaagaagcaaaattttttacaatggccgatgtggttcttaatgtttatgaaggtgatttttaaaacaatgtcataaaagtggggagagtaaaggaacctaaaaagtaggaaggtttctgcattccatttcaaatggcaaaatgttgagtaagactgtaataattgttgtatat

SEQ ID NO: 35690 - DNA, 369 bp, Homo sapiens
cacaattaaaaataataaattttaaaaatactattgtaaaatttataaaatagctaatgcacaatagctttacagatgaatttacagattctaccaacatttgcccgaacaacttttccaccaaaatgtgaaacctcagattatacccttgcataatactctatatttgcctatacattattttagtaagcagagattattcactggcagatactgttataactatgccaaatgaaaagttacttatgaaaagtaactaataagttatgttactttattaactatccttgtgctgtaaagttgtaaatatgtcatttgatttaaatattcagaagaaaatcttttagctttaatgatttttttcctgat

SEQ ID NO: 35691 - DNA, 375 bp, Homo sapiens
tcttagcatgtttttcttcatagatacccgttttggggtttttgtgtcggaagatgaagtgcagtttatagtcctctccacatttatctggaccaaacataatcgtataaggggtcttgtcatggaactgatccaggttgagttctggtgttttagaaagcagtttcacataggcaccaccacattctattccattttggaaattaacctcatactgaacaatgagaggcttggtgtcaaacaggaagggcttgttcagtttagcagagatggcatgatgcttggcccgagacatcaacacaagtcctttatcacctggaagctttgactccttcatttcctctacctcccactttccatcatatttggcaattt

SEQ ID NO: 35692 - DNA, 368 bp, Homo sapiens
atgagattgaacatctttaaaaatcctcattgaccattcatcatcatcatctgtgaattttctcttctagtctttgataatttcctactaggttgtatttttattactggtgagcagaaatttttaatagattatctgtctttgctttttctgtagtttcattacaatatgtctagatggatattttgttttattcatcctgcttgagataaataaagaatctgtggactctttcattatcctttcatcattctggaaaattttcaggcatcatatcttcaaatactgtctccattccattctttctatccttttcatctggaattccctctgggcatgggacatggccattgtctgatttttttttg

SEQ ID NO: 35693 - DNA, 371 bp, Homo sapiens
gggaagtagtctcaaaatacctagcttaacaaccagagtactaccaccaaagcaaactattttgtcctttcctgtcttcacattacaaactttttaaagctaccaaccaatatgaatttgtctgactggctacccacattctgatatacatattagaaggaagatcttttggaagatggaaaaacagcaagattatggtcataaaagaataatatgctctcaaaaataagcaacaatcattaggctttctatagccacatacaattaattctataagaaagttggctccaacatttcatctttaaaagactttttccattatcctgtttcctggttttcaggtactgtccttacaacagtttggactgaat

SEQ ID NO: 35694 - DNA, 371 bp, Homo sapiens
  misc_feature (1)...(371): n = a,t,c or g
nnnnnnnnnnnnnnnnnnnnnnnnnnnnnnnnnnnnnnnnnnnnnnnnnnnnnnnnnnnnnnnnnnnnnnnnnnnnnnnnnnnnnnnnnnnnnnnnnnnnnnnnnnnnnnnnnnnnnnnnnnnnnnnnnnnnnnnnnnnnnnnnnnnnnnnnnnnnnnnnnnnnnnnnnnnnnnnnnnnnnnnnnnnnnnnnnnnnnnnnnnnnnnnnnnnnnnnnnnnnnnnnnnnnnnnnnnnnnnnnnnnnnnnnnnnnggttttcttacttctgtaggcctcaggtatgtttagttggattacttacaatttttaaaaaaaattgcattcactcatttagtcctcagaggcccaggaaaatttaagaatttgcatga

SEQ ID NO: 35695 - DNA, 368 bp, Homo sapiens
  misc_feature (1)...(368): n = a,t,c or g
gagcacttctcatgtccagggtcagagtacaagagcactcaagactttactgacgaaaactcaggaaatcctctatcacaaagaggtttggcaactaaactaagacattaaaaggaaaataccagatgccactctgcaggttgcaataactactacttactggatacattcaaaccctccagaatcaacagttatcaggtaaccaacaagaaatgcaagccgtcgacaacctcacctctgcgcctggtaacaccagtctgtgcaccagagactacaaaatcacccaggtcctcttcccactgctctacactgncctgtntnttgtggacttatcacaaatggcctggcgatgaggantttctttcaaa

SEQ ID NO: 35696 - DNA, 373 bp, Homo sapiens
  misc_feature (1)...(373): n = a,t,c or g
cagcatttaaggggcacatcaatcaacaggagacaataagaaaaagacagaaggaaccatcagagatcaaccaggtgagaatgctacggcagacactgctggttacataccaaagaaccattcatatcttctttctagctaacagatatcttctcccagaaatagagtaatgaactcaaggaaggtgagagcatcccccagtctcttggggatggctcagggttgatttaagtcaatcacagtagtatttcctttgccagtgattgtttaagggcagacatgtgacatggttctagccaatgagatgtaagagagatgttctggggattttcctccctataaggagatatccaccnaggaganaccccagcac

SEQ ID NO: 35697 - DNA, 192 bp, Homo sapiens
  misc_feature (1)...(192): n = a,t,c or g
gttataaacaaggatcacagtttattaatctagtcttttagcattaaaaaaaaaatcggnnnnnnnnnnnnnnnnnnnnnnnnnnnnnnnnnnnnnnnnnnnnnnnnnnnnnnnnnnnnnnnnnnnnnnnnnnnnnnnnnnnnnnnnnnnnnnnnnnnnnnnnnnnnnnnnnnnnnnnnnnnnnnnnnnnnn

SEQ ID NO: 35698 - DNA, 386 bp, Homo sapiens
cttggctaaggccaaactaagaaaggggcttgtaacttcagaaaaagattcaagatgagctgacaaaagaaagtcacctattaaggagagaaattacaaactagaccaaattcacttcttaaatggcaatttcatatagttcaaccaaatatatgccaggtactgtgccagggatgcaaagatacagtccctgctttcatcaaggaagttatggtctaggggagggaaggacagcagacgatatggtatgatacctgctaagttagagataagcataaggaacatagggacagatagacggatcagagggttcaagaaagatttcccggaagaggtgatctcagagctcagtcttaaagggccagcaggagttagccaggtagaga

SEQ ID NO: 35699 - DNA, 378 bp, Homo sapiens
  misc_feature (1)...(378): n = a,t,c or g
cctcgatgaaagctaaacacaaccaaggacccctcccaggacagccctggtgaagtggaatcacatagaaaagcaacagatgacacttgacatgaatgtcgacgcggccgcgaattccnnnnnnnnnnnnnnnnnnnnnnnnnnnnnnnnnnnnnnnnnnnnnnnnnnnnnnnnnnnnnnnnnnnnnnnnnnnnnnnnnnnnnnnnnnnnnnnnnnnnnnnnnnnnnnnnnnnnnnnnnnnnnnnnnnnnnnnnnnnnnnnnnnnnnnnnnnnnnnnnnnnnnnnnnnnnnnnnnnnnnnnnnnnnnnnnnnnnnnnnnnnnnnnnnnnnnnnnnnnnnnnnnnnnnnnnnnnnnnnnnnnnnnnnnnnnnnnnnnnn

SEQ ID NO: 35700 - DNA, 387 bp, Homo sapiens
acatattccttcaggagtcacaacccaggagacaaagataagggctacaatagaccggtgatgaaagaaggtgcacaaacagatttttggttttattaagtaatcaagatcacacaggtcacgttagcctgccaacactatacaggcattttttggcacatgcagctaccaatatggcttcatctgtccagctatatatggcttatttggcacttccgcacaatggaattgatttctgcatcagttttaagtgtagatttacttatattaggcttactatataaattttagtttaatttcgcagttcctatatcagctccaaatgttttcttagattattaaatattccctaggtagaaaattaaatattaaaaagtagtagtattg

SEQ ID NO: 35701 - DNA, 380 bp, Homo sapiens
gtttcctctaaaatgttgttcctgttacatgtgttctgttagtattttccttctatcacttaacaagactctggattctcattgtctgatctctgtatctatgatattctctttggccattttccttgttttgcactttttctctgggttctaggggattttcttaagcctgggctccatatcagaggtagattttcctggggctgatgatgctcttgctgttcctagggtaatgttaagttctctaacagagagatccctctccttaaattctttcttggtgttgccagctgttcctgcatgtcttatcttttctctcacctcatttcagagtccctgctctccttaaatgccctgagtaaataccacttctactcctt

SEQ ID NO: 35702 - DNA, 388 bp, Homo sapiens
gttagaaatcaagtttttggagcaggtggatcaattctatgatgacaactttcccatggaaattcggcatctgttggcccaatggattgaaaatcaagactggtaggatcaaacatattttccctagaagttgatgcacaaatgtctgatgctctatccatgtgaatttattttatggtccactttttactcagtagatgcattcttttcaggtaaagaactttctcaaggatttgaaagccttcccaaagaaggggaataattgtcctttctggttccattcattgtaaatgaaaagttaatggttccagtgcttcttttctctgtaaacaaaaacccaaataatttttcatgtattaaaaaaagaagcaaatcaattgattgcagt

SEQ ID NO: 35703 - DNA, 372 bp, Homo sapiens
  misc_feature (1)...(372): n = a,t,c or g
aatatattacctatctcttgctctgattttccaagaatattaatacctaataataataccagtactatcttaccaaaagaacaatgctgttggtagaacaggttttctcattaaggctataatattgacaacatagtatagttacaatatttctgggctgggcatcgtgtttcatgannnnnnnnnnnnnnnnnnnnnnnnnnnnnnnnnnnnnnnnnnnnnnnnnnnnnnnnnnnnnnnnnnnnnnnnnnnnnnnnnnnnnnnnnnnnnnnnnnnnnnnnnttanccaggggtggnggtggatgttggtantcccnnctattggggaggctgaggcttaggngnaggattgnttggccnantagnttgggg

SEQ ID NO: 35704 - DNA, 392 bp, Homo sapiens
  misc_feature (1)...(392): n = a,t,c or g
aacaaaccannnnnnnnnnnnnnnnnnnnnnnnnnnnnnnnnnnnnnnnnnnnnnnnnnnnnnnnnnnnnnnnnnnnnnnnnnnnnnnnnnnnnnnnnnnnnnnnnnnnnnnnnnnnnnnnnnnnnnnnnnnnnnnnnnnnnnnnnnnnnnnnnnnnnnnnnnnnnnnnnnnnnnnnnnnnnnnnnnnnnnnnnnnnnnnnnnnnnnnnnnnnnnnnnnnnnnnnnnnnnnnnnnnnnnnnnnnnnnnnnnnnnnnnnnnnnnnnnnnnnnnnnnnnnnnnnnnnnnnnnnnnnnnnnnnnnnnnnnnnnnnnnnnnnnnncaatgtaagacaccatactaataatgggagaaaaactcatcacctcagtanatacggaaaaagcatttgac

SEQ ID NO: 35705 - DNA, 389 bp, Homo sapiens
ttttattcctctcaatttccaagagacatgtgtctctaattgacataaatttgactggatatatatccatttataatattatttctgcaccatatctttctttgagaagattctcaaatacagacacagtatttcttcttgacggtataagcttatctctctaatgataagaatatatcacaccttaaaacccctctagataattatctcggttaattattttaatcctaagaagcagcatgtaggcaacactggattttagaaaaatgctgggtttgaaataagagacctggttaaatgccttccattgccacttgttttaggatatggggtcaagtcttacagaccctctgattgacactattttcttacacaaaattgtggggcgg

SEQ ID NO: 35706 - DNA, 369 bp, Homo sapiens
  misc_feature (1)...(369): n = a,t,c or g
gggagatccattaggaagtctttatgtaggagtttaggcctaagaagtgaagcctagtgtcaaatctaggttagtagcaaaggtaactgaaaaggagggacggatgacataggtaagtgacagagctctgctttcataccgagatgtcagtaatattaatggttttacctttgaaattaaattgtgtggtcaccttcctgcccagttttttgccaagcttttactggcttattaatgccttaactgcttatctaaccaatctttaagcatgttgctattatgtgccnaaacctttnaaacaaacatatgaattttncataggtcctaagcagttcganttgctaaattcntactagagaaagncatgga

SEQ ID NO: 35707 - DNA, 390 bp, Homo sapiens
  misc_feature (1)...(390): n = a,t,c or g
agagttcccatgtgccatccctgtatgcaaggagaacacgcaaggaaggcagaagcaggacagtaagttagaaggcaattttaatacatcacacattgagcaggtggcccgaaacaaggagaaaagcgttagatggatggcattacaaggatttatctgtttcctcttcctcataataaacatcactaaacttaggaagcagtttgaattatgcatattttaaaaagatacttaaaagtatcataaattgtcattgtgcactgaaaccttaccaaaccactgtgcagtgagtactattcaccaacaagcccatgtctcaaagagatcacactaaagagatcaatttttcttcctttttacaaaatatttgctcactaanagataccgtta

SEQ ID NO: 35708 - DNA, 65 bp, Homo sapiens
gtattttttggccatttttacatttttttgttaagtgtctgagtcatttgctttttttttttttt

SEQ ID NO: 35709 - DNA, 272 bp, Homo sapiens
  misc_feature (1)...(272): n = a,t,c or g
gtccagataaagttcatttttgctgacagtatccaagctctaaagaacagactgtttttctaaatattctagaatgaatataaattaggaaaaggaaaaaagttttacgaagaatgtttgttttcataaaatttcagagtgaccaccacttcacagtagttttcaaataattgatttgttacataaggatttaaaaaatgataagttacacaatatgccagtttgcctagcaaatatagccctgtatgtatcctctgnaaaaaaaaaaaaaa

SEQ ID NO: 35710 - DNA, 360 bp, Homo sapiens
aaacagtactctttaagaccaatttggctctggaatttcaagaccttcaaccttagtgcagaagggttggttttagcttgtaaaataatacattttgaaggtaaagatgacaaaccaagactattttttcttccaatttcagtagacttagctaaaaagatcgtacctgtataatttgctttcttatttctccaaatgaaatgtgtgcaattcagcgcatgttgggtgaactgagttgacctttggggctctggaatcttctgtcttctttcatctcacctagagtaaggccaggatgccttaggaacatgtgaactatactctggcagaaagatcttgcaaagagcttctattttttgg

SEQ ID NO: 35711 - DNA, 356 bp, Homo sapiens
  misc_feature (1)...(356): n = a,t,c or g
gcctaataaagagaccctatattccaggcaaagaaaatcttcatgtagagttgtttgtcctctcctccttctctgttgttgttattattgttgtttttgttattattattattgcacttactaagtacttactgtgagccaggcaatattttaagcacttgtaatattttatttaatccacacagcaactctatgatataaatgctgtcattattgntttactgatttaaaaaaaatccagaaacaaagaaattgacttgcctactaaaaactacagttagtatgtagcgtaactgaggttcaatcccaggcagtctggctcaagagtctatactgagagtcaggaaaactatggc

SEQ ID NO: 35712 - DNA, 356 bp, Homo sapiens
gtttaagttgtgattcttcaaagacattttggggttgttttaatttgtgaacaaatacaataacttttattttttttgatataaataaaatgaaataacttttttgatcctaattaacatatgtacagactttggtagactatatatccctgttttaatacttacagtttttacctatgatgactgaacttaaactagccattgcatcagataacatttttcaattagtaaaaaaagtttttcttgttatagttctgtaattttaacattactggtttaagtcttctagtttcaccttctaaaaatggagtagccactgtaaaagtctaaaaaatgtccaaataacatttgaaatg

SEQ ID NO: 35713 - DNA, 357 bp, Homo sapiens
tgttgatgctagttatacactgtttcactgatctccagaatcaatgaaaaacaggactgagtgggtaaaagaatccacatggcttttggagaagcaattctatgaagttaactatgtaatccccactgtatttgtaacagtttgtgaaaacataaacacagtatctgctttatgttgggagcatttatttgttcatccttgaagctgcttcttagaacttcagcctgttaatgccatctgataagataaggaataatgctcttggaaaaaaatttgatgtttgaaatgtagaatgaactaatgttttgatcttttctccccgtttttccttttgtagtatgactatgaatatgatga

SEQ ID NO: 35714 - DNA, 357 bp, Homo sapiens
cttcagagaagtcagttggagaaaatgaagaaaaaggctggctgaaaatcactataaccatcagttactggtttcagttgacaaaatatataatggtttactgctgtcattgtccatgcctacagataatttattttgtatttttgaataaaaaacatttgtacattcctgatactgggtacaagagccatgtaccagtgtactgctttcaacttaaatcactgaggcatttttactactattctgttaaaatcaggattttagtgcttgccaccaccagatgagaagttaagcagcctttctgtggagagtgagaataattgtgtacaaagtagagaagtatccaattatgtgaca

SEQ ID NO: 35715 - DNA, 106 bp, Homo sapiens
caaattcaagagtcttattgttgagattgaagatttcctaaaaataactaaagagtatagccttggcaagttaaatagcctttatgggttaatttttttttttttt

SEQ ID NO: 35716 - DNA, 370 bp, Homo sapiens
  misc_feature (1)...(370): n = a,t,c or g
cagaaaactatgagacaaaaagagagatccctgctaccccagctatcacccatgaaccaggaaaatcagcacctcctgaaactagacagaaaggctcacaggcccagccttgacatgttgaatcagtctgcattttggctggaacccaggtggctccactgcatgtaaagcaccttcccagatagtgatggagggagatcctaggacagtgactctgctccacggggagaagcctccagtccagatgggagcagccagaagggcccaggagggacatttccaagaagataaaattaacagaatgtccaaagtgtcgtcgacgcggccgcgaattccnnnnnnnnnnnnnnnnnnnnnnnnnnnnnnnnnn

SEQ ID NO: 35717 - DNA, 366 bp, Homo sapiens
aaaagttaagtgaacatttgaaatacaggcttcttttatcattaaaataacgtctcccatggagtgagagtgagggtggtagtggtggggttcctgagattccaaatagattgtacttctggccctaaagattccttattagcaaaatctttgaatcagccaggtttgaatgataaataagaggacactgggcatttggaatcttcattatctatcataacaaatattgcctctggcaaagaccacatccctcagtctgagctctcacttcaaactgcaggggggccaggttagcagtgggaattgcatttctaagtcttgacagccaaggtccttagacaagaggggcctaagctttgtgacatc

SEQ ID NO: 35718 - DNA, 377 bp, Homo sapiens
  misc_feature (1)...(377): n = a,t,c or g
ctaatataatacacatatttggcctcatcattaaaaaaaaaggtttttttaactaaacacattactaggctcaagctagtatgagtgtacaagtaaaacaggaaacaaatattcctttataaacactaattccagaagacttcacacccacattctaaaatctaattagattaatttcccagggcattcatgtattcttagtagctttcaatttttaagtgtcaaaataaagccttatttttaaatgtgggtggtgttgatgaaacaagtatgagtaatacttgcaggaaacataatattagctttagctgcttantgggtgatacttgaataagtccttcaagaancactttccatgnctcaccaatgnaaagcat

SEQ ID NO: 35719 - DNA, 358 bp, Homo sapiens
agttaatgaatcagtgggctgtagaatgaaagatgctatctttatacaatgccaaatgaagccattaatttgaaaaaaaaaagttagtcaaacttttctggagtctaaacaatgccaaactgccagcttgatggatttatccctcacctgaattgactggaactatatgggcttgttctgctgttgtgtgcatggggctgctacatgtgtattaaaatgtcgtcttggcaagcacccccacccatttgttcatgggaaattaacatttatcagatagatacacagaaaagactgttgttgcattttattttccatttattttctgggcaaatgatgggtttgcaaattgtttttgcga

SEQ ID NO: 35720 - DNA, 372 bp, Homo sapiens
  misc_feature (1)...(372): n = a,t,c or g
tttgaattctttatttttatcctgtgtaggtctactataggtttttgctttgtagttatcattaggcttgcataaaacattttatactaataacaggctgttttaagctgataataacttaactttgatcacttgcacaaactcaactcttttactcccccctctcagtttgttttgttgacatgttttgtatattttatggtttgtgtcccttgacaaattagtagctgtagttggttttaatagatttggtttttttggttgttttttttttaaagaaaggtaggaggatcacttgaggccaggatgaaaaaagcctacttaatataacaagaccctgctntacaaaaaaataaaataaaataaattagg

SEQ ID NO: 35721 - DNA, 376 bp, Homo sapiens
gtgagacctcatcacacaaacaaaaaaagaattagattaagatgagggtcaacatcaaggtcagggacaaagtcagcacagaggtcaaagataagatcaagaaccaggctgcagtgatagtcaagcttggtgtgcagatcaaggctgggccatgggtcagggttaaggactgggttaggctggaggtcaagattaaaaacagagaccaggtcaggggagaggctgaggtcagaagaataggtcagcaattaagaacaaaaactaggcccaaactaaatgtccatccaaagaggaatggttcaataaactgaaatattcacacagtggaatgctactcaacaataaaaaagcaataggcgaacgcggagagcacgcc

SEQ ID NO: 35722 - DNA, 374 bp, Homo sapiens
gtcaagaatatgatcctacctattaataattacattaaatgtaaatagacagcatttgccaatcaaaaggcataaagtgaatgaatggataaaaaccaagatccaatcttatgctgtttgcaagagacttagtacagtttttttggatacacactctaggcaaaaagggaacagatgctttaacactcctaaatagttaaaatgatccatcaggttttgtgcagtgtgggtaaggtttctgctacatcttaataacattggttaccagtgttttctgccaagggctcctctgacattggattatatttcacagttttcttcttttctcattttttataattgagttttcctttttccacattcttaatatccag

SEQ ID NO: 35723 - DNA, 366 bp, Homo sapiens
  misc_feature (1)...(366): n = a,t,c or g
gacaaccagaagctcaggggcagcctggtgggttttctataaagcaaaatgcagccattgaaagggctgtcctgggttctgccattaggaacttcctatttcttaggtgggggaaacttttctctaaagcaatgagggtaccagcaaatcagagacataaactgagggccactggcatacggagcttgctgcatgggttaccaggtttttattttctttaagtccattctttcaggctgtatttccagctttgctttggaagctctggccactctgagcccacattccttcgtggccctatgcctggagctgaggtcgacgcggccgcgaattccnnnnnnnnnnnnnnnnnnnnnnnnnnnnnnn

SEQ ID NO: 35724 - DNA, 366 bp, Homo sapiens
gttttgctaaatgcatggtgacagttgctggtcccttcgggtttcatatttaattaatgatgtgaatgaagttcagcaaatgagaagcatggacatcagtttctttccattcctagttaatattcaacccaggaagggatggtcattcacagctactattaagaaagctttagagttttgttactgagcatagagaaataaaattttaaatatcaaaattttacttccgagcattttttttagcatggatgttaaacaccatcaacagttctgtattagttctatcccaactcccttgatagatacaattaaattttactgatgttggtattttactaaagagggtcattatacttttagtataaa

SEQ ID NO: 35725 - DNA, 332 bp, Homo sapiens
  misc_feature (1)...(332): n = a,t,c or g
ctcccttttccacctctttgccagcatctgttatttttttgtcaaatattttaatcaagaaaactnnnnnnnnnnnnnnnnnnnnnnnnnnnnnnnnnnnnnnnnnnnnnnnnnnnnnnnnnnnnnnnatggtannnnnnnnnnnnnnnnnnnnnnnnnnnnnnnnnnnnnnnnnnnnnnnnnnnnnnnnnnnnnnnnnnnnnnnnnnnnnnnnnnnnnnnnnnnnnnnnnnnnnngctattgaattttctttatacagtctgcttattaatcccttgtcagttttgcaaatattttctcccattctgnaggttgnctctgnactttgttgg

SEQ ID NO: 35726 - DNA, 331 bp, Homo sapiens
agatttaatgcaatccctaaaaaaacccaacgatgttttttgcgtaagtagcaaaatcaaccataaaattcattagcaatctcaagggactcagaacagacaacataatcttgaaacacaagaattaaactggacttcaatcagctttgaaaagctggtttcaaaatttactacaaagctattgtaaccaaaactgtggaactagcatgaagacatatgtatagaccaacgggacagaatggaagattgtaatcggtgcatttcaagcatttgacaatattcaacatctattcatgcttaaaaacactcagataacttcctcaatatgata

SEQ ID NO: 35727 - DNA, 322 bp, Homo sapiens
cccagaggaatattttataaatgagcattgagtatttttcgtactgtggtataggagtatattttgtactgttgatgtctgctactgacttagaacatattgattattgggttactatggagaaaggtggtcttaagaacagcaagggctgagcagcagtaggttggggcagagtgtacagtagaaattacttagtgtggggcctttgtcatttaatatctagctgagttacttaggactctctcaaggtcttgcctatagaaagttgaaactgaacttgattcctaaagtttcctttaagttttaaagtccatacacacac

SEQ ID NO: 35728 - DNA, 324 bp, Homo sapiens
  misc_feature (1)...(324): n = a,t,c or g
attttgacagctaagagccaaaacatctgtgcagcatctattgctgcaggtcttccaacagcagggaaagtcatacatacacatcaataaggggtgtgactgctcaagtttatagaaatgatgctccaaagagaccccaaagnccttttaaactttacnaanggtttnaannacccccagaataaaanttttcaggtanccanttntaatcggggaaaatggttaaaataaatttctagaaaaatttgagaaccactggtatcctgatatttttgcctttttactctttgaaaatgagaaggcangaaactattttcctttaaa

SEQ ID NO: 35729 - DNA, 329 bp, Homo sapiens
  misc_feature (1)...(329): n = a,t,c or g
nnnnnnnnnnnnnnnnnnnnnnnnnnnnnnnnnnnnnnnnnnnnnnnnnnnnnnnnnnnnnnnnnnnnnnnnnnnnnnnnnnnnnnnnnnnnnnnnnnnnnnnnnnnnnnnnnnnnnnnnnnnnnnnnnnnnnnnnnnnnnnnnnnnnnnnnnnnnnnnnnnnnnnnnnnnnnnttcaattattttttcatatgaacattttttaaatataacaaatgctgaaggaatagttaaagaatctcttatgtaccccccatgtggattcaataattaatattttgccacgcttttgtatgtccgtatccatgtgtttattttgtgtgctgagg

SEQ ID NO: 35730 - DNA, 327 bp, Homo sapiens
ctaaactaagacaatagaaaaagcagcaaattaaatccgaagaagtagaagaaagaaaataaagttcaaaccagaaattaaaaacagaaaaacaacaacaaaaatcaatgaatccaaaagttgcttctataagaaaaccaataaaactgataaacttctagtcaaattgatcaggaaaaagaagacaaaaaaaatcattacaaaggatgaaaaaaatcacaccatttatagattgtacagaagttaaaggaatgacagaatgttatgaacaagtttatgccaataaatttgacaattcagataaaaatggacaatttccttgaaaga

SEQ ID NO: 35731 - DNA, 329 bp, Homo sapiens
cttttatagagacaaggccatgtttttatttgtggagactgagacagagaccccatgagatctaatgcagagtcacatgactccaaagccaggtcttctatctgctctttggtatataactggatcattattctattgacagaaataaggaatcttcttatttttcaaaggcacccttttgcccttggaaggtatatttagaaatcctttaccagactagaaagaagacagttatattttcctgccttttgataaaaaacagtgtgttttttctaaatcttgttgtgtttgactagagtctgattaaggtcctttttgggaaaataaag

SEQ ID NO: 35732 - DNA, 329 bp, Homo sapiens
ataatcttaagaaacaaaactaagatttttcaatttatgtcaataaaattacataaacatttgatagaactgagggcatgtttacaaaatggaatggtgattttattagaggtggatgatcttgaggatttttaccctaatattataatttatacactttagtgaatgtactatgttatcttagtgttctcttttggtcataaagaggttacctttaatgaaacagaaatctccctatgtccctaatcttagagtctttacttattatttatggttgttatcactgtaataagcaaatatttgagtattcaaaatcgctttttatgtgg

SEQ ID NO: 35733 - DNA, 329 bp, Homo sapiens
  misc_feature (1)...(329): n = a,t,c or g
gacctgtatggaggggagaagtttgcgactctgacagagctggtggagtactacactcagcagcagggtgtcctgcaggaccgcgacggcaccatcatccacctcaagtacccgctgaactgctccgatcccactagtgagaggtggtaccatggccacatgtctggcgggcaggcagagacgctgctgcaggccaagggcgagccctggacgtttcttgtgcgtgagagcctcagccagcctggagacttcggtcgacgcggccgcgaattccnnnnnnnnnnnnnnnnnnnnnnnnnnnnnnnnnnnnnnnnnnnnnnnnnnnnnnn

SEQ ID NO: 35734 - DNA, 329 bp, Homo sapiens
  misc_feature (1)...(329): n = a,t,c or g
ggggttattacatgaaggccctaattcatgctttctctttcttcttcctaggggataagagcactgattatgctaatttttaccagggattgtgggattgtactggagctttttctgatgagttgtcatttaagcgtggtgatgtgatttacattcttagcaaggattccggtcgacgcggccgcgaattccnnnnnnnnnnnnnnnnnnnnnnnnnnnnnnnnnnnnnnnnnnnnnnnnnnnnnnnnnnnnnnnnnnnnnnnnnnnnnnnnnnnnnnnnnnnnnnnnnnnnnnnnnnnnnnnnnnnnnnnnnnnnnnnnnnnnnnnnn

SEQ ID NO: 35735 - DNA, 326 bp, Homo sapiens
  misc_feature (1)...(326): n = a,t,c or g
aattagtttactacataccataccctcttctaagcactttacatggattaatttgtgtaatcttcagtaatctctattgaggtgtaagtgccattattacctccattctctggatttgtacttaggcacaggtaggttattaggtggtggaccaggaattgaatctaagcagtttgaccctaaaacttacacataaaatgtttatggaaagtggaaaattatgataatctaacactaaaattaggatttttttttttcctgaaaactttttttcatgancagtagttttttttggtnatattcttcttcaattnggnttttcctta

SEQ ID NO: 35736 - DNA, 327 bp, Homo sapiens
tgtctaccgagctccttaacagcctgtggaatacaggtttcccatgagtacatcttgagccagttgtcacagctctgtgttaaagaacccaactaatggttcctagtttttaagaaggttaaggactaactagtctctagaccattatgagattaagataatcctgaaataaataataccgaagaagtaactttctaagaacatacagcccagaaatgactgttagaattctcgcctcagatgctattcatagcttataagtagccttgctcttctcaccatgaggatttccataacattatttttaaagtcaggcacttctaaaac

SEQ ID NO: 35737 - DNA, 325 bp, Homo sapiens
  misc_feature (1)...(325): n = a,t,c or g
gttataagactcggatgatacacaggatttgtatcctgctgtctttttaattccctgaagaaaacattaaaatgttaaataaaagcggtggacnaagaagggaactatnacanngggattcctgctggaggggaaaggtgccagctgataccaacaatgttcttcgatgctgtggaaacttntagaacccagaccannntnnggntaaagnggccaggtncagtggctcntgcctgtnatccnagcactctgggnggcngngacnggcagatnncttgnggtcaggattttgagaccagcntgcnaacttttcttaacnctgctc

SEQ ID NO: 35738 - DNA, 332 bp, Homo sapiens
  misc_feature (1)...(332): n = a,t,c or g
aatatatctcacagaatcttaggagaagatgaacattcaagctctgtaaagagtaaggattttagtaggaagagtttagatactttagatatttcaatataataaagttcccactcactttctttcaaagctcagaacctcagatttattataagacagagaattgaattttggccggaaggacaaggtcatatagtacagccctggcctggacattacatgcctgtccttggctctgagaatagttttcagagaaaaatgaatatggtaagaagggcaaagggaatgnctttactaattggtatttgtcaaacttttattaatgnacacac

SEQ ID NO: 35739 - DNA, 391 bp, Homo sapiens
  misc_feature (1)...(391): n = a,t,c or g
ctttgggtaacaagccacttgtttcctttttccacagtgaagcattccttctttaaaacattttgctgcaattaaactgtgtacccctggaggtgaaacttgtgtctcacctgtagacagcctgtgtttctgaatcgcagcatctagtataatccactcgggtacttaaataaagtaccaaaacataactaatgaataaaagaaagcaatgaattagtaagcctgtatttataaactgctgccactacaaaatgtaagaccttatttaataaaatcagtttatgatatttagcttgaaagaacagctacttccttttagaatatccaaaaccttggagacaccatactttatttttctttgattgnttttctaagactaataattttaaag

SEQ ID NO: 35740 - DNA, 394 bp, Homo sapiens
  misc_feature (1)...(394): n = a,t,c or g
gaacgaaagagaaaggaggcttatgagagagaaaaaaaagtgtgggaagagcatttggtggctaaaggagttaagagttctgatgtttctccacctttgggacagcatgaaacaggtggctctccatcaaagcaacagatgagatctgttatttctgtaacttcagctttgaaagaagttggcgtggacagtagtttaactgatacccgggaaacttcagaagagatgcaaaagaccaacaatgctatttcaagtaagcgagaaatacttcgtagattaaatgaaaatcttaaagctcaagaagatgaaaaaggaaagcagaatctctctgatacttttgagataaatgttcatgaagatgccnaagagcatgaaaaagaaaaatcagtttcat

SEQ ID NO: 35741 - DNA, 388 bp, Homo sapiens
accagctctgtgaatctggatattttataatttctaggttaagtttcctcatttgcaaaatggaaataataagactacctacttcacgtaatttttgtgaagcccagatgagataatcaatgtaacacctttcaatggcttctcatttgttttagaattaaatttgatttcactgatataacctaaaggtttggatgccgttcatcttgcctagaatacattttcccattttcttagcattgtcagctcattttcattcttcgggtgtcacttcaaataacacttcctcaggacactttctgtgactgatcatccatccatccatctatccattcatccaacacaaacgtttactgagcacctatcctgcaccaagcatggtattagg

SEQ ID NO: 35742 - DNA, 388 bp, Homo sapiens
ataaaacctgatcagatacaaatgaaagtgattatttttgtgtgttcttaatacctaataggttttgatattttactcattcattcaacaaaaatttattgagcatccagtgtttttcaagcaccagaaatagataacagaaggcagtttctttctttggagtttacgttcttgtggaaaaacagacgtggaaaaacacacatataagcaagcacagtgcagttaagtgttgtagaattttatacaaaattctcaagatactattgtgccctgaggaagagacacatgtgctgtccgttcttagggcaggtgtcacagaaaagccacatgaggctaagttaagaatatatgtgtgtgggtggtgtgtatctgaaaaaaatatttttga

SEQ ID NO: 35743 - DNA, 393 bp, Homo sapiens
tctttatttaccacctggctgccaaaacactatagttcatattctctcaaaatattgagcttaggctgatgctaaaacaaaggaagcatatagaacaatatatacaacaaacactgatacaatttaaagaaggaattgacatatttttcatcaaagtatgttttaacacatctctttgaaatattataggttacacatgccaaaagaacatagtaatgtagatgatttgagtaaattcttgatctaatatgtagatcacacatagaactctgctccctcaaattggagaattaccttcttctcaacattcacaaaagttgatcataatcttgttaagcaagctacaacaaatgtaaaactttgtacataaagaccacattctctgacaagagg

SEQ ID NO: 35744 - DNA, 387 bp, Homo sapiens
ggaagacagctgcccttgtgcatatactctcaaattgagggggatgggtggttaaatgggaccagcaaatgttgcagatgttacgtaaaagtcaattaggaagtgagttttgagaggagcttattacttaggcagccttttgactgtgatttgagaatgtgagggaatggacagctttattaatggggatttggaattatgacagagagaaatattaatggtattagtaaaactcattataaaaacagtactttacaattaaaatgtcacatttgtgtaaattgttttatttgcttacaaatcaaaactgttttaggcagagaaaatattatttgtgtcttgcagaggaggaaatagatgcctaaagttcaatgacttgccaattgc

SEQ ID NO: 35745 - DNA, 386 bp, Homo sapiens
ctcttaacttagaaatgaatggataattgtgagtgatcattatgttgaaggtacaaagagaaatgagagaagagttaatactttggatatgagaaataaaacacccttcaaatttgtgtcttctggtacctttttttaatagagcaaaaaactcctagggtttttcacattcactgagctgcattgttgaataaggcttgattatagaggttcctgccacatattatacagttacttttttcttgtggagtagtgttcttaaatttaataggcatgaccttcaagatcatattaagtttctgtatcttcttttaagaaggcagcttgcttggaaatattaaggcttcacttgggaaaacccttgaggaattgggatggagtgctaa

SEQ ID NO: 35746 - DNA, 371 bp, Homo sapiens
  misc_feature (1)...(371): n = a,t,c or g
nnnnnnnnnnnnnnnnnnnnnnnnnnnnnnnnnnnnnnnnnnnnnnnnnnnnnnnnnnnnnnnnnnnnnnnnnnnnnnnnnnnnnnnnnnnnnnnnnnnnnnnnnnnnnnnnnnnnnnnnnnnnnnnnnnnnnnnnnnnnnnnnnnnnnnnnnnnnnnnnnnnnnnnnnnnnnnnnnnnnnnnnnnnnnctttacattttagggagacatcatggtacattcattttctaccaaatggagtaaaaagagcttccgtagagacatttagcattgggcaggcaaatacatttatttccttctgtaacaagcatgtgcttggcanaacactgagaactggaggttgagaaaaaaaaaaggggtnttcctgctca

SEQ ID NO: 35747 - DNA, 379 bp, Homo sapiens
cgttcatgatgaatacatactattggtcaatgctgcagtttttatgttatcttgaaagacagagggagaaataacttgcatttccaaactcgtctcttttatactttgaagaaggaacttgttacctttattgtacattaatgattacatatataactcactatgttttcttttctctacttccaaacccaagaaggcattctaacagtatctcagtaatctccgctaaccctgccccagttcagtcatatcctgctagaccattttagttatctaataattacagtaaacctcccttccattcctcccctcttccttcattcctcaaacattgccagcaaccaccaaatccaccttctgccccagcaatctaaattgg

SEQ ID NO: 35748 - DNA, 376 bp, Homo sapiens
atttacagaattatatttaaattcatatagaatatttacatttttaagttatatttttgaaattagaagacgaagtacagctgaagtttgataacaaagaaatatatataagacaaaaatagacaagagttaacaataaaaacacaactatctgttgacataacatatggaaactttttgtcagaaagctacatcttcttaatctgattgtccaaatcattaaaatatggatgattcagtgccattttgccagaaattcgtttggctggatcatagattaacattttcgagagcaaatccaagccattttcatccaagtttttgacatgggatgctaggcttcctggtttccatttgggaaatgtattcttatagc

SEQ ID NO: 35749 - DNA, 366 bp, Homo sapiens
aagggcttctgggtctagcatttccagcagcagaggcagaccctttggggtgtagataagtcatctgagtctgcagccgtaattgagtgtcatgaaggcacctccagatggctgtgaaatgaagctcttttgtttttggcctatgagagttgtataacttctgagaattccaggatacagagaacaccagggtgggatcattaagtatggtgatgttgtgataactagggggtctccttttggcttcctttcccaattaaaggtggaacatatttgtaaaatgaaaaatgtggctttgattagctgagtggctatcattcagcactgcttacagtttatttagggaatcattttgtcactacgtag

SEQ ID NO: 35750 - DNA, 369 bp, Homo sapiens
  misc_feature (1)...(369): n = a,t,c or g
ggagaatatcactcaccttctaagccacgactataagcaagtttgttacgtcaaatagaaaacaatatttaaatggaaaacctaagctgcatccacttgctacccaagttcttctgacatgcagaaatcaatctgaaaatatttaagaaaacattagcttcaatcaatccccatcatccttgttcttctgatacacggataattctttgacacaactgtatgacctgctttatttcacttactcatttataaaataatatacccatccaatgactacttctagagccatatcatgtcaagcattgctgtcgacgcggccgcgaattccnnnnnnnnnnnnnnnnnnnnnnnnnnnnnnnnnnnnnnnnn

SEQ ID NO: 35751 - DNA, 361 bp, Homo sapiens
  misc_feature (1)...(361): n = a,t,c or g
ctcatattttacctggtctgttgagtcctctactgaatgatctgattctaagctaggccacacttgatttcctttctaggttaagactgtgggcttagctgtgggctcctattttaccctgtcctttcctctttatgacatgcattatgcttgaaatttcaagatacatatttgaatgtttttaagcttaggatggccattatgactgatattagagaaacttatactcactaggcagagtcctaggttatcattgcccccacgaaggcaaactacngctgagagaagctaaagcatgatgattgnaagngagagttctgtgttaaagntgcctcgntcatatgttggtattgccatttac

SEQ ID NO: 35752 - DNA, 382 bp, Homo sapiens
  misc_feature (1)...(382): n = a,t,c or g
ctaactttttaaggttcttcatctagctccctaaatctcaagatgatgagaaacatgcttctattgttttcctaataacccgtccactaaaatataggtaaaaatctcagtaaggcaatgccactaagatgggtttttaaataggtgtattccatctccctgcctcaacagagatttcaggatgtggcactttcatctgatcctgtcatataataagaacaggtaatttctctgatccctttccagcaattctcaactgaggttcctcatctgaatcaccaaacataggaaattatttcagtgacttttctcaattggtccaagaatgatcntactaanaccgtcctaaatgcnctgggagctaaaagttnatattcattgg

SEQ ID NO: 35753 - DNA, 377 bp, Homo sapiens
  misc_feature (1)...(377): n = a,t,c or g
tatccatccagccagggacctcatctagggattgggggcagcaaggggctggtaagggccagaggtaattccagggccactctgtgccctaccctcaggtggggcacaagggtgggggcactgcgctgggtagaagccccccgccagcccctggcccaccagtcatctgtcagatacggaggcaggggtgaggggagggtgtgctggggaagtcaatgcatccagcctcgaatcagtgagtccctaggccttgggtaaggcagggctgcagggatggcagtgaggacaaggggctcacctccccccagcagccccacttcacatgtttgtttcttgagttcagtgctcatagacttaaaaaaaaananaaaanaaaa

SEQ ID NO: 35754 - DNA, 375 bp, Homo sapiens
  misc_feature (1)...(375): n = a,t,c or g
cgacagtgctttgtagtttcattgtgtaaggctttcacttctttggttaaattcatacaatagactcataggtattttgttataagtggaattgtgttcataattcctgttcanatttttcagtgcntatanatngnancnnctgatttttgtgtattgatcttgaatnatgcatctttgntnantttgtnattanntntngttgtttcttntanattctttnggatttngnatntnntntattnttctttccgntatttttgnntncntntatntttnatngtattgntgtntntntnttttncgtntatttncnttttacnnttnnnttttngatntngtntttnntntttnttnattttttttntcttttct

SEQ ID NO: 35755 - DNA, 360 bp, Homo sapiens
  misc_feature (1)...(360): n = a,t,c or g
gtctagtatattttgggctcaggcttcagagcccagaggtctaagaaatagtcaaagggcgggctctgtgataacttgagtttcattgaaattttaaaaataactttcatgggattataaagtaatattcaatgtagaaaaatacagaaaatatacatcattcataactgtgttctgaaaatgttagtgtccttttccctacatttacattttagttactcttacttggttgctntaaatatattcagagattattttctgttatggcttgaanccntaacagtnnattccttgcnnatttaananntntggagttnggctgtnnaanctgtannacngtncatgatcttcatngaggcc

SEQ ID NO: 35756 - DNA, 379 bp, Homo sapiens
  misc_feature (1)...(379): n = a,t,c or g
aaacaatttattcatatataagcaaatatattttgttccctcctgtctcattttaaacactgttctgcaccttgcttttttcatttaacatcttggaggtcaatacataaacacattttcatgttgtcaatggctgtatgctattccattatgtagatgtaccaaaattatttaaacattcccttactgatgaacattaagttatagaattaagactttgataaaacgatgtttaaatttagcttaagtattctgttcccattaagaactgcaagcctnnnnnnnnnnnnnnnnnnnnnnnnnnnnnnnnnnnnnnnnnnnnnnnnnnnnnnnnnnnnnnnnnnnnnnnnnnnnnnnnnnnnnnnnnnnnnnnnnnnnn

SEQ ID NO: 35757 - DNA, 377 bp, Homo sapiens
attttgtagccttcacatctgtccaaatccttttcatctactgaaggcttttcatcaagttccagggaatcttctataatcctccaatctgaattaatttttctatcctacgtatttatagaacaagttgtttgcctaatattaccactgttcattgtcccatattataattatgtgtttacatatacaactccttgactggttagtaggatatttgagagcacgagttatatcgtagtcaatttttatatcctccttaataacacatgcttcatataaactaaagtggcatttaagtacagatatttgtagcttggctcaaagaataataaagtcaacaaattttaatattaacaggtatttataagttcaacatt

SEQ ID NO: 35758 - DNA, 357 bp, Homo sapiens
  misc_feature (1)...(357): n = a,t,c or g
cgcggccgcgtcgacctggaatctggaccgagcctatgactatgtgaaagaaagacgaacggtaaccaagcccaacccaagcttcatgagacaactggaagagtatcaggggatcttgctggcaaggtgagtcagtgactttctccaattctccctccttttaagttccctaaagcaagatgaagtgtccttctctgtagctacttctcaagctgatttggatgtgatattttttcaaaaaagacttatttctctatcaatccagttttcaaaacataattgtaagcatttaagatttgcatgggctgnnnnnnnnnnnnnnnnnnnnnnnnnnnnnnnnnnnnnnnnnnnnnnnnn

SEQ ID NO: 35759 - DNA, 366 bp, Homo sapiens
  misc_feature (1)...(366): n = a,t,c or g
ttcacttaaatatggaattctggaatatcataaaatcccagagcgtcagggctgggcaaagccagtctggatcctatgtctgaggctgagagaagggaagggctttatttaacatcacaaggccagttagctgtggaagtaggactcagacccagttctctgtattactcaagtgatcatgaggcttcatttagatgcattgttaaaacatttggcagctctgtgacccatcccccacatgaccgtggcatgacttccttcatctgatcattttttgcttctcttaagcctgagtgctaatcagtgngattagaaagaanggancccattagctggtttgctccccaagttgaatattccaattaa

SEQ ID NO: 35760 - DNA, 370 bp, Homo sapiens
  misc_feature (1)...(370): n = a,t,c or g
gcgggtnnnnnnnnnnnnnnnnnnnnnnnnnnnnnnnnnnnnnnnnnnnnnnnnnnnnnnnnnnnnnnnnnnnnnnnnnnnnnnnnnnnnnnnnnnnnnagagcttaaagtaaaattaaaaaataaataaaaaagaaaaaaaaagaaaaagaggtttaatggactnnnnnnnnnnnnnnnnnnnnnnnnnnnnnnnnnnnnnnnnnnatgaaaggtcgacgcggccgcgaattccnnnnnnnnnnnnnnnnnnnnnnnnnnnnnnnnnnnnnnnnnnnnnnnnnnnnnnnnnnnnnnnnnnnnnnnnnnnnnnnnnnnnnnnnnnnnnnnnnnnnnnnnnnnnnnnnnnnnnnnnnnnnnnnnnnnnnnn

SEQ ID NO: 35761 - DNA, 358 bp, Homo sapiens
  misc_feature (1)...(358): n = a,t,c or g
ccgcctctcctaacttcctggagcatcaaacccagagactaaacttggcatttaaggactttggcatctcccttcctttctgaaacactcttcctgctccagccgaagtgaatccttcgctggccctggagtcccactcgcatgtgctgtcaagccaggaacacggacggcacctgccttccactgcccagaatcccgctgggaccccagcgccctatctgtgggtgagcaggccactgtcccngatcgtcactnccttggcttccctntgggggtctgtggtgccctgnttgncccnnggtangganncgatngctnccgcngctctgcttcntancnnatatgtnnnctngttgac

SEQ ID NO: 35762 - DNA, 361 bp, Homo sapiens
  misc_feature (1)...(361): n = a,t,c or g
actgtcatgaatttatgtaccacctttagcacaatccaggttttaggtccttgtgattagatatcagagataattgccccagaagtgcgtgggtatattacatttggtggctgttaatgttttggaatgattttggaagattactttgggtacattatttgctatgattattttcttatattcctgtctattttatagtgaggcatgtttctcctggtctttgctttttttttttttaaancnncnaanntttttnntanngggcnanccngnccnnaantcccaantntntaannngaaaatccngaaaacccccnnnggtncnnttaanngggncntgggnccccntnnaanttttttt

SEQ ID NO: 35763 - DNA, 365 bp, Homo sapiens
gttggtatggagcctttgctccagaaggtaactgaatggttcctagccagcctcattatttatgtggtagtgttggatgtgggtaggcttacaagatttatgctgtggtcccttacgtggcttaatgtgtgccctgtgctgcgggacatttgcttacgcatgcactggaacctgcagattgaggaagaaagcttgtgggaaactaccattcttcagcatgacatgcttacgtttagggatatcgacatgctacaccaagcagtgtacacagtgccactctctttctcctcacatccttgtctggtggaaggaataggaaatataataccataaacttgaataattcatacttctgtaattggggc

SEQ ID NO: 35764 - DNA, 366 bp, Homo sapiens
  misc_feature (1)...(366): n = a,t,c or g
tgaagctttcatatcaacttagaaaaatactcagatttttagccttgtttataaaaccctacatgagctcagagaggtggatagaacagatcatgtagggttttataaacctctctgagctcatcgcatatgtttctgcctactctactatgcctctgttttctttttatttaaacagtccaagattaaagcaattcttcccttttgcctgaggtaactgtttttcaagatctttgctctgaaggctcctggtcattcagacctcagcttaaataaatatcatatcctcggagaggccaatgcccttgttattttagntcgctgcntaggncncgtgagtgcctgatacttttcttgtttgnttat

SEQ ID NO: 35765 - DNA, 388 bp, Homo sapiens
  misc_feature (1)...(388): n = a,t,c or g
cagcatatagttggtacaacaggaagacctcataggaagtttgcagaatttgctggcctcatgttgctatggtaacaagtgcatttactttttcagtagattcagtataccgttttttgaaggaaggttagccatttgtttctagggctgaaactgccttttttctttttgattgatctgagaaaaaagattactaattgggatgcaactctctgaagaggaggtggctttggtttgctgtattggattccagtatgttcagataaatgaactcattggtagttctacttaattttgtaaacatttactgaatattttcataaattatttttaattaccagaanttaatatactaaatttttttttggancctaaaaacatattggcg

SEQ ID NO: 35766 - DNA, 371 bp, Homo sapiens
  misc_feature (1)...(371): n = a,t,c or g
nnnnnnnnnnnnnnnnnnnnnnnnnnnnnnnnnnnnnnnnnnnnnnnnnnnnnnnnnnnnnnnnnnnnnnnnnnnnnnnnnnnnnnnnnnnnnnnnnnnnnnnttgtttttttcttattgtagtattttggtccttatttaatgtntttcttttaacctatatgacttntcttngntntactctctttctgggactncaatntgatgngtannttnagntngacnttcaatccntcatatctctnanntnacatctatttnccattnncncntttctatgtgctnnantctcntnnctatcttangcnatatttnncngancattcattcnatgntnacngngtcatcntgggcgggctantnnnngtcta

SEQ ID NO: 35767 - DNA, 390 bp, Homo sapiens
aataactccaggtggtgaatgggcgggggggaatacagttctgtagaaatacagctctaaagcaatacaaacacagagggaaaaaatgggaagcttggcaagggggaagtgctggaataaagcattttacctttattgacattgaagaaacctcccttcagctgaactccagaatcattcaacacttcatggttgagctgcacagcggagtgttatatagcctttaacagcgatgtggctgacgttcctttattaagaaaggttgataaactgtgaggtggaaagacagcagattacaattcagtaaatgaaccattttaataaaaatatgtgctgcctttatatagatatagacaggaaaaacatttggaagggtgccacatggtgtgg

SEQ ID NO: 35768 - DNA, 381 bp, Homo sapiens
  misc_feature (1)...(381): n = a,t,c or g
ctgggattacacaggtgtgagccacatgcccagccattacatttaatttctaattatttcatagagtattaatctctgtcataaacataaaatttctcaattaataaaacagtgaattaacctggacatcacagcaccagcctaatgctgacctagcatgaacttttaaaaggcaaggtttccaacctatagggatcttaatgtttataaaatgtctaatcaaatggcgtgacatcttcagacttaaacctattagccnnnnnnnnnnnnnnnnnnnnnnnnnnnnnnnnnnnnnnnnnnnnnnnnnnnnnnnnnnnnnnnnnnnnnnnnnnnnnnnnnnnnnnnnnnnnnnnnnnnnnnnnnnnnnnnnnnnnnnnnnng

SEQ ID NO: 35769 - DNA, 386 bp, Homo sapiens
gggacacagagatccaaaccttcctgatgattacatttcaaaggagtggctttctggttcttgagaaagacactgctgagttgtaggagatacatacacatctcaaagggacagaggaagaatttacaattgtaaactcttcttagttagtgctctaagaaaggaaggtcaggggcctacagtcaggtgttggctagaataaacagtaagcttcttttgatagccctgaacttctccagacagactggagctcaaaaggaggctgggtattccagggctgagtggaggtgggctaggctactagaagctttgctagagttggtcaaggctcttagagcaagaatttggatggagttgtttgccaagaattatttacagttctcatt

SEQ ID NO: 35770 - DNA, 378 bp, Homo sapiens
aaacatttaggagaggtggggaaagttgtgaattaagaccagagaggtaggagggggcttgattaacttaagccttcaggtgacaggaaagagtttagaccttagtttcaattgtgttttatttttgaataatgggataacacagttaaatgaatgcttcaaaagaatactgggaagataaaaaggcaccttgggaagcggtcaatattgtgtgagaggggccagataggaggctataatagtagttctaaaagagatggtattttggcctcggtagtgacagtggaaatggaaaaaatggatttatgaaagatcaggaagtagaatcaataggacttggtaattgactagctattgaaattgaagaagtaaaaaaat

SEQ ID NO: 35771 - DNA, 384 bp, Homo sapiens
  misc_feature (1)...(384): n = a,t,c or g
ctgagactgtcaagtattgatttagtgacaggtgtttagaatgatgttgtctaccacgcttgatttctacaacttaagtctgatgtttccttttctggagtcaatcttgccactcatctttagttcaacaaactttccttgaagtttattttgtgtcaagtaggtcagagttcctatgctagaggtgagtacctcactatccagaggagaaggaagacaacctgattttttggtgtgtattctatcataaaacatganaactacaatattttaatggatagcncattttctaagtaatttaaaccttaattaaccaaaacccaactaantttaaacttaagnaaccatgtttttatattctcaattttcatgaaaaaaaatccc

SEQ ID NO: 35772 - DNA, 384 bp, Homo sapiens
tttctttgttctttttttgaagtcattacacaggacttcactccagagttaccattatgagtgtgttcagctctggtccacagaggatggataaaaatggtttgttatgtttttttgctctgcagtgctatgagccttatatctgttaatatgaaggacaaagtcaaaagcagcagtggatagcaggaagggtagagactaatatgtttgggaccaaaaccatctaagttagagatttccagatcacagaggggctgggcattctctggagcagtcattggttggtgctttattgtaatcattttgcgccaatccccaacaattaggaactggaccctgggaataagctgagggtgctgaactgttggggaagggtgactgtat

SEQ ID NO: 35773 - DNA, 384 bp, Homo sapiens
ctgaacttccctgggatggaggactaaagagagcaaaggtgaaggacatctttaaggaagagcagcagaaaaattacagcaagatgattgtgggcaatggatctctcagctaagaggacggatgacagcctttagatctagaactagcccttagaaatggaatggctttttttgttttgttttgttttattgttttgtttttattattgttaatcttttctacagaatgattgtctctacctctttatgccagaggcagaacctacaggtgccctttttggcttttgttgttgttgtaacattagccccatggattgtaaggtggtttactgagttaaaacagattctgcttttgtaaaatgatggcatcactgtggactgaat

SEQ ID NO: 35774 - DNA, 383 bp, Homo sapiens
  misc_feature (1)...(383): n = a,t,c or g
caatttttgaaatttttaatacagaaaaagaacaatacaatcagttcatctgataaaataggctgctgtgttgagtgctttgtgcttgttggtttgtgcatgtgaatgcctcagaagagtgggatatcatgacttgggtttctttctcctttttttggtgcttattgtaaaagaaccattttatttatgttttataaagaattgttcttgttttgagcctaatctatggaatcttctacatgcctaatagaactagtcaagtcagcatacaaaataacatatacacacatttatcattgtaatgggggtcgacgcggccgcgaattccnnnnnnnnnnnnnnnnnnnnnnnnnnnnnnnnnnnnnnnnnnnnnnnnnnnnnnn

SEQ ID NO: 35775 - DNA, 376 bp, Homo sapiens
  misc_feature (1)...(376): n = a,t,c or g
cttggattaaattttgcttcttccatcatttttttgaaatcttccttggcttgcattattttatttttcttttccctgcgttcttcctctgccctggtctttacatactgatcaaacacctgttttctctctttaggattgagaagtaagtaccggggatcaaaaactatcttgtgcaactccttctcccacgttgaaaaagcagacacccctctctctagcagcatgtccttgaactgcttcattcgagcctccagagggacaatggccctttctcgggcagctttaatttcagcttccatggcagcttctttctctgagtcaatgtctttattatcgtctctcttccgnttttttgctttaacaggctcatctt

SEQ ID NO: 35776 - DNA, 351 bp, Homo sapiens
aatgatagtgctattcagaatgccgttagaatcttctagatgagtgaagacttttgtctgtctaagagtctttgagatgtagtctttgagatgtagtactttttagcttcccttcaaaaataacacatcctgaaagtggccgaaagctactaggggcagcacacatcagtgtctgctatacacttcaggagaactgtgggaagaagtaaaaatgaagagtggccattgtccctgaaagtttcttaatctaattagaaaatagatttgagaaaggagggaactttggagcatttaggaatcattttgtgattatttaaaaattattttggaaacagcatattcctttgtttc

SEQ ID NO: 35777 - DNA, 352 bp, Homo sapiens
attttcaacttaggatatcttcaatttacaataagcctcttgggacataaccctatgtaaatcaagaagcatctgtacttactaactcattctatcaggccagttttagaagaaatcaaactacagacccatatctctcatgaacatagatgcaaaaatcctcaacaaaacccaacaaatcaaacttaacaaagtaaatgatagcaggcagactggggaagatcagattccaaagtactgtactgtatcagatggtagaatgatgagggattattttcctctattttccagctaatttaatgtcatattattcctatatttaaaaaattcatttaacttttgtgaaacggag

SEQ ID NO: 35778 - DNA, 300 bp, Homo sapiens
ctttctttcctctccaaaattccaactatatgtatgcatgttaaacttacttactgcattccatttatgccttagcttttttctgtattttctattcttttgtctctctaagctttagactctatattttctattgacaaatcatttagtttacaaattttctcttcagttctgtttggtctaataattttattcccaaacattaaatccataaaatttccatattattagttttagaattctatttgcttcttctttaatagttttgccctacttctcatctgcctttttttttttttt

SEQ ID NO: 35779 - DNA, 343 bp, Homo sapiens
  misc_feature (1)...(343): n = a,t,c or g
ctgtaacatgggtannnnnnnnnnnnnnnnnnnnnnnnnnnnnnnnnnnnnnnnnnnnnnnnnnnnnnnnnnnnnnnnnnnnnnnnnnnnnnnnnaaataactaagtaaaaagaacagttttcaggaatgtatttggtgcaaaataaggtctatctgtatttaacagcacgtgtcctttcctatagcaatgtacaatggttctagtgattataatgtagactcacttcctagctagaacatcaagaggagacacgcatttgaaacggtcctgcctggaaggccacggcccagacttttccctggagcaataaccaccccgcccttctcaatgatatcagcacc

SEQ ID NO: 35780 - DNA, 378 bp, Homo sapiens
  misc_feature (1)...(378): n = a,t,c or g
ctcagtcannnnnnnnnnnnnnnnnnnnnnnnnnnnnnnnnnnnnnnnnnnnnnnnnnnnnnnnnnnnnnnnnnnnnnnnnnnnnnnnnnnnnnnnnnnnnnnnnnnnnnnnnnnnnnnnnnnnnnnnnnnnnnnnnnnnnnnnnnnnnnnnnnnnnnnnnnnnnnnnnnnnnnnnnnnnnnnnnnnnnnnnnnnnnnnnnnnnnnnnnnnnnnnnnnnnnnnnnnnnnnnnnnnnnnnnnnnnnnnnnnnnnnnnnnnnnnnnnnnnnnnnnnnntaaatcctaaggtcttaaaattgaaagggacagaggggtcatcttatctcattcccaactcaagtcagaaaccctctctaaaacattcacaacccctgaggg

SEQ ID NO: 35781 - DNA, 385 bp, Homo sapiens
cctgcctcggaagagccgttggccccacttagaagccaagactgaccttaagcacttagaacaggcttcttgtctgttatcaggtgaaggaagaaattgagtaagcagagtgatgccggggaggcttatgcaggagacagggtgtaagtgggattgaatgaggattggcaaaggcaggaggggcagcccagcctgcagttaggagagcagagcctgtttagaggaggacattaggtaaagtgggaagtttacataggtggggtgaaatcaaactggagaatcacaaatgaattgtaggtgttagggttcctctgaagtgtcatgagaaagctgattgtagaaaggtcagtggtgcatcgtcatgctggatgattggaccggtgaa

SEQ ID NO: 35782 - DNA, 394 bp, Homo sapiens
caagctgaatggaagacaaacattatcttctttaatacctagctacaccccttctagacaatttgcctcttgcataaacagagacacagtcgtcaaaaacaggttaaaaactgggtaacaataaatgacccaagaattaattaactaaataggagactggggtaaacacaggtaaaatgatcatatcaaaataaaagacaagaaacatgattaaattaggcttcaaaagacccgtgagaaactcataaaaggcataatatgcacttacctggattttattctttcatgatttaatttctaattttattcactaccatctgataattgcacgaaacacttattttaaccatgggcaatttaaactattttaatttttatttcaaggccatgagac

SEQ ID NO: 35783 - DNA, 394 bp, Homo sapiens
  misc_feature (1)...(394): n = a,t,c or g
atttgacacattttatttataaaaccacacatattaagctaattctatatttctaaacaaggtatttgtgtcagtttttattaacaaaaagcctgaacggatagttctcagataaccattcatgtgcacccatcactgattaaagttatttctatgaagaaatactattctccannnnnnnnnnnnnnnnnnnnnnnnnnnnnnnnnnnnnnnnnnnnnnnnnnnnnnnnnnnnnnnnnnnnnnnnnnnnnnnnnnnnnnnnnnnnnnnnnnnnnnnnnnnnnnnnnnnnnnnnnnnnnnnnnnnnnnnnnnnnnnnnnnnnnnnnnnntgtggaaaacatagacactgcggactactgggggtagggggtggggactgaaaaactacccactg

SEQ ID NO: 35784 - DNA, 330 bp, Homo sapiens
  misc_feature (1)...(330): n = a,t,c or g
nnnnnnnnnnnnnnnnnnnnnnnnnnnnnnnnnnnnnnnnnnnnnnnnnnnnnnnnnnnnnnnntttaaaaattaacaatatcaaatgctagcaaggttgagggacaactggaactcacatattgctaatggaaacacaaaatagttcagccattctcaaaaacagtttagcagtttcttatgagatcaaataaatatttaaggtataacccagcaattttactccttggtatttactcaaattaagtgaaaatttctgaaaaacttatatgcgaatgtttatagtgtttttaatcaccaaagactggaagcaaccaaattattcatcaa

SEQ ID NO: 35785 - DNA, 319 bp, Homo sapiens
agaaggtcaggggctgaggactgatccccagcaggtagaaggtcaggggcggaggagtgatccccagcaggtagaaggtttctcttaggggatgaaaatgttttgaaatagattatcgtgttggttacgcaactctgtgaatatgctgaaatcaattcaattgtacattgtaaatgggtgaatagtgtctccataaagctatttaaacaaaagaagatgcaaagtgagtgtaggttccatgactattgaatgagtagaaaattaagattcttcacaaagacaaagcaaattcataggttaaaaaactaaaatcttagaa

SEQ ID NO: 35786 - DNA, 266 bp, Homo sapiens
  misc_feature (1)...(266): n = a,t,c or g
gctgaattgaatactctcacctccaaacaggcttgagaaagcaagatttcttgtcatcctatcttaagaaacagaaagcaatgctgctaataacatatatgtaggattgataccctttaccagagacccctctcactcagggatggcaaggaaagactggcctaccaaaagngnnngnntcntnnnncccnagnggatctttnanatntnnnatgnncangccntaancananatnctgngnnnnntanatgncccncntgnggaa

SEQ ID NO: 35787 - DNA, 314 bp, Homo sapiens
gctttattcattttggttgtgtctctggtgaaagggagtgttttataacacagttttaattcttgcatctttttttttagcttggttataaaaactctcaattggtcatgttttaaaatcccaactcctttgaagcctttaaacagatttgataaataaagagttagtatcataaaaccaccagtggatcttttagatatcttatgtaacaagccactaaacagagatactgtgtaatttagatgtcccacaagtggaaactgataataatatacatgttttgtgtttatgtactatgtcatataaaatctgtg

SEQ ID NO: 35788 - DNA, 322 bp, Homo sapiens
  misc_feature (1)...(322): n = a,t,c or g
ttttttttgatggtttaccttctttattccactatgtataactattttgtaggttcagagaatcagaacacatctgttgcaaaggtgtgcgatccagtctcttaaggcgggtctctgttcctaaatgtagagatgcagtttggagtcacgttaggaagtgggacattcttaagccatggagaggatgtgaaggaatactaacctacactgggacagtgggaccaggaccactgactggagtcacgtgctgtggtctgacatagatgtctctaacatcatgtcactttcattcatttcaatttcnaaggntncttcccaagga

SEQ ID NO: 35789 - DNA, 323 bp, Homo sapiens
ggattcacccctagatgtgtcatagcaaaagtgtacaatagcagtaacaacagcaattataagcagccagagagaaaagacagaggacgttaaaatgaactacaagtaaacaaatagttgacttcttaacaactacaaaaggagcaagatcacttgtgctccttttgtcattgaggagtcaaccatttgtgagaaaatgtttgagcctagaattgtacatccaatttgaaaaacttctttggacagcaatgccaagtacacttttagatacagtctaagaaagtctgccagcaatagaccctcactaaaatttcttgggtaat

SEQ ID NO: 35790 - DNA, 313 bp, Homo sapiens
atttttgctagcatgtatgatatgaagtcagcttttaaactataactctttccacacaacctgcttgttaaaagatttacaccccattaattatatttcacttctaagtgaaaactttgaaatagggaaatagcttgggggtggattccatttttaacaatctgtcttctacaaaaggatagcaactctcagcagcagtaagtggtaaggaaatgagggcatttctaggaagagcacatatagttgagttttattaatacaccttggttttaagtttaggtttccaaggttttaaaggactggaaaatgggat

SEQ ID NO: 35791 - DNA, 318 bp, Homo sapiens
tgctagcatctctgccactcctcagtttgtgagctttctataccttatttcatcatcttctcaatgagcacatcaatatccaattcatattgttttgtgaggctgattgagataatgtacaccgaagtcttaccttattttgaacactgaatatttaataagtttcaattaagtattaaatatcagcacatttcctaaacatgatatttaaatatacattctttctaaaaaggtttccatggcacaaaatttgtaataaggtgtgaatgtgtgatcttttgtgttgttatcattaatatttttccccatattttctga

SEQ ID NO: 35792 - DNA, 321 bp, Homo sapiens
  misc_feature (1)...(321): n = a,t,c or g
tgggnnnnnnnnnnnnnnnnnnnnnnnnnnnnnnnnnnnnnnnnnnnnnnnnnnnnnnnnnnnnnnnnnnnnnnnnnnnnnnnnnnnnnnnnnnnnnnnnnnnnnnnnnnnnnnnnnnnnnnnnnnnnnnnnnnnnnnnnnnnnnnnnnnnnnnnnnnnnnnnnnnnnnnnnnnnnnnnnnnnnnnnnnnnnnnnnnnnnnnnnnnnnnnnnnnnnnnnnnnnnnnnnnnnnnnnnnnnnnnnnnnnnnnnnnnnnnnnnngactgtatgtttttaatactacccttaactcttgcttatctcctattctgacaaaaggag

SEQ ID NO: 35793 - DNA, 346 bp, Homo sapiens
tttttctttattttctttcttttttaaaaactttctttaggtatttggatacattttataatttgattaatttacgtaatgtttttgagtaaattgttttgtacagttttttaaaaaaattaggtggttgctctacatattacattatatatacataactttaaacagcctatggatatgggtgttttatcactcccagtgaaatgtagaaaccttacctccctttgcattactaccctctcctgtttataatcaattatttaaatatttcttgtacattcatctgggaccacagagaatgttggaacttttttctacaattattaaacataatttagaagactca

SEQ ID NO: 35794 - DNA, 394 bp, Homo sapiens
cagaaacaaagtatggacaagcttgggtcatgtgtccactccaaatctacggccagggaatacagtttttccaattatgtcagctactatggtcaaggaggtgaactttcaagaaaaataagtgcttggaatggaagaaagaacatttcatgtgagaagacaagtacagaagtagagagtaggagaggcttggaggggaaataataaataatccttacatgatgcttgtttatgcttgctaaatctttacttcagttagcacaaagcaggaacacaaatacatgctattgcaatttgaaacaggattcctcagcaaaattgattctgatttttattatagttgtagcccagagtttgctgcaagattttcacttttaccttagattaaataaga

SEQ ID NO: 35795 - DNA, 374 bp, Homo sapiens
ccgagatctaatgtaggtataagcgtgacaaaccctccacggcacaggatgggagggctggaggagggaggattgtattaaaaaaagttattccacttaagaactaaacttgtatttggctaacaaagtaagactcaccatgacagatgggaaaaaaaattaaaaaggaaaaactgttatttgagaactatgaactaggttttggaaaggtgagacacccactacttgaagtcacaatctcagcattaaatcatatactcatttaaccaggtaccaactttccttctattagaaacccaggatttttacacctacagactaaatgattaaagtattgctaaaatcttctgtaatggtcctcttgcattacaaat

SEQ ID NO: 35796 - DNA, 366 bp, Homo sapiens
gaaaactaacagttgcacagcagaatacctggcacacagtaggtgcttaataactctctgttgaataaatgagtggataggtgacagaataaaccaatgagaattatccccaacatacacacactgattgtccccaccccctggaatgcattaaccagagtttctaatccataaacaacctctcctctcctagcaagagtcagagggtatgggcggctggggcgctgtttcctccacttccccactccttagctcaggccactccaggccctggaatttcttccctatcaggagtgcgaagcccctgaagtcaggagccgtgtctggggcagctcctcctggcgcctgtgcacacagacaacaatg

SEQ ID NO: 35797 - DNA, 335 bp, Homo sapiens
caaaaagaaaactaaaaaataatttcaatttctcaaaattaggaagatatttgtgtgtccccaaaacaatgaaaaagcagctggattgtgctgtctcttatatgtcatgaagaggactttggctctcactgtgaatgtgaaggaagctcactgagagaaaagtagaatttttagagaatttagaagcataagacaatatgcccctttgtgacagcaaaatttaaaacaacaaaaacaaaaacaaaaaacaaaaaaaacagctgcccagaagttcctttggaacacagcttccagaatcacaccttaaggactggctttctctttgaccttggact

SEQ ID NO: 35798 - DNA, 328 bp, Homo sapiens
catatttataaaactagctgctgtatgcatttgttgttagcaaaaagagtccatgggttctgcaataattactcactattgataacaaaacaatcaagagactatgtaaaatggactaaacatgctattttgggggaatattaagtttccaccttagtaatttactatatgatttagagcagtgacttttctcttctggatattgagatccttatatgaaaagtaagaagttggattacacaaaacacaaagcacctccagctctaacttttggagattctatgattctagatattactctgaagttctacaattacacagacataca

SEQ ID NO: 35799 - DNA, 339 bp, Homo sapiens
tttaaacttaaatcttgtatcatcctttacacttctttcttatatgcccgccattagcattatctacacaagacaggcagaatctcactcctcctgacctctgctgctaactaccacccccaccctggtccaggtcaccaccaccaacttcttgctgtatggcaggggcctcttaactggtctcccggcttcgaagctggcctccttaagtccattgtcaacacaggagccccaagtcctaatcttctactcagaaccctccaacgacttgccatctcactctaaggaaaagcctctgactttccaaagacctatggagccccattccatctgaaagcc

SEQ ID NO: 35800 - DNA, 344 bp, Homo sapiens
  misc_feature (1)...(344): n = a,t,c or g
tgaacacataacatatgtttaaaacttttcgtaataaaatgtaggggctgggcacagtggctcaagcctgtgnnnnnnnnnnnnnnnnnnnnnnnnnnnnnnnnnnnnnnnnnnnnnnnnnnnnnnnnnnnnnnnnnaataatgacaaatcaaacaagtggcaatacttagcaataatagaacaaataaacaacagaatgttaatctgcaaaaataaaaaggaattaactgatatatgcaacaacactgatgaatttcaaaaacacagggagtgacagaagccttatacaaaataggacatatatatgactcagtttataagaaattttagaacaggtgaaact

SEQ ID NO: 35801 - DNA, 354 bp, Homo sapiens
aacttagccattttccttggcataaaaagcaaatatataagcacttacataaattacttaatgttatgtttatgttcttaatagctcagtttagctgttaacctgccttcttggtaacaaaagctctgcctttactcttatccagacaacttgtttacttaacccccagccttactcgagggtcgcaagggaatccttgtccaggtatgataggaatatcctgttgctccttgggaactgtctttgtttgcttttgaagtggtagggaaatctgagtctcaacacttaattataggtagctgtatagcataggtagttgtagcagcacccacatttcccaaacatgtattttct

SEQ ID NO: 35802 - DNA, 364 bp, Homo sapiens
  misc_feature (1)...(364): n = a,t,c or g
nnnnnnnnnnnnnnnnnnnnnnnnnnnnnnnnnnnnnnnnnnnnnnnnnnnnnnnnnnnnnnnnnnnnnnnnnnnnnnnnnnnacaacaacaacaaaaaatgcaaaccagtcagccattgaacttagcctgtaatcttatatctagctaagttagttattttaatcatttatgtgatgaaaagtaataaatctctataccttagaaaattgccgaagatcagggagccaccttaccaatgttctacgtatcagcaggctgacatagaaaatgcaaaatcttttaaatgtaattaaatcttggcagaattttggttaggagaattttgctatgtgtgagacagaattttaaaacacgacttccct

SEQ ID NO: 35803 - DNA, 392 bp, Homo sapiens
tttttgtctagtcatctttattagctataatttggaatttgcaaatgacagaaaaggagaaaggcttcagacgcaaaggacttttaataagttaccttttgaagatgagacaagacaggttctaagctaatcagacgtgtccaccaggtggacctgcgctcttttcacaggtagcggttcctgatgtactctcggtacatggaggagtcctcttttcctagggggcatgataccttggctggcctggatgtgggcttggaagatctctgtagattttctgtctactcttgggggctgaacttcatagatgttatcttgcgagaaagctgagatgggtgttagttttataactccatctgagcacctagaacagggctgctggctattcttgg

SEQ ID NO: 35804 - DNA, 393 bp, Homo sapiens
  misc_feature (1)...(393): n = a,t,c or g
nnnnnnnnnnnnnnnnnnnnnnnnnnnnnnnnnnnnnnnnnnnnnnnnnnnnnnnnttgggatcctctcgctcaagggatccnnnnnnnnnnnnnnnnnnnnnnnnnnnnnnnnnnnnnnnnnnnnnnnnnnnnnngctctcatggtcttaaactccaaaaaataggctcagaaatctgagtaaatacttaagaaatagcaacagtttaaaagttagaatttcaacaaatactatttctagtgagtgttttctgctcaataaatcagaaaatttcaaaaatataattatgattatattgcaacacaaatgctttagtgagctctccctttttccctcccccaaagtatgtaaatttatttaatattgataccagcaaagcaaattagtaattt

SEQ ID NO: 35805 - DNA, 383 bp, Homo sapiens
  misc_feature (1)...(383): n = a,t,c or g
nnnnnnnnnnnnnnnnnnnnnnnnnnnnnnnnnnnnnnnnnnnnnnnnnnnnnnnnnnnnnnnnnnnnnnnnnnnnnnnnnnnnnnnnnnnnacgcccttttaaattttttaaaatgcaaacatattagaggcctaagatttcaaagcaaaagttactttggggaaaccagaaatagtaatgcatatactctgtaatcttatgacagagtgtagtctgtattcatgtcagcaaagagtatttaaataaaaactcagtcttattattagcctttatagtcctgtctgggctagttatgtcagctagttacattaaaactagtgataatgaagccaagatcaaaggtttgctttattggacagttagtttcacagcaggaaaaac

SEQ ID NO: 35806 - DNA, 374 bp, Homo sapiens
ttttaattctcttatttattttactatgtgccagcttaagtatattaaatcaaatgcctgaaagaatattctcttctactacctataactactactactcatatctagataatacagacaatatgctttgttacatattctaaatagccaaaatttcattagcaagaaaggtattttccctcaaaagtatcactatggaccctcaagtgcattagctcgtactaaaatttctcaagagatttctgctaggagtacacaacctaataatgtactcaattatgaaaagaagagtgggacccttgataaacttattacctttcctagtagaaaggagaaagttatactcacgataactgctatgaaactataagata

SEQ ID NO: 35807 - DNA, 374 bp, Homo sapiens
agacctgatactttggatccagcactgatgaggccagggagattggatagaaaaattgaatttagcttgcccgatctagagggtcggacccacatatttaagattcacgctcgttcaatgagtgttgaaagagatatcagatttgaactgttagcacgactgtgtccaaatagcactggtgctgagattagaagcgtctgcacagaggctggtatgtttgccatcagagcacggcgaaaaattgctaccgagaaggatttcttggaagctgtaaataaggtcattaagtcttatgccaaattcagtgctactcctcgttacatgacatacaactgaaccctgaaggctttcaagtgaaaactttaaattggaat

SEQ ID NO: 35808 - DNA, 366 bp, Homo sapiens
gcggagtgggagggcttggaggaaaggggaaagaagggactatatttgaataaatatgaataaatgtattagatacttttcacaatcagataacttttaaaaaggtcattttttatctttctaataatgtaagccttaataaaagcaaatcttagtcacaaatttgaggagactgcccaataataagtttacatgtatttgaactgaaaaattgttaaccatgcttttgctccaagatgtgtgaggccattcaggggctgtagggccctggatatacacacaaacaagtgtgtgtatatctggagccccacacattgtaataaacacagctgcatttatttgactatgtgatcccatgtacatgta

SEQ ID NO: 35809 - DNA, 372 bp, Homo sapiens
gaagcagtgagctctgactgcatcagaaagtgtgaatatgctgcaaatcaacaacttcctgctgctggcgacggcggcgtgtgctggtgtgacatgttcttcaacactagggctctgagagagaaagaaaacaagtcaccatatgcttttgataggatgcatcacatgcttccccgtctctatataattcatgcgtctgcaaccagatctaaagctatcactcttctgtagtaaatccagcactgaattccatgagaagccaatatacatctttcaactttcacaaaatactcaattcaagattggatgaacgtgttagggtttatttctaaaatatggttctatccatcattgtcatcttcctgtgatact

SEQ ID NO: 35810 - DNA, 363 bp, Homo sapiens
gcaaaacaacaatggatgcccagaaatcagaaagctaggggtccatgaaaaaggtggtggcttgccgcagggggttgatgctgtaggggataaaaagtaataacaacagtagcagtagtagctacaattatattgtgttaactatgtgccaggcactattcaaaggctacatttatttattaactcctttaatcctccatgttactaaaaaggtattattttaattttatagtacagagaagttgggttgatgaacttgaatgaagatgctacagaaaaataaataaagatgactcccaagttttaggtttgtgcagctaggtgaactgtagtgccaaagactgtgaggagaaaggccaagaa

SEQ ID NO: 35811 - DNA, 374 bp, Homo sapiens
aaattttttaaatgtgcaagaccgctatataggaagctacaaaaaaaagtactgaaaaaaattaaggacaacataaataaatggagggatataccgtggccatggattagaagactcaatatcataaagatgtcagttctcctaaaattcatctaatgattctaacaatgtaatctgaatgaaaagatattcaaaatgaaaatcaaagcacatggagatgaaaagttttaacattctaaataaaccagatctaggtaataaaggaaatcaaaacccacatctcagactatttaaaaaatgcaaaagtgagatcactatccattaaaacctgtgggatttgccaaaaccgtactcaaaagaaaatgtaacagcgg

SEQ ID NO: 35812 - DNA, 435 bp, Homo sapiens
  misc_feature (1)...(435): n = a,t,c or g
tttgnnnnccnntttggaagggccnnnnnnnnnnnnnnnnnnnnnnnnnnnnnnnnnnnnnnnnnnnnnnnnnnnnnnnnnnnntctcgaggatccgaattccnnnnnnnnnnnnnnnnnnnnnnnnnnnnnnnnnnnnnnnnnnnnnnnnnnnnnnnnnnnnnnnnnnnnnnnnnnnnnnnnnnnnnnnnnnnnnnnnnnnnnnnnnnnnnnnnnnnnnnnnnnnnnnnnnnnnnnnnnnnnnnnnnnnnnnnnnnnnnnnnnnnnnnnnnnnnnnnnnnnnnnnnnnnnnnnnnnnnnnnnnnnnnnnnnnnnnnnnnnnnnnnnnnnnnnnnnnnnnnnnnnnnnnnnnnnnnnnnnnnnnnncaagtatgtatgtttattactgcaattcaagtggccgtgaccgttttcttaaatatactttattngtta

SEQ ID NO: 35813 - DNA, 417 bp, Homo sapiens
  misc_feature (1)...(417): n = a,t,c or g
gttgaagcngatgatttggannnnnnnnnnnnnnnnnnnnnnnnnnnnnnnnnnnnnnnnnnnnnnntctcgaggatccgaattccnnnnnnnnnnnnnnnnnnnnnnnnnnnnnnnnnnnnnnnnnnnnnnnnnnnnnnnnnnnnnnnnnnnnnnnnnnnnnnnnnnnnnnnnnnnnnnnnnnnnnnnnnnnnnnnnnnnnnnnnnnnnnnnnnnnnnnnnnnnnnnnnnnnnnnnnnnnnnnnnnnnnnnnnnnnnnnnnnnnnnnnnnnnnnnnnnnnnnnnnnnnnnnnnnnnnnnnnnnnnnnnnnnnnnnnnnnnnnnnnnnnnnnnnnnnnnnnnnnnnnnnnnnnnnnatgnnngnnnattactgnnntncaagnggncgngaccgnnntcttaaanatctttatttgg

SEQ ID NO: 35814 - DNA, 303 bp, Homo sapiens
  misc_feature (1)...(303): n = a,t,c or g
ttcatctttgtagtcagcagtacggcctatgacttagtgtaactatttatttgatattaaaggttacctagtaatgccagtaatttggcttaattttatcattggaaaaaagtttaaaactacaaaggtatcatcttttaattgctgaaactgccctattggtttcttccattttaactnnnnnnnnnnnnnnnnnnnnnnnnnnnnnnnnnnnnnnnnnnnnnnnnnnnnnnnnnnnnnnnnnnnnnnnnnntacagtacacttgtggaagcagtatccagctcaagaaattgaacactgcc

SEQ ID NO: 35815 - DNA, 291 bp, Homo sapiens
acagattctacaagccaaatggaaagcaagatagtttcatttggatttggaagtagcacagggctctcatttgcagacttggcttccagtaattctggagattttgcttttggttctaaagataaaaatttccaatgggcaaatactggagcagctgtgtttggaacacagtcagtcggaacccagtcagccggtaaagttggtgaagatgaagatggtagtgatgaagaagtagttcataatgaagatatccattttgaaccaatagtgtcactaccagaggtagaagta

SEQ ID NO: 35816 - DNA, 299 bp, Homo sapiens
tgggccttcacacattcctttgttattttctcttccctcaacatcttaatgttcagagtgcccagaatatactgcttgcttctgtgttttctctatctctactcactcccttgaagatcttctccagtaagatcatgactttaaatactacttttagatagttgatcatgactcctaaatgtatgtctctggcccacacctctgtctaaacttgtatacccaactgcttgttatcaccactcagcaagtccaaaactgaactcctgatcttcttcccccaaacctgatccactgacaga

SEQ ID NO: 35817 - DNA, 290 bp, Homo sapiens
  misc_feature (1)...(290): n = a,t,c or g
gctcaccatcctggtcctggccatgtggaaggtcggcttcttcaagcggaaccggccacccctggaagaagatgatgaagagggggagtgatggtgcagcctacactattctagcaggagggttgggcgtgctacctgcaccgccccttctccaacaagttgcctccaagctttgggttggagctgttccattgggtcctcttggtgtcgtttccctcccaacagagctgggctaccccccctcctgctgcctaataangagactgagccctgaaaaaaaaannaaaaaa

SEQ ID NO: 35818 - DNA, 320 bp, Homo sapiens
ctacaataattttttaaaaattttttaaagaaaaaatatctaaaggagagttccaggaataccttaaatttcatcatcaaactgcccaaggtttaaaccaattaattatgatgatgaaaatgtggctaatatttattgtgcaattacatcctgccaggctacatagtaagtactatacaagcattatcaaccaatagcaggcagttcaacatcagattcttctatacagctaattggtaaacatttttctatggtagtaccagatgactggaacattagctgggttcggtggagtgtgcctgttctaccagctacttggg

SEQ ID NO: 35819 - DNA, 328 bp, Homo sapiens
  misc_feature (1)...(328): n = a,t,c or g
gcnnnnnnnnnnnnnnnnnnnnnnnnnnnnnnnnnnnnnnnnnnnnnnnnnnnnnnnnnnnnnnnnnnnnnnnnnnnnnnnnnnnnnnnnnnnnnnnnnnnnnnnnnnnnnnnnnnnnnnnnnnnnnnnnnnnnnnnnnnnnnnnnnnnnnnnnnnnnnnnnnnnnnnnnnnnnnnnnnagcctgtccctaataataataaccagcttgtcattttctcccaaaaaagaatgctggaattttgaatggaattacatagactctgtagagaattgataatttaagaatagtgagtctcctaatccataaacttgatatatatctccatt

SEQ ID NO: 35820 - DNA, 364 bp, Homo sapiens
  misc_feature (1)...(364): n = a,t,c or g
nnnnnnnnnnnnnnnnnnnnnnnnnnnnnnnnnnnnnnnnnnnnnnnnnnnnnnnnnnnnnnnnnnnnnnnnnnnnnnnnnnnnnnnnnnnnnnnnnnnnnnnnnnnnnnnnnnnnnnnnnnnnnnnnnntatttattttcaaaaaggctcaaagcaatatggcaaaacattaaaatttgataaaattgggtaaaaggctgttcgttttattagtctgtatcggcattttgaaactcttcactttttctaatgaggctggagagtatactaattccttattgtaatcagggaattgtttttaaatataatcacccattacagccacncgtntanattttgccttttcaacaaaattcctctctg

SEQ ID NO: 35821 - DNA, 316 bp, Homo sapiens
  misc_feature (1)...(316): n = a,t,c or g
tggacctggaggggggcggcgggggccaggccaaagctggggagagagaagccccacagggatggcagggggagtaggtgctgatgcgggacaggtgagctcctccgactcgggagctggggctgtggttggcagggagcctcttaccgtgccagcctttccatgttctggaccctggacagaaggatgggggtcccctcntncagatggccatttggacagantnaaagagcccnaggccaattgctctgctctgcccagcntggctgnangcctgaagcccanctcttgtcctctcctctgtgncangcactgg

SEQ ID NO: 35822 - DNA, 322 bp, Homo sapiens
  misc_feature (1)...(322): n = a,t,c or g
gtcatctttatcatcatcatattcttcgggacttttccacttcttggatatttcctttaaaaagattattcaaagtgaaggttccaagtttgaacctttctatacctcttggaagacactaccaaattactttccagttaagattctaccagtttgcaatgttaccagcaaggtataggagtgttatttttaccatactctcgacagcacagaatatcattcatatccttttgtacatacatgaaagacattcttcattactgngttcatatatatatatatatatctttactacttgtgaagttgaatattttaagagaaa

SEQ ID NO: 35823 - DNA, 322 bp, Homo sapiens
caagaactcactcctgcaataactaacctacttacatgttaatggcattaatccattaatgagggcagaaccctcacaacctaaaagctcccatctctcaacactgttgcattggaggctaaattcccagcccataaactttcaggaacacattcaaatcatagcatttcaccctttgcccctcaaatgtatgttcttctcatatgtgaaatatattaattccatcccaatagccccaataaagtcataagttgttccaacatcaactgtaaagtccaaagtccagattctcatcaaaatcagattgagtgagactcaaggc

SEQ ID NO: 35824 - DNA, 314 bp, Homo sapiens
ttttttttaactctaaacccaaccttgttattgataggatttttatttctgccttaagaattctttccatcaccttttcattttaagacacttatcatttctatcccttcctttgtcccctgtgctgtccttccttctgaagttctcacccggaaaggcattacatctttgatgctgcagttcacttctgtgtgcacccctgagttcttccagtacatcctccagttcctctgctttccatttcacaacctggttacaggtagtcacactgtaacttcctgttactgagtattttaggggccaaagcgacgcgg

SEQ ID NO: 35825 - DNA, 315 bp, Homo sapiens
  misc_feature (1)...(315): n = a,t,c or g
caagtatgccatagacaaaggactcaggaatttcaaggctgagaggggccacttctcttgggcaaggaggaggctgctacaagggagaagcacattgcaggtttggcaaactgaggcaagcatgcggtgttggaaagtgaggagccacttagtggataattggggggtaattaaaaacatggagagattgctcagtgtaatttgagagccactgcgctctggatgactgtggggtgacaccaaagaacttcagttcagcaaaccctggcagctgcangtgggcagaccaggtgtctggagagcccgncattggca

SEQ ID NO: 35826 - DNA, 327 bp, Homo sapiens
atccctttccatgacatcatatatttgcaaagcaaagtttttggcaggtaccgcagcaaaatgcaaaaatcgtgtgaaaatcaacgtggaacaggaaatgaggtgcgggtgtcaactggttacaaagggtcagaagttgtctggtgcctgacaaggacacacatctcattcataacatatggtggtaatttaaaaatgaaatgatgttattttttccttcgaattcatatgtatttttttttcaggtggccacttagttgtaaggacataaatactcattaagttgtttggacctatttaataaatggacatgttaggtatttctct

SEQ ID NO: 35827 - DNA, 365 bp, Homo sapiens
  misc_feature (1)...(365): n = a,t,c or g
ttttgctgtgataaatctcagcatacggtcacactcatggctgagatttatcacagcaaaaggatgcaaggcaaaatgagcacagggaaatggtgaatgaggcgaagtctggagaaaaccaggtacaagattccaaatgtcctcttccagtggggtcacacaggatgcatttaattagtcccccagaaatgagctgtgaaaatatatatgaagtattgtctaccagagaaatgtattagggactcagtgtccacagtttttgtcgacgcggccgcgaattccnnnnnnnnnnnnnnnnnnnnnnnnnnnnnnnnnnnnnnnnnnnnnnnnnnnnnnnnnnnnnnnnnnnnnnnnnnnnnnnnnnn

SEQ ID NO: 35828 - DNA, 366 bp, Homo sapiens
  misc_feature (1)...(366): n = a,t,c or g
cagaaacctgcatttaagaacacctgttagaattgtacagttgactataaaatcatcttccaaagaggattaaaacaggacaaaaattgtctgtggatgataaaaagtcttaggacagccactattaaggccacaattgatatggaaatttggtcacttctgtggcatatagcaatttcacataacaattataactattaataacatacattaagccatatcagaattagaggagtttcccataattttggaacatataccaataacacatttatacaaatagagccnaaaaaaaaaanccangccccttttngtnttnggnatngcttcttgaangatttttntnccaggtagnccaaangccct

SEQ ID NO: 35829 - DNA, 360 bp, Homo sapiens
  misc_feature (1)...(360): n = a,t,c or g
ttctgctttaaaaggttggatttgcgatgttggcaagacaacacaggtggaaatgtggagctggttatcagcaatgtgtggtggtgaacatgaggtcaagtgtgcaggtgtggctaggagtaatcagaacatccatgtgacgggaagccatgggacagggtgtagaacaaggagaagcctgagagagaggtagagtgtccatctggggatggagagggtagctggagaaggaagaatcatgaaggttgggggaaactggaagaattgtgaacaaacagccaggagtggagagagcttnagaaataatnggtggtaaatagggtcatttattgcacacttgagagggaataagcgtctacg

SEQ ID NO: 35830 - DNA, 363 bp, Homo sapiens
  misc_feature (1)...(363): n = a,t,c or g
caaatcctgacagctggttcttacccctgctgggttggtttctgcatgtgcaattgcacacaagcctcattcactagcacctgccttccacccgggaggagacttcccagctctggggagccaagttactgacttctgtacttcagaagggcagtgaggactgttattttgagattagtaagaataattgtagctcacatgaagcatttcaatgtgctgggcaccgtactgaggactttatatattttacctcacttaatctgcacagtaattttgtgaggcctagatagttattatccccatttgacagaggaggaaattgaggtttatagaggtaaagaagtagtctgaggcactanttgg

SEQ ID NO: 35831 - DNA, 126 bp, Homo sapiens
  misc_feature (1)...(126): n = a,t,c or g
gttatatttgttttatcatgaattaatggatagagggatgaatagatgataaaacaaatataacaaaatatttgcactccagnnnnnnnnnnnnnnnnnnnnnnnnnnnnnnnnnnnnnnnnnnnn

SEQ ID NO: 35832 - DNA, 368 bp, Homo sapiens
  misc_feature (1)...(368): n = a,t,c or g
ctggtcttgnnnnnnnnnnnnnnnnnnnnnnnnnnnnnnnnnnnnnnnnnnnnnnnnnnnnnnnnnnnnnnnnnnnnnnnnnnnnnnnnnnnnnnnnnnnnnnnnnnnnnnnnnnnnnnnnnnnnnncactgaannnnnnnnnnnnnnnnnnnnnnnnnnnnnnnnnnnnnnnnnnnnnnnnnnnnnnnnnnnnnnnnnnnnnnnnnnnnnnnnnnnnnnnnnnnnnnnnnnnnnnnnnnnnnnnnnnnnnnnnnnnnnnnnnnnnnnnnnnnnnnnnnnnnnnnnnnnnnnnccaatttttgttttgttgatccttggtattgtttttgtttcaatttcatttatttctgctctgatctttattctt

SEQ ID NO: 35833 - DNA, 329 bp, Homo sapiens
caagtctgaagcttagtggaaaggttagggctagggatataaatttgggagttgttacaatacagatggtgtttaaagccatgagacccaaggagatcactcaggagtgaggataaagagagatgggaagaagtctgaggactgagtcctagaacaccctgcattttagaggggggacatgtgtaagagccagcaaaggagacagaattgtgcttggagaggcaggaggaagcccaggagagcgtgaggtcctggaaggcaaggaaagagagggccccaggtgggctgaatgctgctgagaggtcaagtcggataagggctgggaagta

SEQ ID NO: 35834 - DNA, 366 bp, Homo sapiens
  misc_feature (1)...(366): n = a,t,c or g
nnnnnnnnnnnnnnnnnnnnnnnnnnnnnnnnnnnnnnnnnnnnnnnnnnnnnnnnnnnnnnnnnnnnnnnnnnnnnnnnnnnnnnnnnnnnnnnnnnnnnnnnnnnnnnnnnnnnnnnnnnnnnnnnnnnnnnnnnnnnnnnnnnnnnnnnnnnnngggtatttcttaaatgaggtttttctttcggtataatgggtgatgttttttctttgtgtttttctgagaagtagcatattacataataattaaagaaacatactttttgagtcagactacctgagtgaacccaagctctcctacttatgagttttgagactttgggcaaataaatctctgtgttgtgccttggtttcttcttctgcaaa

SEQ ID NO: 35835 - DNA, 368 bp, Homo sapiens
  misc_feature (1)...(368): n = a,t,c or g
cattaagatgaagttcaaaaataggcaaaaccaatccatggagacaaaagtcagagtaatagttgccannnnnnnnnnnnnnnnnnnnnnnnnnnnnnnnnnnnnnnnnnnnnnnnnnnnnnnnnnnnnnnnnnnnnnnnnnnnnnnnnnnnnnnnnnnnnnnnnnnnnnnnnnnnnnnnnnnnnnnnnnnnnnnnnnnnnnnnnnnnnnnnnnnnnnnnnnnnnnnnnnnnnnnnnnnnnnnnnnnnnnnnnnnnnnnnnnnnnnnnnnnnnnnnnnnnnnnnnnnnnnnnnnnnnnnnnnnnnnnnnnncnnnnnnnnnnnnnnnnnnnnnnnnnnnnnnnnnnnncaacaacaacaatgacaaaa

SEQ ID NO: 35836 - DNA, 460 bp, Homo sapiens
  misc_feature (1)...(460): n = a,t,c or g
gctgnnnnnnnnnnnnnnnnnnnnnnnnnnnnnnnnnnnnnnnnnnnnnnnnnnnnnnnnnntctcgaggatccgaaaatagtgcctacagggaatgcatgttccataaatatttattgataagttgaataaaatactaagtgaatgaaagaacatcactggattgctgattatggcgtttaagttttattcatctgtgtcttccttgtttaatgtagtgtctaacatatagtaggcactcagtaaatgtatttcattgtgtcataatgaaatataactaagtcaagcatggaatttgcatgttatttaataacatcttagttaaatgagtttttgacatggggaaagcacctttttttgggtaactgtatagagaaagacatattgaagattatgaattctaagcagtgtaataaatagacttcagtaattggttatttcatgaatatttactactcat

SEQ ID NO: 35837 - DNA, 356 bp, Homo sapiens
  misc_feature (1)...(356): n = a,t,c or g
gccaaagctgggctcaggataagaaactcatccttcgccttctttctggagtggaagctgtcaactccattgttgcattgttgtccgtggactttcatgctttagaacaagatgccagcaaagaacatnnnctttngnntttgctttnaagncaanngggttnnnaantngnnnatttgtnntttnagnntttnttanngntngtngancnttnttttttcccnaggggnnnannnggccgnaatttncnaatttttnattggtaattnttgnaaaaccccncaggttntttaantnnngnntgtggcccttttaanttcntttntttnttcnttngttttgctttttttttgtaa

SEQ ID NO: 35838 - DNA, 361 bp, Homo sapiens
  misc_feature (1)...(361): n = a,t,c or g
attgaaggcaggagcccccaccaatttaaccctctgtgattccaagccaaggcactagaggtaggccccttatatctgccttcagcaagctggtggcagcagttttcttgctcagtggagccctgggaaggcaagggtggtctcagggtccctgttgagagttcattcactggctcataattaatgtatattgagcatgtactatgggccagtacattttgtgcagaattccttaaaatttcataataactgttagatacaattataattgtattnnnnnnnnnnnnnnnnnnnnnnnnnnnnnnnnnnnnnnnnnnnnnnnnnnnnaagtggtggaaccattttggccccaagggactga

SEQ ID NO: 35839 - DNA, 367 bp, Homo sapiens
ctgacaatgacaaattttcatacatgaataagtatataaatatgttagcttaacttttacaaattgtacaagcaacataattcattatctaaattttagaaacatgagaaaaatcacccataactccactcactcaaatctctgtcatgagtttcagttaataaatgctttttgacaatgacaaattttcatttttagatattgcgtggatgaacagggaaaatgttatagatatggtgaagaatatatagtacatgagaatatatgtgagtgtgtatgtgtgtatgcatgcatacatacacacttgtgtacattaatgtatgtacacgtaaatatgcatataagtatacacatacaccagaaaatt

SEQ ID NO: 35840 - DNA, 360 bp, Homo sapiens
  misc_feature (1)...(360): n = a,t,c or g
gaggatgctgggatacagataatttaaatagagtttccttttctttccaaagccagccacacactataccagtaagtcaagccagagctgagaaggccagcttctggaagagaaatcatagttggggctgatgggtctttactttttaaatttggctcatagatcgctttgagaatctgatgaagattaaggatcttcttcacagaaaactgcacatggcacatactcatgaaattttacatgatttnnnnnnnnnnnnnnnnnnnnnnnnnnnnnnnnnnnnnnnnnnnnnnnnnnnnnnnnnnnnnnnnnnnnnnnnnnnnnnnnnnnnnnnnnnnnnnnnnnnnnnnnnnnnnnnnn

SEQ ID NO: 35841 - DNA, 362 bp, Homo sapiens
ataacctcatatgtaataaagatcaatttccaaagaaaaacttcaggaaattaataatctatcaactacaactacttaaaaaagaatacaaatccttaagcagaaataacacctggctctacatagcaagtattatcaaagctgggcagaggaaaatgctcagcattgagatgaaagaataagacattctgatcattgcctgcacttcagtagccctattctgcagtctaaaatgatccttccataaaggactgttctacactattgagaacaggatacttagtctctaaatttcaaagttctttttatgtaccatataccacaagcagagacttcattttctccaagtgctaagagctcgt

SEQ ID NO: 35842 - DNA, 357 bp, Homo sapiens
  misc_feature (1)...(357): n = a,t,c or g
gaaaaatgagtagttttatcgtttgtctcaccataatttaacaaatacttgggtatagagttgaactggtttatctactgtttacacttttgaacggcattcaattaaggttagttttagtaaagatcttagaatctcagatgggacttttcagctttaggaaattggaatgtgtccctggactatgcccatgccagagtgccaagctaaaagaatgtaggaaacctctgaccaggcccttcaggggactctgtgcaaaataatgaggtcactagcatgaagagctttggacttnttngccncnaaggnnntnnnatnnnnntttccgtattattattatnnannttntntttgggc

SEQ ID NO: 35843 - DNA, 366 bp, Homo sapiens
ctttcttgctgtgtcctcacatggcagagaggaccctctggtaccccttcctcctcttacaggaacaccagcgtcatcagattagagcttcactcttacgaccttaattacctcctaaaggtcctatccccaaatacagtcaccttcagggttagagcttcgacatatgaatttaggagaaactcaagtccatagcagaagaaatggtcagcaatattgaatgctgccaagggggcaaaaactaaaattcattggaattatcaatgtgtcattcatggctttactaagtgctattttaatggagtaaaagcactagaagccatactggaatcgtttaaggaatgaggagctaaggaaatcgtgata

SEQ ID NO: 35844 - DNA, 362 bp, Homo sapiens
  misc_feature (1)...(362): n = a,t,c or g
gttttgacaaatagatatacctgtgtaacctacacacacacatcactgtagaaaatttccatctttccagaaatttctcttttgggttagtcaccttcctccctccagaaaacaactgttcatgttgttttgaccttagattattttgcctccagcctttaacaaatatgtttatttatttagtatgtatactggatatgtgtnnnnnnnnnnnnnnnnnnnnnnnnnnnnnnnnnnnnnnnnnnnnnnnnnnnnatagatatatacacatacacacaaaatatggaatgtataccatgtggacagtgtatgtccatttattttgaaattatgcaaatgtattatcaatccatttattatta

SEQ ID NO: 35845 - DNA, 374 bp, Homo sapiens
gtcgacgcggccgcggtttttactatgtctgcttctttgcaaagctttgtctttaacagagtaatattctatgctaaaatagtcattatttttagaaagaaaattgttcagttgctggtttcttattttatatattcttcattaaacagagttgatcaagaacttaatggaaaacaagatgaaccgaaaaatgaacagtaagtttggcatctagtccaaacaagactgaagaatgtgctgatggagcagtgctgtttctgcattcataatgcatttattggcccatatttttatgtaacctgttacaaaatagacttgactttttcataatggacttttgtattatacaagggactgttcactgctgtactggt

SEQ ID NO: 35846 - DNA, 369 bp, Homo sapiens
  misc_feature (1)...(369): n = a,t,c or g
taaaaacatggttttaagtgaggcaaatgtaaattaaaatgaaagtaattttagttaattaaattaccttaattaatcaaaagtactaaaattacttttcttaattaaaaaggtatannnnnnnnnnnnnnnnnnnnnnnnnnnnnnnnnnnnnnnnnnnnnnnnnnnnnnnnnnnnnnnnnnnnnnnnnnnnnnnnnnnnnnnnnnnnnnnnnnnnnnnnnnnnnnnnnnnnnnnnnnnnnnnnnnnnnnnnnngtcgacgcggccgcgaattccnnnnnnnnnnnnnnnnnnnnnnnnnnnnnnnnnnnnnnnnnnnnnnnnnnnnnnnnnnnnnnnnnnnnnnnnnnnnnnnnnnnnnnnnnnnnn

SEQ ID NO: 35847 - DNA, 370 bp, Homo sapiens
tgcaggcttaatcaaacactttggccagtgggaggagagagaatcgtagtgatattaccaaggaagggaaatgaggaatgactgggcctcctaaataaggcctgctttgacctgagagtgaagaaacaaatctgggacactgggaatctctacctccataaacccttgtgcctctcctagaaccatgcacccatttagatcccgtatcaagacgatgtgtgctcttgtttctcctcaccctttctcaccactcattccttaccaaacttatttagggtcccatgaggctcaggcagtgtaggcaggagggcttgggatagatttttctttgtatcatccatactcgattcagtgagtgttctgcatgtgg

SEQ ID NO: 35848 - DNA, 349 bp, Homo sapiens
  misc_feature (1)...(349): n = a,t,c or g
ggggaacagaaatttaaatcaggtgaactgattcacttgttttaattatgttaaagggtggtttgcataactaaggtcggggtccagagaaactactggtaatgaaatatctttatgatctacaggcaggacaggaaaaactgcagaaaaatctgaaaaatagagatatgtctaacccccttaacttggctttaacttagctgtgtaactttaaacgtcgacgcggccgcgaattccnnnnnnnnnnnnnnnnnnnnnnnnnnnnnnnnnnnnnnnnnnnnnnnnnnnnnnnnnnnnnnnnnnnnnnnnnnnnnnnnnnnnnnnnnnnnnnnnnnnnnnnnnnnnnnnn

SEQ ID NO: 35849 - DNA, 342 bp, Homo sapiens
  misc_feature (1)...(342): n = a,t,c or g
nnnnnnnnnnnnnnnnnnnnnnnnnnnnnnnnnnnnnnnnnnnnnnnnnnnnnnnnnnnnnnnnnnnnnccaaacatgagacactctcctagaaatttagaattgtgtttacgagatgtcagtctgtctgcaactattccttgaactatgtcctcccagtaaattcaaccacccaacaaatattaactgggcaccttctgtgttccaggtgaaatgttttccaccccttccaatcacagagccttggtgaagccagtacaagaaacacattggactaacatctgcacttaacctgcttgtacaatgttttctttaatgccctccatcttttcttttcttttc

SEQ ID NO: 35850 - DNA, 305 bp, Homo sapiens
gtttatttgaaagatttaaaggtgttagctttgttctgttgggggaattcacttcattacataggggagatgatatttcattaatcttagtaaatattaacataaacgaattgtaaattcagactcatttgcatgaatgaaatatgtatgcttgcccaatttttgtttagtatgaagtcatgtacatcagcgttttctgtctttgctttagttgatagaaaaatagtttaaaattcgtgttcctttactcccttggtttattactgaactttaagattacaggctcgagccaccgcgcccggctg

SEQ ID NO: 35851 - DNA, 339 bp, Homo sapiens
  misc_feature (1)...(339): n = a,t,c or g
gtcgctcgccaccttgcagctgccagggtttcccactgcagcagacagggaaacgctggcaggtcctgcatggtgtatttctgcggctcgatccgtccctcctgcaaacgctctactgattgattcattccacaaatacaatgacttggttactcttaatcactgtcagtgaaatctcttacagaccctcatgagcgtttaacctgaactttgccgtgaatacgcaatgtataattctcacataccanatntgnnnncttaacntntacnttgtacaccatctcaaattctttatttatacatcgtnnatgctgnctntcatgtnactatcatttctaa

SEQ ID NO: 35852 - DNA, 341 bp, Homo sapiens
ctggacaccacttttaaaaagcaatcactgtgctagaaaagtatattggctttgttaggattaaagttcattaacttcaatgtaatcatgcctcctattactgaagtcagattggaaccactaaagatccaaactttctgtctggtaatagaaagtaaaaatctagacatcatttacatttgagaaagctgtttttaacattattttaaaatgccaaatatgttctttctagaaaaatatttatttttgtttttgttggatagcttttaattacatttcagagaggtgtaattttgggtagatgctcattacatttttgaaaggtttatgattccaaaata

SEQ ID NO: 35853 - DNA, 342 bp, Homo sapiens
ctggacttggctctttggcattaaaaaatacctaaggtttttcctatcataagtccctctccattctacttccccttctagctgccatatacctctcttcctcttcctcatagtcagggtgataaacagagttgtcaatactcatcattcactctcatgcacacttctcaactcaaagtaatctagcttttccccaaaccattctagcaaaatggctttcagcagggtcaataacctaataaacaactgaaatgggtgacctttccagttcttttggtcaatctctcagtagcatttaatgcttcactatttcttttcctatcaacaaacaattttttgctt

SEQ ID NO: 35854 - DNA, 347 bp, Homo sapiens
caaggagctccagggctgggtgagggaacactgtccagagagtggagaagaggctgtgattttgctggaggatctggagagagagctcgatgaaccacaacatgagatggtggcccacagacacagacaagaagtcctctgtaaagagatggtgcctttagcagagcagacaccactgacccttcagtcccagcctaaggagccacagctcacatgtgactctgctcagaagtgccattctattggagagacagatgaagtaaccaagactgaggacagagagttggtgctaaggaaagactgtcctaagatagtggaaccacatgggaaaatgtttaatgagcaga

SEQ ID NO: 35855 - DNA, 349 bp, Homo sapiens
  misc_feature (1)...(349): n = a,t,c or g
gacttttagtaataattaccatcatggtgaagagatggttccgtcgggtctgtcgattaggaaagaagatggcagccccattgagaagggtattcctgacttcttgttttagtatctccatgggcacagagtctccatccaccttgtccaccactgataaaatgaacaatggcatcagctttcatatattccatctattcgcttatacatctgctataactagcctataaattcactactctccattttgtacttaataccagagtgaagaagtatttctggtcgacgcggccgcgaattccnnnnnnnnnnnnnnnnnnnnnnnnnnnnnnnnnnnnnnnnnnnnnnn

SEQ ID NO: 35856 - DNA, 352 bp, Homo sapiens
  misc_feature (1)...(352): n = a,t,c or g
nnnnnnnnnnnnnnnnnnnnnnnnnnnnnnnnnnnnnnnnnnnnnnnnnnnnnnnnnnnnnnnnnnnnnnnnnnnnnnnnnnnnnnnnnnnnnnnnnnnnnnnnnnnnnnnnnnnnnnnnnnnnnnnnnnaaatcccagcaacnnnnnnnnnnnnnnnnnnnnnnnnnnnnnnnnnntgtgtgcnnnnnnnnnnnnnnnnnnnnnnnnnnnnnnnnnnnnnnnnnnnnnnnnnnnnnnnnnnnnnnnnnnnnnnnnnnnnnnnnnnnnnactgcactccaccctgggtgaaacagcccatctcaaaaaacagttcatcataagctgaaaaaaatcagatctgctattacacg

SEQ ID NO: 35857 - DNA, 342 bp, Homo sapiens
tgaaagtggattatgtaataatactgtccatttatgagtttagttaccagttcatttgttgccactctattaaaatctaatagtttcactagcccttataaaaggacattaccctatctttatttgtagatactagtttcaaaagtatgacccctttgccatcttcaccatctttaaatgtacagttcaggagtgtgaaatgtattcatattgttgtgaaacaaatcttcagaacactttcgtcttgcaaaactgaaatcctataccgaataaacaactgctcccctttcctctcacttcccagccccttgtgaccaacgtgctgctttctgtttcagtgaa

SEQ ID NO: 35858 - DNA, 330 bp, Homo sapiens
gtttttaagaattcatgttatccaaaattataaaagcagttgtttgaatgagtgaaagaaagggggttaaggttagagagctccatacaaagtcatatataagcaatgcagctttttaatttagcttttatttaagagcaatgaccctttaccactatcaccagcagtattattagcctggtaccttgtattactcttaatacccatcattttgaaatatggtgcaacgacactcaaatgagctgcactacaagaaacaactttcctttctgtaatgccctccctttaggatcactagaagtctgtacaatgcaatgcagattcccgaat

SEQ ID NO: 35859 - DNA, 330 bp, Homo sapiens
  misc_feature (1)...(330): n = a,t,c or g
ctacaattaaagtatgaactnnnnnnnnnnnnnnnnnnnnnnnnnnnnnnnnnnnnnnnnnnnnnnnnnnnnnnnnnnnnnnnnnnnnnnnnnnnnnnnnnnnnnnnnnnnnnnnnnnnntttttatacacatgacaagattttacatcaagaatagtcagttaaatagtacaaatttacattcatgaggaatgttaaaaaaaattcaactaaaaaacccactttttcctgtgacccataatcccacattttacagtgcaggggagaaggggattagggggcatccaaataaagtctcttcctccaaaanatnnaaaanaaaaaattttt

SEQ ID NO: 35860 - DNA, 338 bp, Homo sapiens
cattttagtcttttataacagtaagccatgattgtgtcttgaatttttgtttaaattgtatgtgctgagccttccacctgaagaaagttttcacagaatttccttatgttgactgaagtttcttccttgtaactttttccttttcatcagcacatgagatctgatcacattttgccaggaattctttacttaaagtttcccaatcatccttttctttattcctttatttccctttctttctgcctgctcttctagggccaggctgccttaattaagctttcacttcagaactggcctatttaagggctggtaatatgagtataaaaacttggggtacc

SEQ ID NO: 35861 - DNA, 329 bp, Homo sapiens
  misc_feature (1)...(329): n = a,t,c or g
ctaatatttattatttacctctnnnnnnnnnnnnnnnnnnnnnnnnnnnnnnnnnnnnnnnnnnnnnnnnctcctactgtggacctcagggttgtctttcttgctgttacatattttctctttctggacccaatacaaaatgtaacatgatcttttaacttcttctctgagcctgcattagattttctaagagctttatcgctggtatcgtaacttgcttctttgttccattcctttcttactcctaccctctctacatagtacatattaggcagggacccaaggtgtcaagggtgcctatgaacacatcaccacagagaacctgctca

SEQ ID NO: 35862 - DNA, 330 bp, Homo sapiens
gtagttttctgctcatatgaaaattttagaacttaaggagtcagtatccatttaaatctatgctttaaaacaattatctctttacttatagcatgatacaataactgactttatctcttctcttacataactaagaaaagattaagctgtgtttggtatattgtttaaagtgacaatgaaatatgattttcctccaaatagtacatttcagcacccaacaagcaaaattttcagtatctgggaaatatttcaggtatttggttgtattttccagaatagctcatttgctagcaatactaagagagagctggcatcatgtcttaccatttt

SEQ ID NO: 35863 - DNA, 343 bp, Homo sapiens
gcttcagctatcattcagattacagtttttaaagcaatatttcctaaagtagtttgtgcgaaatggttttgcatgacttgaacctagttcttctgaagctaatatataataataatgacttttccccaatttataatggaaaatcctagaacagagtaaatgtctattagtgggtgaaagcacataatgcttacttcattagcttttaaaaaaaatcacatgtaattgtgttctgaaaatacatgtatagtaatggcatttttggtattacttggtttgtgtgatagaataaaatattagaattttatgctgtttgaattagttatctattgctctggaacaa

SEQ ID NO: 35864 - DNA, 327 bp, Homo sapiens
  misc_feature (1)...(327): n = a,t,c or g
nnnnnnnnnnnnnnnnnnnnnnnnnnnnnnnnnnnnnnnnnnnnnnnnnnnnnnnnnnnnnnnnnnnnnnnnnnnnnnnnnnnnnnnnnnnnnnnnnnnnnnnnnnnnnnnnnnnnnnnnnnnnnnnnnnnnnnnnnnnnnnnnnnnnnnnnnnnnnnnnnnnnnnnnnnnnnnnnnnnnnnnnnnnnnnnnnnnnnnnnnnnnnnnnnnnnnnnnnnnnnnnnnnnnnnnnnnnnnnnnnnnnnnnnnnnnnnngattttttttttttnaaaaanaaacnggttntccntacgttncccaggnnggcctaaaactcnnaggnttaa

SEQ ID NO: 35865 - DNA, 340 bp, Homo sapiens
  misc_feature (1)...(340): n = a,t,c or g
cttgtaattagaacagttttgtggtattcacactactgaatcaatgactcagcctgcagatgagaatcagcctctgattccattccagagagtaatgactgctggtgttctctttgttgatatgcctcaagccctgttttttccgtccttacagccaacaaactacctgccaagctgtgaccaggaaaactttcatgcaaggggagtttctaaagattaaacacatagtgatggatgagactgagaattccnnnnnnnnnnnnnnnnnnnnnnnnnnnnnnnnnnnnnnnnnnnnnnnnnnnnnnnnnnnnnnnnnnnnnnnnnnnnnnnnnnnnnnnnn

SEQ ID NO: 35866 - DNA, 436 bp, Homo sapiens
  misc_feature (1)...(436): n = a,t,c or g
tttgattncnnnnnnnnnnnnnnnnnnnnnnnnnnnnnnnnnnnnnnnnnnnnnnnnnnnnnnnnnnnnntctcgaggatccgaattgcggccgcgtcgacgtaggtatgcttcctgtatttatttctaaagtagtttctctttccttgatgccttattgatgtgataaacagctttgggaataaatctgtctttattttggaaatggtttttagaagcctagttttggctttaataacttantatcancncatnctttggggngtnatggnnttgtattcaanatgananctangttntanncactntntcctntntncntannntnttatatnnnttnnngttnnntcaaagnaattntatncntnatgtanttgnttgtntttntttantnttanntntntnnngtttaattntantnntcccntancnaatt

SEQ ID NO: 35867 - DNA, 345 bp, Homo sapiens
  misc_feature (1)...(345): n = a,t,c or g
ccggagtcgccaacatgtcgaccgccatgaatttcgggaccaagagcttccagccgcggcccccggacaagggcagcttcccgctggatcacttaggtgaatgtaaaagctttaaagagaaattcatgaagtgtcttcataacaataattttgaaaatgctttgtgcagaaaggaatcaaaagaatatttagaatgcaggatggagagaaaattgatgctacaagaaccattggagaaacgtcgacgcggccgcgaattccnnnnnnnnnnnnnnnnnnnnnnnnnnnnnnnnnnnnnnnnnnnnnnnnnnnnnnnnnnnnnnnnnnnnnnnnnnnnnnnnnnnn

SEQ ID NO: 35868 - DNA, 375 bp, Homo sapiens
ggaaatgagtgaactacagctatacctcacaataagaatgaatctcagaaaatattaaggaaaaaagcaagtttgaagagaccacatggggcgtactatttttattgagcccaaaaacaagcaaaaccaaagaatatgtagtctaagcatacgtatacaataaaactatgctattaaaaaaaaaaggtaactgataaaccaaaattgagcatagtaattacccacagaaggaggaagtggaagggacaggagcacataggtagatgccaagttatgcagctgttctggttcctcctggtaggcttacaagtgtttactatatgctattaatacattatactttataactaatagataacagttttttacatatta

SEQ ID NO: 35869 - DNA, 366 bp, Homo sapiens
ttttggcaatctcatgtgactaaacatgtcaagtgatcttgtttacctcttttctgaatatttcaggggccctctgaaccatccagaaagccaggcagcagtaatgacaatttccagattgccataaattattttgtaaaaataactcaaaaggcaaaagcctttcatcagcctttactatgatatgaaaattttgttcaaagcaaaatttttcccttgcattagtttattaatgttaattccagttcgtttccatgaacccttatagattatcccgtctaatcctaaccaatttgaccatgaggtgaaatctttacaaaccttttgtaacccttttactaaagggcagattagtgtcttaagacg

SEQ ID NO: 35870 - DNA, 365 bp, Homo sapiens
ctggaacattcacataatcctacatagttcagtaaacatgaattgacaaagatgaaggctctcttattaaatgagaagataacatgatgctgctaggaagaggtaatatattggatgaaaagtttgtaaactttgagccaacatttcaaagggagaaaacttttgaatcatgtatccccccatgtttatctgtatttatttacaaattatatacatgttctaccactatagtccaatattatatacattataacatacacataaattaaaattttttaatgttgccatgaaaaagataatttttgggtggtttgcacaccctgcatgggaaaccactattcaacatgaccgtatcagaatcaaaa

SEQ ID NO: 35871 - DNA, 369 bp, Homo sapiens
aaacttgctgacatgtatggtggaggtgatgactgaacttcagggtgaacttggtttttggacaagtacaaacatttcaactgatattcccaaaaagcattcagaagctaggctttaactttgtagtctactagcacagtgcttgctggaggctttggcataggctgcaaaccaatttgggctcagagggaatatcagtgatccatactgtttggaaaaacactgagctcagttacacttgaattttacagtacagaagcactgggattttatgtgcctttttgtacctttttcagattggaattagttttctgtttaaggctttaatggtactgatttctgaaacgataagtaaaagacaaaatattt

SEQ ID NO: 35872 - DNA, 298 bp, Homo sapiens
  misc_feature (1)...(298): n = a,t,c or g
gnnnnnnnnnnnnnnnnnnnnnnnnnnnnnnnnnnnnnnnnnnnnnnnnnnnnnnnnnnnnnnnnnnnnnnnnnnnnnnnnnnnnnnnnnnnnnnnnnnnnnnnnnnnnnnnnnnnnnnnnnnnnnnnnnnnnnnnnnnnnnnnnnnnnnnnnnnnnnnnnnnnnnnnnnnnnnnnnnnnnnnnnnnnnnnnnnnnnnnnnnnnnnnnnctcacacctgtgagcacttggctggaataggacatgtttgtaagtcagcacccttctctgtttggggataatgctttggacttcttcgc

SEQ ID NO: 35873 - DNA, 364 bp, Homo sapiens
atttttgcaattttacaaaatcttactaaaaattttggtatttctttccctatattcttcaacaatggatataagtattgttagtgcaaccagttaacagcaacactctgacgtgtttcataaaaacctatactattttataaaaaatccctttcaaaataactctttcaaagtaaagttcccaaaaaagttaattttatccctgttgacatacttcataaaaagttcagatatttgcaatattgccaatactttacagaactaataagatgctctttcaaagcaacaggatatatatacatgtttatgcatctgcttgtttatgtaaaaagaaacacaggaaaaacaaaccagaaacgaaatg

SEQ ID NO: 35874 - DNA, 363 bp, Homo sapiens
aaacaataaagatttgaacctgtaaatgtgtgtgccttttaaagaaggatacatttttaatatatttgagtgattgctgggaagtgtgaaaatattgttatgtatcatatcaaagagaaacatgtttattacaaaaatgttctttaactatatactatgtaacagggtaaacagtgttatgtagaatagaattgtgtaaactagatctttagagaagttgccattgagcaaagttatttaaatgagttagttgagttggatgagaattgtttgaggtttgttgctagagaacaataataaaataattctttttcagaaaatatttaatttcttcataaaaataagttaaatatttttttaaat

SEQ ID NO: 35875 - DNA, 370 bp, Homo sapiens
attgaaagatccttttatatttatattttaattctcattgactttatattagtttcgtagaaacctaatgactgatccacctactcccccttgtggtgaatatttagttttagccaaaatacttttattggtagctgttaactcttgatgttactttactataatgagaacagagatttggatagtctaaaacagattttaaaaaataattcagatggggctttatcataattaggaggggtggctagtactgctcagccccagttgcatgttaggattatctgcagaccctgggtcacgccctgagagattccattttatctgtttgtggtaggacccaggcatttacagtttaaatcaaattaaattt

SEQ ID NO: 35876 - DNA, 372 bp, Homo sapiens
cttctagtagagtctatttgtaggagctttcttggtctttgacaacgtgttttcactgtaagcaaaaactggaaactctgtaagaggcttttgcctctaatgctggtagagagtactttaaaaaacagcttggatgttaaaaaatagtgtatactgtcatttaactcacaaaagctcaactgatattacagcatcctttctatgctcgcttttaaaaaataaattcattaaactgactcatatcttaattaaaagatgttttctgagagccctggtgcagtttgattgctttagcaaaaaagctttttaggagatgaattattgaggaaaatacttagtttttttgtcgacgcggccgcgaattccagatct

SEQ ID NO: 35877 - DNA, 337 bp, Homo sapiens
  misc_feature (1)...(337): n = a,t,c or g
ccaatttaaacggtaggtgctatgcccccttccctccttccttccatctaagaaggaaccagagatgggatacagcatgacaagttcacagaatcattaaaagttgagacctactnnnnnnnnnnnnnnnnnnnnnnnnnnnnnnnnnnnnnnnnnnnnnnnnnnnnnnnnnnnnnnnnnnnnnnnnnnnnnnnnnnnnnnnnnnnnnnnnnnnnnnnnnnnnnnnnnnnnnnnnnnnnnnnnnnnnnnnnnnnnnnnnnnnnnnnnnnngaggtcgaggtnnnnnnnnnnnnnnnnnnnnnnnnnnnnnnnnnnnnnnnnnnnnnnnnnnnnnnnc

SEQ ID NO: 35878 - DNA, 340 bp, Homo sapiens
tttcatttaaatcaatgtgacaacagccttcttcataagccaagaatttccacacccattttcttctctactaacaatttattttaaagtttaactttttttgatcatttaagaaccccaaacaagactgaaccaggaattcaagaaaggctgggaccaagttaatattagtcagcaaaactgcattttgctatcaatcattagactgttcctacactggagcctgaacaaaggacattcactaaactaaaatttacaaacaccgcaatctaatagtgactctcaattccacagcaatataaaagacataaaagttgggctctaccttattccaacaatg

SEQ ID NO: 35879 - DNA, 332 bp, Homo sapiens
  misc_feature (1)...(332): n = a,t,c or g
ggcctttgcatccagcagggctgggactggcaccaggcctgctgacttccattcttcattccatgtcttgattccactttgagctcttggggtatgagaacaactgataaaactgaggcactttagaaaagaaacacacaacctcttttagacagaaatgaaactattgaattttcagcatggcagtcccgagctatgatacttttgtacnnnnnnnnnnnnnnnnnnnnnnnnnnnnnnnnnnnnnnnnnnnnnnnnnnnnnnnnnnnnnnnnnnnnnnnnnnnnnnnnnnnnnnnnnnnnnnnnnnnnnnnnnnnnnnnnnnnnnnnnnn

SEQ ID NO: 35880 - DNA, 341 bp, Homo sapiens
  misc_feature (1)...(341): n = a,t,c or g
nnnnnnnnnnnnnnnnnnnnnnnnnnnnnnnnnnnnnnnnnnnnnnnnnnnnnnnnnnnnnnnnnnnnnnnnnnnnnnnnnnnnnnnnnnnnnnnnnnnnnnnnnnnnnnnnnnnnnnnnnnnnnnnnnnnnnnnnnnnnnnnnnnnnnnnnnnnnnnnnnnnnnnnnnnnnnnnnnnnnnnnnnnnnnnnnnnnnnnnnnnnnnnnnnnnnnnnnnnnnnnnnnnnnnnnnnnnnnnnnnnnnnnnnnnnnnnnnnnnnnnnnnnnnnnnnnngccaaacaaacaaaaaaattttgaagttttcctttcagtgttctgacagatggacatttgtataggg

SEQ ID NO: 35881 - DNA, 336 bp, Homo sapiens
ggtcattgaatattaaagtgaaagactagaacaagaaaaaaaaagatagtttcttgggatttactattataatggcaacagtctttatccctctagagggaaggtgctagttatggtggattcttactgtggtggcccccaatgaaccacacttcctaatagttcccttttatatctagttcccttttatggtgactctggacttggcaaatgggacattagcatgtgggatgcaagcacaatcttagtaaatgcttgcacattggagctggtcttcttggaatgcttgctcttagaatccacctgccaggtaaagaagctctacctagccaatgg

SEQ ID NO: 35882 - DNA, 337 bp, Homo sapiens
ctcttttcaagtacaaaacctcaagaagaacagaagacgagtctggtagcaaaaaataaaatatgcacactttcacagtctatggccatcacatactctttattccaagaaaagaagatgcctttgaagagcatagctgagagcaggattctgcctctcatgacaattggcatgcacttatcccaagcggtgaaagctggctgcccccttgatttggagcgagcaggcctgactccagaggttcagaagattattgctgatgttatccgaaaccctcccgtcaactcagatatgagtaaaattagcctaatcagaatgttaagttcctgaaaacatt

SEQ ID NO: 35883 - DNA, 331 bp, Homo sapiens
  misc_feature (1)...(331): n = a,t,c or g
tttacatttaccttttatttatttgtagtttttgaggcaggttggagtgtaagaatgcaatctcggcttacagccgcctcgactttccaggactccctnnnnnnnnnnnnnnnnnnnnnnnnnnnnnnnnnnnnnnnnnnnnnnaatcacttaattctgtgatgtcgaagctgaagtgagccgtgatgatgccttgccctccagtctgagtgtttcagaaggnnnnnnnnnnnnnnnnnnnnnnnnnnnnnnnnnnnnnnnnnnnnnnnnnnnnnnnnnnnnnnnnnnnnnnnnnnnnnnnnnnnnnttccagtcttcaccctttcgagta

SEQ ID NO: 35884 - DNA, 326 bp, Homo sapiens
  misc_feature (1)...(326): n = a,t,c or g
cagacatggtcttcctccctacagagctcagggaataggaaggcgataagcaaataactacacaaatagaaatatcactggaaaatgtaggggtatgctaagaaggaaaagagctgggtgataagagggaggctggcaagagtcgacgcggccgcgaattccnnnnnnnnnnnnnnnnnnnnnnnnnnnnnnnnnnnnnnnnnnnnnnnnnnnnnnnnnnnnnnnnnnnnnnnnnnnnnnnnnnnnnnnnnnnnnnnnnnnnnnnnnnnnnnnnnnnnnnnnnnnnnnnnnnnnnnnnnnnnnnnnnnnnnnnnnnnnnnnnnnnn

SEQ ID NO: 35885 - DNA, 324 bp, Homo sapiens
tgattttctacttcaaacattgtgtgattctcatttgtattaagtttatttaaggagaagtatgtaaatgactagtactttcagtagtcttaaaaaatcaagtggattgagggaaggaagtgactaaatttttttaaggtttatattttgtggatgctgattcacttggaactaggagtgtggtgaatatttgggtttttttattttaaatgggcaatttagttaaaatttgagtgataaaattctggtttttgaagttaatgcatcagtctcccctcatcatagttcaggctgccataacaaaatagtatagactggatggct

SEQ ID NO: 35886 - DNA, 325 bp, Homo sapiens
cagaaacaaagtaggtttttaatttggcatgagagtaaatgtgtactcctagtcactaaaatgggctttgttggggaaaatttaaatgtttgtcttttttcattgagaatcctatgctgccggtgtatctgtctgatttttaaaggtgctgctgaatgtactgcctgctcagggttttcatgacagtattgaaatgaaaatgtattcagttatagtgttgaagtaatccaggtttaatttaaagactagtattataccaggggtttgaatttttgaaagattatgagtactacacaatgaaacgattatcgacatcacagtaaaa

SEQ ID NO: 35887 - DNA, 326 bp, Homo sapiens
caacttatctaggacacttccacttcagggactttgccctggatgctctctccacctctgcctgttccccaagatttctgcacaggttatagttttttgttttctattacaaagatcataggtaaattgaatgcactttttcaaagattaacccccatcccctatttcacttaagaatcagtgctctgactgggcttgtgcttagcacatgataaatcctcagtcaggatttgttgaatgaatgagtgaaccaatgaaatcaatcattaagttatttatacaggagatttcccaaaagcaaaggaatagaatttaaaaacttttgg

SEQ ID NO: 35888 - DNA, 325 bp, Homo sapiens
cgccgctcttcggttctgctctgtccgccgccatggcccaagctgacatcgcgctgatcggattggccgtcatgggccagaacttaattctgaacatgaatgaccacggctttgtggtctgtgcttttaataggactgtctccaaagttgatgatttcttggccaatgaggcaaagggaaccaaagtggtgggtgcccagtccctgaaagagatggtctccaagctgaagaagccccggcggatcatcctcctggtgaaggctgggcaagctgtggatgatttcatcgagaaattggtaccattgttggatactggtgacatcat

SEQ ID NO: 35889 - DNA, 333 bp, Homo sapiens
  misc_feature (1)...(333): n = a,t,c or g
gacaaataaaaccttgtaatacccaaggtgctactgaaatcgaacatttcagactatcacatctcttcttagaggggnnnnnnnnnnnnnnnnnnnnnnnnnnnnnnnnnnnnnnnnnnnnnnnctgcgtggttaagaaagttgcgaggaagatttctgacaaacccacaaaactggggtgatattaactgttgtgaaaaaaagccaatataagattagtcgatcagatccttcaatgaatatgttcttctctattactgacaagttcaaacacctattcattaagaacagtttggctattttccccagcagacattcatgcnaggncgaccg

SEQ ID NO: 35890 - DNA, 327 bp, Homo sapiens
  misc_feature (1)...(327): n = a,t,c or g
aaaagctgtctcatcactgnnnnnnnnnnnnnnnnnnnnnnnnnnnnnnnnnaaaagggtgtaaacccctcnnnnnnnnnnnnnnnnnnnnnnnnnnnnnnnnnnnnnnnnnnnnnnnnnnnnnnnnnnnnnnnnnnnnnnnnnnnnnnnnnnnnnnnnnnnnnnnnnnnnnnnnnnnnnngtaagtgcaaggtaaannnnnnnnnnnnnnnnnnnnnnnnnnnnnnnnnnnnnnnnnnnnnnnnnnnnnnnnnnnnnnnnnnnnnnnnnnnnnntacagtggaagaagatgtgatttaggtcttttctaactagagagaagttatc

SEQ ID NO: 35891 - DNA, 332 bp, Homo sapiens
gcgacattttagggggaaaaacaaaattatactagcataaatactataaaatcataaatttccttttaatggagaaaatgaaaaactattactgaaaggtatttaaaaagactaaataaatggagagattcaatattgtaaagatgcaaattctcagcagagggacctacaaatttagtgtagctccaataaaaataccaagttcctatagactttctctagcagactctgaagtttacatcaaaaatcaaagagccaagaatagcgaagtctctcctaaaaaagaatatggtaggaggtttaccccactggctatcaagagtcatgtttta

SEQ ID NO: 35892 - DNA, 506 bp, Homo sapiens
  misc_feature (1)...(506): n = a,t,c or g
ctcttctgtttcagctgcctgcccttcacccctgctccatgaggtaattctgctcccctctgattttttgtatcagaattaactggcttgatgaaggtaccatgcgaaatgagctgctcttaactgggcagaggttttgcatcaggccacctcacaggccagcctatggaaagcttctggagggtcggtacccatgtctggtcagttgggaacagagtgacagtgctgcaactatgcataaaaagctgcctttgaaacctgggggcatgaaggagactcagtgccacagactctttcagaaacaaggtattcatttacctgcaagaagaggagaattgcttcgaaattcttancatttggattgcaccattgagaagaagaaaagtggcattttctaaaagcactgtgcagcaaaaaagtggcgttcacattgnagtggttntccacaactgggctaanctaataatctcntcccccaatagnattgaangantnaattgcaccgc

SEQ ID NO: 35893 - DNA, 510 bp, Homo sapiens
  misc_feature (1)...(510): n = a,t,c or g
cccaaagctcaaaagaatttgagacaaagttttctaactgcagcagtttaacctgtaaaggataatgtttagcgggggaaattatgtggtccactcaataacgtgtgactaagatataaataacgtgtgactaagatatgaacttaagtataaatacttaagtttatttaatcacattacctaagacatagttatgttgtgactcgaaggccaatgggccgctgctacatgaattcattaacaaaatttaacgatgaatgatattcccgttgttttggtcagggaactaatttctttattatggcttcttttctctacctgtgtcttcaccaaggacattttgttaggacatatccttatgctatttttaccttgtatctctctgcnacttggttcacgtgtgctttaatactataaaatgagcatcttaagcctgcagtaccacttaccttcacttcgctttcttataatgcccatgctaagcattgagacgtccaattacaacagtgg

SEQ ID NO: 35894 - DNA, 505 bp, Homo sapiens
  misc_feature (1)...(505): n = a,t,c or g
ggagacggatcaaacacaaattgcacaaagctataggagaggggggatagaccaatatttatctaagaccgcactggatgttagatattgtcaacttatagatgtgaatatatttttacatttttcactagggaaatgttgcttttggacgtgtacatatagaactaattgaagtattgaagccaaatctgggaaggtttcttttaggaagaaaagagcaagtggagacacaatatttaagacttttggaattgaaaggcataagggacagataaaattactaagctggtttgaagggaatcagatagaggttgttgagtagtgtagggcagttgtgtntgtgtagacacatgattncgttcaaagaagcactganaagagtgtcctggagtattcagatgctgggagaaantcntttagtaaaactgatgcctggataagaattgtttctagggaccacattttataancgggntatcnggntntcnnaggggggtgaaaaaaa

SEQ ID NO: 35895 - DNA, 512 bp, Homo sapiens
  misc_feature (1)...(512): n = a,t,c or g
nnnnnnnnnnnnnnnnnnnnnnnnnnnnnnnnnnnnnnnnnnnnnnnnnnnnnnnnnnnnnnnnnnnnnnnnnnnnnnnnnnnnnnnnnnnnnnnnnnnnnnnnnnnnnnnnnnnnnnnnnnnnnnnnnnnnnnnnnnnnnnnnnnnnctactagaaaaggagccgaacaacaagcaggtaaatcttccttatatacatcattcttcaaaggactttggggtttctgctaatctctttttctccaagacttactcattcctgtgctttattagtgcaaggactaagaatcacaagttacctattttctcaaacatgaaagctgtgtttgaatcatcttgtgtaacctaaccagcggacagctaatcttcaggatttcaacagtcatcgnaaaggnggaagaactgctgcatctgtttcagacagntctaaaactccctggcgtgacaaccctccgctaaactgagcacacaactnttggcttaataagatcgagcggcgaccgccggatcaa

SEQ ID NO: 35896 - DNA, 505 bp, Homo sapiens
  misc_feature (1)...(505): n = a,t,c or g
gtcccactgccactccccaaaactcatacataatgacttgtctctatcagtcttactatatgcttatttccttcttagcacttaggcctataagaaacattatcttgtttatttatttattcacttagcatctgtcttccatactacaacccaaacttcctgtaggcaggggtgtcatctcttgatggctgctgtcaaccctgtgcattgaacagcgcctggtgggtactgagcactccatgcatgttggctataaaaaagattttcagtaactacatgggatactgctttttttaatttgggaatttctctattatgaatagtttcaaaggcatagccaataatcatctccaactaaatatttatagttctaatacccaagttgggctcacatatatttggtctttgatgattgattgagaagacagggtcttggtcacgcggcgcgaattcaatctatgatcgaatctgaaacccccagnnacttaactgnnctcggcccatt

SEQ ID NO: 35897 - DNA, 506 bp, Homo sapiens
  misc_feature (1)...(506): n = a,t,c or g
ctctgtggaagtcttgacagaggaggttccagatatgggaaacctcacagtgaccgaggttagctgggatgctctcagactgaactggaccacgccagatggaacctatgaccagtttactattcaggtccaggaggctgaccaggtggaagaggctcacaatctcacggttcctggcagcctgcgttccatggaaatcccaggcctcagggctggcactccttacacagtcaccctgcacggcgaggtcaggggccacagcactcgaccccttgctgtagaggtcgtcacagaggatctcccacagctgggagatttaccgtgtctgaggttggctgggatggctcagactcaactggaccgcagctgacaatgcctatgacactttgcattcagtgcaggaggcacaaagtggagcagccagacctnacgttgctgnagctaaggctgggaatccggcctgagnttgcacgctttanagctcattntgggggaccgggtttaaa

SEQ ID NO: 35898 - DNA, 501 bp, Homo sapiens
  misc_feature (1)...(501): n = a,t,c or g
tatgctgtaaccttactggcctctttgttattcctcaaacatgccaagtaagttaacattttagggccttttcacttgttttttacctttgtccagaatgctctttccccaaatatttatatgactcatatgcttacttcactggggcctctgcatatgtcatctcttcaaacaggctttcccaaaccatcttatctaaagtttcaaccctctccacattctgtcccagtgggattcatcccgggatgcaaagatgattcagtatacacaaatcagtaaatgggatatatcatgttaacagaatgaangacaaattgccatatgatnatctcanaagatcaaaaaaagcatttgcaaaattcaacacattggatcctatccctgcctttttatagcatttntatttgtattgctgctctcnttggaatgganctcctaaaacaggtctttggctnggtcatgctnaaccttattcaanncttggagcatgngttgtnttga

SEQ ID NO: 35899 - DNA, 505 bp, Homo sapiens
  misc_feature (1)...(505): n = a,t,c or g
aatcttttaaaaatatgtctatgtacataatttgagactctgacaacgatcacaaacagctggaattgtctccccactccatcccaattaaacattaggtagaaattcgcattaggtgtgacagtaactctcaattcaagataaaaataactcagatgctgccactatgtcatttcctagtttctaaacaaaaataaaacccgaaactgctttgtgtaaaatgtacacacagtcatagttacaagttttcctgcagccttatgaaaagccaacattactggatcattcacacatttacaaaacaatcacagccacaaacagctcataaagagttgatttcacttgcgcctgacatatattgggacctatactttattagtgctccgtctaatctccactccccaaaatttaaactcaaacccaaacttagaagctatctactgntctaattctaccaagttnctgacaagngaaaacacctatttgaaagatattttaaancctg

SEQ ID NO: 35900 - DNA, 100 bp, Homo sapiens
ctgatatacaatatacattaatcttaaaatatcattatcccattaaaaatatttacattaaaaactgagaccactttctttcctcctttttttttttttt

SEQ ID NO: 35901 - DNA, 369 bp, Homo sapiens
  misc_feature (1)...(369): n = a,t,c or g
ggaagatgtcccctagtttcttatatctgtctcctctgcagaattgcccttggccaaacagctgcttcctcacctgggagatcacacccctgcagccgatgattgactgacacgtgggtgcagaaagcctgccctcttgcctccaggtgggacccagtctgtggtgcaatttgtgttcctgggcacctgtgggactggctgaagttaaacttcagattaaacgtcgacgcggccgcgaattccnnnnnnnnnnnnnnnnnnnnnnnnnnnnnnnnnnnnnnnnnnnnnnnnnnnnnnnnnnnnnnnnnnnnnnnnnnnnnnnnnnnnnnnnnnnnnnnnnnnnnnnnnnnnnnnnnnnnnnnnnnnnnn

SEQ ID NO: 35902 - DNA, 365 bp, Homo sapiens
  misc_feature (1)...(365): n = a,t,c or g
nnnnnnnnnnnnnnnnnnnnnnnnnnnnnnnnnnnnnnnnnnnnnnnnnnnnnnnnnnncaacaactatatcctatattcatttggtcatttgtttattcatcaaatgtttctttttaacagctttnnnnnnnnnnnnnnnnnnnnnnnnnnnnnnnnnnnnnnnnnnnnnnnnnnnnnnnnnnnnnnnnnnnnnnnnnnnnnnnnnnnnnnnnnnnnnnnagtccattgtagaatgttttcattaccctaaaaagaaatcctacaccccttagccattactcttcagtccccactccaccgtcttccccaaccctaggcaacccctaatctactttctggctctgtagatttatccactgggcg

SEQ ID NO: 35903 - DNA, 244 bp, Homo sapiens
  misc_feature (1)...(244): n = a,t,c or g
gcgaggtttctccatgttggtcaaaaccagcctttgcaacatagtgagagtttgttactactaacatttaannnnnnnnnnnnnnnnnnnnnnnnnnnnnnnnnnnnnnnnnnnnnnnnnnnnnnnnnnnnnnnnnnnnnnnnnnnnnnnnnnnnnnnnnnnnnnnnnnnnnnnnnnnnnnnnnnnnnnnnnnnnnnnnnnnnnnnnnnnnnnnnnnnnnctcataaatgaaaaaaaaaaaaaa

SEQ ID NO: 35904 - DNA, 537 bp, Homo sapiens
  misc_feature (1)...(537): n = a,t,c or g
cacacnacacaaancaagcnaagccannacnacnnnaananaannnannncccggaggcaagaagccccgncaaccacnnccaaagacgangaaganaccccaccaaacccagcaaangagagcncacaaggaacccaaancgcggaacgcgccgaccgnacagaccaccaaancanagngaagggnanaaagggnccaanccagganacccaccaggantcnccccaanaaaacanaacgggnncancagnagaacccaanggnaggancnntcagacacgcaagncccnagggacgaagnanaagcccancncgagnnacnnnacaaanngacaaaatnccaacgagaacccaaaanacgaganncnnnnaacaggnccacncaaaaagnnancncccggnccccagaaanagggnancgaaaaggaaaaanncganacccacaanggcacacccaagacgagaccnaaaaanaacacnnanggnaaaaancgacaaanacccacagcaagccaancgccacagnccccncaaga

SEQ ID NO: 35905 - DNA, 366 bp, Homo sapiens
caaaaatcaaattgttccctcccacttttttcctatgcaaacctacctcaataaactgcaaaaacaaagataatactggagcttcactcatcatttttaaccattagactcactaatgcaaatgttcgatgtttaagtagtttttgtgccacgtttctgaaatacttatttaaaaaagagccagaaatatgattctgtatagcagtaatttttaaaaagttactaccctgcttgcataaaatgtaaacattaagtagtattactagtggcttaatggtatgttctagactagatgttagtttttcataaatgccaagtcatgtttctcgtccttcttcattgaagtggcactgcccactcatcaat

SEQ ID NO: 35906 - DNA, 370 bp, Homo sapiens
tttctctcagttgggctttctcatcacctgtaacaaagctgtgttggtaactttattccttccaatgtttgtatttgtctccatccataccgagcttgttcccattttaggacctttgtgcttgctgtcctgctgtccagattgctctgtacccagacctttgtatagcctcaaatatctcctgcttagaaatgactttcctgaactccaaattcacatgtcctccttttcccagtcactccattatatcattctgtcttatttctttcatagcatttgtcacatcttgcttgcattgtgaaattaatttacttgcttaatgtctataaccatctctaaaatggcatctctatgatatgataaaaccttg

SEQ ID NO: 35907 - DNA, 375 bp, Homo sapiens
gtttgtcagccctttaaaaaggagtaaatgtatcagagggaggaggagttctggttaaatggaactatccaagtgaaagagcagtccccaactgggtagtgttccagggattagtgggttgggagaacacagaggggggtcaaaaaaaggagaaatagaatgaacagtgaaagaaagtgatctgaagctacaagtttgggagggagacatagtggaaaaattctgaaaatcagatgggtaactaactataggatgaaattggaaacagaggcaatggaatttctcaagcagggggcaagagataagattacttctggtggggtgcaggctggaaacagaatcataaataccagcaatcaagaattccttgatctg

SEQ ID NO: 35908 - DNA, 367 bp, Homo sapiens
  misc_feature (1)...(367): n = a,t,c or g
nnnnnnnnnnnnnnnnnnnnnnnnnnnnnnnnnnnnnnnnnnnnnnnnnnnnnnnnnnnnnnnnnnnnnnnnnnnnnnnnnnnnnnnnnnnnnnnnnnnnnnnnnnnnnnnnnnnnnnnnnnnnnnnnnnnnnnnnnnnnnnnnnnnnnnnnnnnnnnnnnnnnnnnnnnnnnnnnnnnnnnnnnnnnnnnnnnnnnnnnnnnnnnnnnnnnnnnnnntgttttagttaatagatatgatgaacttttctctctggtggtgaaattttagtgggtaatttttcattgaaattctggtactatcacagagttagaaatcctaacttccaatgtgatacgtgttgggcctctaattacagaagttatag

SEQ ID NO: 35909 - DNA, 367 bp, Homo sapiens
ataaaactttatttacaaaaataacccttagcctgggttccaatagtctgctgaccctcgttttagaataagtgtttcaagaaggatcagggaaaagaagagtaaccacatgatcaaaaatggctgcagtttaatttgcaacccagcttggtcagcagtggtccctgccaccttgggtttggttatgcatgctcttttcaatcaataataacaatattgtttaaagcttcaactgagagaggcaacagagatggaattcattgggccttccaaatgcatcaactttcctagttttatccagcacctagaagactagacaattctttcagttaacattaatttagggtctaggatgtgtcagacactg

SEQ ID NO: 35910 - DNA, 370 bp, Homo sapiens
attaaataaatgctgtttctataaaacatattttttccattgcacgttgtaagaaagttatctccatctattatttaattttttgagtgcattttagaaagtattacattatgggggcattagtggtaaaatatattgtttgaaggagaaatacatgacagtggtcattaaaccttattatgagacattatttctttttaaaaaaaattttaaaaatcctcctccaggtaatgaatgacacatcagttctaaatgaggaataacccaatataaatagagagcttatgccaggcactgtgctaagcgttcatttgatactcataacagcccgtgaccaggttggacttattagacaagtgactttatgttt

SEQ ID NO: 35911 - DNA, 325 bp, Homo sapiens
ggagaagatgggacaggtttcagtattacatagggtagtcagggtaaacctcaaaagaaggttaagatttgagctaatatatgaaaaagattaagtttttaaccaaacacatttctgggagaagaatattttagacagagggaaaagcaagtgaaaatattctaaggaacatgccttgagagttcaatgacagtacaggcagcgtggagaatgtgggtgcaggagagtgagcacatcatagaggtcaggaagggggccacatcagggcttgagggccattataaggactttggctttcataactgaaatgcactgactgtcaata

SEQ ID NO: 35912 - DNA, 379 bp, Homo sapiens
  misc_feature (1)...(379): n = a,t,c or g
gtgaaagttcagaacaccaagaatattagaagatcctaaaagtttccaaagagaaaaaaagcaagtcattttaaggggtcaggaaccagaatgggattgcatctctaaacaatacttactggaaactagatagtagcagataaataaatgccttcaaagttcatttgggaaaattattttcaacctagaattctatacccagacaaactgtcaagatagaagaaaggtatttttttagacatgcaccctccctccccacctctgtgaagctactggatgatgaattccagcaaaatgaagaagtcagtcaataagtanaactgagcnnnnnnnnnnnnnnnnnnnnnnnnnnnnnnnnnnnnnnnnnnnnnnnnnnnnn

SEQ ID NO: 35913 - DNA, 370 bp, Homo sapiens
  misc_feature (1)...(370): n = a,t,c or g
ttgaaacatagttctatttcagnnnnnnnnnnnnnnnnnnnnnnnnnnnnnnnnnnagggcagtggcaaattgccaccagnnnnnnnnnnnnnnnnnnnnnnnnnnnnnnnnnnnnnnnnnnnnnnnnnnnnnnnnnnnnnnnnnnnnnnnnnnnnnnnnnnnnnnnnnnnnnnnnnnnnnnnnnnnnnnnnnnnnnnnnnnnnnnnnnnnnnnnnnnnnnnnnnnnnnnnnnnnnnnnnnnnnnnnnnnnnnnnnnnnnnnnnnnnnnnnnnnnnnnnnnnnnnnnnnnnnnnnnnnnnnnnnnnnnnnnnnntatctttatagcagtttccccctgtctatggnaccaatttcctatattagtctatt

SEQ ID NO: 35914 - DNA, 369 bp, Homo sapiens
  misc_feature (1)...(369): n = a,t,c or g
nnnnnnnnnnnnnnnnnnnnnnnnnnnnnnnnnnnnnnnnnnnnnnnnnnnnnnnnnnnnnnnnnnnnnnnnnnnnnnnnnnnnnnnnnnnnnnnnnnnnnnnnnnnnnnnnnnnnnnnnnnnnnnnnnnnnnnnnnnnnnnnnnnnnnnnnnnnnnnnnnnnnnnnnnnnnnnnnnnnnnnnnnnnnnnnnnnnnnnnnnnnnnnnnnnnnnnnnnnnnnnnnnnnnnnnnnnnnnnnnngtatctgtctacatctgggaaaatccacatagtggtttcattgataattcactgaagttggctacttaacgtagtgaatgatgtgattattgcaattaggaaactgaatcaagaaggctgaatcaagg

SEQ ID NO: 35915 - DNA, 366 bp, Homo sapiens
  misc_feature (1)...(366): n = a,t,c or g
ctaannnnnnnnnnnnnnnnnnnnnnnnnnnnnnnnnnnnnnnnnnnnnnnnnnnnnnnnnnnnnnnnnnnnnnnnnnnnnnnnnnnnnnnnnnnnnnnnnnnnnnnnnnnnnnnnnnnnnnnnnnnnnnnnnnnttggcctgggtttggnggcncatacctgnggncccggntacttgggaggttgaggngggaggannacctnagcctgggaggtnnaggcttcagnaatccatgatactntncatgcattcnagantggtgaccnatntnanaattgtctcaaaangntnccttgnttgggntancttggtgnttacattttttaanttgntgctcnntnntgttctcttntgggggggggcc

SEQ ID NO: 35916 - DNA, 368 bp, Homo sapiens
  misc_feature (1)...(368): n = a,t,c or g
cacagttctgtcttcataacattgataagtatgatcacattagcgctctagattttaagcaactggaagatagctatttttttggtactcttcctttaaatttgaacatagtgtctaattagtcaattaacatttttttaaaagggcgagggacatcatggtagagagaacgaagttgaacgtgtttttggttgaatattagcgcatgcccactgtattctaggcacagtcctggtcgacgcggccgcgaattccnnnnnnnnnnnnnnnnnnnnnnnnnnnnnnnnnnnnnnnnnnnnnnnnnnnnnnnnnnnnnnnnnnnnnnnnnnnnnnnnnnnnnnnnnnnnnnnnnnnnnnnnnnnnnnnnn

SEQ ID NO: 35917 - DNA, 368 bp, Homo sapiens
  misc_feature (1)...(368): n = a,t,c or g
gtcatctagatttaccaattgtacaatggctaatattttgccacatgtgtgccctctttctctctccatgttgatttttgctgaacattgaaagttgcagacatcatgacacacttggcctctaaatgtttgtgcatgcattgcctaaaaaaacatnnnnnnnnnnnnnnnnnnnnnnnnnnnnnnnnnnnnnnnnnnnnnnnnnnnnnnnnnnnnnnnnnnnnnnnnnnnnnnnnnnnnnnnnnnnnnnnnnnnnnnnnnnnnnnnnnnnnnnnnnnnnnnnnnnnnnnnnnnnnnnnnnnnnnnnnnnnnngatgtcgacgcggccgcgaattccnnnnnnnnnnnnnnnnnnnnnnnnnnnnnnn

SEQ ID NO: 35918 - DNA, 371 bp, Homo sapiens
gcatttcctgatcactagtgagattgagaattggttctcatatttattcatcacacatatcacttctgtgaaatgcctgttaatatctttaatgcatttttctattttattacttttcatcaatttatatgttttgtatattaatcttttgtagattaaatgtgttgcacatgttttctccctggcctgcctttctttaattaaaacaattaaactttaatatactttaattcattaacattttcttttatagttattttggtctcctttaagaagaaaactttccttactccatagccagaaaggtcatctcctacattttactctaagttttaacattttgtttttgatacttgagcccttaattcatg

SEQ ID NO: 35919 - DNA, 373 bp, Homo sapiens
  misc_feature (1)...(373): n = a,t,c or g
caccacaccgggctaannnnnnnnnnnnnnnnnnnnnnnnnnnnnnnnnnnnnnnnnnnnnnnnnnnnnnnnnnnnnnnnnnnnnnnnnnnnnnnnnnnnnnnnnnnnnnnnnnnnnnnnnnnnnnnnnnnnnnnnnnnnnnnnnntaaaaaacttattatttaatatcagtaaaattaggaattttgctttcaaagtattgctaattctgcttatatgagactctattgatttttatatattattccaatattttgttctaccagtatataatgtaggagctagtggtgaggatttttcgttatagcaactagaaaactgaccttcataaatagtcttagaaatctctaaaatctagtagaatctggcctga

SEQ ID NO: 35920 - DNA, 353 bp, Homo sapiens
  misc_feature (1)...(353): n = a,t,c or g
ggatatcacggaccctactcacactatttataacgaaagatttcatacagaaattacactaccacatgtacccagaatcaaagccaaagtgccctactcaaccaatgaaagcaaatccaaaaaaccagaataattgactattataccagatgtgtggtatcaaggtaagaatacaagaaacatgaaaaaggaaggaaatatgacacctccaaaaaatacaataattatccagcaacagattccaatcaaaataaatttatgaaatcctggaaaatgattaaaaataatgatcttataaaagctaagctgagatagaagaaaacagaaaagcatcacnnaggaaccagaaaaaa

SEQ ID NO: 35921 - DNA, 350 bp, Homo sapiens
  misc_feature (1)...(350): n = a,t,c or g
cnnnnnnnnnnnnnnnnnnnnnnnnnnnnnnnnnnnnnnnnnnnnnnnnnnnnnnnnnnnnnnnnnnnnnnnnnnnnnnnnnnnnnnnnnnnnnnnnnnnnnnnnnnnnnnnnnnnnnnnnnnnnnnnnnnnnnnnnnnnnnnnnnnnnnnnnnnnnnnnnnnnnnnnnnnnnnnnnnnnnnnnnnnnnnnnnnnnnnnnnnnnnnnnnnnnnnnnnnnnnnnnnnnnnnnnnnnnnnnnnnnnnnnnnnnnnnnnnnnnnnnnnnnnnnnnnnnnnnttatggaattttcaaatgtgattctacaaaaattcctactcagtaattttgttataatgctaagcatctccc

SEQ ID NO: 35922 - DNA, 349 bp, Homo sapiens
  misc_feature (1)...(349): n = a,t,c or g
tttcagtgtttaacaacaacaacaacaaaaagggggagcagggagaacgagcatcagagatcnnnnnnnnnnnnnnnnnnnnnnnnnnnnnnnnnnnnnnnnnnnnnnnnnnnnnnnnnnnnnnnnnnnnnnnnnnnnnnnnnnnnnnnnnnnnnnnnnnnnnnnnnnnnnnnnnnnnnnnnnnnnnnnnnnnnnnnnnnnnnnnnnnnnnnnnnnnnnnnnnnnnnnnnnnnnnnnnnnnnnnnnnnnnnnnnnnnnnnnnnnnnnnnnnnnnnnnnnnnnnnnnnnnnnnnnnnnnnnnnnnnnnnnnnnnnnnnnnnnnnnnnnnnnnctccgaaaaaaaaaaaaa

SEQ ID NO: 35923 - DNA, 346 bp, Homo sapiens
cctaattgtttttggtccacagaataaggctattctatgatactatgttattatgttcatgttttcctggaaatataatttgcaaggtcattctaggaactctgattatgaaattcaacatcactttaagtcagttaccctgaactctaatgcagtttcttgtctcttcatacttaccctggagctataacctatagtcttatagaagtgcccttttcaaaaaggctcccactccttgccttctgaatgactgtctagatatattttcacctgtaattgcatactacaccaaatttgcattatatatgaatgtgattgagaaatgattaagataattgtttagttt

SEQ ID NO: 35924 - DNA, 310 bp, Homo sapiens
  misc_feature (1)...(310): n = a,t,c or g
tataaatctagttaaacgtttactccagagggggaagaaaggtaaaagggtagaatacatgcagaggggtaggggcgtgaaactaagagaggcctttcccttcctaaagaatctttgcttacatgcaacacatgccctgataagaaaaagtgtgcattaggacagacttgcccaccctgattttccacttgtacttcactttccactgctgcattctccaagcatgtgaactgatttgttgccaatnnatattgntacntgttttagntanntanannnnncnnnttttatnttnntatnnnnngattta

SEQ ID NO: 35925 - DNA, 346 bp, Homo sapiens
  misc_feature (1)...(346): n = a,t,c or g
tgctctgtgaggtctcaaagattcatttctagatgtttatttaaggagataaaattttattaggtgatattttactttatatatattagtcatagttttctgtaggaggtagggtatgaaaaatgcgccatatataagcaaacctggaataagagtcaggtgctcatgaagtaagaattacagtacattcactcattaaatggctcctgagcatttttcttgtgcctggtattctgctgtgggtaaatgagaaagacctacatttgagattttttttctttcaagaaatttcacatttttagtgagaaaaaacaagtcatatnaaaatggagcacttaattcttca

SEQ ID NO: 35926 - DNA, 349 bp, Homo sapiens
  misc_feature (1)...(349): n = a,t,c or g
ataatacctagcatacttagaacactactagcttaatataatgaataatatattcattcatatcaggttcatctatatgtcaataaatgctcaaatacaaggcaagtgagaagcaggtgagggactaaagaaagaaaagtcatgaataggatatatgcttaacagggataccttcttaagacatatgtcattaggcaatttcatcattgtgcannnnnnnnnnnnnnnnnnnnnnnnnnnnnnnnnnnnnnnnnnnnnnnnnnnnnnnnnnnnnnnnnnnnnnnnnnnnnnnnnnnnnnnnnnnnnnnnnnnnnnnnnnnnnnnnnnnnnnnnnnnnnnnnnnnnnnnn

SEQ ID NO: 35927 - DNA, 341 bp, Homo sapiens
  misc_feature (1)...(341): n = a,t,c or g
tttttatattctgccacacctttattcatacttgactccaaaaagttctcaattattcacagggataatctagaaaataaatattagttttgctttcaaagacattactggaatgagcaggaacctgcatctttgttatattaattaacttattatttagttttcctgtctgcttagaaattggctgtttaggttgaaaaatgatttaagaagcataaactataacacaacaatttaaataaaggtcactattgctgtgaaatgggatgtcagttttgcaattcttctgcactttcccaccaagctgggatctgggtgagtctagagatatttgngaaata

SEQ ID NO: 35928 - DNA, 341 bp, Homo sapiens
  misc_feature (1)...(341): n = a,t,c or g
nnnnnnnnnnnnnnnnnnnnnnnnnnnnnnnnnnnnnnnnnnnnnnnnnnnnnnnnnnnnnnnnnnnnnnnnnnnnnnnnnnnnnnnnnnnnnnnnnnnnnnnnnnnnnnnnnnnnnnnnnnnnnnnnnnnnnnnnnnnnnnnnnnnnnnnnnnnnnnnnnnnnnnnnnnnnnnnnnnnnnnnnnnnnnnnnnnnnnnnnnnnnnnnnnnnnnnaacctttagcatttcttgtagaactgtactagtggtggtgaacaccctcatctttttatttattttggaaagtctttattttccccctgttcttttgaagtgaaattattctagatcaagtgttctt

SEQ ID NO: 35929 - DNA, 353 bp, Homo sapiens
aaatcatctacttctttgtttgtggatttgagagaagattgggatggtcttaagtgcataaaacgagactctaactgcagcgatgagttcagatgagaagggcatttcccctgctcataaaacatccactccaacccatagaagtgcctcctcttcaacatcctcccaaagggacagtaggcaggaagctgacagctgggaaattatagaagggctgaaaataggccaaaccaatgtccagaaaccagacaaacatgagggctttatgctgaagaaaagaaaatggcctttaaaaggctggcacaagattcagaaaggaaaggtccatgggagcatagatgtgggactctcag

SEQ ID NO: 35930 - DNA, 350 bp, Homo sapiens
  misc_feature (1)...(350): n = a,t,c or g
caagtatccagtcagtcactcgacaaacatttattgagcatcttctttgtggcaggccctgttctggctgctgaggaaggaatggtaggcagacaatctccctggcctcctggcactgctaatccagtgaatctgtgtcctcagtgctggcatcagtagctgttagagaccttctagccaaagcccagaatttgccaggccagtgggcagaggcatgtgcagactcacatactgactgtctatttcaggagtctctatttcaggaaaaannnnnnnnnnnnnnnnnnnnnnnnnnnnnnnnnnnnnnnnnncatcaacacagaagaagacttctatgaccaaatgtgtgg

SEQ ID NO: 35931 - DNA, 342 bp, Homo sapiens
taccccgcctcccttcatcccccactgctttcattttaattttttgtttgttcatggagggaagtaaggaaattttaatgatattccttagataatacattttcttacctaaaagtggtacaataatgggttttactctacctcagtccactatgcagcatgcatactctacttaatactaggttgtgttcctacagttagttaaaaaaccaaccagctggtagtatttttttagatccaacctaagaaagacagtgtggtctagtgtagagggcactggctttggagtcagatgggtctaagttcgaatgctggctctgctgcttggaaggtgtgtaactt

SEQ ID NO: 35932 - DNA, 341 bp, Homo sapiens
  misc_feature (1)...(341): n = a,t,c or g
ctgctattcatttgcttgcgtgataattgttgtgggaaattcaatagatatacatgatatgatcctagttctcaaagaaacttcaatttcaatgaaagcagtttctgacacataaataatgtatttttaaaccgttaactattttgagacactcaaaaacatctttcacatgggcctaaaatttcatgacactgccatgtaaggaatttccactctcacaggaagctcctgattagcacaccaagacaattannnnnnnnnnnnnnnnnnnnnnnnnnnnnnnnnnnnnnnnnnnnnnnnnnnnnnnnnnnnnnnnnnnnnnnnnnnnnnnnnnnnnnnnn

SEQ ID NO: 35933 - DNA, 346 bp, Homo sapiens
  misc_feature (1)...(346): n = a,t,c or g
nnnnnnnnnnnnnnnnnnnnnnnnnnnnnnnnnnnnnnnnnnnnnnnnnnnnnnnnnnnnnnnnnnnnnnnnnnnnnnnnnnnnnnnnnnnnnnnnnnnnnnnnnnnnnnnnnnnnnnnnnnnnnnnnnnnnnnnnnnnnnnnnnnnnnnnnnnnnnnnnnnnnnnnnnnnnnnnnnnnngaagccttgcaatttctaaagcctaaacctctccaacacctccctcttgatagagcaatttttatgctactgagcatacacacctacccttgaataaatactttcactccaatacccactgggtgaatgtgacacctaattagaccaatgcagaaaatgaatatgc

SEQ ID NO: 35934 - DNA, 347 bp, Homo sapiens
  misc_feature (1)...(347): n = a,t,c or g
gcctttctccctttattcatcctcatctaccagaatctactcctgctgccatcctctcccacccagtacctgggacagggacagtgcctagtagatcctcaagtatttgctgaataaatcagtccaagtctgtgtatagggtcaggcttgccagtgtcatgtgcaaaggaggatagagagcaagtatgttatactcattaacaccatttcagttttagggtaaataggaatgctttcttgtgttagcatgcagtcttttttccatgggaggtcgacgcggccgcgaattccnnnnnnnnnnnnnnnnnnnnnnnnnnnnnnnnnnnnnnnnnnnnnnnnnnnnnnng

SEQ ID NO: 35935 - DNA, 340 bp, Homo sapiens
  misc_feature (1)...(340): n = a,t,c or g
taggtttttacaggcacacacnnnnnnnnnnnnnnnnnnnnnnnnnnnnnnnnnnnnnnnnnnnnnnnnnnnnnnnnnnnnnnnnnnnnnnnnnnnnnnnnnnnnnnnnnnnnnnnnnnnnnnnnnnnnnnnnnnnnnnnnnnnnnnnnnnncaaaattatttcttgtagtagcaaacctgctaaatcagggataagtactcttcttaaaggccaggtagtaagtattttaagatacgggccttacagtttttgtcgcaattctcaactctgctctgtggtttgaaagcagtggataatacgttaaacaaatgaccaggctatattccaataaaacttta

SEQ ID NO: 35936 - DNA, 347 bp, Homo sapiens
  misc_feature (1)...(347): n = a,t,c or g
nnnnnnnnnnnnnnnnnnnnnnnnnnnnnnnnnnnnnnnnnnnnnnnnnnnnnnnnnnnnnnnnnnnnnnnnnnnnnnnnnnnnnnnnnnnnnnaaaacgttttaaataattgcagcacatagcatgagattatgcacagtaataatatatgagacacttgacaagaaataaattaccttacaatttactatttagaatttctgggtaatgatgtattggtgaaacttttggttaaaaacttaacaaaagataatattcaaatataatcctttcttactctgaaaattgaaactcttgttatacctgaggatcacatctatcaacagcagttctcattggataggct

SEQ ID NO: 35937 - DNA, 347 bp, Homo sapiens
cttgtgtagacaaaaaacagaacaaaaaaaaccttctggctaggcctccactttacatgagtatctttgagatgatttatgcttccacctaggaggttttgctgaagaaaggattatactaatcagactctagaaaagatactgctggttaatgggaaacccatactggaaagtaagttaaatgaccttgactgaggccttgtaatatgtggggctacccctaataccaaaggactcgctactttctctcaatttatagtttcttctcatttgcaacacatcacgtatcattattttgtgcttaaattatgtttcccagctgatacttattgccaaaaccaacgggg

SEQ ID NO: 35938 - DNA, 360 bp, Homo sapiens
  misc_feature (1)...(360): n = a,t,c or g
ctgaaagggaacattagatgtttgaataattttatgatgcctactgaaatggtgattcaaaaaataagttgcaaggtgtttcttaaaaactgattttatcacaaggaaagtaatnnnnnnnnnnnnnnnnnnnnnnnnnnnnnnnnnnnnnnnnnnnnnnnnnnnnnnnnnnnnnnnnnnnnnnnnnnnnnnnnnnnnnnnnnnnnnnnnnnnnnnnnnnnnnnnnnnnnnnnnnnnnnnnnnnnnnnnnnnnnnnnnnnnnnnnnnnnnnnnnnnnnnnnnnnnnnnnnnnnnnnnnnnnnnnnnnnnnnnnnnnnnnnnnnnnnnnnnnnnnnnnnnnnnnnnnnnnnnnnnnnnnnn

SEQ ID NO: 35939 - DNA, 353 bp, Homo sapiens
ttttataataaaattcaaattatcaaaaaattgaagttctttgcatataaatgttgagaaatatgtaatcttgtacaaagagtaagaatactattactgctagatttcactctgtgaatcttgataaatgtcatcatcaatatcaacaaggtatgagtccattggcccaaaatgccatctgccacgatctatccctgccgtctcccttccttcctatatgtggtcttcaagtttcagcttatatgtaatttccttaaagaagcttcacagtttgaagtgtagtctctgttatgagcacccacagtgtgctacaatttttctttatatcttgaggataggaggagtgcctgttt

SEQ ID NO: 35940 - DNA, 350 bp, Homo sapiens
  misc_feature (1)...(350): n = a,t,c or g
aaagaacatactttgtatgatttttgtatgacttgaatcctttaacatttgggtagctgttctccccccacccccccccttggagataggatcttgctgtcttcctccaggctgggctgcagtggtgtgtgnnnnnnnnnnnnnnnnnnnnnnnnnnnnnnnnnnnnnnnnnnnnnnnnnnnnnnnnnnnnnnnnnnnnnnnnnnnnnnnnnnnnnnnnnnnnnnnnnnnnnnnnnnnnnnnnnnnnnnnnnnnnnnnnnnnnccgagtcttgccatgtaacttaggccagtcttgaatcctcccaccttggcctcccaaaggtcgacgcggcgcgaattcagatctatg

SEQ ID NO: 35941 - DNA, 361 bp, Homo sapiens
ccgcctttcagtagttccaccaggttcccacagaaaatgtcaggggaaaaaaatcccctcaggagaaaagtcccctaggcttccaacacggggaagggaaaaggaaacattttgaaaaaacactaagagtactttctttttctgaataagaaaaaatgcccttaggagaaattagctaaccagagcctaaccagtgggaatattatcagagtataactgacctggggaagggaaatacaataccaatgcagtcagttctatccatactggtccatctaagttgggaggaaaaaactgacaaacatgaagttcacagttcagaggcataggctcattaaaagacgataaaatgcttctctta

SEQ ID NO: 35942 - DNA, 352 bp, Homo sapiens
  misc_feature (1)...(352): n = a,t,c or g
ttgtgatccatttgaccttctttccaaagagccaccaacaaggagtgaattgattttgataatctcatctcttttgttttctctctctttgcctctagtggggttgctaatgggagtcacagattgcaaaagattagtttctgcaaaggaaaatcctgtatttgcaaattgggtattttaagagtattttaagggtatttcagatttctaattagtaaaaagattccacctaaattatctcaaaacctccgagttaaaatttcaagaatggcaacaagttaatagtcccgtcacgtttctccaatgttgtatggtatgaagaaattcacagcttttcccaacatnctgttcc

SEQ ID NO: 35943 - DNA, 358 bp, Homo sapiens
gctttagtcaagttaaaggcctggcaagggagagattctggctggcttagcaaggagagagatttctgaggtagccaccacagatggtagcagatgtcacgcagcctcagagcagaagccaccagagacttcactgtcttggagctgagcaaaaaagctgagaaacactcagccacgtcaacagccaattacacacctcaagaatctcaggaagccagggagtgtgtaaaagtttctataattaattgctttccattctctttatccacaaatctgtcagctcatggctcttcaaaaatcaaggatgctagcttcaggtatctctgcctcaccttgtatggccagcagcatgaagatg

SEQ ID NO: 35944 - DNA, 356 bp, Homo sapiens
ttttactattaatgataattcatctggataattctgataaaatggtttcctgatgaatttaaagtttcaattgtagttttctgtcaatatgttacattatacaggacaaagctccaaactcataaaaaaaagtcaaatttagataatttaaaaataaacatagatcacagaaggctacactatcaaccttctctgtccagacgctgtactctcagttcctagataaatcacagctacattttttttcatttaaagatgtaattgtgtaacctggggtttagtaaactacagtcctaaaacatccagccagccacctggttttgtaaataaagtttcattggaacagagccatgccc

SEQ ID NO: 35945 - DNA, 350 bp, Homo sapiens
caaaaacaaaacaaaacaaaaaaccaaaaaattgtgtgaatgaatgtttctagaatgttgtttaaaaattgtgttcatgaatattttatacgtattgtgtgaatgaatgtttatagaatgttagatgttatttaaaaattgtgtgaatgagtgtttcagcagtggtggaaaataataatagcaaatacttatatggcacttaactctgtgccaaaggctattctaaacattttattaattgtatttcacggaatctcagctgccagtaatgataagactacaccattattttatgtactgctacggaagaaaaactgttgccaatgagtctatgatatttttattgatta

SEQ ID NO: 35946 - DNA, 357 bp, Homo sapiens
  misc_feature (1)...(357): n = a,t,c or g
ttctgatgtgcactgtgatcacaaaacaatcatacactaatttgctgcttctannnnnnnnnnnnnnnnnnnnnnnnnnnnnnnnnnnntacaaagctgtgaccaaaatattttcatttttaaactgactctaattttaagtcataaaggaacagaaaacttcttgtaccccttaatctaacaatgacttgcataatataaaaagtgattcaaattaagacttcctaatagaattaaactgctagcagacgacatccatattctagtaatccccaaggtatttctgatgtgcactgtgatcacaaaacaatcatacactaatttgctgcttctatttttggagacagggtctcacgt

SEQ ID NO: 35947 - DNA, 357 bp, Homo sapiens
  misc_feature (1)...(357): n = a,t,c or g
cctnnnnnnnnnnnnnnnnnnnnnnnnnnnnngtctaataaacctnnnnnnnnnnnnnnnnnnnnnnnnnnnnnnnnnnnnnnnnnnnnnnnnnnnnnnnnnnnnnnnnnnnnnnnnnnnnnnnnnnnnncttccctagaatttaatttcttaagaatctctatttttgccatattttattttgagagtaaaaactatgctttttgggttttttccatgtcctttgcagtacttggatggtgcacagaagaggtctaaaaacaaacaatatctccctattttgttcagggcaaacaaaatgtatcctgaattaaatttaccttctgattcaatggagatatagtgtcaatggcagaa

SEQ ID NO: 35948 - DNA, 175 bp, Homo sapiens
acattgtacattaaacgtaatttgtatataactatgtaagattggaactgaatagcaggtgactggttgacctaatgtttcctttttgtatgtttagattttgtaattttccttgcatatttttgtaattaatacctttttccttttctcatatctcatactttttttttttttt

SEQ ID NO: 35949 - DNA, 359 bp, Homo sapiens
  misc_feature (1)...(359): n = a,t,c or g
tctggagagagtcatagcacgtatgcttttaaaagtaagtttcgaaaaactgttttatcagttttgttttttttttggagcatgtcttttctaaataattctcacttatcattccagaaaatataacaaacagtttgtaagaactcatgcaaaaatgtttctctaaggccataaattggtttgctaagttgcattgttttattcaagtaaaaagcccttctagagaacaaggagtctgtaaagaaaaccaatcaccttcaacttttgggcctgtacacctgttaggagctctatcactctgaaagccaaaagatagaatgctcatttgagcntttgcagtcgacgcggccgcgaattcc

SEQ ID NO: 35950 - DNA, 206 bp, Homo sapiens
caattcttcagttaaaaaagaattaatttaaataataagatggaatttgatttctcatattttgtgagaacagcatttgttttctgtcacaggacttaaaatttctagattaaataattacactttgaaacagaaaagcacaatgatacactgtgtgaacaaaatgctatggacttactaaataagtaatactttttttttttttt

SEQ ID NO: 35951 - DNA, 326 bp, Homo sapiens
  misc_feature (1)...(326): n = a,t,c or g
aggggctcttnnnnnnnnnnnnnnnnnnnnnnnnnnnnnnnnnnnnnnnnnnnnnnnnnnnnnnnnnnnnnnnnntacagagtgctcaacaacttcatttccaaccaaaaaaatggactttaaggaagatctttcaggaatagctgaaatgttcaagaccccagtgaaggagctttntttgaacattnttgnnnttngnttttnnatcnannattcggntgtnnattntnncntttatantgtnntcatntttntttttaattntttttgangntattnnntgtttttgntcatgtgttntnanttttttttngntnnaaaatcta

SEQ ID NO: 35952 - DNA, 339 bp, Homo sapiens
cataaatcacacgttcaagaatacctactatgcacaggtaccataaattggagcactttaagttaatttaaaaaaaattttttttagtgtcttccacccatagtggggtcaactatcagctaagcagtagtagagactgtattaggttttgttgtgtatcagcgctcactttcagcaacatgtaagaataggaactaggacctgcgtagtctgctctgaatgactgcttaagtcatatttcaaggtgaaagtagtgaaatgtaggatcagcctatgtattcatacattttttaaagtgctttcagatatatttttacctttttcttggttgtttaaact

SEQ ID NO: 35953 - DNA, 356 bp, Homo sapiens
ctagtcttcattctgactattcctatcacctttgtatgatacagtcaaaatgttgacatatttaagaagagttttattgttattaatacattgcaagtcacgaatgaaactggatagcaaaacctgagcttccactgggctcttatcggagttccaagcctagaagtagctaaaaataaaaaaagtttttggcagcaaagaagcacactcagaagtctgagtatcagccatgagaacatcccaagcctattaaatggcaagtaaatctgtaaatggccaaatgtaatatattgcctgttagttaatgctgggaagaaaatggcttttgtttataaagtaattttagtttgtattag

SEQ ID NO: 35954 - DNA, 337 bp, Homo sapiens
ttgaaaagcaaataaagggggcatggcctgtctctcaatagccccactatcaccacatggtgctatgctttcatcctgtctttattacttgcctgtattataaatgaaaggtgagagcaatgcctttagaaagtcactgttaaaacgcgtctgctatctaggttttacagacttctacttatagaccagattaggcgtttgacaacttgaaactgcctaagttctgggaaaaaataacaagggaatttcaatgggaaaggcatgagaactaagagcatcatgactggcaatcctcaccctcccaaagggtatctcgggatgctaaactgggcccacc

SEQ ID NO: 35955 - DNA, 213 bp, Homo sapiens
cagtgatgctgaatggttttctcatccatttctcatctgcctgttttcaaacaatttctaacacaaattgaaagatttccataaaaggaatcaaacaaccttccaagctcactcatttttgcatttcacgtttcttatgagaagtcccccttttactgcttttgtccacagtggaatttaagagtagattattctaagctttttttttttttt

SEQ ID NO: 35956 - DNA, 353 bp, Homo sapiens
  misc_feature (1)...(353): n = a,t,c or g
gctttttttattttccatgtgacaagttatcttcaagactgtacagccatgccctttaagacagtttatttgcttgcttgctagcttctctgtgtgtggtatcccatgataaaatttaaactatttaaaataagtcacctcccaccagaattccccatctttccccaaagacagtcacagttaacaatgtcttgtgtaccattctgtaactattttacgcaatcacaagcatccacaatgtttttactttgcacacatggcttcattatatttttttttccttttagttgcagattcctttccccaagcatcaaaagacaagtaattggnggtatatatttaatattgcaggg

SEQ ID NO: 35957 - DNA, 335 bp, Homo sapiens
  misc_feature (1)...(335): n = a,t,c or g
nnnnnnnnnnnnnnnnnnnnnnnnnnnnnnnnnnnnnnnnnnnnnnnnnnnnnnnnnnnnnnnnnnnnnnnnnnnntaagactgttctggttgttaattaagagatggggtcttattctatcaccagcaggagtannnnnnnnnnnnnnnnnnnnnnnnnnnnnnnnnnnnnnnnnnnnnnnnnnnnnnnnnnnnnnnnnnnnnnnnnnnnnnnnnnnnnnnnnnnnnnnnnnnnnnnnnnnnnnnnncttaaaatttnnnnnnnnnnnnnnnnnnnnnnnnnnnnnnnnnnnnnnnnnnnnnnnnnnnnnnnnnnnnnnnnnnnnnnnnnnttt

SEQ ID NO: 35958 - DNA, 354 bp, Homo sapiens
tttagaattcagtgacaataaagatgatagataatgtcttaggaagatattaagaaacctagaaaatactatagaaatcagatatgccaactttttatatgagcctaagtccaaagcttacacgacctgcccagtatctatcacacagctagttaacggcagagttgggatgaatttttgtcacagattttcactgaagtatcaataggagacgaatgtacaagcctctctttggagataacccagggagcaattacgaacttgttttgaggtctgcattttatcttaaaaatttcaaaagtcacgcagttatttcatcctatacaaagtatttatgtctttctctttttatgg

SEQ ID NO: 35959 - DNA, 353 bp, Homo sapiens
atcttcttcactaatgtatttgatctgggtgttgctcagaaaaagtttgcgtagggagcttggcagtttgggtggcacgtgtgaaagagaattgaaagatagtgatagcaactccaaatttgtcagcgtttcaaatactccatcttctatgttagttttctcgcaaactttgttaaaatagcagttccaggccaaatagagatttttcaagtttataagtcttgaaatgccctctttagttatgttgtatatattgttttgaattagactaagttctgtcaaagactctggcaaaccagagggtatttggggtaactggttgtcttcaagcagtaactcccttaggtttttta

SEQ ID NO: 35960 - DNA, 355 bp, Homo sapiens
  misc_feature (1)...(355): n = a,t,c or g
nnnnnnnnnnnnnnnnnnnnnnnnnnnnnnnnnnnnnnnnnnnnnnnnnnnnnnnnnnnnnnnnnnnnnnnncaannnnnnnnnnnnnnnnnnnnnnnnnnnnnnnnnnnnnnnnnnnnnnnnnnnnnnnnnnnnnnnnnnnnnnnnnnnnnnnnnnnnnnnnnnnnnnnnnnnnnnncagcctatttaatttccattactctgtgataggggttattccaattttacagatgaaacagtcctatcagatacagtaacttggataaggttatacagcaagtggtgaggaccatgattctattccaggtgacaagcagtgcctacaagtatcaggcacactacatgcttaagtaga

SEQ ID NO: 35961 - DNA, 321 bp, Homo sapiens
cagcaatctccatggattatctctacacatgcaaaattccactgagcaaaaaactcacctttgaagagccagaacagaaatctaccttattcacacacttctaggagtctacgcaggagaaacgaaaacaggtccatacacagattgcatgtgaatgttcacaacagcacctaccacattagtcaaaacgtggatataacccaaaagcctatcaattggtgaacggataaacaaattgtgatattaatctgtacatacatggaatactattcagcaataaaatcagttctgacacatttaacaacatgggtgaacccccaa

SEQ ID NO: 35962 - DNA, 340 bp, Homo sapiens
ggagacgcagtagacagagacagaccgagaaggaagggagagacagagggggcgcgcgcacaggagcctgactccgctgggagagtgcaggagcacgtgctgttttttatttggacttaacttcagagaaaccgctgacatctagaactgacctaccacaagcatccaccaaaggagtttgggattgagttttgctgctgtgcagcactgcattgtcatgacatttccaacactgtgtgaattatctaaatgcgtctaccattttgcactagggaggaaggataaatgctttttatgttattattatgtcgacgcggccgcgaattccagatctatgaat

SEQ ID NO: 35963 - DNA, 395 bp, Homo sapiens
  misc_feature (1)...(395): n = a,t,c or g
cgcctccctcctggaggttagacggaccttcgtgagcaaccaggtgttccctgtcttttgtggcatctgccactggctgtctgatgctaattatttgcccacttttctgtcattagaagttcctgaaagccagagccagggtgttactcactctgcgttccccctcatccaccctgggtacctagtaggtatgttatgtgttagatgaatcatttaagaaatcctagcgtctgtgagcctgaggaacaaccacataagcttttccagctcaggaatggttcctgcactttgaagatggtcaggggctgctctgaaggtaaaataggcaacaggcttggatttcttccggnttcgcanagcctgcagttcagacagaggacacntgtggagttaac

SEQ ID NO: 35964 - DNA, 391 bp, Homo sapiens
ctggtggaataaggtttgggattgtgaagaatccggcctgcctcagacttgcaggcctcctccattattgtatgacatgtcatccaatgatgcttgaagtatttaggatacttcagtgtatgctatgatttggggtcaaaactcgaacctacatttgagcctcatgtcaaccacttattagttgtacatgtctttgggtaaaatgtttaatatttctgagccatggctttttgtttgctaagagagagataataattccatcttaaagcatagtttagatttagatcatgtataaaatatgtatatataagtgtataatgcatgccatatgcttatacgtgaataatgtacatatacattatacagtgtatatatctttaaatacatatga

SEQ ID NO: 35965 - DNA, 389 bp, Homo sapiens
gaaaaagaggggaaaggggatttaaaaaacaatcaaatagaagacagagagactaaggagatatgatgattgaatgcaacgaggtatcctcaactgggtcttaaaacagaaaaatggcattagtagaaaaactaatgaaattcaaataaagtctacagtttagttaatagtaatatatcattgttaatttcttgttgtgacaaatgtttcactgtaataaaaaacagatgttaacattaggagaaactgagtaagggcacacaggcactcttaaatactgtctttgcaacttttctgtaaatctaaaattattcccccaaaagtttatttaaaaaaacagagcgaaaaagacaaggctatcccagcaggggaggaggcagtagaaggaa

SEQ ID NO: 35966 - DNA, 386 bp, Homo sapiens
  misc_feature (1)...(386): n = a,t,c or g
ggaacttagggatggggaagaagcgtgggataaaactgcacagattcgcctttggggaaaagttccttgatcctaaatcacaaacaaagtaattcatttgtttattcatgcaataaacattaaccttctannnnnnnnnnnnnnnnnnnnnnnnnnnnnnnnnnnnnnnnnnnnnnnnnnnnnnnnggtagctgctcttctggactttataggtaggggcaaaaaaataatacataaacacaaatgctttacataaattaaaataaaatgggctatgagatagagtgtggcctggggttatatgaatactttacatagggtggtcaggtcaaacctctctagggaggtgacttaagacgaaacctaggtagtaagaggaagccccc

SEQ ID NO: 35967 - DNA, 130 bp, Homo sapiens
  misc_feature (1)...(130): n = a,t,c or g
tctaggctggagtgcgannnnnnnnnnnnnnnnnnnnnnnnnnnnnnnnnnnnnnnnnnnnnnnnnnnnnnnnnnnntctgggaaataagtgcacactaccacactgggctaattntttttttttttttt

SEQ ID NO: 35968 - DNA, 392 bp, Homo sapiens
  misc_feature (1)...(392): n = a,t,c or g
tagaaaagttgtattagcattgttttattttgcatgacttaaaatgtgcttttctaattgataatttatctagtgctgcctcagacttgataattgggttcatcaacagagccttgaaaagtttgggtagagaccacaaaaatgtagtagctatgcatgaagattagctgatagtttatccgttaagactgcttatggatgtaagcaatgaaaatctaactaacagtagctaagagaaatagagatttatgttttcatgtagcatagagtctggaggttggcagccgacaactctgtgatgccatcagcaaccctacttttctccatttcttaaaatggaagattcttagagtgttgcttttaccgngttgnttttctcatcatgcctccat

SEQ ID NO: 35969 - DNA, 378 bp, Homo sapiens
  misc_feature (1)...(378): n = a,t,c or g
aattattatcattttctttcaagatctgtttgtggacccttgtaattatttttatttctataaggttggtggtgatattccctttttcatttgggtcttctttctttttttcttggtcagtctagccaactgtttgttaattttgttgatcttttcaaagagcaatttctcgcttcattgattttctctgttggttttctattctgtttcatttattttttctatgttcgtnancttttttttctaagtttgctatttgcttttcttttttcttttctttggtttntcttttctttcctttnttantttttttttttannaanaananttnnnttttnnncccccnccnngagnncaannnncncaatcnngntcccc

SEQ ID NO: 35970 - DNA, 395 bp, Homo sapiens
atataaagtgcaaagattattaacaggatgacggaagaaaaaatgttcaagcactcgattaatctgagaaattcaagcttagaacactaagcagcactctccccacttcagtagtgagacagatcagtgcaagctttcaggaagtcaatttgataatgaatccaagtaccataaaatatacacacacttttgtccagtaattccacatctgagaaatctttcctaaagaaatcatcagagctgtggataaagatttatgagcaaaaatagccaacgcagttactgacaacggcaagaaaaactggaaacataaatggattctttcctttctagcagaggctctttctacgaagcacagaatttagaatataagaggtttggcttttgatttacag

SEQ ID NO: 35971 - DNA, 390 bp, Homo sapiens
  misc_feature (1)...(390): n = a,t,c or g
tgcagctctaagtctttgaaagttaaaaaaaaacatgtgtgtgtgtgctgtacattcatatatatttatatttcagcatagaaacatatttacaagatacattcctatccccatgttcttcttttcctccctctgattaattctggctaatttttcagtgactgctagtttatttacaaactggttggcagcagtatgttttaggtcgacgcggccgcgaattccnnnnnnnnnnnnnnnnnnnnnnnnnnnnnnnnnnnnnnnnnnnnnnnnnnnnnnnnnnnnnnnnnnnnnnnnnnnnnnnnnnnnnnnnnnnnnnnnnnnnnnnnnnnnnnnnnnnnnnnnnnnnnnnnnnnnnnnnnnnnnnnnnnnnnnnnnnnnnnnnnnnnn

SEQ ID NO: 35972 - DNA, 381 bp, Homo sapiens
cacaaatatatctgacttatttcaagccagtattattccaagctcactccttagaccactgttcacactttctattcatatgcatcgacatgattctaataagaatgacatgtgataatgccgtggtgtccttcctctaagacctcaaagtattttacagacattatcaagttaatcctccaaggtaggaagtaggtattttacagatgaaaaatctgaggcatagtaactcctccaaggccatgcatggtgtgggtcaaggggaaggctagaaatagaattctcttcgtaaatccaggtcaacttttatattcactagaatacactgaacttactgcattaaacgtttacttgtttgtttgactgtaaatgttttgtgcg

SEQ ID NO: 35973 - DNA, 390 bp, Homo sapiens
  misc_feature (1)...(390): n = a,t,c or g
caccatcatagacagaaaagtctgcaatgatcgaaatcactataattttaaccctgtgattggaatgaatatggtttgtgctggaagcctccgaggtggaagagactcgtgcaatggagattctggaagccctttgttgtgcgagggtgttttccgaggggtcacttcctttggccttgaaaataaatgcggagaccctcgtgggcctggtgtctatattcttctctcaaagaaacacctcaactggataattatgactatcaagggagcagtttaaataaccgtttcctttcatttactgtggcttcttaatcttttcacaaataaaatcaatttgcatgactggtcgacgcggccgcgaattncagatntatgaatcgtagatactga

SEQ ID NO: 35974 - DNA, 341 bp, Homo sapiens
tcctggaggcataaaaatcaaacattaatagcagctatctctgatacttgaaagaggaaatttcattttatattttttgtattttagcaattatatattaacagaacaaacaaacaaacaaagaaaagccacaaaataatctatgtgatatatctatctcagtttaaggcatttagcaagaaattactaaattgaagttatcaccatcctcatcaaattcaatgatggctgaacagttcaaatctatttggaagtccaaattaatataaatatttggtttgattattattatttatttatttatttagatggagtctcgctctgcacccaggctggagtgc

SEQ ID NO: 35975 - DNA, 348 bp, Homo sapiens
ctttgatcatgagatttaacccttagagtgctggatgagacctacacatggtgattagtggtggtaggtaaagcaccttggtttcttcttcttcttgaggggttgcatctctctttctacaggagaggtaaaggaagggaactatcatttattgagtcccttcccgcccctgtgtgccaggccctttgacctacttttgctcattcagcaagagtcctgtgagcttcctactcctcctttacagctggggaaatagaggcccagagaatttgagtgattttcccacagccacgcagcttgaaattgccacattttgttggtctgcctgcaaaggtatcccttctcctt

SEQ ID NO: 35976 - DNA, 350 bp, Homo sapiens
ctctgaagagattatttctcagatctgaattttctaatagactacaacaaattcacacaaatgtcactgcagatagaatgaatgttttttcatgccagtgtcactcacccttgcctgcctgcaccccctcccccaaggcttttcaaaatgtatttcatacacagagtcactgttctggttgtttatttaattaacatgacagcccagcatacacagcatttctttcagttctacagttttaactttttacactttcgactcaatacagaaagagtaaaattactgttttcactccttccagcctctgtaaatttatatagattcactgactatttatgtcacttaaaaaa

SEQ ID NO: 35977 - DNA, 343 bp, Homo sapiens
gctgtgtgtgagagggatggagaccggggacctccatcttggtgtcgccaccactaggatggataacatgctcacatgatttcaggccacttctcatcactctttgcaaggggccaacactctttcccaaatttaaagactcaaaaatggagcagaaggctgaagatcacttggcttatgcaatcttcatttatgttttgtagaaaacatcttggtccttatttactctcaataacagcatcagatgaaatatgtgtatctgcaggcttttgcagtaatttctggaacgcttgtgaagatgcatctgactcaggtgtccacattccgtattgctgatgggcta

SEQ ID NO: 35978 - DNA, 375 bp, Homo sapiens
ccaaattgtggctgtcttcctttataaataacttagtcttatgtgagagtatctatttcagttacaaattataactgcagaaactttaactggtaaaagaattcagagtatatagttaggaaagtttgctgacattaggacgtgccaaactacctatagtcaaaattaattaacaaaattaatgattaatgtgtcaaacttataaattgtcatttaggttatcatttggttggtaatatgattcaaaaaacaaactgcctaatgaaatcttgtggtcacctacatgagccacaatatacatatatttatttttaattaattgtctaagttagaacccaaaattcttttttctgaaatttaaagaagaaaaaaaaa

SEQ ID NO: 35979 - DNA, 376 bp, Homo sapiens
ttggaagggagcagagagatgcaggaagctgtaaggtctgcttgtgggaatactgaggaagttctattctcagtgaaacaagcagcaagggcatagcatgatggaaggggagcaagtgaggaagggcattgtttggagagaagtgttagatgtttaagaagacaggaaatatagtagggttgctagacagtgctaaggtccattagaagctagagaaagtgagttcagtaagcatggttatatttttctcctgttacttttggctgttcacttacaagcatgagtagggtttgggtttttctaagcaagtaacagggagaatgggcaagggttttgaggggataaattcaaaggagtaattaaaatgataaagcat

SEQ ID NO: 35980 - DNA, 364 bp, Homo sapiens
aaaatttcaaaaactcctgagatatgagcctccattttgattgtgctcaatgacttaaaatttgatgaaacaaacaagcttacaaagagtcagacttcagacaaaatcatttaacactaagttgagaaatcactctttcgaagcttctgtttcaaacatgttacaaactataatctagaatcagaaattatgaatctcaaaattcttttcaataaaaccaagacttcagattcctgctaggtacccaaaagagcagtttgccaggaaagaattatctaaaacctatccagtaggattattgcacagtggggcccacaggacaatgatttccaagggctagtccttatataaaaaaaggcccaat

SEQ ID NO: 35981 - DNA, 361 bp, Homo sapiens
tcttgcctgattgctctggctagggcttccaatactacactgaacaggagtggtaagagaaccccctccctttttcaagtttctattcaaatatcactttcctactaaaagctgtctctgcttgcccaagttaaaatggcaacattgcacacaaacatcctaacccttttccttgccttatttttctatttggcatgtatcactaacataccacatatgttacttacttaacttgtttactgtctgttcttccacaggaatgaaaactcctttagggcaagaattttgcctgttttgtgcagtgatgaatccctaatgcctagaggagagcctagtacataataggcactaagtaataact

SEQ ID NO: 35982 - DNA, 363 bp, Homo sapiens
  misc_feature (1)...(363): n = a,t,c or g
gtgagatgttgtctcaagaaaaaaaaagaaaagattgtttttgaatctgaagacataacaaagcagcattacaagttgtgttgtacaagtgtgttagcnnnnnnnnnnnnnnnnnnnnnnnnnnnnnnnnnnnnnnnnnnnnnnnnnnnnnnnnnnnnnnnnnnnnnnnnnnnnnnnnnnnnnnnnnnnnnnnnnnnnnnnnnnnnnnnnnnnnnnnnnnnnnnnnnnnnnnnnnnnnnnnnnnnnnnnnnnnnnnnnnnnnnnnnnnnnnnnnnnnnnnnnnnnnnnnnnnnnnnnnnnnnnnnnnnnnnnnnnnnnncctgagtttctagcctgctccacagatctcagactcaagactgc

SEQ ID NO: 35983 - DNA, 371 bp, Homo sapiens
  misc_feature (1)...(371): n = a,t,c or g
nnnnnnnnnnnnnnnnnnnnnnnnnnnnnnnnnnnnnnnnnnnnnnnnnnnnnnnnngagtttatttttcttaaaggtaatttctctgtcaggttacaaattcttctggagtcatttttgataatttacgtattcctgaaaaattacttcctcctgggcctcaaatttattaaaagtgagcaaagcatttttgtttgatttttgatttcttctatatctgttgttactgttccattttcatttattattttgtgtctgttctcccttatttcttgattcattataggttattctactttctcccccccaaaaccagctcttaacttaccaattctaatttcttgagttgttagatgcttaatttttttctt

SEQ ID NO: 35984 - DNA, 376 bp, Homo sapiens
  misc_feature (1)...(376): n = a,t,c or g
tttttttttcatttctatgttcgtcccttcgttcagtcttgtaatgatggtctccagtagtaactgcagtaatgacagtctcaagcaataacaggagttaactgctgtaatgattgtctcaaaccataactgtggcagtcagccacacaccctgactttagacttctgccctttggaatgataagagaatagacttgtgttttaacccactcaacttgtgataattagctacaggcacaataggaaactaacacagagtcccaaggtttttacttggggctagccacacggtacccctctgctaacacataccaaagttccagactcccagaagaaaagtaggttaacataaaccatatatacttangnctattac

SEQ ID NO: 35985 - DNA, 372 bp, Homo sapiens
  misc_feature (1)...(372): n = a,t,c or g
ctgactacactgtnnnnnnnnnnnnnnnnnnnnnnnnnnnnnnnnnnnnnnnnnnnnnnnnnnnnnnnnnnnnnnnnnnnnnnnnnnnnnnnnnnnnnnnnnnnnnaggacactttttgaagaaaacccaaatctgaactctaatgggataaattcaggacactgccccaggctttttcttagaaattccatccatccctttgggttgaataaagacaagtgtactgcctcttaagatttagtataataccctttctaggccaaagtaccaatgggtgaattttaacaaaagaaaatatgtatttactccacttatataatagttgacaggaacaaatatcctacaactcattcattagtaatttactaggg

SEQ ID NO: 35986 - DNA, 504 bp, Homo sapiens
  misc_feature (1)...(504): n = a,t,c or g
ctgcaaggacaggggcatatttgttttgttcaccattaagtaataaacacctaatacagtgcctgtcatgtagttgcttagcagatattagttagatgcatgaatgtgtaggtatcaaagattttttttttcaggagatcacattctagtggaagacactatactgctttatgtgataagtgctttgataaagtaagcaagtcatctaaccagatcttggtaagttaaggttttctgagatagaacttgagctgagtcttttaaaaatagtaggatttataagggaaaattaaaggtcttcccaaagaaactaagtgaaactaagcagcctatgaaaaggngaaagttggagagattataggctatgaacatgggagatgagagagaaactgcaggatngggcagaaacctgngctaagcattngantttgcctggcaatgngggaccatagtgaaggtattactgctgtcaattgnttgaaaggcntgtggcttagctaaaaa

SEQ ID NO: 35987 - DNA, 521 bp, Homo sapiens
  misc_feature (1)...(521): n = a,t,c or g
tgtttgcagatgtagatctggacatccgtgcccccaagagccaggtaggtaccactctggtcaaagatcagtgactttacctcaaagttgttatccagctgcaaagtcttaaagttcttaagcttgcgcagatcccagagcttgacagaggagtcatcagccgctgtatccaggtagtaaccattctcagagaaggcgatgctagtgatggggcccgagtggccagggaagttggccacattagtacgttccttcaagtcccagatcttgatctgagagtccatggttcctgttccaaagatgagnccgtcagggtggaactgtgcacaggtgagagagcaccagaggtctcatctgtcaccntggtgancacacccctgtctggatgtcaganaaacccaggactgatntnggagagctaagagatagtngcngtgngtgaagctgagnctgnacanactctatggcccgaccactgtcccaagangnnttgggaccgacaaatctgnnggggatgggga

SEQ ID NO: 35988 - DNA, 381 bp, Homo sapiens
  misc_feature (1)...(381): n = a,t,c or g
cacagatattgtttatagctaaagaaataatacagagactacacaactgaatgcacccagaatcaaagccaaagagcccacccaactagcaccattgatacatctcctatgaaagaaaatccaaaagcannnnnnnnnnnnnnnnnnnnnnnnnnnnnnnnnnnnnnnnnnnnnnntgctggaaaatacatgaggtaggagggagggaggaagacaaagattgaaaactacttattgaatactgtgctcacttcctgggtgacatgttcaatnnnnnnnnnnnnnnnnnnnnnnnnnnnnnnnnnnnnnnnnnnnnnnnnnnnnnnnnnnnnnnnnnnnnnnnnnnnnnnnngaagaaaagttannaataaaaaaataaaa

SEQ ID NO: 35989 - DNA, 290 bp, Homo sapiens
cttatacaagtccatgtacttttatttgcacatcataagtctcctgataatactatttctgccaatgaaaccacaagctcatacgcaaaggcggcctcagactctgaactctattaataagagaaaaacagattgatacctccaagagaagcggaacaagcaaaactgcagaacgttcgaaagatgagatgacaaggcttcaagggctcctccggtggcttagaggcgatgtttacatgcatctttattttgttcttttttaaagtgcagggagtatttttttttttttt

SEQ ID NO: 35990 - DNA, 324 bp, Homo sapiens
  misc_feature (1)...(324): n = a,t,c or g
tacatattgtcctccagtcagtctggtgttttcactgtacctccacaaatgctatgcttgtttccatctctgtaactgttctgctgttttttttttttntttnaaanncattnttcnttttttttcnnaaatnttacccnttttnaaaactactccagnccnccnttntgantttnggnananccntttcnttcntttttttaaggtnnccatnnggnaangcnttantaancaaaaggttttnttntttttttgaagccnttcggggggaancgaatngggggnatgcttngcnggctngnttttttgcncaaaattntaatt

SEQ ID NO: 35991 - DNA, 337 bp, Homo sapiens
  misc_feature (1)...(337): n = a,t,c or g
cctcacagtcaaccacagagttaaagacctttcattagatctcactgcccgtgggatgaattcagtaatcaagcctcctctaagaggcctccacggtgtaaatcctcacgatcttcccagttcctacatattccacatcccacatcaccatgccccaagaagagctcctgtaagatactttacctgacataatcacttcacttgggaaaaaaagatgacttttagggtttattaaatgtttatttcctcttgngttcaagtttgaaatttaccttatatatggaagaaggagaaggagaaggagaagaaggtggtgactggctgagactttcgacac

SEQ ID NO: 35992 - DNA, 276 bp, Homo sapiens
ctgggatctgacatgccacctctattccttataccccttcactttgatgttatatgacttttcttaatctacaaaacctaggcaggctaagattttctatgccatcagtgaagaatcttaaaacaggtttatatagagaataagaaaatagaatgcataagccctagattttcaggagtgtggaggaagtgccatccaaagaggaaaaggatgtagcacagggagatacaggacatcagaaataaacttcccccaccccaccaaaaaaaaaaaaaa

SEQ ID NO: 35993 - DNA, 335 bp, Homo sapiens
aaatattaataaaattaatatgccttttctcctgttactctgtcttttgtcagtttaatttgtagtttaacttctaaacctaagaggtagaagaaaagttctttttttttcctctccactatagttcaataagcaatttgaaagcagtgttaaatcagaaaaaaaatctatttatacccacaaatacacagaacttccaaatgtttataattgttgaattgctaaatgactacaaatttatgaaataaataagaaaaaaattctagaaattggcaaaaagagcaaaagtaaaatgacaattgatataacagacaaaatcagcagttcacattttt

SEQ ID NO: 35994 - DNA, 335 bp, Homo sapiens
tggcaaatacacagtctcacttaaactgtaatttaacagtctgtgtgttgtgtttatattttgcttccacttgaagcagcttgaacaaggctgtagccgttgagtgccaggcccctgagactttagtgtctgaaggaaggagatgcctcctgggctgcactgttggccccggtctgccccttgtacaggccctcccgcaggctctgccgtagccgcgactcagtctgccgagtgcagaggttcgggctgttgctgtgagctggccctgccagggctgacttccccggggctgcgtgtcagctgggtgggggccacgccacagctgggattccagc

SEQ ID NO: 35995 - DNA, 337 bp, Homo sapiens
gcacaaaattttctgtgtatccgtaaatcaaatgtagtcggtgttccagatttgtaatgatcacagtcctcatggaagaaggaaattcttagagctcagttggaagagaaacagcagtctttcagtcttcataggtttgtatcccggggcaatggttttttgaggctggaaaggagggggagcatgttagcagtacatcctttgtatgcattgctcagctactctttgatttcttgaggagaaatagaaagaaaaaagtctgaagacaaaagtgcaatgagtttcctcttccattgtctcatcagtccctctgatctcgtggctaatgtcacttacg

SEQ ID NO: 35996 - DNA, 333 bp, Homo sapiens
tttggttatactgcctattccagtaatctcaaaattttccagtttgaatctaccctaattcctctctgaacaggaattttggcttatgcatctttgtatttgaaacacataagacattattttgtaataatgtagtcttattttattagtgatttaatatactgagctatcttagttgttgtattttaatcatttagattatttatgtgaactctttatttttagtgtaatgaacaagtctggggtgaatcgtgtagtttggaaacgacctcgactcactcacaatggacctgttagaaggagcacagttattgaccagattccttttctggc

SEQ ID NO: 35997 - DNA, 339 bp, Homo sapiens
  misc_feature (1)...(339): n = a,t,c or g
gaacaaaagggagagactctctttgctattcaagagatcttattcttcaatttttagggtggagaatgggaagggataacaaattacgttccaatttctgcatgtattctaaaggatagaagtaagaataaagttaggagtaagnnnnnnnnnnnnnnnnnnnnnnnnnnnnnnnnnnnnnnnnnnnnnnnnnnnnnnnnnnnnnnnnnnnnnnnnnnnnnnnnnnnnnnnnnnnnnnnnnnnnnnnnnnnnnnnnnnnnnnnnnnnnnnnnnnnnnnnnnnnnnnnnnnnnnnnnnnnnnnnnnnnnnnnnnnnnnnnnnnnnnnnnnnnnnnnnnnn

SEQ ID NO: 35998 - DNA, 342 bp, Homo sapiens
atttaaagccagatatcccttcttcaagaaaatccttgaaaagcacaaatttgaggcaaataaaaatgtaccaaataaactacagtgcaatgtggaaaatattacatgttaaataacagtatatttagtgtgtgattggagtaaagaaatatgaagagcgtcttagacgactttctagagcaaataacatttcagctaagtatcaaagaatcatacacacattgccacctggagatgaggaacagtgttcagagatgttgttccacattataattgaaagggagacttaacagggagagaggcacgaaagaaaaataaaatatcagcatatcttttactaag

SEQ ID NO: 35999 - DNA, 339 bp, Homo sapiens
  misc_feature (1)...(339): n = a,t,c or g
nnnnnnnnnnnnnnnnnnnnnnnnnnnnnnnnnnnnnnnnnnnnnnnnnnnnnnnnnnnnnnnnttttttttttaatcataatacagttttgttggaatcttggcaaatttatagattaacttgggaagaattgacacctttgtgagactgagtcttcccagccaagaacagactatgtctttcccttatttaggtcttcttttgggtccttttgggagcattttaaagttttcttcaccagtttatttcagtttctaatgctttcctaaccaatcagtatttaatagaatctttgacctactgccttttcttttgtgaggtttctcatataaaagcat

SEQ ID NO: 36000 - DNA, 340 bp, Homo sapiens
  misc_feature (1)...(340): n = a,t,c or g
gttaaatacttgctcagggccccgcagccagtaagtggcaggacctgtgcttacctcctggcctatggactccagcgattgtgttgtgaagccaccacacccgctgcctttcctgaacacggacaggaagcgttacatacctaacgaggagaacatgggcaaaaccttgcgagtttaagttgtgagtgagctaagggtgagccgagaggatgactgtagccaagcctggcagcctggggagcctatctgcaggtgtggaggggtgaattgttagtgaaggtgaggtcgacgcggccgcgaattccnnnnnnnnnnnnnnnnnnnnnnnnnnnnnnnnnnn

SEQ ID NO: 36001 - DNA, 337 bp, Homo sapiens
cacaggttgtcgccgttgctcaggatcatccccatctggccccatgatgacggtggcccaggtcatctgtgagtgtcagacgtagcataggcagaggtctgcaaccagataagtgcccagctcagggcccactccctccagcctcctcccagcctgccctctgggcccctccacccttactgagggagatgtggtgttggtccccttccttcctctgcccacatgccctcacctacagaagggcttaggcgtggggtgatgaggggttcctgccggttccttctctctgcccaagcagaactgcacccacatcatcaaggacctgaggtgggaggat

SEQ ID NO: 36002 - DNA, 341 bp, Homo sapiens
  misc_feature (1)...(341): n = a,t,c or g
cttcaatgttgacgactgctgaatgatcagcatggcagatactaaaggatggggtgactatggtataatttcttaaaataggtaacaatgaagtttgccacactgattgcaacctcttacaaaagattcatctagcatgtggcactggttgacggtttttaactcaagagtagaatttcaatttgatcnnnnnnnnnnnnnnnnnnnnnnnnnnnnnnnnnnnnnnnnnnnnnnnnnnnnnnnnnnnnnnnnnnnnnnnnnnnnnnnnnnnnnnnnnnnnnnnnnnnnnnattnnnnnnnnnnnnnnnnnnnnnnnnnnnnnnnnnnnnnnnnnnnnnccc

SEQ ID NO: 36003 - DNA, 77 bp, Homo sapiens
aaacgagataatgcatataaacacacttttttgaaatcacagagcactatgccaatggaagcctttttttttttttt

SEQ ID NO: 36004 - DNA, 136 bp, Homo sapiens
aaaaatggtttacttgagggacatggggagggaatgcccatagaatatttgtgaacaaagaagtgaaggacctatagacttttttaaaatcgtatgtctgattttaatttttacatttttactttttttttttttt

SEQ ID NO: 36005 - DNA, 344 bp, Homo sapiens
  misc_feature (1)...(344): n = a,t,c or g
tttttttttagcagttttgcagagggcttccaattctttatcaagcctgcaccccactcttaggttatacagtcttaggcacaagcaattatctgaataattggagtgtttcttaaaagaggttttaggtgtcagcagcgatgtctgttcaaacggcacactagtgacagatccttggaaaactccatgctccaatgtgaagcaaggtcatagggtccagctgagccccctcactcatccaaaggggtcaagggagggccagcggctacaaggggtcagagcctcaggtttgactgttgacgcggacgggaattccnnatctatgaatcgtagatactgaaaag

SEQ ID NO: 36006 - DNA, 375 bp, Homo sapiens
  misc_feature (1)...(375): n = a,t,c or g
ctcaaacctctgagctcaaatgatcatctnnnnnnnnnnnnnnnnnnnnnnnnnnnnnnnnnnnnnnnnnnnnnnnnnnnnnnttcagtttctttttctgtatttgtgttttaaaggctaattttattttttttctgatagagtgggtggttatcttttgagaggttttaaggtataacaatcttgccttttcctcctacctctaaggcctcttccccttgccccacattgtaggacctatttgaaaatgcagatgtttatttacatcaggtgataagagatgagctcagcatcattactgctgggcctggaagggcgtctgggccttggatgtgcagctgccatcagctccctgtttatcttgaatctggaatt

SEQ ID NO: 36007 - DNA, 387 bp, Homo sapiens
ctaaagtttccacttactcagatgtagaagtgaatttctttttctctaaaagatacggaaactactctcttaaaaaaagaaaaaataaaaatttaaaaaacgttgtgcagaaacttgagacaataaggagcagagttatatgtgaaatccaggttgcttagataggagattagctacatatattttttattaatgggaaaaatactcagaaaaatttcatatggaatgtgaccctgtgctttgtataagtaattagatattagaatggaagagcaaattttagtgctttggttgtgtacatcaccttactattctgtaatagatgtaactttagcatagtcattttaatgatgagaacatggggcaaaaaagattgtccaggcttga

SEQ ID NO: 36008 - DNA, 373 bp, Homo sapiens
caagcagctatgtccaactcaagtactaaaaagaaaaccccaaccctgctgcttctactagaaccttccttacctgaaaccccaagctactctcccaatgaaaaagcttggtttgaacaagagagcggaagttacatacaaggaggcaggtggaagttctcagatgggaggctagctattccggaagcaatagccccccaatttatgaagcagtttcatcagggaacacacatgggaaagactgcattagaaactcttgtaggatggcatttctatgtgccatgccttactgccatcactcgagccgtttgtgagcaatgtttaacctgcgcccagaacaatccatggcaagtgccaactcagcccccaggga

SEQ ID NO: 36009 - DNA, 381 bp, Homo sapiens
  misc_feature (1)...(381): n = a,t,c or g
catttataaaaaaaactgaatttgcattgcaaaacattcagtaacatcagctttgcctcatggttatttaatatgccaaaaatctcccttttcttatttcttccttcttctttcccattatgtgtaatttctcttcccagcttgcctgtttttgaaaggagcagcagatcttaaatgagactaaatgttttgtgttggcttatgcttactctcatggccattgcaaatatttcactcattcatctgccttcttttgctttggtgttgctgagtcaagtatctttcttgcagaggcattatgttcattcaaaacatgttgttttcttctctctctcttttttttttaaggattatncttactcagctgttaaaagtaggcaa

SEQ ID NO: 36010 - DNA, 380 bp, Homo sapiens
  misc_feature (1)...(380): n = a,t,c or g
cttttagggagccctcaggaagcttctgtcagatcagcgtcattagattctcataagagtgcaagccctattgtgaacagcacttgtnnnnnnnnnnnnnnnnnnnnnnnnnnnnnnnnnnnnnnnnnnnnnnnnnnnnnnnnnnnnnnnnnnnnnnnnnnnnnnnnnctgccacatccannnnnnnnnnnnnnnnnnnnnnnnnnnnnnnnnnnnnnnnnnnnnnnnnnnnnnnnntgctgctctagaggacaaagccagagggcacctgggttagaattttttgannnnnnnnnnnnnnnnnnnnnnnnnnnnnnnnnnnnnngtcgacgcggccgcgaattccnnnnnnnnnnnnnnnnnnnnnnnnnnnnnnnnnn

SEQ ID NO: 36011 - DNA, 377 bp, Homo sapiens
  misc_feature (1)...(377): n = a,t,c or g
cagtggttcactgtaggttttccatggatagcctttattagaataaggaaatttccttctattcctaacttgttgggaattttatcattaattaatattgaattttgttgaatgccttttctgcatttatttatatgatcattcgatgttgcgtatttagtatgacaatatgataaaatacattgattgatttttgaatgttgaaccaactttgaatacctgggatagannnnnnnnnnnnnnnnnnnnnnnnnnnnnnnnnnnnnnnnnnnnnnnnntcgcgttgtggatgtggtcactgagttgtacaatttaaaatggttcagnnnnnnnnnnnnnnnnnnnnnnnnnnnnnnnnnnnnnnnngaaaatattac

SEQ ID NO: 36012 - DNA, 369 bp, Homo sapiens
gacatattaaagcaaagcagtaccagatccacatcatatgaaatatccactagaacttaaatgtgtggggaccttttattacagaggacacaattttatagttttagtcaggtcttaggagattatctgctttgtagactatccaaggcataacataaatcctaggcagcagcaagctcttcacatgagctttctttggcgctcaatcagagcctattaaaaaagcctaaacatctttctatagcaaggcacaatgcaacagaaatatactgtaaatataatcatatgaagcataccaaaacacacaaaaattcaggattcttttgaatatcttttcaactgatgatatttaataacagagttgattaa

SEQ ID NO: 36013 - DNA, 378 bp, Homo sapiens
ctctgagcaggttcagccatatcaatcatcttttgaaccacgtaattggcatactggtccttcatcatggggtataaggcactgtgaggaccatcattctggcagcaaacctcgtcaatcagtaaagctctctcagcacgggaggcatgagtaacacacttttctactacattgctggcaaatttgtgttgactcagggctaaaacctttcccctgatttcggaaacaattttgctcttggcttcaggtcgaccgtgttccagtacatgctgaataacataattgccatactgatcctgtaccaactgctctgtatgttggtggagttcttctaagataggtaaggtctgttctgcagtgcaatgctctaggatgcgc

SEQ ID NO: 36014 - DNA, 378 bp, Homo sapiens
gaaccttcttgatgctatcatgtttcagctgtgaatatagcctgtcagatgcttagaacaatcagttgaactggtatgagtggctgcattagggctttacaaatcgttaggactgaattttggtgggtttagagagtgcatttttatagctgagttgaatgtgatgagttcactacaggcttttggcaaaggaggggagctgcagtgagtagctcataagattcattttataaatagaaacataaggattttgtataaggcctcacctgtttataatctacctaagactttttgggaattaaagttagaattataaatggctggttgggtaaaatgtaatactatgggctttctttagatttttcagagtatgtggga

SEQ ID NO: 36015 - DNA, 378 bp, Homo sapiens
  misc_feature (1)...(378): n = a,t,c or g
caggaacagaatttttcnnnnnnnnnnnnnnnnnnnnnnnnnnnnnnnnnnnnnnnnnnnnnnnnnnnnnnnnnnnnnnnnnnctcattgaaactcacctttaaaaaaaaaaattgggaanagatttaattagngttctcttatttttaaaaaatgtttatttcagtannnnnnnnnnnnnnnnnnnnnnnnnnnnnnnnnnnnnnnnnnnnnnnnnnnnnnnnnnnnnnnnnnnnnnnnnnnnnnnnnnnnnnnaaactcacatttttttaaagcataaagattaaattccctttatgttaaaagngaaaatgaaataccttttcaaaaatatctacnaagaatctgtatccctctgcaaaggaaacagttccttat

SEQ ID NO: 36016 - DNA, 336 bp, Homo sapiens
cgcgggttctttgacctcaggtttgtgattctggctgtgggctcatcacaggctctacctccaccctctggggagataagccctggccgggggcagaagagcagttgtaatggtttcctggctgttctccttccccaacgggtcttgctttcagtgtttctttgcttgctccctctccagaggtgacttccctcccggtttctgggtatctgtgtctttgctctctccttttgcttttctttttgctcccttggtctcttctcctccctctctcattgctccctgggggggcaggttcctgtctcaaagattaattacttgctttttttttttttt

SEQ ID NO: 36017 - DNA, 368 bp, Homo sapiens
  misc_feature (1)...(368): n = a,t,c or g
gttggaggagccaaagagacctggcaagtgatgctgccctcccatgtggggtctggggccaatggctaagctagtgctgccctcccggaacagagggtccgggtagtcatgttggagagtgtcctagcaatgcatcaggtctacagctctttcagtgctgagaacagatgatgatggcagggtgtgttggtgttgagcagatataccaaggtgctagcatgttggggatttggggccctgtggactttcctgctactttctatgtttgaaattatctcaaaactgtttcgtctccaacagaaattccatacccattnaacatgaactccgagtccttgcttccctgacccccagcccctggcaactat

SEQ ID NO: 36018 - DNA, 350 bp, Homo sapiens
ccttctttcacccaaaaaaagtcccctatcctcatattcacaaaagcagagatgtcatgtcctcctgagcccccccccagcctatgtgtgacattcttccagaccccttcaccgatgcctatcattatgtgccacacttattagctgcaatatgttaactatgttccatatattgtgaaagtccagctccttttaaaaacaagaaagaagccaggaggctgctgagtcactgacagcctgaatgaattaatcaaaactagctggagcagtctgagtaacatcaaaggttgccataagccattttgaaaatcagaagagaacgactgtagtgctattatcattcctcttga

SEQ ID NO: 36019 - DNA, 337 bp, Homo sapiens
atttattttagccacagacatggataagaggcaatctaagttaaatatgtgcactttggtaccaggccaacctgagttctaaccaaatttttcatgttttagatgtgagacaagttaatcttctaggccttacttccttcatgtataaagtagttattattacttaattcaacaaatattattagtcactcttctatgtgttggggtattccagtgaataaaataatgacagtctttcccttagtgcagtttccattctaatggtagaggacggaggatgggggaggcaataaaaaggaattgcatgttaaaaataataattgctgtaagcagagag

SEQ ID NO: 36020 - DNA, 342 bp, Homo sapiens
  misc_feature (1)...(342): n = a,t,c or g
ctttgttctatttttgtatttttaaactttttttctttttaaacttttttattaaaatctaagacnnnnnnnnnnnnnnnnnnnnnnnnnnnnnnnnnnnnnnnnnnnnnnnnnnannnnnnnnnnnnnnnnnnnnnnnnnnnnnnnnnnnnnnnnnnnnnnnnnnnnnnnnnnnnnnnnnnnnnnnnnnnnnnnnnaatatatcnnnnnnnnnnnnnnnnnnnnnnnnnnnnnnnnnnnnnnnnnnnnnnnnnnnnnnnnnnnnnnnnnnnnnnnnnnnnnnnnnnnnnnnnnnnnnnnnnnnnnnnnnnnnngaaatcccgtctctactaaaaatacaag

SEQ ID NO: 36021 - DNA, 329 bp, Homo sapiens
gcgaactttgggtctggattggggttccagtcttctctctctgtgaaatttatcagtagtatgactaagcaaatcatttaggcttcaccaattcatctcagctttctcatctataaaatggggacaagaatgtctaccacccagaatccttggaggactgaatgatgtaatgaccgtatgtgatagtctgttggagagaataagcactacataaatgccagtcatcatcataattagcagattagcatatacaggttaagcatccctaataaaaaatctgacattcaaaatgctttaaaatccaaaacttttgagccctgacatgatgc

SEQ ID NO: 36022 - DNA, 342 bp, Homo sapiens
  misc_feature (1)...(342): n = a,t,c or g
ggacaagggaagatcaattttgaacacgttaagatcgagttctcaatgggtcactgaagagggtacctaggatgcatttggaagtgcaggattggagcttcaggtagaagatttctgcagtaattatttaattgtatggcgagccctcaagaacagtaaaaagatcatgagatatggaatcagaagacacaccaattactggcttctctgtgtgatattgcattgacaaatcactccctctgaggaactgataatacacttgttctactcatcttgtgatattatgagaactaagtaaaagcatgtangtgaaagccactgcggaagaattgaagaattata

SEQ ID NO: 36023 - DNA, 332 bp, Homo sapiens
ggcatgtgtgccagtccagaggtggcccaggacgttctggttccttaagcgtggccctgatgaaggggaagggatagtgagaagacacaggataaaaagccagttagagagctcatctctggacatgcttcccgtcttgtccttgacatgcatgctgacccactgctgggccttgggcattctgccctttttcagcttgacagactgatgctgcccccacctccccatccgaaagccatgatttgacatttttaaaagaccgaagaaaagaaagaaaatttatcttttctgtttatccctccgtttatcatttttagcacttttatttcctc

SEQ ID NO: 36024 - DNA, 343 bp, Homo sapiens
ggcaaagaaaaaaactatggatgccaagaatggccagacaatgaatgagaagcaactcttccatgggacagatgccggctccgtgccacacgtcaatcgaaatggctttaaccgcagctatgccggaaagaatgctgtggcatatggaaagggaacctattttgctgtcaatgccaattattctgccaatgatacgtactccagaccagatgcaaatgggagaaagcatgtgtattatgtgcgagtacttactggaatctatacacatggaaatcattcattaattgtgcctccttcaaagaaccctcaaaatcctactgacctgtatgacactgtcacagat

SEQ ID NO: 36025 - DNA, 345 bp, Homo sapiens
tttttatctaagtatccaaaaacacacatacaaaaaagtacaggtatgttaagggtacagttcaattaattttcacaaagtgaacacacctgtgtaatgagtacccccctcccccactcaccaacaccgaaatcttgaaacaaaatcaacttcctagaacgctaagtcacctccctcatgacccctccccaggcactactccacagtaagcgtatacatgatcctgacttctattatcgtaagttagttttgtctgtgtctaaactttatacaaaagaaatcagaataccacttgtaaagaagcaatcctcaagaccatcacagcaattcaaaatctttccaaag

SEQ ID NO: 36026 - DNA, 345 bp, Homo sapiens
aaataaataaatataaaattaagaactcgataagtaggttaacagcagattagctacaactgaaaagaggacaggaagatagctcatagaatatccagactaaagctggaggggtaagaaaaaggttggaaaaatatagaaaagagctgaagacacatttggcacacagtgaaagatctaacatatgtgtattcagaactacacaaggagacaagaaagtggagcagaagcaacatctgaagagatgagttctgactgagaattttccaacactgacaaaaaaagcacctaaagatttaagaagcaatatgaacccagagcaggataaaagacacacacatggcc

SEQ ID NO: 36027 - DNA, 337 bp, Homo sapiens
  misc_feature (1)...(337): n = a,t,c or g
gtttgtattttttccccctaaagtttattttacctgcaggagggtcagtcttacaggaacttacttggctacaaccagaagtaatcccctaggtgatttttttattattgttttaacatggctcaggtgtttcctattaaatgctctgtggatttcctactttcttccttatttcctctgttccagctacagtagctgtacttcttcataggtcttcaaataagccctcatctttctgcctcaaaacttctatacctgaaggactcttccccagctgtcctatttaacattataaacattgtcaccctcagggtaccncgaancngcnnnnattact

SEQ ID NO: 36028 - DNA, 331 bp, Homo sapiens
  misc_feature (1)...(331): n = a,t,c or g
nnnnnnnnnnnnnnnnnnnnnnnnnnnnnnnnnnnnnnnnnnnnnnnnnnnnnnnnnnnnnnnnnnnnnnnnnnnnnnnnnnnnnnnnnnnnnnnnnnnnnnnnnnnnnnnnnnnnnnnnnnnnnnnnnnnnnnnnntcaggttgtctttctcctgctttactatttcatttttttcttttcgtcttctagcgtactgtaaatttacatatattttaatgtctgtactagaatataagctcaacaagggtagggctctttgtgtgtagacattgctcagtacatagttggcacgaaataaaatcacgtcgacgcggccgcgaattccagat

SEQ ID NO: 36029 - DNA, 344 bp, Homo sapiens
aatcagtacattaataagatctgggaaagaaagggtagtgctcaatacatacttggctgatcaattgattcttaaaacaaacaaacaaaattatccttattccttcccatttgccagtaaaaaaaattgtaaaataaaataagtccatcacaataaaaatacacaatctcagaaaagtcatttgtttggaatggggaagaaatggagcaggaaggacaatgagaaagctccacagtagtctggttgagagacagtatggattgtttggtttttttttataatagccatgtaactttcaacatatacaggtttttattcattagcaatattgttaccttagccat

SEQ ID NO: 36030 - DNA, 322 bp, Homo sapiens
  misc_feature (1)...(322): n = a,t,c or g
cctggatgaaaagatctaatatataagcatgaacttttaaaggttaatttatattggaattatgcaatgtcaatttttaaactccccaaagaatttaggggttggggaattcacagattaaaatttttttcaggaaaaataaactggtgaaaatagataagggcatggaaaaaaaaaanggaaaatgaangggtntntnttggcncaggaanacnaaatggatcantggactggaaaaataagtntaaaaaganacttacccntaaccaaaantaagtntnccccaanggtancaccttgantcagngagggaanactgatt

SEQ ID NO: 36031 - DNA, 348 bp, Homo sapiens
  misc_feature (1)...(348): n = a,t,c or g
gaaactcacacttttcttgggctatcacatgaaagtttttactgtagtcaagtatggaaaatctgaaacaaccttcacataacctacaaatgtaacttttcttcaatgagctcaaaacatagatatttaattttaattcctctttagataatacattggccgcacatgtacttggaattttaatatttaagtttcctttctgagtgaaaaataactcacttttttctttttttttttnnaaagggngnctnanttngtcccccnggnngaanngcaggggggcaatntggtntaatngaancntcngcntcnggggttaangcanttttannacctangtntccaaag

SEQ ID NO: 36032 - DNA, 366 bp, Homo sapiens
  misc_feature (1)...(366): n = a,t,c or g
tttccaacagggaaaaggctaacaaattgaaatttcaatcagttttagcatacgcaggagctctggtaatcagagggctgaatcaaagcctaaagtcttgaaaataaaaattcatgtctctacattactcagtcctttcttactagtgatacagcagacctgattctgtaatgggatatttgcctcaaattctatgaacaagactgtcatgatatttaggccacattacaatttggatgtaagataaaaatagttgaatacttcaataacaacaacaacaacagggacagctgatttttaaggcttctgggtgctaccctatttcaggtttttggccaaatgtggtttgaatcanagatttaaaac

SEQ ID NO: 36033 - DNA, 359 bp, Homo sapiens
atttcggttagagttttccaaattttcaaaaatcattcactatatagtattaaaggccactgtatcagattttgtcatcaagtaacatgactattaaaaatggtagttgagaaagaattttaaaaaaacagttctgttttctacagggaagtaggaaggagtgtctgcactggggcacaatatgattgctacaaacttacaggatcacatcatgtcctctgagacgtgctctcagaaagatagtagggacttagtttttctcccacatagcatcgttaagtctcttcttgctaccgaaataattcgttttgctgccaaaacagtttgcaattatgacaaaattcacatccaaaagatat

SEQ ID NO: 36034 - DNA, 364 bp, Homo sapiens
gcaaattttaacaaactcctcttagtaactgatcaagcatatcaaaaaataaaaaaagtgaacaacacaaaaagctcaagtaatctataaattcatttcaaacatacacagaactcttacaaaaaactgattacatactggacaataaaggaagtctccaagtatttcaaaagattggttatcatagcaatcttattttctgacagtatgattgacttagatatcaataaaaaatactgctagacaacctacatgtttagaagaaacatacttccaagcagcctacaagtcaatgaaaaataaaaattagaaaatattcagaatgaatgaaaaaagttaaataacccaacttgagacagaacta

SEQ ID NO: 36035 - DNA, 361 bp, Homo sapiens
cccggccctgtcccctcccatcctgccaatggggaagagcatgggagctcccactttctctctgtacaagccctgcgactctgggcgggacccttgatctctctggcctcagttttctcctttggaaaatgacagcaaccctcacaccttctcccgggatcggtgtgcagattcagtaagaggtgcaggagaggggttctttgcacacggcctggcctggcgtccggaccagtgaaacatgggcattggtggattaggctggccacacatcacagttgaatcagccaatgcctgaactccagtctgcacccgactctgtgccaggcaccaaggcgtggggggaggcccccctcctgggctc

SEQ ID NO: 36036 - DNA, 353 bp, Homo sapiens
cagtgatgcaatcttgactcactgcagcctctgctcccccgggttccagcgattctcttgcctttatttagcaaatatttaccagtcgttcctgcccatatgcacttgttccttgtgtacttggatctgaattgattaaaaaggtctgtatgtattgagtcttttcccttaggagtgcttaagctttcttttgatgctttttttctcttcctttaaaatggtgcaggaaaatgttggaataaacatagtcagcttgtgaaaggatgattctctcccttatctgggcataaatattgttgaatgtgagaatgtgggagtagctactgggccaaatatgcacaatgagtgcaagt

SEQ ID NO: 36037 - DNA, 354 bp, Homo sapiens
  misc_feature (1)...(354): n = a,t,c or g
tggaaatactgatctattttgttgccccaatgtaaatattactaacatacaacaaaggagggtggcatgaattagcaaaaacactgattatccctctgtcaacaattccattaaagaatgttatagttatccatttagttaaaatgggtaactacttgatcaactcttctttaaaaatatgggataggnnnnnnnnnnnnnnnnnnnnnnnnnnnnnnnnnnnnnnnnnnnnnnnnnnnnnnnnnnnnnnnnnnnnnnnnnnnnnnnnnnnnnnnnnnnnnnnnnnnnnnnnnnnnnnnnnnnnnnnnnnnnnnnnnnnnnnnnnnnnnnngggtggtcgacgcggccgcgaat

SEQ ID NO: 36038 - DNA, 362 bp, Homo sapiens
  misc_feature (1)...(362): n = a,t,c or g
caacttacactgaacttgtgtgttatctttgtaaggattttggtgaaagaaccagggcctgttttttattaccccataaaccatggtgggctagaaagtttgtaatttaacattgtctaaaacacctgtatgctatcctaataataagattagtttcgccattaaagtgattgctagcataatccatgaaagaaatgtatctttcaacctatctcaaatttcagaaaatgttaaggcagttctagtaactgaagcacttagctgttagcaaatgttaggaataataccatattatggaaattaacctttagtcccctgtacgtccagtgttgagaatatatacatatttatgnttacatttg

SEQ ID NO: 36039 - DNA, 367 bp, Homo sapiens
ggataactctgttgtaggggcgctgtcctttgccaaatgtccactggggggcaaaattgagagcaactaccctaatcaatcctctatcctggttacttatattatttcctttttcatgattataattgaaacattttcatgcatgtgagtttattcaattttttaacttctttcccttagaaatggaactactatgttaaagggaatggcattgacatggcttttaatgtatactcctaaattttctttcccaaaagccttatagttttctgaaatgtaggacaacacattttactacagatgtagatatgtttaatatataataattgcatattctaattacaacaaaatagtatatgttaactat

SEQ ID NO: 36040 - DNA, 345 bp, Homo sapiens
  misc_feature (1)...(345): n = a,t,c or g
cnnnnnnnnnnnnnnnnnnnnnnnnnnnngtgacttcttgtttaggtctctgggccaggaaattcatactgttacatggataaggttgggattggggagagggaacagttgggactagaagcaaaagtgattctgggactaaaataggaagcagatgtcctttcccaatgtgtgttgctgtcttcacctgaatgcatttgtgtaaaaatagcggagggacaatgtgaacatttgtatttggaagctatgaatttactctgaagtttgcagttgtttccaatttgtgagctctaagagtttctgcctgtaagaactactctccttttattttgatttttaaaaacc

SEQ ID NO: 36041 - DNA, 348 bp, Homo sapiens
  misc_feature (1)...(348): n = a,t,c or g
ggatcattgtgtccagatgctcaacgtctcttaacgtcaaacattcacaactgatccttgctcagctcccctttctgtttgcagcgaggaaaggggttctacccaagcactatgctttcctttaaacattgccattgtaataagtaaatgtaaaaggaaatatatcaaatatattaaaacacatatttatgtttaatagatgcatataaaatagtgtattgacttattacaaatttactaaactgacaaataatataaaatggcaaagaaaaactcangcaatgtaagagtatatactgnatatttaaaaagtgaaagtgcgctcctttcctcccctntggctncaca

SEQ ID NO: 36042 - DNA, 341 bp, Homo sapiens
gtttttctctcccgggtagtgtagatgacacatttttcctgtagcttgtcttcctgtagtgtgcaggaattcctgcactttctgggtgcccttcctgttaacttacatttcagatttcctcaaaaggcattctactgctttaatatttgaaaaatgtcaactcaaccccagacagctaatataaacaagctgaaaagcataccacctaaagttacaactgtggaaaacaaaatttctttttaagaaattctttctcggaatctcactgttggtaaggctgtagagcagtaacccagtccttccagcttccagagagtctgtaattcctttgcctctgctgg

SEQ ID NO: 36043 - DNA, 338 bp, Homo sapiens
ctatacatgctccttcagttactgtttatctgatctttattcagaaaggatttaaatcaactaacagggaattcatatccaacaattcactggtattttcttcgtatgttcttaagaacaaaacaaaacaaaaatctcaatttgaactaacagtgggtggcatacagagagcttgcatacaatactcttacaagaattacgtactatactgaacttctatgaaattatttacctggtccgtaatgttattcagggcaacccatcccaaaaagagcaaattctgcaaccctcaatggcaaaaacgctgcccagcattgcttcccaaaaatgtccttgca

SEQ ID NO: 36044 - DNA, 340 bp, Homo sapiens
cccggccccaaaatcacattgcaacccaccataatcaggcttttgtccagcccactctactgaaactgcactggcaaaagtcactgagatgaaattcttacttaccaaatccaatgaacattgctaacaactctcttaaatattcttccttaacatctgaaatattagtttctcctagtttcctttctacctcctgatcatactttttcaatttctttaatggcttcttgtcttctgttcttccttaagtggttattttcctgggagttctgctcttggcccacttcccttattctacatgatctctcaagatgatcttatttactactctcatgaaaga

SEQ ID NO: 36045 - DNA, 340 bp, Homo sapiens
attttttttccttttaaattaccacccaatttggcatttatttaaggtcagggctgtgcttcccataactttgcagagtgtgtaacccgttgacgatttcagcgcaagagacattatttgatttcttgtggaaggcttacaaagtaaagtatcaataccaaacaagtgcttgttgagttctaaagttaaaaaattaaaatcgttctttccttaggtgtacaattttattgccaagcaataaaattggcaagaaaaccaaagttattgttcagtactttgtattgttctactctgtgcccaccaaatgtcaaagcactggaaggacagagggacaagaggg

SEQ ID NO: 36046 - DNA, 332 bp, Homo sapiens
atagacaagtgaatgcataatgtcagatgacaaatgctagcaagaaatacaaagcagggaaggaactagatagtatgagggcgctcagttatgtgatgagataaagaacaactatttggggaaggtggcatttgaacaaagactaaaggaaggggtgaaatgagccatttgactaggcagaaaggattctaggtagagagaatatgtggccgaaaaaatgagatagcttatatgctggacatgtttgaggaccttagcaaggagatttgtatggtactaggtattagggagtgtgtactgagggactgccagaaagcagagcatgtgggcct

SEQ ID NO: 36047 - DNA, 342 bp, Homo sapiens
cttttttcttcaaagtgaaatccttcaaatgtctgtggctaaaccataatcagtatgaaagatagaggaaaagtatacatgacccaaaaatattcattcatatcaaaaagtatctaaggaatgatatagaaaaagccaaaaatatttcattgttaaaggacactcttgatgtatacaagacagagataattactacttaggagcagtagctaccagtgatgttgcaattcagccatacaactcaaggataccagacaggagctactagtatctgtattttttaagggtttaatagcaagtggtattagtatgttatggagggggctttttgaattaaatgcc

SEQ ID NO: 36048 - DNA, 341 bp, Homo sapiens
cccttttttgtctctgcctctgacatccttaacttcccacttccaacttccttattttttctactgaaacccaccaaacattcagagaacagacatttttgacaacagttattatgactagagagatgagtaattttactgctgtgttacagatgaagaaatggaggttcgagggttaatattttttcccaaggtcaaaatggcaaccgaggaaatttcagagccaagatttggactcaagcccatctggcgtcaaaagcgtccttttagcaaccacaagacaatcgaatgttggcttccctggagaactttcccaccacacacacctccgcgggactctt

SEQ ID NO: 36049 - DNA, 341 bp, Homo sapiens
  misc_feature (1)...(341): n = a,t,c or g
tgacttttgtaaaggcctcttctgagctggactttatatgattactgtaacagttcctaaagtaacccctatttcttgactcaacctaatgggaactctttttaaagaagattttattttaaaaaaagagtgtggggaacatagctaccaatttttcatcttataggaggaaagtgtcagagaatgataagagtcatggctttagaatctgacgaacctgattttacaccacaactctttactttgtggcnctgtaaatttaaatgagtnacttaacacctctgaactattntgcacatgtgagangtgacngatgntgataatgggnactgcntnnggga

SEQ ID NO: 36050 - DNA, 337 bp, Homo sapiens
tttttgactacctttccattttcatgaagtcatatacaataatctttttctttataccttgcgaattttgtgtgtggcttaagaaacatacatggattgattttggactttgtggtagacacagtgatgggcctctcagattccccctcaaggagggatttgctgccctgttgcaaggagctgagtgaacaaacagcctgcagctgtgaactcctttgccccaggtactccccttctgagccagtgactgagaaaggcgaggggataaagccttggccatttcagtctgacgtgggacaagcctgaggggcatttgctcagtgctcccggctgcaga

SEQ ID NO: 36051 - DNA, 348 bp, Homo sapiens
  misc_feature (1)...(348): n = a,t,c or g
gtggtgaaggaagtgcttcctactgacctagtggccagccccttcagcctttgtaatactgattagactactacaactgcaagatgtttacgtgagaaaattgacgtgtaagtactttgttgactataaagtacagtgtcatggtagtgataatgtgtaggggacagaaagcaagtagtaacgtctagctggtacaggagatgcacagactcagtacatttaggagagtgacaagaagaaattaggtgctccaggtaagtggactccaaagctttagcagagggatttaagtgaaatgtgggtaagtaatgtgttctccagtaagctgtcaaacagcacctntntttg

SEQ ID NO: 36052 - DNA, 332 bp, Homo sapiens
  misc_feature (1)...(332): n = a,t,c or g
gtttttcaaatactcccaggacgtgtaagcctggctttaatgtttcctgattctttggtcctcagtgagttatgattgaaagtagcagggctgagggttggtgatatggccaagcaactcatttcctcactgcacttcagtttccttctctgggaggagaactttggactagttgatttgctaagnnnnnnnnnnnnnnnnnnnnnnnnnnnnnnnnnnnngnaaannaannnntnntttngccccnnngnnggaaggnnagggcccnanttnggccccnnngaancccccncnncngggttnnccccntttnncnggcntaaccnncaaaa

SEQ ID NO: 36053 - DNA, 334 bp, Homo sapiens
cagtttctcattttctgtatgagctagtgaatgacattcctttgtctggcattccaggccttcagaattagctccacttgactcttctggctccttctcttgcttttcatccacacagatcctctggtatagacaaactggtgtattactgtctcacaaatatgtccccaatgtttgtgtctccatgccttggctcgcatcctctcctcttctgaagtgtccctgcattcttcttgatctgcccaaattctaccctttcttcaaggtccagtccctccctcttccatgatgaagactgcggagcatgatgcaattcactgtgtttcaaattcag

SEQ ID NO: 36054 - DNA, 340 bp, Homo sapiens
  misc_feature (1)...(340): n = a,t,c or g
tttttaatgagaaaactagagattagagaggttatagatacttgctctgagtcactagtaatgagtagtagagctttaataagtccctgaatttaggttgtatctagtacatttactcttagaagtctatcatgctcaccagagttgcagagttgcgtgtatttcttgggctcattaatgtgtcgacgcggccgcgaattccnnnnnnnnnnnnnnnnnnnnnnnnnnnnnnnnnnnnnnnnnnnnnnnnnnnnnnnnnnnnnnnnnnnnnnnnnnnnnnnnnnnnnnnnnnnnnnnnnnnnnnnnnnnnnnnnnnnnnnnnnnnnnnnnnnnnnnnnnn

SEQ ID NO: 36055 - DNA, 99 bp, Homo sapiens
aaaaatagctttcaatattttagtagcaaatatacaggaagaataagttataacaaatgagggagaagtttaacattattatttctttttttttttttt

SEQ ID NO: 36056 - DNA, 338 bp, Homo sapiens
gagttagcagaaacttctcagatgttatcactaacgctttgtagatattttattcccttttggaaaaacaagctcataaaaacaatacttcaataaaatatatacgcctagtgttgtatgatgtactggtagcacagggaagaaagccatttatttttagagatattcaaaaccctcactgatcaccactgctgcaaaaagtacaagtttagcactataagagttaaagagcagcggaaaatgcccatcttgttatggcaggggagagtattagaaatgaaaccttagttttataaatttcgaaactgtcagacagaatgtgcagtattagctttgcc

SEQ ID NO: 36057 - DNA, 338 bp, Homo sapiens
taataacatcacatactacagctaagccttttttggattgcctgtagatatttaatccttcttttgcctagcaagcaggtttttactttaattctcaatagcccaactattttttcttaaagtaattaagggattcctaaacaagaaaattattacaaaatgaagtataatttttcatttgtttaaatcttgaaaactgtattagtattctaatatggtaagaggccccccaaatatactacctactttaaataagtttatttatcttaatagcatgaaagtcagtgatccaagctagtaaggcagctcttttctgtaggattatttattccagatct

SEQ ID NO: 36058 - DNA, 330 bp, Homo sapiens
gtctctgcagggcccactttctgctcttctgcagagtaccacagtcagtattacatctctgtgttgagccacatgtaaaggccatttttaaaacaacaaattgacaaaatatagtatcagtataagaattttgagaagattttgtcatttgaggacccaagaaaagttgcttttagaatttatttaatgcattagtgtctgagtccccacatgttcttagactaggaggactgctgccagaacgccttggtgtgatgatatgattgtaccaaggacagcctttcattttatctctactaatatttcatactctcttctgcagattgctcc

SEQ ID NO: 36059 - DNA, 329 bp, Homo sapiens
  misc_feature (1)...(329): n = a,t,c or g
aattttttcatttgcggagatatgaggcttgtcatttttattattccaatgttcatgtttttaaccaatttttcttgtcttgcctccactgattatatataaagaatagcgatgagaatatagctgtaattatgattactaacatctttgaatactttctgtgtgctaagctaaggtttatannnnnnnnnnnnnnnnnnnnnnnnnnnnnnnnnnnnnnnnnnnnnnnnnnnnnnnnnnnnnnnnnnnnnnnnnnnnnnnnnnnnnncaagtcccattaattgtgcaaaggtacttaattaataagtagcacaataaggagttgaacc

SEQ ID NO: 36060 - DNA, 340 bp, Homo sapiens
gaaacatcacctgagatgaaggggaaggtgctcactcggttaaagcacattgtagaattgcaaataatcctggaaaagtacttggcagtcaccccagactatgtccctcctcttggaaactttgatgtggaaactttagatataacacctcatactgttactgctatttcagcaaaaatcagaaagaaaggaaaaatagaaaggaaacaaaaaacagatggcagcaagacatcctcctctgacacactttcagaagagaaaaattcagaatgtgaccctacgccatctcatagaggccagctaaacaaggagttcacagggaaggaagaaaagacatcat

SEQ ID NO: 36061 - DNA, 365 bp, Homo sapiens
  misc_feature (1)...(365): n = a,t,c or g
nnnnnnnnnnnnnnnnnnnnnnnnnnnnnnnnnnnnnnnnnnnnnnnnnnnnnnnnnnnnnnnnnnnnnnnnnnnnnnnnnnnnnnnnnnnnnnnnnnnnnnnnnnnnnnnnnnnnnnnnnnnnnnnnnnnnnnnnnnnnnngaaagtgggggtcatgctgtctcctccttctagaggagaatgtcctgaggcccagtaaactggcacatgagcctccaccagctgtgcttcttatctgtattcatcacttttcctctccatcaatttgttcttcctgctagtgcttccttttctcaggtggtgttgcaagagactgagttgcatgtcatcactcttagtcaacttgcccttggttattcccaaa

SEQ ID NO: 36062 - DNA, 360 bp, Homo sapiens
aggagctccattgtagagtagctccattcttatatatgcaaaaatataagaatggagctactctacaatagaggaggagctccattcttatatttttgcatatatatatatttttaatccaccacattaaaaagaatacaatattacttttggaataagtttatagataaagtaattcagccttgtctatctgtctcttgacttctggagtaataacaggaatactgtggttaatcagagcagctgattagataaatggctcaatgtcaaggttatagctataattcctatgtgagacagacgttatctagccagagattaaacttttaaagtctgtatagccatctttacatatgcatg

SEQ ID NO: 36063 - DNA, 357 bp, Homo sapiens
ccctaatccgttgtcatctgttagccctgagcaggtgggagaaaagggcaggatgttctggccctgaattacatgctctgtatccttttttcttttcatgataagcacatgttatgatttactattatcctatttcatatttgatgatatgaaaattattttcctttctctaagtataacagtattatggttatacttcaaaagaggcaatatttttcagagacagtgatcggaaaatggaaccatctgggatttgcttcgaaacaattcagagatgggggagtgggtgaggatgagaggagactatgtgagtgggaaacggggggagctgctgttttattccctgctcttggaatg

SEQ ID NO: 36064 - DNA, 351 bp, Homo sapiens
gcttcgtcttacagaaaagtgcgagctaatgatagaatgaaaaaacatcatttttcaccaataaaataattgatttactcaatgattaccaatggattctgaaactgtaacatgagagactgagaacaaaacctttgtatggcgcccaaatatcacatattctgcactagttataagggaaaaaaatgtactttcatcatgaagcaatgttttagtgaccacttttagaaaacatcactaatgagggaccacctgacattgtgtgcctcataactgatgcaacaggagatactcactcatctactagacaaagtatttaacttgaatatcaccaaatttctagacctaatt

SEQ ID NO: 36065 - DNA, 357 bp, Homo sapiens
  misc_feature (1)...(357): n = a,t,c or g
gtagctcttagctatttgtcattttaagagctagagtagttcttagcaagtcgttattttgtcatttgccagttttaaaaaaagtaataaggttaatagacttaacatcaaatagattcatttattcatctaacatgtatttattaagcgtctattatgtagcaaacactgttctagatgccagaggaatatagtgggaataaaacagagtccctactttcatggtgcatatattctagaggggagtagtggagggacagataatcaagaaatacatatgtaaaaatataatagatgtaggtgctgtgganaaaaaaatgagtgaatggaacanaaaatgctttaaggagagactgg

SEQ ID NO: 36066 - DNA, 360 bp, Homo sapiens
  misc_feature (1)...(360): n = a,t,c or g
aaacagcagagctcttattcaatctcagctttgataaccaagaaacactactctccatcaaatcatcctgctaccttctctgattttgtttcataaaataagttttattaaaccaacacatcttttttcaatactgtctatgggcaaagccctatgctaggtctttgatgacacaaatataaaacaaggctatggccttcaagggtttacaaaccagtatggaagacaaaacaaacatacacaaagttaaattaaaatatttaagtatagttatcagcaacactcatattatgcagtagtgcaaaactgccaaatgaattataaataactgaaacatcacctgaggcttanacaattaga

SEQ ID NO: 36067 - DNA, 355 bp, Homo sapiens
  misc_feature (1)...(355): n = a,t,c or g
ctgagatcaagctataaaattaaaaataaaaaatgacctgaccatgtcagtactttaagccaaaacatatgaataaaataaataagaaacatatgcttatcctaattaaggagagaaaattctaatcttctttgataagccattaaaccttcacaaaatgataaacattaatttaaataatctaatctttaagagcatataagagcatatactttattctaaatcacccagagaaacttctatactaatacaatccaggattgaagtaaacagagataaagacatgagcccaggagctaagcggttgnnnnnnnnnnnnnnnnnnnnnnnnnnnnnnnnnnnnnnnnnnnnnnnn

SEQ ID NO: 36068 - DNA, 353 bp, Homo sapiens
  misc_feature (1)...(353): n = a,t,c or g
gttctaattgatgcacataaggatactcttattagcatgaagtgggaccctacaggtcatattcttatgacatgtgccaaagaagacagtgtgaaactctggggctctatttcgggatgctggtgctgtctacattcactctgccatccatctattgtaaatggcattgcttggtgccgccttccagggaaaggatccaagttgcagttactgatggctactggctgtcagagtggcttagtatgtgtttggcgcattcctcaagatactacacagaccaatgtgactagtgcagaaggatgtcgacgcggccgcgaattccnnnnnnnnnnnnnnnnnnnnnnnnnnnnnnn

SEQ ID NO: 36069 - DNA, 367 bp, Homo sapiens
  misc_feature (1)...(367): n = a,t,c or g
gggcaatcaggcaagataaagaaataaaggatattcagatatgaagagagatagtcatgnnnnnnnnnnnnnnnnnnnnnnnnnnnnnnnnnnnnnnnnnnnnnnnnnnnnnnnnnnnnnnnnnnnnnnnnnnnnnnnnnnnnnnnnnnnnnnnnnnnnnnnnnnnnnnnnnnnnnnnnnnnnnnnnnnnnnnnnnnnnnnnnnnnnnnnnnnnnnnnnnnnnnnnnnnnnnnnnnnnnnnnnnnnnnnnnnnnnnnnnnnnnnnnnnnnnnnnnnnnnnnnnnnnnnnnnnnnnnnnnnnnnnnntannnnnnnnnnnnnnnnnnnnnnnnnnnnnnnnnnnnnnnnnnnnnnnnnnnnnnnnnnn

SEQ ID NO: 36070 - DNA, 355 bp, Homo sapiens
  misc_feature (1)...(355): n = a,t,c or g
ccgcaatggcctggatacactggatgggggagtctctctttatgcagctgacaggagggccacgcacttttctcatattcctttgccattggaagcattttgtggcctcgggttgggatacggcgcaccactgaacactcctcctacggccagccagacacagtccgagggccccgaggaacagcaggacgaggaagacaagtttcatgtctgcggtcgtgggaaatacaggggaatgagcaaatctcaaagagctggcgtcttagaactccctggcttatatagcatcgacaaagaacagtttagagaaacaacaaaacaaanaaaaagagctttgagtctgtaggggcagcag

SEQ ID NO: 36071 - DNA, 367 bp, Homo sapiens
gtggcactgctcttcacttgtcagtcataagaccagccctcaaggccagaacttaccagaaacatagagaggatatgactgtcacactggtggaggtgaggaggaaagaggccaagaatgaaaagcaaaaggttgactggatgttaacctcagagatctggcgggagatttggggcctttcagaccccaaggattactgttgcatcaaaagttcccatgcttgcaggcattcagccaggcaaaaatgcagcctgctgccaccaaaagaatccatattccctgaatgcatggtgagtcctggccactttggagggtcatcttttgagggcctaccatgtgccaggcaccatgctaggggctttattta

SEQ ID NO: 36072 - DNA, 360 bp, Homo sapiens
aacaaagatatcagcacataataaatacttgttgattaactcattgagaaaaacgtaagaaaaacacttaaacagaatgttttattgactttaggtcagctgggaataattacctgcatttatgccttattttacctcactggaaaaaagacaaatgatatattagagacttctgactttcatgtgtttgctgctctgggctgatagaacgttcagctctctcctgtaatgtgtgcatcagtattacaactcatcaacaaaaggtgtatgtcccaaatttccacttgctgccattgacttctggccagaaacaaacttctttgccgcatttatgatatcagcattagccactgaatcaat

SEQ ID NO: 36073 - DNA, 369 bp, Homo sapiens
attaggagttgtctcaataggcaaagacatgatggtgattgtgttgtgtgtgcaagatgaagagatggggtgggagttgttgggggtatagttacctgttccacatgccccatgagaaaacaaacacttcttgcacatcttactgtccagaaaattgagaacacaaaggaataaccaaatacgctttacaaaaaataaaaagcctccgtgtttcctccctaggcgagtgcccttaaaatcatactcaatcacaatgtttacattatttactatataaagtctattaaaacaaatattatccacctaacacatatatcttcatattcataaacctgagattttctgtgtagtgcatctacctatgttgag

SEQ ID NO: 36074 - DNA, 346 bp, Homo sapiens
  misc_feature (1)...(346): n = a,t,c or g
tcagaatcagtatgcagtactcacaggagccctttgggctctccgcttacatagcttgtctgttctgccccagtgagtcttttctcaggcagagcctcccacttttggcagaggctttttgacttgactttggatttgtcttggttctaagaccactttaataaaggactttacatccctcctgggatgacaaaagactttttgtctttcctggcaagtcctttttgatataaagacaagtgtccctctggtttgagtactctggatttaaaaacaatnnnnnnnnnnnnnnnnnnnnnnnnnnnnnnnnnnnnnnnnnnnnnnnnnnnnnnnnnnnnnnnnnnnn

SEQ ID NO: 36075 - DNA, 347 bp, Homo sapiens
gtttaagaaaaaaaaacaaatttccttagtatggaaagcatgcctccttattaaaaagggcagtcaatttataagctggaaaaatgagacctacaaatattcaacctatatactgaattccaaaagaagttaataaaaaccaaacatttggggattaactaagatagcggatatgaaatgtgtcacaatgcccaaaacagacacactcaatgttaactatgcttcccccctaagagaaacaacagagtggattcagcatcggccaactggactgtgctgcaggtaaagacagtgcaggaatagattttaagctagtcccaaagtatccaataaataaatgttagaaa

SEQ ID NO: 36076 - DNA, 360 bp, Homo sapiens
tttacttagtatctactgatataaatgttaatctcatttaaaaaatactttcacaggagcatccggaaaagtgtgtcacccaatatctggctgttgtggcttagccaagttgatatattgaaattaaccatcacaatgagggaaagagtatttcagtttcttctgacctctaagaactatagaactatagctggacagggaggagcttgtggtcctagggagcaagaatgatttctggacactgttgacattctaacaagtcttcgttctgtggtaaggatagaagggcaggacttcacaacccgtagcatggatgctggctcagctgtggctcctgccactgccttctgccttacttgg

SEQ ID NO: 36077 - DNA, 363 bp, Homo sapiens
cagaatccgcctcttgtttcacttcctctgctggctcactctctttgtcccaagccttggcagccataggctccaggtccacctcttcaacttccatgggctcatcaaagtcaccatcttcaaactccattgcccctgactcctgctcttcttctgtactctcgacctgtacatcatcgcctgtaggcatcatcacacattcttgtcatgtgttattgcgatgacacaaaggcacacaaaggcacacaaaggcgcacaaaggcttatccaacactaaaatagcagcctgtcccttttctatactatgtttgcatttctctttaatctccaaattgggtgtttttaacttttactgaaattttt

SEQ ID NO: 36078 - DNA, 365 bp, Homo sapiens
aggaaattgagcagaaggtacaggagtaatagataaccaaggaaacgggaagaaggtagaagataacaataagacatcagtgaaatagacttctgaaaacacagccatagagaagattttaagcaactgaacagggacaaatagataagtcaataattttatttggagattttaatatacaaatctcagaaattgatacagtaagcaaagataagtaaataaataaataggtagatagattttgataacactatataacttttctgccaacaaatggataatgtattaggtcacagagaaagtactaataaatttcagagtcagaatcttccaattcatgctctatgataataaagcaataaaat

SEQ ID NO: 36079 - DNA, 129 bp, Homo sapiens
aaaacttctcgtttttataatccttccaaattttgtggcacgagctcaactgcatccaagtgtggctttttgtattagtagtttgagttggcctaatagtaacgaccagtttgtctttttttttttttt

SEQ ID NO: 36080 - DNA, 348 bp, Homo sapiens
cctcaagcccccaaggcccttctgcgggcccctgctgaaagaccggcatgccctattctgtgggcttccgcgaagccgatgctgctaccagctttctgagagcagcaagatcaggtaacttggacaaagctttggatcacctgcggaatggggtagatattaacacctgtaaccagaatgggttgaatggcttgcatctggcttctaaggaaggccatgtgaaaatggtggttgaacttctgcacaaagaaatcattctagaaacgacaaccaagaaggggaacacggccctgcacatcgctgctctagccgggcaggatgaggtggtccgggagcttgtcaactatg

SEQ ID NO: 36081 - DNA, 349 bp, Homo sapiens
cgcggccgcgtcgacgtggaattaccatacagcaagctgaagggataacttcagtggctcccaaagtggggtccctggactggcagtatcagcatcacccagggaagttgttagacatgcaaattgttggaccccacctagacctgtccagttggaactctgagtgtgtttgaacaagccaggccaaggggcggggcctcctagcagggtctgggggaatgcaggttggaccagccttgcaggggcttttccctgcccctgtgaggggaggggcagcaccccatgacctgagctttaccctgatcatccccgaatccatgcttgtgctcccttcagccctgctaaagtc

SEQ ID NO: 36082 - DNA, 361 bp, Homo sapiens
  misc_feature (1)...(361): n = a,t,c or g
cagcctcctcttctagagtgggtggcttttggagtggagatattgctggatgctgagaagatgtggttgctcatctgcattttggggatggccatggggtcctgggttcaatctctggatcaccactgctgtatgtaattggtagactgagaagagggagagacaggaaacaaaacaagttagcagcttctggtttcagaacattgtgtgaaatcccttgagtccagaggaatcaaagtgaaatgtagcagcccactcttcatcctagaagtgctagcatcagtttctttcatctgttgcacctctgtcagaggtcgacgcgccgcgaattccnnnnnnnnnnnnnnnnnnnnnnnnnnnn

SEQ ID NO: 36083 - DNA, 358 bp, Homo sapiens
  misc_feature (1)...(358): n = a,t,c or g
tccatgttgaaaaatcccaaggaaggagtttgattagcttagttttattcataggctaaccaatcataagccacttctagaagtggaagtgcggaactattgggacattacatttgacctgtcctcacccttcacttgcctatttcttcaaaaaaacaagtcagtcacatagcccaaacctagctattggggcagttgtaaacagtaggcactcaaacatatctttatatagaactgatattcctttttgtttttccagtatggcctcagtctgacctagtaggttattgaaaatattctcaagctggacagtatcttttaaaaatatacagaatttctgtctactttttgnaagtcg

SEQ ID NO: 36084 - DNA, 357 bp, Homo sapiens
ggagaagccatgtatagatgttcgagccaacaatcccagctgaggtcctaaccaaaagccgtcatcaaccaccagatacataagtgagaccttgagatgactctagcctaagcagtatcagactgaaactacaagagagatttgagcaagaagcaccaagttgagcccagtccacctccagaaccttaacagataataatatattgttattttacatcactaagtttagagtgttttgttacactgaaatagataactgatacatagttggatagtacattgtaatttataaagcacttttactttcattctcataactctcacaatcttgtggatgtagataagaagattctttat

SEQ ID NO: 36085 - DNA, 362 bp, Homo sapiens
gcttatcacttcctccagtccctcatatccctcagtgacctctaaagcccctttcccaaaccccggggctggctctgagaagaaatgctggaaaaccacccttctcaggtctttgtcggctctgatgggacattccagtccgttagctcctcccagcacaacattccaatccagcattcttggaacactccaacccaatcttctccgaccttggtaaattgtcatgacaacattctatccaaaatctggccttctggagaattccaacctaatctccagtctttcactctgatcaagttgtaccatcttccactctgatcaagttgtaccatcttccacatcagggtctcctgctgctgtgg

SEQ ID NO: 36086 - DNA, 363 bp, Homo sapiens
  misc_feature (1)...(363): n = a,t,c or g
nnnnnnnnnnnnnnnnnnnnnnnnnnnnnnnnnnnnnnnnnnnnnnnnnnnnnnngcatggtggtgcggtgtgttttgttgctgttcttttttggccaaataattgctcaaggactttttaaaaaagaaatgtatatgctacataattacttcacaaatggtttgaagatctaagtcagacgttttggcaagtgttaaaatttagtgtttcaaggtgagagaatgctctgtataagaaatgtttagttaattgcagatcatacaaaagttcctaataatttttttaaaggactttgtaagtttttggagggagcaaaatggatttcacaacaaccaacacctctcacctccccatctacaagg

SEQ ID NO: 36087 - DNA, 358 bp, Homo sapiens
  misc_feature (1)...(358): n = a,t,c or g
nnnnnnnnnnnnnnnnnnnnnnnnnnnnnnnnnnnnnnnnnnnnnnnnnnnnnnnnnnnnnnnnnnnnnnnnnnnnnnnnnnnnnnnnnnnnnnnnnnnnnnnnnnnnnnnnnnnnnnnnnnnnnnnnnnnnnnnnnnnnnnnnnnnnnnnnnnnnnnnnnnnnnnnnnnnnnnnnnnnnnnnnnnnngggcaataaatgccctctctgaatgtttgaactgccaagaaaaggcatggagacagcgaactagaagaaagggcaagaaggaaatagccaccgtctacagatggcttagttaagtcatccacagcccaagggcggggctatgccttgtctggggaccctgtagagtcact

SEQ ID NO: 36088 - DNA, 363 bp, Homo sapiens
gtttagatgaaaggtaaaaatcatgtgatattaatgattgtcttattaaagacatatgagtctttttatactttgaggccctttagcaaatcaaagtagatggtttgggagaggaatcgttaccccgtctattagttgaggagactgaggctggaggtaagaggcccaaacattccatgattggaaagagccagtcatgccttgcctctaggactagaattccctcccagtccaattctctttcttttactccccgtgattgaggagtggaggagactcagcctccaaaggacctgggaacccctgctgaggacactttcatcacacctaacaataattctctctgcctggagttaaattcat

SEQ ID NO: 36089 - DNA, 362 bp, Homo sapiens
ggagagagcaaattatagcatcttactgtaaggacaataatcagaagctcatcttacctttgggaaggcttaaagggttttatagggagtcatcattgtcactttatttctggaagaaagggcaaaatccaagaagagactaagtgatgtgaatagcaaaatgggatttttctcagagcacttttttcttaagattaagggtcaaggccacactttttatattgccaggttcaacttcttgccttaaggacaattttccaccccacaacagtgaagatattttgatgagagttgagagaaggtggggaaggtgggtagagtcagagcagacacaagtgaataatatgcatgaaaactgactc

SEQ ID NO: 36090 - DNA, 359 bp, Homo sapiens
  misc_feature (1)...(359): n = a,t,c or g
catcaaagaagtgagaagttactatagatattctacaaaagtcctcatggaataagggaaattgggcatccagcttttcaactcaactgccataaaatgttacttattctgagagaggccagtggctatcttgaaagaagtgagttgagagagataagaggaggtaggactgggtcacaagtttctgtaaatgtagatattaagcccaagaatcccaatagaggataatatttgaaaactannnnnnnnnnnnnnnnnnnnnnnnnnnnnnnnnnnnnnnnnnnnnnncanaacccacaattacttttgtaccaacctgatatgnatatgagtatcatctctcccctctcctttaaagg

SEQ ID NO: 36091 - DNA, 360 bp, Homo sapiens
  misc_feature (1)...(360): n = a,t,c or g
ttcttaaagcatttcaacatatttaaaatagtcaatttaaaatctttgcctagtaagttcaatagcttcctcagagacagtttctattcatatcttttctttttttcctgtgcgtgggtcatactttcttgcatgccttgtaattttttttttgaaactgggttttgaatattgtaatgggataactcgggtagtcagattctttctgattctcaggacttgttgcacctgcttattggggttgctgtttctttgtttagggacttttaaaaactaattttgttaagttctgccttctttgtcatgtatgtccatggaagcttatgtttggttagcttagcaatttgacaaanattccct

SEQ ID NO: 36092 - DNA, 357 bp, Homo sapiens
atttcaaagcatatatgtataaacagcactacgtatatgtcaacaaattaataagattcattttgccaatgtattttgtgactgttttaaaacaaatgaaaaaatgttttgttctttttctgctttcatgttactattgttaagaaaagtatgtagctaaagaattgacacattttgtacttagagaaaacaagctacacaagttagatgacagtctatagggtaagactccactatgaactaataaataacttcgttaagaaattcttggcctaactctgtaattttgacataaacagttcttccaacatatagtggaagattgatgattaattatataatttccttatcaaagat

SEQ ID NO: 36093 - DNA, 363 bp, Homo sapiens
cttggtcccacagtgagaacgctttgctatcacatgggcaggctctgagagccctgccggcctggccttctcaaagaagacctgagagcttgggacccaagcagagaggaagaacagggctcagggtgcttgctccatgctcgctccacacctggggctcaaccctggctttccccggctccctgtgtgacttcagggcaggtcccttgggccctctgggccttatcatcttcatctgtaacagggcgatgcctctgccgtgtctggtggtgttgaggagttcctgtttgtgtaagcagctagttcagtgccagcacgagatgggaggcccatgaagttagcagtgcacaaaaaatagagcat

SEQ ID NO: 36094 - DNA, 359 bp, Homo sapiens
  misc_feature (1)...(359): n = a,t,c or g
attttgttcttccccaggagtcactggctttggacttcttcgttagaggtaaaggctctttgctttggaaagctctcaacatttacaaggaagtgacaagtgtgaacgaggcagatcacactgtttatttccgtttccccaataagcattaaggaggaggatattgagggtctagttgtggttgtcttagactttgcacatgtttttataagcaaagcagacaagctccagcaagggaactcaattgtctaattagatgttactagaaatcttattggggctgtgatctaattcttttttttttttgaaaaaaantttttgntttnaanncnngnttgattnnaaggggccctntttat

SEQ ID NO: 36095 - DNA, 363 bp, Homo sapiens
caagaacacagggaccatgtgggtctgtgttcacagctctacccttagcacccaagacaatgctgagtaaatggttcaataaccatctggtgaatgcactcaagggcaaggacctggccttgtaatttttatgtcacttctgactacaaatgtactatcctgggaattcaaacaaatgctactgactagatgcagaaaggaattacatttagtaagaacagagagtaagtacaattagtaccttttttcccctctttcttcccttcagaccacttcaatcttgttggtgtcatcgtgacagctggagagccagaaaataataagttcctattttctttgctggttcccttcaattcaccaatg

SEQ ID NO: 36096 - DNA, 357 bp, Homo sapiens
catgcattaatttttttaatcaggaaaatatatttttaaacaaaactttcacaatttgtgggggtgtaacatcatactggcaaacatataacactataagccagatactgttatgtgcaatgtatataatttaatcttcaaaacaattataatctttattttatatttgagacaactgaggtgcagaaaacttcagtagtttacctgaggtcacgcagctagtaggtgtcagccaggatctagcaccaatctgtgttaactaggttaggctgcctaaattagatataaaacttgggtgtcaaactccaatttgaattacagtcacattgcgctaatgtgttgaagaacagagaccat

SEQ ID NO: 36097 - DNA, 360 bp, Homo sapiens
  misc_feature (1)...(360): n = a,t,c or g
gttaaactaaacctaaagaaagcagaaaacggataataataatgtttagaacagtaatttaatgaaacagagaacagaatagagggnnnnnnnnnnnnnnnnnnnnnnnnnnnnnnnnnnnnnnnnnnnnnnntacaaatgtttagctagattgactaagggaagaaaagaagattcaaattattatagttaggagtgaaagaaaggaaattattactaactacagaataaaaaggattacaaaaggatattatgagttattgtatgccaaccaattatatcacttgatgaaatgtccaaaattcctagaaagacacaaattgttgaaactgactcaagaagaaacaaaatctggggtgg

SEQ ID NO: 36098 - DNA, 350 bp, Homo sapiens
  misc_feature (1)...(350): n = a,t,c or g
cccctttcagaaacaaaccccaaaacaacacagagttataaagtgaagatatatatacacacacacacacatatatatatcatacatacaattattatatacttttttagttttctttttgataactgaaaatatctacaatgttttccattccattatagattaccattccatttgcaataattacaaacacatacatattctacgtttgcaaaacaagattccatctgtactctctcctgacacacacattacctttgtctctagtctttcactacaaattaggcctttgaaatatatatccttctccactccatttgtagatagcttatctcccattgnatcctatc

SEQ ID NO: 36099 - DNA, 345 bp, Homo sapiens
attacttcagtgtgagattgatattttaaaattactaatgagatgttttatattttttcatactaagtcaacaaaatcaggtgtatattttacttactatacatttcaattcagactagctatatttcaagttctcaatagctacatgtgtctagtatataaagtattgtatagcaaaggtctagatatttttgttgaaaattcctctttaaaagatcttttcactggtatctttttaaaaaaatcactagtatttaatgcttctgaaccaaaagtagtataagttaaaacgtacaaaaggggaattcacgtgagacaggtaattcccaagtgtttacataagct

SEQ ID NO: 36100 - DNA, 343 bp, Homo sapiens
cactgaggctgcagttggcgtgaaggtaggaaaatactatgtttgaaactgggattgttggatctattatcataattactggaaaattttagcttttgcttttgaaaactataacgtagctaacaaaacccaagtgtaaaatgtttcctttcatttgtaaagttggaccatataaacagtttgtaatcaccataagtttttctagaactgtcagtctgtaagaataaccttttaaagtaagtatgaatgatcaagaaattgaaaatgctttcacacatggcttcttgtaatataaaacgataccccaattttctgaggggaaataatgattttaaatggatgg

SEQ ID NO: 36101 - DNA, 337 bp, Homo sapiens
ccctcttttagagtaagcaggaatagcactggctatggtggcaaatccatatgagtatataatggcttcttctgtcttcataaattttgccaggcggtcttccaaatccaaatgaacatcaaatgtgccataaaatcctctgggtccacaagtccccacgccatacttctttagagatgctaaagctgctgccttaaccctagggttatccaacaatccaagaaaattaaatgaggcgaagtttatacattcttttccattcaccacagttttgtggcttggagggcctgaaacgatgttgtagttgagagcaggatggtcttttgggacaggagga

SEQ ID NO: 36102 - DNA, 338 bp, Homo sapiens
  misc_feature (1)...(338): n = a,t,c or g
cttaaatcagtatttcagtaggaaaaattcttagaaattaaactgtgagggcaagcaattgtgaacatttacattttaataagtaccaacaaattaccttaaaacgtgtaccgatggatactcttagtaaaatgtaagagagtgattcactacattcttactagctcaggcattatcaatttttttttattttaaattactgcctaagaaatacagtcatatatcttgttcttttattttaaatttctatttgagaagttatgcacnnnnnnnnnnnnnnnnnnnnnnnnnnnnnnnnnnnnnnnnnnnnnnnnnnnnnnnnnnnnnnnnnnnnnnnn

SEQ ID NO: 36103 - DNA, 345 bp, Homo sapiens
cattaatacacggaagaactcttaagaaacagactcacatagaaagataaatgaaaattctgaattcagtcttaggaaatcatttaattatatattaaaatgacatctgtgaccaactagagtttatcccaggagtgctttaatattaggaaatacattgataagatggatctcgtcataaggacaactttgtagtcatcttcatggatgttggaaaggccttcagtaaattaattgccatttctgatagaaactctttcaaatgtcaggtttcagttaatggtttgaagagttcaccactgaaatcagtttgttcttagcattaataaaataagcatagtgtcg

SEQ ID NO: 36104 - DNA, 197 bp, Homo sapiens
  misc_feature (1)...(197): n = a,t,c or g
ctccggttactataaaatttgtgttctgtgaggtatgtcttttctggtgaattcacttctggttctgcatgcctaatttagtattttgtttaatctgcatacctgggtttaaaannnnnnnnnnnnnnnnnnnnnnnnnnnnnnnnnnnnnnnnnnnnnntttttncnnnnntttttttnncnaaaaaaaaaaaaaa

SEQ ID NO: 36105 - DNA, 373 bp, Homo sapiens
  misc_feature (1)...(373): n = a,t,c or g
gttttacatgaaattaaccatatttatcatctggctaccatagttccaaaataaggtccagtagtagtttgaagcacagcaagctcagcagtttcttccctttttaaagcccgacagtcagtggagttttctatagtcgagccacgtgagcactgtcaccccaagtagagactcttgtgaactcaaacggctccagattcacggtcaagaaccttggtgacttcacataactaccacttattgctggaagggagacaatattgtttgcttctgaagttttcaaacagtttctcacctggcagcttctccggatttctttggtgctttcataatcgcttctgacattgcgctttcaaaaatctaaaggncgaat

SEQ ID NO: 36106 - DNA, 375 bp, Homo sapiens
  misc_feature (1)...(375): n = a,t,c or g
nnnnnnnnnnnnnnnnnnnnnnnnnnnnnnnnnnnnnnnnnnnnnnnnnnnnnnnnnnnnnnnnnnnnnnnnnnnnnnnnnnnnnnnnnnnnnnnnnnnnnnnnnnnnnnntcagttgtattgtaactcccttcctacagacacctccccatagaataaacccagaataaggatgacatttttggtaaaactattcactatatcaatattacacattttccctgatatctgtagatctggacaaaactaggtaaaaatctagttcaagtatcgtgtaacttacagttatgcaccacctaccaacgtttcaattatttaacaatggaccgcatatgacaggtcgacgcggccgcgaattccagatctatgaatcgt

SEQ ID NO: 36107 - DNA, 354 bp, Homo sapiens
  misc_feature (1)...(354): n = a,t,c or g
cagatgcattggtactgacacattgctactgattatcaggctgggaaggctcaactgttttgtttacttaaaatttctcataatttatgagattaagttcaagtatagtaggctttgagtatctatagttaatgaggagagaaaaaagtagaaccaacaaaatctagtttgctgagatataaaaaataaaatctacagtcaacctacagacattcaatctacagccaacttgggggttaaaaaaacaaaacaactttcttttaaaaagcacttaccaatctctaagcttgaactgggctataacgaaccaaaacattatgggcaacanggcagagctaagacatttaaaaaggc

SEQ ID NO: 36108 - DNA, 463 bp, Homo sapiens
  misc_feature (1)...(463): n = a,t,c or g
attgaagctnnnnnnnnnnnnnnnnnnnnnnnnnnnnnnnnnnnnnnnnnnnnnnnnnnnnnnnnnnntctcgaggatccgaattgcggccgcgtcgactttatttttatgaaataaaatatggaacaaggtgtgggagggtaaaaacacaaataaatcaatgttgcttgattgtaacttttgagttgtgacaagcttgcttttaaattatgaaaatagcagccagttattttgtacccatcttgtgctgagcactttatttttatcacgttaattatttgtaaagtcctttgcagtggatgtgtacgtcctctaagcaaggaaacaggcccatgggtttaagtttcctcctcaactttaccatgttagtgagaggccgagctccaatttgaactccaaagctatctagcttgtgttttcaccactcaccacctcgcctccttgtcccccaccacttccaaaa

SEQ ID NO: 36109 - DNA, 309 bp, Homo sapiens
  misc_feature (1)...(309): n = a,t,c or g
ggccacctcaactcctgtactaactgcagagtatatattttttctcattgaacctacctggattataatagtagagttttctttaatagacttcaaagtatgggttcagacacagagtaactctcaaactttgaattgcaaaggctttcactgcaaaccttcatgagatgtacatataccccttatggaaaatgatatcaaaatccactgcagcagtgatccttacctgatggtttctttggtgtcacccgccctccaactcgctcatctccaaaataaactaaattcatgattntttttttttttttt

SEQ ID NO: 36110 - DNA, 356 bp, Homo sapiens
  misc_feature (1)...(356): n = a,t,c or g
nnnnnnnnnnnnnnnnnnnnnnnnnnnnnnnnnnnnnnnnnnnnnnnnnnnnnnnnnnnnnnnnnnnnnnnnnnnnnnnnnnnagatacaattatttttagtgatatcttcaagtttactgtttcttctgcccatttatttagcacattttctttgaattctttgaatgtatttaaatagttgctttgaagtcattgctaaatccagcatctagacccactcagagtccatttctgttcattgttgttcttcctgagcatgggtcacgttttcctatttctttatatgtctggtaactttgtgttaaaaactggatattttagatatgttaagtagcttttgatatattacgttct

SEQ ID NO: 36111 - DNA, 361 bp, Homo sapiens
  misc_feature (1)...(361): n = a,t,c or g
ggggaatgaggctcttatttcctgatatcattaggattgggttagcatttggatgatctgtaggccttcttctgtgactgtagctaagcaaaatgtctgcaaagtaataccacacgattagtattccaaccggatgtctgattgctgcatatttgtatgtcttatttaagttgtaagcttctgatagatacactataatacaggcactcactaaaagctgtgtatgtatataatttttcggtttgaagacagcactcactaaaagctgtatatgtgtgtatatatatgtatgtatacatgtaatanttcctttgaagacagtattctttgntcgctgngtnaattngatggtacagagggt

SEQ ID NO: 36112 - DNA, 358 bp, Homo sapiens
tggtgatatgctgataaaagcagcttcagatccacaaatgtgggctggggctggccgagcacagccagctggcttccagggggctctcgggccctggctcctgtactgagcccactgcacgggcagtaccctcagcggggctgctcctggctatcttgctggtctaagctggagacaggcctccatggagagacagcgtggggcaccagtgggggtgctggctggggccctgtcctgctgtgtaacctcagagaagttgcttgctctctcgggtctcagcttccccacgtatagaaggaaggaggcgggagcggatgatctatagcattctaggacgtcgacgcggccgcgaattcca

SEQ ID NO: 36113 - DNA, 329 bp, Homo sapiens
ctagccccaaactgaggtttccttattcaaagttttaacatctagctgaaatagtacatttggtaaatgctaaaaaaaattagctgtggaatgaaaatcctggcacttttctaatttttcttaggaattgtaaccaacacttaaaatagtaatacattctcatagagaatcacaggtagactaaatagtgaaggtcttattcttgtcagagaatacatataaaagccagaaaagatggctttctcttgcaaatgtgcaaacataaatgcaagaaaataaggattacaaagacttgggaaattatgacatttccggaaaaaaaaaaaaaa

SEQ ID NO: 36114 - DNA, 359 bp, Homo sapiens
ggaagcgccccttgagtccctcaggacccttctaatggatgagtagctggtaaactcgcccaggtaaaacctcagctttcctggccttcttgtaacaaagacaagcagcaaaacctacatttccaggcatgtgctcgtctttttctttttccgtcgtcctctccagtgatgatcctttgtttggcatcagttttttacatcctgaaaagccagaaaacccagacatcaagaaatgtctatgaaatgttagtgcgatttaagccgttttagttccgcattttcccttcacttatgtgacctttgacgaaagattctcgtttttggtgtagtttacagaatagaatactatttgcaaatac

SEQ ID NO: 36115 - DNA, 370 bp, Homo sapiens
  misc_feature (1)...(370): n = a,t,c or g
gtttcatatcagcttggccaatatggcaaaagtttgtcttttaaatatgcnnnnnnnnnnnnnnnnnnnnnnnnnnnnnnnnnnnnnnnnnnnnnnnnnnnnnnnnnnnnnnnnnnnnnnnnnnnnnnnnnnnnnnnnnnnnnnnnnnnnnnnnnnnnnnnnnnnnnnnnnnnnnnnnnnnnnnnnnnnnnnnnnnnnnnnnnnnnnnnnnnnnnnnnnnnnnnnnnnnngtataataaaagtgttcacttacaatttttgcataatttatgnnnnnnnnnnnnnnnnnnnnnnnnnnnnnnnnnnnnnnnnnnnnnnnnnnnnnnnnnnnnnnnnnnnnnnnnnnnnnnnnaacctctgccctgggttc

SEQ ID NO: 36116 - DNA, 362 bp, Homo sapiens
ctccttcttctctacattacaatggccactgccatccatatccaggcttatgtcctcatcatcccttgcctgggagacttcgacagtctgccatccagtctttgaccttctccagtttccccttagccaaagtcaatcccttatttacactttttttaaaaacagcaaatctgctggggtctctcccctgttagaaatcccttaaggagcttatgtccaagctgcataggacagtctttgaggccttctcatatcctgttcttgcccatctttctcgtcacatctcctctgcttctgcctccaggccccgtcatgtttcttacattccagcaaactagacaactggagtctctgaatacacc

SEQ ID NO: 36117 - DNA, 370 bp, Homo sapiens
atctcactatccttgaaaagcctttaataaccattataaatttctttctgctctgctttctaaagcaatttgtctcttttaaaagaaccactagatctgattgtatacagaactttgacaaatctattatcaggagccatgtaagtctataaataaggttatatagattgcttaaatattttgaaataactacttagattaactttccacatgtgtaattacattctcccttttattgaccttaagcttctggagcacagatccttgtaggaaagccattatgtaactcatatttgcttgaatctgaatcctaaaatacgctgtcattccagtttgaattatacgaaccattatctatgactccatgtgg

SEQ ID NO: 36118 - DNA, 363 bp, Homo sapiens
cttatactttccttataaacattgctataataatcatgtttgtacacaattcccaaagaataggttcttaaaatgaaatgtgaatcataatatatgtgtaattttcacttgaatagcaattgagacaaagatatgattccctcctgctagctgggataatcttgaaggtctttactaaaatgatagatataatttaagtagatcttaaaggataaacaggttttctgtaattagggaggtgctatgggaatagttaaaaaaaagagagagagaagtaatataaagttcatagtaggataagatacccttttgtttaaaaataggatgtttataaggaggactaacgtcgacgcggccgcgaat

SEQ ID NO: 36119 - DNA, 369 bp, Homo sapiens
  misc_feature (1)...(369): n = a,t,c or g
nnnnnnnnnnnnnnnnnnnnnnnnnnnnnnnnnnnnnnnnnnnnnnnnnnnnnnnnnnnnnnnnnnnnnnnnnnnnnnnnnnnnnnnnnnnnnnnnnnnnnnnnnnnnnnnnnnnnnnnnnaattaaaaaataaaaataaaatcagacattttacacccagaaataaaagataattttaaaaattagggaaaagatgaaaaagatacaagagaaagtgacaaaatagattcaactcatggatatcaggagttcctaagggagtaaaaccaaaccaatggtgaggaacaaatcctgaaaactttatagagatataaaacaaaaagtctggaaactacatactgaaagagcacactgcatacctagagtat

SEQ ID NO: 36120 - DNA, 337 bp, Homo sapiens
  misc_feature (1)...(337): n = a,t,c or g
ctcttctcaacatcctcccgggagcgctccatgttgcggaggctgatctctagggctgcagacttcttcttttccttctccagttcttcattgagcctcaccactttagcccaaacgtcataattttccttctcaaggtttttaatctgttcctcatacatttgcttctgtgtttctatttcctttcgtagctcttggaccgtcctctgcaaagaatcaatttcctcttctccagagttcttttttttttnnnaaaannnggnntnnnnnggnngcccnnnggtggntttnaanntttgggntaannaangtncccncnttngnnnnnaaaangggg

SEQ ID NO: 36121 - DNA, 357 bp, Homo sapiens
  misc_feature (1)...(357): n = a,t,c or g
aaagaactcaaagcagggactnnnnnnnnnnnnnnnnnnnnnnnnnnnnnnnnnnnnnnnnnnnnnnnnnnnnnnnnnnnnnnnnnnnnnnnnnnnnnnnnnnnnnnnnnnnnnnnnnnnnnnnnnnnnnnnnnnnnnnnnnnnnnnnnnnnnnnnnnnnnnnnnnnnnnnnnnnnnnnnnnnnnnnnnnnnnnnnnnnnnnnnnnnnnnnnnnnnnnnnnnnnnnnnnnnnnnnngcagctaaacttccaaagactaatatacaattccactgaataggcaaattcatagacagaggatagaataaaggctaatgaggggtgggggagaagagaatgggcagttattgctaatgga

SEQ ID NO: 36122 - DNA, 249 bp, Homo sapiens
tttttttttgctaaacatttaaaatatatttctaaacagaatgggccgactcagtcacagtaactgttgatctccatagtagagcaacccacaaagacagaactgatttttttcccataatcaggggtgaaaaatatacaacttgtttctgaaccaaaaccacaatttctgcagtttaaaatgtttcactgctaatatggccctggtagaaattatgtagttttttttcttctttaaaaaaaaaaaaaa

SEQ ID NO: 36123 - DNA, 344 bp, Homo sapiens
  misc_feature (1)...(344): n = a,t,c or g
cacacctagctaattaannnnnnnnnnnnnnnnnnnnnnnnnnnnnnnnnnnnnnnnnnnnnnnnnnnnnnnnnnnnnnnnnnnnnnnnnnnnnnnnnnnnnnnnnnnnnnnnnnnnnnnaccttgtggttttatcctaaacagcaataaatgaatggtattctaattctctgtgaagctaacttggctaggttgtctttgcctgagcttcttaacttgtccacataaataaatcactataatctggggttaactgagtattccttggagtttgcagggttctgaaagaacctaataaacacacagcttggtgaaatgtgagttatgtttctaaacttatgacc

SEQ ID NO: 36124 - DNA, 354 bp, Homo sapiens
gaaaccccaaaacagaagggtgatggaaggcctgaaactccaaagcaaaaaggtgagagccgccctgaaactccaaagcaaaaaaatgaagggcgacctgaaacaccaaaacacaggcatgacaataggagggattctggaaagccatctacagagaaaaaacctgaagtgtctaaacataaacaagatactaaatctgactcacctcggttaaaatcagaacgagctgaagccttaaagcagagacctgatgggcgatctgtttctgagtcactaagacgtgaccatgataataaacaaaaatcagatgacaggggtgaatcagagcgacatcgaggggatcagtctagggtt

SEQ ID NO: 36125 - DNA, 344 bp, Homo sapiens
  misc_feature (1)...(344): n = a,t,c or g
atcagatagctatcaagctatcaaatataagctgtcacagtagaagaagaatgaaggtaatttaccattagataattaaatttgacctagaaattatagagttttattgcacataactctccaggaagacaccagattttcaataaacaatttataatcaagtattcattgtttaccttcctttcctgccttcagcagtactgacagctttggggactttgatgcattaattatctatttttcttcttgttgatgccggttttctttttcttatttatttatttatttgagacagaatccttaatgncgctggcgnantcnntaatnnngangtgctcatgctg

SEQ ID NO: 36126 - DNA, 362 bp, Homo sapiens
ccaaaaggcaaaaacaaaggagctgatggcaaagaaggtagctgtgattggagctggggtcagtggcctaatttctctgaagtgctgtgtggatgagggacttgagcccacttgctttgagagaactgaagatattggaggagtgtggaggttcaaagagaatgtggaagatggccgagcaagtatctatcaatctgtcgttaccaacaccagcaaagaaatgtcctgtttcagtgactttccaatgcctgaagattttccaaacttcctgcataattctaaacttctggaatatttcaggatttttgctaaaaaatttgatctgctaaaatatattcagttccagacaactgtccttagtg

SEQ ID NO: 36127 - DNA, 362 bp, Homo sapiens
caggcatcacgttcttaaccaacagttcatgaactcactttgtaaaattacgctgaaccttacagattaacaccccctgtacttcttgtggaaggtgactttcacatgttttctttcatgcagaacttatggaagtatcagtcaagaatttattcgatatatggtgatttagatctggttaagaacagagaacattgttttgttctttaatggtatcaagaaggcatttttcctttgacagtaaatgttaagacaacagtgtgtttaaatacttctatgtattattctatgttaaaatcactttttcaccaaagaacatataaatgtttttaaatacctcataatctagacattttaagctt

SEQ ID NO: 36128 - DNA, 356 bp, Homo sapiens
ctggaaatacagcttgggcagttagcaacatagagatggtagatgaagccacggatgcagatgtaattacctgtaggagtatcatggagaccttgatctagccaggacaatttcagggacagcccaggatttgagcaaaggacttgtccattgcttttatttgagtctttcaaggttgatgatttattattgtttaaaaatatgagggagccatattatggttgttttaattatccttgtggatgggtatagtagaatgtcctaaatattaaaacatatagaattcatttataatgttatatcatttataatggttgtagctttattattatttttaataattaggacaaatgctt

SEQ ID NO: 36129 - DNA, 357 bp, Homo sapiens
  misc_feature (1)...(357): n = a,t,c or g
gatattgttcaattaacagcaacaaaataaagtgaaatgattaagattccgttgctagttaggctgtggtgagtccaatatacttattattgataaattcatatatggatatatacatcaactgatgaagaccaatcaagcttctggaaggcagtttggcaattcaaatcaagagctattttttacagtgtcatatttaatacatattgaatacagaacccacatcctgggaatttatcctgagaaaagtatgtttagaaaagaaagcaagcaaacaatatatacttaaagaatgtcannnnnnnnnnnnnnnnnnnnnnnnnnnnnnnnnnnnnnnnnnnnnnnnnnnnnnnnnnn

SEQ ID NO: 36130 - DNA, 365 bp, Homo sapiens
cagaaatcaattgtatttctgtacattagcagtgaacaaaaatgaaattaagaattccatttataattgcatctagaaattaagaaaataagcggtaaaaaaatggtactctgagacctaccaaaaattattgaaagaaattaaagaattagacatcccatgttcatggatctagatgacttaatattgttgagatgtcagtattatcccaaatgatctacagattcaaggcaatctcagctgccatttttcttcttcagaaaaggcaaagctgatcctaaaagttacatggaaattcagggtagtcagaatttttaaaacagctttgaaaaagaacaacaaaagtgaaggagtcacagttcttg

SEQ ID NO: 36131 - DNA, 221 bp, Homo sapiens
  misc_feature (1)...(221): n = a,t,c or g
gagattttaaccttggcaatttagcttcaggttttgtcattatgctgctggtcacttagcctgtggtcaagcagcaagggagggagctggagttcaactctgtgcaacgtgaagcttccaggatcttcatgcttgataactatgctcagtgtgcacatgctttgctttagaggcttgtggaacagcatttggagatgtgtagtcagcacttggngacacac

SEQ ID NO: 36132 - DNA, 236 bp, Homo sapiens
  misc_feature (1)...(236): n = a,t,c or g
nnnnnnnnnnnnnnnnnnnnnnnnnnnnnnnnnnnnnnnnnnnnnnnnnnnnnnnnnnnnnnnnnnnnnnnnnnnnnnnntcactgatagagcgagactgtctcaaaaacaaacaaacaaacaaaagtcaacattttaggacaataatctgttactcttcagaggcaaagtgatgaagaaacttaagaacacagagtctaagaaacttctaaaagacatngtgaagccnaagattt

SEQ ID NO: 36133 - DNA, 234 bp, Homo sapiens
  misc_feature (1)...(234): n = a,t,c or g
gggacactcccctgctttcctccaacctcagaatggaaatagtcgtcacccatctggctatgttccagggaaggttgtcccattgcgtccccctcctcctccaaagagtcaagcttcagccaaatttacctccatcagacgagaagaccgggcaaccttcgcattctcacctgaagaacagcaagcccagagagaaagtcaaaagcaaaagagacacanaaatactttcatttg

SEQ ID NO: 36134 - DNA, 241 bp, Homo sapiens
  misc_feature (1)...(241): n = a,t,c or g
ctgagagctatggtacaattaaattgaagatatttgaacacataaagtaggtgtaatgtaacatataggctcaaacatttgaaagtgatgatatttggtcattgctggcctacaaaagaaatgattttatgtgattcagtctaatggtaatagttacaaaggattgacttctttgcaaataaaatggttgaaatagtacccaaaactagcacattgggcaaaaattnccaagaaatatctt

SEQ ID NO: 36135 - DNA, 234 bp, Homo sapiens
gcgggacagaggggctgggcccaggcaaagcttctgtcgctgctgctgcggaggccgaggacaggacgtgggctgggccgggcagtgccggactcggaggagcaggaggcgaggtccgccggagctctgagcccccgctgctctgccgcgcggtgaccccgcgccccggcgccgtccgacccgtggctgttccgagacgattggtggggagacgcgcggtgaggagacgagcga

SEQ ID NO: 36136 - DNA, 354 bp, Homo sapiens
  misc_feature (1)...(354): n = a,t,c or g
cttaattttcctttcatgctttctgtctctttgtccttttgaactgctttctgaaagaattcctcaacccagtcttcctattttaatttattcttcacttgcatccattgtgctatttggcccagctgttgaatttttattttaaaaatccagctttttaatttccagcatatctagctgattcttttctcatgggcataatattctcatgtctctcccatggaatagaaattatgtgtttgttaaagcactgggttgcctgttccatttctctgtcctacaggcatgtacaaccatgctcggctggttnnnnnnnnnnnnnnnnnnnnnnnnnnnnnnnnnnnnnnnnnnnga

SEQ ID NO: 36137 - DNA, 361 bp, Homo sapiens
  misc_feature (1)...(361): n = a,t,c or g
gccacctctcaattttccaccccagtgaagagaagctctggtgtaaaatcaaaagcactgacagtgtgcctggtgtggagcaagaccacggccctacccgcaacactgggtcccaggtcctgtggaatagtggaatagccaccagcagaggcaactaattgggagctgaccatgggagaaagagagtcgacgcggccgcgaattccnnnnnnnnnnnnnnnnnnnnnnnnnnnnnnnnnnnnnnnnnnnnnnnnnnnnnnnnnnnnnnnnnnnnnnnnnnnnnnnnnnnnnnnnnnnnnnnnnnnnnnnnnnnnnnnnnnnnnnnnnnnnnnnnnnnnnnnnnnnnnnnnnnnnnnnnnnn

SEQ ID NO: 36138 - DNA, 352 bp, Homo sapiens
atttttgtatttaacaccactgaagtttattctatttggtgcccaaattgtcccatctttggccaatgagaagacatttaaattgaatttagagatcttctcatatgaccctaggagtctttgaatttccagaactctcatacattgtatgctccagacctggaatcagctctttctccaaggattagtaagatttttaagttctcagataaacctattaagttacttaattaaaagatgcttgttggaaatctagtcttcaggtcattggccttttcactatccagtgctgcctctataaattgaaacacacagtactagtcattttctcaactgctgttttcccttctat

SEQ ID NO: 36139 - DNA, 360 bp, Homo sapiens
taaagctccaatgaaaaatcatttttctctcttacttagaatggtaccaaaccaccactggatgcagatgtaaatttggaagcaattgctggtgaccttcgctgtgattgctatacgggcgcagatctctctgctttggtacgagaagcttctatctgtgccctgagacaggaaatggcaagacagaagagtggaaatgaaaaaggtgaactcaaggttagtcataagcattttgaagaagctttcaagaaagtaagatcatctatatcaaaaaaggatcaaatcatgtatgaacgtttgcaggagcccctcagccggtgatgtctccagcagccggcttagaggagctagcccatcaag

SEQ ID NO: 36140 - DNA, 354 bp, Homo sapiens
  misc_feature (1)...(354): n = a,t,c or g
gtaataattaacacactgtaaaaacatatagagcattatgcttaaaatctagaactgtaaatggattttattttctcccaatttaatggatgttttactgactgcagttaggactactgctaagcaaggtatcatatgaactttttctaaagcaaattcactgactatatggcttatttattttgttttatgtatgtatggatgtatttatttatttgagacagagtttcactcttgaggctggactatntcanaannacccacttngaaacanaancaanatcaaaaagacccaaanaggacnaatgtaatttgatatgggtgataaattattaatacntggtatacgaaccg

SEQ ID NO: 36141 - DNA, 353 bp, Homo sapiens
  misc_feature (1)...(353): n = a,t,c or g
nnnnnnnnnnnnnnnnnnnnnnnnnnnnnnnnnnnnnnnnnnnnnnnnnnnnnnnnnnnnnnnnnnnnnnnnnnnnnnnnnnnnnnnnnnnnnnnnnntctagtgtgcctggccctccaaacattttttttcactgagcatatattgtcttatgtaattagaaaaacaattctaggataataaaagagttgtagggtttacataagagacattagaacattttggctccatatcagcaactaaccaatattttgaagcacccactatgtttattaatagttataatatagaaccttatttcttttgttaattttaaaaacggtgcatattttataagtacttttgaagtaatc

SEQ ID NO: 36142 - DNA, 359 bp, Homo sapiens
  misc_feature (1)...(359): n = a,t,c or g
cttaaaagtagataataatgttgtatctgaattcacagaattagctggtctttgcacgggaagaagtgggggtaaatgaagcggagttactgcaggagcagtagaggggacaggttggcatttcagagtgtaaatgtaaggtaggactctaaatgtaagcctattgactggtagagtccaggaatattcaacagttctgtctatgagtggtaactttggtgacggatggaggtagatgatgggatgcttgactaaggacaaggagccaattaggaaattatatgagataccatgaaaggtgaggagcacctgaaccaaggaaggcngtggagagggaggggaggtgtnatcgacnggac

SEQ ID NO: 36143 - DNA, 350 bp, Homo sapiens
  misc_feature (1)...(350): n = a,t,c or g
cctatccaataggttcatcacaaaagaggacctgagagacaagaatgaatggtttctgactggtggagaaatttgaggataatctcccttgcttgaaaagcggtgattaagattggcacttgcttacaggagtgaaaaacagatctcgttcctcttccctgtgtcatcttcttaattataaataatgggggatgaagatattacatatgangattcanaaccntncacaggaatgaattacacnccctccatgcatcaagaagcacaggaggagacanntatgaagctnaaaggtatngatgccantganccaacacaaggaagtattctctngaanagcanngaaaaaa

SEQ ID NO: 36144 - DNA, 322 bp, Homo sapiens
ctaaatataaaaaataaaactggaaagttaagagaggaaaatatagaatgcctttaagatctagaggtggagcaggacacctccagagcacaaataaaaagcttgcaatgtctaaagctgacaagtgctttatttccacaatatacaaagatttacaaacagacaagacaaaagcagcaaccgtgatggaaaaaagggcagaggatatgaacaggcaatttatggaagagaaaacccaaataactaaaacatgtaaataagggcttgaattcattagtaaaaacagaaatgcaagttcaaataactacaagatattgatcac

SEQ ID NO: 36145 - DNA, 317 bp, Homo sapiens
  misc_feature (1)...(317): n = a,t,c or g
ctccgtttgcattatctttttttctgatcctcaggttagataatttccagtgaccagtctcaaagtttactgatagattctattaatggacacctctattaaattttttcagtacagttacagtacactttatatctatgatttgtttgacattattgtataacgtttttccttttcttgaagttctcaacttgttcttgcaaagctatcttgacctcagtgattattgctatgaccattatctggaaatcactgttagataaattacatatttgcacttcactcangtgctggagatttatcgtgntttcttgctt

SEQ ID NO: 36146 - DNA, 331 bp, Homo sapiens
gtgattttgagttctaatttagaaacactgaagaaataatgaaaaacctagatttcttataaaattactcagtactacattttgcattttccgcttttaagaaccgaggaagagagttaagtggaaaaaggcaagctttctgaacttgaaggccttctattataccttcagatcagtgaatgatgtgtgctaaaatttctactcaaatgtagataactttgcaagcttaatttagataacttaccaaaattatagaatattttctgattcatgttgatcagtaaatataaatcctacataataaaactattcttaaattttatgccataat

SEQ ID NO: 36147 - DNA, 316 bp, Homo sapiens
ctaataaacagggtcaacctcaaatggctcactagcatctaagcatccttttacaagcacctagctcacagcccacctgcatgctgtctgcaggtactcaggcttaagcagcacgaccttaaaaaattttcctccagcccctgcctctttgcaggcagttttccctctgctgtcttgcctactgctctcttgcaacatattttccccttttctcgaaacaaatctgcctttctaaactcattactgtcttagtaaattcttttatcacctatgtgccggcctcagacactcagtgaccaccacagtatatgcatgt

SEQ ID NO: 36148 - DNA, 319 bp, Homo sapiens
tttcttatgaactaccagagttgcagttaacctattaagggtaaacactataaataccatgccctataactcaaagctaaacaagcatgccatttaaaaatatagcagtttattaagcacttcagcatacattgtaatttaatcccataaaactctatgggttaagtattacactaatttttaaaacagaaaccagagtactaaaatgcaaacagacagtattacagggctactgccaaatccagtgttctttctacttaacttcattacccaacaagatgaccttttcagtatagttcttattcacattttatattta

SEQ ID NO: 36149 - DNA, 316 bp, Homo sapiens
aagagacactagggccttttggaaatagagtgggcaaatggaaggagtatctgtttttaactctgtgtccgctgtattctaattgcataaactcagtgagtcacttacctaaggttgtgtaattaatgggagcagagctcttgtctcttcaaatgtgtttagaccatttgtaaactgggcggtctgtgctttgagaatggtgccgtgaaaagggatccaagctgagcttagcaacaaataccacaacctacttggtctttatgctaaaaagtggggaggaccaaggacgcgagcctatgtgttatgagtccaagac

SEQ ID NO: 36150 - DNA, 331 bp, Homo sapiens
ctcactgctagttccccagtaactcaaccatccacagaaaccatgtgagaatgaaggctgaaatactaaactccataaactgtcagaataaatcggagccagtctccctgggcccaagtttatactgcagttcatggtaaactgctcgtcaacagaagatggggaatctggcaaattgtaacaaaaccagatatttgtgtcactcaaggcttgatgtttactgggttttcggtttgcctggagggtacctgagcaagcatgtaggatacaattctggaacctggagtaaaacttggcaagtgcctgcttcctcagcctcagggatttccag

SEQ ID NO: 36151 - DNA, 318 bp, Homo sapiens
tttccttttctactagttctgtgggaaccatatggactggcatattaaaataatcagacttaaaattatctgccatctctccaaagctctgaagtgtatactctcgtacagcttgttcaaatccaaaggcttctcgaggtttgctacattcctcggcgacacatttaggacacctccagtctcttttgggcacattaggtagtggaggaattagactaaatgtatgatagctgtcatcacatccatcacacaaaagcaatttatcttcattgttttcccgaccacaaaacatacaaacatagagatcaacaaagttag

SEQ ID NO: 36152 - DNA, 317 bp, Homo sapiens
ttctgtttttccattttcttattcagactgtttaggactaatgagagaagttttgcttcctggatgagaccaagaatactgtggagagtcacatgtcactagcatttgttttcgtatctagtattatttttgaagaagagtctggaaaatgcactctggcaaaggttaccaagaatctaagcctttttgcggggggtggagggggggcgttgatatgtgcattataaattatcatctaagaaaccgtccaagaaaaatgccgcgtcgttacatgacctcgatctttctttctcccctgcaatcctacacggcaataa

SEQ ID NO: 36153 - DNA, 329 bp, Homo sapiens
caatcttccaaaacaaggctttcagaattttaattcaaattgtcttcaatctataggtcaatttgaaaagaagtgacatttttacaatagtctccttattccttaaacatggtacatatctctatttagttaagtctactttagtatatttcaatgtaaaaaccatatactataatttggaatagctttataaattactttagaatttacataagtgaaaagaaaaattattttggacaataaatcatgctctccatttcgccctcttttcctctaagtcgtatcactatcacatgagcagcagtactcagtgataattctgcaaggat

SEQ ID NO: 36154 - DNA, 357 bp, Homo sapiens
  misc_feature (1)...(357): n = a,t,c or g
ggttcattgggtgaggggcagtaaatctgtataaataatctatatttacaataacctgaaacttccataataaatatgaaatggctggaaatgaattttcaaaaactaaactcaaaaagtgaagctatgagtagacaaaaaatacctaacataacaatagttaagttgaaaacttcagtaacaaaagattaattnnnnnnnnnnnnnnnnnnnnnnnnnnnnnnnnnnnnnnnnnnnnnnnnnnnnnnnnnnnnnnnnnnnnnnnnnnnnnnnnnnnnnnnnnnnnnnnnnnnnnnnnnnnnnnnnnnnnnnnnnnnnnnnnnnnnnnnnnngtcgacgcggccgcgaattccagag

SEQ ID NO: 36155 - DNA, 346 bp, Homo sapiens
  misc_feature (1)...(346): n = a,t,c or g
ctttggccctgtagcaccaggtctgactgactctgtgtctgtccgagtccagccgtgttctgtgcggctgtgacgggttggacgggtctgggtcagccagttgccagctgcatcagactatggctggctgagttgattctgtcaggccgagcctagcaaaatccaatatcatatcgactgtgtgtggctgagctcgttctgtccagctgtgctgtcagcatcccactggtatgcctaagtctggatcccttttgttgnaattggttgtgttgctaccantnccttcaccccacaagcacagaatancaagggctgcctgaannctctgcnantagnnnnctnattc

SEQ ID NO: 36156 - DNA, 350 bp, Homo sapiens
  misc_feature (1)...(350): n = a,t,c or g
ctcagtgacattttacctaactgcagagccaggtacctacagtacatcttcatgaacttgagcaacacaaattcagtatttatacaaaagtataaacattagtcttagagaggcagagaaattttatccatgctagaagaaacagtttaagagcttttttccaatacttatattgccatagaagttttcttttaaggaattttttttcaattactgtattgtcatatgtaggtagattttattcattaaatttagaagcactcactgtaagtaccagccactttttgccttttccctgtcctcctacatgaccttatctatatttgccctagaaattgncatctgtactg

SEQ ID NO: 36157 - DNA, 355 bp, Homo sapiens
tgaatatgtatacttagccaacccattcaacataacttcctgtctcacccttcctcctttgaagggcttgcttttggtctctgtctgaggatacacttccaagcctgcaggcttcaagcttcctaagaaataaagctctcttttccaaatttgtagatctcctgcttttaaggtgatactttgttatagtggatagctggatgttgaagtgttgctagtaaatgacagagaagtaatgaagcctgcccttctaccagacagcatggtagcagattgattaactgtactggtataaccatcctcctcccactcagatttaaaatcttgagtcatctcttaactctaatctaccata

SEQ ID NO: 36158 - DNA, 350 bp, Homo sapiens
  misc_feature (1)...(350): n = a,t,c or g
ccagcactgaaatttaatctgaagaacaggaggcttgcttatcttgtttacctaattaccctgctgattactatacattatnnnnnnnnnnnnnnnnnnnnnnnnnnnnnnnnnnnnnnnnnnnnnnnnnnnnnnnnnnnnnttttttaatttgaaaattataaaacataaacatttaaatttagctgccctggatgtttgggacaggaaatatttcaaagcaaatccatgccatttttcatttttcaccatctttgctctactcacccgtcgacgcggccgcgaattccnnnnnnnnnnnnnnnnnnnnnnnnnnnnnnnnnnnnnnnnnnnnnnnnnnnnnnnnnnnn

SEQ ID NO: 36159 - DNA, 358 bp, Homo sapiens
  misc_feature (1)...(358): n = a,t,c or g
cagaacccagcagaaactactcatgaatgagaacttattgaattgaaaggtaattacacatgttttgttattttcaaatgtaaagtaagtttgaacgcaatgaatcccactgggtttgggtgatgggtcaataatgatgatacatattttagcacagttttggtgagacaagctggaggtacaggtctttatttgtgtgtgtatcagtcctcacagctctctaattccaaggccatatttcaaaatttgtagtattcagattatttgtagctggaatctgctaaccttactgaccacaatttaccttattacctaattcaaaattaataatccaactntctatgggagtccccctgct

SEQ ID NO: 36160 - DNA, 352 bp, Homo sapiens
ctgccttttcttggttttctgggacctttttcttcagtgattcttcaaagattattgacagttgttctttaattttagtccaagctctcctagcactcaatagttgatgagaatcaaattcacagactctggaggttcttttcctccctccttttggtagctcagatggacgtgatttagctcaatggaagaagagactgacacaccagccactgagctagaggcacggttttctaacaaggcctattccctattcatagacctcccattactacacagtcttagagatgttctcctgtcccatactatatatagactattacagagcaggattcctgtccattggaaggta

SEQ ID NO: 36161 - DNA, 359 bp, Homo sapiens
caaaagtaaaaaatgttaagcagctaacctaccatatgaattttgcagttgcactcttgggaatttatcacagagatacaaaaagttatgttcacacaagaatctgtacatgaatgttataagagctgtactgctaacagccttaacctggaaacgatccacatttccttcaatggcgtatggttaaacaaattgtggtacattcaaaccagcggttaaaacaggaacatataacaacttggatggttttcaaggcaattttgctgagtgaaaaaaagcacatttcaaaagggtaatgctataccatttatacataacacattcctgaaatgacaaaactagagaggctgagaacagat

SEQ ID NO: 36162 - DNA, 327 bp, Homo sapiens
  misc_feature (1)...(327): n = a,t,c or g
tgcatttttaacacctaacactgtccatttttcttaagggaactttcagcatgttctgcagcagcgctcagcttgaatttaatatttgctttgttttcactatatctgttttactcttcatagctttattgagatgtagttcatgtaccacacaactcatccattgtaaacatgatttgatgatttttagttaaattatagaattgtccagtcgtctggtnnnnnnnnnnnnnnnnnnnnnnnnnnnnnnnnnnnnnnnnnnnnnnnnnnnnnctgaattgcttgaagctaagaaaaaaaaananaaaaaaaagnaaaaanaaaaat

SEQ ID NO: 36163 - DNA, 328 bp, Homo sapiens
gccagatgtccggaaaagcctcaggacaagggaacaccctgtagccttgtggtgggagcacagctgaggcccccttggccaccctctgccacgaccaggcagaaagcagctttcggacagattcgttgtctcagatttgatctcaaagaaaaaccaagaccagtatttgtcccaggttctgcttttttacaatttcctccgaaatccagatacctgtcaacaccttggaaaaactgatttctccccagttagtagtgttgtgtgactgtcatcagcccagtacaaaaatggccttctttgttggggagcttcttaccctccagtgttt

SEQ ID NO: 36164 - DNA, 328 bp, Homo sapiens
gaaagacttaacagcatggtcaatgtagggcattcataaattctagatttcttaactcacactggtcagcataatcaaagattacaatattctctatttagggaggttaaagatacccatcagaaatagacatcccctctgtccttgaagaactattaaaaggcagattactggggaacacccaagcaagagaccctcagctgatcactgttaggcaataattcagcactgctaaagccgcagatactctcaagacactggagaggacaagctgcttgccattatacaaattagattaggcccagaaatggagaattctttcagcagc

SEQ ID NO: 36165 - DNA, 328 bp, Homo sapiens
gttatttcctcttctgtgctataatcctctcctccactaatccactctgagtaaagatctgttacacaccatacccttgttcatggtgcccaggggaaatgaagaggagagtattacaggcaactggaagattaagcatcccagaccccattctgaggtatcagaaatattgaggaggatactggacttcctaagattatgtggaatgggggcctacaactttttgtgtataggaaaataatacctcagagggcagagggcaaagggaaatgaggacattcctaactggtctctctgttttaccttttatgctcctctaatccatttt

SEQ ID NO: 36166 - DNA, 328 bp, Homo sapiens
  misc_feature (1)...(328): n = a,t,c or g
gttgcccaggctggagtacagtggaagcacactgaaagtggggctgaaaaaaatatagaagaaggagttccacgtagtcccagctacaccgaaggcagaggtgggcnnnnnnnnnnnnnnnnnnnnnnnnnnnnnnnnnnnnnnnnnnnnnnnnnnnnnnnnnnnnnnnnnnnnnnnnnnnnnnnnnnnnnnnnnnnnnnnnnnnnnnnnnnnnnnnnnnnnnnnnnnnnnnnnnnnnnnnnnnnnnnnnnnnnnnnnnnnnnnnnnnnnnnnnnnnnnnnnncnttaactngaaanttccttttttaaaactnnaaatttttcccaa

SEQ ID NO: 36167 - DNA, 341 bp, Homo sapiens
ggtaaactagattacatagtctctgcccttaggggaatatagtcagttggactttgtcactacagaagggttaaaaaaatacctattaaaataccgtgtattgggtttacattaaagaatattgggctaaaaccagccatcaatgcagttttggcactgtgttcctaatgtgagattagtgacatactgaaaaattagggctgcactgaaaaacttcagggaaaaataacaactgagaaaacaagcagaacaaccgagggctttaatgtagccttggaatgcttcagtctttggcagttgttaataaacaaagttaaaagagcccatgatcatcttttctt

SEQ ID NO: 36168 - DNA, 330 bp, Homo sapiens
gggctaatcaggtaccacaatactgtgctatgcattttttaagcacgttgataaatattttattgaattttacagataaggaaaaacgaggttccaagagattaagttacttgcccagggtcaagagttactaagtgctggaaccaggattcaaatgcagaacttaaggctcccaaatcttaaacactatacaacattgcctggctagttgctcaaggagagctgatgctataaaggcggcagtccccaaccttttcggcaccagggaccgattcatgaaagacaatttttccatgaactaggggtagggggatagtttcaggatgaaac

SEQ ID NO: 36169 - DNA, 327 bp, Homo sapiens
  misc_feature (1)...(327): n = a,t,c or g
catcaagttacttattggtatttgcctttactccaaactgctaatcttttctaggtgcttagcatttcatgtttggcaactcacgtcgacgcggccgcgaattccnnnnnnnnnnnnnnnnnnnnnnnnnnnnnnnnnnnnnnnnnnnnnnnnnnnnnnnnnnnnnnnnnnnnnnnnnnnnnnnnnnnnnnnnnnnnnnnnnnnnnnnnnnnnnnnnnnnnnnnnnnnnnnnnnnnnnnnnnnnnnnnnnnnnnnnnnnnnnnnnnnnnnnnnnnnnnnnnnnnnnnnnnnnnnnnnnnnnnnnnnnnnnnnnnnnnnnnnnnnnnn

SEQ ID NO: 36170 - DNA, 334 bp, Homo sapiens
  misc_feature (1)...(334): n = a,t,c or g
gggcagggtgacagtgagggctgtaaggccacatagggcaggagggacctggggacagggtgacagtggaggctccacccgtgtttgggttctgggcagggatctggggacgtcgacgcggccgcgaattccnnnnnnnnnnnnnnnnnnnnnnnnnnnnnnnnnnnnnnnnnnnnnnnnnnnnnnnnnnnnnnnnnnnnnnnnnnnnnnnnnnnnnnnnnnnnnnnnnnnnnnnnnnnnnnnnnnnnnnnnnnnnnnnnnnnnnnnnnnnnnnnnnnnnnnnnnnnnnnnnnnnnnnnnnnnnnnnnnnnnnnnnnnnnnnnnnnnnnnnnnn

SEQ ID NO: 36171 - DNA, 334 bp, Homo sapiens
  misc_feature (1)...(334): n = a,t,c or g
acagagtacaactccatctcaaaaaaacaaaaagtgccttccaggtgaggcaagtttttaaatggccctattttaagttgcattccctcttcattcttgatcctccatatcccacgccccccgactttttttgtttttttttttnnaaanngggtntaaaacccccaggnnggggngcagggccggnatnanggttnaccanagcnttgncccaggntnagggnattntcccgcntaancctcnngagnagnnggnanaacagtcntgngccnccannccnggntagttttttngggtttttcgnaaaaaagggntttnnccatgttgcccagg

SEQ ID NO: 36172 - DNA, 244 bp, Homo sapiens
gccagttctcatcacactgaatgttaaaaattacagttacagcagtgattgcaaattcaaagctctggtgcggataccaacagtgaccataaagttttctaggtgattccactagtttcttattggatgtgtatgtgtagcatctggactaggcactgtagatggatgagtgggggaaattttatttagcttgaaaattgagatagttttggacctcatggttaggtctttctgggaaattttt

SEQ ID NO: 36173 - DNA, 238 bp, Homo sapiens
ggcaaactttatttgaaagatgattccccattagctaactgcatgacctcaggtgagttatttagcttctctaagctcaagtttctaatcagtaagatgggaatagtgacagcacttatacagcagctgtgaggattagacataacaaggtatggaaggcatttgttcagcatgtggctagctactactatgatttccttttcatttcgcccccgtgtcttctgtgtaaggccctgtg

SEQ ID NO: 36174 - DNA, 243 bp, Homo sapiens
ctgcacctggctcatattgttttgattactgtagtcatgtaatgtattttggaattaaaaagtgtgatacttccaactctattcttactcaagattgttttttgctatttggggccttttgtggttctgtatgaattttagggctgttttttctatttttgtaaggaatgccattgaggctgggtgtggtggcacacgcctattattcccagcactttggggaggccaaggagctaacttctg

SEQ ID NO: 36175 - DNA, 243 bp, Homo sapiens
ctttttacaagtactagtcctctcagtgatactggtggtgttcagtatgaatccatagaaagaaaacaaaatttgttgtttaaaaaaagcagagtaatgaatgaatttcagttttgaaaacaacataatttgaaaacactgttatactaacatggcaaggtgttaattaaatataagagtaaggtagtaagttcttttagagcacctgtttaaatttactccagtaatcatcttaaggattga

SEQ ID NO: 36176 - DNA, 237 bp, Homo sapiens
cttgttttattttgacagaatttaatttttttagcccatctgataagtatgaagtggtatcctgttgtttaatttgcatctccctgatttgtgatgagattgagaatattttcatatgctcttctacaaattacttgttaatgtcttttgccagttaaaaaaaattaggttgactttcgcgtattgatttttttcataaatcctagatatgaattctaagttgtatgcattgtacat

SEQ ID NO: 36177 - DNA, 242 bp, Homo sapiens
atcagagaaaagctgtgaagcttggggaacagagggacttttggtgaagtaggtggtctgcagtttctatcttcttgggaaaagcaagctggaaaagtgaacagtggttggtaggccatagtgctcccagctgggtgacataatgaccacacagcacagtgatgttattagcaactgtgtggtggagtagttgtgggctggacaaatcaatcgtgtggaaattgttaggagttttattacat

SEQ ID NO: 36178 - DNA, 222 bp, Homo sapiens
  misc_feature (1)...(222): n = a,t,c or g
gggcaataatccgatagagaggaaaaatctgatgatacagaagagagatgaactgcaagagtcaagcctttgagttggaaagcaggagtgggattttgagcactgatacctttaggccgatgcagggacagttcatctttttttttttnanncannnttttntttaaaaaanttnttttnntaaaaanctttttcncnttaaaaatncccntngggnggaaa

SEQ ID NO: 36179 - DNA, 241 bp, Homo sapiens
tagcacttaaaattgagagtcctggctcttataaatgcaactacctactctgcagggctcctgtgaggaacaaatgatatgattacaaagcattgagaataatgtctggacataattttcaacagatattagctattacatttaaaacctcaaaattttcaaagttttctaaagttaaagattctaaaacaaaatccagtatttttgtaaaggtctagccagtgctaagcatatcagaacg

SEQ ID NO: 36180 - DNA, 234 bp, Homo sapiens
  misc_feature (1)...(234): n = a,t,c or g
ttcaagaccatgctgaggttttgaaggtgggtaccaggaagaaggtggcatcagtaactggaaacagattaagaagcagtaaaggatggaaattaagaatatgggctcaggaatnnnnnnnnnnnnnnnnnnnnnnnnnnnnnnnnnnnnnnnnnnnnnnnnnnnnnnnnnnnnnnnnnnnctctttctaagccttagtccctcatctagaaaaaggaaataagcagaatctac

SEQ ID NO: 36181 - DNA, 240 bp, Homo sapiens
gataattcaacatttattttgagaagctctgattttgcttcttccccctttctaaaagtttgaggaatatttcaagctctgcaacagggggcaaagattaatctaccttgcagtgtaggaattctattgagtggcagtgtcattgagcagtatatatataaagcacagatttgcatttcagaatattagccagtaccagctttggtaatgttagcagttctggagcttaattttctgtga

SEQ ID NO: 36182 - DNA, 239 bp, Homo sapiens
ctcacacaaagattttactgaagtttctcataaaatagtaagattttccggaagcacctcaggaattccaccaaccctggtacttacaacctgtaaaccacagctggctgcttccatgatcgccatgcagaatgcttcagtaagggaggtattaagaaaaatatgtccttgaactaagacatttctaacattcttgtgttctaaagctcccaaaagatgcaccctgtcatgcaactggt

SEQ ID NO: 36183 - DNA, 231 bp, Homo sapiens
ggtttctaagcagttatggtgatgacttagcgtcaagacatttgctgaactcagcacattcgggaccaatatatagtgggtacatcaagtccatctgacaaaatggggcagaagagaaaggactcagtgtgtgatccggtttctttttgctcgcccctgttttttgtagaatctcttcatgcttgacatacctaccagtattattcccgacgacacatatacatatgagaa

SEQ ID NO: 36184 - DNA, 239 bp, Homo sapiens
ttcacttctgtaggcctcaaatttcctacttgtacactggagtctcataaggagaatggggagtagcttcaacttctctaaggttctcccttctagggctaatatttattctccctccctctctcttttgtaagtaaaggtaaaagaattttctgaagggagcctgccatccatagtcttcatccttctacccctctgagacgcttatttctgcagcttttcaaagagctctccctgca

SEQ ID NO: 36185 - DNA, 315 bp, Homo sapiens
  misc_feature (1)...(315): n = a,t,c or g
ttcaatttggcctgtccaagtttttcgacttacaaaactgagagccannnnnnnnnnnnnnnnnnnnnnnnnnnnnnnnnnnnnnnnnnnnnnnnnnnnnnnnnnnnnnnnnnnnnnnnnnnnnnnnnnnnnnnnnnnnnnnnnnnnnnnnnnnnnnnnnnnnnnnnnnnnnnnnnnnnnnnnnnnnnnnnnnnnnnnnnnnnnnnnnnnnnnnnnccagtttttcctttctttttttatatttataagtaaatgtatctgagtatctatctatgtacataaattccaaaaattgggcttatattgatgatatat

SEQ ID NO: 36186 - DNA, 319 bp, Homo sapiens
  misc_feature (1)...(319): n = a,t,c or g
nnnnnnnnnnnnnnnnnnnnnnnnnnnnnnnnnnnnnnnnnnnnnnnnnnnnnnnnnnnnnnnnnnnnnnnnnnnnnnnnnnnnnnnnnnnnnnnnnnnnnnnnnnnnnnnnnnnnnnnnnnnnnnnnnnnnnnnnnnnnnnnnnnnnnnnnnnnntctattctgttttttatctctttatatgtcattgtgtcagtaccacattgtttttgctgttgtagcttttaatatgtttttcaatcaggaaggtcgacgcggccgcgaattccnnnnnnnnnnnnnnnnnnnnnnnnnnnnnnnnnnnnnnnnnnnnnnnnnn

SEQ ID NO: 36187 - DNA, 314 bp, Homo sapiens
  misc_feature (1)...(314): n = a,t,c or g
cttcattctgcataatttttaattcctgcaatatacaaaatatatcttattcaacnnnnnnnnnnnnnnnnnnnnnnnnnnnnnnnnnnnnnnnnnnnnnnnnnnnnnnnnnnnnnnnnnnnnnnnnnnnnnnnnnnnnnnnnnnnnnnnnnnnnnnnnnnnnnnnnnnnnnnnnnnnnagattaaccatatcatatgttcaaaaagctaagtagagacacagaagatatgttattaaacttctagagatgaagttatgttattaaacaacatgtgagatgaaaagtgcactggttaggataaaccacagattg

SEQ ID NO: 36188 - DNA, 316 bp, Homo sapiens
gtgctgaatgaaaaaaaaaattgccaacaaagaatagtatctctggcaaaactattcttcaaaaatggagcaataaagactctcctagatattcagaagctgggggagttcatcaccactacacctgccatccaagaaaggctaaagggagtccttcaagttgaaatgaaaagacactaaacagtaacacgaacagggaagtataaagcttgctgataaaggtaaatatatagacaaatacagaatactgtaacactgtaatagtagtatataaatcacttttaattctatagaatttaaataaaagtagagtatg

SEQ ID NO: 36189 - DNA, 314 bp, Homo sapiens
ctaggacaaaaagccaaagccgaaaatagtatatgagcattctagcccagagactgtcgctactaaaagaatgaaggaaataataaagtgatagacagggaaggatagaaaagacttaacaatatacatatgttccgtctttgctgttttggagaatgatggataagtagtgtttcctgattctgaagcatagctgaacaatttaattgtggtttaccatctttttggttccctcttcagtaattaacctatcgaaaatctgtcctaaatgtttggactggggcacagttccctccatcgctttgggagaaaat

SEQ ID NO: 36190 - DNA, 315 bp, Homo sapiens
  misc_feature (1)...(315): n = a,t,c or g
aacctatcacnnnnnnnnnnnnnnnnnnnnnnnnnnnnnnnnnnnnnnnnnnnnnnnnnnnnnnnnnnnnnnnnnnnnnnnnnnnnnnnnntgatgtccccaatgtaatcacaaggatctttataaaaaaggaaatgtgagacaaagggagagaaggtgatgtgatgaagtagaggtcagagtgatgcgggggctagatnnnnnnnnnnnnnnnnnnnnnnnnnnnnnnnnnnnnnnnnnnnnnnnnnnnnnnntcctagagcctccagaaggaaagcagccttgccaacccatttgaaacttctgatctccaga

SEQ ID NO: 36191 - DNA, 317 bp, Homo sapiens
aaaacagagtcattacagaggcaatcaagtgagactgaagccatcagggcggacccgcatccaatgtggctggcgtccttatgaaaagggggatttgagagacagtcacgcacacagggagaacaccatgagaagataaacgcagagataagggagatgcttctacaagctaatgagtgccaaagattgccggccagccgcctgcagctaagagaaagggacagaccagattgtctttcacagcccacagaacaaacgaacctggccaccactttgatttcagacttccatcctccagaactgcgagacaatgattg

SEQ ID NO: 36192 - DNA, 321 bp, Homo sapiens
tttttttcttccagttatttgttttcttttcataaacacacccatatatgcagttgtgaaaaaactgtcttgctactgatcaaatgctaccgcaacttcttctggcaagaggaggcaaagacctggtgaagtctcgcgtatgtcatctctggcatgcctgccagccggccggtctcctgggtcaataactgtgataaaaggccgctgagtgcgtcaacagactgtcctgcactgagacactattaaaggtccttgagctccaaatgtaccactgcactgctctgtggccctgccaacttcctcctcctcaagctgacatga

SEQ ID NO: 36193 - DNA, 320 bp, Homo sapiens
  misc_feature (1)...(320): n = a,t,c or g
ctggagttggggggaaaatgctataatagacattactgggactcctgaaatttcaataaggtctgtagatcaaataatagtattgtcttaatatttaaatttcctgattttgataatttattgcagtttaagcaaatgtctttcattttgagaatacacatcaaagtatttatgggtaaaggagtttgnnnnnnnnnnnnnnnnnnnnnnnnnnnnnnnnnnnnnnnatntgtatntntncagagaataaatgnggtaaagtnttacccatcggngaatcttggaaagtntgtatgaaagttattttatttttattattc

SEQ ID NO: 36194 - DNA, 315 bp, Homo sapiens
cttttgccttttttattttctctcactctcccattctcttttctccttatttccttttcctcctaaaccagtcttctgcccttcccccagctctttctccttcttcctcattaccgaagttgaagagttctaaacatttgtggctccaaggggtggggcaaataaaactggttttagttcccagaaatgggagcagttctaagaacaaaaagaaaaccctgctcttggccacactaacagtgatttagagactctctcttgaacatatattcagaacatactattgagtgtgaatttgatctctgtatagagatt

SEQ ID NO: 36195 - DNA, 235 bp, Homo sapiens
tctgttcatattttgtcagtcttttaaaaaaattaactatcttttcttcagattgcatgattttttgtctgttatcaggttcactgactcttttctctgtcactcttcctcctgctcactcttccccctgcttactcttccaccggctctaaacatgtaagacgtgcctccttcctctttgccttccgctgtgattgtaagtttcctgaggcctcgccagtcatgcttcctacac

SEQ ID NO: 36196 - DNA, 239 bp, Homo sapiens
cagcatctcaggggccatccagtaggggtttcccaccaccgtgtagcgcttcttgcggtcgttcttgcgcaaggtgcgtttcttggtggtggccttctccatgggggcccttttcctctcttccactatgagccgtgacagcccaaagtctgccaccaccacagtcttgtccaacttgatgaggcagttgtgcgagttcagatcccggtggatgatgcacatagagtgcaaataggcca

SEQ ID NO: 36197 - DNA, 238 bp, Homo sapiens
  misc_feature (1)...(238): n = a,t,c or g
nnnnnnnnnnnnnnnnnnnnnnnnnnnnnnnnnnnnnggctcccaaagtgctggattataggagtgggctatcactgtgtcgagccataaatctaatatctaacctcttccttctttatttttctagtagatgaactagttggtgagatttttgtgttggtggtttttttaataagattggttgcccggtcgacgcggccgcgaattccnnnnnnnnnnnnnnnnnnnnnnnnnnnna

SEQ ID NO: 36198 - DNA, 238 bp, Homo sapiens
gagaaaatggatttaaaaacaagtagagaattatgtagccgtttagatgcatcaatctcaaataattctacaagtaaaaggaaatctgagtctgccacttgcaacttagtcagagacataaacaaagtgggaattggccttgttgctgccgcttcatctccgcttcttgtgaaagatgtcatttgtgaggatgataagggaaaaatcatggaagaagtaatgagaacttatttaaaac

SEQ ID NO: 36199 - DNA, 238 bp, Homo sapiens
gcctcatcatcttgttactgcatttacaaaaaaccacacttgtttcactacatacacctcccagacaagtgctaacataaacagatgtttcatttgttaagtacatttcagctctaagtacatacatgacagtaactgttgtgatttgagtaatgatttatgttaattatgtagctattgacatttagattataatttgtgtaaactgtgtgactgtcatcatttgatctgtacatta

SEQ ID NO: 36200 - DNA, 239 bp, Homo sapiens
tatgcatgccaaaagaatatttgttttcttttttatgcaagtggtgacatcccctacacagcattctgcatcatgtttcatccacttaacaatttatcttagagatcttgccatgtcagtacataataagcacccttattcttttcttaataccacatagaattccattgtgtagctgaatcataattaattagacaagttctctcctgaaggccatccaggttaccataatgagtaaa

SEQ ID NO: 36201 - DNA, 239 bp, Homo sapiens
gggaataatgtaacatcaagtatttactatttttgcaagagaaataaaattggcagttccatttttacattacttaagaaaaatttaagagtgtttgaagaactgggacaagacattccaaacctacgacctaaaaatgaagcaagggatacatactgtccttcagcacatttccccacctgatacagagaaatttaccattagaatattagctgtgtgtggcaaggcgggggtggggg

SEQ ID NO: 36202 - DNA, 239 bp, Homo sapiens
  misc_feature (1)...(239): n = a,t,c or g
cctcactacccaccttgcccctcgctacttctcaagtctccctcgctcattagatnnnnnnnnnnnnnnnnnnnnnnnnnnnnnnnnnnnnnnnnnnnnnnnnnnnnngcagtttgtgctttagcaagctcttcaagtgattctgatactcgctaaagtttgaaaacaactgtaataaagtattgccatgctagcccccttgcagtttctctatcaggttctcaccaagtttgtatttg

SEQ ID NO: 36203 - DNA, 239 bp, Homo sapiens
  misc_feature (1)...(239): n = a,t,c or g
gctgattattgtattcagactctcgatggaagatggtttggtggccgtcaaatcactgcccaggcatgggatgggactacagattatcaggtggaggaaacctcaagagaaagggaggaaaggctganaggangggaggctttnctcaatgctcctgaggccaacagaggccttaggcgttcanattctgnctctgcttccgaaagggcagggccttctagagcaaggcatttttcaga

SEQ ID NO: 36204 - DNA, 236 bp, Homo sapiens
  misc_feature (1)...(236): n = a,t,c or g
nnnnnnnnnnnnnnnnnnnnnnnnnnnnnnnnnnnnnnnnnnnnnnnnnnnnnnnnnnnnnnnnnnnnnnnnnnnnnnnnnnnnnnnnnnnnnnnnnnnnnnnnnnnnnnnnnnnnnnnnnnnaaaataaataataaaataaaatagaatcttcaattacatgcatatcagggattcttactgtgcaaagcttttctctagatatttaattttttttttcagtttatgtgaagaac

SEQ ID NO: 36205 - DNA, 237 bp, Homo sapiens
  misc_feature (1)...(237): n = a,t,c or g
tatcactatagttttaaaaaggcattctgatgatttaaattaacttggctaaagggtagagatttagataaaagttaataattgaagcctaaatgacatggttagctcttctttttgataaagagggagcaacgcatacacatacagtagtttcatacattgtcctttaggcagaaactgaagccaataaaaccatacatgacaataccattnatttattatctgggctnttttttt

SEQ ID NO: 36206 - DNA, 332 bp, Homo sapiens
  misc_feature (1)...(332): n = a,t,c or g
gaagaacagaattctataataaatgaattaaatcagtatgttttcaccttacagttgcaggtttctcttacccattgtttcttcctgtttttgcacgttaccacatgcannnnnnnnnnnnnnnnnnnnnnnnnnnnnnnnnnnnnnnnnnnnnnnnnnnnnnnnnnnnnnnnnnnnnnnnnnnnnnnnnnnnnnnnnnnnnnnnnnnnnnnnnnnnnnnnnnnnnnnnnnnnnnnnnnnnnnnnnnnnnnnnnnnnnngactactgtttcacagtttgataatgaaaggaaggaaatagagtgcgtcgacgcggccgcgaattccagatct

SEQ ID NO: 36207 - DNA, 326 bp, Homo sapiens
agattcatctgcaccttattttcttactcttccataaagcagctttatttctgatttcaggctattaatcatacttgatcccaacagaagtctcgagttatctcttcttgcagaaagacatttagttttaagattaagtaaaatgaaaaaaaaggaaagcacttttcagaagcgttggtattcacttcagttaaactaattttaaatttttaatttcctaaaataatggcttagaatagcactaaagcgaatatactaaatggatccaaccattaaaacgtattctaaaattagtgaataaatatttttaaatgtaagaaaataat

SEQ ID NO: 36208 - DNA, 114 bp, Homo sapiens
gggaccttttgctttgtgtacttataggatgcacaagacacaagggaacaatctctcactttttaaatacagtgataggcctgaggagaaacaactgcaatttttttttttttt

SEQ ID NO: 36209 - DNA, 283 bp, Homo sapiens
  misc_feature (1)...(283): n = a,t,c or g
ggcaccatgtgcccaaattgaaaaaactccaggcatgtggcatctgtattatattttttactatgccctgttatcttgctagacttatgtgactgccacttatctggcaaaagccattacatctcagctacttggtaggtacccacattgcatcattcacctatttcgtattctagaagtatattttggttgtctcccattcacgagagattttttttttaagttttttgtttggttggttggttggttggttggttgttttttttngntttttttttttttt

SEQ ID NO: 36210 - DNA, 324 bp, Homo sapiens
  misc_feature (1)...(324): n = a,t,c or g
ccatttctaagtaagaattaactgnnnnnnnnnnnnnnnnnnnnnnnnnnnnnnnnnnnnnnnnnnnnnnnnnnnnnnnnnnnnnnnnnnnnnnnnnnnnnnnnnnnnnnnnnnnnnnnnnnnnnnnnnnnnnnttaccttgacaaaatgtttaaaaattatctgggcatggtggtacacgactgtggtcccagcaacttaggcttgnnnnnnnnnnnnnnnnnnnnnnnnnnnnnnnnannnnnnnnnnnnnnnnnnnnnnnnnnnnnnnnnnnnnnnnnnnnnnnnnnnnnnnnnnnnnnnnnnnnnnnnnnnnntattaat

SEQ ID NO: 36211 - DNA, 328 bp, Homo sapiens
ctgacatttgacagattatttcttaataaataagcaaaactgccatgactacaaatatggatagtatcccctgcgttgtacatagtcatatgttgaggccctggttagaaagctttaactctgattcctcccccatcctgttttccacagtatcactattagactttagcttcactttgttttttcaaactccaccccaaaattgatgaaattattatctttttaatatagtccttgtttaaatttactaacatggttatcatttttttaattcactgttgtttcttgcatctcatttctttggggttcactttttattttagtgagg

SEQ ID NO: 36212 - DNA, 112 bp, Homo sapiens
tcagtttatatatttttacattcacttatttactacctaaatgcttatgtaagtcattgatgctgaaaaagacttctaaatacagtaatgccctatcctttttttttttttt

SEQ ID NO: 36213 - DNA, 323 bp, Homo sapiens
cgcaccaaaggatcaatgctagtgagctggactcctcctttggacaatggtggctctccaattactggctactggctggagaaaagagaagagggaagtccttattggtcacgtgttagccgagcaccaataaccaaagtgggattgaaaggcgtggaatttaatgttcctcgtttgcttgaaggcgttaaataccagttcagagccatggcaataaatgctgcaggaattggtcctcccagtgaaccatcagatccagaggttgcaggagatcccatatttccaccggggccaccttcttgcccagaagttaaagataaaat

SEQ ID NO: 36214 - DNA, 322 bp, Homo sapiens
gcattgtcgactgaactgcgtgccctggttggtaggattttcttctctagagctgcagcctcctagaaagtttccagtaagtaccgacagacacccagcggatggaaacagccgtggatagagcaggcagtgcaatggtggggcaggatcactatttgcacagttgcgagaatgtattgcctacaggacagatctaagaacctagatgacactaagtatcaatggagggatgagaacacctgcccatttcccttcaaagctgaagttcccagtcagaggtcgacgcggccgcgaattccagatctatgaatcgtagatactg

SEQ ID NO: 36215 - DNA, 329 bp, Homo sapiens
acagaacagtgtcactacttcaagctaagcagtgacaggcaaagccaggctgaggtgacaatgtagaaggatctcgagtcagccctcaatgttgttgttcaatgttgggaagtcccttttagattatttatacagtggcaggtggtagcaattacagtaaattttcttgggtttcttcctaataaaaaagtgttgataaaactacaccagtcccaaggctattcaatgccacgtaaaatagtgtattttagcatttgaggtccctttttgttgcatactaaagcatgtttaaaatggtttgcagaaaacagtctgctaaccagtactga

SEQ ID NO: 36216 - DNA, 327 bp, Homo sapiens
ggcaaatcagggctccactatctgtaggccatgccgcttgcatcctcactaccgaatgagccatctcattttcactatccatgtgtgggttcactgtattcctccttacaaatacattttatataatgtgaatgtgcttcctaccctctgggcctctcttcttccaggtgtgtggctggtccacaaatactcattaagggacgtgaccttgaaaagctcttcctggttccacttggcgtcttttcttagggagctctgtgcccagtctctggccacttttagttcataaatagcttgcatggttagaggcacagaaggtggaggctt

SEQ ID NO: 36217 - DNA, 359 bp, Homo sapiens
  misc_feature (1)...(359): n = a,t,c or g
ccccagctgccaccccttcttcccttactcaacatttcacactggcatgaaaaaatggctggtggctcattcacctgtcctggaaactgtcctctctcccttggaacttgatagtaatctaagattcaaaaatgtttcaaagaaaaaaaaaaaaggggaaaaccccccnctttaaaaattnttnanntttttnaaanccaaaannngganggnnatnngnnccnntcctttntanttnnnaanggnacntnatttttttaaaaaanntttnaggnnggccncgggggttannggtngaaancccnncntttnggnaggntnagncggnggnannncntgnggtcagnantccnaaacca

SEQ ID NO: 36218 - DNA, 362 bp, Homo sapiens
  misc_feature (1)...(362): n = a,t,c or g
nnnnnnnnnnnnnnnnnnnnnnnnnnnnnnnnnnnnnnnnnnnnnnnnnnnnnnnnnacagnnnnnnnnnnnnnnnnnnnnnnnnnnnnnnnnnnnnnnnnnnnnnnnnnnnnnnnnnnnnnnnnnnnnnnnnnnnnnnnnnnnnnnnnnnnnnnnnnnnnnnnnnnnnnnnnnnnnnnnattaaagcagtaaacttaattattggctaggtgtggtggtggctcacacctgtaatccctggaccacacggaactccctctcctacatttttttcagccccactgcgagtttgcgtccgtggtacttttaagagggagtcactgctgccgtcagtcagtaatacttcctccttttttgcttt

SEQ ID NO: 36219 - DNA, 349 bp, Homo sapiens
atcacttcccataatgtaataaactctaacaataatttaaattggttttaatttttaaaattatataccaatgattctttagactgaaagattgaacctcattcttaggttctttatcatgtgtacatatgtataacttaggagcagagacttctgtttacaatacaactcaggtcctaatacagtataatttttaatctcttcaaagttcttcttaccctcttattttttttctttcatccttaattcctactcccatttcctgttttcatataaatggctacttttatcttggatatattttcctgcatatatgtatttatctttgtaaaatatatattattttgtg

SEQ ID NO: 36220 - DNA, 359 bp, Homo sapiens
aaaaaaaatccatgcattcccttggactgttattatttattttcattcatgcttcccagtgaaatggcaagtaacaggtagacattatagttgccccgtcttgttgtctcaccttgtccctaatatcagaatcacattgcttttattcctgagtgctatttgtgttgacctgatacgttctttagcttggggtaactgtttggaaagctctgtttagttcccatatttgtgtcataactgtcattctggattcttgttgttgagtcaatgaagaagcttttggggaaggcttggcagccattttatagacaggatcctggtgcacagactggacggtccagacaagctcttagagaacc

SEQ ID NO: 36221 - DNA, 359 bp, Homo sapiens
cagatattgactgtactgataatacaaaaaccaaaaggaggaaaacgaaaggaaaagcaaaagtagttagaaaaggtaaaacttttacagctaacatatctaaaactgtgagacgtcaaagacaaagcaaacgccctaggttaagtgtggatgataatgactgggaggatttggactatgcaaaatctaaaagagttcttcgacgttcaaaaataaaaacgagaaatcagggtagaaggactgtgagataccatgatggggatgatgacagaagtttagaaaatgtgttagatttcaatggttgcaccttatgaccttgagggaaagccagttcatttaagaggaaatggactggcatt

SEQ ID NO: 36222 - DNA, 357 bp, Homo sapiens
  misc_feature (1)...(357): n = a,t,c or g
caatttttaaagattcagcaaacaaaatacatttaacaataaaattcatactgaatattatttttgattcaaggaaacttttgtagtggcttgaggtctgtgagggttatattatcaatattgaccagtaatgtaaaactatatatttttaatctttctggttatctgccttgccagtttaaagtgttgaaagcggtataattaatactggttaaaaaagaagttgtagtgcatgctagtgcttcagaagaagctctccttttacatcttccattctcccacatgaaatgtcgttcataaacattcttagcttaatttctaaacttactaacttccatttaaactggntaaaaattg

SEQ ID NO: 36223 - DNA, 354 bp, Homo sapiens
tttttttccacatttaaaactttatttatatttattatttttacagtatccttgataattctatagacatagatattaccaactacatttaagtatgaaaggttaaaatgaccttactagtatcacaacattaagggtgaagctaaaattaatagcacaggttttctgctttcccaaccaataacttagctgattgattcagctattttttaaaggcagtatttttcaaaggcagtaagtttcatgattagtaacagtgcttttgccgatttgttttaaagaaatgtgtgtcttctaccttctgtattttgtttgtttaacttttggagatctattcaattgcattgaatttag

SEQ ID NO: 36224 - DNA, 352 bp, Homo sapiens
cgcggccgcgtcgacgtgaacatctttgtgatataaactgcacatatttgttgcgagattgttctttttctctttgttaaaatgttttgttttattctggtttggatgtccttcagggttttgttttgtggctatttattactacaatgcaacttctcccctaattgactgacaggtttgtacattctcaataaaatattttggtaaagtctttgtaaaaactgtgtagacaattttacagttttcataaacataaaacagtcaagactgtcatgatgaaaaagaaagattgagggcttaaaaattaaaatatgatacagctaaagtagtgtgcaaagggaaatttatggca

SEQ ID NO: 36225 - DNA, 357 bp, Homo sapiens
gaagctcagacatagccttgtgtcctccttaacacctggctgcattaaagtttcaaccatagcccacaaagttttctattagtagtagcacactcagtaaaaaataaaagccatcttttactgtgcatctgctatgtgtattaatcgttaatcctcatttagaaaatatttttaggtattttatacttattaacccagttttatcataaagaaacagcattactcaaagaaattgggttagacagatttaaaaaattttactggtaatgctaattcttaaaaataactgtgaaacaaaagacagtctagagactaaaggaacgttgtagatactacttcatcctcgttacatgtgtt

SEQ ID NO: 36226 - DNA, 356 bp, Homo sapiens
cagactcagagagaacccaccatggtgctgtctcctgccgacaagaccaacgtcaaggccgcctggggtaaggtcggcgcgcacgctggcgagtatggtgcggaggccctggagaggatgttcctgtccttccccaccaccaagacctacttcccgcacttcgacctgagccacggctctgcccaggttaagggccacggcaagaaggtggccgacgcgctgaccaacgccgtggcgcacgtggacgacatgcccaacgcgctgtccgccctgagcgacctgcacgcgcacaagcttcgggtggacccggtcaacttcaagctcctaagccactgcctgctggtgaccctggccgc

SEQ ID NO: 36227 - DNA, 352 bp, Homo sapiens
aattgttgagctgtttgccataatgggtgagttcaaactaaaagcatttttcagcaataattaaaggatagaatggaagtgaaaaaactttctctattatgtgttattataaacctttttataaataaattttatgatatagcagatttatgaaatgttttatatttacttaatagactttgaattaaagtactttttgtgttgctgtagttttagaatgatcattttatgcgtaacagcagggacattcaaaataagctgttaagatgtgttgtgatttgcttaaagtctgatggcaagagagaaatcataaaatttaattttatcattcatagagcagcaaatcattggt

SEQ ID NO: 36228 - DNA, 358 bp, Homo sapiens
  misc_feature (1)...(358): n = a,t,c or g
cacgaaactgggcatacatcaggaggcaaaatggaatggaggtttcaaattaggtagaagtcagagggttgatgaaataaatgctcagagatgaggaagcacacatcatgtcttgaaaatttcaagtgactcaatttagcaaaacagtagagttaactccccatatctgtaggttccacacctgtagatttaaccaaccatgggtataaaatattttttaaaaattccatctgtactgagcatgtacagactttttgcnnnnnnnnnnnnnnnnnnnnnnnnnnnnnnnnnnnnnnnnnnnnnnnnnnnnnnnnnnnnnnnnnnnnnnnnnnnnnnnnnnnnnnnnnnnnnnnnnnaa

SEQ ID NO: 36229 - DNA, 338 bp, Homo sapiens
  misc_feature (1)...(338): n = a,t,c or g
nnnnnnnnnnnnnnnnnnnnnnnnnnnnnnnnnnnnnnnnnnnnnnnnnnnnnnnnnnnnnnnnnnnnnnnnnnnnnnnnnnnnnnnnnnnnnnnnnnnnnnnnnnnnnnnnnnnnnnnnnnnnnnnnnnnnnnnnnnnnnnnnnnnnnnnnnnnnnnnnnnnnnnnnnnnnnnnnnnnnnnnnnnnnnnnnnnnnnnnnnnnnnnnnnnnnnnnnnnnnnnnnnnnnnnnnnnnnnnntgaagttactcttactgtaattaatccatggtccaggcatccaagaaaaatcaaacaaaatagaattcagaatttattacgattctgagacttctggga

SEQ ID NO: 36230 - DNA, 338 bp, Homo sapiens
cttccaggtccccttcccccacgtggaagctttcctttcactttcgctttaataaatcttgccgcagcacactctctaatcgagctgtaacactcgccactgccgtccacggcttcattccttgaagcccgtgagaccacgaacccttcgattgagaagaaccttcggtgggaagaagacttctcgtctcagtaacaataacaagaaaaacagcctagactagacgcacatcaggaagacaggtagtaacaaaatattttgttgtttgtacttttagtgttgtctctaagacagctttgcctaacccaggcaacaaaaatttaatcctatactttcat

SEQ ID NO: 36231 - DNA, 337 bp, Homo sapiens
aggaaaggtaacaaccaagatgtagatgtggcaataaaagaagtcatgggttgtaactgtttgaaacaagattgtagaggattaaagatggcaaggaaaaggaagtaactagctattcttgaagaaatcttgcagtaaaaagagaaaggaaaaatagacagctaatgatcccctaagacatagaactctgccagaaattagcctctgatcctgcactgaagctaagtaagccttaaggaaatatttacaaccttcaacctggctgggatcctcaaacaactaggcaggttgaatgaatacaggaaagatcctacctacaccatgtctgaaaaaggca

SEQ ID NO: 36232 - DNA, 317 bp, Homo sapiens
ggaaaagtcccgctgcttctcacaggtctgttcagttagtaaacttcctgaacagagtactgccatgttttcaactgtcaattcaaaaacacagtacctagggcatagtgggcactcaggtatctccataaataccttctgtatgaatggataaatgatagagaccatggatggatgacagagaccatggatggatgacagagacaaatctttgcattccttcagagcctatcaggacagtcactcaaatgttgttaaaatagctttttaaatgccgattagatataaaagttattacaggaaatgtagatattagc

SEQ ID NO: 36233 - DNA, 320 bp, Homo sapiens
tcctcatcactgttataacaaagtgacattgaacagaacaatgtaatttgaagaaatgctatataaaactctaccgcaaatctcattacacataaagttgtaagaccaaaggcaaagaatcagtcttcctatcaaccggaagttactgaagattcccatgagttctactgggaaaataaggttctgatccacagggctgtccaatcaccagtacaacattcagctaattaaatgctcacctaattctttccctgagtttgtgaatcgaatttactaggtagttaaggacagaaaagtagtcctgttgtgaaggacttttt

SEQ ID NO: 36234 - DNA, 333 bp, Homo sapiens
  misc_feature (1)...(333): n = a,t,c or g
gccctgttgaattcanaaggtacatttaagctagaaaaccacttgcagcacatctaatccaaattgccgactttacagatagacatttggtctcataaaaattaaatgactagctcagattagcatatctggtaagcagcagaactgagacttaattctgctgacccccaatattagtctcaccttccagatctcgctgcctggttgagatgttgtcagcaagatttctctaatgttttagtatattagtcagcaagcattggggcatattgtacatacaaaaaaggacaactaaattcctgagctccctggacatcctaaaagctagaattt

SEQ ID NO: 36235 - DNA, 318 bp, Homo sapiens
attcaatttaggaaacaaaatatgattgactagatttctagaaggagattaacaaaaaaacagaaggaagaagttattttttaaaaaaggaaagaaagaaagaaaatattctggaagagaaggacacatattccccgagagtgtggaaaaactcaagctgtatttttcctctgccctcacatcaccacaacaatcaacagaagtcacagaagacttctgtgactacatattggcggggggtggtttcttcccaccaccaagcaagcaatcaattcggcagcagacaccagctgggtatcctccaatttaattctgacg

SEQ ID NO: 36236 - DNA, 330 bp, Homo sapiens
  misc_feature (1)...(330): n = a,t,c or g
nnnnnnnnnnnnnnnnnnnnnnnnnnnnnnnnnnnnnnnnnnnnnnnnnnnnncaaattttttgtaaagtggtgtctggctatgttgcccaggctgatgtcaaactggcctcaaaccatcctcttgtctnnnnnnnnnnnnnnnnnnnnnnnnnnnnnnnnnntgcgcccagccctcaaatgctgtatttttttgtaggtgaaatacttctgaatatttggggatttaaaataagagaactatgtatggttaactatcagtgagttcttccttattgttcagaagaccatttcttcagtttgaaaggacaggagtttgaaagataggata

SEQ ID NO: 36237 - DNA, 329 bp, Homo sapiens
atttttcatagtatgagttaaaaatatatgttttatttaagaattgcagacgaagcttctccaacttattttttaagagttgtcaaaatcagatgttaccgtctccttattcttagtaaaagaatttctctaaaatatagtcaggcagacattttccttctctctctcaatggtattttgtctaattcttacttccattaagacaacactgcctcaagctttatatccatttccaaagactatcttatttcttaaaactacttgttttaaactctgaaagactaaaaagcagcatagaaaaacacctcttaatcttatagtcgttttat

SEQ ID NO: 36238 - DNA, 373 bp, Homo sapiens
  misc_feature (1)...(373): n = a,t,c or g
taannnnnnnnnnnnnnnnnnnnnnnnnnnnnnnnnnnnnnnnnnnnnnnnnnnnnnnnnnnnnnnnnnnnnnnnnnnnnnnnnnnnnnnnnnnnnnnnnnnnnnnnnnnnnnnnnnnaacatactttttaataaagagaaatattaagaaaataaattgagacttaaatgaaagcaaaggatttggctgggggggcatggtagaagatggatcttttgtttaatagtgtcagagccaaatagcaggaaataacagtatcctaaattttaggggaaattagatgctgttttatgttggttatctttctgctaaacattacttgtgccagttaactcttttgtttcatagttctgcttagaaccacttgnaagt

SEQ ID NO: 36239 - DNA, 362 bp, Homo sapiens
ccggccctcacacattattcaaacactgctcccatgtaactggcaaccctcccctaccttctctctatcccattagtctcttatctcctaccccagtctcatttttttaaaaaaaagtcaatactgattttgacagaaattttcttggaataagcctcttctaatatagacagtattttaagaattcagctatcagtaaatgttacttatagaaaataaccacttcattgtacaagcagctccagctaaagaaaaatagagcaaaactgagcataagtctttgccgaaattaccaactaaagcagggaaaagaaaaacaactttagtttctatatataattttatttctaagttttttcttc

SEQ ID NO: 36240 - DNA, 369 bp, Homo sapiens
ccacttctttgcataattcatcctgacccacctttggcaaaccaactgctccttctctttttgaacaaaagaaatcaagcaagcaaggacaatcttgttaatgcagattaactctgatgttctttttatccatttcttccagtttctcttcccagatttacctttgttttccctcccaactgtaactcaagtccctcagctcccgcaagagaacttttactgtctcagttctcaagtgtaccttcccactccaggctgccagttccaaaattacactccctgcagccatctgataccctagtcaagtccttccctgcctcccaggtccttcaaccaacagcttcattgaatgtaactccatttcaggcc

SEQ ID NO: 36241 - DNA, 361 bp, Homo sapiens
ctacaggatttcccatcagaatgaaacctgctgttatctctcccatctgagaaacaaaacaaaaccttgaccccatttcctcctccggttaccacaccattctttgctcccctttgtggcaaaacattcagaatcgtctctactcagtcttcccacctaggagactttcctctctttgccaatcatctattcaccaaccaatctcgattttatatctccagcttagacctttctcgaaaactccagatttatttaaccatctacatagtcacatctctacttccatatctaatagatatctcaaactcagcatgtcaaaatctgaacacttcatctcccccgaccaaagcctgctccacct

SEQ ID NO: 36242 - DNA, 370 bp, Homo sapiens
taaaaatcagttggatatatttaaaacaggttacaaattggaagggccattgatgctcatctgagtcaagatgagtttactctatgtcctttattactctggcctaaaaagaaagtaaggaaaatataaaatgtccaagaatttggtgtttctgtctttgaacttaaaaaaagctagattttcctgtgtgtttatccacaaggcagtggtagctgtttcatccataaaattcaccttgaattaaggcttgaatctacaatgaaaggcagcagtacctccagtgccagaaaacaatgacctagaactccttaactcttcataaaagggctttgtacagtcaaggattacatccgtttcacattaagcaacg

SEQ ID NO: 36243 - DNA, 360 bp, Homo sapiens
aatacatgtaattttattgtctctttgaaaatacattacagaaacatgttttaaatattaatcaatacgcaattaataatgtgtgacttttctggtatttaaagtatttccaagctgtagtatgcatctcaatttcgattttgaacatgcaattggtcacttttttgctttgattcatcttttatgctgccaaccaaattttgcctctgtatacctttttgacactaataatgactgagtctctgttcatttgagttcaagatttcccaagcggcagtttggagctgggataaactatctatcatgattgcataccactaatctgtctcaaccaaaccaccctatgactgaaattatact

SEQ ID NO: 36244 - DNA, 361 bp, Homo sapiens
tgtttccctcactcagctttgaacaactgtgaaggcagagagtgggtccgagagacctatgcacccaggaccaggcctggggctgccagatgtgaggccttcaaaattatttattgatgcgtggagtaaagcacaacccagagaactgggcttggctctcagctgtgtgtgtatagcacagtctcaaggctagctcttgacttctaggaaggtctttagggtcagcagggcagataattacagcaaagtctctggggtcactggaggttcacagcagacacctaggacaagcttggaggtggcatcactgctcaggaaatcggctgattggctgtagctgggcctttagaacaggcaggtg

SEQ ID NO: 36245 - DNA, 359 bp, Homo sapiens
gttttattaaaccattatggttttttctgtaatttttttactattttggttgtcttccttggagactccaattatgcaaatgttaggtttcctttccctgacgtctatatctgtcattttctctttgttcctttataactttttcattatttccattttcgtttgcttacttttatagtttctgtcctctgtgcccttggttgttttttccatgtggcccttctgccctgtgctccttccaacttcacgttttcatctctttctttcctgagtcctgccagcccatagtttatcactcattttatcagcccttgactactttcatttttgctttgcattctgactgccccatttctaaa

SEQ ID NO: 36246 - DNA, 370 bp, Homo sapiens
cacagccatgcctgtgcccaggactggggcttttccactgatatcctcaggtgagaagcagcgtgtagagcgagccagctccactccctgggaccaaaaagagagtctagccatctctgccgtggaaaacaaagcgtggaggtgtctgctgtttgtctgaaggcgaacaaacccttcaaaagtgtcccgtacctgtgcctctccttattggtagacaagcttgacctgtttctgcagtcaatctgttatatgttgttttgttcacagtatatgaggaaaatccagtctcacacagacatacagctggaaaagataggagtactttaatagccttatcaggtaattgtggatattctttgataccacacca

SEQ ID NO: 36247 - DNA, 368 bp, Homo sapiens
  misc_feature (1)...(368): n = a,t,c or g
ggtaatgtctgcctttttcattttagtcattctggaggtagtgtgataatatctcatcgtggttatttgctttagcctgatgattaacgatcctgaccattttttggaacatttggagatcatcttttgtgaagtaactactcaaatattttgcccattttgctactgggttgttcaaaagattcattaaaagaacttcttttatatatgggtttgtagttggtatttagatattctagagactagccagatccctatactacaaatactttctcctactttgtagtttgcctttttactttcttttatatacatataatttttccccctccaaannnnnnnnnnnnnnnnnnnnnnnnnnnnnnnnn

SEQ ID NO: 36248 - DNA, 371 bp, Homo sapiens
cttcttcacatgatgccatttaaacctgaagagactaacttaattaccagagccaattagtagcagaacaagaataaaaacccacaactgcaacctcccagtccaatcttctttgcaataaatgagattcctctttaaaaaactcttcaacatttgctgtaatagctacacttccacctctagccattgtctgtttactctctctggagtaactgccaaagtaaattactaaaactatgtataaattagaggcaagaaaaataaaaatagttcctatgttagggtagtgtaggtcaatttcattattttttattctattcatgctattaagttatgtgggcaataaatcccattttaaaataaaagtaagc

SEQ ID NO: 36249 - DNA, 371 bp, Homo sapiens
cgcgtgtgtgtgtgcatgtgtgtgtgtggtggggggtggttttgcctagcaaatttgctccatttcaatagaaactttaaacttcaaaattcctttttttcttattgctaagtataaaagctaatacttatttaagacccagtgctttatattaagaaaaatataaaggtatacatttagatttgaaatgtagtctatgatatcggagatatatcatgaaatcagaagtaatactaaaagcaataaaagaaaacaaagagaaaaaagagcaaatggcttttacatagaggttaaaaatttactgaattctcttggttcccaactaacaccaaagaccaaagttcaccattttgcttttttctgaggctacg

SEQ ID NO: 36250 - DNA, 334 bp, Homo sapiens
ctgggtgttggaggctatcttggaaaatctaggaccaaaatcagccctgtagcatgctcagcactgatatgctaggtgccttgggcctctggtggggtttccaggacctgcagagctgggatcctgaggccacacagctctgggagggcatgattgggacaggggtcgcctccaggcatgcatgtgccttagagccaggcattccaggtttccaagtctggctctatcacttactagccagccactgtgaaaggttataacctgagtctcagtttcatcatctgtaaaatggggacaaatataacagctcaccttgctgttgtgaggacaacat

SEQ ID NO: 36251 - DNA, 195 bp, Homo sapiens
ttaaagttcatatttttcattaattcacagaagaattgtaaaaaaggtaacacgcagttgacattccatttttccagaaagacagataattacatactgtagaggatgactcaaaagtctgtttcaagccactgacttcctaaactagtgaaggcctattcaaagtcacttaattcagctgtttttttttttttt

SEQ ID NO: 36252 - DNA, 336 bp, Homo sapiens
  misc_feature (1)...(336): n = a,t,c or g
gtaaaagttagcacattaagtagagatgtggatgatagaaaaaatatccagnnnnnnnnnnnnnnnnnnnnnnnnnnnnnnnnnnnnnnnnnnnnnnnnnnnnnnnnnnnnnnnnnnnnnnnnnnnnnnnnnnnnnnnnnnnnnnnnnnnnnnnnnnnnnnnnnnnnnnnnnnnnnnnnnnnnnnnnnnnnnnnnnnnnnnnnnnnnnnnnnnnnnnnnnnnnnnnnnnnnnnnnnnnnnnnnnnnnnnnnnnnnnnnnnnnnnnnnnnnnnnnnnnnnnnnnnnnnnnnnnnnnnnnntgtactcctacctgggcaacaagagcgaaactccata

SEQ ID NO: 36253 - DNA, 328 bp, Homo sapiens
cttctttgcaaaggcctctgggtctagtagtgcctggaatagaccaggagctgacaggcttgccagggacctttgctgaatggcccaaggaactaggatacaggtgcacggcagacctgggagacagtgaagaaaaaccacaactgggaaggctttccagagttaatttggagactggcttcaggaatgctggctatacctagggcctagttatttggttagcccagagattgttctgaacgacatctgatggtgcaatgacttcacacctcactgtctacattgtcatataaattcacactatgagtctaaacaggtttttgcttac

SEQ ID NO: 36254 - DNA, 321 bp, Homo sapiens
  misc_feature (1)...(321): n = a,t,c or g
aaaacagatgattataaagaacaaagactgagtatggctcatttgccatgtctttggtaagggtaccaggtatatatcaaacagcagttaaggagacctgttgacataaatttccttacttaaaaaaaaaaaanggaaaaaangtntntngtnaaaanctggnggttgcaagnnaanccantccntnanttttttcccaannccantcnttccaagctgttntcnantnaaaggcnnntgtnanncagngtnggnnaaccatanggntnngggccagggnnttnggnaaactgaatctcanntttgntanttacccncaac

SEQ ID NO: 36255 - DNA, 334 bp, Homo sapiens
ctacaccgataggaagtaaactcttcatagatttcagctgaatctggaaggaggagtcagtgtccccagttagacaaagaaagagaactaggaagcaagagcagcggatgcaaaacaaaaatggtgtgagacagcgtgctgctgaggggatccacgtacatttcaggattgtcagagtatgggggatggtgagagacaaaagcggagaaaagtagcaagagagggaccagagtatggaagacctcctgtgccattaataaagagtttagcctctgttgtgagggcattggggaaccattaaagagctcttgccggaaagcaacatgatttgaag

SEQ ID NO: 36256 - DNA, 334 bp, Homo sapiens
tagtgtgccacctgggcttgaaggcatgaaggaacaggacctgtgcaacaagataatggctaaaattctagaaaattacaataccctgtttgaagtagagtatacagaaaatgatcatctgagatgtgaaaacctggctaggcttatcatagtaaaagtaagcaacttggtttttaattttcagtattgctataattttggacagaagattttatttaattctttctcataaaaattccatatggatataaccctcagattattattcctgtgtatagtgaatccttcttatgaaatctattattccaaatgcttattaaattgaaatatagcg

SEQ ID NO: 36257 - DNA, 328 bp, Homo sapiens
  misc_feature (1)...(328): n = a,t,c or g
cagtaatctacctctgccgataacctgtttaagatgactcagcagaacaccgcgtttcattctattggtcaattccatgtggctgactaggtcaattttttttctgaacaaaagcaggtttttatatgtaaacagtgagaaaagaaaggctaaacactatgtaaatgtgaatggaaacttggaaatactcgtttttataaactacaaaaactttttgttgtttatcaggaaatccatatttattttgtaattaactgtcaagcctgtggatgatttttttgaacttggtagttcataaaggtttacagngaaataaaggatatcatct

SEQ ID NO: 36258 - DNA, 332 bp, Homo sapiens
ctcacttctcttttattccttaaaaccactgatgttgcactcaagcagaatttagctctattagtaacatgctgtgctaaaatttttctgattctcggtgaataaatctgccttcttaatatttcttattctttgctagtaatttgtcatttttttgaactttttaaaagtttcctttcatgggtgtaaagatcagaactagatacaatattatagttgaaggattaatatctaattcttagattttgtgttcctgttagaactttgtaaatggatattttgttttgtgcttatttttgaataagaaacttactgcaactgatttttgctct

SEQ ID NO: 36259 - DNA, 175 bp, Homo sapiens
tggaaatgctttttcagattaaaacagtgctcttctattcctagtttaatctgagggtttttttaattaaaaaaatcatgaatgacagtgagtattgacatttagtcaaagcttttctgttattgagatgatcatatggttttggacatttgtactctttctttttttttttttt

SEQ ID NO: 36260 - DNA, 365 bp, Homo sapiens
aaaataatttattcccttgtttttctggtagaggtactttgtgcagaaagggagagaatgattttcttagagaggaagcatgttaaaagttcaaatagcatatggcaaatcagttttaactttaaacttgaaaagagcaacaacactattgagtaatacataaaaaagaacatacttctccatttcaaagattcatgagtagagttaaaataccatgtaatttaactaaaaacaaatcaaaatccaaaaaactttcttttacaaatctcgtttttatctcagcataagtccccaagagcttttaagagttttgtgtatctgaagaattctgatgtaagagctgaatccctgataccaatctcact

SEQ ID NO: 36261 - DNA, 363 bp, Homo sapiens
ggggaacattggtttaagctatgctatagttgaaagcagtcacagcagcctgtggccaaggactaaaattgtcagctcacaagacatttcacagcagcattagtggacaaaactcactctaaatgtaccactgaaggggaaataacttaaagctcaaaggcaaggttgcccttccatatcccctttgaagttagaagaccatatgacgtggtttggccaaaggaatgggaatggaagtgacgtaagtggaaaagatgtgttctacttatgggcagaaattttcagagccagggaacatcttatcacattcccttgcccctgctggggttatcatgaaaaaaacctgttgcaactccaacttct

SEQ ID NO: 36262 - DNA, 357 bp, Homo sapiens
aaaaatcctggctttacagagtaaccatgatatttccaggtttttaagcatatggcaggatggggatctctttttttggtcaagaatcttttacttacaagaaaaaaaacatccaaggcctcaaaacaatttaagtagtttcagttttatatttttagaaagagaatatatagagttctactcaggtacttttaagtgtaagtaattttgaagaccctactttggtttcacagcatagcttagtgaggcacaggggagagaaaattagactgcaatgttgaagttactcccctctgatcatttttttgtttttatatctgtcttctttcctggctgtaagctacttgtgggaagaaa

SEQ ID NO: 36263 - DNA, 362 bp, Homo sapiens
ccaggttctggttggactgctgtgtgaccttgggcaacttactaaggtatgatttttccatgtgcaaactgaggaataggatatttgccatataaggctgatgtgtgaggggcacatgttaaacatttaatgaccatgagctgataatgcttttgttattatctggtataacaagcacaacaggcagcattctattattggtattccagtatcttcctgtttctcctcactaaattgtgggcctccagaagacatgatccatggctctgcatctcatctgcaatggcactaagtttatgacgcaggaacttaaactgatagccactgaatcgtattcagatgtttcctctaccatgaagtct

SEQ ID NO: 36264 - DNA, 361 bp, Homo sapiens
ccacaaccaaaagttacctgacagtaccaggggatgtggaaagttactatttaaaaatatatccttttcataagtaataaagttactagtaattcttcttttccaaatcaagaaggactttattctttcaaagtaaagaatagcgagtaccacaaaaagctaataccgttcactagttatgggacttgtgtaaattaaattggtttaaggattaaatgagattaacagactcactgaaaataaattatgtcatgcaccagacattctattctacttcagacattctaacacccaactttactttgcccacgtacaacctaaagcagttccctcgattatataatatactaagtcatatgtc

SEQ ID NO: 36265 - DNA, 356 bp, Homo sapiens
ttataccctattagtttttcagagatctgtaaatcagagaacctatgaaatcaatctttacagattaggactttgtatagtaaagttgattatagttctgaatcatcaaaacaataatcttgggggctttaagaaattatttcttaaaagggggaaaaactcttagacttttacagagaaactttcacaccacacaaaaatctcagagaacagtaaaccacaataagaatcttaactctgatggtaactgaaaacaaacactacattgttagtgaacaaggaggaaaaaggaattttacatattacaaaagaatctataaatttaaacaaagaacctaagcaaaactactcctgaa

SEQ ID NO: 36266 - DNA, 357 bp, Homo sapiens
  misc_feature (1)...(357): n = a,t,c or g
catacatcaccaaaaagtttcaaaattaagggggtattctgcaccattgcattaagtaatacatttgaaaaactcatttttttcctgtaaaaatctaaattaacaaaatcaacaaaagaaatggaaaccccaaatcaaccaaaaacgaaaaaaattcctgttttgnaaaccgtttccccaaanggcntcaggatctgangaatttacnggnaaattatttcaaatttttgnggggcaactaattntactttttcaacagtatcagnntttggncnacncggccgnaaattccaannnnnnnnnnnnnnnnnnnnnnnnnnnnnnnnnnnnnnnnnnnnnnnnnnnnnnnnnnnnnnn

SEQ ID NO: 36267 - DNA, 362 bp, Homo sapiens
  misc_feature (1)...(362): n = a,t,c or g
ccgtcttactgcttcaaccttccttctctaaatttttatctttaccctaaaaataaactcatgtcagccctcctaaacaaatcttttgtttgtccttccctctccacaaattgctatcagtatctttcctgtctttacctctgaatttcttaaaataataggcatgctgtttccactgcttagtgcattattattcttcagtctagtccagctactgcccccacttccttaatgaaattatcctctgaagtcacccatcaccttctaattgccgtcgacgcggccgcgaattccnnnnnnnnnnnnnnnnnnnnnnnnnnnnnnnnnnnnnnnnnnnnnnnnnnnnnnnnnnnnnnnnnnnn

SEQ ID NO: 36268 - DNA, 357 bp, Homo sapiens
  misc_feature (1)...(357): n = a,t,c or g
ttttgctttaaactaaataaaaatggaaaagataaataaaaaatggaaaagaaggtctgtgtttacctacacatttaccattttcagcattctttgtttctttgtgtagatctgggtgttcatctggtgtcattttcttttgcctgaaaaaacttcattttttcctggatttccacagtgtttggacatttcctgaaaaactttatttgttcattctgtnnnnnnnnnnnnnnnnnnnnnnnnnnnnnnnnnnnnnnnnnnnnnnnnnnnnnnnnnnnnnnnnnnnnnnnnnnnnnnnnnnnnnnnnnnnaatcctcctgtttcagcctgccaggtagctgggactacaagcgcatg

SEQ ID NO: 36269 - DNA, 358 bp, Homo sapiens
tgagattactttaaaatctactatcatacttctacttgatctgaaagccaacagtcaagctgtactatgtcaatttttgtaaccaatcatgatgacattgtcttaagagtggatcagtctgggtctacattataaactaatcattaaaggagtactgagtgatgtgagatacaggcaatatgaaggagaaaagatgaatataagtaaagtatgggaaaggaggaggcacatactaatgaattagacacatacactaatgcccgcaaataacccacagagacagagaaagtacctggaaagctgtgagtgcgccagtccctgggttatacaggcatcgcagcgaaggcatgctgtccgc

SEQ ID NO: 36270 - DNA, 360 bp, Homo sapiens
gacactacaaaaaagaaatcaaaacttattgatagcttacaggacaggaagaatggggacaggcctggtgatccattctttcataattctacatgctgcagggtaaaactgctagccttgggtctcaaagggcttagtctaatcatggggggcaatgtaattaataacgcaataataacacaaaggatagaagtgaaaaataaatggtaaggtaaatgtgagtttatcagaagaggtctctatgagttggaactgtcaagaacagattcatagaagaaataagactttgaagtctacgtaataagcaaagtggtggtggtagcatggataaaatgaagaattcaagcaaggagagtcagt

SEQ ID NO: 36271 - DNA, 359 bp, Homo sapiens
cgcccttcagctcgcgctggacagcccaggccaactcaggttcttcgttgcagttcccctggacatgtttcacttcccttagagcgcttatctccatgtgtaatctcatctttttaagggtggatttctcattaatgtctgtctctccagctgactgtgaggtccttgagggcaagaagcaggtttttgttcataatagtttccccagtccctggtatggatcctagcacaccctgaatgggtgttttaagaaacacctgttgactgattgatgcaggagcccttgagaacagctagaaatggaagtagggaaatcccaaagtgaaaacaaaccctcaaggccagagaacagctttggg

SEQ ID NO: 36272 - DNA, 469 bp, Homo sapiens
  misc_feature (1)...(469): n = a,t,c or g
tttgnangtcnnnnnnnnnnnnnnnnnnnnnnnnnnnnnnnnnnnnnnnnnnnnnnnnnnnnnnnnnnnnntctcgaggatccgaaaatgtccaaatgtttgttttaggaaatggacaagaatactctggaaaagaagagcaatagggagaactagctgttctacaggttaaaatatactctgaagcctcagtaattaaagcaatgtggtactggtacatgttcagacaaatgtcctgaaatagacctaaatacagaaagaactttagtacataataatcttgtataagtgaaggaaagatacattacttagtaagtaatactggggcaactaagaaaccacctagaaaaaaattaatttgatcatacctcctactgtaagcctagataaattccaaatggaatttaggtgtaaaacctgaaatcttaccaatactagataaagacatggagcaattattttatgactt

SEQ ID NO: 36273 - DNA, 320 bp, Homo sapiens
  misc_feature (1)...(320): n = a,t,c or g
agaagtgtcacctccagccactgcttcctgtagcttccaaacggcctcctcagaagtgtcacctccagccactgcttcctgtagcttccaaacggcctcctcagaagtgtcacctccagccactgcttcctgtagcttccaaacagcctcctcagaagtgtcacctgcagccactgcttcctgctctttcacattttctttcttctttgtctgtgctctgtggtttggcatctgccccagcgtcgacgcggccgcgaattccnnnnnnnnnnnnnnnnnnnnnnnnnnnnnnnnnnnnnnnnnnnnnnnnnnnnnnnnnn

SEQ ID NO: 36274 - DNA, 313 bp, Homo sapiens
gctaaatcttaaacgaacacttttcagtcagtttagttttctcttaaagtactttaattccgttaaaacctgagccaccagatttcctgtctgcctgtctcttccttggccttaatccaaaactctgctgaggaagaagattcgttggtacactgacaattgttttataatccattcatttcataacccctcatttgctacccaaaagtggggacctaaatctgtacagatttacgtgttcaaaggccatggcctacccaaatagagaatatctcctttcttgagtttctctcacaacttttgctgaagtctc

SEQ ID NO: 36275 - DNA, 319 bp, Homo sapiens
ttcctctcatggttaattctttactagttttcatctttaataaaaagtcctacatggattagaagcagttaggctaaattctataatgactggattccctgaaccaggggacttattatgcaaggaaaagcagacagcttaagtccaagtcttttgtgatctgttcttttgtgatgtcagaagcaaatggatacctaacataattgtatttgaacattagtcagtataaagttatgagttctaatgtctcttcttgtaagcatattatgtttcggctcataagcttagagaaaatagtctatggccccatgtgccttaa

SEQ ID NO: 36276 - DNA, 313 bp, Homo sapiens
  misc_feature (1)...(313): n = a,t,c or g
cccatgtcaactttgcttctctcttccctctactcccccatgcatctttactttggaacttaccaatgtttcaagttccacgtctcccttcagtccacaatcaggccatctgcatttatctactcagcccctcaccatgatacaacacgctttctaggcagggacaggtcgacgcggccgcgaattccnnnnnnnnnnnnnnnnnnnnnnnnnnnnnnnnnnnnnnnnnnnnnnnnnnnnnnnnnnnnnnnnnnnnnnnnnnnnnnnnnnnnnnnnnnnnnnnnnnnnnnnnnnnnnnnnnnnnnnnnnnnnn

SEQ ID NO: 36277 - DNA, 310 bp, Homo sapiens
catcagtgaaaaatagggcagctaagaagcttcactaagttcaaatgggtcacaatacaggaggctccttgctttgaggagctattcatggctgagagttactaatggcaaaatttccttccctaacagaaatcattccttccttccaggctggttatatgattatacccagacatacaatggctctttctacttctctggcatatgctatctcctctcttcagtttcctttttttttgtaccattggccgaaagatggaaaaacagtctgacctgaaagaaagaagactgcaatcaagtgagagctaaa

SEQ ID NO: 36278 - DNA, 275 bp, Homo sapiens
atgctattgtgtttacttttgaaaggcagcaaacataaagctaggagcttgcccttcaacaaacagctttagttgggtctggtagagtcaccctaagaactggctctgcgcccctcacctggattgcagtcactgcttgctctcatctgttgtacatatttagcattcatgaaatttcttttaaatgatgtaactgctttgaaaacatttcagaacaattgcattgaattgaacttttgcattaatgtgagtctttctgggtttttttttttttt

SEQ ID NO: 36279 - DNA, 308 bp, Homo sapiens
aaaggatgccatagtgatataaatcttctccagacttgtgttgaaagtattcgcaacttggccagtgatttttacagtgacttcagtgtgccttctacttctgttggcagctatgagagtagagtaactcacattgtccaccaggaactagaatctctagctaagtctctcctcttttgttttgaatctgaagaaagccctgatttgttgaaaccctgggaaacttataatcaaaataccaaagaagaacaccaacaatctaaatcaagcgggattgacggcagtaagaataaaggtgtaccaaagcg

SEQ ID NO: 36280 - DNA, 315 bp, Homo sapiens
atttgtagcagggaaatgcatgacaagcattgatctgaatgtatcaatattagtaaacagtgatttaaaaacacattgaattcaggcaaaatgtcttagatcatggaaaagtcctttcccaacactgattataaaacattattgacaagtgtcagagttcccatcaagaatgttccttgagcaaatttgggttttagcaaattcatatccagattttcaaggttcactggaaattgaccccacagcacttgtcttttagtgggtgtatagaaactggagtaaaactggagaagtgcaagaactcatggacagcat

SEQ ID NO: 36281 - DNA, 314 bp, Homo sapiens
  misc_feature (1)...(314): n = a,t,c or g
cctggctatgctgtttactaataatnnnnnnnnnnnnnnnnnnnnnnnnnnnnnnnnnnnnnnnnnnnnnnnnnnnnnnnnnnnnnnnnnnnnnnnnnnnnnnnntaatattattgtgaggattaatcgatatgtcttcagtgcctagaacatgcttagaacatattaaatgtgcaacacaggtatctattggtagaaatttgaccccacaattctacctctaggaatttgtccttacaaaaataatcaggcaagtatgtaaagatgtatgaataatatgactcattaaagcatcatttgtaaagaaaaaaact

SEQ ID NO: 36282 - DNA, 307 bp, Homo sapiens
ctgcgttgctgggaagttctggaaggaagcatgtgctccagaggttgggattcgtgtctggctctggaattgctactgctgcctctgtcactcctggtgaccagcattcaaggtcacttggtacatatgaccgtggtctccggcagcaacgtgactctgaacatctctgagagcctgcctgagaactacaaacaactaacctggttttatactttcgaccagaagattgtagaatgggattccagaaaatctaagtactttgaatccaaatttaaaggcagggtcagacttgatcctcagagtggtg

SEQ ID NO: 36283 - DNA, 316 bp, Homo sapiens
  misc_feature (1)...(316): n = a,t,c or g
ctttaccccatattcatgcccagctatcaagaaaaaattacaaggcatactaaaaggcaaaacaacacagtttgaagagacagaccaagcatcagaaacagacatgacaaggatgttggaattatcagatagggaatttaaaacaactatggttaatttgttaagggctctaatagatagtcagcatgcaaggacacataggcaatgtaaccaaagaaatagaaatcttaagaaaaaaaaatgttaaggatcaaaaacactgtaacagaaatgaagaacgtctttggtaggcttattagtanactggacatagctg

SEQ ID NO: 36284 - DNA, 308 bp, Homo sapiens
attcaccaaatgccacatctaaaattgaatccaatcctgacttacctctgactttctactcacagagatacaattaattaactgatttaagttatgcatacgtatgctttaagttattatacaaatttattgtcaccattatcctgtctataaactcgaattgatagaatgatatcagtcttcttgtgcctcctgctaacataatcctacctcagccatccttctcagaacaatataatctggttctcactctttccaggattattaccacaatcaccactccccatgataatctcaatttatctccc

SEQ ID NO: 36285 - DNA, 305 bp, Homo sapiens
cggggatcttgggtgacagggcaccgagggaaggaggacgcgagggcagccaggccctagggagcagggagagtggctcgggctcagtcgcgtggccccaggtgcgcgtcccaggaagaagaaattgtcgagacgaataacatgaggtcatatagaatcccacttttggtgatttcaagtcaagaaagtaaaagtaaaccattgctatctttcaccttaaatatcctgtgttttattgctcataacatccagtttttctaatactcatgatgtcagaagggaaacctcctgacaaaaaaaggcct

SEQ ID NO: 36286 - DNA, 308 bp, Homo sapiens
aataaatgttagctattattattattaagccagatccccttaagtattactaacacttcaaatgacaaaaatacacaaattatacctcagactaacacaaaagtatgggtttgatttacttcatcatcctatattgaattctaaatcttcctagattgggaagggaagacacccagcaagaaaacaattttactgtcccaaacaagttggggttaccatctcagcaggttaaggttgctcatcgtgcagaaactttgggccacaacatgagctctggggctgcatacatgcaagatatttcctgtggc

SEQ ID NO: 36287 - DNA, 313 bp, Homo sapiens
ccacagtgagagtggatttttagtgtaaccagtctccatgcgccaccatagcaatgactgtagtaaactcaggactagttcttttacccgcacttcagcctgctctcctttggattatgtgtcaggtgttaaatggagatgtttcaagaattgaacacttgaaattctctgtaccttttggaagtagactctttctgtggtcttttagttaggctgtatattcttggtgagttaggggtgggtggtgatgggatcagtgtcttggggggacataaccatgtgggtgactgctggggtcccctgatggcttccc

SEQ ID NO: 36288 - DNA, 315 bp, Homo sapiens
  misc_feature (1)...(315): n = a,t,c or g
atactattggcttacttaaaaaataagcattgatttcttgcagttccagacactggaagtcctagatcgaagtgctaggagatttactgtctagtgaggacccactttccggttccatggaccactgttnnnnnnnnnnnnnnnnnnnnnnnnnnnnnnnnnnnnnnnnnnnnnnnnnnnnnnnnnnnnnnnnnnnnnnnnnnnnncatgaaggctccacaggaagaaagaagatgggggtagaaggaggaagacaagagggagaaggaggtgcgtaaagagaaaataactgaagacttttaaaaggaaatagga

SEQ ID NO: 36289 - DNA, 352 bp, Homo sapiens
tttctaagttgcagaacatgaattccttattggcctatcccactagccacagctgtgagcacaacagaactgacacatacctggtaattataccttatctaaagtgaacagggccaccttcccagcatagtgacagctatagcccttaatctaatgcagtggttctcaaagtatagactcactgggggtgccctttctgaggctctttcaaggaatctcttctatgaaatcaaaactacttcacagtaattcaaatatattatttgcctttttgactctcaatgacagtagagttttccagagactacataatgtatgatatcacaacagattgaatactgaagcaaatgtt

SEQ ID NO: 36290 - DNA, 180 bp, Homo sapiens
  misc_feature (1)...(180): n = a,t,c or g
ccccattccttccttcccccagtccctggaaccaccatttcactttctctctctgtgaatttggctactctagatacaatnnnnnnnnnnnnnnnnnnnnnnnnnnnnnnnnnnnnnnnnnnnnnnnnnnnnatacatccatgttgtggcatatgtcagaatttcctttttttttttttt

SEQ ID NO: 36291 - DNA, 351 bp, Homo sapiens
  misc_feature (1)...(351): n = a,t,c or g
aatcccaagaccaattgggttgaagcaccaagtgagttcagatatttacactgatctagaagagatgggccttaaagaactgaaatctgaggacagttagtatgcccagttaggtcttcaggttaccctgggagatacatggtaccttttggatacagctgtagtacagctggactatggctcagaaaaggttggcccnnnnnnnnnnnnnnnnnnnnnnnnnnnnnnnnnnnnnnnnnnnnnnnnnnnnnnnnnnnnnnnnnnnnnnnnnnnnnnnnnnnnnnnnnnnnnnnnnnnnnnnnnnnnnnnnnnnnnnnnnnnnnnnnnnnnnnnnnnnntgcgagtgatggg

SEQ ID NO: 36292 - DNA, 360 bp, Homo sapiens
gtgatttcatagggctgaatttcatgtttttctagaactttcatcacatgcttcatagttttgtctttcacattccaaaacacagcagctccttccctgaagaagaatattgttccaggatcaccttcttttgcagaattttccacacccatcaccaaaatatttgctgcatctctaggcaagcttgttacttcaacatatccgtgggaggccagatcttgagacagatttcccagatgatactcatctgccgttgcaaatgctgtgcagtgcattaggtcctcgttcacagacagaactggaaggttggtcctggatggctgtctggtcctggatgcttttagtggtctcttcacctgg

SEQ ID NO: 36293 - DNA, 343 bp, Homo sapiens
  misc_feature (1)...(343): n = a,t,c or g
tnnnnnnnnnnnnnnnnnnnnnnnnnnnnnnnnnnnnnnnnnnnnnnnnnnnnnnnnnnnnnnnnnnnnnnnnnnnnnnnnnnnnnnnnnnnnnnnnnnnnnnnnnnnnnnnnnnnnnnnnnnnnnnnnnnnnnnnnnnnnnnnnnnnnnnnnnnnnnnnnnnnnnnnnnnnnnnnnnnnnnnnnnnnnnnnnnnnnnnnnnnnnatgaatcctcatgacatgagnnnnnnnnnnnnnnnnnnnnnnnnnnnnnnnnntgaacctaaaataaaagaaaaagancaaaaaaaatgaagggccatttataanaactgntagtaancaaactgattnttcaaactc

SEQ ID NO: 36294 - DNA, 359 bp, Homo sapiens
gaaatattgcctgattacagtttgctacttccctgcggaggtgctaatacatattattttagtgagaaatttgagtcattggagtgagaagcttctaaattataattcctgtttctgaataaaggggtttgttttattgacaagagtcctgagcacagagacaaggaacagcaagtatatttaaaatgcatgtgcacctgggaaccagtggattaaagcgtgatataatatagaagctgcatggggatttgaggaatggtagatctggattctagatctcctgacattacctgtgtcatttgagatgagctatcctctctaccagtgggtctcaaagagtcctcaactagcaacatctg

SEQ ID NO: 36295 - DNA, 351 bp, Homo sapiens
ctccatttcccggtccagggaacacccaatccctcagcaggagaagaatataactaacctatcattcatgtctttggatctagggaagaatcaattcagagaataatcgaggcacatgctacactgataagatgcttaagatcacaatgaaggttaggtaagtcagaactcaagcctgacctttacccctacactcaagtttgacaagatgcagtttttgcccagtcttcctctcaacctactaaggtgatgcagcgtaatggttagcaaaagctctggagtttgactgcctgggtgcaaactaattccgtcatttatatgctgtgtgacttacacaaattactttattta

SEQ ID NO: 36296 - DNA, 360 bp, Homo sapiens
  misc_feature (1)...(360): n = a,t,c or g
tttttttttccttccaatttttattttgcagtagtatgcaacagactttctcaaaaggaccagagcctttcataaccccagtccagacaactatggacacacaaatattgcccgagtactttgaatcacgagagaaagtggaagagtgatgtctggaacatgtgagagtctctcaggacctccaaactcattttcaagtgatgttaacagactctgtcaatattagaatgtataaattagctaagagtcaagggaacaagagatttttacctctcttggcctcctgccataccgaaaatgtcagcaccaaacctcaaacagtcccactgngtttcttccttgctcccagtcctgaagttc

SEQ ID NO: 36297 - DNA, 351 bp, Homo sapiens
  misc_feature (1)...(351): n = a,t,c or g
nnnnnnnnnnnnnnnnnnnnnnnnnnnnnnnnnnnnnnnnnnnnnnnnnnnnnnnnnnnnnnnnnnnnnnnnnnnnnnnnnnnnnnnnnnnnnnnnnnnnnnnnnnnnnnnnnnnnnnnnnnnnnnnnnnnnnnnnnnnnnnnnntaataaaaaaaagatacagcattaaatttttaaagacatgtagggataaaacacggtgatcatgaagcaacagagaaattcattgatgagtttgccaaggtcattgctgataaacatctgacactagaacaagtctataatgccaatgaaacatcactgttttgacattattatcctagaaagacaccaattacagctgctgagac

SEQ ID NO: 36298 - DNA, 359 bp, Homo sapiens
  misc_feature (1)...(359): n = a,t,c or g
atcagcttccattttcatactgtaagagcacctgagaatgagaggccacttatatttaattaactgctaaatcaggannnnnnnnnnnnnnnnnnnnnnnnnnnnnnnnnnnnnnnnnnnnnnnnnnnnnnnnnnnnnnnnnnnnnnnnnnnnnnnnnnnnnnnnnnnnnnnnnnnnnnnnnnnnnnnnnnnnnnnnnnnnnnnnnnnnnnnnnnnnnnnnnnnnnnnnnnnnnnnnnnnnnnnnnnnnnnnnnnnnnnnnnnnnnnnnnnnnnnnnnnnnnnnnnnnnnnnnnnnnnnnnnnnnnnnnnnnnnnnnnnnnnnnnnnnnnnnnnnnncaaaaacaacaacaaaaaaaac

SEQ ID NO: 36299 - DNA, 341 bp, Homo sapiens
  misc_feature (1)...(341): n = a,t,c or g
cttttaccattttcttattctttccccccataggcaactccctcccttctcataattagcttaagaccttaatggnnnnnnnnnnnnnnnnnnnnnnnnnnnnnnnnnnnnnnnnnnnnnnnnnnnnnnnnnnnnnnnnnnnnnnnnnnnnnnnnnnnnnnnnnnagatcagcctgaataacatggcaaaacccaatttctactatannnnnnnnnnnnnnnnnnnnnnnnnnnnnnnnnnnnnnnnnnnnnnnnnnnnnnnnnnnnnnnnnnnnnnnnnnnnnnnnnnnnnnnnnnnnnnnnnnnnnnnnnnnnnnnnnnnnnnnnnnaacctctacaac

SEQ ID NO: 36300 - DNA, 358 bp, Homo sapiens
cgccagtgtcctcgtgggttgtgctcacccctgtcccgccagtgtcctcgtgggtcggccgcccgccccgcttccaccgcaggtgctcacccctgtcccgctagtgtccttatgggttgtgctcacccagtctcgccaatgtcctcatgggtttcacagaccgaggagtcccagttggctcagttgttgggttgcaccgagatcccatcggggaaacccactgcctcacgagtgtggcctcagcccaggctccctatgtgctgcaggagctcagctcagctgcctggtgctggggctgtcagagggcggggctgctgctgaggcaggtgcaaaagtgtaagggtgtgtcctggaacta

SEQ ID NO: 36301 - DNA, 349 bp, Homo sapiens
tagattcccagctggcactcgtgggcagacagtggtgctgcttcctgacggggggatgacttggggaggagcagagtggaaaaaagatggggcccacctggatttaggtgccaaagggaagagaagcatgagagtgctggctcagaggccaagaagtgtccagaagaaggacgcacaggaaggtcatgtgagagaaaggccgtataacacttaccctaagtgaccactagacgctcagctggtcagggggctgctgaaggcagagggcagtggtcagtagtgaagtgagggtgcgaattgagtgtgtggacaacgggcagaaggagagagacacagtgtggccagaggg

SEQ ID NO: 36302 - DNA, 340 bp, Homo sapiens
  misc_feature (1)...(340): n = a,t,c or g
gtctttttagtccagtaatcacgtgcctatattgagtccataagtgccaacaagctctagttttctcctaccattgccaccctgtttgctcagattgaagattgataatatgtctaatactagcaaacttgtttctcctgggttctggtgggactatagcttcttacacccaagcagggagtctttatgctcttgctctttcatatatagggtgaatctaaaggaaacatactattcccaccagctgtcttttttctttttttttttttgnaaanaaaccntcttttngnccccnngntngaaggcnaggggccnaatnnannttantngaagccccccc

SEQ ID NO: 36303 - DNA, 341 bp, Homo sapiens
  misc_feature (1)...(341): n = a,t,c or g
tggttataaaagggcaacaaggatctgtattttgctggaaatgttctgcatcttgatggcaggagtagatacaggaacctatgcatgataaaattgtatataaatataggcacaggcatatgcagttgaacaggagtaaaaccagnnnnnnnnnnnnnnnnnnnnnnnnnnnnnnnnnnnnnnnnnnnnnnnnnnnnnnnnnnnnnnnnnnnnnnnnnnnnnnnnnnnnnnnnnnnnnnnnnnnnnnnnnnagatgtctttgtatgatttcttacaactgcatgtatatctataattattccctcaataaaaatttcaattaaaaaaaggatgaccaactt

SEQ ID NO: 36304 - DNA, 339 bp, Homo sapiens
  misc_feature (1)...(339): n = a,t,c or g
nnnnnnnnnnnnnnnnnnnnnnnnnnnnnnnnnnnnnnnnnnnnnnnnnnnnnnnnnnnnnnnnnnnnnnnnnnnnnnnnnnnnnnnnnnnnnnnnnnnnnnnnnnnnnnnnnnnnnnnnnnnnnnnnnnnnnnnnnnnnnnnnttnnnnnnnnnnnnnnnnnnnnnnnnnnnnnnnnnnnnnnnnnnnnnnnnnnnnnnnnnnnnnnnnnnnnnnnnnnnnnnnnnnnnnnnnnnnnnnnnnnnnnnnnnnnnnnnnnnnntacatcagaatgttttattgtacaaccaatttcattggtacatacaaaaatgtaatcaaaacaatggactttttttg

SEQ ID NO: 36305 - DNA, 225 bp, Homo sapiens
  misc_feature (1)...(225): n = a,t,c or g
annnnnnnnnnnnnnnnnnnnnnnnnnnnnnnnnnnnnnnnnnnnnnnnncacacctggcctacatgttgtagttttgttgcagtaagttcagttgacttttgttaaatgtaccccagtaagcacatgccctgtggtaagtcctgttgtgtaataaaaaacatggtatgtatcaatgtgcttttcctatagttgtcctctgtcttcccaggtttttttttttttt

SEQ ID NO: 36306 - DNA, 327 bp, Homo sapiens
gggaaaaccctggtatcaatgtgctctgatctgtcattgctgtggggtacggtatgacttgagaccaaaactcctattttggagaagaaaaaactgagactcagagaaatggaaagaacttgcctctagtgtgtcaaccaggagaaactgaacttctacccaggcagttattttctggtcaagtccacgtctactgcccattgtcatgcttgtggtttgcttatttctgttatttaaaaatcataaataagttctcactgcagtaacacaaatacaaaggtgtttagcaaaatattttcctcctttacaataagtccaatagtagtt

SEQ ID NO: 36307 - DNA, 324 bp, Homo sapiens
atttcccatcaggacctggaggagctgggggtcacacggatcggacaccaggagcttgtgttggaggctgtggaccttctctgtgcactgaattatggcctcgaaactgataacatgaagaacttggttctgaaactgagagcatcttcccacaatttacagaattacataagtagccgacggaaaagtcccgcttacgatggcaacacctcccgcaaggcccccaatgagttcctgacctcggtggtggagctcatcggcgccgccaaggccctgctggcgtggctggaccgggctccgtttacagggatcactgatttctca

SEQ ID NO: 36308 - DNA, 325 bp, Homo sapiens
  misc_feature (1)...(325): n = a,t,c or g
nnnnnnnnnnnnnnnnnnnnnnnnnnnnnnnnnnnnnnnnnnnnnnnnnnnnnnnnnnnnnnnnnnnnnnnnnnnnnnnnnnnnnnnnnnnnnnnnnnnnnnnnnnacgatatttgttttcttactgaattttaaaaattctttggatattcaggatatttctcttgtcaattaaatgtttcttttagactaatatgcatgtgtgtgtgtcttgtctttttatattcctaacagtgtctttcatagaacagacgttttaaatttctttcttttatgcatcatggatcatgcttttgatgtcatttttcttcttttttttttaaca

SEQ ID NO: 36309 - DNA, 335 bp, Homo sapiens
agaatccctaattctcttatgttagtagcaggtgatacaaccacaacattattccttttgcttcttgtgaggaatgagattttattttttggaaaaatcatggatattaagacattagttatgtctttatttgaatatgaacattagaatcatgatgatatgggttaaagctaagggctttctctgtttctctaccccacacttccttggtggaacatttctcttttccttcacatggtgcactgttttcaaattatatctatcaatgtgataagttcacctcatctgcattgcctcttcatcctaagtattatatacggttctggcaatgtctt

SEQ ID NO: 36310 - DNA, 324 bp, Homo sapiens
  misc_feature (1)...(324): n = a,t,c or g
ttttaataaacacatacttcaaaatttttaacattttaatctatttaaaatttatatattttttggtgctcagtatgagggaaagaatctagagtgactttctccaaatgatcaggcaacattattaattggaacagacagccttctctccactaatttaaaataatacctttatcatctactaaattcttttaagatgaatnnnnnnnnnnnnnnnnnnnnnnnnnnnnnnnnnnnnnnnnnnnnnnnnnnnnnnnnnnnnnnnnnnnnnnnnnnnnnnnnnnnnnnnnnnnnnnnnnnnnnnnnnnnnncgcacacatcacg

SEQ ID NO: 36311 - DNA, 335 bp, Homo sapiens
attagttccgaaacatctggtgacttccggaaagctctgttgactttggcagatggcagaagagatgaaagtctgaaagtggatgagcatctggccaaacaagatgcccagattctctataaagctggtgagaacagatggggcacggatgaagacaaattcactgagatcctgtgtttaaggagctttcctcaattaaaactaacatttgatgaatacagaaatatcagccaaaaggacattgtggacagcataaaaggagaattatctgggcattttgaagacttactgttggccatagttaattgtgtgaggaacacgccggcctttttagc

SEQ ID NO: 36312 - DNA, 334 bp, Homo sapiens
gggacctacagatgctacagctcactcagctccaacccctacctgctgtctctccccagtgaccccctggagctcgtggtctcagcatccctaggccaacacccccaggattacacagtggagaatctcatccgcatgggtgtggctggcttggtcctggtggtcctcgggattctgctatttgaggctcagcacagccagagaagcctacaagatgcagccgggaggtgaacagcagagaggacaatgcatccttcagcgtggtggagcctcagggacagatctgatgatcccaggaggctctggaggacaatctaggacctacattatctgg

SEQ ID NO: 36313 - DNA, 332 bp, Homo sapiens
caggcctgcaccagtgtgaatgcctctgcctggaatgctagccctcaacctccctgggctggcgccttctgggagactttcctccactcctcccaaatgtctcataaatagcattcccaaagcacgatggcttctcacacccccctgtgcagatgccattgtgatcatctctcttcttgtctgtattctctgcagcacaagctctaagggtgggaatatcatcgtatccccagcacccagttcagtcttttggacaatggaaacatataggaaatagttgcgaaaagaattgaatacaggaccttcaacttagaattctttctttcttagga

SEQ ID NO: 36314 - DNA, 319 bp, Homo sapiens
  misc_feature (1)...(319): n = a,t,c or g
gcaagtctttgtggacatctgctttcatttttcttgggtaaatatgtaggagtggaattgctaaatcataagataggtgtaggtttagttttagaaaaaactacagacttttccccaaagagattgtatcattttaccctctgaccatcagtatgtgagagttctggttactccacatcatcaatatttgatgtggtcagttcttttagtgattgtctgatagtgttnnnnnnnnnnnnnnnnnnnnnnnnnnnnnnnnnnnnatgttgaatactttctaattttttattgatcatttgtatattttcctttctgaaat

SEQ ID NO: 36315 - DNA, 323 bp, Homo sapiens
  misc_feature (1)...(323): n = a,t,c or g
aaaacttttaaaaaacttcaggaagcagaggctatttggctggtacatctaattggtgaaaactaatttgcatccacaatccaaacagtatttttttgccttccaacctctgcagcccaagagagtacagtaaaaggtggtaggaatgggtgatgaataccaactgatcatatccagtacactcatttccaggttcaattagatggtctttcttaggtgttcgaggagtaacttacttttggtcctttgaagtnaaanntngcttggncacannngctnatgcctgnnntnntnnnagntnnnnnnnatnnnnnnnnnatttc

SEQ ID NO: 36316 - DNA, 322 bp, Homo sapiens
ttttatttttattacaacttcattatttacaaaaccccccatccagatatattcacgttaacaattctgagataactgctgcatcacagttgcacaaaggctgatgagttgcaaatgttcatcagcaccatctgctaggcatttgtcaacttcggcaagtttttctgtgataatagacttctgtttatcagataagttattttctacaaccacatcatggagttgattgacgagctgagttgctgcatgaccctcatctattaaatccttgaccacagcttctagtttgtcaaaagagccactctgacaggcagcaaatact

SEQ ID NO: 36317 - DNA, 337 bp, Homo sapiens
ggttcgtcgaatgggcagccgcagcttaggactcagtgcacaaatcaacaagatccccctgttgtttagacagcctgagctggcttttcggtcacttacaatcaaaacatccaacagatacccatggagagttagtggtggatccagtttcttgacttcctgttcacaaagtaaagcctttaacattaaacaacaaagaaagccatagtttgacaagtttagaggccagatttgataggaataaacagatttgggagaaaagtaccaaattatacattatcactgaacttaaaagtatggcttaggccaggcacggtggctttacattcttttctta

SEQ ID NO: 36318 - DNA, 324 bp, Homo sapiens
  misc_feature (1)...(324): n = a,t,c or g
caggactctaagttccctgagggtgagaccaagaatactttgttcaaccctctatgcccagcccctgacagaaggcatatgttcaataagcatctcctaaaagaatgaagtgaatgaaaaacaatgtcaggtatatgcctctgatagctgcctacatttacggaaggatctgaggacatcaagcagctagaagtctaagttaacaatgtcttgcttaaaaacgatgttnnnnnnnnnnnnnnnnnnnnnnnnnnnnnnnnnnnnnnnnnnnnnnnnnnnnnnnnnnnnnnnnnnnnnnnnnnnnnnnnnnnnnnnnnnnnnnnn

SEQ ID NO: 36319 - DNA, 322 bp, Homo sapiens
gcatcctccaggatccttattgccctcattctgtaaataccaattaatcctttctctttcctggctatctagagattatcacattttccaaaccaggacactaggcaatgaggtttcatggcccttcccccattcactgctcacctaactcccaggggctccccttgagcctttattttttctcccagtactactccaaaaggagtactgatgccttgagctgaataaaattcagactgcattccaatggcaaccaactctggacctgtcttctttctaggcctttgcagtctgctgccattagaggcatattagatggttt

SEQ ID NO: 36320 - DNA, 316 bp, Homo sapiens
ggcatatcaaaatgcttgcttaaatgtggaatatttatgatatagctacatatgtataaggagagattaaccagttatcatatacgactgttcttcagtacattattattttttaaggctcttccatttatttactatctagaatatatttctttcaaactgattgtttatagaacaaattggtattatgtataccccatgttttactttattaattgttttgatatccagactaatggcattttaaatgagatgtgaaatttggactttactactgcagacctttggctatctagtcaaagaaggaatatgggct

SEQ ID NO: 36321 - DNA, 260 bp, Homo sapiens
ctcatactcacctcaccccactgtggctgatttggaattttgtgcccccatgtaagcaccccttcatttggcattccccacttgagaattacccttttgccccgaacatgtttttcttctccctcagtctggcccttccttttcgcaggattcttcctccctccctctttccctcccttcctctttccatctaccctccgattgttcctgaaccgatgagaaataaagtttctgttgataatcatcaaaaaaaaaaaaaa

SEQ ID NO: 36322 - DNA, 322 bp, Homo sapiens
cacagactcagagagaacccaccatggtgctgtctcctgccgacaagaccaacgtcaaggccgcctggggtaaggtcggcgcgcacgctggcgagtatggtgcggaggccctggagaggatgttcctgtccttccccaccaccaagacctacttcccgcacttcgacctgagccacggctctgcccaggttaagggccacggcaagaaggtggccgacgcgctgaccaacgccgtggcgcacgtggacgacatgcccaacgcgctgtccgccctgagcgacctgcacgcgcacaagcttcgggtggacccggtcaacttcaa

SEQ ID NO: 36323 - DNA, 311 bp, Homo sapiens
tttgttctttgcctcactgacaaccttgtcctaccaggtgtgcacaggtctccatttttagagctgccataatccctcctaccacttgtgactctggcctcaacttccccagctacactggctgctggcttggtcaaacctcctttcccccatagcttagcagaaacaagttagaatctttcaaagagagctttagtgtgaaattaaggttgggggggacatgaaatatatggagtgataaattatagtacacagtattccaagaataaagtactcttgtggttccttcctgattcaccctggggtacaca

SEQ ID NO: 36324 - DNA, 329 bp, Homo sapiens
gaaaaagcaaggacgtatgacacctccagaaaaaaccagtaattttccagtaatagattccaatgaaaaacaaatttataaaatgctgaaaaaagaattcaaaataataatatgaatgaagctcagtgagatacaagagaacacattaacaattacttaattgtattgagattaacaatacagtgaaattttaaaaattcaggatatgaataagaaattcaccagagatatagatagcttaaaaaagaaaccaaagagaaatccaggaactaaagaatttaaggaatgaaatttaaaagaatacacttgagagcttcaacagtagacta

SEQ ID NO: 36325 - DNA, 329 bp, Homo sapiens
ggaatatgtctcaactatgttaggtttcatggtgtccttcattaaccaaatgtgtgaatcaccctgaatttaagcagttactagtcaaataggcacttaagggaggtttgatttgaaatcacttttttcttccctttcatcttaaatactaaagagaacatcccaagtcagagattttagttatcttaaaacactttgaactttactggcttagaatgattggttaaacacaatgaaacaaaaaatgctgcagaataaagtgttcacacatttcactgtcaatgactaacatttgcttagaattttctgttaggtcacaatattgcaag

SEQ ID NO: 36326 - DNA, 87 bp, Homo sapiens
cagatttctaagaaactatttaaactggacattatataaaagctgttttgttgttgttagtggccctagatttaaaaaaaaaaaaaa

SEQ ID NO: 36327 - DNA, 327 bp, Homo sapiens
ctaaaagagaatttcagatatgtaatgagttaataatttttagtaactattatttaaaaattggctgagcatgtgggcggtggtggtgatgataagttcctcatttcacatgcaaccctacatgactcaacttcccttcactgcttagcaagcagcctggcatgatgctttctctgtggcccactcaccttctgtgtatttgctgctgctttcctttttttaaaatctaattccttcactttgacataatcatcttctgaatttgtctcttttttgtcacctttctttccttccatttcctcaggctccttcttctccccctgctaa

SEQ ID NO: 36328 - DNA, 335 bp, Homo sapiens
  misc_feature (1)...(335): n = a,t,c or g
agacaagtcatttctctatccatttccctctcaattaaacaccggcaaaacccaaagaataataagccctgaattacaagccacgtaacaaacactcagatttttgtaatgaatacatggatgaatgctgatatgtgccttgcaagtcttcggactactgtggagatcaacctagtattacaggccaggcgcaatagggcacacctgaaatntcagtnctncgngnggncgacgtgtccggatcatctcatgttangaggnanaganctncctgntgngggntttanaannccttcnttncttggtnanangagattagaatcttgntngaggcc

SEQ ID NO: 36329 - DNA, 329 bp, Homo sapiens
  misc_feature (1)...(329): n = a,t,c or g
nnnnnnnnnnnnnnnnnnnnnnnnnnnnnnnnnnnnnnnnaccatagctgggattacaggtgcctnnnnnnnnnnnnnnnnnnnnnnnnnnnnnnnnnnnnnnnnnnnnnnnnnnnnnnnnnnnnnnnnnnnnnnnnnnnnnnnnnnnnnnnnnnnnnnnnnnnnnnnnnnnnnnnnnnnnnnnnnnnnnnnnnnnnnnnnnnnnnnnnnnnnnnagagcattttacttgtattgtttcatttaatctttaatggcaaatttatacgtgtttctgttttacagatggccacactgagggtcagagagataagtaacttgcccaaggtcg

SEQ ID NO: 36330 - DNA, 310 bp, Homo sapiens
  misc_feature (1)...(310): n = a,t,c or g
ggtggtccttatactatcagcacctgaaaacttgtttgagatgtaggttattattagactctcccctgcaactctgaaaagaaccagggggtgggaagttcacttagccttttgcatggtaaatgtagtttatcttaaaattaataatgtggcagggtgcagccgctctcacnnnnnnnnnnnnnnnnnnnnnnnnnnnnnnnnnntggaattgatttcttaatttcatttacagattcttcgttggaagtgtataaaaacaaaaatttttttatactgatcttgtatcctgtaaccatctgaacatatt

SEQ ID NO: 36331 - DNA, 311 bp, Homo sapiens
  misc_feature (1)...(311): n = a,t,c or g
ggtatatgaggtagtacacaacaatcccataattttttgtagaacacatgtgacaacaatgtaagattattcaagtatagctgtatagaatttgaatttacttttagttttgagcaactatccttttaaatccataattatccaaaaaaagttttcttacaggagtctctctcttaaaaatgctacnnnnnnnnnnnnnnnnnnnnnnnnnnnnnnnnnnnnnnnnnnnnnnnnnnnnnnnnnnnnnnnnnnnnnnnnnnnnnnnnnnnnnnnnnnnnnnnnnnnnnnnnnnnnnnnnnnnnnnnnnnnnn

SEQ ID NO: 36332 - DNA, 320 bp, Homo sapiens
gcaaaaagctgttcaaaaatgagcagcttgcaaatctatcataaatgagacattgaataaaatattcttacagtgaggtctaagaagtagttcagtctgagaatttgcttcagatactttttgaaaaaaaatattcaaggcataaaaaaagcaaaactcaaaatatctaaaacagatacatactgatatttttatcctagtcatttcccagagtttttatgtgtctctgtgctctgctgattaaaataaacaacaaaagcagtaggcatcttctaactaaaagttaatttactagtcttcaactaaaaagtcacagtgga

SEQ ID NO: 36333 - DNA, 312 bp, Homo sapiens
  misc_feature (1)...(312): n = a,t,c or g
nnnnnnnnnnnnnnnnnnnnnnnnnnnnnnnnnnnnnnnnnnnnnnnnnnnnnnnnnnnnngctagttagttaacctttctgtgcttcagtttcatcatctgtgaaatgaggataaaaatggtgtgtatctctttgggttatgatgaggatcaaataaattagtatttaaattaaaacatatatctaacactgtaaatgcttgttaaataaataacagtttctcaatatcttcaaaggaaaaaataaatgggtctttgtcagccctttccagtgagctgagtgtgtcctgctggccccctatcgacttcact

SEQ ID NO: 36334 - DNA, 314 bp, Homo sapiens
ctacaaagtgcccttcagagcattcctaatccatcatccgagtgcatgcttaaaaatgtgtcagttcgtcttgctcagcagatatctgatgaggcttcaagatatatgcctgatatttgtgtaattagagctatacaaaaaattatctgggcatcaggatgtgggtcgttacagctagtatttagcccaaatgaagaaatcactaaaatttatgagaagaccaatgcaggcaatgagccagacttggaagacgaacaggtttgctgtgaagcattggaagtgatgaccttatgttttgccttgattccaacagc

SEQ ID NO: 36335 - DNA, 337 bp, Homo sapiens
gtatttcttctttaagcttattattctctgcagcagcctcttggatgagttggtctttttccaagattatagagagatgtcgctcttccagctgttgatagtcacccactatgcggtctcgatcattttggagagaagacatggatttaacaaaggaatccaactgtgccttttgctgaatgttttcctttttgatggttttcagtgtttccataagctgattggttttatcaacagcctttttgttctcctcttctaaaacaatattctcctcttcctcctgggacagcaggttttccagctctttaatttctttatcatgttgctgacgcagttc

SEQ ID NO: 36336 - DNA, 270 bp, Homo sapiens
  misc_feature (1)...(270): n = a,t,c or g
nnnnnnnnnnnnnnnnnnnnnnnnnnnnnnnnnnnnnnnnnnnnnnnnnnnnnnnnnnnnnnnnnnnnnnnnnnnnnnnnnnnnnnnnnnnnnnnnnnnnnnntgagnnnnnnnnnnnnnnnnnnnnnnnnnnnnnnnnnnnnnnnnnnnnnnnnnnnnnnnnnnnnnnnnnnnntcttaactctaagaatttaaataaattnaataagaagagccnggacaccaatgtggccggagagaantangtgaggggngaaaatantatatgat

SEQ ID NO: 36337 - DNA, 368 bp, Homo sapiens
ctcgtgtcagccaggtcccaaacatgagcaactgacatgtagacacactgacttcaaggccagacaaatccacctttgcttcttagttttcccccaccttgaaagtgccccttccccccaatttaagttttttcccccatccttctaggcttaattttatttttgaatagaatatttgcatgatttcaaaaatcaaaactataacaaaaggcgttactcagagatgtgtgtagttcagttccctctccccacacccagctccaagcaaccatgatctgatttctgtccctacagtttttgccttttccaaagtgttatttgaacaaaagtatatgatatgtcttttttgtgtctgctgctttcactta

SEQ ID NO: 36338 - DNA, 380 bp, Homo sapiens
  misc_feature (1)...(380): n = a,t,c or g
gtgattagttagcttgagcggggagtgagacatgacttcgtgtcacatttcattgcctctctgggcctgatgaaagggttcacattcctcagatagatgtttcttttctttctcacaagggctagatcatgtaaggtcttgcaggcttttggaaaggattttggtttttcctctgaatagaatgacttggattagggtaatgacaatagatgtaatgtgattctggataattttgaaagaatcaactgactgatgaactggaagttaagaacgaagnnnnnnnnnnnnnnnnnnnnnnnnnnnnnnnnnnnnnnnnnnnnnnnnnnnnnnnnnnnnnnnnnnnnnnnnnnnnnnnnnnnnnnnnnnnnnnnnnnnnnnnn

SEQ ID NO: 36339 - DNA, 380 bp, Homo sapiens
tgagcttgagtcacaaagagtttacctccccaataatgttaattatgtcactagatttcatcctcttgcatccctactcactgaaattcttcaagatttcttaatgtgaggcaggataatttaattttatagggaaatgcaattgtgaacatggaaaagcattatttggaggtatacccaagatacttctacaagaacaataagctaaaatgctaaatcatttccatttactcactaactaaacaacctttcataccaggagctcagagtctggaggtgaaagggaaggtgaagacagacaataaacacatatgcaaataagcaaagaagattaagtgtaagtcatgatcagtgctgagaagaaaataaattcagagctg

SEQ ID NO: 36340 - DNA, 378 bp, Homo sapiens
  misc_feature (1)...(378): n = a,t,c or g
gtggcaggagatgactttcagcagacctttccccttagtgaggacagtaagtcccaaggacatgtggaggcaaggatgaggggcagatgaacaagcagctgtctggcctaggtcttacagaattatttttcctggaattaatatgcttagaatgtatactttagcaagtgtctatttctggctccagcatttttctttgggtgtcaaacctggttttatctctgagatttttcgacactaggagaatttgacattcacattctaagagtgttctgtaatgtttccatttacataccagttttcttcattttttggctggaggggtatgtgaatatatacnagaatctgagcagattcatttttagctgcagcagaggc

SEQ ID NO: 36341 - DNA, 365 bp, Homo sapiens
  misc_feature (1)...(365): n = a,t,c or g
ctttcttcttgacattgcatccattatctcttgttgcccctttccctattttctgcttctgttcacattttctttacaacggtttctaataaaaattgcttattgctacttagtcaccattatttttctttgcacaataaaaatattctgagggcaaattttgaaacttgacatttgtcaataatcctcctgctaggaaaagaccaaaattgttttatcatctttttttctaaaaaaaaaatcccttctgtatttaaattatcttatgtagcaggattcaggtcatttttctacaaatgaaaactgcaaaacaactgatattgcctatctataatccacagcacaaagtccanattttgttcttt

SEQ ID NO: 36342 - DNA, 378 bp, Homo sapiens
  misc_feature (1)...(378): n = a,t,c or g
gccctgggtgcttcatcctagccccaactgaaaggactaaattaggaaatgaactttctcttttgattttacttttctatactgttggagctttagaacaagcaggtgttattttcataataacatgtagattgtaattattggctttaaaaatgctgcttagaaaaacccatgaagtactttttaaaaggtaattnnnnnnnnnnnnnnnnnnnnnnnnnnnnnnnnnnnnnnnnnnnnnnnnnnnnnnnnnnnnnnnnnnnnnnnnnnnnnnnnnnnnnnnnnnnnnnnnnnnnnnnnnnnnnnnnnnnnnnnnnnnnnnnnnnnnnnnnnnnnnnnnnnnnnnnnnnnnnnngcctgtagtcccagctacttggg

SEQ ID NO: 36343 - DNA, 378 bp, Homo sapiens
ctgaaatatctttattcaaaaggaagtatatgcctgtatctaaacctgtgtgtatcatctgatttaagggactcatacatataagcctatagtgattgattttaacatttttttatcagttgttcatgtcattgagaaatgtcaacagaaactacattttgatatccatcagccagaattaatagttgaagtattagccttgttttggtacaggtaatgggtacattatttaaagctgagagaaaagccttaattttgtgcttctaatatatcaagaataaaaatgagaagcccataacaatataaatactattcttacagctaaggttcaaactgaatacttgtattttagggcttacaaaaattctaaattaaaat

SEQ ID NO: 36344 - DNA, 366 bp, Homo sapiens
tgttttttttaaaaaagctgaagacgtaaaatattctggttttcagtctgacaaccagctttgagtgtggtgaacatcactttaaaggtgttaaaaaaaggactgcttttaaaaatcataaatcttgatttcttttaggccaatttttctgataacctcaacattcttagttaggagtgcctagccaaatgctgggtgagatgtatgtaggaaaagcaaagaaactgaagcctgaaggagaatcttcagtttatttggcttgtgtgtttggcatcctcccaattgttcttgtgtctttgtaagtttctgctgagttttcagtaacaagtgaggcctgacatttccctagcctatctataaggacag

SEQ ID NO: 36345 - DNA, 373 bp, Homo sapiens
  misc_feature (1)...(373): n = a,t,c or g
tgagaaaatacctattctaatctttttgctacctaagaatcctttgaccatcccttttttaatgagcccaaaaagttttgaaagactttgcttaccaatttatactcattaaataataattattctttttcctccactttaaaaaataaggcacagacaagctgccaatcacaggcttggattatcatttgataaccagtcttatcacactgaattaatagaatgctagcccaaagttatgttttagttttactctgcagccttataatgggctccttttactaggtttgcataactctcctggncaaaggattttagattaagaactaatgatgtaatatgtcattatctgttatactcccattgtccagtt

SEQ ID NO: 36346 - DNA, 380 bp, Homo sapiens
  misc_feature (1)...(380): n = a,t,c or g
cgcggccgcgtcgactccaggcttgaggtcagaggaaggcatttcagatctgagcaatatgcgtgagccccaggtgagtgtgagagccaagtcaggtctctgctgagatctaggtggttacagaggaggggaactctgagtggatgggggaggcatagccatcactaccaatgatgggggtaggggggcatcatccagggccacggggaaaggggatgggcattctggaactcatcccttcctctgttcctttcatcacaacaaacgttatggagattatgcgataccaggcactgtgctagctgatagggagggggtcanagtacccagcgaggctagacattgtgtgggattcanagaaagcatataatagggctcct

SEQ ID NO: 36347 - DNA, 377 bp, Homo sapiens
  misc_feature (1)...(377): n = a,t,c or g
gtcaaaacgtccatctttgatttgagatatgtaataaaccttgactcattaggaactctgtatggtaatattagggatgggaaaggttctgcaaaccggtcatatttttaaccttttttttttngccntctntttnnttntcccntcccntnantaatggtcctnatttntttannttnntccttaaaantccaccncanantngaanggnaaanggccccnnangggnaggggtnnatnanggtnnggggnangggnannaagnncngggncnatcntganagttaanggncngtcnggangtnncnttacccttaggatttgggggggggggaaancttttngggncaaangttnnnnctaaaggggggggcttg

SEQ ID NO: 36348 - DNA, 379 bp, Homo sapiens
  misc_feature (1)...(379): n = a,t,c or g
attaaattgtcttgtataccctgaagtatgtacatctattatatataaatgaaacttaaaaaaaagatgtcaggcaaatttgacctttgaaaggctacaagctttgtcatatcccacatttttttcactgcactccacaatcatcagaataaattcacacttacccttatgagcaatattccctcactgagaaagcatgggcaagatgcagaaatttggcataaaacatgtctgcatggcaggagcagcccatgaaaatcatcccaagttgatgaaagtggcccaggagtgaacactgtggagcttaagtgagcctgagagctcagccacaatcagtgttgcanataagtcccagtgcagatcactgtgagccattgat

SEQ ID NO: 36349 - DNA, 378 bp, Homo sapiens
  misc_feature (1)...(378): n = a,t,c or g
tcttnnnnnnnnnnnnnnnnnnnnnnnnnnnnnnnnnnnnnnnnnnnnnnnnnnnnnnnnnnnnnnnnnnnnnnnnnnnnnnnnnnnnnnnnnnnnnnnnnnnnnnnnnnnnnnnnnnnnnnnnnnnnnnnattcagcctggttttcttttttttctaactaccggtaatataaaattcttcactaagaagactttatcttattcaaatgttttgagatttcattgacatttaactgtctgaattatgtggaatattgaaattttccatgaactcaaattgattaccatagataatcttttagtaaaagcttttctgaggcanagtaagatttataacattttattatcatatggaanatgtgtattagccctgtttt

SEQ ID NO: 36350 - DNA, 370 bp, Homo sapiens
  misc_feature (1)...(370): n = a,t,c or g
tcgccacatctcagcaacaacctgggcaaccaacaccagacaacgtaaaggatattccactagtacctctacttgaaagtcctcaaaagacacaaattcatgcagtcttgaaacagcacccagcctgcttaaacgtacatgaagacctaaagttaaaaaaacgagagagaaaatgagaaaacaaacccaatttgttaactagttaactcatcaagtttagaaacttgtgcgannnnnnnnnnnnnnnnnnnnnnnnnnnnnnnnnnnnnnnnnnnnnnnnnnnnnnnnnnnnnnnnnnnnnnnnnnnnnnnnnnnnnnnnnnnnnnnnnnnnnncccatggngaaagcccgcttacntnntatnanaatt

SEQ ID NO: 36351 - DNA, 376 bp, Homo sapiens
  misc_feature (1)...(376): n = a,t,c or g
gggcaacagagtgagaattcaactccagaaaaaaaagaaaagaaaagaaatgcatcaatttcctagaatggtacaaggaacatgaaggtccaattctctcagaaggaaactcttggctcttcagcagtacaatgtaaaatctttggtgaaaaggaaaacctgttgttctgtattcattccgcaataaaccgtgaaaagctcttcatctcaaggagagagaaaagaaacaaaagaaacacagacttctcaggccctgagtgcacgcaagatcagaaacaggggaggtgccatcatttaaaggaggaggtangggtgggangnnnaantnntnnngtntcncttnttnnnncnnnnnnnnntcnntnnttnnnnatcc

SEQ ID NO: 36352 - DNA, 399 bp, Homo sapiens
  misc_feature (1)...(399): n = a,t,c or g
taccactggagccatcaatcagccttggagctgctgaggcccagccagagtccagggcatgtggtgcgagggaaggagcacggcctttggattcaggcccaccggagtgtaaacaccacctctcccactagccgtgtgacctctgatggacgatttagccactccaggacaggttcctcatacatgaaatgaggataactgaacctccctctacgggtgggtaggattaagtaaatgtggaacatttactattataaaagctcagggaatgtaaatttcccctctgcccctagcccccattctggctgcctctgtgccatcttctgttctgtgggaagtcctctcttcatctgcattcgcaaccaccttcgngcttnttgagctcatctctggcagcca

SEQ ID NO: 36353 - DNA, 391 bp, Homo sapiens
  misc_feature (1)...(391): n = a,t,c or g
nnnnnnnnnnnnnnnnnnnnnnnnnnnnnnnnnnnnnnnnnnnnnnnnnnnnnnnnnnnnnnnnnnnnnnnnnnnnnnnnnnnnnnnnnnnnnnnnnnnnnnnnnnnnnnnnnnnnnnnnnnnnnnnnnnnnnnnnnnnnnnnnnnnnnnnnnnnnnnnnnnnnnnnnnnnnnnnnnnnnnnnnnnnnnnnnnnnnnnnnnnnnnnnnnnnnnnnnnnnnnnnnnnnnnnnnnnnnnnnnnnnnnnnnnnnnnnnnnnnnnnnnnnnnnnnnnnnnnnnnnnnnnccagaagttgagttcaagtcctggatatcctttttaacctcctgctcattgatctgctaatattgacagtggggtggtaaagctcccattattaagggggggggag

SEQ ID NO: 36354 - DNA, 388 bp, Homo sapiens
  misc_feature (1)...(388): n = a,t,c or g
gaaaggccacgtggttgacttattcctagaccctccactcaaaatactcagctaggaagttagaatttgaagagaaatccaggtccacagaaactgccttctcattggccactgttgtctcttccctttcaggtgctcctcgcctgcttgcagatatcagaccccagctcatctcagacctcagcccctgaggccaagcaaacatacatcatcatggaggctgcagacgtagctcaccgtgcccacatgtgaacttcggccaacacaccacaacagggactctgcccactgaatcccctgtgattcctcaatcctgtcctggcataccccactgggttttgngaggctatttangaagataagtttcctcactgaagaaaagagagac

SEQ ID NO: 36355 - DNA, 379 bp, Homo sapiens
ccgggtcatttgggagaaaagtaaaacccgatggcccctggcaagaaaaagaaaaggaaacactgccaagtctagtggtatttaaggtcaatttccctcaggcaaaatttaccaaacaataaaagtttataaataaataccaaagtagaaatataagtgtcgtatgatttatagactgcctcagaacctccaaatgctttctatgagaatacacctccacaggtagctgtatccctcagagcagtcatcctcaaactagagtggagattattcccaggagacgtgtcaatgcaacaggggatataagccctagaataaacaaggtgcctctttctggaatgtcaatttgctcaatggaaagaaatataagctttcattt

SEQ ID NO: 36356 - DNA, 388 bp, Homo sapiens
tttacatcttttaatggttaagaacaaattaaaagaagaatattttgtgacatgtgaaagttgtatgaacttcaaatctgtgttcaagttttattgaaacatcatgctcattcgtttacatactgtcaatggatggtcctgcactacaatggcagagttgagtagttgccacagagaccacatggactgcaaagcataaaatctttactatcaggccctttacagaaagagtctgccaacttctggtctagatcaaaagtttataatcaataatgactgcccttgtctcaaaaagactagattctagtctcttgattgagtgaaaacaatgggagccatcagcaaaacattccttaaaatattacacaaaaagataagaaaaactttt

SEQ ID NO: 36357 - DNA, 382 bp, Homo sapiens
  misc_feature (1)...(382): n = a,t,c or g
tagatatttggcctacttcagattagacctcatttcccaaaatctcaactattgtaatttcatggaattaaatgactagagataaaaagtcagataaaatcctgtagtcttattcaggggtcagaaaacttttcctataaaagactagatagtattttaggccttgctggccatatagtgtttatcatagccattcatctgagacagttttgcacaagagcaaccataggcaatatgtaaacatgagtatgctgtgttctgcaataacactttatttatgggcacagaaattttattttcatataannntcattttgnncaaacttttaactttttttcttccaactatttangaatatnnnagccnttcttanctctcagg

SEQ ID NO: 36358 - DNA, 112 bp, Homo sapiens
cttcacgctaggcaggtggaagtctttagttgtactgggccggacttgagccccgacccttcgccagcatctccccgctgccctcaacacacacacactttttttttttttt

SEQ ID NO: 36359 - DNA, 366 bp, Homo sapiens
tcgggcatataaacaagggctgctggcacgttcaaagcgcaggggatagttcacagagcaaaatgtagtcctaagtaaatgggtttcaggcaatttcagtgttaagataacatcattaagagtagaacagattgtgctcaaaccctgctgtttataattaacacgttgcttccaaatactccagggtccctggtaaatagtcttctgctcacatccacccagaccaatcagaatattttcatcagattccatgctgggccagcacctgtttggacaaatccaatagagccaaagaactcctctccttggccagctaagtagctggatgaacacagcttggcttaatcattgtcacagtgtccatat

SEQ ID NO: 36360 - DNA, 383 bp, Homo sapiens
  misc_feature (1)...(383): n = a,t,c or g
atgacttctcaggagaatgctagcatactttttaaaagtataaactcccaatgctactttaaaattattccaaaaacatagataataaggaaaacttctaagttatgtctttaaagtgagtatataacactgatccccaaacctaaaaacaaggcagtcaaaaagaaactgcacaacacatatcaattgtcaacactgttgcaaacaattccgaataatagactctaacaggaaatgcttagaaatcatatatgatgatcatcgtggttttaaaatatatcccacaaattcttcacttnttccttccaaanggnatgnanaatctaattntttcctgcccaaagtgttgactgnacttaagtnatcgctcctaangaatagaa

SEQ ID NO: 36361 - DNA, 377 bp, Homo sapiens
ctgaattggataaaatggagccttaaagttatctttttctttctcagctttaattcttgcattactggcaatcacatgagttattccacttggtgaactttttggtaaaataacatttgcctttccagcctccaaaactctaaataaaaatgtaaatggtataaaagtattagaaaatttgagtttctttagtcaaattatctaaattaattatttcttaggagtacgaatggacttttctaatagggactaatttctttgggcaattgaggatcacagagaacacggctgcaatttcttaaattataaattgttcagagtagatatttaagaaatcatagtaagtttttctacctatccatttcttgataaaggaa

SEQ ID NO: 36362 - DNA, 376 bp, Homo sapiens
ctttggctatggctatggcttcatggcccattcttcaccttataaagagagtcagtgaacttggccatatcgtacttagtacacagtgagtcgaggaacttgctttatatctagtactactatctacttaagtgagggaggaacaagaggaaatctcaccttggtttgatttgatattgtttagaatctataagggactgtccccacagagaaaggccttagtactgaaaatgaatagatgtgacttctgatcttggcccagctgcctgtcggggtcttgaacacagtgcttaaccttcagtgctgcagtgttctcatcactcttaggtagagcagaactgaatctctgagactcaaagaggtctgagggggtggg

SEQ ID NO: 36363 - DNA, 385 bp, Homo sapiens
  misc_feature (1)...(385): n = a,t,c or g
gtggaagctgaggtgggagnnnnnnnnnnnnnnnnnnnnnnnnnnnnnnnnnnnnnnnnnnnnnnnnnnnnnnnnnnnnnnnnnnnnnnnnnnnnnnnnnnnnnnnnnnnnnnnnnnnnnnnnnnnnnnnngtcatcaaatagatttgttttcttgtggactggctacataaaagccattcataactccgtttctcccttgccttctacttctacaaaggcagaaaaattaaaatggcttctcatactgtactttcttgctgctgaggaggccataggactcacttctggccaatgagatataactggaaatccctgggaggaacttccaggaaagttttaaaaaggacatggctgacatgtgcttttggccagctttagaccac

SEQ ID NO: 36364 - DNA, 385 bp, Homo sapiens
gttataatcataaagtggatttgctttgtttcatgtttcttcttaaaataatataaagcaaataaatgaaacaaaaatggaggtgtcctctgctaggtctacagttatataaggaaaaccggaaagataacataaaaatctccctaaatcaggtctatacagaaacagatttgctggatttagagagtagataatgcatgtaatctcaaatataaaatatagcaggtgactttttatggggagttttttcttaatgttgatagtaacatatctgtacttgacattaattaatccatatcgtaaagatttgaaccagagaatcaggcccacttggtcatagaggcagtcaaggaatgggctctccactacaatttgatgtgaattg

SEQ ID NO: 36365 - DNA, 379 bp, Homo sapiens
gaataaaatcctgaaaggcaaagcagcagatataccagattcatcattgtgggagaatccagattctgcgcaagcaaatggaattgattctgttttgtcaagggctgaaattgcatcttgtagttatgaggccaggcaacttggcattaagaacggaatgttttttgggcatgctaaacaactatgtcctaatcttcaagctgttccatacgattttcatgcatataaggaagtcgcacaaacattgtatgaaacattggcaagctacactcataacattgaagctgtcagttgtgatgaagcgctggtagacattaccgaaatccttgcagagaccaaacttactcctgatgaatttgcaaatgctgttcgtatggaa

SEQ ID NO: 36366 - DNA, 378 bp, Homo sapiens
ttaatgatagaagggttaatatggaatatgtaacaattacaatcatatcagcactaacaacagtgcccaaaactacatacactgaaatttaacatgattgaggggatcaataggcaattcaacaataaaagcttttgttcataccctcttcttaatcagtgataagtcaattagatagagcatcattgaggttacaacatacttcagcaatgttgtcaaccaatttgacctgagatagatagatagacagttagacagacagacagacagacagagaaaacttcacccaacaacagaaatacaaattattttcaagcatacctggaacattctccaggatagagtatatgttaggctataaaactgtactcaataaat

SEQ ID NO: 36367 - DNA, 382 bp, Homo sapiens
  misc_feature (1)...(382): n = a,t,c or g
tcaagaatataatctcattgaaggtaggggctttgtcttaccactgtgctcccagcatccagaataacacatgacacataacaggcgctcaacgtgatataaaaaaccgctgtactgttcttggcagggatttctagatctcatttttccctattcaagttttacattttaggtgttattaaatctgtgcttttatggtaagttgctttaaatgctttttagaaacaaacattgtnnnnnnnnnnnnnnnnnnnnnnnnnnnnnnnnnnnnnnnnnnnnnnnnnnnnnnnnnnnnnnnnnnnnnnnnnnnnnnnnnnnnnnnnnnnnnnnnnnnnnnnnnnnnnnnnnnnnnnnnnnnnnnnnnnnnnnnnnnnnnnnnnnn

SEQ ID NO: 36368 - DNA, 377 bp, Homo sapiens
tcaaaccttagtaacacgttgatgagaaatctactttttccactcttgactcactctgagccttcacagggcagtctgcgaagattgcaggcattgtttgttcttgtcttggatttatgcctttaaatttcaccttttattacacagctatagcaggcctttttatgagactaacctggcctctccactaaaggatgtgtgactttctggggacagaagagtacagtccctgacatcacacactgcagagatggataaccaaggagtaatctactcagacctgaatctgcccccaaacccaaagaggcagcaacgaaaacctaaaggcaataaaagctccattttagcaactgaacaggaaataacctatgcggaat

SEQ ID NO: 36369 - DNA, 385 bp, Homo sapiens
  misc_feature (1)...(385): n = a,t,c or g
tcaaannnnnnnnnnnnnnnnnnnnnnnnnnnnnnnnnnnnnnnnnnnnnnnnnnnnnnnnnnnnnnnnnnnnnnnnnnnnnnnnnnnnnnnnnnnnnnnnnnnnnnnnnnnnnnnnnnnnnnnnnnnnnnnnnnnnnnnnnnnnnnnnnnnnnnnnnnnnnnnnnnnnnnnnnnnnnnnnnnnnnnnnnnnnnnnnnnnnnnnnnnnnnnnnnnnnnnnnnnnnnnnnnnnnnnnnnnnnnnnnnnnnnnnnnnnnnnnnnnnnnnnnnnnnnnnnnnnnnnnntacccagcctcaaagcatattatttttctcaattctatagatgcaacttanttgcctttgtcccatgcctgtagtgcagaatgcccaatttttttttttt

SEQ ID NO: 36370 - DNA, 386 bp, Homo sapiens
ggcagcttcacctcagagctgcaggaaggaacggggcagtgaaaatcgaatcgggtgtgatcctaggccaagctcatggcccagcagggccagcaggggcagatggcaagtggagacagcaatctcaacttcaggatggtcgcagagatccagaacgtagagggtcagaacctgcaggagcaggtttgccctgagcccattttcaggttcttcagagaaaacaaggtggagattgcaagtgcaataacaaggccatttcctttccttatgggcctccgagaccgctccttcatctccgagcagatgtatgaacattttcaagaagcttttagaaacctggtcccagtgacaagagtgatgtattgtgtactcagtgaactggagaa

SEQ ID NO: 36371 - DNA, 374 bp, Homo sapiens
  misc_feature (1)...(374): n = a,t,c or g
gttcacacctcactgcactcctatcattaatcttttcctgactgaactacattggcctcctcgttgttcctcacacatgccaggcacactcacttccagcctctgcccttgtctggaatgctctttcctcggatataacatgggtccctcttctgtcaaatagtaccttctcagtgaggccctccctagtcttactatataaaaatttcaatctccctctctaatcattcaaattttgcctttttttgtgggggggggggggngtttnaanccntnatntacncntgtnntaatnnatctnanaaaacnacggaacccnnaaattttngccnntcnnccggcgntnntatngnncnactangngagngancacc

SEQ ID NO: 36372 - DNA, 373 bp, Homo sapiens
  misc_feature (1)...(373): n = a,t,c or g
gtcgacgcggccgcgggtgtggtgatttttcaatagaaaggatgttaccaatatataaataacataaaaggatcacatgagaattaaagtgaagtaacttaacatacaattttcattctaatcttatacaataatttttcttgactattgatagatcacaataaaggtatgctgatgatataagttattttaagactttggggaaaaaggcttccgtctctggcattgaccttattgtggaggaccctccaaaatcttnagntntncaccancaggtatgctgagtcatgtatgatgacataaaccacanggagtnaaggagctnaancancctcagcgactggtcagatcttatatgtgcnngatgaatcct

SEQ ID NO: 36373 - DNA, 379 bp, Homo sapiens
cgatgtgtgagaaaccagacagcacacattcccccggcctgccatgttctccaggccctccctgccacgccgggggctcagcaggagagaaagaaccacgacgaagtccaggaatgggatgtgacaggggccagggaccaaggctggtcttgccgccatcactccgctcaccaccttgctctgactaccgcactccatcactgatcccctcaccgagaggcctttaccagtgagcactgggggcctccgagccccaagacagactctagaatcccacagctttgacagacaggccaagaggtcccagacattcgcaacactaaaatcacagcatttcagaccagagttgcaactctgtcacccgggctggagtgcagtg

SEQ ID NO: 36374 - DNA, 387 bp, Homo sapiens
  misc_feature (1)...(387): n = a,t,c or g
tttctattgtgtactttcaaaaatattctttatcttctgtacatttgtactgaaaataatatgttttgatgtaggcctatttggaataacttgtgtcttcatccctaacttttgaataaaaattaccaacagaccaaatttttgaatttatattttcacagtgcctggttattcacagatattaaatttaagtgtgacattagtttagtcattttcaattgtgtgggatgttttcaagttgagagaataattgaaagggattttatgcagaagtatataaatatttaaatgaagtttttaccaatatatactatgtcctagngaanttgtggatnaagagctaatcnttcaccnngaatnaanaaaaaattaagtcaccaatgtgct

SEQ ID NO: 36375 - DNA, 387 bp, Homo sapiens
cgggccaacaagaactgaagtaagacttttttcttcttccacattaccagacagtagtaggtgtgggtggattaaagaaccaccaatgctatatgagtttagcagccacagaaaaaccctctgatctagaagagcatcatccacctggtgcggcagactccaacacttttatcaggagaaattaatatcaacagattaagtcatatatttcttagaaatttttttatcctttcacaaaaaagaaaaggaaaacttagccatcactagaagcttggaaggaatttagttatcacatttctttatcttggtactagagcctaaaggttaactttactatggagtgagtgaggcacaaaggacattcttcctctcttccacaggttgctt

SEQ ID NO: 36376 - DNA, 389 bp, Homo sapiens
  misc_feature (1)...(389): n = a,t,c or g
nnnnnnnnnnnnnnnnnnnnnnnnnnnnnnnnnnnnnnnnnnnnnnnnnnnnnnnnnnnnnnnnnnnnnnnnnnnnnnnnnnnnnnnnnnnnnnnnnnnnnnnnnnnnnnnnnnnnnnnnnnnnnnnnnnnnnnntntgttnnaangtntntntaattngaaaaaatanncccggnaaaaaataaanggttnttatggcaanntgngtttnttaanccaaaatttaaaantcaaancncttttcatangaaaaagnnanggggctttttttttttattcaggnaaccnttaaaacnntannccntnntaanggccacccttgngncaaaagccngtaangnatggttgggggcaccctncttgcctnnagnangggnntttttccaggg

SEQ ID NO: 36377 - DNA, 365 bp, Homo sapiens
ggaaaataatgattaatctggctgggaagcaggagttcatttggaggaataggagaatgttattccccttttatgtctttagatatttgctagatactaaggatataaggatagcttaaatatagcaaaaatggaaattcaggagaagggcatatacaagaaacagtttcttgaaaaatttgatgaaacaatgatttgataaaataaagagaaaaagataatatgaaagttttgcatttatatgaggctagtgacagaaatggaaaagctgaagcaggagacctttgtgaagcaaaatgatcagtttagtttccgcagttggtttaagccatgcacacagggagcttcatctttgtgtgttttat

SEQ ID NO: 36378 - DNA, 347 bp, Homo sapiens
  misc_feature (1)...(347): n = a,t,c or g
ccccctcctctatgcacaaatcccactgagaaaagtcctttacatagggatacagagaaaccctttacatagggatggcctcctcaaaacacactgttgtacaaatagtgattcactcgtgaagaaggtctagcgaggtcagccctcaacataaaaacgctaaaaagcttaggtctctgacataatggtcaccaagcaaaattcactctggtagaactctctgctcttggtcctatagttggtcctgggagtgcanaggcananagcagctcctgttnctgctgnccagnanccgtncccttncataangtaacagctgctggtntggtcaggggaaccaccnttta

SEQ ID NO: 36379 - DNA, 363 bp, Homo sapiens
  misc_feature (1)...(363): n = a,t,c or g
tttttcccaatccctcttgcctcaaagatgacgtttctcttggaatttcagctgcttgggagccaccaccatgcagctctgcagtaaggctgccctcagagcagagcttggagataaagaaaaaaagaaaaaaaatctgacatttccccccatactctccagcttgcagtggcccttttcctgatcctttggccaaaaaaacagtttctctgcaagttttcgctgcttgcagttntgcanctaaggctgcgtttgagtnnaangccaggatacaaaactngggganananaccnttnnaacttnncctntgtntggncggaaaggnaatnncnatnatnnntgctannnctngcgttggaatg

SEQ ID NO: 36380 - DNA, 354 bp, Homo sapiens
aggaaacccagctggtttcttacctcagtttttaaagtaaacattaatcgcttaaatatgaagttttccaattggcaacattatctaattcatttactcccatgtcaagggaagttaaaaaaatacattccaagtacaaatgattggaatgttttgtcatagctgctcttattcagttgctgactcttaattgagtcagcaattacagagtcctggaaggggtttaatagattgccttagagctcataagcagtgattggattatttatacattggcaaatgagagctgcttgagattcattcagaaccactcaaatttaaaattccttaaagtcttgagaaatgctttcttgg

SEQ ID NO: 36381 - DNA, 356 bp, Homo sapiens
gcgagatgggctccaggtggcttctaagttagtatgccaagccatttccctctctcttttgtcacctcccccttacccaaaccatcagcctttaaatgccacctccccagtgggccttcccagacccctcctcctagtgatctcctccttctttgtggtcccatggtgcttacagccaccaccgtgcaatttagtagttgagtaagcactgcattgcatcactctctaattattttgtttaaggcttgtctccacagctgggtcatgagcgtctgtaatgttgtttgcttggttattggttgtttgatgcacctgcagactattagctgataaacactgacctgctaaggagttag

SEQ ID NO: 36382 - DNA, 363 bp, Homo sapiens
  misc_feature (1)...(363): n = a,t,c or g
tgtctctatacctgcattactagaaaccaaaaaataaaagtaaattagtgaagtaataacagtgaccaaatctactacagcacttgagaaatttggcacaaatgactcaggcggtgttttagtctgttttctgnnnnnnnnnnnnnnnnnnnnnnnnnnnnnnnnnnnnnnnnnnnnnnnnnnnnnnnnnnnnnnnnnnnnnnnnnnnnnnnnnnnnnnnnnnnagataccagcatcttgtgagggcccctgtgctgcatgattccattaagaaaggacgagtaagcaatgcaaaagagaaagcacaagcggccaggctcactatataacaatacactcttgtaataactaacccattcccat

SEQ ID NO: 36383 - DNA, 345 bp, Homo sapiens
  misc_feature (1)...(345): n = a,t,c or g
cttttttttagagaccctgaagagactgagtggcattagaatggcagtattgttcagaatggattcaaagatgtggacaaagagaccagtttagatgacttttacagtaatttagctttgagatgagagaattgtttgacttaggtaatggnattcagaatgaagaccttanagtgaaancanangacntattgnngaangaantgataggnttatgcattcncatgntnttntgntnatttnnggtttnaannncntantggttagtnanattnntnnttttnnngnngannnanntnnnntngttangtnnntttttnnttnntntttgnttntntgnttttt

SEQ ID NO: 36384 - DNA, 375 bp, Homo sapiens
  misc_feature (1)...(375): n = a,t,c or g
gctttacctttttccaattggctnnnnnnnnnnnnnnnnnnnnnnnnnnnnnnnnnnnnnnnnnnnnnnnnnnnnnnnnnnnnnnnnnnnnnnnnnnnnnnnnnnnnnnnnnnnnnnnnnnnnnnnnnnnnnnnnnnnnnnnnnnnnnnnnnnnnnnnnnnnnnnnnnnnnnngcactactttttaaaaaatgaatttgattactattgaagtaagtaatgcatttctgtgattcaacaaagatctatctcacagagatatctcattctgctcccttcccccagtcacattcttctttgtcttatgtaaacatgtcttggttttttttgtttgcttcttgtttatccttcaagtgggttttttgttttttgttct

SEQ ID NO: 36385 - DNA, 385 bp, Homo sapiens
ctgacttccctctgcagcagcacacaggggtgccactgttcccctttctgagccctgcagagagcaagcaagcctggccccctgcagaagcacggtgagggatttctccatgatgagatgcagggtgcaggccagcacactcaagggagtcactcactggccagtttcctgagctgcaaagggcaagcacggagttttgctaagtgagcatgtgctgtttttagacacccatgttcaccggggaacttgtaatatttccaggcctcggctgcatggaggagcccaggcttgaatgcagagagaatggtcccccacagcagcttaacacagcgttcctttgctgacagtaatgttttcttcttgcaaactacctgtgattttatgc

SEQ ID NO: 36386 - DNA, 369 bp, Homo sapiens
ctactttcagggcccccaggggaaggtattctgctgtccacatttcctttcccattgccttttgattgcgatctggggcgttcggcacctctcgtgatttttgtctgatgaacctgaattggtgaccaggcttctggtagctgctaacgtgctctcacgctgtggtgcagttgtctgtgggtagctggagactgaggtgttgctcctgaggcccacatttaacatcccatttcttgtcttggccatttaaattccagattgcaaaagggcctctggatgccagccatctgccgtgtcacttggatgtctgtctcttcctgcaacctgggtttgcctctgaccttatttgaacagtgctgggtccccttt

SEQ ID NO: 36387 - DNA, 371 bp, Homo sapiens
  misc_feature (1)...(371): n = a,t,c or g
ctctgaaaatgctggctagatgttatatgtgataataattattattggtatgattatcacccacatggtggctggcactcacccatctacatcccctacttcatccaacttttccgacaacattgcttccctgatgggacatgggtctcgtttgatttaccaaccccttttgacttaggaggaaccttcagcattgtctttctcttttcctcaggtggtagatgggaccccctgttccccggacagctcctcggtctgtgccagggccgatgcatccatgctgctgtgatcgcatcattggctncnagaagaagttgcnagtgcatggnggcggangngcggntntggttgnnnnancannnnngttcttt

SEQ ID NO: 36388 - DNA, 369 bp, Homo sapiens
atggtgaaagttttgattatttccttttgattgttctgaaaaatattcttacatctttatacaccagtctaattgttttggagaggttttaaagagctgaaggacctcaaccactttccccagggctgaacaccagcaatattttgcttgtctcaacgcagctctttccttccatttttgtggtgcctatgcctacccacttccaggtccagctttaacatagagaaaagatttgcctggcaataaaccaaaatcaggaatttgcagtgctagaatttgcccacataatcatgtcctcctggtcctaaagctgtattccttgagtacaatagagtataagcaatgtctttcagaaatgcccacatagga

SEQ ID NO: 36389 - DNA, 366 bp, Homo sapiens
  misc_feature (1)...(366): n = a,t,c or g
gccaagatgtggagaactgtgctgtacggggaaagctgacggatgagtgctacaactatattcgtgttcttgttccctgggactcccagacgctccttgcctgtggaacgaactcattcagccctgtgtgccgcagctatgggataacttcgctgcagcaggagggtgaggaactgagtgggcaggctcgatgcccctttgatgccacccagtccaacgtggccatctttgcagagggcagcctgtactcagccacagctgcggatttccaggccagtgatgctgtagtttacagaanccttgggccccancccccactccgctccgccaantatgactccaagttgngtnnganagccncacttt

SEQ ID NO: 36390 - DNA, 376 bp, Homo sapiens
cctcagcatccagaaagccagcgctttctccagtttcctcatagctttatcccgtgaggagcacgcggaaacctctacccatgcaggatgtttctaagaaccacttcttccctgtcttaactaagaaggctcccacagctggtgccaatcaggtggagaacatggcaagtccccgaaatgcacttccaaagacaggaaagattgcagtgggacagaacccagaaaatctctcacattctcgaaaacccgaaagagaacctccaagaaagacgtttgcctctcctccacctctttatctcggcgggagaggaagcctcgccccattcatcccgcccttctccccaccccgccgcaggggagagtttaccatggctgg

SEQ ID NO: 36391 - DNA, 365 bp, Homo sapiens
  misc_feature (1)...(365): n = a,t,c or g
attcactgtgggtcacttgaacgatgtcgggggtattgtccacctcccagtgctcagtctgtggcttgtggccagctgttcctctgtggggtctatgttggctgtgttaaggcctgctgcagaaacatctcatttctagcatgtttttctcaagcagtgatcctgtggggtcaagtcttcaatatcaaataatattgataataattatgatagaaataatatgaggccatgcaccgtggatcacatttgtaataccancactttgggangcanagtncatgtggatcattngggcncaggagtntnnatcagttaatcnatgtntnaagccaantctcntgcttngggancntnacnttnctggc

SEQ ID NO: 36392 - DNA, 341 bp, Homo sapiens
  misc_feature (1)...(341): n = a,t,c or g
tggggactctgaacttcccagggagtaacctgtgtcccccagggcagtgggctcatgcactagtaattttttccatctgtcctttccatgctgagcctcaagtgaaggaggaggccctatcctcagctagatgaggctctgggtgctcggacctggctggtgaccaactccaggagtcatggcccttggatagctcacatccttgctcccagccagccctgcccaagaggccaccacacagccctggcacagactccccaggatcacctggaatcaggaaccagggacagggctttgtacaggggctcagttcagggaagagttgagcttntcttctaggg

SEQ ID NO: 36393 - DNA, 375 bp, Homo sapiens
  misc_feature (1)...(375): n = a,t,c or g
tacagaaatgcagataaaaatactccttaatagaaaggtcagttaaatataatgtgtcatatttaaaagaataaactttgaagtcagagaggacaaaatatgagccatggctccagtactctgtttttaagatttgtgaatgtaaaaaaaaaaaaangttngggnaaaatntttaanctttnttccngggncntgcaaaacagngagttttgnggaannctttgggttaaaannncatatncttacccanngancgtcccaanngncccntncttcnccngntcagtnnntagggcnggacccttaaaataaaatcncntaaaacnntttttttcactnanaaccngantancctatccntantnncctnggttt

SEQ ID NO: 36394 - DNA, 374 bp, Homo sapiens
  misc_feature (1)...(374): n = a,t,c or g
gggacatggaatatgaggaagcgtttgaccatgtttaatatgttaccaaaattgagcacagctgaatggaacttaccttctgtacctaattttctatttttctttcttgttttttccatctagaaaatgttactacgattatggattttcttttttaaaaaatattnnnnnnnnnnnnnnnnnnnnnnnnnnnnnnnnnnnnnnnnnnnnnnnnnnnnnnnnnnnnnnnnnnnnnnnnnnnnnnnnnnnnnnnnnnnnnnnnnnnnnnnnnnnnnnnnnnnnnnnnnnnnnnnnnnnnnnnnnnnnnnnnnnnnnnnnnnnnnnnnnnnnnnnnnnnnnnnnnnnnnnnnnnnnnnnnnnnnnnnnnnnnnnnn

SEQ ID NO: 36395 - DNA, 315 bp, Homo sapiens
  misc_feature (1)...(315): n = a,t,c or g
attttagaaaaatgcagtgataatgatggcattgttcacattgcagtatacaaaaattcacgtgagggttgcgtatatgttaaatgtctggctccagaatatgctggaaaggcttttaaagcattgcatggctcttggtttgatgggaaattggttacagtaaaatattaacgactagatagataccaccatcgctttccccangctctnacttccaacactncattgangccatcaantaancatatganctccatgtctcatcnttcgccttnggacnggcctnnccanttntcnnngannttcctgacttga

SEQ ID NO: 36396 - DNA, 315 bp, Homo sapiens
caactgtgttcactagcaacctcaaacagacaccatggtgcacctgactcctgaggagaagtctgccgttactgccctgtggggcaaggtgaacgtggatgaagttggtggtgaggccctgggcaggctgctggtggtctacccttggacccagaggttctttgagtcctttggggatctgtccactcctgatgctgttatgggcaaccctaaggtgaaggctcatggcaagaaagtgctcggtgcctttagtgatggcctggctcacctggacaacctcaagggcacctttgccacactgagtgagctgcactg

SEQ ID NO: 36397 - DNA, 321 bp, Homo sapiens
cagtttcatggatttaataagacaggctctcttcctagctccttttaaaaatggatctttgaaagccttttgttttatgttctatttaaaatagcaattagctttgcatcgcaggtactttacagtgcaccatgtgtattattcttgtggaatattagttcaccagatgatagcccacaattctagttacatatgaagtggtggtgtggtgaaataacattgcagctcctcactaaaccaaaaactgcagcaagcttgtcgcagagagaccctcattttcccagctgtcaacctgactgatattttaatttttttgccctg

SEQ ID NO: 36398 - DNA, 104 bp, Homo sapiens
ccgcttactggttcatagatggctgtctcctttctgtgtcctcccactgcagaaggggcaagagagatctctagggtctcttttcttttctttttttttttttt

SEQ ID NO: 36399 - DNA, 345 bp, Homo sapiens
agcttgtccagattgtggtctcctgggcttctattggctaccacatttatttaacaccagtctcctgtcagagtcccgaaggggttatgcaaatctcttgcatttaaatttacgggttcacgtgtttgtcacatcccctcagctaatttgtagttagtgtggagccaagtgacttctctctcactagccacgatgccctgcacacgcctgtgttgtcctcggaaagcctccctggcatccctcggcagcatgggctatagctgatgggatggaaggccagcttggccaggttgactctttaggagtggagcgtttgctgttctctggtctgtagccacagacagc

SEQ ID NO: 36400 - DNA, 363 bp, Homo sapiens
ctgttcagcttaaatacattctgccacacagattccatagtatttttttttaacataatggtattttcgtgtttgaaagtcacaataaaaataaagtggtatccagctgaaaaattttaaaaggccctataacctatacagttccttgctgggtgttataacaatgacaacaaaatagcttttttctcatagccactattatgttttgagctacattttggccaggccgccccacttgagtgggaccttagggttttatgtagttattgttgaatctttcattctctccacatccactgcactgctcctaagtcctaatggtctctaaaagcattccaaacaaaggacattaattttattttt

SEQ ID NO: 36401 - DNA, 369 bp, Homo sapiens
gccttctgttggcctgctgggtgtgagtgggtgggttccggaagtggtagggccagggtaagaggtgcccatgatgggggcaggctgggccctatggagatagcccaacagagggagggtaaaaagcccacagaaggttcaggaccagaatcaagaaccatgtgtatttttctccccacatcatgagtttagtgtcagatattatttacaaacattttaaaagcagggtcagcaggcccggaggattgcatgtccagtgggagtgggggaggggtgaggccactgagggtgggtcagcggtccccagggttctgtggcttcttccagactggcttggaaaaaatgcttttattttcttggagttccccc

SEQ ID NO: 36402 - DNA, 361 bp, Homo sapiens
  misc_feature (1)...(361): n = a,t,c or g
gccttcttgccttcaaacttttcctggcccacctaaaacccccagtcagcttttggtattattctttttccaggcaccaaaaattggcttccactttttcttatactggtcctctaaggcctaatctcagaacaatttgcacatctctacaattaggactgctgagagaaaatgttcataacaagtctgaagtggttgcacatcatggtctctaacttcatctgggctttcggtactgccttctctgggtctctagtaagctccctttgctattgtctataatggctaccaaaaacattcaccatttgtttgtgtttccataattacctttgcaattatacttctcaagactgncttaaat

SEQ ID NO: 36403 - DNA, 367 bp, Homo sapiens
  misc_feature (1)...(367): n = a,t,c or g
gtttaggtgaacatagatcttaaaaaaatcatttgcacatagtttttcagtaactacaggatgcataattacatgatttaacaagtgggacnnnnnnnnnnnnnnnnnnnnnnnnnnnnnnnnnnnnnnnnnnnnnnnnnnnnnnnnnnnnnnnnnnnnnnnnnnnnnnnnnnnnnnnnnnnnnnnnnnnnnnnnnnnnnnnnnnnnnnnnnnnnnnnnnnnnnnnnnnnnnnnnnnnnnnnnnnnnnnnnnnnnnnnnnnnnnnnnnnnnnnnnnnnnnnnnnnnnnnnnnnnnnnnnnnnnnnnnnnnnnnnnnnnnnnnnnnnnnnnnnnnnnnnnnnnnnnnnnnnnnnnnnnnnnnnnnnnn

SEQ ID NO: 36404 - DNA, 359 bp, Homo sapiens
  misc_feature (1)...(359): n = a,t,c or g
cttgtaaatactgttattggnatatactgtaaatgatgacatcggtgggcactaaccgagcccggggaaactgggaacaacctcaaaaccaaaaccagacacagcacaagcagcggccacaggccactgcagaacaaattagacttgcacagatgatttcggaccataatgatgctgactttgaggagaaggtgaaacaattgattgatattacaggcaagaaccaggatgaatgtgtgattgctttgcatgactgcaatggagatgtcaacagagctatcaatgttcttctggaaggaaacccanacacgttcgaggtcaggaaaatggattggatggcaccaagagtggagggcctt

SEQ ID NO: 36405 - DNA, 368 bp, Homo sapiens
ccaggtagtgcaacagggctcggcggaactcagccactctctccgcgggcaagtgcctgcccagtccctgagagccccgcgtggcagggccaagaacagagaggttgatgcggtaacgtgggtcgtaagtgcgaggtaggtcggccagcgctgggatgctgtgcttgggctgtccagggtctttctcctccttcctggaggtcttgagattctggaatctctgcaggcgttcaaagaaggtccaaaacttctgacattcctcagaaccctgacggatgtaatcctcttcacggaagaaggcatcttccaagaggcgacgcgtctctggacaattccagtcccatttctccaaggcctcttcctcgctg

SEQ ID NO: 36406 - DNA, 360 bp, Homo sapiens
  misc_feature (1)...(360): n = a,t,c or g
cgggctgtgtgatttgtttggctgggttcgttcttttgtgtctgcgtgaatcaggaatcatgtgtgaagcagcccttgcatgtttttttccagttcagatccaggaagtataaagaaagcacaaaaggccctctgggcccctctagggcagaccatttccctctgaaaatgtcaccacagctgcctgagctccccctcccccatctctcttccctggcactacctgggacacttctgagcggaattgggaaaagcacagagaatggagtcacagagacctagactcggatcccagctctgnctctcagctgggtggnctcaggcnagccatnggcttntcagagncccaggtctctcgtc

SEQ ID NO: 36407 - DNA, 366 bp, Homo sapiens
  misc_feature (1)...(366): n = a,t,c or g
caaagctgaatagtagatacatggctattagttttattcttctttaaagttacatcatcatatacacttttgtatgtacgtatctcacaataaaaataaaccattgccatcgaagaccctgacgagtagtaagagcaaaagcccaaaccacaccttgtcctcccgtgagttcctaagctgctggggcagtctccaccccgctggccctcggaaagccactggcactggttttctgaggcctatgtcagggtcatcgcgcaggagacagtcacaccacgatcagaacctgacctgcgggccccacagtgacgtagcgggactacacccgcaggatgccaacctgcatggnangacgtgctgcagtcg

SEQ ID NO: 36408 - DNA, 365 bp, Homo sapiens
  misc_feature (1)...(365): n = a,t,c or g
ctctaaaagcaatttatctcttagtcaattatctgacagataattgatcagttcatattgtttcctcctggatatgtccttttttggaaccttccagccctctctggctccagtctggactgctggccctgtaggtatgctccctagtgttgtcaggaggcttcctttgtcttgtcttgggaattactttgcccttttgtttttccttcttttttttttttggggggggnnaaataccccttggntggnttncangggtttttccttttngganaantccnggggttnaagggnccnatntttntccggnnnttncnnnaaaanaaagggggggaaaaaaatttttnnaancngaaannnaaaat

SEQ ID NO: 36409 - DNA, 360 bp, Homo sapiens
  misc_feature (1)...(360): n = a,t,c or g
nnnnnnnnnnnnnnnnnnnnnnnnnnnnnnnnnnnnnnnnnnnnnnnnnnnnnnnnnnnnnnnnnngaccttcttcttataatacatattaaaggatcaaagtagttctactataaaggaactcatttaactttgcttaacccaacagctcccaatgtaaaacagatctattaatattctgaggaaccacgttgtatgggtcaccagactaggaaacaatagtgaaaagttgtgcttcttcactctctgatgattacacagcagcaaagcatgaaangctgcccataaatttcttaattactcacactgtcaccctaagcaacagatcttgacctatatcccatagggtacagctgaggg

SEQ ID NO: 36410 - DNA, 358 bp, Homo sapiens
  misc_feature (1)...(358): n = a,t,c or g
gacttccttctttctttttctccattaaattatcttggcacctttgttggttcaacactaagtatgtgcaggtctatctctggaccatcctgttgcattgatctgtacatctatccttatgtacacattgtattgtcttcattgcttcttttctaacttaagaagttggatcaatgaatttaaattatttctaatgtaaccatttaaaattataaaattccctctaggcatcgatttaactgcatctcacagatattgatatattctactttcattttcatcctattctaattatcttctaatttcccttgagatttcttccttgacctatgagtaatttanaaatgtgntgcttcat

SEQ ID NO: 36411 - DNA, 362 bp, Homo sapiens
  misc_feature (1)...(362): n = a,t,c or g
ttcccctacaattttgtagagcccatggaaccctatctgtgggcaccattccataaactactgtcaatgcttattttaaaaaatgggtactataactttctggttctctcctcaattccatcctaagtcagactaggatctgtaagtgctaaattcaataagatatgaatgatcagttgttttgaaaagggaggggcagaagcaggtaagggcatggccaggaacaggatttcaagcttctggatgacaggactcagtaccagtgtgtagcacgggcgacacccaatgcacttttagttagctgattacattgngcaactctcactttacagagaaaagaactaacgaagaaaccctggggg

SEQ ID NO: 36412 - DNA, 353 bp, Homo sapiens
  misc_feature (1)...(353): n = a,t,c or g
cgtgctgctatttatatcattcagctgcctcatcctagccatccttcagggctgccaatcagatgtcacttactccatgaagctttccaggatgcccttagcaggaaatgacatctcctttctctgaaccacaacaggacccgaatccctcttgtggactttggtcctgcctgctttgctggaactgctgatataaggacatatcctccntttgnggaaagtgcggtngacgcggccgcgaattccnnnnnnnnnnnnnnnnnnnnnnnnnnnnnnnnnnnnnnnnnnnnnnnnnnnnnnnnnnnnnnnnnnnnnnnnnnnnnnnnnnnnnnnnnnnnnnnnnnnnnnnnnnn

SEQ ID NO: 36413 - DNA, 358 bp, Homo sapiens
tgattttgtcagtaagggcctggagttacgcagtgtacaaacacaaggtatccccacagagtatctgggcctcagtgtcgccatctgttccatggcagttatgactgtccagagccagcacgtggtcctctctcagggttggccacagtcccccaggactcctgggagttccatcaggcagggctgttggagctggagccctggcaccctacttgtctcccctgccctgttgcgccccttcctctcctgggatgtgacaccggacacctagccttgggccttgattgctttgctctgtgtcagggtctccctgactgaaacttccagggctttagattccagtttattaaaaaaaaaa

SEQ ID NO: 36414 - DNA, 372 bp, Homo sapiens
  misc_feature (1)...(372): n = a,t,c or g
ctgagttacaccaatcttccaaatgttggcacattttattacaaaatatcaaagtctacattaattaatatcaccactaatctcatttaaaaagcctgtaagtactgggaaattatcacactgatggatacaagttttctaaaattccagttttcatgtagaaagctcaaattctttcacaggcaacaaatcttgtcattcactttttagaaaatgtctgccaaatacacaaatcaaagtaatgatagcttggcattcattatagaaaaaaaaaaggttgcatgaaaaaaactggtannncagcatgcaactnaaactatcnctaaaaggttttacctcaaggccatgatgtatnatagcaggcagnggaag

SEQ ID NO: 36415 - DNA, 368 bp, Homo sapiens
ctcatctttccatcctggggaaggcatgggattgcttttggttggttgtgtacctaccctggcacacagcactattatcagagtgatgggccaatacaatatatggtgagggaaatgaggttccatgattggccccatcagtcacaaggatggaaaggcagtttcctaagacagatgtatcaggcaggagagaggagctatacaatgtcaacagggaaagtgtaatataaataatcatgaactaataatagagggttagccactaagggataaaaagaagtctaaaggttacagaaacaggtgaatggataaacaaaatgaaatgttattctgcataaaatggaatgaaattctgatacatgctaccc

SEQ ID NO: 36416 - DNA, 341 bp, Homo sapiens
  misc_feature (1)...(341): n = a,t,c or g
gatatgttcaactggagacactatttatctgtgcaaatccttgatactgctcatcattccttgagaaaaacaatgagctgagaggcagacttccctgaatgtattgaacttggaaagaaatgcccatctatgtcccttgctgtgagcaagaagtcaaagtaaaacttgctgcctgaagaacagtaactgccatcaagatgagagaactggaggagttccttgatctgtatatacaataacataatttgtacatatgtaaaataaaattatgccatagcaagattgcttaaaatagcaacactctatatttagattgttaaaataactagtgntgcttggct

SEQ ID NO: 36417 - DNA, 355 bp, Homo sapiens
  misc_feature (1)...(355): n = a,t,c or g
agtgagaacttctattcctgtttgcccactctttcccactgggtctttctgaataatgctttttaaccaaccaaaggttaccttttccagtgctacctacagcctgcccctccccattctgtgcccagaaaagccctagacccagccacacccaactctgggcggttcagcaccctcgcataccctctccgctgagagctgtttcattgctcaataaaattcttctccactctcctcaccctttgaattgtcagagtaacctcattcttcttggacgcgggacaagaacttgggaaccgatgaatgcaggtataagctataacacaggtgggctgagccagngcataagccaagc

SEQ ID NO: 36418 - DNA, 380 bp, Homo sapiens
ccgagaccgataaaagcagttcaataaccacttttgctttagctgtaattggagccaaattatcttgattgcttgttgtttctaacttcagattaatatccagatctggggtgtcaaaggtgacttcagttgtacttaaaaccaaataaaaagtgacatttgaatttcttttaaaaggatttccgagctcacagtcagcttgcgagccattctggttggcaacacaactcaactgtttctcagggaaagccctcagttctctatatgcagaataggttaaagtgtctggaaacgttgcaatcagtttagcctcatgggcatcatcgccatcttttgtgggattccttgggttggaagggctgtttgtcactgttatttct

SEQ ID NO: 36419 - DNA, 374 bp, Homo sapiens
ggcagagccgggtggctttttagtttaggtcctctttctccattacaaaatggcgtccctccgtctttgttgtttttctcccccttttgccatcctgagcttagggccgccctagaaacttggtcaagtgggaggagcagccttgaaaggtgatgtaatcagctttcttcctcctctctccaccctcttgaagctccacccctgagcagatgcttttgcactgcctgtgctcgttgctgctagggagaagacattttccttattttcattatataaaatatcttaaagggataggagcttataggaattaagtatcaaggctgtccatctctgtgtagttctagtttttatagaaccagtttttattttcactt

SEQ ID NO: 36420 - DNA, 375 bp, Homo sapiens
aaacaggagttttaagataatttgtgtgtccaaaaaggtttatttaagaggcaggacttgaactaagctggactgagtgaggatgaattgggagaagaaagcacttctgtggggtgttggggacaagatgagaaaggagttgactcagataaatcagagcatatgacaggtgcactggagagaagaaaggcactgcattgtggtaggatggagaagagctgacttgaatgaagcaaaggggaacaaaaagaaataaagtggtcagcctgagcgggcaagatggaatcacatggcttccaaagccagaaaggaggctctgaaagccacacactggtgatctccagtggtgatacccaataacaatcagcatgaatc

SEQ ID NO: 36421 - DNA, 373 bp, Homo sapiens
  misc_feature (1)...(373): n = a,t,c or g
cgcggccgcgtcgacnnnnnnnnnnnnnnnnnnnnnnnnnnnnnnnnnnnnnnnnnnnnnnnnnnnnnnnnnnnnnnnnnnnnnnnnnnnnnnnnnnnnnnnnnnnnnnnnnnnnnnnnnnnnnnnnnnnnnnnnnnnnnnnnnnnnnnnnnnnnnnnnnnnnnnnnnnnnnnnnnnnnnnnnnnnaaaccagcccttttggttagcatcattgactaatactgacccaaacagctctaattcttaagccccctccaaaaaaaaagcatacatatttttatttgaaatgaaattattgatagtgattttttttcatttcttgtaaatatttgcaccaggaagccaaaggggggaaaaatcatgctatctgtac

SEQ ID NO: 36422 - DNA, 373 bp, Homo sapiens
tttttttttaagtgtaagtatggactttatttttttaaaaaaaagtcttttgagaactacaaattacaaagtaaaagcagatcactacgtagaaatctagtgaatacattttgcctgtgcatgaaaaactttatcaaagttactcattttaacaaattcaccccattcacaacaatcagttataatgttctttttaaggttactatacctttatttcaaattatattacatgttattccctcaaaatgaacttttaaatgacaaacttttggctcataagaatggcaccttcaaaaggggcgatttccactcagtctctggtggcattattccaggctagtttcaccagttaaaaaccttcaaaatgttcact

SEQ ID NO: 36423 - DNA, 251 bp, Homo sapiens
gaaaaaacaagaaacatttctgcctggatcaagaaggacttaacacagcaaattggaaatgaacttgcagcatcactagggatctggaaggatcaacatgtgtccaataagcattggacagttgatccttctttgagaatattctgaaaaccctgcaatttacagacaaaagcaagatgctagaaacagatcagaaatgaataaacatcataatgagacattaaacaggattaaggatttttttttttttt

SEQ ID NO: 36424 - DNA, 377 bp, Homo sapiens
  misc_feature (1)...(377): n = a,t,c or g
atcaacaatatttgccggtgcccttcccttccatcccctcatctatacctccctctccacaattcccttccagagtgtaaatgaggatccactactcccatgtgcatcagcgtgtctgtcccgacccccatgactctgctccaccctgaatcccacccacttggtcccctgtcctcaccttacccacccttttatggcccaatttaaacagcacttcccacgatgcctggacgtgcccagcagaaagcaaacaccctctnnnnnnnnnnnnnnnnnnnnnnnnnnnnnnnnnnnnnnnnnnnnnnnnnnnnnnnnnnnnnnnnnnnnnnnnnnnnnnnnnnnnnaagttgagcagtgagctgagattgcaccaccgc

SEQ ID NO: 36425 - DNA, 368 bp, Homo sapiens
  misc_feature (1)...(368): n = a,t,c or g
tttcataatgattgttttagtagaattaaacttgaaccagccaagctaacataattatattctgctccagatacaatgaataattaattgatttcaactgctagggtgaactcttgaagctatcagtcatccagcaatcttagcaagcaggccattgggtccctgtttgctctgtctctctctctctctctcactgtagaagggcttagctaactacttaagtaaaatatttgctctctgttaaacatgtcaaggagtatggtcagcttatccacattaagcctgtgtgtcccacgttggantaaatgntaannagcncactacaataaactagattcttctgccctctcttgntnaaatgaacatgc

SEQ ID NO: 36426 - DNA, 368 bp, Homo sapiens
  misc_feature (1)...(368): n = a,t,c or g
gctttgctgttaaagggttaggtgagaatgtgggagatttttgagggagcttatttaatgcttatggaaaggagcttggaaagaataggttgtagatacagaaaccagggcagttagttgatggaactcaattgttagggatattgggattccagatggaaggtaatccagatggaatacctttagccgtgaaggagttgtgacagaaggaaatgaagtaaacaaaggtgtaggtgcagctgatttgtcattttgggggccaagaaatgaattgctttccaatttaatttttcttctcattgaaggcnaaagtagctatctctganagtgagaaggggtggtaangnnnnatttttgctagggnaaac

SEQ ID NO: 36427 - DNA, 375 bp, Homo sapiens
  misc_feature (1)...(375): n = a,t,c or g
gttcttttcaaagaaccaacttttgggttgattgatttttttttttctctactgtttttctgttctctatttctgctgggttctttatttaattttttcttttgtctgctttgagtttagtttgtctttttctaatttcttaaaaaattaggttatggatttaaaattttttttaaggtagtcatatatagctataaatttccctgtaagcattgcgtttacttcatcccataagttttagtatgttgggtttttgttttcatttttctcaatatactttctgatttgcaatgcaatttctttggcttactggttacatagatgtttgnngcttaatttccacatattaacttaccaatttccttcngggattgg

SEQ ID NO: 36428 - DNA, 370 bp, Homo sapiens
  misc_feature (1)...(370): n = a,t,c or g
ggacaattctctggccttactcactggtagccctaatccctgcactgataaacataaacaaaagaacttatggttttcaaggggatcatttattactatgggcttatggctatttgctaagaggtagagatagatataaacataaatccatatgactattctatgttgggggataaaatgactaccattaggcaaatttgaataataattgaagtaatttaagatatgaaataggaaatgggtattaagcaatctgaacacaaggaattaatgagcatcaagcagggtctgaaagtaaattttttaaaactttactccaaacaattacatattctatacagtanataggttttcatactgctttccataa

SEQ ID NO: 36429 - DNA, 375 bp, Homo sapiens
  misc_feature (1)...(375): n = a,t,c or g
ctcatacccacagggaaggggaaatagaaaaccccagaagcacagaggggcaatgcttgtcttggtgagagtctggagtcattgagggaaaaataaattcagtcaagcgttctatttaagtttagagaaactatacgttttaaaagttgtccagagcatgcatgtaagatgacgtttggagtgtggaagccatctcacctgagctgtgctgcctgatacaggaaccttgagccacacatggctggcatggtcattgcactgcgtgtggtatgcacagcagatgccaaatgaccggtacaaaagggaatgcanaaaacccaccacaccttgggggtccacagctactggatctcttgagctcagcagttcaggact

SEQ ID NO: 36430 - DNA, 369 bp, Homo sapiens
  misc_feature (1)...(369): n = a,t,c or g
tgggttgtatatacatccttggggcttactagttatgtgatctttgataggtcatttcactttttgcatctctgtatcttcactatcctcacctataaaataaggggttgggataaagttgtcttttcctgttcaggtattctgtgattcaaagcttaaaaatattttaaatcctacatttttttaaaataaggaaaattgaaaccaatagaagtaaagtgactttcccaatgtgacagcgaaaattaacaacagagccagaacaatgaactgatgtcaaggtttctagtttcagagatattttctccaacatcataacagactcttatttaaaatgaatttattccaaaagttcctaggttgnggata

SEQ ID NO: 36431 - DNA, 370 bp, Homo sapiens
ctttatagggcaggatgagaggctcttatgaattaggatattaccgatggaatgtggcaagcttcagaggagcttggaagtagcagtgaggttcattctgaaagtcactgagttggggactggttaggctgcatgcaggtgttctttgagagcctaccgtttgagacaactccacccagaattcagaactttgaaagccccaggttacgaaaccagcctccatcttccagtcaggcactggcaaattgctgagaaccacagaatctcagacctggaagggatcagaaaggcccctgagcccctccctgtctaatgtctgaattctacctacaggacccctggcttttttttgagacagagtctcactctt

SEQ ID NO: 36432 - DNA, 364 bp, Homo sapiens
attagttttatgaattaagcatgctaggatcaataggcccacactttttctatcatctttgctttgattatgtttgtggtaaagttttctgattatatgaattctagtcaaaagcaaataaaacttagggaacagaagtacgtgttaggactaaatctaagtaaaaaggcagcagcgggattattcagattaacatttatgtggcatggtgccacagatacaaaaaaaactgttttgtgctttaagggatctagtgttaactgaagctgttgtgcagttttaaaagtagaattttttggaggcagaaagattttgtgtttcctaaatatagaggcttttcttttttttcggccaaaaaaaaaaa

SEQ ID NO: 36433 - DNA, 372 bp, Homo sapiens
  misc_feature (1)...(372): n = a,t,c or g
gttgccttgtgggaatttagatccagtgttgctagatcttttgatttttttcaagggaagctataaagctaaatccttatggaatctactgatttttaaatattagaagttgtacaggatatatgtaattttggggagcatgagaagtgggaagaggtaccctgtacaggccaaactgcaggcttaagaaaccacatctgtgagcctcgtggcctccaggcctccatatgaacttagaataattaaatgtctgcttcattgttggactagagcaatgattttcagannnnnnnnnnnnnnnnnnnnnnnnnnnnnnnnnnnnnnnnnnnnnnnnnnnnnnnnnnnnnnnntacacttgaaangcannggggg

SEQ ID NO: 36434 - DNA, 377 bp, Homo sapiens
  misc_feature (1)...(377): n = a,t,c or g
gcctattacttatccatatgaattttataaatctagtgcaatgacaatcgacattccaatgggatggttttttgaaacagaataattttaaaattcatatggataagtaataggcatgaacatccaggaaagttttgaaggaaaaaactgtacattatataatattttaaagaaatattctaaatctacaatgattaaaaaggtatgataatggatcaagaacaaacagataatggatcaagaacaaatagatcaagaacagagcaataagacagaagagaaagtctccaaagagacacaagttcatatgaatttaatgtttaaagaaggttattcaaatnagtgaancaatncaaattgagggtactttgttaact

SEQ ID NO: 36435 - DNA, 359 bp, Homo sapiens
agaatatctagcaacaagcaactaagagaatgagagaccctgaggacaccacatctgagaggttgtttcagagagtcatatttgtaggtatagaaaagtcaggaaatcatgaatactttcaaacagcgttatgttgtaaaggactgacagtcctatgtagctccaaatataaaactaggatctttaggtgatgtcgcaaggcagtggtggatgtcgcaagggcagtgatgggcagatttgggatcaacacagagattttctaacagttagagctgtcactaaagtaggaacaaaataaacagccttcatagataaataggagatattcttttaaaacaagaggatttgtaccatcatga

SEQ ID NO: 36436 - DNA, 354 bp, Homo sapiens
  misc_feature (1)...(354): n = a,t,c or g
caacttttgaagttacttaaatatttaatttaacaaatatcatttaagatttaactgtctactatccttgaaagggtcatgagtttccctcctaaaccaagactttgaagctctctgtgctgtctcacaggaatccccatgatccaacttcatgtgacctgcagaggtctgctgccttgaggagtagacaggtagctgggctgttagtggctaagtccttttctcagaatatgtggaggctccttctacctttaacagtgcttttttgctttgtttgggaagtaacagagtagtcaagtgcatgaccctggagccagactgcctgagtttaaatcctgnttctctctttagagg

SEQ ID NO: 36437 - DNA, 361 bp, Homo sapiens
gggatagtcatggtttctacttcaaagaataaaaggataggattagtgtcagtcattgtatcttgagagaggtagtacagatagaagtgaaaaaagaatataaaagaaagtacagtcaagagtgaattcaataaagcctacctcttctgctgattacagctaaaaactctggacaaaatacaaaaaacaactacctaaggactctgaaaggtaaagaaatgcagtcagattatgaagagaagtcaaaaactgaaacagcaatttgcacaggattaagtttctcattttatttcctctttcttttcacaggctttggctgaaagcaatcacacaaatgagctgcgatgggggtgctgcagac

SEQ ID NO: 36438 - DNA, 359 bp, Homo sapiens
gttaggaggctgcgtggtcatgcaggaaagaacaactgaggcaaactttccttgtaaagggccagaagtaagtattttccactttgcagaccatatggtctctgctgcaactactccacccccatcggagcacaagagcagccacagacagtacgtaaatgaacacaagtgactgtgttccagtaacactctgttcatggacaataaaattttaatttcacaaaactttcgtgtgttatgaaatatcattcttttttgttggtttaaaccacttagaaggtagaaaccattcttagcctgaaaaccatacaaaaacaggtggtgagctggacttggccatgggtcatagtttgccaacc

SEQ ID NO: 36439 - DNA, 359 bp, Homo sapiens
  misc_feature (1)...(359): n = a,t,c or g
ccagtggcatctttggacacacccagggccagggggaccttaccaccctaaaaggaaggacacaagcctgctgtatttgccacctgctgattgtagatctcttgggtcttgagtgaacctaagtggtagtcaagcaacggtcactgtggacctnnnnnnnnnnnnnnnnnnnnnnnnnnnnnnnnnnnnnnnnnnnnnnnnnnnnnnnnnnnnnnnnnnnnnnnnnnnnnnnnnnnnnnnnnnnnnnnnnnnnnnnnnnnnnnnnnnnnnnnnnnnnncttcatttgnnnnnnnnnnnnnnnnnnnnnnnnnnnnnnnnnnnnnnnnnnnnnnnnnnnnnnnnnnnnnnnnnnnnnnnn

SEQ ID NO: 36440 - DNA, 359 bp, Homo sapiens
  misc_feature (1)...(359): n = a,t,c or g
nnnnnnnnnnnnnnnnnnnnnnnnnnnnnnnnnnnnnnnnnnnnnnnnnnnnnnnnnnnnnnnnnnnnnnnnnnnnnnnnnnnnnnnnnnnnagtgtctgaccttttgtttgtttttggtcagctttgatgaggtataattaacataccataaattcaccattttaagacaacagtttgataaatgttaatacagttatgtaactaccaccacaatcatcatatagtctcttttcatcatacccagaaagttcccttttatgtcttggctgtaatcttctccacctgttccttagccattagcaacaactgatgtgctttttatcaccgtggtttttactctagaatttcatgcagcta

SEQ ID NO: 36441 - DNA, 363 bp, Homo sapiens
  misc_feature (1)...(363): n = a,t,c or g
gcacagctgtggttgtgtaacttcccccagatgcatggcgtgacaagggtgcaggaaggggtgcagggcccggaagcccagtatggccaaggagagacaaggcagggaagaaggtgagagatgaaagatatcgccctgattgaaacaccaaactacccccagtttctcagaaaaaggactcagagcaacaagagaacctacagtcgacagggaaattcgtcagtgcggatgtgatttgagcaagaccattgaagcccctgctgaaaggcaggctggcagagccagggtacctggccatctaccttgaagnnnnnnnnnnnnnnnnnnnnnnnnnnnnnnnnnnnnnnnggagacaggtttggt

SEQ ID NO: 36442 - DNA, 371 bp, Homo sapiens
ggaccatttgaaatagagagcagagggaagatggcttttctcttcacttaatttcccagttgtgccattggggtgggcctggaaccattagcatcaggaaggtgccagaccatattaatattttaaaatatatttctctcggtacagtttagtcatggttcagagcacccacagaagaacctttcctggctgaccgaggagacatttttaacaaatcctattccctaaagtcattcatcctagatgacattgacatagtcaatatttaagctgcctaagaaagtgtagactttggggtcagcctgggtaagagcaatagctcttttgagatgaaggatagtgtgataaaagagagacctttgtgatagcta

SEQ ID NO: 36443 - DNA, 378 bp, Homo sapiens
attatattaacagctttctaattagtctccctgcttttgttctttcttacctctggtcgtaattcagcagtgggaatgatgacatcaggcagaaggagacttattcagtagcttctgatctcactcagtaaaagacaaagttcttcaaggggcctacaggtagtgacaataaactggctctctggagggggaaaaggttctgatttgtagcatttgcctgttttactggtataattactcccactctggctgattcaaagttctagaatgtacagcaatctgctccccagtcaatatcggcttcagcacatcactgttgaacatttggctccccgtctgactcccatctgctgcactttccctcttgccactccattt

SEQ ID NO: 36444 - DNA, 371 bp, Homo sapiens
  misc_feature (1)...(371): n = a,t,c or g
gaagaggccacaccctgccctgctctgctgcagccagaatgggtgtgaaggcgtctcaaacaggctttgtggtcctggtgctgctccagtgctgctctgcatacaaactggtctgctactacaccagctggtcccagtaccgggaaggcgatgggagctgcttcccagatgcccttgaccgcttcctctgtacccacatcatctacagctttgccaatataagcaacgatcacatcgacacctgggagtggaatgatgtgacgctctacggcatgctcaacacactcaagaacaggaaccccaacctgaagactctcttgtctgtcggaggatggaactttgggnnctcaaagattttccaagatagcctc

SEQ ID NO: 36445 - DNA, 380 bp, Homo sapiens
aagctttagagtttcctgctggttcagtccatgtcaatgtctactgtgatggaatcgttaaagctacaaccaaaattaagtactacccaacagcaaaggcaaaggaatgcctattcagaatggcagattcaggagagagtttgtgccagaatagcattgaagaacttgatggtgtccttacatccatattcaaacatgagataccatattatgagttccagtctcttcaaactgaaatttgttctcaaaacaaatatactcatttcaaagaacttccaactcttctccactgtgcagcaaaatttggcttaaagaacctggctattcatttgcttcaatgttcaggagcaacctgggcatctaagatgaaaaatatgggg

SEQ ID NO: 36446 - DNA, 367 bp, Homo sapiens
  misc_feature (1)...(367): n = a,t,c or g
nnnnnnnnnnnnnnnnnnnnnnnnnnnnnnnnnnnnnnnnnnnnnnnnnnnnnnnnnnnnnnnnnnnnnnnnnnnnnnnnnnnnnnnnnnnnnnnnnnnnnnnnnnnnnnnnnnnnnnnnnnnnnnnnnnnnnnnnnnnnnnnnnnnnnnnnnnnnnnnnnnnnnnnnnnnnnnnnnnnnnnnnnnnnnnnnnnnnnnnnnnnnnnnnnnnnnnnnnnnnnnnnnnnnnnnnnnnnnnnnnnnnnnnnnnnnnnnnnnnnnnnnnnnnnnnnnntttcccttactcttgataaggaatgctggtgtattgtatctggggtcctccctgtatctggggtcctcccagtgctggaagcattatgtttcg

SEQ ID NO: 36447 - DNA, 369 bp, Homo sapiens
  misc_feature (1)...(369): n = a,t,c or g
ctgagacactgaagagggatttcatgggacagtctaagaacatttttatctagagaacataattatctagaggaatcctcaaagccaaagtcaaagagaacgaacaaagaactgctagagttaggaggcaaagttagaattttttagttggctagaatcctagttagggacagctaagattttctatcacaatttgaaagtactgaatcaataagttgatagcatatattaataaaattaaggcatgtacctcaaagagcaaacaacttttatctcaatacctatattagatagtacctttcttcaaaagcattttcgcatattctcattcttatttttaagtatataaaataatacttatttgnagaa

SEQ ID NO: 36448 - DNA, 369 bp, Homo sapiens
tttttttccccatggaattgcatttttttattagacttagtggcttcaagaacctctcaatttttcactatattaagctatttatggaaattgacagttcagatgaaaaatttttaagtcatatctctttatgtttaaaatgatttcagaaagctacctctagattgtatttttaattttggtgacaattttctctccaggaagcaaatgtcctcaaggaccttcatgtctcaggaggaaacaggtgtacccagatacaaagctgcaaaggaaggcctggctgtatggttagctgcaaacagcaatagagaacaaactgtgccaagatatttattagtagagttgtttttatcagggctctacttaaag

SEQ ID NO: 36449 - DNA, 378 bp, Homo sapiens
  misc_feature (1)...(378): n = a,t,c or g
atnnnnnnnnnnnnnnnnnnnnnnnnnnnnnnnnnnnnnnnnnnnnnnnnnnnnnnnnnnnnnnnnnnnnnnnnnnnnnnnnnnnnnnnnnnnnnnnnnnnnnnnnnnnnnnnnnnnnnnnnnnnnnnnnnnnnnnnnnnnnnnnnnnnnnnnnnnnnnnnnnnnnnnnnnnnnnnnnnnnnnnnnnnnnnnnnnnnnnnnnnnnnnnnnnnnnnnnnnnnnnnnnnnnncccccatatccttatcaaagaagtatataatcaaacttttgaacttggacaatttgataggtgaaaaataataccacattattattaatattattattacttggtaaataagatggggtttcactctgtttnccangttggtcttgaa

SEQ ID NO: 36450 - DNA, 375 bp, Homo sapiens
  misc_feature (1)...(375): n = a,t,c or g
atacaccacccacgtgaccctgggacgcactggagatttcggcttagagccgcagaaaccatctgaaagacataagtcaggagacagagtcctgatacctttccctatttggccagttcatgatccagctagccctgggcaaactagtccatcttttggataaaataaacacctgcctnnnnnnnnnnnnnnnnnnnnnnnnnnnnnnnnnnnnnnnnnnnnnnnnnnnnnnnnnnnnnnnnnnnnnnnnnnnnnnnnnnnnnnnnnnnnnnnnnnnnnnnnnnnnnnnnnnnnnnnnncacctgccttaagtcacaaggtgttttacaggcacctggtgtttctgccatgaaaaatgcatgcagcttcaagatt

SEQ ID NO: 36451 - DNA, 372 bp, Homo sapiens
  misc_feature (1)...(372): n = a,t,c or g
agttgatatacgtcaagcacaataaaggagttggttattgctattatcttctagggagagtcctgcagatttcaaaatacattaaaaatatcacacttttaannnnnnnnnnnnnnnnnnnnnnnnnnnnnnnnnnnnnnnnnnnnnnnnnnnnnnnnnnnnnnnnnnnnnnnnnnnnnnnnnnnnnnnnnnnnnnnnnnnnnnnnnnnnnnnnnnnnnnnnnnnnnnnnnnnnnnnnnnnnnnnnnnntngggngggggggnngcccnngggnnctnatntnntanggnggntgnattncnngttnttttgnacccnagggggcnaaanntntgggggttnaacnaaannaaannanngtttnggnaaaaa

SEQ ID NO: 36452 - DNA, 366 bp, Homo sapiens
cttgtgctgcccagggttaacgagaaactacagaaaggcttccctctcccgacgccggccagagtccagctctacaacgtagtgcttcagcctcaccagaacttcctgctgttcggtgcagacgttgtctataaatgaaggcaccaggggtgccgggggctgtcagccgcacctgttcctgatgggctgtggggcaccggctgcctttccccagggaatcctctccagatcttaaccaagagccccttgcaaacttcttcgactcagattcagaaatgatctaaacacgaggaaacattattcattggaaaagtgcatggtgtgtattttagggattatgagcttctttcaagggctaaggctgca

SEQ ID NO: 36453 - DNA, 369 bp, Homo sapiens
  misc_feature (1)...(369): n = a,t,c or g
atcttttagcaattttgaaatagtcattattgttaactatagtcaccatgctgtgcaacagatcaaaagaactgactcctcccatcagcagaaacttcatgccctttgaccagcatctctcctttccccgtccacgactaacccccagcccaagagaacagccaacacccacctcgctgctgccacacgacatgtcgggctttgatgggatggaggtgagggtggggaagacaattccaaagctggagcactggcctcacagctcagacactcttctacttatcctgagagaatgatgtgctgagaccaactaaacctcccctgctcttcccacatggcngaaaagaggcaacccagggaagccattgg

SEQ ID NO: 36454 - DNA, 365 bp, Homo sapiens
  misc_feature (1)...(365): n = a,t,c or g
cgcggccgcgtcgacctctgagtgatttccttaccatctttcctttttctcaaggtcctcatggccctgcagtgcttgagtacttgtctttgactgctgggaatcagtttgtttggctgaagactgtcacacttatccacacattctttaaaatccctttcttcttcttacacttctcttccaaagcttgcctggttaccttagttgaatctcactctctctctctttctctcttctgtccttccgtccctcttcccttcctttttnnnnnnnnnnnnnnnnnnnnnnnnnnnnnnnnnnnnnnnnnnnnnnnnnnnnnnnnnnnnnnnnnnnnnnnnnnnnnnnnnnnnnnnnnnnnnnnnnnn

SEQ ID NO: 36455 - DNA, 366 bp, Homo sapiens
  misc_feature (1)...(366): n = a,t,c or g
ttttgctgttgtaaaatttatagtctaacagaaaatgtttatgaattcctgtaatccagtaaaataatggctcatactgaaacatttaagcagttaaaagcattgtatatgtaaagagtttaataannnnnnnnnnnnnnnnnnnnnnnnnnnnnnnnnnnnnnnnnnnnnnnnnnnnnnnnnnnnnnnnnnnnnnnnnnnnnnnnnnnnnnnnnnnnnnnnnnnnnnnnnnnnnnnnnnnnnnnnnnnnnnnnnnnnnnnnnnnnnnnnnnnnnnnnnnnnnnnnnnnnnnnnnnnnnnnnnnnnnnnnnnnnnnnnnnnnnnnnnnnnnnnnnnnnnnnnnnnnnnnnnnnnnnnnnnnnnnnn

SEQ ID NO: 36456 - DNA, 235 bp, Homo sapiens
cttaataaagtgtaatgcgaacttgccccatggctacttgggtttctcagttatcttttaaaaattttcgtgagttacactatccagtcagttcttagaaactgtgtaagtacacagtaggaaaaaaatctagccattttcttgactgtttagaccacaaggatagttgaaagcattttaaaatctttagtggacatgaactaaactttccactacacatgtttttttttttttt

SEQ ID NO: 36457 - DNA, 367 bp, Homo sapiens
gcttattctaagtattctaaatcccagccttggggttagtccatccttcctattcatcaaattacttaaaggggagggaaaaagattaattcaaactgacagtctgtaatttccagaaacataacttattcaacagaaagctcagaaaaaaaaaatgatttaaattttcttgtttaaacaatactgtatgtagaagatttaaaatgtaaatatatacctaagaaattctgataggacttgttttaaaaacctagagatgacaagattcctaaaacgtttttaatctggagaaatcaatatgtcaattataaaaatataaaatcttctccaaatcagtgatctttatgctcaactcctaggggataag

SEQ ID NO: 36458 - DNA, 364 bp, Homo sapiens
  misc_feature (1)...(364): n = a,t,c or g
ctttattcactttcagtatagttccattaacagtattaatgtgccatgtatgaatatacctgtcatgcagactgaggcccacagactaataacattttgagcaagataattttaagtaaaaactgaagctctgaactcaaacattctttcaaatttctttaaaataataatgatcacttagatgaggtgcatcatttatgtaaccctgaaaagcctggaattgacttacgaaaatgtcataggcctgattattttaaagttatcttcgagctgatgctggtgtgagcatgtttgctttagaacacatggactcttaagctcatgatagataatttcctaggtgagctagtatactgnttcttgg

SEQ ID NO: 36459 - DNA, 268 bp, Homo sapiens
tgaaaactctttcaccgtttttggttataagcttctatccagtcccttaacttatgaacaaaatttttacatttttagtaaaagttctctgaaaacagaaattgactagaaagttaatatacatcacctcatgcatatttaaaatctctctgtatgttgtttttagaaggagtggtctgaagaatatacaagtaatagctaaaatgaagaccttatgttgacttcttatgatgttacatatcacttgaacatactttttttttttttt

SEQ ID NO: 36460 - DNA, 358 bp, Homo sapiens
  misc_feature (1)...(358): n = a,t,c or g
ttctgaaacaattatttcgttgcggtaagaacattaaaattctctttgtttagctattttgaaatatataatacattactattaactatagacactgtgctgtgcaatagaacaccagaattattcctcctaactgaaactttgtatccgtagagcaatgtggacattttccctgtctaactccccacagccaattccgggtttatacccaaagatatttaaatcagtatttcaaagggatgtttgagctcctgnnnnnnnnnnnnnnnnnnnnnnnnnnnnnnnnnnnnnnnnnnnnnnnnnnnnnnnnnnnnnnnnnnnncagattttttaaaatgtgctgaatatacaaaatagg

SEQ ID NO: 36461 - DNA, 358 bp, Homo sapiens
gcagggagtcacatccacaggggtgttgtggggcactctctccaactcttgaacaatgtttatatccaacagctcaaaggacagcaggtcctgggcagtcagaagatccacagatgggatgtagagctccctctcactggcaacattttttgccttctgtgggatgcaggctgctgtcccttctgtctgctcagtcacttcaccaagctgtctttcttctttagccagaagaaaagtttcctcttgctggcaggtgagatcatcagttttgcttgagctgatcatgcccttttcaatgttatcagggctctcttcggaggggaaaggatctactatgatactgcaccagacccgaggc

SEQ ID NO: 36462 - DNA, 366 bp, Homo sapiens
ggaaacctgtacagtggagacacaaagggtcactggcagatttcaaatgatccaagacatcctcaagacattgagatctgctggttggagatcttagtgcccaaggaagaatgcttgcaaaaggagatggaacagtgtttctgttgcattggccactgagaatatctggttattttgaatttgtcacagtctgcagctaaaaggcgaacaggaaaagaagagagagcggtaatttgaatgatagcagatttcacatcaggaaccaatgaagctagataagaatgcaacatctttgatgtctaaaagaaacaaaaagccaaccttgaattctttatttagtgaagttacccttcagaaatgacggca

SEQ ID NO: 36463 - DNA, 365 bp, Homo sapiens
  misc_feature (1)...(365): n = a,t,c or g
gtagaccaaggggccacgacactttagaggtggtactggcctctgagaaggcagaggtctctaagaattaaagaactcctatgacttaaggtcagcagagataggctatcttgaaagaaatgatctacctcccttccctgagggagataagaaccctcagggaaccctcccttcaaaattagaaccaagatgagaatgaagttgaaggatgaagatgttttatataatatctttacttacaaaaattaaaagaccaagatgtgctgtaattctgaacttcactggatctacaaacatcaatagtggtnnnnnnnnnnnnnnnnnnnnnnnnnnnnnnnnnnnnnnnnnnnnnnnnnnnnnnnnnn

SEQ ID NO: 36464 - DNA, 359 bp, Homo sapiens
ctcagccttgcttaaattgcagacataagcagaacaagtagagtcattttgataaatgtttatgttagaagtaaaacttaacccccgccagtcgtaagctgccaactaacatatgactaagtgactaggggctttccaacaaggtacctaaaaaaaggcaattctgtaatttcaaatcaatcaaataatttctttattttgcttctacgtttcccagtaaatacttgtctctgactttttgtcattgggacactaaaacttttttcgtctggtgttccccaattcatgaattgcttcttactcaaataaactctttaaaattgtattgttcctcagatttttcttttatagtaactttc

SEQ ID NO: 36465 - DNA, 316 bp, Homo sapiens
  misc_feature (1)...(316): n = a,t,c or g
taaaaataaagcaagaaaagagaaaaaatgaacaagtcagatgagacaaatgaaaaacaaacagtaaacggatagatttaaacccaaatatatcagtaattatgttaactgtaagtagactaaatattcaaaataaaagagaccatcaaattggattttcagaaacccaaactataggttgcttataggacagacactttaaatataataatacagtaacattaaagtaaaagaaggaaaacgggatatcatgtgaaaaacaaaccaaaagaaagtttgtatagctannnnnnnnnnnnnnnnnnnnnnnnnnnnn

SEQ ID NO: 36466 - DNA, 360 bp, Homo sapiens
  misc_feature (1)...(360): n = a,t,c or g
ctgaaaatctttcttgttcaaaacagcaacgacatatcttgttaacttttacggtgacttttggaggaggggagtttggaaattgtaaaatgttatagattgttgcctatttcctgctgaaagtaaatgtttttaaaaagtatcacataaagctgaatacaaattggtttggggggagatcctttcctacccaaagtcataaatatattctttactgccttgtggaaattttatagttttgcctttcacatttgtctttagtctgtcctgaactgatttttgtgaaaattatgagttagaaattcaacttaacatttttcatattcgaagtggttgtctctgcactatttactnnaaagg

SEQ ID NO: 36467 - DNA, 356 bp, Homo sapiens
  misc_feature (1)...(356): n = a,t,c or g
nnnnnnnnnnnnnnnnnnnnnnnnnnnnnnnnnnnnnnnnnnnnnnnnnnnnnnnnnnnnnnnnnnnnnnnncgcaaaaaaaaccctgtttctcacagaaaagggtggggacaagcatttattgtataaaaggaaattcttgacttcagtaaattgtaggctgtaattttttgagacaggaggtttgtctactggtgcgagatcaaaagagagcccctgtaagtgtattgataaaagtaagaaataactgaattttgagaactggaagtttggagtcaaggaatctaaagtatgggtttcttgactctttcatcaaaacttttcagctggaagtgttttaaaaaaatttaattgag

SEQ ID NO: 36468 - DNA, 360 bp, Homo sapiens
  misc_feature (1)...(360): n = a,t,c or g
aacacaaacaagataaatttaattgaaaatgttcattacagaaattaacaatgcttaccattctttaaacaccatgtacattattaatatatactggatatttccaattaactccattcttaggctcaatttaagaaacacaattgtaacattttatacaaaaaatacttcactaagaaagtagacaaactgcacaaaacagtacaagtataatgtgcatagcaagatagcttgaagcattctatgtatggctttctttaaaaataaaactattaggggaatgggcccatttgggacctactgttacagttgacatatgtaaactgtttcacatcttttttaggcactngctaacaatat

SEQ ID NO: 36469 - DNA, 357 bp, Homo sapiens
  misc_feature (1)...(357): n = a,t,c or g
caggaatgggaaatttcctatggtgcttatgacagtcccacccaaaataccagaagtgctcctactggggagtactgggacagatgatgtctaaggatcttttaaactcaaaattccctgagataggagtctaattgcatgagcagattcatgatgccaggccatgggcacagttcctggagtggagtacccaagaataagtgactgagagtcctctgctttgcctggagccccttgaaggcagggaccgcctcttgtctaactctggcctggtgtccacccgtgacttaggtcacaaataaatacctgcaggcatggggctggacagaggtggaggcctacagctatnagccactt

SEQ ID NO: 36470 - DNA, 76 bp, Homo sapiens
ccaagctgtagtgagctgccatggcaccactgcactccaacgaagggagaccttgtctctttaaaaaaaaaaaaaa

SEQ ID NO: 36471 - DNA, 329 bp, Homo sapiens
  misc_feature (1)...(329): n = a,t,c or g
ttcatacagttagatttatgtgtatactttttttcaaaatcatgctcttgctcttcctacttcaatgtctgttggctgctttctgattcctttgaggcagcacatggtaagatgcctctaaattgtaccgtggcctatcaggtgttcatagaaaaccctctgcaaatggaatttcttttttttttttcccnnttttaantngaaanngggnnnnntnntntncccnagnnnggnttnnaccncngggaanaaaaaaaccnnccngtttaannnnccnaangggggggnntnncngggggnaccccccnaanngggtttttttttttttt

SEQ ID NO: 36472 - DNA, 386 bp, Homo sapiens
atttgccattcacactgattgtaacactggatttacagaagaaactgtggtacaaagagaggaaggctctggtggctcctgaacagcagcagtccagctgccctgctcaggctgggcacgacgaatgctcccaggagaggggaggcggcccacccgactgtgtaccgtggactgtggacagtgcagtgcctgctctcctgtgctatctagaaacaccttggagagagggttctgggatattctctcatgtcatctggctgaagacaccagcttgacagttcccctttaagaagcattccatacgtttgtaccagggagaaagaagcccacgcacgaattttcaggatgttttgtgaccaaacccaataactgccacacaaatagac

SEQ ID NO: 36473 - DNA, 224 bp, Homo sapiens
ctgagatttccttgggaacaaaggagagctcagttgttcttgaggcctcaaaggggcccctgaggcaggcctgatgcccggctgtgtgcaaggaccagaggagtggctgcccagcctggaggcaggtgctggctggactgacctcctgggacccacttaagctttctacaaacaacacatcatctgggctgagtggggggttctcggggcaaaaaaaaaaaaaa

SEQ ID NO: 36474 - DNA, 371 bp, Homo sapiens
  misc_feature (1)...(371): n = a,t,c or g
nnnnnnnnnnnnnnnnnnnnnnnnnnnnnnnnnnnnnnnnnnnnnnnnnnnnnnnnnnnnnnnnnnnnnnnnnnnnnnnnnnnnnnnnnnnnnnnnnnnnnnnnnnnnnnnnnnnnnnnnnnnnnnnnnnnnnnnnnnnnnnnnnnnnnnnnnnnnnnnnnnnnnnnnnnnnnnnnnnnnnnnnnnnnnnnnnnnnttccactttctctacattttgctaacacttactattttccatttttttttttngatnatcaggaaatnttangatcccgataaaggactttnancaangtaaaaaaangattatatattnctnacatatttaagnaattaattcctttaattttttngaaatggggggnnctctg

SEQ ID NO: 36475 - DNA, 372 bp, Homo sapiens
tgccctttgaggctctcagccatttgattcttcctgtgtatcccctgtggttgttgtctctgtttctagagtgcagtggttcctgcactttgggctgtaaccccctttggtggggccagagaccccttagattaattatcacatttctttcacttactgccacaaaacccagcagcgattcactaggagaacccgaagattggtgctcttctttatgagacaccaaaggggctctgtgtttcccagcatgaagtcttcagtgacagagtctgggaggacagcacaggcagcagcagtgtaactctcagaatccccacggaagagcagagcagctcaatagcaaaaccaaaacccagcgacgagacatcccca

SEQ ID NO: 36476 - DNA, 374 bp, Homo sapiens
tacagttttacaagatgttaccattgacggaagccgaataaagggtagatagggtatctttgcattatttcttaaaactacataggagtccacattgataaaaaatttaatgaaaaaatggaaatttcctaaaccaacctgttctgaaactcctattcgaaaatgtatatgaaatggaacctaattaaactaaagagcacagcaaatgaaactatccacaaaataaacaacctacagaatggcagaaaatatttgcaaactataaatctgacaaaagtctaatatccacattctataaggaatgtaaataattgaagatgcaaaaaacgaccccattcaaaaattagcaaaagacatggacagactcttctcaa

SEQ ID NO: 36477 - DNA, 374 bp, Homo sapiens
  misc_feature (1)...(374): n = a,t,c or g
cccaaatttaagcaatctaaatatttaataagtgaatgaataaacaaaatgctacgtttccatacaatagaatactacttagcaatcaaagggtataaattattaatacatgtgactatatggatgaatctcaaaaaaatctagacacacaagaagcacctagacatacaagaatagataccatataattcattctatatgaaatancagaaaaaangaaacaaatcaatagacagactatagattagtgggttgtcaggatccagagnttatagaaggaaggtaattataaaggataagagaacttcttgngttgatagaaatgntctatatcttgattgatgangatagatatatgagtgtatatatttcta

SEQ ID NO: 36478 - DNA, 382 bp, Homo sapiens
tttgaatgttcccagttatgagaaggacagtcaaccatttggtgataagtacggattatctgattagggcattgtcttttttctgagacatcctgtaattgagtggaaattccatgacaatgagaaatttatgttatataccagtgcttctaaaatttgattgtatgcgcaagtagcctagggatctggttaaaatgcaggcttagattaaataggtcctgaaattctgcttttctaaaaagctaatatgtgatggtgattctgctagtccagagaccaatactttgattagcaaggctgtaattaacaaatggccagtgtgagacttcaggtagagtacaagccagataaggggctgaacgaatgttctagaggtgatgcc

SEQ ID NO: 36479 - DNA, 385 bp, Homo sapiens
ctccgttttgccttatccattctcctgtgttattcattatgaactccgcaacaaaatatgaaatctccttataggtatccacatccggggcaatttgctgtcgtagaagtttcttgatgagaataccttcaaatgcaaatatggttacaattcttccccagttaatgatgccgtcttcaaactccttttccatcacttggttgaatagtgttctggcagtgtctacggacacaacattaacattgtccaagcatgacttcagattcttttccacttctttttggactgagaacgcaacattttgtagcactctggacgttttgcttggacctgatccaggttgtggtatctgtaggacgcactgcagatagtcctgagccacctg

SEQ ID NO: 36480 - DNA, 383 bp, Homo sapiens
  misc_feature (1)...(383): n = a,t,c or g
ccaagatcatcctgtcnnnnnnnnnnnnnnnnnnnnnnnnnnnnnnnnnnnnnnnnnnnnnnnnnnnnnnntatatttgtgtgacttacaggtacaggtaaagttgcttctggttttctggttgttgcatggtatttcctatgcagccacagctctttattttcttacttaagtgcctccaacttcccataacacaaattaaggcatgatgaacatcctctctgtgctgaacatcctgtgtatgtcactttagaagcctgtgtgacggtttctttagtctttatacctaggggtgggatttctgggtcataggacagtaatttatatttattttcactaagtattctctttctctggcttttgntacatattacctgtttgcc

SEQ ID NO: 36481 - DNA, 396 bp, Homo sapiens
  misc_feature (1)...(396): n = a,t,c or g
tccatgcccaattttagttctggggtactgaatgacagcagatatatatatactgaattaacgttcaagcaaggagaggagaaaatccccttttccattatctcctagagatcacctaagctgaaaaacatggcatccaaatcaacacctttcaaaagcctgtgaccccacaaataatctcactttacagttctcactcttactgaaacctactcctccccaccttcccatggaaaagtcctcctcaaagactcactggaccctaattatcattaaattgctttcatggctgtaaaaaaaattcatctttaatgnttgcgacaagtgctcatctggattctcgctactacattttggggnttaaagtaattcttttgggcacattaacgcctatcg

SEQ ID NO: 36482 - DNA, 388 bp, Homo sapiens
ctaagattatgaaactgtgaccagatctagcccatcttactccaggtttgatactctttccacaatactgagctgcctcagaatcctcaaaatcagtttttatattccccaaaagaagaaggaaaccaaggagtagctatatatttctactttgtgtcatttttgccatcattattatcatactgaaggaaattttccagatcattaggacataatacatgttgagagtgtctcaacacttagtagtgacagtattgacatctgagcatactccagtttactaatacagcagggtaactgggccagatgttctttctacagaagaatattggattgattggagttaatgtaatactcatcatttaccactgtgcttggcagagagcgg

SEQ ID NO: 36483 - DNA, 397 bp, Homo sapiens
  misc_feature (1)...(397): n = a,t,c or g
agaaacatgagctcaaccttagactggcgagtactgaggtgctcatgggacataccagtgaagacagcaactctcccaggactggggctcagcagggagggctcagatgagttcaggatgtcaaatcatcgaggtgtatctggtggtgatgggaaccagccagtgagcaggaataatcagagaagagcagagggtcaaggtcagagtcctagagagctggtctgggaaggggaaactgaggaatgggcccccaggcgggagatataggaggagccacctagagtgagaggcagattaggaaaagcatcactaggacagatcagggaattcaataagagtggttttggtggaggaatggtggctactggtggcaaattgtggtaaggtantgatgaaa

SEQ ID NO: 36484 - DNA, 398 bp, Homo sapiens
  misc_feature (1)...(398): n = a,t,c or g
caggagtggcagctcctctggaagtgacatgagcaggtcgaggaccacagcggactcagctgctgagagctcggggctgcggccacttcgggagacagaggacaagtacttgtagatcttctcaaagtccacagcaaagtcttcttcagtggagggaccagccgacgactcagaaggtttctcaggggcagggtcaggagtcctgggtgcggagctaggtgcagcaggggcagagctaggtatttcaggggcggggtcttcctgtcctccaggggcgctcnnnnnnnnnnnnnnnnnnnnnnnnnnnnnnnnnnnnnnnnnnnnnnnnnnnnnnnnnnnnnnnnnnnnnnnnnnnnnnnnnnnnnnnnnnnnnnnccgcactcgtaaggggtggattt

SEQ ID NO: 36485 - DNA, 400 bp, Homo sapiens
  misc_feature (1)...(400): n = a,t,c or g
ggccgacaaggtcctgaaggagaagagaaagctgtttatccattccatgggtgaaggtacaataaatggcttactggatgaattattacagacaagggtgctgaaccaggaagagatggagaaagtaaaacgtgaaaatgctacagttatggataagacccgagctttgattgactccgttattccgaaaggggcacaggcatgccaaatttgcatcacatacatttgtgaagaagacagttacctggcagagacgctgggactctcagcaggtccgatacctggaaattagcttagtacacaagactcccaattactattttcttccttnccagctcttcaggcagtgcaggacaacccagctatgcccacatgctcaagcccagaaggcagaatcaag

SEQ ID NO: 36486 - DNA, 388 bp, Homo sapiens
cagattatcatggacatcaaacaatgagaacattaggagcaaatgaaagctgttttgtttacagatactacttttatgatgagaggagagcaatgatggtatctgagaaagaaaccaatatttgttgagtactcgctgtgcactggtcacttttttttcttttttaccaatgggaaatctgaggctttgagaagtaacttgctcacagttattaataatatagccaatgaagtgcccagatctgactggttccaaaatccattctcattttattacaccgtactgcctccccatggagtagcatttttggatcccctaaagcgaacatcaatatgctaggaaaatgaattacttgtgcagtattgggaaaaaggaaatggatgtaaat

SEQ ID NO: 36487 - DNA, 401 bp, Homo sapiens
  misc_feature (1)...(401): n = a,t,c or g
nnnnnnnnnnnnnnnnnnnnnnnnnnnnnnnnnnnnnnnnnnnnnnnnnnnnnnnnnnnnnnnnnnnnnnnnnnnnnnnnnnnnnnnnnnnnnnnnnnnnnnnnnnnnnnnnnnnnnnnnnnnnnnnnnnnnnnnnnnnnnncacatagccaggtcagagaactgtccactctatcattttcttgatcatatgtacttggcattattaaattatttccaacctatagttctttacaggaatcttagagcttggctttcaaaggtttcaccaattattcacatttcttcattttgctaacgtaagactttaaaagtagcataagacttgnnnnnnnnnnnnnnnnnnnnnnnnnnnnnnnnnnnnnnnnnnnnnnnnnnnnnnnnnnnnnnnnnnnnngtct

SEQ ID NO: 36488 - DNA, 366 bp, Homo sapiens
  misc_feature (1)...(366): n = a,t,c or g
atttttttcagtttttatgattgttgaatagatatgtatgtttagttccattattatttcactggaagttttaaattttgagaagatgaagcagagatagaaatccattgcagatatatgtatatttaccccatcttgcaggtttcagttagtaaaacacagaatgataggtcggttttaatgttttaaaaaaaaactaaaaaactaaagttagagaaacctttctgtttgagctactgtatagaaaagacaacttttattgcattgctggtccacatgataaatatttcaatgctgttctagactgtatgagaagtacttaatgaaaaaagggatacnttacatttaagaattgtatcagctaat

SEQ ID NO: 36489 - DNA, 366 bp, Homo sapiens
  misc_feature (1)...(366): n = a,t,c or g
tatgccagtaccatattaccatactgctttaattactatggctttgtaatgtaggctggttgctatttttattggtatattcacaaattcctatccataaacgctggtaaagagtgaatgataagctggcctaataaaaattggccaaaagctgctgtttcatgctggtaggtctactgcatacatcttttttctctattacgagaaaatcaagtccatactgannnnnnnnnnnnnnnnnnnnnnnnnnnnnnnnnnnnnnnnnnnnnnnnnnnnnnnnnnnnnnnnnnnnnnnnnnnnnnnnnnnnnnnnnnnnnnnnnnnnnnnnnnnnnnnnnnnnnnnnnnnnnnnnnnnnnnnnnnnnnt

SEQ ID NO: 36490 - DNA, 369 bp, Homo sapiens
gagcacattccgttaacatctgatgaaatgattagatgaatttatggcatcttccagaagaatgataccagcagagtgagctttatataacaatagcatgggcataatataatgaggaagaacctaagaaagaaaacaagtcaccagaagtgagttaaagctaatttttaactagttccatgaaataaaatgtgtccctgacaaagatagtgtgtcagtttgattgttaataaaataattgtgagacgtggtttcacagcacagcatagtagtatagtaggagctggtacactggggctaaatagccaaggtaggaatcatagccttaactctttctttctgtcactgacctcaagcaagttgctgagg

SEQ ID NO: 36491 - DNA, 365 bp, Homo sapiens
cgcggccgcgtcgactctgggtgacacagactccttcacgcacacacaaaaaagtgaaaacaaacttggaagtctagaatgaagaattacatctaatgcagtaatattcttcccacctttccatattaaatgtaagaagcaccagcaaaaaatactaaagacagagaaatgacctggcaaaatgattcaaataccacagagcgtgagaatattcctcagtaaagctcaagatattatgaagtagctagcagaagaaatggcaggggtagcggaagtaaaaattctaaccatatgacagactctaacagtaagtcataaattctaaaggtttaattagtaaattcattatttcctccaaaatatac

SEQ ID NO: 36492 - DNA, 367 bp, Homo sapiens
atccctctgcatctccttaaaactcactaaaaacagcaatatataaatctctcattttgtctgagtatatcagctccgtgctgatttcattttttccctacccagcctgaactaaaatggtccatttagatattccctcacccgtaacctcaattactacaattgttcttccaacttacctaacctatagtttcccattttgcatcaatcatacaattcaactttcctctctaaccagctgggtatatagtaaaaaattgtaagtatgtaaaccgctgtcacaaatttgtggttttaaatctcacagttcctcaataccttcacttctctgatcaatgaacatttactaaatatctatgtgtaggat

SEQ ID NO: 36493 - DNA, 374 bp, Homo sapiens
gagtcaagtgagtaggagaatggtggtggtgccctcaaaagaaatgagaaagtcagggcagcacctgaactgtggagattagtttagctacagacagcaagttgtaggcactggtgggcatcctggtgggaagtttcagcaaggtggtggagatgtgagtctggagggcaggggtggggccagggtagagtagaggttagactcaggagtcacaggcagaggagttggtagacaaaagggtgaggaaggagatgcctaattagcaggaggtgggtagagacaggagtaaggtttggagacagatggcgggagaggaaggagtaagaggcattgagatgggagagggaagggaagggaacccaggatggtacaga

SEQ ID NO: 36494 - DNA, 368 bp, Homo sapiens
ctctatagcctgcttgttaagagcctagttctggagtcatactgggtttgaactgcttctctccttgtcattagctctgggaccttaaacaagttaacttgccaagcttcctcttctccagctgtaaactgggggtgaaaataaaatttgtatctgggttctggagctaccaagtgaggtggtgcacagtacaccaccatgttccatgtttcatggtaaatattggatagatgctagttataaatggcagcagtatagtgtagtaaaggtagcttgtccaattagctgagaaaagatagatagttgataattattgtttggaagaatttaaaggttttaaacaagaagttaaaccataaaaatactat

SEQ ID NO: 36495 - DNA, 374 bp, Homo sapiens
  misc_feature (1)...(374): n = a,t,c or g
ccgtcgcatccactgttgtggtcgccaatcggccgaggggccgcgatactggttgcccgcggtgtaagcagaattcgacgtgtatcgctgccgtcaagatggaggggcctttgtccgtgttcggtgaccgcagcactggggaaacgatccgctcccaaaacgttatggctgcagcttcgattgccaatattgtaaaaagttctcttggtccagttggcttggataaaatgttggtggatgatattggtgatgtaaccattactaacgatggtgcaaccatcctgaagttactggaggtagaacatcctgcagctaaagttctttgtgagctggctgatctgcatgacanagaagttggagatggaactacttca

SEQ ID NO: 36496 - DNA, 377 bp, Homo sapiens
gtatactacaaaacgttggatgatatgacacctaatgttaattgaatgctcaccattaaacagacctgatgctaagaacttcagatatattaattcacttaaccataacctctgagaaggcaaaggcatgcctgcactcaagcacttactccatggtactctcattcactcaacaaggttaagtgagttggccaaggtcaaaggccatgtgagtacttcacagagccaggtgagacccaggtttctgactcccaagctccaacagaaggctccttagcagtttgaaaacacttacaagcaaccatctgacctcataccatgaattggaaaaaaaagactctgaaaatctttcaaatttctctaatcattctatatct

SEQ ID NO: 36497 - DNA, 362 bp, Homo sapiens
  misc_feature (1)...(362): n = a,t,c or g
tccaggggttggcaaactttttctgtagaaggccagatggcaaatatttaggctttgcaggccacacagtctccgtctcaactacacaactcttgccattatagtactaaagcagccacagacaatattcaagtgaatgagtatgactgtgttccaataaaactttacttacaaaaacttgccttagactgcatttggcatacagggcatagtctgttgattgtgctaatccaaccaactaatatcaactttcctaaatttcatcacagatcatgtgatttctgatttaaaagtcactttcnttgnntngntnggtnctttgtatgttntnacttngttnantntttcngancnnngtctga

SEQ ID NO: 36498 - DNA, 376 bp, Homo sapiens
cgcggccgcgtcgaccagaatttccatcttctgtttccctcatcttcttttctctgaatattctttagaatttcagtaaatgcacctgttagtgtaatacgtgttccccattgctatgaattttaggtatctgggaactgtatggatttattctgtttgggatcgataattacattgccaggactttttgctgcccagtcagagttgatgagaacagtctttcacgtgatcactgcgttcttttggctcttgaggtgctccaaactgcagggacattttccagagtggatatattaaatgaaagcacttactataaagtaggtgctaagcaaatgttttttgaatctgcatctggtgagtgactgggataagatca

SEQ ID NO: 36499 - DNA, 369 bp, Homo sapiens
  misc_feature (1)...(369): n = a,t,c or g
agaaattataaaagtattaatnnnnnnnnnnnnnnnnnnnnnnnnnnnnnnnnnnnnnnnnnnnnnnnnnnnnnnnnnnnnnnnnnnnnnnnnnnnnnnnnnnnnnnnnnnnnnnacagcagactggtggttgagtagggctgggaaagttggggagaaatgatgaacgactgctaatgaggggctgcttttggtatgatttgaaaatagattgcagtgatggtcacacaactctgttcaataccattaaaaaaccaaagttnnnnnnnnnnnnnnnnnnnnnnnnnnnnnnnnnnnnnnnnnnnnnnnnnnnnnnnnnnnnnnnnnnnnnnnnnnnnnnnnnnnnnnnnnnnnnnnnnnnnnnnnnnn

SEQ ID NO: 36500 - DNA, 367 bp, Homo sapiens
ctctaatccattactacgtgaatcatttgagcttcctcctcttgctcatctgtaacctcctgctccagcagtgggaacctaactcctactatcagccacttatttaattgttcatttccagtatacatgtatagcagcatcggaattgttggcacatacctcatggtaaacaattttatcagctggagtacagtgtttatatacggtgtcttttacctttagtttgacagactctactcatttccaaagttacataggtctgcaacttccccctcactacgcctttcagtgaggttgtttcatacatgagtaataaagttagattgttttgtcacattctgtttttatcctgggattgccaaccttc

SEQ ID NO: 36501 - DNA, 368 bp, Homo sapiens
cctccctcgagtctctaacccggggctaccctggctctgatcctggactttgcttccccagtcccgcctcctctgcctcttcccatcaccctagggcatctagcttttctttcttagtgacctcaggtgctcacggcatcaattactgtccagatgaagaggcgccccaatccgtaactctagcgtgaagcccacgctccaattctgtgcatggacatcactagccaggtaatacaccagcaccccaaaatcaacctgtcaaagcaaaaattcataattttccttcccaaccaagattcctgtgtgactcctctgtgacacttggtcctgcgcttttatttttcttgaaaaataatagtacaatagtc

SEQ ID NO: 36502 - DNA, 114 bp, Homo sapiens
ctcaactgtaggagtgtgaaagtacagtaatagatgtgagggaggccacagggcagaggtctgcaaacgatggaccctcagccaaatctggcccactgcctttttttttttttt

SEQ ID NO: 36503 - DNA, 358 bp, Homo sapiens
  misc_feature (1)...(358): n = a,t,c or g
nnnnnnnnnnnnnnnnnnnnnnnnnnnnnnnnnnnnnnnnnnnnnnnnnnnnnnnnnnnnnnnnnnnnnnnnnnnnnnnnnnnnnnnnnnnnnnnnnnnnnnnnnnnnnnnnnnnnnnnnnnnnnnnnnnnnnnnnnnnnnnnnnnnnnnnnnnnnnnnnnnnnnnnnnnnnnnnnnnnncaaaaaacaaaacaaacaaaaaaacaaaaaacagcaagcaaggactccatggcctgcaagatccaaaccagtaaaggagcagctcctcagagacaggcatgtgcattagagagaaaaagtatgcttaacatgacttcatatgataatcagctcattaaaactcatgcatatggactac

SEQ ID NO: 36504 - DNA, 356 bp, Homo sapiens
  misc_feature (1)...(356): n = a,t,c or g
ctgtgattagcttaatggcggagtagatatgggaatgagcaatggtatagatgaaaggagactgcccacaggtttataactgctgaagctgatggtacatgaggattcgttgtattattcgatgttaaatttttccataacaggaagtttaaaattattttaaatataaagttgaattactaaagccaatttttatttaatcaaaataacaatcttttctggtctttaaatgagaagttaaatatgttaaatatttaaaattcacaaagcagcattttgntaaaattattttcccttaaaatangaaacaatgttaatcatcttaatcacaaactcaagataaaatgttttagtat

SEQ ID NO: 36505 - DNA, 372 bp, Homo sapiens
tttggttcattgtaatgaaatttaaatttcctttaaaatcttcactgtcaccctcccccactccccatgcacagaggggctctgccacatgcagctggagagataccattataaataattctacaggtcaggtccaacaccagcaaagtctcccttccttcttagaacctgggctcacagctaacagttcagcaaaatacagagttaaaaaccaatgtgaatttcccagcctgaaaaaaatccaagatcagctgcaggtgcaggaggtccctgaggaaatacaatcgacacaagagcttgaaagctttgaggatgtgtaaagaataaaggcaaataggtggtgggaataaagatctagggcataaaaacatt

SEQ ID NO: 36506 - DNA, 388 bp, Homo sapiens
  misc_feature (1)...(388): n = a,t,c or g
cagtttcaagagatttaacattagaaattaagagacaaaatacaaagtagactgattatgtaagtgaaaatgaattcacagaattctccatgtactccaaaggataaagcttcttgtttaggtggaagatatgtttgtttgagtcatttgaatcattcaacctacacttcatcaatgccaactgtattgtcaggtaccatgcttggcagcagggattcaaagatgaataagaaacagttctgctgagccaccatgcctggccagtttggcagttctttataacaataaacataaactaaccatattgnnnnnnnnnnnnnnnnnnnnnnnnnnnnnnnnnnnnnnnnnnnnnngtccatgcaaaaactggttcatgaatgttcatagc

SEQ ID NO: 36507 - DNA, 387 bp, Homo sapiens
ctggaagccttgtgaagaaaatgtttcaaagggggagtgatcaattgtgtcaaatgctgatgatggtcaaatgagatgaagactaagaatttatcattgcacatacaatggtgtgaaaactggtgacctgataagcttagtttcgtttaagtaaagacaaaagcctgtatgaagtagattaaggtaagaatgacattcaggacagaatattaagtttacctataaagtaaaatagagatatgaggcaataaagaaggacgaaggataaatattggggtgatgtctttgactaggtgtaagagcggatcagacctagagtcaagagaaggggttaaacttagataagagcatgttatgatttctagtaacaagaaaaaaggcagatat

SEQ ID NO: 36508 - DNA, 382 bp, Homo sapiens
  misc_feature (1)...(382): n = a,t,c or g
nnnnnnnnnnnnnnnnnnnnnnnnnnnnnnnnnnnnnnnnnnnnnnnnnnnnnnnnnnnnnnnnnnnnnnnnnnnnnnnnnnnnnnnnnnnnnnnnnnnnnnnnnnnnnnnnnnnnnnnnnnnnnnnnnnnnnnnnnnnnnnnnngggtncancnttncagggnttcagntgtncncncntaaaanttaancgggttntancnanttntncaataccctgntggngggggggaaaattntttttaggaaaantaaaaangtttttttangganacngtnnttaatcnnaancctgtaagngaaaaatttcaagttgggganancaanttcangtaancaaacatgngggcanttnnttntccnacntttaagcaaatntagt

SEQ ID NO: 36509 - DNA, 369 bp, Homo sapiens
  misc_feature (1)...(369): n = a,t,c or g
nnnnnnnnnnnnnnnnnnnnnnnnnnnnnnnnnnnnnnnnnnnnnnnnnnnnnnnnnnnnnnnnnnnnnnnnnnnnnnnnnnnnnnnnnnnnnnnnnnnnnnnnnnnnnnnnnnnnnnnnnnnnnnnnnnnnnnnnnnnnnnnnnnnnnnnnnnnnnnnnnnnnnnnnnnactccttcagagagttcctaagggtttcaggagcagattgcacaataatagaacttggtttacatcagtatgcagaatattaatgaaacaatcaaaatttgaaagtttggtggaaaacaaactggtatgaaatgctaagcagatgaagcaaaaagattctgtaacctttaatgaatattgttaagtgccttatgccaga

SEQ ID NO: 36510 - DNA, 377 bp, Homo sapiens
  misc_feature (1)...(377): n = a,t,c or g
gnnnnnnnnnnnnnnnnnnnnnnnnnnnnnnnnnnnnnnnnnnnnnnnnnnnnnnnnnnnnnnnnnnnnnnnnnnnnnnnnnnnnnnnnnnnnaaagggaggtataaggagtgactgctaatgggtatgagggttttttttggaggaggtgattaaaatgttcttcnnnnnnnnnnnnnnnnnnnnnnnnnnnnnnnnnnnnnnnnnnnnnnnnnnnnnnnnnnnnnnnnnnnnnnnnnnnnnnnnnnnnnnnnnnnnnnnnnnnnnnnnnnnnnnnnnnnnnnnnnnnnnnnnnttttttatattaaaaaaatgttcttcaagtagttggtaattatttttaaaaatggccaggtgcanaggctcatgcctgtaat

SEQ ID NO: 36511 - DNA, 378 bp, Homo sapiens
ctctgctgtatgtgtatacacatgtgcatttctatactggtgtctctgtgtgtccagaaaaaggaaagaagtggggtgtgtatggggagggtaaggttcatattggcctctgtggccctagggagagatgcagcccctgatatctataatctctgccctctcccatgcctttcctgggttctagctgattcctgcttgtgctggtgtggaaactgaggcacacaagatcaggtcctgccccagggagtaaggtgactaagatggtggctggattggggtgaaggtggtaatatcagctggggccagcagttaccctttgagagcctggcctccccttcactccccctaaatctgtgatcccaggcaagctttgccaca

SEQ ID NO: 36512 - DNA, 399 bp, Homo sapiens
  misc_feature (1)...(399): n = a,t,c or g
ctgaaaaccattattattagctctaaaataatgtacaaattctcatccaataggcttgaatctttcctttttatctgttattaactaaacaaatattataaatttcttcgttcaccaaagttctaggatttaaattaattttctcaaagatttttttgggtagatcctgtggtcccagaccattttcactcctatttttctataaatatttttactccctgtcctacatttttttttaaacaaaaaccaatttagattatttctgagcctagaatacatatacttgttccttaaagaatcccttaaaaattatacaaacaagcataaacatcaccagcataagaatgcatttttcaaaccatatattttgtcttctttactatactggnngtactcata

SEQ ID NO: 36513 - DNA, 391 bp, Homo sapiens
  misc_feature (1)...(391): n = a,t,c or g
nnnnnnnnnnnnnnnnnnnnnnnnnnnnnnnnnnnnnnnnnnnnnnnnnnnnnnnnnnnnnnnnnnnnnnnnnnnnnnnnnnnnnnnnnnnnnnnnnnnnnnnnnnnnnnnnnnnnnnnnnnntcaaatctttatctccaacctagatctctctcagagctttcagactgcctaatgaacatctctacctgaatgtaccatgcataactcaaaaacgggcatcaaattctccaaaaatctgttgttctctctgtgagcagcaacaccattcacagttgctcaagacataaatctagacatcatcctgaattccttcttcctcatgccccatatccaagcaatcacaatgtcctattatcattctacctcctaaataccttgatgctatctc

SEQ ID NO: 36514 - DNA, 337 bp, Homo sapiens
  misc_feature (1)...(337): n = a,t,c or g
gcggactggagaggatagtgtcaacacctttacagagaaagctcctatctgaaggtccttgtcttttcttcagggactatgactattttaaataaaagaggattaaagcttcttgtatatttgtagcactatacttatcgtactaaattacaggtcttatgtctctctgtttcctccattagattgagagttccttgaaggcaggaactcacagtctatttactcattttgtgtccatagattaacacaatgcttgacacacagtaattattcaatgtatgcctgctgaatgaagagtgaacaaaggaatgaccantaaaaaangggtancaaaaat

SEQ ID NO: 36515 - DNA, 492 bp, Homo sapiens
  misc_feature (1)...(492): n = a,t,c or g
ctcaatctgtgccactcactgccttgagcctgcttcctcactccaggactgccagaggaagcaatcaccaaaatgaagactgctttaattttgctcagcattttgggaatggcctgtgctttctcaatgaaaaatttgcatcgaagagtcaaaatagaggattctgaagaaaatggggtctttaagtacaggccacgatattatctttacaagcatgcctacttttatcctcatttaaaacgatttccagttcagggcagtagtgactcatccgaagaaaatggagatgacagttcagaagaggaggaggaagaagaggagacttcaaatgaaggagaaaacaatgaagaatcgaatgaagatgaagactctgaggctgagaataccacactttctgctacacactgggctatggagaggcnccacgctggcacagggtatacagggntagctgaatccacttnccaanaggtggggatatncnancaagct

SEQ ID NO: 36516 - DNA, 339 bp, Homo sapiens
  misc_feature (1)...(339): n = a,t,c or g
nnnnnnnnnnnnnnnnnnnnnnnnnnnnnnnnnnnnnnnnnnnnnnnnnnnnnnnnnnnnnnnnnnnnnnnnnnnnnnnnnnnnnnnnnnnnnnnnnnnnnnnnnnnnnnnnnnnnnnnnnnnnnnnnnnnnnnnnnnnnnnnnnnnnnnnnnnnnnnnnnnnnnnnnnnnnnnnnnnnnnnnnnnnnnnnnnnnnnnnnnnnnnnnnnnnnnnnnnnnnnnnnnnnnnnnnnnnnnnnnnnnnnnnnnnnnnnnnnnnnnnnnnnnnnnnntgtctttttattctttgttgctgaatcttcttgagattacattagcttcttggcgttaattttgtta

SEQ ID NO: 36517 - DNA, 339 bp, Homo sapiens
ctcctttgtaggttctttttcttttacccagccattagctgttggaggtcctaggccctctcttcttactctaatttctctacccagtgatctcatccacccctgtggtttcaagttgcatatatactcagatgactcatggttttatctccagtcttgatcttgcccttaactccagacccatatatcaactgtctacttaccatcttttgaatgccttgaaggtaccttgcgttcagcatgtccaggactgagctcatgatcttctctcccaggcctggtcctcttccagggtctctctcgctgaacaacaccactggtctgctacttgctcacgca

SEQ ID NO: 36518 - DNA, 342 bp, Homo sapiens
ttcaccttcagctacctctgctcatctagcaagaaaggaggagttcatggaaactaatggttgcactttgagaaataataggggatgggccgtctactctgcctatggcaggagcaattaggggctaagagggccaacaccaactacataagcatgatctaataatgattctagaattaaccaataacttatatcaagaagactgaggctactctattgcaccagagattcataggtgattttccccctctcttttaataagatatccactaagagtttcaaaatattgatacatgaatgggaagactcttcagtaagaccaaaagcaacacacacgtgtca

SEQ ID NO: 36519 - DNA, 343 bp, Homo sapiens
caagaaagagcaaagtagtgagatgactgaaatgcaacttcctacctcacaagtttgtcttgggttaattctaaggcctaaaaactaccaagtatccactcagtaaatagctgttgaataaatgaatgaacagatgtctcaataagcaaaattggtttaatatgtctatttagtgttcaatttctcataaggatgttatttccatgtttaggataaaaattcaaaatagagttttcagctccttacattagctaaggtgggtgtacatttatctcctgcctggtacctttcctttccgacaagtttctagtctgctgtattacactatctaaaacagccactt

SEQ ID NO: 36520 - DNA, 357 bp, Homo sapiens
  misc_feature (1)...(357): n = a,t,c or g
cagacaccatggcccttctctgttacaccatacatcctgaaaattactataatctgttggctctatcttaaaatagatcctgaatttgaccttgcatcctctagtaatactacctggcaaagttaccatgattatagatatacactatggccaagagccatatggcacccggcttatctccttctacacttttctccctacagtgcattctcaatacagcatcaagattaatattggtaaaatagccaaaaaaggttatatcatgcctctactcaaaacccttaaatgccatcccatcttgctcacttttattagtcaaagtcgttacaatgatttgtaagtccctacaggncttgg

SEQ ID NO: 36521 - DNA, 352 bp, Homo sapiens
cgcttgtctatatcagatcttcttactgatacttaatatttaaagtaacaaatgcaaagtacttatactcactttttgaaatgcttttaataaagggctgaaagtagatcccccttttccatggcctccagggagtggctacatccttagctgtatgttggaaacccacactgggcacagatattttcacagccataaccagttatagctttcagcaaagggcagatttcaccaagcttttcatttcccttctttatttttaggtgtcttttatattggtgaaagacaccacttggcagcaaggtcccatgagtcaaggccaacttgccacatagttgaatacaggcaaaag

SEQ ID NO: 36522 - DNA, 362 bp, Homo sapiens
  misc_feature (1)...(362): n = a,t,c or g
gtgcagtagcaaggaatcatcaaactcactcatttaatttgcctttgtcacaagaaggagaattctacgagtgtgaagatgaacgtatttacactctaaaggagattgttgaatggaagattcctaagaacagaacaagaactgtaaaccttacagatttttcaaataagtgggactcaacgaatccatttcctaaagacttttatggtaccctgattctcaagcctgtttatgaaattcaaggtgtgatgaaatttcgaaaagatataatccgcatcctccccagtctagatgtcgaagtcaaagacatcactgattcttacgatgctaactgggttcttcagctgntatcaacagaagat

SEQ ID NO: 36523 - DNA, 309 bp, Homo sapiens
  misc_feature (1)...(309): n = a,t,c or g
gggtattgatggaacttctgaattttatagctgattttcaccatatgacgagggtgtcctctcacccttttgtgaccttcctattctggagaagagtctgtgtgcttgggagctttatgtgttgggtggggtactttgggaacacaggattagagtttggattagagtttgacttagaatggaaattaacctttgacttaattgtgtgtgagagtggagaagggggaggggatagagttaggaggctgngaagntaggaatgcttgaatgctgnntgaggcnanncggncgnnaattccananntatga

SEQ ID NO: 36524 - DNA, 319 bp, Homo sapiens
  misc_feature (1)...(319): n = a,t,c or g
gttatctcttgcctcctcctctctgtttttatttgttttcaaggtttttcatagaaacaaatactagttttgaaggattttttcttacatttaactgctcaaacataatatttttggggacaccttcttatggaggagtttgaaaactttttatgttcttgagtttgtccaatatcagctgcttttgggaaaggaaacnnnnaagngaaggaaatattttnaggaagtttntctcaacctacaanagctttnaaaataagaaattgacaagtanctagactatgatatgcctttgctttcatcacaaaagttcatcagc

SEQ ID NO: 36525 - DNA, 322 bp, Homo sapiens
  misc_feature (1)...(322): n = a,t,c or g
gcgggatcatagctnnnnnnnnnnnnnnnnnnnnnnnnnnnnnnnnnnnnnnnnnnnnnnnnngcgaggtggggaagcagggagatggtgttagggccagtggggagacgtgcacagattcaggtgcagcgtgggaaacaggttcacgcccacaaggcatccaactggaagttggtgctgaaggacgctagcaaatgccaagatgtataaaagtgcaaggcagaaggtcaagagaatgaaagggtgtttctgattgggcataagtgtctcctgagaggggagctgtgggtgaaggaaagggctcattgnagcttgcatggct

SEQ ID NO: 36526 - DNA, 328 bp, Homo sapiens
cccacttggggagcagaaggaaatttgccatctcaatttacttaacttatcagaagtttctttgcagaaatatgattgtcccttcagtgggacatcatttgtggtcttctctctctttttgatctgtgcaatggctggagatgtagtctacgctgacatcaaaactgttcggacttccccgttagaactcgcgtttccacttcagagatctgtttctttcaacttttctactgtccataaatcatgtcctgccaaagactggaaggtgcataagggaaaatgttactggattgctgaaactaagaaatcttggaacaaaagtcaaaat

SEQ ID NO: 36527 - DNA, 326 bp, Homo sapiens
  misc_feature (1)...(326): n = a,t,c or g
aattccacttctggaaatccctccggatatggattctgcccaggatctaactctagatggccttcctatcaagctcagcaactgaaggtcttacccttaagaaagaaaagggaaagtaacactaaagaggaggggcagaaaataaagtgagagatgctctggtacagcacttagaaaactcacnnnnnnnnnnnnnnnnnnnnnnnnnnnnnnnnnnnnnnnnnnnnnnnnnnnnnnnnnnnnnnnnnnnnnnnnnnnnnnnnnnnnnnnnnnnnnnnnnnnnnnnnnnnnnnnnnnnnnnnnnnnnnnnnnnnnnnnnnnncccc

SEQ ID NO: 36528 - DNA, 363 bp, Homo sapiens
gaacagagtccctgttggccattaagatggcttggaaacaagataaaagagtaaactggctgaaaatcagctcaaataaatatctttgatggaaattaatgagcaagaggtaacttgaactatgcttttaaaaagcaagacagcattaatctttcaccttagttgatatctcaaaaatgaaggattgggagataaaagattttgtcactccagaaagtactagagatgtacacgcagatgattgcagattgttaaataggtattggcaagggtataaatcaggttactgaatttaatctatgcttttgagaaactctgactttcttttctctgataacattcttgagtcaactatcccattta

SEQ ID NO: 36529 - DNA, 354 bp, Homo sapiens
cgcggccgcgtcgacttcacaacaagaagggcacagccaaatctcattctcttgcagtcttttatttctttgtctttatatatatagtctcaatttcccatttctctctctagtttttcaaactttttgtctacatatcctttgaggagcataccaccttaagtagaaacattcagtccctcatctgtatgtcatctgcgccctgtacttatatctgttcttgcaccccccaccctgtattatttttattggcttcagtattgcatcgccaacaagaccatgagctctttgtggggggaacaggccctgtgaaggagttgctagaagttgccatttttgagcacaataccaggc

SEQ ID NO: 36530 - DNA, 356 bp, Homo sapiens
ttaaaaataactgaaaaattttaaggcttatggtaactagaaaaaggatattatcattaagaaatgaagggtagatcccaatgaagttatcgagctatgatatgctggctttaacagtgacctcccaagtagatgtacgtccaacaggtaaattgggggagaaatggttcaagagacaggtcaagtcgaagggcaagaatgaattgatggtgctagatttaattcaggaaaatcactatatctgctgtaaaagctatctgacatgttctaaaaatcacgtgataatttattctgtcaaaaagatgaggtatcttcagtaatacagaagtgtttgtgtaaagtttccacaggtgctg

SEQ ID NO: 36531 - DNA, 322 bp, Homo sapiens
gttttgtatgttcagcctcttaacaatagagggaaagttatggttttatttacatctctcactgagcagatttacacacacacacacatatccaccctccctcttaagggatctggggatgttttacctaaatgattcttactttctgtagggtacaaactgtggctttggtaattggtcttgattgttgagtttagaagctggaaacatggtaattctagcctccagtactctgctcaaaaacgtgcactacccagtacagcactgtttgtagcatgttaattcactttaagaaatgttaaaagtttgagggatctcattg

SEQ ID NO: 36532 - DNA, 326 bp, Homo sapiens
cacagggttggcatcaagcctgacactgaagcaacagcaggtgatatttaaactcttgaagtgattgccaaagttcagaagcacagaggtgtgaattctaatcactggtttcactgtgaaggtgatagtgtgggctggctgctgctacctccatactcattttaaaaaaaactttcaaattggaaatggcatccttccagctattaaagtaaaaatgcacattgtaggaaatttataaagtacttaaagtagtagtgagaggttgatagaaatcatcagtaaactcacctcttgccttgactctgtaccttgactgtaatgcatat

SEQ ID NO: 36533 - DNA, 328 bp, Homo sapiens
cctgttgcttgttttaacccagtaattatctcaaatactgatgccatttcttattaccataatgctgacatcattttaccccttaaggatactcctaaggagcggtccctttgttaagcctcaatctgggtcccttcctcaaagggggaaaaaacaagtattttgggaagattctcacttgctaaatagtttccagcattttgtgccttcccttttctcgtaacatttatttgttcattcactcatattcagtacacatttgttaactgtatcataggtgctgggcagtgtgttagacactgaagataaaaataagtaaacaaatagg

SEQ ID NO: 36534 - DNA, 344 bp, Homo sapiens
  misc_feature (1)...(344): n = a,t,c or g
gannnnnnnnnnnnnnnnnnnnnnnnnnnnnnnnnnnnnnnnnnnnnnnnnnnnnnnnnnnnnnnnnnnnnnnnnnnnnnnnnnnnnnnnnnnnnnnnnnnnnnnnnnnnnnnnnnnnnnnnnnnnnnnnnnnnntaatnnnnnnnnnnnnnnnnnnnnnnnnnnnnnnnnnnnnnnnnnnnnnnnnnnnntaacgagttttggtaaannnnnnnnnnnnnnnnnnnnnnnnnnnnnnnnnnnnnnnnnnnnnnnnnnnnnnnntcatggaaaacagtatggagattcccccaaaaataataatagaacaattatgtgatccagcaatcccatttctgagtatg

SEQ ID NO: 36535 - DNA, 236 bp, Homo sapiens
ctctataacaatatcttggttttcttccaacctctctggccactcctctgcagatttattccacccctttaccccaccctcggccacactggtgtgtgtgtatgtgtggcctaagtcctggcacaagcatttttcttctatgtttcctccttaggcaagctcattctgggtggacaacatctacacacagtgactcccaaatttccatctctgatcctaacctttttttttttttt

SEQ ID NO: 36536 - DNA, 345 bp, Homo sapiens
cagaactggccctgcacgcagcctctactccagtgctctcaggtcctgtccttaataggagaacatgagagctgcagatttaaaaacccaagagggaacctttgcaacaacctttgttatattaggaatcccaaaataaggtgagtcatgcccgttagtgtgcaccttcatcctaaaaatgacttagctgtagttttaatagcttatgtccatcttggtataatgctgtaagtgagttgtgatgagctgtaatcacctttgcttataaatttggtagactgtggaaacagttccaaaccacagaagagacatttcaaactctgagcttgctgcctgatatgacac

SEQ ID NO: 36537 - DNA, 374 bp, Homo sapiens
gtgttactaaaggttgagcgtagtttcatgtgactcttgatatttcttttgtgacatacttgtgacctttgtgtgtctgcttatgttattcataactaacactgctgcctgtgttgtctgggctgccttgtgaggtaaggccctggccccgctctgtgtacaaagagactgaattacggggcacggggcagtgtacacgggggcagggccgcctgaggggagcgggcagggccaaggcacccactcctgccggtagtgccatggagtagacatctgctctctgcgtctgagccacatggtccccactgctggggcttgctgttggaaacagacagccagttgcataaacagaactgcagctggctcaccgccag

SEQ ID NO: 36538 - DNA, 374 bp, Homo sapiens
gtgcaatctcagttttgtcaagctgtttttagaagaggtgtttgaaaataggcatggccaataagaagctgattttttttttaagccaaggacttttgtttgacttcagatggcttttctccagcccccagttctattgttctgtcttcaacaggcctggcctttctagcctggctgactgcaaaggcttcccaccttacctccaaagttgccctgctggaacccattcttcattccacagccagaaagatctttctaaaatgcaaatctgactgtgtccctcctctgttggaaccactcctgtgcctttccgttgctctcatgctgaaggtatctggcctgtttgacctcttcaggttcaagttcagcacttt

SEQ ID NO: 36539 - DNA, 371 bp, Homo sapiens
ttctgaagaaagtgacagtagaagagtaggttagagcaagaatgaaaccagagtaacgagactaaaaagcaaacaaacaggattaattagtcttttaaaaaattaaaattggtatattgcaaaaccattgctataaagaatatattattaagtagtatttaagacttttggtgtatatgttttacaaatcttaatattgagaatagagatttttacaccaagtttattacatgaaataaaagagcaagtaaaagttaattttcagccagcagtcagtattgaatggttcatatgcaggtaaacaaaatctcaagtgtatctgcattctagtcatgtagatatggtatcttgaaatatgaatgtggcctaag

SEQ ID NO: 36540 - DNA, 381 bp, Homo sapiens
caaaaaccagcagcatgttctttaaaacaatctgctcaaaatgattttatggtgtttgcaggcatctgctggccacaacaggtactgtaactgaaccattttgaaacgagtttgttacttattaggaaccaaaatataccttaaacacatatcgggttttctaaattaaccatgttactcaaagctctgatgatgagcatctcaacctcaaactgtatcattttaatttttactcttcaatgaataaagaataaaaaaagacagatttttctgtttccaaacagcatataaatattacaaattttgtttaaaaaaggtcattcttaagacttcgataactttttaatccatcttcattttcctggaccctctcaaatcatg

SEQ ID NO: 36541 - DNA, 503 bp, Homo sapiens
  misc_feature (1)...(503): n = a,t,c or g
tcgacctgtataaataaaacacgcaggaaagatactaagacataaagctgtatcagagtaatattggcataaaactagtggcttgcctagcttaaacttatggaacaatagttttaaattggtcatgaggccattagaagtcctattgaaaacaataaaatgagtctttagaaagaatctctccaaaaccctagaatgtattattgtaaaaatgggaaatataaatgaaatttttataagtaaagataaaattccagtaatagtaaaactttccgtctgagcgcggtgagnnnnnnnnnnnnnnnnnnnnnnnnnnnnnnnnnnnnnnnnnnnnnnnnnnnnnnnnnnnnnnnnnnnnnnaccaacatggagaaccccatctctactaaaaattcaaattgcccgntgtggtggcgcatgcctgtatnccagctcttgggaggctgagcagganaatggctganccaggagggaaagttcggtgagccagacatacattgcct

SEQ ID NO: 36542 - DNA, 512 bp, Homo sapiens
  misc_feature (1)...(512): n = a,t,c or g
gtcgacgaaataactcgaggtacagtcattttggaaaattgacagtttctttaaaaatgtaaacatacacaataagactcagccatcctactcccaggtactcaagagaaataaaaatgtacatccatacagagactggtatatgaatattcacagcatctttattcacaatgactaaaaactgggaacaacctgaatgtctcccaaagagtgaatggatacatccaatgtgatatattcatacaacggaatacttggcaacaatgaaaagtaaccaagcactcctactatgcaacaatgagaatcaatctcagagttactatgctgagtgaaagaagtcagaaaacaagagtatacagtaagtccattatataaaattccagaaaatgcanactaatttatagtgcagaaagcagaacagggttgtgtgggctgagagctgagggaggaacagactgcnagaggaaatggtccatattttgatccggagcaaggtgatgnatctgcatttg

SEQ ID NO: 36543 - DNA, 481 bp, Homo sapiens
  misc_feature (1)...(481): n = a,t,c or g
gccaacttgacaaatatttaagtgttacggcagatttaaaatccatctggcacaccgtggtaggtatttgtacagttcttttaattacacatagctttaaaccatcaacctgatgagtttaaagcttttgcacccatgccttcacttcagaatgaacaccttcattgtgatcttatgttaacctgagaattgatttaaaggaagattgataatcctatactttataacgtaaaaatacaggggctacaggagggtacctaattagacagttctccaaacacagaacacacactggaaaattttccggccaattttgctacctcccaacttgatggattagaggtagcgcaaatgctggtgctcccatctaccttgtagacacttagccatcaagaatcaaggcacaagaagtgcactctctcattaacagtaaatgtttgcaagatatcagtttactttcagcatcatnatgtcttatcca

SEQ ID NO: 36544 - DNA, 494 bp, Homo sapiens
  misc_feature (1)...(494): n = a,t,c or g
gtcgacgctttgtgagctgagaccccactgtgtacctggttaccctcctctgggatatagagtctattcactaaacacttccacttattgtttatatttcttgagggggaacatgagattgtggaaaacacacagatgatgaaactatgtgctttttaagccagtacaatgtgggaagtttttcctatttattaagaaattattcagggatagggcaacttggtttaaatgcagccatagatcctcatttctggttctctcatctggccctccaccttccaaagccagcacaccacctttgaagctcagcctcaaaccctggagntnatcccttgtcccttgaggacccaaagaccaacagncttggcaatgccctantgccctgcctgctccactgtaagaccatggtttctttgcctcatangtcntttgcaagtgtttctccaatcaaanattggtcngactanncgttggcactgcatgagattgcatat

SEQ ID NO: 36545 - DNA, 507 bp, Homo sapiens
gtcgacctttattgcagtgaataccagactaatgcatttactaaattactaatcctaaacgtattatttcaggtgatattgttacaaaagaagtgtttcagattcaggggctctgtgtgccagggctgctaggccaccaacaagtgaggaagccataggtttctctagtcctattttcttatgtggaggataaaaagagtatcacttaaatattctctcacaccctaaaaacaaatgacaacttaaaaaatctaactttacttcatgtttaaataagactgccaagacatgactcaaatgagactcttggagaatactttgcattcacttcaaaacttgatcaattgcattctataaatcatctgacctgccctagccattttcctgctctacccctgctctctgcctagaatactgcttttctctttccttgcttcagcaagctcgactcatctaccctcttggatctctttgcggagcacccaaaaaatgattttatacctaata

SEQ ID NO: 36546 - DNA, 478 bp, Homo sapiens
  misc_feature (1)...(478): n = a,t,c or g
tatgtgtgtgtgtgtatacatatatagnnnnnnnnnnnnnnnnnnnnnnnnnnnnnnnnnnnnnnnnnnnnnnnnnnnnnnnnnnnnnnnnnnnnnnnnnnnnncttaagaccaccctaggcaacagtgagactccgtctccactaaaaatnnnnnnnnnnnnnnnnnnnnnnnnnnnnnnnnnnnnnnnnnnnnnnnnnnnnnnnnnnnnnnnnnnnnnnnnnnnnnnnnnnnnnnnnnnnnnnnnnnnnnnnnnnnnnnnnnnnnnnnnnnnnnnnnnnnnnnnnnnnnnnnnnnnnnnnnnnnnnnnnnnnnnnntatgggtttgcacccactagcattgaggagatgatcactctacggccttgagctatgaatagttcataaacaaacatatattaagggtatatgctaaaattatttttaccaataggaataantatgtcaaaaagttagagacaactgtctagactacttt

SEQ ID NO: 36547 - DNA, 338 bp, Homo sapiens
  misc_feature (1)...(338): n = a,t,c or g
cttagagcaaaaacctgcttatgacctgctctttaacaaaaacttgtaaagggttataaaaagtttatgagaatcttaccttatggtcaaactgattaagattggaaagatttatttatttataaggttttattaagaatnnnnnnnnnnnnnnnnnnnnnnnnnnnnnnnnnnnnnnnnnnnnnnnnnnnnnnnnnnnnnnnnnnnnnnnnnnnnnnnnnnnnnnnnnnnnnnnnnnnnnnnnnnnnnnnnnnnnnnnnnnnnnnnnnnnnnnnnnnnnnnnnnnnnnnnnnnnnnnnnnnnnnnnnnnnnnnnnnnnnnnnnnnnnnnnnnnnnnn

SEQ ID NO: 36548 - DNA, 508 bp, Homo sapiens
  misc_feature (1)...(508): n = a,t,c or g
gtcgacgaaattattgctgctgcagaaaatgctcaagaaccttaaggagggtgggcatcgtgtactcatcttttcccagatgaccaagatgctagacctgctagaggatttcttggaacatgaaggttataaatacgaacgcatcgatggtggaatcactgggaacatgcggcaagaggccattgaccgcttcaatgcaccgggtgctcagcagttctgcttcttgctttccactcgagctgggggccttggaatcaatctggccactgctgacacagttattatctatgactctgactggaacccccataatgacattcaggcctttagcagagctcaccggattgggcaaaataaaaaggtaatgatctaccggttgtgacccgtgcgtcagtggaggagcgcatcacgcagtggcaaagaagaaaatgatgctgacgcatctagtggtgcggctggctggctncaagatggatctatgtcaaacaggagcttgatgatatctcaa

SEQ ID NO: 36549 - DNA, 477 bp, Homo sapiens
  misc_feature (1)...(477): n = a,t,c or g
cttacccttgcttacaaggggtggtagcagattgcaacaagagctggttttcatgattctttaatcgtttccgtattagcctcctcctgtatcagtcctgcccagctctatctctgtctactatattcctcatctccccattccctgagtcttgcatttttgtttgtttgtgcctctctcctttctgatttcatcgttcttggtctgcaacagtggcacttggtcctttaagacctattgcccccattttatagcaatgtcttgtaattgctcctgaaatgaaagctaatnnnnnnnnnnnnnnnnnnnnnnnnnnnnnnnnnnnnnnnnnnnnnnnnnnnnnnnnnnnnnnnnnnnnnnnnnnnnnnnnnnnnnnnnnnnnnnnnnnnnnnnnnnnnnnnnnnnnnnnnnnnnnnnngataatgtgcaattttatgaaattgtatttcagtgaaatgcctgaatgtgattaacacc

SEQ ID NO: 36550 - DNA, 151 bp, Homo sapiens
gggtggtgggaggccctgtggatgaggccaaggctgcctgcactgagtgtcccaggccttatagctttccacattctcacgtctgctgccacatgatatacaagtaaatgtattagaagttggtgttcataaaatactttttttttttttt

SEQ ID NO: 36551 - DNA, 475 bp, Homo sapiens
  misc_feature (1)...(475): n = a,t,c or g
ggctgccccaccatggctacctgggccctcctgctccttgcagccatgctcctgggcaacccaggtctggtcttctctcgtctgagccctgagtactacgacctggcaagagcccacctgcgtgatgaggagaaatcctgcccgtgcctggcccaggagggcccccagggtgacctgttgaccaaaacacaggagctgggccgtgactacaggacctgtctgacgatagtccaaaaactgaagaagatggtggataagcccacccagagaagtgtttccaatgctgcgacccgggtgtgtaggacggggaggtcacgatggcgcgacgtctgcagaaatttcatgaggaggtatcagtctagagttacccagggcctcgtggccggagaaactgccagcagatctgtgaggacctcaggttgtgtataccttctacaggtcccctctgaccctntaccttgnctgtggaagaaca

SEQ ID NO: 36552 - DNA, 477 bp, Homo sapiens
  misc_feature (1)...(477): n = a,t,c or g
gcgagagaggccccgagatgccgagcaagaagaagaagtacaacgcgcggttcccgccggcgcggatcaagaagatcatgcagacggacgaagagattgggaaggtggcggcggcggtgcctgtcatcatctcccgggcgctcgagctcttcctagagtcgctgttgaagaaggcctgccaggtgacccagtcgcggaacgcgaagaccatgaccacatcccacctgaagcagtgcatcgagctggagcagcagtttgacttcttgaaggacctggtggcatctgttcccgacatgcagggggacggggaagacaaccacatggatggggacaagggcgcccgcaggggccggaagccaggcagcggcggccggaagaacggtgggatgggaacgaaaaggtcgacgcggccgcgaattcagatctatgaatcgtagatnnnnnnnnnnnnnnnnnnnnnnnnnnnnnnnnntcgtg

SEQ ID NO: 36553 - DNA, 507 bp, Homo sapiens
  misc_feature (1)...(507): n = a,t,c or g
gtcgaccttctgttttaccatggataggactaggatggttctcaaatctgagtttgaaggataaataagtaatgtaaaaaaataattttctacttgctctttgcgaccttggccaattactgtcttaatccattgttgcaggaggaacagacaaggagctgaggctagtggatggtgaaaacaagtgtagcgggagagtggaagtgaaagtccaggaggagtggggaacggtgtgtaataatggctggagcatggaagcggtctctgtgatttgtaaccagctgggatgtccaactgctatcaaagcccctggatgggctaattccagtgcaggttctggacgcatttggatggatcatgtttcttgtcgtgggaatgagtcagctctttgggattgcaaacatgatggatggggaaagcatagtactgactcaccacaagatgctggagtgacctgctcagnaagacttgcattatcaaagcctcacacaaaatcttggnggaaaa

SEQ ID NO: 36554 - DNA, 338 bp, Homo sapiens
tattaattcagcagcattatgtcacattcctatccattagtctatgtgacccagtgagtctctactttcctcataaatgtgctatacgttgactgctccattaatacctatatttgcttatcaatctaacagagtagatataagcatttgtttgccaggtatgtggaacatctaccctatatccaattggtatattctatatttttattgcaccatttattattttcattttcttacatcaagcctaaaatgatttctcctttgcatttaagaaacaccattcttagactgacacagcaaaaatttcttattttggaagactgacttgaaatatacaa

SEQ ID NO: 36555 - DNA, 323 bp, Homo sapiens
cttttttcattcttaaaaataaatgaattttcactgttggcacatatgaggcttaaatataaggaacataacacttgcattctaatttttgcatatattgtaaatgtgtctggtatttacagcaaaatactgtgtatccttttatgggtaaaacaaaagtgaacattgcatgcatgtaatgtgatgaatttgtaatttaggagttctttggggcttctgtgacttgggaaatgcttacattcaggccttaatgttgcattagctagcatgttttccctctgatgtatatagtcactgttgtataaactaatctttgcttgttt

SEQ ID NO: 36556 - DNA, 338 bp, Homo sapiens
  misc_feature (1)...(338): n = a,t,c or g
gctgatttaactctagtttctccatcctgctgccaggcaatccccctaaaatacaattgtattcaatcaaacatttctatatttgaacctctacatagtacctgcccttaaagaattcaccatctggtagggaagacatacgtctcatgattcccttgtccaaaatccccaccaatacaatcattctgaagaacaatttatcaacttctagtagagtttaagatgggnnnnnnnnnnnnnnnnnnnnnnnnnnnnnnnnnnnnnnnnnnnnnnnnnnnnnnnnnnnnnnnnnnnnnnnnnnnnnnnnnnnnnnnnnnnnnnnnnnnnnnnnnnnnnnn

SEQ ID NO: 36557 - DNA, 323 bp, Homo sapiens
ggtaaactctgggaaactatttgacctctagcctgctggaagatgaggccatgtaggggagaacagaggcgttccattgacagtcagtgtgcaagacatatgagtgaagccaacttggaacttcaaccctgccgcttccccagtcaagccatcaatgactgtagactcatgagtgaccctaggcaagaccagaagaaactcccagccagcacatagattcattttggttgtttgaagccattaagttttagggtggttggttttaaagcaatagataccatttataataggaaaatatcaaatacctacaaataaatctgtct

SEQ ID NO: 36558 - DNA, 322 bp, Homo sapiens
tttgtatttcagtggtaccagttgtaatatcttctctttcatttccaatttgatttaagtcttctctttttcttttttagtctagttaagggtttgtcaatcttgtttaacttttcaaaaaactctttgttttgttgattttttcccctggttttctagtctgtatttatttctgctctgatctttgaattgttttccttctgctaactttgggcttaaatttgttcttctcttgtagtttcttgagtaggttctttatttgagatgtttatttttatttaagtatttgttgctataaatttccttcttagaactgcttttg

SEQ ID NO: 36559 - DNA, 322 bp, Homo sapiens
  misc_feature (1)...(322): n = a,t,c or g
nnnnnnnnnnnnnnnnnnnnnnnnnnnnnnnnnnnnnnnnnnnnnnnnnntcatattcccttttctgtcttccttctttttcttttgtgcctcatcatcgcttttcccccaaaaagctttccccccaaagtgctagttttttttcctccatattgaaatgtttgatactagacttcctggtttagaatgagttgttttcctatactcccctattttttttgttccctcgtgccaaaattttgactgagatcctacactttttcccccccgatccagggctaatagagcatgccaaatttccagtggagaagaattggagatg

SEQ ID NO: 36560 - DNA, 338 bp, Homo sapiens
aacttaagaaagtgatccatgagaaagatggaaagatcaagtctgtagaagagcttctggaggcagaacttctcaaagttgctaacaaggagaaaactgttcagttatctatcacttccaaagttcaggagcttcagaacttattaaaaggaaaagaggaacagatgaataccatgaaggctgttttggaagagaaagagaaagacctagccaatacagggaagtggttacaggatcttcaagaagaaaatgaatctttaaaagcacatgttcaggaagtagcacaacataacttgaaagaggcctcttctgcatcacagtttgaagaacttgagatt

SEQ ID NO: 36561 - DNA, 320 bp, Homo sapiens
cttaattctagttgtcttttctttggttatttttataatgggtggttttcaattgtatcatgggtattctaagcaatataataggagactttgagccctatgtaaaaatcttttatttttgtgggtagtcattctacttaggcttaacacacagatcttggcccactttgtgtgctgtggttccaataagagtttaattttggtttatctgatgcatctgggactccctgatgctgcagtatgaaaggacagatgagatttctccagtccagctgcctccatgttggggagatggagcctccagcagttggagaagaagg

SEQ ID NO: 36562 - DNA, 337 bp, Homo sapiens
  misc_feature (1)...(337): n = a,t,c or g
nnnnnnnnnnnnnnnnnnnnnnnnnnnnnnnnnnnnnnnnnnnnnnnnnnnnnnnnnnnnnnnnnnnnnnnnnnnnnnnnnnnnnnnnnnnnnnnnnnnnnnnnnnnnnnnnnnnnnnnnnnnnnnnnnnnnnnttgaagtaatgaattttatttcagtggtatggggaaccttgtttctgacagtaggggaagctatcatgttcctggtaggaggttgcatcttatttcaagcggtgggaaaacaggacctggctttgcattagtaactgaagccaggtggtgaactctcagcatgtgtaaggagccggctgagaaggagctttgctcccatgata

SEQ ID NO: 36563 - DNA, 332 bp, Homo sapiens
tcttggagtcggataatagacagcaagtttctaaaacagcaaaagaaagatgtggtcaaacggcaagaagtaatatatgagttgatgcagacagagtttcatcatgtccgcactctcaagatcatgagtggtgtgtacagccaggggatgatggcggatctgctttttgagcagcagatggtagaaaagctgttcccctgtttggatgaactgatcagtatccatagccaattcttccagaggattctggagcggaagaaggagtctctggtggataaaagtgaaaagaactttctcatcaagaggataggggatgtgcttgtaaatcagtt

SEQ ID NO: 36564 - DNA, 332 bp, Homo sapiens
gcattatcttattttatttattttatttactatacacttcacctagaaactcatagtgttaggaacctcatcaaatgtcaggtaaaatgtccctttcagaaactgtccctgaaatcatccaattaaaaacagacacttgaaatgtcaagaaaacaaacagaggtagtgacacgctctatttttaaacttactgtggggatgctcaagcacctatgggagtggaagaatcatacaacaaataccgtttctatttttaagagatgttaagaaaggagcacactgaaagctggcaattaaagggaaagaagttagcatttctgtccaaagtgtgg

SEQ ID NO: 36565 - DNA, 314 bp, Homo sapiens
tttttggaaagtgatttttaagaaaggttaaatgaagcattactcatgatactgggtatctactataaatgttatacttgatttcatagaataaataaatgtgtacttagaattaaattgccaacaagaaagttacatggaaaaaaatgtgaattcattggatgacactgaaaattaagtaagagaaatagtattctgataggaatctctatcaaaatgggaaagattgtcttgattagtgaactagaatatctcaagtagaggaaatgactaaaggcttttgtccagtgataatacaattgctaatattttta

SEQ ID NO: 36566 - DNA, 314 bp, Homo sapiens
cttgtcacacactgttatgtggtaagaaaactgcaatgaagaaaatagacaaaaatctctactcttttacattctagtttgggagagagaaacaaaatagctgaattatgtagtagattagatagtgatgagtgctatgtaaataataaagcaaggctggttggttgggaggcatgggagttgattgcaaaattaaatagagtggtcagaggctggttggttgggaggcatgggagttgattgcaacattaaatagagtggtcagagaaggcctcgctggcatttgagcacagactttaaagcacagtcatgtc

SEQ ID NO: 36567 - DNA, 333 bp, Homo sapiens
gaataatgaaaacagtaaattttaagaagactagggagtacaatgtaataattttaaaaagaaggcgaatttaaattcacttccaagtgacactctccaagatgaattatctgtcctacgttaaatgttccagaagaccttcaggaacacaactagaaatggaaaatttcaagataagttgtatagcagcatttccccaaagtacttttgcatagttggttttaaaggttaacaggcattacatgtaaataaaagggtagtgaagacaatttgggaaatcctagggttcataaaattagattcttttgtgtaggactcattagcacctttaat

SEQ ID NO: 36568 - DNA, 312 bp, Homo sapiens
tttgtatttaatgaatttttaaaaaatttattgtgcttctcctgtttataaaaagtttgtttcttgaaaagaaacaaattggaattgtacaggactatatcttgtaaattttacaattaatgtctttatctaagtcattacttcaaatgttatctaataaaggactgaagatgactcttatgaatcaatataagagaatgccttcagactgcagcaatttgtgatcactgttctctaaatatagatatactgtcacctaattacatcatctacccaacccatatttttccgtcttgtcccaggtatataaga

SEQ ID NO: 36569 - DNA, 313 bp, Homo sapiens
cttacccacaatgtcaattaggactcatgattctcccaccggcctctattttttggtcacaacatctagcacgttttataaatccatgtttacttggatgtttgttcacttaatatcagcctttcctacccgtaactaagttccaaaatagacaggaccttggctgtttggtacaccagttgtatctcaaggtgaagacagttctagatatatggtgaactcctaatcgatgatttgctgggttttatcactttacttacagtcaattccaggcaggctatatctgtatcttggtaataggaggaaatatttt

SEQ ID NO: 36570 - DNA, 338 bp, Homo sapiens
  misc_feature (1)...(338): n = a,t,c or g
tagtagagtaaaatgttaatggtagatctaggtggtgagtttactgtaaagttctttctgtatgtgtgaagattttcctaatattagaaaaagagtgatatgtttgaatgactgcagaaaagcttggaatgacattcagactgttaatatgttgttacctttgggaatggggaaaggatttatgtttcaaacaatacaggaatgggtgaagtattaaaaaatgagcttattattacttatgtaattaaaatccaaaagggaagaagttaattaatttcagtgtttactcaggggtgnnnnnnnnnnnnnnnnnnnnnnnnnnnnnnnnnnnnnnnnnt

SEQ ID NO: 36571 - DNA, 339 bp, Homo sapiens
ttctattttaaacatataacggcaagaaaaagaataatccaaaaactaattaaagggttatctatcgagaaagagaggtgaaggggacaggaatggaagcaagaattctcttcatgtaccttggtttatacttttgattttagaaacacataaagatgttatatataactattaaagcaaaattaaatcaaaatgtgaaaaccactgggtaaaaaattgttggggaacaagatattcataagatgccaaagcatcactctaaagattactaattaatgacaaaggtaaaagtgtacatttagcgttgaaaaacctagcaactgacactttaactgaggg

SEQ ID NO: 36572 - DNA, 342 bp, Homo sapiens
  misc_feature (1)...(342): n = a,t,c or g
ggcaattctcaggtgtaatatcacttgacctatccagagcatttaacaagcgactgatcacatgcttcttcttaaaacattttcttcatctgacttccccgacaactgacacctgcttccccgtgcctccccatgcctcatggattctcgtcttcagtctctgctagctgcctcatctccaggagctgtagaggatgaggtccctagtaatcagttgctgaccctcctccctgctctagctaaccttattaccttgtgatgggatccagtctcatgtcgacgcggccgcgaattccnnnnnnnnnnnnnnnnnnnnnnnnnnnnnnnnnnnnnnnnnnnnnn

SEQ ID NO: 36573 - DNA, 336 bp, Homo sapiens
ggttaatttgagggtccctcatatcaggaatagatttgtggttattatactgtcaacagttgggtttctgagcctataaggctgagtcctggactcataactctcttatcaacaagccaataccattctgtgaggcctctggaaaaacagccagcaccatcagctgacatcctttaactgtattctacaacaaattggttttgcttatctaaatgcttttcagcaagaaatctgctactttaaataataagtgggaggagatgaaagaaaagagagaggaggaaagagaaaattttaaaaaaagtaactaattgactaattcaacattctgcttca

SEQ ID NO: 36574 - DNA, 336 bp, Homo sapiens
tttcagactctcaactcaacatgccacaagagcaggagacaaaaaagagagtgaaaggaaggacctgctggcaggacttggtgcctgggcaggggctgatccactagacatgatggcaaaagctctgaggcaggaaaaagggtgaactctcctccttggttgtatacgggaaaaggtgaagtctggagtgaagcaggttttaccaagaggacaacaagccactctcatcactggctatgggggtagctgtctggaagctgatgagactgatagtgccatggctgtgcttgtcataaatgagtcaaaggccattttggagggcagcgatgttacaaa

SEQ ID NO: 36575 - DNA, 333 bp, Homo sapiens
cgcggccgcgtcgacatccaaattgtaaaagcaccaggaatagtgcccattcttactagcctacatggtaaacataatccataggacatcaagtaaaatactcgtaagggtttttgcctgagtagcagggaaacaatgcctcacagtaaacactgctttggccctacctaaccatgcttgaaaccaagatccaaacagatcaaactgttccctaataatcagatctcagaacaatgctcaagaatatgtagagaaatacgaacatttcccacagccagagaaaaatttagtgtctgtcaagtaataaaaagctaccagacatgcaaagatgca

SEQ ID NO: 36576 - DNA, 330 bp, Homo sapiens
ccctccccatgcagctcttccactgtccatccaagccttcggcaatcactagtgagctttgttttatggcccagggtagggtctaaggatatgttcagtgaatacttgaaaagaatgtttattttgctattgttgggtagagtgttccgtaaatgtctattagatcctgttgttcagtggtgttaagttcttctcaactccatgctgatttttttgtctagttgttctatcagttgttaagagagggtgttgaatctccaagcagaatgattgatttgcctgcttttctttcaggatcttttcttgatccttttattcctgctcttgaaa

SEQ ID NO: 36577 - DNA, 338 bp, Homo sapiens
gctttttaaagaaagcaattcaaaaatgtcttaagtttgcaaattgtataaaagtatgtaactgtatttgggatcacatagtgagggatcctcccagagctttggaaggagcttgtgagtgagaggcctaaagcctaagcttcattagctttccaataaatccacctttagcagttttagtgcctcattatcttcctttccactcaatctctgcctccaaacaccccaggcttggattctgaagggggagtattgcatttcaacccagctgcaattcagtgctggcacaaactagccagacttagcacagactccataagttaaagggcatagtcccc

SEQ ID NO: 36578 - DNA, 335 bp, Homo sapiens
gtgcagcgagaccttttccacgggatcacattttcttttgacactcctgggaggcaggcaggaccatgttaagtggctgtttttcagtgaatgattctacggggaaacctgaataagatggtaatgttataggaaagtgtctgatgcagaacccggcaatggctaaaactggaagatgcaaagcagcctgctagtgtgggagctgcaataaaccaaatcccctttttttttctcagtcagaaggagggactttccaagcttgatcctctaagaaaaaaggatcccctcctattttcttaccgattttcaattcatccacaatgcatgcttcttaa

SEQ ID NO: 36579 - DNA, 332 bp, Homo sapiens
aagaggagtggagaagttttggaatagctgttgaaaatgggagacagctaactagggaaacagtaagacagccagtcagtgttaagggtttaattgagattgatgacaacgaatgtataaacttgatcatctgtgtggttttgctcatgttctcctgtggagctcagtagcccatgcacagagtatattgtacgtactatccgctcatcactcttatttactcattcgcttgttcattaatttaactactttgtgccaggtactattctaggcactgtttcatttgatgattaatattttatcttctttttctttgatacagggtctcactc

SEQ ID NO: 36580 - DNA, 339 bp, Homo sapiens
tttaaacttcttaactgcacaatgagccctcagtggacaccttgattgtgtttgtttgggaaaatgccaagcactaatgagtattttgtttaatgtaatggaaactgaaagtacatggcttcttccctgactgatcaatgcccacttctgttgtttgaatgtatctatacattctaaattcaaaaaagaagtgtcacaagagggcagagcacttaatgtctgcccaaggaaggacttgaagattcagaagttttgtttatttgggcccggtatagacagacagtactggagttagtactctagggcctcctcctctgtgctcagatatgcaatttttat

SEQ ID NO: 36581 - DNA, 333 bp, Homo sapiens
gttttggtggtcaatgtagaaaggtgtttagtggggatggaaaagatttctacaggctgagtggaaatgtcctgtcctatacattccaggtgaaaataaataatgattttaattatgaattttacaatagtacttggtcttatgtaaaacatacgtcgacagaacacacatcatctagtcggaagcgctccttttttagatcttcatcatcttcttcacgcagttatacttcacataccaatgaaatccataaaggaaagagttaccaactgctggttgttgagaacactgttgaagtggctcagttcattaataacaatccagaatttttac

SEQ ID NO: 36582 - DNA, 333 bp, Homo sapiens
  misc_feature (1)...(333): n = a,t,c or g
cagctactcaggaaacnnnnnnnnnnnnnnnnnnnnnnnnnnnnnnnnnnnnnnnnnnnnnnnnnnnnnnnnnntctatctcaaaacaaaccaactttggaattgtctaagcagaaggtcttttggagctcaggagcagagaggaaaaggtaatttcagagtttaaggagcttccaagatctccgtagagaggagtcccttcagaaagctggaaggcattatgttaacactggatgtctggggagaagggaaaagtacagggtactattttcacatttcctttcactattctgtgaaccaccttttgtgtttatttacacataattcttttct

SEQ ID NO: 36583 - DNA, 341 bp, Homo sapiens
  misc_feature (1)...(341): n = a,t,c or g
cgcccggccaagacagattattaaaggaaaaatgattaagaattttcaagaattaaaaaaatggaaattacaaaataattagatctaaatcacaacaaaagtgttgtatcaaaatttgagggatgcacaaaaatggtacttggggataaatttataatctttaatgaatgtattagattgaaagattgaaaataaatgagccagctcttcaatttaaaaaactaaaaaaagagtagagccaaaggaagaagaggaaataataaaaatgaaaacagaatttggtgaactagaaaataatcagcaatgannnnnnnnnnnnnnnnnnnnnnnnnnnnnnnnnc

SEQ ID NO: 36584 - DNA, 329 bp, Homo sapiens
aaaaaattataagcaatcggcttgtctgcagggaaacatctgtgctataatttccagcgttaatggatatagtagaaaagttggaaatgatttaaaaagatgaagtccatggaggtttattttggtaaataggatttatgtgttttgatttctctttaaacctgtttttaaagctattttattgaatacgttttcttcctctccacctgaagcaacaaatagcaagattcttttagaggtccattcttaatacaactatttggatgcctggtatttgtagaagtacatactgtatgttagatgtaaattgatttatttgggaaagaccc

SEQ ID NO: 36585 - DNA, 335 bp, Homo sapiens
  misc_feature (1)...(335): n = a,t,c or g
taaaaatgtcctatttgtctaaaatctaaatctaaaagatctgaacctaaaaccccataattttaaaaatggaaatgnnnnnnnnnnnnnnnnnnnnnnnnnnnnnnnnnnnnnnnnnnnnnnnnnnnnnnnnnnnnnnnnnnnnnnnnnnnnnnnnnnnnnnnnnnnnnnnnnnnnnnnnngttatcctgtagagnnnnnnnnnnnnnnnnnnnnnnnnnnnnnnnnnnnnnnnnnnnnnnnnnnnnnnnnnnnnnnnnnnnnnnnnnnnnnnnnnnnnnnnnnnnnnnnnnnnnnnnnnnngtggaatcctagactctggtcctttgtgactg

SEQ ID NO: 36586 - DNA, 322 bp, Homo sapiens
  misc_feature (1)...(322): n = a,t,c or g
tgacaattgggggtggggttgaaatagcccataaagacctgtcttcacaacacttgcattgtagagaaaggcttcttatatccttttcaatagactgccctggctctttcctaggccttccactacctcctttctttctcccactttctaggatcatttttatgtaaagtcacatatcccaggccctcaggttgaatccagagctgtagaggttacagtagcatcaccagccttgggggtccagagcctaatttatattcactatccttccaagtagcagaagggttgccatagatctcantttgatcaaaaagaaggctta

SEQ ID NO: 36587 - DNA, 333 bp, Homo sapiens
gctaaagcagcacaaaaaaaacatagcccctaaatgtatgtgcatctacagataaatagtgccatttatacacacatacgctgtatgtctgtatttttaaagctaaagaaaaataagcatgcagcttaagttggaacaactcaaagtaaatggaagaaaaatctccaaaactgactaaaagtaatagaaagcctgagttgtaatcactgatgaaattgagtcagtagttaagaatgttcccctagacggttttacagggaagttccaccgatatagagaacaggtaattccagacgtagacaaattctaacagaatcaattgagagaacactt

SEQ ID NO: 36588 - DNA, 329 bp, Homo sapiens
gacaattttaactgagtgcttgatctttactctctgtgtgtatccttttagatttttggtttgattctgagaacactagatagctgatagtgtgaccagagatgtctcattattatagttagctcccattggtttatttctgtgtaactgtatatgagatagaaagagaccatgtgaatgtctagaacataggcattcaatcaagttgttttgaatgcatgagcagttgttcagctgattctgtcttaactgactgtcttgcctggtcaccttcctccaatatctgtacagatcccaccttttctcagagcttggttccaacagtgtgg

SEQ ID NO: 36589 - DNA, 330 bp, Homo sapiens
  misc_feature (1)...(330): n = a,t,c or g
gggagagcggagaatcctctggggagaatcctcttcatggctgcaggaaacagagactagtccagaagggaccttgaggggtcatctggcactagtgcccctccaggaaggaaggccctggtggccacactgacttcactcttactatgtgcaggcactgttccaggtactttccaagtattaactaatttaatcctcttgacagccatacagggcaaataacattgttattcnnnnnnnnnnnnnnnnnnnnnnnnnnnnnnnnnnnnnnnnnnnnnnnnnnnnnnnnnnnnnnnnnnnaagggacagagctaggattcacactcaggg

SEQ ID NO: 36590 - DNA, 330 bp, Homo sapiens
atttttctgatagtgctgttattgtcagactgctacagaggtccatggcagaaaattaagattaagataccttgatctaagaagttagtaaatgctgtgtgacagatctcagtaatatagcgcagggatttgtacccaggtgtgagagattcaatgccagcgctcttaaactaatgataaaaataaaatgagacacaagctaaattggacactgctgtgtgccaggcacagcattaagcagctttaattggattagctctgactcttctcaggcacctaaatgggtaagtacttttattatccacatttgttagttgaggaaactgaggg

SEQ ID NO: 36591 - DNA, 328 bp, Homo sapiens
  misc_feature (1)...(328): n = a,t,c or g
cttggatcaggagtgagcatgcctgagtttggagatgtgctgactcagagcagtgatgatgctcagcacttttaggacagcttattacaaaataatacaatactgctccatggaagtagccgtttttgactgtcggtattatttcagtactggtagctaagaacacatccccctcaggaacagtaatagctgccttggtgctcatttcagttacatcatagatggtcaagagtcataccatttgccatggtgaaccttcctctacctttttttaaacaacaaacagccatgggttttgngagtggnatggagaaaattgtctgaagta

SEQ ID NO: 36592 - DNA, 359 bp, Homo sapiens
  misc_feature (1)...(359): n = a,t,c or g
tttcaagttaaaatgttatgctctggctggatgtggctcacgcccgtaatccaagcannnnnnnnnnnnnnnnnnnnnnnnnnnnnnnnnnnnnnnnnnnnnnnnnnnnnnnnnnnnnnnnnnnnnnnnnnnnnnnnnnnnnnnnnnnnnnnnnnnnnnnnnnnnnnnnnnnnnnnnnnnnnnnnnnnnnnnnntttggcttgagccatcgagcctggaacaatatattttaattgtggtttccctatctatatcccccacaatattgtgagtagattatactttatgcactgttgtctccttagtggtggtcgacgcggccgcgaattccnnnnnnnnnnnnnnnnnnnnnnnnnnnn

SEQ ID NO: 36593 - DNA, 358 bp, Homo sapiens
  misc_feature (1)...(358): n = a,t,c or g
cgcggccgcgtcgaccaccatcaaagaacaagatatgttaaagnnnnnnnnnnnnnnnnnnnnnnnnnnnnnnnnnnnnnnnnnnnnnnnnnnnnnnnnnnnnnnnnnnnnnnnnnnnnnnnnnnnnnnnnnnnnnnnnnnnnnnnnnnnnnnnnnnnnnnnnnnnnnnnnnnnnnnnnnnnnnnnnnnnnnnnnnnnnnnnnnnnnnnaaattaattaaaataaatgtttatttacaagtcacaacccacccctaacacagtcctcagcacatcgttagggttctctcagtacttaactaactgaatgagaaaataaacagacgcgtgactaaatcctccagcaaagagaaggatac

SEQ ID NO: 36594 - DNA, 355 bp, Homo sapiens
ttcactgaagtctcttgaaaaatgtccaagaaagtttgcatttataacacaagtaacacatgttaagtcctctttcacaatctctgttagttgcactcaatgttctttttctcctcccaaacttcttagcactttctaaaaacctgacctacgattgttattttaggttcttcccaactttttttctgcctcccaaggaaatgtggtatctctgacttccacagctctcactttgattcataacaccaaggcttcttccccctggagtgggagacacaatagggatggggatgtgggcagaagaagaggattctatgaatattcatagttttatttcacccaccccaaatgtatt

SEQ ID NO: 36595 - DNA, 358 bp, Homo sapiens
ctaaaaccttgccctaattatagtcctgggagaatatgtagtgcagtgtgatgaggacggcacaaaaattagaataaggcagtctgggttcaaatcctgtaaccttagaaaagttattcgtggttgaggtgcctccattttttcttctctaatattcctaaaatcccaccactaaattaatagtagcatttattgtgtgataattgagacaatgtatatgaaatacattcaccagtactcaaaacatagtaaatgactgtaaagttaccacactattattgtttctgtgttaggtgttgatcttttgcattccttcttgtgctttagtgttaacactaggtggcagcaatgctctctt

SEQ ID NO: 36596 - DNA, 65 bp, Homo sapiens
ctgaaactctgtagttattaacaattccccacttctctgttgccccagttctttttttttttttt

SEQ ID NO: 36597 - DNA, 140 bp, Homo sapiens
cacctacataacaagagtctggatctaaaaaggaccattgccagtatcattgagacattttgatgtttgttttgattcaggttttttcattttcctagatgttctagtagagctgaaggcttatcctttttttttttttt

SEQ ID NO: 36598 - DNA, 354 bp, Homo sapiens
  misc_feature (1)...(354): n = a,t,c or g
gtcgacgcggccgcggccaggctggtctgtaactccttacctcannnnnnnnnnnnnnnnnnnnnnnnnnnnnnnnnnnnnnnnnnntataggtgtcagccacaacgcctggccaaggtctaataagattataatggagctaaaaacatttctattgcctagtgacatcacagatgtcttaacattatagcgcaatggattactcatgtgtttgtagtatggtggtgtaaataaacctactgctttttatagttatttcagagtatactccttctacttagaaatgnnnnnnnnnnnnnnnnnnnnnnnnnnnnnnnnnnnnnnnnngtgtccagaaggcattgctatcataag

SEQ ID NO: 36599 - DNA, 350 bp, Homo sapiens
cgcccatcagtggcacccctaacatgctcacatttccagaactgcctcttgggcggaggtgggggagggtaccatctctttcagaacaagtattttaaaagaaatcctgtatcctccttaagtagtatttcagtctatatatttgtccatttcctatctctgcttctctctcagttctttccccaccaaacctgaaaattcagaatctattttgtgggctttctttttttaattttttccctggaagaccatgaacattcctctttaggttgttagtattgcagcaaaccctgaggtattgacacaaaacttttcatccgccaaagagctcgagtaagtaaatctgtctg

SEQ ID NO: 36600 - DNA, 340 bp, Homo sapiens
ctccttcagacctgaagaaggcatttagtcaattattgtttctgggaactaaataatacccttgtcactcaaaaaatttaaaatagcctttgtaagtggctcctcagtctctaagagaacatgactcattctttctttgtaacttgaaagaaatccaagtgtcagaagacactgggaaatggacttaagttacacttctaaacatcagtactagagatcttaaatattaggaaaccaatatgatattggtttaaagttgatggttggagccactgtattaggatgaaagggcaagggattgactggcagtgctttctagaatattccttggggaaattct

SEQ ID NO: 36601 - DNA, 350 bp, Homo sapiens
  misc_feature (1)...(350): n = a,t,c or g
gtttctaaaaaatgatgtcaactggtatacaataccggggcaagggagcaaaattttactatgttggttcttctcctgaaccccatgttttttccattataataaacaagatcatttatagtctggatgaattagccttattcagaaaacagtcttaagaaaaatctacattaaactgctttcagattttaaaaaaggtttccattattttttgtttttgcaagagaagtcaatacacaaatttattagaaaaaatatttcttaaaaaaannnnnnnnnnnnnnnnnnnnnnnnnnnnnnnggttgtctagatgggagtgcaatggcatgatcgtagctcaatgtaaccc

SEQ ID NO: 36602 - DNA, 343 bp, Homo sapiens
acaagctggccaaagtcacttccccaagatctgccagacctgcatggtcaagcctcttatgggggtgtttctatctctttctttctctttctgtttcctggcctcagagcttcctggggaccaagatttaccaattcacccactcccttgaagttgtggaggaggtgaaagaaagggacccacctgctagtcgcccctcagagcatgatgggaggtgtgccagaaagtcccccctcgccccaaagttgctcaccgactcacctgcgcaagtgcctgggattctaccgtaattgctttgtgcctttgggcacggccctccttcttttcctaacatgcaccttgg

SEQ ID NO: 36603 - DNA, 290 bp, Homo sapiens
cactcactgaattcagttatgcctctttttatcagaactaaaggcctgctttcgtttttctctttcgtgatgttgacgtctttgaagagtctgagccttgttttatggagtgctgcacaatctggacctgtctgattatttcctcatacttagattaagatagacatttcctccatttctctttccagcacatcagtgggcacaccgtggctcatggtgataagtttgttcactgggctaaggtcgtttctacaagagttctctttataaagttactttttttttttttt

SEQ ID NO: 36604 - DNA, 343 bp, Homo sapiens
ccccttttccatttctcgttctctctgtattttcttttccattcttttttcctgttccttttttctgatctcaactgcttttagcaagttgtgaatatacttgggctttctgtctttccccaaaagcaatttgggattattttcctccttttttttctgcatttcatcataaatactgtcatattcatacacagtagcatcttctgcaagggccttctggatttccagtttggtctgtttcatggcctgcttcttagcagcttccctctgaaggctttcactcacagaggtctgtaaaacagaaatatattgtcactttttaaacaaatttaaaatttctttt

SEQ ID NO: 36605 - DNA, 337 bp, Homo sapiens
aaaagatatagtagtcagctgatataaatacatccaaagttttgcacttgtgggaaatgaaattagctctttggtcaaaactcaaaactttttcttgggattttaccatttgtggtgggtttctgtgtttcacagggattaacttttagttgactccttgatataaggaatccctttatcatcttatctacatggatattatatcttgctcaagtgattcaggctcttggggcaaaaagatggggagataccctaaaaaataaggggaagttcaagaaataaatatttcctaaaagaactctataatataaaagagtcttgagttcaggggcaggat

SEQ ID NO: 36606 - DNA, 327 bp, Homo sapiens
tagcacagtcccttaaaatatgaagggtgctgtttctttactgcctagccatagagaacaagctgttacgttgttcacaaacactcacgttagcatctgagatataccagattttaaagtagtagagaatatatcctggtaatgtgaagggtgcgcctggatcacatagtgcgtgacatgtgagagcactaaatgtgtgtgctctcctttattttaaaataattgaaccaatgattctgattttttcctgcttcccccataacaatttggaagcaactttttacgtaagaatgagtaagaaggacctgctctcaggtccttcttaag

SEQ ID NO: 36607 - DNA, 325 bp, Homo sapiens
aacaaaacaaaaccatagagaagagctcttccctgggaggaggaaaagtggcctaagacatagttaaatcataaaagcaagttgtagaacatcactccttcatttaacacccagatacacatgacaaaaaccaatagactgctctacctatgtgtatatatttacaaaagcaaacatgagaatctagaaggttatgcatcaaactggtaacagtggctaattctgggaggcagctggggaaaagtgagtggtcaaaggggaactatagcattaattgtttcaatttaatatccaataatgtttcatatttaatatccaaaatatt

SEQ ID NO: 36608 - DNA, 324 bp, Homo sapiens
  misc_feature (1)...(324): n = a,t,c or g
ctggatttgttggattccctggggaaaatcctgcttctccgggggcccaatcattttactttctatacctttcatctaattagcaacaaaagaaattgttgtctagatcacagaacccaaagcattattttaaattctcatctcnnnnnnnnnnnnnnnnnnnnnnnnnnnnnnnnnnnnnnnnnnnnnnnnnnnnnnnnnnnnnnnnnnnnnnnnnnnnnnnnnnnnnnnnnnnnnnnnnnnnnnnnnnnnnnnnnnnnnnnnnnnnnnnnnnnnnnnnnnnnnnnnnnnnnnnnnnnnnnnnnnnnnnnnnnnnnnnnnnnn

SEQ ID NO: 36609 - DNA, 332 bp, Homo sapiens
attttcttactagttatatgcttgtatatatctcatggacccagtccatgttctgtaagcatttatgttcctagaatctttttctttggccatttctcccagatctccccactgatactgttaaccctttggggttttatgtatataaatgtgcactttgttttatctgtttctaggctaccatcttgtggagtttggagggcaagtagaaatttcacaaacatagttaagtgaaatactgtaatttggttacttttcttcataaaatttagtgtgctcttcagatatactgattagtttatccccaggcttactagatttgggcataatta

SEQ ID NO: 36610 - DNA, 332 bp, Homo sapiens
  misc_feature (1)...(332): n = a,t,c or g
ggggaacaatggtgcacttctctttgaatgacaacccagctagaggacaaaaacactttgtggagttggggcaacagcctcgggtctcaacttgcctctcccaatgtggaactgctggattacaagctggggcatgggtgactgtgccttcagtattctcagtggtactgtacacaggtacagcctctgtaccatgagtaagaaatagttcctgcctctcagccccactcatccagaacttgacctcaccaacaggccactaaaaaaaaaaatcttgatatcctattcctttgaaaaagataccctccaactaggaaataanggaacaggta

SEQ ID NO: 36611 - DNA, 323 bp, Homo sapiens
  misc_feature (1)...(323): n = a,t,c or g
caccaatcagagtgggaaatgactctatcatcaaagcacaaaaaaagattttgcacttctgaacctttccgattggtgctgaacctacatacacggatgaatgggtggatgtgggatggatgaccagttatgtataattgatgagaaatttgtacatgactgccaaccttgaacaaaattttcagcgttcaggaaatttttttttgagacagagtttcactcnnnnnnnnnnnnnnnnnnnnnnnnnnnnnnnnnnnnnnnnnnnnnnnnnncaccaccagacgctaactgaccccttattctatcagccataaccatgcttt

SEQ ID NO: 36612 - DNA, 330 bp, Homo sapiens
cagaatcaagtaaacctagatcaggttatttcttagcacacagtacattgttcccattctgagaaagttgattcttttcaagtttgtaaaattgtagtttcactctaaggtgtaggtcttattttagggaactttcttttatcatttcactgaactcatcatgacctcagttttgtaacatggagaggttcttttatatttccttaggtgtatgttttttgttgatatacttactagtggagtggcccagtttgctttggttattactgtgatctttgtagggactagatttttgtaaaatgtgtctgaggaattctagtcataatattt

SEQ ID NO: 36613 - DNA, 329 bp, Homo sapiens
gggatatgctgtattttataaaattggcaaaattagagaaatatagttcacaatgaaattatattttctttgtaaagaaagtggcttgaaatcttttttgttcaaagattaatgccaactcttaagattattctttcaccaactatagaatgtattttatatatcgttcattgtaaaaagcccttaaaaatatgtgtatactactttggctcttgtgcataaaaacaagaacactgaaaattgggaatatgcacaaacttggcttctttaaccaagaatattattggaaaattctctaaaagttaatagggtaaattctctattttttg

SEQ ID NO: 36614 - DNA, 321 bp, Homo sapiens
ctgccgtgccaggggtctaggctccagaaacaggggtgaggactgggtagagggctggggttcgaattgcccctgtgcccccaggctggctgtgtcacaagcttgggccaggctttttgcccctctgaacctcagttcccctgtctgcaaagtggagttaatggtgcttacggagttgtggaagggattaagtggaataacgatgcaagtaaagcgcttacatagcacaggtcctagcacagaataagcgtttaacagttgacagttgttgcttttctaagcctggatctgtgtgatacagtcgttattatccaagcctgg

SEQ ID NO: 36615 - DNA, 319 bp, Homo sapiens
  misc_feature (1)...(319): n = a,t,c or g
attggttttctgcttcataagcatcccccttgttttgcaaacagcacccacccccctgcattatggaaactgctcttacccctgactccaactatgtagttctagtgagggttgccattcacagtaccctccccactccagccacagagatgatgggcacatgatccaagacaggccaatcagagtcctttccaggattcttctaaagagccccttcttctggtaaaaggggctggaaacaagagctgncagcagtcatggttccagcctcatgaagtagagtctgtagtatgagagaatgaaatcaacacgcagagaa

SEQ ID NO: 36616 - DNA, 328 bp, Homo sapiens
ctccaacctaactgtacaactagctactttcattcctctcattccctgctttcagggctaggcttttaaaaaaatattctatttaaaatgatacatgataaaaacagaaaaaaggatattttaaaaattgatgttacacatgctattttaagatatgtacgaaatttaaatatactggattttaaaaaaggaaaagaactgctgctacttaggcaaatatttcttttattcaagtcattcttttttttttaaacagcttgagataaaactgacatactataaactacataaatttaaagggggtcattttattttctgccatatgatg

SEQ ID NO: 36617 - DNA, 331 bp, Homo sapiens
  misc_feature (1)...(331): n = a,t,c or g
nnnnnnnnnnnnnnnnnnnnnnnnnnnnnnnnngtggtgactttttattagcctttttctttcttatttaggttgtgtaacaaatcattgaaagattggattcattcaggaattaaaggaggtgcaaacagaacttatactcaacattgatgttgaacaaactcattagtcgcttacatcatttacaaggattattttaatgaggaaaatgagtcactgaagtcacatgttctaacaggttggttttggatagctttctaaccatttgttcctctgagttgaaaggcagcatcaaggagttggaatttcaggacctgagtgaatagacagg

SEQ ID NO: 36618 - DNA, 324 bp, Homo sapiens
gttccataggaggtgaaaggatggagggaattagcacatagaactgcctttcaagaatttggctgggaaggaaggagaataagtgaggctgggatataaggcagggtgtgttttctcttttttaggatgatgagactgagcatgaataaatgttgatgagaagaagcccagagaaagcgagagagagagagggagagagagacaagttaaaaatacaggactgagatggtgcaaaggggagaaggaggtctctgagaagtaaaagtaggtgatgtcaacagcaaagaccctggatttttctttatccagaaaaagacacacctt

SEQ ID NO: 36619 - DNA, 329 bp, Homo sapiens
  misc_feature (1)...(329): n = a,t,c or g
cgcagccagttataccttttagtactcagatgaagaaagcatctgttaaacaaatagttgtaaaccaggcatagaatagtatcacaacagtatctccacatctaaagttgtctgtagtactagtttgagctaatttttcagttgggagtaattaaaatgcacttattttgtacctgacgtctcattttcccgtcgacgcggccgcgaattccnnnnnnnnnnnnnnnnnnnnnnnnnnnnnnnnnnnnnnnnnnnnnnnnnnnnnnnnnnnnnnnnnnnnnnnnnnnnnnnnnnnnnnnnnnnnnnnnnnnnnnnnnnnnnnnnnnnnn

SEQ ID NO: 36620 - DNA, 323 bp, Homo sapiens
  misc_feature (1)...(323): n = a,t,c or g
atggggatgaggtagttctgcattaaaaatagtcataacagttaccagtcctcataataatttttattggaactatcagaagtctgagtgcctatttgagaaagagtttccttggatgaatcactgcaggaacatgagaaagaaacatggcactgtgagatcaaatgtgtagataaataatcccccgctgagctgcagtcacaagtgaatttaaagataggaagggttttaggggtatataatccaggtcgacgcggccgcgaattccnnnnnnnnnnnnnnnnnnnnnnnnnnnnnnnnnnnnnnnnnnnnnnnnnnnnnnn

SEQ ID NO: 36621 - DNA, 321 bp, Homo sapiens
  misc_feature (1)...(321): n = a,t,c or g
agaagagaaaagacactttaccaaagagatatatggatgacaaataagtacctgaaaatatattcatattataaatctttagggaaatgaaattaaattcatattttgatactgcaccacctagtannnnnnnnnnnnnnnnnnnnnnnnnnnnnnnnnnnnnnnnnnnnnnnnnnnnnnnnnnnnnnnnnnnnnnnnnnnnnnnnnnnnnnntgggtaaccacagtcattgtacgttttgtgctgctatggcagaatacctgacactaggttatttatttattatttatttatcaagatggaggttgcagtgggtcgagg

SEQ ID NO: 36622 - DNA, 321 bp, Homo sapiens
  misc_feature (1)...(321): n = a,t,c or g
atagtcaaatctaccaagttgctttaaaattatcctggtagctggggcctcacttccagggagtctgatgtaattgctacggataaggcacagacatcagtaaannnnnnnnnnnnnnnnnnnnnnnnnnnnnnnnnnnnnnnnnnnnnnnnnnnnnnnnnnnnnnnnnnnnnnnnnnnnnnnnnnnnnnnnnnnnnnnnnnnnnnnnnnnnnnnnnnnnnnnnnncaggcatcagtaattttttaagagttctccagatgatttaaataagcaattggtcatgaaaattgctagattatgtgctccagggcagggatatc

SEQ ID NO: 36623 - DNA, 324 bp, Homo sapiens
  misc_feature (1)...(324): n = a,t,c or g
gtcttcttcttgctgaagctggtgagccaattgtagatcaccagaacactggactctatccatgcctgttaggtattgttaatgttcagaataaaataactgttgcaatcaaagattatttattatttaatatatgtttttaaaatagagtaaatgctgttatttgccatttattcatgactgtgatgatatggaactgagtacaaatttagcaaaacttagaactgctttggtaaggaataacctccatctaaatgacaactaacagtcactgnnnnnnnnnnnnnnnnnnnnnnnnnnnnnnnnnnnnnnnnnnnnnnnnna

SEQ ID NO: 36624 - DNA, 325 bp, Homo sapiens
atttccttctaattacagtaaaggcagaatggcattaatcagcagtgaattgtcatcatctccctcagaggatttatgtggcagggccagccctcattgaacctcacaactgtgaggttcatggtcctgtcactcgttggtaaagcagtatcatccagtggcccattcttggaccactgcactctactgggaaaaaatcctactcttgggacaaaaacagcccaaaatagagaaaggtaactattcaaagagtttttttaaaattaaagaaagaaaagaaagaataggagttaaagaaaaccaatcaatttctcagtctctagaa

SEQ ID NO: 36625 - DNA, 318 bp, Homo sapiens
ttttaacctcagctccacctgggatcacttaataccagagcacttcagaacaggctagggtgctgcagtgcagcccagctcgctccaatttccctcacctgtgagctcccacctccctacctaacacatgggagtgtactttattttcctctcccaagactgcatctgttcctgccaggtcatttacctctctttttccttcccagcactcggcctccctgctttctaataaatctgactaaccttagacattttgtatcttactaagaacatcccttcaatatctacttcattatcccatgccatttccccactggg

SEQ ID NO: 36626 - DNA, 323 bp, Homo sapiens
  misc_feature (1)...(323): n = a,t,c or g
ttagaatttttgatagactgaaattctaagaataaaaatattcagaatttctgagcaggaagaaccaggactaaattaccattcagagacttactataggatgtacttcagtaaaacaaaactgagtttagaataaaggagtgggatgcaagaaacaagggaaagtcaagaaattagtaaattgtcttctccatcctcatttctgccttctttccctcagtgtttgcaatgcagtggtccgttcaaccaccagccctcctcccctgctgccattattatgattacaactacttacctctactacttcctggnttcttattttc

SEQ ID NO: 36627 - DNA, 322 bp, Homo sapiens
atggtttggaggcatagatagcctccccattgatgctcagccatttcccaacagcaagaagcctttcttggaagatgggaacaatcagtccatctttagttggtccaatgttcagaagatagttgcctcccaaacttactgtctgaaccagttccgaaatgatttcagattcttctgtaacatcagacaatgccatgtcacgacgatagccccaggaaaacttgtcaatgctggtgcacatctcccacttgtgatctggcaagctccgtggcttgaatttatcttcacagttatagtatcctccatggtgacaggaacagtt

SEQ ID NO: 36628 - DNA, 324 bp, Homo sapiens
  misc_feature (1)...(324): n = a,t,c or g
gtttagaaagactggaaggttgagaaattcctgcagaaaacacatcaaaaaagacagaggcatgaaagtnnnnnnnnnnnnnnnnnnnnnnnnnnnnnnnnnnnnnnnnnnnnnnnnnnnnnnnnnnnnnnnnnnnnnnnnnnnnnnnnnnnnnnnnnnnnnnnnnnnnnnnnnnnnnnnnnnnnnnnnnnnnnnnnnnnnnnnnnnnnnnnnnnnnnnnnnnnnnnnnnnnnnnnnnnnnnnnnnnnnnnnnnnnnnnnnnnnnnnnnnnnnnnnnnnnnnnnnnnnnnnnnnnnnnnnnnnnnnnnnnnnnnnnnnnnncca

SEQ ID NO: 36629 - DNA, 320 bp, Homo sapiens
gtggagttttgttttcttctagtggtgggatcacatcccaccttagcactaacagcctggaacatcaaagcacacagacgcagagccatggaatgccaggcatgggagagactgagggcatttgcctgtagcaatggtgttcaaacctggcagcccatcagagtcatctggggagctcattaaaattgagattcccaggaaccagcacagagattgattaggtagatctaggctggggtccacaaatcttcattttcaacaagcagctggtttaagaaccaaggttctggttcaaccccatccatccacctatcaaaact

SEQ ID NO: 36630 - DNA, 320 bp, Homo sapiens
tttttaagcttcataggggtttaagagtggagaaattaatggagaccatgtaaggaaggaacccttcaaagaagaaacgggaatagagccaggctttgaataatggtatagcagtgtttgaattgttggaggagaaaggccatacttggtggggtgagttacctggccacaggttaggaagcaggagtagcatgggcttgaaaagaagactggaatagtctgacggaagtgtggctgtttgttttgaggtacagagaaatttgggtaggtggtacaagataagaaccctaaagggtagatataagagtgtgaacttggct

SEQ ID NO: 36631 - DNA, 310 bp, Homo sapiens
ctggcccttccatcttagacttccccgtctccagaactataagaaataaaatctctgctcgttataggtgacccaatcctaatattctattacagcaacacaaaggggctaaaacattttataatccaaatgtgaagcaaattaatggaaactacatatattcaaagggaccaccttatttatgtccaaaacaaaacatttttgaaaaaaaaattgtgcaaaccaaatttgtcattgtcttctttcatatcaaactcctttcacatggtgttagataaacttagttcagtctttggagatcaatgttaga

SEQ ID NO: 36632 - DNA, 317 bp, Homo sapiens
atgcccctcccacacaagaactaacctatggtgaggacacctggatccccctcctgggccctgcatagatggcctgcagtagccggtcctgcctccgccacccacttacctttcttgagacttctgacgtggatgcattccagatgtgggggcattctttgcaaagtgcttgtggctgtcttcattcatggtattctccactgcccttctaaacctttctaaatgggtgtgtcccttaaaacacaatttgcctagattcttccaaagaactgcttctgactggccccctgccatgggattgctgcccttgcttgaga

SEQ ID NO: 36633 - DNA, 317 bp, Homo sapiens
  misc_feature (1)...(317): n = a,t,c or g
ctagaatagtcccacaccaaacacacactaaatcatttctctattgctttacttcatcttcctttataatatttaccaatgcttgaaactgtgctnnnnnnnnnnnnnnnnnnnnnnnnnnnnnnnnnnnnnnnnnnnctcactgtcttttctatactgtatcaccagctcctaggatactacctggcatgtagaaggccctttgtaatgtaggagatgaatgaatatgtgaagacatagctatctaaacttgaggctactgcatgaagtgcccagcacttacatcagtaaggctggatgagaagcttccatttgta

SEQ ID NO: 36634 - DNA, 308 bp, Homo sapiens
  misc_feature (1)...(308): n = a,t,c or g
nnnnnnnnnnnnnnnnnnnnnnnnnnnnnnnnnnnnnnnnnnnnnnnnnnnnnnnnnatcaaaatatcatgtacatcataaatatgtgtaattgtgtgtcagtttaaaataataataaaagcaaaaacataagtagtaatggaaggcaaggtcctttgaatggtaacaaacaagggggactgagaatgatgagggaagggctaaagtgctgggcccagatgtcaaggaatgttatcacagggcacaactgttgccaattgaaagttttaaaagacaatgacatctgatttatgtggtagaaaaataaa

SEQ ID NO: 36635 - DNA, 306 bp, Homo sapiens
  misc_feature (1)...(306): n = a,t,c or g
gtgcaacctcagctcgctgcaaccttcattttctaggttcaagcaatcctcccaccnnnnnnnnnnnnnnnnnnnnnnnnnnnnnnnnnnnnnnnnnnnnnnnnnnnnnnnnnnnnnnnnnnnnnnnnnnnnnnnnnnnnnnnnnnnnnnnnnnnnnnnnnnnnnnnnnnnnnnnnnnnnnnnnnnnnnnnnnnnnnnnnnnnnnnnnnnnnnnnnnnnnnnnnnnnnnnnnnnnnnnnngcgctaattacttttcaacaagtcctttcatccacttgatggtagagtaggcataaacaaccattc

SEQ ID NO: 36636 - DNA, 307 bp, Homo sapiens
  misc_feature (1)...(307): n = a,t,c or g
nnnnnnnnnnnnnnnnnnnnnnnnnnnnnnnnnnnnnnnnnnnnnnnnnnnnnnnnnnnnnnnnnnnnnnnnntaggagacatggcaaaaccccgtctccannnnnnnnnnnnnnnnnnnnnnnnnnnnnnnnnnnnnnnnnnnnnnnnnnnnnnnnnnnnnnnnnnnnnnnnnnnnnnnnnnnnnnnnnnnnnnnnnnnnnnnnnnnnnnnnnnnnnnnnctcttttaatctttttttaagaaaaagaataaaatatatttttaatgcagtaaaaatatttaaggagtttaagtttgtaaatggga

SEQ ID NO: 36637 - DNA, 316 bp, Homo sapiens
cacacggcggggagaagtaaagccactgagaggccaggatgtgtgcacaaggcaaagcacataaagtgtatttccagctgggtaatcaatatttaaaagccattacctccagtgctttttaaccttcagtgcccatatgaatcacttggcgatcctgttaaaatgcaaattatgattcagtaggttctttaacaagctcccacgtgatactgatgctgctgctggtccagcacaacagcacatgaaccatcttttgaggagcaaggctctagtctgtaccttctgaattgtgtccatgaagctatttataaactgg

SEQ ID NO: 36638 - DNA, 308 bp, Homo sapiens
  misc_feature (1)...(308): n = a,t,c or g
nnnnnnnnnnnnnnnnnnnnnnnnnnnnnnnnnnnnnnnnnnnnnnnnnnnnnnnnnnnnnnnnnnnnnnnnnnnnnnnnnnnnnnnnnnnnnnnnnnnnnnnnnnnnnnnnnnnnnnnnnnnnnnnnnnnnnnnnnnnnnnnnnnnnnnnnnnnnnnnnnnnnnnnnnnnnnnnnnnnnnnnnnnnnnnnnacttcttctaaaagtgtacttccttttccatcaagagtgctttcctggcgttggtgctgctaggaatctacctcttcattgtgcccatcctccattttttccccaatttttctacg

SEQ ID NO: 36639 - DNA, 317 bp, Homo sapiens
aaaaccttgaagaaatgagatctgtaacaaaagaaagagatgaccttaggagtgtggaggagactctcaaagtagagagagaccagctcaaggaaaaccttagagaaactataactagagacctagaaaaacaagaggagctaaaaattgttcacatgcatctgaaggagcaccaagaaactattgataaactaagagggattgtttcagagaaaacaaatgaaatatcaaatatgcaaaaggacttagaacactcaaatgatgccttaaaagcacaggatctgaaaatacaagaggaactaagaattgctcacatg

SEQ ID NO: 36640 - DNA, 306 bp, Homo sapiens
tattgaccttgttaaacaagatcaatatcattaaactgacccagatggaaattacaggacttgtaccagacttgaacttgtagcctaatgatacacatttttacaatatttcttcaccatttagttttctttcttttaggtctcaggatgctcagcttaatttagagtatgtgttaagtacattgtttcagcgtccagagaattttgtgagtgtggatccagtgaggaggtgaacagtaactagaaatgcttgtttactacttggcatgttttttccaaagtgtttcttctttagcttcatacatc

SEQ ID NO: 36641 - DNA, 315 bp, Homo sapiens
caaaatttgcatttgagtctctgtggtgttctttctagccgagatgctagggtatgctctttctttctggggagattccaaaaatgttactctctgtggctgtgtgtacaatgtctatttagaaaagaagactggcatttgcatcttctctcaaattctttacgtttgtctcactgaattttggagtggacaaaatattcaatagcttttttcaagtgaaaaaaatgtcgactttcaagagtgtattactttaggttcttgtgtatatctgtgctttcctggtggcagaaacctagaaaactctagagctcaaat

SEQ ID NO: 36642 - DNA, 308 bp, Homo sapiens
cacctattcacctataaaggaaattacatcagattaacagctgacttctcagcagaaaccttacagaccagaagaaaatgagatgatatattgaatgtgctaaagaaaaacattgccagcaagattaatcttcataaaggaagacaaaataaattctttcccaaacaagcaaatattgaggggagtcattgctattagactggttttacaagaaatgctcaagggagtcctaaacttggaagcaaaaggacaacattaaccatcataaaaacacatgacagtataaaactcattggcaaagtaatcac

SEQ ID NO: 36643 - DNA, 306 bp, Homo sapiens
ctttgttactgagtttctttggtaagtcagtttttaagaaagcagatacttcaaaatcgtttatttatcttgggatccttcatttgctgcagttagattaagtggatacatgtttccttgttgtaatatctgattagtgtagtttttggaagtagatttaataattcggaagatttttttttttaaacactacgatgcgttttatatgtttgaggtaaaaattgaaaacaaaggcagtgggcaaatgataaaccttggattcaaagctatgctatctttagccgttagttactgaaatctaactgg

SEQ ID NO: 36644 - DNA, 306 bp, Homo sapiens
ctgggatttggcttagtttctaggaaggattttggatatctgctaccataccaccatcttttctggaagtctgtttataataaatttcagggtgaagttcaacaacatagtactcaaggatcacatttttgatgcataatcaatttaatttccagacgaaaatggatagtcttttggattttctgccgaacatacagctatgaccttcactgcaatgttgaatggaagtggcaagaaaggatatccttgttgtgttcctgatctcaggagaaaggcattcagtttcttaccagcttccattgcaac

SEQ ID NO: 36645 - DNA, 315 bp, Homo sapiens
atctccccagacttacccctgtcctcagccccccgtggaagtttacgcttagtctcatggccagagcgacctaaattgaagatagacctccacttcctgaccttcaaagaccccttcctcctacaaagaatggaggggcataattggaggttggaacatgaaggtcggtgcaggggaggaaggcccaggaaggaggccttacttgtgctctgcaatctcgatgatagtatggtagggccgcatctgtgggggtccatcgccagcctgcagtatgctaggcaggtgataaggcagtggcctgggcataaggtcctc

SEQ ID NO: 36646 - DNA, 219 bp, Homo sapiens
  misc_feature (1)...(219): n = a,t,c or g
tctcctccacactgcacttcacagctcaccccttctctcaccttgactactaagtctgacttctaagggtattgtttcccacattaataccagcctcaggctgagaacagtggctcannnnnnnnnnnnnnnnnnnnnnnnnnnnnnnnnnnnnnnnnnnnnnnnnnnnnnnnnnnnnnnnnnnnnnnnnnnnnnnnnnnnnnnnnnnnnnnnnnnnnn

SEQ ID NO: 36647 - DNA, 366 bp, Homo sapiens
  misc_feature (1)...(366): n = a,t,c or g
gggagcccttcgagcagcacctcctgctgggcgtcagcgtttcctgcattgtcatcctggccgtctgcctgttgagctatgtcagcatcaccaagattaataaagaatggtgggatcagattcccaacccagcccgcagccgcctcgtggctataataatccaggatgctcaggggtcacagtgggagaagcggtcccgaggccaggaaccagccaagtgcccccttcaagggacggcaggaggaggggtgttctggaaacgtggactgctggccaagccccctgagtttcactggtgtgtcanacactggaagaattgtcttaccaagctcttgccctgttttctggagcacaacatgaaaaggg

SEQ ID NO: 36648 - DNA, 356 bp, Homo sapiens
ctttatctcttctcccaacccccactgtgatgcttcaaaaacacatgaataacaaatctactatctctctgttgaataaataaaccttctgataaagtagcatttgcttctcacaactaaattcatgtttttgaagccagcctaagaagacacaatggaatttgtaatttgtttaaagcctaatttggaaatgcctagtctaggttaagaattccaatccatcagaaccttagcagggtactggagtagtctaacctagacactagtccctgctcaagtaccaaaaccaaaaagtcatagcccggtttcaccatcggtctttcaaaagtgcaaaccagcctaatgcctccctgctt

SEQ ID NO: 36649 - DNA, 329 bp, Homo sapiens
  misc_feature (1)...(329): n = a,t,c or g
gtggaaggtccgtccgcgtgtggaaggtccgtccgcgtgtggaacgtctgtcagcgtgtggaaggtccgtccgcgtgtggaacgtctgtcagcgtgtggaaggtctgtccgcgtgtggaacgtctgtcagcgtgtatgagttctgggcactgctttggctgtgagatcccagtctgcatcagggaagcaattacaaaagagnnnnnnnnnnnnnnnnnnnnnnnnnnnnnnnnnnnnnnnnnnnnnnnnnnnnnnnnnnnnnnnnnnnnnnnnnnnnnnnnnnnnnnnnnnnnnnnnnnnnnnnnnnnnnnnnnnnnnnnnnnnnnnnn

SEQ ID NO: 36650 - DNA, 363 bp, Homo sapiens
  misc_feature (1)...(363): n = a,t,c or g
gctcggcgtgctttgctcggggaagctcaggtggccgccacagcctcttgccctctgacctgcaggtatcaggagatccatagctaagcagcctggacacccgggaagctgggaaatggacatgcagattgtcttcacccaactccagcgtctgttccttggagacacattgctggtcagccagttggatgctgatattgagaagaaaaaacagaaatgatttctgacatctggattctctcagacttgtgaagggggaaaaactgttccaaaggacaaggaagacccactgcagtgagggggcgcgagaatctgcaaagtcaagccacttggggcacccagnggggcacagagtggtggcta

SEQ ID NO: 36651 - DNA, 313 bp, Homo sapiens
  misc_feature (1)...(313): n = a,t,c or g
tgccaatgagctgatggcttcatgcttcagttcaaagggccacccattttgaaaggtaaaaaaatttggaaaactagccaggcgcgaaaactacannnnnnnnnnnnnnnnnnnnnnnnnnnnnnnnnnnnnnnnnnnnncgtcagatctatgtgattagcactgtaacccgccccgtgcccctggagcactatcttttcacagggaacagctccaagacccagggggagctctttttgttgctggactcccgaggagccttccatacaaaagggtactatgcagctgtggaggccaagaaggagagaatgac

SEQ ID NO: 36652 - DNA, 305 bp, Homo sapiens
tttagattggagcagagggtaaatacccatttccataatttaatttctcagcaaagcaagtgggaagaaacccaaaacccctcatgatagggaaggcggttgctttcccatttactaggaaaaattgacttaattgacttaacaaggaggtagaatatgaaccattctctaccatgtaacagtgacactttggttctgaacatcacacaatgatctcagaacactaaaagctcctttcccactttccaaccaaatacatcagtatggattctaaagcatatgcaaaaaaggacaattatactgtt

SEQ ID NO: 36653 - DNA, 309 bp, Homo sapiens
aagaaatgtaattctgctaaaattctatataaatctaggcaagtcacaaactctgtagagttccttctctataaaacagaaataagaattaaagctctgactaacctagaaatctctgatgatcaaaggagattatgcaagtttagagattaatattaactaccaaaggaaagcttttaaatctgatattccaaactcgaaaaatatttaaaaggttagtcattaaccaaactagtactagtcattatgttaaagtattttaattatcttttcctaaattatctgtttcctaaatataaaagctaatgg

SEQ ID NO: 36654 - DNA, 310 bp, Homo sapiens
cacagactcagagagaacccaccatggtgctgtctcctgccgacaagaccaacgtcaaggccgcctggggtaaggtcggcgcgcacgctggcgagtatggtgcggaggccctggagaggatgttcctgtccttccccaccaccaagacctacttcccgcacttcgacctgagccacggctctgcccaggttaagggccacggcaagaaggtggccgacgcgctgaccaacgccgtggcgcacgtggacgacatgcccaacgcgctgtccgccctgagcgacctgcacgcgcacaagcttcgggtggaccc

SEQ ID NO: 36655 - DNA, 309 bp, Homo sapiens
  misc_feature (1)...(309): n = a,t,c or g
tgtccctgggtatgtcccagcccagacactcagggcactggccaccctgcctcagcccctctggagcaaagagagttttaagcagtagtggatgtaactcatttaaaataggattagatctagctgggttagcttagtggcatgcacctggtgaggctgtattctnnnnnnnnnnnnnnnnnnnnnnnnnnnnnnnnnnnnnnnnnnnnnnnnnnnnnnnnnnnnnnntcggtatagtgagaccagcctgtctcaaacaaacaaacaaaaacaggattacatgagctatgactaaattccagggcagta

SEQ ID NO: 36656 - DNA, 303 bp, Homo sapiens
ggaacattaacaagctataaaaggatgcctttgaagcctgtgtttgtagacatgttttggtcattattaattttgaattatacaatttgaatttatttcaagttcgagggaaacaacagtaggtaaatgcttttttttcctatttattggatatttttatagtgtttgtaggggaagtctgatgctcttagaattaactttgtgcctttattacttaaagtaaaagtgatttctggacctttttgaagcattggatgccatatttcagttcgtggcttaaatctcaacaagaaactggctttg

SEQ ID NO: 36657 - DNA, 305 bp, Homo sapiens
cacatataatttcaggagattcacaaatactccaaaatctatttaaggatcctaaattaaaagctttaactatagaaaggtttgacatgcctagtgcctaggtagccatgacaattcatgctggatatctggatacaatcctagaactctatctccatcaattccaagagggccatataaaggaattcctctaatatgtggctaacatgtccattagcactcttggagtatcttatcatataccatgaggaaaatcagtcttcttgggcttaatttctatgtaagcatgagaatggcaaataagt

SEQ ID NO: 36658 - DNA, 311 bp, Homo sapiens
ttatttaaatctcaaagagtttacaaaagactgatgtctgtactactttctaaaaatatgtattaggcaaaacaaagtatctctctaatcagagaaataaacccaaaaagatgggctttcagacaagatgatccaagagacatttttatttaaggtctataggaaagaagatctcttcctgtgtttccacttgtaccattctggcctgtctataggacagtcttatgacttggacagagctggggttaagagcacggaggttgacatcagtcaaaactgaaggatctcctaactctctgactttaagcaat

SEQ ID NO: 36659 - DNA, 305 bp, Homo sapiens
ccctgcctcaaaaaaacaaaaaaaacccagggattgtagagaccgtagaaagcaataacgctgtatgtcttagcttacagcagaaaaaatactcttctgaatttttctgaatagtcaaattgttctctatatgtgaaaactgaagaaataaatggttttccagtgagtggatgaaatattctcaaactaccatgtggttgatgtaagacctgctgattagactgtgctgttcacttgcatgcatcgtaaacctgagggctgttccttgtccatgcgtgcatcttttgtagctcatatttgatgcc

SEQ ID NO: 36660 - DNA, 303 bp, Homo sapiens
cacagttaaccacacgccagtgcaaacaatctttgcatttcttttggttcttagagtctttgacttaaatgggtagacaattgccagaaatcgatctacactaatacaggttaagaacagaatgcttccgtacatgttggtataaaacagcatcacagaaatcttacaaagtaaatctccaaatggccaattccgtgttgtgaagtaaaaaatcctgaagggtaaagtaaaaacaaaaagcaagtctgacattgccaagttaatcatgtaagttgtagtttcatttcggactttgaggacgca

SEQ ID NO: 36661 - DNA, 318 bp, Homo sapiens
ggaaagctgagggggaagggaggggaggggagagaagagagaaaagagaaaaaagaaaaataatacaattggttttggtacactgaccttgtatcctgcaacctgttacattcacttattaattctagttgctctttttttgtggagaaggtaggttatttaggattttctatgtatataacaacacagtctaaataaaggcacgtttacatcttctgacttatttctcttgctttattttattatctacaacctctaatatactgttgttctttatttgaccttaggaagctctagactaaatgctctgccattaaa

SEQ ID NO: 36662 - DNA, 310 bp, Homo sapiens
ctttctaatagctcactcttttctctcttaggcttgtatggcaaacccttcctctctgcagatcggggtctggtgttgatgccaggagagaatatttccctcacgtgcagctcagcacacatcccatttgatagattttcactggccaaggagggagaactttctctgccacagcaccaaagtggggaacacccggccaacttctctttgggtcctgtggacctcaatgtctcagggatctacaggtgctacggttggtacaacaggagcccctacctgtggtccttccccagtaatgccttggagcttg

SEQ ID NO: 36663 - DNA, 315 bp, Homo sapiens
  misc_feature (1)...(315): n = a,t,c or g
nnnnnnnnnnnnnnnnnnnnnnnnnnnnnnnnnnnnnnnnnnnnnnnnnnnnnnnnnnnnnnnnnnnnnnnnnnnnnnnnnnnnnnnnnnnnnnnnnnnnnnnnnnnnnnnnnnnnngtctattttaattccctaatctaagccagttaagaagttaagatgcccatgcaaacaattataatgcaataagatcattgtttaatggaagagtcttcaaaactacagttaggaatatataaggaacaccaaagttcacctgagagaaaagggatgctgttagagaagttagcatttaaacagatacctangaatgag

SEQ ID NO: 36664 - DNA, 312 bp, Homo sapiens
gtttaatgccaaaatgctggaaatggcacaggctaactcagctggaatcagtgatgcagtgtcaagactggaaacaaaccaaaaagaaaaaatagaaagtcttactgaggttcatcgacgagaactcaatgatgtcatatcaatctgggaaaagaaacttaatcagcaagctgaagaacttcaggaaatacatgaaatccaattacaggaaaaagaacaagaggtagcagaactgaaacaaaagatcctcctatttgggtgtgaaaaagaagagatgaacaaggaaataacatggctgaaggaagaaggtgt

SEQ ID NO: 36665 - DNA, 316 bp, Homo sapiens
ctagattataggtgtgcccttcaaaagcatcacagaaaaacaaaagggttacccaccagtcaagggtttgggacattaacatgctttagttgaaagttatattatgaaaaatgtcagaaaaatgcatgaaaggaaaattgttccatgagggaaatactactgctgaaactccaagtggaagatgatgtttttaatattcccttagttccacatttgtgtagttctgtagtgaaacgagtcatttaagaggggaggtggcccaggctaaaaataaagtttctttgaaaccagatgagagtctagctatgccaaaaat

SEQ ID NO: 36666 - DNA, 315 bp, Homo sapiens
  misc_feature (1)...(315): n = a,t,c or g
nnnnnnnnnnnnnnnnnnnnnnnnnnnnnnnnnnnnnncctttgttcaatttaaatattttggttcctggcccaaaccacagcaaaatgagattgcgagaccattcatctgagagaagtgaagtgttgaagcatcacacagacatgagcagttcgagctacttggcagccacccaccatcctccacacagtcccttggtgcgacagctctccacctcctcagattcccctgcacccgccagctctagctcacaggttacagccagcacatcgcagcagccagtaaggaggagaaggggagagagctcatttgatt

SEQ ID NO: 36667 - DNA, 310 bp, Homo sapiens
  misc_feature (1)...(310): n = a,t,c or g
tccagttaagaaggccacgttgtatgattccattgatatgaaacatctagaacaaccagcaaaaaatccatcaacagattagtgaccgcctagggccaagagtattacagggaaatgagagaccactgtgaaaggataaaatnnnnnnnnnnnnnnnnnnnnnnnnnnnnnnnnnnngattgtggtgacagttgtataactctgaatctgttaaaaaccactgaattgtacactaaatgagtaaactggatggtatgtgaattatatcttaacaaagctgttaccaagaaagtacttttcagacagttcg

SEQ ID NO: 36668 - DNA, 310 bp, Homo sapiens
cccgcctccacacaactggctcctcatccccgcctaaaagtcgctcttcaaagaggccttctctgaccctcatagctaaagcagccaccttcaccactgccctgtcacctgcaccccagccctgactttgtttccttcctggcgcttaacccaatttgtcattattttctgcttttgtttccgtgttcatgcctgtctccctgcaggactgtaagctccaggaggagacaggatcccgtctgtctcatttcccactgtgctcctatcacctagcaaggacagttaacctggtacttacatggccctaaat

SEQ ID NO: 36669 - DNA, 183 bp, Homo sapiens
atttaatacaaatttacattacaaaatgagaccatgttaggaaaacattagaagtaaacatttaagtaaaaaccaaataaacaacatgctaagggatacaatttaaaaaatcctagtaaatgtagttgcctaaatccagacttgaaacattgagattgactttgccactaaaaaaaaaaaaaa

SEQ ID NO: 36670 - DNA, 310 bp, Homo sapiens
cgcggccgcgtcgacctcatgcaggtgatccgggagccgaagccacgttcagcccgctggctcagcacctctatccccgaggcccagtggcacagcagcctggcacgcacgtcctccgccgagtacaatgtcaacaacctggtgagccctgtgctgttccaggaggccctgtggcacgtgcctgagcacgcggtggtgctggagatcgcgccccacgccctgctgcaggctgtcctgaagcgtggcctgaagccgagctgcaccatcatccccctgatgaagaaggatcacagggacaacctggagttct

SEQ ID NO: 36671 - DNA, 308 bp, Homo sapiens
aacaaagagtttctattaattattaaagacatatctaagagaatgaaaaatgacctctgggtcaaggtatcaagacagaacagaagcatctaacttcgttctctccctatattccattaaaaataaaacaaagattcttttcaataaaatccgtaagtaagagaaaaacccaagagacaaagctacaacattttgaaagctggaaaacagatggataaataagaactgaaagtttgtcagtgagagaactgaaaaggctggctcccaggccagtggtaggaaacaagagcagagttaaaagcaggagc

SEQ ID NO: 36672 - DNA, 310 bp, Homo sapiens
  misc_feature (1)...(310): n = a,t,c or g
tgacagatcaatacgaagaacatttttattcaacctaatgccttccacacattaacttctaaatgatttctccttttccaataaggcaacctcagagaagaatggttttccatgctttttctgatgattctaggcattttccttttaagtcctataaattatactaaagctacctcttctcaaaaccgttcaaaacagaccacagtattagaaactttacaacacacttctcactgacaaaaggagctaaacataatgcctagagactactgccctacaaaatangtnnttaggnctaatgcnnaaaaaa

SEQ ID NO: 36673 - DNA, 317 bp, Homo sapiens
cagaaattgcactatataacttctacttactgagttgccacctggagcttagcacagaatttgtggaatggtttggttcttgggccagcatacgaatctacatttaatccttaaataacagttctaacaacttcagtgtagtaatgacaaatggtgcgacaggggatcaacctatctccaaatctggacacttatcctcatatccaaaagtcatgcttcatctgcttatggagaccaagatatggcaatatatgatcttgagaaaaattactgaagatgtcgctattcttgacaatgtaaatccccaataatttttg

SEQ ID NO: 36674 - DNA, 314 bp, Homo sapiens
tggacccctggatgcaaacaccagccgaggatgtacccctcaacccctccaaaggaggccctgcccctttggcctggtccttgctaccctaagcctggcctggcctggcctggcccccaatggtcagaagagccatcccatggccatgtcacagggatagatggacatttgttgacttggttttacaggtcattaccagtcattaaagtccagtattactaaggtaagggattgaggatcaggggttagaagacataaaccaagtctgcccagttcccttcccaatcctacaaaggagccttcctcccagaacc

SEQ ID NO: 36675 - DNA, 225 bp, Homo sapiens
ctcggcttggattattctgcaggttcatctcagacccacctttcagccttaagcagccacctgagccaccaccgagccatggcaggatcgggagaccccaactccccctgaacaatccttttcagtattatatttttattattattatgttattattacactgtctttttgccatcaaaatgaggcctgtgaaatacaaggttcccttctgaaaaaaaaaaaaaa

SEQ ID NO: 36676 - DNA, 320 bp, Homo sapiens
  misc_feature (1)...(320): n = a,t,c or g
ttccgatgtgttcttggaaatttctctgaatttgtttcctttgccataaaacatcagtagctatttcatatgaactgctgtgaggactaagttaaataacggttgtaaaaatccttaggacagttcctgacatacagtaaacattcaatacatggtaataataatgatcatgaattacaaaatctacattcttatcttctagattcatacccctctccttccttgccaattctttaaaaataactgggggtaaaaaatcaatcattannnnnnnnnnnnnnnnnnnnnnnnnnnnnnnnnnnnnnnnnnnnnnnnnnnnn

SEQ ID NO: 36677 - DNA, 316 bp, Homo sapiens
ccaagattcatacttctgggcatgtggtaatctttccccttgcctcctccagcccaattattaagtcccaaaagggaacagacaaagccgggggaggagaaagtgacttacaaactaatttcacaattccttacctggatttaaaaagagaaggaaagagaataaaataaagtgagtaaattgagatgtttagattatctgcactttataaagaatgctctctcgttacttagataaggtaactataggagagattctgtttttagcacaagacattgaaaacttacacactacataattcgcttaatgagaaaaa

SEQ ID NO: 36678 - DNA, 313 bp, Homo sapiens
cacaatgtttcctaaataatagtttcatattattttaaccaaattatccattactcagaaataacactgtggataaccagataatgttacacaaaggctgagttcatttgttttggacaggtggccagtctgcagctctgtgtcagcagcccaaacccacccacaatggccccaaagacgattatgcaaatgccaaccaacccagctcttttcccaggaacaggagaagccctcctactagaagctgtaattgtttcgcagtcatgtggaaaaacaaaaagaggggtgttttgttttttgttttttgccagag

SEQ ID NO: 36679 - DNA, 328 bp, Homo sapiens
gtcagagtgtctgatgcggccactcattcggctccccagaattcctagactgggttaatagggtcatattgtgaatgtctcactacaaaatgacttgagtccagtgaaatctcattagggtttaagaatatttcagggatccttaatgttttgatttttgttttctgaaattggattttattttattttatcttataatttcagttcatctaaattgtgtgttctgtacatgtgatgtttgactgtaccattgactgttatggaagttcagcgttgtatgtctctctctacactgtggtgcgtcgacgcggccgcgaattccagatct

SEQ ID NO: 36680 - DNA, 330 bp, Homo sapiens
aacactaccctgtgggctgaaggtatgcattcattcacaaggtttttaatttcttttgaaataagaaaatttgaagtggaagttaaatggaaattttcctgtctttgaagagagcagctgtgaattttacgtagttatgacaattatagattcctctttttagtaaatttgcttgtaaactgagacctatttatacctactacttctcctctatccatacacccagtcatctgtaaaacagctaaatagcaggatgtaggaatgcatttttatacttttcttttcccttggctctaatctacctcaggcatttgcacatcacttcttata

SEQ ID NO: 36681 - DNA, 220 bp, Homo sapiens
ggagcatcaaggtactttcagctagaggaaggggcctgggcacggagcaggcagaaaggcatattccgcttcgtctggtgatgggcatcgggagtctctggctgagtcagctcctcgtttcctggggctccattcctcttcattttggatttggcggaagtcagtgtccacaggaccatctgtgtcatgggtgtcagccctgcttctttttttttttttt

SEQ ID NO: 36682 - DNA, 331 bp, Homo sapiens
  misc_feature (1)...(331): n = a,t,c or g
tttctcctctggaagaagtgacacaggttttgacaaggcggctggttttcccagtgctttcaaatgctctgacaagtcatcaaaaactttaaagtaccccattccacctttaaaaagggagtccttanatgtacccactcagaagttagtgtgggttagctctgcgatcactgtggcctggatgctggttgctgggagacattctccctagtggggctgcacagggacacaagcttcccgcctctgctcccctgacccagctgaacccgaagccctggtggaagaagtcacgtggctgagccagtgctctaaaggagctgactcctgtcca

SEQ ID NO: 36683 - DNA, 329 bp, Homo sapiens
tgggaatcaggcttctcatctccacagccctgtggccctgcccttttctccttatcacctcaaaaaaatgatttactgggatctgagcactttttttccctttaactcaagtttgaaaaacatttagtccatgtagggacagattaaagtttaaattgatgttaatggtcagttatttggaatatctctatataatgacaacttggaagctctctcaggatttacattacctgaggtaaagattaggcagggtctgtggtgggagactggggggcaggggaacatggaaggtggactcctgcagtttgatatccccagttctcttcttg

SEQ ID NO: 36684 - DNA, 317 bp, Homo sapiens
aacatagccaagtcctagcccatgaagccacattctagtggagagaccctaatgaagagacaaatacactgatgtgtggaggcacaaatgtcagacagaaaaacaaaacagagcaggggagagaaagggacctgaaggcttctctcagcagaagacagatggaggtgaagatgcaggtgtcagacgtttgggggtaagttctccaggcaaaggcccaggaagtgtgtgtgacgaatattcaagggacaacccagaggacatgagcaaggacaagagcagctcacgcagcaggagtggcctggatgcccacatccgtg

SEQ ID NO: 36685 - DNA, 316 bp, Homo sapiens
caccaccgcccgccacctggctgttactgtccttcaggtcctcatgattgatttccaacacattagtgacatagaagggtccctgctgggcactgctggcctcttccataagctgagtatagatgtacccagccgaagacattataacaatgatgttctttccctcctcattgaaaaggaaggtaacatctcttatctttgagcttggcaggagaaaatagaaggttggactcaaggcatcaacacacaggtcataaatctgcaggatggaagaaaaattaaataagggaaatctatctcagtcccatcccccaaa

SEQ ID NO: 36686 - DNA, 332 bp, Homo sapiens
aggcaaagctcttcagtgtggtgagggaggcatgtgcccgggcaacctggaagagcatctgtgagtggcagtgtggggagtggcctacatgacccagcttgggcagggatggtgcttcggttcactgacaggacccggtcccctcctccccgctgcagccacacatggtctctttctcagtctcagcacctcgtggctttgggtctgtgctggcaggagtgctccgaagccccacagacagttcaccgaggcagctgtgtctgccttgaccagctctggcctcggatgcctggccaggctgcactttaccttgatcaaactgtctctgcaga

SEQ ID NO: 36687 - DNA, 317 bp, Homo sapiens
gacattcttcccatcccataccccggactcccagtgaatcttgaagaccctggggttagccttatcatttattcgtctgtatagtgatggcctgtgctaatgcccaaatgatcctgacttattaaaggttcttcctgaaaagacatgatttttattagttcaccacaacttattctcaaaaaagcatttattctttatcaagccacaaattttacttaattaactattctactagattccaagacgatttagaagctattgaggttgtaacaggataagagaacaactagtccactctgttaaaataaaataaaatc

SEQ ID NO: 36688 - DNA, 316 bp, Homo sapiens
ctcaaggtaattagatctcttttgttttcctcctgggcttctgacgcaagggaacctgctgaaaatgcaggaaggaaaactcaaggtaattagatctcttttgtttctttatctccattttgtgtacgttgagtgtggcttttctccggggtgccttccttgggatcagatttctgtctgtcttaatgctaataagaggaggtggacggcagattaatttttggttattgttgaatcgattttaagaaatgacgacatgttgttcatttggattaatccctcgtggtatgtcaaaagagcttagaaaactggcagt

SEQ ID NO: 36689 - DNA, 348 bp, Homo sapiens
attgagagaagagatttacaaatacagaagtgaagaaaactaaaatgaaccccatagtgttggaatagaattggagatttgctgtatatcattggttttcaatgatagatacagaaataaatgtagatgtaagtatatgtgtctgtgtgtatatatacatatattccctacctctgtacattgagaggacctggatgcagccacaccccaaaagcaatgagcacacctaatgtatagattttgacttctaaataccattctccactaaaagaatcaggactcagagaaatggccagccccaggtttagggcaaggacattattaggcgataagcccaaaagtatcttg

SEQ ID NO: 36690 - DNA, 340 bp, Homo sapiens
  misc_feature (1)...(340): n = a,t,c or g
aggacataggagtggtgtggaagggacattgccctgtagtgtcagatctcacgtcctgatgctttaagctgcctgctgggaaatgattagcagaggtctgtatcccttgggggtgatgaaagagagaaagagaagtattttctgtctctactttccatttactaagacaaatcctttggttatgaaaagcttttgcttttatcttttttgagaaaaacatgacctttcagtaagaatttttctaaataatatgctgacctttctattcataaattgtaaggttgctttaaaaatgggccttttatctgagtggcncaatatagtctcattctactagcct

SEQ ID NO: 36691 - DNA, 348 bp, Homo sapiens
  misc_feature (1)...(348): n = a,t,c or g
ccgggcagggttgtgctcactttggcagcacatgtactaaagttggaatgacacaaagattaaaaaacaaaaataaaaatattgggggtgggggagtaatcccctgctccatcagaatgggagatttctcctctcaatttacgaggatactccctcataaacacgttcggctgcagtagaaccaaacaggtgaagctccagtgaaacctgaggtggaaaataagaggctggggagatcaatgacctaaaacactaagtacaggaaaaacaggtagatcaaagtctgaatctttttacagtttttatggaattagaaaagacactgaaacaaaaaatactttnaaattt

SEQ ID NO: 36692 - DNA, 339 bp, Homo sapiens
  misc_feature (1)...(339): n = a,t,c or g
gaaagtaacagtggtattgggagactgaggagcctaaaaagtacttgaaggaagtaaaaggtttgtttgaccacattgtatttggaaagccagctttttcagctgtgtcagctttgtgtagtgatttttagttcttcttttagaaaataacggnnnnnnnnnnnnnnnnnnnnnnnnnnnnnnnnnnnnnccaaagtgttgctattacaggcatgagccaccacacccagcatgtattttttaaatgtataaaatgaagcagaaaagagaaatgataatttttcttcatcttgaaagattatcttcaccaggcgcagtggctcacacttgtaatcccag

SEQ ID NO: 36693 - DNA, 332 bp, Homo sapiens
cttgaggtccagtttcaccattctttccaggaggaccctgagggccaggtcctccagggccacctcgttctccattcttaccaggagcaccatcatttcctttaggaccggggaagcccatgacaccaggctgacctcggggaccagatggcccaggaggacctggtcgaccactttctccttgacttccgggaggccctggtttcccatcacttcctggtcctcctggacttccgggcatgcccctcattcctggacctccagggacgccatctctgccaggttctccagcagctcctctgggccctgcagggcctggagcaccacgctct

SEQ ID NO: 36694 - DNA, 343 bp, Homo sapiens
cccatctgtacccaggtatttcttgaccctaacctttatgcagatcctgggaactgctcttcttgttgacagcatccatgaacttctgaacatcttgagctgactttcttaaggcagccatagcttcacggagcttctggtcttttggagttctgctcccagcatcacctatggacgagaagaactctaatgagtgtcagagacttacacagaggaacttctgggaaattaagaactaacttactcaaaagcattattatgggagcattatcaacaataactgaaaataatcttgatataggtatacacacaaatataaagtactcaaaagggctggaaagac

SEQ ID NO: 36695 - DNA, 346 bp, Homo sapiens
  misc_feature (1)...(346): n = a,t,c or g
attccattcacaatttgaataaaaagagccaccaggcctcatgtgccctgcaccttgcaaagctcttcatgtggctcgttttgttaattctcacagcatccctttgaaggcagagcatttcagaaccacaggggcaaccccttagtgagcagtgaaataaagccagtaggtcgacgcggccgcgaattccnnnnnnnnnnnnnnnnnnnnnnnnnnnnnnnnnnnnnnnnnnnnnnnnnnnnnnnnnnnnnnnnnnnnnnnnnnnnnnnnnnnnnnnnnnnnnnnnnnnnnnnnnnnnnnnnnnnnnnnnnnnnnnnnnnnnnnnnnnnnnnnnnnnnnnnnnnnn

SEQ ID NO: 36696 - DNA, 345 bp, Homo sapiens
cactctggtttttctctgctgccagcacaaatgagactggaaggcaacacctggaatgacgggaccccacccagtctccatgacatatcttggcattcccactgaagctgttaagaagcttggaatgctagaaaaactaggaagcagcataatagtcaagaggagttttgtgcttacaggtactgctacattcccacctggctgctgcccatacatcccattgtaaagtttcttgttactgctagtttgagagccaccttcgtgtctcttggcttttcttttaatcaaggggactagaagtaggaaaacatttctttggggcttaaatgatgtcagtaattggca

SEQ ID NO: 36697 - DNA, 338 bp, Homo sapiens
atttttatcacataaccctttagccccagtattgcccacggtgatccattccacaacttactgccaagctccagcctctttctggctcttggggtaagaggatgggtaggagtttggcgagatttggaggcggagtgccttgattcaatccttttggccacatgttctgctggggtccaagaagggctctctgcactcttactcttggctctcacgggtttctggcacttggctgcactctcttgtggtttattcaactccgcaaatagttctgaggaaagtggcctgaatttcttctcattccaggatagtttcacaaagagtgtcttctcattttt

SEQ ID NO: 36698 - DNA, 339 bp, Homo sapiens
  misc_feature (1)...(339): n = a,t,c or g
ctgtaatagcatttctaacactgtaatgaaagagaacaaaagtacacgcttgctcatcatttactaattctaaaaatatatattgaatacatctatgtagcaggtactgtggtaggtgtggaagatagttgagacaggtaacaaagcccaacattacggagcttagcatcaccacctagaagagtttttaaaaaacatagattagtgaataatgattataaagacaaagagattcttgccatataattacttataagcaaatttaggatgtgatgaaagattttgatattggtcttctgatttggctgtangatgaagtgtttataagtcatccnggga

SEQ ID NO: 36699 - DNA, 343 bp, Homo sapiens
caacaagctcagtttgcaaatacaaacagtaggtgcacactgaaaaataataatctctaaatctttttacttgcaaagactcaactgttatttaaaaaagtctccctttacgggtatgcaaatttcctacaaaatttcctcacaatcttcaatcaaattaaagttggattatatcaagtggctgtccattcagtttctttctggaaatgttgagttatcctcctgggaatattcagagtttcagggttttagcacttatggcattatagatgtcctcagtcataggcacatacatttttgctgtgtcatccaagaaatacaaggcatctttgatgacagcaag

SEQ ID NO: 36700 - DNA, 348 bp, Homo sapiens
  misc_feature (1)...(348): n = a,t,c or g
ctcattcattcattcataaataaataaataaagtgacagaactggacagcactgtcacagcacatatcatttgttcaaaatatgtgttgcccttctgtattggcctatcccaatgggaggataatgttcagggccatggacattacccttggtcaatgaaataggagtggtagtgtaccactttcaagcagttcaagaggcacctaaggctttactgtctttgtttcccctctgccttgatcccagagcaaacaaaacatatagcagagtcacagtctacagctagttaaataacataagtgggaaagaagctttatttctttggntattttttctttcttttttaaa

SEQ ID NO: 36701 - DNA, 344 bp, Homo sapiens
ctccccctgcctggcatggctcttccttcatgagacggcaagtctcacggcaaaggccctctgtgacagccacccctgcctcagttgctgttcctagctctggcccttttgctctcatttcctaccctgcactgaattatctatgcagtggctagagcatcgggaagggcagatgaatacacaataaatgacttactagtattacaggatacacacaatgatgttatgtgattcatccaatgtgccctgcaaaactgcaatgaacacagcatttctctaagccctgcgtgtgcatctgtggcgggctgcctcacatgatttggttctgaatttactggacctac

SEQ ID NO: 36702 - DNA, 276 bp, Homo sapiens
  misc_feature (1)...(276): n = a,t,c or g
catggtcaactaaatgtaagacatggtgaattaaactaatccagggctggctggggcctttaatatgccagtgtgcacaataactctcaaaggtggcaactttctaggcttctctggaaggcaacctcttttaacacaaggtttgggatatcctgggcacactaagagatatactgtggcctcaaacagagggcttggtcagtaaaaacttacggagtnnnnnnnnnnnnnnnnnnnnnnnnnnnnnnnnnnnnnnnnnnncanggctgangcatg

SEQ ID NO: 36703 - DNA, 282 bp, Homo sapiens
cttatccctctgaagaagatatgatcgaatgggccaagagggaaagtgagagagaggaagagcagaggcttgcccgactaaatcagcaggaacaagaagacttagaactggctattgcactcagcaaatctgagatatcagaagcatgaagaattctcttgttctttggcaacaatatagtattcttcttcctgaatactgaaactatttacaatgtgtatcaaaactacctgtgagcatgggaatacaaaaggtttgagattcctgtaaatgtgacaaaat

SEQ ID NO: 36704 - DNA, 274 bp, Homo sapiens
gttggacttaggtacacttgatagtttttatatatgctttatgtaagtttttcatagtccccataccatccttatcaggtacacattattgtccccattactcaaatgagaacttaaggttaagtgactcttccaagttcacaagccaagaaaagagcaaaaatttgtacctaaattctcctaatctgggaaccattccaccacactgtactacctcttagattcatgtgtatcatttcagtgagcaccagcgtgtcccatccttctctggacc

SEQ ID NO: 36705 - DNA, 273 bp, Homo sapiens
  misc_feature (1)...(273): n = a,t,c or g
aagagaatagatctatggatatggctaagatcttcctcaaaaaaatagttttgnnnnnnnnnnnnnnnnnnnnnnnnnnnnnnnnnnnnnnnnnnnnnnnnnnnnnnnnnnnnnnnnnnnnnnnnnnnnnnnnnnnnnnnnnnnnnnnnnnnnnnnnnnnnnnnnnnannnnnnnnnnnnnnnnnnnnnnnnnnnnnnnnnnnnnnnnnnnnnnnnnnnnnnnnnnnnnnnnnnnnnnnnnnnnnnnnnnnnnnnnnnnnnnnnnnnnnnnnn

SEQ ID NO: 36706 - DNA, 279 bp, Homo sapiens
caggatttgattttcatgtgagtgcagcctacagctgcatttgatagtgcagcacattgatatgacaccttttctacaaggcctttggtggaatacatctgctgaacagaacagaagcaaaatatgtgccttgactcaaacttgtgacagagagctatcaaagtggaaacctgctcgaatccatttgcataatatgcagatgaaaatctaatgagaaaggtatattgacagacgttgccttgttatctggcaatgctgtgcataacagcatgtggtacc

SEQ ID NO: 36707 - DNA, 279 bp, Homo sapiens
  misc_feature (1)...(279): n = a,t,c or g
caaaacatttacagatgataaaatcaattcatgcattcannnnnnnnnnnnnnnnnnnnnnnnnnnnnnnnnnnnnnnnnnnnnnnnnnnnnnnnnnnnnnnnnnnnnnnnnnnngcataggcccctgccccctagcttacattctagggatgtgtaaagtgtggcacattatgattttaaaaattagccaatataggactgttgctttaacaatagaggaatttggtaagtggattaactttaaggtgttctactctacaaagacttggttcttacct

SEQ ID NO: 36708 - DNA, 272 bp, Homo sapiens
cattttaaaaaatatgtatatttgattgtctcatgattaattgggaagaattttgtcatttttactgaagtcacttgtacagagacgccaaaggatgtttgtgatctcttctttatttattggtggccttggtcacagtgagaagaaatgttctcagagcgttttgtgtattgcaaaagggaggtgccattttcgtaatgaaaaattaacgacatatccatcaaattagagactcagaagagaaataatgcattgttttttacttgcagaag

SEQ ID NO: 36709 - DNA, 277 bp, Homo sapiens
gttttataagagttctttgtatattttgtgtactacatccatattagatagaatttgtgaatactttttttccattctgtagtttttcttttcactttgatgtgctgtggtttttcacagtacttttacgtatattttcctttgatctttttggtggaaattattccaggaccaataggattataagaaccatgagcccatttctgtaaaaggtccaggacatagtgaaagaacaggttttattaataagaacttaattctcagataaggttcataa

SEQ ID NO: 36710 - DNA, 269 bp, Homo sapiens
gtcttcctcagtgtccccttttgttggctcctttattatagcctacctaatttggcgtgtattacttcctgctgcaagggtcttgtgctgtctgcaatactgaatttttacaacactgttgattctggcatttgtttcaatcatgctcttaagtgggccttcaagcaaattctgttagaaattgaacttcatacattagcagcctgcgtctcataatcttaatcatacagtcattctgactttctctgtaatcccaaactttctgattg

SEQ ID NO: 36711 - DNA, 270 bp, Homo sapiens
caactttaatttttttaatgttataccaggatgtaacaatgctcacacaaattgataacaaaattattaagattccaaaaaggaaataaagaaaatacatgaagagaattaaccaggaagaaatataaaggatcaatgagcacaggaaagaagtctttagtctttcataatccaaatggaaagcaaccataacaaccctctcctacccttataaattgatggtctttttcaaaaggatagtgtttggtaggataaaatgggaactttgat

SEQ ID NO: 36712 - DNA, 274 bp, Homo sapiens
tttcggagtttgcaatggaaatccagctgttgggtccattctggcagatcatgttgattggattgtgctggtaaataattgaggctgactttgctcttcttccagaatcttctgggcggtaaatcgtccatgctttggactgctcatccatgtccagaaggtgcctgctcttcatcctgtacaagtctcggttcacatcttttgctgtcctcattcccagtgcttgggcgatgaccagggccctctggggaccattgtctttgagaaacctgta

SEQ ID NO: 36713 - DNA, 266 bp, Homo sapiens
cccacactagcctggcctcgggagagcagagatgatgatgccactgtcaacactggccttgtgcagcaagggtgacagcagagtctccccttaattcccagtgggacatccaagacaatggtgtcatcataagcctcattattggacactcatcattatcacaccatcacaacagctgtttgatttttattttcttggtttctttgacttctcattatgtaatgcgcgttatcttattcaacagtgctgtgatcgagggcgtgata

SEQ ID NO: 36714 - DNA, 267 bp, Homo sapiens
gtcatttttaatacttacagttcacacagatgttctttctcttcggagttttaaaccttcattagaattagtcttttcttaccaagtctcttgccctgctgagaggtgtttgttagttgaatctgaatttgcttagcaagtacagcagacttttatttatttatttgcaggtctagtgtgtacaaaatactcttgacacagggttgtagaagtatgtggctaattctaaatctcaaaattatctatcaaggcagaaaacttcagcag

SEQ ID NO: 36715 - DNA, 269 bp, Homo sapiens
cgcaggtctgaggagctgagaagggaggcttacgtgaagggaatttagataatgggctgtgtgcaatgtaaggataaagaagcaacaaaactgacggaggagagggacggcagcctgaaccagagctctgggtaccgctatggcacagaccccacccctcagcactaccccagcttcggtgtgacctccatccccaactacaacaacttccacgcagccgggggccaaggactcaccgtctttggaggtgtgaactcttcgtctcatac

SEQ ID NO: 36716 - DNA, 277 bp, Homo sapiens
gtgtacccatgttcacacacttatctcacttggtcctcacagcagccctttgtcaaggggaggagagatggcttcatcctcaattcccgcataaggaaaacatggattctcccagtgggcctgtaactagtaagggcagagtcaagactcagatttcccattccccatatccagtgcactgttcaccagccaaaccatctctccaggaggcacgcacaaatgcatgcacgaattcatccactgattcaccgtacgtgcagtcagcagtatgcaagga

SEQ ID NO: 36717 - DNA, 371 bp, Homo sapiens
  misc_feature (1)...(371): n = a,t,c or g
nnnnnnnnnnnnnnnnnnnnnnnnnnnnnnnnnnnnnnnnnnnnnnnnnnnnnnnnnnnnnnnnnnnnnnnnnnnnnnnnnnnnnnnnnnnnnnnnnnnnnnnnnnnnnnnnnnnnnnnnnnnnnnnnnnnnnnnnnnnnnnnnnnnnnnnnnnnnnnnnnnnnnnnnnnnnnnnnnnnnnnnnnnnnnnnnnnnnnnnnnnnnnnnnnnnnnnnnnnnnnnnaacattaaggttaatcagctaaagtcctacggggaagaacctcatcgattcttgacaatacatgcaaatttatagtaataataatagcttgtgtttactggggactgtgtgcctggcactgttctaagctctttacacatactagtta

SEQ ID NO: 36718 - DNA, 378 bp, Homo sapiens
  misc_feature (1)...(378): n = a,t,c or g
gggagacagaatgagaaaagtcagagaaacattgatggccactatggctgccacagcagccccactgcctgagaactcacatgtgccaggcactctgcctaacctttccatgcatcgctccatttcatccctgcaacaatctacgacttaggttctgttattctcattttatggatgaagaaactgaggcttagaggttaagtgatttgcccaatgtcatacagcaagtgtggcagagccaagtgtcaaactgagatccagttccaggcatgctgttccaggtcactatgatgcactccccaggcgggcgcccagggctccggctcaggcaacagggtgggnaaggntgccattgactagacagacaacagagaaggg

SEQ ID NO: 36719 - DNA, 372 bp, Homo sapiens
  misc_feature (1)...(372): n = a,t,c or g
gcagcatgagaacggactaatacaatccagaagaacttttcaagggggtcccacaaggttatgttttgtaccactgtctgcactcaaaagagactccctgaaactcacagggttcagagttgcaaagaatgtgaggtgtgatctaatacctccaacttgagctatttatcatttcaggtaccgagaggctatgttacatcctctccaattgatgaagatttgttcttaatcattgactgagggagaagacacttggaattttccatttaaatctcaactcaagagctttctagatgcagtaagctaggacatcactctggattgtattgtaaaattaattcaaacattgnttccagtttttaggtttacata

SEQ ID NO: 36720 - DNA, 376 bp, Homo sapiens
  misc_feature (1)...(376): n = a,t,c or g
nnnnnnnnnnnnnnnnnnnnnnnnnnnnnnnnnnnnnnnnnnnnnnnnnnnnnnnnnnnnnnnnnnnnnnnnnnnnnnnnnnnnnnnnnnnnnnnnnnnnnnnnnnnnnnnnnnnnnnnnnnnnnnnnnnnnnnnnnnnnnnnnnnnnnnnnnnnnnnnnnnnnnnnnnnnnnnnnnnnnnnnnnnnnnnnnnnnnnnnnnnnnnnnnnnnnnnnnnnnnnnnnnnnnnnnnnnnnnnnnnnnnnnnnnnnnnnnnnnnnnnnnnnnnnnnnnnnnnnnnnnnnnnnnnnnnnnnnnnaaagtagggttctcctancancgagtttgagatctcaagaacggacagactaccttctnaaangggtccctaaccccc

SEQ ID NO: 36721 - DNA, 371 bp, Homo sapiens
  misc_feature (1)...(371): n = a,t,c or g
ccaggtccacctaacaccccctccctcccctaagaagatggatgtcctcaaaagagaaggaacaaacctccttgggaatccacattttttgggggaatggaaaagctctgtctccctaactcaactgctttgcaaggggaaatcaagctgggagaatctttttctggccacctgtggggtaggtatgcnnaccaaacnnagccnccgtggnacntnangtggannaactntgtntgcntgagaagcnttnanacccncggganntcnngatnnattnatggtngntacnnataaacnccnggggntgcttnnactgngcatngtgcaccattttaatnnntttnattttncatngntntgcttnttttatg

SEQ ID NO: 36722 - DNA, 369 bp, Homo sapiens
  misc_feature (1)...(369): n = a,t,c or g
cccttcttgcacaaaggattatgacagctactggtaggtggcaaaaccctgccaagcagtgagagaagccccctcaagagaccctcatcccccgctttcatctgtccccagatctcccagcatcggtccacaatgggcaacgtccatgcttcttgaacctgggctttcccttccatatgcaccgtttccagccacacagcaagagcttgacaagatttgttaaatgaacaaatgaggcgtcgacgcggccgcgaattccnnnnnnnnnnnnnnnnnnnnnnnnnnnnnnnnnnnnnnnnnnnnnnnnnnnnnnnnnnnnnnnnnnnnnnnnnnnnnnnnnnnnnnnnnnnnnnnnnnnnnnnnnnnnnn

SEQ ID NO: 36723 - DNA, 373 bp, Homo sapiens
  misc_feature (1)...(373): n = a,t,c or g
ctggtacttaggcttaataataaacatctctacatacagtacatactttatttatttatttattttttagaggcagaggtttgctctgtggcccagnnnnnnnnnnnnnnnnnnnnnnnnnnnnnnnnnnnnnnnnnnnnnnnnnnnnnnnnnnnnnnnnnnnnnnnnnnnnnnnnnnnnnnnnngtgcagtggcccatnnnnnnnnnnnnnnnnnnnnnnnnnnnnnnnnnnnnnnnnnnnnnnnnnnnnnnnnnnnnnnnnnnnnnnnnnnnnnnnnnnnnnnnnnnnnnnnnnnnnnnnnnnnnnnnnnnnnnnnnnnnnnnnnnnnnnnnnnnnnnnnnnnnnnnnnnnnnnnnnnnnnnnnnnnnnnn

SEQ ID NO: 36724 - DNA, 366 bp, Homo sapiens
ttggaaataattttcccttaaaaacctgaaggtattacctcatcatcttttggttcattgatgctattaagaagttgaaaactcttctggtagtgactgatgtttttgtaactaacttgtttcccctgactttggaggcttgtataatcttttttctcccagtatcctgaaatttcatgatttgccttgggtgtaggtcaattttcattcattctactgggtgcttggtgggctccttcaatctgaaaacttgtgtacttcaatttggggaacatttcttgacttttttcttgattatcttatttttttcttattctctattttcactttttgaattcctatcattcagatattgaacctcttaga

SEQ ID NO: 36725 - DNA, 363 bp, Homo sapiens
  misc_feature (1)...(363): n = a,t,c or g
tgtcactccagcttgacaccgagatgtcctaaagatggggcacataacaagctcttctatacccctgccccagctgtcagggggatcccaggagtgtaaccaaaggaagtcacaagggcccctggttcggtgacagcaggccattcttcaccttctttggacaaagggtttttctctgaactttccaccccatggcatgcccctcacaaactgaagtttagcccctgacggagcccatgctgctgtgtaagcttctgagccaaggggatggagagtctaaagcactggccacactgactcgtgctgaccaagaaagaaaagtgacacagtcatttccagaaagagcgccacagggctngggaa

SEQ ID NO: 36726 - DNA, 375 bp, Homo sapiens
cgcggccgcgtcgactgagtatatacacttttatgtctttgtgtccttgctctttctgaatagcttttaaagttaagatggcaccgtgaggagaagaaaacaaggtgatgacattactagtcttcccagataattcatttgacttaaacattttaaaaatttcttctcataattttaattcacagaactgttcagccatcagaaatacgggcaaaacaaaaaagtagcatgtttgagttctctttaaaaacagattaattttctttggcttccttaagccaacttttcttagttattcaacattagcctccatttatatccattttatcttataaagtaaaataaacaaccagaatttaaaaaaacaaaaacagg

SEQ ID NO: 36727 - DNA, 367 bp, Homo sapiens
  misc_feature (1)...(367): n = a,t,c or g
nnnnnnnnnnnnnnnnnnnnnnnnnnnnnnnnnnnnnnnnnnnnnnnnnnnnnnnnnnnnnnnnnnnnnnnnnnnnnnnnnnnnnnnnnnnnnnnnnnnnnnnnnnnnnnnnnnnnnnnnnnnnnnnnnnnnnnnnnnnnnnnnnnnnnnnnnnnnnnnnnnnnnnnnnnnnnnnnnnnnnnnnnnnnnnnnnnnnnaagcagtcttctaaggagaccattcattacgcagtgctccttccaccagtcagctccctagggttccatgcagaagagaaatcagaatttctttacaattcaaggtgctaagaggccattttttggtcatcaagtccagctgtccttttcagatgaagaaaatgaagctt

SEQ ID NO: 36728 - DNA, 373 bp, Homo sapiens
  misc_feature (1)...(373): n = a,t,c or g
ctactttctaccaaactctggctggagtcacacatttggaggaatcagacatcattgatcttgagaaacgctattggttattgaaggctcaatcccggactggacgatttgatttagagacatttggcccattggtttcaccacctattcgtccatctctaagtgaaggtttgtttaatgcttttgatgaaaatcgtgacaatcacatagattttaaggagatatcctgtgggttatcagcctgttgcaggggacccctggctgaaagacaaaaattttgcttcaaggtatttgatgttgaccgtgnatgagttctctccagggttgaactgagagananntnggntgcacttttagaagtctggaaggacaa

SEQ ID NO: 36729 - DNA, 364 bp, Homo sapiens
tgcagctaaccagggaagagttccaggtagtggggatagcaagtgcaaaggcactgaggaaagggcacatgggagggggcagcaagaaggccactgtagccagagcagtgagtgagggaaaaggagaaataatttcagagatagcgagtgatcagcatgtatagggtattaagcataagaaggactttggattttatcctgtgtgagatgggaaaccattggagtgccagagtaattttttcttaaagctagtctgcttgtcatttcttttcttaaaaatgcctcagttccctgttgcctttggaataatgtcacgtactttactttggcacacaaggtccttccagtcaggccttttgctgtt

SEQ ID NO: 36730 - DNA, 367 bp, Homo sapiens
  misc_feature (1)...(367): n = a,t,c or g
aaaataattttaatttgtacaaagcatgcaagaggacaagcaaaacacagaccacaagaaaaatggtcattcatgttccagcagattacagaataaaacttttccacctgtctgtaattagagatggcatatggcccaaactctcactttgcaaaaatcatggaaaagatataaaccaatcatcctcaggaactaggaagagtgggtaaaggtagaagtaggatgctcactgtggctcatgatttaattgtttactcagcaggaagccaagccacacattaaccctcatcctctaactgcctgaacctctaagtactcttaaatgtattaaatttccctattttccttgctccttgnttactgattt

SEQ ID NO: 36731 - DNA, 370 bp, Homo sapiens
ttctgatcttattcctgtggcatttctctgtattcacttggaggacttcattagtgaatcttgaggtattggagcagatgtcataatgacttggccatgttctaaaaccctaaagatggccctgttgaatcactgcaataagccgaaaagctattaatctggagttgtttggagttgctgctgactcaggagtcaggtttgaaatcaataccgaagttaagtacaaaatgtagacaaaattattcccaataacccttacctatctcactgagtgtatagacatcaccataacttgtaagtccaacacagctagtccccacgccagtgctggaagaggtcatgctcactcctatggtgcagctctctgagg

SEQ ID NO: 36732 - DNA, 364 bp, Homo sapiens
cggaggggctgccggcggagcagagacacagccaccctcccccacacaccatgaggtgagtcggggaggggcctaggtctcccacatgctgttgtgggaagctctgacccccgctgtgcctggggcgggctcacccacggaggtgactgttaatacagcgctgagtgcgaaggagacccgagaaaatgggcctattctgtctagtaacgttttaccttctggtgagggtgtggggagagaagctttggcagggtcagtgaggccccgcagcagagccctggtgatgaaagacacttttgtatggtacccgaaggcttaacttcactcctgattgtgagtggattgtgtgtggtagtggtggacc

SEQ ID NO: 36733 - DNA, 332 bp, Homo sapiens
cgacttttctgacctcatctcctactaacccccaccatcgctggtcttcctcttttcttggactgtaccaggtgcgctcctatcttgggccttgtactgactcttccttgcctccttcaggtctttgctcaatgtcaccctcacattgaggcctactctaacaactttaatttaaaggattatttccccaatgtggcacaacaaatccccttagtcctgatctatttatttcctcgggaatttcttacatattaatttcctttattgtatgctgtctactctgcccactagaatgtaaactccagtaagtagatcaagctcttttgtctgtt

SEQ ID NO: 36734 - DNA, 332 bp, Homo sapiens
  misc_feature (1)...(332): n = a,t,c or g
gttcagatgacctacggacaggtctatttcagtatgtacaggatgctgaatctttgaaattgcctggcgtctatgaagtcttattttataatgaaactgaagattgcccagggatgatgttatggagatatccagaacctagagtactcacccttgtacgaataactcctgtaccttttaacaccacagaggatccagatattagcacagcagaccttggtgatgtgctacaggatccttgtagcttggaatactgggatgaactccagaaggtttttgntgcatttanagaatntantctgtctgaaagcnnagtttgtgaactgcagttg

SEQ ID NO: 36735 - DNA, 332 bp, Homo sapiens
tccgactctgccctccctcccctcctctctaatccttccctgccagggaaatcctgtgcggactccggggctggggagaatgcccctcctccagcccctctcctggggagcaggccacttgctcctgaggccccatcacgtgcccctctagccttgggcagatggcaagggggcagttgctgcttctctgtacttttccatgatgacttttttgcagcaagcatgtatcatttttgcacaaccaataaatctactttcaaaacaaaaaactgaaaacccctataaaagtccaataaggacaaacgccagttgcctggccgtgggcagaggca

SEQ ID NO: 36736 - DNA, 330 bp, Homo sapiens
tttaaactcaaagcttgaagagagaagggtatatataggcagtccttagctttacatagttcctgtaggcacaaatttcaattgccatgacttagctaagtaacagtccactaacaacatggttaaaatttcacctaccctgccatattaactaattatataaactacaacatttgctgctagtctttcaacctacaaattaagatgtaaatgacaggtgcatataatgtcacttttaaagcttcttggtgattggtcaccatgcattggtttctcaaaatcatgcacagtcggatgtatagttggcctctgtctcctaatgatgtcccc

SEQ ID NO: 36737 - DNA, 327 bp, Homo sapiens
cttttttatttttaaaaatagttcttttgtaatgtggtgttcaaaacggaattgaaaactggcaccccatctctttgaaacatctggtaatttgaattctagtgctcattattcattattgtttgttttcattgtgctgatttttggtgatcaagcctcagtccccttcatattaccctctcctttttaaaaattacgtgtgcacagagaggtcacctttttcaggacattgcattttcaggcttgtggtgataaataagatcgaccaatgcaagtgttcataatgactttccaattggccctgatgttctagcatgtgattacttc

SEQ ID NO: 36738 - DNA, 337 bp, Homo sapiens
cccttttctgcttaaattagggttgatttttggtgcttataagaagaatttgacttatacatgtataaaaggttgtctcctagtcttcactataataagcaacctagcataaatatccttctcatcatttccttttaaatttctaaaagtcaaaatctagttgctttttctttaaactgtaaataattctgccattatctttgtgcataggctattctccacatttttctgtttttaaaaaatagacttacaggtgactactatttaacacttatttacaagcccacagtataaactccccaacctcaaaataaaaaatcctgaaaataatttactc

SEQ ID NO: 36739 - DNA, 326 bp, Homo sapiens
cagaaccagacatctctgatcttctatatgttttcaaattgtgacttgatgactcttttggacttttgttcaaaggtctgtcagcacagtttttataccaatcctaaacatccattttcaaaatcacttgaacttggaattctttagagcagagtctaagccagttttttcgttactgatatttattcttatccattggactggttctggtcctgggtagaaaataggggaggggtggctagtcctgcttaggtgcatggtcatgtaggcatgggatttcaaactgttcatttatacacatatttcatcctctcttccctcaggtg

SEQ ID NO: 36740 - DNA, 325 bp, Homo sapiens
  misc_feature (1)...(325): n = a,t,c or g
nnnnnnnnnnnnnnnnnnnnnnnnnnnnnnnnnnnnnnnnnnnnnnnnnnnnnnnnnnnnnnnnnnnnnnnnnnnnnnnnnnnnnnnnnnnnnnnnnnnnnnnnnnnnnnnnnnnnnnnnnnnnnnnnnnnnnnnnnnnnnnnnnnnnnnnnnnnnnnnnnnnnnnnnnnnnnnnnnnnnnnnnnnnnnnnnnnnnnnnnnnnnnnnnnnntctattttaaaagggaaagttttgaataactcttaccgttagtcttcgaaaaaaatatttatgtaattataaatattaagaattattcatgtaaaaggtagtctcaaaactaca

SEQ ID NO: 36741 - DNA, 324 bp, Homo sapiens
cttattttagagactgggagagagaaatttgagtaagattaaagaagtttctcagtctcatagctaaagcttcccccggagccttggctcttaaccaggatgggagacatcttcacctgcataagaaaaacactccgattttactgctgaatgagaatgcacagcacctaagtcaggaaaatgtatttaaaatgagtatccagcttttgtgcccaaatttttaatgcattcaattgcctgaactttaggatcattgcgattttcacaagtaaaaatcagaattcaaaaattttaatctataaaagtcagtggggaagtttagca

SEQ ID NO: 36742 - DNA, 335 bp, Homo sapiens
tatacaatgaataaagatataatttgtcacatcaataacataaaaagagtagagctatatatatatagcagtagaattttggtatgtgattgaacttaagttgaaataaattcaaattaaaatgttataactctaggatgttatatgtaattctcatagtaaccaaaaatgaaatatacatagaatataaacaaaaggaaatgagactagaaacaaaatgtgtcactacaaaaaaatcaactaaagataaaaaagaaataattgagaaaatgattggcaaaaatcagtaactctgacgtattaaaactttccatgctacataaatctgaaaactc

SEQ ID NO: 36743 - DNA, 312 bp, Homo sapiens
  misc_feature (1)...(312): n = a,t,c or g
aatacacttggtgtgaatgcgcaggtgtgtgtccttccgtggacacatgcattcattttgttttgagtatttacctaggggtgggattattgggtcagagtataggtgtatgtttagtttgagtaggtaacgtcaaatagtttctcaaggaaacaacaaaaaaatttacactccaatcagcggtgtatcacagctccagttgctttaaactccactgacatatggtattctgtcctctaattttagtttttctgttaggntttatatttnttttaataagntaatatgattntanattttatatttntttta

SEQ ID NO: 36744 - DNA, 334 bp, Homo sapiens
aaaccctgtctctacaaaaaataacaaagattagccgggtgtggtgaaggagagggaagcatcaggatgacttccagatactgtgtcttggagaattttagaaaatgccagtgccatttgaggagaagctgttttaaaaggaataattagtttgctgtttgaacatgctgaatttgagctggtaaaggatacccagaaagatgtgttctgtaggtatttggatctggaacttcaaaaaagggtttatagttaagaatcaagagtcatcaggattgaattgtttgaaaccgtggaagtagatatgataatctaggaattcaagaagaaaagtgtg

SEQ ID NO: 36745 - DNA, 323 bp, Homo sapiens
cttaaagtgaaatttaaaaagtaataataatttttaaaaatgtttaaaggcttactttggagagacagttttacatagcttaatattttatcattaaaggcatggtggagctggttcctgcttccgataccctcaggaaaatccaagtggaatatggtgtgacaggatcctttaaagataaaccacttgcagagtggctaaggaaatacaatccctctgaagaagaatatgaaaaggcttcagagaactttatctattcctgtgctggatgctgtgtagccacctatgttttaggcatctgtgatcgacacaatgacaatata

SEQ ID NO: 36746 - DNA, 324 bp, Homo sapiens
gaaaatgcaaccttttgtgctcagcaaagaatttatctacttttaaacagagtaataacatttaaaacaaaacaaatacaataggagaggcaatcactggtaactaactgtatatttacagaagtgcaatttaattgggaactggtttcttagattttacatggaaagagactacagactttataagtagagactaaaagccctgagaagggaatttttcaacagaagcagctgggtgaggaaaattcaatgtatcctcgcccactgccatgggagacccaaggatgctataatacttaaagaccatgtcaaggcaaccaggta

SEQ ID NO: 36747 - DNA, 322 bp, Homo sapiens
ggtttaatcaccaaaagtgcagagcaggcaaaatgcagctgtttatcaatctcaaaagctttgggacagtgtcatagttgaaagatgagacttaagaaaacagtttcttaaacttcttaaaacttaagaaacattgtttcataaaacaatattgagtgggcattcttctgcacagtgtgatgctccaaccctggccctagtctcagtagaccatgctgcctcgagtgtgcatcggagagaagccatgggtaccttccccattagaggctacttccttctagtaacaggaagggaagttccagcatgaggtagttatccaggg

SEQ ID NO: 36748 - DNA, 322 bp, Homo sapiens
  misc_feature (1)...(322): n = a,t,c or g
cctattttgagttagattttttgttttgttttgtttttgttgttttgagacagagcgtcttgctctgttgctgggttggagtgcggtggcgcagtcatagctcccggcagcgtcaaactctgggactcaggcggtcctcctgctgcagcctnnnnnnnnnnnnnnnnnnnnnnnnnnnnnnnnnnnnnnnnnnnnnnnnnnnnnnnnnnnnnnnnnnnnnnnnnnnnnnnnnnnnnnnnnnnnnnnnnnnnnnnnnnnnnnnnnnnnnnnnnnnnnnnnnnnnnnnnnnnnnnnnnnnnnnnnnnnnnnnnnnnnnnnnnac

SEQ ID NO: 36749 - DNA, 323 bp, Homo sapiens
cttaacctcccttcatagctcagactattccatgaacaatttatggacataaaaatctatgccagtagacatttaaggatattttttatggtgactatggaaattgcctggttacaaatttatatatagagtcagtaacattgataaaaacataacaaattactgtttcatggaactcatgaggcattaagaggcttatttagttttgtttagatacaaggtagtgtcttccaaaacattgttacttcaaaatttttgtagctgctccagctgaacactatattaaaatgcacatttttgaggacatattcttgaaattagga

SEQ ID NO: 36750 - DNA, 328 bp, Homo sapiens
  misc_feature (1)...(328): n = a,t,c or g
ggacaaccttatagnnnnnnnnnnnnnnnnnnnnnnnnnnnnnnnnnnnnnnnnnnnnnnnnnnnnnnnnnnnnnnnnnnnnnnntaaacatagataattttttttaacantntttcgttntgnantntanannggagngcannggnncatncanggttnantgcnncnttnacctccngggntnanccantctttccncttnancctccnaagtatnnggggctntaaaccgggggntacccnggccaattttcggattataanaatnnnttttnngtaaanacngggtttttccatggtgcctangctggtntngaaccccngggc

SEQ ID NO: 36751 - DNA, 339 bp, Homo sapiens
ggggaagacccattccttcccagaggggcctgccacctggacccctgcattggaactggaggcagggaacatggggaggaggagggtcggtgccttcaagaaaacaggcactgccctggtggccctctcccctgccccctgcaggaaggagctgcctggacccgttcatgggggagggggcagaagtgttttttatatatgtgtatatattttttttaagctctgagctgtcaacgagacgtttcctaccgatctcggctgccgtctctgttgtcatttctgggagagggagggtttaggggtagatttggaaccttttaaaaatggcttgatgtatgt

SEQ ID NO: 36752 - DNA, 333 bp, Homo sapiens
  misc_feature (1)...(333): n = a,t,c or g
ctaatatattagtaccttaagagagagataagtacttccacagatttatatttatagatgaagtggtggaagaggtggaaaggaaaaaggacgagtagaggtcnnnnnnnnnnnnnnnnnnnnnnnnnnnnnnnnnnnnnnnnnnnnnnnnnnnnnnnnnnnnnnnnnnnnnnnnnnnnnnnnnnnnnnnnnnnnnnnnnnnnnnnnnnnnnnnnnnnnnnnnnnnnnnngtcgacgcggccgcgaattccnnnnnnnnnnnnnnnnnnnnnnnnnnnnnnnnnnnnnnnnnnnnnnnnnnnnnnnnnnnnnnnnnnnnnnnnnnnnnnnnnn

SEQ ID NO: 36753 - DNA, 325 bp, Homo sapiens
  misc_feature (1)...(325): n = a,t,c or g
cggagattgtgtcttaccctaaggtagagacagtaagttaaccaaactctctagttgacagtgtataggggttaaatgtgccccacatggtctccactccaaaatgattctgttcatatcagaatagaatcttttctttcttatcttttctctgggactcagtttttccatctataaacagggtatagnnnnnnnnnnnnnnnnnnnnnnnnnnnnnnnnnnnnnnnnnnnnnnnnnnnnnnnnnnnnnnnnnnnnnnnnnnnnnnnnnnnnnnnnnnnnnnnnnnnnnnnnnnnnnnnnnnnnnnnnnnnnnnnnnnnnnnnnn

SEQ ID NO: 36754 - DNA, 319 bp, Homo sapiens
tgcttttaagtatcacttggtctttatttcattaaaatgtcagccttcatgctaggaggtacttacttctgtaagctgatactttagctaaataagacttaacagagcttttgttcaaattatttacaacatctgattgagatagtgaatgttttttcctaacatacaaaaccaagatacaagaaaagaccctgcagcctgacatgtactcaatcctggggaactgtggatcttgggcaggttagctggtatgacttgaaatattgagactaatacttgatctttaggacataatttagaatattctgattccatgttt

SEQ ID NO: 36755 - DNA, 316 bp, Homo sapiens
gtttaagggaaaagcactctcaatgcctcctctaactccagatcctctagcttttcattgttcctacacacctcacatgtgttttgcatcagaactcactttcagtagctttaatgtatttcaatgagctgtgtttaaggttgggaagatatatgtgcatccagagacacatgaagggtctcgctgtatgctggctcgcacctgagaaacactgtgctactcttgataaaattatctaagttcaacttcttatggaatccaaacacataaaaatacataaacctttatgaagtattattgatgatgtcaatacatg

SEQ ID NO: 36756 - DNA, 316 bp, Homo sapiens
ctcagaactgcgcttttcaagtccttcttactgctagaagatggatcttgaacatgcaagctatgttcctccttatgatttagttctgcagcatcactctgatccgtattttctgacatctgatctgcagaaaattctttgttctttccagataccttgctttctgtacctataggctccaggatctggccctcgccttcacttgcaacgtttctcagaggggggttctttttccggaccatatctgttgattaatcgtcaagaacaccctcggcagcccgaaagatggtggcgcggcggccaaagccatgaaccg

SEQ ID NO: 36757 - DNA, 311 bp, Homo sapiens
atagaagttaatttgaactgttttagaaattatcatgttttccataaagacagcattgaattcattcattagcatgccctggtgctttcctgtttgacactggtcagagaatttaaaaagaacaagagcgttaatgcacattcagaaatcaggtgcacatagaatttaatgtcaggaccttaaagggaatcttatccaatgatattaggcctgccttaaaaagaattcagacatgatatgttgataccaatcatgttttccatactggtaatggtagaatttgtgttttaccatggacagctattattaaa

SEQ ID NO: 36758 - DNA, 210 bp, Homo sapiens
gtagaccatataatctaaccctcctcctctacaagttttaacttaagaactgttatttgtttatttattttaattttgaagaaagttttgcagttggggactcttatggctataaccacgagtaatggatgtttttagagagatgcctgtgcttgtctctctctttctctctctctctccctgtctttctgtctgctttttttttttttt

SEQ ID NO: 36759 - DNA, 312 bp, Homo sapiens
gaggcgtgttcgggtactggaggaagaagaaaggaaagcacctacataatagctgcccaatctcttccctgctctgagcccaggggtttagtctgcagagctctgagagtgtaaaatttcccatgtgccttcaaaccaggtcattctggaatctgcgatgtctcatatgtcctgaaaccaaccagcagaggggagcaggctgaccaagtgggctgaaggacccatgtggccatatctgagggacaccctagctcacactggacaacaggggaggaaatcaggagagtgctcaccagcagcgggcaacatttc

SEQ ID NO: 36760 - DNA, 273 bp, Homo sapiens
taccatcccactaaagtgtgatacaagaaacttcttcactctcttccctctacgtatttatgaaggcagataataaactggataatatttatcttcacttattcaacaaacatttattgagtgcctactaggatggtggcagtggcagtgaaggaaatgcaaggatacaagatatagaatcaagggttactcttagaatttttgctttataaaacagatggatggtgaatgagatagggaagactgagaaaagaacaggatagagacatgatt

SEQ ID NO: 36761 - DNA, 279 bp, Homo sapiens
tggttttgttcaccatttatctttctttttacagtttcaagtttcatatgaatggaatcatgcaatgcatgctcctgtataaggcttcttgcattcagcatgtttttgagattcattaatgttgtatgtatcaatccttctttgttgttgcttagtagtattccagtgtatgagcagatcacagtttatttatccattttccttttagtggactcctggacactttccaatctgaggctagtattaataaagctgctatgaatagtcttgtacaggtat

SEQ ID NO: 36762 - DNA, 328 bp, Homo sapiens
cgcggccgcgtcgactttaaatttcacatacattaaggtaattctttgtgctctaaaactctatagaatttgacaaatacttaacgttttgtattcaccattatattatcacacagaagtttcactgccctataaattttcctgtgcctcacctatttaaccttcacttccttccccagaacctctggcatctactaatgtgtttaaggtcttttaagttttatctttcccagaatgtcatataattggaagcatatattatacagctttttttctggctggcttctttcacttcataatatgcatttaagattcttttattttcata

SEQ ID NO: 36763 - DNA, 323 bp, Homo sapiens
cctgtacccacttgtacagagtagacccagggtaaaagttagctgaatgaacaaatgttagtgccagcaatggcaagaacaactgcaacattctttattccttcttctgcctcctcttctccctctgtagcttttaaaaatatctttatttgatccaccaattacccagaggaggcctgaagacttactgataaataaagacaactctgtagaccaaaaaaagcttgcaaagacccttatactaacaagtgaggcgtaggccagtggagaggggaatctcagtccctgctttgctgacagcctgctcctggggagtagaagtg

SEQ ID NO: 36764 - DNA, 330 bp, Homo sapiens
gtcaatcgttacagtcagtccatttcagtgggaacaacgaatttctccacagggtcttatttttctgtttttcacttcaccaaatggggtagatattttttcagaatgcagttattagaaccttgggattttcttctgtctccattgagtctcttgtttttttcccagatctgaaccatttcactttctgcatctgctctaaggtttctggaagagtcattcccaaactttcagggaaaaaaagggtgaggattccaatcaggacagtcagactacccatgacgatgtagggcagcattctgttgtgtcgacgcggccgcgaattccaaa

SEQ ID NO: 36765 - DNA, 405 bp, Homo sapiens
  misc_feature (1)...(405): n = a,t,c or g
nnnnnnnnnnnnnnnnnnnnnnnnnnnnnnnnnnnnnnnnnnnnnnnnnnnnnnnnnnnnnnnntctcgaggatccgaattccnnnnnnnnnnnnnnnnnnnnnnnnnnnnnnnnnnnnnnnnnnnnnnnnnnnnnnnnnnnnnnnnnnnnnnnnnnnnnnnnnnnnnnnnnnnnnnnnnnnnnnnnnnnnnnnnnnnnnnnnnnnnnnnnnnnnnnnnnnnnnnnnnnnnnnnnnnnnnnnnnnnnnnnnnnnnnnnnnnnnnnnnnnnnnnnnnnnnnnnnnnnnnnnnnnnnnnnnnnnnnnnnnnnnnnnnnnnnnnnnnnnnnnnnnnnnnnnnnnnnnnnnnnnnnnatagattaaactgaaatccatgatctattaccaagattcctcngaaaaaaaa

SEQ ID NO: 36766 - DNA, 301 bp, Homo sapiens
ctctgagtttttcttcaaaaactctgggataatattcacctaagaaaattaaatgagaacaaatataaaaacacttggaaagaagtttctgcaatggagaattaaatgatagataattgggtcctaccctttttttctttcacatccctctgtcaccccaaggctgtatattctctagtttccctcaagagtaggaagaggattcccttttcctttttgtgcctttgtattagtagaaaaaagaaattagggatcggggacatttctgactgagtagcccatggcatatgaatatattggg

SEQ ID NO: 36767 - DNA, 310 bp, Homo sapiens
ggggaaggtaaaaatataatgcctaaattcttacctcattccagttagaaaaaccaacacactatatttttaccttccccaaacagaacatacaaaacgcaatgtaagttcctaaatttgactctgccttattttagcttttctttcctgtctttcactatcgagctgtttattctcactagtactagtctcaaaactttccacctttctagcctaaatggactaagaaaaaggagaacccggattataaaactgtatgcaaaatttatttaactagattcataatgatggcttcaagtatttcctgagg

SEQ ID NO: 36768 - DNA, 291 bp, Homo sapiens
  misc_feature (1)...(291): n = a,t,c or g
aaattatttaaaaattttattttacaaattcactgttaatgctggcagtatattccaaattaaagatgcacataacctaagtttagaaacnnnnnnnnnnnnnnnnnnnnnnnnnnnnnnnnnnnnnnnnnnnnnnnnnnnnnnnnnnnnnnnnnnnnnnnnnnnnnnnnnnnnnnnnnnnnnnnnnnnnnnnnnnnnnnnnnnnnnnnnnnnnnnnnnnnnnnnnnnnnnnnnnnnnnnnnnnnnnnnnnnnnnnnnnnnnnnnnnnnnnnnnnnnnnnnnnnnnnnnnn

SEQ ID NO: 36769 - DNA, 299 bp, Homo sapiens
gcgcaaagctgcagcgtctggaaaaaagcgacttgtggcggtcgagcgtggcgcaggcgaatcctcggcactaagcaaatatggacctcgcggcggcagcggagccgggcgccggcagccagcacctggaggtccgcgacgaggtggccgagaagtgccagaaactgttcctggacttcttggaggagtttcagagcagcgatggagaaattaaatacttgcaattagcagaggaactgattcgtcctgagagaaacacattggttgtgagttttgtggacctggaacaatttaaccag

SEQ ID NO: 36770 - DNA, 308 bp, Homo sapiens
  misc_feature (1)...(308): n = a,t,c or g
gttggagaatcacattttagaaacagtgaaataggctgggcgcagtggctcnnnnnnnnnnnnnnnnnnnnnnnnnnnnnnnnnnnnnnnnnnnnnnnnnnnnnnnnnnnnnnnnnnnnnnnnnnnnnnnnnnnnnnnnnnnnnnnnnnnnnnnnnnnnnnnnnnnnnnnnnnnnnnnnnnnnnnnnnnnnnnnnnnnnnnnnnnnnnnnnnnnnnnnnnnnnnnnnnnnnnnnnnnnnnnnnnnnnnnnnnnnnnnnnnnnnnnnnnnnnnnnnnnnnnnnnnnnnnnnnnnnnnnnnnnnnnnnnn

SEQ ID NO: 36771 - DNA, 309 bp, Homo sapiens
  misc_feature (1)...(309): n = a,t,c or g
aacatttattattaaatatctagtagataccaggggcacaggaataaataaaacatggtccaaggtaggttatattttaacacacacacacacaaacaagtagaacatggtcaataaactcacaatctaaataaagagaaaagcataaaaacaaataattttgtttttctttttttgagatggagtctcctnnnnnnnnnnnnnnnnnnnnnnnnnnnnnnnnnnnnnnnnnnnnnnnnnnnnnnnnnnnnnnnnnnngtcgacgcggccgcgaattccnnnnnnnnnnnnnnnnnnnnnnnnnnnnnn

SEQ ID NO: 36772 - DNA, 297 bp, Homo sapiens
ggaagatgttatttattagccctatttcatctatttcttacaaaataacaaaaagtgatcgttattaacctggcttaacagctgaggaaataggcctggaagaattaaatcacctgcccaaggtcacataagcggtattgaaaataagctttgcatccctcattctctcctaccaggtgtgtgctcctcacagaagcttcagaggggcactctgccctctggttaggaaggcctttgttttaaaggcctcccctcatctctcaaggctaaagggcatatcaagacaagacataagga

SEQ ID NO: 36773 - DNA, 310 bp, Homo sapiens
tttccaaagaggcctccaaggccaccaactgtggaaatgttcagatttgcccttaatctacaacaaaatatttatgcttttggttattgcaacatgaagtaaatgccaattctgtttaatcccccaaaaaacctctggctcagggtccccaaagggaggtacatgaagaaaatattagaatgtgaaacgaaaatatctttggcccccaaaattactatgaaaaactcaaggtggaaactgcttaagacaaaccggcctcccattctattcaaaagttatcctttcgctcattgagttagatgcatagctg

SEQ ID NO: 36774 - DNA, 83 bp, Homo sapiens
cttatccttccttctctccacctgtgtgtggggctatatcaccatttgctttcctcctagcttctcaactttttttttttttt

SEQ ID NO: 36775 - DNA, 382 bp, Homo sapiens
  misc_feature (1)...(382): n = a,t,c or g
ggaanaccgtnnnnnnnnnnnnnnnnnnnnnnnnnnnnnnnnnnnnnnnnnnnnnnnnnnnnnnnnnnnnnntntcgaggatccgaattcgcggccgcggtgacccgacgctgggaaaggccattcagtgttagctgtgtgaggtgccatcctgagacaatcatcatcacaaatgcagatgcaaagactgtacatcaagcttaaggagatgcaatgcaaatatgcagaacatgtagcactgggcaaaaaaagttcagtgcaatgatatagaagttcacttggactaatagnttnnnntnttgttaaaatttgtggggtgctaanttgaantanaatnnnnnanattnngnnannnntnttngncggcnnanantntnntaac

SEQ ID NO: 36776 - DNA, 297 bp, Homo sapiens
ctcttcccttagaaaaaagagaaaagacaaattaccaatatcagcaatgaagaaccagtcatcatactgttcccatgaacagtaaaaggataataaagaaatattacaaataactctatgcccacaaatgcaagaaaaaatgtaccaatttctttaaactatcaaaactcaccaacacaaaaacctgcatatgaaaccttacagcagctttatttataaccgtcaaaacttggaagcaaacaactaagaggtccctcaaaagatgaatgaacagtggtacatccatacaatggagtt

SEQ ID NO: 36777 - DNA, 308 bp, Homo sapiens
ccttactagcccccaaggctgtgggttctctttggctgaccgtcgtatttctcatgctagcccagttcctggcacacagtaggtgcacaatgtatatctgataaatgaatgaatgaaagaaatgcccttagtaaatgaccttggggggtggggcagagggagagttctaataaaacaggaataggtactatatttccatcacagggtcaatgcccaataaaagtttgtaattatattattattacataggcttttacttgtgaatacttatggaatgcctgctgttatctcatgcactctcattttag

SEQ ID NO: 36778 - DNA, 103 bp, Homo sapiens
ccaggttcaggagccctgtaacacacataatatcatattacactgtcacactttctacttgacataaaatattctaagtctaggaactctttttttttttttt

SEQ ID NO: 36779 - DNA, 168 bp, Homo sapiens
ctggcaagggagcctctctctgggactgtgtgggcttcctgacagcatggtggctaggctccaagaacaagtgttccaagagacctaaacagacagaaactgcaggcttcttctgacctagcatttgatgtcccagagtgttacttctgctgcatttttttttttttt

SEQ ID NO: 36780 - DNA, 306 bp, Homo sapiens
  misc_feature (1)...(306): n = a,t,c or g
ccggtaccnnnnnnnnnnnnnnnnnnnnnnnnnnnnnnnnnnnnnnnnnnnnnnnnnnnnnnnnnnnnnnnnnnnnnnnnnnnnnnnnnnnnnnnnnnnnnnnnnnnnnnnnnnnnnnnnnnnnnnnnnnnnnnnnnnnnnnnnnnnnnnnnnnnnnnnnnnnnnnnnnnnnnnnnnnnnnnnnnnnnnnnnnnnnnnnnnnnnnnnnnnnnncacaataatataaaataaaatcacaagggtggtgcacagacatgctggcttagaaactttgtgccccacgcagaaaccaaatattgtataacg

SEQ ID NO: 36781 - DNA, 296 bp, Homo sapiens
gttcctgggcatggaggtgtgcgactccctgagtggcagtgacagagagctggtcatacagcaggcaagcacttcccagcgctcatcttaaatttatgctcaggaacaagccattcctaacaatctagagagagagcaaaaatgtaagatgggttacggtatattacttatataatagcatatacacacaccatgaaacctggtatttaaatttccctcagtatcttggatgcactcagatgagcggatacaatcattaaaaatcatgttgcgaaataatacctaaaacatgggat

SEQ ID NO: 36782 - DNA, 363 bp, Homo sapiens
cttttgtatcagggcctttcctcttgacattccttctacctagaaacctctgctccaagattaattcattcagcaaatactttatggagtacctgtaatgcaccagcacttgttttaggtattaatgataacagaatgtagaacttatcagagtggaggaaaatagatgataataaattttaaacaaataacttttaaagtatagtatgttagaaagtgttaagtgctgtagtaaaaaagaaaacctaaaagtatcataaaaggggattgggagtagaggggaatgggttgcaattttaaattgagtggtcagggaagcccttatttgaaagtaatatttgaaggcagtaaggaagttaatca

SEQ ID NO: 36783 - DNA, 463 bp, Homo sapiens
  misc_feature (1)...(463): n = a,t,c or g
tttgangcnnnnnnnnnnnnnnnnnnnnnnnnnnnnnnnnnnnnnnnnnnnnnnnnnnnnnnnnnnnnntctcgaggatccgaattcgcggcccgtgtcgacatctctatggtaataggactaacagtagcctattgattgagtggaagaagacattatacaatgtcagctggcttgttacaatttcatttgttgtatgacctgaattaaccctttaaaacctttcttctgtgaatataaacccaacagcaggacacagtttttgtacaaccattacagtgatggctttttcctgttccagtgtacaataaatgtgtttctttgcagcttgactcccttatcagaatttgtttaggagacgtttcactactttattcatttacaaaccaaatcatcattccattttgttgttgaatattgaagggttttgatccaggaaacagttttattctttctttccccc

SEQ ID NO: 36784 - DNA, 362 bp, Homo sapiens
  misc_feature (1)...(362): n = a,t,c or g
cgggggagggaagaatgacagcnnnnnnnnnnnnnnnnnnnnnnnnnnnnnnnnnnnnnnnnnnnnnnnnnttagaaagaatagtgatggttacctaacagtgaactaatcaatgtcactgaaaagtatacacacaagaaatgttaaatggcagattttattaaatatatttagtttaccataataaaacaagattgctagaataaaagatctctaaactctatttcctcttctactcctgtaagttttttaaattcttgaggtcagaggctaggagaaaaaaaccctgaagacaccagaaataggttcttaaagcaggcattctgtaatggtttatctttgtattgntttaagtcctagaa

SEQ ID NO: 36785 - DNA, 353 bp, Homo sapiens
  misc_feature (1)...(353): n = a,t,c or g
atttcactcacagtaaaatccaaaggttgtacaacaccctgcatgctctggcctcctcttagaacccctaggctctctcccttgcttactgtgctatttttagaatagcccagacagctttctacccctgaccatttgcccttgcagttctctgcacatagctcatcccttcgcttcattcagggttctgcctgactcttacctcctcagaaaggatccccgaccattctatttcacattttttctttttttacttttttttttnccantttngcccccnggnngaagggngggggggaaacccnggttnntnannncntnnnccncnggggntnangggacccnccccccta

SEQ ID NO: 36786 - DNA, 366 bp, Homo sapiens
ctttgcgttgggttttactatgtatttagctaaggatgcaattcttcaaggcagtgtctctccagctgcatcaaagtgcatcagaatattctggagggctttttaaactcaggaatatgggggccccatcactacactttctgacaatgtgactttctaatgagttcccagatactattgaaggaaatcaaaattttttaccccaaagtatatttacttgacatattttgggagatagatggttgtcaaagagcccgcaaacagaagtggccctgcaaggctatctttagtggggaagatttgcatctgtagagaatctacattaatgcagctaggtcctcccttgccagatgtaggaagattacc

SEQ ID NO: 36787 - DNA, 370 bp, Homo sapiens
gttgagcatggggtggggcaggctgcccccaccgaggagattgctgtagacagggcacagcctcgggaagaggccaaagttgttgatgccattcatgctgctcacagcgtcaggccattacaattcatgccgtaggggggcaagaggaacttggggtagtgagcgttgtacgaggggatgaaagctggcgggaggtggggcaggggtgcgtagccagggtaggagcccaaaccttccgtgccgtaggacgcgttcaagtaagcgtaggagtcccggtgctcttgagagccggggcccacaggggacaccgtattcccagggctgctgtgagggctggagctcttgaggctttggtcggggctgcttcttt

SEQ ID NO: 36788 - DNA, 364 bp, Homo sapiens
  misc_feature (1)...(364): n = a,t,c or g
gtcgacgcggccgcgcgatgtttgaattctaaatgacactgagaaggccccttcagctcctttgtaggtatgaacaaaacgggctattgaagacatgccaggcccacaaaactcttgagagaaaacggcatgtggaaaatttgtttcagcaaaaggcaatttggcacgtattcgtagagaatgggattagatttattaaacggggaacccccaactccatctggttctctctgcatcagcactggggagggctatgaggagaaagagctagggattattttttggctttcatggatttcttcctcagggatcagatataaaatttanactgaccttcgtttcagaaattgtaagctggacacca

SEQ ID NO: 36789 - DNA, 469 bp, Homo sapiens
  misc_feature (1)...(469): n = a,t,c or g
tttgaangncnnnnnnnnnnnnnnnnnnnnnnnnnnnnnnnnnnnnnnnnnnnnnnnnnnnnnnnnnnnnntctcgaggatccgaattcgcggccgcgtcgtggacaagcagggcaacttcaacgcctgggttgcggggagctacggtaacgatcagtggctgcaggtgggtcagccttcttgggatgtggggctggggttgggtgggaataggtgggacttgccagatctttgacctctctccagcccaggcttctcttctgctccccaaaagagttctggaaaagccttgtttttcttcggcttttctttcttcttcccacctgtactcccttctcttgatcctgcttccaccaaggtggannnnnnnnnnnnnnnnnnnnnnnnnnnnnnnnnnnnnnnnnnnnnnnnnnnnnnnnnnnnnnnnnnnnnnnnnnnnnnnnnnnnnnncntgcctgtnaatgcgtgt

SEQ ID NO: 36790 - DNA, 360 bp, Homo sapiens
gtcaaattaataatactattcctaataaatacatattttatgagtaacttttcatgttctcccagcccacaaagaaaataacactattccagaatatgttatgtttaaaatttttttttaactctggaagtttagttcctgctaatgagagcaacatgctttcgagtatcaagcaaagtttcaaagtaatagataaaatagaagacagttttattaggaagattttctttagcatttcttctagtcttgagtagaattaatggtgctatttcatgttcttggtgctagataacattgggatagggctgaatacatgaggtcaaactaacttaattgaagaccaacaaatgaagccagtaa

SEQ ID NO: 36791 - DNA, 362 bp, Homo sapiens
ctttattcttgctattccccactgctcttaaacatatgcccctacttatcctgctattttgcaagcatatattaaatctttatgacacagcccaaatgttatctctctctgcagttttttttcttctaatttccccagatctccagcttcctccatcaagacatatcattttaatggcacctggagttgctgttgtgattggctgattataagtcttggacacaaattacaaagtcttccagggcagttaccttatctttttcacttagtacatgggttgaatgaattcaatatatttttttctgaggttagtttttcatttacaacttcattggcatgaaaatccagaattacaaaacaca

SEQ ID NO: 36792 - DNA, 355 bp, Homo sapiens
attttaaagtttatgttcttggtataaggtaggcacactaaccctttgagggtagtaggaatacattaaaggaactggcaaggatttgttcaccctcctcaaagcagcatgaacacaccaccaggcccctaagtgtccttttcttttcaattgtgagtgattccttcctttggaggtgaagaagagtgatactggaagaaatgggatatgtcctgtttaatcaggagtgtcctaatagttttaaatcagtttgatatgtctattttaagatggaaaaaaaaatcgctgcctttcagcgaacatttccaaatcatcaaagactgcctgcttcactttatacttattaggaagggat

SEQ ID NO: 36793 - DNA, 362 bp, Homo sapiens
cttctgtgctctagtgttggttaggatcctctgttgcaaagatcagaaatcaagtcactcaaggaataaaaggggagttgaaaaaataggaatatatgaatggctataaaatggaatgatggcaggaaataaaagttaagactctctgtttgcctctcaggaccttatctcttaattttctccagtaaacaaaacaaactttctctgctcttgggggaatataatgggaataatatggctgcttcacagatcctgagttccatatttcagttccagtcattgagaagactgcctcaactctctttaggtccatattccaaaatcttgaaagaatttgattggcaaatttggtttggatgtct

SEQ ID NO: 36794 - DNA, 345 bp, Homo sapiens
  misc_feature (1)...(345): n = a,t,c or g
gcagcatttatttacccattgaattccaaaacatttattttagaagtctggcatttcataatcacccatcttgattgacatgggctgacacacatggacttgtcaggatacacaaggacaatagccaaagagttacaaaaaataaatccatgattcttaaacaattgcaaccaaaaangntnccagntttaaaanttttaaanncnttggtttnaaaaaaanggttgggccccntannatttaaanggggnaaacccnggggnntttgnaaccnncngntnaancgnttttttnnaacnntgnggaaagggncnannttntnttaancnngncngaaattncaaa

SEQ ID NO: 36795 - DNA, 356 bp, Homo sapiens
  misc_feature (1)...(356): n = a,t,c or g
tgcctcttcattgtaaaacgggaataataaaaagagagaaaataaataaatnnnnnnnnnnnnnnnnnnnnnnnnnnnnnnnnnnnnnnnnnnnnnnnnnnnnnnnnnnnnnnnnnnnnnnnnnnnnnnnnnnnnnnnnnnnnnnnnnnnnnnnnnnnnnnnnnnnnnnnnnnnnnnnnnnnnnnnnnnnnnctcttgtctcaaaaacaaaaaataaataaataaaaagggaaacccacgttagcatttacaggtggcgccctgcggaggcccagagaggtacagagacaagtgggctggggtcgacgcggccgcgaattccnnnnnnnnnnnnnnnnnnnnnnnnnnnnnnnnnn

SEQ ID NO: 36796 - DNA, 353 bp, Homo sapiens
  misc_feature (1)...(353): n = a,t,c or g
cggcccttggcctccacacggcgcagcgtggaacggatccagtccacgtagagggctacccgcgtgaagaagtcagggaaaaggcgggtggcacatccccagatcacgaaggagtctattccttggatgatgccatcacagatcagggggccacctgagtctccgaagcagatgccggccttgcggcgagggacgaaagtgcaaatgttatgtggccggcagaagaaggtgacgtcgacgcggccgcgaattccnnnnnnnnnnnnnnnnnnnnnnnnnnnnnnnnnnnnnnnnnnnnnnnnnnnnnnnnnnnnnnnnnnnnnnnnnnnnnnnnnnnnnnnnnnnnnnnnttc

SEQ ID NO: 36797 - DNA, 362 bp, Homo sapiens
ggaaaggctgagagcagcaacagttcttcttctgatgactccagtgaggaagaggaagagaagctcaagggcaagggctctccaagaccacaagcccccaaggccaatggcacctctgcactgactgcccagaatggaaaagcagctaagaacagtgaggaggaggaagaagaaaagaaaaaggcggcagtggtagtttccaaatcaggttcattaaagaagcggaagcagaatgaggctgccaaggaggcagagactcctcaggccaagaagataaagcttcagacccctaacacatttccaaaaaggaagaaaggagaaaaaagggcatcatccccattccgaagggtcagggaggagga

SEQ ID NO: 36798 - DNA, 353 bp, Homo sapiens
gtcattttaatcctgaaggattgtggcacgcacagctagtacataccagtgattgagaacagaatgaacagtaaacagattaactaaatccaatcaagtgataaaataacctgtctggagacagattaattaggaatgtttaacttgaatctaaagaaatagggctaatagaaacatgctgtttcaagaacaaagcagctataaaatggagctctgtgtatgccactagtttgagcaaggattcactcaccatccaggctaaggacatctttggtcattaaaaaaccacagtgagttgagaaggcaaccccaaaattgtaagcatcttttcatccaggaagattcagaattaa

SEQ ID NO: 36799 - DNA, 358 bp, Homo sapiens
aacctatctgcagcatgtatgcttctgggttttgcaactttggctctgctgaattagatattcttattcttgggatacgggagagttctgcttctaacagggattagtaagtatcatgaactcaaagctgtgaccactgcatggtaactatggatactcatgatgtgtacaagagggcaactaaaatagctactatattcatggggatagctgaccctaattataatgagaaagtaaggttgcatatgcacagcagcaggaggaagaatgaatctggaagtcagatgattcagtgagatgtcttgtggtacatctaggcctgatgagagcagtgaactgtcaactacagtgaacaggg

SEQ ID NO: 36800 - DNA, 349 bp, Homo sapiens
  misc_feature (1)...(349): n = a,t,c or g
cgaatttgtattgggctgcattcaaaggtgtcctgggccacctgtgggcctcaggttggacaagcttnnnnnnnnnnnnnnnnnnnnnnnnnnnnnnnnnnnnnnnnnnnnnnnnnnnnnnnnnnnnnnnngttaatttaaaaatattttcttcaataatannnnnnnnnnnnnnnnnnnnnnnnnnnnnnnnnnnnnnnnncttaaaaatgttttaaatgtnnnnnnnnnnnnnnnnnnnnnnnnnnnnnnnnnnnnnnnnnnnnnnnnnnnnnnnnnnnnnnnnnnnnnnnnnnnnnnnnnnnnnnnnnnnnnnnnnnnnnnnnnnnnnnnnnntctaattaaaaag

SEQ ID NO: 36801 - DNA, 339 bp, Homo sapiens
  misc_feature (1)...(339): n = a,t,c or g
cagacatcactgtccttacaacaattcaactaataagatttaagatttaacttcatcctaatgtatcagaacattaaaaangnctnaaggnncctattnaaataaatngggcttccataataanattctttaaaaangaaaancagtaaanancncncnttttnatttacncncancnctgaanaatnaaggnaancttttnnaattttttttttntttaaannttttncctnnaaagnaacttttnanggccttntnannancagccttaagtttnatngccaaaanaaaggccctnntttnggnaancagttngaagtaagtaanaancnttngcca

SEQ ID NO: 36802 - DNA, 188 bp, Homo sapiens
tggaaagttcacttactcagaaagttcacaaagggttgtcagactaaggtgaaattctcagaaatataaaccaggtcactcattacctcgctagttcagagcactaagaaaaactttttccttttccttcattctcttctccataccatagtttagcctggactctttcctgcctttttttttttttt

SEQ ID NO: 36803 - DNA, 344 bp, Homo sapiens
  misc_feature (1)...(344): n = a,t,c or g
aaaaaaattttgtggggaaaacattaaagatgaactttgaaaaagttccttaatttttctggcattacaggcttagaaaagcttatttccagttttccctcctgactttcaatgctacagatacatttcagtaagtaaaagatacagttgacacttttgcttttcactatgtttgcataaacagctctccaggaaggacacattttaaaacttaaaaagttaaaaaaaaannttaaaangtaantncaaaaancncntaaaaggaaataaaaaaaaaaantnggnaaaaanttcaancgggggnaaaacaaanaanctganngtcaaaaaaaaatccnccaaaa

SEQ ID NO: 36804 - DNA, 353 bp, Homo sapiens
  misc_feature (1)...(353): n = a,t,c or g
cgcgggccacgtgcgccccggagtacttagggtagcggcggcccgcaggcagtagggagagaccctctgtgggcagggtcttgtgctggaaccgccattcctcagccacaggggcgcccggtgtctttctgctttaaatcctgaaactattgacgccccaggcggagaccagtgtctacaaaccaggcggtgagtctgcagagggaggaatgtgcctggttttgccgtggatcccgagcgctcgggcacaaaaattccgaggtgggggcagaggggtgcacggcactgcggggtggcggacctcgagtgtgtgtgcatcacggtggccgcgagcataaaagcangaactgact

SEQ ID NO: 36805 - DNA, 347 bp, Homo sapiens
gacaggcttaaaagctgctgtgcatcttttcattatcttccatgtcttttcaaatgagcaactttgaaccttttttgtacaaatacataccttctccctttaaaattgctccataaaaatttgcactatatccacttcttttattggatttcatagagaacaaaacctctaacaagttcatccttttctcttttctgtgctaatcatctcagggatttgtagtcctttagcttcttacaagacttggttagggtatggtgtaatctatttttcatttcattcatgtactatctaagtaaccaccaaggtcaaggagggtctaggcaatgaggatataggacagacaa

SEQ ID NO: 36806 - DNA, 451 bp, Homo sapiens
  misc_feature (1)...(451): n = a,t,c or g
gcattnnnnnnnnnnnnnnnnnnnnnnnnnnnnnnnnnnnnnnnnnnnnnnnnnnnnnnnnnnntctcgaggatccgaattcncggccgngtcgaccccctgcacagagtcatcatggtactgctgagtgggattgtgggaaggtggctgagaatggtagagccaccagcggcttgtactctgaacctggaaaagcaaccggcactcaactccaaccagtgagagtagccatgggagctgcannnnnnnnnnnnnnnnnnnnnnnnnnnnnnnnnnnnnnnnnnnnnnnnnnnnnnnnnnnnnnnnnnnnnnnnnnnnnnnnnnnnnnnnnnnnnnnnnnnnnnnnnnnnnnnnnnnnnnnnnnnnnnnnnnnnnnnnnnnnnnnnnnnnnnnnnnnnnnnnnnnnnnnnnnnnnnnnnnnnnnnnnnnnnnnnnnnnnnnnnnnnnnnnn

SEQ ID NO: 36807 - DNA, 346 bp, Homo sapiens
ctcatttagtgtttgttaatgcttgttgtaaataacattttgaaagggaaattgtttggttatctattttgaaaaggcagtttagttttgaaactactgtatgaaatcttgaggcgccaatgctgctaagaaagaaagaaagcactgcctgttagactcagacctgtcatcagttgtaaatccaccgtgatcagagacgttaaaagcaatgcattgtatgtcttagagttgaatgcagcatttatcattattttatttgcttcaagaatttggagaaattggacatgctggcagttggattttttaaaatgatagtttatacagggagatgaggcagtgcacggct

SEQ ID NO: 36808 - DNA, 355 bp, Homo sapiens
  misc_feature (1)...(355): n = a,t,c or g
atctgattgggctgaggatactgtatcagagaatcaaggccagggttgaagtgtcagttaaagaatttgagagagggtcagggacctaattaggtaccacacatgcccagggtgcctctacacgacccgaaagtcaatctgctgggcatctccttgaggtaacagagctttccaaattcacactgtttcatgcagtctagtatatcatgtgtacccttacctagnnnnnnnnnnnnnnnnnnnnnnnnnnnnnnnnnnnnnnnnnnnnnnnnnnnnnnnnnnnnatttctctgtcannnnnnnnnnnnnnnnnnnnnnnnnnnnnnnnnnnnnnnnnnntggaccttncaaagta

SEQ ID NO: 36809 - DNA, 348 bp, Homo sapiens
ctgggccacacttctttctctgaagagggctgctagtctaaaacagaccacagctgcagcatccctgggctgtgagttgatttggagctcggtagacctgtgttcttctctccccttatctctgcatgtgccttccttctaaagccatgtgcttgatctgatgggagccccttttccagcatcatgtttgctcattgttgagtgggagtagaatgagtcaaagtacactgagagtagaattatacagattttgctttgccagtttgtatgaaacttcaagaactgttcagatgtgataatggatttatactaacataaatttaagaattaaaatgaatacttttcaaa

SEQ ID NO: 36810 - DNA, 349 bp, Homo sapiens
atttaatgtaatttgcatagagtacaaacttctgggctagctcttcagtccacaaatcaccatggtaataaaagctcgtcatgatcagtaaccagtcatgttgtgtctttcaaagtctgttggtgattggtccctatggctctcctactcaaacagcaaagcctatagttgggttgcctccttgcctcccagtgatgagcccatatgacattttacagaaatgaataattgaaagaggaattttgcaaccaagatgaaagtgcagtgaagaaatgagaagtgaaaatgctgcaagtgaggttcaaattgaatgtgagtggaattctagaagtacaaatagttgactgtg

SEQ ID NO: 36811 - DNA, 322 bp, Homo sapiens
  misc_feature (1)...(322): n = a,t,c or g
agcatttctaacctcatcttccttagctatttgctatctcaagaaatgttaatacattttcgtgataaaaggggttacatgttttcttgactctagtaacactgaatgctttatctccgtctcgttgactgcaccaagaagtctttcaataaagaatgcagcctaactttttttaatccaataattccctagcttatttgagaagaccccttttttctttttttttttttaaggnccncnnntntangggtcccaanaaannnaanggtttttaaccccccatttggngggaaancnnggncaaaaannangnccngtttta

SEQ ID NO: 36812 - DNA, 114 bp, Homo sapiens
cattagcttaaccacggttaatgagcacagtaatatgttcatttatttcttaccatcttggtttcattcgtttatttctaataaaggtaggaaaggttttaaaaaaaaaaaaaa

SEQ ID NO: 36813 - DNA, 334 bp, Homo sapiens
  misc_feature (1)...(334): n = a,t,c or g
ttctcgctgtgtcctcactttgtggaaggggcgggannnnnnnnnnnnnnnnnnnnnnnnnnnnnnnnnnnnnnnncctgagggaccctcctcctcataccacttcatacccgcctcctcataaccccaccgagggtttcaacactcggatctggggggctcagccatgcagaccacatcagtcccggctgttagacgacattgctgagctgacctggcgagatgatgcgaacatccggggagggggggtcgacgcggccgcgaattccnnnnnnnnnnnnnnnnnnnnnnnnnnnnnnnnnnnnnnnnnnnnnnnnnnnnnnnnnnnnnnnnn

SEQ ID NO: 36814 - DNA, 351 bp, Homo sapiens
  misc_feature (1)...(351): n = a,t,c or g
nnnnnnnnnnnnnnnnnnnnnnnnnnnnnnnnnnnnnnnnnnnnnnnnnnnnnnnnnnnnnnnnnnnnnnnnnnnnnnnnnnnnnnnnnnnnnnnnnnnnnnnnnnnnnnnnnnnnnnnnnnnnnnnnnnnnnnnnnnnnnnnnnnnnnnngaacgtatttgggatcattgtttttagatagggtgtgtttttaaaatttagtatcagtcatttaacattcacgggcagttttccatgttactctctttgcagccctcgtttttattgtcctgccatgcgagtggcagatggcctcatggttgggagtgggggctgcagagcctgccagggctggcttcgccttctctttt

SEQ ID NO: 36815 - DNA, 361 bp, Homo sapiens
  misc_feature (1)...(361): n = a,t,c or g
ggatgattgatctctgctgctgtcaggctggatattcagcagcagcagttgctagatcagcactggtgaatgaaaacccttttattgggcccatgcacagccaacatccggtaatttttccatgcactcataggccaaaagaaataccaaacagtagtgtttattaagtagttagatccaaataacaagaattcatgtcctaacaaatgagtagacatttgaaaaaataacacataaattggaagaaaaatatttttatttccttcttaaaaactacaaatactnnnnnnnnnnnnnnnnnnnnnnnnnnnnnnnnnnnnnnnnnnnnnnnnnnnnnnnnnnnnnnnnnnnnnnnnnnnnn

SEQ ID NO: 36816 - DNA, 353 bp, Homo sapiens
cttcctgtcactgagaggggggaaagaccaagaaccaaacaataagacttttatttacagctactggaaagctgtcctgaaggtcgctacaagcctcccattgtgtgcttccatcttggacatgccatccgagatgcctagaatggcaggggtcttccagagcatggagtcttatctcgtttcacagttgaagaaactgaggcacataggtcctcccagggccatgcagctacctaatgccagatccggaactaaacttcaggttcttgactcccaacccactgtcttttccactgcccagaaaatcccaggaattctttccaagctccctgaattcatcgtcgacgcggccg

SEQ ID NO: 36817 - DNA, 356 bp, Homo sapiens
gtcccagataaaatgttatgggaatttggcaaaagggccaattatcttctgttggaaagaacaagaaagtacccatgtaaagctgccattttaagcaagattacagagaattagatatgggaagatgagggaaaagtcttccaggatcaagaaacagtgtaagtaaagcacagagccatcaaaaaaaagtttggctgaagtaaagaatgtgtaaagattacatgaagtgaacattgagccttaaatgacaaactttgagttttattttgtaggatcaaataaatgatataaatgatatccttctaccttttttgtgtctttcatctctttcttaccctaaagaacaactgtcacag

SEQ ID NO: 36818 - DNA, 362 bp, Homo sapiens
  misc_feature (1)...(362): n = a,t,c or g
ttcataataaaaactctcagcagaagaggaatattgaggaatatttctcaacttgacaaggaataactacaaaaaaacctacagctaacatcacttaatggcgagaatctgagtttatgcttgtgaggtgacttagtgtagagcccctagacagcctcagtacagggccagttaccagaaagaccacgaccaagagggctggagctttcagactcacccaccaaaatctcggaagaggggaggggtggggttggagattaagctctttattataaaaactttttgttgnnnnnnnnnnnnnnnnnnnnnnnnnnnnnnnnnnnnnnnnnnnnnnnnnnnnnnnnnngcctgatcacagctca

SEQ ID NO: 36819 - DNA, 333 bp, Homo sapiens
cttgtcttcgcactcttatccagggttaggtcaattaatcccttcaacttgtactctaggtcttcttgagttccttcctcatcaaggacttctggtccatcttcagcaaaactggaaggatcgctataaccactgcaatggctcattgtttcaattgatgcatcttcatcactaaaaggctgaacatttcgatgctggccacctgctgtcgccgccgtcgctgcggctgctcctgacccgccgccgccagcactgctaccgcggtggggagtgttccgcttcttggtcttcggcatcgtgggacgcccggtgccgcccaaagtcggacttacc

SEQ ID NO: 36820 - DNA, 333 bp, Homo sapiens
  misc_feature (1)...(333): n = a,t,c or g
gagcaatgcagatgaattttatctaatagagacacaattgacttcccccgtataaaagataaccctaacatttcattttattttcccataggatattacgcagtttcacagattgattttaggatttttgattgtctgcgctcctcaagttctcctttgacctggctttaagagaattaaaaccatgtggctctgctactgaaggacataagggacagacagaagcagggtgctgagaagggagctgcagtcagcaggcagtgtagcatttgctttgggctgaagtagtgaacgtgggtactggtgatgtgagagtcatgttatggntcataa

SEQ ID NO: 36821 - DNA, 323 bp, Homo sapiens
tggggagctaactttgtgctgttcatttttcaaccacatatacctattctgtctacactggaaacaacatgattcaacttattcatttaacaaaaaaattttttagcaactactatgtaagcaggcatgttctgaatactaaaaacaccatggtaaacaaaacaaaatcccctcctcatggagcttacattctagtaaaatatgtcaggtagtgatatttgctgtaagagaaaataaaacgggaaaaaatatagaggaggcaaagatgttaatttaataggaaagtctggaaagccttcgtcgacgcggccgcgaattccaaa

SEQ ID NO: 36822 - DNA, 382 bp, Homo sapiens
ctcagtttttgtgtgtgtgggaactggagttactagttgcatcatggatcttggacaaattaaccacacagatatgagccaaagaagtttcccttgctctccctgcggaagtcatttatgagagctgggaggagtagatgccttttcattgagactgttggtgagccagaaacccaggccatgcacataaccatcacatacagatggaaacggaggcccacttcactgagggccattatgcaaacagagggggtgtaaagcggaccatattctaagtgaactcatcactctcaatttaactgttgcaaactacaacatttagatatgggtatatactgaactgtctcaaaacacgatatctgcaggaattattttaaaggcg

SEQ ID NO: 36823 - DNA, 376 bp, Homo sapiens
tgtcactctttccacattagctaaaatttttagttattgaatggttttcattagcttttacccctttctcagaataaaaggtgctaaaatttgcctattgaaattactcaggatgcatcccctctcagtatttctagaacaaagaaaaagccaccaatactcagttacaaaattccaaagctgcagatctagtccatcccaagagccttctgcttgtgctaggaactcagatttccaaactgtggcagaaatgtaagagatattttaaaggtgtgactagcatggccattaaattccttaatcctatgaagcggatgggaagagtaggagggctggggaatggttgccattactacatttgggagacctaaagatg

SEQ ID NO: 36824 - DNA, 382 bp, Homo sapiens
caattactcactttatttacattaatgacaagtataacatttaccaattacaaatctacaggtttacttgttggtagtaattgagtttttccgataggatgttttggagaacctttgtaccaggcccttcctctttctgatggtctcctaaggaccctgttatttatcccagaagaaatgcccatgttgttatttacaactggttttactatatcatgattagtcagatcatccaagggaaccttaacttggccatcagataagatcttctgtttataaactgtagtagacctaagagaagcattcactgaatctgggtgcttcctcatctttaagaaagatttcgagggtaactccatgcttgactttgaaattgcccaaa

SEQ ID NO: 36825 - DNA, 382 bp, Homo sapiens
caagaatagaggtgaagatattttcattttgtttaacccacaaactatttggtcaaaggaatatgtaaagctaaataaaagcacatctggtagaaattcatggcaatgcatgttgacaagatgtgcttggacctcgcttgcagcatctggcagtgggtagcagaacaaaggtaggaatctcacaggctctcctgtgtcttttctggaagaggctccgtggtggtggcactagcatttgcagccgaattcaagacttctccaaaatcaccaccagcaggcttggttccccctactttagactttaagttttcgaccttttcttcaaatgatttaaaagttggggagttttttacatcttccactttttggtgatgactgacca

SEQ ID NO: 36826 - DNA, 352 bp, Homo sapiens
ttagaatttggggtgaaagtataatgaaattattttcagattactacaatctgtattcactgtaactgtgatggctttgtaatttagacacttaattttttaacccagctgaccaactaggtgaagtaacctctgagggcttgtttgaacaaacttgtgataatgaaagttaccttttttatgggaccttttgataaatgattgttaatgctagttgtatgttttaccagaaaagtagactgggtttttgacttgatgttttctgcagtaatcatcataagaattattcttcaaaatttagcaaagttctagaaactataactagcatgggactatttaaaggtgtaaaatg

SEQ ID NO: 36827 - DNA, 356 bp, Homo sapiens
  misc_feature (1)...(356): n = a,t,c or g
nnnnnnnnnnnnnnnnnnnnnnnnnnnnnnnnnnnnnnnnnnnnnnnnnnnnnnnnnnnnnnnnnnnnnnnnnnnnnnncaaacaaaaaacaagaaaatacactggacgttagaagacccagggctaatttcagctttaataccttaagggtgtcaattttatattttgtagggatgctacaggccttatttgggtcaaaaggtagataactaaactacaaatattaggtatcatttttaaactttcagtgaaatgccatagatgtaccactaccaaacacggttgaataaaacaaaaacaaaaacagaaaacaaaactgggtcaggcaaggtggctcaagtctgtaatcccagca

SEQ ID NO: 36828 - DNA, 355 bp, Homo sapiens
gagcttctagcgtctacccaaaaaggcttctttgtcatccattctttcctgtccttgccatctggcctcctgcttctttgcctgtgcagccccctggggagtgtggtgatcattctttttgggttgcttttctcaagagaatctatccatgtgtcttgcttttgttccttctctgcagaaagaaagaagctaagcaggtaatgacccaaatgctttttctcaagcagaggcgaggggaaggctgtgagctcttcattttaatatttttatccagtgggataatagtaatagtaattgcgatacctgcataataatggcatggtaatacttggaggcagtgtgaattgatagttac

SEQ ID NO: 36829 - DNA, 347 bp, Homo sapiens
ttttgctaatcagttgtattaataaagttacatgctgcttagaaattagatattcagttaagagtttaaaatactgatttttatatgcttggattatatataaaaataaaaaatataaaatgtgaacctaagctggtagggcactaatatattcatgtcactgctctttttttaggttgtctcagtataactatctgctttaaatacacttagactgtcttgtttccatctgattttattgaagaaaacaggagggtggcttagaggaaatcagctatgaagaagaaaggtggtgtagggttctctgaagcgagtgacaaaaagtgaggtggcaagtctagtaggtg

SEQ ID NO: 36830 - DNA, 348 bp, Homo sapiens
gatttatgtcacgtggtatatgggttttttttgtttgtttgtttaattttcattcagcaaccagtggtcttggtcaaggtgggccatggccactctgcgactccaggtcgattcgtctgcctgttgctttttttgatttttgctttgaagtttccttttgcctcagtcagctgccttgaatgaaattatctgctgctgctctgggcttgtgatttcctttgctttcatgtttgctccctttctgaaagatgggggttgtaatttgtttgctgtttaggagccagcccttcagcttcctttcagtgatagcatcctgcctgcacactgggcttttctccttttccagtc

SEQ ID NO: 36831 - DNA, 480 bp, Homo sapiens
attccacgagctacagcaggtcagggggcccttaagaaccgtccttttgtctcctggaaatggaggtcaaggctggcactctgttctacgggggattggggggattaagcaaaggaggagtggcagatgaaaagcaaagtgccccaccccatcccacaactgggcctggaactagagaggaccacaaagtgcttgggccaagcatggcggatctcatcatttctctgtactgcagatcacaccaccttcacctccatcctcgcctctgactccaacacccgatgccgtaaaccctgagccaaacgtctactgtgttctaggccctggaaatgcagaaccgttcgttcctgggataatcacctaactgatgaatcacagagccaaaatgattagatttactgggtcatcattgagtttagcagttaggactgaaagacatgtaggaatggtcagaatatgacagactgatgatcctctgta

SEQ ID NO: 36832 - DNA, 479 bp, Homo sapiens
  misc_feature (1)...(479): n = a,t,c or g
ggtttaattgtaaaatgatgggaggtggtgtttaaaatcagcagtggtagtgacctcatgatgctcttttggtattctgaagcttaattattgatttttagggtatttttttcaccttacagagatataattaaatcatcaaagtcaatatttttagacatttaaataaaaagttattttgccctgtgcacagaaatgtaattagtatgtacacacataataagactcatgaaattacttggtgaatgtaaactgaaaaaacaaacgcatttctctccttaaggaaaaataattctgcaattaacattgctacttttatttccttctcaggacaagacctgtagtaattgttgacgcttctttaagccaccctgagtcagtaaatagaacgaaatttgactgtntgaaaatggatggccttctgtgtgcatagatctaacactttgntctcatataagggcangaagtccaggtaattg

SEQ ID NO: 36833 - DNA, 460 bp, Homo sapiens
  misc_feature (1)...(460): n = a,t,c or g
catcaccatccgcaaccagatcaacgcgctcacttccttcgtggacgccagcatggtgtacggcagcgaggagcccctggccaggaacctgcgcaacatgtccaaccagctggggctgctggccgtcaaccagcgcttccaagacaacggccgggccctgctgccctttgagtcgacgcggccgcgaattccnnnnnnnnnnnnnnnnnnnnnnnnnnnnnnnnnnnnnnnnnnnnnnnnnnnnnnnnnnnnnnnnnnnnnnnnnnnnnnnnnnnnnnnnnnnnnnnnnnnnnnnnnnnnnnnnnnnnnnnnnnnnnnnnnnnnnnnnnnnnnnnnnnnnnnnnnnnnnnnnnnnnnnnnnnnnnnnnnnnnnnnnnnnnnnnnnnnnnnnnnnnnnnnnnnnnnnnnnnnnnnnnnnnnnnnnnnnnnnnnnnnnnctttggacttnttccccaaggta

SEQ ID NO: 36834 - DNA, 474 bp, Homo sapiens
  misc_feature (1)...(474): n = a,t,c or g
cttggctcctctcttgctgaggccagcctcagcaaatatactcccgagtgtcaggcagtcaaatccattcacccagcaaatatgcattgagtacacatgctgtgtgaacccatgtcaggggccagcagtgcgatgtgaacaagataggccctgacctcacaaagctgaccgtgtagccacccatcagggagccgatgagagagagaatgtctgaaaggacttgcccagagctgaggaccccaggatcgtgtcctgatgttgacttccagatggccataatggctcccagatctttactaagagttgaagtccacactgcttgctagtttgcaggccactagatcattttgtgctaagtcagtccccacccagtaaaagcatgattctttgtgtggctttagtgtgcctcctgaagcggccccatggaggtatgttctccacaactgtgtagaancattctatagttggctggcc

SEQ ID NO: 36835 - DNA, 341 bp, Homo sapiens
  misc_feature (1)...(341): n = a,t,c or g
gtgatcaggaacggcttctctgaggcagggcaatgagaagcagcctggaagagcagggagccagacacaggaagatcctgcagaagggccttctaggcagagaccacaccctggttccactctgcacctctttcccatgccctgctcttcattcacatccaaccactcccagctgcccaattacgtcatgctttctctggcttccatgtctgcacaggtgttgctttctctgtctaaaatggcctcacaaattatatagctgntctattccttgaaatttgaacactctgtgatccataaaagtgtatcttcatggttccaggcataataaaaattaaaaa

SEQ ID NO: 36836 - DNA, 340 bp, Homo sapiens
  misc_feature (1)...(340): n = a,t,c or g
nnnnnnnnnnnnnnnnnnnnnnnnnnnnnnnnnnnnnnnnnnnnnnnnnnnnnnnnnnnnnnnnnnnnnnnnnnnnnnnnnnnnnnnnnnnnnnnnnnnnnnnnnnnnnnnnnnnnnnnnnnnnnnnnnnnnnnnnnnnnnnnnnnnnnnnnnnnnnnnnnnnnnnnnnnnnnnnnnnnnnnnnnnnnnnnnnnnnnnnnnnnnnnnnnnnnnnnnnnnnnnnnnnnnnnnnnnnnnnnnnnnnnnnnnnnnnnnnnnnnnnnnnnnnattagattcttgcttcctaaatacaacattttcaatttagagagtcatctttgntttatttggctttgacat

SEQ ID NO: 36837 - DNA, 330 bp, Homo sapiens
aacagtgaaatatcagattcagaggatgacagttgcaagagtaagactgctgctgctgctgctgatgtgaatggatttaaacctttgtcaggcaatgagctgaagaacaatgggaactctactagcctgcctttgtctagaaaggttcttaagtcactcaatcctgcagtctatagaaatgtggaatatgaaatttggctgaagtctaaacaagctcagcaaaaacgtgattattccattgctgctggcttacaatatgaagttggagacaaatgtcaagttaggttggatcacaatggaaaatttttgaatgcagatgttcaaggaatt

SEQ ID NO: 36838 - DNA, 315 bp, Homo sapiens
  misc_feature (1)...(315): n = a,t,c or g
cgannnnnnnnnnnnnnnnnnnnnnnnnnnnnnnnnnnnnnnnnnnnnnnnnnnnnnnnnnnnnnnnnnnnnnnnnnnnnnnnnnnnnnnnnnnnnnnnnnnnnnntataaaatttttatattacaatttgtcttatttcatttttacttcacagaaagtcaaattctgcactgaaatatagcacagtaagtactatagatgttttataagagacatgtttattttctatgataaattttttaaaaattagggatatattaattctctgatactccaatgaattcatcttctcgaacctctatatatttagctaa

SEQ ID NO: 36839 - DNA, 331 bp, Homo sapiens
  misc_feature (1)...(331): n = a,t,c or g
nnnnnnnnnnnnnnnnnnnnnnnnnnnnnnnnnnnnnnnnnnnnnnnnnnnnnnnnnnnnnnnnnnnnnnnnnnnnnnnnnnnnnnnnnnnnnnnnnnnnnnnnnnnnnnnnnnnnnnnnnnnnnnnnnnnnnnnnnnnnnnnnnnnnnnnnnnnnnnttagcataaaaacagaccttactttttaatcattaggaatatgcaaacattacaatggtaacagaagcattcattgccttttaatttttagtctcatacctttgaatacttgttacagtgctcagaagaaagaatcaatccaggtaagttactgggcaagtcaagacgtctga

SEQ ID NO: 36840 - DNA, 331 bp, Homo sapiens
gcatatttagcatttaataacctaaatagcctattgccctaaatatttatgatcacaaaccataaaggaaagaaaaactaaatttcctttctaggacaaaaggtgaagtcattacaaatatctccaactatatgacagacctttataaaaacaatactatgtatgtatttttatctactttatctgacaaatgcatccttttcccaagagttgtgctggtatcaaggagcaccctacttattataatagctgtatgactgtaacagattcataatctgggttactttaacagttgacctaagctgaatttgtgtgcccaacttcttggtgg

SEQ ID NO: 36841 - DNA, 331 bp, Homo sapiens
gccaggtcgtctaatggattacagatatttcagtttagggcttcataacagcaccacagaaatacacaaaacaacatgtattccacatcatgaattttgatttgagcaaaaaccagcatattggggaaaattagagatggaaaagacttatcagactcatgctctcctcattttctcagtgcagttagctctccaaccttaatacaaattagctcagtaacagtgcgactacttctcttaggaacttactctagggccatggagatcttgctgctattatctttccatacaaaatttcaagtgcttaatttaatataatttatcccaaagg

SEQ ID NO: 36842 - DNA, 315 bp, Homo sapiens
caaaaacaaaaaaactgataaaattcaacagctattcatgatttttaaaaatcttagtaaactgataaaattcaacagctattcatgatatttaaaaatttcagtaaattgcagaatttaaaaaaaattctgaaataatcagattaaataaaaggcataaaagtaggcattacatttaatgttgcatgactgtcattttcccttgaaatcacaaataagaaagagatatccatcactacttctcaacattgtattagaagtctgagtgtagtaagtcagaaataaacaaaaggaagatagactggaaagacacag

SEQ ID NO: 36843 - DNA, 329 bp, Homo sapiens
ctagcattggtggtggtggtagtagtagtagtaaagatagtaataattgtagtagtaaaaataatagtaataaaagaatgacgacaaaatagctaagcttttacagtactttccatttaccaggcaccattttaaatgttttgtatatgttaaatgatttcataactctcctttgaagtgggtacagttattacctgtattttatgaatgaggaaacgatggtaatacaggatggagcgtagttgtacctcctggaaatctgcctagaaagcctagagtgaccctgtgaaccagcttcgataattctaggaattctgttttcggcagga

SEQ ID NO: 36844 - DNA, 357 bp, Homo sapiens
  misc_feature (1)...(357): n = a,t,c or g
attttatcatgcatctctaagttacctgaaagtcctgctataattgttctaggcattttcaaacttttgagaagcctagaagtatacaaactaagatgttaagacacgttgtannnnnnnnnnnnnnnnnnnnnnnnnnnnnnnnnnnnnnnnnnnnnnnnnnnnnnnnnnnnnnnnnnnnnnnnnnnnnnnnnnnnnnnnnnnnnnnnnnnnnnnnnnnnnnnnnnnnnnnnnnnnnnnnnnnnnnnnnnnnnnnnnnnnnnnnnnnnnnncgcattgtaataactattccatttcttaaattggaaggctgtatgttttanaataaacttccaagtaatatctttctttttcttt

SEQ ID NO: 36845 - DNA, 350 bp, Homo sapiens
gtttgttgttttcattttcccatactcctagagtacttgccaaggtagtctggtgagtggctggaaaggggtgttgggagcaaactgagtgactccctgtgctctattttcccattggagaaaaaactgttttgtatctactaggaaccattcaagagagtgattgaaagagaggatgagaaggtattccttagtggtgggggtgctgctgcagggggtccaggggtgaatagtcatacagggagtatgtttgccattacaaaacctggactgtttgttaagcagggaggaggtgatgatttttgggggccctgagaagcggacaagccatctgaatagagcggtttggg

SEQ ID NO: 36846 - DNA, 461 bp, Homo sapiens
  misc_feature (1)...(461): n = a,t,c or g
cccccttgnangcnnnnnnnnnnnnnnnnnnnnnnnnnnnnnnnnnnnnnnnnnnnnnnnnnnnnnnnnnnnnntctcgaggatccgaattgcggccgcgtcgacgttttagtgggtgttcaatggtgtctcattgtggatttcattacaattccttactgcctaatgatcnnnnnnnnnnnnnnnnnnnnnnnnnnnnnnnnnnnnnnnnntggtgaaatcccccatggcattcctatgagttcactgtgggtgccgcagggtgactatgtgcacaatcttggaactgtgcatttagacactatttattagttcccaactttaatcaatgataaaattcgcattttagcacgtttatttctccatcttttctctttcttccatttctccttttcttcacacagacatctaatatgcaccttaaactttatgtgtctaaaacaatgcttcaagctcaaccc

SEQ ID NO: 36847 - DNA, 354 bp, Homo sapiens
tgggaacagaaattgtttcacaaactgctggtgaattttgctcaactttggtaacattttctgatgaaagctgagtattcaatactgcctgggtcatctcaacagctgatgtctttgaagtgagaactttccattcatgagatgggtctggcattggccgcttttcagaatagacaggatttggtaaaacagaatcaacttggttaaaccttctgcaattgacttcctgaatgtcagaattcaacatacattgagtcttatttgtttctgcagattccactactgttggtgtttgtctctctgcattctctggcattactggagttatctggggtccagactggattttggcag

SEQ ID NO: 36848 - DNA, 352 bp, Homo sapiens
gagcaagcttagtaactttgttctaattttttctcctttttttgcttcatatctttgcttgactgcctccatattattcctgtctcacaccttcaaggaaaattctgatgactgtattttttatctgctttgtttacgatgtatcctcagagcgcagaataatggctagaacacaggaaaactcagtaaaatttcattgaatgaaataggtcttccctgcctacccaaggcaaagcagcttgtagtcttcttccctccttcccattaatttctctttcattttctacctgtatttttttcatagcactcagctcccaggactagcctctttatttgtataactggttattgg

SEQ ID NO: 36849 - DNA, 359 bp, Homo sapiens
cttgttttaagtactatatctataaaatacaatttaaataatatagctttctacccaccccctgtgcccattactttccttttttcaatgactacttttttctgttctcctaaagaaactttagaatcatttttgtcacaccttgggtaatttgactgaaatggtatttaataagttaattctggaatactcagcatctttatagtggtaaattttccattctaaaaacaactttggtatattttcaagtttattcaaatcttacttgctactattaagttttgtgagttttttcagaggtaatcgcctaggttatttatttatctgtttttgtgattttctcctttgtgaatggactt

SEQ ID NO: 36850 - DNA, 378 bp, Homo sapiens
ctttgcactaacatcatcaaaagaatagtgcctggatgcttgcttcacaatgcaacgtgtatatttagaaaccagagaacatgccagactgagtgatgattgtacaagacattccatactccatccagatgtatcaggctcaggtggaaagacccttaaactgtggttagggagatacaaaaaaggagcttatttttgcaaattttcatgcataacacattaggtgggaacattgtctccagagttggatacacccaatcagttttaactatttcaaggctggtccctttgggcaaataagttattctatttcagccacatatttcttagctatagtcgacgcggccgcgaattccagatctatgaatcgtagatact

SEQ ID NO: 36851 - DNA, 103 bp, Homo sapiens
  misc_feature (1)...(103): n = a,t,c or g
cttctgttgnnnnnnnnnnnnnnnnnnnnnnnnnnnnnnnnnnntgccctgagcctgggcaacagaaggagaccatctcccagaaaaggaaaaaaaaaaaaaa

SEQ ID NO: 36852 - DNA, 382 bp, Homo sapiens
tgttacctcgtgctcttagccaccattatacaaagaaaagagacaaaatgacaaaaaatgacaaacccactttagctgtcttttgcacctattacgtttcttgttccaagaatattttgtgaatacacagtaattgaacttaaattacattgtggttgatcattgtgttggcttttcttgacaatagtttcactttaacttaagaaaagggcatctcatttatttggcatggggttatgcatcatggtaaagttctttagtataacttaagcaattgtgtgtagatacataggtcatagatatggaaagtttacctgaggatcctggtatatgaaatttagctttgtaatatgtgaaaccaactaaattttacttaggggag

SEQ ID NO: 36853 - DNA, 375 bp, Homo sapiens
  misc_feature (1)...(375): n = a,t,c or g
nnnnnnnnnnnnnnnnnnnnnnnnnnnnnnnnnnnnnnnnnnnnnnnnnnnnnnnnnnnnnnnnnnnnnnnnnnnnnnnnnnnnnnnnnnnnnnnnnnnnnnnnnnnnnnnnnnnnnnnnnnnnnnnnnnnnnnnnnnnnnnnnnnnnnnnnnnnnnnnnnnnnnnnnnnnnnnnnnnnnnnnnnnnnnnnnnnnnnnnnnnnnnnnnnnnnnnnnnnnnnnnnnnnnnnnnnnnnnnnnnnnnnnnnnnnnnnnnnnnnnnnnnnnnnnnnnnnnnnnnnnnnnnnnnnnnnnnnnnnnnacctttttcaataaaggaactggcagaggaggcactgtgtgtgaccacagtgccctctgtgagcagggaggatg

SEQ ID NO: 36854 - DNA, 381 bp, Homo sapiens
  misc_feature (1)...(381): n = a,t,c or g
taactggccaagtttcatttatttcttcacgtaacatttttacagctcacatacagcaggaagcacacctttgcacataattgtgacattagcttcacaacagcatctgctgactgcacttccaattataatataacaagtgcaagttcatttggaaatgtacatttatacacctgatataaattaaagatgggtacactatgattggtgatagcaaaagcatgacttgaggttccttgactagaccacttaagagaaggtcgacgcggccgcgaattccnnnnnnnnnnnnnnnnnnnnnnnnnnnnnnnnnnnnnnnnnnnnnnnnnnnnnnnnnnnnnnnnnnnnnnnnnnnnnnnnnnnnnnnnnnnnnnnnttctt

SEQ ID NO: 36855 - DNA, 374 bp, Homo sapiens
  misc_feature (1)...(374): n = a,t,c or g
gttgatttcagatacatatgtctagacccctccctggagactgtgattaacagaggctgaagctggagactattttttaaaggatccatacaaacagtagtggcttcatgggcattcagactgtgccatctcccaaannnnnnnnnnnnnnnnnnnnnnnnnnnnnnnnnnnnnnnnnnnnnnnnnnnnnnnnatcagtaattttgtctgctgccattccttcttactccattcacatgtagagtacaaaatgacccttgagcactgaattccagggagctcaaaataagtgggagttcagcaagactcaaagtgagtacaaggtaagggctacgcctatgactgggtaaatgggggtgctgacagcccccaaa

SEQ ID NO: 36856 - DNA, 379 bp, Homo sapiens
  misc_feature (1)...(379): n = a,t,c or g
ctctgcagtaactccctcaccctgcttaggctctaacatcgaactccagggtacctcccccatgcggatgccctcctaacccacttgggcaccaatattccacactggggtcgggtgcgnnnnnnnnnnnnnnnnnnnnnnnnnnnnnnnnnnnnnnnnnnnnnnnnnnnnnnnnnnnnnnnnnnnnnnnnnnnnnnnnnnnnnnnnnnnnnnnnnnnnnnnnnnnnnnnnnnnnnnnnnnnnnnnnnnnnnnnnnnnnnnnnnnnnnnnnnnnnnnnnnnnnnnnnnnnnnnnnnnnnnnnnnnnnnnnnnnnnnnnnnnnnnnnnnnnnnnnnnnnnnnnnnnnnnnnnnnnnnnnnnnnnnnnnnnnnnnnnnnga

SEQ ID NO: 36857 - DNA, 373 bp, Homo sapiens
  misc_feature (1)...(373): n = a,t,c or g
cccagagctccctggcttgtttcnnnnnnnnnnnnnnnnnnnnnnnnnnnnnnnnnnnnnnnnnnnnnnnnnnnnnnnnnnnnnnnnnnnnnnnnnnnnnnnnnnnnnnnnnnnnnnnnnnnnnnnnnnnnnnnnnnnnnnnnnnnnnnnnnnnnnnnnnnntgctgattttctttgagacactgatattttctgggataagaatctgtttgactaacaactcctagggtaccaagaccattgattgatctgttatagataatgattgtaagaaggctaaatggtataatgttgatattgtgaagaattaattaaaatccttatttttacttagcagattattttagtcgaggggtcagcaaacggtggccag

SEQ ID NO: 36858 - DNA, 371 bp, Homo sapiens
  misc_feature (1)...(371): n = a,t,c or g
gnnnnnnnnnnnnnnnnnnnnnnnnnnnnnnnnnnnnnnnnnnctgtgaatgtacttaaagccaatgcctggtacctttttnnnnnnnnnnnnnnnnnnnnnnnnnnnnnngcaataaaaaatgtgatactgttttaaatggtagagtttaaagcttgggttctaatgaatgacagttcagtcaaaggatcagaaattccgggcactctgctaaccctaccagggcttcacaaggaatttaaaaagagaaggacaatgcttccatctccctggtttcctgtcttaatcttctgatcttgagatctgcctgcaactgaaagagatgcagaactgggaaaagaggaacaaggaggcagatccccactttcccc

SEQ ID NO: 36859 - DNA, 381 bp, Homo sapiens
tgcatttaaaggcctctcagtttccacaaaatattgcacagaaagaactagctttcagttgccagcatgaagatgagatgggcatggagaagggtctttggaccctgagggttgcaaaagtagtgtagaagagagctccataattcaagacttaatttatgacactgaatgagcaatgaactcacaacatgccaaaagtgacctattcggttccaaaattttatattggacagaattctttgggagcaagaaccaggccaactgtggttcctaaaattcgaactcattccttattctttctcaaggatatagttcatttgataataagaccatcctagttcattttaaaggctctccagtgttactcaccagagacagatt

SEQ ID NO: 36860 - DNA, 356 bp, Homo sapiens
ctgaccagcttagccaggccgcctgatccccatactcacatcaaggcaaaggaacttggcagctctttaataaaaccaaatcctgttgcccaggagcttcatgtttgggcctctaggccatagggtgggtgaatcactttctactctctttaagatggagccatcagttaaaggagggaagagatgcccaggagtggaactgtagggggcagccagagcagtaagagcaggagcaggtcagtgccgtgtcactcaggccaagggaagatgggcctggaagaaggagggaggccacaggctcagagctgggcctgggagccaggccccacccccactggccccaggagaggtcaagg

SEQ ID NO: 36861 - DNA, 357 bp, Homo sapiens
  misc_feature (1)...(357): n = a,t,c or g
nnnnnnnnnnnnnnnnnnnnnnnnnnnnnnnnnnnnnnnnnnnnnnnnnnnnnnnnnnnnnnnnnnnnnnnnnnnnnnnnnnnnnnnnnnnnnnnnnnnnnnnnnnnnnnnnnnnnnnnnnnnnnnnnnnnnnnnnggccagattatttactttttagaacaaataatagcagttccaaagtcagttctataattatgttactttcattcacttgtattccaaatgtgttgaataacctggtcaagtgttaaaactagcatatcaggaactgaccatgatcaaaagtcttttagggctatgctgaacccaacattaagtaactgtttcctataaattataatatgnatangtaatta

SEQ ID NO: 36862 - DNA, 351 bp, Homo sapiens
  misc_feature (1)...(351): n = a,t,c or g
gtttctcatatattaatgagattatagcatttagattccttaattaatgtttaagtgatttcattatgcttgttagtttaatttctcctttcttggcagacctatcgtaaaatccaataagcctttggaataggtacaaactggtctcaggtaggaaggaaggttccacctgagacctccagttccctgtatatagcagggatgtatacttccttttccagaacgttggtgtgagaatcatatgctttctatgacattttttggtttgattactttcagtggacaaatatttttgaagtgcagtcgacgcggccgcgaattccnnnnnnnnnnnnnnnnnnnnnnnnnnnn

SEQ ID NO: 36863 - DNA, 354 bp, Homo sapiens
  misc_feature (1)...(354): n = a,t,c or g
cactacttccacatgtctgaattttaaaaagccaaatgaagagattaatttttaaaatatttaaagttctgcagctgcagcaagaagaaataaacacatataaaatgcctatagcctaaatcattatttaaaattttttaaagtaaaattttttgctgaagtataagacagcatggggaggaaaatgcaaaattataagtatataggccaatgaacttttatagtgtatctatgtataactatacctggttcaagaaacaacattgctaagcacaacacaagaaatcctttccatctcctcccagttactaccctttccagangtaaccttacttctaacacaaaagattacat

SEQ ID NO: 36864 - DNA, 356 bp, Homo sapiens
  misc_feature (1)...(356): n = a,t,c or g
gcccatcacccaacttcagtaattatcaattcatggccatcttgttcacccctgcctgcttccctgcttcccctcattctgcagaggttcnnnnnnnnnnnnnnnnnnnnnnnnnnnnnnnnnnnnnnnnnnnnnnnnnnnnnnnnnnnnnnnnnnnnnnnnnnnnnnnnnnnnnnnnnnnnnnnnnnnnnnnnnnnnnnnnnnnnnnnnnnnnnnnnnnnnnnnnnnnnnnnnnnnnnnnnnnnnnnnnnnnnnnnnnnnnnnnnnnnnnnnnnnnnnnnnnnnnnnnnnnnnnnnnnnnnnnnnnnnnnnnnnnnnnnnnnnnnnnnnnnnnnnnnnnnnnnnnnnnnnnnnnn

SEQ ID NO: 36865 - DNA, 203 bp, Homo sapiens
ctgattgtcagttttgagttgttttgctattaggaggcaaagtaggggggcatatacccacttaaaatattttaattctggctagtggaaatgacagtaatgccttcttcataattaaaatgtcactctgaaatggtcccaaattaagaaggatctctttttggtgtgttctgcaagattctgatcacctttttttttttttt

SEQ ID NO: 36866 - DNA, 353 bp, Homo sapiens
tttagaatccctgggtgtgaaggttaactctgtccggaaagaggaccagtaaaagcttcatgaggctgagatgcactttggaagaggaatagagtttcagcacattctaggtgttggaggaatgggggaatctaggcagatgtttaaaatcaatgagaaaccagaatgctgaccatgagggttggagtgggggcctaaggacatgacggaggagcagggtgtgttcccagcttaactcaggtacccatggggaagcaggaaaagtgaaggtgtcctaggcagctctgccacaggatgaatggcttcagatgccaggtgagcgagggacccttcattcagtcagcaggaaagaa

SEQ ID NO: 36867 - DNA, 356 bp, Homo sapiens
  misc_feature (1)...(356): n = a,t,c or g
aatttatcagttttaattttatgcaaaactctcaatctttttaaactttcttcccctccctgtcttccatcttatctccctctctctctcccttccacgtctttctttctttctcatattgagcaaagttatttcagtctgtgaaataactgtgtctgaggccagtattatttgaatcccttctgggtctgtttctattgctttgaatctctgttgtcacctttcttttgtccctgtttacttcgtaattttttattgagtgccaattggtgtatattcaaaaccaggtatattttaaggnctagggtaatattatcctcctccagagaggatttatattaattttgntttttaag

SEQ ID NO: 36868 - DNA, 325 bp, Homo sapiens
cccccccatgcttgtggggatcatggaggaaggagaacttacacctctgagcattttgaaaatacttttactgcattgactgattcccaggtaaggctgagcagatatctatgcccagtgattgacaggaaattcctctgaaatagctgcaagtctggagtttcaaaaggacttagtagtcctttcctcagagaactgctttctctaagatgggggctttctcataggtaagtttccctttcatagatgttttttccttcaacttcctgcaattcagtagctatttgtttttcttacatttgtgtatttgatgcaccaagaagtc

SEQ ID NO: 36869 - DNA, 332 bp, Homo sapiens
ctgctgtggagcatttcttctctctcttattaaacttttgctccacccccacccttgtgtccatgctcaattttcttggacgcaggacaaagaagccaggtactagttcagagaacaagaaactgctacattatggtgcattggcaaaactacaacatatttaggtgcaggaagaaagggatcatcagaagggtgagtaagagcggacctctaccctttactttcatttctgaggtttcttgtctattccaatccagtttcctttcacaaagggcccagacattgcatgggattggaaggaggtcctagggcaactgaaggtttctggctgg

SEQ ID NO: 36870 - DNA, 261 bp, Homo sapiens
  misc_feature (1)...(261): n = a,t,c or g
tctgaaacctctctttaacacaaagggcaatcacacaaaataatgtatgtgtacttgttttttttgttggtgatggtttttttttgttttttnaaaaaanngggtntnanngtttttaaggnngnanngnaggggccnaggggcnnantngancntaatnggancntaaaacnttngnnccnaaanantcntcnngggtaagtttcccaagtngggggnactangggggnaantnannnngccgggntttttttttttttt

SEQ ID NO: 36871 - DNA, 355 bp, Homo sapiens
caaagatgcccctactcaaccctgctaacatctctcatataccatgttcattccttctctgcatccaagtttgccttcctaagtagacaatatgctttttgagaaaagactgttttacatttccatggaatcctcaatagctattaattagcacaataatgagcacataataagtgctcagggaatacctgttgactcatttttaaaagtgcttttaattttcccctactagatttatatttttgaatgtactgttcaacactaaaccattgctattattccctctgcctggaatgacctctatggtcctttctgtatgtgcaaaaaaatccctcttatccttcaaacctcagct

SEQ ID NO: 36872 - DNA, 363 bp, Homo sapiens
gcttaatcacctttaaaggtaagtatggtagggcattttaaatgtagtcatacaagctcataagaatacaaaaactcctttcttcagcagatattttttattctttgattatctaactataagatgtttgttgaacagagtgtggaatcatccttaaatcatctcctgaggcttgatagtgcctacttaagagaggcactaggtaccttttcaaagtcacacagtctattagggtagagctagaatttaaagcccagcgttctggctctagagcccatgctccagcaccctgtcaatgtattcaaatggagaagctaacaaataaatgggaaaaaatatttaatctctttggacataaaagtt

SEQ ID NO: 36873 - DNA, 346 bp, Homo sapiens
ttattgacatacacatcacagagatgttattgacatctgtatcaatttggatatttctaagacaaaaatacaatttggtatactagaacacattgtattttattttaaagtggctactcagtttctttttctaaacaaaaattctggtatttaagactaacaatttcttgcagtaggacaaatatatttacagccaatattaagaaagagctcatggttcaaactgccaaaggccagatgcaagttcccacaatgtacctttaccccttcagatatgtggcaatcataagactgcaattcaaaagaatataaatgcagatatgcttaagagcaagttgacatattt

SEQ ID NO: 36874 - DNA, 357 bp, Homo sapiens
  misc_feature (1)...(357): n = a,t,c or g
caggtagaccatacatcagaccacaaagcaaatctcaatatgttttaaaagattaaagttatacaaactatgttctctgactacaatggagtaaaatcagaaaataacagaaggaaaactggaaaactcacaaatatacagaaattaaacagtacccctaaataagcaatgagacaaatgagaaaccacaagaaattagaaaatactttgaggtgaacataaatgagaacacaacatatcaagatttatgggatgaggtnnnnnnnnnnnnnnnnnnnnnnnnnnnnnnnnnnnnnnnnnnnnnnnnnnnnnnnnnnnnnnnnnnnnnnnnnnnnnnnnnnnnnnnnnnnnnnnnnn

SEQ ID NO: 36875 - DNA, 355 bp, Homo sapiens
tcccagtcctgcttcttgatatcttgtaacctagagcaagttattaaacttctccaagcctcagcttcctatgtgtaaaatgagcccagttcctgacatgtagtagattctcagtaaatgatatgaggagagcccagaaggcgttgttgacctcactcgagggattggggttgggagggaagtcggctgtacttagggaaataaatggttcctggcctcttgatctcagttcagactgcaaactcttaggggcaggggtagctacatatcaggctatgggtttggtgctagaatggtgttgatactgtggtgttctctgaggatggggatcccagccaatgccatctggcataag

SEQ ID NO: 36876 - DNA, 353 bp, Homo sapiens
cggggaaagttcaatctcccccatacagtgggaagtagcatctttacttttggaaaacctgtcaaaaccaaactttagctttctcagcctcagctaagactggaaagttaaattaaggtcgcaattgctagctagatggcattaaatgtcactaacctgaagccaaggatttaaatagtaggcttcctgcgtggttgaattccaaccctgttccaaagttcaaattatttgtttcccatggcaacttcctgaaacctaagtcagtgtttccgaaaactggccgatcagaacagccagggagtttagaaaaatacagactctggtttccctcagacttcatacttcagaatctc

SEQ ID NO: 36877 - DNA, 342 bp, Homo sapiens
cttgtgaaaaaccttcttgctggtattaatgtttttataacattcactgtatgccaggtactgttctaagggcctttatgtactaactaatctgattttctcctaatccaaatgagctaaatattgttattatccctctttcactagtgaggaaagtgaggcacaggcagtttgagtaactccatcaaggttctacagctatgaaaggtagactcacaattctaacccagaggttagacttctctaagagcataatcttaagtattatggattagaattcaagacaatctttactttagtctcattttcatttgagcaggcagtattgcggcatttactaaa

SEQ ID NO: 36878 - DNA, 353 bp, Homo sapiens
aaaggttggaagcacaaaagctgtgagccgctttcactctccttttattgtagaaaattacagacatctgaatcagctccgggagcagctagtccttgactgcagtgctgaatggcttgattttctagagaaattcagtgaacattatcactccttgtgtaaagcagtgcatcacctagcaactgttgactgcattttctccctggccaaggtcgctaagcaaggagattactgcagaccaactgtacaagaagaaagaaaaattgtaataaaaaatggaaggcaccctgtgattgatgtgttgctgggagaacaggatcaatatgtcccaaataatacagatttatcagagg

SEQ ID NO: 36879 - DNA, 341 bp, Homo sapiens
tttttgtgggggaggcattttttcagtctgtgtgttcttaggttttagagaggattgatatcagtactttcattttagagaggattgatttcattaggcctcctaagatagttgttgatagcttctctattgtattagaatgtaaataccttaaggggctggtaggagactagaaagctattgcttagtagtcagtgccagagggcccagcaattctactgacaatctgtgttaccttgggcagactgtttgacttttgggggatctccttttgcttatttgtaaacattggaagaataacatgaacatcaattggccttgcaaatatgtttataatagca

SEQ ID NO: 36880 - DNA, 344 bp, Homo sapiens
gcagtggtgtgatcacagctccacagctgtgcacctgctatgcgtatacacctactatgcacctaaatgcctaggtacctacatttacgggtactacgtacccgtaaaaattgaaaattaaaaagaaaaataaataaacgaaatgatctattatcttcttctactgatgaggacataatgaagggtttggtatgttagactcatacacatatatgcagacttttgtggttgtagttaaattggtcaatagatatagactgacctaagaaaagaggaattaacttccagcctaatactgactgggcacttctgttcccgtacaccctcagagacttcagccaacc

SEQ ID NO: 36881 - DNA, 351 bp, Homo sapiens
  misc_feature (1)...(351): n = a,t,c or g
nnnnnnnnnnnnnnnnnnnnnnnnnnnnnnnnnnnnnnnnnnnnnnnnnnnnnnnnnnnnnnnnnnnnnnnnnnnnnnnnnnnnnnnnnnnnnnnnnnnnnnnnnnnnnnnnnnnnnnnnnnnnnncantaancaaacaaacaacctgtatttttntgaaataaaagngggtacatacnctatgccttaaactattcatatgtataagctggaaatatgtagcttcaaataacccaatatttatatctttaggcagtanctanaggtaaagcatcatctataaatgctattacacacagtagctactgngagcaaaaatatttgatgacagaaaccacgtntataacatat

SEQ ID NO: 36882 - DNA, 339 bp, Homo sapiens
  misc_feature (1)...(339): n = a,t,c or g
ctggtgaagcaagagggggataaaggtgttgattatttgacgatctttcccagcctcatccaagtttgcagtgnnnnnnnnnnnnnnnnnnnnnnnnnnnnnnnnnnnnnnnnnnnnnnnnnnnnnnnnnnnnnnnnnnnnnnnnnnnnnnnnnnnnnnnnnnnnnnnnnnnnnnnnnnnnnnnnnnnnnnnnnnnnnnnnnnnnnnnnnnnnnnnnnnnnnnnnnnnnnnnnnnnnnnnnnnnnnnnnnnnnnnnnnnnnnnnnnnnnnnnnnnnnnnnnnnnnnnnnnnnnnnnnnnnnnnnnnnnnnnnnnnnnnnnnnnnnnnnnnnnnnnnnnn

SEQ ID NO: 36883 - DNA, 435 bp, Homo sapiens
  misc_feature (1)...(435): n = a,t,c or g
nnnnnnnnnnnnnnnnnnnnnnnnnnnnnnnnnnnnnnnnnnnnnnnnnnnnnnnnnnnnnntctcgaggatccggtcgacgcggccgcgaattccnnnnnnnnnnnnnnnnnnnnnnnnnnnnnnnnnnnnnnnnnnnnnnnnnnnnnnnnnnnnnnnnnnnnnnnnnnnnnnnnnnnnnnnnnnnnnnnnnnnnnnnnnnnnnnnnnnnnnnnnnnnnnnnnnnnnnnnnnnnnnnnnnnnnnnnnnnnnnnnnnnnnnnnnnnnnnnnnnnnnnnnnnnnnnnnnnnnnnnnnnnnnnnnnnnnnnnnnnnnnnnnnnnnnnnnnnnnnnnnnnnnnnnnnnnnnnnnnnnnnnnnnnnnnnnacctgannngnncancttnganacactgtgnnngnttttggcagntgnactgnggacttcntnattgcg

SEQ ID NO: 36884 - DNA, 353 bp, Homo sapiens
catggctgtgctgccggcacttctgcgcagcggcgcccgcagccgcagccccctgctccggaggctggtgcaggaaataagatatgtggaacggagttatgtatcaaaacccactttgaaggaagtggtcatagtaagtgctacaagaacacccattggatcttttttaggcagcctttccttgctgccagccactaagcttggttccattgcaattcagggagccattgaaaaggcagggattccaaaagaagaagtgaaagaagcatacatgggtaatgttctacaaggaggtgaaggacaagctcctacattcaggcagtattgggtgcaggcttacctatttctactcc

SEQ ID NO: 36885 - DNA, 343 bp, Homo sapiens
ttttcttttccccttccccttgcttcagaggcctgatggcgtcggactattccgaagaagtggccacctccgaaaaattccccttctagaacatgtagacacttgagaaatgtttctgtttgaagaaaatagagggagaaacagaagtcttaagtctgtggcacactgtgtcttcagacagtttgaaggaatgaaaacctagagattttaaatcatgaattgaacatgtaaaattccagtaaaatgtaaaaacggaatatgcatcgctcttaaccttgagcatagtgacttagagacactgtgtatcagttttgccaataagactgtggacttcatgattgtt

SEQ ID NO: 36886 - DNA, 352 bp, Homo sapiens
tatttccaaaagcccttgaaatactgtttcagccctactttattccctaaaaacatcaactcaaaagtctcctaagataatcactaaggttttttctcagttattttcctcaacttgttacccctgttgctattgcaaactcacccacttgtatttctgtgagagtttaccatttttttctgaactagtttctcagtactatcccattctttactcctcttctatcctcttctcttcttccatcctcttctcttgtatatctaatctaccttgaaaactccaatcattatcactaggatagtaactcccagtgaatttattcagagggtgagcacggtggctcacgtctgta

SEQ ID NO: 36887 - DNA, 353 bp, Homo sapiens
  misc_feature (1)...(353): n = a,t,c or g
gcaacatgccatagtttctccaggtcatatacctgactgtcaaattgctgggtcctaggatataaatatttttccctttataagatatttataggatattgcaaacaatttctgttttttcatatccttgccagcagttagggttatcaaattctttgatttcttactgatttgtaagtttttttgtttgtttttaggtattttcaggatagttacaaatgttaggaaaacttatttttatttggcttttgaagtttccagatttcttgaacagtgaccaatatggacccaagttactgtaattttgtcctatagtatatattgntgatagtgagctttccaatgnactttct

SEQ ID NO: 36888 - DNA, 353 bp, Homo sapiens
  misc_feature (1)...(353): n = a,t,c or g
gattttcttttcttgtaatatctttggttttggtatcaaggtaatgctggcttcatagattgagttgcaaagtgggtttttgtttgtctgnnnnnnnnnnnnnnnnnnnnnnnnnnnnnnnnnnnnnnnnnnnnnnnnnnnnnnnnnnnnnnnnnnnnnnnnnnnnnnnnnnnnnnnnnnnnnnnnnnnnnnnnnnnnnnnnnnnnnnnnnnnnnnnnnnnnnnnnnnnnnnnnnnnnnnnnnnnnnnnnnnnnnnnnnnnnnnnnnnnnnnnnnnnnnnnnnnnnnnnnnnnnnnnnnnnnnnnnnnnnnnnnnnnnnnnnnnnntctcaacctctcanaatgctgggatta

SEQ ID NO: 36889 - DNA, 345 bp, Homo sapiens
attgacttagcgtttgctctgcctctttcttttcttacctaggtaggtagtggggactccttcaattatctgagcaattcaaatctcagaatgtagtgttgggtaaattgagggttctaaaagaatgccagatggtttgaaaggaactgtgagcattccaactagtgcagtcctttgaaagccagctggcagagcctcctgtgctttggaggtaggaaccagacactttgttccatgccagctggcccaagaatagctggccagtggccttgcttttggctggccactcttgggaaagctggcctgggccctccatgtgccctaaggatagtctgataccagaga

SEQ ID NO: 36890 - DNA, 349 bp, Homo sapiens
  misc_feature (1)...(349): n = a,t,c or g
agtacatagcaaatagaaggacataataaacaaccacagaggatcactttatagttcctaaaagacagtacccaaacagctgtacagttttaagtctactaatcccaaatgagacagtcctagttcagaaagacaatatactaactaaatcaggtgcccctagcannnnnnnnnnnnnnnnnnnnnnnnnnnnnnnnnnnnnnnnnnnnnnnnnnnnnnnnnnnnnnnnnnnnnnnnnnnnnnnnnnnnnnnnnnnnnnnncctgaagctgtacctggcttaggatttctatttaatagaaaagcacagggcaaaagtgggtctgacattattcacaattaaaataatc

SEQ ID NO: 36891 - DNA, 359 bp, Homo sapiens
  misc_feature (1)...(359): n = a,t,c or g
ggaggctgcaggcctctgaccactgacccactccgcggaccccgggctggcttggggtgcctttgagtgtttttacaattaaggacaaatcggtaaaacgggagagaagaaaacgaattgtaagaaaactacaaaacattaggtctaaaactcacctgttctatgtaaaacaaacaaaaaatgactccagggattctttaaaaacacgtcttagaatcaatatttataaaagtggttggtggtcgacgcggccgcgaattccnnnnnnnnnnnnnnnnnnnnnnnnnnnnnnnnnnnnnnnnnnnnnnnnnnnnnnnnnnnnnnnnnnnnnnnnnnnnnnnnnnnnnnnnnnnnnnnnt

SEQ ID NO: 36892 - DNA, 348 bp, Homo sapiens
cccagatttaaggacccctcatcaatatccattggggctgggaagaagagtggctggttttccattaggtagggggcccagatcactaataatcagggcgatctggtgaggcagaagatgccagcaagaaatgccctggagggcctgaagcagctgctgaattccccatgagcagcttttcacatgctacctgaaggcagccactgggaggttttgaaagaagatactaagtgactccgcactagcacttgccacactagataacctggtgagagaagctgctaattgtaatagaggcagaatgttatctgtactgtttaaaacaagttttccagggggaaatgagga

SEQ ID NO: 36893 - DNA, 357 bp, Homo sapiens
  misc_feature (1)...(357): n = a,t,c or g
tgaacattttagggattaagaaatctgcctccattgctgtttagaagcctctgctccttgcctggcactactggctgttgggaatgtgaagataaataagagtgactacccttgactggttcacagtttgttccagagacagataatgaggcaacagttccagtacagtgtgaatcctgctgcgataggaacacaaatgcagctttgagctcccgcagcttgtacttcttcaggggcttattctcttgtcctgtaagtagtacacttttgaggtaaggtgaagacaacagcactgttgcttgctcggtttgtgntttgtttgtttcttttgcgattggcataacggaacaaagaaat

SEQ ID NO: 36894 - DNA, 347 bp, Homo sapiens
gtcagatgcaggagcttcggagggttcgttctggagtcatgagtgaaaaggaccacatggtgacaatgcatgatgtgcttgatgctcagtggctgtatgataaccacaaggatgagagttacctgcggcgagttgtttaccctttggaaaagctgttgacatctcataaacggctggttatgaaagacagtgcagtaaatgccatctgctatggggccaagattatgcttccaggtgttcttcgatatgaggacggcattgaggtcaatcaggagattgtggttatcaccaccaaaggagaagcaatctgcatggctattgcattaatgaccacagcggtcatctct

SEQ ID NO: 36895 - DNA, 347 bp, Homo sapiens
  misc_feature (1)...(347): n = a,t,c or g
tcttcttcacctccagcagcatgtctttggtgaggtggaaatgatccagggtctcctctatctgccggtgctgctcggccaagcggtaggccaccgccgtcaccatggctgcccccttgccgctgccactctccgagaggaggaagcgcacatcggagtctggcaccaagcgccttaaagtcttgtggaaacgccgtgaatactgtgggtgcgtcttgtaaagagatccgtcgacacctnccgtggtccgcancctgggtgtgcccttgtnatcacncatgcggttcaagatggcgcccattgtggcagccaccaagttggctgagcgaattgagacaatggtgcaa

SEQ ID NO: 36896 - DNA, 138 bp, Homo sapiens
ttgaggggtaggtgggattggggattatggagtggagataaagattcttgacatggggattctgtgtgtttactggtacctgtgagtgcttggaggctgtctggattttgttttgttttctttctttttttttttttt

SEQ ID NO: 36897 - DNA, 347 bp, Homo sapiens
  misc_feature (1)...(347): n = a,t,c or g
tttccaactaactataggtctgnnnnnnnnnnnnnnnnnnnnnnnnnnnnnnnnnnnnnnnnnnnnnnnnnnnnnnnnnnnnncagttaccttccagaaaaattaaatcagactatctgggagtgggaccccttcagtattttttaaatttcctcaggtgatggatttcaacatgctctccaagttgataaccaccaatctaagctaaaatcctaagatgttggaagactgaatttcaagtaatggaaatttgattttatatttacaaacaacaaaccttcctaatcagcaaatagatgcttgtccaaaacatactctatacaaaaaatacatatgtatgaaataaa

SEQ ID NO: 36898 - DNA, 346 bp, Homo sapiens
acctcacaggggctgagtcactgaagagggaatttgacaacccggacactgcagacctgaagtttctagttgatggaaagtacatttatgcacataaagtccttctcaagattcgatgtgagcattttcgttcgtcattggaagataacgaggatgatattgtagaaatgagtgaattttcatatcctgtttaccgggccttcctggaatacctatacacagacagcatcagcctttctcctgaggaggcagtaggactgctagacttggctacattttatagagaaaatcgtttgaaaaagctctgccaacaaactatcaagcaaggcatctgcgaggagaatgc

SEQ ID NO: 36899 - DNA, 229 bp, Homo sapiens
caaacataatttttaattatactaagtgcaggagattcttctttatatctacaagccatatcttagcacagtatagtttaataaatcattaattttattaaatgggattttcttttaaaaagcagacaacactggcactttacatagaaaaacaacttggttcaaataagcagttaatttgggattttttttaactatcgtattctcccacattctttttttttttttt

SEQ ID NO: 36900 - DNA, 349 bp, Homo sapiens
cctccattctcaaagacaatccacagctgccctctgtctccaggataaagttcacatcccacaacctggtatatgactcttcatggcacggtccaaggacctctttccagcctaggcctgacacttttctgtgtgtttcacacagattcaagtatctcctatttctcacaaacaccctaaactttcctgctgccttatttgttcaagtcacttctttcacctggaatgctctgtcccttttctatccatccaattcccactcagtgtcaaagcctagctcaaaaacttgctttgccccaaatgtaaatatttatttatatgtcttctctctccttttaagtgataattt

SEQ ID NO: 36901 - DNA, 348 bp, Homo sapiens
gaaataacatgatgcctgggaattacttttaaatactctttttttaaaaaaaagggaaagggtaatagatgagctatggtaaaactctgattgttatttattaggcctgggtgatggtgtggggattaattatccagtccccactgttgtgtatatttgaaagttccattaagggggaaaaggaagaaaaactcattcctaaaacacctggctttataaaatattgtgtataaaaagtactagaaaaaagggggacggagaattggagagttacagaattgcaacttgcagttaatgaatttttccccaaaaacaatgtattccaagagctataaaaatccaaataac

SEQ ID NO: 36902 - DNA, 346 bp, Homo sapiens
  misc_feature (1)...(346): n = a,t,c or g
ctactttggataggattttagggaaagcaactcaaaagaggtgtttcagcctaatgacctgaaaggtaagaaggagccagnnnnnnnnnnnnnnnnnnnnnnnnnnnnnnnnnnnnnnnnnnnnnnnnnnnnnnnnnnnnnnnnnnnnnnnnnnnnnnnnnnnnnnnnnnnnnnnnnnnnnnnnnnnnnnnnnnnnnnnnnnnnnnnnnnnnnnnnnnnnnnnnnnnnnnnnnnnnnnnnnnnnnnnnnnnnnnnnnnnnnnnnnnnnnnnnnnnnnnnnnnnnnnnnnnnnnnnnnnnnnnnnnnnnnnnnnnnnnnnnnnnnnnnnnnnnnnnnnnnnnnnnna

SEQ ID NO: 36903 - DNA, 336 bp, Homo sapiens
ttttactccaaaatacaatgacatttctcaaaacttatctttcaaacatcaagtttgcctgtacttcagcttgggcccaattttaccacttggtccttttaaatctattattcaggtatcccacattattctacacaaatacacataggctagagacaaaaacacatgaagaaaagagagaaggcagaaatgctgggtaaaacactaactgccacttcttagtttccacttcagtgactttaagtcaaataagcctggaatcaactatcactgttgccaaagtctggcttacgtagggagtagggaacataaatgttaactacagacttagaaata

SEQ ID NO: 36904 - DNA, 335 bp, Homo sapiens
gaattacttggctataggtatgcgtatctcatctttattagatattaccaaattcctctccagagtggttgactcagtgtaactttctttcattagtgtgatactttgccagtctgacgcgaaatgctgtttcatcgtagtgttaaactgcatcgtactgaacttgaacatcttatgtttattttcaccgtgatttccttttttgttaactagctattcacaattttttgcctcatttttttcaatacagttgtttgtatttatttactgacttttaggacttaatgtatcctgaaaattaatacctttttgttatgtattttgttaatatcttg

SEQ ID NO: 36905 - DNA, 347 bp, Homo sapiens
gggatagtttatgagcctctaataatatacggttagactaccattatctctttcgtgaacattgccaaaagtgtttttttggtaagagatatcttagttataataacagtttgtaggatttatggagtgtttactacatgctaggcactgtatatagtaagctccttaatggatccttatattggatctacacagaaatcttatgaggtagttcccattgtattcttattttacgttaaagaaacaggtttggagagatactgtcttttgaagaagcatataagtggagcagtagtggagtctgaattctgatacaggtcctagtaaccactgcctgttccatggaa

SEQ ID NO: 36906 - DNA, 350 bp, Homo sapiens
ataaaacagcagccactagtggagaggggtggtggtgagacaagaaggcacagagctctccggaggaagacaatcagaattggaataaattaggcttctaagacagctgctaagtagagagaagggatttgaatccatctcaattaaaagccatgttattccctttatgtttcactgcactgtccttctcaaattttatagacaagaaatgtatatcccaccagccctaccttagaatagggggaaaaataataaacttggatacaaacaacaagagaccagagacatcaagatagcaatcatggatagatctgacagtaggagtcggcaatctaattatggaaaacttg

SEQ ID NO: 36907 - DNA, 331 bp, Homo sapiens
  misc_feature (1)...(331): n = a,t,c or g
cggaaggggaagtgggaagggacaatgggtacaaaaaatnnnnnnnnnnnnnnnnnnnnnnnnnnnnnnnnnnnnnnnnnnnnnnnnnnnnnnnnnnnnnnnnnnnnnnnnnnnnnnnnnnnnnnnnnnnnnnnnnnnnnnnnnnnnnnnnnnnnnnnnnnnnnnnnnnnnnnnnnnnnnnnnnnnnnnnnnnnnnnnnnnnnnnnnnnnnnnnnnnnnnnnnnnnnnnnnnnnnnnnnnnnnnnnnnnnnnnnnnnnnnnnnnnnnnnnnnnnnnnnnnnnaaaatttaagaagtgtgaggatatgtcaacgnacacttttttttttttt

SEQ ID NO: 36908 - DNA, 349 bp, Homo sapiens
attcttttaatcagctggttggaaataactctggaagccctgggacagttggaagcatgagccctgctgttggaggtaggaaaagtgaaccataagtgaaccttaagagatgattgtgaaccaaaggaatttggttcagagtatgcatttacttcagaccccttaagcatatagtatgccactaaacagctttaatgtgtcaattatataatcttcacaaaagtggaaacataccatattcaatttatgaagaaaccatttaattttgtgaaaacagttttatgtcagcaagaaaataatagaagttgggtttttctgagccacaaatttaatcatacattaccagttt

SEQ ID NO: 36909 - DNA, 481 bp, Homo sapiens
  misc_feature (1)...(481): n = a,t,c or g
nnnnnnnnnnnnnnnnnnnnnnnnnnnnnnnnnnnnnnnnnnnnnnnnnnnnnnnnnnnnnnnnnnnnnnnttatgtgagacactggaaacaagttatattttcctaattccataaatgtctgtcagaagagagacttttctgctgagagttggggcaatgctgtgggtgggcacggtggtgctaggtgtatagataaaatgtccactaatgcaggatagtttatgtgtaatgtggaggggaatataagaggattgctgtttatgtgctatgaaattttatattaaatcaattggtttgagactgtcttataaaccttacttatgtcttatttttttgcaatgcttttgaaagaaggcaatgtacacgcataaaaaccgagggagtaaaaatgaaagatgaattagaatgncacattggacccagggcatccttattcaactcacagtagttgtcagaatggaagngggattaaacaacct

SEQ ID NO: 36910 - DNA, 474 bp, Homo sapiens
  misc_feature (1)...(474): n = a,t,c or g
ccagcatctacgccaccctggccatccactagcccggagggtacgcagactccacactcagtagaaggagactcaggactgctgaaggcacgggagctgcccccagtggacaccaatgaaccccagtcagcctggacccctaacaaagaccatgaggagatgctgggaactttgggactcacttgattctgcagtcgaaataactaatatccctacattttttaattaaagcaacagacttctcaataatcaatgagttaaccgagaaaactaaaatcagaagtaagaatgtgctttaaactgaatcacaatataaatattacacatcacacaatgaaattgaaaaagtacaaaccacaaatgaaaaaaaaaaaaangtcancnnggccgnaatttccaaatttangantngaaaatcntgaaaaccccgaggtcanttaatngggatnggcccctntaattttttatttaaca

SEQ ID NO: 36911 - DNA, 470 bp, Homo sapiens
  misc_feature (1)...(470): n = a,t,c or g
gtttttctgtccctttaaagtctttacatgtaattgtagctgtataatcgttatttttcttttgcatcttaagtcttagaaattaagatattccatcgtgaggatgagagaggtcctcagtgtgtttttggtctggttgtagggaaggactcaagtcctggaatgtcctccactggtctactgagttgcagtcacactgttccaatggattatttgctttcggttgtaaatttaattgtacatatggttgatttattatttttaaaaatacagactaactgatgtaatgtttatgtataagttgcaccaaaaatcaaggacaaaaataagtgtgtttgtttttacaggtgtgaaagtcacagcttgtaaataagtgttgnatgtattaaaccttttccagttctccaaagcgatgtatttttgacacttgaatagagtactctaattactgggcaatgtcttggaatgac

SEQ ID NO: 36912 - DNA, 472 bp, Homo sapiens
  misc_feature (1)...(472): n = a,t,c or g
nnnnnnnnnnnnnnnnnnnnnnnnnnnnnnnnnnnnnnnnnnnnnnnnnnnnnnnnnnnnnnnnnnnnnnnnnnnnnnnnnnnnnnnnnnnnnnnnnnnnnnnnnnnnnnnnnnnnnnnnnnnnnnnnnnnnnnnnnnnnttttgtttttatatgaagttcttctaaaataaagcaagttataaacacaaatacatttaaatttcagtgtttttacaaggccagggaagagacgcggcttcagggaaaaatatggttgaactttgttaatacatacatttttttgccagcaaaattggagatatgcttggtgtgcacatacattaaaagcagtaattgttaacacttttggagtacttcacagagtgcctgccagactgctgacatgcttctcatttggngcctacgcagcttgccagtantaaggggagagggacactctgacctctgtgctatgccacacttcctcccca

SEQ ID NO: 36913 - DNA, 405 bp, Homo sapiens
attcaattggctcttgccttatgtaagtgagtaggagttcaattggctcttgccttacgtaagtgagtaccatagtggaggcagggaaggatgcctcttggacggtgctgggcaccaggtcagatgccagtagcccctctgtggatgccctatgtttgggagcctcctgtagtccctgtacagtgaaaactggccatgaatgatggaggggaagaagggagaagtatggcctgctggagatttgaggaccacaaattctcagatcatagtttagatgggttatgatgttcattcccaagcctctaggcaactgcaaatcctgaagccctcccttgctcctgggtcagggtagatgccccaactcaggatggacccccactcagtaccacttcagctctggcccag

SEQ ID NO: 36914 - DNA, 403 bp, Homo sapiens
atcattttcttatggaaactgagcttgaacattgtcgtgcaccatatccaagttcttaaacatcgcagaagatcactcactgatgaatctgttagtgaaatttaaaacaaggattatagaatagtttgaaaatctcaatttcttgagaatagttttgtatcacaaatattattagccaagttaatcaggtaactctttgttattagaagaatgcttttttcacatcaaatatgtattgctattctttatgttctcatgtatgctgtgaaggactgatagtcccatttaaatagaagagcagagggcaaattgtctctcattgataatatagttcagtgtaccagaggttgaataaaatcctgagatgaggctcactccttgtgtgcagttttatttttaataa

SEQ ID NO: 36915 - DNA, 392 bp, Homo sapiens
cgagcgctcacaccttcccccgttatggtccttgaaaacattgaacctgaaattgtatatgcaggctatgacagctcaaaaccagatacagccgaaaatctgctctccacgctcaaccgcttagcaggcaaacagatgatccaagtcgtgaagtgggcaaaggtacttccaggatttaaaaacttgcctcttgaggaccaaattaccctaatccagtattcttggatgtgtctatcatcatttgccttgagctggagatcgtacaaacatacgaacagccaatttctctattttgcaccagacctagtctttaatgaagagaagatgcatcagtctgccatgtatgaactatgccaggggatgcaccaaatcagccttcagttcgttcgact

SEQ ID NO: 36916 - DNA, 391 bp, Homo sapiens
cactggcacctccttttcttccggctgatgaataattgtccgcaaaccagcctctctggggcactgaggggcgggaaggttagaaggagccagggctagagtcctggaaggtggcagtcaggtcgcagggccacagcagtcactctgcgactctctcttccggtgtttctccagcgccaagcgggagaagacggagcctgggagctgggactggaggagcgggaagcgcagtatcgggaccacggctctgggaccaggaaaaacgcaaactctccaaagtcaatgtctacttcagccagctcaagggcgcgacaacctggcgccgagcatttcaggccgccgcggggaccccccctaagggactcgggaacacctgcctaccctagaagag

SEQ ID NO: 36917 - DNA, 400 bp, Homo sapiens
cccttctgaatgttgtcctgtgtcatctgtcagcttcccaacaatactttgtgtcttttgttctctcttggtctctttctttccaaaggttgtacatagtggtcatttggtggctcttggtctctttctttccaaaggttgtacatagtggtcatttggtggctctaactccttgatgtcttgagtttcatttttcattttctctcctcggtggcatttgctgaataacaacaatttaggaatgctcaatgtgctgttgattctttcaatccacagtattgttcttgtaaaactgtgacattccacagagttactgccacggtcctttgagtgtcaggctctgaatctctcaaaatgtgccgtctttggttcctcatggctgttatctgactttatgatt

SEQ ID NO: 36918 - DNA, 405 bp, Homo sapiens
actagttctagatcgcgagcggcgcaaaatggcggcggcgatgaccttctgccggctgctgaaccggtgtggcgaggcggcgcggagcctgcccctgggcgccaggtgtttcggggtgcgggtctcgccgaccggggagaaggtcacgcacactggccaggtttatgatgataaagactacaggagaattcggtttgtaggtcgtcagaaagaggtgaatgaaaactttgccattgatttgatagcagagcagcccgtgagcgaggtggagactcgggtgatagcgtgcgatggcggcgggggagctcttggccacccaaaagtgtatataaacttggacaaagaaacaaaaaccggcacatgcggttactgtgggctccagttcagacagcaccaccactagag

SEQ ID NO: 36919 - DNA, 404 bp, Homo sapiens
cccttcgagatgtctcctggtgtgctaacgtttgccatcatatggccttttattgcacagtggttggtgtatttatactatcaaagaaggagaagaaaactgaactgaggaaaatggtgttttcctcaagaagactactggaactggatgacctcagaatgaactggattgtggtgttcacaagaaaatcttagtttgtgatgattacattgctttttgttgtccagtagtttagtttgtgtacatatatacacatatatattttgcactacacaaacgataacattttaaggactaatattgctgatacttgaataatcaatctctactaggttataaagtagtatacacagatttaccctgcccttgaacttgaaggacattaaattattaatgatcatttg

SEQ ID NO: 36920 - DNA, 402 bp, Homo sapiens
  misc_feature (1)...(402): n = a,t,c or g
aattggttaccaagtcctgggaattacacaggatctcatctttttccttttcttcatacccactgccatagccttggtncaagtcctcatcatctcttacatggcccatggtagcagtgagctagcaggaccccctgcttctagatgtacctcttttaatccattctccaaacattcaccaagtgatctttttaaaacacgaagcagataaagttacccatacctacctgtttaatacctttcaaaggttaccaatattcttgcaggataaattacaaatccttaacattattccctggctcttgtctacatctctatatttttttattaagttcaggttctttcctcatctgctacctatccatgccagacaactaagactcagactcagtctcactaatt

SEQ ID NO: 36921 - DNA, 387 bp, Homo sapiens
  misc_feature (1)...(387): n = a,t,c or g
gatgtcatcttaagtttaaatcataaaattaccaaaaaataacttatttcctgcttgtattaaatatattgctttgaagtggactgaatttagtannnnnnnnnnnnnnnnnnnnnnnnnnnnnnnnnnnnnnnnnnnnnnnnnnnnnnnnnnnnnnnnnnnnnnnnnnnnnnnnnnnnnnnnnnntattggttgagcatctcaaatctgaactgaaagtccaaattcttcttctttttcttttcttttcttttcttttttttttttggnaancgnannntngntnngnnncccagncngnaggccagggnccnantttgggnnaanngaaccnttnncnnccnnggtnaanncattnntaagncctaanttncccngggggggggg

SEQ ID NO: 36922 - DNA, 398 bp, Homo sapiens
  misc_feature (1)...(398): n = a,t,c or g
catnnnnnnnnnnnnnnnnnnnnnnnnnnnnnnnnnnnnnnnnnnnnnnnnnnnnnnnnnnnnnnnnnnnnnnnnnnnnnnnnnnnnnnntcagttacagtgctttgaataaactttgagtgatgtggtataaaaatgggcatgggttgtcctttggtaaatgagacatgaaagaaagattgctgatgagattctgagaaatgttctttgtcttaaaaggtgaggatggggaggtgtcaaacaagacctaacctctcaacaatcagctggacactgttgtgtaagaatgtgaagcttggcactgctgcagccatcttgttccaggaagggtaaaacctgaggttagaagccaacatcctaatgatggcagagaagacaaagagaaccagagtctaaat

SEQ ID NO: 36923 - DNA, 403 bp, Homo sapiens
  misc_feature (1)...(403): n = a,t,c or g
caccaagaatgaggtggtggggaggctgatcctgggggcacacagtgtcacagccagtggtgctgaacactggagagaggtctgcgagagcccccgcaagcctgtggccaagtggcacagtctgagcgagtactaatcctgttcttctctcctctaatccccgggggccaagctggggagggatgtggaggggaaaaagatgacagagaagtggactccaaacctcattttagttgtagaagaaaatttcttacaaaacaaattccacaaagaacaccctatatgaccacagctgcagatcagttcttagcaatgatgtttttttttctgctttgcaaggcgctagaatcttttattttactttannnnnnnnnnnnnnnnnnnnnnnnnnnnnnnnnnnnnn

SEQ ID NO: 36924 - DNA, 389 bp, Homo sapiens
  misc_feature (1)...(389): n = a,t,c or g
gcatagtgcaacataacattgcaaagccacaaagaaatgtatcagagaactagtatatggacccaacaaagcttcaggaggaccttgttagacccaattaaagccatatggcatctagtgaacacatttttaaaaggctatcctgtagctcagaaattacaaaataccacagaaagaaatgtcaacaactccaattctttactacacattaagctactaaaagtaacaggcctcaagaaaatcgtattattcactgcattttcttcactgtgataaaaaaaaaaaancctcantntncntgggtancaaaaaaaaaantnccntngttngnngnncnnaaannnttttngcngcnnnnaannttccannccttttcnttntntgcaaaa

SEQ ID NO: 36925 - DNA, 388 bp, Homo sapiens
gactgggacctcatctatgtgggccggaagcggatgcaggtggagcaccccgagaaggctgtgcctcgcgtgaggaacctggtggaggccgactattcctactggaccctggcctacgtgatctccctgcaaggcgcccgcaaactgctggctgctgagccgctctccaagatgctgcctgtggacgagttcctgcccgtcatgttcgacaaacacccagtgtccgagtacaaggcccacttctccctccgcaacctgcatgccttctctgtggagccgctgctcatctaccccacacactacacaggagacgatggctatgtgagtgacaccgagacctcagtcgtatggaacaatgagcacgtcaagaccgactgggaccgcgcct

SEQ ID NO: 36926 - DNA, 390 bp, Homo sapiens
cttttaaacaagatgtataatcatataccagctccagagattctgagtctgattcagcagaagcaaatcctagttacctggatttttaaaagctgttaaggtgacaccaatgaacaccacagtttaaggaaacgttactctgcaagttattcaaacaggagttctaccctcttgaattattctgcacctttccatgaattcatgtatagaatgatacaatgacaaacgattttcttttcaaatgcaaagcaacataaaacacacacataaaaagacaaatgatgatgcttctatacctcttcaaagtcatctttggctgaaggaagatcagtggctaaactagaatcccccagatgtttctccatcctctctccaagtaccacagttgtt

SEQ ID NO: 36927 - DNA, 364 bp, Homo sapiens
  misc_feature (1)...(364): n = a,t,c or g
cctacactcaagaaaattctaaatgatgtaataggttgtggacactttcttgtaaaaatgatcgatatttttttcttatagggataaagcttaaaagcatgggatgtatctccattaggaaatatgaagtgagttggtatattacaggtaggttagactgagataattataaaactgggctgattttacatagagaagaacttgattcctaaaggtgttgaaggacaagatggggacagttattgaagtgttcaggtgctgtcctttgtantctgtagcctattaaaataatacacaactgaacacagacccaaggaaaggggttctactcatcgctagaatgnaaactctaagaagataaggg

SEQ ID NO: 36928 - DNA, 363 bp, Homo sapiens
gacacacacacattttctttttctcggccacctgtgaggatgtttgctacgagtggtgactcatgctgtttgtaggaagaatttgtttattggtttgaaggggaataaactagaggaaaaataaatcaaatctaagggacagaacaacattttttattttttgccaggaagaggcaaaatgtgaggagataatgtgaggaatggctttcttcaaaattaacgctgtctgcatacatgatggactttgatctcaacaaagaacgatacagcctctgagcaggaataattttcagatttgtgcaaccctccagactctccctattcaagggaactgtactgcatgccttggatttctcaaagaca

SEQ ID NO: 36929 - DNA, 382 bp, Homo sapiens
  misc_feature (1)...(382): n = a,t,c or g
gtcagaaacgtggagaattgcaaactaaactcaagacagaaggaccttcaataactgatgattctacttcaggagcaagaagctcctccactatccgtatcaaaaccttctctgaggtcctggctgaaaaaaaacatcggcagcaggaagcagagagacaaaaaagcaaaaaggatacaacttgcatcaagctaaagattgatagtgaaattaaaaaaacagtagttttgccacccattgttgccagcagaggacaatcagaggagcctgcaggtaaaacaaagtctatgcaggaggtgcacatcaagacgctggaagaaattaaactggagaangcactganggtgcaatcagaanttttganagcagcaccagctccccg

SEQ ID NO: 36930 - DNA, 377 bp, Homo sapiens
acgggctactttagattaactacatatgactgtacaactaagagggcaaactctttgagatagtcatcttacatgggatgatttgagaaatgttagaaggcacatctacttgtaagaaggcatactttttatatccagcccgccaccaggaaaaatttctacctaactggagcagtgtttctccataggggtgccactaacactgtaggacgtttagtgtccttggtgttttagtcagggttctccagaaaaacagagcctatatacatatacatgtatagagagatacagagagggagagagagggacagaggcactcattattatagggagttggctctttgctggtatgggaggctgcaagtccaaggagctgt

SEQ ID NO: 36931 - DNA, 423 bp, Homo sapiens
cccacgcgtccgcccacgcgtccgctcattatttaggcagatagacagttgcagaactttttactattcgttccacatttattaaatgttttcctattgtcttattttcttttatattataaaataatacatgtctgtgaaagcaatcaagtaacacaaaaatgcatataagtagaaagtgtcactattttcaacatttgctatcagagtgcctactgttgacttcaagtgttctttcagacttaaaaaaataatgcattggtaaacatatgtctgttggtgtatatacttttctttttttcatgggagggaagagagggaggaacggaaggaggaaggaaggctgtttgtgtatatacttattatatatggttgtgtgaattcttacatcccaaaacagaaattctcataaacattcatcta

SEQ ID NO: 36932 - DNA, 416 bp, Homo sapiens
  misc_feature (1)...(416): n = a,t,c or g
aagcgaacaaaactatcagccactgagctccttggtgccagctgtttgtctgctgtgctctcagactgcaccaggcctggaaggttctcaagctccaaaacttttgatgaggaaacaacataagaaatgattagcccatgccctcacatctagtaagagaaagctgggattaaaccaggccctgccccaaagcttattgtgcactttgtaccacatccctccgtccagagctcaagctagtttgacagttcatgggccaccacgtctgtccatgacagctatttctgtatttttctggtgtaagagccttttagtcttagagcaccagtctccctgttcccctaccccgcccactggggaaggggtgatggcagcatcctattgctagctgcatatgcttgctggnccancatgta

SEQ ID NO: 36933 - DNA, 405 bp, Homo sapiens
agccctgatcctttcagccggcctgagcacgggagctctcgttgcgattctactctgtgtcctcatactgcttattttagtcgtgttgtttgctgcattgaagaggcaaagaaaaaaggaacctctgataatttcaaaagacgatgtccgggacaacattgtgacctacaacgatgaaggcggcggggaagaagatacccaagcttttgacattggcacattaaggaatccagaggcaagagaagacagtaaacttagacgggatgtaatgcctgaaactatttttcagataaggaggactgtgcctctgtgggaaaatattgatgtacaagattttatccatcgaagattaaaagaaaacgacgcagacccaagtgcacctccatatgattcgctggcacgtat

SEQ ID NO: 36934 - DNA, 404 bp, Homo sapiens
  misc_feature (1)...(404): n = a,t,c or g
cagaagggagaacaggggactgtggcctgcacctgggaaagaggacgagacacccacttatacactgagtatactctacagctaagtggaccaaaaaatttaacctggcagaagcaatgtaaagacatttattgtgactatttggactttggaatcaacctcacccctgaatcacctgaatccaatttcacagccaaggttactgctgtcaatagtcttggaagctcctcttcacttccatccacattcacattcttggacatagtgaggcctcttcctccgtgggacattanaatcaaatttcaaaaggcttccgtgagcagatgtaccctttattggagagatgagggactggtactgcttaatcgactcanatatcggcccagtaacagcaggctctggaa

SEQ ID NO: 36935 - DNA, 408 bp, Homo sapiens
  misc_feature (1)...(408): n = a,t,c or g
cccggaccccaccttcctccctgatgccgagaggttcctgatctaggccccagacctggccaggccagcctccctgtgcgtgtgcgtctctgccttccgtccgccgcacacccgcctgcctggccgcaggtggttctccctgaagacccccacatgtgccatatccctgtgggcgggtgcctcccacgcccttgccccctcgtnagctcccagccagcaccctactcaccctgtccagccccatggccacccccacccctgcctcgccccctacaggcctctgggcccagctcctggccaggctgctgccaaggtcaagccctcaagggcattaccccgcctcctcttcatcactgttatttttgtctttagctttaaaggaaagagttgttggtgccattgcaggtg

SEQ ID NO: 36936 - DNA, 417 bp, Homo sapiens
aactgtattctatgtaacgaacccttggcaaggtaggttggccaaaagtttgctctttggctgtgtttcgtgtgtaggtatagacatacatgtgacatgagcatggatgtagcacttctcttgctgtattgatatgtctgctttattcttgtgattaggcagtgttttaaaaacgggatttcctgctttctccataggtgatcaggcagacagatttccattgacgggtttctacctattccagaccatgcaggaactatctaattataattgttaacataggtcttttctttttctaacaggaagcatatgtactttgacttatacttgcttgtctccttttctttggaattctaatctcactaaggtcagcttttctgataatttatttaaaaccaacaaaatactatttttaaa

SEQ ID NO: 36937 - DNA, 184 bp, Homo sapiens
cttaaggatttcaattcaaatgtgtcctttattctgattgtgatgggacttttgatttctcctatttgaaatgccatgtgaatgtcttagaaaacccagacatctgaccttatattttacttgataaattgaaaaagccacttgctgataaaattttgttattcacaggtaaaaaaaaaaaaaa

SEQ ID NO: 36938 - DNA, 399 bp, Homo sapiens
  misc_feature (1)...(399): n = a,t,c or g
gttcagtctatttgcgcagccgtggcatttttctacagcaactaccttctccttcactggcaactcctggtcatggtgatatttgggttttttggaacaatttctttcttcactgtggaatgggaagctgccgcctttgtagcccgcggctctgactaccgaagtatctgatctggtgtccgtgaggggacacgtatgacctcagaaacacagctggacacagagcttggtggaagaagtcgcctttgatcttcactatatattgggngatgttcantanggaaaancnngggatnaanactgnaaatcagccngagntgnngnnnnannttanctnnntnggnaannaaaaaanntnnnaatggnatgggnnnanantnnantgatnatnaannggaa

SEQ ID NO: 36939 - DNA, 408 bp, Homo sapiens
agatggcggccttctccgagatgggtgtaatgcctgagattgcacaggctgtggaagagatggattggctcctcccaactgatatccaggctgaatctatcccactgatcttaggaggaggtgatgtacttatggctgcagaaacaggaagtggcaaaactggtgcttttagtattccagttatccagatagtttatgaaactctgaaagaccaacaggaaggcaaaaaaggaaaaacaacaattaaaactggtgcttcagtgctgaacaaatggcagatgaacccatatgacagaggatctgcttttgcaattgggtcagatggtctttgttgtcaaagcagagaagtaaaggaatggcatgggtgtagagctactaaaggattaatgaaagggaaacactactatg

SEQ ID NO: 36940 - DNA, 406 bp, Homo sapiens
  misc_feature (1)...(406): n = a,t,c or g
ctcgaatatgcaagctaccatttttgctattaaatatttggtctaatttaaggacatactgttttagagttgtagtgagtttttacggaaattcttagataaatttatttaatgaccttactaaactgtgttttaattagattgaaaaggcatttgttgattaattgttaggctttactttgggaaaaaaaaaaggaacagccaatgtcaagaatgagctactggtggttgacatttttggaatttgtcttttagtgaaatggtatcattggaaattgaaatggattctgtacttaactaataaagccatttcaaaataaggncattaaggagctaaccagcantacntttcagtcgagggagtgaattaatacagngctaggtttgggaattaaagtactatatc

SEQ ID NO: 36941 - DNA, 401 bp, Homo sapiens
aaggcatcctgactgtgcaaatgtgaagcagtggaagggtggacctgtccagattgaccctctggctttggtacaagccatcgagagataccttgtagttagagggtatggaagagtaagagaagatgatgaagacagcgatgacgatggatcagatgaggaaatagatgagtctctggctgctcagttcctaaattcaggaaatgtaagacacaggctgcagttttatattggagaacatttgctgccgtataacatgactgtgtatcaggcagtacggcagtttagtatacaggctgaagatgaaagagaatccacagatgatgagagcaatcctctaggcagagctggtatttggacaaagactcatacaatatggtataaacctgtgagagaggatg

SEQ ID NO: 36942 - DNA, 395 bp, Homo sapiens
  misc_feature (1)...(395): n = a,t,c or g
gataaatagcatttattgcatacccactatttaccagatactgtgcaaagggctttacatatattactttactaaatcctcaccataaactttaagtcaggtttaannnnnnnnnnnnnnnnnnnnnnnnnnnnnnnnnnnnnnnnnnnnnnnnnnnnnnnnnnnnnnnnnnnnnnatagagccataatctgaacctttgtctaattttgaagcccttgatttttccacttcatgaggctgctctttatatttatttagctgagtgaccaccatcttggattttactaatattcttacaagggggctttgatgccacttcttctgacttttaagaaaaggaaattcttgcattatttttgcatgtactccaggggaccctcaatctcatcatcat

SEQ ID NO: 36943 - DNA, 393 bp, Homo sapiens
gcatgtggtcaataagtattttccaaaatcaatattgttatcccaaaaaaactaagtctattatgctgatcaccatggtctattaaatatcacctagattctctgttaacaaagaaaagctgacccacaatgaacatacaggaaataatttaaatttaacacttgaaggcacaccagctacagtcctgtaggaaaggagagctaaggacattgttagaaggaatgacactacatgggggaatattggagtggttaagcatggattgtagagtcatcatctatattagaatcccggctctaacatcaccaattgtatgataaaggccaagacacttaacctttctgtgcttatgatcctcatttgcaaagtagggtggataataatggaatcta

SEQ ID NO: 36944 - DNA, 450 bp, Homo sapiens
  misc_feature (1)...(450): n = a,t,c or g
ccctttggatttgancgcccttcccgggtcncccacgcgtccgcttgaagtcatttatgttgccaggggtaagagcttggttgaagggctaaaagactagaaactactgaagatgcccttcttactgtcagtaaagctgctggagacaaaagaagttgttctcgctgctagagtggtaatttgagaatcatcagtattcctatgtgacaatccaaaattactggttttcatttgacttgtaaatgacacccatcatccatctgcccacaaacctggccaaatgtgatacaacctgaaaacctgatggactaaaggagtactatttaacaattgattgcctttgcactttattcaggttgtttcttaaattttggtagacagatccatttgtatatgtgtgtgttatatctagtttatggctatagagaaggtttaaaatactacagtgcc

SEQ ID NO: 36945 - DNA, 403 bp, Homo sapiens
  misc_feature (1)...(403): n = a,t,c or g
cggacgcgtggggttttactgagctacatgagctaagctctaagaatttttttggtagtctcctagagaagcacaaagatacaaaccagcacaaggttgtcttctggagatggacgtggaataaaggaggggaagcagatcagttttttccaatctccagcctctccaagaagctaagagtttccaagatgttcccaacatatttgtattttttacttttacatatactatcataactaaactccatttacagtggtgttaaagatttcttaagttatttcattttctatccctcatgtggtttcctgtcttaactctgccactgcaggatttataaatactcctcctccaaaactgncatgttactttaaaacaggatggcctttcttaaaaaaaaaaaaaa

SEQ ID NO: 36946 - DNA, 439 bp, Homo sapiens
  misc_feature (1)...(439): n = a,t,c or g
cacagaccatacatagcacaatttgaggtcaagagnnnnnnnnnnnnnnnnnnnnnnnnnnnnnnnnnnnntcttttgtaatagtgtaatacagtaagtccatagccacctcttgttgccactgcagggagctcaagtgttataggtatccacttaaaatgccatgtgacactcatctctgcatgagcagttcctcgctccagtaaattgcaaatcaaagtaaaagcgatccctctctgtctcatgtattttttgtgtttaataccataccacannnnnnnnnnnnnnnnnnnnnnnnnnnnnnnnnnnnnnnnnnnnnnnnnnnnnnnnnnnnnnnnnnnnnnnnnnnnnnnnnnnnnnnnnnnnnnnnnnnnnnnnnnnnnnnnnnnnnnnnnnnnnnnnnnnnnnnnnnnnnnnnnnntctgattcagacaccact

SEQ ID NO: 36947 - DNA, 440 bp, Homo sapiens
caaacctccacttccatcctttattacatagcgtataagcaatgggaaatctttaaagggtacttaaaccccagaacattttgtaaccagggctcctgagctgcttgcttgagcccgctccaattctgtagagggtattttcaccttaataaatctatgtttctgttgccttttgtgtcaataaatctatgcttttgttgcttgttcatgcatgctgttcaaatccttgttcaatacatcaagagcctagatgactcacgatcagaaccctttatctagtaacactttacaaacatatatgctcattttaatttttaaaataactttttgaataaaataatgtatgtttataaagtgcatagtaaactgtaaactagtatgtaataaatgagttattgttgcatccttatctttttctaatcaaagtagataatatctat

SEQ ID NO: 36948 - DNA, 482 bp, Homo sapiens
  misc_feature (1)...(482): n = a,t,c or g
gctcntaanacctttcggaattcccgggtcgaccncgcgtccggcggcccctcagacccctgcctggcctcacccagctttctgggaaagaaaatgctgcacaagctctgagccctcctggggctgcgaagttcctctgatgggaggtgtggggtggccatcccatccctgtgtaagacctggggaaaccactcttcaaggttcaggaggagggagggcggcccccgacccttaaccagagcgaggttgttgctttgtgtccacagggaccaggagcgaaccatgatgccaggtccctaatcatggactccccaagagctggcacccaccagggccccctcgatgcagagacagaggtcggtgctgaccgctgcacgtcgactgctaccaggagcaggtgcgtgggcctgggcctcttcccctgctgggggtcggtgcttctgctgctccgagactggggaccacaatgggaccaacatgag

SEQ ID NO: 36949 - DNA, 405 bp, Homo sapiens
  misc_feature (1)...(405): n = a,t,c or g
agagctttgcttataaactgggaaggctttcaggctacctttttctgggtctcccactttctgttccttcctccactgcgcttactcctctgaccctccttctattttccctaccctgcaacttctatcctttcttccgcaccgtcccgccagtgcagatcacgaactcattaacaactcattctgatcctcagcccctccagtcgttatttctgtttgtttaagctgagccacggataccgccacgggtttccctcggcgttagtccctacccgcgcggggccgctgtccaggttctgtctggtgcccctactggagtcccgggaatgaccgctctccctttgcgcagccctaccttaaggaaagttggacttganaaagatctaagcagctggtcttttctcc

SEQ ID NO: 36950 - DNA, 406 bp, Homo sapiens
cggacgcgtgggcaatttgccagcttcagtcaacttacttggctccacttagatcacaatcaaatttcaacagtaaaagaagatgcttttcaaggactatataaacttaaggaattaatcttaagttccaacaaaatattttacttgccaaacacaacttttacccaactgattaacctgcaaaatttggacctgtcttttaatcagctgtcatctctgcacccagagctcttctatggccttcggaagctgcagaccttgcatttacgttccaactccctgcggactatcccagtacgcctgttctgggactgtcgtagtctggagtttctggatttgagcacaaatcgtttgcgaagtttggctcgcaatggatttgcaggattaattaaactgagagagcttc

SEQ ID NO: 36951 - DNA, 406 bp, Homo sapiens
cgaggctgccctgaggcctatgggacactttacagtgctaggcaaagcgtttcgagaggaggataatgccaccgcggccctggtcgagctcgaccgggaagtcaactatgctttggtccccagggaaatccccggcactgggggcccgtggaacgtggtctttgtgccccgttgctcaggcgaggagtttctcggtctcggtcgcgtgttccacttcccggagcaagaggggcagatggtggagagcgtggccggcgccctgggtgtggggctgcgcagggtgtgctggctgcgatccatcggtcaggcggtccagccctgggtggaggccgtgaggtgccagagcctgggcgtgttttccgggagggaccagccagccccaggggaggagtcctttgaggtctgc

SEQ ID NO: 36952 - DNA, 414 bp, Homo sapiens
atgctcttaagagctagtagctcccagttagagtcaaaccagtcattgttatattatagattgaatccagcctctttctcccaaactgtggtcatcactgcatgaatccacactaaggtgtgtgaatgggaacctgcagattatctcctcctactgaaaatgctgcccaggggaatcttggaagctatggacagcatccaggcagagctggtcccactgttatctccagaagcaaatgcccaagctgtgctcagaactggaagcaatggatgacttgtatcaggtgcttgtttgagaggatatattgacattattgccatagtaagcttaaaaaaatgtgcccactcattcattctttgtccatggaccactaatcatgcattgtcatttccaaagataaggggaaacatatca

SEQ ID NO: 36953 - DNA, 462 bp, Homo sapiens
  misc_feature (1)...(462): n = a,t,c or g
ttttnaggncctttncgagctgacccggaattcccgggtcgaccccgcggccgcctcatcatccactatgacagtgagcccaacctcctggttcgggcctgcaaccagctgggccagttcctgcgggaccgggagaccaacctgcgctacctggccctggagagcatgtgcacgctggccagctccgagttctcccatgaagccgtcaagacgcacattgacaccgtcatcaatgccctcaagacggagcgggacgtcagcgtgcggcagcgggcggctgacctcctctacgccatgtgtgaccggagcaatgccaagcagatcgtgtcggagatgctgcggtacctggagacggcagactacgccatccgcgaggagatcgtcctgaaggtggccatcctggccgagaagtacgccgtggactacagctggtacgtggacaccatcctcaacctnatccgg

SEQ ID NO: 36954 - DNA, 414 bp, Homo sapiens
taaagtatcatgatctagatagaagcctgtatttggaatacaggtttgttttgctttctatgttgagaagcattgaaaatgctaatataaaggtgtttagacatttttacgaataagtcagtagtgttttttagtatcagtagtgatatttgtttgtaaattatttacatattgggaaaggtcaataatgaagaaatgaaagaatggaaggaaaggtgtggataggctcattggtatttgaatattctgtctgtcaagtaactagagtattaggctaattgtctacagacctaatttaatcctggctgtcctactgatgatatttggtaaattgtttaacttctgagcctacgtttctccatatataaagtggaaatagtattactatgcctactatatgagaatggttatgaa

SEQ ID NO: 36955 - DNA, 322 bp, Homo sapiens
tgctgaaatcagtgctctttcacttcttcagagaagcagggatggtacctacccggcaggtaggttagatgtgggtggtgcatgttaatttcccttagaagttccaagccctgtttcctgcgtaaaggtggtatgtccagttcagagatgtgtataatgagcatggcttgttaagatcaggaggcccacttggatttatagtatagcccttcctccactcccaccagacttgctcatttttcgagtttttaactagactacactctattgagtttaattttgtcctctaggatttatttctgttgtccaaaaaaaaaaaaaa

SEQ ID NO: 36956 - DNA, 402 bp, Homo sapiens
agcggcgtgggggacaggtccccaacgggcttccgcgggctcccccggccccggtgatccctcagctgaccgtgacagccgaggagcccgacgtgcccccgaccagccctgggccgccggagcgggagagggactgcctcccggcagcgggctcttcgcacctgcagcagccgcgccgcctttccacctcgtcggtctcctccactggctcctcgtcgctgctcgaggactcggaggacgacctgctgagcgacagtgagagccggagccgcggcaacgtgcagctggaagcgggcgaggacgtgggtcagaaaaaccactggcagaagatccggaccatggtcaatctgccggtcataagccctttcaagaagcgctacgcctgggtgcagctggcagggc

SEQ ID NO: 36957 - DNA, 437 bp, Homo sapiens
cccacgcgtccgcgcttctccttttggctgctgacggagccacgggaagatgccgagctcctgccacgccaccgggccggggcacgttccgggagggcgccggggcacgcgtgtgtctgagctgcctttctcctcccgttgctagggaaatggtccaggagtgctgggtgtgagcctcccttctcctcaagccggagactgcggttgtcattgatcaattgaagaagcaaggacccgaaatcacagacattagcaatgatgtgtgaagtgatgcccacgattaatgaggacaccccaatgagccaaagggggtcccaaagcagtggctcggactcagactcccattttgagcagctgatggtgaatatgctagatgaaagggatcgtcttctagacacccttcgggagacccaggaaagcctctacttgcccagcag

SEQ ID NO: 36958 - DNA, 342 bp, Homo sapiens
gcggcattgatctaacctttttcccccccatttcagttgcagtttttgtagaatggctttttctttttcctcttaagagttctattcttcaggtagataatttttcaaatgtgaattatcttttgtgtctatattgatagctcttaaaggagtgaaaatctaaaatagtaaatttcaatgttaagtgtctgctttatgggcatatataaaagtagacacatttcatttgttaatttagttgtgtgtgtgtgttaaaaggagctaatgcttattctgttaatgtaaacttttgaagatcttaagtgtattgctctttcatcttaaacactttcgaggatttgc

SEQ ID NO: 36959 - DNA, 344 bp, Homo sapiens
cttcacttctgtccccgtttccgcacacgcaccaatccccactggcgatcccttccccttcggcatcacccccaccttcatgcgccccagctccccactcacatccgccccctattgggctggctctagcttgcaagagcagaaggtggcccagggcccagccttccaggatgtcccctggaccccctctctgggaaaggcggcagagctactggccactgacaagacctttgggccctcgtgctagacaggccttcgaatccacctgctccagcccagagagcaggcccaggccgtgcctcccacaccgcagccgacctcagagcaccctgcctcaactcccc

SEQ ID NO: 36960 - DNA, 360 bp, Homo sapiens
cccacgcgtccggatcgagctggcaagggccagaagccccgtggaaaggagcagctggccaagcggaagaccttctcgctggtcaaggagaagaaggcggctcggaccctgagtgccatcctcctggccttcatcctcacctggacaccgtacaacatcatggtgctggtgtccaccttctgcaaggactgtgttcccgagaccctgtgggagctgggctactggctgtgctacgtcaacagcaccatcaaccccatgtgctacgcactctgcaacaaagccttccgggacacctttcgcctgctgctgctttgccgctgggacaagagacgctggcgcaagatccccaagcgccctggg

SEQ ID NO: 36961 - DNA, 344 bp, Homo sapiens
  misc_feature (1)...(344): n = a,t,c or g
caggacctctgcttttgcacaccttttccccaggagcagaagagagtggtgcctgccctctgccccatcattgcacctgcaggcttaggtcctcacttctgtctcctgtcttcagagcaaaagacttgagccatccaaagaaacactaagctctctgggcctgggttccagggaaggctaaccatggcctggactgactgcagccccctataaacatggggtccctgctgcaaaggacagtgggcaggaggccccaggctgagagccagatgcctccccaagactgtcattgcccctccgatgctgaggccacccactgacccaactgatcctgctncagcagc

SEQ ID NO: 36962 - DNA, 348 bp, Homo sapiens
ccaaaccaaaggataaaataaactgctgtggctttgaatgtagagttgagtagatgctcttgaatgattgtttccacctcattcttcaatgatagttaatgagggcacagaccactaataagcagtggaagcagcttctaggctaagcttaaattgggccttcaaatctaatcaaaattagtcactgctgagaagaaaccaaatgtggtgtgtccattcggatgtggagtttggagaggccctccttgttttccaggctgtgagccatgggaagcgtgtcaaccatgtcaaaccaaaggatcaagaaattgaagattccgttcacttgccttggagtttgagtctcca

SEQ ID NO: 36963 - DNA, 398 bp, Homo sapiens
  misc_feature (1)...(398): n = a,t,c or g
ttgaagccnttgacgctcgnnncggntcgaccccgcgccggctganagtaactcaaatatganatgcacctgcaggattattgaggatggagatggtgctggtgcaggtactacagttaataatttagaagaaactcccgttattgaaaatcgtagttcacaacaacctgtaagtgaagtttctaccatcccatgtcctagaattgatactcagcagctggaccggcaaattaaagcaattatgaaagaagtcattccttttttgaaggagcacatggatgaaggatgctcctcgcagcttctaacttcagtaaggcgcatgggtttgacccttacccagcaaaatgatganagcanagagtttgnaaaggttctttcataaacaactgggagtatat

SEQ ID NO: 36964 - DNA, 390 bp, Homo sapiens
  misc_feature (1)...(390): n = a,t,c or g
atccttttctctgcttttgtcctaaagtcttgcactacagtggagtttcctatttggcccaggaccagtttatgggtaaggtaactaaccgacccagtttgcctgggattcttccattttagcactgaaagttctgtgttccaggaaacctctcagttccaggcaaaccaggacgattggttcctttccttacaggtcaggagtgactgaaagccgctgcacctcagtgagtgaatgatccagcctgcaaggcccagcatcagctctgtccatccagagatggtgtggcacccggggcatggggttagcattggacaaaagaggaccgtanagaaggaaggagggaaaatgagggaactaaaatctagagatagatgagggggggtggcc

SEQ ID NO: 36965 - DNA, 386 bp, Homo sapiens
cccagttctagaggccagaattctgaaatcaaggcgtcagcagggccaaggtccctctgaagtcaggggaggatccgtccctgccccttccagcttctgggagcagcagctgttccttgacgtttcttggcttgtggctgcgtcactctggtctgtctctgtggtcacaaggcctcttcctctgtgtgtctctcctcttctgtctcttataaggacacttgtcataggatttaggacacacctggagaatccggggtgatctcatctcaagaccttttgcttaattatacctgctaagacctttattccaataaggccccactctgaagttgtgagtagatgtatcatttgggaacccactagaaatgctttggctccttaaagct

SEQ ID NO: 36966 - DNA, 383 bp, Homo sapiens
ggtctcctgttacaggggggcacgcaagggtaacactgttggtctctgtctcccgtgccgcccctaggggaggtggactgtagagagattggagactgtgccccagcacccggagccccgtccacagacctgtgcctcccggccctggattacctcaggcgctgctctcaggtaggggaatggtccagctgggctcccggcctggaaacctgcctcggaacatgctgccaaaacatgcgtggggggtcttttgctgaagcccgagagagacactttgccgtctgaggagattggggcgcagatgtggagtatacatttttgccctcctttttccatgaaggaaagaaaataatgaaaacatactagaacccacaatttggatg

SEQ ID NO: 36967 - DNA, 374 bp, Homo sapiens
  misc_feature (1)...(374): n = a,t,c or g
gttctgactccagctcctgtccttggggtccactgagatccctgtagccttgtaataagcccacattatcatatttcccctgccggctccaccctagagcatttccaacaatttccagtgcttttccccttctcataccactgggcctttgcacgtgctcgtgcctccccaacttgccctgccttctccttcacccagacaactcctactaaatctctcagactcctcagctgtgtcccttcctaggggaggactctcttccctccagtgagcccggtggtcctccctgggatcccctgctccttgncttccctgcgtccttactgccatccttgtctctactcagaaggaggcagaggctgncctgnccccaa

SEQ ID NO: 36968 - DNA, 377 bp, Homo sapiens
cccatttctaaactacctgatggcttcacacagctcctaaacctgacccagctctacctgaatgacgcctttcttgaatttcttccagccaattttggaagacttgtcaaattgcggatcttggagttaagagaaaatcacttgaaaactctaccaaacatctgaagatccagagtgtgccccttgcccaatcgcctgagactatacagtgacacctacaacagaggatgtggagggagcagcttttcgggcaccagaaatggcagcatcaggagcatcagcacgaatagactttgtagaggtagttctcccaaactatattatgaaaccaaacatttttggtgcgctacctgctgatgggggctgccttcttactg

SEQ ID NO: 36969 - DNA, 346 bp, Homo sapiens
agacaagagtggagcctacctcttcctgcccgatggcgaggccaagccctacgtccccaaggagccccccgtgctgcgtgtcactgaaggccctttcttctcagaggtggttgcgtactatgagcacattcaccaggcggtccggctttacaatctgccaggggtggaggggctgtctctggacatatcatccctggtggacatccgggactactgtcaacaaggagctggccctgcacatccatacagacatcgacagccagggtatcttcttcacagacctcaatggctttcaggtgcagccccgacggtatctgaagaagctccccctccaggccaacttcta

SEQ ID NO: 36970 - DNA, 350 bp, Homo sapiens
  misc_feature (1)...(350): n = a,t,c or g
agaacacttatcaatagctaaaactttctttttcatgacattaaaaaagtttattgtttgccttctctcacaggttgaagacaaactagtctgtgcattccatgttaataaaaaagaaaacataacttaatatcccttcatataataatgtaattaattacatactctttaaatgagcgttatgtgtgttctaagaagctaaataaatacttgcatcaatatttcttcatatatatatatccagtaagagtcttcccatccttatcttatctaatagagttcacacttttgccctcaaatccttttaaaggttgaggatcaaaatgttngggaataaatgagtaagggcc

SEQ ID NO: 36971 - DNA, 399 bp, Homo sapiens
gatgcacattcaccagggttatttctggaaggtgaaggggtcaggtgtagaagaggtggcaagaatgacaagtctgtggaaaactgttggccttgagaccacagtgaactggtggaaggggacttgctaagtgtggccacaaggtggcagtcacctcctgaaaccccgtgtgaaacgtcagcggggttgagaaaggccacgtctccaagtttccaggagagccaaaccaggactcaggaaaaccggccagctgatttgtatgggagattgatttgtaaaagaacaacaacaacatatggcagcaaggaaatgcaaagcaaacatctacaaatatttgaatccacctgtccctcacctaccaacttcccctctaccactcataaagtggtaggactccta

SEQ ID NO: 36972 - DNA, 382 bp, Homo sapiens
ggcagagtgctttggaagggtagaggaggagataaaactatatagggacagtaagacaaataggtaccaaatactgaaagagtactatataccaaaatcccattctaagctctttacagtcataattttatttaaattttacacaaactttatgagttaaattttattatttatatcactgacaggtgataaaatgagattttaagaggtgaaatatatttccaggtcacacagcactaaattgtctaagactgaattagcctctaggacctctttacagacatcacgccattaccactctaatcttttgttttatttctgtcttacattatatattatatgtattaaagaaaataaagcccatttagcaacatatgttgaa

SEQ ID NO: 36973 - DNA, 383 bp, Homo sapiens
  misc_feature (1)...(383): n = a,t,c or g
gaactacagcgagtagctttagccctttgcttgggcaaacctgctgatgtctatttaattgataaaccatctgcatatttggattctgagcaaagactgatggcagctcgagttgtcaaacgacagcctttgttgtggaacatgacttcatcatggccacctatctagcggatcgcgtcatcgcttttgatggtgttccatctaagaacacagttgcaaacagccctcaaacccttttggctggcatgaataaatttttgtctcagcttgaaattacattcagaagagatccaancaactataggccactgaataancanacttaattcaattaaggatgtngaacnnaagaagagtggaaactactttttcttggatgatta

SEQ ID NO: 36974 - DNA, 420 bp, Homo sapiens
  misc_feature (1)...(420): n = a,t,c or g
aggcagctaaagctgactgctggttgcgcaaaatccccctggctcttctggctaaagtcctaccactccctgtacctggcagcagcctgtcttctgggcctcacctacacacgtctgggtaggagccagtcatctccatccatccacagccatgaatttcctccggcgacgtctctctgacagcagcttcatggccaacctgcctaatggctatatgacggacctgcaacgcccagatagctccaccagctcacctgcttcccccgccatggagaggaggcacccccagcccctggctgctccttctcctctccaggatccagcctttttagctccctctccagtgccatgaagcaggcccctcaggccacctcaggactgatggaacctncaggnccctncacgcccattgntcaaaga

SEQ ID NO: 36975 - DNA, 422 bp, Homo sapiens
  misc_feature (1)...(422): n = a,t,c or g
ccccaccaaacaccccatactaaggagccatgagccacctggacattcaccttttctttgaccatctggagtctggggcaacttaaggaggcaccacacagtggtgcaggcacatttccaagcgtaggtgtccctggcttttgtggccaaagctagtgttatggtcaacaacaggccagggtctgtggggcactgaccttgaaagtggcaaaatggaggtttcacaggctgtgcgggagcaggacggcttgcttcatctaacaatctcagtttcctttaaaaaaagaaagaaaggaaaagatttcataagcaggtgtcagtggacagtttaagtacttaaccatttctctttcttcttatggatgtgaactgtgctgtggataaatcatttgnatttcttgaatggtctctatgactaacag

SEQ ID NO: 36976 - DNA, 283 bp, Homo sapiens
  misc_feature (1)...(283): n = a,t,c or g
atgggatctatttaaactacatcaaccagaatgttaatctagttttaggctttaaaatcatgcccagcgtaccatgctggcaatcaagttgcaggatattttgctgttgtttttcaaatgcatatagactttatttgatacagatatattaaaaacacagatatattaaaaactcttatcccaaactacttttcttttcttttcctttttttttttttttttggngggnntntggnttncnnccnngnncnncnnaannaannnngnnnaaaaaaaaaaaaaa

SEQ ID NO: 36977 - DNA, 414 bp, Homo sapiens
aaacattttccttctgatatattatacttgtaatgggcgacatggcaaacaactcagttgcttacagtggtgtgaaaaactctttgaaggaagctaatcatgatggagactttggaattacgctcgcagagctgcgggctctcatggagctcaggtccacagatgcattacgaaaaatacaggaaagctatggagatgtctatggaatttgcaccaaattgaaaacatctcccaatgaaggtttaagtggaaaccctgcagatttagaaagaagagaagcagtgtttggaaagaattttatacctcctaaaaagccaaaaacctttcttcaattagtatgggaagcttttttgaatcgctttttgatcacataatctgccattttaagagtaagatttgctttatggaaatcaa

SEQ ID NO: 36978 - DNA, 377 bp, Homo sapiens
  misc_feature (1)...(377): n = a,t,c or g
gtgccccaattctgcaacatctctgtcccaggacaataggaaaaaagaacaggatggtggtgacccaaatgaagagactccaatgtaaacaaattaactaaggaaatatttcaatctctttgtgttcagaactcgttaaagcaaagcgctaagtaaaaatattaactgacgaagaagcaactaagttaataataatgactctaaagaaacagaagattacaaaagcaattttcatttacctttccagtatgaaaagctatcttaaaatatagaaaactaatctaaactgtagctgtattagcagcanaacnaacgacatccaattgtcatgctgcatgcaaaactacacagaattcatgttttgcagagttttgcct

SEQ ID NO: 36979 - DNA, 372 bp, Homo sapiens
cggacgcgtgggagcaaattgacttctaatatggcacaattcattcattcacatacttccagagtgttgctgccatgctccagaattacacttgttttccaaaaagcaaaatatcccaatgtttctatgtgacaaatgacatagataatttacaaaatattaaatacaatgaatgattgttttaacattaaatttttatagagaaatataaggatcccatttttcatacaaaattatagtatatttactaaatttatgtttgtctaaaaatatatattactcatttgtagaaaacctgtgagaaaatttgttacagtatgcatggcagtataaattgaaaagattttaatcacatgtgtaatcaaccttaaa

SEQ ID NO: 36980 - DNA, 397 bp, Homo sapiens
  misc_feature (1)...(397): n = a,t,c or g
cacttattttcaacacgagcagtaattaaaaataagtacctcacacaataacaatgtagtctgaaagactatcctccaatgaacgtaaatgtcatagaatcatagttgacttacatttattccttacacagtttcagattttttccatctcactgataattagtttggtatcaacaggaaaatgtgtaggactaggagcaaaaaaggagattcacagttattatcctcagatatgtttccgaaagtctctgtgttcagggtccaaaccacaaagtagagatggcaatgacttccctgcccnnnnnnnnnnnnnnnnnnnnnnnnnnnnnnnncatctgtaaaatgctttgccaactgcaaagtattcaattgcataaaagcttgcagacgcttatct

SEQ ID NO: 36981 - DNA, 402 bp, Homo sapiens
  misc_feature (1)...(402): n = a,t,c or g
cccacgcgtccggcagaagatggtcaaggagcactacaaaacctttgagaagggccacatccgggacatcacagacagcctgattgagcactgtcaggagaagcagctggatgagaacgccaatgtccagctgtcagatgagaagatcattaacatcgtcttggacctctttggagctgggtttgacacagtcacaactgctatctcctggagcctcatgtatttggtgatgaaccccagggtacagagaaagatccaagaggagctagacacagtgattggcaggtcacggcggccccggctctctgacagatcccatctgccctatatggaggccttcatcctggagaccttncgacactcttccttcgtccccttcaccatcccccacaggaagctatg

SEQ ID NO: 36982 - DNA, 402 bp, Homo sapiens
  misc_feature (1)...(402): n = a,t,c or g
agtgattcatgttacaatattaataagccttgaaaacnnnnnnnnnnnnnnnnnnnnnnnnnnnnnnnnnnnnnnnnnnnnnnnnnnnnnnnnnnnnnnnnnnnnnnnnnnnnnnnnnnnnnnnnnnnnnnnnnnnnnnnnnnnnnnnnnnnaattgggaatggggagaatgtgaagtgacnnnnnnnnnnnnnnnnnnnnnnnnnnnnnnnnnnnnnnnnnnnnnnnnnggaagtagtggtgatagttgcacaactgtgaatatacaaaaatccattgtattatacacttttcaaatgggtgaattttatgataagtgagttatatctcaatttaaaaaaggaaaaatagtttttcagttgactaagttgtgttatctagaaatagcctcaaattataagt

SEQ ID NO: 36983 - DNA, 396 bp, Homo sapiens
cggacgcgtgggaaaatcctgaggctttagccaaatgggcggaaggccggacaggctttccatggattgatgccatcatgacacagcttcgtcaggagggttggattcatcatctagccaggcatgcagttgcttgcttcctgacacgaggggacctgtggattagttgggaagaaggaatgaaggtatttgaagaattattgcttgatgcagattggagcataaatgctggaagttggatgtggctgtcttgtagttccttttttcaacagttttttcactgctattgccctgttggttttggtaggagaacagatcccaatggagactatatcaggcgttatttgcctgtcctaagaggcttcctgcaaaatatatctatgatccctggaatgc

SEQ ID NO: 36984 - DNA, 395 bp, Homo sapiens
  misc_feature (1)...(395): n = a,t,c or g
gtcggacattcgggaaggtgcgccgctaggggtccacctgccttttgtgggctactcctactcctgcatggccctcagggacagtgaggtcccaggccccacacccatggaactggaggccgagcagctgcttgagccacacgtgcaagcgcccagcctggagccctcggtgtccccacaggatgaaacagctgaagtggcagttccagcggctgtccctgcggcagaggctgaggccgaggtgacgctgcgggagctccaggaagccctggaggaggaggtgctcacccggcagagcctgagccgggagatggaggccatccgcacggacaaccagaacttngccagncaactacgcgaggcanaggctcggaaccgggacctagaggcacacg

SEQ ID NO: 36985 - DNA, 387 bp, Homo sapiens
cccacgcgtccgcggacgcgtgggggcgcggccggacgggagttccccggagaaggatcctgcagcccgagtcccgtcctcaggcttccccaatccaggggactcggcgccgggacgctgctatggacgacattttcactcagtgccgggagggcaacgcagtcgccgttcgcctgtggctggacaacacggagaacgacctcaaccagggggacgatcatggcttctcccccttgcactgggcctgccgagagggccgctctgctgtggttgagatgttgatcatgcggggggcacggatcaatgtaatgaaccgtggggatgacacccccctgcatctggcagccagtcatggacaccgtgatattgtacagaagctattgcagt

SEQ ID NO: 36986 - DNA, 387 bp, Homo sapiens
cccgcgccgagctgctagtcggacccacagacggtcggactgacagacgtgcagacggacagaagagcagacaggaggcgggggcgcgttcactcccggcggccagccggccagagaaggcggcggtggcaccttctgagcgcgtccggagcagagaccagcagcagcaggggcagcggggacacaagccgcgaccgagccgccgccgcagccctggctgccacagctgtgtgggatcccagccgacactgcagaaagctccttttactagcagttaaataaatcgaccaaaaacaaaacaaacaaacaaacccaacaacaacaacaacaacaaaagccaagccaaaagccaaaacaaacaaatccagccaaatcaatcattgagaa

SEQ ID NO: 36987 - DNA, 394 bp, Homo sapiens
  misc_feature (1)...(394): n = a,t,c or g
cggacgcgtgggccacctgtaggcatgagcaatgaactgggaataaatggtattatgatggaataggaaatgtaactttccaatgtgtgcctagcagagcctgagcaagcttcactcgagctctatgccctgctgcccagctgctgcgaccctagtccagtaaccctaagaaaggtccaggtgagtgttcattagggaagcactcccttctcaactggggagtcaggtgagagcctaccaggtccacaaggtcctgtgggagacagactggatccatccagcaaatgtagagcttcagagagagcagcagcttgtttactgtgtgcctagtgccagtgtcacttctcaagcaaaagaagcatttgcaaaatgcctgtcctggcctanattgagc

SEQ ID NO: 36988 - DNA, 346 bp, Homo sapiens
  misc_feature (1)...(346): n = a,t,c or g
gaannnnnnnnnnnnnnnnnnnnnnnnnnnnnnnnnnnnnnnnnnnnnnnnnnnnnnnnnnnnnnnnnnnnnnnnnnnnnnnnnnnnnnnnnnnnnnnnnnnnnnnnnnnnnnnnnnnnnnnnnnnnnnnnnnnnnnnnnnnnnnnnnnnnnnnnnnnnnnnnnnnnnnnnnnnnnnnnnnnnnnnnnnnnnnnnnattatggtgtaaaaataaaaaaaaaatttattcacataagtttcaagactgctctgtccctcacatgtacacatacatgcctgagacagataatgtggttcagtatttatctttacagttttacagcaaatataatgcagggtggatggg

SEQ ID NO: 36989 - DNA, 55 bp, Homo sapiens
caacaacttgattttctcccacagttactttatcaagtttgtttttttttttttt

SEQ ID NO: 36990 - DNA, 354 bp, Homo sapiens
  misc_feature (1)...(354): n = a,t,c or g
caatgtaaaaactgcttatagaaagtatctctatggttttgaggagtactgccgttcggcaaatattcagttcagaactgttcatcaccatgaaccaaaagtaaaagaggaaaaaaaagacttagaagaatcaatggaagaggctctcaaattagatcaagaaatgcctttaacagaagtgaagagtgaacctgaggaaaatatcgattcaaacagtgaaagtgaaagagaagagatagaattaaaatctccgaggggacgaaggagaattgctcgagatgtaaattctattaaaaaggaaattgaagaagagaaancagaagacaaattaaaagataatgatacagaaaataa

SEQ ID NO: 36991 - DNA, 352 bp, Homo sapiens
ggtttcaatccctgtaaaataacatcttaattttaactaaaacattacaattatcacagaaactaccgattattttattgccctgaagaaatacaaattacaaaggtacttacaagggattcatgttaaacaacatgttgaaatatggttatgtttgcagcatttaaaagttgtccattaagaatattcaattaaaataatccacttgtttgaagctgtacttaaggacatcatttacattaagcttagatgtacatcgtttaaaaagaaaacatgtatagaatatttgtgcatactctatagtaggcaagggcccattagagtataagatccaagagaaaagaggactccc

SEQ ID NO: 36992 - DNA, 415 bp, Homo sapiens
  misc_feature (1)...(415): n = a,t,c or g
atcagattcgaaattctgtgccatggcgtatatgttcaaattcaaaccatttttaaaatgtgaagatggacttcatgcaagttggcagtggttctggtactaaaaattgtggttgttttttctgtttacgtaacctgcttagtattgacactctctaccaagagggtcttcctaagaagagtgctgtcattatttcctcttatcaacaacttgtgacatgagattttttaagggctttatgtgaactatgatattgtaatttttctaagcatattcaaaagggtgacaaaattacgtttatgtactaaatctaatcaggaaagtaaggcaggaaaagttgatggtattcattaggttttaactgaatggagcagttccttatataataacnattgnatagtagggataaaacact

SEQ ID NO: 36993 - DNA, 412 bp, Homo sapiens
gtcaccatgtgtctatctgaaggttgcactggccagcatgggcctgtcccaagcgagaggggagacacagtggactgaaaggactggttgaaagtggccaatctctgtcagcttaatttggcagagaaaatttgtaacaactctgagcacatgctgggtgaagtcacagctcaaggaaagataaagctgggcggaaggaggtgtgcgtggcttctggggtgggacccagaggggaggctctgggacaggggctggggttcagtgccagggccctgaggaagaaatggggactgatctcaaaattccagaattccctgtacatctgttcacgtgcttgtgtccaggtgtgacttgtaaactgtctagtgtttgcattaaataaaatggcacccgagcagaaaaaaaaaaaaaa

SEQ ID NO: 36994 - DNA, 421 bp, Homo sapiens
  misc_feature (1)...(421): n = a,t,c or g
aactaagaacaaagtgagactgggaagctagtgttggggaaacatttctgggataaactgtggagtgagtaaggacaatggaaggcaaggcaaaaacccacagacttgtttacccatagaggccccactcacctccatgctgacagaattccagaaaaattccttccctatctcccaaacacctgaaattctgaaatattgccctactatttagcactttaagcttcagtgaggtgctgtaatggagagatagcttcatagtttagcctatagccaactttgcctcaagacctccagataagatgaagtggcttttacctcatgtgagtctcaaacgctggagagagagtccacaaccacccctgccctttctcccatattacgctcattagaaagnctactcatggctgggtgccgtgct

SEQ ID NO: 36995 - DNA, 409 bp, Homo sapiens
gaaacactccacaaagaaatacacaacctcaaacagcaactggagcttctagaggaaataaaaaggaattggaattgaaatatcagaattctgaagagaaagccagaaatttaaagcactctgttgatgaactccagaaacgagtgaaccagtctgagaattcagtacctccaccacctcctcctccaccaccacttccccctccacctcccaatcctatccgatccctcatgtccatgatccggaaacgatcccaccccagtggcagtggtgctaagaaagaaaaggcaactcaaccagaaacaactgaagaagtcacagatctaaagaggcaagcagttgaagagatgatggatagaattaaaaagggagttcatcttagacccgttaatcagacagccagaccgaa

SEQ ID NO: 36996 - DNA, 397 bp, Homo sapiens
cccacgcgtccgatgccgccgacgcggtgctgctgccgccgcttcgggtttggcccctcagaacccctccttttctgagcgcttccctcttaggcctcagggcagtttgatctgtggggagaaagagcagccatcgctgagcctgccttttaaaatatatgtgtatttccttagccccactctaagaaatctatgttcctgagtttgccccctgccctcccactccttccccttctcccctctaaaccttctcccatctctttcaaaatcttttcccagaaaggcaggcttcaaccagccactccagctttgtgtcttctctcaattacatagcaatttctccttcccaccatcatggggaagctggctctgcttttgccctttgtcatcaccaaca

SEQ ID NO: 36997 - DNA, 386 bp, Homo sapiens
  misc_feature (1)...(386): n = a,t,c or g
cccagataaaggttaaacacatgttgaaagaaccttggcttaaaggggagacagattattagactgtcctgccatttatatttcctgaataggacctgcctcttcaggggccagaggtaatgaagggtgctcttttctctggctatttgtacctcctctgagatcattgtgttattaaactttactatgcatcttatttagaaattgcttaatcgctnnnnnnnnnnnnnnnnnnnnnnnnnnnnnnnnnnnnnnnnnnnnnnnnnnnnnnnnnnnnnnnnnnnnnnnnnnnnnnnnnnnnnnnnnnnnnnnnnnnnnnnnnnnnnnnnnnnnnnnnnnnnnnnnnnnnnnnnnnncgtggtggtgancacctgtggncccggctg

SEQ ID NO: 36998 - DNA, 224 bp, Homo sapiens
cttctgttctgttggaatgcactaccttgctcccaggacagttaactcccaaatctaaccattccttcaacttagcaaaaaaatttccttcctgaagcctttcttatcccacttcttcctatccacctatctccagaattgatttcatcctcctctttatctctaactttttgctgggatctctgttgtagtactttatcacatgttgtctttttttttttttt

SEQ ID NO: 36999 - DNA, 409 bp, Homo sapiens
  misc_feature (1)...(409): n = a,t,c or g
atcaggattcaaaatatatgtgttgctttaaatatgtctgtttgaaaaaatgcatatggattctccaaaatttgggtttctaagcaagaagatatgccatataatcgaaaccaatttatattggctttatcttagtgaaatgtagataatcacaatctcttatttcatagtaacatgaggtttttgtgatgctgtctgtaaagtgttggtgtctttagataaaggggtcgctctttaagaaaatattactactgttcatgattttattagcaaggtgttgatttaaattaaaactgtagcaaaaatgctatggctctgattttaaactgctgtaagttctagacagcanaggaaagctnaaaatanatgctgcatttaaaaataaatgttgctttaccaaagaggtggg

SEQ ID NO: 37000 - DNA, 408 bp, Homo sapiens
ccacgcacgcgtcccggctcacgcgtccgcccgcccgcccgccctcgcttgtgccgcccctaccagagacccccaggagcaggatgtccttccagggcaagaaaagcatcccccggatcacgagtgaccgccttctgatcagaggtgggaggatcgtgaatgacgaccagtccttttacgctgatgtgcacgtggaagatggcttgataaaacaaatcggagaaaacctcatcgtccctgggggcatcaagaccattgacgcccacggcctgatggtccttcctggtggcgttgacgtccacacaaggctgcagatgcctgtcctgggcatgacaccggctgacgacttctgtcagggcaccaaggcagcgctagcaggaggaaccaccatgatcttggaccacgtct

SEQ ID NO: 37001 - DNA, 418 bp, Homo sapiens
  misc_feature (1)...(418): n = a,t,c or g
tggaaactaaggatcaacagaaaagagtatcacaaatacggtaatactagcatatggtaatattatttctgtatttgagtgtaaaacgtggctgtgagcttcctggaggccaaggcaaaaatagagacaagagcaacgtgcataatatcattagcagacagaaagatcatgtgactttttaatttttttcccggaaactgaatctaaaaagaatcgctctatataatgactcatatatatggttttaagtgaaaaaatgatgaacactgtcctccatgagagttttggcncaaattgaaggaggtaagaactgatattgaagcacaactcantggagttaatcctgtcaggctaggtcacacaagaaaacttctgacagaatcctagaatccggcnnatgcaggcatggantgagaga

SEQ ID NO: 37002 - DNA, 418 bp, Homo sapiens
  misc_feature (1)...(418): n = a,t,c or g
tggaaacttaggcagagggatttcattatgcataaacatcatgtgtttcttttttcctgtacaatttgagggcagaggtgttggcagtaaatcaaatatgtcatactggatgtaagttaaaatatagccatgtatccttagaaaatatttgcatatgtagaaagactggaaccttaagtagcagccatgatgaacacagtggaagaattaataggttgctgttaacagtagtaacactgaaatgaatcacagtggatttatgtaatacatgtgctattgaaggcaacagtgattacacttgaacattgataacatatagctaaggtgtcttangctggntcttggtacttanaataactaantctgggtgatttatanataanctattatgtcttatagagggctaagtccaaggttg

SEQ ID NO: 37003 - DNA, 400 bp, Homo sapiens
caaacgcatctcccgccgcggggcgggatctaggggcccaggccccggggtccagaggcgggtaactttgctaatctcccccagcggcggggaacgtcgcgcaaccgctgagccctgtccgccgagactaaacaagcagaggaacaggctgtaaacacacatcctgacacgcagggatgttgctcttggagaatgtgaagacagtttgcttcttgacaagcgagcgaacgggcgcccagatttttgcagcctttccgagtctcccccgagggagaggcggcagagaaaacgccggatttgggagccaccagggaaggatccgcgcaggggagccgccctccttggccccagacccgcctgcctggggccccctttgctcactgtcaatgtatggtctgaa

SEQ ID NO: 37004 - DNA, 401 bp, Homo sapiens
ccagaatatgcctctactgtgagaagggcagtacagtctggtcatgtcaacctcaaggacagactgacaattgagttacatcctgatgggcgtcatggaatcgtcagagtggaccgtgttccattggcctcaaaattagtagacctgccctgtgttatggaaagcttgaaaaccattgataaaaaaactttttacaagacagctgatatctgtcagatgcttgtatccacagttgatggtgatctctatcctcctgtggaggagccagttgctagcactgatcctaaagcaagcaagaaaaaggataaggacaaagagaaaaagtttatctggaaccacggaattactctgcctctaaagaatgtcaggaagagaaggttccggaagacagcaaagaagat

SEQ ID NO: 37005 - DNA, 401 bp, Homo sapiens
accacccctcaacccctgttttcccctgccttccttgcagaggccatggaggacgaggagagacagaagaagctggaggccggcaaagccaagcttgcccagtttcgacaaagaaaagctcagtcggatgggcagagtccttccaagaagcagaaaaaaaagagaaaaacgtcaagcagtaaacatgatgtgtcagcacaccatgatttgaatattgatcaatcacagtgtaatgaaatgtacataaatagttctcagagagtagaatcaactgtgattcctgaatctacaataatgagaactctacatagtggagaaataaccagtcatgagcagggcttctctgtggaactggaaagtgaaatttcaaccacagcagatgactgcagttcagaggaaga

SEQ ID NO: 37006 - DNA, 387 bp, Homo sapiens
ccgtctccgcctcgccgcagtcggggcagccgctcgcccctcttttccatgtatccgtccaggatcccatgacagattctgttgtcacgtctccttacagagtttgagcggtgctgaactgtcagcaccatctgtccggtcccagcatgccttctgagaccccccaggcagaagtggggcccacaggctgcccccaccgctcagggccacactcggcgaaggggagcctggagaaggggtccccagaggataaggaagccaaggagcccctgtggatccggcccgatgctccgagcaggtgcacctggcagctgggccggcctgcctccgagtccccacatcaccacactgcccggcaaaatctccaaaaatcttgcagatattctg

SEQ ID NO: 37007 - DNA, 403 bp, Homo sapiens
cccacgcgtccgcttccagttcaacatttaccttggaagaggggaccatctacttgaccgctgagcccaacactctggaagtgcaggatgacaatgcttctgtgcttgacgtctatttataagtgaaaatggtgatcacctaagcacatggatgagacgtgagcacagttatggcagagaagtttctccgcaccagaattatccacagcaacttggctgagccccactacacacagagaaatcatcaacctgacttaagagttttcaagatgtcaacttcaggctgatcagcagatgggatgtgaaaaatactaccctattctatcatttgctgttgcttgctgaactgtgaagaactgcatgaactatatttaagctgctttctgtaccattgccaatcacc

SEQ ID NO: 37008 - DNA, 383 bp, Homo sapiens
  misc_feature (1)...(383): n = a,t,c or g
ccagtagtagcattgagaagataccttgtccccatttttattacttctgatattttattgctggcagccagatgtgctaaaactcctgacgacagcatctattcattgcatgtttttaataggcttagagaaaatatgagtaagagtacatgaaagcagctcagcttcacacttcagctgggaatgcccaaaaagcttactgctgtttaaaattcttgttccagccaggagaaagccgaaggttgnaactngaatctttnncaanngattnaaagaatnatggnntggnccantnacnatnnaccnttggtcatttaagcncangtttttacngagctcaggagaantatggaacttgatnggcgggtttttattngatgggc

SEQ ID NO: 37009 - DNA, 393 bp, Homo sapiens
ctctggaatcgttgcaggcaaagccctctccaaccgcaatctcagtcagattgtgtcttaccaaacaagggtgcctcctctaacaccttgcccggcaccttgcttctgcaaaacacacccttcagatttgggactaagtgtgaactgccaagagaaaaatatacagtctatgtctgaactgataccgaaacctttaaatgcgaagaagctgcacgtcaatggcaatagcatcaaggatgtggacgtatcagacttcactgactttgaaggactggatttgcttcatttaggcagcaatcaaattacagtgattaagggagacgtatttcacaatctcactaatttacgcaggctatatctcaatggcaatcaaattgagagactctatcctga

SEQ ID NO: 37010 - DNA, 230 bp, Homo sapiens
taggagcccgccccaccctcccaggggctccatcctcagccctctgcccactgggcccagggaccacagtggctggaccaacccaggaccagggcgcctgggcctctcccctttcccagcggctggggaggggagatgggggcttcccctcaccacacctgtggctgttcccacatccccttgaatatcccaggaaaaataaaacggcagaactgcaaaaaaaaaaaaaa

SEQ ID NO: 37011 - DNA, 404 bp, Homo sapiens
gagagaggtcctgctgtctccggggctctccctctgccattggaccaaactgaatgaaatttacaaagccagcagccaatagatctccggagtcggccccatcactacagaaaccacatccacagctacaacctcatgcaaagagctgctaatcccaatgcaaaccagctgtaacggagagatcccgggtactcgggagatagagcaggtgggcatggcaaacggtgccaccgcaccagacgcgtacagcaaaccttcttcctctttgcttttttaggactctctagataccctccacaccaaacatgctgcagtatatgcaaacatctttaactgtttaaggtcacgatctccagcagtctctatgtctgcgttattgtaattcatttgggaagcaatgatat

SEQ ID NO: 37012 - DNA, 406 bp, Homo sapiens
gagggacataaagaccaatgtacctggtgtgcagtaagtaaggggttgcggcaggacctgagggcatagaggagctggtaccatattgtaggactctgtaaaccaatgtaaggagtttggattttttccaagtacaatgggaagtcattggagggttttaagtgaggggacatcataattttatctgtatttcataaagctcatgctgatggctgaatgaagaactgactgtggaatggaaaccaggagtctggtcagaatgattacagtacaggtgtgaggtgatggcagttttacattagggtcatggtagtagccgtgtatagaatcgatatgtattctagaagtagagttaacaatattttctaatgggctaactgggagggggtagcaacaaaaagaggat

SEQ ID NO: 37013 - DNA, 388 bp, Homo sapiens
gctggttaaagatatatctttctgaagaccacttgtatttaaacagactaaatgaaaagagaatcaacaattttataatatattaaatagaaaggaatctaaatgctattaaatattctaaaaggatgttaggaaccctgtacatttcttggtcagctgctgtggtaatacactgccatcaagcagagtgggtgcacttggatttccagacatacgttcctcaaaccttgtgcacaaagggtgatttgagtattgaccctttggaggtcaggattttcaaatgcagttttatctttttagctactttttgatgaaaaatataaagattgtttaaaaataacttaaccttcagttttatactgtgttggcacagatatttttttctcat

SEQ ID NO: 37014 - DNA, 401 bp, Homo sapiens
gtggatcaagtttaagtcagtcagttaaggggaggagaaggagaggttataccttcagggggctaccagacagtgttctcaacttggttaaggaggaagaaaacccagtcaatgaaattcaatgaaattcttggaaacttccattaagtgtgtagattgagcaggtagtaattgcatgcagtttgtacattagtgcattaaaagatgaattattgagtgcttaaagattatttttgacttaaaatagtatactttgaacaaatactctaattatgaaaaggaagaacaattccttgtatgcctgtttcccctgcccccagccacctttttgggaggagaccattatggcggggcccctcacagcattctaccaaccatagcacccaccccgagcagcgctg

SEQ ID NO: 37015 - DNA, 397 bp, Homo sapiens
  misc_feature (1)...(397): n = a,t,c or g
tgcttttttaggtagactatgtatccctgacaaccatccaggtcagcttgatgattaacacattggttttaatagctacatagtattctataagtatgatttattcaagtgtgtgtgtgtgtgtgtgtnnnnnnnnnnnnnnnnnnnnnnnnnnnnnnnnnnnnnnnnnnnnnnnnnnngangatantcaggggttctgtccactacaacattttgtcacacgctacagagctgacatgaanncncttgnacacatatttttatgattttactttttatgatccccaaangngngctcgcnaggtcaaacaatanatgngttgctnttaananatatcannagatnatttactactacccaanttanactgtaatttnttcttgaaccgtnnaatcc

SEQ ID NO: 37016 - DNA, 395 bp, Homo sapiens
  misc_feature (1)...(395): n = a,t,c or g
cctttttgtgcccgcgcagagccggctggccggagcaggccctgaggcagagtgccaggtatgtgggaactgctctggggtctggggtctgtgggactctgcccagcacccagcctcacccacccagtgcccatgctctgctctgagccatgttgcgtcccccaactctgctctgagctgtagagccttggcactttgagggttaacaacagagctgtcccctcctcacctggcactggcaggaggccaagccatagtgggtggtgccaggggagcccctgtcccaggcagtgttgcttagccatgtcccttgggggtggggggggggtcactgcctggngctgtccctgagcaagggcaggacagggacagctgtgacaggaagtactcatggg

SEQ ID NO: 37017 - DNA, 146 bp, Homo sapiens
gtgagaaaaatttaaaacacgagaatacataggcacacattctattcatcgtgggaaccatggtgtcaatacatatcatgtagcttctgaaaaactccactgtacacttatagaatgaagaaggcaaaaaactttttttttttttt

SEQ ID NO: 37018 - DNA, 400 bp, Homo sapiens
cttcagatgacggtgccagtctccttttcctggattttggaggtgctgaaggcgagatccagctggacctgcactcgtgtcccaaaaccatagtcttcatcatccactccttcctgtcggccaaagtcacccgcctcgggctgttggcctagaagtcgccggatgcactagccctgaagaggggtgtccatgacatggcctgagctgggcctccaccgactgcctgctcacccctgggctgagggaagggagaggagaggaacaagggcctccgaaaccccaaccctgagggagactggattggtcttggggcccaggacccagacgcaggacagagtggactctgcctgtgatggggtggccttcctgctgccccctccaccagtgccttttgcagaga

SEQ ID NO: 37019 - DNA, 408 bp, Homo sapiens
  misc_feature (1)...(408): n = a,t,c or g
ggcatatataagtaaacttaatctagtgtaggagattatgaaagcccttctggagcaagtaatatttaaattggtatctgtagaaaagagagatcatcaaacagaggaaatattaataccttgtgcaaagcgcctgagataggaaagaacatggcaccttgaaaaccctagaaatgaatgactggagcacaggggaagggagggtgtgggagataatgctggagaagtggatcatccagattatgcatgtttatggcctttttgaccatattaaagaattctatgttgtttttttttttaaataatggaaagccagttttttttttaaaanactttatgcanggtaagtntggataangtnttaaaanagttgccagcaaacttttcctctttagggccaaattgtaa

SEQ ID NO: 37020 - DNA, 408 bp, Homo sapiens
cttattctaaatcaagatctggttcaacacgttcacgctcttattctcgatcattcagccgctcacattctcgttcctattcacggtcacctccataccccagaagaggcagaggcaagagccgcaattaccgttcacggtctagatctcatggatatcatcgatctaggtcaaggtcacccccttacagacgctatcattcacgatcaagatctcctcaagcgtttaggggacagtctcctaataaacgtaatgtacctcaaggggaaacagaacgtgaatattttaatagatacagagaagttccaccaccatatgacatgaaagcatattatgggagaagtgttgactttagagacccatttgaaaaagaacgctaccgagaatgggagagaaaatatagagagg

SEQ ID NO: 37021 - DNA, 395 bp, Homo sapiens
gacagttctataatttttttaaggtaaggttatttttaaattgcatttttgttctaacgttttgcaatttatattctttttaaaatatttcccataattcatcatgctagcttctgtgttcttggaatagtttttgaaaaatgcagagattcgaacatgagtccttaatatactaaacagtgaaagaatgatgatatctcatttctaaagtaagcatggttcacaccactttggcaatacactgcagtactttttaaaaaatattctctagtgataaaagtaaagacagggtactggccaagatcctaattctgacttctgactgtgtgatcttcgatgaaatttatatttccctttatcattactattctacttgttaagtaaggctaagttaa

SEQ ID NO: 37022 - DNA, 391 bp, Homo sapiens
gcacccaccaagctgtgggaaggagatgaggctgtttgctcttccttggccagcatccagccccgtcccccaactgttgtggccaaaattctgaccacccacgacacagggcctgctgtgtgcacccccactggcccagggcgggccttgccggcggcaggcgaggagtccagcccctcctggtgtcggtcaggtgaactcacaaacaggaaggcacgttgcacagcacgaaccttcagatctgccaggcggtgcctgcgatccggctgctggcagcacagctttgcagagaagctgctgggaagggtcccgtgttcagcccagcagtcagggtgctcagtggcccctatgctgtgaggcaccttaaacaaacagcagagggagacccgca

SEQ ID NO: 37023 - DNA, 388 bp, Homo sapiens
taacatcatagcagaagtagccaaaaatgagtttatgcgaattccatgtgtggatgctggattgatttcaccactggtgcagctgctaaatagcaaagaccaggaagtgctgcttcaaacgggcagggctctaggaaacatatgttacgatagccattcgcttcaagctcagcttatcaatatgggtgttattcctaccttagtgaaattactgggcatccactgccaaaatgcagctcttacagaaatgtgtcttgttgcatttggtaatttagcagaacttgagtcaagtaaagaacagtttgccagtacaaacattgctgaagagctagtaaaactcttcaagaaacaaatagaacatgataagagaaatgatttttgaagttct

SEQ ID NO: 37024 - DNA, 386 bp, Homo sapiens
ccgagctaagaggcaaacttgtagcacgtggagaattctgggacatagttgcaataaccagcggcttgatgaaaaacaggaacttgcttacaaccaacagctgtcagaaaagctgaaaagaaaggagttaccccttggagttcaatatcacgtttttgtggatcctgctggagccaaaattggaaatggaggatcaacactttgtgcccttcaatgtttggaaaagctatatggagataaatggaattcttttaccatcttattaattcactctgatgaatggaagaaaaaagtcagtgaatcatatgttatcacaatagaaagattagaagatgacctgcagatcaaggaaaaagaactgacagaactaaggaatatatttggct

SEQ ID NO: 37025 - DNA, 373 bp, Homo sapiens
cttcaatttctttcaggacacttgggttgaattcagtaagtttcctctgaagcaccctgaagggtgccatccttacagagctaagtggagacgtttccagatcagcccaagtttactatagagactggcccaggcactgaatgtctaggacatgctgtggatgaagataaagatggtggaataggttttatcacatctcttatttctcttttccccttactctctaccatttcctttatgtggggaaacattttaaggtaataaataggttacttaccatcatatgttcatatagatgaaactaatttttggcttaagtcagaacaactggccaaaattgaagtcatatttgaggggggaaatggcatacgca

SEQ ID NO: 37026 - DNA, 375 bp, Homo sapiens
aaagtaaactactgttagagggatgtgagaattagtttgaccttaattccagatgtgcatgcctcaaaagtaaactactgttaggaacagcagtgttctcacagtgtggggcagccgtccttctaatgaagacaatgatattgacactgtccctctttggcagttgcattagtaactttgaaaggtatatgactgagcgtagcatacaggttaacctgcagaaacagtacttaggtaattgtagggcgaggattataaatgaaatttgcaaaatcacttagcagcaactgaagacaattatcaaccacgtggagaaaatcaaaccgagcagggctgtgtgaaacatggttgtaatatgcgactgcgaacactgaa

SEQ ID NO: 37027 - DNA, 379 bp, Homo sapiens
ataatttttactactgaccttatggaacaacacacatctcaagtagcggttagtccaactgtgttcacaggaacaccagttcagagcaatgttctcatggtctattaagtttaggaaaaacaatacattatacagtttactgtaatacacattagcatatcacagagcattatcaagtcaggaaacccacttaattgtgattcaccagcaggttcccatacatttggccaccgcacactttttcatagaacatgtaaagaaagtttggaaaaggttggttatcaacattttaaggaacattttccctaggtattccatcagaaaggcatagacatttttaatagtagctctaatattttttccttttatacaggaaaaa

SEQ ID NO: 37028 - DNA, 397 bp, Homo sapiens
gaagaactgacatttagatatctcaattcaacaattactcagtacctcccaagagccaaaggtggttatatgaatgattataatagctatgacttaaagctaatggtgactgctgtggcaactgtgatagtcattcattcagcaaacaatggctgactgtctagaatacgcaagccctgggatgggtgctgggcaaacagaacaccacacatgaccctgcagcaaaccgtctagtatggaagagaaacagtaggcaaataaatgcagaaattgtgctaagttctatgaagaacaataatctctctaagaaatgacagttgagctgagacctacagcatgaggagccactcaagcaaagagtgggggagatggtgttacagaaagggggaacagtctg

SEQ ID NO: 37029 - DNA, 382 bp, Homo sapiens
taaatttgaatttccccattgttctctagagataggtcaaaaaaacaactgtttcttttcttattccactattaataaattgaaagcttgctgtacaaaggcaacagcaacttaaaaaagaaaatctggacaatagatgtggactccaaggggccactgccatcccttcctgtgtgctctttttgacaagtaaatcactccagttagctgatgtcctgaaatgacatttgtacctgaggcaattcttattagagcttactcaggacttttcaaacatcaggacacacatagcaatttggatgttgtaaaactacgtgttacatttggagaggtcttgttgagaaggcaaaattttctaaatattttgatatcaatttgggta

SEQ ID NO: 37030 - DNA, 375 bp, Homo sapiens
gtcagttcagtacttagtcccctattgaataaggacacaattgatttcttaaattatactgtcaatggtgatgaacggcagctgtggatgtcattgggaggaacttggatgaaagccagagcagagtggccaaaagaacagtttattccaccatatgttccacgattccgcaatggctgggagcccccaatgctgaactttatgggagccacaatggaacaagatctttatcaactggcagaatctgtggcaaatgtagcagaacatcagcgcaaacaggaaataaaaagattatccacagagcattccagtgtatcagagtatcatccagccgatggctatgcgttcagtagcaacatttacacaagaggatcc

SEQ ID NO: 37031 - DNA, 371 bp, Homo sapiens
  misc_feature (1)...(371): n = a,t,c or g
attttggtattataaaattatacttcttagattttgctaactaataactcaggggggtcaccccccggagagnntagntagcggaatgtacctggggnngcgggaagagctngnnttctcannnggcaagggatnggntntncgctgggncnagcnttgcactcgcctnngaggnacgtggcggngtactancancccttanggnancaggncnttggtgagaggnagaanagccggaggaatnntgaancatggngggatggctnctggaaaagaactgatgangtgcagngnctctccagacgatggtngaanccacaggacnacnttangattggcccagnngctagtttagannnaggtgngnggcc

SEQ ID NO: 37032 - DNA, 372 bp, Homo sapiens
  misc_feature (1)...(372): n = a,t,c or g
ggtttcttctacctctgttatctaagcagagggaagtaaacctctcaccgccccccacccctcactgcccccgattacactagaattgctttcgccaaattgtagttgaagctaaggaaggggaatctggcccctgctgggagagggaactggaatgccacacaaggcaaggcctgcttccttccttcccctctgctgctgctgcctcggaacgctgcagcccaggcttcctcccacagtggcccttggaagcaggccgcagagtagacagctgctccttttggaagagtcagtcccctgtgttttctgaactgnttttcctagcatgtatgtgggtagagctttcatgcatctctagtaataataagctga

SEQ ID NO: 37033 - DNA, 377 bp, Homo sapiens
gacggatctgtttggccgaggcatttcttaccgcagatactatattgaatacgctgcagaacatttctgaaggattggtcgtgtaccccaaagtaattgaacggcgcattcggcaagagctgcctttcatggccacagagaacatcatcatggccatggtcaaagctggaggtagccgccaggattgccatgagaaaatcagagtgctttctcagcaggcagcttctgtggttaagcaggaagggggtgacaatgacctcatagagcgtatccaggttgatgcctacttcagtcccattcactcccagttggatcatttactggatccttcttctttcactggtcgtgcctcccagcaggtgcagagattcttagaa

SEQ ID NO: 37034 - DNA, 372 bp, Homo sapiens
  misc_feature (1)...(372): n = a,t,c or g
nnnnnnnnnnnnnnnnnnnnnnnnnnnnnnnnnnnnnnnnnnnnnnnnnnnnnnnnnnnnnnnnnnnnnnnnnnnnnnnnnnnnnnnnnnnnnnnnnnnnnnnnnnnnnnnnnnnnnnnnnnnnnnnnnnnnnnnnnnnnnnnnnnnnnnnnnnnnnnnnnnnnnnnnnnnnnnnnnnntccctgcttaccaatgatgcttgacttttctatgcttgtgtgtgctggagtagggggaagggtatggtgaagagaggttctcccctcctcagagcatatggttcattttgcccactcttgagcctggattgtaggctcttgctatccgaggagaaactagacggggaatgccctggaagaatgatctggaaca

SEQ ID NO: 37035 - DNA, 369 bp, Homo sapiens
  misc_feature (1)...(369): n = a,t,c or g
gcatgggctaatgcagaatgtactgcatttatgcaattagcaaataactgctagttttcattttatctattatattagcaacaaaaatggcatttaactgggtaaagctcctacctaaatatttgagtattgtgacatctctacttgcaaggtttgagtgaaagattagtcacagattagtgaaaaaaatgtatctttttgttaaaactggcttatttgaatggattgttgcttttcactagcttgtatggtatgtcagctaacatttgtttttttttttcttttataatanccaaacttctntatctcagctgcaatagngttccatcttaccncanagggtttnataattaangctgttgactttat

SEQ ID NO: 37036 - DNA, 278 bp, Homo sapiens
ggcccaagctctacttgtgtacagtgtatattgtataatagacaattgtgtctactacatgtttaaaaacacattgcttgttatttttgaggcttttaaattaaacaaaaatccaactttatttttagttgtaactgcttgaggtatgttttatgaattaagtgacagatttgttatcctttattaacgtactttgttggtcagcactgggctgacaaaaattttttcttgctaataaatttagttgcctgaggcaaaatcttcaaaaaaaaaaaaaa

SEQ ID NO: 37037 - DNA, 393 bp, Homo sapiens
  misc_feature (1)...(393): n = a,t,c or g
tgtgtttttctcgattatctaaaaaccatagtacttaaattgaacagttgcaaagatgtcttaattgtgtaaagaattggngtagtcatgactttagctgatactcttatgtacgagatctgtctctgctgtttaacttcattggattaatcagctggtttcaactctactgcgaaacaaaaatagctccttaaaagtactgttctccttcagtggcatgtagttatctaatcaagacacctcattcaaacaaaacctgccttaggaaaatttaatatattttaaattattttaaaagaaatacaacatcttattctttagctttcttaatcggtgctttatggaggccagtgtaacgttacatgactcgttgagaaagttgaggaatttcct

SEQ ID NO: 37038 - DNA, 326 bp, Homo sapiens
gttttgtacacagagaccaagaggcctcagtttagcaccttagtacctccgctgcttcacttgctttagccaaagccataaaaaacctgcaacgtagagaaaataatgcagataccctgactagccagccctctactcctccaaccttttccaagatatgcaatggcctttgtgcctgcccaaaggcttcgccccctccagtgcatgaggaaccctctttcctccgctcagagatgctgcttcatttacccaggaggtcatattctttatatatattttttgttgcaaagtgtctctctagagaaactctgcaaaaaaaaaaaaaa

SEQ ID NO: 37039 - DNA, 382 bp, Homo sapiens
ccaaaggaccgcttggtagccactggaaccctttccagaactgctgtttggttcttctccatcctcaattttgccactttcatgtgaatgttagtcaattcggtgggcaatttttggacatgaaccagaaagctgaaagctgaggctgacacggactgtaggtgctttttgttcaggtggattcgaaggagttagagatgtgatttcccattgctgttagttttagaactatacccgtgaagcatgacttattgtaagatgttggctgaaagcatgaacttgcagaactccctcggagacgcaggttgcagtggacattgggattgttgcttgaaaaattaaaatttgaatattttctctctcatttgcatcatacagctct

SEQ ID NO: 37040 - DNA, 404 bp, Homo sapiens
gattattccccctttcaatgtgatttttagcctgtaatctctaaattatgtggcacttaagatatagtttctcagatgttgttgaggttaagtaaattttaaacaataatcttttattgagaaaaggggaagtaggatttagtctactgcgtatttccctgctctctacagataccttatcgctcccgtgaagtgctggcttcatgcattcctatcacaaggcaatcactcagggtaaacgatgatgctgcatgtcttttgtgccacctctacatttctctaaaccatattaaaattgaaaccaaaagcacagataaaagcaatgaaaatatgaattcacttttccatgtgctggtctcacctagtgcttctacttaaatttttaatttatgggaaatatactt

SEQ ID NO: 37041 - DNA, 391 bp, Homo sapiens
gtgttttcatctgtaaaagggactaaaaacatttatgttgcctcctttgtcaagctgctttcagtactgaatgagaatgcccaaaggcactgagagatggaagatatttctggcacctggttctcttaagctgtaactagattcaccattgattgcctggaatcataaggcatgagcagttagttatgtgaatcatatgtaatgttgacaaagacaggaatctccctctgctaaggcagtgggagcccatctgtgatcagcattcctatagccctggagactgaggtggggtgctgggcagcgagggcaggcagtgtgtgcgctttcataatagagcaacaaatgcttcctcaaaccaagtaccaagagaaaacagcctgcacctggacct

SEQ ID NO: 37042 - DNA, 402 bp, Homo sapiens
  misc_feature (1)...(402): n = a,t,c or g
ggcataacctacatccttctctgatttcttcagcagggtcaaaagacagttactagcaatggggaatgcttgtcactgtggagaaagagttttgtatatgtctgataccgttgttataacaaaacaaatttttttactatagttttttgttttctacctgcacacccaccagaagagcacaaagcaaggccattgcaacaggcatttaaaaattattatcaaacatgcacatgcttgnnnnnnnnnnnnnnnnnnnnnnnnnnnnnnngggcatttgtaaaggtgtccctggaatgtaagatttataatgtttaaggcaaggtgaaggcattgccaagtgtgtgtcgctcataggactagtgtatattcactgaaagttaacctgatgatttgttattgttt

SEQ ID NO: 37043 - DNA, 249 bp, Homo sapiens
gtcagtagtaggctccaaggattgacaaatatatttatgatctattcagctgcttttactgtgtggattatgccaacagcttgaatggattctaacagactcttttgtttttaaaagtctgccttgtttatggtggaaaattactgaaactattttactgtgaaacagtgtgaactattataatgcaaatactttttaacttagaggcaatggaaaaataaaagttgactgtactaaaaaaaaaaaaaa

SEQ ID NO: 37044 - DNA, 409 bp, Homo sapiens
gagatggttaatggctataaaaatatagatggaatgaataagatctggtatttcatagcacaatagtcaacaataatttattgtacatttaaaaataactaagagtataattggaatgtttgtaatgcaaaaaaatgacaaatgcttcaggtgatgcatatcccattttcctgatgagattattgtacatcgtaagctagtatcaaaatatctcatgtactccataaacacactatgaatgcataaaaaattcaaactaaaaaaataaatgaattttaaaactcccaacagagaaaagccctggaccagatagcctcactgttaaattctaccacacatttaaagaagaataaacaccaaatccttctcaagctcttccaaaaaatagaaggaaactgcccaaatcatt

SEQ ID NO: 37045 - DNA, 408 bp, Homo sapiens
atgtcattggattccattttaattaatggatgaggctgacccatttcagagagcctttttaaaaggaaactttagactacccactggagacattcttaggaagattcccataggatgagtacaaagttttagagacaaagctccaggaagcccaaagaaagaatatctgttaaagttatggccacagtcttgcttgaccataggccaatgaatagttaagcccaatgataaaggaataaaaggatgaagaatatttgaagagaaataaatcttcctcactcctcaggttcccttccatgtgcaggagcctcaacctacaactagcaaccttatctcctgactcattcctctccagaggaggagtaaattagtcaactgatatgctctggaagaaaaacccagcttagc

SEQ ID NO: 37046 - DNA, 415 bp, Homo sapiens
cccacgcgtccgcccacgcgtccgctcatgacccccgatatgaacctagggctcgcgagcagtttacactgcccagtgtggtacacagggatatctacagggatgatattacccgggaggtacgaggcagaaggccagagcggaattaccagcacagcaggagtcggtcaccacattcatcccagtctagaaatcagtctcctcagagactggctagccaagcatctagacccacaaggtcccctagcggcagcggctctagaagtagatcctccagtagtgattcaatcagcagcagcagtagtaccagcagtgacagcagtgattccagcagtagttcaagtgatgattctccagctcgatcagttcagtctgcagcagtccctgcacccacttccagttgctttcatctctg

SEQ ID NO: 37047 - DNA, 416 bp, Homo sapiens
atcaaaaattacctgtagcaacagattttgaatttaagctagaagctctcatgtgtacaaaccctgaaattaaacaagaagaccccacaaatgtggggcctgaagtaaagcaacaagtaaccatggtttcagacactgaaatcttaaaggttgctagaacacatcacgtccaagcagaaagctacctggtgtacaacatcatgagcagtggagagattgaatgcagcaacaccctagaagatgagcttgaccaggccttacccagccaggccttcatttaccgtcccattcgacagcgggtctactcactcttactggaggactgtcaagatgtcaccagcacctgcctagctgtcaaggagtggtttgtgtatcctgggaacccactgaggcacccggacctcggcaggccgctg

SEQ ID NO: 37048 - DNA, 406 bp, Homo sapiens
gcagaatttaccttccacaccactccatgggtatcctgataaatacaaagtagatcctgccactccactgcttaatagtttctcttgattccatatggaaaacaaaattccttattttgaaatttagcacatttcacaatctagcccggtttatcttttaatcttcatccagtgttgtccttatttaatctcaaatttctaagttattaaattgttcctgaaacactctaggctcttgcacaactttaaaccttcgtaaatattactatttcttcatctggaaaatttcctgtccttcaagagttacatcaaatgtcacttccttcaacaagacttttctaatttctccagagaattagattcccctattcatcctccaagctcccaaaactctctgtcatatttc

SEQ ID NO: 37049 - DNA, 417 bp, Homo sapiens
  misc_feature (1)...(417): n = a,t,c or g
ctgaggtcctgagacctgggtctgggatccccaaggcctgggcaggcatagacttgaaggtacaaccccaggaacccctggtgctgaaggatgtggaaaacacagattggcgcctactgcggggtgacacggatgtcagggtagagaggaaagacccaaaccaggtggaactgtggggactcaaggaaggcacctacctgttccagctgacagtgactagctcagaccacccagaggacacggccaacgtcacagtcactgtgctgtccaccaagcagacagaagactactgcctcgcatccaacaaggtgggtcgctgccggggctctttcccacgctggtactatgaccccacggagcagatntgnaagagtttcgtttatggaggctgcttgggcaacangaanaactaccttt

SEQ ID NO: 37050 - DNA, 408 bp, Homo sapiens
  misc_feature (1)...(408): n = a,t,c or g
ggaaaatagatgttaccaataaagttgttgcagaaattctttcaaaaaccactgaatatcttcagccaaatccagagctaagctaggaatgctgaacactgtgtcgaagatccgagggcaggtgaagaccacaggatacccgcagacggaaggcttgctgtgggactgtatgctgaaatacgggaaggagctcggggaagactccacctttggcaatgcattgatagaagttggtgaatccatgaagctaatggctgaggtgaaagactctcttgatattaatgtatagcaaacttttattgatccacttcngttactacaagatanagatttnaaagagattgggcattacctgaaaaagctggaaggccgtcgctggattactattatnnaaagagncnagnaggt

SEQ ID NO: 37051 - DNA, 410 bp, Homo sapiens
  misc_feature (1)...(410): n = a,t,c or g
gcgagcggccgctcgcgatctagaatagtcggcctggaggggaaagagagagcgagacctgggagggagggggcctccagcagaaaggggcggtggaaaaggtgcaaaagcagcgtgggagcgccgggctggcttcctgcggctgctgctggtctgactgggaagcagcaagccaccactacgaactctcaagaggagtgggagtgcgggagtccagagctgcctctgggaagtctgcagtagttgagcaaaggggtcctcacgttcctgagagctgggcaggggggattttggaacctggggcagccaagaacgagcagccaagggtacgggagattagttgngcacagagcagntgctggtcggcttggnggtgctggtgggcactgcgtggtaaaccttgtttgtaa

SEQ ID NO: 37052 - DNA, 421 bp, Homo sapiens
gggggttaaagggggacgatgtgaaggagagaacctgtggtccttcagaaggcgaagaagaaagaaaggggaagcagtgaagaaagggacggagatactgggacagggagaaaaaagttgtggagagtagcttttaaggagtcatttggtggccatggatccaacgtgctcttctgagtgcatttataacctcatacccagtgacttgaaggagcctccccagcctcctagaaaaaaactttgatcggaacgtgcccaaaaagcctgctgtgccattgaagactgatcatcctgtcatgggaatacagagtggaaaaaattttataaatacaaatgcagctgatatcatcatgggagtggctaaaaagcctaaaccaatttatgttgataaaagaactggagacaagcatgatcttgagcc

SEQ ID NO: 37053 - DNA, 412 bp, Homo sapiens
gttatcggcccatagctaataagtagtgacagacaaccaagcttcaatatttttctaaagaaattacaggtgggatatgctagaaaaggcattttggggttatgtttaaaaaaacattattgtcccacaatattaccttaagatttttcttttccgcactacctgaacattgtaatacagacaaacttgatttcttctagaagataacattttcaatactgtcccacttctcatcttaaaaatattgtcatgtttattctaatatccaacacaactatcaaaattgcctttttctctagaggatgaaggctgtgaaaaaaccgttcaaattctcttctttttcttttttattaccaggtccattttgcctgacaattgcaaatcagagcatacaaaataaaactgtgcagtt

SEQ ID NO: 37054 - DNA, 391 bp, Homo sapiens
cccacgcgtccgccaagctctcggcggccggcggcgggacgctggaccgcagcactggcgtgctgcccaccaaccctgaggagagctggcaggtgtacagctctgcccaggacagcgagggcaggtgtatctgcacagtggtcgccccacagcagaccatgtgttcacgggatgcccgcacaaaacagctgaggcagctactggagaaggtgcagaacatgtctcaatccatagaggtcttggacaggcggacccagagagacttgcagtacgtggagaagatggagaaccaaatgaaaggactggagtccaagttcaaacaggtggaggagagtcataagcaacacctggccaggcagtttaagggctaacttaaaagagttttttcaat

SEQ ID NO: 37055 - DNA, 407 bp, Homo sapiens
cggacgcgtggggaaaaagaagcgaggcttagaaagggagaaatattccatatatttgtatatggatgactttattaatatattaatttaaagcttaataaattatgagtggtgatatcactaccctgaacctacattgaatatattgaaattagggaactggaattcaaaatgttgagtagggcagaggttaaactctgggtagaaactgaaatagttttctcgaggaaatatttacaactgattgaatttaatttcaattgtactaattttccatgagttgagctaaagtgtattcttatttttcaataaaacaatgggaaattctataaaatagggattagcttgttagtttcagttcgtttttgtatggctcttaattgttgtcctgggtttccaggatatca

SEQ ID NO: 37056 - DNA, 410 bp, Homo sapiens
gcagactcaagatagtcccagccacaagatcttgaccctgaggagacagacaatggaaataaaataagggcagagattgcaaaagtggaatcagttcaagttggtcttagtgaaattatgacacctaagcaatataactctaaaaacataagcatttggctttgtgtctcagttacagaaggctgggacatatttaaaactacaatttagaaattaagtttggtttaaaagcctgttgcattcacacacacacttctacacacaaatatacacactgtatacacatatatagtgagaatatttgaaatgaagatctagaaaataagagtaggttaaaatcaagataactcgagactgactatggaagcagtaagaaggcaatttagttttgttaaattttgtctgactta

SEQ ID NO: 37057 - DNA, 412 bp, Homo sapiens
gcagtagatgatgaagagaaaaaaaagtctccctcagaaagtactgaggagaaagctaacggaacacatccaaagaccatcagtcgtattggaagtactactaacccatttttggacattcctcatgatccaaatgctgctgtgtacaaaagtggattcttggctcggaaaattcatgcagatatggatggaaagaagactccaagaggaaaacgaggatggaaaaccttttatgctgtactgaagggaacagttctttacttgcaaaaggatgaatacaagccagaaaaggccttgtctgaagaggacttgaaaaacgctgtgagtgtgcaccacgcattggcatccaaggccacggactatgagaagaaaccaaacgtgtttaaacttaaaactgccgactggagggtct

SEQ ID NO: 37058 - DNA, 411 bp, Homo sapiens
  misc_feature (1)...(411): n = a,t,c or g
gcctcggcaggacccctgggttgttgcaggtgactagccgcctgcctgcgaaacccagcgttcttcaggagaggatgtgatggnnnnnnnnnnnnnnnnnnnnnnnnnnnnnnnnnnnnnnnnnnnnnnnnncatcaagaaaacagcaagggagagaatccaagcctaaaattaaataaatctttcagcctgcttcttccccagggttctgtattgcagctaagctcaaatgtatatttaacttctagttgctcttgctttggtcttcttccaatgatgcttactacagaaagcaaatcagacacaattagagaagccttttccataaagtgtaattttaatggctgcaaaaccggcaacctgtaactgcccttttaaatggcatgacaaggtgtgcagtggccccatcca

SEQ ID NO: 37059 - DNA, 392 bp, Homo sapiens
atttgctgtgatgtttggagacttcggtcatggcattttaatgaccctttttgctgtgtggatggtactgagggagagccggatcctttcccagaagaatgagaatgagatgtttagcactgtgttcagtggtcgatacattattttattgatgggtgtgttctccatgtacactggcctcatctacaatgattgcttttccaagtctcttaatatctttgggtcatcctggagtgtacggccgatgtttacttataattggactgaagagacgcttcgggggaaccctgttctacagctgaacccagccctccctggagtgtttggtggaccatacccttttggcattgatccaatttggaacattgctaccaataaactgacgttcttga

SEQ ID NO: 37060 - DNA, 356 bp, Homo sapiens
cacagaaggagctcagtatttagtcctttgtttttattcagtgagaaccaagctagccttgagtaatttttatcttgtcttcctaaaacactattaagcttattgtacttttaagaaaaattgccttacgtacattcctttttcctttttctgcctcttccctcaatagttgccttttagtgctgtaatagttaaatcctacagcataatcaataactcgcatatgaagtaaaaaggaatactgtgaaaggggagtactcttgtacagccagttcttttatgcaaaaatctatgcatttttacaatcttatattaaactggtattttcaaacaataggaaactttttttttttttt

SEQ ID NO: 37061 - DNA, 386 bp, Homo sapiens
  misc_feature (1)...(386): n = a,t,c or g
nnnnnnnnnnnnnnnnnnnnnnnnnnnnnnnnnnnnnnnnnnnnnnnnnnnnnnnnnnnnnnnnnnnnnnnnnnnnnnnnnnnnnnnnnnnnnnnnnnnnnnnnnnnnnnnnnnnnnnnnnnnnnnnnnnnnnnnntnnnnnnnnnnnnnnnnnnnnnnnnnnnnnnnnnnnnnnnnnnnnnnnnnnnnnnnnnnnnnnnnnnnnnnnnnnnnnnnnnnnnnnnnnnnnnnnnnnnnnnnnnnnnnnnnnnnnnnnnnnnnnnnnnnctaggtttaagtacccgcttttgatgtttgcgtgacgaaatcatgtaacaatgcatctctcagaatgcatccccattgttaatcagtgcatgactgtacttcagaatgatttttttttt

SEQ ID NO: 37062 - DNA, 385 bp, Homo sapiens
  misc_feature (1)...(385): n = a,t,c or g
ctcatagtcctcacctttatcatcaattctaactatacattcacttgttttatttcttaatttttttggttattatctgtctccccaatagaaagtaagtcttatgaagaagggactttgtttctaacagtgcacacactctctagtatgcaattaggggagaacccgacatacaaaagatgctccatacatatttgttaaatgaacgaatttgttaataaattaatggattcctgacatctatttaacacatttttatattatttaagacccatcatgatattgcttcaattgactttatttattaaaaccatatttcttacctttatgcaaaccattcaactttaatcaggncttttaccccagaatagtgcgcttgatgact

SEQ ID NO: 37063 - DNA, 372 bp, Homo sapiens
  misc_feature (1)...(372): n = a,t,c or g
ggatactttgggtctgggctggcaggggctctggaaggagaggcatggaggtgcgaacctggtgcccaggtggaggtgcagtgggggtaaggtggccaggctgcagacccctgcatcagaatgcctgcgaagctgtgggttttttgtttgtttgtttgttttatttcgggtgncactntgtctgnccagnctggantgcaanntcnncngtttctactnnctgnangcttctnctnccagnatnnnnngantctnntgattcangctannnnnnncttnnatttactantcntntntcacttntcncnaactgntctncattacannantnnntatnntnttntatggnttttttannnnnatttttntcta

SEQ ID NO: 37064 - DNA, 371 bp, Homo sapiens
  misc_feature (1)...(371): n = a,t,c or g
aataactgtacaccaagactgtgtgaggtagaccctacacagttcccttatcttttctgtttctacgtgtctccctacttggctttctctgatgaatttggctcaagagattctaagtgggttgctcagtggaaggatggagggaggagggaggggaggaagggacgggggaaaaggggatgtggacatatactctttggtgatcagaatgtaatactcttnaanagttggaatattganatagttgtntattcatcatggacccctgtancttctccagctcaatgctcccctaccacttttacttctgctgcnactactancgaaggtagtggnttnanctttttnatnntaccatgcaaatgaatctt

SEQ ID NO: 37065 - DNA, 439 bp, Homo sapiens
  misc_feature (1)...(439): n = a,t,c or g
ctttatttcccttttggtttttttcttttcctcctctggtcgacaacctcttaattctagcagtgtacaaaagcaaggccaagctttcctggggcacttgggatgaaaggcccatccatgcctgttgtggaggcacagaggaggagaaggtgaagaacaggaatgggtgcagggggagtgtgaacgcaaggctgctggctttggcacagctccctgtgcagggctggatttccaattgcttttcagtgcctgtgccctgataggatgggcacagctggtatggaatcagagcagcccatctccagagcagaagtctgagagctcagcgtttgactcctgaaagaccaggatgttcctacctgggttcttgagattcattggctagtggaggtagatggtactctccatgtctgcagaagaatncccactttgggctgaa

SEQ ID NO: 37066 - DNA, 435 bp, Homo sapiens
  misc_feature (1)...(435): n = a,t,c or g
ctgtttcagcagaaacactccaatctgaaatagattgggggcctatattctgcatttttaaagaaaagaaactccaaccaatnnnnnnnnnnnnnnnnnnnnnnnnnnnnnnnnnnnnnnnnnnnnnnnnnnnnnnnnnnnnnnnnnnnnnattaagggaacctgttacaaccagacctgccttacaaaacgtacttgagggagttctaaacatggaaagccccaaccaccaccctctttcttctaccaaataaagtttacttggaaacattcttttcttggttttttagtttcttacgtagtatttatgactagaatataataatagattattttcctattgccaatgccttgaacaacaaaaacaatactggcaatagtgaaaagaaaacaccttgtttttaaaatctcaattttgctaattttagttgctgg

SEQ ID NO: 37067 - DNA, 429 bp, Homo sapiens
  misc_feature (1)...(429): n = a,t,c or g
gaagaagcctaaaaagaaatcatgtctgctgctctaggcccatagtcagcagcagctctgagccagattacaggaatgaagaactgttgcctaattggaaagtgccagcattccagacttcaaaaataaaaaatctgaagaggcttctcctgttttatatattatgtgaagaatttagatcttatattggtttgcacaagttccctggagaaaaaaattgctctgagtatatctcttggaacnatagtatntctcctttgcaatancagntataacagatgtgaaaatatacttgactctaatatgattatacctaanagcatggatgcatttcanatgttanatattgctactataatcaaatgatttcatattgatctttttatcatgatcctccctatcaagcgctannaagttgaaccattatac

SEQ ID NO: 37068 - DNA, 438 bp, Homo sapiens
  misc_feature (1)...(438): n = a,t,c or g
ggagaagccgcggcggagcccgaaccccgcagcctgagccacctccgtcatctgggcccggggcctcaccgcgcaggagctgccaaggccatgtctgttccatcatcactgagccagtcggccattaatgccaacagccacggaggccccgcactgagcctacccctgcctctgcacgctgcccacaaccagctgctcaacgccaagctgcaggccacagctgtgggacccaaggacctgcgcagcgccatgggggagggtggtgggcctgagccaggccctgccaatgccaagtggctaaaagagggccagaaccagctccggcgggccgcacggcccaccgtgaccagaatcgcaatgtgaccttgaccttggcggangaanccagccatgagcctgagatggcncccttgggccccaaangcctgatacacctgt

SEQ ID NO: 37069 - DNA, 415 bp, Homo sapiens
  misc_feature (1)...(415): n = a,t,c or g
gaagactgctaagggaaagctaaaggcatagatgttacctttttaagaaacacattttggaacctttgtgagttatttcattgcttgagtcagctatcctcaaccctttattgcttgagaatgtttccctttgtaaaagagattgctaaaattacgtgttctaaagcactctgtttagagttagagttgcctatgggaaaagcagcatataagcatcctcgattcagagaggctgatttcgtccttagacgttttccccgttctgtcttaagatgacagtggtctnnnnnnnnnnnnnnnnnnnnnnnnnnnnnnnnnnnnnnnnnnnnnnnnnnnnnnnnnnnnnnnnnnnnnnnnnnnnnnnnnnnnnnnnnnnnnnnnnnnnnnnnnnncattttgctaaaggctgtgggag

SEQ ID NO: 37070 - DNA, 413 bp, Homo sapiens
gggagtcaccatggttcatggaaatcttaccgctggtcatggtctcctggttgagttgataatcacatttcaattggtgtttactatctttgccagctgtgattccaaacggactgatgtcactggctcaatagctttagcaattggattttctgttgcaattggacatttatttgcaatcaattatactggtgccagcatgaatcccgcccgatcctttggacctgcagttatcatgggaaattgggaaaaccattggatatattgggttgggcccatcataggagctgtcctcgctggtggcctttatgagtatgtcttctgtccagatgttgaattcaaacgtcgttttaaagaagccttcagcaaagctgcccagcaaacaaaaggaagctacatggaggtggaggaca

SEQ ID NO: 37071 - DNA, 420 bp, Homo sapiens
  misc_feature (1)...(420): n = a,t,c or g
gcttgaaataattattactctgtaggttgaaaaatcattttaatatcttttgaaaaaactatattagtagaaactaagaaaagagttttgggttgtgtcatttctcacttttatgcctttagatatgtattaagagatacttgggcaatttgatcaaacataaaatttaattgactttttgagaaatagagaaatatttctttcccattcatgtatctttgagtgaaaagcctttcctcttgtaagagtaccttannnnnnnnnnnnnnnnnnnnnnnnnnnnnnnnnnnnnnnnnnnngcgcngcagntattattcatatttcttctattcaganaaggntctggggcntgatatanaccatgtatcagtgtgnttttnctaatataantattgctcntgacangcacttgtnagattt

SEQ ID NO: 37072 - DNA, 414 bp, Homo sapiens
actcattgatctttcatccctaagatagtttgagagagctcacactggatatataagttatttgttgcagcataacaaatgatccccgcaaattttgtggcttcaaacacgaaatgtttattctctaacaatttctacagatcaggaattcaagaacagcttatctctgtagttacactgcaggatctctcatgcctttacttacaatcaagatgtcagccaaagctatagtcatctaacatctttactgatgaacagtccacttccaagatgacttattcacatgcctggaaagttgatgttggttgttgtcaggggaccttcagtcattaccatgtaggcctctttacaaggcccagctccttgacaatttggcaataagttctcgccaaggttagtgatccaagagaggac

SEQ ID NO: 37073 - DNA, 424 bp, Homo sapiens
agtatatactgcttttgaatgtatataaagtggtatgttatgcatataaattgtacgtaaactttttagaaaagaagcattttcctgctcctttttcaaaaccaacccaagcttacagtccatctataagaccaacacacttacgaacttcagttggaaatacctaaatataattcagcacttcttagctcgaatgagttttatcacttcttaaggatctcatcttttaaacagctgaataaaatagttctgtgtcacttcaaagtttctttctctgaacagattgaattgagcaaagagaacctcttctgtccttaccaggattgtgtaaggttacacatttgcttttaaatataccaaatgccgttgattggaaacaagttctgacacaatgtttagacaagaatccagagattttttctaa

SEQ ID NO: 37074 - DNA, 423 bp, Homo sapiens
caggcccatcgggcccactctggagcagacgctgcctcatgcccccgggtctctgctgtgaggaggagggaggggacagacctccatggcaccacagtgtcctggggaactgaggcgagtcacagaggctgcagaggaaagtgtgaacttgtcacagtgggggaaggacgtggtgccgaggccaggctgcagggctccctgtgcctcccagccccgcacctcctccctctggaccggctcccacaaggacatcccacccggtcagcagcccacggaggctcccgtgcagggaccaccccctccccgtgctgggccggctccggggccaccccctcctccctgctgccccagagctgctcaccctggggatcttcccccatcctcttctggctcaccgtgggctcaggccctgccgatggctgg

SEQ ID NO: 37075 - DNA, 230 bp, Homo sapiens
  misc_feature (1)...(230): n = a,t,c or g
ctggtcttgaannnnnnnnnnnnnnnnnnnnnnnnnnnnnnnnnnnnnnnnnnnnnnnnnnnnnnnnnnnnnnnnnnnnnnaacataaggcccctatttaaacatttttcttaaataaaaaacaaaagaattaaactgtaactctactatcttaacatagaatcagtcttaccccttcttccaacccttttccttttccgtgcatgtattgatctatttttttttttttt

SEQ ID NO: 37076 - DNA, 408 bp, Homo sapiens
  misc_feature (1)...(408): n = a,t,c or g
cccacgcgtccgggctaaagttaccagccacacagaactaacctccaaccaacaatcagctaataagacacaagctattgcaaagcagccaataaatcgaggtcagcctaaacccatacttcagaaacaatccacttttccccagtcatccaaagacataccagacagaggggcagcaactgatgaaaagttacagaattttgctattgaaaatactccggtttgcttttctcataattcctctctgagttctctcagtgacattgaccaagaaaacaacaataaagaaaatgaacctatcaaagagactgagccccctgactcacagggagaaccaagtaaacctcaagcatcaggctatgctcctaaatcatttcatgttgaagataccccagtttgnttctcaag

SEQ ID NO: 37077 - DNA, 403 bp, Homo sapiens
cccacgcgtccggttttactctccagatgtttttgagttgcataaaaatcttgcattcatcattcaaaaaatactaaatttcacatgagactcaaaaatttctgaatgatggaactcagacttccaatacattcatacatgctagagctgaaagtaagcagggaatttcagctctaaacacatttttgagacagttatctgtgagtgaaaacagggtattataacaaaagatgagtttcaatcttaactacagtgtttgttactgtgaatgctataataatacataagtaaaatgagtgtaaatgtaataaattattttatactgctgtatacatatgaaataaataaaactaggatacatattatgccatttttccatgcatggatcttccactgacgcctg

SEQ ID NO: 37078 - DNA, 401 bp, Homo sapiens
aatcctctttgggcacagctgggtgatctttacggagccataggctctccagtgagactgactcgcaccgtagtggtagggaagcagaaggacttagtccagcgaatactttatgtcctgacctactttctccgttgctctgagctacaagagaaccagctgacctggagtggcaatcatggtgaaggtgaccaagttttaaatgggagcaagatcataacagccttggagaaaggagaggtggaggagtctgagtatgtggtcattacggtgaggaacgagcccgctcttgtacccccccatcctaccaccaacagcagcagagagacacaacccctggccgacagggtttcctgagtgcccagagggcactgacagtagagacctgggtcttaaacctg

SEQ ID NO: 37079 - DNA, 389 bp, Homo sapiens
aacacatcaatgattttccacttgtgaaaaatcattgatgtgtttctatagttacactttaataaaaagttaaacaaaatgatttttcacaagtggagcacgtgcatacaatcggcaccccagaagccccccgtcagattcccttccagttaactacctctccaagggaaaccactatcctgagttctaagcgcatagattagttctgtctggtttggggagatatataaatggaattatgcattcttcgtatctggtttcttttcaccaatattatgtttgtgagatttttgttgcatgtatttgtacatggattttcattctcatggttgtataatatttcattgtgtgaataaaccacatactgtttatctgaaaaaaaaaaaaaa

SEQ ID NO: 37080 - DNA, 395 bp, Homo sapiens
ggttctctcaggggcagcaaagtggcccaagctgcccctgacagcacagggcctgggggtggctaacgagagaggccttacagtgccggcatgcctcctcttccactgtcgtccttcctcagagggcctcacgccaaacaaacggccttttcgtgtgaaacatcttcagggcgggaaaggggccacttctggctttgttagcaataactgaccttcagtttacccttctgaaggagcagggactcagcacagaattcactttagacggggctgaaggagtgtccctcctctatgtgaaaagaaaattgttttattcttcattctgactttttaactgtttggctcacttccagttagtttgaatgaaaataataattttctacttggagttgaag

SEQ ID NO: 37081 - DNA, 403 bp, Homo sapiens
cccacgcgtccgatacagtgctatatgatagcgtgccacaagtcggtgctacttatatttggcaaatgatttggtttttcctagtataaatctgagcagattcaacatcataaaatcaggtaagcccacttacactcccctgtgcattcttgaaagggatatgaatgagtggggttagagctggtgagtctgaggactcaagccccaggaaaagaggagagctcagcccatcttcaccatgtggagtctcaggagggatggggttcaggcaaagagttctatgttgaagaagagtggtgcaaacagacctctgtgtcttgttcctgattttaggggaaaagcttttggtctttcaccatgggatatgatgtagctgtgggaattttgtagatcctctttatca

SEQ ID NO: 37082 - DNA, 404 bp, Homo sapiens
gaggcttccctagtttacaagtcagagtcacttgtagtccatttaaatgccctcatccgtattctttgtgttgataagctgcacatgactacatagtaagtacagaacagtaaagttaaaacggatgtctccattgatctgccaaatcgttatagagagcaatttgtctggactagaaaatctgagttttacaccatactgttaagagtccttttgaattaaactcgactaaaacaagtgtataactaaactaacaagattaaatatccagccagtacagtattttttaaggcaaataaagatgattagctcaccttgagataacaatcaggtaagatcataacaatgtctcatgatgtaaaaaatattaaagatatcaatactaagtgacagtatcactctaa

SEQ ID NO: 37083 - DNA, 393 bp, Homo sapiens
ctcagatctcttaagaactttctgtctccaaaccgtggctgctcgataaatcagacagaacagttaatcctcaatttaagcctgatctaacccctagaaacagatatagaacaatggaagtgacaacaagattgacatggaatgatgaaaatcatctgcgcaagctgcttggaaatgtttctttgagtcttctctataagtctagtgttcatggaggtagcattgaagatatggttgaaagatgcagccgtcagggatgtactataacaatggcttacattgattacaatatgattgtagcctttatgcttggaaattatattaatttacgtgaaagttctacagagccaaatgattccctatggttttcacttcaaaagaaaaatgacacct

SEQ ID NO: 37084 - DNA, 393 bp, Homo sapiens
gaaaggtatttctctgtccgttcaaggaaataaaatgtaagttcttgttttattaaatgaatgaagccttttggttaaaaaaaaagtaatgtaatatgtttctgttcaaacttgagctaatgacatttaaggaattaaagacattgatctagttcttagtatgaaaagtgtacatgtagatatagttatataattgtgtatatacatatctacacacatggttggttttatattgctttttcatcaatatttttgactgaaacctttacaataaattttattttaattatgtaaccactaatattttgagagaaggaagcaaatgttatatgtccttctgttaaaagaaaaaaaattcagtcctccgccaaccgcttcccacacactcatact

SEQ ID NO: 37085 - DNA, 405 bp, Homo sapiens
gtgatggtatatatttctttctaggtggtgtataatcaagactccctatcaattcccatctcatacttcccagttaattggaattaatgaaatttggctgctcccagacctttttccatgtcttcctttttccttttaacaggatttaagttgagcattcttgagagagagagagagagagagattggaagagagatggggagagactgactcagatccctctcctgtctgcttctttttctggttctctcagttttttttcttgaagttataaagccaaacctggagaatttgtaagttgttaggtttccccaggtaacttggcactcatatgaaccccattttaataagtactcagcccatctcctctcctgggctcagatggctctctctcctccctcacct

SEQ ID NO: 37086 - DNA, 422 bp, Homo sapiens
catggctgtggtggcagaaggagtgccctggtgggtcatcctcctggctgtactggctgggctgctggtgctagcactgctggtgctgctcctgtggaagatgggattcttcaaacgggcgaagcaccccgaggccaccgtgccccagtaccatgcggtgaagattcctcgggaagaccgacagcagttcaaggaggagaagacgggcaccatcctgaggaacaactggggcagcccccggcgggagggcccggatgcacaccccatcctggctgctgacgggcatcccgagctgggccccgatgggcatccagggccaggcaccgcctaggttcccatgtcccagcctggcctgtggctgcctccatcccttcccagagatggctccttgggatgaagagggtagagtgggctgctggtgt

SEQ ID NO: 37087 - DNA, 426 bp, Homo sapiens
  misc_feature (1)...(426): n = a,t,c or g
cttctctcttagatggctatagatctacctttgagaaatgagaaatttctgaaaaggggtgtgaagttacatatattttatagacaaagagcatggccaaggcaatgtttgtaattcaaagtgttgctcacaaactctagtttaatgcttttcctttaagtgtggttatttgtttttgtatctttgtgtgagtgagagcgagagtgtaaaaaaatgaagagaagggggaaaagagatatcaagcaaatataaaagaagagaaggcaaacgggaaaggtctgaacctttactttttaaaattatattcagcnnnnnnnnnnnnnnnnnnnnnnnnnnnnnnnnnnnnnnnnnnnnnnnnnnnnnnnnnnnnnnnnnnnnnnnnnnnnnnnnnnnnnnnnnnnnnnnnnnnnnnnnnnnnnnnnnnnn

SEQ ID NO: 37088 - DNA, 410 bp, Homo sapiens
ggcgaagccattaccagtgctgcaataggaactagttctgtggctgcccgagatgcctggcaaatgactgaagaggaatatactccacctgctggagccaaagtgaatgatgtggttccatgggtgttggatgtgattttaaataaacatatcatcagccccaacccacacgtgaggcaagcagcctgcatctggctcctttcccttgtcaggaagctaagtacccacaaagaagtgaagtctcatcttaaagaaattcaaagtgcatttgtttcagttctatcagaaaatgatgaacttagccaagatgttgcatcaaagggccttgggttggtttatgaactaggcaatgaacaagatcaacaggaattggtttctacacttgtggaaacacttatgactggcaaaag

SEQ ID NO: 37089 - DNA, 368 bp, Homo sapiens
ctttaagataaatgcaacttgctataaaatgatagaaatgaaaaattttagaaaatcattttctactcactattttatgcctgccagttatcctttgttagtgataaaattgtcttttatgggaacgaatttgttaaaggtagaaaaaaaactggtagtgtatgtatgttttatagattagacactaccaaaattatttaacatttagaataattaacttgctttcaggatgacagatgacttaagaaactgatgaagggttaattaaggatattgatttttagggcagaactacaaaattatcaaatcacttaacactgtaaatatgttcctgtttcaggttttcaaagtaaataccttaatcaaat

SEQ ID NO: 37090 - DNA, 94 bp, Homo sapiens
  misc_feature (1)...(94): n = a,t,c or g
ttttnnnnnnnnnnnnnnnnnnnnnnnnnnnnnnnnaagggactgatcaagatcattcagcaataaatgctggaaccaggaaaaaaaaaaaaaa

SEQ ID NO: 37091 - DNA, 395 bp, Homo sapiens
cggacgcgtggggatgagagttcatattatcgtcaccattttatgcgtcaagatctgatccagtctctaattatgattcagcctatcctgtatgcgtattcttttagtggaccaccagagccggttcttcttgatagcagtagcattcttgcagatcgtattcttctcatggacacattcttccagattttgatttatcatggtgagaccatagcacagtggcggaagtcaggataccaggatatgcctgagtatgaaaatttccgccaccttctgcaagccccagtggatgatgcacaggaaattcttcactccagatttccaatgccaagatacattgacactgaacatggaggcagccaggcccgtttcctcctttcaaaagtcaacccttc

SEQ ID NO: 37092 - DNA, 407 bp, Homo sapiens
ccctagcatgcacttcccattatattcctttttaggccagcactatgtatgatattcttaagggtaaaaagaaagtagttatatcaattctaaattcttagtaattgccaaaagtaaattaggacatctttttattttaaatgctgtgtttaccattgcttctgaaaataattctcttcatagagaaaataatattccactggttgtttttaggtttgcttcccttcctagaagacattctagctcatgacatttactcagtttagaaatgaaaggaagaggcgatcataatgtgactttcacttagtttattagactcttcctagggatcagtgactctgaaaggaaatatggtaaaagacaaatgactggggaaaatgttggttaatatacatccagttctgaaa

SEQ ID NO: 37093 - DNA, 405 bp, Homo sapiens
  misc_feature (1)...(405): n = a,t,c or g
atttgattaatattggctattctcttgatttatttccttacttgggagaaaaaaggaagcacgctggttttttaaataaaatgttggccctataatgtatcagacttgatatgtagggcagtctttgtaaaaatattgtctctgcaaaatttctgattaatctatctttcctttgctgacctcaaaagacaacttatttataattctctggaggtttagaattacacaaagactaagccatgctccatgagtgtagtaagtgctacgtggctgagaacctggagaactttgaagagctgcatcatggcttgggcccaaaacacggattatttttctggcagcccagtgttttgaaaaaaggaggaaaacacataggaatttttctgntgctcatattaagctatt

SEQ ID NO: 37094 - DNA, 406 bp, Homo sapiens
atatttttgctcagggaaggaatgtttgagcgaattcctgatatagttctatggccaacatgccatgatgatgtagttaagattgtgaatctagcttgcaaagataatctttgtatcataccaattgggggaggaacaagtgtttcatatggcctgatgtgtcctgcagatgagacaagaacaattatttctttggacacttcacaaatgaatcgaattctctgggttgatgagaacaatttgacagctcatgtagaggctggcataacaggacaggagttggaaagacagcttaaagaaagtggttattgtacaggtcatgaaccagattccctggagttcagtactgtaggaggatgggtatctactcgcgcatcaggcatgaagaagaatatctatggcaata

SEQ ID NO: 37095 - DNA, 411 bp, Homo sapiens
gtgtatgtgtgtgtatatacatttgggaatatgtagttatatacattgagtgtatggaagcaatctaaagtagttactactaaggaatcaggcattatgaaggggtaggagtatcccctttatatttgatacacttctgtgtaagattttttaaaaaatgagtttgtcttggaaaaaacctcaagtgagaaataaaataggattctaacagacagatgagatggggtaaagagttttagtgagcagaaggtaacaacagtgtggaagtacaaaagggaggtctggaccatgagtaacaccagccagcatttgctgagcccctcctctgtgcaggtcctatgccaggtgctttacaagtaacaattccttgtagcaatccaataaggtaagaattaattcttccatttccac

SEQ ID NO: 37096 - DNA, 406 bp, Homo sapiens
  misc_feature (1)...(406): n = a,t,c or g
gttgacaatcttcatctataaatcatatttagtgagacgttaaaagagtttgtaaagaacgaatgataacatcaggttgttcccattcagtctcaaggtataattgtagacacatcggttttgcatccacactcccgcgtggcaattgcaggaccatctggatatgaaactgtctcttcctgctcacataactgcactcttgtttgacagaccacaagtcttgatttctgcatcaaaaatagtagctaaaatatcagtaacaatgacaaatcaattctcatgtcatcaacctccttccctttgcactcagtcacctgctggtttggggttggccacgttgtgcttgcctttggggatctcaggcattttccctggatctaaagcagccaatggcattgntccccca

SEQ ID NO: 37097 - DNA, 413 bp, Homo sapiens
gttttcaaaacatagagatctcaaagtaattcactttcaaaccatttttcctcttagtctcaaatcttttcatcatgtgtattagtctctgtgtcatgatggctaggttgccagtgttttctttaacaaagagtacataattatgtatgttggcctttgcccatatatttacctggaatgcaaatatacgatctgaatcattttcattagacagaacatgggtaaacagaaagtagctatggggtagtggtacaatttaacaggaataaatcagtgaatccgagaactaaagaaccgtccaactttcatgtggcctgggttcctaacgttcatgcacagatgaatgacccaaacagctacagcacataatagagccatcatacaaaatgcatgtccttacaactcttgaaaat

SEQ ID NO: 37098 - DNA, 164 bp, Homo sapiens
gttctagatcgcgagcggccgcccttttttttggttttcactccactgtgcttctgaattcatgtttattctctgccagggtgggaaaggagtaataatattacaattctatggctttataccataaataaatctagatgctgtgaaaataaaaaaaaaaaaaa

SEQ ID NO: 37099 - DNA, 407 bp, Homo sapiens
cgataatgctcccaagtttgctgccccttatgaaggtttcatctgtgagagtgatcagaccaagccactttccaaccagccaattgttacaattagtgcagatgacaaggatgacacggccaatggaccaagatttatcttcagcctaccccctgaaatcattcacatccaaatttcacagtcagagacaaccgagataacacagcaggcgtgtacgcccggcgtggagggttcagtcggcagaagcaggacttgtaccttctgcccatagtgatcagcgatggcggcatcccgcccatgagtagcaccaacaccctcaccatcaaagtctgcgggtgcgacgtgaacggggcactgctctcctgcaacgcagaggcctacattctgaacgccggcctgagcacagg

SEQ ID NO: 37100 - DNA, 400 bp, Homo sapiens
gcttcaagtaattgcagtgtgaagtgactgaaaagtaagtctacagaaaaggtgggaatgatattacctatcatgatgtctgaaacataattgttgcttagatgaatgaatgagtaaatgaataggtaaatatggccatggagtaaggtgtggaaataagaattttcatttgttagtacaatacagatttgttatctaaatattatattaccataagcaacaaattctctgtccttttcttgttttgctttctgtcatttattattttattcctcatttaaacagtcatatatatgtgatctgaagcatctggtttgctgtttgttgtttctgactatatgaagattatatatacatatatattatttttgcttcctcgttcttatttttcttttatttt

SEQ ID NO: 37101 - DNA, 293 bp, Homo sapiens
  misc_feature (1)...(293): n = a,t,c or g
actagttctagatcgcgagcggccgctctagaggatccctcgaggggcccaagcttacgcgtgcatgcgacgtcatagctctcnnnnnnnnnnnnnnnnnnnnnnnnnnnnnnnnnnnnnnnnnnnnnnnnnnnnnnnnnnnnnnnngacttgctagcttnnnnnnnnnnnnnnnnnnnnnnnnnnnnnnnnnnnnnnnnnnnnnnnnnnnnnnnnnnnnnnnnnnnnnnnnnnnnnnnnnnnnnnnnnnnnnnnnnnnnnnnnnnnnnnnnnnnnngctgcatatnngcctt

SEQ ID NO: 37102 - DNA, 401 bp, Homo sapiens
ggtttacatctttctaaatctagtcaactaggatgtaattattgttaaaaattagatttaagttagactctactcattgttttcagaaaccaatgaatgacccactgacttaacccatagcatatcagactccaacagatgaggactcatgaagtctcaagtgctttatagcatttctgaaaatgtgatcagcccatttgtataaagcctttgtctgctaatgtgtaattaggcatgtttatgtatcatttttgagaaattaatactggggaaaataatcattttagcttttgcttagcattggaattaaattgtaatcacctgtatgttttgtgtagaagatggcatcatcattcttaggtcattaactcatgaaatacaacattttccaactactactg

SEQ ID NO: 37103 - DNA, 390 bp, Homo sapiens
ctgggaggagagcattccaggcagaaggaatattacatgctaaggccctgagctggtacagagtgtaaagaaacagtaaagagatcagtgtgactgtagtgaacaataatagcattttagggagaattagaaaatgaactgagagagattgggagtaataatcctgcctgattgtaggtaattacgtagggcattatagccctttctcaagagtaggactttactgagtgagctagcaagcaattaggattcagatcaaagcaaggatggaagcaggtagtagtaggaagataatatggtaaatccaggtgacaaatggtacaatttgagattaagagtaatggaaataataagtggtcagattctgaatgtattttggtggtagcacca

SEQ ID NO: 37104 - DNA, 387 bp, Homo sapiens
agaaatctatgttacattttatttagttcctcttactaaatcttcaaattcccttatcttttctatagcagtctctaatatgttgccacattcattcagtgtatttttttagtttaggtgtttttaaaatatctttagaaatttggtttagtcttttcagaataactcttccatttcttccctcgtatgtatggtttcttgtacattcttgaatatatggattatatttttaatagtcgctctaatattcttatctgttaattctatcatatgtcttctttctgggtctctttttattgattgattttctcctattattggtggtatctttctgctagtttgaatgactgacaattttttgttagatgctagaccttgtgtgtttta

SEQ ID NO: 37105 - DNA, 401 bp, Homo sapiens
  misc_feature (1)...(401): n = a,t,c or g
attttcttgtaatcagtttgttttaaaagaaagccactaacatgtatacaattaaggattttgctcttagtagtctcctctaatactagtttgggattgtgtccactcaatatcaacatctaataataattgtgttcaattataccaggcagtattcaaggggtattactcagagtaactcacttaatcctcacaaactccaatgagacctttccttgtctnnnnnnnnnnnnnnnnnnnnnnnnnnnnnnnnnnnnnnnnnnnnnnnnntataattacacagttaggaaggagtgctctttgacaatttaataattttaacaatgagatgcaattaattcttgtcatagccatttttcattcactaatgtttagaatgaattaatcaaatgtctgacttc

SEQ ID NO: 37106 - DNA, 402 bp, Homo sapiens
ggcactccttcgagtttaaccaaatgagatcatctctgtcatgtgcctcacgcctcacagggactccatgtgtgaagattcccccttcactcaccagatcatctccatggcaacagcttgcagcctgctcttggagtgctttgttttggcagcttctctgctgttttgtgtatggagtgaatggaggaggtaaatccacagattaagaatatgctgtcaggagtcaggcagccaaggtcagaagccagctctgcttctcagtggtaaggtgcttgacttctacatctcaattttcacccactttgtacttttttcctaaattaaatgagtataatagtagtacctacttgataggacttttgtgaaaattaaatgatataatgcacctaaaaacagtactgt

SEQ ID NO: 37107 - DNA, 368 bp, Homo sapiens
cggacgcgtgggattcttttaatcagagttagtaatgtggacagtacaaaatcgagagagtctggggcttctctctttccctgtgatgattaccatggtctgttgtgcacacagcaccaatgaacccagcaacatgtcatacgtgaaagagacagtggacagattgctcaaaggatatgacattcgcttgcggccggacttcggagggccccccgtcgacgttgggatgcggatcgatgtcgccagcatagacatggtctccgaagtgaatatggattatacactcaccatgtatttccagcagtcttggaaagacaaaaggctttcttattctggaatcccactgaacctcaccctagacaataggg

SEQ ID NO: 37108 - DNA, 291 bp, Homo sapiens
aaagaagatggaattctctgtagagcgtctcaatccacttttaaccatggatgagagcagactccatttaccctgaaatagcagcttctcttgagaggagagtgacattgaagcaactccgtctgctgcagctgaccccctcacactgagttcacagtgcgccctccctccctcccatctgggggtagtgccttatgctgggtgttggagcagagtgagggagaggaaaataaagacctgcacatctgaccccaaggtgtcaggccggtttactggtaaaaaaaaaaaaaa

SEQ ID NO: 37109 - DNA, 361 bp, Homo sapiens
  misc_feature (1)...(361): n = a,t,c or g
agtggtttgagacaggagtgtaaatctggttgttgttactccatcataactcaaaacagaagtgtctattggcttattcaagtcatggaccacataatcttttcccccactggcaaagtgataggataggcacatagtattactcaataaacacttgtctaattgaataaactatattgcctctttttttttttttgnaannggnntttanntttnnngcccggnnngnannccaggggngnantctgggnnaactgnaccntngncnnccntnntaaancnntttncccngcntggccccccnaanntcnggggannnanggncnccctnnncangccngggnaatttttnnaaaaaaac

SEQ ID NO: 37110 - DNA, 435 bp, Homo sapiens
  misc_feature (1)...(435): n = a,t,c or g
ttttgaacgttggacgccctnnaggnaccggtccggaattcacnnnnnnacccacgcgtccgatctttcctatgcctttgacaagtggtcagttgtcctttctaagtaatagtcatcatcatgaaatgtctccaagagttcctttagcacagactttttggccgccctaacttgcttcaggaactacatacctcgtcattaaattcactgtctcactaggatcctctggctgcatatcccaagttttcttcagtggcagcagtgtcaacattcctgtggccaatcatttatttgttctagaattcatttacatgtatgtctaattttgcttccagcattatcactttgtgggtttatgctgcacttcgattttgttggccagttcctctcttgtgactatccattttcgtaacacgtcctgcaggtttagcattg

SEQ ID NO: 37111 - DNA, 419 bp, Homo sapiens
ctccaagaaattactggattcatttattgtggagagctggaacatatatattccagctaggtacaattcttaacccctttacacaggcaaagccagaagctgttgtcatgtcacaaacctggaaaagtctaataatctatgaagagaagccagaggacaaagttggtttgcttctccaccctcaagatgacagctcactctggtttttatgtttagacactcagggcaccatagctttgtaaataaggggaattgtcatcaggtttatgtacacaaattctgacacattaaatggtgtctaaaccaaagcaaaacttagtagaactactgaaatgcagaatgttacagataccatttgagcatgtatctcaagagaattcactgctacttgatgaaaagtgccatgttatactctttaa

SEQ ID NO: 37112 - DNA, 406 bp, Homo sapiens
cccacgcgttcggcttgaactcgctttctccatcttgtatgactcaaactgccaactgaacttcatcgctcctgacaagcatgagtactgtatctggacggatggactgaatgcgctactcgggaaggacatgatgagcgacctgacgcggaatgacctggacaccctgctcagcatggaaatcaagctccgcctcctggacctggaaaacatccagatccctgacgcacctccgccgattcccaaggagcccagcaactatgacttcgtctatgactgtaactgaagtggccgggcccagacatgccccttccaaaactggaacacctagctaacaggagacaggaatgaaaacacacccacgccttggaaccgcctttggtaaagggaaagctgtgggttccat

SEQ ID NO: 37113 - DNA, 408 bp, Homo sapiens
cgctttgcctccgtccttccccctactcccgccttacctgacttccttttcggaggaagatccttgagcagccgacgttgggacaaaggatttggagaaacccagggctaaagtcacgtttttcctcctttaagacttacctcaacacttcactccatggcagttcccgagacccgccctaaccacactatttatatcaacaacctcaatgagaagatcaagaaggatgcgtatccagtatgccaagaccgactcagatatcattgccaagatgaaaggcaccttcgtggagcgggaccgcaagcgggagaagaggaagcccaagagccaggagaccccggcaccaagaagctgtgcaaggcgggggagccacccccgtggtggggctgtccaggggcctgtccggca

SEQ ID NO: 37114 - DNA, 410 bp, Homo sapiens
atgctgcaaactgtctattcaataaccattctgccattttccttactatatgaaagcttataatagtctcagaggcaacatggccagcataaaagtagaacaacagaacagaatgaaacataagaaaacagaaacaaacaagtagaagctcaaatatccacacaactaaaagtggcgatgataataaaatctggctctggtgacataagcggaagttgttgtgtggaacgtgcaggaggactcctttaaaaggaatatggacagggagtgcacacttttccagccttcttgtctcattccttcttgctgccaggaacaatgacatgagaactggagcgctaacagccattcagatcatgaggcaacattaaggatgaaaaccacacactgaggatgatggagcagaaaaa

SEQ ID NO: 37115 - DNA, 431 bp, Homo sapiens
cgtacttcctttctttcttccctctgttattcattcatcaagcaggttaaagccattgtgctaagatctaatctgaggacactataatggccctgtcgtcagggaagcccgtgatcgctcgttttcaggggtcttaccggtcagcaaccttggcattgatacataggcactctacagaatttaagttttcagaggtaagtctgttgttctgattaatctgcattcattcagcgaatgctcaagacaagccaggcatgctgagaagcggcgctctagttgtatgtaagatgggcattcctctgctctcctctattctccatgtcgactgagaagagtataataagaacattgtaccctctccacacttaaccctctgggattctttattataatataaaccaccgtcgtgaggcatttacctgttggatgga

SEQ ID NO: 37116 - DNA, 384 bp, Homo sapiens
  misc_feature (1)...(384): n = a,t,c or g
aaggatgttagcttttacttggagtgaaatgggaagccactggaagatgtggagtagtgacatgatgtggctttcatgttaacgggaccactctgactgtgtggggaaagagactgtcagcaagggctgaaccagtcagaggatgaccacatgattcaggtgagagaaaatggggcatggacctgggtgggtacagggggagggtggggagaatttcccccnngtntnttntcnttnnanntctannctttcttttnacttgnccttcgnccnntgcgnnctgtncttctttntcnntcccnnagnnagcgngntncccntnccctgtccttcncatgttccgnncctatncnntgtnctcnnnctgacgtgccnctncttctg

SEQ ID NO: 37117 - DNA, 387 bp, Homo sapiens
  misc_feature (1)...(387): n = a,t,c or g
ggaaggctttgccatgggcctgctgcgtcagaccagtactgggaaggaggacggttgtaagcagttgttatttagtgatattgtgggtaacgtgagaagatagaacaatgctataatatataatgaacacgtgggtatttaataagaaacatgatgtgagattactttgtcccgcttattctcctccctgttatctgctagatctagttctcaatcactgctcccccgtgtgtattagaatgcatgtaaggtcttcttgtgtcctgatgaaaaatatgtgcttgaaatgagaaactttgatctctgcttactaatgtgccccatgtccaagtccaacctgcctgtgcatgacctgatcattacatggctgnggttcctaacctgttg

SEQ ID NO: 37118 - DNA, 396 bp, Homo sapiens
  misc_feature (1)...(396): n = a,t,c or g
ctagactgcattacaaacagacgataccatcgcttcagcagcatcctctcagacaagagccactatttctgattcagatcacctgtcatcgaagtttaaagaaggggaaacaggagacagaaatacactgaaccaaaaagattcaaaagagcaagtggaatctctaagaatggcttccagccactggaatgaaaccactacctctgtttatcagtaccttggttttcaagttcaaaaaatttaccctttccatgacaactggaacactgcctgctttgtcatcctgcttttatttatatttacagtggtatctttagtggtgctggctttcctttatgaagtgcttgactgctgctgctgtgtaaaaaacnaaaccgtgaaagacttgaaaagtga

SEQ ID NO: 37119 - DNA, 394 bp, Homo sapiens
cttcctactgaactggaggacttgataccggaagtagaagaattctacaaaaaaaaatcatagtggtagaaaattacattggcatcatctcatgtcaaatggaattataacatttaagaatgaagttggtcaatatgatttggaggtaaccacgtttcagctcgctgtattgtttgcatggaaccaaagacccagagagaaaatcagctttgaaaatcttaagcttgcaactgaactccctgatgctgaacttaggaggactttatggtctttagtagctttcccaaaactcaaacggcaagttttgttgtatgaacctcaagtcaactcacccaaagactttacagaaggtaccctcttctcagtgaaccaggagttcagtttaataaaaaat

SEQ ID NO: 37120 - DNA, 399 bp, Homo sapiens
ctctgtagttacatttaggataatctttatggttctacttcctgtaatgtacaattttatataattctgaaatgtttttaatgtatttgtgcacatgtacatatggaaatgttactgtctgactacaacatgcatcatgctcatggggagggagcaggggaaggttgtatgtgtcatttataacttctgtacagtaagaccacctgccaaaagctggaggaaccattgtgctggtgtggtctactaaataatactttaggaaatacgtgattaatatgcaagtgaacaaagtgagaaatgaaatcgaatggagattggcctggttgtttccgtagtatatggcatatgaataccaggatagctttataaagcagttagttagttagttactcactctag

SEQ ID NO: 37121 - DNA, 398 bp, Homo sapiens
  misc_feature (1)...(398): n = a,t,c or g
ggcatgagttgaagaaggcaaaggcttgtaaatttacccaatgcagtttggctttttaaattattttgtgcctatttatgaataaatattacaaattctaaaagataagtgtgtttgcaaaaaaaaagaaaataaatacataaaaaagggacaagcatgttgattctaggttgaaaatgttataggcacttgctacttcagtaatgtctatattatataaatagtatttcagacactatgtagtctgttagattttataaagattggtagttatctgagcttaaacattttctcaattgtaaaataggtgggcacaagtattacacatcagaaaatcctgacaaaagggacacatagtgtttgtaacaccgtccaacattccttgnttgtaagtgttg

SEQ ID NO: 37122 - DNA, 415 bp, Homo sapiens
  misc_feature (1)...(415): n = a,t,c or g
cttcggggaatgcctcctggccgtggccctggcaggcgccccttaccaggctgtgggcttggtccaaggcactacacctgtactgcaggggctcaatggagctgtcttcaggccagaagtgcctctccgcagggacctgcccctgctcctattccggactcagacctctgaccctgcaatgctgcctaccatgattggcctcctggcagaggcaggcgtgcggctgctgtcctaccagacttcactggtgtcagatggggagacctggcacgtcatgggcatctcctccttgctgcccagcctggaagcgtggaagcagcatgtgactgaagccttccagttccacttctaaccttggagctcactggtccctgctctggggcttttctgaagaaacccacccactgngatcaag

SEQ ID NO: 37123 - DNA, 405 bp, Homo sapiens
  misc_feature (1)...(405): n = a,t,c or g
nnnnnnnnnnnnnnnnnnnnnnnnnnnnnnnnnnnnnnnnnnnnnnnnnnnnnnnnnnnnnnnnnnnnnnnnnnnnnnnnnnnnnnnnnnnnnnnnnnnnnttattttttcctttctcttttcttttttttttnggctacnngactcannattttttttnaaatnaaaaangncaaattttnggcnggccgngggggctcacccnngaanncccagcnctttggnaggccanggnggncanatcncaaggncggnaaatcgaaaccntccnggctaanggggnnaanccccgtctttgntaanggtccaaaaaatnacctggncgtnctgggggncncctggggcccaagnnnnnnnnnnnnnnnnnnnnnnnnnnnnnnnnnnnnnnnnnnnnnnnnnnnnnnt

SEQ ID NO: 37124 - DNA, 393 bp, Homo sapiens
agtttgaaacatttgatctcatgacacttcatccaatacaaattgcacgtcagctgacacttttggagtctgatctttacaggaaagttcaaccgtctgaacttgaagggagtgtgtggaccaaataagataaagaaataaattctccaaatttattaaaaatgattcgccataccacaaatctcaccctctggtttgaaaaatgcattgtggaagcagaaaattttgaagaacgggtggcagtactaagtagaattatacaaattctgcaagtttttcaagatttgaataatttcaatggcgtattggagatagtcagtgcagtaaattcagtgtcagtatacagactagaccatacctttgaggcactgcaggaaaggaaaaggaaaattt

SEQ ID NO: 37125 - DNA, 400 bp, Homo sapiens
  misc_feature (1)...(400): n = a,t,c or g
ggcagactccgtctcaaaaaaaagaaaaacaaacaaacaaaaaaaaagaaatggtaccaattatggaagtctgcagatgtaactattttttgcttataaacacaggtgtttttggtgtttttaacatctcaaaatgttgaagacagttcaatgtgtactttatcacgcagtactataacattatatgactgtatagtaggctaggtgcttacagaactatgtcctatggtaattgctcaaatgttcatttaattgaatcaaattatttcagattgtgtttctccagttacaaataagtgtctgcagaagttccaatgattgacttctctatgagtctccccaaactattcctgtaaaacaagggcctgngtattcaatattcccctctgcaggggataaa

SEQ ID NO: 37126 - DNA, 393 bp, Homo sapiens
caactcaacacatgcatgtattcacacattgccgtcattccggagtctgctgaaggctgccccagactttgtaagtgagatgcagacatagcatagtgatgacctactatgtgtcaggtgctttgaatgtgttatctcttatgtggtctttataacagtggtaggtatattacttagttccattttaggatgaagacacagagagcttaaacaatgcacctaaggtcacagttccaaaaccaggtcttgaggcttgttgaatactctcttctcagggagaatcttggttgatcaggaaatctaacgggtgcttactaacttcattccctcttgtgtaagattttctttctacctgttttttggtattaaggtttgtttgtatattctggaaac

SEQ ID NO: 37127 - DNA, 401 bp, Homo sapiens
  misc_feature (1)...(401): n = a,t,c or g
atcagttattcatgtaggtaaagtaaatctagaattatttataagaattactcattgaactaattctactatttaggaatttgtaagagtctaacataggcttagctacagtgaagttttgcattgcttttgaagacaagaaaagtgctagaataaataagattacagagaaaattttttgttaaaaccaagtgatttccagctgatgtatctaatattttttaaaacaaacattatannnnnnnnnnnnnnnnnnnnnnnnnnnnnnnnnnnnnnnnnnnnnnnnnnnnnnnnnnnnnnnnnnnnnnnnnnnnnnnnnnnnnnnnnnnnnnnnnnnnnnnnnnnnnnnnnnnnnnnnnnnnnnnggttctcttgtatacctgctcagtcagttcctttca

SEQ ID NO: 37128 - DNA, 400 bp, Homo sapiens
aaatacttaagttcttatctattttgtttatatcttaaatggaaagataaatgcttaagttcatatctattttatgtatatccatataaaatagataaatgtggtttcatcttgatatgcaatgataacttaggtacgaatttaatacacatatacctatatttatcacactacatttcaccttagatatttgaattttcactttataaattatgagaatatctttagagaaggcgatatttgggatgatacagaaatacaactggtgttttccaaaaattagctgaatacgctatatattttcagaccaacatattcatatgttttagtctttatttgatattttacggacattgtaattgttttgttaactgtgtactggatcatcttgatttgatta

SEQ ID NO: 37129 - DNA, 298 bp, Homo sapiens
cccacgcgtccgaatgatttcagaattttcagttacaagtgtatataccgtggctattgtttatggattcatatgtaaggtagggtcttttttgcatatagactccagtattagttactttcattctaaaattatatttatgcttctatggggaagaaaatttttaattcacttggttgtattaaaattatacttacggtttgagaaaacatgctatgaaaatcatgattatagcaaattaaatatgctcaaaatttaaatctaaaataaaagcccagaaactgaaaaaaaaaaaaaa

SEQ ID NO: 37130 - DNA, 406 bp, Homo sapiens
ctcttttgggactttagcatcccaaaagttctacagttctacaactgcaagtaatgggttctgccaaatccagggaggttggaagaggttctgaggcttggatgaaactgcagcctggctaacaccttgatttcagtctgatgccaccgggcagagagttgttacctgtgcccagacttctggccatatttcaaaaaaattctgaggctgtagactctttcacacaacaacaatgtagttggtgcaataaagtacctggtgcaataaagactccaaagccagcaaaggtgaggtacagggcaagggtaaagtgcacacatgatgcaccttgatgtcatagtttctcattgcctccttatctcccctctactgctatgagattccatgggaaagttccatcttgaag

SEQ ID NO: 37131 - DNA, 401 bp, Homo sapiens
gaaagtgataggtaaattgtatatgaccatagaagtacaattaaattaagaatatagcatgatcaaattttcacattatattggattaaaaagtaccctaagtagccatctccttaaagtaggtgagccaaagacataataataaaatattcaatatttttctataaaatacaaatttccatgaggcacacatacattaaatttaatataaagagaatcattactttatttaagagttgtttaaaggtgcacaacaacagtgagttaccaatattcagaaccttagtctataatttcaatgtactgtaagttactacagctttaaccacaatagctggcataacctaaatcattctgcccaaatacaggtaattatagttttgatgtataaaaattaccaa

SEQ ID NO: 37132 - DNA, 407 bp, Homo sapiens
ccggccacctgtccccagccctggcgttacacagcagcagctgtgctggggaaccagatttttattatggggggtgatacagaattctctgcctgctctgcttataaattcaacagtgagacttaccagtggaccaaggtgggagatgtgacagcaaagcgcatgagctgccatgctgtggcctctggaaacaaactctacgtggttggaggatactttggcattcagcgatgcaagactttggactgctacgatccaacattagacgtgtggaacagcatcaccactgtcccgtactcgctgattcctactgcatttgtcagcacctggaaacatctgccttcttaaatgcagtacattctaaagagagtgagcatgagctcactccatcactcgatgagataata

SEQ ID NO: 37133 - DNA, 410 bp, Homo sapiens
  misc_feature (1)...(410): n = a,t,c or g
ggaaaaacaattttactgttttgaagccaaagatgttgaaatcagtttatatgtatagatattttaacaatgtttaacaatgtaagtccacatataagatacccaagctttaaatatctatacatataaacattgttaaaataaaatgaatcaaaaacatggtttttaaaaagaatccctgagatacataaaagtttgaaaattattgagaaaataattgcctctgccaaaaacaaatggtatgaaaaggtagtctgaatcattcagcatatctaaacataatcttgttcttctcaaatatgcttggaatgcatatttgacacgtttgtttctgagaaaatttagcagaaatattgtagtccaacttttcctatagcttcccctacaatgnttatcattgctttaaagag

SEQ ID NO: 37134 - DNA, 408 bp, Homo sapiens
catctttcctatgcaaagagctccctgaaggtactctcatgctccactacttccaccctcaccatattgtggggtttgcaatgctggggatgattaaggctgcaggaaagaagatctatcggctggatgtggaagtggaacaggttgcaaatgagaagctatgctctgatgtttcaaacccaggcaattgtagctgtcttactttccttatcaaagaatgtgaaaatactaatatcatgaagaaccttccacagggaacctcccaagttcctgcggacctcagaattagcatcaacaccttctgtagagccttccctttccacttgatgtttgatcccagcatgtcagtccttcagttgggggaaggtctaaggaagcagcttcgatgtgacactcacaaagtgctca

SEQ ID NO: 37135 - DNA, 403 bp, Homo sapiens
  misc_feature (1)...(403): n = a,t,c or g
tatagcattgcattctcaaagacaaggtccaaaaatatgcagttaaatttgcaattttatttaattatctatctatttagagacgggatctcgttctatcgcccaagctggagtgcaatagcaacctcaaacttctgggcacgagcgatcatctcgcctcagccttccaaacacctgagaccnnnnnnnnnnnnnnnnnnnnnnnnnnnnnnnnnnnnnnnnnnnnnagtgacagggtctagcccaggctggtctcgaactctagtctcaagcgatctgtccacctaggcctcccaaaagcactgagattcccagatgtgagccactgtacccaacctagatttgtaatttaatgacagaaaaccttttaagtgctacctatctcttacagagtaaaatacaa

SEQ ID NO: 37136 - DNA, 413 bp, Homo sapiens
aaactgaaggaaattcagttacaggagcgagagcgagctctcaaagcaagagaagaaagattggagcagaaagaacaggagctttgtgttcgtgagagactagcagaggacaaactggctagagcagaaaatctgttgaagaactacagcttgctaaaggaacggaagttcctgtctctggcaagtaatccagaacttcttaatcttccatcctcagtaattaagaagaaagttcatttcagtggggaaagtaaagagaacatcatgaggagtgagaattctgagagtcagctcacatctaagtccaagtgcaaggacctgaagaaaaggcttcacgctgcccagctgcgggctcaagccctgtcagatattgagaaaaattaccaactgaaaagcaggcagatcctgggcat

SEQ ID NO: 37137 - DNA, 412 bp, Homo sapiens
caggataagaagaaaggatttttcatctaagtaatgggagcactgtgttaattagagcagggttctgagtggtcaagttgcaaaaagacaaataagctgtggactaaaaagaactggaatggagaaatctgtcaaatctcagaaggagtctaatgggttaaatgtgtgttgttgaagaattgcaatgagtggtgtagatggtgaagagcagcgaaggcctgaatacgagcaggagccagaaaacagactagctcttcaagtcttgatgggaagttttttctattgagaacacatatacatacatttatacagcattgcaaacacagcactacgtattaattatggatatgtagtaaaattatgaaaatatgtatgaggataagtatcagattcatgtagtgattttctcttg

SEQ ID NO: 37138 - DNA, 422 bp, Homo sapiens
  misc_feature (1)...(422): n = a,t,c or g
atggccaattcattggaaatatgtgaaacatcaaatatgagaatcacttttaggatgacaggtataatttggaaaatctgatccgatagaattaagaccaaaacttttttaaatgggagaagacagaatggccatttttttttcaatgtctttgaacaaaataatgagtagaagtaatatattcttcaccattgcttactgtgtccatgagaggttgtttgtaaatagatatatacctacaggaagtaaaagataatgtaatgaaattctcaaactctccaaatatgtttgtttccttttaagattgtttttcttgagacaaaaaactgaaatactatctaaaataattttggattttatttcctctatcctttttataacaaaatgttacttagctttatatattgctattatgnatgttt

SEQ ID NO: 37139 - DNA, 429 bp, Homo sapiens
gactcttccctgaagctgccggctgaggccggagctgccgcctccatgagaggcttcctcctacaccccagggccagaggaccctttgccaccagagtgagatcctagagaccatcatcctggtaaatcccagtgcagacagcatcagctctgaggttcatcatcttcttagcagctcatcagcttataaactactaatcttgagtgggcaaagtttagagcctgggggagacctcatcctacagagtggcacctactcatatgaaaactttgcccaggtccttcacaaccccgagatttcccaattgctcagcaatagagaccctgggatacaggccttcttaccgtgtcctgcttaggggaaggtgattggagccacctgggattatccagttccaagagaccctgcaccttcggctaaaccctgag

SEQ ID NO: 37140 - DNA, 416 bp, Homo sapiens
  misc_feature (1)...(416): n = a,t,c or g
gcaatgcagtaattcaggtggctcaccccctggtgcagaagcagttggttgattatatccataatgggttcctggtgcctgtcatgggtcctgccttgcacaagacctctgtggaggagatgatcgccagtaccgcctacctggaacttttcctacggagtatctcagagcctgctttgctccgtaccttccctgcgattcctgttgttgcaccggcatgacacccacaccatcctcgacaccctcgttgctcgtattggcagtaactcccggctctgcatggtctctctgagtctcttcaggaccctcctgaacctcagctgtgaggatgtcctgctgcagctgggnctcaggtatcttgntccatgtaaccncgttatgctgagccagaaccggctgttcgtgatgtggaccta

SEQ ID NO: 37141 - DNA, 406 bp, Homo sapiens
ggtgtatccatacaatagcatactactcaacaataaaaaggattgaagttcctatacctgcagcaaattgggtgaatcccaaaagcaagaaaccagattcaaaaggctatgtactactgttgatccctgtttcattctgggaaaggcaaaactgtagggataggtatcaaactgagggttgggaaagaggattgacttaaaagttacatagggaattttagggggaaatggaaattctttgtattttgattgtggtggttacagaactgtgtagttaggaaaaacttagaactgtatacctaaaaaggacaggttttactgtgtgtaaattatgcttcaataaaactgacttaaattttttaaatgtgaaatgaaggtgttattaaaaaagcaaattatgtcaagg

SEQ ID NO: 37142 - DNA, 420 bp, Homo sapiens
aacgatgccatcggcaaagtctttgtgggctacaacagcaccggcgcggagctgcgacactggtcagacatgctggccaaccccaggcgacctattgcccagtggcacaccctgcaggtagaggaggaagttgatgccatgctggccgtcaagaagtaaaggaaagaagaagcctttctgcatttgcccatatagtgctctttagccagtatctgtaaatacctcagtaatatgggtcctttcatttttccagccatgcattcctaacacaattcagtggtacttggaatcctgttttaatttgcacaaatttaaatgtagagagcccctaagtccttcatcataccactgccctccaaatctactcttcttttaagcaatatgatgtgtaagatagagcatgaatgaaattatttattg

SEQ ID NO: 37143 - DNA, 418 bp, Homo sapiens
  misc_feature (1)...(418): n = a,t,c or g
agcgcattaaaaataggaaataaagcagttgcttaaaatgccagtcaattgaaaagtgtaacttatcattatacaaacattctgaacctaccataatgaaaatgttcttgaatcttcactttgactttcagtttatggggggggtagatcattcatgtgatatataagcagctatcaagtgggcaaaaacattgctgtgaatagcactgtttaggctaacattgtaaaaattgtaatgttataattattatttatttggagaattaacttccccctctaaagttatttattattgatgcttataccatgattgcaccttagccttttacatactaaaaacatgacttgttagttgtattgcatgctctttgtcctgtaatgtgtgtgcaatgacaacttggttctgntttatttaaag

SEQ ID NO: 37144 - DNA, 416 bp, Homo sapiens
cccccccaagccccatgcatgccccacctgtgccaagtgcttcctgtctcggacagagctgcagctgcatgaagctttcaagcaccgtggtgagaagctgtttgtgtgtgaggagtgtgggcaccgggcctcgagccggaatggcctgcagatgcacatcaaggccaagcacaggaatgagaggccacacgtatgtgagttctgcagccacgccttcacccaaaaggccaatctcaacatgcacctgcgcacacacacgggtgagaagcccttccagtgccacctctgtggcaagaccttccgaacccaagccagcctggacaagcacaaccgcacccacaccggggaaaggcccttcagttgcgagttctgtgaacagcgcttcactgagaaggggcccctctgaggcacgtggc

SEQ ID NO: 37145 - DNA, 400 bp, Homo sapiens
  misc_feature (1)...(400): n = a,t,c or g
aaaaaagtgcctgtggatgtatataaaattaagatgataagaaagtgctcctgagaaggctcttgccagaagcctgatgtgagtgtgtggcacctgtgatggcagggctgaganctgggcttctgncctnctctgtgtcccggcatggaagccagtataagcatttccaaatgagggaaaagtccttggctcgtttgatccagttgagttgaaagggttgccttggcatcanaggctcctctgatggctgacatnagncactgcgtctgggcctgagacgtncatgganggctgnnaagccacngattcccctagctggagaggctcctgtctganatcggtagatgaaaantanngncnttatgactntggcaacntgcttnatttctttntcatttaa

SEQ ID NO: 37146 - DNA, 397 bp, Homo sapiens
  misc_feature (1)...(397): n = a,t,c or g
agctgcacagcctgaatagaagggctggtccagcggcggcggaggctggcgctgtcctgagagggagggctctgtgcggaagagatgaatcggacaaagggtgatgaggaggagtattggaacagctccaagttcaaggcttttacctttgacgatgaagacgatgagctttcacagttaaaggagtccaagcgggcggtgaacagcctccgagacttcgtggatgatgatgacgatgatgacctggagcgagtcagctggagtggggaacctgtgggaagtatctcatggtccatcagagagactgctggtaatagcggctcaacccacgaggggcgtgaacagctaaagagccgaaacagcttctcctnctatgcacaactacccaagcctactt

SEQ ID NO: 37147 - DNA, 399 bp, Homo sapiens
acccatctttgcttcctttcagttgcctcctggatcttctttcccgtcatcaaatgactgctgaacaggaaacctctttggtgctgtttcttgtgcatctgtccacctgttccccagtattgccctcaattcctgagagccctggagcggtttcctaccattcccttcttttagctgcttgttttaagtcctttttatgtgacattccctacccccaatgttgtcagctgcttgtgaaactcagccaggttgtctaacctggggtcaagtttgggtgactggtgcagagttacttcctaaaaggccactctccctgcctttggatttcatagtttctctgtcagtagcatgatccccaccgctatggtctatctatgatcaccgtgctttgtgaaactg

SEQ ID NO: 37148 - DNA, 413 bp, Homo sapiens
  misc_feature (1)...(413): n = a,t,c or g
gnnnnnnnnnnnnnnnnnnnnnnnnnnnnnnnnnnnnnnnnnnnnnnnnnnnnnnnnnnnnnnnnnnnnnnnnnnnnnnnnnnnnnnnnnnnnnnnnnnnnnnnnnnnnnnnnnnnnnnnnnnnnnnnnnaggcacatctcacatggtggcagacaagagaggnnnnnnnnnnnnnnnnnnnnnnnnnnnnnnnnnnnnnnnnnnnnnnnnnnnnnnnnnnnnnnnnnnnnnnnnnnnnnnnnnnnnnnnnnnnnnnnnnnnnnnnnnnnnnnnnnnnnnnnnnnnnnnnnnnnnnnnnnnnnnnnnnnnnnnnnnnnnnnnnnnnnnnnnnnnnnnnnnnnnnnnnnnnnnnntatcataatgccacaacaatcttcctaatgcaacaacctgaggtggcaacagtgtctat

SEQ ID NO: 37149 - DNA, 400 bp, Homo sapiens
  misc_feature (1)...(400): n = a,t,c or g
gaagtctttccataaaatcttttcacaatattactcctatttcttttagattttaatgagccattacttatctcttcagaagacttaagtcttcctttatactcagtgaaatttcccagaatgtaatactgtcactgttctgccaagttccaatcaccaagatcatgattacgaatcccaatctgaattctatacccatggtgactctgatgctctcaacttttgagtgcctcaaaaaatgctaaaacnnnnnnnnnnnnnnnnnnnnnnnnnnnnnnnnnnnnnnnnnnnnnnnnnnnnnnnnnnnnnnnnnnnnnnnnnnnnnnnnnnnnnnnnnnnnnnnnnnnnnnnnnnnnnnnnnnnnnnnnnnnnnnnnnnnnnnnnnnnnnnnnnnnnnnag

SEQ ID NO: 37150 - DNA, 407 bp, Homo sapiens
cttgctaccccagtcgtgtctgtgacaaccccaagcttgcctccgcaaggacttgtgtactcagcaatgccgactgcctacaacactgattattcactgaccagcgctgacctgtcagcccttcaaggcttcaactcgccaggaatgctgtcgctgggacaggtgtcggcctggcagcagcaccacctaggacaagcagccctcagctctcttgttgctggagggcagttatctcagggttccaatttatccattaataccaaccaaaacatcagcatcaagtccgaaccgatttcacctcctcgggatcgtatgaccccatcgggcttccagcagcagcagcagcagcagcagcagcagcagccgcgcaccaccgcagcccagccacaacccccgcagcccagccc

SEQ ID NO: 37151 - DNA, 392 bp, Homo sapiens
gcagcagagacgacgcctgcagcaaggagaccaggaaggggtgagacaaggaagaggatgtctgagctggagaaggccatggtggccctcatcgacgttttccaccaatattctggaagggagggagacaagcacaagctgaagaaatccgaactcaaggagctcatcaacaatgagctttcccatttcttagaggaaatcaaagagcaggaggttgtggacaaagtcatggaaacactggacaatgatggagacggcgaatgtgacttccaggaattcatggcctttgttgccatggttactactgcctgccacgagttctttgaacatgagtgagattagaaagcagccaaacctttcctgtaacagagacggtcatgcaagaaagcaga

SEQ ID NO: 37152 - DNA, 387 bp, Homo sapiens
ggcagagctggcgtcatgggccctcctggtagtcgtggtgcaagtggccctgctggagccacaggtgaccggggcgaagctggggctgctggtcctgctggtcctgctggtcctcggggaagccctggtgaacgtggtgaggtcggtcctgctggccccaatggatttgctggtcctgctggtgctgctggtcaacctggtgctaaaggagaaagaggagccaaagggcctaagggtgaaaacggtgttgttggtcccacaggccccgttggagctgctggcccagctggtccaaatggtccccccggtcctgctggaagtcgtggtgatggaggcccccctggtatgactggtttccctggtgctgctggacggactggtccccca

SEQ ID NO: 37153 - DNA, 404 bp, Homo sapiens
ttttttatgcagtgcctgtttttttttaaccaattaaaatcccttttgttgatgagctattgagagctgcagtagtttgcttttagtattgttgttgcacttgagcagagacaaacctttattcatagtgtctacaggacatatgaagagtgcaatggcaaaacaagagcaaaaagcacttcctcccatgaccttacagtaaccatactgattgaatccccagggacattccatcattgcaatagctcagatttttcttcctttttctttgcacaccagctctactctttagtaaaattgtaaaaggctgccattatggacattaggtatcccaacataaccatctggagtgtgtccagtttgttcttcataggaccaatttttatttgcagcttgagttttta

SEQ ID NO: 37154 - DNA, 404 bp, Homo sapiens
  misc_feature (1)...(404): n = a,t,c or g
tgtttattttgtttgctttttgaggcatgtgctgtcaaatgttagagaccaaacttagtgattagaggttggtcctttgaccttcttctcttaattgcttttcatgtaatcatgataatttactcaggtagcactccagtcacaaacaatgtcacagagatgaaacagattcaaagaaaaaatatttttaagtcttttgaaaagaagtgctattcaaatttaagacatgtttaaattcataggtacattatctcttagtaagaaatannnnnnnnnnnnnnnnnnnnnnnnnnnnnnnnnnnnnnnnnnnnnnnnnnnnnnnnnnnnnnnnnnnnnnnnnnnnnnnnnnnnnnnnnnnnnnnnnnnnnnnnnnnnnnnnnnnnnnnnnnnnnnnnnnnnnnnnn

SEQ ID NO: 37155 - DNA, 387 bp, Homo sapiens
aaagtttaaaagatttgaacagaaccaagctatcctgggaatggaggtccaatcacactaaccctcggactaataaaacatatgttgagggagacatgttcttacacagcaggttcataggagccagtcttgatgtcaagtgtctggcctttgttccaagcctgatagcctttgtgtggtttggattctttatttggttctttggacgatttttgaaaaatgagccacgcatggagaatcaagacaaaacttacactcgcatgaaaagaaaatctccatcagaacatagcaaagacatgggaatcactcgagaaaacacccaggcttcagtagaagaccccttgaatgacccttctttggtttgcatcaggtctgacttcaatgaga

SEQ ID NO: 37156 - DNA, 406 bp, Homo sapiens
  misc_feature (1)...(406): n = a,t,c or g
gacaaagtccgctcggctgtgcagaagggcacctccacaccagagtacaatgtgaaaggcattttctaccgcaagaagctgagccagcccatcactgtacaggtctggaaccaccgagtgctgaaggatgaatttctgggccaggtgcacctaaaggctgacccggacaacctccaggccctgcataccctccacctccgggaccgaaatagccggcagcccagcaacctgccaggcactgtggccgtgcacattctcagcagcacctccctcatggctgtctgacacctgcccacctacctggctctgaccgttcccaccaccatctgcatgttcccactgggcctgagtntagcctgggagccaggatactggggtccttttcccactcttccactgacttgct

SEQ ID NO: 37157 - DNA, 396 bp, Homo sapiens
gtgtctgtcatgaaagataggctctgcttacttctaaaacttgtaacataagaaggagattctgtttctgggcaaccccaaattatcaagatctccttcaagtggccatggaggccacagggaagagtaataggagaaatgggtgtgggctgaactgcttttctacttaagtagggaatgaaggaaagggagtataataaggatactgtgaaggagtcatatgaggtgtagcaagaaactggaagagtgtagcccataagagccaacagaggaaagggttgcaggggcaggatgatcaacaatgccaaatgacaccatgcagtcaactgcaggggcaagatgattgacaatgccaaatgacactgtgtggtcatataaatgaacctgaaaatttcc

SEQ ID NO: 37158 - DNA, 409 bp, Homo sapiens
cccgagcttcagcttccaggatgcttctctggaacctcaaggcaggcagcccaggccctgggcctgatctctaaccccgtcatgctgctgctgaccacacccagccaacctgcccctccctgacccggggccccctttcctccagggcccagtctggctcccgagctcagacacagcccccaggagccgcccaccacggctgtgggaacttccaggcctcagcgcagagccctgcttggggccagcacggtgggcagctgccggccgctggggactgggccctgctcgcatgccgccccgccctccccccacctccacgactatttattgagcgcctgttgtgtgtcacggggctatgagggccgtggggtgtttgggtggattatccacacaggtcccgggccctgcc

SEQ ID NO: 37159 - DNA, 350 bp, Homo sapiens
acaggtgtgagccaccgtgcccggccaccagaatcctttggtatagccaagccttttggttaccgcctcatgaagaatatgcttcccgcattgtcctagtcccagttgtattctcacaggtgttatgtgcaggacacaatccaaatcataaacctggctatgcccaacacatttctgctaatagggagagggacccaccacacacccacacatgccagaggtccctcctcacagaggagagggcctgtgtctgtagaaggttaaagctgacaacatgtgaaacatcccagaattatgactcttcccaagtttaaaatacattctcctcatgagagcaaaaaaaaaaaaaa

SEQ ID NO: 37160 - DNA, 275 bp, Homo sapiens
cttcaaaactgtttgttatctcttgttaccatgtatgtataaatggaccttttataaccttgttctctgcttgacagactcaagagaaactacccaggtattacacaagccaaaatgggagcaaggccttctctccagactatcgtaacctggtgccttaccaagttagcttttctgttttcaagtgtaaatgatgttgagcagaatgttgtacttgaaaatgctataagtgagatggtatgaaataaattctgacttatgaaaaaaaaaaaaaa

SEQ ID NO: 37161 - DNA, 414 bp, Homo sapiens
  misc_feature (1)...(414): n = a,t,c or g
gaacaagacaaaagaaagtggaagtggtattccccacccctccctgcacccatgtgcctgggcttcccctttatttcccttttccatttaccccgtaatgtgtctctacagctaccttaccactgagccgtaagacaaatgtataggaagaagcaagtctacagcacatagtctttgtaagggattgatgtgaacacttttttttggatgcactaaggagttatcaatacttctggctttatgagagctcttaaattttgtctaaaaaaccaaagggctgtgagtaagggagctatgtggaaagtgggactctgaagtgtattttgaaaattaatcgccaccctcttccaaattatagaattttttaaaaacaanananaaaaatnaaaaaaaannanaaatttaagngngggg

SEQ ID NO: 37162 - DNA, 422 bp, Homo sapiens
gatactgattgcattaactttagtgcatcagtttaaaatccacggcattcttctaaagagttatgtgcttttctctaacaagttttggcagaaagacttccttctgtgtcatctcgctaccagtttttttctcagaccatagaagttacttgttccttgtctgaaaaactcatcaatttaccagaaaaagataaatgattgattgaatgtgaaatgccttccagtctttcatcctagtagctacctcttgagtaagatccatcaacactcaactataacatgctcctcttccaagacaagcttcctgtattacttccaaacttcatcagtgctgactgtacttttaaaaatatataagtactaacaggcaaaaggaagaaagtgatgcctaattaacgggcaacatgaatctatgtaccata

SEQ ID NO: 37163 - DNA, 413 bp, Homo sapiens
  misc_feature (1)...(413): n = a,t,c or g
cgtccttcccggccatcccctcggccctgggcttcaaggagttggggccctactccagcaaaacccggggcatcgagtggaagcgccccacggagatctgcgctgacccccagtttatcattggaggagccacccgcacagacatctgccaaggagccttgggtgactgctggctgctggcagccattgcctccctcaccttgaatgaataaatcctggctcgagtcgtccccctaaaccagagcttccaggaaaactatgcagggatctttcacttccagttctggcaatacggcgagtgggtgnaggtggtggtggatgacaggctgccaccaaggacggggagctgctctttgtgcattcangccgaagggagcgagttctggagcgccctgctggagaaggcatacgcc

SEQ ID NO: 37164 - DNA, 387 bp, Homo sapiens
gtgatgcccgccctggaggcagcccagatgcgcccagcctgtgaacagatctacaacctcttccacgcggccgacccctgcgcctcacgcctcgagcccctgctggccccgaagttccaggccatcgccccactgaccgtgccccgctaccagaagttccccctgggagatggctcatccctgctgctggccgacactctgcagacgcactccagcctctttctggaggagctggagatgctggtgccctcaacacccacctctactagcggtgccttctggaagggcagtgagttggccactgaccccccggcccagccagccgccccagcaccaccagtgaggtggttaagatcctggagcgctggtgggggaccaagcggatcc

SEQ ID NO: 37165 - DNA, 344 bp, Homo sapiens
  misc_feature (1)...(344): n = a,t,c or g
atcaaagcccccccagggtggcacacccatctgtttgctggggtgtggcagccacatccaagactggagcagcaggctggccacgcttgggccagagagagctcacagctgaagctcttggagggaagggctctcctcaccctgccaggaagcttcttaacatgtgacaggaccagggaccaggagcatggtgaagccaagtggcacatgggagccaacctggatgggggtttgntnnatnggntnaatgngntnnncctnccnnnttntgnnnanatntgtatnnnnnnantnnntttantnnnnntttaaatntngnccnngnntcnntnnnnntnnctttg

SEQ ID NO: 37166 - DNA, 400 bp, Homo sapiens
cggacgcgtgggttggtttttcccttaaaggaagatcatataattacagttttgtatctgtgatgaaactactgcaggtgacaatgtttattatgcaaatgaatactagtatcccagaatgatgtggcatattacttttaatttagcacccaaagaatttatttccaatgtaaattttatagctccattttcttttaattgactgataggaatctcataacataatgtattaattattatgacataacatttcattcttttctcacatgacctgtgttgaagaatctcaatggctttataacttgctatttggagatccattgctattatcattttaaaacacttttactgaggtacaattcatatggaataaagtaaacaccattctaggtgtatagct

SEQ ID NO: 37167 - DNA, 230 bp, Homo sapiens
gaaaccttcaccgtgaagtcctgtcctgatgccatcaaagaggtcttcgacaataaattccacatcatcggcgcagtgggcatcggcattgccgtggtcatgatatttggcatgatcttcagtatgatcttgtgctgtgctatccgcaggaaccgccggatggtctagagtcagcttacatccctgagcaggaaagtttacccatgaagattggtgggattttttgtttg

SEQ ID NO: 37168 - DNA, 420 bp, Homo sapiens
  misc_feature (1)...(420): n = a,t,c or g
aatcaatgaaacttgaggacacactaaacatttgataactgcaaatgtgctttaaaaattggttcaatggtgcttacacatgaaacggtaacaaatggggttcctaggacgtcagaaggaatctttagtttgtatgtaattacacactagaggaggaggtgcttttagccagtcttttatttttaatcatctcaaatatgcaaccatacatgcagtaacattaagggtcgtaaactggtgggaaacaggaacttcagtggagaggcttaaatgcctctggttagagtgggggtttttgtttgtttgnttattggtgggtttcaacactgagcatcatttctgtgatcaagtttctaactggcatgtgttttgatcatgaggtttaccatatcttgccatacngacnnatgagagatctag

SEQ ID NO: 37169 - DNA, 371 bp, Homo sapiens
  misc_feature (1)...(371): n = a,t,c or g
caaaggttgttttagaagagaaattgcaagaaagaacagagtcttccaaaggaagaggtacttgtaaactttcagaaatgaagctgacacataaatagattgtgccagtataaacacagtttgaatactgaacacctctctttgggaaagaattaatgcaagttgacatcacatggngctgttctgaatatcatttcacaaagcatttgacaaagcaggtcaaacaaaagcttaagagctgacaggttttccttagcgctacgtacagcaagaaaaaaatcaatttagaaataattctttgatatactttttgaaattatttgggtgtagttgatggaataaataaattttttttgtaaaaaaaaaaaaaa

SEQ ID NO: 37170 - DNA, 419 bp, Homo sapiens
  misc_feature (1)...(419): n = a,t,c or g
gtcctgctggctggacagcaccacggagtgacgaaatgcaacatcacgtgcagcaagatgacatcaaagatacctggaagctttgctcatccactatcaacagaaccaggcatcatgcggcaaacgcgcaatcatcttggagacgagacagcacaggctgttctgngccgacccgaangagcaangggtcaaggacgcgatgcagcatcnggaccgccaggctgctgccctaactcgaaanggcggcaccttcgagaagcagatcggcgaggngaagcccaggaccacccctgccgccgggggaatggacgagtctgnggncctggagcccgaagccacaggcgaaagcagtagcctggagccgactccttcttcccaggaagcacagagggccctggggacctccccagagctgccgg

SEQ ID NO: 37171 - DNA, 414 bp, Homo sapiens
  misc_feature (1)...(414): n = a,t,c or g
tgctcttgttcactcttttactgattcagcaagtacctattggatcaccagctgtgtgccgggcttctagttgagcaacacagaggcagcctctgccctctgagcctcctgcattcggtctcctcattgtcatttgctgtctcaggcaaggtcagtttggctgcaagtatcagaaataaacttgagcttcctgaaacataaagggccctgttgatgtagaatcatgggcatcctttggagttcggaggtatgtgatgtccgtggacctgagaacctggtagctgacgctgttaagagctggggcaaccannnnnnnnnnnnnnnnnnnnnnnnnnnnnnnnnnnnnnnnnnnnnnnnnnnnnnnnnnnnnnnnnnnnnnnnnnnnnnnnnnnnnnnnnnnnnnnnnnnnnnnnn

SEQ ID NO: 37172 - DNA, 426 bp, Homo sapiens
  misc_feature (1)...(426): n = a,t,c or g
caaaaatcaagcaaacccttctagacagccggggagtgttcctcgacatgtttctccagtgacacctcccagagaagttcctatatatgcaaacagatttgcagtaccaacctatgcagccaagcaacctcagcagttcccatcaaggccacctccaccacaaccgaaagtatcatctcagggaaacttaattcctgcccgtcctgctccngcacctcctttatatagttccctcacttgatttttttaaccttctttttgcaaatgtcttcagggaactgagctaatactttttttttttctngaggtttnctngaaaagcctttctgtngcanctatgaatgaaancaaancnccncaaancagacttcntancccagaaaancagaaactgagtgtganagttntgaaatacaaggaaaggca

SEQ ID NO: 37173 - DNA, 414 bp, Homo sapiens
tgaagatctcaaacagacaaatcatggcttggaagaatatgttaggaaactcttggatagtaaggaggtggtaagcagtcaagtagatgatttaaccagccacaatgagcatctttgtaaagaattgattaaaatttgactcaacttagcagagcaactcgaaaaagagaaaaattttgtggtggattccgccaacaaggaacttgaagaagccaagattgatctcatttgccagcaaaataatattatagtattggaagatacaataaaaaggcttaaatctacttgattcctttgtcaagactttggaagcagacaaagatcactataagagtgaagctcaacatttgagaaagatgatgcgaagtaggtctaaaagtccaagacgcccatcaccaactggccggggtgcaa

SEQ ID NO: 37174 - DNA, 355 bp, Homo sapiens
  misc_feature (1)...(355): n = a,t,c or g
gccatatgagaaagtaccaaattatatccagtttcctcagagtaatatcactaggaggaaactggatattactctgaaaaatttcacaaagccagacaagaataattactcattttttttcccaagacgactctcaaagttaatgtgcagcaggtattccaaatggtaattttttttttttaggattccctaataaaaaaaaaaaaatttnnganatttntttttaaatcngatttnggttgngggcntnccnttnttaaataanaattgaaggtttatgtngccntntttntaatnngggnttngccntgnnaaactncntaaggnnggtnttggnnnnnnnnacttnnggggg

SEQ ID NO: 37175 - DNA, 389 bp, Homo sapiens
  misc_feature (1)...(389): n = a,t,c or g
gccaaaagtgcttttggtcagctgcccagctgtgccacagcgggcaccgaggcaggaggcgccagaggaacctttcacatgggctgcgggagcccgagcttcctgacccccagcccgggagcggagagggaccgcttggagcccaggccgaccgcacaccgccctggagcgacttcgcccaccagagtcggctgcccagcccgtgggtgctgcgctccgaaggcagagatgcagtgtggagggggggcgtcgggagcgagagagacaagagggccccgccggggcctgcccagcctgccccttgcgggcttctcgccgctgctggcacccagctnttncactttggaaagggtgtcttctgggggggcatgcaggctggcctttcaccc

SEQ ID NO: 37176 - DNA, 408 bp, Homo sapiens
  misc_feature (1)...(408): n = a,t,c or g
nnnnnnnnnnnnnnnnnnnnnnnnnnnnnnnnnnnnnnnnnnnnnnnnnnnnnnnnnnnnnnnnnnnnnnnnnnnnnnnnnnnnnnnnnnnnnnnnnnnnnnnnnnnnnnnnnnnnnnnnnnnnnnnnnntagctcccggccaggtatttgacctttgaatatgtcacttcactaagtaggcattactgtcacccttgacatatgtaaattttatatttcttcaaataatgttttattctctcaggatatgtgtctaatatttgtttcttttgtatgatatatgttaaaccttatatgaatgttttcatctgtttctaccacatctcagatgttcttgataggaataatttctctatagtatttaaaatacatcttaatgngntcattcctggtttattaatacttta

SEQ ID NO: 37177 - DNA, 408 bp, Homo sapiens
  misc_feature (1)...(408): n = a,t,c or g
aattgagagtggagacaggacacttcacaggacacttgagcacagtcaagattttattcacacttttggttcctgtgttttatatcgaagacttagctatgaattgctatctaaatctcagagcttagaagccaacccagcgacctaggacccttccagtgaagaaagtgatctcaagaggtccagggacttaacagccaagccacaccacccgacaggttcttctgtgacaccgagagatctaacccaaggcctgggttatgtcttagtcgagacatcatcatctgagaagcaccacatcctttcagacacatcctcggacacacatgcggcttggtgcccccaggttcaatcctgcgttagctcttttgatgagaaggnaataaaccnaaccagccncttgnaaaa

SEQ ID NO: 37178 - DNA, 391 bp, Homo sapiens
  misc_feature (1)...(391): n = a,t,c or g
ctcctttaccgcctgttaaatagcatcctattagtacctgtgttgtagattgtagtgaagattaaatgaaataatgctcaataaatactagtacctttacataaagtaagcactcaataactgttagatgtcattatttttccattaaactgcggggcctataaagccttcttctctgtgatatttatccctggctcctaaaattgtacctcgcccatagaaaatatttgttaaatgaatcagtagatgaatgaatgactatttcatggatggcatttccataccttgatcttatttggttttcagttagccactgaaaatatanacntgcattanttcttttatttattctacaaatacttattgaataatcacgcagaacaagaacact

SEQ ID NO: 37179 - DNA, 382 bp, Homo sapiens
gtggcactcggtttagagggcttcggccggcggtggccccatggacagccctgctggcactgggcctgcctggctgggtgttggctgtctcagccacggcggctgctgtggtccccgagcagcatgcctccgtagctggccagcatcccctggactggctgctcacagaccggggccccttccaccgcgctcaggagtatgctgacttcatggagcggtaccgccagggtttcaccaccaggtacaggatttatagggagtttgcccgttggaaggtgaacaacttggctctggaaaggaaggacttcttcagtttgccattgcctcttgccccagagtttatccggaacattcgcctccttggaaggagacccaatctgca

SEQ ID NO: 37180 - DNA, 385 bp, Homo sapiens
cccacgcgttcggaagattttagtgaaactagaattgattcatgctcgcaggtttgccagcgaggagagaaacagccaggacagacggctctggcagggaagaaagaaattgaggtcactgcaacccagagcactccatcgttcctgtttgaaaagcccccacgtgatggaatagccaggccagaagaaggaaggcctgtggtgagtgggacaggaaatgacatcaccaccccaccgaacaaggagctcccaccaagcccagagaagaaaacaaagcccattgcagatgcaaaggctcctgagaagcgggcctcaccatccaagccagcttctgccccagcctccagatctgggtccaagagcactcagactgttgcaaaaacct

SEQ ID NO: 37181 - DNA, 389 bp, Homo sapiens
gtcagggaaagcacagtgaagcttgcttaaaggcactggccagcagtgtgtgactttggcttttgggatcacaccctgtaatcgggcccgtggaagcagcgtcaaagaggggtcttggagctcctatggagcagactgccccccgagcagtgtccccagcctagccctgtgagaccccatggggacacgggtgcctatgtattttcactaaaatatacatggtagctccatttactgatgcggttgtaatgagctcacatcgtgtctgaagagatggcaccagggaaaggtgtgccataagctgctccagagcttttggtatgctgagtgttgacagagctgcactcttaacatcatagagaactgtcaggagcccacaaccaacccca

SEQ ID NO: 37182 - DNA, 385 bp, Homo sapiens
  misc_feature (1)...(385): n = a,t,c or g
gtcaattttatatcataagcattttctattttgctttaaaaattaccattgtaataaccacctaggtctccatagagtggttataaaattctttatgtgaccatttttccaagatttggtctgttcctttatttcgtattaaagttaattctgcaatcaacatttaacatcttccataactgagaatttttttcttctaaactatttccttggggtaaattcccagaagaaggattaacattcaaggatatacatgctttataaccttaatatagattgtcaattatttacccaaaggattgcaagataaccctgacatgagcaatactggagaaattattttatcacaatgatgccattatttttactgggtaatannagagac

SEQ ID NO: 37183 - DNA, 286 bp, Homo sapiens
  misc_feature (1)...(286): n = a,t,c or g
acttccaacagttaagagccacacaaagtaaataaataagacaggacttagtaagaatttagtgctaataagaggcaagaagtaagaaattcttctcatggttaagtctctggaactctactccctggattcaaatcccagccttgtgatttttccggtgtgtgatctttaacaagtatttaatctctctgtgcctcagtttcctcaattataaaattaagatagattttgtctattttatagggttgttgngaggattaaattanngaatacnngtnnngngctc

SEQ ID NO: 37184 - DNA, 374 bp, Homo sapiens
  misc_feature (1)...(374): n = a,t,c or g
gtgctgctgagcgagcccgaggaggcggcggctctgtatcggggccttagccgccagcccgcgctgagcgccgcctgcctgggcccggaggtcaccacgcagtacggcggccaataccggacggtgcacactgagtggacccagagggacctggaacgcatggagaacattcgattctgccgccaatacctggtgttccatgacggggactcagtggtgtttgcaggacctgcaggcaacagtgtggagacctggggggaactgctgagcagatagttccttcagggccatgaaagctgtctgngcaaggctggaggcacggccctgnngaanataancatttcctggaggtnannaacaaaanccggttggtt

SEQ ID NO: 37185 - DNA, 378 bp, Homo sapiens
ctgaccatttatacaatactcctctagagacatttgtggacttccaagaaggatggaattataatctaaaaattgaacagaaagctgaagccaaagggtaataaatctagaaagagaactgttgtaatctcatgataatacagtaaaaaaaatcaaaggtcataaccaccaaatatgctttaatttgaggtctctgataaaacacaccgtaggactagggtaaacttaaacagatcaggctatttattatgtctattaatgttaaaaataaattttattatgtatatttgaggtttagaacatattacagaacacatataggtagtaaaatggttactatagtgaaggagattcctaagctttattttgaaatgttaa

SEQ ID NO: 37186 - DNA, 392 bp, Homo sapiens
  misc_feature (1)...(392): n = a,t,c or g
ctggtaccctataaatttatacaaataaaagagtttaagggagttcaaggatgccatatgtatattttaaaaaaatttctaagggaagtctaaaaaacataaattataatattacccaaaataagatgctacttttcacctaaccaagtcctgcctcatttcacactttaacctcctaagtatattcataatcctaccaaaagttgttttctttaaaaagtaagaaacttnnnnnnnnnnnnnnnnnnnnnnnnnnnnnnnnnnnnnnnnnnnnnnnnnnnnnnnnnnnnnnnnnnnnnnnnnnnnnnnnnnnnnnnnnnnnnnnnnnnnnnnnnnnnnnnnnntcccccacccctgcccagtctctagtaaaaatgcaaaaattagccggg

SEQ ID NO: 37187 - DNA, 405 bp, Homo sapiens
  misc_feature (1)...(405): n = a,t,c or g
cccaggcctcagttaccggcactacagcatcagacccactgcaggggcccaagagggcacccaggagccggctgccactgtggcgagcacccttcaatttggccgcaggctgaggagacgcaccagccatgcgggcaggtacttggtgcctgtggcaaacgactgctacattgtgctgctcgaccaggataccaacctgatgcacagcatctgggagagacagagtaaccgaacggtgcgcgtgacccaggaattcctggagtaccacgtcaacggggatgtgaaacagggccccatttccgataactacctgttcacaccgggcaaggccgcggtgcctgcgtgggaagctgtggaaatggagattgtggcgggacagcttgtgactgagatncggcagtactt

SEQ ID NO: 37188 - DNA, 389 bp, Homo sapiens
  misc_feature (1)...(389): n = a,t,c or g
ggcaaactatagcccatgggccaaatcagttctgctacctatttctgttaatctttattggaacacagccacgttcacttatttatgtcttgtatgtggttgctttcaggctgtaagacagaattgaatagttgtaacagagattgtatgacttgcaaagccaaaaaatgtttacactttggtcctttgcagaaaaagtttgctgatccctaccctagacccattcctggcttaccaaatcatttaggagcaaaatatgatctgtatattgtgatgtactatagaaagaaactgctaagcagaatactctcaggtacaccaaatgtatagttttgntcccaaatttaaccataatttctgnacagtgtggnattngaanagtntaggat

SEQ ID NO: 37189 - DNA, 379 bp, Homo sapiens
cgagtttcctgatcacaaaaagatcacggtgtggctggatctcctaaaacccattgtgaaacagattagaaggccaaagcacgttgttgttaagtttgtggtgaaattctttccgcctgaccacacacaactccaagaagaactcacaaggtacctgttcgcgctgcaggtgaagcaggacttggctcaaggcaggttgacgtgtaatgacaccagcgcagctctcttgatttcacacattgtgcaatctgagattggggattttgatgaagccttggacagagagcacttagcaaaaaataaatacatacctcagcaagacgcactagaggacaaaatcgtggaatttcaccataaccacattggacaaacaccagca

SEQ ID NO: 37190 - DNA, 393 bp, Homo sapiens
gcatttttaacatactccatagtcttttcctgtggtgttaggtctttatttttatttttttcttgggggctggggtgggggtttgtcatgggggaactgccctttaaattttaagtgacactacagaaaaacacaaaaaggtgatgggttgtgttatgcttgtattgaatgctgtcttgacatctcttgccttgtcctccggtatgttttaaagctgtgtctgagatctggatctgcccatcactttggctagtgacagggctaattaatttgctttatacattttcttttactttccttttttcctttctggaggcatcacatgctggtgctgtgtctttatgaatgttttaaccattttcatggtggaagaattttatatttatgcagttg

SEQ ID NO: 37191 - DNA, 397 bp, Homo sapiens
ccagcaccaccggcctgggacagcggcaggacgccgagacaggtgccggccccggattagaaacccaaacggagaatcctagatgttgctcctactacattcgccataattggcctggtggaaatgggagaaaaaactacttctcacaaagaatcaattctgggaactggaaaaagcatatcagaccaactcaaaacgtctccatttgaggcaatgtagtgctgtgaaaggaacgtaggcagatttgagtttcagtggcacatctgaaacttatccgcagagactctaagcaattaaattctgagacattcttctctgtgcagcgagactactcatgtctttctcccaggggagttgtaagacttaaatgaggtaaaccacgcagcaggggagccta

SEQ ID NO: 37192 - DNA, 394 bp, Homo sapiens
  misc_feature (1)...(394): n = a,t,c or g
cagagtgaaaaaaaaaatacagaaaacatgcacgcgtnnnnnnnnnnnnnnnnnnnnnnnnnnnnnnnnngcnntgaccccaccgnggggcactttccttcttcccttctctattccctgngaagtcagagcatanttactgaaaagcatttttgactgaattttanatgancnttttgacaaaatataatatnggaaacaatctttatcaaacnttnntgtgtagtgngaganataaagcccggaatccatanttnatacggcgngngtattaccaagtgtgcatgagaggctgaatttcanngaggctgcctgaacaatattttntgccanacgtgggctttcatcatttacattattcactaggttttccagaacagtanntcttatatat

SEQ ID NO: 37193 - DNA, 388 bp, Homo sapiens
  misc_feature (1)...(388): n = a,t,c or g
ggtccctcaagctcgggccccctgcctatcttcctagtctttctctcaccttgtcattttcaccggccattccaaccacaaggaatcatgagtaacttcccaagtgctacagactcttacaggttgcatatctctgccatgctgttacctcaactctccctaacccccttccactggccggaaccctactgtcctacaatacctactgcatggcatctctactagggacatttccaacatctcccctaatttaatttggaggcttcccctcctggcttctctggcacctgtatatgcttcttttagaagattattagcattcactctctctgccctttagtagatggnaaggcctgaagaccatgagtatgtattttgagtatcttct

SEQ ID NO: 37194 - DNA, 410 bp, Homo sapiens
cccacgcgtccgctttatttgcttctgaatcttgctgagggaatgtgaatcagtgcttgtgaatgacttcttcttggtggcttgtcttgaggatttcattgaaaatgcccgtctcttcatatttgagactttctgtcgcatccaccagtgtatcagcattaacatgttggcagataaattgaacatgactccagaagaagctgaaaggtggattgtaaatttgattagaaatgcaagactggatgccaagattgattctaaattaggtcatgtggttatgggtaacaatgcagtctcaccctatcagcaagtgattgaaaagaccaaaagcctttcctttagaagccagatgttggccatgaatattgagaagaaacttaatcagaatagcaggtcagaggctcctaact

SEQ ID NO: 37195 - DNA, 399 bp, Homo sapiens
  misc_feature (1)...(399): n = a,t,c or g
gcgatgtggtaatggcggcgaccgagccggagctgctcgacgaccaagaggcgaagagggaagcagagactttcaaggaacaaggaaatgcatactatgccaagaaagattacaatgaagcttataattattatacaaaagccatagatatgtgtcctaaaaatgctagctattatggtaatcgagcagccaccttgatgatgcttggaaggttccgggaagctcttggagatgcacaacagtcagtgaggttggatgacagttttgtccggggacatctacgagagggcaagtgccacctctctctggggaatgccatggcagcatgtcgcagcttccagagagccctagaactggatcataaaaatgctcaggcncaacaagagttcaagaatgcta

SEQ ID NO: 37196 - DNA, 410 bp, Homo sapiens
agccagagaggttctgacggagatatttaagagttgtgcccattcagagcagacgctgagcctgacaccagcgaagcccatcagagtctctgacatttatcttagcaaagagcagatcaactcccagaccccaggcaacctcctccacctcttcttcaccaatgtccggccgccaaaaaaggtgctggaggatcagctcacccagatcctgaggaagtatggcgtgccaaagcccaagtttgacaagagcaagtacagcaaggccgggaaggagcagcaccccgtgaaggtggtgagcaccaagcggcctatcaccaagccgcccgccaaggacaaggctgtgctcaacagcgtcaggactgccttaagtgagaagaagccaactgtgaagccaaaatcaccagaaaaga

SEQ ID NO: 37197 - DNA, 377 bp, Homo sapiens
  misc_feature (1)...(377): n = a,t,c or g
attaggcaacctatatgtagatcagggtttctcaaccttggcattattgccgtgttaggtcagataattctttgccatgnnnnnnnnnnnnnnnnnnnnnnnnnnnnnnnnnnnnnnnnnnnnnnnnnnnnnnnnnnnnagcaatagtatctnnnnnnnnnnnnnnnnnnnnnnnnnnnnnnnnnnnnnnnnnnnnnnnnnnnnnnnnnnnnnnnnnnntctctagttgaaaacccttggtgtccccagnnnnnnnnnnnnnnnnnnnnnnnnnnnnnnnnnnnnnnnnnnnnnnnnnnnnnnnnnnnnnnnnnnnnnnnnnnnnnnnnnntggataaaactgntcactttattntnngctttaaattntanntgga

SEQ ID NO: 37198 - DNA, 408 bp, Homo sapiens
cagagcatggacatgttcctagtgctgctttgctttaacggccacaagtttcctccacttcctaggtttggtatttagttaaggaatcatattaaattaaccaataacaaaagagatacttttgaagaacaaactattccttacccatttttgtagctcaaaaataatttttcaagttcatgaccttattaaaatgaacttgtgtttttttaacaaacgtgtatgttttattttgatagtttctttccgtaagataattgaaatattatactgtaaacccttttcttttctttttttgaaaagtccaagaatgtacttatacaggcatttttccccacctatttttggccattctcataccacagactaaagagtgaaatgatttgtccattgtagcttattggttat

SEQ ID NO: 37199 - DNA, 373 bp, Homo sapiens
  misc_feature (1)...(373): n = a,t,c or g
cggacgcgtgggttaatataaatgcttttacctttcactttttagagtaaaaacatttatattaatcaatcaaaaagataaatagagagtgaaagggaaaaccattgaagtagcagctgagtcagtactgacaactacaaaacaaatgttcctgcagggggctggaggaacttcttatacttaatagacagatggaaagataagacttggctcgtttctttttctttctttatttaatttggtctcatgtcaagtttgatgttatgaaatgattatccagaagttttttttttttaggggaangcagcccttnaganaaacttaattaagcttttaaancntatttccnaatnaatttcctttgctcnaggga

SEQ ID NO: 37200 - DNA, 374 bp, Homo sapiens
  misc_feature (1)...(374): n = a,t,c or g
cgccaatcaattatcaatcctgactggaactttgaaaaaatgggaataggaggtctagacaaggaattttcagatattttccgacgagcatttgcttcccgagtatttcctccagagattgtggagcagatgggttgtaaacatgttaaaggcatcctgttatatggacccccaggttgtggtaagactctcttggctcgacagattggcaagatgttgaatgcaagagagcccaaagtggtcaatgggccagaaatccttaacaaatatgtgggagaatcagaggctaacattcgcaaactttttgctgatgctgaagaggagcaaangaggcttggtgctaacagtggtttgcacatcatcatctttgatgg

SEQ ID NO: 37201 - DNA, 383 bp, Homo sapiens
caggcctctccatttgctcttcagatgccacttctaagaaaagcctaatcacagtttttcctggaattgccagctgacatcttgaatccttccattccacacagaatgcaaccaagtcacacgcttttgaattatgctttgtagagttttgtcattcagagtcagccaggaccataccgggtcttgattcagtcacatggcatggttttgtgccatctgtagctataatgagcatgtttgcctagacagcttttctcaactgggtccagaagagaattaagccctaaggtcctaaggcatctatctgtgctaggttaaatggttggcccccaaagatagacaggtcctgatttctagaacccgtgactgttactttatacagc

SEQ ID NO: 37202 - DNA, 406 bp, Homo sapiens
ctctggacgtagggccggaggatagttctcaatgaggtaaaacgcagtggcacacatgaccagtacgtgctgctggctgtgaatgttcacgcagtgggcgatccctttcaggttggagaggagatagtcgctgagaactatcctctggacgtagggccggaattttcagcatcaataatacagatgtgtggggtgatgctgtctggaagtgaggagtccaccccctccatcatttaccactgtgccctcagaggcctggagcgcctcctgctctctgagcagctctcccgcctggatgcagaatcgctggtcaagctgagtgtggacagagtgaacgtgcacagcccgcaccgggccatggcggctctgggcctgatgctcacctgcatgtacacaggaaaggaga

SEQ ID NO: 37203 - DNA, 403 bp, Homo sapiens
gaaagaaagggcagtatcacgtgacctacacatctgtgtgtgtgtgtgtgtgcgtaaaagatacattagggatcacacagatgtgtaggtcacgtgataccgaaagaaagggcagtatcaatttttctgataagaggatttttcataaagtagagaaaatcagttctaatcagcactgtctctgactggactggctgttagtgttgggagcaggagagtgggaagcagtcacttgaactctcaggttttctggtctaggttttctcacctagaacaccagggatctgtggagcttccaaatcttgtaaactttatttctacattgcaaatattaaaacgtacattgctgtaagactgatggtacttatagcagataagatctattctagttttaacatccatc

SEQ ID NO: 37204 - DNA, 404 bp, Homo sapiens
ggcacaggaaacctcatcatctcagacgtgacggtccagcactctggcgtctacgtctgtgcagccaacagacctggcacccgggtgaggagaacggcacagggccggctggtggtgcaagccccagctgagtttgtgcagcatccccagtccatctccaggccagctgggaccacagccatgttcacctgccaagcccagggtgagccaccgcctcatgtcacgtggctgaaaaatggacaggtgctggggccaggaggccacgtcaggctcaagaataacaacagcacactgaccatttctggaatcggtcctgaggatgaagccatttatcagtgtgtggccgagaacagtgcgggctcatcacaggccagtgccaggctgaccgtactgtgggctgaggg

SEQ ID NO: 37205 - DNA, 394 bp, Homo sapiens
ctttttaagttagcaggactttttaaaaataaatattgctctaaactttaatatatcgaacgtgagagtggagctgcttagtggaagatgtaagtgaggtgggtgtcccatgtgcttggtctccccttctgctgttctcctgttcttcataatccactactgcagcagtccctgaaccactaaacttgttcctttcatttacaaaagagatacctgacatcctgagacactgagaaatgtcctgaagtcacacagctaatggcagaactggcactaggtccaaatcttgtgataatgaacaccgtaaggttagctagcttcctactttcccttgaatagtgcttttctccctatgtaatatcttttattatgatatttgtggtttagaaggcat

SEQ ID NO: 37206 - DNA, 398 bp, Homo sapiens
tgatggctctcaaattgagaaataaaagaagaaataactcagctgcgcaataatgtctttcaggaaatttatcatgagagagaggaatatgagatgctaactagtttggcacagaaatggttccctgagctgcctctgcttcatcctgaaataggattactcaaatacatgaactctggtggtctccttacaatgagcttggaacgagatcttcttgatgctgagcccatgaaggaacttagcagcaagcgtcctttggtacgttctgaggttaatgggcagataattctgttaaagggctattctgtggatgttgacacagaagccaaggtgattgagagagcagccacctaccatagagcttggagagaagctgaaggagactcagggttactgcc

SEQ ID NO: 37207 - DNA, 394 bp, Homo sapiens
atttgacagagaagagctctttggggaagcttcggcaggaaaagcatcccgcagccttgcgcaacacattcctggaccaggtagtatagaagggatgaaaggcgctgctggaggggtgatgggagagctgacccgtgcacggattgcacttgatgaaagaggacagaggctaggagagctggaagagaaaactgcaggcatgatgaccagtgcagaagcattttccaaacatgcacatgagttaatgctgaaatacaaggataagaaatggtaccaattctgacttctaaagaagctgtgactgctttgagaaatcatattcagggaaaccaaatttattcccagcatcactattcaactgctagaagccagtttcttctacaaaatgttccat

SEQ ID NO: 37208 - DNA, 370 bp, Homo sapiens
  misc_feature (1)...(370): n = a,t,c or g
ccacgcgtccgagtgaatatacaatttatttaacattcaaacttcattaagacatgtgcaatatggcaattttactggggattaaaccctacctaggattgcttgctggggcttagcaacagggtccagttcacacttagcactaattaaatactttattgaataaatacaataccaaacaaaatgcattcaaatgctttctaaaaaaattttaaaggcctttctactcaggctaatgacaaaaaaaaaaggggnggccgntttaaagnanccctnnngggnccaannntnacncgngcnngcaangnnnnacntttntccntatagggngtntnatnntannnnaggccnngccgncgtttnnnaacgc

SEQ ID NO: 37209 - DNA, 388 bp, Homo sapiens
cggacgcgtgggctcctggggacattctcaggaattctgcctgcagcaggctgcgtttcctgtttggtagcttagcggttccagctccgtccagggtctctaacactgcttcttgcctgtcttcctcatgcctgggcgtggtaaaggcgtcttgctgtttctaggcgctgggtcttcaccatccctcagtggctcctttacctccgtccacacatctgttggaacttcagtgcagagggttgaagtaatcatattcttcagttgaaggttgattctaaggaagccaacagccgtgttgtgagtacccaatggaaagtctgttgtggcagaaaactgatgtctccagccaacagcactgaggccctgagacctgccaactgtcatgtca

SEQ ID NO: 37210 - DNA, 388 bp, Homo sapiens
  misc_feature (1)...(388): n = a,t,c or g
ttttttcaaatcccagaactgggagatggctattaaaaaatatgcagaagttttaagatacgtggacagttcaaaggctgttattgagacagcagatagagccaagctgcaacctatagctttaagctgtgtactgaatattggtgcttgtaaactgaagatgtcaaattggcagggagcaattgacagttgtttagaggctcttgaaatagacccatcaaataccaaagcattgtaccgcagagctcaaggatggcaaggattaaaagaatatgatcaagcattggctgatcttaagaaagctcaggggatagcaccagaagataaagctatccaggcagaattgctgaaagtcaaacanaagataaaggcacagaaagataaagag

SEQ ID NO: 37211 - DNA, 392 bp, Homo sapiens
attgcttgacctctctgaacttcagcatcctctcctcaggatgacagtaactctgctgtggctcagagggggattgtgataatcaagacagaatgatgtttgtggacagtggacatatccccgaccatttactgagcccagccatatgccaggccaggagctaagctgggaagctgttaacacaaggatgttggcagagccagtgctgagaaggttttctgggtaagtggccgggcttggcccccttagccttcctgccccatctttcttctctccctgaacatcagggcatccgggcaagggaccagctgcatcggcacctggagggggccatttctgagaagcttcacgaggacaaggctgcagagcccgggtgatgccctcgacctaat

SEQ ID NO: 37212 - DNA, 385 bp, Homo sapiens
cccacgcgtccggggttatttaaacaccatgtttccttattagggcgtgggaattacgttttgtgaagttctggggaaaaaaactcttttcattttaaatcatacatatattgctttcctaaccaaaattaagatagatttcacacctttggaatggtgtcatcacctcaactgcattttacaggcgcttacctagagaacacagtccttagcaagttgagcaattttcacaagaggtggttcaatagagtgagaagacacagagtgcggagtccaacagcttaaattttagtcctagtttggcttatgaccacgtggatatcctctagcacatcagttttctcatttacagaatagagataaaaataacttttgtgctttcagg

SEQ ID NO: 37213 - DNA, 380 bp, Homo sapiens
  misc_feature (1)...(380): n = a,t,c or g
cggacgcgtggggttcagtgtcattcattagcacaggcaggtcccaaccacaatggttcaacttaacggttttttcatgattctgtgaaagcttcataatttctacatgctttgaattttgaattttgttattttttggagggctagtgatacatgggccatgaaatattcaacactttattataaaatagggtttgtgttagacaatttgcccaactgtaggatgaggtatatgttctgagcacgtttaagcangtttaagntagggngggctatgattntccattnaggnatctgaaatgcntttnagacttacaatgtnttnaacctttgatttctttatctgtatgtaatcctattgttaaatcaaggagcattca

SEQ ID NO: 37214 - DNA, 390 bp, Homo sapiens
cttgcatgaaggagtttgaccatccacacgtggccaaacttgttggggtaagcctccggagcagggctaaaggccgtctccccatccccatggtcatcttgcccttcatgaagcatggggacctgcatgccttcctgctcgcctcccggattggggagaacccctttaacctacccctccagaccctgatccggttcatggtggacattgcctgcggcatggagtacctgagctctcggaacttcatccaccgagacctggctgctcggaattgcatgctggcagaggacatgacagtgtgtgtggctgacttcggactctcccggaagatctacagtggggactactatcgtcaaggctgtgcctccaaactgcctgtcaagtggctgg

SEQ ID NO: 37215 - DNA, 376 bp, Homo sapiens
ggaacacggagcagtggctgccctgcgaggaggtcctagagcagctccagcaggatggcggctccagcgtctctaaggcctgcagggggtccagccccatggggggcgccctaggcctccgacagctccccatctgtgctcctgcctgccggccatcctcaggccactcgccatgggcggctgcttctccaaacccaaaccagtggagctcaagatcgaggtggtgctgcctgagaaggagcgaggcaaggaggagctgtcggccagtgggaagggcagcccccgggcctaccagggcaatggcacggcccgccacttccacacggaggagcgcctgtccacccctcacccctaccccagccctcaggattgcgtg

SEQ ID NO: 37216 - DNA, 365 bp, Homo sapiens
ctcaatttggttgagaatttctaaggaaggttaatatgactttagaatgaataaagagactgtcaaacaacaagtactctccctaaaaaagaggaaagaatgccttcctaaaatatttgtttcctattgtatatgtcaccaattggaaaatgccaatctcatctgcaagtgtgagaaatggaacaaggagaggagccaactctagtaaaatgtagtgaggccataatccaaggcaaagtttaacaaatcttgattgtgtaatttcttattctgttgattcattttgtcacccaccagactaccaaaaataaagcacagacatgacaattttagtatatacaacagatttggcaaataatacataa

SEQ ID NO: 37217 - DNA, 394 bp, Homo sapiens
gagggaggctctggagggcccggcaccctcaggacggccgcagtgcctggcccccaccggggcccatacctgctgggcactgggaagcaggacccaagggcccaggtggggtgcaggcccatggagacgtcacgctgtacaaggtggcggcgctgggcctggccaccggcatcgtcttggtgctgctgctgctctgcctctaccgcgtgctatgcccgcgcaactacgggcagctgggtggtgggcccgggcggcggaggcgcggggagctgccctgcgacgactacggctatgcgccacccgagacggagatcgtgccgcttgtgctgcgcggtcacctcatggacatcgagtgcctggccagcgacggcatgctgctggtgaactgctgctg

SEQ ID NO: 37218 - DNA, 288 bp, Homo sapiens
  misc_feature (1)...(288): n = a,t,c or g
cttggagaaccaagtctcgtatgatgattaccatcttttactcctcttcagccccagcttccttgaggggacggttggggaataggtttagagtaattttcgatgagcaaaagccaaccgtctttgctacgtcgcctgcgtagcccacaaattgattccaaagcgattacgctaatggcgtgagggggccggtcagttggtggtgctacgctagcagcgttagcgccgctgaggtagtggcgtatcttagcggggggggcagtccccgatagtcgggggcggngttgg

SEQ ID NO: 37219 - DNA, 396 bp, Homo sapiens
  misc_feature (1)...(396): n = a,t,c or g
acagcccccaagatcgcagcttcatcgtctttccgatcttccgacaagcccatccggacccctagccggagcatgccgcccctggaccagccgagctgcaaggcgctgtacgacttcgagcccgagaacgacggggagctgggcttccatgagggcgacgtcatcacgctgaccaaccagatcgatgagaactggtacgagggcatgctggacggccagtcgggcttcttcccgctcagctacgtggaggtgcttgtgcccctgccgcagtgactcacccgtgtccccgccccgcccctccgtccacactggccggcaccccctgctgggtctcctgcattccacggagcccctgctgcanggcggtgtctgagcctgccggcgccacctgggccc

SEQ ID NO: 37220 - DNA, 401 bp, Homo sapiens
  misc_feature (1)...(401): n = a,t,c or g
gttatagtgatgttaacaaagttagcccgttgtcaccaatgagccatagtcatgacttaaattatttagtcatttaaatattaactgattagtctttgttatgtgacatatttatttagagtgtttccatgaagtcaaacagctttttatgaggtttctttgtatctgtctgaatatatcaatcacctacaatggaatgaaagatgcccagatgctatctgaattgatgattctgaaatcaacagcttgattaacagtgacagtaaagagtatcattatgttatataccagatggaaaaggtatttacagattagataagtgaattttcataattagcaaaataaattaaaaatgcttggtttatttgaatttanaattggttaaagntatgaaaatatca

SEQ ID NO: 37221 - DNA, 381 bp, Homo sapiens
  misc_feature (1)...(381): n = a,t,c or g
caccgcaccaggagacagggcagggcgatcaggagcagcgtgagccaaaggaggaccatcgggaacgcagctccggaacgcaggacagaggtgcctgctggaggagaaacgagagtcaggcagcggggactggctgtgaaactgggttgcgggtaatgaaggacgcttgccccttccagagcctggtgctcacagcagaaggagctgcttctggagggaaagtggtggtgagtgtgcatatgtgtctgtgtgcaaatgcgcctttgcgcatgtagaagtcagagtgtgcttctacatgtgtgcacgaatattcgngtgtgtgtacatgggtctatatgtgtgcatgcctctatgtanccntgnntgnngncatttncatga

SEQ ID NO: 37222 - DNA, 398 bp, Homo sapiens
  misc_feature (1)...(398): n = a,t,c or g
atgaactagtagtggagaatcgcagcgccgctccccgccctggggagggaggggagccccggagagcctgccggtgggagctggaagcaggctcccggctgagcgccccagcccgaaaggcagggtctgggtgcgggaagagggctcggagctgccttcctgctgccttggggccgcccagatgagggaacagcccgatttgcctggttctgattctccaggctgtcgtggttgtggaatgcaaacgccagcacataatggaaacaggacctgaagacccttccagcatgccagaggaaagttcccccaggcggaccccgcagagcattccnntaccaggacctctttacttggtcattgcancggacagtnctttttttccaggnnctgggaaccca

SEQ ID NO: 37223 - DNA, 394 bp, Homo sapiens
  misc_feature (1)...(394): n = a,t,c or g
ctctcactatggcccagtccacgcatggaggtcccagttggtgctcaggttcgtagcgcctacacgaataaatgcagtgctgtttaccgcctcagtctggctagctttaaacacagccactaataaggtgattgctttttatcataaaaatgctgaaagagcattggatattgtgacttcaggatgtccagaatcaagaggaaaaaaaacatttcaacactgtcaaaaattttgccctgtctttgtggccagctccctcttggttcttcaacacacatctccttgtgcgttgaatattcagttattcaatgactctacctgtggttcttcccgtgtggtgggtgcagggtgcatggccagcgatggatggcaggaacccanacccgtgcgcttc

SEQ ID NO: 37224 - DNA, 399 bp, Homo sapiens
  misc_feature (1)...(399): n = a,t,c or g
gaaaatcttaatgtgatcattacaagtgatcatgggatgacccagtgttctcaggacagactgataaacctggattcctgcatcgatcattcatactacactcttatagatttgagcccagttgctgcaatacttcccaaaataaatagaacagaggtttataacaaactgaaaaactgtagccctcatatgaatgtttatctcaaagaagacattcctaacagattttattaccaacataatgatcgaattcagcccattattttggttgcggatgaaggctggacaattgtgctaaatgaatcatcacaaaaattaggtgaccatggttatgataattctttgcctagtatgcatccatttctagctgcccccggacctgcntttacaaaggttaca

SEQ ID NO: 37225 - DNA, 402 bp, Homo sapiens
catcaattcatcagtctcatgagtgtggatgacatccgtaagtgttctgcctggaaagctgaggagcagggaccactcttgctgtctcaaagtcagctctatcagctgtgatcataggcttagaagtcagtttgaataaaaggtgctcaaaagagctcggaaaggcagcacgggaagtttttgttcagtaagaggggaaagtttccagaaacaactctgaaaaacaagaacatcaattcccttcttgcccttgccctcaaccaggcctccccaggtgctggggctctgttttcctacacgtttacaaaatcagtgtgttccatttagtcagtgatcaatatcttacatttttttcatcccatactctaacccggaccttttgtctggaggagttgtatgtaa

SEQ ID NO: 37226 - DNA, 407 bp, Homo sapiens
gggctcgtgttaaaggagaacagtgaactggagcagcagctgggggccacaggtgcctaccgagcacgggcgctggaactagaggccgaggtggcagagatgcgacagatgttgcagtcagagcatccatttgtgaatggagttgagaagctggtgccagactctctgtatgttcctttcaaagagcccagccagagcctgctggaagagatgttcctgactgtgccggaatcacatagaaagcctctcaagcgcagcagcagtgagacgatcctcagcagcttggcagggagtgacatcgtgaagggccacgaggagacctgcatcaggagggccaaggctgtgaaacagaggggcatctcccttctgcacgaagtggacacgcagtacagcgccctgaaggtgaa

SEQ ID NO: 37227 - DNA, 413 bp, Homo sapiens
gactcgcactcccaggacctgggctccccagagcgtcaccagccagtgcctcagctccaggctcacagcacaccccacccggacgactttgccaatgacgacattgactcttacatgatcgccatggaaaccactataggcaatgagggctcgcgggtgctgccctccatttccctttcacctggcccccagccccccaagagccccggtccccactccgaggaggaagatgaggctgagcccagtacagtgcctgggactcccccacccaagaagttccgctcactgttcttcggctccatcctggcccctgtacgctccccccagggccccagccctgtgctggcggaagacagtgagggtgaaggctgaaccaagaacctgaagcctgtacccagaggccttggactaga

SEQ ID NO: 37228 - DNA, 410 bp, Homo sapiens
cggacgcgtgggagtttctctatcagtcgcgcagctgtgttcgcggactcaggtggaaggaatttcttctcttcgttgacgttgctggtgttcactgtttggaattagtcaagtttcgggaatcaccgtcgctgccatcaacatgtcggtcccaagcgctctcatgaagcaaccgcccattcagtctacggctggggccgtcccagttcgcaatgagaaaggtgagatttcaatggaaaaagtgaaggtaaagcgttatgtgtccggaaaaaggccagactatgcccctatggagtcctcagatgaggaggatgaagaatttcagttcattaagaaagccaaagaacaagaagcagagcctgaggaacaggaggaggattcatccagtgacccccggctacggcgtttac

SEQ ID NO: 37229 - DNA, 337 bp, Homo sapiens
ctaggtgcgttattcctaattgtaaacacctgtttcgttatggagctgtgcattacttaggaggaaagccgttagctaacacaggtggttaccccaattaccagatgaattaaagaggaaatataaaagaatgtatagaacactatgttaagccctcttacatgaggacacgttaccagtttccttgagaatgtgtaatggattgtgtctccttggctgtataaaagagggatttccttctctctttgtaacctcattagcagattagccgtgatgtgcatcaaagtctagttgaatgcctaataaaattgttgtctttctgcaaaaaaaaaaaaaa

SEQ ID NO: 37230 - DNA, 409 bp, Homo sapiens
cggtttgcacagctagaggccgcgcagcagcaaaggatgagcggaaccttggaaaaggtgctgtgcctgaggaacaataccatttttaagcaagccttttctctcttaaggtttagaacttcaggagagaagcccatctattctgtaggtggaattctactaagtatcagtcggccctacaagacaaagcccacccacggcattggaaagtacaagcacttaattaaagcagaagagcccaagaagaagaagggaaaagtggaagtgagagccattaatttggggacagattatgaatatggggttttaaatattcatctgactgcatatgatatgaccctggcagagagttatgcccagtatgttcacaacctctgcaactctctctccattaaagtcgaggaaagtt

SEQ ID NO: 37231 - DNA, 410 bp, Homo sapiens
ctactccaatcaagatttgcaaactacaaaaaaatcattctgaagctttcacctataaatatataccaagataatttcagataagaatgtccagcaaggaagtgaagactgctctaaaaagtgctagagatgcaatcagaaacaaagaatacaaagaagctttgaaacactgtaagacagtgttaaagcaagagaaaaataactataatgcctgggtttttattggcgttgctgcagctgaactagaacaacctgatcaggcccagagtgcctataaaaaagctgctgaattagagccagaccaattactagcttggcaggggttagcaaacttgtatgagaaatataatcacataaatgctaaggatgacttgcctggtgtttaccaaaagctcctggatctttatgag

SEQ ID NO: 37232 - DNA, 406 bp, Homo sapiens
ctttggtgctctcttttgtgggccagacaagagttctcatgttaaatggagaggaggtagaagaaaccgaactgatgggtttcgtggatgatcagcagactttcttctgtggcaacgtggctcagcagcttatccagatcacttcagcatcggtgaggttggtctctcaagaacccaaagctctggtcagtgaatggaaggagcctcaggccaagaacatcagtgtggcctcctgcaatagcagccaggtggtggtggctgtaggcagggccctctactatctgcagatccatcctcaggagctccggcagatcagccacacagagatggaacatgaagtggcttgcttggacatcaccccattaggagacagcaatggactgtcccctctttgtgccattggcct

SEQ ID NO: 37233 - DNA, 389 bp, Homo sapiens
  misc_feature (1)...(389): n = a,t,c or g
gagatggatgtgccaactgaactgtatcttgtcatggaattagtataggggggagacctttttgatgccattacttccactaacaaatacaccgagagagacgccagtgggatgctgtacaacctatccagcgccatcatatacctgcatagcctgatcatatgcccaccgagatatcaagccagagaacctgctggtgtatgagcaccaacatggcagcatatcactgaagctggctgactttgtactggccaccattgtagacggccccctgtacacagtctgtggnaccccaacatacgtggctccagaaatcattgcagagactggatacggtctcaaggtggacntctgggcannangtgtaatcacttatatcctgctgtgtg

SEQ ID NO: 37234 - DNA, 401 bp, Homo sapiens
ccttggttcaaaatccttagcaggcaagagccaggcctctcccatgtgattccagaccagctgttcggtcctgttgccaagcccggccatcaccccgccattcagaccagctttcctgggcttgctttctcctttgctgtgcttaatctgggtgttttccttaaaatgtagcctcttgtctctgctcattgaaatggaactcattctataagcaccttactaaagactttgttattcactaagctataaacattttcctgaaaagatgtcatttgtccccggttgaggtggggaggtgcccccttccctactttgggttttcctgtgtacttacttccattaggcagcacgcctagctttttctgcgcagtttctcaatcagcatttgcaggattggattt

SEQ ID NO: 37235 - DNA, 394 bp, Homo sapiens
  misc_feature (1)...(394): n = a,t,c or g
cttgcaagtcctacaacagagatgactagtccaggcctaactccatcctgaaaatttttgtgtaaaagccaaaactttttatgttgtaaatgtttaatttacatgtttgactgctgggaagacctttgaaattttatattgctctggcacatgtctgaaattctattgcttggagagaatcccctccagataagagattttgagtgaaaaacataatgatcctgccatttttcattcttaaaattcttacatttgtcattgagaaagttcaaaatggaataggctttaaaaaaaanaaaanttttaaaannnccnccaannnnttnntannnaatnntccntatnntccncnngntttttanatntttaaatnccccttatggcccaaaaactg

SEQ ID NO: 37236 - DNA, 391 bp, Homo sapiens
  misc_feature (1)...(391): n = a,t,c or g
gaagaagctttttatacaacagatcgtggaatgataccgtcattacacgatctgttgtattaaaagctttttcaacaccatcaccatgatgacggtatcattccataaatatggggaatactttcctggcacatgagacttgagggatattggtgctggaaaaggctaatactatgctgtcaatttttcaatgagagatggtatagatgatgagtcatatgggcagatatttaagcctattatntcnaaggtgatggngatgtatcancctantgctgtggtattanangtgtgntgcatactnattatntggngattgactgnttgtttcaatctntnantgntangncattcttncnngttnttacttntntannattcttgttacctt

SEQ ID NO: 37237 - DNA, 386 bp, Homo sapiens
  misc_feature (1)...(386): n = a,t,c or g
gtcaggtttctgggtgttgagtgtccaggtgtctgggtgtcaggtgtctgggtgtctgagtgtcaggtgtctaggtgtctgggtgtcaggcgtctcagtgtctgggtgtcaggtgtctcggtgtccgggtgtccaggtgtccgggtgtcaggtgtctgggtgtcaggtgtccgggtgtctggatgtctgggtgtcangtgtctgggtgtnattgagacttagnatnntgnacgncatncgtnttnannaanaatatnnntgaatattnangattnttnaacangatnncgantctntcaacnnntaccatnactactaatnattnnnatnctcatgnttnaananaatncacnactnttcttntanttttatcttnaattttatta

SEQ ID NO: 37238 - DNA, 393 bp, Homo sapiens
catctactacaattagaaaatatcaatagtggtgaaaccagaacaatatctcactttcattatactacctggccagattttggagtccctgaatcaccagcttcatttctcaatttcttgtttaaagtgagagaatctggctccttgaaccctgaccatgggcctgcggtgatccactgtagtgcaggcattgggcgctctggcaccttctctctggtagacacttgtcttgttttgatggaaaaaggagatgatattaacataaaacaagtgttactgaacatgagaaaataccgaatgggtcttattcagaccccagatcaactgagattctcatacatggctataatagaaggagcaaaatgtataaagggagattctagtatacagaaa

SEQ ID NO: 37239 - DNA, 395 bp, Homo sapiens
ctccgacccggccgccgccgccatgcagccctccagccttctgccgctcgccctctgcctgctggctgcacccgcctccgcgctcgtcaggatcccgctgcacaagttcacgtccatccgccggaccatgtcggaggttgggggctctgtggaggacctgattgccaaaggccccgtctcaaagtactcccaggcggtgccagccgtgaccgaggggcccattcccgaggtgctcaagaactacatggacgcccagtactacggggagattggcatcgggacgcccccccagtgcttcacagtcgtcttcgacacgggctcctccaacctgtgggtcccctccatccactgcaaactgctggacatcgcttgctggatccaccacaagtacaaca

SEQ ID NO: 37240 - DNA, 389 bp, Homo sapiens
cccgagctgtacgcggagctgcgcgccaagagcacgccgagcggcttcacgctggacgacgtcatccagacaggcgtggacaacccgggccacccgtacatcatgaccgtgggctgcgtggcgggcgacgaggagtcctacgaagtgttcaaggatctcttcgaccccatcatcgaggaccggcacggcggctacaagcccagcgatgagcacaagaccgacctcaaccccgacaacctgcagggcggcgacgacctggaccccaactacgtgctgagctcgcgggtgcgcacgggccgcagcatccgtggcttctgcctccccccgcactgcagccgcggggagcgccgagccatcgagaagctcgcggtggaagccctgtccagcct

SEQ ID NO: 37241 - DNA, 391 bp, Homo sapiens
cccacgcgtccggtaaagagttgtgttgttcttttcccccaagtggtttcagcaatatttaaggagatgtaagagctttacaaaaagacacttgatacttgttttcaaaccagtatacaagataagcttccaggctgcatagaaggaggagagggaaaatgttttgtaagaaaccaatcaagataaaggacagtgaagtaatccgtaccttgtgttttgttttgatttaataacataacaaataaccaacccttccctgaaaacctcacatgcatacatacacatatatacacacacaaagagagttaatcaactgaaagtgtttccttcatttctgatatagaattgcaattttaacacacataaaggataaacttttagaaacttatct

SEQ ID NO: 37242 - DNA, 374 bp, Homo sapiens
  misc_feature (1)...(374): n = a,t,c or g
cttcaaaaaagtgtccttggtgtgatcacaattgtaaatctacggggagcccttcgtaaatttagggatcttcccaaaatgtggagtattagtagaatggatacagttatctggtttgttactatgctgtcctctgcactgctaagtactgaaataggcctacttgttggggtttgtttttctatattttgtgtcatcctccgcactcagaagccaaagagttcactgcttggcttggtggaagagtctgaggtctttgaatctgtgtctgcttacaagaaccttcagactaagccaggcatcaagattttccgctttgtagcccctctctactacatanncatagantgctttanatcngctttatacacaca

SEQ ID NO: 37243 - DNA, 296 bp, Homo sapiens
gatcacccagttatgcttcagaagatcagataactgacatctaaggcccaaatgttcctccaaaacttgccaagtctacttggcagaagccaggccatggtccccatagagtgttaaaaagctgtgttagtgacagaatggggcttttgtttatttgtttgtttcttctgctctggaaacaaatactctgatgaagcaaggtggttcaatccttgattttccatttggacaggtggtgtttctttgaaacagatgctgtttgttggctgtcactgcatgtttgggggtgggagagg

SEQ ID NO: 37244 - DNA, 378 bp, Homo sapiens
attttatgttttcaatgtggcagacactaacaaagaaattaagattattctaaatagcacatatagacttaaaacagatcaggtaccgtattaattgccataagatactaagtaaaagaatagctataatactgatgtcaataaaataataacatcatttcaggattaaacacataaccttattcttatccatagtgtgttcttcttttattgcacaattttcacttacagtgccaacctctatacctactcagctacttatttcattatacaaaatcaaattttctaagatatcaaaataataaagtcaattcctgtcagttgagatatggcatatgaagcacagattttaaaaactgataaattggactaggtcaa

SEQ ID NO: 37245 - DNA, 403 bp, Homo sapiens
  misc_feature (1)...(403): n = a,t,c or g
aagcagccggtgatggcggcagcggctgtggtggctgcggcgggtccgggcccatgaggcgacgaaggaggcgggacggcttttacccagccccggacttccgagacagggaagctgaggacatggcaggagtgtttgacatagacctggaccagccagaggacgcgggctctgaggatgagctggaggaggggggtcagttaaatgaaagcatggaccatgggggagttggaccatatgaacttggcatggaacattgtgagaaatttgaaatctcagaaactagtgtgaacagagggccagaaaaaatcagaccagaatgttttgagctacttcgggtacttggtaaagggggctatggaaaggtttttcaagtnccaaaagtaccaggagcaaatactgg

SEQ ID NO: 37246 - DNA, 370 bp, Homo sapiens
  misc_feature (1)...(370): n = a,t,c or g
cgagcggcccggggccggggcggccatggcccgctgcaggacgagaccctgtttgtggcgtncgtgccctttnagaannngtncgtccaagggcttcttttggnttnnctgaanatcntttagccaggcangntntttcctnncnntgnaaaatnnccntgatnangnttctntttttaagaaancggnacttaaaggntttttttaaaantnccttnaaaantctgggttccnttntnnannttgnnnnnttgnnaaancnntttttgatntatanccttatanaangcttttttccngggnannttttggnttnaatttttttgncccntcctttgggnattttttttnnggcaaaattnngaaattc

SEQ ID NO: 37247 - DNA, 387 bp, Homo sapiens
  misc_feature (1)...(387): n = a,t,c or g
ggcggcggcagaagcggcggcggcggcggcggcgggagccgaggaggaggttccggacgctgcttaggaaccggggactcaggagtgcccgcgccctgagcgctcagctccagaggcgtcatggctgagtacgggaccctcctgcaagacctgaccaacaacatcacccttgaagatctagaacagctcaagtcggcctgcaaggaagacatccccagcgaaaagagtgaggagatcactactggcagtgcctggtttagcttccttgagagccacaacaagcttggacaaagacaacctctcctacnttgagcacatttttgagatcttccggccgtcctgacctattcactatggnggtgnattccngaacccgtntgcttgaaa

SEQ ID NO: 37248 - DNA, 375 bp, Homo sapiens
  misc_feature (1)...(375): n = a,t,c or g
gccagagagatgtcggatttcgacagtaacccgtttgccgacccggatctcaacaatcccttcaaggatccatcagttacacaagtgacaagaaatgttccaccaggacttgatgaatataatccattctcggattctagaacacctccaccaggcggtgtgaagatgcctaatgtacccaatacacaaccagcaataatgaaaccaacagaggaacatccagcttatacacagattgcaaaggaacatgcattggcccaagctgaacttcttaagcgccaggaagactagaangaaaagccgcanaattagatcgtcgggaacgagaatgcaaaacctcagtcacttggnanaaaaaataatnggccccttttc

SEQ ID NO: 37249 - DNA, 379 bp, Homo sapiens
  misc_feature (1)...(379): n = a,t,c or g
agtaagaaattctgggggcccaccaatctgcatttggacaaatcttcnnnnnnnnnnnnnnnnnnnnnnnnnnnnnnnnnnnnnnnnnnnnnnnnnnnnnnnnnnnnnnnnnnnnnnnnnnnnnnnnnnnnnnnnnnnnnnnnnnnnnnnnnnnnnnnnnnnnnnnnnnnnnnnnnnnnnnnnnnnnnnnnnnnnaggcatgctcannnnnnnnnnnnnnnnnnnnnnnnnnnnnnnnnnngatcataactcattgcagcctcgaactcctgactcaggcaatcntcctgcctnagcttcctgngggcatgagtcttnntcncctgcccaaaaaaacttgtttnanttccgntcacattgcattggntaanaaaaaaaa

SEQ ID NO: 37250 - DNA, 362 bp, Homo sapiens
  misc_feature (1)...(362): n = a,t,c or g
aagagatgttgaattcccctataaaattagtggatttttccattcttctttttaatttgtatcagctttgcttcatgcaaatatgtaggattgcaggtcttcttggagagttgactcctttatacctgataaatgctctttatccctgatacacttctttgttttgaagtcagctttgtctaaaagtaatatagctaaacaggttaattttgataatggtnaanagggccggggttcctctattccttaacttaatccntttaagggcctaanaattaaanggngttcnnngtccttngaaattnngataaggcccctttaaaancnnnntggaancnccngnctttnaatggccaaattaa

SEQ ID NO: 37251 - DNA, 402 bp, Homo sapiens
cccagagggagcaggtttctttgaacttttcctttttatgtacagcatagtgctgagcagatcactgcactgtgcaggagttttaacgacagtcaggccaacggcatggaaggaccgcgggagaatcaggatcctcctccgaggcctctggcccgccacctgtctgatgcagaccgcctctgcaaagtcatccaggagcttgtggacacagagaagtcctacgtgaaggatttgagctgcctctttgaattatacttggagccacttcagaatgagacctttcttacccaagatgagatggagtcactttttggaagtttgccagagatgcttgagtttcagaaggtgtttctggagaccctggaggatgggatttcagcatcatctgactttaacacccta

SEQ ID NO: 37252 - DNA, 396 bp, Homo sapiens
aaccaataccttattttctctttttttctacctgtctccccaaccacgcgccccacaaatatattcctaaaacctttgtatttggtgctggattcagtatgaaaagaaatagggtttttagaagaaaaaaaaatcctatatgaattggggcctggatagcactgagttgaagatcttgaagatctcttactttgagaaggtacatgagtcttacacaacctagctttttatgagataaaattaaaaaaaaaaggaaagacatcataaatgactgttgttctctcacagtctgctcatttgtcttccaatgatcatgttatcagtggtgaatccatacaggtctgcatcaaactcgatacaattcttgcctccttggagggaagaattcagctgagg

SEQ ID NO: 37253 - DNA, 395 bp, Homo sapiens
cggacgcgtgggctgtacccggcgttcgcccagcctggccaggagtgctacctgcagaaggagcctctgctcttcagctgcgccggctccaacaccaagtaccgccggctctgcccctgccgcgacttccgcaagggccaggtggccttgtgccagggctgtctgtgaatccgcctctgccaccctgcctggcacccacgctggctctctcctgccgcgggagaaagcaccagcaggttctgagccctggctgcttgtcctcctcgcaacccccccaggccggagcttccttccttagccgggaagctggcagaggagagccgtgcccgggaataggaggaggcagcatgccgagcccctgggacctccaggcaggctccggttctctctggggg

SEQ ID NO: 37254 - DNA, 405 bp, Homo sapiens
attatacaatgttacaaatatgcagaccgtgttgtttgctccagtgataccttgttaagctaggtggctgagtcgcttatggttttaatgcaatgagcaatgtggatatgaccaagagttgttgtgcaagttgacaaatgccaaatagaaaaccacttggccatttatttctatgttcactaaaaatcctattgccttgtgtgattcttaatctcttttgcgaacctttcagtctccgctagctctttcctaatgagctttacagcagaagccgttttatcgttaagtgccccacagagacactttaccaggaggctgggagagttctccagatttgggagaggcgcagagacagtgtgtgagccgagccctgtctcagcaatccacctggaggagctagagtat

SEQ ID NO: 37255 - DNA, 397 bp, Homo sapiens
agactacacccacttctacttctgttatcgctggttcctgctggattttaagagagaactgctgtatgaggatgtgtttgctgtgtgggaggtgatctgggcagccaggcacatctcatcggagcactttgtcctgttcatcgccctcgccctggtggaggcctaccgagagatcatccgtgacaacaacatggacttcactgacatcatcaagtttttcaatggtacgagctggtccagccatccaggctgccctgagcagaggtgtggaggcccccacctctgccccgcacacagctggagggttctcaggaatcctgggggcccttccccaaaggccgggatgtcaagaatctagcagagcagatggaaacagagcagggtagtcagccacctc

SEQ ID NO: 37256 - DNA, 405 bp, Homo sapiens
cttctttctgtctgcccctactccttttctttgccttttccctttcctatccgtgatctcccctgaaaatgtcagactcccggagcaaggaacccggagtagcccgggcgcgcggttccggcgccccctggaggagccagcggccgagtgcttagcgtcggaggatcgcggggctttgtggtggagcactccggctgagcgcgcttcacagcgctgtggcacactggtcatcgttgcttatagaggatgccaagccccacccccattcccccaattggcctcgtctcttgtcttacttagatcagtttgttgtaactgttcatgtgtgtactgtttttcaggactgaaaactttataaataatggacatgtcctaatctcacgagttgccatgaagatcaaataa

SEQ ID NO: 37257 - DNA, 411 bp, Homo sapiens
gaaggggtatcatggagttgggagctccagaggaggcaaaggttttgggtcacgggagagtgccattgagaacggacaatggatgctgagaaggacaatgagaatcagtggaaataaggcaacaggaatttgtgctgaacatggtcaccctggtttcatgattctccacaacaatatgggaagctcagaggcaaagaaaaaaacaaaaaacaaaaaacagagagaccagggctgatggcaggcatggtaaacctggtcatgcccctcctctgcttacagtccgtcagaggcttcccattccttcaagaagaccttccagatccttcaccgtccggcagtgcccatttctccagcttcctcgtgtatcactctcccttgggctttcaaacttccatcaccctggccgactct

SEQ ID NO: 37258 - DNA, 353 bp, Homo sapiens
  misc_feature (1)...(353): n = a,t,c or g
caagaaacctacagccatatttgccatgtaatcacagctgtgttttccctttcagcaagtgtattcgcattcttgtactttcttggaacctaatttttgcattcaatggtattattaactttatttttatggctcttggcataacctgactcaaaagatggtttgaaggnntccggcncnagngaatcnataagcntaatttttttcnaaatggtccnnnttaatttaaantgggcttcttgcttaacnaaatgtggngccccactcccctttagggnnaataggctttttgaaatccnnggntgtagggnnatctagtcaacaacacgcttttnaaataggngatggngacc

SEQ ID NO: 37259 - DNA, 338 bp, Homo sapiens
  misc_feature (1)...(338): n = a,t,c or g
agatttttctacaccggtagccttcgctgtctgtcagtcaggaccttctggtataggtgatgtaaaataaccgtacaatattaatgcatgcgattccataatgcttagtgaactgtatgaatattactcacaaggtatgttagtctttttttccgacttgnntcttgnaaagctaggcttaaaaggnaattcactgagaacncaaantctggnatttcctgaattccgctggtttnaanantttggaggganacntttcttaaantcnggattanncnnggtttgggttttngnnatngntttttgggnatctttttcctaggggancnaccntgggg

SEQ ID NO: 37260 - DNA, 363 bp, Homo sapiens
  misc_feature (1)...(363): n = a,t,c or g
cagcttttccagggatgcactgcttgttggtggtagtttagataccaaaccaggatgaatactctccgaagcttgtgctttaaaccactctccgttatttgacttacaaatcacctttctcaaaggaactgttggaaacctttcattaaatgaaatcataaagatggctggaanccggcagtttaaaatttgctngcaatgaattaagaattggtttggccccaggcattttaaattccctcntaagganaaccntncnnttttgncccanggnggttggcnaanccttaattaaatttaaaaatgnccggnagcccattttttngaaaaccngaaagggtttttacncnccctnttcngggg

SEQ ID NO: 37261 - DNA, 352 bp, Homo sapiens
  misc_feature (1)...(352): n = a,t,c or g
cagggattagatatctgtgcaaatggcaggtgcccagaaagttggctgtgatggtttattagggtctcttgcaagagaagatcattgtggtgtatgcaatggcaatggaaaatcatgcaagatcattaaaggggattttaatcacaccagaggagcaggttatgtagaagtgctggtgatacctgctggagcaagaagaatcaaagttgtggaggaaaagcccggcacatagctatttagctcttccgagatgctggcaaacagtctattaatagtgactggaagaatggacactctggaanccttcaatttggctggaactaccggtcattatgtagaacaaggccntggg

SEQ ID NO: 37262 - DNA, 404 bp, Homo sapiens
agcaggagaggaaagataagctcttcgtggtgcccacgatgctcaggtttggtaacccgggagtgttcccaggtggccttagaaagcaaagcttgtaactggcaagggatgatgtcagattcagcccaaggttcctcctctcctaccaagcaggaggccaggaacttctttggacttggaaggtgtgcggggactggccgaggcccctgcaccctgcgcatcaggactgcttcatcgtcttggctgagaaagggaaaagacacacaagtcgcgtgggttggagaagccagagccattccacctcccctcccccagcatctctcagagatgtgaagccagatcctcatggcagcgaggccctctgcaagaagctcaaggaagctcagggaaaatggacgtattct

SEQ ID NO: 37263 - DNA, 401 bp, Homo sapiens
gttgctgcatgcctaagaagtagtatcttattgagtcttatcgatgagaaactaaaaataagggatcctagagcaaaggattttgctgcaaaatatcaaacaatccgcttccttccatttctgacaaaaccagcaggtttttctttggactggaaaggcaacagttttaagcctgaaaccatgtttgcagcaactgacctttatacagctgaacatcaagatatagtttgtcttttgcaaccaattctaaatgaaaattcccattcttttagaggttgtggttcagtgtcattggctgttaaagagtttttgggattactcaagaagccaacagttgatctggttataaaccaattgaaagaagtagcaaaatcagttgatgatggaattacactgtacca

SEQ ID NO: 37264 - DNA, 391 bp, Homo sapiens
  misc_feature (1)...(391): n = a,t,c or g
ctgtttaatactcatccttgtataaaaaaaatagttgagccagcagacattgtcagcaaattaattggcagcagattttaggaaatgaatgtgtgtggttttttttctaaaactaaatagcatgtattgtgtcttttgcatgatgatccggatttaatttgatatcacagtctaatttttattcataagccaatttttctgcactgagcagagtcttgctacctcagtcagtattgttttggtttgctacttccctcacccactttggcctccgttcaccccaccccaccccacctctccccaccttacccccgccccgcttggnttcttctttaggantgtgatggttccgtnctgnacactcagtttgaaacnagaggatgcctgcctc

SEQ ID NO: 37265 - DNA, 392 bp, Homo sapiens
  misc_feature (1)...(392): n = a,t,c or g
cacacagcacatgcacacaggtgcacagaccacacagcacacacaagtgcacagagcacactgcacacatgcacacacacacgcgtgcatgcacactcctcgcacttccagccttggagcccttctgtctctggtctttctctttgaccctgctgagtgtaagctgcctggggaggggctacaaggagtaattgtggctttaggggtcgtggtgatgctggaatgtcaagcgccgtcgtggggtatccgactgtccgggctcctggtccgcagtggcagagcgccaggcagagcccaatcanggtctcgtgctgcccttcccccccacagcctggcagccatccagaggaggggctctaccagatgccaaggtgccccggtgtctgtatggt

SEQ ID NO: 37266 - DNA, 399 bp, Homo sapiens
gttattttgtgtacaagttgttattgttgaacatacttcaaaaataatgtgccatgtgggtgagttaattttaccaagagtaactttactctgtgtttaaaaagtaagttaataatgtattgtaatctttcatccaaaatattttttgcaagttatattagtgaagatggtttcaattcagattgtcttgcaacttcagttttatttttgccaaggcaaaaaactcttaatctgtgtgtatattgagaatcccttaaaattaccagacaaaaaaatttaaaattacgtttgttattcctagtggatgactgttgatgaagtatacttttcccctgttaaacagtagttgtattcttctgtatttctaggcacaaggttggttgctaagaagcctataag

SEQ ID NO: 37267 - DNA, 392 bp, Homo sapiens
cggacgcgtgggagcaaaagtagaacagcttgcagtgagatttaaaactaaagaagtagctgattgtttcaagaaaacatttgaagaatgtcagcagaatttaatgaaactccagaaaggacatgtatcactggcagcagaattatcaaaggagaccaatcctgtggtgttttttgatgtttgtgcggacggtgaacctctagggcggataactatggaattattttcaaacattgttcctcggactgctgagaacttcagagcactatgcactggagagaaaggctttggtttcaagaattccatttttcacagagtaattccagattttgtttgccaaggaggagatatcaccaaacatgatggaacaggcggacagtccatttatggag

SEQ ID NO: 37268 - DNA, 300 bp, Homo sapiens
gaattaaggaaaaactttaatgaaggaatgtacccatgtacatatgtgaactttttcatattgtattatcaaggtatagacttttttggttatgatacagttaagccaaaaacagctaatctttgcatctaaagcaaactaatgtatatttcacattttattgagccgacttatttccacaaatagataaacaggacaaaatagttgtacaggttatatgtggcatagcataaccacagtaagaacagaacagatattcagcagaaaactttttatactctaattctttttttttttttt

SEQ ID NO: 37269 - DNA, 384 bp, Homo sapiens
gtcccgaagccgctctgtcagctgtagcaccagcacatggtgagccccgacccgcagcccggcactggcaccgccggtgagggggcggcatcaggcatgcctgcctggaagactgggggaggctcccagatccgctcagcccaggtgccaagggtgggccgagcctggcactcgaacccaagcaaataaggagaggaaaccaaggtaccagtgatgcgggaggtggagggagaggaggagactgagctgggaggggccccaggcacccatttcagttcacctggggtctgagcctgggtagaggaggggcctgtcagtgagggtgctcacccacactcattgagaaagacacccaacagattcaggctttggattcaggccagg

SEQ ID NO: 37270 - DNA, 394 bp, Homo sapiens
  misc_feature (1)...(394): n = a,t,c or g
ggacatttccttctagtccttccaaggaggggagagaagtgtatgtgcatttgtgtgtgtgtgtgtgtgttgtgtgtgtgtgtgcgctaagtgagaaagagagcaggctcgggaggccctgcccagggtaggaggagcttcctgctttgcaccatctggtggtcgcacgccctgagggcaccccgactctgtctccaggagtctcatcagcaaaccgctgacaagtctttctagaaattctactgcactgtctggctcagctgcagctgcagacatttctgcaggaggagcaggtgtttctgtcttctgttccttctagggccacctngtccccttaaacacaggtccacgttgtgtcaagaacctagtgcatctgtgtgtgtctgtcagtgtc

SEQ ID NO: 37271 - DNA, 367 bp, Homo sapiens
cccaactcccaaaatgtgtggatgtaaaggccaactgtcaaggacctggggaagataaatctatacagtgcctctgtaaaaaatgtactctcaaacacacacacactggtatgtgcagacctggctgtgggtatggatggatattgtacacttagatatatttcagtttatacatatagattttttgaaaaggaagatcttgggggagatatgtgaaaaagacagcttaagaagcttttagggctaggcagtctgcttttatcacatgtcatctttgatgtggtgcaagttccaatccagtattttcatcagtgaacactgatataaaagaaactaacattttaagcgcataagttgtttccaaaaa

SEQ ID NO: 37272 - DNA, 380 bp, Homo sapiens
tgaaatcatcaagaaactcgagtgtcccgaccctcagatcgtggggcactacatgaggcgctttgccaagaccatcagtaatgtgctcctccagtaatgcagacatcatctccaaggactttgcctcctactgctccaaggagaaggagaaagtgccctgcattctcatgaataacactcaacagctacgagttcagctggagaagatgttcgaagccatgggaggaaaggagctggatgctgaagccagtgacatcctgaaggagcttcaggtgaaactcaataacgtcttggatgagctcagccgggtgtttgctaccagcttccagccgcacattgaagagtgtgtcaaacagatgggtgacatccttagccaggtt

SEQ ID NO: 37273 - DNA, 379 bp, Homo sapiens
cctatgtaaaggggtgcacagagcgttttgtatgtagtccagatgaagttatggataccatagatgaaggaaaatccaacagacatgtagcagttacaaatatgaatgaacatagctctaggagtcacagtatatttcttattaatgtcaaacaagagaacacacaaacggaacaaaagctgagtggaaaactttatctggttgatttagctggtagtgaaaaggttagtaaaactggagctgaaggtgctgtgctggatgaagctaaaaacatcaacaagtcactttctgctcttggaaatgttatttctgctttggctgagggtagtacatatgttccatatcgagatagtaaaatgacaagaatccttcaagattc

SEQ ID NO: 37274 - DNA, 379 bp, Homo sapiens
cggacgcgtgggccttcaggtacggcgagcgaagaagactctaaaacactgtcagggaaggagagaaagagggagagagggagggagggaagggagagaccaggcagcttctgcagaggcttcctgaagcccactgactccgcgggagggggttgcagagggacgggggcgggcgacagggggaggagtgtgcaaattgacatttttggctgcctgtggcagaggagcagccgtcagccgctgtccaacgttagcgcagacacggtggcggcgtgtgcgcctccggggctgctgattagaataggggacttggccgtggatggaatccgggaaacccaaaccggagatggaaggatgaggctgcgtttgcagcgcgtga

SEQ ID NO: 37275 - DNA, 368 bp, Homo sapiens
attttagcaatgaaaagtatcagaaaggattttctctgtgggcagttctttttgttttgggaagacttctgactttaattctttcagtactgactgttggttttggccttgcaagagcagaaaatcagaagctggatttcagtactggaaacttcaatgtgttagctgttagaatcgctgttctggcatccatttgcgttactcaggcatttatgatgtggaagttcattaattttcagcttcgaaggtggagggaacattctgcttttcaggcaccagctgtgaagaagaaaccaacagtaactaaaggcagatcttctaaaaaaggaacagaaaatggtgtgaatggaacattaacttcaaatgta

SEQ ID NO: 37276 - DNA, 387 bp, Homo sapiens
  misc_feature (1)...(387): n = a,t,c or g
aaaataaagttaaagtttattttggcttgggaataggttggagactccagttcctgtaatgctgctcatcattagtacggggtttaccaagagtttttccctcttcttgagtcagtctaaatttatattaaacttctcccagctgttcaatatttaatctccagacagatttagttccagccatagaaagtttctcttctgaaaggacacctactggagacgagagtagggaaatgagaatgaggagtcttcataattgatagtttctcttttattccctttgttttgtgccattttgctactgaaagatgatcatgatgatgactttctgtggtcaggaggaatctcacnaaagtggttgnanagagaggcttttgtgacccctca

SEQ ID NO: 37277 - DNA, 390 bp, Homo sapiens
caaggttaaggtttcctcatgagcaaggttgcagatcggtccttcctcagctccttgatttgtgaccttgaccaaggggcctgccacccagcccctccagtgccctctcctcgatgcctcgctccttcctgcccccactcccctggcttaggcaggtaggggaattagggccatgctggaagaagcttaaccatgtgttcaaagaacggtttcttgcttgcttggtcctggaactccccttggctgccccaggcctccttggcccatgggtgctgggggaggtggatgtcagatctggtaggttgcagcagagaaaataaatgtgccttgagagaccactcagagagggtccaagggtgatggagaaggaagcatggcctgggagcttga

SEQ ID NO: 37278 - DNA, 390 bp, Homo sapiens
cgagcatctagcatgttccagacacaatctgaacactgagcacacaacagttggaacaaatatgattcctatcctcatggagcttctattctcctgtgaaaaacagatgttaaacatgattgaggattaggtttcaacataagaattctaggaggacacagacatttagaccatagcatcttcaggtaaactttatcttcagtaaattaaagagatctatttagatgacctttgagcatcttaattattagatgtcagtgctagtttaacttattttaaacgtttcagatatttatttaattatactttaagtgtctcatgtaaaaaagttatttataaaataatttatagggttagagtcattgcccttttaatgcaacaaataaacag

SEQ ID NO: 37279 - DNA, 145 bp, Homo sapiens
cccacgcgtccgaattccgactagagagggaggatatgaagggaaacctaattctgaatctatactgattaagggcaccgatggtcagggtccaagagcccttttttccctgggatgcactcatttctttctttttttttttttt

SEQ ID NO: 37280 - DNA, 406 bp, Homo sapiens
tgagagtttggttttgtaacaggagacagaaagagaaaaggatgacccctcccggagggactctgccgggcgccgaggatgtgtacggggggagtagggacactccaccacaccacggggtgcagacgcccgtccagtgaactcgagctgggggaggggcagagcgcggggctccccctccccttcggtccttggccctttcccggccctcttgttccctctctaacttctgattgttcttttatttttaattattatttccccgtcccttaaaaagacaaaaaaaataaggcaaaaggaaagcaactaagacactggactatcctttaaaggtagcaggtgtaatgatgtgttttgacctttgcaggcgagtaaccaggcaatggaatggagtgctcctggagaa

SEQ ID NO: 37281 - DNA, 446 bp, Homo sapiens
  misc_feature (1)...(446): n = a,t,c or g
cccacgcgccgcggacgcgtgggtttttataagccatagtattttgttatagcagcctgagctaaaatgttatgtttatggtatgaatccatgtttctatgtttagatttaattaatttatttgcattgatgtgtagtatacaattattgaacatatcacagtttatgctattgttttgttctttatataaatttaggttatttccagcttttcaatattatatataatgcggctatgaaaattcttatatatacctctcagtatacacgtacacaaatttctgttgggtagctatctatgaggagaattgcatgttcaactgtaatatatgatgccaaacttccaaattggttgtatcagtttacacttccatcagtagtgataacagttcttggtgctgnacatcaccaccattgcttgtattatctggctttttcatttcact

SEQ ID NO: 37282 - DNA, 383 bp, Homo sapiens
  misc_feature (1)...(383): n = a,t,c or g
gaaaagcatatattactggtttgcatattgtttaagtgatattgtattttatattgttctgtttcttgcgtttttcactatgtaccatattttaaaatcaatttctactgctctaagtatgtccaactaattgcttctacccacagcaaaatactctgtggtgtacctgcaccacattttacccattcactctcccagtgatgccatctccttgccaccaccatgctgcaatgatccaccatgtacatttccctcttcagcctgcctgggaatgtttccaggatatgtgctcatcagtggaatttctgagtcagagggcacctgcatacttaatttggttatgnaatgctagaagctctccaaaataaatgctggttcataaa

SEQ ID NO: 37283 - DNA, 387 bp, Homo sapiens
cccacgcgtccgaaactcctgtgtctgtgtatattacaagcctacatgacacagttggatttattctgccaaacctgtgtaggcattttataagctacatgttctaatttttaccgatgttaattattttgacaaatatttcatatattttcattgaaatgcacagatctgcttgatcaattcccttgaatagggaagtaacatttgccttaaattttttcgacctcgtctttctccatattgtcctgctcccctgtttgacgacagtgcatttgccttgtcacctgtgagctggagagaacccagatgttgtttattgaatctacaactctgaaagagaaatcaatgaagcaagtccatggtaaccctaaattaataaaaagaggt

SEQ ID NO: 37284 - DNA, 384 bp, Homo sapiens
  misc_feature (1)...(384): n = a,t,c or g
gatatattcctttttatatgtcagaaaggcaaatggtataaagaattaaaattcccagggacaaaaaggaagtacagaaataaacctcttacagagtcaacaggaatgtaaattgattccacctttctgaaaaaatattttggtaatatagttttcctgcatgcctagtaattccactttagggaaattctcctttaaatgggtcagaaaataaaatgagctaagatgtatttattcattattcaaaaagtatatgcaagaaaggatgtttatagcagcattatttggataagcagaaaaatgtaaataagcctactttatagggttggttaaatatggtacatcctttcaatggaatactgngtaccagttaagaataagccc

SEQ ID NO: 37285 - DNA, 373 bp, Homo sapiens
caaggcactacgaaagactctacatgccacagggaaaagacagacaagatctctgtcccaacacagaaaattttagcctgccatgttgactcccagggatctttttgtttctgtaggaggtgctcattacagagtggccaaattcctactgaagaatggacttggttgtgaaataaaacaatcctgggcaatatttgttgatagttttgttgaggatgattcaggaaataaatacaaacttttaactactcataatgaatattggtgggatattataatgaggaggtaaggatttacctgctacaatttgggtaggcaaaaatgtaggcttctctgtttctttgcagtgaactaaaacttcttatgaactctg

SEQ ID NO: 37286 - DNA, 388 bp, Homo sapiens
  misc_feature (1)...(388): n = a,t,c or g
gtcgaggaggaggtggatgtggcagctgagatctacagggggcacggatgtggttctttctatcaaggcctgcccggagacaagagagtcactgaggagactaagaacaaacacagccccttgctctgggatctttaatatcccatggctaaaaggaagatcctaaggatctgggaaaagacccagccagggctggctgctccagctcttgcttccctttcagctttcttccatccctgctccgggagcctgaggagggtgtggggacacccatcttggatacaccaacgcaggatgcaggtgtcgccaacagcagggggagcatgagggctgtctccccttattcacccctgtcctctgaagctgnttacacttttctctttgcttt

SEQ ID NO: 37287 - DNA, 390 bp, Homo sapiens
  misc_feature (1)...(390): n = a,t,c or g
nnnnnnnnnnnnnnnnnnnnnnnnnnnnnnnnnnnnnnnnnnnnnnnnnnnnnnnnnnnnnnnnnnnnnnnnnnnnnnnnnnnnnnnnnnnnnnnnnnnnnnnnnnnnnnnnnnnnnnnnnnnnnnnnnnnnnnnnnnnnnnnnnnnnnnnnnnnnnnnnnnnnnnnnnnnnnnnnnnnnnnnnnnnnnnnnnnnnnnnnnnnnnnnnnnnnnnnnnnnnncatctcgaaaaaaaaaaattgtgtaattataggaactttggaaagattgttattcaactgatattacataaggnatttattttgtaaattatttgcaatattanaatttctgtcagcctacagtatttctctgctgttattctgaccttacacattgaaagagttctta

SEQ ID NO: 37288 - DNA, 392 bp, Homo sapiens
  misc_feature (1)...(392): n = a,t,c or g
cggacgcgtggggggattatcaagtggagaaaaattatgtctttctagacactgctaaaagcttggtaaaactagacttcaggttatatgaggggaagtagtggaagtgcggctggaaagcaaagcaagagatggctcggcaccatctcactcagaagcattgtcttcgtctcatagagacagagaaacaatgaacggttataagcaagggggcaaaatgaccagatttgtactttagatcagaaatctgatgctaggaaaccaacccatatttttaataataaacctttcatttggaataattttatttacataagtgtttctaattaactacggagagttcccctgtacccttcatccaatttcagttttccttaatgntatcatcttac

SEQ ID NO: 37289 - DNA, 388 bp, Homo sapiens
gagcatcccgagcctcccaaagcagaattgcagctgccgccgccgccacctccaggccactatggcgcctgggctgcccaggagcttcaggccaagttggcagagatcggagctccgatccagggtaatcgcgaggagctggtggagcggctgcagagctacacccgccagactggcatcgtgctgaatcggccggttttgagaggggaagatggggacaaagccgctccacctcccatgtcggcacagctccctggaattcccatgccaccaccacctttgggactcccccctctgcagcctcctccgccacccccaccacctccaccaggccttggccttggctttcctatggcccacccaccaaatttggggcccccgctccttt

SEQ ID NO: 37290 - DNA, 364 bp, Homo sapiens
gccctatggaaattcctgtgtgcagtcaggacttgagaagtacagcaagaaagggaaggggcaggctaagcctaagaaccctgtagttggcctttctaaaccaggagccagtgaatacaatatgctttgcagagcagagatggcatgtgagatgagattatagagaaaaatctgatagagaaatcatgggctttgaatttctctttgtttcataaggaaaggaagatgctagacagggcgtattggagagattcttctttgtgacttttaacttctttgcttggtttcacagtaagtcacattatggagaagttgttacaaacagatgaaaccccaggaagggaagtagaaatttccgatctgg

SEQ ID NO: 37291 - DNA, 371 bp, Homo sapiens
ccaatacttaaagtctactgtgaacctacacactattatcattgggtttttctgctatacctcagcatcaggtaagggagtatctctcatgcaagcggagaaattcagggattacaaggtatgaactgagtggttgtgaaatgtagaaggaaaaacacaggctttaaagtcagagaagtccaagttgaaatgccagttctgccacctctcagccacctaacttttgagagtctcactttataaaatgggaacaatgattgccttaaagggtggttgtcaaggttaacaaactaatgtttataaaatgcattgtagcaaagcttacaatgcattttataaacatttataaaagagttacctatcttacctgg

SEQ ID NO: 37292 - DNA, 372 bp, Homo sapiens
  misc_feature (1)...(372): n = a,t,c or g
gtttatttcaatgattacctggttttcagtagttatgcaatttctaattgtttgtccttacaaataatgccaaaatatgtatcctgtgggcaattatttgcacacatctgttgaagtgtttggtttttttttttaaacntnnntttaatanccnnggnngnagggaagggnnnaantntnnnntannngaancntcancttccanggttaanggancttccancntnaattccccccngaannnggnnccncnggnnctnncnanntgncccagnnaattttngantttctggtnnaaanggggtttnnccntnttgccnaggcaggnnnnaaannggnggnntnaaggnatcctcnggcctcccntaaaaa

SEQ ID NO: 37293 - DNA, 412 bp, Homo sapiens
ctaaacttgaaaaaagaagtgtcctcttttatctgtttataagtaccaatacatccaattccagtaatgtgccacatatttgccaactgtttaattccatctccttggcttgacactcttagaagagtgtcccaaaacaattggtttcactgatagttacattattgaatttggtaagaggttttgtaattttgcataagccttggtaacatttgaaatattttttgtgtctactgctttgtaaaataaagatactctcttgcaaccccagtcatatatttttatatttttgtaactttaagcaaggatgagatttttctaaaagcagtatataaacaggctttttacacttggactagttgcaggaaatacatctgaatgtttatttgcaagtaattttaagaaagaaaat

SEQ ID NO: 37294 - DNA, 404 bp, Homo sapiens
cattggcaatggcgttcattccttacgagtggctttactgcagtttatttcttaatctatgcagtacactacttcttttcaaaactgcagatcacgggaacagcaagcacaattctgtactttggttataccatgataatggttttgatcttctttctttttacaggaacaattggcttctttgcatgcttttggtttgttaccaaaatatacagtgtggtgaaggttgactgaagaagtccagtgtgtccagttaaaacagaaataaattaaactcttcatcaacaaagacctgtttttgtgactgccttgagttttatcagaattattggcctagtaatccttcagaaacaccgtaattctaaataaacctcttcccatacacctttcccccataaagatgg

SEQ ID NO: 37295 - DNA, 401 bp, Homo sapiens
  misc_feature (1)...(401): n = a,t,c or g
cacttaaatacatgaagttttatttttagacgtcttagccactcctatgctgcttttcttgttgtgcttctaaatatagtgaccagttttggagctctcccagtttccattctttgtgttcattgaattgatttcatgatctggccatattgtttattggagagagccagaatattttcccttactcagcacatcatgacccctgagttcacaggtcagttgaggtagggaattttaaacatagagtagtaataggacaatgttagactgaaagcatcattgaatggaataactgaaatatatatatacatgtataggaagaccaccctaaggggactatttgccatcccactttaaaaaaaaaanaaaaaaagnaaaangntttttnagggcctttggtt

SEQ ID NO: 37296 - DNA, 404 bp, Homo sapiens
  misc_feature (1)...(404): n = a,t,c or g
nnnnnnnnnnnnnnnnnnnnnnnnnnnnnnnnnnnnnnnnnnnnnnnnnnnnnnnnnnnnnnnnnnnnnnnnnnnnnnnnnnnnnnnnnnnnnnnnnnnnnnnnnnnnnngatgtttatgtcttccttttctggattgctttagaagtttctttgtgcaggtttttaaccttgtcttggatctcattgagcttccttgtaatccatgttttaaattctttatctgttatttctgaatttccattttggttagtgaccactgctggagagctagtgcgatcctttggtgatgtcactaccttnagatttttcatggtgctggaattcttacactggttccttcttatctgaagacttctgatttttataattatttttgtgttggtaggattttttctgtacatt

SEQ ID NO: 37297 - DNA, 406 bp, Homo sapiens
  misc_feature (1)...(406): n = a,t,c or g
gcaacaagagagttctaacaattctagtgtgaagccaaatagtgatcttttagtgctttggggatggggtgggctggggtggatggatgggcagcagtgactttgattacccttgctgctctgcatttgtcagtttattcttttgtttcttttatctgactgactctgtcaaacaanngncanagntgggtgntanaaaatgtttaacctaaaaaatgttgtattgacacaaagccttatgaacagatttatggagttcaatccactaagtctgaagagtaacaaaaaattaataaacattctcaaaatggggncncttnaaaaaaccncttgggggnnccnngttttacnnggganntaatctgctttantttnccnnanggggctttgnttnnctganncgccg

SEQ ID NO: 37298 - DNA, 401 bp, Homo sapiens
  misc_feature (1)...(401): n = a,t,c or g
cttttaagtttttctctttttcagacaaattactgataaaaatgatattgctctatatgtaatatatcctgaaagcattattttttgttgaataggaaataaaattaatgaagacagaggctagaaagcatccattaattaatgagacacacttaactacttatctctaaaccatctatgtgaatatttgtaaaaataatgaatggactcatcttagttctgtatataaatatattttctttctagtttgctagttaaggtgtgcagtgcttttcctgtgtattaaacctttccattttacnttntagaaaatnttatgnattttaaaataaggggaagagncattttcacttttanactactatttttctttccaagtcntttttggttttgggttctta

SEQ ID NO: 37299 - DNA, 404 bp, Homo sapiens
  misc_feature (1)...(404): n = a,t,c or g
gtgggcaggcatgggaaacaagtaggaggtgaagtcatcagacataaatattgttgaatgaggagtacaggtactgaagtcccaatttaggaaagcacaaagtggtagactacagatccagacacttctgtaattcaagaaaggaagttggctttgtccaaacttatataagnnnnnnnnnnnnnnnnnnnnnnnnnnnnnnnnnnnnnnnnnnnnnnnnnnnnnnnnnnnnnnnnnnnnnnnnnnnnnnnnnnacgtgggaggtaattaaatcatggtggtggttaccaccatgctgttctnatggtagtgagtgagttctcacatgatctggtggttttataaggggctcttcccggcttcgctctgcacttcttgatgccaccatatgaagaaggatgtgc

SEQ ID NO: 37300 - DNA, 402 bp, Homo sapiens
cccacgcgtccgcaaaaaaacagacgttaaggaagaagataaatccaaggacaacagtggtgaaaaaacagataccaaaggaaccaaatcagaacagctcagcaacccctgaatttgacagtctcaccaatttcagaaaatcattaaaaagaaaatattgaaaggaaaatgttttctttttgaagacttctggcttcattttatactactttggcatggactgtatttattttcaaatggctttttcgtttttgtttttcttggcaagttttattgtgagtttttctaattatgaagcaaaatttcttttctccaccatgctttatgtgatagtatttaaaattgatgtgagttattatgtcaaaaaaactgatctattaaagaagtaattggcctttctga

SEQ ID NO: 37301 - DNA, 402 bp, Homo sapiens
gggcatgtcagatgttgcccaggagaagaacaaaaagcaggaggagagcgcagatgcccgggcccccagcgggaaggtgcggcgttgggaccagggcctggagaagccccgccttgactactccgagttcttcacggaggacgtgggccagctgcccggactgaccatctggcagatagagaacttcgtgcctgtgctggtggaggaagccttccacggcaagttctacgaggctgactgctacattgtgctcaagacctttctggatgacagcggctccctcaactgggagatctactactggattggcggggaggccacactcgacaagaaagcttgctctgccatccacgctgtcaacttgcgcaactacctgggtgctgagtgccgcactgtccggga

SEQ ID NO: 37302 - DNA, 407 bp, Homo sapiens
  misc_feature (1)...(407): n = a,t,c or g
gtattttttattaagcccccccctcccatttctgtacgtttgttcagtctctagggttggttattattctaacaaggtgtggagtgtcagcgaggtgcaatgtggggagaatacattgtagaatataaggtttggaagtcaaattatagtagaatgtgtatctaaatagtgactgctttgccatttcattcaaacctgacaagtctatctctaagagccgccagatttccatgtgtgcagtattataagttatcatggaactatatggtggacgcagaccttgagaacaacctaaattatggggagaattttaaaatgttaaactgtaattngtatttaaaaagcattcgtagtaaaggtgcccaagaaattattttggccatttattgntntgccttttctttaaa

SEQ ID NO: 37303 - DNA, 404 bp, Homo sapiens
gcagacactggaagcagaggcttctcacccttcctgctttttcaccacaatcaccttgagctcgtcccttggactagagtctccacagttccagtaaaattctgcggtgggctgatgagctgcttgcatttctgtgacatttccagatatgattctcagtgggattttggaaactttgattgctcaagctcacccttcttaacattctgtaatggttacagatgagaatggaaaacacatattttatggatgaggcgttttggtctcccctgcagtcgatttctagaatcaagttttagagttcggctgatgcatctgcctggggacctcagatgggaggagtgtgtcagttgtaccccgacagaaatgtctctgggatctgtggctggcttgcccgggcatct

SEQ ID NO: 37304 - DNA, 475 bp, Homo sapiens
  misc_feature (1)...(475): n = a,t,c or g
aaggtttttaatcctctgatgcttccatcttcctgtttaggccatgtgcccagaaacctggactgatctttctttaatagtgaacccctgggccactgaagagtaacatggctccactggacacaaaagagggatggaatcaacaggcagggggccttttataagccttaggaaaagaaaatgaaactatttcatctttggacttttcaatactattggagtgatttttttctttctaaacagggaaaataatgttacaaaagcatcttttttgttatttgtttgcatccctcccccacaccctggtgttttaaaatgaagaaaaaaaaccatcaccttttgtacaaaaactcttaatgattaaaaaacnaaccaaacnaannaaaaannnnnnannaaaaaaaaaaagggnngcccnnttaaaaaaacccnttgggggcccaattttacnnggggnggcnnnnttttttttttt

SEQ ID NO: 37305 - DNA, 400 bp, Homo sapiens
  misc_feature (1)...(400): n = a,t,c or g
taaaacaggttagccaatgtatttttcttaaattcattgttcatttttaagctaacctatacaaatggatattaaacaccagaaattaaggccattaaaattgaattgtactttaaaaccataagaaatgctaattaagtttagaacaggagttgaaatgactctcagttttatctatagctccaattaggacaaagttactttacaaaaagcattaaaaatagaagtaactgtatggtacttcaggaatttgaccagtgccttacatgtcattcttggcagtattttgtcggtgctatactttcatncagatgctanagaaccntggagtntggtatanacangcatttggtcccngggagcttnnnnancngcgccctgtnnanntggnncgctttga

SEQ ID NO: 37306 - DNA, 442 bp, Homo sapiens
gggccacctagataaatccagggtaacctcatcttaactacatctgcaaaaactctatttccaagcaaggtccccttctcttctgtgtctgccccacatctctctttctgtcgtaaacataccggtcggtcgttggatttaaggcccactctgctccaccctgacctcatcttcaccagctgcatccgcagagatcttaattctgggtagggtcccattctgaggctgctggtggatgtggatttgggggcggggtgctgtttggctccggaactgcccccggccctagggtgctgagtgagctgcacactccatccgtaccgtagactttccaagtgcatgaagagcacggggaaatattgtcaagcaacaaggtaggaaaacaaggtgtgagattgcacattcaggctacggctttggtttttgcctgagggagaagcac

SEQ ID NO: 37307 - DNA, 392 bp, Homo sapiens
  misc_feature (1)...(392): n = a,t,c or g
ctccctggtcacgttgctcctgctgccgtcttgttccaaggtgcgggggggacactgttggtctgtccaggtcaaggtccctttctcttaccatgacagaggctgggggcagacagcggggacttttttttttttaaaaaaaacnnnntngncntaggnaaanttnnttnccnttaaaattggnnngngnacttaaaaaaaangggccntaaaaaaattnnnagnaaccccccnggangnggttttaaaaaaaaggnnttngggnccntncntggaaaccntnnncccnatnnggnaaanctnnggggggccccannnnttggccntngggnttngggggggnnnaanangaanngggggntncccnccttggnanatncnangnccggggc

SEQ ID NO: 37308 - DNA, 391 bp, Homo sapiens
  misc_feature (1)...(391): n = a,t,c or g
atacacatatttataaacagttgtaaataacagtttctgtatgacaacagaaaaggcttatctatactttgggcaaagagctgctactatattgatggcaccagtattattagcatttatggcagattgaccagaaaacttatcactgttattcttattttaaatttcatgtggtaaaattttatttgagtgcaatgacattctggcagttcagatttttcagtgctagggatcagaattctttgttatttctttaaactttgatgtactttttacatatttcttcttcttttaatgtttaaataaatcaaaaggagcttcttctcttgtggggananntaggatgctccgnggaaattgcttttaaattatagaacaagattcgtaacaa

SEQ ID NO: 37309 - DNA, 401 bp, Homo sapiens
  misc_feature (1)...(401): n = a,t,c or g
ctgattgacaagacgaagttcaccatcacaggtctgccaacagatgcaaagatctttgtgcgtgtgaaggctgttaatgcagctggtgccagcgagcccaagtactattctcagcccattctcgtgaaggaaatcatagaacctccaaagattcgcatcccaagacacctgaagcaaacctatatccgcagagttggagaagctgtcaatctggttatacctttccagggaaaaccaagaccagaattaacttggaagaaggatggtgcagaaattgataagaatcaaataaacattcgcaactctgagactgatacaatcatatttattagaaaagcagagaggagccactctgggaaatatgatctgcaagtcaaagtggacaaattcgnggagacccg

SEQ ID NO: 37310 - DNA, 387 bp, Homo sapiens
  misc_feature (1)...(387): n = a,t,c or g
attttttccttggtaacattatctcgaagaaagagtctgtgattgactactaattttagcccagaggatagaaaactcaaatgtactcaatttcaatgtaacatatgtatttgtggcctaagatacttaatgtctctaaagttgctacaagggaatgagtaattgaaaggtgagtttgggtggccttcttagacataatctctgttaaaactatttaatctgtatggttcacaagaaaggttttcttgagttgatgagtagaatgatatttctgataagatatttctacaactatattcttggctgatggnagtagcagcaccaccattttttcattacttaatttnggaaaattgaccactatttttttcatctaaggctgnggcc

SEQ ID NO: 37311 - DNA, 395 bp, Homo sapiens
  misc_feature (1)...(395): n = a,t,c or g
gtctttctagatgtatagagtctcacaaagtataattttgtaaataagtcattgtaaaatttcatggtttcattgtgttttgcaaatgtcttggcaaagaacttgataaaattttgggcttcttgacctatacatattttggtatctctttattgggttgtttagtgtaaggaaaaagttgaaagaatgtatttttaactttgaattgtaatcagaaagaaaatatattttaaccattgtttagtgcttctgttatatattgaaaacttcagtcttaattttttagttacattgttgatagggcattatataaatatacttctatagtcattgnaggaaatgncttttataagggaaatattccttctacctctgaattacncagtttgnattta

SEQ ID NO: 37312 - DNA, 386 bp, Homo sapiens
gaagtaggtgctctcactacccccgttttacagatgaagaaagtgaactgtcgtttcctgagtacccattctatgtcagatactgtattaagtacctttatacacatcatctctgatcccatggagaggaatcatctccattttacagatgagaaaaccgaggctcagaaaggtgtagccacctgcccagggccctatagataataagtgaaagggctaaggtttgtattcaggactatgactgagctctctgcccgctttctgggtccccataacacaaagctccccctcctttggttcttatcatcctagggtctatgctgtgagctctccaagagcaaaatctggcataagttacagactgtggggtcaaatactcctgaaaa

SEQ ID NO: 37313 - DNA, 384 bp, Homo sapiens
  misc_feature (1)...(384): n = a,t,c or g
nnnnnnnnnnnnnnnnnnnnnnnnnnnnnnnnnnnnnnnnnnnnnnnnnnnnnnnnnnnnnnnnnnnnnnnnnnnnnnnnnnnnnnnnnnnnnnnnnnnnnnnnnntaccacagcagatgccaaaactgagtcacgctgcctttggcttctccagggccccgatttcctcatttcagttggatggaccagttgactgtaatactgataaaaggcatgttctgtcactggggtgttggcacagctggggttcaccctgtcccagagctctggctagggtgctgggagtgactggagctgaaagggaggcttaggactgtgaccctcccaggatcacagaggcattcagagagtggaaggggcctctgggacacagtattangaaa

SEQ ID NO: 37314 - DNA, 383 bp, Homo sapiens
  misc_feature (1)...(383): n = a,t,c or g
ctggcattttgttttctggattccaggcacttagcaaagtccctcaataagcatttgttgaatgaatgcatgaattaatgaatgaatcaatcaatcaatttaacttcaaactcagcacccttctcaaaagagttacctgctttataccatacttgagaaggttacgttgttttatcattaggccaaaatcgaatcaatcaatcaatttaacttcaaactcagcaccctcctcagatgagttacctgctttataccatacttaagaaggttatgttgtcatatcattaggtctaaaagagaaaccaggatcttgattttagaacttgaggcatctcttctatcatctcatacnatgnaggaattcactctattaaccngggagg

SEQ ID NO: 37315 - DNA, 210 bp, Homo sapiens
  misc_feature (1)...(210): n = a,t,c or g
gtaggttatgtctagcctgcaaatcatttgtaaaaactcagtctggtacataggactccactttttaataatgatgcctgaacaccaaactcaagagttgtgaatgcccaagaaagattatgggcagcccacaaagtgaatatgaccattcttcctgtggttttctactacatgnnnnnnnnnnnnnnnnnnnnnnnnnnnaaaaaaaaa

SEQ ID NO: 37316 - DNA, 371 bp, Homo sapiens
  misc_feature (1)...(371): n = a,t,c or g
attttccaaaccaattaaaatgatctagggaacttttttaggaaaacatatatagtattttgaatatagttggatttccgatatggaaaaatctgaaagaaaatgtaagtcttttagaatattctgtgtttcagctaaaatagtatttaatcttagaaatcatgatcaggagattccgtgaaatggatatttatttgactctactgagaatgataatagtaatttcagtctagcagcaatattatggggaatgaggcttttgaagttatttttacagtgctgacatatcatgttaataaaagcttttcaatcgcttgaactatcaagagattttctctcctgagacctattttccaggngntantcnggcg

SEQ ID NO: 37317 - DNA, 390 bp, Homo sapiens
  misc_feature (1)...(390): n = a,t,c or g
cagtaggctcatgtgctcctcggtgcagaaggccttgtttgaggaggaggaccacgtcaagaaactgcagcagaaagtggccaccctggagaagcgcaaccggcagctccgggagcgagtgaagaaggtcaagaggtccttgcggcaggcgcgtaagaagggccgccacctggagctggcgaaccagaaactcagtgagaagctggcggcgggcgcgctgccgcacatcaacgcccgggggcccgtgcgccccccctacctgcgggggtaacgggcctgggggctgccaggtgtgcanggccaatcctggcggtaattgagaatgagtgaggtttcgtacatgcagctatttcaagggttgtaagagtttttgnttttaatcacgcattt

SEQ ID NO: 37318 - DNA, 387 bp, Homo sapiens
gcaggaatgctgtaactagaaattaaaacatgaggctgaactttaaggtttctcctttccctgacattatcactttcataattttctagacatgcatctgttggttgtaggatggccccatcatcgaggaaattcttcattccttgtattctacttgtctagttttctttggtccattttatacaagaagctggtttgaaaaatgagagggaagtttgggcttttagatgatcaggctggaaatgataatcagttccatattgcttattcatcagttcttgacggaaaaattttgcagtttacctagtgtctggctgagtaggtcatttacacagaaagaacctggctatgatttagcaaagatgaggatagttcttccatatcata

SEQ ID NO: 37319 - DNA, 388 bp, Homo sapiens
aggcagcgcacctacgacttctactacatggattacctgatgttcaactattccaagccctttgcagatctgtactgaggggcgccgcagctggccggggccgccctgccccggtcactcacctgtgctcccgggcatcctcctgtccctggctcctcatcctgggagcaacagggctctgaggacgtgaggagccatcgctgtgggaggcagcaggccccgggtggggggcagaggcgcccagccttggatggggaccccagcccctggcctgtacctgtttcctcattccttggctgagggagaggctgagaactgggcagacacccctggagctcagccgacagttttgatgagcagggaagtctgaggcccagaggacgggggg

SEQ ID NO: 37320 - DNA, 385 bp, Homo sapiens
  misc_feature (1)...(385): n = a,t,c or g
nnnnnnnnnnnnnnnnnnnnnnnnnnnnnnnnnnnnnnnnnnnnnnnnnnnnnnnnnnnnnnnnnnnnnnnnnnnnnnnnnnnnnnnnnnnnnnnnnnnnnnnnnnnnnnnnnnnnnnnttnnttagggctggccgggtttcaaagggcaggggancntggnanctatcatggggcaangtagggagggtnaaactttgggttngnccaaatcctgattaatttttcagtcnntanntttnnggnnttgacanggntgagggggnacntgaanccntcntaacnctaaannccntttaatcttttnngnantaggancaaaaantagttaatcntccncctagnantntaanattncngggaannttatcttctntncnttaaaa

SEQ ID NO: 37321 - DNA, 388 bp, Homo sapiens
  misc_feature (1)...(388): n = a,t,c or g
aggagccctctggtcccaagaatataagagtctaatctcagggccttaacctattcaggagtaagtagagaaaatgccaaatacgtctgtttctctctctcttttttttttaatncnttngntttggnaaaaaatgaaattancnncacntngtngttttnancctttaaaaaaaccnggttttngtnntttnggnaccaaaaaannccanggtngnccntnannaanntnttnaaanccntnaggggaggantccancctnagaantnatntntgngntcccggggganggaancccgaatttttccaaaggnnaccncctttggaaaaaagggttggaaccntgnngcnctaaaccccccntaancnnggngnacntngagncagg

SEQ ID NO: 37322 - DNA, 231 bp, Homo sapiens
ggatgcaaaaataaatgatgtcagcctgcagccaaactccagcatcccacaccgcagctgacccactgctcatcgcgagggcctgccaggagctggcctcccgcactacttgtgagtaaagtgaatatcaaataccaatcttagagtacaactgtaccagcagtaagtatatctaggactgtaactgacaaaaataaactaattctgaaaagaagataaaaaaaaaaaaaa

SEQ ID NO: 37323 - DNA, 396 bp, Homo sapiens
aatcaggaaacctaatcacccagtaacccagtttgaaaactcatattattttgtaaatcctgatgtaattaaaccactttaaatgtctgctaaaaaatatcaagttatatttacatatgcttttttaaagttatgccttgtgaaaaatattattatctttaaatgagacagttagagacatcttaaactattaaggttaacatcagctgctaagagacatcaaatcctgattcaagagaatagtaatattttcataagcagaaatttttctcaaagagaaaaaacagaatgtgcagtgtattcgcattataaatgcagttaggaaaaatgcatttacagaaagtcccaggacttgagaagcaagctcaggtttttcatagtgatgtagagaagcat

SEQ ID NO: 37324 - DNA, 408 bp, Homo sapiens
acaaagtctcagagagattgaatttactgggttgaagggaggagcaccttccacatgacctgcccagcaattaaagccgcttgttagtccgaggcccaggacggccgaggacagctggagagctcttcgttgcaggcagctctggttaacatcaaccgggaaagctctttgtaaacacatgaataattgatcgtccagcgctcacatagctaccgcggatctgagcccgtatgactcatttgcgagccattcctgtcgtctggatgccataacattggaggaatgatgatcgtttcttggaggttcttctgtggccagagttgccaagaccaaggctgtaatggtttgttatgatgacctttgttattccattaggctcaattgctttaaaaaatgatgtgtgcatac

SEQ ID NO: 37325 - DNA, 394 bp, Homo sapiens
attcgggaaagcaataagtaatgttagtttggttccagaagaaacacgggagcaaagtgtgctggccaaacagcaacaatcaaagcagaggggagcaagattttctttcaaggtcatgataaggctagacaaatagagtgcaatgagggggtcaggtgcgaggccgtcctcccaggtcagtaaggccgcatggagggataaagagatccctgcactgcccccaaccgccaattcaccctgtgtctctcgcagaattaaagccaggaggtggctttctctttccttctactggtggtaaattaagtgactgtcctactttgtagacatgcaatcgttttgtacctctagaccttgggcagtcactggtgatgacactaattgaactaacacagaa

SEQ ID NO: 37326 - DNA, 398 bp, Homo sapiens
ctgattagctgctgtatccccactgcctggaacaaacctggcgcctagtgggttcgttgaatatcactcaatggaatgaattgacgaatggtggcccttgtaccatttcaccatgtccaaactagtgcttagaagaggccattgatttgctgaagcttcataactcagctgtggctacaccctgcctctgtggagacctttccccaagggccattgtccactgtgcatttgcagctgggggcatgtctgggcactgtgcttctagaggtggaggcagcactgggcagacgggtcaaggccaggggcagaagggttcgcatggaggggcagcgcttcccagcctgcagaaacccaggccatcatacgggagagactgtaagactaggagtggttcaggc

SEQ ID NO: 37327 - DNA, 414 bp, Homo sapiens
agcgcgagccgccgccgccatcactgccgctgccaagtcctccacccgctgcccccgccatgtctgctaccgctgccacggccccccctgctgccccggctggggagggtggtccccctgcaccccctccaaacctcaccagtaacaggagactgcagcagacccaggcccaggtggatgaggtggtggacatcatgagggtgaacgtggacaaggtcctggagcgagaccagaagctgtcggagctggacgaccgtgcagatgcactccaggcgggggcctcccagtttgaaacaagcgcagccaagctcaagcgcaaatactggtggaaaaacctcaagatgatgatcatcttgggaagtgatttgcgccatcatcctcatcatcatcatagtttacttcagcacttaaatc

SEQ ID NO: 37328 - DNA, 407 bp, Homo sapiens
agaaagttggttgtatacattaactgtgtatatcctactaacagatatagttacttctgagacaattaatttgacttgaatataattagtacattagatgagataattagctgttttatagactacctaatattgtcatgaggctagcaaattgtttcaaaaactttatcttttataatatatcgaaaaacattaactcctaaattaaaaaaataaaaaatgatgacgggtagtatgtgtgtaattcagtgcctccacccctactctcagcaaaagtatagtaaattcaaaaccgaatgtccatattaaaattgtaaagcaccagttaacatgaattggattagtttccttacttgtttgaataggaaaagaattaattttctttaggaggtgttgccttcatttaa

SEQ ID NO: 37329 - DNA, 418 bp, Homo sapiens
ctcatctcaaaatccttaagctgaccacagcagcatcgtcccttttgcagtgtaagggagcccagctgggacaatgtgtgaatcaacgcatgaaggagtgagtgagcagctaaccaaatgaaagaatactcagatatctggggtacagttcccttccaggtttgcacagcatctgctgaagtctccactagaaactcaatggaaggtccccaccggaaactgaaagtctcctagagtggctttgagttgtggtttcaccctccctgcagatccacaggggaggctggggcagatggaaaataccaacttgatggtctgtggccacaccatgctgctccccaaggcccctcagaatttcactgcccaatatggtagccgcccagcctgaaacgtggccagtgtgaattgagatgggctg

SEQ ID NO: 37330 - DNA, 411 bp, Homo sapiens
  misc_feature (1)...(411): n = a,t,c or g
ccctcatcctatttactgcagcaaatctctccttagttgatgagactgtgtttatctccctttaaaaccctacctatcctgaatggcctgtcattgtctgcctttaaaatccttcctctttcttcctcctctattctctaaataatgatggggctaagttatacccaaagctcactttacaaaatatttcctcagtactttgcagaaaacaccaaacaaaaatgccattttaaaaaaggtggattttttcttttagaatgtaagctcctcatgagcagggacaatgttttctgtatgttctattgtgcctagtacactgtaaatgctcaataaatattgatgatgggaaaaaantnaaanntgggtatngccnataantaaaaantagnngnggnncnntctnaaanaacc

SEQ ID NO: 37331 - DNA, 415 bp, Homo sapiens
  misc_feature (1)...(415): n = a,t,c or g
acttttacgctcacatctgttagaacccagaactgttcacaaaagaccaatattataagcccttcccaaatatatgcttatttctgaggctcccccaaaagctcagaggtcctgttgggcctctgaagtttcaccacccagaatccatggaagtccagtcccaggctccatcatagaatcagtttcaattcttgcctgattgaaactccttcagactctaaaacatccacattagaggcctttagatctcacttccgtcctttcttcatcaatgtttccaaaggaccagaatccaaatccagaatttatcaattattattttttaatcaaactacaagttttatttagatttcgngtttccactaatgtcctttttcttttcttggatccaatccaggatattaaatttccttta

SEQ ID NO: 37332 - DNA, 407 bp, Homo sapiens
  misc_feature (1)...(407): n = a,t,c or g
cccacgcgtccggggtgttggcgtcgccttttgagctacgtttccatcgattcgaacttcgtatctagggaccctgcatgcaagagcttatagtgaagaaatacttggtcccatttcttttcgcctgggaggtatctttccactattagcaatgcgattattgcaaatcatcatatgcagtctatttcatttgcctctggaggggatcctgatactacagactatgttgcctacgtanctaaagatccagttaatcaacgagcctgtcacatattggaatgccacaatggaatggcccaagacgtcataagtaccatagggcaggcttttgaactccggtttaaacagtacttgaaaaatccttctttgaatacttcttgtgaaagtgaggaggtgcatattgatag

SEQ ID NO: 37333 - DNA, 406 bp, Homo sapiens
  misc_feature (1)...(406): n = a,t,c or g
atcaagtgatctaactagactgatcatagatagaaggaaataaggccannnnnnnnnnnnnnnnnnnnnnnnnnnnnnnnnnnnnnnnnnnnnnnnnnnnnnnnnnnnnnnnnnnnnnnnnnngcgtacactgagtagtnnnnnnnnnnnnnnnnnnnnnnnnnnnnnnnnnnnnnnnnnnnnnnnnnnnnnnnnnnnnnnnnnnnnnnnnnnnnnnnnnnnnnnnnnnnnnnnnnnnnnnnnnnnnnnnnnnnncaactcttagaaaatgaaaaggaaatatagaaatataaaatttgcttattatagacacacagtanctcccagatatgtaccacaannaatgtgaaangagagagaaatgtctaccaaagcagtattttgtgtgtataattgcnagcgcata

SEQ ID NO: 37334 - DNA, 405 bp, Homo sapiens
  misc_feature (1)...(405): n = a,t,c or g
cgcagcttggacccaaatgaggcagataaacttgaaataaggtagatgtaagctgacagtagtgattggtcaccatgtgacaaactagcattgatctgttccaagtatagagtaccaatgtgagaaattgaatgagttgtacgtgaagcagggaatgtgtattctgtcagactcatcttggtacattttggactagttacttggtaggaagtcaagtcatgtacagaattaaagttctnnnnnnnnnnnnnnnnnnnnnnnnnnnnnnnnnnnnnnnnnnnnnnnnnnnnnnnnnnnnnnnnnnnnnnnnnnnnnnnnnnnnnnnnnnnnnnnnnnnnnnnnnnnnnnnnnnnnnnnnnnnnnnnnnnnnnnnnnnnnnnnnnnnnnnnnnnnnnnnnnnnnnnn

SEQ ID NO: 37335 - DNA, 396 bp, Homo sapiens
cgaatgctttatgaatgataaagatgtttccggaaagatgaacaggtcacaatttgaagaactctgtgctgaacttctgcaaaagatagaagtacccctttattcactgttggaacaaactcatctcaaagtagaagatgtgagtgcagttgagattgttggaggcgctacacgaattccagctgtgaaggaaagaattgccaaattctttggaaaagatattagcacaacactcaatgcagatgaagcagtagccagaggatgtgcattacagtgtgcaatactttccccggcatttaaagttagagaattttccgtcacagatgcagttccttttccaatatctctgatctggaaccatgattcagaagatactgaaggtgttcatgaagtctt

SEQ ID NO: 37336 - DNA, 392 bp, Homo sapiens
acatttttcaagtcttaaaaactttataattagcattgataacatggaaatgattttgaaaccacatgttagagaaatgcttcagggtagctttctgtagtgactttatgttgtgcttctcaggaaatatatactgtttgtgctattgagaatttcttttgttatggcctgatccctggagatgtcattctcttgaggagctgggctgtgtaaccaaaaacaagttgcagcaggaccagagagaggggattttagaacacctcattctctggcctgctacagtgtctgagtctctgcactcctgagagagaatgcatgcagatggtgtctgtgagggtcttacattatcagctcattggcagaagaaggggctagcagggcattttcttagg

SEQ ID NO: 37337 - DNA, 394 bp, Homo sapiens
gtacttgtctgacaatttatctaccaactaaattcaaaagaacatttagtattttacacgtcagatatttttctattttaaaaataatgttaacattttgtcatttttataataattaattttaaaacagttaatggagtacgtgttcagacacaactaatgctacatctctctcccgcccttcctcctcccatcagtgaaatagccactctcctaaaaatagtgtctcatttccaagaatgtttttgtgctttcctatatatgttttttccataaatagcacatgtttaatctgatcttcaaaaacagaaaatccaaaactatattgtgaataaaaatataaaatattagtcaaataaagaggtgggtatcccatataagtattttcttgaat

SEQ ID NO: 37338 - DNA, 389 bp, Homo sapiens
cgcgttgggactgagtcgccgccgtgagctccccgaagactgcacaaactaccgcgggctcctccgccccgtctgcgattcggaagccggcctgggggtcgcgtcgggagccctggcgctgcagctccgcaccttagcagcccgggtactcatccagatccacgccggggacacacacacagagtaactaaaagtgcggcgattctgcacatcgccgactgctttggggtaacaaaaagacccgagttgcctgccgaccgaggacccccgggagccgggctcggagcagacgaggtatccggcggcgcccatttgggggcttctaactctttctccacgcagcccctcttctgtcccctcccctctcgctcccttttaaaatcagtggc

SEQ ID NO: 37339 - DNA, 353 bp, Homo sapiens
  misc_feature (1)...(353): n = a,t,c or g
gacctggtggagcccagagaggcagaaaaaccagcctcacaggttgagaaaccaaaagcagagcctggagcncagtgagcacagacagagccggggctggcaggttcagaggtcgcagcctggagcccagtgagcgcagacattagagccggggccggcaggttcagaggtctcagcctggagcccagtgagcgcagacattagagccggggcggcaggttcagaggtcgcagcctggagcccagtgagcacagacattagggccggggccggcaggttcagaggtcggagcctggggaccagtgcgctnagtggtcggagcaggggccagcgggttcanaggtcanagcctg

SEQ ID NO: 37340 - DNA, 391 bp, Homo sapiens
atttattaaaaaaaatagcttaactgaagatcactaattccttttctaaattttgaactgctctaggcataaatatcattgtgtattatcctttcatctaatcacttttggaatgtaaactgaaggctgttcactccaagttaagttagcatttacatgatgtttattaaatctgccagtctgatcaaaggtttatgaccatggggccaaattcccatagattacccaaaattgaatatgtgcagttaactggaacatgtctcattaaggtttacatacacactaagacagcaaaggattggaattaactttatggagacagttccagggactaatattgaagcagtggttatttgataatgcatggaaccaccatttggattcaataaac

SEQ ID NO: 37341 - DNA, 393 bp, Homo sapiens
gaccgccttgagcgcgaggatgctgacccggagccggagcctgggacccggggctgggccgcgggggtgtagggaggagcccgggcctctccggagaagagaggctgcagcagcgaggaaaagccacagccccgtgaagcgtccgcggaaagcacagagactgcgtgtggcctatgagggctcggacagtgagaaaggtgagggggctgagcccctcaaggtgccagtctgggagccccaggactggcagcaacagctggtcaacatccgtgccatgaggaacaaaaaggatgcacctgtggaccatctggggactgagcactgctatgactccagtgcccccccaaaggtacgcaggtaccaggtgctgctgtcactgatgctctccagccc

SEQ ID NO: 37342 - DNA, 393 bp, Homo sapiens
  misc_feature (1)...(393): n = a,t,c or g
gggagaatagcttgagaagttcaaggtcaagggctgctttgtcgagtacaaaggactcgagcatatttgaggtgaaaggtaataactgatctactcttatggagcaaccgagtttcctgatagagatgtttttctgggggaaaaaggcataagtcaatcttcttggagagaatgggatcanaaactgacatattgctacagaggttacaaaagctgtagtcagagggcttcagtgttctggatatattaaaggacaaggtcagatacccaagtgggaccgtgagtgattaatggcagcagtccactgacagcaccagtaggaaggcgctaatgaaaagatctctaaatatcagtaaggggttagctgccattaataatacaactttatagctt

SEQ ID NO: 37343 - DNA, 381 bp, Homo sapiens
gtgagtttggaagtttggggggtcttatgtttgttttgcctcttctgtttcttggaggagagttgaggcttttcttaggtgcatacacagacccaggtgaacacgctgactgtgaacctgccctgtatccggagctgtgctgggcactgaggggatgcaacaaaattaggagaggatccttgctcccaacgtctacttctcctacctcaacaggggtccagggtgcagtgaactcagttcttggcccttgggtgaggattcatggatgaatgaaagctagacctgatggggaggcattatgactaaataggcccagcctccttcccttccagctctgtcctaggagcataggcgggaaatctgagtagagtctgactgcag

SEQ ID NO: 37344 - DNA, 374 bp, Homo sapiens
atcttagagaaactggtaaaggaagacaacctcctgatggcatatcagatttgttttgatttgtatgaaagtgctagccagcagtttttgtcatctgtaatccagaatcttcgaactgttggcacccctattgcttctgtgcctggatccactaatacgggtactgttccgggatcagagaaagacagtgactcgatggaaacagaagaaaagacaagcagtgcatttgtaggaaagacaccagaagccagtccagagcctaaggaccagactttgaaaatgattaaaattttaagtggtgaaatggctattgagttacatctgcagttcttaatacgaaacaataatacagacctcatgattctaaaaaacac

SEQ ID NO: 37345 - DNA, 378 bp, Homo sapiens
attaagagttttatgagctgttaagaatgaggtagtttctcctaggaccccccaaagacagtgcaagtaatgaccgtttggatctcattcgtcgatctttgatagtatgttctggagtctactccccaggagccaggacaggcgtgaagatggagtccttgtcgcagctggagccttgcctagctggtgatcacacagcctggcctgtacctgcaccccactggatggtggtacatggtggcagggacaggaccacacccagttaaggccagaccaggctgagtgtgacccctgaggtaaacactccactaagctgtgtcttgttcatgccccctgctcagtgaaaggtgagtcccgagaccagttgggtacctctct

SEQ ID NO: 37346 - DNA, 372 bp, Homo sapiens
  misc_feature (1)...(372): n = a,t,c or g
gtacaaggttttccacttccaccacggcggcctggacaagctgtctgacgtgttccagcagtggaaatactgcaccgagatgcagctcaaagaccaggtcgcccccgataagacatgcatgcagttctccatccgccgccccaagctgccgtcctccgagacgcaccccgaggagagcatgtacaagaggctcggcgtctccgcctggctcaaccacctgaatgagctgggccaggtggaggaggagtacaagctgcggaaggccattttctttggcggtattgatgtgtcaatccgcgtagaggtctggcccttcctgctgcgctattacagccacgagtccacgtcggaggagcggnaggcgctgcggct

SEQ ID NO: 37347 - DNA, 376 bp, Homo sapiens
cattgaaagactttaaacagccttagtaaattatctttctaatgctctgtgaggccaaacatttatgttcagattgaaatttaaattaatatcattcaaaaggaaacaaaaaatgttgagttttaaaaatcaggattgacttttttctccaaaaccatacatttatgggcaaattgtgttctttatcacttccgagcaaatactcagatttaaaattactttaaagtcctggtacttaacacgctaacgtagataaacaccttaataatctcagttaatactgtatttcaaaacacatttaactgttttctaatgctttgcattatcagttacaacctagagagattttgagcctcatatttctttgatcttgaaa

SEQ ID NO: 37348 - DNA, 376 bp, Homo sapiens
gccccggaggaagaaaaaagggtctaccccgagccccggagcgagagcgagtgcctgagcaacatccgcgagttcctgcgcggctgcggggcttccctgcggctggagacgtttgatgcaaatgatttgtatcaggggcagaattttaacaaggtcctcagttccttagtgactctaaataaagtaacagcagacatcgggctggggagtgactccgtgtgtgcccggccctcgtctcaccgcataaagtcttttgactcccttggatcacagtctttgcacactcggacttcaaaactgttccagggccagtatcggagtttggacatgaccgacaatagcaacaatcaactggtagtaagagcaaagtttaact

SEQ ID NO: 37349 - DNA, 369 bp, Homo sapiens
cttacataaacatattacagttggtgtttagatggctcttttttttctggccttgaatttctggaaagtaggtatggcctgctatgtcaggactagttcttggaattctttgttgtttttcagtcagccttattttcttgggtcatgttttgaacaatatttatcaaatgtctgtttaccagacgttgttccagatgcttgaacaaaatgaaatgtctgctgtcatagagtttccagtctatgtaagacagtaaacaaatgtataatataatgctagatagtgataagtgctaaaaagaagaagaaaataggaaaggggaaagagagtttctgtgtgattgtatgtgaaagtgtccatgcatgccgctc

SEQ ID NO: 37350 - DNA, 376 bp, Homo sapiens
cacactgccatgcctccctctgggccccgaggaaccctccttctgttgccgctgctgctgctgctcctgcttcgcgccgtgctggctgtccccctggagcgaggggcgcccaacaaggaggagacccctgcgactgagagtcccgacacaggcctgtactaccaccggtacctccaggaggtcatcgatgtactggagacggatgggcatttccgagagaagctgcaggctgccaatgcggaggacattaagagcgggaagctgagccgagagctggactttgtcagccaccacgtccgcaccaagctggatgagctcaagcgacaggaggtgtcacggctgcggatgctgctcaaggccaagatggacgccgagc

SEQ ID NO: 37351 - DNA, 372 bp, Homo sapiens
cggacgcgtgggtcaatgtctttgtggacattgttgtgaaattggtgactatgtatagctgtcgttagtctttttgggagactgttaggaacagtttgtacagtatatacttgctaaatgagttcattatgacagtcacattgctgatgcttactgagaactattacctactcttggctcctgttactccgtaggcttcttaatcttccaggcattacagcagcacagtgttctactttttacatcatttctatgttcggttgtttttaggcataaacaatgtgtattgcagtgcatttcggcatttgtgccatactgaaagaatcaaaaacaaatcatccaaattaaatttcaaacattatttcagagaac

SEQ ID NO: 37352 - DNA, 365 bp, Homo sapiens
aaaggggccgggagaagcgtgagcgaggggcagattctagtcgggagcccatgccctggaaatccatctttcttcatctttcccattgaccactttgggtttgacctgcacatctgcagtgagggcagaattcaacaagcacaactcactggtctttcagtcaacgtgctagaatccgatgacttattaatctctaattttttggcgcctctttcattgaatgagaattgctttcgtatagttcacattagaaaaatgcctaatatactaaagtaaaccaaacgttgtcacttttctcttgttcttgaaacattgcaaccaaaaaggtcagcacaaaggccttcactacgtgaagacctcctggt

SEQ ID NO: 37353 - DNA, 372 bp, Homo sapiens
ggctgatgggaggaagttaccaccgtacatcattttgaggggaacatatatccccccggggaagtttcccagtgggatggaaattcgctgccaccggtatgggtggatgactgaagacttgatgcaggactggttggaagtggtgtggagacggaggacaggagcagtgcccaagcagcgagggatgctgatcttgaatggcttccggggccatgccacagattccgtgaagaactccatggaaagcatgaacactgacatggtgatcatcccagggggtctgacctcacagcttcaggtgctggatgtcgtggtctacaagccactgaatgacagtgtgcgggcccagtactccaactggcttctggctgg

SEQ ID NO: 37354 - DNA, 392 bp, Homo sapiens
  misc_feature (1)...(392): n = a,t,c or g
cccacgcgtccgcccacgcgtccgggagagatggagagaatggaggtgatggagggtacaaaagggaagggataaatgaatgaggctggcggctgtcaattccatgccagtggataacaggaaccacaatgaaggaatggtgactcgctgcatcattgaggtcctctcaaatgccttgtcgaagtccagcgctccacccatcacccctgagtgccgccaagtcctgaagacgagtagaaaagacgtcaaagacaaagagacaactgaaaatgaaaacacaaagtttgaagtaagattgttaanagacccagctgatgcctcggaagcccacgagtcctccagcaggggagaggcangagccccaggggaggaggacatccaaggcccaacat

SEQ ID NO: 37355 - DNA, 389 bp, Homo sapiens
cggacgcgtgggattcagtggaatcagttcttccttatgaatacacagcgtttgatttttgccaagcatcagaaggaaagcgcccatctgaaaatcttggtcaggtactattcggggaaagaattgaaccttcaccatataagtttacgtttaataagaaggagacctgtaagcttgtttgtacaaaaacataccatacagagaaagctgaagacaaacaaaagttagaattcttgaaaaaaagcatgttattgaattatcaacatcactggattgtggataatatgcctgtaacgtggtgttacgatgttgaagatggtcagaggttctgtaatcctggatttcctattggctgttacattacagataaaggccatgcaaaagatgcc

SEQ ID NO: 37356 - DNA, 384 bp, Homo sapiens
ggagtcagtatacaaggaggaggtatacaaggaggaggtatacagggggcaagcaagcaaggtggaagccagcctagcagttttagtcctgggcagagccaggtcactccacaggatcaggagaaggcagctttgatcatgcaggttcttcaactgactgcagatcagattgccatgctgccccctgagcaaaggcagagtatcctgattttaaaggaacaaatccagaaatccactggagcgtcttgaaaggttttagaaaatatttggctgtagtctcaaattttattctgtagcatggagaatgggtgcaaaaagctgacttctgtatccccacacttggattagggtttccctcctcctagaacctaatcttattttttg

SEQ ID NO: 37357 - DNA, 382 bp, Homo sapiens
  misc_feature (1)...(382): n = a,t,c or g
nnnnnnnnnnnnnnnnnnnnnnnnnnnnnnnnnnnnnnnnnnnnnnnnnnnnnnnnnnnnnnnnnnnnnnnnnnnnnnnnnnnnnnnnnnnnnnnnnnnnnnnnnnnnnnnnnnnnnnnnnnnnnnnnnnnnnnnnnnnnnnactgtttttaaacattagttccaatgtagtgtacactgaaaacttttatgaaaggaatttcaaaaattaagataaaccattaaaaacgtaattactaagtactactactactacaatgatatttacataatagactgagttacatttcataaagacaatatatctgtataagaatttttaaacttccctgtctatataatagaagttttagagaaattttttaaaaaccaaagaaaactg

SEQ ID NO: 37358 - DNA, 387 bp, Homo sapiens
ctgcgctcctgccccacgccctgggcccttgaagggctctgcgagtgacccggcgggcgagctccgtgctgcatggaacggctgcagaagcaaccacttacctcccccgggagcgtgagcccctcccgagattccagtgtgcctggctctccctccagcatcgtggccaagatggacaatcaggtgctgggctacaaggacctggctgccatccccaaggacaaggccatcctggacatcgagcggcccgacctcatgatctacgagcctcacttcacttattccctcctggaacacgtggagctgcctcgcagccgcgagcgctcgctgtcacccaaatccacatcccccccaccatccccagaggtgtgggcggacagccggtcg

SEQ ID NO: 37359 - DNA, 373 bp, Homo sapiens
gacaccaaatcctgctgtgattactccctccacgtggacatcacaagctggtacgatggcgttcgggaggagctggaggtgctggtgcaggacaaaggcgtcaattccttccaagtctacatggcctataaggatgtctaccaaatgtccgacagccagctctatgaagcctttaccttccttaagggcctgggagctgtgatcttggtccatgcagaaaatggagatttgatagctcaggaacaaaagcggatcctggagatgggcatcacgggtcccgagggccatgccctgagcagacctgaagagctggaggccgaggcggtgttccgggccatcaccattgcgggccggatcaactgccctgtgtaca

SEQ ID NO: 37360 - DNA, 405 bp, Homo sapiens
aacggagtggcggcggcatttcctggtgtctgagcctggcgcggaggctatgggcagccaggaggtgctgggccacgcggcccggctggcctcctccggtctcctcctgcaggtgttgtttcggttgatcacctttgtcttgaatgcatttattcttcgcttcctgtcaaaggaaatcgttggcgtagtaaatgtaagactaacgctgctttactcaaccaccctcttcctggccagagaggccttccgcagagcatgtctcagtgggggcacccagcgagactggagccagaccctcaacctgctgtggctaacagtccccctgggtgtgttttggtccttattcctgggctggatctggttgcagctgcttgaagtgcctgatcctaatgttgtccctcacta

SEQ ID NO: 37361 - DNA, 79 bp, Homo sapiens
ggaagcgtgaagtccaaacttgctgtccagactctagcttggctgggtctttgcttgtaccacccaaaaaaaaaaaaaa

SEQ ID NO: 37362 - DNA, 406 bp, Homo sapiens
  misc_feature (1)...(406): n = a,t,c or g
gcgggcgcgggacggcaaggatggacatcgaaaggcgcggggcatggggcggggcgccgaggggtcgcgcgggtggggagcggagagaacgaagtgggaacctggctgggactccaagggtcttcacacctgcaagctcaggtcccgtgagcagcccaaaagtgcgccccaaaggggtctttttaaggccgaaccgctgtggaggagggagggcctgccggttctgagggtggggaaagaggaacaggaatggcctaagagagtgtcaggcaaagagagaccgggaaggccaggtcctggagactgcagcgaagccggctccctggaggacctgcctacacaatggctangggaaggccacatgtgcaggaaagaaagctaggcagagaggaagctcagcgcccct

SEQ ID NO: 37363 - DNA, 396 bp, Homo sapiens
cgcccagccaaccccgcctggagccctatggccaactgcgagttcagcccggtgtccggggacaaaccctgctgccggctctctaggagagcccaactctgtcttggcgtcagtatcctggtcctgatcctcgtcgtggtgctcgcggtggtcgtcccgaggtggcgccagcagtggagcggtccgggcaccaccaagcgctttcccgagaccgtcctggcgcgatgcgtcaagtacactgaaattcatcctgagatgagacatgtagactgccaaagtgtatgggatgctttcaagggtgcatttatttcaaaacatccttgcaacattactgaagaagactatcagccactaatgaagttgggaactcagaccgtaccttgcaacaagattctt

SEQ ID NO: 37364 - DNA, 371 bp, Homo sapiens
ccaaacttggaaaaacatccgaaagatttctttttaagcagctggattctctatggctccttgacagcgatggcagtttcacactgagcctgcatgaagatgagctgttcacactcaccactctcaccactggtcgcaaaggcagctacccgcttcctccaaaatcccagcccttcccaagtacctataaggatgatttcaatgttgattacccattttttagtgaagctccaaactttgctgatcaaactggtgtatttgaatattttacaaatattgaagaccctggcgagcatcacttcacgctacgccaagttctcaaccagagacccattacgtgggctgccgatgcatccaacacaatcagtatt

SEQ ID NO: 37365 - DNA, 390 bp, Homo sapiens
gcactttgcctacctcccccaagccctgagccactgcctgctggggctcctactgaggttctggaaacacctctgcacctgccgcccctgggaggaaagagggccacacaggaagtgtctgcagggagaggtggcactcggcagcctgagttcaggagaggtgcttggagcttcaggcagaggggccttcagaggagggaaacggagcaatgtgtcacaggcaggcaggggcaggactgccaccccaggccccgtgggaggcctgctgagggcacagagctgctcggtgcagccttcatgctttgatctggaaagaccagctgtccgcaggcctctgtctccaagaggcctgtcacacaggaggaccgctggaaacataccaacacgtgc

SEQ ID NO: 37366 - DNA, 383 bp, Homo sapiens
gagcgaccagcgtgcgctcggaggaaccagagaaactcagcgccccgcgggactgtccgtcgcaaaatccaacatgaaaatcctcgtggccttggcagtcttttttcttgtctccactcagctgtttgcagaagaaataggagccaatgatgatctgaattactggtccgactggtacgacagcgaccagatcaaggaggaactgccggagccctttgagcatcttctgcagagaatcgcccggagacccaagcctcagcagttctttggattaatgggcaaacgggatgctgattcctcaattgaaaaacaagtggccctgttaaaggctctttatggacatggccagatctctcacaaaagacataaaacagattcctttg

SEQ ID NO: 37367 - DNA, 380 bp, Homo sapiens
cacccctagtgaaatgcctcccttagagggtgaggaagaagaaaaccctaaagaaaacccagaggtgaaagctgaagagaaggaagttcctaaagaaattcctgaggtgaaggatgaagaaaaggaagttcctaaagaaattcctgaggtaaaggctgaagaaaaagcagattctaaagactgtatggaggcaacccctgaagtaaaagaagatcctaaagaagtcccccaggtaaaggcagatgataaagaacagcctaaagcaacagaggctaaggcaagggctgcagtaagagagactcataaaagagttcctgaggaaaggcttcaggacagtgtagatcttaaaagagctaggaagggaaagcctaaaagagaag

SEQ ID NO: 37368 - DNA, 385 bp, Homo sapiens
ctcacgagtcatccagaatgtatagacaggaaaagcatgtcttatttaaaactgtaatttatgggctcaggatctgaccgcagtcccgggagtaagcatttcaaagggggaaggcagtgtggtccctaccctgtgtgaatgtgaggatgtagacacccatcagtgcaactcgagctccatcctcatccgatttctaaggttccagttttctggagggacagtcatcatgttttgatttatctgggagaaaactgtggtgcacagcttgtgaggagggcaaggttgtgacgttcgagcttagttctggtgttattctgtctcctcttctttgtcatcagccaaaacgtggtttttaaagagagtcatgcaggttagaaataatgtc

SEQ ID NO: 37369 - DNA, 390 bp, Homo sapiens
attttccacgtctcttcaacctccgctcaatttacttacaatggaacaggattcgctccattagccaaggtttgacatggacttggagttccttacacaacttggatttatcagggaatgacatccaaggaattgagccgggcacatttaaatgcctccccaatttacaaaaattgaatttggattccaacaagctcaccaatatctcacaggaaactgtcaatgcgtggatatcattaatatccatcacattgtctggaaatatgtgggaatgcagtcggagcatttgtcctttattttattggcttaagaatttcaaaggaaataaggaaagcaccatgatatgtgcgggacctaagcacatccagggtgaaaaggttagtgatgcag

SEQ ID NO: 37370 - DNA, 389 bp, Homo sapiens
gccaagtggtcaggcagcccttgctctcgaaaccgtgaagaagccgatatgtggaccaccttccgtccacgaagcagttcaaatgccagcagtgtcagcacccggctgtcccccttgaggccagagtctgaggtgctggcggaggaaataccagcttcagtcagcagttatgcagggggtgtccctcccaccctcaatgaaggtctagagctgttagatgggctcaatctcacctcttcccattccctgctatctcggagtggtctctctggcttctctttgcagcatcctggggttaccggccccttacacacctacagcagctcccttttcagcccagcagaggggcccctgtcagcaggagaagggtgcttctccagctcccaggg

SEQ ID NO: 37371 - DNA, 388 bp, Homo sapiens
  misc_feature (1)...(388): n = a,t,c or g
cctttgaggagagatggggacagggcagtgggtgttgggagtttggggccgggatggaagttgtttctagccactgaaagaagatatttcaagatgaccatctgcattgagaggaaaggtagcataggatagatgaagatgaagagcataccaggccccaccctggctctccctgaggggaactttgctcggccaatggaaatgcagccaagatggccatatactccctaggaacccaagatggccaccatcttgattttactttccttaaagactcagaaagacttggacccaaggagtggggatacagtgagaattaccactgttggggcaaaatattgggataaaaatatttatgtttaataataaaanaaagtcaaagaggcaa

SEQ ID NO: 37372 - DNA, 386 bp, Homo sapiens
ggagcgcgctgctgtttagagccacgagttaccggagcgcctgattcctgcgccgaagtcagtggtggccgaaagtccggagtcgctgtaaaacctgagattgtgagccatggtggggagatcccggcggcgcggagcagctaagtgggcagctgtgcgagccaaggcaggtcccacgctcaccgacgaaaatggagatgatttaggattgccaccctcaccaggggacaccagctactaccaagatcaggtagatgactttcatgaggcacgatcccgggccgcttagctaagggctggaatgaagtacagagtggagacgaggaggatggcgaggaggaggaggaggaggtgctagccctagatatggcgatgaggacgacgaa

SEQ ID NO: 37373 - DNA, 383 bp, Homo sapiens
  misc_feature (1)...(383): n = a,t,c or g
gtaaaatactataagtcattttgagtgttggtgttaagcatgaaacaaacagcagctgttgtccttaaaaatgaattgacnnnnnnnnnnnnnnnnnnnnnnnnnnnnnnnnnnnnnnnnnnnnnnnnnnnnnnnnnnnnnnnnnnnnnnnnnnnnnnnnnnnnnnnnnnnnnnnnnnnnnnnnnnnnnnnnnnnnnnnnnnnnnnnnnnnnnnnnnnnnnnnnnnnnnnnnnnnnnnnnnnnnnnnnnnnnnnnnnnnnnnnnnnnnnnnnnnnnnnnnnnnnnnnnnnnnnnnnnnnnnnnnnnnnnnnnnnnnnnnnnnnnnnnnnnnnnnnnnnnnnnnnnnnnnnnnnnnnnnnnnnnnnnnnnnnnnnnnnnnnnnn

SEQ ID NO: 37374 - DNA, 395 bp, Homo sapiens
gaagaaaatgagtttctgagacactgtttaggtaaccataaatcagacagatatttttatggtgggcaaattgatgaagatacttttagtaggtgatttatattcataacaaatacatattgaaataattgtcactactgtatcagaattaaaaaccagcttcacattaggacttctccatacaaatgctttatcattggttcttaaattggaaaaatatctataaatgattacatttttaagctaaataaaatgcagatattttggcttcttgtgaatgtaataaagaatcataaaacatagaccttttttttgttctcccagaatgtctcaaaatctacagtagtagctttgacaagttgggcaaatgcagaacctgctagtaaagttaagta

SEQ ID NO: 37375 - DNA, 388 bp, Homo sapiens
  misc_feature (1)...(388): n = a,t,c or g
cccacgcgtccggtttcatttgtgatatgaagggagagaagaaagaaaagtgcatagccattctgtaacaatattgtgtaaacctatagtttgaaggaatgcaaggagaaggatttctgtgttttactcattttaggctgttcagaagatgcttcaaaaattgccctgttagaatttccatcatggaaggtggtatggaagaaggtatggaaatactttgtattctaaaaactcactgacgtggtcagttagacataccgttggtttccaggatggaggcccatatatcctggggagctttggtctattagtttgtgacgatattcaaaggccaaaacactactcagacactttcctgggaagagcaactaaanatgtanaattggtg

SEQ ID NO: 37376 - DNA, 388 bp, Homo sapiens
aggaaaatgaatgtcttgttctgaaaaaatagcagtaccagctgagctttggggaggtgacagattgagtcacttcacagcttaattctgttatgaactggtcccatgggcatggattgtcaattagggagacttgaatcttttagatattaaatctacaggcagacaacaaagaacacattattcttttgtaaaaatagaggaacctggctgtctactacagaactagaggaacctagcttagacagaagctcatcccacttcagcacctacaacagatttgatacctttgagcaagattggatacttttctcaaagtaaatactgggttggtaccccagagttatgcaccactgaacatggattttaacttaaaatacttaagggc

SEQ ID NO: 37377 - DNA, 195 bp, Homo sapiens
aacagttgtaaaaatgtacttagaacaagcagtttcctgcctggttcagctgatgccacatgtgttatataaaagtatgtacagccacatccaaggatgataaagggaagaataattagcaaatttgtaaattgtgcctccgttttcttagttttgaaacattaaatcttacatcttgactaaaaaaaaaaaaaa

SEQ ID NO: 37378 - DNA, 398 bp, Homo sapiens
  misc_feature (1)...(398): n = a,t,c or g
gcccgcctgtgctgtgggccagggaatccagcggcgtctggcctcctgggcactgcttgcctggcctcgtgcttggattgtcccgggggctcctctccgtgtgtccttctgtggccgcaccgtgtggctccgcctcctggcccccagccagttctcagaaacgtggctggggcccagcacagcagcctgcaagggcccctgtttgttgatgcagcttttgttgaacaaaaatcgagctctttcctggtttgaaagtagcatggatgtatccagtcttgttgattgnaatttgacgtgaagagaaaataaaattcctactgcgtganccaaggcancgggtgctgttnccnacgcgggnagcccttccctgnntgtcacaggncctgtgctcctccctt

SEQ ID NO: 37379 - DNA, 381 bp, Homo sapiens
ctgctctcaaagtggataattataactccctcgggggcgggaagcggggatcctcccccagccgcaagtccacgaagaaagcaacgaatgaaaattatgaagacaacgagaagtcagactcctccgggtcgcgctccagctgcttcggcttcgtcgcctactctgtgaactccggggagagatctcgagtcaagattaagaccttaacccaccaacctgcctgttcggacaccccccgggccggccgctgtctgtccccttctccatcgccctctcccagaaagctccggtgcttggaccagctagagtctgagaaagaggagaggcgcgaacgccactccaaaaagagaagggttaaagagggcaaccctaacgataccg

SEQ ID NO: 37380 - DNA, 386 bp, Homo sapiens
aatagcatattacagctgaaaattttgagaaggtaaaagcctcttaattaaaatatgaacatatttagcttgctttagtgtctggggcaagtcctctcaatggctaaaattaactttagagatccatgtgttcaggtttagatcatatgacactcgagcacagaagaataatttcaaggaggtcatcttgtaaattaaaggtttagaagaattgcataaaacgtagtaaatggggtctgtcattagcaaaggcaaatctaagcaatcatttttccccccagaagttacttagaaggagaactgggaacacttggggtctctctaactgatggcattcacttcacacagtcgtctatgttatccagagatttttatttcattttaca

SEQ ID NO: 37381 - DNA, 377 bp, Homo sapiens
  misc_feature (1)...(377): n = a,t,c or g
cctgccccttttgcttttttaaagaaactggggaaggatttatgaatacaccaccaccagagtggataatgcttagaattctttattggtggccctactatggtgatgatctagaactgacttacttcaggacagaagaaaaaacaatcacacccttaacctttaagccagttagatcagggggttgcaacaattgggttaaactttgggtatacattggaagcaccagggcatgtttgctttttttgtnnnnnnnnnnnnnnnnnnnnnnnnnnnnnnnnnnnnnnnnnnnnnnnnnnctccagcacagtggcatgatctcnnnnnnnnnnnnnnnnnnnnnnnnnnnnnnnnnnnnnnnnnnnnnnnnnnnnnnn

SEQ ID NO: 37382 - DNA, 427 bp, Homo sapiens
gcttctcatatcattttctccccatggcagccagcccttctgatcatccccatatctcttgagttttcattcatctaacctttattagaagttcatcaagtatttttttttctattgttacaacaggacacataagtatataaggtaatgatgatccatacacttgctcttttagagatgattgaattttattatttttccccaaatcttttccagataactacatttagctctaatgaccacagtgaactactttgaccttaaaacacaagtgggacaataaagccttttggattgctgaataaataaaagtaaaaatgtgttatctaatttctgtgaagcacctctaaagccaatactggccaatgcttcaccagttagtcatgctccaaggattgaggtcatgaccatgggaataaagttattt

SEQ ID NO: 37383 - DNA, 418 bp, Homo sapiens
gctattcccagcagataaatgagatgcttcacgtactaggccagaaaacagttgggttgacctatctatctccctagattccttgggttttaagagaactcatgtagtgtacctcagatagctttctaaagtaagaaatgagcttaggggagagaaagtagcccactctcccactttttggtctttggttgaccaggtgtcttttgttcagcaatagagtctgccacagcctatttcccatcccctggtgctaagactctggggccatcagtggatttgtataaagatgtcagagtaaaaaagagtccacataccagatgcggtctacataatgtagggactagcagtaaagcccttgtctggtgaagttttgcacattcagtcaacatttttcaaccagttggacatcacgtccctg

SEQ ID NO: 37384 - DNA, 406 bp, Homo sapiens
agcattgaatctgctaagaaatttgtagagacccctggccagaagtacaaagaaacagacctgctaatacttttcaaggacgattactttgccaaaaaaaatgaagaaagaaaacaaaataaagtggaagctaaattaagagctaaacaggagcaagaagcaaaacaaaagttagaagaagatgctgaaatgaaatctctagaagaaaagattggatgcttgctgaaattttcgggtgatttagatgatcagacctgtagagaagatttacacatacttttctcaaatcatggtgaaataaaatggatagacttcgtcagaggagcaaaagaggggataattctatttaaagaaaaagccaaggaagcattgggtaaagccaaagatgcaaataatggtaacctac

SEQ ID NO: 37385 - DNA, 414 bp, Homo sapiens
gtccccaccgcttgtcgtgatggctttcagcatgaagacaatgcagaatgcaaagaaccatcaaaatgagattattgctatggcagctttggtccatcacagttttgcattggataaagcagccccaaagcctccctttcagtcacacttctgtgttgtgtctaaaccaaaggactgtatttttccatatgctttcaaagaagtcattgagaaaaagaatgtgaaggttgaggttgctgcaacagaaagaacactgctaggttttttccttgcaaaagttcacaaaattgatcctgatatcattgtgggtcataatatttatgggtttgaactggaagtactactgcagagaattaatgtgtgcaaagctcctcactggtccaagataggtcgactgaagcgatccacatgccc

SEQ ID NO: 37386 - DNA, 402 bp, Homo sapiens
tgacaagagaggttaagacaagtgaactttgaactatgggtctgcaagttgcaattgcagctttacattataatgcatacctattactaaataccttagaaaatcttcacttccctaataatgttgaaccagttacaaatcattttattagtggcttaatgatgttgactgtttcttggggcttcatgacagaaggatgtgtgttctcagtctctgtgctcttattgatatggaacagataccccaaggtttaaatcaggtttctggacagattttgccagcttttatccttttatttaatggattaaaaagagcatatgcctgccatgcagaacacaagaatgacagtgatgatgatgaagctgaatatgatgatgaaaccgaggaactggggagtgatgg

SEQ ID NO: 37387 - DNA, 410 bp, Homo sapiens
  misc_feature (1)...(410): n = a,t,c or g
agaacatctggggtggacccatcactttggacagaattaggacctggttctggaccaagtgggtaaggatgcggaaggattgcaatgcccgccagcacagtggcggcaacattgaagacgtggacggaggaggggccccgacgacaggtggcaacaatgccccgagtggtggcagccaggagagcagcgcagaacagcccagaaaaggcggtgctcagcacggggtgtcatcctgtgaagggacacagagaacaggcaggaggaaaggcaggagccagtccgtgcaggcacactcagcgctaagccaaaggccgccatgctgagctcatctggccccatcttagagagccgccaaacattcctccagacgtccacctcagtgcacganctggccanaggctntngggcag

SEQ ID NO: 37388 - DNA, 413 bp, Homo sapiens
  misc_feature (1)...(413): n = a,t,c or g
gttggttgataaggtaaggttatatgattttgagggagcttcattgtaaattgaatgagaatccggttttcatgcaaaggtgtatctatgcgataatactttgaatgtctgtagtttgaaatagaaggttaattttttccactggcttatccttaatgaaggaaatcccctgataattactttgattctgaaaatgttgaaaactccagaagaaataaagcttttctttgatttctcagctgaagtgttgtacaaactgaggaatatgaagtccattcccttctttcttctcttgaataattttaaaattgtttgtttagttgtacaattgaaaatattccttattatagaagtaaaaaaacaataatgcacatttcctcatatcataaaaactaaatttgntatcatctgag

SEQ ID NO: 37389 - DNA, 397 bp, Homo sapiens
  misc_feature (1)...(397): n = a,t,c or g
ctagttctagatcgcgagnnnnnnnnnnnnnnnnnnnnnnnnnnnnnnnnnnnnnnnnnnnnnnnnngtagctattagttttgaatcttacatgttggaaactagactgctctgcttatagtatataacttaattctctcaaaccacctctcccgatgagaaggcaattttaacctatttgacaaatccttggaccaagttgaaacatgacatgtgtatatgaaatactgtacattttccagaatcagaaatacatgctttgcacacaggtaagaattttattaacagcagtaggaagggaacttgcagggatgtgaattagtaaatttatattctttagtttccttttaaaaatatttttaggccaggtgtgtggctcacgcctgtggtcccagag

SEQ ID NO: 37390 - DNA, 410 bp, Homo sapiens
  misc_feature (1)...(410): n = a,t,c or g
cccacgcgtccggtttgcagcctgtatgaaatggactgtggaagggggataatttctctcctcacagaaagccactcgtctccttgaatgaggcattgagcagacacacgtttctctgtgtcgtggggcaggaagcaattcccttgcctcttcagcacatctcagttctttcccacatgaccccagaaccacatagaaaacattgaaaataatggattcttcattgtatttgaattttttttttttaacctttagcccaaaagggaagtgtgcctcggggaaagagcaaatgccgtaaaatagaaaccaggagttttaatcgccatatattttaatgggcttgcatgatgggaatgtgacttttagcactgcatggngtttgggggcaanatnttaatgnggaaatctta

SEQ ID NO: 37391 - DNA, 404 bp, Homo sapiens
cccacgcgtccggggcctaggaaaagctcacagtacaactgagagatgggcctgtttgggggagggcaccactcccaagcctaggacagagtgccaggctcatcctgggcccagcagcccctgtgcccagcaactgccagtcagcagcctcttccaaggccctgaaaacttgcagcccccaccccctgagaagactcccaaccccatggaatgcaccaagccaggggcagccctgagccaggactcagagccagcggtgagcctggagcagtgtgagcagctggtggcagagctccgcggcagcgtgcgccaggcagtgcggctctaccactcggtggctggctgcaagatgccctcagcagagcaaagtcggattgcccagctcctcagagacaccttctctt

SEQ ID NO: 37392 - DNA, 401 bp, Homo sapiens
tttaattttgaataaaatgacgaagcccagaaaagtgaatcagaagttgaagtgtcccataataagctgtcatggcttcatgatcatttgtgtatgtaattattataaaaatgcatttgcatttttattgcttgtgtcatgactagcctggcctttcctttccttttctgcacacactgaactaagggagaataccttgtttttcttccatttcagtgaacctttccttcataactgcaatgagtaaaggtcctaatcactcctttgtatatatgaagatgaaaattccttgaaataattatccagaatttctttaaaagcattcctcaatggttttatgggtgctgtatttgaagaagattaaaatagaaactttattttaaagctatgactccatctct

SEQ ID NO: 37393 - DNA, 396 bp, Homo sapiens
  misc_feature (1)...(396): n = a,t,c or g
nnnnnnnnnnnnnnnnnnnnnnnnnnnnnnnnnnnnnnnnnnnnnnnnnnnnnnnnnnnnnnnnnnnnnnnnnnnnnnnnnnnnnnnnnnnnnnnnnnnnnnnnnnnnnnnnnnnnnnnnnnnnnnnnnnnnnnnnnnnnnnnnnnnnnnnnnnnnnnnnnnnnnnnnnnnnnnnnnnnnnnnnnnnnnnnnnnnnnnnnnnnnnnnnnnnnnnnnnnnnnnnnnnnnnnnnnnnnnnnnnnnnnnnnnnnnnnnnnnnnnnnnnnnnnnnnnnnnnnnnnnnnnnnttaattaattaattaaaataaactaggtaaacttggataggcagtagatatttttgcccacctgaggaggaactcagtcaagctgttgcttacagcttgatccagggcg

SEQ ID NO: 37394 - DNA, 397 bp, Homo sapiens
caatgaaagacccaaattgcctgtacagataaaattcactgaatcaaaggcacaatagctatcttttcacttgagctcagaaaagtaagatggcttaatttgaactattaattttcagtggcctctaattaaacaaaaacaaaaaaccacaaatactggctaggtaagatattcctgaggtcattttaaaagaagtgtggcacctaggattcaatatttaatgctaacagtattatattttagtgaaatttattttggtggtgacagtttattaaacctaattagacttctttcaatagcttgttgtagagacaatctcaagggctggaaagtgttgctaaaatgaatgtcatacatttctgatatactaaggagcttataaagtaattctttcata

SEQ ID NO: 37395 - DNA, 398 bp, Homo sapiens
ccttgagagttcctgaaatgttagaaagctcccaggaaagacgtaaacaacctgggctcaactcaccagcccagagcaggggctttgagtgacttctttgatagcaggaccagataaatacgaacacactttgggatctgatcctgctgggaagcaaaagacgcccagccacatgaccaggatagaggcccctttcagacggcaagtcctggccaatgggaggacttctcaggtgaccttgatccctctagcataagggcttgaccacagattaaaacatgtgactccaaccagttacggaagctttctggctgtgaggtagctgagggagatgaggaggaggaagagaggagccttgacttgtgaggctctgtaggtcagactctgctaactccaaa

SEQ ID NO: 37396 - DNA, 392 bp, Homo sapiens
  misc_feature (1)...(392): n = a,t,c or g
ctgaagagcaatattacatgatgcggagatatgaaagctcagcctcacatcccccacctcgccctccgaaacacccctcagtagaggaaacaaagttaaccctgctaaccttagcagaagaaaggacggtagacctgcccaagtctcccaagcgtcatcacgtagacataaccaagaaacttcacccaaatcaagctggcctggattcaaaagtactgattggtagtcagaatgatttggtggatgaagagaaagaaaggagcaaccgtggggccacagcattagcataaacattcnnncatcataaatancnngatgtgacngaagccacttaggcagcatcatanatgttgcagtgaaaaaagaagctagccttctagctgaaaacgagg

SEQ ID NO: 37397 - DNA, 408 bp, Homo sapiens
  misc_feature (1)...(408): n = a,t,c or g
atttaacaaagcaattttaaaatgatttaaccagtgattgtaacttttaacacttttaaggacttgataaaaatgacaaattcaatatatcaaatttccttaaatagcataaatatatctatgcaatatataacacaatttacatctttttaggattttattttannnnnnnnnnnnnnnnnnnnnnnnnnnnnnnnnnnnnnnnnnnnnnnnnnnnnnnnnnnnnnnnnnnnnnnnnnnnnnnnnnnnnnnnnnnnnnnnnnnnnnnnnnnnnnnnnnnnnnnnnnnnnnnnnnnnnnnnnnnnnnnnnnnnnnnnnntntaattntntgnnnnnnnnnnnnnnnnnnnnnnnnnnnnnnnnnnnnnnnnnnnnnnnnnnnnnnnnnnnnnnnnnnnnnnnnnnnnn

SEQ ID NO: 37398 - DNA, 398 bp, Homo sapiens
tgccacttaaagtgcttttctctggcatggttggtagctgtggtaatgctttaccactctgttcctccccccctcacttaccactcacacaattcctcatttcctgcttgcacagtcctgggtcattcgagattaataccattgactttcattcaacagttggggagcaattcgggccaagcaccaggcagcgagtgtgctgtggtgggagaaaaaaaaaggagacactccttcctcttaaggaatgcaatgcagcggagggtgcattttctaaaacgctgccacggagttatgtgcaacccaaatagctacaatgcagtgctattaaatgctttgcgaaatgctacgtgctaaatggaggtgtgttcaaaggaaatgacttgatagaaataccaggg

SEQ ID NO: 37399 - DNA, 400 bp, Homo sapiens
  misc_feature (1)...(400): n = a,t,c or g
gcagggacaaccacttccacaacggccgggggaggagaaggcggcagcggcgattctaggcggcccaggcgggggggaggaggagaaggaggagggtggcggccgggcttggcttcggctccttgaggagttggcggcggcgcgacccggggaaccggcattgatgtccagctcgccgctgtccaagaaacgtcgcgtgtccgggcctgatccaaagccgggttctaactgctcccctgcccagtccgtgttgtccgaagtgccctcggtgccaaccaacggaatggccaagaacggcagtgaagcagacatagacgagggcctttactcccggcagctgtatgtgttgggccatgangcaatgaagcggctccagacatncagtgtctggtatcagccg

SEQ ID NO: 37400 - DNA, 407 bp, Homo sapiens
gtcgagtggttgatgacgaactggcaaccaggtttcttaaaagttttaaagcaaacctagagaatcctatccgacttgcctagtcctcaaagataagaagttggtgttcagcttagttgattcagtagttgttaccaagaaacatatgttataggaaaacaacttggtatttaagtatgaagtggatgaaatgtttatttatttaaggtgaaagcatttgacccagggtgtcttcatcttcaatttgggtttaatgttatagaaataaatgatgataaactctaactaataaaggaaagagaatatttggttactcagatccatttttaacctctggtgctgtataaagggaatattaaactagatgtaaatcaaagtatatgtttggctcatttgagcattttgga

SEQ ID NO: 37401 - DNA, 395 bp, Homo sapiens
gcctggccgagtggaagctcttcatctacaacccgaccaccggagaattcctggggcgcaccgccaagagctggggatcgcagtatgtggtagggaagtgatgctgtctgaaggtgacatcctgttctcctctcttctgtcctctccatccttattttggccacctggtttgatcttgctcttctacctagttttttatgggttcctggctgcactcttctcattcacgatgtgggttatgcttcagactctcaacgatgaggttccaaaataccgtgaccagattcctagcccaggactcatggtttttccaaaaccagtgaccgcattggaatatacattcagtaggtctgatccaacttcgtatgcagggtacattgaagaccttaagaagt

SEQ ID NO: 37402 - DNA, 400 bp, Homo sapiens
  misc_feature (1)...(400): n = a,t,c or g
gggttgaaggtcggtccggacatcggacccagtcagttcccagactgtccgggcggcagcggacgccgctgccgccgccgnctcttcgtcgcctcagcctggcgttttgttccgagagacgggagaggcgancggagctgacagtgattttgacagtgatttaaacccgcttttgttgttgttggcttttcgttgttnggnttngtgtgntgtgcnngtgtgtggcggtttttcccccgtggtgcattttattttttatcgttgtgctcttttttttctttttttttttttancccaggggggngtttttttnttggnttntctttttctgagggtnnatnncaaantgntnttnntgantatnntnnccnccntngnaggggattncctngtaaaaaaa

SEQ ID NO: 37403 - DNA, 396 bp, Homo sapiens
tgagaaagcaatgctttcttgggttttatgccacatgcaactacaacatttgagttgctgctctgggaccagaatttgctgaacgccatttgggcctcctgataaattattttattgtgagagctctcagcatggcggctcctctacgtcacttgcgtccaccaaagtctgcagctcgatggatgagaacgatggccctggagaaggtgatgagcttgggacttggtatctgaggaggcagaggatgggttggctaaatttactccaagaaactgtggcttctcaagcggaatgacatggacaaggctgagcagctcctgagggtcaatcacaaggggatagggttgaatatggtgcccaccagggattggtatctgctctgtgagaatgggaagg

SEQ ID NO: 37404 - DNA, 457 bp, Homo sapiens
  misc_feature (1)...(457): n = a,t,c or g
aacacaattctagatagctgaaacagcccaaaatatgtgtttagaatacttagagtttgttataaataaccctctgtttagaatttgcccagtgaaattctctaataatacttaaaactctttactaaagttgaattttccttttttttcattgaaatagcaaaggtagtaatctgtattggtcaaagaaacgagataattcctagatctctgttttagaccagtagacctaactgtgctttcttaacttggatgttacatgaaacttaaaaacaaacaaatatgtgttacaagtacttgtgtgtacgtgcatgtgtgtttgtgcatgtgtctgtgtgtgtggaacttttgtacctttgcataaagaaggttatttaacaaagtggtacaaacagtgaactacttaatccttctatggtatcatacacttcttttcctggttaggntatgagactgc

SEQ ID NO: 37405 - DNA, 450 bp, Homo sapiens
  misc_feature (1)...(450): n = a,t,c or g
caagaggctaacatgtgaccttgtatgctttccattaaaatgtaaatggtgaagttatgattaaactgctttgatgaattcctgtgtgatgaattctgctatatttccttttgacttttctcagtttgtgacattctgtattaactttgctgcagctctctagaaaacttgcatccctatatattgtgcctttaaagctcttatgcacacacagacaaaagtgtatatatacatgtcagagcatgtgtacatatgctttcgtatgtactcacacagtatgtctctagtatatattgtgggagtagatatatagatattcaaaggcaatgaaatattgctctccagatatatatgtatataaatagtggtgatataactgnatatacacatgtatatgtatgagttttaaatggctatcttttacatttagcaaaatgctgccctactgga

SEQ ID NO: 37406 - DNA, 458 bp, Homo sapiens
  misc_feature (1)...(458): n = a,t,c or g
aaaagatgtagtttgtattccaaataaaatgaccctgtctgagccaaatgaagtcaacctatttgagaacaaaaatgttgaagtagaagtgttatcccctgcaaaagaacctgttcagccaggtatgccattgacagttgttgcaccagcagaactagttgtccctgcaaactgtttagcccagttgatagacgtgaaggttgtcaatggtacacagcagcttgttctgaaactgtttccgctggaagaaaataattgccttgaagctgggagggataatggaggtaattctgaacgtatggtgaaagagaagggttcaaatgaacaagaaaaagtctttctgcagaaaaaacaaagtcactgacagttgacgggaatgttggaaaactcgtaggcattgatagttttcaaccttcagttcagaacagcttanaaatgtgaaatgggtaagggcttat

SEQ ID NO: 37407 - DNA, 459 bp, Homo sapiens
  misc_feature (1)...(459): n = a,t,c or g
ggagagcgcctcattgccactgcagtgactaaagctgggaagacgctggtcagttcacctgccccactggttgttttttaaacaaattctgatacaggcgacatcctcactgaccgagcaaagattgacattcgtatcatcactgtgcaccattggcttctaggcactccagtggggtaggagaaggaggtctgaaaccctcgcagagggatcttgccctcattctttgggtctgaaacactggcagtcgttggaaacaggactcagggataaaccagcgcaatggattgggggacgctgcacactttcatcgggggtgtcaacaaacactccaccagcatcgggaaggtgtggatcacagtcatctttattttccgagtcatgatcctcgtggnggttgccaggaagtgtggggtgacnagcancaggacttcgtcttgcaacacactgnnaccggga

SEQ ID NO: 37408 - DNA, 396 bp, Homo sapiens
ggccgctccgcgagtattcccactttcctgtgcggtgcagcagtatgcctgggggaagatgggttccaacagcgaagtggcgcggctgttggccagcagtgatccactggcccagatcgcagaggacaagccttatgcagagttgtggatggggactcacccccgaggggatgccaagatccttgacaaccgcatctcacagaagaccctaggccagtggattgctgagaaccaggacagcttgggctcaaaggtcaaggacacctttaatggcaacctgcccttcctcttcaaagtgctctcagttgaaacacccctgtccatccaggcacaccctaacaaggagctggcagagaagctgcacctccaggctccgcagcactaccccgatgccag

SEQ ID NO: 37409 - DNA, 395 bp, Homo sapiens
  misc_feature (1)...(395): n = a,t,c or g
atttttgttttatttccctgagcaccattggcctgggggattatgtgcctggggaaggctacaatcaaaaattcagagagctctataagattgggatcacgtgttacctgctacttggccttattgccatgttggtagttctggaaaccttctgtgaactccatgagctgaaaaaattcagaaaaatgttctatgtgaagaaggacaaggacgaggatcaggtgcacatcatagagcatgaccaactgtccttctcctcgatcacagaccaggcagctggcatgaaagaggaccagaagcaaaatgagccttttgtggccacccagtcatctgcctgcgtggatggccctgcaaaccattgagcgtangatttgttgcattatgctagagcacca

SEQ ID NO: 37410 - DNA, 387 bp, Homo sapiens
gttgtggctttgaaaggactacaaggaatgagaagctggcagcaaagactgatgaatttaacagaactgtatttagaacagatagaattgtcaggcaatacagcaaaatcacagctgctcaaaatcatcggaggatctcaagccctgtgatacctcatctactcacacaggtagcatatcacaaagtaacgatgtgtccggtatttggaaaaccaatgcccacatgcctgtgcccatggaaaatgtgcctgataatcccaccaagaaatccacaacaggcctagtaagacaaatgcagggacacctaagtcctcgcagttatcgaaatatgctccacgagcatgactggagaccgagtaatttgtctggccgtccgaggtcagctga

SEQ ID NO: 37411 - DNA, 370 bp, Homo sapiens
ctccctgcagagcagttcgcagtacatctccacggcttcctacctgagctccctcagcctctcatccagcacctacccgccgcccagctggggctcctcctccgaccagcagccctccagggtgtcccatgaacagtttcgggcggccctgcagctggtggtcagcccaggagaccccagggaatacttggccaactttatcaaaatcggggaaggctcaaccggcatcgtatgcatcgccaccgagaaacacacagggaaacaagttgcagtgaagaaaatggacctccggaagcaacagagacgagaactgcttttcaatgaggtcgtgatcatgcgggattaccaccatgacaatgtggttgacatg

SEQ ID NO: 37412 - DNA, 403 bp, Homo sapiens
  misc_feature (1)...(403): n = a,t,c or g
tcttataatatgaccatgagccatttcacagagaaaccatcccaccgaagatattgactatcaccccaggggccatctgaaggtctctttgcatttctacatgcgaagaggagaaagcttttgctttcacactgtcccttcccaaatatgtgagtcatggaattgtcaaagtaagccttccctcaccagcaaattgactcctgatctgaatgaatttgtctcttaatgcatccatagaaaagtgttaattgggggttcaaagcattctctgcaaataggcatctcagctcctcacacttatggctatttctgacgtatagccagttttcttccctccttgctattaaagccagagcgggaattccnaattatttttcagtaagacagttaatcagcattattg

SEQ ID NO: 37413 - DNA, 395 bp, Homo sapiens
actagttctagatcgcgagcggccgccctttcttaatatgactagtggtcttgatgctagagtcaacttactctgttgctggctttagcagagaataggaggaaccatatgaaaaagatcaggctttctgacttccatccccaaaacacatttaccagcatactccaaactgtttctgatgtgttccatgagaaaaggattgtttgctcaaaaagcttggaaaatactacacactccctttctccttctggagatcaacccacattagagtgtctaaggactcctgagaattcctgttacagtaaacaaaactaacgtaatctaccatttcctacactatttgagcatggaaatcatagtccccactctgtgaaaacttaacgctttttggaaga

SEQ ID NO: 37414 - DNA, 260 bp, Homo sapiens
tacaatatgtgaaaaccccaatgtgaaaacgttctgtgcaggtgcctcttgtatgattccagatatggaggaggcccaggaagcccacagaggtacagcatgtcatctgcctcaaggtggtgctacttcaccacattgatgatccaaccacaagcaacatgggacacagcattcactttaacatttctattttcctttatcatttctgttacttgagtgtgtaagagtaataaacataaataatctaaaaaaaaaaaaaa

SEQ ID NO: 37415 - DNA, 391 bp, Homo sapiens
  misc_feature (1)...(391): n = a,t,c or g
ctgaaaaaggaggacatgacaaaggcatttgtgggtacctttggaggcacaaataaaattctccctaaggaatctcagaggtaggaggaatttgagaagatcatagttttcacaaagcatgtagagacaggactatataagcattctgcgttaaccttcaggactttgtgnccatgatttaangnnntatnntaaatntatgnattttcatcatgtntnatgtattgagctanctgcatatgcntgntgcttgnnagttttgcttactgagtatgattnatgaacatantatacacaggagctagtgatttntttttnnnnnntngcctntttcnntctntngtttcccttctcncattntctcntnncnttctctnttntctcgctcttt

SEQ ID NO: 37416 - DNA, 342 bp, Homo sapiens
ggaattggtgctactcaaaagtcttgaactaattcgaggataaaattattaacatatttttctaagtgtgtgaattgatatgtcattgtgtctgagcatctgagaatttctaccattaactcccatctataaagagcttgagagctacagaaagatcagtctcatttacgtacttaccaaggagataaaacctattataagagaggtggaatcatcgaatactcaagcaaacattgcctagtgtaatcaagtgaaatcatttctttgaggacaaacaagacttacctgctatagcagacttctttgaataggcagagtcacaggttgtaaaaaaaaaaaaaa

SEQ ID NO: 37417 - DNA, 128 bp, Homo sapiens
gtttggtggaagctggaataccttgagaaatagggcttccaagcaaattttaaaatcaataacagacacatttttcttttacctgcaggcctagatgatatagaccagtcaggtaaaaaaaaaaaaaa

SEQ ID NO: 37418 - DNA, 405 bp, Homo sapiens
ctttgtttctgtcccctccgaggagtcattttggtcgacaggctctcaaggcaactccccattttcaagaggctgctcctgcctgcttcgatcatttctccctgcagctgcctagaccccgttcacagtgggaggagtcaatgtcattctacccctcgctaaacgaagatattaacatctattgctttttcccttcatctgtcacaggaaacagaagcccaggcacaatcttttccagctttgcctgttacccctgtttctgaattgcatctttaaggtattattttgttgaaaatagatcctttattcactagttacgcaaattggttcctagggggatactccttaccttcctttgtgatggcccaaaatgtctctaggtatctcaagtgataagtaaatttc

SEQ ID NO: 37419 - DNA, 395 bp, Homo sapiens
  misc_feature (1)...(395): n = a,t,c or g
gatttttagggagagtcttgcagggctcaccaaagatctttgtgccttggaaccatgagttagataagggaaaaatgtgaatttagaaagatgtaagttatggtaatatccaaacaaatgaacttgtttggcctgtgattgtatgacttttgcgggacagaatcagaggacatacatgattttgaaaagctggaaccttggcctaatctggcaagattaaaagagataaatgtaaaatttcaagttgacaactatagtagtccttccttatctgtggtttcactttccgtggtttcatttcactgtggtcaatcacagtccaaaaacgttaaatgaaaattttcagaaagaagcaattcatgttttaaattgngnactgntctgagtatcgtgaa

SEQ ID NO: 37420 - DNA, 388 bp, Homo sapiens
gagtcagacctgacattcttatgcacactgtgcttgcgttatgatacaaatagccatgccggcaccatcccgaggaagagcatcaagccaccttcccttagaacaccaatttgcagcaaggttggtgcctttcatttgccaccatggatacatcatatagacagtcatgaatcattcatgagcaatgctgcatgatttatgtctgcactcaaaagtaaaggaattccacactttagcttatgtctagacagagatgtattatagagctttctttgccccgaggttgcctgttgccaacttcaaaaatccacactcttggaaagaaataataataataaatgacaggaataaggtttgaaactcagaaaatatcattaatagagccatg

SEQ ID NO: 37421 - DNA, 379 bp, Homo sapiens
gggggaagtcgaaggatgctctttcccttttctgtttaggaagaagtggtactagtgtggtgtgtttgcttggaaattccttgccccacagttgtgttcatgctgaatccacctcggagcatggtgttttcattcccccttcctagtgaaccacaggttttagcattgtcttgttctgtcccttccacttctaactccactggctccatgattctctgagtggtggttcctttgcaccctgtagatgttctaggatagttgatgcatgttactaaattacgtatgcaagtctgtgagtgcgtctgaggggacatcgccaaggactgactgagacacgatgccgagacctcaagccctgaggggcagtcccaaaaccctt

SEQ ID NO: 37422 - DNA, 399 bp, Homo sapiens
tgaaaaacaaaaggacaaaactctctctacacaaggaaatggcagtaaagaacttacagaaagaattctcacaggatcattaacaaagacaaaaacacagtaagagaactgaagcagctgctaatccctaggtagtttaccaggtggaaaagcaagcacagggaagggcacacatttgaaaggccagaggaaccccgaaccccacccaccgcccatgcatctccctgccgcccacggagatgcctccggttcaagacaaaaatcctttagcatgcttagctgtttcttgtaggtcacacagaacttgtttgtgataactgatttttttttttaactacaatatgtaaggaaggaatcaatgctgaagggaaagatggagagaattggcatttcatgctt

SEQ ID NO: 37423 - DNA, 391 bp, Homo sapiens
  misc_feature (1)...(391): n = a,t,c or g
aattttctagaccagttgcaaagactttttcaaagtactaaatatccccattataaataaagtgcacttaatggttcttttaatttgtaagcaaacagcaaatgattttttataaccaaatagagattttagttttgctatttgcttgctctttaactttgggcagatatttaaactgttttgagcctatgtcctaatcagtgaagtgagaatcgtgcctacctctagaggttttgcaaaaactttaatgagatgaaataaatgatcattgctctatttttttttttaaagttgtgcatttttagtagtcaggaaaactattaaatcaatgaggnnnnnnnnnnnnnnnnnnnnnnnnnnnnnnnnnnnnnnnnnnnnnnnnnnnnnnnnn

SEQ ID NO: 37424 - DNA, 404 bp, Homo sapiens
gagcggaaagaacagacccggaatgccagggccgaggtgttgcgccaggctaaagccaattttgaaaaagaagaaaggcgtaaagaacttaagcgacttcggggtgaggatacatggatgctacctgatgtgaatgagagaattgaacagttctcacaggaacactctgtgaagaaaaagaagaaaaaagacaagcattcaaaaaaagcaaagaaagaaaagaaaaaaaagagcaagaaacagaaatatgaaaaaaacaatgagtcatctgatagctcatcaagctctgaagatgagtgggttgaggctgttccatcccagactcctgacaaggaaaaagcctggaaagtgaaagatgaaaagtcaggaaaagatgaccccaaattatcaagagggatgagtgg

SEQ ID NO: 37425 - DNA, 391 bp, Homo sapiens
ctccttggtgatgggagcttgttgtgagaatgttattggatatatgcccatccctgttggagtggcaggacccctttgcttagatgaaaaagaatttcaggttccaatggcaacaacagaaggttgtcttgtggccagcaccaatagaggctgcagagcaataggtcttggtggaggtgccagcagccgagtccttgcagatgggatgactcgtggcccagttgtgcgtcttccacgtgcttgtgactctgcagaagtgaaagcctggctcgaaacatctgaagggttcgcagtgataaaggaggcatttgacagcactagcagatttgcacgtctacagaaacttcatacaagtatagctggacgcaacctttatatccgtttccagtcc

SEQ ID NO: 37426 - DNA, 385 bp, Homo sapiens
ttcctttgtgactcaaggttgaattaaaatgcctgtgaactgcaaacttgcttatgattgacttggtgcaataaagttcctttctaaccatttctggtttagaaaacattcagccatcctagaaactagcaatatttatttttgcctctttcgttttaccttcatttttagatgaggtaaatgttttgtcttttacttaagggtactaagcaaggtccactctagtgtagctgaagagaatgcatatttggctacactatttctgtttactgtattttgcttcctactttatgtctaaatgctattgtttgtttaaaatcctaataatgtctcatttccaatatgttattttcagataactaaggttttgctactaatgtcagcc

SEQ ID NO: 37427 - DNA, 376 bp, Homo sapiens
  misc_feature (1)...(376): n = a,t,c or g
gtcattttgttatcacattgatgaannnnnnnnnnnnnnnnnnnnnnnnnnnnnnnnnnnnnnnnnnnnnnnnnnnnngcatgggttttcatcaggtactctggtttcctcccacatcgcaaaaatgagcacttccagtaaattggggtgtctagatggtgccacagtgagtgagggtgtgggtgtgagcatgccctacagccagataccatcctctccagggttgatgcccacttagtgctctgagccactgggataggctctggccacccacaactctgaactggaatcattgggtgagtaattattatttgtttttagtaatttttttttttttgaaacaaagtttnantttgtcncccaggccgnagngcag

SEQ ID NO: 37428 - DNA, 370 bp, Homo sapiens
ataagtttctcctctcaattattatgtgcctcagttttgatagattgaaaagatgaatttttttcttcctctaagtatagagcaaaagctttgccagcttgtagaagggatatattccccatccttagtcactgtgtgaaaccaggtgcttgaatcatacagggatcttctaactctaacagtgttggatttgggaatgatgcagtactcttagatcccctacctaagtcaaaactatgcctattttttttcaggcaaacagtaaaagaagtaggagctctgagtttaccagtagaacccaattctgctttttgcatctcagacacagacacccacaaccagaaacccatgaagagatgtgcaaaggctg

SEQ ID NO: 37429 - DNA, 365 bp, Homo sapiens
  misc_feature (1)...(365): n = a,t,c or g
ctccgtccgcccgtccgtccgcgcgtctgtccgttcggcccggtccggcccgaagcatggccggcgtcagcttcagcggccaccgcctggagctgctggcggcttacgaggaggtgatccgagaggagagcgcggccgactgggctctgtacacatatgaagatggctccgatgacctcaagcttgcagcatcaggagaagggggcttgcaggagctttcgggacactttgagaaccagaaggtgatgtacggcttctgcagtgtcaaggactcctatcttgtctgccaaaatacgtgctcatcaactgggtgggcgaanatgtgcctgatgcccgcaagtgcgcttgtgccagccacgtggcta

SEQ ID NO: 37430 - DNA, 371 bp, Homo sapiens
agctgccagagataatagaaattctttctccatatgtcccagcctatccccctttaccgaggccaacagccccctcagaaatgagattcaggagctaacatgccccaggtctcacctcaaaggggaggatcggagcctcgagaggccgaggaaggaagtcaagatagtcaagtgggccctctcagatctggtcttgctcgagctatgcaaatgcctctcagggagacgcgaggacctgtctattataatgaccaggcccacatttgggggggcaacagactttcatctatcagcccttttcaaccattgatctactaaactggaaataccctgaaccctccaccttgctcctggcagctagagccctgtcg

SEQ ID NO: 37431 - DNA, 370 bp, Homo sapiens
ggaactcaagagccattagacctgcttttgcaaatcactgttttatacaaataaaacaatttttcagaaggcaatttagaattttgaaacacataccaattgtcagagtcagtctgtcaggttctgctcatcattaattttttaaaacatcaattatggtaaactctatcataattgcaatagaatacaattcaataatgaatataaacatttaatgcaatgcatagaatagaattcataagctgacaataatattggtctcttcatattctattcagggaagcccaagctctaaactgatatatacactgcagagactaggagacaaaggtaatattctgaagaagaatattttagggagaaaaaatga

SEQ ID NO: 37432 - DNA, 366 bp, Homo sapiens
gtattttctgtgggttaatttaacatgacataaacataggaaagcccttggcaaaattctacatcattgaagtagaccatttctaaatgcaattaaatagtgaggttattataaaaattagaatttaaaatatgacttgttgatagtgcagattataatgttacttagaaagttaagaattcgagagtaatgatgctattggagaactggtttgctatacggcagcaaaaacataatgagaatgtaccatgaagaaattgtgttaaatattcacttcgagtgaaactttaaatatgtttcctcttttgagctactgttatttagcagttacctaaaaaagaatacatttttactagtctaccatta

SEQ ID NO: 37433 - DNA, 440 bp, Homo sapiens
gtcccgatgcttgtcagatactcaccagagccccgctgggccaggatcccccgcagaggacagtgctagggctgctaactgcaaatgggcagtacaggaggacctgtggccaggggatcacaagaatcaggtgttattctggatcagaaaatgccttccctccagctggaaagaaagcactccctgactgtggggtccaagagccccccaagcaagggtttgacatctacatggatgaactagagcagggggacagagacagctgctcggtcagagaggggatggcatttgaggatgtgtatgaagtagacaccggcacactcaagtcagacctgcacttcctgctggatttcaacacagtttcccctatgctggtagattcatctctcctctcccagtctgaagatatatccagtcttggcacagatgtgataaatgtg

SEQ ID NO: 37434 - DNA, 426 bp, Homo sapiens
atgggatagcaataggtacctacactgtggtactgttaggattatgtgagttagtatatgtgaagttcttaaacagcgcttgaccctattatagacattatataaatgttagctataatttcatggaacccaagaatttgatccatcctattcctttggggttttatataattattctgtgttgcctaagagttcatgtttgttaaaatgttaggtggttttgaaaataaggtatatttttcaggttatcagatatataattttatataaacacaatctattgatgcaacattattctattccagtaatctaggacttgatcactagtagtgagaactaaaaagaaagaagagatacaaggtgaattttagaattaggattggcaggatttattggccatatgatatattgagaagccatgaatga

SEQ ID NO: 37435 - DNA, 436 bp, Homo sapiens
  misc_feature (1)...(436): n = a,t,c or g
cacaatgtaaaatgctaagtgtagctgagttccttttgaacttatttttgcagaagtgatttttgggaaactgtgagctttcataaatgccacattaactcttcttacagaagcaaaacaaaacctcacactcaactcttgactttggcatccagtcttcagacgacctctgatgtatatgggtgggatttgtgcaccatacagctttgcgaaatgtgaaattgccctatggatgaactgcaatctgttcttttgtgtattttactaaagaatgtcagctgaactcgtggggaaggggaagtgctgatatgtcctcccttgtcttcaagacacagatggcccagatatgtttgtggctgagtgtacgtgaagggggtgctgagctgccattcaacaaanatggatgaaatcggagaagttcacaggaaaaaactgg

SEQ ID NO: 37436 - DNA, 426 bp, Homo sapiens
  misc_feature (1)...(426): n = a,t,c or g
agccactgtaagcttatacactgtgaattgcaaaatgttactgcctctgggtggacaggttttaaaaagactttttttttcctccnggcatggntgacanagggaaggctgggtttcaatcccatctttccnttccnttgcccagggcttntttatgngcncaacctgcacaactatatgnggttngcaaacncccataaccaaanactaacagnttntgaancaaactntgaataaaanagggancntattaaggcaaatggcaaaggaggtgaccagcatggncanatanaancntcncagagactacaanaaaaatgtgccaaaccggntcatagnggccacnctgattaaaaattaccatcagctntttaggatttggaaacttggaaacacattgngggtncttcctggttngtnanaaag

SEQ ID NO: 37437 - DNA, 412 bp, Homo sapiens
gacataatagtctatattttcagagtccagtttttgttttgctttatataaacttataggggctacaagtaaaatgttccattggcataaaagataatgtgattatcacaatcaacttgatcataaaaatgtacatccttgttcaagtctatgttatggattttgcttctttctaaagtttagcttacaaatggctataaattatttgcataggaggtgcacttaattgtttcagttaggttttaaaaagtagttgtagtttactcctctaatgaaattagagatgttaaaccctttggaatactgacttttggcctcttaggcattcgatgaaataaatcagctgcttctttttacttgtttgcatattctcaatagtcaggtaaacacctgactaattgcttgttatatg

SEQ ID NO: 37438 - DNA, 410 bp, Homo sapiens
cggacgcgtgggtcctcatttgatgaggaattctgtgtaaagaaggtaaaaatggaaatgatatatatacgcctaaaaaggagaaacaacatgatggacaagatgagagacaataagtacaggtccagtgaaaccaaaagaatcaatatcatgctgctctccattgtggtagcatttgcagtctgctggctccctcttaccatctttaacactgtgtttgattggaatcatcagatcattgctacctgcaaccacaatctgttattcctgctctgccacctcacagcaatgatatccacttgtgtcaaccccatattttatgggttcctgaacaaaaacttccagagagacttgcagttcttcttcaacttttgtgatttccggtctcgggatgatgattatgaaacaat

SEQ ID NO: 37439 - DNA, 410 bp, Homo sapiens
  misc_feature (1)...(410): n = a,t,c or g
gtgggaggattgcttgaggccaggcggnnnnnnnnnnnnnnnnnnnnnnnnnnnnnnnnnnnnnnnnnnnnnnnnnnnnnnnnnnnnnnnnnnnnnnnnnnnnnnnnnnncntcactgggggatggtaggaagggtgtctnaggancccacaggccccctgcccgcaccctgtccccaggnggnaggcntgtcgncctgngattcaccatnttcaanccttcaagcnctttntcctttgcttnattttgtttaaataaaaaaaattgccccttaggngaatgaaaagtgtgatggtccactaggcncctggtaaaaatgcaaaaccagtagtgaaggcctcaaaataaataatgcncctgggaggactgttaccgaacctctggttgtggcccgntgcaatgtccttggc

SEQ ID NO: 37440 - DNA, 414 bp, Homo sapiens
  misc_feature (1)...(414): n = a,t,c or g
nnnnnnnnnnnnnnnnnnnnnnnnnnnnnnnnnnnnnnnnnnnnnnnnnnnnnnnnnnnnnnnnnnnnnnnnnnnnnnnnnnnnnnnnnnnnnnnnnnnnnnnnnnnnnnnnnnnnnnnnnnnnnnnnnnnnnnnnnnnnnnnnnnnnnnnnnnnnnnnnnnnnnnnnnnnnnnnnnagacacaaagcaatatatgcattttctcatgaaacagtaaactttggttcctttggactattctgtgagggtttttgtttgtgtttgcagggaaaaaaattaacctaagatattaatgccatttctacttttcctcacagcatatataagataatttgagatttgatttttttttaagtttgctacttttctaggttgaaactttgtgatgcggcaaaccaaaccttactaatttaa

SEQ ID NO: 37441 - DNA, 408 bp, Homo sapiens
  misc_feature (1)...(408): n = a,t,c or g
aatttattttgattaaacttcttttatacaatttttatttacaattgtataaaagaagtttaatcaaaattggttctttttttgtggaaagtttgttgttactgtatggaaatgcaacaaatatttgtatgctgagcctggtgcagtgctgcatttnnnnnnnnnnnnnnnnnnnnnnnnnnnnnnnnnnnnnnnnnnnnnnnnnnnnnnnnnnnnnnnnnnnnnnnnnnnnnnnnnnnnnnnnnnnnnnnnnnnnccccagaagtatttgtatgttgattatcctgatactttaataaatgcatttattagttcaaaaaaaaaaaaaggggnngcccnttaaanngancccttngggggccnnagttnnncnnnattnnncaanttnanantttnccccnnatgggg

SEQ ID NO: 37442 - DNA, 417 bp, Homo sapiens
  misc_feature (1)...(417): n = a,t,c or g
gtttgtttcttatgcagaaccttttggtcatgtattgtgggaaagcttgggcaaatttggccagtgcaatttaattacaaactttaagttatctgcttttagtgtgcactgccactcattatcccttagagatggaaatgtgtaaaattaaaaaatacannnnnnnnnnnnnnnnnnnnnnnnnnnnnnnnnnnnnnnnnnaaaaatcannnnnnnnnnnnnnnnnnnnnnnnnnnnnnnnnnnnnnnnnnnnnnnnnnnnnnnnnnnnnnnnnnnnnnnnnncctgggtgatggagtgggaccctgtctttaaataaataaataaataaaattcaaaaaaataaaaaaatacaataaaaacctaatcatcttgatctccccaatctagaatatataaccatttttataatgntagg

SEQ ID NO: 37443 - DNA, 425 bp, Homo sapiens
gacctaaggctgtgcaattgggtatctcgaagagcagatcaagggcctaaaactatcgaacagattcacaaagaggctaaaatagaagaacaagaagagcaaaggaaggtccagcaactcatgaccaaagagaagagaagaccaggtgtccagagagtggacgaaggtgggtggaacactgtacaaggggccaagaacagtcgggtactggacccctcaaaattcctaaaaatcactaagcctacaattgatgaaaaaattcagctggtacctaaagcacagctaggcagctggggaaaaggcagcagtggtggagcaaaggcaagtgagactgatgccttacggtcaagtgcttcagtttaaacagattctctgcctgcaaccttcagcaccctcagggtccacgccatccacgcctgtagagg

SEQ ID NO: 37444 - DNA, 417 bp, Homo sapiens
gaccagcttctcaggagacgggttctacgggaaatgggtcaaggccagcattaatggttagcattgatcttcatcaggcaggaagagtggactctcaggcttctataactcaggattcagactccataaaaaagcctgaagaaatcaaacaatgtaatgatgcacctgtttctgttcttcaggaagatattgttggaagtcttaaatctacaccagaaaaccatcctgagacacctaaaaaaaagtctgatcctgagctttcaaagagtgaaatgaaacaaagtgaaagtagattagcagaatctaaaccaaatgaaaaccgattggtggagacaaaatcaagtgaaaataagttagaaactaaagttgagacccaaacagaagaacttaaacagaatgagagcagaacaactgaat

SEQ ID NO: 37445 - DNA, 414 bp, Homo sapiens
caagtcctggaggccgtggcctatttgcactcactcaagatcgtgcacaggaatctcaagctggagaacctggtttactacaaccggctgaagaactcgaagattgtcatcagtgacttccatctggctaagctagaaaatggcctcatcaaggagccctgtgggacccccgagtatctggccccagaggtggtaggccggcagcggtatggacgccctgtggactgctgggccattggagtcatcatgtacatcctgctttcaggcaatccacctttctatgaggaggtggaagaagatgattatgagaaccatgataagaatctcttccgcaagatcctggctggtgactatgagtttgactctccatattgggatgatatttcgcaggcagccaaagacctggtcacaagg

SEQ ID NO: 37446 - DNA, 419 bp, Homo sapiens
gcatattctggacatgatagagcagggctcagctggcaaagtaactacagactatggagaaactgaaaaggaaaggcttgctcgtcaaaggcagctttataaattgcactatcagtgtgaagatttcaaaagacagttgagaacagtgacttttcggtggcaagaaaaccaaatgcagattaaaaagaaagacaaaattatcgcatctcttaatcaacaagttgcttttggaatcaataaggtttccaaattacagcgtcaaatccatgctaaagataatgaaatcaagaaccttaaagagcaactttctatgaaaagatctcagtgggaaatggaaaaacataatctggaaagcacaatgaaaacatacgtaagcaaactgaacgcagaaactagcagagctttaacagccgaggtgg

SEQ ID NO: 37447 - DNA, 416 bp, Homo sapiens
gactcaggaggcagagaagatgggcatcctcagcgtagacttgctgatcacactgcaaattctgccagtttttttctccaactgcctcttcctggctctctatgactcggtcattctgctcaagcacgtggtgctgctgttgagccgctccaagtccactcgcggagagtggcggcgcatgctgacctcagagggactgcgctgcgtctggaagagcttcctcctcgatgcctacaaacaggtgaaattgggtgaggatgcccccaattccagtgtggtgcatgtctccagtacagaaggaggtgacaacagtggcaatggtacccaggagaagatagctgagggagccacatgccaccttcttgactttgccagccctgagcgcccactagtggtcaactttggctcagccactt

SEQ ID NO: 37448 - DNA, 431 bp, Homo sapiens
aaaggatgtaccatcaccccttcatgctggctctaagctttttccagcagtcccacttcctgatattcgttctcttcagcagcctaaaatacagctttcttctgtccccaaagtaagctgctgtgctcattgccctaatgaaccctccacttcgccaatgcgttttggtggtggtggtggcggtagcggaggtaccagtagcttgattcacccgggcgcactgttagactcgcaaagcaccaggacaatcacgtgtcaggtagggtcagggtttgctttccagtctgcatcttcactccagaatgcctcagctaggaacaatttggcaggcattgcaagtgactttcccagcatgtgtctagagagtaacctgtcttcctgcaaacacctgccctgttgtggaaaactccacttccagtcatgtcatggta

SEQ ID NO: 37449 - DNA, 225 bp, Homo sapiens
gaatcctttggaatcttatggcaaccaaatgtggcttgacgaagtcgtggtttcatctcttaaacacagtgtgtaaatttattcaactaacgatgggaaatgtattacttctgtacacagtggactgaagtgcaatttgttgaaagggaacaagtcattgaagagaaaaaaaaagcccaatacttagagtcccaattttgtctcatttgccaaaaaaaaaaaaaa

SEQ ID NO: 37450 - DNA, 398 bp, Homo sapiens
  misc_feature (1)...(398): n = a,t,c or g
attggtataattaactaaactccacgctttattcagatttcactagtttttacccatatttgnnnnnnnnnnnnnnnnnnnnnnnnnnnnnnnnnnnnnnnnnnnnnnnnnnnnnnnnnnnnnnnnnnnnnnnnnnnnnnnnnnnnnnnnnnnnnnnnnnnnnnnnnnnnnnnnnnnnnnnnnnnnnnnnnnnnnnnntctcatgattcagctggggttgtggactttaaggaagtgaattgctcttttcattacatcacatcgagggtacgttcttatcacctggctgaggtagtgtccatcatatgggcacaatttaagcnatccatcaaacattcaggttgtgcctgttttttatcactgtgaataacaatcagagatagagaaatatatatctt

SEQ ID NO: 37451 - DNA, 394 bp, Homo sapiens
cggacgcgtgggctggaatgtctggttccttacccggtggctcagtcatcagtcgcctgttaattaatgctgatcccttcaactctgaaccagaaaccctagagtattacacggagaaatgtgtcatgaacaactattttggcattggcctggatgcgaagatatccctggactttaacaacaagcgcgatgagcacccagagaagtgcaggagccgaaccaagaacatgatgtggtatggagttcttggaaccaaagagttgctgcacagaacctacaagaacctggagcaaaaggtcttgctggagtgtgacgggcgacccatcccactccccagtcttcagggaattgctgtccttaacattcccagctatgccggaggaaccaacttctg

SEQ ID NO: 37452 - DNA, 400 bp, Homo sapiens
cccacgcgtccgcaaaaaacaatggccaaaacaagaaacatcaaatcctagggagtagggagaatctgatttccagagttgccaagtaataatcccactagtttcaacaaaaaattacaagacatgccaagaaaaagaaagaaagagaaaaagaaataaagaaagagaaaaagaaaaaaaaagaaggtatggtccattaaaaagagtaatagaaattaatacaaactgtccttgaggaagcccaggtattggagttaccagagaacgatcccaaatcaggtctgtcaaatgtggcaaaaagctaaaggaagtcatagataagaatgaaaggaaaccaggaacataaagtataaacatatggagaatgtaaataagagatagaaactataaataggaccac

SEQ ID NO: 37453 - DNA, 398 bp, Homo sapiens
  misc_feature (1)...(398): n = a,t,c or g
ggagcaaatggacaaaataagccccctcttgctcaggacctgactaacatttcagaagtgctttggtttgtataaaatgggtgaccgcagttctgaaatgttagtcaggtcctgagcaagagggggcttattttgtacaaaccaaancacttntgacagacctctgaatttgcattaaaaagagcacgtntncagctnctaacantcaaaancaactatgaacactgcttgnttnantgatacaaacagacattttcttgttacatgngtggtgatctgagaatggngactttggacccagtttgactgnntagcgtttaaataaaacttaccagactangcaactaaaggaactcactaanagatcanaagcaatgctcaaagggagtgcctgggta

SEQ ID NO: 37454 - DNA, 401 bp, Homo sapiens
cacacttttaattattgtcctgttttctttaaggctcatctttaagaaaacaggacaataattaaaagtgtgaatcatcaacatgctcaagtatacatgcttgtaccaaatcaccaatgattcagaactacacaatgccttgatttgataaaagtattgaaaacagatggtcaacattttccagaaagatgagccttaaagcgcaaaaacagacataaagaaaaaaggaaaagaaaacttaacaaattcatctgatactttgattagaattcagttttgccaacagggataaaaaattgggctgctaatggacagctaaggaaagcaaccatcttaaaccacatatcacaggaagtataatgttttaatgtaaacctttctgaagtgacaattgtaaagac

SEQ ID NO: 37455 - DNA, 322 bp, Homo sapiens
  misc_feature (1)...(322): n = a,t,c or g
ctctagaggatccctcgaggggcccaagcttacgcgtgcatgcgacgtcatagctctcnnnnnnnnnnnnnnnnnnnnnnnnnnnnnnnnnnnnnnnnnnnnnnnnnnnnnnnnnnnnnnnngatctgctagcttnnnnnnnnnnnnnnnnnnnnnnnnnnnnnnnnnnnnnnnnnnnnnnnnnnnnnnnnnnnnnnnnnnnnnnnnnnnnnnnnnnnnnnnnnnnnnnnnnnnnnnnnnnnnnnnnnnnnngctgcatatgcttgctgcttgagagttttgcttactgagtatgatttatgaaaatattatacacaggagc

SEQ ID NO: 37456 - DNA, 413 bp, Homo sapiens
ggcacttttggaagcagcaacagtaacagcagcagcaaacttttcctctcatattttgggtgtatcaaaagttctagacttttgaagttatgatttcagtggcccactttatttctaaggaagagtgtctactttggaacgatactttgcacatagtaggaactcaagaaatacatttgaataattataattaactgtttagctatcttaatgagaatttgttgacaacaaaagatcatccatcgccttatgtgtgagtaagattggagcctctatcaagatttagtcaagttcagttagattgattctagaaacaaatatttatttctttcttttacggggatgtgaataaggcttttccttaaggccttcattctttaaacaaacaggttgaaatggtatgttgtaaaaga

SEQ ID NO: 37457 - DNA, 347 bp, Homo sapiens
  misc_feature (1)...(347): n = a,t,c or g
ctagttctagatcgcgagcggccgctctagaggatccctcgaggggcccaagcttacgcgtgcatgcgacgtcatagctctcnnnnnnnnnnnnnnnnnnnnnnnnnnnnnnnnnnnnnnnnnnnnnnnnnnnnnnnnnnnnnnnngatctgctagcttnnnnnnnnnnnnnnnnnnnnnnnnnnnnnnnnnnnnnnnnnnnnnnnnnnnnnnnnnnnnnnnnnnnnnnnnnnnnnnnnnnnnnnnnnnnnnnnnnnnnnnnnnnnnnnnnnnnnngctgcatatgcttgctgcttgagagttttgcttactgagtatgatttatgaaaatattatacacaggagct

SEQ ID NO: 37458 - DNA, 418 bp, Homo sapiens
gtctacaaggaaagcctccatagctgtgattattcagtaagaacagtctcaggaaaacaggaccttcaacagagataagagaattaaaatatgcagactaacaactctgggaatgggctgaccagcctgataagaataggctgatggcacctacagaaggccacaaaacactgaccaagaaagcaatgaccaacaaagcaatgacctgagactgcacatttcacaagaatgttttgatcatcattttttctaatttcccttaaaaacccctgatatggagacagaactcggcggtctttgaacactagttcactgcctcccctgggttgttggattcctgaatagagctaaccatcctttcaccaatgctcatctcttaaactttcaagtgacaagtggtctggacctgaatttcgtt

SEQ ID NO: 37459 - DNA, 430 bp, Homo sapiens
gggtgatgtcggctcgcggatagcagaggagttccgggtgatcttgcctaacgagcaggaaactgtgcatggtttctcgagtccttggagagtgaaggcccccggggtcgctcccgggcacggagagacgattggttcacggcctagtgttcggtttgttcccagtcagcccttgctggccttgggttcaaccgaatgaacgccagaaactctgtggggtggggggagtcaccaaccgtggtgcatccatacgaatcagcctaccgtactgggaaagagccacctgaatttgtgaatgttgtaaaagcaaaaggaagaaaaatgatcagtagtgtcatttttggataggaagggcagcgaataacatagtgttaaccactagaattcactgtaaaattcccctctctgcgttatctttccagttatacct

SEQ ID NO: 37460 - DNA, 422 bp, Homo sapiens
cccacgcgtccgcttagctcttcatcttgtctaagtggaaaagccgaaggattgcttgaatgtctggtccagctacggccatctctctcggaagggattacatttctgcggagcttcagaattcctgcaatgctttgatcttgctgaatctatggcatgattgtaactgtgagtcatgctacacggtttactacaaaagggatcatgatggaatggtggactatggggaagggaacattgattctgagacttgtaactcttttcaacattttgaaacagagattattttacttatcttggacacgaaggcagcataacatcgcagcgaggagcgtgggctctgcatccatgatcctaggtgggaatccaccttctgcagctcaccagctctgtaactgtgggctcaccttttctcttcttgg

SEQ ID NO: 37461 - DNA, 373 bp, Homo sapiens
ctttataaccgataccagggaggattcttaatatccagactaataaagctatcagttgagggatttgcagttgataaaatggctggagaggttaaggctttcttcgagagtcacccagctccttcagctgagcgtaccatccagcagtgttgtgaaaatattctgctgaatgctgcctggctaaagcgagatgctgagagcatccaccagtacctccttcagcggaaggcctcaccacccacagtgtgaatcctgaggtgccgccattggcggttctgctgcttcgctgcagggataaggtggagctaccgaacagctgattcatatgccaagaatttggagtcttctttcaaaccaagtgggggttggacaa

SEQ ID NO: 37462 - DNA, 349 bp, Homo sapiens
cggacgcgtgggggagagatttgaggaaatcgttaatgtcttaacatttgagtatatttataaatgtatcagtctgtgattcataatggtgacattttggaccagccagacatgttgtaccaatatttaaatggtcactgcaatagttttatgacatcgtgacagtattttattgtttaaattcgaaggccctctgtgtgttttccgtaagtctgcccgaaggaaaaaggctgagatgggaagagcaaaccaacgacgcacagaaataagatctttctatgaattttcatcagagtcgtacagttttaagaaactcataaaacacattttccacgaaaaaaaaaaaaaa

SEQ ID NO: 37463 - DNA, 379 bp, Homo sapiens
  misc_feature (1)...(379): n = a,t,c or g
attaccattgctacaaactttgagaagtaaatatggctaataatggcagggaagcagtttttaacgtctgattatgtgtgattaatatatacaaaatctgaactcttcccaccacgctcattgctaacatcttctgcctagtattgaaagaattttgcataaggttgccttgtttctgaacttgctcatctatggtctcttctcaagagtaagcagagtgaagactgaggacagatcacagccttcttctgttcaaaaaatgacctttaattttgtgcactgtcttaaaaaataccactccctaatcaaagctcccactccctgatcaacattgcccattaatctctggaattgntttctgctatcctcctgtcactct

SEQ ID NO: 37464 - DNA, 381 bp, Homo sapiens
cggacgcgtgggcgcgctgaggaaggctttctcgccatccgaggcttggccctagccctgcgcggcttccctcgcggctgcgaaccctctgcctgcgcccagcccagccacaatggggactgctcaggttttgcctggcattctgcagaagcattgctgtatcttaccagacaggaatacagagtcgcagtgcacgctctgcggggagccggaagctcccatgtgccctaccggggaaggcgcaagatgccctctgaaagggtgacctatcccagcagttctaagccgccgttgcgtgtttttagttattaataggacttccagaacaccgctccgtggcggtggttttctaagtgacgcttttttacaaaaagaggtttt

SEQ ID NO: 37465 - DNA, 367 bp, Homo sapiens
gaatgtattcacaggaggccataaattagcattgtgccatgtccacctgttgttcctggactctgacacatgattgtagacaatgatggcattttatgatttttaaaaaagattttgtttgttttaaggtggagagggaggagaagcctgaattggggagcttgggagtggaagcttttctcatgcttgtgatttggtgactcttctaaatgctgattcattagggattattacagcggatgtcaactggttgtggtgatggggtgggggcagaacatgagtagcaaagaaaagggagagacgaaaagggtacaggctcacgtaaagtaatgaagcctttcccaaccaggatggttcacaaaaaagc

SEQ ID NO: 37466 - DNA, 374 bp, Homo sapiens
catgattttcactccttgcaaactttgccatctttgttgcagagaatcggaaatcaatatgcatagcaaagtcacaatcatatgcatcagatttctcttttggtttcttttgctctgcatgcttattgggaagtcacatactgaagatgacatcataattgcaacaaagaatggaaaagtcagagggatgaacttgacagtttttggtggcacggtaacagcctttcttggaattccctatgcacagccacctcttggtagacttcgattcaaaaagccacagtctctgaccaagtggtctgatatttggaatgccacaaaatatgcaaattcttgctgtcagaacatagatcaaagttttccaggcttccatg

SEQ ID NO: 37467 - DNA, 379 bp, Homo sapiens
agagactacaacacagcaacagtttggatctgttacggaaggaacttaaatctctcaaaggaaacacgtttcctgagtcacttcttgaagaaatgattgctactttacagcatttcatggatgatattaattacataaatgttggggagattgcatcttttatttctagtactgattacctcagtactttgctactagataggatagcctcagtggctgttcagcagattgaaaagatccatccttttacaatccctgctattattcgtccattcagcgtattgaactatgatccacctcaaagggatgaatttttgggaacttgcgtgcaacatcttaattcttacttaggtatattggatccttttatattagtgtt

SEQ ID NO: 37468 - DNA, 379 bp, Homo sapiens
gccccctacgcctcctgccacatatttgaactgtaccaggaagattctgggaatttctcagtggagatgtactttcggaacgagagtgacaaggccccctggccgctcagcctgcctggctgccctcaccgctgcccactgcaggacttccttcgcctcacagagcccgtcgtgcccaaggattggcagcaggagtgccagctggcaagcggtcctgcagacacagaggtgattgtggccttggctgtatgtggctccatcctcttcctcctcatagtgctgctcctcaccgtcctcttccggatgcaggcccagcctcctggctaccgccacgtcgcagatggggaggaccacgcctgacaaccactcagcccccttc

SEQ ID NO: 37469 - DNA, 378 bp, Homo sapiens
gaccgtgaacagcttcttcagcagtgtggatgggcagctggagctcctggcccagggggccctggaaagcactgtgtccagtgtgggcgccttgcacgccctacgcccgcggctcagctgcttccaccagctcctgctggagcctcccaagctggagccgctacagatgacatggggcatgctggctccgcctctgggcaacacgcggctgcacgtggtcaagctcctggccagtgccctgagcgccaatgatgcagccctgacgcacgagctcctggcactggacgtgcccaacaccatgctggacctcttcttccattatgtcttcaacaacttcttgcatgcccaagtagagggatgcgtgagcaccatgctgag

SEQ ID NO: 37470 - DNA, 386 bp, Homo sapiens
agatcatcttctagaggtggagcaatccaaagatcaaatggaaaaagaaatgcttgagaaaatagggagattggagaaggaattagagaatgcaaatgaccttctttctgccacaaaacgtaaaggagccatattgtctgaagaagagcttgccgccatgtctcctactgcagcagctgtagctaagatagtgaaacctgggatgaaactaactgagctctataatgcttatgtggaaactcaggatcagttgcttttggagaaactagagaacaaaagaattaataagtacctagatgaaatagtgaaagaagtggaagccaaagcaccaattttgaaacgccagcgtgaggaatatgaacgtgcacagaaagctgtagcaagtt

SEQ ID NO: 37471 - DNA, 386 bp, Homo sapiens
ggcggctgttctcgctccagctcgatgctgcctccccggcccggttgcgctgtagccgctgccgcctctgcctgggtcccttcggccgtacctctgcgtgggggctgcctccccggctcccggtgcagacaccatgtacggatttgtgaatcacgccctggagttgctggtgatccgcaattacggccccgaggtgtgggaagacatcaaaaaagaggcacagttagatgaagaaggacagtttcttgtcagaataatatatgatgactccaaaacttatgatttggttgctgctgcaagcaaagtcctcaatctcaatgctggagaaatcctccaaatgtttgggaagatgtttttcgtcttttgccaagaatctggttatgatc

SEQ ID NO: 37472 - DNA, 387 bp, Homo sapiens
gctgttcactcctaagtcagacgttgaatgtaacctcagtgctgtttctagtcactaaactctattacctcctgagatatatttcatggtttgggtgtcatagggctggtggtttgtggtctgagggcagccacacagcacccttggtgggcagagggcccaggtctaagggagactaggctctaatgacaggaagttgccagagtgcttcatctcaaccagatggctaccccaaacagcagtttggaaattgtccctgtaacattaacacatggcccagtcacgtgtgaatcctggcccattgcatgttgacaacttggctttagttggataacactgaccacaatatcttctcccctcccaccccctccagtgagacacttgaat

SEQ ID NO: 37473 - DNA, 386 bp, Homo sapiens
ctattatttccttcccttccctgtgcagcattcaaaatcacccctagaaaaagtgagtgttttaatgagacttcctaggaagggatgcactgtaaaacaaaagtattcttgtaactcagttttgtgaaaggtaaaaaactactatgttttaagtacactttagaaagtctcttcaaaacaaacagtcctgtatttgaactctgttcatagtttttttttgaacagtttagacaaaactgctggaaattaaaccaatttcctgcattaagctgagacaagtatatatacagccctatacagtttcatagcttttcctcccccatttatgtgtattggtgacagtgggtataaaacagcctgaaagtgtatgcatgtaccataacatc

SEQ ID NO: 37474 - DNA, 314 bp, Homo sapiens
gcaaaaatgttttccaatattttaataaagtagttattttataggggatacttgaaaccagtatttaagctttaaatgacagtaatattggcatagaaaaaagtagcaaatgtttactgtatcaatttctaatgtttactatatagaatttcctgtaatatatttatatactttttcatgaaaatggagttatcagttatctgtttgttactgcatcatctgtttgtaatcattatctcactttgtaaataaaaacacaccttaaaacatgaacacgccaaaactgtgtgcagacaaattaaaaaaaaaaaaaa

SEQ ID NO: 37475 - DNA, 397 bp, Homo sapiens
  misc_feature (1)...(397): n = a,t,c or g
gactgtccacgctcgcccggctcgtccgacgcgccctccgccagccgacagacacagccgcacgcactgccgtgttctccctgcggctcggacacatagtatgaccattaggtgtttcgtctcccacccattttctatggaaaaccaaggggatcgggccatgatagccactggcagctttgaagaacgggacacctttagagaagcttgatcttggaggcctcaccgtgagaccttacaaagccggattccggcagagttcctctatctcgtcttgttgctgattaaaggtgcccctgtctccagtttttctccatctcctgggacgtagcaggaaatcagcatcatggttgggttcaaggccacagatgtgccccctactgccactgngaagttc

SEQ ID NO: 37476 - DNA, 398 bp, Homo sapiens
  misc_feature (1)...(398): n = a,t,c or g
cccacgcgtcnnnnnnnnnnnnnnnnnnnnnnnnnnnnnnnnnnnnnnnnnnnnnnnnnnnnnnnnnnnnnnnnnnnnnnnnnnnnnnnnnnnnnnnnnnnnnnnnnnnnnnnnnnnnnnnnnnnnnnnnnnnnnnnnnnnnnnnnnnnnnnnnnnnnnnnnnnnnnnnnnnnnnnnnnnnnnnnnnnnnnnnnnnnnnnnnnnnnnnnnnnnaatgataatgtttaaaaggattttgcatcctagagaatctaaaagattcgccttgggattacacttttaaaagtgtaaatgaggaattggcttagatttgtaattttaggttgaaagttaaaagaaattttacgaagtttgtaaataacattcaaatatttaaaaccagctaaaatcaccgtatt

SEQ ID NO: 37477 - DNA, 392 bp, Homo sapiens
  misc_feature (1)...(392): n = a,t,c or g
agtaaagctaggcacacnnnnnnnnnnnnnnnnnnnnnnnnnnnnnnnnnnnnnnnnnnnnnnnnnnnnnnnnnnnnnnnnnnnnnnnnnnnnnnnnnnnnnnnnaaaaaanccaangcngttnccttaatttaaaancnctttanggctttaaaaaagggntgacccaaacncnaanngancntgngctgttnaaaaaagggggccaanaaacttgctggacagngttgtcaaaaagcttcantttaaaaaaaaaaaaannntnngnnnnntncntaanangnaagaaaaanaanacaaananggnccggtntttnaaaggganccnggcttttttcntanngggaaannngaaaanntaaagggcnaancnnnngggaaaaattncagga

SEQ ID NO: 37478 - DNA, 399 bp, Homo sapiens
gtggaacttggagagccagcccataagaaaacggggaccacagtgccagaatctattcattctttcattggagacggtttggtgaaaccagaggccctaaataagaaagctatccagattattaacagggttcgagataagctcactggtcgggacttctctcatgatgacactttggatgttccaacgcaagttgagctgctcatcaaacaagcgacatcccatgaaaacctctgccagtgctatattggctggtgccctttctggtaactggaggcccagatgtgcccatcacgttttttctgaggcttttgtactttagtaaatgcttccactaaactgaaaccatggtgagaaagtttgactttgttaaatattttgaaatgtaaatgaaaagaa

SEQ ID NO: 37479 - DNA, 352 bp, Homo sapiens
  misc_feature (1)...(352): n = a,t,c or g
cccacgcgtccgcccacgcgtccgtattactagattcatgatgttgctatcaaaagttgagaaattgtcagaagaaatcatggagataatgcaaaatttaagtagtatacaggctttggagggcagtagagagcttgaaaatctcattggaatctcctgtgcatcacatttcttaaaaagagaaatgcagaaaaccaaagaactaatgacaaaagtgaataaacaaaaactgtttgaaaagagtacaggacttcctcacaaaggtcagcctcagatgtcacaacctctgtgaagctttccccagttttcntagcntnccgtnntcttgacngtnttganttccttaaggcct

SEQ ID NO: 37480 - DNA, 352 bp, Homo sapiens
gcatggcgtccctgcaggtggtggacagcctcctggagaccagctgcggggccccccattatgcgtgttcagaggtgattaagggggaaaaatatgatggccgccgggcagacatgtggagctgtggagtcatcctcttcgccctgctcgtgggggctctgccctttgatgacgacaacctccgccagctgctggagaaggtgaaacggggcgtcttccacatgccccacttcattcctccagattgccagagcctcctgaggggaatgatcgaagtggagcccgaaaaaaggctcagtctggagcaaattcagaaacatccttggtacctaggcgggaactttatctcctt

SEQ ID NO: 37481 - DNA, 358 bp, Homo sapiens
  misc_feature (1)...(358): n = a,t,c or g
gaaccacaagacctacattgatctgatcttcccagactgtctggcaccacgagtcatgttggaaccagctgctgagaccattcctcagacccaagagatcatcagtgtcacgctgcaggtgcttagtctcttgccgccgtacagacagtccatctttgttctggccgggtccaccgtggaagatgtcctgaagaaggcccatgagttaggaggattcacatatgaaacacaggcctccttgtcaggcccctacttaacctccgtgatggggaaagcgccgaagaaagggagttctgcagntttccganacccnaacacccnntgtgganggtntggntgtnacnacccaggtnggaaa

SEQ ID NO: 37482 - DNA, 368 bp, Homo sapiens
  misc_feature (1)...(368): n = a,t,c or g
ggagaaaggaacaaagggagggaaggagggagggaggaaggaaggaacgaaggaaggagctccatcctctataaaatggtcagatgactcttcttgtttttggtccttcaataaaatcaaacagatgagaatgaatgtcagacgaagccagggatctgtgagaatgggcgctgcctcaacacccgtgggagctacacctgtgagtgtaatgatgggtttaccgccagccccaaccaggacgagtgccttggtgagtacagttggcaccgcactttcctaacctcagcctccacactgggatgctggaaacccagacttcttatttaaattncaggaaatngtcaaaatttgaggaaggttaaaaaatg

SEQ ID NO: 37483 - DNA, 345 bp, Homo sapiens
  misc_feature (1)...(345): n = a,t,c or g
gtgaattccctaatgggcctgttgagattcagaatcttagtgtctgttatcaatccaacaccaggattagtacaaggtcagcatgccaggcccatgcctgacaagcagtgaattgctcaaaccagagaaagtcaaatgtcaagagaaccatcaaagtggaaataagatataatgaatggcttgttggtaagtcaaacattgatgtcacataggctcgtgcaaaatttatggcatggataaacagtggccccaaatccctctcagtctatattttttaaacactttaatttggaaaggcaatatattatatatacagttgnccctcantattgnggaggattggtt

SEQ ID NO: 37484 - DNA, 352 bp, Homo sapiens
ttttacacactgagaaaatgttttcctctcagtagttgaaagtcaatggcaatatctttagggaaaaaaattactcaaggccataactattcactcattcgacatgtacttattgaatatttattattattattaattatttcctcctaccacttcccagtgaatatttattgaaaaatgccaggcgctaaaccaggtactggggatacaatgaggaacaaaacaaataaaattccagatgttaaaatcgagtggtttatattttgatttaatggactagtgaatatggatggacttaagaacattaacctatttctatttgtttttacttttttcttttctctgatgtcgc

SEQ ID NO: 37485 - DNA, 351 bp, Homo sapiens
cactggtcccaccatcaagaatatggatggcacatttaatgtcactagctgcttgaagctgaactcctctcaggaagaccctgggactgtctaccagtgtgtggtacggcatgcgtccttgcatacccccttgaggagcaactttaccctgactgctgctcggcacagtctttctgaaactgagaagacagataatttttccattcattggtggcctatttcattcattggtgttggactggttttattaattgttttgattccttggaaaaagatatgtaacaaatcatcttcagcctatactcctctcaagtgcattctgaaacactggaactcctttgacactcagac

SEQ ID NO: 37486 - DNA, 353 bp, Homo sapiens
ccatcttccaggcagaagctcagtgtatccgcacctacaagggctggactcagtgagattgcactggctcttagctgcagagcatttccatgcaagagagccaggaggtcctgcagagagagggtgttccggacaacatcaaaagcttctataaagtgaatcacatctggaaattccgctatgaccgaccatttcacaaaggcacaaaagataaagagaatgaattcaagagtctctgggtggagagaacgtcattatacttggtgcagagtttgcctggcatctctcgctggtttgaagtggaaaagcgtgaagtggtagaaatgagtcctctggaaaatgcaattgaagtg

SEQ ID NO: 37487 - DNA, 362 bp, Homo sapiens
  misc_feature (1)...(362): n = a,t,c or g
cgactatgccactgcctcactgtcttcctctaaaatagtttatttcaggatagcagaagctatttgctgctttatctctggcaagagctggcatgatatttctctaaagtaacacagccctccatttcgtgggggtagacagttatggtctaagagtatccttagctgtactcactagtacagncatgtgttaattaangatagggataccttnttagaattgcgncattaggcgattntntcnttgngctnnnatntagggncntnnganangaannngagacntnntgncnnccnnttggnnngngggngnnatnntgntgnncgtagnngnnngtgnganncnagtcnctctnntgttc

SEQ ID NO: 37488 - DNA, 378 bp, Homo sapiens
  misc_feature (1)...(378): n = a,t,c or g
cgctccttcccgtcctactacaccagccatgtccaagaggagcagatcgaagtggaggaaaccattgaggctgccaaggctgaggaagccaaggatgagcccccctctgaaggagaagccgaggaggaggagaaggacaaggaagaggccgaggaagaggaggcagctgaagaggaagaagctgccaaggaagagtctgaagaagcaaaagaagaagaagaaggaggtgaaggtgaagaaggagaggaaaccaaagaagctgaagaggaggagaagaaagttgtaggtnctgnnaggancatgcanctannannannantgnccnnatttttctnannntnnngtgaannannnnnnnnanatnnnnnnnnnnntttt

SEQ ID NO: 37489 - DNA, 392 bp, Homo sapiens
  misc_feature (1)...(392): n = a,t,c or g
gagccccactgtgggagcaccgtgttccctggggacccaagagaatcctcccctgctggggtggcagagacaggcacaaggatagactgtctcactgtgcgctgctcccccgcagattccaggacctgctcctctgttttcttcanggtcttgctttattcttnnttatctcttatncanannatttganntgngtnttnntnnntnntaantnnntntttttnttatnnnntntttttttattnnatttgntatanttcnatntgtttctnttttctgnnattttnntnattatatnttnttcgattntatantnnattttatnttctnnttttntnatcttttttnctntttantntnnttttttctnatttatgnttttnnntnttttt

SEQ ID NO: 37490 - DNA, 393 bp, Homo sapiens
  misc_feature (1)...(393): n = a,t,c or g
cctttgggaattcaattctctagtgttaggagcaggcttggcccagggattcttaaatgcatccaggttttggcatcaaagggccccaaacatgacaatttacctatactcatggtctgttcccattcaactttaataggttatgtgtgttttttttttcttaaaagctggnngggnnnnnnnnnnnnnnnnnnnnnnnnnnnnnnnnnnnnnnnnnnnnnnnnnnnnnnnnnnnnnnnnnnnnnctgagtancnggnactacaagngngtaccnccatgccnggctgaacactttttttttttngnaaaaaaanccccntnnacnccntaancnnnnnnctgggggggnaaccnantnttttgggnccnnnantttnngggtnnaangaatt

SEQ ID NO: 37491 - DNA, 386 bp, Homo sapiens
cgcgaggcgcggggagcctgggaccaggagcgagagccgcctacctgcagccgccgcccacggcacggcagccaccatggcgctcctgctgtgcttcgtgctcctgtgcggagtagtggatttcgccagaagtttgagtatcactactcctgaagagatgattgaaaaagccaaaggggaaactgcctatctgccatgcaaatttacgcttagtcccgaagaccagggaccgctggacatcgagtggctgatatcaccagctgataatcagaaggtggatcaagtgattattttatattctggagacaaaatttatgatgactactatccagatctgaaaggccgagtacattttacgagtaatgatctcaaatctggtgatgcat

SEQ ID NO: 37492 - DNA, 291 bp, Homo sapiens
tgctatctttgtgaagttttggtatcatggttaagcttgcatcatagaaagacttgggtaacttttaccttttctatgcttttcaatagtttctgtagcttaggaagtatcagtcccttgacaccttacatgaattcattgttataaccaggtcatagagtcatggagagaacgtttcagctaattcttgggcagctttcttagttctttacaatgttatcagtttattaatactttttacctcttgcatttattttggcgaattacagaggtttttgttttttttttttt

SEQ ID NO: 37493 - DNA, 396 bp, Homo sapiens
  misc_feature (1)...(396): n = a,t,c or g
ggggtcgaagcggcggcggaggtggcggcgacggagatcaaaatggaggaagagagcggcgcgcccggcgtgccgagcggcaacggggctccgggccctaagggtgaaggagaacgacctgctcagaatgagaagaggaaggagaaaaacataaaaagaggaggcaatcgctttgagccatatgccaatccaactaaaagatacagagccttcattacaaacataccttttgatgtgaaatggcagtcacttaaagacctggttaaagaaaaagttggtgaggtaacatacgtggagctcttaatggacgctgaaggaaagtcaaggggatgtgctgttgttgaattcaagatggaagagagcatgaaaaaagctgcggaagtcctaaacnagcat

SEQ ID NO: 37494 - DNA, 398 bp, Homo sapiens
  misc_feature (1)...(398): n = a,t,c or g
ggagaaagagtacggcgtccgaatcatgccctcaagtctggatgatagaagaggcagccgcccccggtccatggtgcggtccttcacgatgccttcctcatcccgccctctgtctgtggcctctgtctcttccctctcatcggacngcaccccttccagaccaggctccgacgggtttgccctggagcctctcctgccatngaaaatgcactnntggtnccannactagctgnacnnggatgaccttgnnnncggnnanganngncattantnnngntnnntnngntctnnttncatnttttnnntctncgtntnganntcgtnnctgnancggcgtttngnntgtnnntgnctgctntttgatttttttnagcatnttnnnttggttgnctntattt

SEQ ID NO: 37495 - DNA, 384 bp, Homo sapiens
  misc_feature (1)...(384): n = a,t,c or g
ctcatctataaggctgaccttcatgcagagattttatttcacctttagttttgggaaaagcgagaaacagatgatctataggatgtgagtgggtggcagagtcaaaaggaacctcacctgttcctaatttctccttttaaatattcatgttgagtgtgcctaatactctcctcgacaagtcatgctgttttatgcagaataatccaggcgtgagagtgttctcttgggaaatgactggggagacacctgaaaggagcaacctccagatgttcttccctgggtgttgatgtcatgacagccatacagtgagtttgttctgaaacatctcttgctaaatgngggtcatgctagacacagcataaactgagggtgtgggtncnggct

SEQ ID NO: 37496 - DNA, 118 bp, Homo sapiens
atacattcattttaataacattgagtactgatggatgttttgaaagtgagcattcatttaaggataaataaaaaataaagtagtaataaagaataaaatactttaaaaaaaaaaaaaa

SEQ ID NO: 37497 - DNA, 377 bp, Homo sapiens
  misc_feature (1)...(377): n = a,t,c or g
ataattttgagcccctgctttccctagttccagttacaagatggggaaatccttcgccaacttcatgtgcaagaaagactttcatcctgcctccaaatccaatatcaaaaaagtatggatggcagaacagaaaatatcatatgataagaagaaacaagaagaattgatgcagcaatatcttaaagaacaagaatcatatgataatagattgcttatgggagatgaacgtgtaaagaatggccttaatttcatgtatggaagccccaccaggagctaaaaaagaaaacaaagagaaagaagaaacagaaggagagaccgaatacnaatttgaatggcagaaaggagccccncgagaaaaatatgcccaagatgncatg

SEQ ID NO: 37498 - DNA, 364 bp, Homo sapiens
  misc_feature (1)...(364): n = a,t,c or g
cagctctgtcatggtattgcctacagtcatgtcttaatggatcccagctctgtcatggtgctatctatgtattaagttgggtcctaagttgggtcttttgtgtcaaagagatcatctcttctagaaatatcaaccttttttgtccagtaaataattgttaggggatctttattggaaaacttttttggagaggctggtatttaagttagatctgattgggctactcatgtcctgtagccagttcatcctcataataagaatgggcaggatctcttgttctctcctgagcgtctttctactctctgancgnctttctgctctccctatnccgnnctcttatccntatcccctccngnctctgccg

SEQ ID NO: 37499 - DNA, 377 bp, Homo sapiens
  misc_feature (1)...(377): n = a,t,c or g
atcaaattgaagacttactttgctataaaacaattctttggaaccccactcagaggatttttataaaatatagtattgaaacaaatctattcacattcatcttatttacaagaacaactctccatgagtggctgacaggactataagcacaatcttttaagatggcaacagctacaagcaagatggactgcccaggtcataacccctctcttcaagggtgctcctgtcctggttcctgggaatgtcaaccttaaccttcaactccgcacgtcagtgtttcccactcttgctttagacaggaccccactaagatatccccaccctcaccaacccataccctgngaccttccccacagggnacaccaanggaggncttt

SEQ ID NO: 37500 - DNA, 383 bp, Homo sapiens
taaatggggtgttcacagtgacttggatacaccaattagaaattaaataagcaaatatatatatatatatataaatatagcaggttacatatatatatttataatgtgtctttttattaaccatttgtacaataaatgtcacttcccatgccgttattttatggttcatttgcagtgacttttaaggcagtactgtttagcactttgatattaaaattttgcttatgttttgctaaattcgaataatgtttgaagatttttaggtctaaaagtctttatattatatactctgtatcaagtcaaaatatctttggccattttgctaagaaacaaactttgaatgtcaaactgatgtcacagtagtttttgttagctttaaatca

SEQ ID NO: 37501 - DNA, 206 bp, Homo sapiens
cggacgcgtgggatatatatgtatatatacacatataataaatccagatatacatgtattatatatctatgaataatacacatacataacacatgtataatagatactcctattaatcagtattatcacttagattactcaagacctggaatatatatttggaacaaaagtaaaatcccttattatgattctaaaaaaaaaaaaaa

SEQ ID NO: 37502 - DNA, 295 bp, Homo sapiens
  misc_feature (1)...(295): n = a,t,c or g
ctagttctagatcgcgagcggccgctctagaggatccctcgaggggcccaagcttacgcgtgcatgcgacgtcatagctctcnnnnnnnnnnnnnnnnnnnnnnnnnnnnnnnnnnnnnnnnnnnnnnnnnnnnnnnnnnnnnnnngatctgctagcttnnnnnnnnnnnnnnnnnnnnnnnnnnnnnnnngtgtgacataattggacnnnnnnnnnnnnnnnnnnnnnnnnnnnnnnnnnnnnnnnnnnnnnnnnnnnnnnnnnnnnnnnnnnnnactngctaanccttgctgg

SEQ ID NO: 37503 - DNA, 377 bp, Homo sapiens
caccggttggcggtagttgacccgctgtttggaatgcagccaattcgagtgaagaaatatccgtatttgtggctctgttacaatggtgaaatctacaaccataagaagatgcaacagcattttgaatttgaataccagaccaaagtggatggtgagataatccttcatctttatgacaaaggaggaattgagcaaacaatttgtatgttggatggtgtgtttgcatttgttttactggatactgccaataagaaagtgttcctgggtagagatacatatggagtcagacctttgtttaaagcaatgacagaagatggatttttggctgtatgttcagaagctaaaggtcttgttacattgaagcactccgcgactcc

SEQ ID NO: 37504 - DNA, 398 bp, Homo sapiens
ttcaaagcttgacagtgaaaaggaaagttccggaaaaccaggtgaatctggaatgccagaagaacataatgctgcttcagccaaatctaaagttcaagacctctccttgaaggcaaatcagccaacagacaaggccgcattgcatcccagccccaaaactttaacctgtgaagaaaatcttctaaaccttcatgaaaaacgacatagaaatatgcataggtagaatgtaccccctccccaagcatgaaaatcatctcactgaaagatacgcctggctgcaactcaggggtggcctcatcctcccgccctgggctggcctctggttccatcacgtttgtcactgccgtttattacattgacttctcccaagatgaatcttccttccaaatgtgttttct

SEQ ID NO: 37505 - DNA, 395 bp, Homo sapiens
  misc_feature (1)...(395): n = a,t,c or g
agattaaggtctgtcagtgggctgagagtttgaggattgctttttaaaaaagacagcaaacttttttttttatttaaaaaaagatatattaacagttttagaagtcagtagaataaaatcttaaagcactcataatatggcatccttcaatttctgtataaaagcagatctttttaaaaagatacttctgtaacttaagaaacctggcatttaaatcatattttgtctttaggtaaaagctttggtttgtgttcgtgttttgtttgtttcacttgtttccctcccagccccaaacctttggttctctccgtgaaacttacctttccctttttctttctcttttttttttnggaaaataatggttncaanaaatnnccttggctttaaaaaaaaag

SEQ ID NO: 37506 - DNA, 377 bp, Homo sapiens
  misc_feature (1)...(377): n = a,t,c or g
tgagagccgtagtatctggataccggagagtctgcgaacttgagagaagggccgtgttatgtctncctggganatatttcctnncantntttgntgtcctncgnttntntgncttnctgctctnatnacttgntatncttcnnntgctatntcntngctttnctttttaancttntncttctgtnnntttnctntcntgcnntngnctttttnttttgtntttnnttaanagctttgntttttgtcntgttttgtttgttttnttntttccntcncagccccnnacctttttttctttncgtgaatcttncctttcnctttttctttctntttttttttttngtttntttttntttnntntnntttnntttnncttt

SEQ ID NO: 37507 - DNA, 396 bp, Homo sapiens
aagcggcggtgcagaacccagggaccatgggcgcctccaggctctataccctggtgctggtcctgcagcctcagcgagttctcctgggcatgaaaaagcgaggcttcggggccggccggtggaatggctttgggggcaaagtgcaagaaggagagaccatcgaggatggggctaggagggagctgcaggaggagagcggtctgacagtggacgccctgcacaaggtgggccagatcgtgtttgagttcgtgggcgagcctgagctcatggacgtgcatgtcttctgcacagacagcatccaggggacccccgtggagagcgacgaaatgcgcccatgctggttccagctggatcagatccccttcaaggacatgtggcccgacgacagctactggg

SEQ ID NO: 37508 - DNA, 322 bp, Homo sapiens
aaactgaaaaagaggcatggctcatttctctcctgctttatgtttttgaggttgacttgtaagataaaaataaaaataagaaaaaaatatatctaggcaaatgacatgaaaaaaaagttgaaatatactactggtgttcatttttgtcctgcagtgttgctttctcaaagaaataaacatgtggctggaagtgtttaatggctgcgttttgatcgtctacaacaaggttacagtgccctctggtggcagtcatcaaaatcgcttctagacttgtttttatttttaaataaaagatctaattatattggaaaaaaaaaaaaaa

SEQ ID NO: 37509 - DNA, 388 bp, Homo sapiens
  misc_feature (1)...(388): n = a,t,c or g
ggaagacctggaggagcatgggccagggcagacagtctctgaggaagccacagaagttcacatgatggagggggacccagacacactggccgaatttctgatcagggatgtacttcaggagctgtccagttacaacggcgaggaggaggacccagaggaggtgaagacatccttgggagttccacaacgtggtgacctggaagacctggaggagcatgggccagggcagacagtctctgaggaagccacaggggttcacatgatgcaggtggacccagccacgctggcaaagagtgacctggaagacctggaggagcatgtgccanagcagacagtctctgaggaagccacaggggttcacatgatgcaggtggacccagccacactg

SEQ ID NO: 37510 - DNA, 384 bp, Homo sapiens
  misc_feature (1)...(384): n = a,t,c or g
aaaagaggcaatgtaggaaggaagggaaaagatagtcttttcaatagaaggaactggatcaaagagatattcaatggaaaaaaagaacgaaattttacctcttcctcacaacataagtaagttaattattacagacgaattatagacctaaatgtgaaaggcaagacaacatcgtttccagatgataatataggagatgtcctcatgactttgcattagtggaaatgttataaacctacacccagatgcctgtgctgatactgacatgactttaatagtgtgggaatttgcccagtctgcactcaatgcctgtctcatccaaccatctttaatangtcatcaccatgtggctaccctttaaggagcaactagaaccactaagag

SEQ ID NO: 37511 - DNA, 388 bp, Homo sapiens
gcgttttcgccttagactttcttgggtgcaggcccacaccacctcagcagcctgcccggcagtcctcttttcccaggttttggcgtttagacaacccacctgagtcgtcagccttgtcccacacagcaaggtacaagggaccggacgtctgcctcctcagcagcgcagcgcacaagcttcctgtcatcccggcgcccacgatcagcacctgcgccatggcgagagggagcagcgatccgcgctgagtctctgcggcggggccgttcggcccgggctttctggaaaggcggccgaaccggcgctagcgctctttggttccgtgctccctgggccgacctgggccctgagctttcctccggccggcctgcagggggcggaaaggaggcgg

SEQ ID NO: 37512 - DNA, 381 bp, Homo sapiens
  misc_feature (1)...(381): n = a,t,c or g
cggatctccaggccctggggagggagcctctggacggacagtggggacattgtgggtttggggctcagagtcgagggacggggtgtagcctcggcatttgcttgagtttctccactcttggctctgactgatccctgcttgtgcaggccagtggaggctcttgggcttggagaacacgtgtgtctctgtgtatgtgtctgtgtgtctgcgtccgtgtctgtcagactgtctgcctgtcctggggtggctaggagctgggtctgaccgttgtatggtttgacctgatatactccattctcccctgcgcctcctcctctgtgttctctccatgtccccctcccaactccccatgcccagntcttacccatcatgcnccctgta

SEQ ID NO: 37513 - DNA, 378 bp, Homo sapiens
  misc_feature (1)...(378): n = a,t,c or g
agaattcataaaaataaaaactgcgaggctgtttaatacatttcaactaaaagttgccagcatcattaatatgtaaaccactagaaataagattttgttaattttttgtttgtttgtttaaacagtcttgctnnnnnnnnnnnnnnnnnnnnnnnnnnnnnnnnnnnnnnnnnnnnnnnnnnnnnnnnnttcagagtttatttccttcccaaatacttcatagatgttggtttgtaggaataacttaaaagtctcactcgctttctgtcttttctagtaatttttatcgtggattctgattgcctagatctgctaattcattgagggttacaaaattgtgatactcgaattctttattcctccttcctttattacctg

SEQ ID NO: 37514 - DNA, 366 bp, Homo sapiens
  misc_feature (1)...(366): n = a,t,c or g
aacagaattcaccaggagggattagcaaagaaggggcggggtcaaaggtgacttgagagccacataggagagcttttggagagaatcataaacctaagcaaaggaacccgagagagagctgtaagaggcactgccctatttggccagggtggggcattgggatggtgaggacagagcagggatggggtccttcttgggcccaaagttcatggaacttactgaagggttgagtgaagggaaggacctacccttcttgattcanattccccctntgtatgagggttgataatcntaacatgttttcaggatccntagaccttntcaactgctttgacctggttggtcaaattacngccttgaanactt

SEQ ID NO: 37515 - DNA, 352 bp, Homo sapiens
  misc_feature (1)...(352): n = a,t,c or g
ctcatagaagccgccgagccgggaggtccacacagcagcagaaatgggctctgccatcctctgaatcacagcaggaccctggcgggcaagagaccaaaggccccccgtggggaggaagcccatctgccacctgtctcggatttgactgttgagtttgataaactgaatttgcaaaatataggacgtagcgtttccaagacaccagatgaaagtacaaaaactaaagatcagatcctgacttcaagaatcaatgcagtagaaagagacttgttagagccttctcccgcagaccaactcgggaatggccncaggaggaccgaaagtgaaatgtcagccaggntcgttaaattgt

SEQ ID NO: 37516 - DNA, 358 bp, Homo sapiens
  misc_feature (1)...(358): n = a,t,c or g
nnnnnnnnnnnnnnnnnnnnnnnnnnnnnnnnnnnnnnnnnnnnnnnnnnnnnnnnnnnnnnnnnnnnnnnnnnnnnnnnnnnnnnnnnnnnnnnnnnnnnnnnnnnnnnnnnnnnnnnnnnnnnnnnnnnnnnnnnnnnnnnnnnnnnnnnnnnnnnnnnnnnnnnnnnnnnnnnnnnnnnnnnnnnnnnnnnnnnnnnnnnnnnnnnnnnnnnnnnnnnnnnnnnnnnnnnnnnnnnnnnnnnnnnnnnnnnnnnnnnnnnnnnnnnnnnnnnnnnnntgatttatgaattacttttcaggagaatgntntnccantantattttttgccnanatnccntngaacttttnatattc

SEQ ID NO: 37517 - DNA, 371 bp, Homo sapiens
  misc_feature (1)...(371): n = a,t,c or g
caaggagtataattaaaatgtatccagccttatgctgatgagagctataacttaatgtttgaagtacccttggacatatcattatgcaactcaggatttaaacttgtcaactttggatgtgattatcatcaataccgagataaattttccaaacacctgactctgcgagtttttaccaaccatacagggaagtttgngtgtatgttacagcccnaantgtgcctcttgggaaacaaatcaccatattcngtggtgttacattcataaacggacacagcaagacctttacnacttnttnttnagaattgttggctnacacntgacaaagggcattactttttccttnaaccttncnntttatgggggcttgg

SEQ ID NO: 37518 - DNA, 355 bp, Homo sapiens
  misc_feature (1)...(355): n = a,t,c or g
atatttgcaaaatttcctctgtaaaaaagagaaacattgattagccaaatggctgttaatttctccaattttggtcatgcatgtatgcaagttgttttagtcatttattaagtcataaatgttgaaaatgaaaaataataatgtctcaattttattttcatttcttttgttaaaataagctattaaaacaattccttacaggatgaatcacgtggaagttctattcttgaatattctatagaagaataatgagatgtgaacccagtgtaattatgcatgtgatagttgcaaagtttttgccatagatagtatgatnattccttcatttggnncttgaaataggtattatttagga

SEQ ID NO: 37519 - DNA, 347 bp, Homo sapiens
cacagaaactagctctgtctcctccccagttttattttcactctagttctacctaccataacttgtctctcctaccagaattttaaaccttgtactgtggcttattttcactccacaaggaagcttgacaggacaaaggatggcaattagcctggatccttgcctgctgagaggacaggatacagatttaggatttccttcccagagacaaaatattctgcaacaggtttagagatagctgaattcatatatacatgaacataaagacagacgttggtgcatacatacatgtatatatatagttgagattcacctatatcatcttgtaagtcatatattaatgcatt

SEQ ID NO: 37520 - DNA, 358 bp, Homo sapiens
  misc_feature (1)...(358): n = a,t,c or g
ggccaagttgttcctactaaccagattcaaagtggaatgaatactggacacattggcacaactcagcacatgatacaacggcagactttacagagtacatcaactcagagtcaacaaaatgtactgagtgggcacagtcagcaaacatctctacccagtcagacacagagcactcttacaggcccactgtatacactatggtgatttttaagcctgcagccggaagcatgggcccaaattccttttagtatgcaacaaaacagcacccaaagtgttgaggaacttacattactcaggacaggcgnntaagnatttttttcanggcaanaacttggngaccaaattaggggctngctct

SEQ ID NO: 37521 - DNA, 394 bp, Homo sapiens
ctcattcaggtgcccatgtctgaaaagggcaagatcaccagggggcgcctggggtctctctccctaaagaaagagggcgagcgacagtgcttcctgttttctaagcatctgattatctgtaccagaggctctggagggaagcttcacttgaccaagaatggagtcatatccctcattgactgcactttattggaggagccagaaagcacggaggaggaagccaaaggatccggccaagacatagatcacttggattttaaaatcggggtggagccaaaggattccccgccctttacagtcatcctagtggcctcgtccagacaggagaaggcagcgtggaccagtgacatcagccagtgtgtggataacatccgatgcaatgggctcatgatga

SEQ ID NO: 37522 - DNA, 84 bp, Homo sapiens
aatttatattctatatttattgatttcataaaaaaataatttaaaacttgatttatattacaagaacaccaaaaaaaaaaaaaa

SEQ ID NO: 37523 - DNA, 375 bp, Homo sapiens
agcatgagtaaaatgaaggaaggacagcagcgtctctaagacagtgaagatgtggtttatgcttcgcagttcctgggattccttgggagggtccagggacacagtggatgggtctccttggcccgcctcctcctttgtcacacccaaggatcttttcgccacaactgtgggtgcacatgtccccttccactcccatgcaaacaagtgcttagcagaagcttcagcttcagatgagagtctgaacaaaaaatggtgcttctcctgtgcagtgtggttctaggtcaaaccaagacaagttgaatggaaagaaacgggcgcagtatttcagctcagcacaattcagctgtgagcacaggtcagctgtggaatcttggt

SEQ ID NO: 37524 - DNA, 386 bp, Homo sapiens
gtggaagctccgtgatctcggagggcctgagtcgtggagttgggggagcttttaaagttaactttgttgagcaccgcgttgtaggcgggcgcggtggcgcctgtgggccccgctatcctggaggtcgcggttgcaactgcaccgcagcccgggcaagagcgagaccctgtctctaaataaatcacacgcgcgcagtcatgaaagtaagacggacgccagaatctcacatgcttttaagttctttgtggaagtggcgctctcagtgttcagaaaagtgtaagttgcgcgggacagaattcacaccagtggggacgatccgttcgccagatcagcgccgtgggccctcctgagtagtgggagccgcatttatcttctaagagacctcg

SEQ ID NO: 37525 - DNA, 388 bp, Homo sapiens
gtttagactttaacataagctatttttctaactacaaaggtttaaatgaacaagagaagcattctcattggaaatttagcattgtagtgctttgagagagaaaggactcctgaaaaaaaacctgagatttattaaagaaaaaaatgtattttatgttatatataaatatattattacttgtaaatataaagacgttttataagcatcattatttatgtattgtgcaatgtgtataaacaagaaaaataaagaaaagatgcactttgctttaatataaatgcaaataacaaatgccaaattaaaaaagataaacacaagattggtgtttttttctatgggtgttatcacctagctgaatgtttttctaaaggagtttatgttccattaa

SEQ ID NO: 37526 - DNA, 374 bp, Homo sapiens
aattttgtcagccataaaacttacctttttcacatacttctaactctaacaatgtgagaaatgtagatcattgcaattatacccacaaggcagatggctacatgcagaatggatagcagaatctagctacttacgctagccacatggtagacgttttttcctttgtttttgcaaaattgcaatataagttgcatatcgttagagtgaaagatgtaaagaacccatagaagcagtgatgaaggacatttatattttcaacttacaaaagaccttaaaattgcctatgtggagcagaactgaggagggcaaacatcgtaaaaattttgttctatttgatttggcacatatactcacagtactttgttaacttctta

SEQ ID NO: 37527 - DNA, 381 bp, Homo sapiens
  misc_feature (1)...(381): n = a,t,c or g
cagggacccacctagtaagaaaaggaaaatggaaaactgtgcacaaaaccagaagttatccaacaagaccatagaatcattgaacaaccaaccaatccctagaccagacactcagagaactagaagcttcagaaataaagctagaaccatcttttgaagactcttgtggctctaacactgacaagcagactcttacaacaccacccgagatatcctcagaagttgcttttaccaaagcccaaagtggctttggctaaactacccgtgaggcagagtttctgccatgcctgtctttgagcctacaggacgactcctcagcccancctgtggngttaggtgttgatcanggctnttgccacaggggctgngcacttaatgccc

SEQ ID NO: 37528 - DNA, 387 bp, Homo sapiens
ctggaatttgccattcagcccaatacaactggcaaacaactttttgaccaggtggtgaaaacagttggtttgcgtgaggtctggttttttgggctgcagtatgtagacagcaaaggttattctacatggcttaaactaaataaaaaggtaacacagcaggatgttaaaaaagagaatcctttacagttcaagtttagagctaaattctttcctgaagatgtttctgaggaattaattcaagaaataacccagagactcttcttcttgcaagttaaagaagccatcttaaatgagatatattgcccgccagaaactgcagttcttttggcttcctatgctgtccaagccaagtatggagattacaataaagagattcataagccaggg

SEQ ID NO: 37529 - DNA, 385 bp, Homo sapiens
  misc_feature (1)...(385): n = a,t,c or g
gttaaaaaataagcaaatagaaaataaatttttataatagaaaagtcaaagagttatcatagccattataaacactctatcttgaaaaaatgtcaagctacagaatcacttcaatgaatttgataaactagggaatcagaaaaggttttgaacatgacaaagattatttttcattgttatgctacatagttttatacacattgcttatgataaaatgtacccttttttatttggcttgactggtttatttattaccatggttccttttttgccctttaatttaaaattaatacaccaaagatttttttaaaggattaatcatatcttatattgctttctccatttagaaatcttcagaggactcctttncctttgaatgataatc

SEQ ID NO: 37530 - DNA, 387 bp, Homo sapiens
gaagaaaacctctaaatttcaaaattatgaagaattacagaattactcatttaaggtactttaaaagaagtttgtacattgtcaaagtaaattttaattcaaatcatgtctgtaaaacttgacgtattttgtgtatgcatgttttcattttgcaaatatttaatatatagacctatgatgtacaggtacgacatgtataggttacctagatgttatgagaaattttagtttattgtgagtactcaagttgcttagagagccaccagggtgatttgctgctggctttctatcatttttatgttttaatgcaaaggaaattttaaaatgttctggaagtgtttttgattaagcaatgcagcctagaagcaatggtctgttcaatcattc

SEQ ID NO: 37531 - DNA, 382 bp, Homo sapiens
  misc_feature (1)...(382): n = a,t,c or g
atccgagctaatcagtcaatacaagtcacatgggtttatggatatgctccatgacaagtggtacagggtggttccctgtggcaagagaagttttgctgtcacggagactttgcaaatgggcatcaaacacttctctgggctctttgtgctgctgtgcattggatttggtctgtccattttgaccaccattggtgagcacatagtatacaggctgctgctaccacgaatcaaaaacaaatccaagctgcaatactggctccacaccagccagagattacacagagcaataaatacatcatttatagaggaaaagcancagcatttcaagaccaaacgtgtggaaaagaggtctaatgtgggaccccgtcagcttaccgtatgg

SEQ ID NO: 37532 - DNA, 375 bp, Homo sapiens
  misc_feature (1)...(375): n = a,t,c or g
ctgctctcagtgatacaagaaacaaggcaaaggaaaaaagatgggaccttagaagcaatgccctagagtaaaaagcatacattggcactcagtaaccacagagatagaaacaactgactcagcctctccagaaataacagtagatgtagaatttgttcttaaatatatgtttcgttgaaatgaaatgcagtcatcaaatgcgaggaggggtgctagacctgataagtctaggaagaccagtcagcttgatagccagttgttaaactaaaggaccacaaaggtgtgtttagtagttctgatatgggattactatcagtttatacatatgtatagattttcttttaattataaacagccagatangccagcaattaa

SEQ ID NO: 37533 - DNA, 372 bp, Homo sapiens
agaacagctctgacggccggtatgtgaaggagaactgcaaacctctgaagagttacatgctccaagactccctggagcacgtgcagctgtttgacctgatgaggaggatgttagaatttgaccctgcccagcgcatcacactggccgaggccctgctgcaccccttctttgctggcctgacccctgaggagcggtccttccacaccagccgcaacccaagcagatgacaggcacaggccaccgcatgaggagatggagggcgggactgggccgcccagccccttgactccagcctcgaccgccaggccccaggccagagccacccaatgaacagtgcaatgtgaaggaaggcaggagcctgcaggggagcag

SEQ ID NO: 37534 - DNA, 371 bp, Homo sapiens
actgtctaggctacaacaggattctaggtggaggttgtgcatgttgtcctttttatctgatctgtgattaaagcagtaatattttaagatggactgggaaaaacatcaactcctgaagttagaaataagaatggtttgtaaaatccacagctatatcctgatgctggatggtattaatcttgtgtagtcttcaactggttagtgtgaaatagttctgccacctctgacgcaccactgccaatgctgtacgtactgcatttgccccttgagccaggtggatgtttaccgtgtgttatataacttcctggctccttcactgaacatgcctagtccaacattttttcccagtgagtcacatcctgggatccagg

SEQ ID NO: 37535 - DNA, 397 bp, Homo sapiens
gagggaatgatatgcatttgacttgttaaacagcctattcctgaactataacacctgccaccactataaaatgtcttcaaggcttcagtctcatatttagtattgaatacttacattctctaataagaaaaccaccccttagattgaagtaaactgcagtcctggagcaatcacagatgagttatctaagaatacagctttctgaccttcagctcacgcttcacagtgatcgatgattcaggtgcagaggaagtacaaactaaggtgctaaatctgcgatcatcgtcatttgctgtgaactgaaattagaactattcatgctacccagccattacccagctaaataatcttactctagatacctaaaacatatgatcactgcagagataaactaaag

SEQ ID NO: 37536 - DNA, 387 bp, Homo sapiens
agcagctgctgcagcagggcccatggcggacacccagtacatcctgcccaatgacatcggcgtgtctagcctggactgccgtgaggccttccgcctgctgtcacccacagagcgcctctatgcctaccacctgtcccgtgccgcctggtacggaggcctggctgtgctgcttcagacctcccctgaggccccctacatctatgctctgctcagccgcctcttccgcgcccaggaccccgaccagctgcgccaacatgccctggctgaaggccttaccgaggaggagtatcaggcgttcctggtctatgccgcgggtgtttactccaacatgggcaactacaagtcctttggtgacaccaagtttggcccaacttgcccaaggaaaag

SEQ ID NO: 37537 - DNA, 382 bp, Homo sapiens
  misc_feature (1)...(382): n = a,t,c or g
cggaggttcgacctgctgtggccgccaagcccgggcgcgcaagaagaaactcagcaagtcagacatcatgctggtgcagagctccaatgtacccagtaacccggcccaggtgccgatagaggagtccgggggctttggctcccaccaccacaaccagaattactgctatcaggtatgcctgacccctgagtccgccaagaccgacctgatgtttcttaagccctgcagcccttcgcggagtacggacactgagcacaacccctgcggggccatcgtcaccggttacaccgaccagcagcctgatatcatctccaacggaagcattttgnccaacgagactaaacaccagcgagcagagctcagctatctaattgacaaacct

SEQ ID NO: 37538 - DNA, 389 bp, Homo sapiens
  misc_feature (1)...(389): n = a,t,c or g
gtaaggcgctgcagaatgagggagatatgtaaggcgctgcagaatgaggtcaaggtatgtaccgacctcttatcatagagtccaaaaatggcaaatactcctcatcacaccaagtttccctactgagggggagagccagtttgtgctgcaactaagaccttcgttacgaggagcactcttgagttgctggatcactacgaatggaactgttttgtcttcctgtatgacacagacaggggatactcgatactccaagctattatggaaaaagcaggacaaaatggttggcatgtcagcgctatatgtgtggaaaattttaatgatgtcagctataggcaacttctagaagaacttgacagaagacnagagaagaagtttgnaatagactg

SEQ ID NO: 37539 - DNA, 384 bp, Homo sapiens
gacattttcatgaaaatgtcaacatggttcttctgaatctatcacagtgaaaagttctaacttgtttttgagaagtcagtacagcaggggaaaacatatgtgatgcaattaacatctgcataatttcacttaaaattattatgcaaaaatgaatgttttttcaaaaaatgtgaaatgtattttattttctttatttgtattcttgtttcattttttaatatgttgtgaacatgctacagatttgatagtacttttgactaaatgttgggagtggtcgtattaacttcttgcccaaagaagtaagcatattggtgttttctcaattagtcactgagaaaattaacactttaggcagtggctatttaaagtaggaattgcatctta

SEQ ID NO: 37540 - DNA, 392 bp, Homo sapiens
  misc_feature (1)...(392): n = a,t,c or g
tgaaaacttgcttagctattctgtgtggaagatgggagcagtaaatagatctcatgccaaaatgggataaagaccccagcctcacatagctttggtaagatggatagaagccagtgaagaagggtagggacccagaacaagaccaaatggggctttggggaaggcactttatggggtaaaagctttggagccacccagtctagttttaaaaatagtcccatctgtttctggtctctgtctgtatgtgctattcccaggttgcctcagtaaccagggctcctagggtcatttagcagggcaggcagtaaggagagtgtatttgctgaaatgcngatgggatgttacatagttgacagatccttattcaaacngacangacaggnggagtttgg

SEQ ID NO: 37541 - DNA, 385 bp, Homo sapiens
aggaaatgaagggtattgccgctgttactgaaatacctttaggagagattatttcattcaatattttttatgaattatttaccatttgtacttcaatagtagcagaagacaaaaaaggtcatctaatacatgggagaaacatggattttggagtatttcttgggtggaacataaataatgatacctgggtcataactgagcaactaaaacctttaacagtgaatttggatttccaaagaaacaacaaaactgtcttcaaggcttcaagctttgctggctatgtgggcatgttaacaggattcaaaccaggactgttcagtcttacactgaatgaacgtttcagtataaatggtggttatctgggtattctagaatggattctggg

SEQ ID NO: 37542 - DNA, 386 bp, Homo sapiens
  misc_feature (1)...(386): n = a,t,c or g
gttggcctgtggaatggctcatgtttgtgcgtgtgtgtgtgtatatttatgggcatgggtgcatgcttggtgtgtatttgtacatgtctgtattgctgtgtccctgtaaatacatgcttgtgtatggatgggaagagannnnnnnnnnnnnnnnnnnnnnnnnnnnnnnnnnnnnnnnnnnnnnnnnnnnnnnnnnnnnnnnnnnnnnnnnnnnnnnnnnnnnnnnnnnnnnnnnnnnnnnnnnnnnnnnnnnnnnnnnnnnnnnnnnnnnnnnnnnnnnnnnnnnnnnnnnnnnnnnnnnnnnnnnnnnnnnnnnnnnnnnnnnnnnnnnnnnanaanannaantnnggncnatcccnttttaaaaatccctanngggccctacc

SEQ ID NO: 37543 - DNA, 403 bp, Homo sapiens
  misc_feature (1)...(403): n = a,t,c or g
gtgaaacattatttttctgaggaggtcatttatatgattataggcatttgttactatgtttttcatttacggtaaatgctaaggatataaaaattctacgaatatcgttggggcaagttttctttgttatgacattataacaattgttgtattagaaattgaaattatagtgataaagttagatttaaaattgggcattatagctatgaaaggtaaaaagtaataagacagggtccctggccttaagtaacttgtgacctanagggtgaaacagtcatagataagtaactacagggtgtgtctatgtagtttggaaacagaggcaaatatataatgggctaagggcatcattattaaaaatgtatctatacttccagatgttctggacacctagaatgataca

SEQ ID NO: 37544 - DNA, 414 bp, Homo sapiens
caggacatggggcatagaaactgaggagtagctgagaggaagatgaagagaagctgagaagaagctgaggatcctcacaggagcagacagagaaatgtgaagggtggggttttatgtgtgggaaagggacccgaagcccaggctgaagagtttaactttgggcccagaaactcaaccatcaatggaaacagggcagtgacaagtggagggggtgtctggaagctgagcaggcccgacagagagatgaagccatcagaaggacttgagggggctcctggggaggtcggggggaggtggagcaggaagagttttaggggcaaaggacagaaccccttgtaggactggaggcaagattgaatgtgggagaaaatcggagagaagcgataggagttagaacatctggatgtgtctgca

SEQ ID NO: 37545 - DNA, 414 bp, Homo sapiens
  misc_feature (1)...(414): n = a,t,c or g
agnnnnnnnnnnnnnnnnnnnnnnnnnnnnnnnnnnnnnnnnnnnnnnnnnnnnnnnnnnnnnnnnnnnccaaattgttccatgaggcctaagaatgaaaacagttcaagtccaacacaggttgttaaaccagcttcatgacctgacttctgacctattctgacttgaggtgaatgaagtgagtctggaaaagctccttgtcagcagcgtttttgtgtgttatgaatctggacttgaaagaattgcacagtggtgattcacatgattttgcccactgatgaatgacactaatacacttgtttacaggttaaaaaatgtcaggtcctagtttattcgtcattcccagaagccatgtggtaagaaggaattcttcattgtgtgctgtgctggaagcaaattgttgcccttgtgctt

SEQ ID NO: 37546 - DNA, 399 bp, Homo sapiens
gctcatcataacttatgttccatattttttaacccacatcactcttgaaatcgactgttcagttgatgtgcaggcttttacaggataagcgctaccagtgtgtctattccttggcagaaatctttaaggtcctggcttcattttatgtcattttggttatactttatggtctgacctcttcctacagcctgtggtggatgctgaggagttccctgaagcaatattcctttgaggcgttaagagaaaaaagcaactacagtgacatccctgatgtcaagaatgactttgccttcatccttcatctggctgatcagtatgatcctctttattccaaacgcttctccatattcctatcagaggtcagtgagaacaaactgaaacagatcaacctcaataatg

SEQ ID NO: 37547 - DNA, 413 bp, Homo sapiens
atttttcttttgaagaatcaaacttgtccatctctcccctcccaagtgactttcctcactcatgtaatcattttcttcataaatgcccttttactatcccacagaaaaagtaaagatttaaaaaatcatttttaaggtacatccaagatttcatagcaatattttatttgtgttcacagtgcaagataaatctgactttctcaatatttttggtcttcatatggcatctgaaacagttgttcacattcacacatttatgtttcaccatatgcatactgtgtacaagctctgttgttctaaaatattttattggttttcctttatatctcaacttttgatgggtgtccttgaagaactttcatgaaaaaaatgtaaatgtgaatgattcattcattttgaacatatgtaactat

SEQ ID NO: 37548 - DNA, 401 bp, Homo sapiens
  misc_feature (1)...(401): n = a,t,c or g
caaaaaaagaattcaaagcaagatgccaagacaacagataatgactgctcaatggttgctctaggaaagcagcattctgaagaggcttctaaagacaatagcgacggagtgaatgaaaaggtgagctgtgtgtgataggctagttgccgtggcaactgtggaaggcacactgagcaagttttcacctatctggaaaaaaaaaaaantntgaaatngaaaaaanttanncaagtntagggnacccancnatcntatctntanncctnatttnattcngncantgaaaancggggttnaangntncaaaangngnnnttgnaaaangttntgacagcntttcagntggnanctttcngatnctnatttatancnttgnaaangatatgcctttaaaaggattc

SEQ ID NO: 37549 - DNA, 402 bp, Homo sapiens
  misc_feature (1)...(402): n = a,t,c or g
caccaggtgagccttgagaagcgctggaattcatagagtcatagctcagcaaaggaaaagaggagtccacagagtccagccagtgatgcccgtatagctgagaagggtacagaaaggtgagggcagtgtccagatgactgtccctcaccatcctggtcagccccctaggtgtacaggtgcacaggtaggaagtcctgagcttactctgtgtgggaaagccaaggttttgttttctgtnnnnnnnnnnnnnnnnnnnnnnnnnnnnnnnnnnnnnnnnnnnnnnnnnnnnnnnnnnnnnnnnnnnnnnnnnnnnnnnnnnnnnnnnnnnnnnnnnnnnnnnnnnnnnnnnnnnnnnnnnnnnnnnnnnnnnnnnnnnnnnnncaggcacatgctgccacacct

SEQ ID NO: 37550 - DNA, 414 bp, Homo sapiens
gacccagcaatcatcttttaacaagccctccctcacgtgatccttacacacactaaaaatttgagaattaccaatgtagaagagcaagcatagattctgcatcagaccaacttgggttccaataccagttttttcatcaatagctgtgtgaccttgagcaagttaacctcccccagtctttttcttgaatctctaaaaataaggcaatggtatctgtctcacagaagcttgagaaagaaatgagataaaatatagtaaagtgcctggcatatactaggtgctcaaaaaatgctgagttccttgtttctcgtccagaaacatggcattaaaacaatcaggagaacaatttcccaagatttagattttgcacaatgtgcaacgtctccaacaacatagctgttgccaagatgaaag

SEQ ID NO: 37551 - DNA, 428 bp, Homo sapiens
  misc_feature (1)...(428): n = a,t,c or g
agttgatgtgacaagggaagggagcaccagatgacacataaatctgtctgattctatgcctgtatttccaacaaacttactgtcagagaatatgacctaaatccattttctaaactgttttcatgtgttgcaaattattctagtcaactgctgttttatgtcatactctgtgtaatctctgattaaatttaatatactgcatatcctggtgtctagtttgcatacttcctggattttctttctatgtagaactgttcatttccaccaagggtatctgctgcctctgaaaatatttttttctagctataacaactctattttttactacataattaaattttaatgtaaaattcatagcatcctgattattgaatggtatatcatcaatacttttgngnattctgnggatnctatatttcatattgaga

SEQ ID NO: 37552 - DNA, 375 bp, Homo sapiens
caaccatcccatgtctgttgtcagctcaaccaagagcaggctggccctgcagcatggggacggccatgttgtggattacctgtcccagccggtcatcgactacatcctcaaaagccagctgtacatcaatgcctccggctagcagcccctcgtcctccggcaacacaatggcccctccatctttgtcagccccctgtttctctcctgcctctctgtttctccatctcctcgtcttgactgttttccctacttgctgacttaaccccccatagtgtgggggacctgcagagaaccatggcattccctattccacagtcatctttggacagactttcctctagtctccgggttgggggtgggtgagggaatgggggt

SEQ ID NO: 37553 - DNA, 409 bp, Homo sapiens
gagattattaatattgaatgcaatagttattggatatagctggtaagttctctgccatgcatacttacaataatccttctacctctcacttttaacatgggctatgatacttcaatataaatagaggaaataattatttaccagatatcccaggaagcattcttatggaactattataacagtgcactccccaccccctgggaaatctcaaaagccaagttcttcagtgtattctatggtgtatgaatctgcatttgtttttccttttctatcattagcttttcctaaaggcaaaatattataactttataagaatagtccttctcctgcctatttaatatttcaatgttaatataattgtattggtttttaaaaataattaaaatggcaacactttgcgatccaatct

SEQ ID NO: 37554 - DNA, 406 bp, Homo sapiens
gtgcccctcacgtggaagctctcggccggcgacaagctgaccgagttcctgcaagacccggatcgctactacgaccccaacggcttcaatgcccactacctccgaaacctgctcttcttcgacctgggctatgacaacagcctggaccccagcagcccgcaggtgcaggagcacatcctggaggtggagcgtcgcttccacctggtgctccttcaagagtacttcgacgagtcgctggtgctgctgaaggacctgctgtgctgggagctggaggacgtgctctacttcaagctcaacgcccgccgcgactcgcccgtgccgcggctctcgggggagctgtatgggcgcgccaccgcctggaacatgctggactcccacctctaccgccacttcaacgccaagcttc

SEQ ID NO: 37555 - DNA, 404 bp, Homo sapiens
ggaggaagagggtatccctttaggatggaactaggtcctggacaccccctctcaagtgcggggaggctgatactacaactcccagcatgactcgcggtggctgtccggtttctgcgcggctgttcgcgcaaaggcctcatgggagttggagttctttgttgtgcgtggggctcaaaggacgtctggggtgggaatgggggactagggtgcttgagtgtctctgcagaaaagactccaggaccccgccaccatgttcccggagcccccaaccccggggcctccatcgcccgacacgcctcccgactccagtcgcatcagccacggcccaggtgcagccagaagtagaggagctggagccagcaccatccgggccagggcagcaggtggcagacaagcatgagcta

SEQ ID NO: 37556 - DNA, 402 bp, Homo sapiens
gccagcgtcgccaggttctgcaactgtaaagcattcatgcctgccatttgttgaatgccgctgaacgcacccaggttgctggaggaggtggcctgctgcaggagcgccagatactgtggggtcagtccgcccagccctgtcaggttcccccaggtggcagtgttgagctgctgcatctgctgagcgagctgctgctggaggcgcctttgctctttgtccttctgagtgtcagcaaacttcaccacgataggtgaagagcagcctgtttctcagcctggttcatgcccagttctgctttatgatccagagtcctccttctacaggaacacaggggaacatggtctcccgtgggttgtccgtggctctctgagcattactgggggggctccaagggaaggaatg

SEQ ID NO: 37557 - DNA, 314 bp, Homo sapiens
ggcagatgtctgagtccctgtccttccctttacgccactagtgtgtaggcagatgtctgagtccctaggtggtttctaggattgatagcaattagctttgatgaacccatcccaggaaaaataaaaacagacaaaaaaaaaggaaagattggttctcccagcactgctcagcagccacagcctccctgtatgcctgtgcttggtctactgataagccctctacaaaaaaacaaaagtatatatatatatgtacataatatcagaattataacaggcaaataaaacctgaaaatcaagagcaaaaaaaaaaaaaa

SEQ ID NO: 37558 - DNA, 401 bp, Homo sapiens
  misc_feature (1)...(401): n = a,t,c or g
cccacgcgtccggggaagacgaccttcctggagcagtcgaaaacccgatttaacaagaactacaaggggatgagtctatccaaaatcaccaccaccgtgggcctaaacatcggcactgtggatgtgggaaaggctcggctcatgttctgggacttaggagggcaggaagagctgcagtctttgtgggacaagtattatgcggagtgtcacggcgtcatctacgtcattgactccaccgacgaggagaggctggctgagtccaagcaggcgtttgagaaggtggtgaccagcgaggcgctgtgcggtgtccccgtcttggtgctggccaacaagcaggatgtggagacgtgcctctcaatccctgacatcaagacggccttcagcgactgcaccancaagat

SEQ ID NO: 37559 - DNA, 406 bp, Homo sapiens
  misc_feature (1)...(406): n = a,t,c or g
acnnnnnnnnnnnnnnnnnnnnnnnnnnnnnnnnnnnnnnnnnnnnnnnnnnnnnnnnnnnnnnnnnnnnnnnnnnnnnnnnnnnnnnnnnnnnnnnnnnnnnnnnnnnnnnnnnnnnnnnnnnnnnnnnnnnnnnnnnnnnnnnnnnnnnnnnnnnnnnnnnnnnnnnnnnnnnnnnnnnnnnnnnnnnnnnnnnnnnnnnnnnnnnnnancaaancaaaaanaccngtccnangngtnnanggccntcanangttcngaatatantatgatganaatgcaatggtggggnanaagggggatnagttcctgnggctgctgtancaaactaccacaaacctanatgcttaaaactacccncntttactatgttancagtactgcntgggnatgggggctcatgcct

SEQ ID NO: 37560 - DNA, 399 bp, Homo sapiens
atggtcctttggagtgctgctatgggaaatcttttctcttggatatatgccataccccagcaaaagcaaccaggaagttctggagtttgtcaccagtggaggccggatggacccacccaagaactgccctgggcctgtataccggataatgactcagtgctggcaacatcagcctgaagacaggcccaactttgccatcattttggagaggattgaatactgcacccaggacccggatgtaatcaacaccgctttgccgatagaatatggtccacttgtggaagaggaagagaaagtgcctgtgaggcccaaggaccctggaggggttcctcctctcctggtctctcaacaggcaaaacgggaggaggagcgcagcccaactgcccaccacctctgcta

SEQ ID NO: 37561 - DNA, 401 bp, Homo sapiens
gcgttgagtcatcaacactttgccaattagctcatggtcctggcaacctcagaaacccctgaagttttaaaaactttctcgctccccacgaccccagaatgaaacagctttaaaaatagccttaagcaaaaggatgttatttcattaaatttggtttaatggaaagaataaaagtaaatgaaaaacacaccctacacactagactccgaacactggtaatcagtactgcatagcaaactctttgggaaagaaaacgaaaatgttattgcacatgtaaaatatgaaaacttaactctgctgtgtgttaggcaatcctgtaatcttttttgactcttaaaagaaattcatttctgaaatgcttggttggaagactgtgacaatagctcatgaaattgagtgtt

SEQ ID NO: 37562 - DNA, 386 bp, Homo sapiens
  misc_feature (1)...(386): n = a,t,c or g
ggaagggatcccatttctttagaagatagattctttctttttcttttttttgttatactttaagttctannnnnnnnnnnnnnnnnnnnnnnnnnnnnnnnnnnnnnnnnnnnnnnnnnnnnnnnnnnnnnnnnnnnnnnnnnnnnnnnnnnnnnnnnnnnnnnnnnnnnnnnnnnnnnnnnnnnnnnnnnnnnnnnnnnnnnnnnnnnnnnnnnnnnnnnnnnnnnnnnnnnnnnnnnnnnnnnnnnnnnnnnnnnnnnnnnnnnnnnnnnnnnnnnnnnnnnnnnnnnnnnnnnnnnnnnnnnnnnnnnnnnnnnnnnnnnnnnnnnnnnnnnnnnnnnnnnnnnnnnnnnnnnnnnnnnnnnnnnnnnnnnnnnntttttttt

SEQ ID NO: 37563 - DNA, 394 bp, Homo sapiens
gctgtggctcaatgacccccataacgtggagaagctgagggatatgaagaagctggagaagaaagcctacctgaaacgtcgctatggcctcatcagcaccggctcagacagtgagtccccggccacccgctcagagtgccccagcccctgcctgcagccccaggacctgagcctcctgcagatcaagaagccccgggtggtgctggcacccgaggagaaggaggcactgcggaaggcctatcagctggaaccctacccctcgcagcagaccatcgagctcctctccttccagctcaacctcaagaccaacaccgtcatcaactggttccacaactacaggtcccggatgcgccgggagatgttggtggaggggacccaggatgagccagacctt

SEQ ID NO: 37564 - DNA, 399 bp, Homo sapiens
  misc_feature (1)...(399): n = a,t,c or g
gtctccagaaaggggacatcgggggggaggggggctcagaaaggagaagggctgtgatctccggtcccttcccccatcatccttccttagactgatgctttgactgaatcatcactagctatggcattaaaaggcctctcttctcatctggtgccaaaggttccgttgcagctttttacaaccatccggtgtggtttggaggatttgtttttttttttncccancanaaaaaancanccnttaaaaaanggctcccnttttcngaggtnccnccccanngnnaaaagggngctcgtttaaaattcangtggatnnttgnaancncngnanngncttaatcangtatttccttacaaaactcctcaanaaaccaganatnatttggcatanaatngctgg

SEQ ID NO: 37565 - DNA, 397 bp, Homo sapiens
  misc_feature (1)...(397): n = a,t,c or g
gaggacgtgagtggaaagggctgttgggagggacccagcttcacccttggggggcaccttggggccatgtgcaggccagatcgcaggggtgggctggagatgagcttggggatggcagaaccgaagaagggcaggactgggggagggccgggggggctgggctttagcctcgggtcctggggacggcattctgaatatgggaatatgggccgtgttggggtgtattcagacacccgctcagaggtgctccatgcagcaccaggcccctggctgccaactctgatattgtcactggggctctgagggctgggtgtggacaggctccttggctgggaagccagtgtcctctcggggcatagctgncatggccaggatccacacagcaatgcttccaaga

SEQ ID NO: 37566 - DNA, 390 bp, Homo sapiens
ggtctgcagggctcagctgagcccatgagctcccagagctaacccctgaacacccaggcgggcaaagggctgatgtcggtagtccccatcctggaggggcaggctctgcgcatctgctcctggcatggcgctgcggcacctcgccctcctggctggccttctcgtgggagtcgccagcaagtccatggagaacacggcccagctgcccgagtgctgtgtggatgtggtgggcgtcaacgccagctgcccaggcgcaagtctgtgtggtccaggctgttacaggcgctggaacgcggacgggagcgccagctgcgtccgctgtgggaacggaaccctcccagcctacaacggctccgagtgtagaagctttgctggcccgggtgcgccatt

SEQ ID NO: 37567 - DNA, 412 bp, Homo sapiens
ggaaaatcgagatggcagagctggcgcagatcctgccaaccgaagagaacttccttctgtgcttcaggcagcacgtgggctccagcgccgagtttatggaggcttggcggaagtacgacacagacaggagtggctacatcgaagccaatgagctcaagggattcctgtcagacctgctgaagaaggcgaaccggccgtacgatgagcccaagctccaggaatacacccaaaccatactacggatgtttgacttgaacggggatggcaaattgggcctctcagagatgtcccgactcctgcctgtccaggaaaacttcctgcttaaatttcagggcatgaagctgacctcagaggagtttaacgcgatcttcacattttacgacaaggatagaagcggctacattgacgagca

SEQ ID NO: 37568 - DNA, 394 bp, Homo sapiens
ggctctggggaaaccggcgctcccgacaggggagcaccgggcctctgagctccctcgggagcctttcacgaggtcagctacgtctttgttgtgcgcgttcctgaacttttggtccattaaccaacaattagacacgccggtattcagtgcctggcgcggtgctagatgctgggtgtaatctcagaaaaatacattcaggggcgcgcctgagggtgctggctgctggcatctcaggtgctttacgtgcattcgtgaagaagcccatcagtatttcttgaataccaggtacgtgccgggcatgtagagtctatgcagagataaactcctgtcctcaagaacccgggtggggatggggttggtgatctgtaatacgagatggagatgagggttgggt

SEQ ID NO: 37569 - DNA, 397 bp, Homo sapiens
ctcactacagaaaggatgagagaagaagagaatgaaggaatagttcaactacgaatactaagaacccaggaagctatcatacaaataatgaaaatgagaaagaaaattagtaatgctcagctgcagactgaattagtagaaattttgaaaaacatgttcttgccacaaaagaaaatgataaaagagcaaatagagtggctaatagagcacaaatacatcagaagagatgaatctgatatcaacactttcatatatatggcataattttgaatatcatggacaatatttagaacccaaattttggagtgcttgggcagaaagttgtaaagtttgtgctggagaaaggtttatttggactttgattacataaatattaaaatctctgccttaccttaca

SEQ ID NO: 37570 - DNA, 385 bp, Homo sapiens
gtgttactcacgcctcacgtacggagcgcgctgtgctcatcgatgaggtgtgcaccatgaacgacggtccccacagtgccttatacaccatgatgaaggaccagtatgccaactacgtggtccagaagatgattgacgtggcggagccaggccagcggaagatcgtcatgcataagatccggccccacatcgcaactcttcgtaagtacacctatggcaagcacattctggccaagctggagaagtactacatgaagaacggtgttgacttagggcccatctgtggcccccctaatggtatcatctgaggcagtgtcacccgctgttccctcattcccgctgacctcactggcccactggcaaatccaaccagcaaccagaaatg

SEQ ID NO: 37571 - DNA, 385 bp, Homo sapiens
caaaaacaacctccagttaccatggaaaccactaagagacttagttggccacagtccacgggcatatgtagcaatataaaatcggaacctctttcttttgaggaaggtttaagcagcagctgtgaactgggcatgaaacaagtttcctatgaccagaatgaaatgaaagaacagttaaaagcattcgcgctaaaaagtgcagatttctcttcctatttgctttctgagccacaaaagccttttacccaattagctgctcagaaaatgcaggtgcagcaacaacagcagctctgtggaaattatccaacaatacactttggtagcacgagtttcaaaagggcagcatctgcaattgaaaagtccattgggattttgggaagtggct

SEQ ID NO: 37572 - DNA, 335 bp, Homo sapiens
  misc_feature (1)...(335): n = a,t,c or g
cgcgagcggccgctctagaggatccctcgaggggcccaagcttacgcgtgcatgcgacgtcatagctctcnnnnnnnnnnnnnnnnnnnnnnnnnnnnnnnnnnnnnnnnnnnnnnnnnnnnnnnnnnnnnnnngatctgctagcttnnnnnnnnnnnnnnnnnnnnnnnnnnnnnnnnnnnnnnnnnnnnnnnnnnnnnnnnnnnnnnnnnnnnnnnnnnnnnnnnnnnnnnnnnnnnnnnnnnnnnnnnnnnnnnnnnnnnngctgcatatgcttgctgcttgagagttttgcttactgagtatgatttatgaaaatattatacacaggagct

SEQ ID NO: 37573 - DNA, 400 bp, Homo sapiens
gttaaataatgtagcagacagtacaggctagcaccaggcacagcaaatacagcaatgcagcaatgcagaaggcagaccttgtctaaactcctagtattgatggattctgcagacagactgcagaagggtgtggcttcttgcctcagctgcagtacagatgtccggattataatatcaagtcctattcagaggaaactttcatctttatttaaaagggaagaaagcagtaaaattaatcccaattaagtcataattggatttacttcattttacaaaatttgtgctttgaatactgaatactttttaaatatgaaaaatcttctattcaagcatggtagtaggcacaatgggctggtaccacgtgctgaacagggccaaggcgacatcattattcagacca

SEQ ID NO: 37574 - DNA, 389 bp, Homo sapiens
caggaatctctctgggatcaccatttcatcttacacctgatcaagaagaaaaaccctttacaagtaataaaggcccacgaattctaaaaccaggggagaaaagtacattggaaactaaaaagatagaatctgaaagtaaaggaatcaaaggaggaaaaaaagtttataaaagtttgattactggaaaagttcgatctaattcagaaatttcaggccaaatgaaacagccccttcaagcaaacatgccttcaatctctcgaggcaggacaatgattcatattccaggagttcgaaatagctcctcaagtacaagtcctgtttctaaaaaaggcccaccccttaagactccagcctccaaaagccctagtgaaggtcaaacagccaccact

SEQ ID NO: 37575 - DNA, 405 bp, Homo sapiens
caggtttcttgtgacaactgtgctgcatcaatggcatttgaagataaagagatccatgaccagaactgtcctttggcaaatgtcatctgtgaatactgcaatactatactcatcagagaacagatgcctaatcattatgatctagactgccctacagccccaattccatgcacattcagtacttttggttgccatgaaaagatgcagaggaatcacttggcacgccacctacaagagaacacccagtcacacatgagaatgttggcccaggctgttcatagtttgagcgttatacccgactctgggtatatctcagaggtccggaatttccaggaaactattcaccagttagagggtcgccttgtaagacaagaccatcaaatccgggagctgactgctaaaatg

SEQ ID NO: 37576 - DNA, 406 bp, Homo sapiens
cggacgcgtgggtcagagctgggtcaacggcgggccaggaaagaagggaatgagtttaagatgatgcctaacaggagaaatatgtatacagtacagaataattcaggtccttacttcaatccccgctctcggcagagaattccacgtgatctggccatgtgtgttactccaagtggccagttttactgctcaatgtgtaatgttggagctggcgaagagatggaattccggcagcatttagagagcaagcaacataagagcaaggtgtctgaacagcggtacaggaatgagatggagaatctgggatatgtatagtgattatcatattaagatagagcagcttttcctgcctgttgtttgccttttgtcaacttgccctgctttgtggtctttttgatatgagtac

SEQ ID NO: 37577 - DNA, 396 bp, Homo sapiens
  misc_feature (1)...(396): n = a,t,c or g
cgaatgttttacaggacttttataattagaaaaaaggaacattaaaaacaaaaaacannnnnnnnnnnnnnnnnnnnnnnnnnnnnnnnnnnnnnnnnnnnnnnnnnnnnnnnnnnnnnnnnnnnnnnnnnnnnnnnnnnnnnnnnnnnnnnnnnnnnnnnnnnnnnnnnnnnnnnnnnnnnnnnnnnnnnnnnnnnnnnnnnnnnnnnnnnnttaaaaaaaacaaaaaaaaacatgatgagaactgtgttctgctcccaccccctatccctctagtcctcagggcccctgctcattccaaagcaaatctggagggcttggtctggggttcatggtatgcaagtgcatctgtccccagaattcaagaggcctgtgaacttggatgggaaaataact

SEQ ID NO: 37578 - DNA, 401 bp, Homo sapiens
aagaggtagtgagcggtgtttcaggatgtgagggcccgcaggagccgagtcaggctctctccactgcctgcccgccaccgtgcaagctctggccggcgctgcccacagtccccatggagggcagcccccgcggcggggacccctgatcggcagcggcatgccagggaagcccaagcacctgggcgtccccaacgggcgcatggatctggctgtgtcagatggagagctgagcagcacgacggggccccagggccagggcgagggccgcggcagctctctcagcatccacagcctccccagaggtcccagcagccccttcccaaccgaggagcagcctgtggccagctgggccctgtccttcgagcggctgttgcaggacccgctgggcctggcttacttca

SEQ ID NO: 37579 - DNA, 397 bp, Homo sapiens
  misc_feature (1)...(397): n = a,t,c or g
ctaaagcttggtggaggtagtggagctatcacacactcaaatgagcttgtatatttataatacaatatagtattatagtaacagttatcatacactgagatatagtttctgtgcttgtaaaaaattcttgaagtgnnnnnnnnnnnnnnnnnnnnnnnnnnnnnnnnnnnnnnnnnnnnnnnnnnnnnnnnnnnnnnnnnnnnnnnnnnnnnnnnnnnnnnnnnnnnnnnnnnnnnnnnnnnnnnnnnnnnnnnnnnnnnnnnnnnnnnnnnnnnnnnnnnnnnnnnnnnnnnnnnnnnnnnnnnnnnnnnnnnnnnnnnnnnnnnnnnnnnnnnnnnnnnnnnnnnnnnnnnnnnnnnnnnnnnnnnnnnnnnnnnnnnnnnnnnnnnnnnnnnng

SEQ ID NO: 37580 - DNA, 396 bp, Homo sapiens
cccacgcgtccggggaattctctcctatgcattgcggtttccccagcccctagcacactgtctagcccagtattccttctcagtaagtaggtgttgaatgacttacaaaatgaatgctaaaagacctggtagacaagaaggaatttcttagcctaaatgaccagatgtggagaagatactcaaacacttcagggtccccaatctggtgatgtcacttgcagtggaatttcatatgaatccagtgtgacagaagttgcctagtcaagttgtaagtcctcttctctgggtcacatgttcaaatacttttaggggacagataatgcaatatttaagatacaggaagtgatgaggactgtggcacactggagagtttggactccaagagtaattaattcg

SEQ ID NO: 37581 - DNA, 405 bp, Homo sapiens
catgctacagctgtgtatggacactgggtgacgggattatgaccatgataggtggctgggtcacatggacattgatgctgtggccattcctataggaccaccatggctgtgtcttgagggaggccatccttggggacagttgtttgtgggtggttgcatgctgtggccatcagtacctctgtatgtggttgtgtatagaggactgtccctatgagtgtggctgtcacaatagactgtgtgactgatgctgtgaccagatttgagcacctatgactgagtatgtgtgaccacgtgacagtgtgtggccaaaaacagtgtgttggtgtgactggtctggttgaggctgcatgtggtctccgtgggaccaaatgtgtgtctgtccgtgtgcatctgtgaccagatgtt

SEQ ID NO: 37582 - DNA, 403 bp, Homo sapiens
gtgacacccagtcatccagcagcgtcaacatcgtgatgggcccctcagccagggctgccagccaggccactcgggtaaggggctgggcagggctcaccaggacaggctgggatggtggcacgggctcctggcctgagcgtggcacctgccttgcgttcccacccttctgcctgcagaaccccatccccttctctatggggctcccagagtgacaaaggacagtgattagacacgaagtggcttagctgctcttgaaagcagacaagatacagagcagatatcctgtaaacgataatgcccaggcaggcactgaaaggagtcaccggatacagaggttctgcagaactgtggccatctgccctacaccggggcatgacggagaatgccctccacccattcacac

SEQ ID NO: 37583 - DNA, 402 bp, Homo sapiens
tggtgcactgtccccgaaacccctgcttgggaagggaagctgtcgggtgggctaggactgacccttgtggtgtttttttgggtggtggctggaaacagcccctctcccacgtggcagaggctcagcctggctcccttccctggagcggcagggcgtgacggccacagggtctgcccgctgcacgttctgccaaggtggtggtggcgggcgggtaggggtgtgggggccgtcttcctcctgtctctttcctttcaccctagcctgactggaagcagaaaatgaccaaatcagtattttttttaatgaaatattattgctggaggcgtcccaggcaagcctggctgtagtagcgagtgatctggcggggggcgtctcaacaccctccccagggggtgcatctca

SEQ ID NO: 37584 - DNA, 414 bp, Homo sapiens
  misc_feature (1)...(414): n = a,t,c or g
nnnnnnnnnnnnnnnnnnnnnnnnnnnnnnnnnnnnnnnnnnnnnnnnnnnnnnnnnnnnnnnnnnnnnnnnnnnnnnnnnnnnntactctctgaatttctaaaagtcagtaggttgaccaaaaagtctagaaactggctttaagtcagtatgggacgtacttataaagagtccatggttttgcacgtttcggtagacaagtaaatctgagttatttttcaatgacttaccaatatttgaatagtaactaagatcgtcagtgtatctggacttctttttttgaagttctaaaacaattatagtagggatttattattttgggcctccatccagatgtttttccaagatcatttttaaaattcatttgtcttctgtttccagataacatactttccgttctataggaatcttcac

SEQ ID NO: 37585 - DNA, 413 bp, Homo sapiens
cacgcagaatcaccagatgacttggtgcgagaagctgcttataaaatttttctttatcccaatgctggtcaattgaaatgtttagaagaattgctcagcagcagagatcttctggcaaagttggtggggtattccacgttttctcacagggctctccaaggaacgatagctaaaaatccagagactgtcatgcagttccttgaaaaactatctgacaaactttctgaaagaactctgaaagattttgagatgatacgagggatgaaaatgaaactgaatcctcaaaattccgaagtaatgccctgggaccccccttactacagtggtgtgattcgtgcagaaaggtataatattgagcccagcctatattgcccgtttttctctcttggagcatgcatggaaggcctgaatat

SEQ ID NO: 37586 - DNA, 410 bp, Homo sapiens
cggacgcgtggggggtgcacctgccaggccaagggtcagggtgcccagagcctccaaagagagctgaggggatgtggggccccaaactcattaattcactgaagacacaggtcccacagggagcggatgatgaagcagaccccctcctgtcatcaccctctcctggtgtagtgtggatgcgaggccacggctcagtgatgggctcaccacccagaagtggggagagactttgggcctcccacccagtggggcttggcctggcttctgtggcctgggcgtgttgtggactcaggcactggggcctgtcaccaaggctcctccaacatgcgggaggaggcttagcagacttgcgctgcaccagcgaatctgcctgggctgccctgtcccacccaccctcactgagatcatgt

SEQ ID NO: 37587 - DNA, 379 bp, Homo sapiens
  misc_feature (1)...(379): n = a,t,c or g
nnnnnnnnnnnnnnnnnnnnnnnnnnnnnnnnnnnnnnnnnnnnnnnnnnnnnnnnnnnnnnnnnnnnnnnnnnnnnnnnnnnnnnnnnnnnnnnnnnnnnnnnnnnnnnnnnnnnnnnnnccttgagccagatttggctcatgggtgctagttgtccaacctctataggattagagggctcacggaaagtaagttttgagggccacgatgggcacccagctctgtccgattccacagctagccaccccatgaatgcagcttcatatcaccaaagatcagcctactccagcggttcctaaaggctgcatggaatcccctccttcatctataccattcatgatttaaccactcctcccacccccatccccaatggtgcca

SEQ ID NO: 37588 - DNA, 390 bp, Homo sapiens
gagaggagagaggacgggcttggatgaagaagggaaagaaagagaaagagactgaagcagagaagagccgcagaggaagaaagtgaatgagcactcaagaaggacaaagaggagtagtcgggggtggggtggaggcagggcggggaagggagtgaccgcccctcctggctgcactcttgcctccggagccctctgatcctgtttgcagtgatgctccgagggcaggcacctgctgctctgtaatgattcagcccctttcagccgtcgtcgcgttaacacaacaggatgctgttgctattgtcactactgcctctcctgccgccgctgctgctgccgccgccgcaccgccgctggtcctccttctgcttttacttctcctgcatgacaagt

SEQ ID NO: 37589 - DNA, 382 bp, Homo sapiens
agaggaggcagctagaagagtcccaggactcgctcagcgaagagctggcaaagctccgagcccaggaaaaaatgcacgaagtcagcttccaggataaggagaaggaacatctgacgcggttgcaggatgctgaagaaatgaagaaggcgctggagcagcagatggagagccaccgggaagctcaccagaagcagctgtccagactccgagacgaaattgaggagaagcagaaaatcattgatgagattcgggatttgaatcagaaactgcaactggaacaggagaagcttagttctgattataacaagctgaaaatagaggaccaagagagagaaatgaagctggaaaagctcttattgctcaacgataaaagggaaccaag

SEQ ID NO: 37590 - DNA, 384 bp, Homo sapiens
agcgtcctcactcacctgaatcttttacgccagcagcgtctcttcactgacgtccttctccatgccggaaataggaccttcccttgccaccgggcagtgctggctgcatgcagtcgctactttgaggccatgttcagtggtggcctgaaagagagccaggacagtgaggtcaactttgacaattccatccacccagaagtcttggagctgctgcttgactatgcgtactcctcccgggtcatcatcaatgaagaaaatgcagaatcgctcctggaagctggtgacatgctggagtttcaagacatccgggatgcatgtgcagagttcctggaaaagaacctgcatcccaccaactgcctgggcatgctggtgctgctgatgcca

SEQ ID NO: 37591 - DNA, 384 bp, Homo sapiens
cgcagctgggccgcggcgctccgacctccgctttcccaccgcccgcagctgaagcacatcccgcagcccggcgcggactccgatcgccgcagttgccctctggcgccatgtcgcagaacggagcgcccgggatgcaggaggagagcctgcagggctcctgggtagaactgcacttcagcaataatgggaacgggggcagcgttccagcctcggtttctatttataatggagacatggaaaaaatactgctggacgcacagcatgagtctggacggagtagctccaagagctctcactgtgacagcccacctcgctcgcagacaccacaagataccaacagggcttctgaaacagatacccatagcattggagagaaaaacagct

SEQ ID NO: 37592 - DNA, 414 bp, Homo sapiens
  misc_feature (1)...(414): n = a,t,c or g
aggaaattgtgtagatatgtggaaacggagtccctgtaatttggccataccttctgaagtagatgtggagaaatatgctaaagtggaaaagtctatcaaatctgatgactcacagccaacagtctggccagcccatgatgtaaaagatgattatgtatttgaatgtgaagctggtactcagtatcagaaaacaaagctgaccatcttgcagtcgcttggagatccactttactatggtaaaatacagccatgtaaagcagatgaagaaagtgacagccagatgtctccatcacactcgtccacagatgatcattcaaattggttcattattggatcaaagaccgatgctgagagggtagtcaatcagtaccaagaattagtccagaatgaagcccaatgcccggncaagatgtc

SEQ ID NO: 37593 - DNA, 418 bp, Homo sapiens
  misc_feature (1)...(418): n = a,t,c or g
ccccctttgtaggaatcagataccttttgtagaaaaaaatggcttatgccacgtaaaggtgaatttttagaaaccaccttctaggcgtttttggaacccttactgaaatccctccccttgttacagatggcgtagaagtcacaagtctgttaattggactgttgcttctttgcctgttcctgctttctctttctgtctggatagtcaggaaaagatttaatgtttaatatttaaacaaaatatttaatgtctatacagtaaaattattcaaacttcaaaccagtattgaaagcagttggaaaccagctaatagtttcttaatctcagatttcgagatgaatgtaaactgtattcttttgaaatgtgcaagtgtttgattcatgccatttgataaacttctgncttggagtcattggtt

SEQ ID NO: 37594 - DNA, 403 bp, Homo sapiens
gttgtttcattagtagtaaactatcttggcattaatggtttgcatatccatggaaatgtgttcatgcacacactgcactgacttcagcaacatggagcaagatttcgttttcacagaccaatctcattcaagcatgttcaccaccagagccagagagtcatactgtgggccttgttgggcctgagaccttgccatcacaatgtttagagtagtatttctcaatggttagagcagggtgcatcagaatcatctagagagcttgttaaatcaagttcccgggtcctgtccatagagtttccgattcaatagggacccaagaatttgcatgtctaacaagttccctcatggtgctggtaatgttgaagctgcggtcctggaaccacactttaaaatcctctgggtt

SEQ ID NO: 37595 - DNA, 394 bp, Homo sapiens
ggcctggccgatggcactcctatcgacatggaccacccttatgtcttcagtgatatgacctcctacttcaccctgctggttggcatctacttcccctcagtcacagggatcatggctggttctaaccgctctggggacctgagggatgcccagaagtcaatccccactggcaccatcctggccatcgccaccacctctgctgtctacatcagctccgttgttctgtttggggcctgcattgagggggtcgtcctgcgggacaagtttggcgaagctgtgaatggcaacctcgtggtgggcactctggcctggccatctccatgggtaattgtcatcggatccttcttctccacctgtggggctgggctgcagagcctcacgggggccccacgcc

SEQ ID NO: 37596 - DNA, 397 bp, Homo sapiens
ggttttgttgtcaggaactgccatataagaggcatgcatcattttaattgaatcttaaacctgacacttttattgaccaaaaaaaaggatttcaagttatttttcatgcataaagcctgcatgaagcctgtacttctttagtgaaggctatctcagatatgtatgaccttacctccttgcctttaggaaaaattaaacctcactgtctgagatccttgagatttggcaaatgttgatcaattaactcttcaaagacttatgatgaaataactgtaggcaataaaacatactgaaatatgtccaaatgaccagcacagcaaaatatgcatgaccctgtgcctaaggtctgtggcatacaagccttgggttctgtttatggggatgtcaccttctatga

SEQ ID NO: 37597 - DNA, 395 bp, Homo sapiens
  misc_feature (1)...(395): n = a,t,c or g
gccacacatagctattgagtacttgcaatgtggctagtctgaattgaaatgtactgaaaatcaaaacacacactggatttcaaagacttannnnnnnnnnnnnnnnnnnnnnnnnnnnnnnnnnnnnnnnnnnnnnnnnnnnnnnnnnnnnnnnnnnnnnnnnnnnnnnnnnnnnnnnnnnnnnnnnnnnnnnnnnnnnnnnnnnnnnnntaatgtaactactagaaaatcaaaacttacctatgtggctcacgtttgtggtttgcattgtatttcttttggacagctctaatctagataatatgctccaagatcccacgggaattttaatcatgtaccaatcttaaatcttcctccctaaatccattttctttaaatgcagtttagagtatgtg

SEQ ID NO: 37598 - DNA, 403 bp, Homo sapiens
ctttctttgtgttatctgcatgttgtaacgtgtgataagaatgaatgtaaaggctgtggcaactgtaattaatttttgtaaagggctggtcacacgtggatctggtttatgaatgcatttgggatgattttggtaaccagatcaccttttcagaaatttagatgtgaacaccaaaagaagcattttctcaacaaaaattaatagctggttctattttttttaaacctagaaaaaataaagttgatttttttcaattaaagtgcttttaattcttagcagtggggatggggcatgtgtgttttaccagagctatttgggcattaatatctgcaggcaagtacttaaagcacactgtggcagttggatgctgaaggcaaactgaaaaaccaaatgaaaaaacatc

SEQ ID NO: 37599 - DNA, 403 bp, Homo sapiens
aacgtcttctgcctcttcttctttctagacgagaccctccgctctttggccagcccttcctccctgcagggccccgagctccacggctggcgccccccagtggactgtgtccgggccaatgagctgtgtgccgccgaatccaactgcagctctcgctaccgcactctgcggcagtgcctggcaggccgcgaccgcaacaccatgctggccaacaaggagtgccaggcggccttggaggtcttgcaggagagcccgctgtacgactgccgctgcaagcggggcatgaagaaggagctgcagtgtctgcagatctactggagcatccacctggggctgaccgagggtgaggagttctacgaagcctccccctatgagccggtgacctcccgctctcggacatctt

SEQ ID NO: 37600 - DNA, 380 bp, Homo sapiens
  misc_feature (1)...(380): n = a,t,c or g
gtgagatcagaagggggatgatgtcattccttcgaaggaatgaattaaacgtgcttcctcgtgtgtctgattgacagccctgcacaggagaagcggcatataaagccgcgctgcccgggagccgctcggccacgtccaccggagcatcctgcactgcagggccggtctctcgctccagcagagcctgcgcctttctgactcggtccggaacactgaaaccagtcatcactgcatctttttggcaaaccaggagctcagctgcaggaggcaggatggtctggaggctggtcctgctggctctgtgggtgtggcccagcacgcaagctggtcactaagacaaanacacgaccttcgaccttttcagnancancancatcaat

SEQ ID NO: 37601 - DNA, 383 bp, Homo sapiens
  misc_feature (1)...(383): n = a,t,c or g
cgccagaactagtggcgggctgaggacgccgtacccctcggaaggcagccctgcggtccctttgccggccgttccctcccggacatggaggacgtggaggcgcgcttcgcccacctcttgcagcccatccgcgacctcaccaagaactgggaggtggacgtggcggcccagctgggcgagtatctggaggagctggatcagatctgcatttcttttgacgaaggcaagaccacaatgaacttcattgaggcagcgttgttgatccagggctctgcctgcgtctacagtaagaaggtggaatacctctactcactcgtctaccaggcccttgatttcatctctggaaagaggcgggccaagcagctctcttcggtgcangagga

SEQ ID NO: 37602 - DNA, 394 bp, Homo sapiens
  misc_feature (1)...(394): n = a,t,c or g
tccacgcgtccgcctactatattttttttcctcactagtagcatctgatggttgatacagtcagtaactattctgaagaatcagattaagagagaacaatttacttattcaggaataagtgcatttttacagtacatatttttcacatttcagctgcaacttccaaagatcaggttctcattgctccgtagcacagattaaacagcctacttatgtcatatcctcacttcacaccaacttcttcagtctattattttagttttctaaatgtaaatctagttttcaactgaattctttgaggatcgcaatcacacccaaaanaacattcnaacttcntaacanggnanaangggggctttccattnanaccnnggcaccaccntgacccaggccc

SEQ ID NO: 37603 - DNA, 385 bp, Homo sapiens
caaaagtgaatattatgagttctagggaagaaagttgaagagctactgaaatagtaatagcaaaatgggaaagacacatgaatgaacaattcatagaaaaataatgatgaataatagaaatatgaaaaacttttcacccagaataaagaaatgcaatttaaaacaagaaactattgaactgcatccaatgtaagaggaagtattcatttgtataatccttctaaaaccagtttgtcaatacatattaatcttccaaaaaatcttttgacctaatttcacctttttccacctatcctgatgaaaaaatcagaaagacacaaagttgggtggcaaaatgctaatcatagcaatgtttatacagcacacaagaaaacaacctagttgt

SEQ ID NO: 37604 - DNA, 145 bp, Homo sapiens
  misc_feature (1)...(145): n = a,t,c or g
ccttctctgatattttattgggattacagacatgagccactgtgcccggccaagcattcttgnatatgggaatanaatancagagaagggggaacaaaanngganatannatngnganatannnnaangcnnnganngnncacag

SEQ ID NO: 37605 - DNA, 86 bp, Homo sapiens
tgacatatcttcaactaattccacaataaaaactgactggaaaggagctctcaatccagtactacgcaatacaaaaaaaaaaaaaa

SEQ ID NO: 37606 - DNA, 393 bp, Homo sapiens
cccacgcgtccgcccacgcgtccggacagactgaagataaaaaccgccagttacaggagcgcttggaattggcagagcaaaagctgcaacagacactgaggaaggcagagacgctcccggaggtggaggcggagctggcccagagggtggcagcgctttccaaggctgaagagagacacggcaacattgaagaaaggttacgacagatggaagcacagttggaggagaagaatcaagaactgcagcgggcaaggcaaagagaaaaaatgaacgaagaacataataaacgtttatcagacactgttgacaagctgctttcagaatctaatgagaggcttcaacttcatcttaaagagagaatggctgctttggaagataagaactctcttttaa

SEQ ID NO: 37607 - DNA, 391 bp, Homo sapiens
  misc_feature (1)...(391): n = a,t,c or g
agaagtgactggaggtggctgtggattcaactctggcctgagattgattcccttgagataagttgttttctgcaaatccagtttgctgatgacatgcaggagttcaccaaattccccaccaaaactggccgaagatctttgtctcgctcgatctcacagtcctccactgacagctacagttcagctgcatcctacacagatagctctgatgatgaggtttctccccgagagaagcagcaaaccaactccaagggcagcagcaatttctgtgtgaagaacatcaagcaggcagaatttggacgccgggagattgagattgcagagcangacatgtctgctctgatttcactcaggaaacgtgctcagggggagaagcccttggctggtgcta

SEQ ID NO: 37608 - DNA, 388 bp, Homo sapiens
gcggcggttgggccgaggcaggcggcctcagtggccgaggtggctggacgcgtagcaggtggaaggagggagggagccgcaggcgcagacccacccgccatgaagccccccgcagcctgtgcaggagacatggcggacgcagcatctccgtgctctgtggtaaacgacctgcggtgggacctgagtgcccagcagatagaggagcgcaccagggagctcatcgagcagaccaagcgcgtgtatgaccaggttggcacccaggagtttgaggacgtgtcctacgagagcacgctcaaggcgctggccgatgtggaggtcacctacacagttcagaggaatatccttgacttcccccagcatgtttccccctccaaggacatccggacag

SEQ ID NO: 37609 - DNA, 408 bp, Homo sapiens
  misc_feature (1)...(408): n = a,t,c or g
gatatattgattatagaaagcctctcagaagaatttgatagggagtggcagcataatttttttccctcctcatgtctctgggttatgataggtgtgctgagttggtaagaactgaatattcatttaatgtataacagtgcatgcaattgagacagttgctatggacaggttataaaaagaagaaatccatggatggatcctcatttatcagcaagtagagcatccttcagagagaataaaaacaactctctcttcatagataaccaaacaatgacacacaaaagttgcttgtgcccaatcatcatggccatgctggcagggaggatgcaacaggctccatcagagtgtttacagaatgaagactaatgtggattgaattaaatataatactaaagagtggnttactct

SEQ ID NO: 37610 - DNA, 284 bp, Homo sapiens
  misc_feature (1)...(284): n = a,t,c or g
aatagaaactctgaataacccacaatttattgaagaatataataataatctaaaaccttcccnnnnnnnnnnnnnnnnnnnnnnnnnnnnnnnnnnnnnnnnnnnnnnnnnnnnnnnnnnnnnnnnnnnnnnnnnnnnnnnnnnnnnnnnnnnnnnnnnnnnnnnnnnnnnnnnnnnnnnnnnnnnnnnnnnnnnnnnnnnnnnnnnnnnnnnnnnnnnnnnnggctaanncttccngntncntggtnnngcagggngtgncnancnngctctantnntgtttg

SEQ ID NO: 37611 - DNA, 305 bp, Homo sapiens
cataatttgttaaaatgacttcatttaacattcactgatgtagattaataatgtaagttctgatttaaagaatggtgggaaaatggtgcatgtaatacttttgcaagtgttggggagatcggtatgttttgaaaagagtaatttaacttttgggtgccaggaaatgggttttctcaaagtccattgccggcaatgggcaggcctgcaaatactggcacagagcattaatcatacaccttattaacggtgaggtgaataactttgaaataaagttttagagaaatgtttcagaaaaaaaaaaaaaa

SEQ ID NO: 37612 - DNA, 402 bp, Homo sapiens
gagttgaagtgacagaatttgaagatattaaatcaggttacagaatagatttttattttgatgaaaatccttactttgaaaataaagttctctccaaagaatttcatctgaatgagagtggtgatccatcttcgaagtccaccgaaatcaaatggaaatctggaaaggatttgacgaaacgttcgagtcaaacgcagaataaagccagcaggaagaggcagcatgaggaaccagagagcttctttacctggtttactgaccattctgatgcaggtgctgatgagttaggagaggtcatcaaagatgatatttggccaaacccattacagtactacttggttcccgatatggatgatgaagaaggagaaggagaagaagatgatgatgatgatgaagaggagg

SEQ ID NO: 37613 - DNA, 403 bp, Homo sapiens
ggataggaatcggtagtttggtttttttgtttgttttgtttttttaaccacagataattgccaaagtttccacctgaggacggtgtttggaggttgccttttggacctaccactttgctcattcttgctaacctagtctaggtgacctacagtgccgtgcatttaagtcaatggttgttaaaagaagtttcccgtgttgtaaatcatgtttcccttatcagatcatttgcaaatacatttaaatgatctcatggtaaatgttgatgtattttttggtttattttgtgtactaacataatagagagagactcagctccttttatttattttggttgatttatggatcaaattctaaaataaagttgcctgttgtgacttttgcccatctactgcatacttagtg

SEQ ID NO: 37614 - DNA, 401 bp, Homo sapiens
aagggttctcacaatgccactctcatgcccacagaacatcaatctcctaggcctttttgcagatgggacctcccataggccaagcatcttactgtatccttacggtctgctgaagtgcacacaagatacttggctgtacaaggagagcgtgttgcatcaaacaccagcacctctgaactgcctattgccacaaagagttcctctctctctgagtcataggcccaagccaaagccttatccataacaagtagaggccaagtgataaccaggagatcccctgttactggagacaagaagcgcaataaaccatcctcagtggcacatagaatccgagtccagttatggccgcagcagacccgctgcacttgctggggagcagaaccacagacattgaagaggct

SEQ ID NO: 37615 - DNA, 398 bp, Homo sapiens
tgtggcgtgatctttggttgtctggcttttaccttctatatcttgctcctgtttttccacaggatgcaccctggactcccatcagttcctacccaagacagatcaattggaatggaaaactctgagtgctaccagaggtaaaactgggtgaagaaggcaagagaagactttcagcctcttgatcaccagcacgaccatactgtttcagaaagctgggtggtggtggaggcgctctctcaatggctattcaagtcttctccactaaaacttggttgggtagaggaaattaaattgagtcctggtacctggtcaaaatcattagaagtttacctggcttctcaagttatcttcttccctggttcagactgttggtaagagctgccagatcccagatggga

SEQ ID NO: 37616 - DNA, 402 bp, Homo sapiens
gactaagttctagatctcggccccctgtgcccccccagccccttcactcctcccggctgctgtcctcgtctccacttttaggattccttaggattcccactgccccacttcctgccctcccgtttggccatgggtgcccccctctgtctcagtgtccctggatcctttttccttggggaggggcacaggctcagcctcctctctgaccatgacccaggcatccttgtccccctcacccacccagagctaggggcgggaacagcccaccttttggttggcaccgccttctttctgcctctcactggttttctcttctctatctcttattctttccctctcttccgtctctaggtctgttcttcttccctagcatcctcctccccacatctcctttcaccctct

SEQ ID NO: 37617 - DNA, 244 bp, Homo sapiens
tgaatgagggccattgttgtgtaattcaagttcagacatgttacaggattgtctttcaggtccccagagcaaagcaaatgtgcaaagatcctttctgtggttgccccagggccattgacaattaaaatagaagatgatgggccttgcgtccatcctgcttagtgtctagaatgttttctgcatgggatcactattgttttcttcctgcttggtgcgacctagagctcaaatctatttttttttt

SEQ ID NO: 37618 - DNA, 401 bp, Homo sapiens
ctccacagtgccatgggaaaggcactattatcacccccgtttgaaagatgggggagtcgaaacacaagtagctggcccaaagtcacacagctagagggcagagcgatgatctgaacccaagccatctgcttccagagtccttccccttgccatcacctgggaggcctgggggtcccagggtagctaggagggttacggggtggctgggagggttacgcccacctgatcagcgaggtagacttctcctgggtggcgctgtgggctgcctggggccaggtggagcctcttcgcctttgaaccaccccctgcctgcagttctggatgtctgcactggccaccaccatcccagttccctgtggggccttcatgcctgtctttgtcattgtgccccctgcctcccg

SEQ ID NO: 37619 - DNA, 402 bp, Homo sapiens
  misc_feature (1)...(402): n = a,t,c or g
cattagcctcctggaccagctggataaggacatcaataccttctctatgcgtgtcagggagtggtacgggtatcactttccggagctggtgaagatcatcaacgacaatgccacatactgccgtcttgcccagtttattggaaaccgaagggaactgaatgaggacaagctggagaagctggaggagctgacaatggatggggccaaggctaaggctattctggatgcctcacggtcctccatgggcatggacatatctgccattgacttgataaacatcgagagcttctccagtcgtgtggtgtctttatctgaataccgccagagcctacacacttacctgcgctccaagatgagccaagtagcccccagcctgtcanccctaattggggaagcggaagg

SEQ ID NO: 37620 - DNA, 387 bp, Homo sapiens
  misc_feature (1)...(387): n = a,t,c or g
cacagagattttccatattcttcctgcctctccaacaaacatgtctccctcattatcaacatttcttcccagagtggtacactttttataattgatgatcctacactgacacatcatcatcacaatgagttcatagttgacgccagggttcactcttggtgttgtacattccaggcannnnnnnnnnnnnnnnnnnnnnnnnnnnnnnnnnnnnnnnnnnnnnnnnnnnnnnnnnnnnnnnnnnnnntcctctgtgctccactgatacttactccttcattcccttgctccctcagcccctgacaaccactgatctttttattgtctccatagtttgggcttatttaatattttttgaggttgcactgttgcccaggacatcgtatg

SEQ ID NO: 37621 - DNA, 297 bp, Homo sapiens
  misc_feature (1)...(297): n = a,t,c or g
gtgacagagatgatggatgagcagctggattttcgtgatgaaggacggaagcagcagcgggccggcaaggccatacctcggtgagggacaggtggacaacggtcacctatctgtagccaggggcagttgtgtggccagctgtctctctgggatgagtcaggaggcctggaggcttggggagaggtgtggagaaggagagaacatggcccaggccctttccttccccctgtgctgacagcattgctgtgggggtggnccnctgncctnncctggncctcatgnnccnccggngctggg

SEQ ID NO: 37622 - DNA, 401 bp, Homo sapiens
caaagattttgttatttttgttctttaaattagatgttgccaatttaatgcacttacatcctaacatgttgatgattttaagtatcaagcacaatcacaatgctgaagtctccctgaagggtctatagaggaatccaagaaggaggtgaaaacattattcattgacatcaaacacctccaaggcctcattctgggccagattggaagtgagggaaagaaattttcagctcaagtgtttccattcatcgtgatttcagagagaaaaggataggaactgggaaacgaaatactcaacagtcctgatcttgcaattacctgattcttttgttgtgcatgaaaattaagttctaacgtctgtgaaaccgtgtgaaatatataagccaaacttaaatgactgtaga

SEQ ID NO: 37623 - DNA, 397 bp, Homo sapiens
  misc_feature (1)...(397): n = a,t,c or g
tagtgaatagatctcatgagagctgatgattttataagaggtttccccttttgcttagttctcattnnnnnnnnnnnnnnnnnnnnnnnnnnnnnnnnnnnnnnnnnnnnnnnnnnnnnnnnnnnnnnnnnnnnnnnnnnnnnnnnnnnnnnnnnnnnnnnnnnnnnnnnnnnnnnnnnnnnnnnnnnnnnnnnnnnnnnnctgtgaaaatgaacctatacannnnnnnnnnnnnnnnnnnnnnnnnnnnnnnnnnnnnnnnnnnnnnnnnnnnnnnnnnnnnnnnnnnnnnnnnnnnnnnnnnnnnnnnnnnnnnnnnnnnnnnnnnnnnnnnnnnnnnnnnnnnnnnnnnnnnnnnnnnnnnnnnnnnnnnnnnnnnnnnnnnnnnnnnnnnnnn

SEQ ID NO: 37624 - DNA, 408 bp, Homo sapiens
aaggtcctggtgttcctatggtgacggtgcacaacacaacagataagaaaaaaatgtttgacctagaaacaaatgaacatgtcaagaaggccataaatgaccgacagatgcctaaagtggaatacagggacattgagattgatgattacaacctgcccatgcagatactgaagccagcaaccttcaccgacaccacccactaccctctgctcctggtggtggatggcaccccgggcagccagagtgtagctgagaagttcgaggtgagctgggagacggtgatggtgagcagccacggcgcggtggtggtaaagtgtgacggccgtggcagcggcttccaagggaccaagctcctgcacgaagtgaggcggcggctgggcttgctggaggagaaggaccagatggagg

SEQ ID NO: 37625 - DNA, 406 bp, Homo sapiens
  misc_feature (1)...(406): n = a,t,c or g
atgaactggtcagacctgcttcctcctcccccagcacatcctcctccacacagcaatagcgaagagtacaacatttctgtagatgaaagctatgaccaagaaatgccatgtcccgtgccaccagcaaggatgtatttgcaacaagatgaattagaagaggaggaagatgaacgaggccccactccccctgttcggggagcagcttcttctccagctgccgtgtcctatagccatcagtccactgccactctgactccctccccacaggatgaactccagcccatgttacaggattgtccagaggagactggccacatgcagnaccagcccgacagganacggcagctgtgagtcctcctccaccaccacggccgatcttccctccacataccnatggctacatttc

SEQ ID NO: 37626 - DNA, 399 bp, Homo sapiens
  misc_feature (1)...(399): n = a,t,c or g
ctctttcccaaagtcaacctgagccccgtgacgcccgcaaaggacacggggctcaccgctgctccccaggaaccaaaggcccccaaagccagcccagtccagcacgccctaccgtcgtccctgagcgttccccacaccgccattctggtcacgggcgcgcagctctgtggcccggcagtcaacctgagccagatcaaggacaccgcgtgcaagtccctcctgggcttggaggagaaaaagcacgnggaancnccagntgntgagaaccatcatggaggtntnggnganncgnnngcgtntantaatgaggtgatnccngaangggnnatgncatnannagcattctnanaatctgactaaagccagnntnangtgncntgantgnnnancttnanattc

SEQ ID NO: 37627 - DNA, 395 bp, Homo sapiens
ggtggctgctgtagaggatgtgcgcaaacaaggtgagacgatgcggatcgcctcctccgagtttgcagatgacccttgctcgtcggtaaagcgcggcaccatggtacgggcggcaagggctttgctctccgcggtgacacgcttactcatcctggcggacatggcagatgtcatgagacttttatcccatctgaaaattgtggaagaggccctggaagctgtcaaaaatgctacaaatgagcaagaccttgcaaaccgttttaaagagtttgggaaagagatggtgaaacttaactatgtagcagcaagaagacaacaggagctgaaggatcctcactgtcgggatgagatggcagccgcccgaggggctctgaagaagaatgccacaatgctgt

SEQ ID NO: 37628 - DNA, 379 bp, Homo sapiens
  misc_feature (1)...(379): n = a,t,c or g
catctggcctaacccaacttttaaaagcaccccatcttttgacctttgagtagaagcaggaatgtactgtggtgctcttttttgagatcgcagaattccaaatatgttaattgttttcagttatacaaatgactaatgaattgaatgcagtctgatctcaaaggaatgtgctgggtttttgttcatttggaactaaaacattcaaattaagatggttcccttcaaaatttacacccttggaagagtcacatttatttcagggctctcgccatcaggcaaaacatttggaagtgccttcaaagtctgccgtgcattcttctgaatgtctganccatagaaaatgngtgcattttgaangtanantnngagnntgnatatg

SEQ ID NO: 37629 - DNA, 398 bp, Homo sapiens
  misc_feature (1)...(398): n = a,t,c or g
attttaaagcagagactattttggtggataggtgggagggagcaaggggagtttgagggaatcagagcttgatgctactgtacagaactggacaggttgggccngnagtgntgntgccananggctctgtgctctangagctaatccagcagcccccgagaggggacttgnntgcnccnttcctatgccttcacctgnctnattttactgcacctntntannccnnatggcncantgtnngnctgtcctnncttttntgactannanccatnccggncttnncannctccctcanttctcatatntccnttgactatcnnntgcctctcnnnnttnatnctgacntgngntnnnatantttncntcttatcnntccgntcnnttcnntnttttnccag

SEQ ID NO: 37630 - DNA, 390 bp, Homo sapiens
  misc_feature (1)...(390): n = a,t,c or g
gagcagctgccgaagtcagttccttgtggagccggagctgggcgcggattcgccgaggcaccgaggcactcagaggaggcgccatgtcagaaccggctggggatgtccgtcagaacccatgcggcagcaaggcctgccgccgcctcttcggcccagtggacagcgagcagctgagccgcgactgtgatgcgctaatggcgggctgcatccaggaggcccgtgagcgatggaacttcgactttgtcaccgagacaccactggagggtgacttcgcctgggagcgtgtgcggggccttggcctgccaagctctaccttcccacggggccccggcgaggccgggatgagttgggaggaggcaggccggnctggcaccttactgctnttgttgg

SEQ ID NO: 37631 - DNA, 378 bp, Homo sapiens
  misc_feature (1)...(378): n = a,t,c or g
nnnnnnnnnnnnnnnnnnnnnnnnnnnnnnnnnnnnnnnnnnnnnnnnnnnnnnnnnnnnnnnnnnnnnnnnnnnnnnnnnnnnngtgcgttttagagtcttaactagtagtttccccaataatgtaatgtgattttatctttgaaacatactgtaaggaaacttttgattttaagtaaaaaagcttaaaaatgattaatatctaaaaatgcttgtatacatatatatgtcctcagaaaaagcaagaacagcttgtggaataagcacgtctttaaggaattatcgatgtcagagtctatccatttaaagctgaagaccattacaggaaagtcatgttaaaatattcattggatatggtaaaggaggtactggnggctg

SEQ ID NO: 37632 - DNA, 385 bp, Homo sapiens
caagagcgccctctcctgagccctggcagaccgactgcaggtagcaggattgcaggaccctctgcctggcctggcgtttcaggagagaggggaagtggggcctgtgctctgggaggcgtggtcatccgagacaggagtccaggggagagaggaggggacaaaggcgccgtctgggggaggtcgatgagcctgtgctggcatccgcgggccccacgctttgccaactcctccagccacaggcaaggccacggctccgggctgttgcgctctaagggttctgtgattggatggaacagagctgctggggaggagactggaagtttctgcattccttcaacagaacatttaatgaagtactctatatatatatataaatatatattaa

SEQ ID NO: 37633 - DNA, 341 bp, Homo sapiens
  misc_feature (1)...(341): n = a,t,c or g
cgcctgcaggtaccggtccggaattcccgggtcgaggggcccaagcttacgcgtgcatgcgacgtcatagctctcnnnnnnnnnnnnnnnnnnnnnnnnnnnnnnnnnnnnnnnnnnnnnnnnnnnnnnnnnnnnnnnngatctgctagcttnnnnnnnnnnnnnnnnnnnnnnnnnnnnnnnnnnnnnnnnnnnnnnnnnnnnnnnnnnnnnnnnnnnnnnnnnnnnnnnnnnnnnnnnnnnnnnnnnnnnnnnnnnnnnnnnnnnnngctgcatatgcttgctgcttgagagttttgcttactgagtatgatttatgaaaatattatacacaggagcta

SEQ ID NO: 37634 - DNA, 380 bp, Homo sapiens
  misc_feature (1)...(380): n = a,t,c or g
gccggccagaacgggcggcgcgggggagatgcataagcttaaatcgtctcagaaggacaagggccgccagtttatggcgtgcactcaggctggcgagagaactgctatctactgcttaacgcagaatgagtggagactagacgaggccacggacagcttcttccaaaacccagactcgctccacagggagtccatgcggaacgctgtggacaagaagaagctggagcggctgtacggcaggtacaaagatccacaagatgaaaacaaaattggagtcgatgggattcaacagttttgngangatctgagcctggatcctgccagtatcagtgtattggtcatagcgtggaagttcagggcagcaactcagcgtgaattaa

SEQ ID NO: 37635 - DNA, 382 bp, Homo sapiens
tatagctgtgactattccatgtgtgcgatagtataccttgtttttctacccaatcttataccttacaaaactgctgtcatcactcactcgtctgtggttatcaccgccttaccagtggcacagcaaacccagtgctttctgtggatcctcctcctctgttgttaggaggtaaaattcagtttcaatttttcatagttatgaacatactataatcaacatttcggtgcttaaacctttttccaaatgtaaaatttctttacgatacatatttgccaaagaggaattgctgcatcagaaggtgtataattgcttttaagatttttgatatatccaagttccttttggaaacattacatcagtttgcactgctgctactgctagt

SEQ ID NO: 37636 - DNA, 389 bp, Homo sapiens
ggcaacaattcctatgtgttccctggagttgctcttggtgttgtggcgtgtggattgaggcagatcacagataatattttcctcactactgctgaggttatagctcagcaagtgtcagataaacacttggaagagggtcggctttatcctcctttgaataccattagagatgtttctctgaaaattgcagaaaagattgtgaaagatgcataccaagaaaagacagccacagtttatcctgaaccgcaaaacaaagaagcatttgtccgctcccagatgtatagtactgattatgaccagattctacctgattgttattcttggcctgaagaggtgcagaaaatacagaccaaagttgaccagtaggataatagcaaacatttctaact

SEQ ID NO: 37637 - DNA, 383 bp, Homo sapiens
gccccttttccaggaaccttgccacacccacacctgcagcctcccctccccggccctcccaccactgctgcggcgcggccggccccggccgtgtgctgcgcttgccttaccagctctctcctcgcttttctctcccgttttctctctgctttctctccaactgccagccgatcgggtcaggcaagtccatcccgtcctgagagccccaggccccccttcgacctctaaacagatccctcctcttctcggagacctccctttccaagcctgcctggacggctgttctgtgacttgacagtggctcccccagccccaaagccagcccccttcatctgtgacttaatctgttgtagtggtgagctgatacattcaggtgtgaccgt

SEQ ID NO: 37638 - DNA, 384 bp, Homo sapiens
  misc_feature (1)...(384): n = a,t,c or g
ggaataattatcttcctgcattttgatttcttagatcagaattttttaatgccatcctcattagttttccaatacaatataagttgaaacaatgtacaatattgtatattctttgttgcaagtggcagaaagtaaggttatgtgcatggccatgtgtttgtaggtgcatgtgttgaaataggaagtatcctagtatgtatttagatatgaaaaacttatgtgctagtgttgactttgaaattataacatgtatacctatatattctttgtgtttatttaaaagttttgaaaatatgcagtactgtttatattttgnataccttttaataggnatccacttaaggcatttgcngncnnanattaantgccacttncttggnccca

SEQ ID NO: 37639 - DNA, 403 bp, Homo sapiens
  misc_feature (1)...(403): n = a,t,c or g
cccacgcgtccgaattgataggattattttctactttaaaagaattttttttgaaaaggagaatttgtactgcctctctttattcttattattcttggactttccagattattcataatatcttagatttaatggtttataactctgaaaacacttgctaattccttgagtccacatacatgtgtctgctattatcactttgttcattccggtttgctctaaagataggaaggaatgaagaattcccttctttttcattcccttctgcagttaacatttccgttctggttctcattttatttggaaggttaaggttagtnttttgttgnttcttgaagaacttggattttaagttaagctcattttggangtgaagntctgnttcccacctggtggggagcaa

SEQ ID NO: 37640 - DNA, 405 bp, Homo sapiens
  misc_feature (1)...(405): n = a,t,c or g
cagacccccctcccgggtcctgagcccgaactcccagagctcacccgcgggtgaccgggggccagcccaggagggcgggtggtttgtgcgagttcccttgccacgcggggccccggccccatcaagtccctctggggacgtccccgtcggaaaccggaaaaagcagttccagttaattgtgtgaagtgtgtctgtctccagcccttcgggcctcccacgagcccctccagcctctccaagtcgctgtgaattgaccccttctttcctttctctgttgtaaatacccctcacggaggaaatagttttgctaagaaataaaagtgactattttattaggaaaaaaannnnnnnnnnnnnnnnnnnnaaaaaaaanngggggnncctntttnaaanancncntggggg

SEQ ID NO: 37641 - DNA, 392 bp, Homo sapiens
  misc_feature (1)...(392): n = a,t,c or g
gtttctgcggcagaccctgataggagcatgtagtcctcctgttccgctgctaaagggnctccgtaatgggaggaatcctttagatctcattgctccaggatccanactagaatgtcaagctttccaggactctttaagcacttggattgttactgtantagaaaacattggaggaaggctgaagctacgttatgaaggacttgaaagntctgacaattatgaacattggttgtattacttggatccatttcttcatcacgttggttgggctgctcaacagggatatgagcttcagcccccttcagccattanacatctaaaaaatgaagctgagtggcaagagattttggccaaagtgaaagaggaagaggaagagccattaccatcttact

SEQ ID NO: 37642 - DNA, 399 bp, Homo sapiens
  misc_feature (1)...(399): n = a,t,c or g
gagacaggaggcagcagacggacatccnnnnnnnnnnnnnnnnnnnnnnnnnnnnnnnnnnnnnnnnnnnnnnnnnnnnnnnnnnnnnnnnnnnnnnnnnnnnnnnnnnnnnnnnnnnnnnnnnnnnnnnnnnnnnnnnnnnnnnngcctcaatgtttctgtggacaaattcactgctatgtcttctcattttacccaagaccttctgccagagcagggcatacaagatgcattcccaaaaagaatactgagaggatatggaaattgtggccttgataatttatatttaaggaaagactgggaaagtttagatgagtgtaagttgcaaaaagattataatggacttaaccaatgttcatcaactacccatagcaaaatctttcaatataataaatatgt

SEQ ID NO: 37643 - DNA, 389 bp, Homo sapiens
aaaaatgatggatccagtttcacatttagcaaaatgttttcttttatattaaactcttccactttaactactcttcctaaaggtgatttgaaggttatacccatcagtaaatttagtatgaaaactttttttaaaaagctataaaagatgtttttccctttttgtctcatagttttgaagaatatttaccatcttaatagttttcacagaaagaaatgcttttgcatttttttaaaccctaagaacactaaggctatgaaatcttctcaaaatattaaaaagagagaaaacaatcatggcaactcacccggattaaccacactgcattcatggaattaagtttgactacgatacttttgtaatttattctaaatagaaaagtttctcat

SEQ ID NO: 37644 - DNA, 387 bp, Homo sapiens
caccttggtaacatactgttgatatcaagaacctgtttagtttacattgtaacattctattgtaaaatcaactaaaattcagacttttagcaggactttgtgtacagttaaaggagagatggccaagccagggacaaattgtctattagaaaacggtcctaagagattctttggtgtttggcactttaaggtcatcgttgggcagaagtttagcattaatagttgttctgaaacgtgttttatcaggtttagagcccatgttgagtcttcttttcatgggttttcataatattttaaaactatttgtttagcgatggttttgttcgtttaagtaaaggttaatcttgatgatatacataataatctttctaaaattgtatgctgacc

SEQ ID NO: 37645 - DNA, 397 bp, Homo sapiens
cccacgcgtccgcctgctctccctatgtctcaagccttctttccacaggcctttgaagagagcttcaggcgcacacctcaaagtgctgccacctacggatcagctgtattattagcaatagctgacactgtgaccagcctttattcacctgagctctgtctttatgtcatggttctcatcagcatccagggctcctttccttgctccagtaaggaaagtatatttggcttagggactgcacatacagcttaaaagaaaggaaatggtgcatggtcatgctaggggattcccagattcaaatctagtccattggcatcaaagaagggagacactgacaggaagtgacagagaaagatgtgacagtctaaaggataagagataaaaaggtcacggtgga

SEQ ID NO: 37646 - DNA, 396 bp, Homo sapiens
aataaatcaagaattctcaaaccaaccacctggggaaacagtttgttttaaacgttaaacccaattattccacttccaagtatttaagaaaaatgaatactagaagaaacccaaatgtccacccacaggtgaatggatacaatccatggtatattcatcagtggaatattacttagcaataaaaaaagatctgttgataacagcaacatggatgaatctcataattatcctgagcgaaaaaagaaaaaggccaaaaaatatatataaaccacattattccattgatattatagaaaataacaacctaatctctgttgacagcagacagatcagtggttgcctggagccaggaggctgggaagagtttatggggaagaagggaaggtgggactacca

SEQ ID NO: 37647 - DNA, 390 bp, Homo sapiens
  misc_feature (1)...(390): n = a,t,c or g
atnnnnnnnnnnnnnnnnnnnnnnnnnnnnnnnnnnnnnnnnnnnnnnnnnnnnnnnnnnnnnnnnnnnnnnnnnnnnnnnnnnnnnnnnnnnnnnnnnnnnnnnnnnnnnnnnnnnnnnnnnnnnnnnnnnnnnnnnnnnnnnnnnnnnnnnnnnnnnnnnnnnnnnnnnnnnnnnnnnnnnnnnnnnnnnnnnnnnnnnnnnnnnnnnnnnnnnnnnnnnnnnnnnnnnnnnnnnnnnnnnnnnnnnnnnnnnnnnnnnnnnnnnnnnnnnnnnnnnnnnnnnnnnnnnnnnnnnnnnnnngtnttggggccaggcntgggggttnatgcctgnaatcccaaagngctggnatnacaggcggtaagccaccgcntccagccnttattt

SEQ ID NO: 37648 - DNA, 388 bp, Homo sapiens
  misc_feature (1)...(388): n = a,t,c or g
gtacatcatcacccaagggcctttcaattgattgtcgctataatgccataggatttatggcaaacattactccagttttgtaagcgaaaatagaatatagggagatgaatagacttgacagtctcatggtgaagagtggaaaaattcctacttccaattatctaggaaccgtattttaggctgtcctacaggtaggcatttaacccttatgcctggggcactatactttcatagacatgtaatgagctctgtaggtgtgaacttttccatttgaacaccctttccagagtttacatggttaaccctgacaaatcacaggcctctttgaaattcatagcagctagcctcaccctctgcacttcaaaatctgnaacacactttgagcctg

SEQ ID NO: 37649 - DNA, 380 bp, Homo sapiens
  misc_feature (1)...(380): n = a,t,c or g
tatttatgttaataggacttaattcttactagacatctaggaacattacaaagcaaagactatttttatgcttccataacctacaattaaaaccaaattatgaccttatgataaatctttaagtattggtgtgaatgttatttaaattctatatttttcttatttaattaccaatactatacatgagcaaggaaaaggaatagactttcttaatatattataacactcattcctagagcttaggggcgactctttaatattaccttatagtagaaactttatgtaatatagctaactccgtatttacagaacaaaaaaacacagntccccctcctgtagtataaattttattttcacatacttagctantttagcagtaa

SEQ ID NO: 37650 - DNA, 384 bp, Homo sapiens
  misc_feature (1)...(384): n = a,t,c or g
gatattaatcgagcggccgcccgcgatctagaactagtccacgaggcggctctcccgaacaccggctctgcacccccagggcccggggaaccaagacttccccaagggcccagcaaaagtcccctgacaagcccaccaggccccctgctgagatggctgtgaccctgggctgacccgcccagtggcacattgactccgcctggagctggggagaccagagaggccctgtggttggacggtggcctggntgcgctgntcctgccctctncttgncctgcctcagctgctgcctgccanagtgtgnngatggngnnngatactctggntgctacntganaacantgggccgatncctggggnttntcaaggtgagcacctcacctt

SEQ ID NO: 37651 - DNA, 322 bp, Homo sapiens
catatatatacacacctacacatggccaaccgcctcgcctctagcgctgggaatcagtcactgtgctatccttgtggagtcttgtggcccaactaccagagaacgctgtcccccgacatcccactccaaagtgtgccacctccagtgagcctccttgtcatgcccggcctgtggacagccagcccccgccatccctcccaccccctaccaagcatgggggtgctgtgcaggcagccgtgtggcctgacagtttctaccagtcctgctgtccctcggctgagaataaaacccatttctggatgatggggaaaaaaaaaaaaaa

SEQ ID NO: 37652 - DNA, 405 bp, Homo sapiens
  misc_feature (1)...(405): n = a,t,c or g
caatgaactgtctctggattttattaagcatctcactagttccttttcttcagctgtatggcaccctgtcttcctgtacaccagaggctcctcagctgggtaaggtgagccaacgttaccaggagtatatgctgagaggccatttcaaagtctttcatagaaggctgtgcttgggcaagtagaacttttcatcatacagtcccagagatgtgaagttatcaaggtcagagaagaggaaaagagactcagagaaactgtgttctctagtctttcattcgggaacaaatggtgtcgtaccaaatggctgaaaagatcccaggcttactctgagaaacatctctctcttctgaattaaacttgcacagtggctaacaagngtttggttggnggtgacaaagtaataaa

SEQ ID NO: 37653 - DNA, 385 bp, Homo sapiens
gccatccatcgacgaggtcaggcagcagatgcacatgctgctggaggaggccttcagcctggcatccgcgggccacgcaggccagagccggcaccaagaggcctacggctcagcccagcacctgccctattcggaggtggtgaccagcgctccggggaccatgacgcggcccagggccggggtgcagtgggtgccgacctaccgcccagaaatgtatcagtacagtctgccccggccggcttacaggttttcccagcttcctgagatggtcatgggctcaccgcctccacccgtacctccccggactggtcctgtggctgtcgcttctctcaggcgatccacctcagacatcggcagcaagaccagaatggcgagtctacagggc

SEQ ID NO: 37654 - DNA, 396 bp, Homo sapiens
tgcctcttgttttttgctgctgtaacttaccagaaagtgttctatatttatttctgtttgaatttgaaacagtgctatgcttacaagacttcataatgattttatgtcttgctttaaagatagtacctgcataatagtttttgaatacacccacattttgtacgtttccatgtaagctgacatagtgttctgccatgtaatgcttatagctgctgatgtatgcacatttgggggtatatctatttctgaagaggtaagctgatcaaaataaatagagtgtaaattctttttaatgctttagtgattaaatgttttagtattttgaactgaaatggacacacaaacacacacacgcacacacagacccacagctttgaatgatcatgttgtggcttg

SEQ ID NO: 37655 - DNA, 387 bp, Homo sapiens
ctggaccctgtgcaagctgcagcgccaggaggaggcagcggaggaagcagagcgcgggatgggcgcccagcggcatctgtgatcccgcgcacctccgccccacgggcgcgcgcacaaacacggacacacacatacacacactcgcgcacacactcgcacaaacacacactcgtacacgcccgcgccgctcgctcgccggcttgctctcccacgcaagcggaatgcagcagcgcctggagagcgtgtcttggaccgccgcctgaatgtacctcgctcccgggagccggacggcccagtagggcgcactggaggacgctccgctgcgggagcctggacagtttttgacggtgcagtcttgctatatggagtgagaaatggctgtaggaa

SEQ ID NO: 37656 - DNA, 379 bp, Homo sapiens
  misc_feature (1)...(379): n = a,t,c or g
ggacacccatgttcatcacaagactatttccaatagccaagaggtgaagcacctnnnnnnnnnnnnnnnnnnnnnnnnnnnnnnnnnnnnnnnnnnnnnnnnnnnngtgaaaaaccatgcaaccttagtaaaggaaggaaatcatgtcacatacacnnnnnnnnnnnnnnnnnnnnnnnnnnnnnnnnnnnnnnnnnnnnnnnnnnnnnnnnnnnnnnnnnnnnnnnnnnnnnnnnnnnnnnnnntcatagcagtnnnnnnnnnnnnnnnnnnnnnnnnnnnnnnnnnnnnnnnnnnnnnnntaggagagggagttagtatttagtggtatagagtttcantcnactttnctncctttncttggngagnattncntttt

SEQ ID NO: 37657 - DNA, 384 bp, Homo sapiens
gaaagtttatcttgggagttgagttgtcaagagaattataatttatgaatttaagtggtattcttttctgtattaatatattagcagatatttgatcttaactacaacatagctttgtttgtaaacttaccagtatgtcttgattcttttcaatgtttcttgatagcacatggcaataccatcatcctaataacagaagatcttgcaaagaatcacagagcttaatgggtcaagaagttgaatttggggaaaatatcctgaaactcactttggtcaaatgattattgtgttgtcactggaagtactgtcaaagactttgggggtctaactaaaatggccaaagttccaacttccttaaatttcagacctgactgtaatggcctc

SEQ ID NO: 37658 - DNA, 390 bp, Homo sapiens
attctgtgttactactactatcaagtatgttagaaaattaattttgataaattttttagtttcaggttttgagtatgtgacagttttttcctctttactcttttcaaaaggtattccagattaggtgagctaaaaatctctcacaattacttttgtgtatttacttgcaggaccattgcagagcttattagaccgagagcactgggtcagcaaactacagtcctctgacccacggcctgttctttggaatgcccatgagttaagaatgttttttatatttttcagtggttaaaaaacacacaaaagaagaataatattttgtgcatgtgaaaagtatatgaaaatcaaatttcagtgccatatttaagttttattggaacacagccatga

SEQ ID NO: 37659 - DNA, 391 bp, Homo sapiens
aacggagtcacagatgacagattattaaagatgaaaaaagctttagaaactatctgattcaccatccttattgtataaaggaggctctgagaggcagaaaggtggggtgacttgctcaaaggcaaagagctagttctagcagaagcaagacaacagcttaggtttccagactcccagatcaaactcctctgtactattcaggggaaagggcaaagtggagagaacataggatgtctaggccaaggaggacaatggaatcacaggtaccataggtggaaccaaggagacttcttgaggaaatggcaatgtagtatcccaaaccctgtgaaatgacatcaacagatgggactacctagcagcaggtaaaagctgccaattagaacaaaagtgc

SEQ ID NO: 37660 - DNA, 383 bp, Homo sapiens
  misc_feature (1)...(383): n = a,t,c or g
cgagaaacgtggacaacgccgagggctccgacactgactactgaccgtgcgggtgctctcaccctcccttctctccctcaataatgctcacttctgatttgatgttgatatacttttatggtaactacatagatgttataagaacataaaccaacattataaacaatggccacatttagttactctaaatgtaacaaagaaattagatgtttttatttttctgtgattgtacaaaaacaacaaaaacgaagtgctctcagtcaggtttttccctccatatttttggtcacttttgataagtttgcatgaaaccattttggtgcatttttagttgggaatggtacatttttgtaaatccacccagtgaacatgaaattgnacat

SEQ ID NO: 37661 - DNA, 390 bp, Homo sapiens
  misc_feature (1)...(390): n = a,t,c or g
ccgagggggtcggcccgggggtcccgggggaggtggagatggtgaaggggcagccgttcgacgtgggcccgcgctacacgcagttgcagtacatcggcgagggcgcgtacggcatggtcagctcggcctatgaccacgtgcgcaagactcgcgtggccatcaagaagatcagccccttcgaacatcagacctactgccagcgcacgctccgggagatccagatcctgctgcgcttccgccatgagaatgtcatcggcatccgagacattctgcgggcgtccaccctggaagccatganagatgtctacattgngcaggacctgatggagactgacctgtacaagttgctgaaaagccagcagctgagcnatgaccatatctgctacttcc

SEQ ID NO: 37662 - DNA, 383 bp, Homo sapiens
  misc_feature (1)...(383): n = a,t,c or g
atcagctggatgtgtgcagtgagctctatagaggagcaatgcagagcatcagtttacaggtactatggaaagaacatctccttaactctgtatgatgaagcaaataccaatacaatgaaggccacggaaaggtatgatatatttgatccaagacagtccattccagtccgggaatctacagtggtgacaaggacatgggactcctcctgccagattacagatggttcactacagttgacatcctggctgacaactgtgaaaaagaaccttggattattttattttatttttgtgggacaccacaatcccaaatccaaaggacgcatcaggcttcaagctccctgtagaattcgaaaataaccttttctaatgaggatgnctga

SEQ ID NO: 37663 - DNA, 380 bp, Homo sapiens
gggagggggagcccatgcgccacaacctagggggcaacctgggggaccccagagcccgggctgtctcagtgccccttggcggccgtgtggctcgctttctgcagtgccgcttcctctttgcggggccctggttactcttcagcgaaatctccttcatctctgatgtggtgaacaattcctctccggcactgggaggcaccttcccgccagccccctggtggccgcctggcccacctcccaccaacttcagcagcttggagctggagcccagaggccagcagcccgtggccaaggccgaggggagcccgaccgccatcctcatcggctgcctggtggcatcatcctgctcctgctgtcatcattgcctcatgctctggcgg

SEQ ID NO: 37664 - DNA, 383 bp, Homo sapiens
gcccggcaacctggctgtgaacgaagactgtgagctgaagatcctggacttcggcctggccaggcaggcagacagtgagatgactgggtacgtggtgacccggtggtaccgggctcccgaggtcatcttgaattggatgcgctacacgcagacggtggacatctggtctgtgggctgcatcatggcggagatgatcacaggcaagacgctgttcaagggcagcgaccacctggaccagctgaaggagatcatgaaggtgacggggacgcctccggctgagtttgtgcagcggctgcagagcgatgaggccaagaactacatgaagggcctccccgaattggagaagaaggattttgcctctatcctgaccaatgcaagccctc

SEQ ID NO: 37665 - DNA, 402 bp, Homo sapiens
  misc_feature (1)...(402): n = a,t,c or g
gactaatataagggcagtgggattttcacagatgcatgccatgttgtcgagagcctcttagattttctcaactgtgagaaagaaaaacgaaaatgttgaagacgttgagtctggagaggggatactaatcactgtccagttgggcactggtgggaatggggaaatggcacaggaatgcaagcctctccaccctaccccccgaactccagccatacactcatcgtttcacaaaatataaatgagttagcattaaatgtttcagagtaaataattccttttcccgaaatgcatgatgatagagtaacagacttctcacactgnatttttagggtatggagaatttanaaggttnaagaattactgcttnaatttttcagttaanaaaanancaggaagctctgt

SEQ ID NO: 37666 - DNA, 383 bp, Homo sapiens
aaatgctgctgtgaagacccaattaaagctttcacataaatgaagctacagctatcatgatttagtgcccccaaaaggaagaacttcagtggacaagaaaggacatttctgggggtagtagaatgcttgaggcctggaatttaaacctgagccactatctgaagctattaaataatagaagaaaatggaattgaatatgatgtcagcatggaacaatctaatgattcattaagagtcaaccataatgacggtgaagagtcaaaaaccagtgctcaagtatttgagcatctaatctgtatggactccagggattcttcctttggacaaaatgattctcctacagttttgcccatcactactcgtgaagcaaataattcactcat

SEQ ID NO: 37667 - DNA, 401 bp, Homo sapiens
gtcatcttatagccctatagtaaaactctcatcctgctatactgattcctcagttatcttactaatttgataggcttagctctccagaaggccattggctagaaaggaaaagggaaaagtctgagtatcaggagcaaataaaaagctcaaagggactaaaatatccatgcatacatgggacacagtgtgattggatgctttttctatctttatggaagaaatgtttttaagatttatatttgtcctaatgtcaccaggctctgcagcaccagagtacaaacagagtaattcagattggtctgaagtggcaatgggagccattagctaactgcatactagaccttcctatgacctgtttcagccctcttatttcagtgttgagggacgggagctctgaggca

SEQ ID NO: 37668 - DNA, 392 bp, Homo sapiens
aatgtgttttgtctttttttattactagtgtttaagtcattttttacttgaatcagatggtgtcatttagtaaggattttatgagttcttgttttttaaaatccagactttctttttctacatgtgagatagttttcattttaactggcatgtcatttgcacacaaaaataaagactagagcaaaataatgcaacgcaggaggagaaaagaaatgcactaagacaagaacattctctcatagaacattgatctgttttacaggaaacaaaccttgccttgaaatttacacagtgagactgtacataattgcatgaaaatagctatttttttcctaagacatttttcattcatgaatattttcaagtttttcatactgtacacatttcttaaa

SEQ ID NO: 37669 - DNA, 395 bp, Homo sapiens
taaggatttcagagatatcatttggggaataactcaccaggtagagaaagtttgacctgatatgttaacaggcacaacaagaacttatttcaatgctttctcaccatctgccccttctctgagagtttagcctttcttaggatacttccttttccaggctagaaaagattgattgtattcatatcccaaagtaaaggctcctccaattctatcagatgtggaggcaacagaaaatgactcatgttatttttctctcacttcacagcatcaagaactcttcttgtttatgtgggggccatggtggattagcttgaggaactgtcaaattaaaatgaaaggaaagcaagttggggcaagaaaattctcactctgaatgtgaaagaaaatagcagtgg

SEQ ID NO: 37670 - DNA, 389 bp, Homo sapiens
caaatttgccacaaatactgtaatactctgtagagtaaaatgcaaagattattcctgttacaagttttctctgtatcaagtgcaggaaaggaacatgggtagagtcatgtaccattcttatcagtcaggagatgacacgtggtaaatttctcttcttgattttcctcttgattatactcacataagggagctccatttggtaacaaagatgaaattctgttcacagttaacaagaatttagcaacttcttgcttggcaaaatctgagacaaccttacaaaaacatcctacattaaattcagaattttgggtagctgcataagctgaagattatggaaaacctgagctgaaaatggcacctggatctgtaacttcttgcttgaactcttt

SEQ ID NO: 37671 - DNA, 394 bp, Homo sapiens
cccacgcgtccgaagaaagggagcggacaggaacccaaggcagtttgaatgaagcaactccaagcaatagtaaagcatggccaccatgaacttgaactctgacctcagattagctttcttatcggagccaataagggaaacgagcagggaaatagaagcgtggaaaggaaatgcggcctcctcctagcaccagatccaaggattaaggaagaataaggctatatgggcatattcataatttttttaaagatttagtagaagatagatcacacggggtttaaaaacaatgcagctctattgttttgcttccagtgtttactaggctccaagtggtgagaaggagaagtgggacataaacatgggaaatgcatgaagcggtcttactcaatatctc

SEQ ID NO: 37672 - DNA, 393 bp, Homo sapiens
gtcccagccaggacagtttttggggtcaccacggtgctgaccatgacgaccctcagcatcagcgccaggaactctctgcccaaagtggcctacgccaccgccatggactggttcatagccgtgtgctatgccttcgtcttctcggcgctgatagagtttgccacggtcaattactttaccaagagaggctgggcctgggatggcaaaaaagccttggaagcagccaagatcaagaaaaagcgtgaagtcatactaaataagtcatcaaacgcttttacaactgggaagatgtctcaccccccaaacattccgaaggaacagaccccagcagggacgtcgaatacaacctcagtctcagtaaaaccctctgaagagaagacttcttgaaagcaa

SEQ ID NO: 37673 - DNA, 403 bp, Homo sapiens
  misc_feature (1)...(403): n = a,t,c or g
gtgaatggcaaagcgagaagaggctgtaccccccacctaccatgacttccttattaggcacatggggaatgtgaggcccagtgggtgaaaggggcctgaaggggcacagctgggacaagaacccagaactccagccccccagtccagggccctctactgcccaggctgtgcaaatggggctgggaccgaaagatggggacagtcaggctgggaggcgggcttactggccagccagcccaggggcagcacaggcactcgggcaggaactccccaggaagtttggatccttccttccctaggatctcagcacccttttagatcccgtgcagattgtctttctgttaaagcgttttgnnnnnnnnnnnnnnnnnnnnnnnnnnnnnnnnnnnnnnnnnnnnnnnnn

SEQ ID NO: 37674 - DNA, 413 bp, Homo sapiens
  misc_feature (1)...(413): n = a,t,c or g
ggatgtctgaaaggggcaagtctgtttgtgtggggtaagaaatgcggggagacaaacggacagtggacagattgcagagagctctgtgtgctgagaggagggtgcagaccagatttttaaattgagaatgcaacagtgaaggatttcaagcttggagtgagaggggagactacgagcctgcagtgataaggcaaagctgaagatttcagagccaaggccacaccctacagttgccatggaatggggtggcacagtgggctttggagctaaagtctgcagttgagaagttcaagggtagtaagtacttaatgccaggtcaatcatcccttttaagacacagatatcatctgcagccgttttcaggaacagcgatagagangaaaagcaggcagctactagatattcaaatcttc

SEQ ID NO: 37675 - DNA, 380 bp, Homo sapiens
ctcatattctatcaaccatcgtatttcagtctactgaatgttatggttgatagaatatgaggagagaaacaagcagacataacattcagtagactgaaatacgatggcattttgagcagtgcaaaacacaaaaatagtagactatcataatcatgaaacaatgctttctttggtgatttcatgctctatgatgggaagatctggtgctgaaatatagtatattttgcttaaaatgttttcttgaggttggcaagcttacttttgacagaacttatgtcttttaatcactatattccattatatgataaagtgaagagatctagaaagttggaagattatgaattgcttattatactctgtgttattttaaatgtattcat

SEQ ID NO: 37676 - DNA, 401 bp, Homo sapiens
  misc_feature (1)...(401): n = a,t,c or g
aaaggggcattaggtattaattgcatgggtctaactacattgatgatgagagtttaattccaactagagtatattttttgtttattaataatgaaattggtgctgacatgtaatgacttcacaagttttacgagggaaaactgaaaaaggaagtaatataaattttgtggggtttttttgagatggagttnncncncgctnctcanatcccnnngnccnccgncnctncgcnccatatccttnntcnagtcctctntcctcatcccnntncctacntntgccntcattnccatnacngatncctnnctcnnccacgacntatggtnncntnnncttnngactttnncncttcgnattcttttctcatgncngnanctatgtncccggnnnnctnnccccct

SEQ ID NO: 37677 - DNA, 390 bp, Homo sapiens
  misc_feature (1)...(390): n = a,t,c or g
cccacgcgtccgcacatttattgaaaacctatactattgtattggcaccatacagggtattgtatttatactagtgagcagaccagggcatttccatcctcatggagttcatggtctaatgaaaatagctnnnnnnnnnnnnnnnnnnnnnnnnnnnnnnnnnnnnnnnnnnnnnnnnnnnnnnnnnnnnnnnnnnnnnnnnnnnnnnnnnnnnnnnnnnnnnnnnnnnnnnnnnnnnnnnnnnnnnnnnnnnnnnnnnnnnnnnnnnnnnnnnnnnnnnnnnnnnnnnnnnnnnnnnnnnnnnnnnnnnnnnnnnnnnnnnnnnnnnnnnnnnnnnnnnnnnnnnnnnnnnntgcagtgagctatgattgccactgtactctatactcc

SEQ ID NO: 37678 - DNA, 394 bp, Homo sapiens
cttagctctcccgtagtcagcgcagtttagcagttaaaagtgtatttttgtttaatcaaacaataataaagagagatttgtggaaaaatccagttacgggtggaggggaatcggttcaattttcacttgcttaaaaaaaatactttttcttaaagcacccgttcaccttcttggttgaagttgtgttaacaatgcagtagccagcacgttcgaggcggtttccaggaagagtgtgcttgtcatctgccactttcgggagggtggatccactgtgcaggagtggccggggaagctggcagcactcagtgaggccgcccggcacacaaggcacgtttggcatttctctttgagagagtttatcattgggagaagccgcggggacagaactgaacgt

SEQ ID NO: 37679 - DNA, 395 bp, Homo sapiens
gctccacctgggaggggaggcagaaatggaggaacgggcgttcgtcaaccccttcccggactacgaggccgccgccggggcgctgctcgcctccggagcggccgaagagacaggctgtgttcgtcccccggcgaccacggatgagcccggcctcccttttcatcaggacgggaagatcattcataatttcataagacggatccagaccaaaattaaagatcttctgcagcaaatggaagaagggctgaagacagctgatccccatgactgctctgcttatactggctggacaggcatagcccttttgtacctgcagttgtaccgggtcacatgtgaccaaacctacctgctccgatccctggattacgtaaaaagaacacttcggaatctgaatg

SEQ ID NO: 37680 - DNA, 404 bp, Homo sapiens
  misc_feature (1)...(404): n = a,t,c or g
gactacccaacttttggtgatatgcagtgaaagaatcccaattttctatgttacatttaatcaaatactgacataatgaatttatctttcctgacacattttcattcattggctttttaatttcttattttattaacaaaatatatcagatatattaccaaaacacatggagttccatacataatatggaatttgatgtcttttcaagttgcacaaagaatttgagcatatataattttaccaaagcataatggaccttagattatagaatacagcatttaggtctgcagtgggcagtttctttttgttttgctttgtcaaaaatgggaaattgttaactgtgatgaaatgtgagaattacatagattatgntattttttagttgntttccaaatgcagagtta

SEQ ID NO: 37681 - DNA, 401 bp, Homo sapiens
caagcttatatccttaatcacctaaagatcagagtgtgaagaaacaaacctgtgacagatctgtggttgaggtttagactacgggaggagtatattacctgactttctttgtaacttgtaccatgactggggcagagattgagcctagtgcccaggccaagcctgaaaagaaggctggggaagaggttatcgctgggcctgagagagagaatgatgtccctctggtggtcagacccaaggttaggacccaggcaactactggggcaaggcccaaaactgagaccaagtctgtgcctgcggcaaggcccaaaactgaggcccaagcaatgtctggggcaaggcccaaaactgaggtccaagtaatgggtggtgcaagacccaaaacggaggctcaaggaatc

SEQ ID NO: 37682 - DNA, 410 bp, Homo sapiens
ctgtttggaatctggttttctcagcggcagcttgacatgtgcacccttttgtattaaacactgcaagggtgatgcaggggagcaggaaagccatcctaaactcactactgagtacgattcagtatgttcctgtggatgtctgctgtgactaatataaatttcttgcagaatcagctacacttaattatgttgctgatagacaagcatccacgcttcagctggcactaagtgttttcattgtaggatcagcagcaggttaaagactgaacggttagtgaagacaaatgtcttaagaggctgcgatgtctaggttgggcttgtgacttcttagtggcctagccttcttgatggcaccttgaaagtgaacttctagaaatctacatttaaaaggcaaagctttaaaagcagag

SEQ ID NO: 37683 - DNA, 397 bp, Homo sapiens
gtgtttcataaaatacagtttactttttccccccattttaagcacagctttaccatctctgcaggtatttgtttcagaaaaacaggaaatgctctctctctctctctatatatataggaatttataatgtttcatagataaaagggctggtttgtcaaaatagccatttttagaatatttattaaaaacaatgaatgaagttagagtaccaaggaagaacacaaaggaaaccacatatattatagttggaggaattatatcatgccatatttatatcatccaactttacaacgattaaagttcacaggataaatctaatactaaataaatggtaatagtagtagatggagacaagatatcattgtataacatagaatctgtcataaagtgttttttc

SEQ ID NO: 37684 - DNA, 387 bp, Homo sapiens
  misc_feature (1)...(387): n = a,t,c or g
gactagttctagatcgcgagnnnnnnnnnnnnnnnnnnnnnnnnnnnnnnnnnnnnnnnnnnnnnnnnnnnntcaggattcttaacaattaaagtgtatctgaatgaggaaggaaacgcttgtcattctctagtcttacccaattaatactgacaccttttgaaattaaaacctgattttttagttgttggagccagtaggaaaaatggctgatttgaacttttttcctataaatgaagtagtgcttgcatgtgtgtactctaatgcactttagtctatgatctaaatgtccttttatgctattatcttctgcatgcaaactttacatacatcagcatgaatatccaacattcactgaacacagtgccaccagcacttgtaattgcc

SEQ ID NO: 37685 - DNA, 400 bp, Homo sapiens
cgctggagttcggacgctttgaaacagtttaaacagttggaacaaacacacccggagccccggaaaggcgttggtgtaggagctgcgcctccctgatttggagttgcagaaccttgccctgcttttatctcactttaccgcccgagaatggcgccagccggggtggggggggctaaagatttggacccagaccgtgccactgccaactgccctcccgcccttgctcccttcccgggctggggccagtgggccctgcctaggggagatgtggacagcgccggcagctcgtgttcgcagtcaccctgaacgccctcctctgaactcccacgtgtctccattctcctaagctcaggtcgtcaaaggcaaacggagaacccctttaggtcggagagtggtcagt

SEQ ID NO: 37686 - DNA, 344 bp, Homo sapiens
ctcaccgacaggcaagggcgggcaggagggggcagtttcgctgctctaaggggggaaatgggcgtcaggggcaggaggcagggatggggaaaggatggacctgtttctgtttccagtctgtggtgatgctgtctgtctgtctgagtctcgtggccgcccctggaccagtgatgactgatgaatcttatgagcttctgattgatctcggggtccatctgtgatatttctttgtgccaaaaagaaaaaaaaagagtggatcagtttgctaaatgaacattgaaattgaaatgctttatctgtgttttctgtaaataaaagagtgcaataatcaaaaaaaaaaaaaa

SEQ ID NO: 37687 - DNA, 407 bp, Homo sapiens
gtggcctcctctttgcaggcatctttcccgtgtgctgacagagaaaccgaaggaaaaggtctctagaaatcacagttgtcgggggataaaaagagatcaggggttactatcacaataaacttaagtcccaagtccctgagtagaggtagcagtaggaggggcagagatgcaacttgataaagggtaactaactgggtcctaggaagaatgacttcactgggttgtgttttccacttttcagctgagaaggcactgattaactccctcctagccatttaattgagttcagacctggcggggggcttacccatctggaaacagacacggaagaagattctcactaatcttgccctggaaaatgaccaaatcccatgacctggttttactgactgggggcaaaatcccct

SEQ ID NO: 37688 - DNA, 402 bp, Homo sapiens
  misc_feature (1)...(402): n = a,t,c or g
ctttaaaaggagagaattattgcaaaccacataagatatttagtctgcattaggaaatgaaaatgcaagaaacattctgcaatgtggaatgaacaaatatgattccttaaaatgcataaaactcagcaaggacagaaaaccacgctgtttctccactgtgctgtaaacacagtggtcaacaaaaccacattaacattttgccatgcctttgtcaataacttttcttggcagcctcagatatagccttcacttgcaagacaagntgaaagggtcttgtaacatctttctcttttgaaaaccaatttatcaaaatgaaaaccttttattgttgatttcaccataaagttagtagaatctcagaaaagatacagataatgcatatgtgtctgagaaagagctcct

SEQ ID NO: 37689 - DNA, 401 bp, Homo sapiens
gccagaatctggtcctaataagttacccttgattggcgccatctggcaccatctcactttattctcagtagcccctgggagggtatacgatcacccctattgcaggggaggagacccagcacccagagactgagggcatcagactcggagccaggaacctggcccttctcccacaccattctagaaaggagcttcagataagcctcagagactgggggtgcaggggcctgacagggcacccagcaggcactatccaattcactccccaatctgcccgccagccttccatgccaacctgttctgccacctgcttgcagttccaggcactgccaccctcaggcaggtcacctgtctggtggcccaggggttctgtggtcccatcctcagatctcttctctgca

SEQ ID NO: 37690 - DNA, 408 bp, Homo sapiens
  misc_feature (1)...(408): n = a,t,c or g
aacaaaggatgaagaggagagaaaaggaactcacatttattgagggcctactgtgtgcaaagtgtttcatgtatatctcattgaatgtatacagccaccctgttgtggtataattttgctctttataaagagaaagaccgaagctcagatgagttaagtggtctcctcaacaccaaaatgccaagaagtgatggagcctagacagaagcccagaactttctgactcacactagtccatcctctaccatcacgatgactttcaaattgtgctctgcagttctgcagattttctagcagtgccatctccaaaatgtgttttaaactctttatttttttaattannnnnnnnnnnnnnnnnnnnnnnnnnnnnnnnnnnnnnnnnnnnnnnnnnnnnnnnnnnnnnnnnnn

SEQ ID NO: 37691 - DNA, 400 bp, Homo sapiens
  misc_feature (1)...(400): n = a,t,c or g
acagccagagcgggatgcacgcctaggcagacagggcatccacattaatctggataaaggctgcttcttcagccacagctaaggtgcatgtaataggaatgagagccacctgtgtttcagaaagcgtctgggattttagagctgcttgtaactgcagcctaacacagcctcagccgactgatacatccagtgtcgtcaaaacagagcagttatccttcatgaattccactggggattctgctatacagcttcataagaaactctgggggtatcatatctcaaaccaagctccatcttcttcctccagtttaaaagaccagcatcttcatggagacagtgactgaaaccacaaagtgaacctagcagccggctcattggttgagaaacagttgnttcatgg

SEQ ID NO: 37692 - DNA, 408 bp, Homo sapiens
cttgtcttacgctttccgagcaagttcaaaccagaaagaaaaggtgaggctagaagcccaaagtgagtgagtgtgaggaccacaaggaagcccaccactccacagtagatgatcaaaaccacatcctcacgtgggaggtagcacttggagagggtgtagtctgtgggcgtgatgctaccctggaaaggagaagggaaagttatgctgagagcaccaggcacaggttgaacaccgcagtcttagaaacagcagagggaagactgccttctcaggtccccctcaggtgaggcagggaacgggccctcctcacctgagaccaagggggcccagccttctccctgcacagctcacccccgaccagcccaggctccagcaggagagacaactaaggcccaagtgtgcctgagt

SEQ ID NO: 37693 - DNA, 408 bp, Homo sapiens
gcaaccgccggaatggcgaaagcaacaacaatcaaagaagccttagcgagatgggaagagaaaactggccagaggccatctgaagccaaagagataaaactttatgcccagattccccctatagagaagatggatgcatccttgtccatgcttgctaattgcgagaagctttcactgtctacaaactgcattgaaaaaattgccaacctgaatggcttaaaaaacttgaggatattatctttaggaagaaacaacataaagaacttaaatggactggaggcagtaggggacacattagaagaactgtggatctcctacaattttattgagaagttgaaagggatccacataatgaagaaattgaagattctctacatgtctaataacctggtaaaagactgggctgag

SEQ ID NO: 37694 - DNA, 409 bp, Homo sapiens
  misc_feature (1)...(409): n = a,t,c or g
gtttttgtttctaaaaatggctttgtcttatctctatttttaaggagtatttttgctgggtatagaaatagattggcaggggttggtctctttgtcaaactctaattgcatctgatctaatttccagttatcaaggaaactatacttttgattcttccagggaaaaagtaaacacactgaatatttcattatatttgagtgaacataaattctacatttcctaaacttgggaatagtaatatataactatggaacctcattcaggaaaaanaananaaacnaaaaangggaaatgacaagatggnacannaacaaaaanannnngggggggcccccntnaaanancccccnggggggcccngntcttacggntgtangacagtgccctgttncctctatagaggggaaa

SEQ ID NO: 37695 - DNA, 401 bp, Homo sapiens
agggagcagagagacccaactgggagccagagatggaacttcaggtcttaagtgcaaatcaaagcaaaaaacaaacaaaacttacatggaaaaactgtaagtgctgaaagcaagtttagccatgacaaaccaaagagtgcccaggtcagccaagaaagatacataatctcatgggacttcagtgggagttacacaggaatgttgaagaatcattcttctttttcatgcatttgtccttctcccacccccttactacaccctagcagatcagctgagtgtactttattccaagaacttactggatctctggtttttctcctgaagttggggcaggtgcaattccaagcataaccaccagatggcagagtgaccgcgcatacctgcttccaagaataaaacag

SEQ ID NO: 37696 - DNA, 399 bp, Homo sapiens
gcacttaaaatgtaagtaattctgattttattctcaagaacttatttgaagattcaagccaagcaatgctgaaaaaagctaggcctgcaaaactaaaacatagcacgagcctctcaaaatttccaccaaatatacaaaatccagtctgctctgaatgcgcatcagaaacccaactttggttattagccctggaatttggtgccaaaaacaaaaatttggttttgttgtcaagcaatttctaaaggaagaaacaatgtaaatattaatctgtcattttaaatgttgttgaaactgccatgagtgtgcacacagctctctgtttcatacctgtaatcagtattcgcatgctttcagtccactgtttctacttaaagcattattccgtatttcagcacagaa

SEQ ID NO: 37697 - DNA, 389 bp, Homo sapiens
gagggcactaaaagctatgttccatatcgtgacagcaaaatgacaaggattctccaggactctctcgggggaaactgccggacgactatgttcatctgttgctcaccatccagttataatgatgcagagaccaagtccaccctgatgtttgggcagcgggcaaagaccattaagaacactgcctcagtaaatttggagttgactgctgagcagtggaaaagaaaaggaagaatgagaaggagcaagaggagaggaggaggagaagaagaaaaggaggtggaggaaaaatgagtaggagaagagaaaaacgaggcggaggaggagaggagaaggaggaagaggaaaagaggagaaggacaagagaggaggaagaggaggacaggagagga

SEQ ID NO: 37698 - DNA, 388 bp, Homo sapiens
  misc_feature (1)...(388): n = a,t,c or g
tttcattttgtgaaagaatagcatacaattaaaacataaaaattatctctagtttattttaaatgcttatttattgtttctcattaaaatcttctgtttatgattattctgcattatctctaaaattttactgccacacagtgcctgtcaatgattcgaaatacctgccttccatgagtacacagttacagtcaaatactgtagttatctagacaattttttttaatggtacatcagtgttgcataccacattatatgagtaaacattttacttattgttgttttgcagttccgtattagtgtgtttttttcaatgtagnnnnnnnnnnnnnnnnnnnnnnnnnnnnnnnnnnnnnnnnnnnnnnnnnnnnnnnnnnnnnnnnnnnnn

SEQ ID NO: 37699 - DNA, 388 bp, Homo sapiens
  misc_feature (1)...(388): n = a,t,c or g
tctacacctcctgactccctctgagcaagtctgaaggcgctgccttcccagggaccgtgatggggcgggaaggggcaccatgactttggggccactgctagtacatttgtacccttaagaaggagcacagnnnnnnnnnnnnnnnnnnnnnnnnnnnnnnnnnnnnnnnnnnnnnnnnnnnnnnnnnnnnnnnnnnnnnnnnnnnnnnnnnnnnnnnnnnnnnnnnnnnnnnnnnnnnnnnnnnnnnnnnnnnnnnnnnnnnnnnnnnnnnnnnnnnnnnnnnnnnnnnnnnnnnnnnnnnnnnnnnnnnnnnnnnnnnnnnnnnnnnnnnnnnnnnnnnnnnnnnnnnnnnnnnnnnnnnnnnnnnnnnnnnnnnnnnnnnnnnnnn

SEQ ID NO: 37700 - DNA, 390 bp, Homo sapiens
gggataactagccatcagtgtttgcagaagacctcaaaaatattcatgtacatgaaatacactaattaacagagtagaactatataaaaggtttagttaattagtgtatttcatgtacatgaatatttttgaagtatttgggataactagccatcagtgtttgcagaagacctcagtctgttttgggccattacggaaacactaagctaatgtagactcgcctggccatttcctggtttcctcctgcattctgctttacattcttgaagaaagggataaagtggcaggttgaaaaattatcccatttcttctcctcatggtgtgcgttctgttttgtaagtattattttcttgcatgtgggcaagtgtcagggatgattcccttaaagct

SEQ ID NO: 37701 - DNA, 407 bp, Homo sapiens
  misc_feature (1)...(407): n = a,t,c or g
cacacaggctgaatttttctttataataatccttggcaaaagcataacttttcaaaaaccaaatgattttagtggtgctatggcagctgcagttttgagttagattaatgtggtgaaaaccatcaaatacttagaaattgactgggattataggcatgatcactaaattgttgtaagaataagataatgtttgcggaagcatttgagttctccaaaggaaaagctattcagacgttcaagataatagaagagtgttgtgtgaaggattcctttccagtttgcctctgtgaaaatgtctttgttgtagatcattttatgaaataggaataagagaaacataggccttatcatggtgtagtgttcacttacaaacatatcctgttgnttcttccctgcaagatatccac

SEQ ID NO: 37702 - DNA, 409 bp, Homo sapiens
  misc_feature (1)...(409): n = a,t,c or g
agttacttttgcaaacagacagaaaggatacacttctaaccacattttacttccttcccctgttgtccagtccaactccacagtcactcttaaaacttctctctgtttgcctgcctccaacagtacttttaactttttgctgtaaacagaataaaattgaacaaattagggggtagaaaggagcagtggtgtcgttcaccgtgagagtctgcatagaactcagcagtgtgccctgctgtgtcttggaccctgccccccacaggagttgtacagtccctggccctgttccctacctcctctcttcaccccgttaggctgttttcaatgtaatgctgccgccttctcttgcactgcttctgcgctaacacctccattcctgnttataaccgngnatttattacttaatgga

SEQ ID NO: 37703 - DNA, 396 bp, Homo sapiens
attcaggaattatagatgtgtatgtatattttttaagtacagaaagttcagccagtcttcagagaagtaaaagtgatgtctattgtgcattgaagtaaatattacaaacattccagtttcgcaatacaatacttgagctttcgaacacctcagacactagaatgtgtaatgcgagtcaaaaaagctgacatacaaaacaattcccatttggctcagggttcctaaatgtcacaatatcttgggtaaaatatactttttgatttcctgatgatgtccttctaatcccttctgactttgattcctaacagccaggcactgttgacatgaatcattaacttccaaacccctttaaaatcaagaagctaggtgatcatacagtcatttcaatggccaacc

SEQ ID NO: 37704 - DNA, 394 bp, Homo sapiens
  misc_feature (1)...(394): n = a,t,c or g
gtattgttcgttctgatatgtgaatttgtttgtgacaactaaacaaggcattcagcagtttctgacaattaacatacatcattccacactccttgtcaacaaagtgctttttcactgcctaaaattttagatgtagatatttgaaatagattttttcatttataccagttttcttttaacactgtatcatcataaagaaaataaattacaattgatctgtcatccatatttgctaagaatgtctatttccaagaacctatatcttacaaaatacacattcttgcttgtgtgtctgtgtgtgtgggtgtatgtatgtccacgtactagaaaaattacctgtgtgagattttattttgacagaagctatttcatttgctgntcatcttgnacaaac

SEQ ID NO: 37705 - DNA, 391 bp, Homo sapiens
cagctctttattgccgaggtaggagcactgggttcttcgctctcctctttgcctccttttgggggataatcaggactgattattcctctactggaagaggtgactcagaccccacagagtaggtgtgatgtcactgctctggcagtctcagtttaaccttcacactagatctcatcatgcccagaaaccttgtaacaggagcccagctaggtgggtgcacctggcatgagctggacaaggttttctctctgaccttgcagggatttagttgttctctaaggagctaaggaatgggctgattttatgaccagcagctgtccttttaccatcctattaacagtctctttaatagtctgggagagggacatgaaggacccaaggcaggaagttt

SEQ ID NO: 37706 - DNA, 398 bp, Homo sapiens
ccttaaggcatatactttgtctttctgcagaaagacaaagtatatgccttaaggataacagcaaagcagaggacagagaagtcttaaggcatatactttgtctttctgcagaaaattctacctggctacaattactttgaacattaatgttgaaaaagaaaacaaccaaagaaaattggtacttacccttctacaaaagaagtgtgactagatatcaatcagtaattaacatatcaaggagctcttctagctaaatgaccatccagtagagatttcccacattcccatgaatatcaagaatagttgtcagaatatgtatgtacctgagcatatgtacacagacaagggggatgttgtggaatatggcaatagcattgtcttctcccctttcaaattgc

SEQ ID NO: 37707 - DNA, 394 bp, Homo sapiens
ggttctccctaacctcggtaccttgactaccccagtggaaggtcttgatatacagttggaggtattgaaattgttggcggagatgagttcattttgtggtgacatggaaaaactagaaacaaatttaaggaaactatttgataagttattggaatacatgcccctccctccagaagaggcagaaaatggagagaatgctggtaatgaagaacccaagctacagttcagttatgtggaatgtttgttgtacagttttcaccagttgggccgaaaacttccagatttcttaacagccaaactgaatgcagaaaagctcaaagatttcaaaatcaggctgcagtactttgcacggggcctgcaagtttatatcagacaacttcgcttagctctccag

SEQ ID NO: 37708 - DNA, 404 bp, Homo sapiens
gactagttctagggtcgcctcgggcagggtagccagcggctgcatctgaggcggacgccgcagtgtagggcacaccctgagggtagcgagagacgtgacaggaccgagcagctgggggctgcagcctgctctgtccccaccgatcccagagagaggctgtgagtctggatctgggcgttcgcaccctgagagagggggtcaaagctcccctgcggccccgaggaagaagagcaaggttgaggacagcctcgggtcaccagagtagtttggaggcaggcctgcaggcgcgtccccgctcctcagctccaagctgacgtatctacacctgccggcgggcattaagatggctggttatgccactactcccagccccatgcagacccttcaggaggaagcggtgtgtg

SEQ ID NO: 37709 - DNA, 401 bp, Homo sapiens
  misc_feature (1)...(401): n = a,t,c or g
nnnnnnnnnnnnnnnnnnnnnnnnnnnnnnnnnnnnnnnnnnnnnnnnnnnnnnnnnnnnnnnnnnnnnnnnnnnnnnnnnnnnnnnnnnnnnnnnnnnnnnnnnnnnnnnnnnnnnnnnnnnnnnnnnnnnnnnnnnnnnnnnnnnnnnnnnnnnnnnnnnnnnnnnnnnnnnnnnnnnnnnnnnnnnnnnnnnnnnnnnnnnnnnngtggcaccttgttatggccgcctgagcctactaaggcaaggctgggaaaaagtaccccatctcgtgtgtaccccatctcgtgcataccccacagagttccaggctgcctggtgctccaggtactcccctctaagggaagggtggagggggtgcagagatggagaacataccctttctggagtgacacatgaac

SEQ ID NO: 37710 - DNA, 404 bp, Homo sapiens
  misc_feature (1)...(404): n = a,t,c or g
gtgaattcccccgtctccctgaccccaatgtggtcttccccccaaccccaaggcgctggaacactcagcaggactctaccttggagagacccaagactctggagtttctgcctcggccgcgtccttctgccaaccggcaacggctggacccttggtggtttgtgtcccccagccatgcccgcagcacctccccagccaacagctccagcacagagacgcccagcaacctggactcctgctttgctagcagtagcagcactgtagaggagcggcctggacttccagccctgctcccgttccaggcagggccgctgcccccgactgagcggacgctcctggacctggatgcagaggggcagagtcaggacagcaccgtgccgctgtgcagancggaactgaacaca

SEQ ID NO: 37711 - DNA, 405 bp, Homo sapiens
attcagaatcatatcttcaagtttaaattcttattacttgaaaacgaatgggacttcacatattgtttctctaagcaaacagaaagtattgacatgtcttttagttgcatttaatggtaatgtgacaggagtatgttatctatgtactatgcaaactattacgtaattattttaagatgtttagtctggttcctcaggtggaatctggtctagttacccttgtcaggtaacctgcaaatttacttgaagctacattaaccactgttgagctttgactctgagctgcatagtggccaaagcccagagtcttcatttctcaatcagagcctgaaccacagattagcaacaagttggggccagtggtatctgctgactattcctgcttgaccttcaatgctggtcctc

SEQ ID NO: 37712 - DNA, 393 bp, Homo sapiens
gataatttctccaatatctaaattctttttctgagaaaacaaatgccgaggacatttttgacactcttcttacatgagactatgaaaaagagcagcacttttgttgtagttgttgttgttaataaaaaggataataacatacagaggattataagaaaaataagacatacctgaggttttgtgatgagctatagagaatcaagggcagttccagtggagctgaggctgacaaagtactgcccagctgccagccaaatccacccttaagttgcttttgtatggcctgggagctcagaacgaattttttaaattttttttacagctttaaagtattaaacagaaaccaacaaagaagaatatgagacagggacgtacgtggtccgtaaagtttaa

SEQ ID NO: 37713 - DNA, 383 bp, Homo sapiens
  misc_feature (1)...(383): n = a,t,c or g
gtgcatggaggccagtgaaagctgacatctgtaaaaggccttcaaggaagagaaaccaggccctgcgtcaggcagtcgtgagtttgccgtttgtccttaactttcttttttttttttnaaaaannnaaanntttaaaaaancncccnttaaaaccaaancatntttnngntntnannaanggaanttnnaanattngatggganttnngttctgaannntagnanntttttnancctanaangcccccngttttatnccnttttaatcntaangcnggggtattgnntnagngcntgtntctnttttttnttttttaaaaangcnggggngnaananngggnnnataatctgggtnannnnacncntttnaanagatntgaaa

SEQ ID NO: 37714 - DNA, 396 bp, Homo sapiens
  misc_feature (1)...(396): n = a,t,c or g
agacttagccttaaagagcctacagtgtccttttggactctttcacttcgggacatttaataatggaccaaattcaacagaacaccaggaaggtcaagacgctctccaaagggcaggaagtacagcacttccgaagagtttagttggccctttgctggttgggctgagttttttatttttaagtgtttgtttttcagtgcaataatttttgtgtgtgtgtgattcttatcagaaagttgaattgttttctgcctacaccgttcattagccccataacccaggaaggaacaggcattgttagcatcagattatacctcattattaaaaggaggcatggccacacatgaagaaatggncantctacttcaaagaaattgngccagcactatctgtact

SEQ ID NO: 37715 - DNA, 393 bp, Homo sapiens
  misc_feature (1)...(393): n = a,t,c or g
atttcagacactttaccaaagaggatataccaatggtaactgaatacataaaaagattctaaacctaagtaattattagagagacataaattaaaccacaatgaaataccatatatattcactagaataactataatgaaaacaactaacagtatcaagtgttgcatgaatgtggagaaactggacttnnnnnnnnnnnnnnnnnnnnnnnnnnnnnnnnnnnnnnnnnnnnnnnnnnnnnnnnnnnnnnnnnnnnnnnnnnnatacacatgtcacataactatttgataactaggaactttattgaatgtgaaataaaatctactagagaacaatgtaaatatatgttcatacgaagacttggatattaatgntcataggagcattattcaa

SEQ ID NO: 37716 - DNA, 398 bp, Homo sapiens
  misc_feature (1)...(398): n = a,t,c or g
cccacgcgtccgggcaaagactttcccagagaggtggagaggaagcgtctccaacagtgtccaagcagcaaagcctacccaggttaccagtggggagctggcagactgtcaaatcctattcttttggggtaatccatggccagaagcttttgtggaactcactacaggggatgtggctgcttgtcagagatgcaaacaggagcactgaagcttctgggcttaagtgatgacctcaagaggactcctgaattaatgtctgtacagtaacttctcagagtctggttaccagtttcctcagctcttccggcacatggaccatgatggctgccccagatggtgccttcagctccccagtcaccatcactgnggnatatgctgttggtatctaccccgatgcc

SEQ ID NO: 37717 - DNA, 403 bp, Homo sapiens
caaggagcctgggtccttggtaactgtagaaccacagtcaggcctggaccttcattctagccatgtagatagtagggaaataaatatctatcttgtttgtaccatgattacttgagttttctctataaataacaattattagtcaaaataatacaatagctaacatttatttggcatttactacataccagacactgtgctaagagctttatataaactctctcatttgctcaagacagtaacagtttcaagcaattattcctatcctcagaaagccaggccttatggagaaaagataactttctcagagtcattcagctactagggcctgaacataggcctatctgatgctgatgccatggtcaggctgtgagccacagccacatacacaataaattccatt

SEQ ID NO: 37718 - DNA, 401 bp, Homo sapiens
cttcaaaacataatgtgcattgcttatgaatgccttcatatactaatacagatactctgataatattacactctaataaggataatgctgaattttgaaaggacacaaaacatctaatgccaatatatacatgattagccaacatctttgctatcaagaccacttgtttttaaataaagatgcaagtgtcagttgtagattattgggatgaagctaaatccccagaatgcagcagcagctgagcatgttaaaatggggaaggatgatagctacatgtatgccggtcctactcacgcgacacccgtgtgctcaaaaaagttatttgtttttgttacgtgtgatttttctatttctctagcccaaagtgcattacagaagatcacctatagaaccattacctt

SEQ ID NO: 37719 - DNA, 397 bp, Homo sapiens
  misc_feature (1)...(397): n = a,t,c or g
aatgaatcacagaaccaaagaagcaagttatggaggagcccggtgtctctataccagtccagtgtatttccacttctgcctctcctctctcctccttcaacagagtcgttttattttttcctaccaaagtgttgcctgatctgacaacatcccaaggtttccggcttgtcctatgctctccgttgactcccccgactcttgcctggggacccattctatgcctgtctctcagggattaacttccttccctttgtctttcttccatcttccaacctgttttgcccttactctcagcagtcaaggctaagaacctaagaacctagccttgccttccaagcaagaaaggaaaggaatcagctgcacagatcaggagagaaggtttggatatcanctgcat

SEQ ID NO: 37720 - DNA, 399 bp, Homo sapiens
cagaaatcattgagtgaagtcagaatagagccagcatgggtacctttatgtaaagttcaaaatcagaaaaaactaagtatattgtttagggactcagacacaagtagtaaagctataaaggaaagacagttattaacattcaggaacatagtttcctcaggagagggtggtggaggggaatgagaacagaggggagaacggggacttggaagcacttcataatatgaacgtttggaccattctaaacatgccagttctctgagttaatgtatattcagtgtaaagccaattcagataaccaacagtatttatataatctaaaaaactcatggaagtataaacagatgaaaataggaaaatccccattgaaagtgaagaaaatggaaggaacttgctgta

SEQ ID NO: 37721 - DNA, 403 bp, Homo sapiens
gtcaggagtagggaggcagacggcaagacctccttccatgaaaggaggctgggaccaggggaccaggtagtgcaacgcggtgagggggctgtcagggcgactggccggaggagtcagaggcaggaggcaccaccaggttacagacaaggaccttctacaagagggaaacgtgtcatgggctctggagcccctgtccaggttcaaattgtgaccctgtgccagggacagcttctttgtgcctcagtttttcccataaaatgaggataataatacttcattcatgcctttttttcccctcaacaaacatttgttgtatgtctgctgtgggcccaggacaggaggctgagaaggagctgaccacagtggtcacacagccaagccctgctgctgagatctgacccag

SEQ ID NO: 37722 - DNA, 348 bp, Homo sapiens
  misc_feature (1)...(348): n = a,t,c or g
actagttctagatcgcgagcggccgctctagaggatccctcgaggggcccaagcttacgcgtgcatgcgacgtcatagctctcnnnnnnnnnnnnnnnnnnnnnnnnnnnnnnnnnnnnnnnnnnnnnnnnnnnnnnnnnnnnnnnngatctgctagcttnnnnnnnnnnnnnnnnnnnnnnnnnnnnnnnnnnnnnnnnnnnnnnnnnnnnnnnnnnnnnnnnnnnnnnnnnnnnnnnnnnnnnnnnnnnnnnnnnnnnnnnnnnnnnnnnnnnnngctgcatatgcttgctgcttgagagttttgcttactgagtatgatttatgaaaatattatacacaggagct

SEQ ID NO: 37723 - DNA, 383 bp, Homo sapiens
gaaactaattaactagtagaaactaattaaaatggtttattttgatgtgtgggagttagtaaagttttagtttcaaaactgggtgatatttaaagttatagaaagtgaggaaatgaagtacatttgtgatatatttatttaaggaattgttggaattaaggtatgtcttgaactgtgagttacaaatatgtagctggatctcaatagtaattcagaattggagatgaatgtgttttttatatgttttgtggtgatggacccttaggaatggaagaaatgaattgcctatagatagcagagaaggactgattgattggtagcaagagaaacaggaaacatcctgtgttagaattccagggcctcactattcatgaagaaaaggg

SEQ ID NO: 37724 - DNA, 389 bp, Homo sapiens
  misc_feature (1)...(389): n = a,t,c or g
atggcacgttgctagtttacagggttttgtgagtttaaatgccttatatttaacaatcataatttatgactaacttgtagatatcgtgggttcttatttaattatttttatagttgttttgcatttttaattataatttatttatttagaaaggatactaattttttttattactcctattacctcattttggcgttgtttctgggagtggaatgctttgcatgcattggtacgatgacaaacaactacgaatacnaaanaaaaatttaaataaaattctgcaaactttatttcgcccgaactatcagggggngtgattgcaagctgcctaccgggggngctggcctctttggatacattncatacgaaangcaaacctttgattctgg

SEQ ID NO: 37725 - DNA, 317 bp, Homo sapiens
  misc_feature (1)...(317): n = a,t,c or g
ctaccttcttcaggctgcctaagacatgtaacgaaacacttcaataattgtccatgaggagaaaaaaagcatgtgtcatgcatgaaggaaactgaacttgaggtggcctccttgcttgttacatacctgggtatgtgtaggcagtttagtgcatctttgcctctcagttgaaacctgtataaccctgttacaaagctgtgttgttgcttcttgtgaaggccatgatattttgtttttccccaattaatngctattgngnnattntactactnntntctgnannnnnncttgcnnngcnntntnnacnttgnngacct

SEQ ID NO: 37726 - DNA, 400 bp, Homo sapiens
gtttttgattttacagtttgctaaatcttattttcttggagttgctttttggtaacagccccattgctactccccattttattgttttacatcaatgcatgcttcgttgtgatccctcaagatgtaacacttggtatgctcggttgaggatatgaaaatacttccgaaaccaggaattcaatgtatgtttgttttatactgtttgataagaaaagtaggtccagccttaagcagcacagatgcgctggtagatgcatagtcaggaactttttttatttcttttaggtctagggacaggagtgaatagaaagggaggagagctctattatgttctatacacagattatgagatgaccttactgggtacacccctctaaccagtgcttacaggttaatgccg

SEQ ID NO: 37727 - DNA, 388 bp, Homo sapiens
cccacgcgtccgtgctcttcatctccctgctctggatcatcgaactgaataccaacacaggcatccgtaagaacttggagcaggagatcatccagtacaactttaaaacttccttcttcgacatctttgtcctggccttcttccgcttctctggactgctcctaggctatgccgtgctgcagctccggcactggtgggtgattgcggtcacgacgctggtgtccagtgcattcctcattgtcaaggtcatcctctctgagctgctcagcaaaggggcatttggctacctgctccccatcgtctcttttgtcctcgcctggttggagacctggttccttgacttcaaagtcctaccccaggaagctgaagaggagcgatggtatcttgc

SEQ ID NO: 37728 - DNA, 391 bp, Homo sapiens
gggtgatggcggagctacagcagctgcaggagtttgagatccccactggccgggaggctctgaggggcaaccacagtgccctgctgcgggtcgctgactactgcgaggacaactatgtgcaggccacagacaagcggaaggcgctggaggagaccatggccttcactacccaggcactggccagcgtggcctaccaggtgggcaacctggccgggcacactctgcgcatgttggacctgcagggggccgccctgcggcaggtggaagcccgtgtaagcacgctgggccagatggtgaacatgcatatggagaaggtggcccgaagggagatcggcaccttagccactgtccagcggctgcccccggcagaaggtcatcgcccagagaacct

SEQ ID NO: 37729 - DNA, 361 bp, Homo sapiens
agaaaataaatgaaaacaaaattttaaggtataaaaaattagtgtacctcattattatttctgggtaaattttttgtcttttaaaaaatagtgcctaaaacattgtcttatctatgtgacattcagtgactactaattgatggttattgtgttgaattactcctattaaatgtgggttccacatacttggtttcaatttatacattccatggaagaatagacatgttttattatcatcatctcttggcattttttttcaggataacagacaatggaagtaggataagtgtaaactttttgaagtatgttattaatgttatttgattttaaataatgaataaaagaatgagaatgagaaaaa

SEQ ID NO: 37730 - DNA, 393 bp, Homo sapiens
  misc_feature (1)...(393): n = a,t,c or g
ccaccctggaagctcatcaggccaagacccggacagagcttcagaggagtgttgagtgacacctgaggatgcggctgcacacactcagccaagggccgagtctcacctgcggtggggtttcggctctgcctgggggctccatccctttcagccactcgtggccttggggatttctggttgtccccagctgggactgttcacagatgtcacctgcagacctgcctctccctggcctgaggttcaaaggcctcatcggatggtcagtacagtggggtcacctgctgtttctatacaacagcagggaaggggccangnagctttttcctgctgggttgctcctgtttggcccagccactttctggngctccaagctaggangnctgtggcccaccc

SEQ ID NO: 37731 - DNA, 395 bp, Homo sapiens
  misc_feature (1)...(395): n = a,t,c or g
ctttatcatggaaggaaccaaatccaaaaactctaagcagagagcagagtgcctggaagagctgggatgtctggttgagtcctatggcatgaatgtttgccaaccaaccccaggaaaagccttaaaggaagtagctgttcacataggagaccgtgacaatgctgttctcactgctgcactnnnnaccnttgtancggtgtncantgttcntggggnttaanntgttcntantgntcgtnnatctttttttngatgtttnngtttcttttnntgnnnnttntctgttctttntntnncncttcttnttnngnnatnnngnnngtntntgaattncntntttgtttntnngttnnntntgncntngnnnnctgcntnttntagntgcnnngantcct

SEQ ID NO: 37732 - DNA, 394 bp, Homo sapiens
  misc_feature (1)...(394): n = a,t,c or g
cggacgcgtgggatcttttactgatatgaccaccagagctacatggcttttaccttctgtatatcagatgtcactggaatcaagcattaaacctagattaaatctggattaaaccagctgtatggcaccttagaaaattgagaaggactaggaagctgatagaaagaactcctgtataaaaaataaattctttttacattttccttggtagtatttctgcaagcttctttagtttctataggggaatcccagagttttcctctgagattgcttccctttcctttgtattttcatttttccctcttgggctttacttttcagtcgtgtatttctatcccaatgttaatttattacactgnttatattttcctgccttcaattcatcagtagatta

SEQ ID NO: 37733 - DNA, 395 bp, Homo sapiens
ataaaagatttgtccttagagaaacaaatgaccagtattattaaaagcaagatttctgttaacttgagtcaagcagagagaaatccagatttagtcattcattaacatatgttttgtggctaacaccacaggtggtgaaaatgcccatatgtttgtgtccttgattctgctttttataactgtaattcttccttcatttttctcttactcccaagtgtgtaggaactcagattttctttagtatttcaaaatttcagtagtagtattgtagtgtagcttaaagtatctagttttcagcagctgagtaattgtggagcagttttataacttgaaatcctctgcacaggattcttgaccttctgttcatcagcagaatagttcagtgatactctctt

SEQ ID NO: 37734 - DNA, 402 bp, Homo sapiens
ctagaggtggcgccctgcacccggcggaaatgaagagaatcagactacccaccttggattctgatatgaaagatttaggataaaagagctactccatcagcctggaaagatgactcactggcaaactcttagataaagatggcagaagcaattcttcagtgaaggcttcaagcaacacctccaaacttctgacacatctgggaagcggtactgtagagctgacctaccttgaatgagacctttaaatgttgattctctaactgcaggtcaacgcttcttgactccctggttttccttcttgactcactgctcaggagactgcccttttagtgataattctgctccacttctgctttcaacctgcatattcttcatgaggaatctactggatccttgatccta

SEQ ID NO: 37735 - DNA, 145 bp, Homo sapiens
gctccacacagcttaattccagatggagaacgtccttaatttaaaataagctttacttcactgataacggttgataagaatgattttatagctcctggatttcaagatatgtaatcaatttcttctttttctttttttttttttt

SEQ ID NO: 37736 - DNA, 398 bp, Homo sapiens
  misc_feature (1)...(398): n = a,t,c or g
nnnnnnnnnnnnnnnnnnnnnnnnnnnnnnnnnnnnnnnnnnnnnnnnnnnnnnnnnnnnnnnnnnnnnnnnnnnnnnnnnnnnnnnnnnnnnnnnnnnnnnnnnnnnnnnnnnnnnnnnnnnnnnnnnnnnnnnnnnnnnnnnnnnnnnnnnnnnnnnnnnnnnnnnnnnnnnnnnnnnnnnnnnnnnnncagaagcctgattatcagactgcccggaggagacaggctccagcagatagatgccagccaggcccagctgccacgatttgtcccaggtgaccaaaggcacgcagctccagcatgaatcgttctaacccaacagtgacaagaactgctgggccttaaccgtcatggaagactggggccgcttccaagtcacagacaggagacggggac

SEQ ID NO: 37737 - DNA, 392 bp, Homo sapiens
gtggaatcagaaacacatgttacagatatggatttttaagatgaccaacattttgcaaaacaagattggacactactaaagcaactgctctctgaacaggattcaaacttagatgttacaaattccgttcctgaagacttaagtttagcacagtatctaatcaatcagacactacttttagcacgagatagctcaaaacctcagggtataacacatattgacactttgaacagatggagtgaactaacatctccacttgattcctcagcgagcatcaccatggctagtttttcctctgaagattgttcgcctcaaggcgagtggacaattctggaactggaaactcagcattaagtgttaacattttggaaaaatttatgccactcctttat

SEQ ID NO: 37738 - DNA, 400 bp, Homo sapiens
gctagccagagaattaccttcagctgtatcacgagacaagtcttctaaagttccaagtgctttggcacctgcctcccaggagccctcccccgctgcttctgctgaggctgatggcaagttaattcaggacagcagaagagaaactaaaaatgttgcatctggaggtggtggggttggagatggtgttcaagaaccaaccacaggcaactggagaggaatgctgaaaacttcaaaagctgaagagttattagcagaagaaaaatcaaaacccattccaattatgccagccagtccacaaaaaggtcatgccgtgaacctgctagatgtgccagttcctgttgcacgaaaactatctgctcgggaacagcgagattgtgagggtattgaacgactcattaaa

SEQ ID NO: 37739 - DNA, 392 bp, Homo sapiens
  misc_feature (1)...(392): n = a,t,c or g
gactccagtggggtgatggtttattgacgatatgaccaattccttcgggaagttctcaaactacccacggcagtttttgaaggtccttcatttggttacacagaacagtcagccagatcctgtttctcccaacagaaaaaagtcacgttaaatggtttcttggacacgcttatgtcagatcctcccccgcagtgtctggtctggttgcctcttctgcatcgactagcaaatgtggaaaatgtcttccatccggttgagtgttcctactgccacagtgagagtatgatgggatttcgctaccgatgccaacagtgtcacaattaccagctctgtcaggactgcttctggaggggacatgccggnggntctcatagnnccancnccanntgaaa

SEQ ID NO: 37740 - DNA, 393 bp, Homo sapiens
ttcttctcccatataaatactgctctttcatcaagatttaagtgtagcctctttaatgaagcctctttaaattatgacatattccttaatctatagtctttgtgtgtgtggttctcgtcaacaaaattttaagctgattttgaaatggttcctattctgtgctattgcagtgaaagttctcttaactgatgtttggttagccagtgctctccattccctttgtatgctgtactgactgataaccttagcattaagactaggctctattacatctatccacttctgtttccacccttggagttgtatgcttatcaaaagtcagttgtgtgatacctggaccccacctccagaaaatctgatacaattagtctgtagtgtgacctgaatattggg

SEQ ID NO: 37741 - DNA, 392 bp, Homo sapiens
aaagcatgctatgctcatttcttgaacttgaaataaagaaattaatttttaattgttattagttaaatgggaacaaaataatggccttgaattttacaaattcatacaaatttgcaaaccttttttacttcctaacagtcactgactaatatttggatggcaacttttgctatgagaatttctataagaatatgaggcttttggctcataagtcgtcatcttttctaatagaattacagttaagactcattaatgaatgtgctcattttccttctgtttactaacatcagttactttttgtgtttgttgaatttttattttgtttattaccggttagtttcagcctgtgtttttttgttttgtttcgattcatgtatatttattcttccctg

SEQ ID NO: 37742 - DNA, 385 bp, Homo sapiens
  misc_feature (1)...(385): n = a,t,c or g
cccacgcgtccgtagatgtttgtgctctgcccaagagattctgatatactgtgatttgatgtgagccacgatgtgaattattataaagttctctagttgattctgatacacataaactatgaaaannnnnnnnnnnnnnnnnnnnnnnnnnnnnnnnnnnnnnnnnnnnnnnnnnnnnnnnnnnnnnnnnnnnnnnnnnnnnnnnnnnnnnnnnnnnnnnnnnnnnnnnnnnnnnnnnnnnnnnnnnnnnnnnnnnnnnnnnnnnnnnnnnnnnnnnnnnnnnnnnnnnnnnnnnnnnnnnnnnnnnnnnnnnnnnnnnnnnnnnnnnnnnnnnnnnnnnnnnnnnnnnnnnnnnnnnnnnnnnnnnnnnnnnnnnnnnnnnnnn

SEQ ID NO: 37743 - DNA, 388 bp, Homo sapiens
gcaaagagcagaatttgggatgacatggaaggaacctagggattgaagctctaccaactccaaaattccagaaaggcagtattgggcgaagtacacaaaggaaggaaacatttgtcctcaatccactaaggcacaagcttcgtaaaaatcagcagctgtttcagttcaagaatctcctgaagaaaaatctccagctaaggcaattgtgatgcaaagacaagggaaagaaccctctaaggcacaggattcgtaagcccaaggaattctagagggggaggcagtagcagcagacaaatggcacactgctaaaaatgcctttagatatttttgtggttggagaaatccagaaaaatgaaaaaaaaaagcagaagattgacattgtggagaa

SEQ ID NO: 37744 - DNA, 386 bp, Homo sapiens
aaaagacgttcattatgtatgaaaagtaactgatttgtattctgtgagcatgtaaaagcggaaagttagtgcttgttctaagattaccttcttgttgataaaccataaatgaatcatcaaagctcacaccaaatttttctatcaaataaaactagtgacagcttgtggctttttattagagctcgccacgaactagggtaaggtgagtgtcttagcatattttaatgcagttgcttactaaaggttttaaccgcacatgcacacacacacgctttcttatgcaatctatgtttgcacttgtgctttcagttagccttctgtaggaagtagaagtcatatgttgtctttgttgtagtgaaattatacagatagagttccatatattg

SEQ ID NO: 37745 - DNA, 385 bp, Homo sapiens
ctccttcaccctcaccctgaggccccaggggagaggacccgtgggatggtgcccaggggttgccttgggacctcggatctcctctggggggcttggctgctgctgttgctgctctgtatttgcctctcgtgattctgtttgttacccatgttcacttcccccaggagaggccttggtaccccctctcccctggggcatccctttgccttggcatccctgtagcccagcaaccctgcccctccccagcatcccagctgggccagagagagccgagtgtgccaacaaggactggggcctgcccggctgcccgcctcagggatgggcacctcatgcctgtctcgccacctcctgtgccaatgtcccaccctccacctggggggggggg

SEQ ID NO: 37746 - DNA, 393 bp, Homo sapiens
  misc_feature (1)...(393): n = a,t,c or g
caacttcgttctatacggagcctgacggatttatcccagacggtctaacaaaaggaagaatattgatggattgtaagccatagtttttaaagagcttgagaatacggggaaattaacttgttctcctacacacatagatagggtaagggtgtttctgatgcagctgagaaaaatgcagaccgtcaaaaaggagcaggcgtctcttgatgccattagcaatgtggacaagatgatggtccttaattctgctttaacggaagtgtgctaagactccacaacatgtgaggagctgcttctcagtgaaggaagtgtggggaagaacaaatcttctgcatgtcggaggaaacgggaattcattcctgacgaanttaaagatgctntgtattgcgaaaa

SEQ ID NO: 37747 - DNA, 400 bp, Homo sapiens
  misc_feature (1)...(400): n = a,t,c or g
atctattagaaacatacaataacaccattgaaagctgttaagatccatccagatgatatgtgtatttctaaaagtataaaaatgtaagatagtaattttagactggctgtggtaatctcttaaattatagcaagatggttccgtttgtcacgtagaaataaaatgctaactgtaattccaagggacatatgtttagtggtttgttcaaagcaattcaaataaattaattgtaaatcacagcgaggagacagcatgtgtagagggtgagaatacagattctggaacctggttgtgtgtcgtttatttcatnnnnnnnnnnnnnnnnnnnnnnnnnnnnnnnnnnnnnnnnnnnnnnnnnnnnnnnnnnnnnnnnnnngtaaactgtgaataataagaatcc

SEQ ID NO: 37748 - DNA, 392 bp, Homo sapiens
ctccctgtttggcccagacagggggcgggtaagacaatccatgctctaagatccattttagatcaatgtctaaaatagctctatcgctctgcggagtcccagcagaggctatggaatgtttctgcaaccctaaggcacagagagcccaaccctgagtgtctcagaggccccctgagtgttccccttggcctgagccccttacccattcctgcagccagtgagagacctggcctcagccctggcagggctctctcttcaaggccatatccacctgtgccctggggcttgggagaccccatagggccgggactcttgggtcagcccggccactggcttctctctttttctccgtttcattctgtgtgcgttgtggggtgggggaaggggtccac

SEQ ID NO: 37749 - DNA, 398 bp, Homo sapiens
  misc_feature (1)...(398): n = a,t,c or g
atacattttaatgtgtaggcaaatttgcatatacagaatccataatgaggatcaacttatttgcaaatcataatacagacagtccccaacttatgatggacttaagatggatttactaacacataatcccatggtaacctaaccccatagtaaactgagaaacacatggatttataatttatgatnnnnnnnnnnnnnnnnnnnnnnnnnnnnnnnnnnnnnnnnnnnnnnnctacagacacagaccatcgcactgggcttataatcactttttaaaactgaaaatgaaaggtgttggcaaaaatgtggagaaactggaatgcttgtatattgctagtggaacgtaaaatggtacagatgcttcagagaacattttagcactgtggaagagtttggtg

SEQ ID NO: 37750 - DNA, 397 bp, Homo sapiens
  misc_feature (1)...(397): n = a,t,c or g
gacaaactttctccagaaaatgagcctgatttgaaaaagcggatccgtgtgcacttgctcaatgcccatggcctggatgaagctggcattgatggtggtggtattttcagagagtttttaaatgaactactgaagtcaggatttaaccccaaccaggggttctttaagactactaatgaagggcttctgtaccccaacccggctgctcanatgcttgtgggagattcttttgccagacattactacttcctaggcagaatgcttggaaaggctctctatgagaacatgctggtggagctgccctttgcaggcttctttctttccaagttgcttggaaccagtgccgacgtggacattcaccacctcgcctccctagaccctgaggtgnataagaatt

SEQ ID NO: 37751 - DNA, 390 bp, Homo sapiens
  misc_feature (1)...(390): n = a,t,c or g
gcctgtccctggacaagttaattccctggtctcatttttcctatctgtaaaatggagtatgcaataatagtactcttaacctcataggttgtggaagaattcacagacacaatggaaataaaaggcctggctcattgcctggcatgtagtaaggacctgataaatgtcagccatcatattattactacatggtattactgcctccccttagatgggagccaagtcttgctcaccagctcattgcctgatgttagtaggcattcaataaaagtatcatgaatgaataagaacatttgagaaagacagcattccagcctttccaggcaatactcgnnnnnnnnnnnnnnnnnnnnnnnnnnnnnnnnnnnnnnnnnnnnnnnnnnnnnnnnn

SEQ ID NO: 37752 - DNA, 394 bp, Homo sapiens
aacttttaaatggaaaaacctattttcaaggattatttccatttacctaataggtttttccatttaaaagttataaggtaaatggaaataatccttgaaaatagtttttgatgttttgtgatttttaactggtaaatttctactttaggtgggcattttcttccctagaatatgccctttattatgctatcattgctagattaaagggacttgtaagcatttctggaaatatttgatttaaaaacatatattaatagatgttttccctagcagacttttggagcaaaaatattattttagttcagcagaggattactgatattatgggctgatctcagaaaggaataaggatgaggcagagaggagtacttgagtttgtgtgtgtgtgtgtgtg

SEQ ID NO: 37753 - DNA, 390 bp, Homo sapiens
gaggcttctaggtctgcatgatgatggggcccgtttctggccagagggtggctctgggagcagttgtgctgcgggcttgctgggggagaactctaactgttgcagaaacagagcttcatggcttgcttaaattacttagctggaatattttaaagtgtcagataatgtgatgtacaaagagagtatgccgatgcatttcattgtttttgcattatctgtatcagtatttcccattgctagcccgaataatcaagaccagactgtttcttgtcactggattctggaagccttgccctttcaactggatttatgtttgtttctgctgctgtgaaaccccaaagtaatgcagtaggttttaattgaaaattgtttaattctattattgataat

SEQ ID NO: 37754 - DNA, 394 bp, Homo sapiens
  misc_feature (1)...(394): n = a,t,c or g
ggcctcccggctctggcgccggggagggagagctcaggccgccatgcgggacaggacccacgagctgagacagggggatgacagctcggacgaagaggacaaggagcgggtcgcgctggtggtgcacccgggcacggcacggctggggagcccggacgaggagttcttccacaaggtccggacaattcggcagactattgtcaaactggggaataaagtccaggagttggagaancatnatgtcaccatcctggccacgccccttncngatgagagtgagtnaaaccccgnntntacgacgcatgttacctctannatattganggttanaggcnccgnctgncctnngacanatgtttaacggcgnnntacctanncgtcnnnggtannatta

SEQ ID NO: 37755 - DNA, 401 bp, Homo sapiens
  misc_feature (1)...(401): n = a,t,c or g
atagtcaactctttttttcctctactgtacttatcatagtacccctaattctgtgctttgggttgaaaaaggtaagctctgtatgctacaggatgtgtaataaataaagcaaatgactttcaagtgaaaataagaattacatttgaaaagaaagaaccatgtctgtttaattttgtgaaaatgttctaaatatgtttctctggaggatgaactactttttgttctttggatctctgtgtataggggtgttacgtctctttattaacccttagattatactattcttttagaaacgaacagccttcattagggtatcttggctagctttccgaaagcgnttacataantttaaaacatgggacaaanggaccatacatttnccattncgttctccgtttaat

SEQ ID NO: 37756 - DNA, 396 bp, Homo sapiens
ggaggatgctgcagcagcagcggcagccgccgccgtgcacgagcagcaaatggatgacaatgaaatcaaaaccttcatgccgattgcatgggcagcagcttatggtaataattctgatggaattgaaaaccggaatggcactgcaagtgccctcttgcacatagatgagtctgctggcctcggcagactggctaaacaaaaaccaaagaaaaggagaagacctgattccaggcagtaccaaacagcaataattattggccctgatggacatcctttgactgtctatccttgcatgatttgtgggaagaagtttaagtcgagaggttttttgaaaaggcacatgaaaaaccatcccgaacaccttgccaagaagaaataccgctgtactgactgtga

SEQ ID NO: 37757 - DNA, 398 bp, Homo sapiens
  misc_feature (1)...(398): n = a,t,c or g
gtaatataaataattattcatgattcaataaaccagaaatgcatgttcctgatagagggccaggattgatactcgcaatatttatgtggtttgctaccacctgaaacatattatcttggccttctttacaaacagaatggcttttttttcaggtcttgtcttataagtaggtgtgggtaaagacattaaacttcaaaggttaatttatagcaatgtcttcattttattttcttctagatacagtaacttttttgtgtgaaataatttatccactcaatgtcagtttttaaaatttgtgtagataaaaatcatgtcattagctaatgataaatctcatagagtaatttagcaatatatttttaaatgaagttttttatggaaatgnttctactataaaa

SEQ ID NO: 37758 - DNA, 402 bp, Homo sapiens
ctttgtagtgtgccaactctttgccttgctagcagccatttggtttcgaacttatctacattcaagcaaaactagctcttttataagacatgtagttgctacccttttgggcctttatcttgcacttttttgctttggatggtatgccttacactttcttgtacaaagtggaatttcctactgtatcatgatcatcataggagtggagaacatgcacaattactgctttgtgtttgctctgggatacctcacagtgtgccaagttactcgagtctatatctttgactatggacaatattctgctgatttttcaggcccaatgatgatcattactcagaagatcactagtttggcttgcgaaattcatgatgggatgtttcggaaggatgaagaactgacttc

SEQ ID NO: 37759 - DNA, 401 bp, Homo sapiens
  misc_feature (1)...(401): n = a,t,c or g
taacatgccaccatctgccctcagtcagttgggagcttgcactagcactcatttatctcagagttcaaatctctccctgccttctactcaaagcctcaacatcaagtcagaacctgtttctcctcctagagaccgtaccaccaccccttcgagatacccacaacacacgcgccacgaggcggggagatctcctgttgacagcttgagcagctgtagcagttcgtacgacgggagcgaccgagaggatcaccggaacgaattccactcccccattggactcaccagaccttcgccggacgaaagggaaagtccctcagtcaagcgcatgcgactttctgaaggatgggcaacatgatcagattattacttactagtttttttttttttntggcngggggggg

SEQ ID NO: 37760 - DNA, 410 bp, Homo sapiens
aaaaaattaacttagtttttaaaatttatttgcaaatatactttactttttccatttggcactatggtttgttgcctacctagctgcatctataatgtcagcttatcctaaggctgtccacgtacttaatttacttaagtgttcattttaagtaacgtgctcactgtgtataggaatttgtattttggaggtgcttgatctatctacaaagaaaaattaattaggaattactttattataaaatgctcctagaagtcttaattgtgtttattttttaaaaaaacaaatgttagacttgtgtgcatggaagtaattaaggtacatcattattgtagtttgaaagttgtacatgataagacattttgtttttactgtatgtttttactgaatgatctattccccatcccaag

SEQ ID NO: 37761 - DNA, 161 bp, Homo sapiens
  misc_feature (1)...(161): n = a,t,c or g
atcccttaaaatggttaaggtggtagatgggtattaaaaaaataggttgtttgctcttttannnnnnnnnnnnnnnnnnnnnnnnnnnnnnnnnnnnnnnnnnnnnnnnnnnnnnnnnnnnnnnnnnnnnnnnnnnnnnnnnnnnnnnttttttttttttt

SEQ ID NO: 37762 - DNA, 401 bp, Homo sapiens
agcaaaatcaaatcagaagtcaagtctgtggtcaagcggtgccggcagctggagaacctccaggtggagtgtcaccgcaagatggaagtgaccgggcgggagctctcatcctgccagctcctcatctctcagcatgaggccaagatccgctcgcttacggaatacatgcagagcgtggagctaaagaagcggcacctggaagagtcctatgactccttgagcgatgagctggccaagctccaggcccaggaaactgtgcatgaagtggccctgaaggacaaggagcctgacactcaggatgcagatgaagtgaagaaggctctggagctgcagatggagagtcaccgggaggcccatcaccggcagctggcccggctccgggacgagatcaacgagaagca

SEQ ID NO: 37763 - DNA, 392 bp, Homo sapiens
aaaagtcacctgcctggaaatggggacaaatcctttacttggtgatttatgtacatttgattgtcacatccacctcacaaagcaggtattattatcatgcccattttatagaagaaaaacaggttcagagaaggtaagtaacattcccaaatggtagagcttgtgagtctcagaggcaggatttgaacccgggcctgtctgaccggagacccatcctctttattatagagtgtttctcctgtgttgcctggaagtgtgagttaaagctgagagcatgtgccacgtgctccagccctaactcttgtcatttattatattggacaaattacttatttatgcctcagttttgatgttagaagtggaggtaataataggactttcttcctaggagt

SEQ ID NO: 37764 - DNA, 397 bp, Homo sapiens
ccaaagggacatatatagaaccttttaaactggatctgcttctagccagttcatattttggtcacttactaatgtagtatttcaccataaattatgcctagattggagcatttacaggcactctttatctgaaaattcttaagtgcatgagttgtaacagtttcacatagtgatcatctcactgttctaattggtgactatgtactacagttaggttgatcgtaattatgaccttaaatgaagctgaatatttttatattcctaatttgattaattttattttatgggcttttacacattttaactgctttagtcaacatattttataatattatgacatttgcctagaatgtaattttaagaaagtcatttaattgatgttatcaagaagggtttt

SEQ ID NO: 37765 - DNA, 395 bp, Homo sapiens
ctgaagttctgttagtgatatgcagggcagcattttgcacaaaatgaagcatgcatacctctggacagaaggctgcttagagtttctttgcacaggagaagtttggggaggggctgtcagacccaccccccttctgtgcagccttctggaagggggcttcactctaggctggtggcgtgtaaggcctcagtcttacatgccaatggagaatggcaagttctccattcatccatctgggttgaaaaggcctagcgaccagttcaagcctctccctctcatctgtagttgctaacttttcttaaacatgttgtgggaagaggagaccccagcaagtgtttcttaagtgagttcccagtgaaacccccaggagacttttgctgggaaggctggcagtg

SEQ ID NO: 37766 - DNA, 442 bp, Homo sapiens
taaggaatgaggtgcctctgaaatggcctagagacaaatgcagaagtccctcagctgtggaaagctctgcgccttcaggaaggatgttgacaggctctttcgaggtgctgctaggggtctgccaggttccctggcggttggaattattaccttgcagggaactggctgtttgtcagtttattctggaagctattcctgctacaaagagtagaagacatcaagggatggaacaatagaccgcataaaactacactaccacatgaaaacactgactcttaaacaattgtgagattttaggcagaagatcaaagcagcaaagcatcttctcaggaactcagggtacagaacacaactgtgtttgaggtgagcaggatgagacagtcagggggcctaaagaagggaatcggattcctggagaaaagctgcttcttatttttgctgc

SEQ ID NO: 37767 - DNA, 440 bp, Homo sapiens
gagaattaaagtacctagatgccatagcactgaaaagtaaagtactactcaaactactaatagaagactattggtcagtgttttctattatatttgttctctgccaggtgttaatgaaaaatttgtaaaatgcttcaacagtgttaataattttaatgaatattgaattgctgcatgtctagtccttgaaatggtcaaattctatataatgagaataacaaggtgagataatgcaattgacaatcccaaacaaatccagtgtcaaaggaatttttagttttggaagctatccctcataaagtcaacatcagagtttgcaactgatggtggcataacttgtttgaaagcactttacaagtagagcaacatggggctgtatgttaaggcaatgaaagaaccttagtgccccgtggaccataatgacaggaaattttcaggtc

SEQ ID NO: 37768 - DNA, 424 bp, Homo sapiens
aattcctgaatggatagacagatgctacgtcatcggagctgcatcctccactccacaagaggctaggagctggggggagagaggcagtccagccgcaggggccacccgaacagtctctcctcctcacagaagcctggagctgggcatccaagaagaagcagcctcatttgttttctggtgtcatcgtaggtggccacctatggcttttgggcttctcacctggggcgggtgggttctgcaccaccctcccaccctccttcctccgtgtggacgatagagccacatccagcaccacggacagctcccgggcgccttcatctcctcgtcctccaggcagcacaagccattgtggaatctccaccaggtgtacagaacggtgcctctgcgtcctgcactcaggacctctcaagtccccgatgtgatg

SEQ ID NO: 37769 - DNA, 420 bp, Homo sapiens
gagggaggccgggacaaggcgccggtgcagccccagcagtctccagcggcggcccccggcggcacggacgagaagccgagcggcaaggagcggcgggatgccggggacaaggacaaagaacaggagctgtctgaagaggataaacagcttcaagatgaactggagatgctcgtggaacgactaggggagaaggatacatccctgtatcgaccagcgctggaggaattgcgaaggcagattcgttcttctacaacttccatgacttcagtgcccaagcctctcaaatttctgcgtccacactatggcaaactgaaggaaatctatgagaacatggcccctggggagaataagcgttttgctgctgacatcatctccgttttggccatgaccatgagtggggagcgtgagtgcctcaagtat

SEQ ID NO: 37770 - DNA, 421 bp, Homo sapiens
gtggattgacttggaggtggcagggcatgcaggactggatgttgaagatgaaaaggagtttctggaagatgacagtgggaggcaacactgtgtgtagactgtgcaaatttacactggcataccacatggaatgagagagtctggcagccattctaaggcagttattgggatgtaaatttgatgacggaagtttatggtaaaagaagggacaggaggcaggtaggaggggagataaccttatgaatttgtgcagggcttagcatcagtaaaagggctgacatggaataggggaaggtggaatgcagagttcccaaagtgggggcactggcaaatctcaggggcaagtcagtggtatgttcggtatcatggctgagtgtaggagcattttagggaatagaagttaaatcctagacgacaagcg

SEQ ID NO: 37771 - DNA, 402 bp, Homo sapiens
  misc_feature (1)...(402): n = a,t,c or g
ctttctcctctcctatatccatttcttccttttccaatttcattggttttctctaaacagtgctccattttattttgttggtgtttcagatgggcagtgttatggctacgtgatatttgaagggaaggataagtgttgctttcagtagttattgccaatattgatgctggtcaatggcttgaagatnaactntctantnattattatttctttgagtagctcagacttggntttgccnaaactcttggtaatttttgaagatagactgtcttatcaccaaggaaatttatacaaattaagactaactttcttggaattcactattctggcaataaattttggtagactaatacagtacagctanacccagaaattnggaaggctgtagatcacaggttctat

SEQ ID NO: 37772 - DNA, 409 bp, Homo sapiens
gcgcagccagtgatgagtgaagaagaatctgaccagtatcttgcagtgttgacgtttcccagatgtgtgcttgtgatgatacacacacatgcacaggttctcaaccacgtgtgtatatatgtatgtgtgcatatgtctgtagctgtatataaagcgcatgtagagctacagatccagatacacacacttgtgtatatatgtacatacagacatactgaagggattagtacaatttctccaaagtactgtacctatcttcagcaagaatgcaaaagaaaatattttcaatatatatacctggaacagattttaataattatcagagtaataccattaatggacaaattgactgcaatgtaatactagctggtatgtttcataaatgtcaagctgtggaccacatatatag

SEQ ID NO: 37773 - DNA, 406 bp, Homo sapiens
agcgtgtgtgcgtgcgtctactttgtactgggaagaacacagcccatgtgctctgcatggacgttactgatactctgtttagcttgattttcgaaaagcaggcaagatgtccagcacaccacatgaccccttctattcttctcctttcggcccattttataggaggcatacaccatacatggtacagccagagtaccgaatctatgagatgaacaagagactgcagtctcgcacagaggatagtgacaacctctggtgggacgcctttgccactgaattttttgaagatgacgccacattaaccctttcattttgtttggaagatggaccaaagcgatacactatcggcaggaccctcatcccccgttactttagcactgtgtttgaaggaggggtgaccgacctg

SEQ ID NO: 37774 - DNA, 406 bp, Homo sapiens
attgaaataatgtaaagttatattttcatgtttttatagatacaacatgacaagaatacataatgtaagagtatttcaactatggataatgttgattggataatgcacatctcagttacaagcagtactcatagtttaatatccatgtaacggtgcatcaatatattgctatataaatatgtctgtgtgcatataagtgaaaagtggtcaaacaagagtgatgacagctgtctaaaggtttttttattcattttatataaaaactgttatggaaagaccaaaatgtttatgaactattcttatgtaaatttacaattgtcctttactgtacttttttgtttacagtatagtaccttattttctgctgtgttaagtgggtgtcaaactccaagaagacatacacttt

SEQ ID NO: 37775 - DNA, 398 bp, Homo sapiens
ccctgcctttgtgccttggccccccaccatatactttgggagtctccaatgttgccatttcaactgccaacctaaggctgtccctgcacttaaactacagccaacatcttttagtccctcccaccccgtcttcgtctctgcccactccattctcgctctgcccacctgtccctggcccacccctctcctctcgccacagggaactccgaaagagtgagcgccccagatggaccttgtccaaccggctttgaaagagttaatgggtcctgcgaagatgtggatgagtgcgcgactggcgggcgctgccagcacggcgagtgtgcaaacacgcgcggcgggtacacgtgtgtgtgccccgacggctttctgctcgactcgtcccgcagcagctgcatctc

SEQ ID NO: 37776 - DNA, 398 bp, Homo sapiens
  misc_feature (1)...(398): n = a,t,c or g
gaaaaaagagagtgagcgagcgccggaatcagcccggcgtggagtgcggacccgcggtagtgccagggggcgaaggcggcggtggtgaggaagatactttggttagtgaccacatcgcagcatgttgagtcaagtttaccgctgtgggttccagcccttcaaccaacatcttctgccctgggtcaagtgtacaaccgtcttcagatctcattgtatccagccttcagtcatcagacatgttcgttcttggagcaacatcccgtttatcactgtacccctcagtcgtacacatggcaagtccttcgcccaccgcagtgagctgaancatgccaagagaatcgtggtgaagctcggcagtgccgtggtgacccgaggggatgaatgtggcctggccctgg

SEQ ID NO: 37777 - DNA, 400 bp, Homo sapiens
gccccatgggctgtgttacatagagacagcagaacttgatggcgagaccaacatgaaagtacgtcaggcgattccagtcacctcagaattgggagacatcagtaagcttgccaagtttgacggtgaagtgatctgtgaacctcccaacaacaaactggacaaattcagcggaaccctctactggaaggaaaataagttccctctgagcaaccagaacatgctgctgcggggctgtgtgctgcgaaacaccgagtggtgcttcgggctggtcatctttgcaggtcccgacactaagctgatgcaaaacagcggcagaacaaagttcaaaagaacgagtatcgatcgcctaatgaataccctggtgctctggatttttggattcctggtttgcatgggggtg

SEQ ID NO: 37778 - DNA, 406 bp, Homo sapiens
  misc_feature (1)...(406): n = a,t,c or g
cacctatgactcttctcagcaatccccattctccacccctggcctcaggcagnnnnnnnnnnnnnnnnnnnnnnnnnnnnnnnnnnnnnnnnnnnnnnnnnnnnnnnnnnnnnnnnnnnnnnnnnnagctaactgnnnnnnnnnnnnnnnnnnnnnnnnnnnnnnnnnnnnnnnnnnnnnnnnnnagatcacagcctttgttctgtgactggcagcttgatatttggagtccagacactttttaagtttggaaactaacttttaggtgagtgctgaaaagaagtctcctgaggttgagagcacctttagcctattacctgtaggaggtcggtcagctctctcagggaggaaaggcaataatggggttaaaggattattctttgcagggatctgtggcccagggagg

SEQ ID NO: 37779 - DNA, 409 bp, Homo sapiens
caggtaagtacccattcatcggcagagaggttcaagacttaatgaaagggaagaaaaaagttgttaacaaaagactgaacccaaattccagagcggagcctctccctcattccccagcctgtgcaatctccctttcagatagcactgagcaaggatcaacaaatctaatttgcccaggatccagctcttgcacaaagtccagagatcaatgccagcaaggcatttgctaaagcagcaacagccagctatgcacacacatacgcatttccacaagaagcaactatttgtcatcccccaaagagaaggctatttgaagaaccccagtcagtggggcacacaggtggggaacactcaaagtggctcttgtggggagattcaaggctatcctgaaccatgcattctcttcttg

SEQ ID NO: 37780 - DNA, 392 bp, Homo sapiens
gtgatatatatgtgaaattattgtatatactgtttcaatatctgctttttcacacagaaatatatattatagacatagatttatagatattcttgaactttcatgtcattaaatattcttctaaaatagttttcatggatgtttagtgctctaatatgtgattgggcttgatagagtgatagatatatatacatattagatatagatatagggatatatttgttttaagtagttattggacgtctgggttgtttcattttgttttcttatgcaagccaaagctgccaacaagatcacagtgcacaaacattacattcatgtttatttcctgaacaaaagttaatagtataattgaaggatgaaaagatatgggaggtttaaaatcttctttt

SEQ ID NO: 37781 - DNA, 400 bp, Homo sapiens
aagaaattcagaacaagccaaggaagtaaacaatgggagggaaatgctaactttaggtaagatgaccatggaacatctcctggaggaggtggcatttagctgagaactagaggatagcaagatacaacgatgcagagagctgagggggagtgggagtgaaccagtgggggtgtttcaagtggacaaattagtatgtgccactgccctagccaaggaagaactcaatgtgtttgtgaaacttacagaaagtctcttcagtttgatttgaaagcagagtaattgagagcaaagtggcatgagactggggaagtaaccttgaagtcagattatggggccatgtagggcatgataaagagtgtgggttttatctgatttgtagcaggaagccatgaaaaaggat

SEQ ID NO: 37782 - DNA, 395 bp, Homo sapiens
cgccgggcgcatcagcgtcgtccttgttgcttcccgccgcgtccaggcccccgaggaagcgcgaagcgggagaggctggggctgcgacgagcaagcagcgggtcctggacgaggaagagtatatcgagggcctccagacggtcatccaaagggatttctttcctgatgtggagaagctccaggcacagaaggagtacctggaagccgaggagaatggagacttggaacggatgcgccagattgccatcaagtttggctctgccttgggcaagatgtcccgggagcccccgccaccctatgtgactccagccacatttgaaacccctgaggtgcatgcaggcactggagtggtgggcaacaagcccaggccccgcggccgaggcctggaggatgga

SEQ ID NO: 37783 - DNA, 400 bp, Homo sapiens
  misc_feature (1)...(400): n = a,t,c or g
agtgccatgaggatcgattccagtaacttgaatccacaggacttttggaattgtggctgtcagattgtagcaatgaattttcagactccgggtccaatgatggaccttcacacgggctggtttcttcaaaacgggggatgtggttatgttctaaggccgtctataatgcgagatgaagtttcttacttcagcgcaaatacaaagggcattctacctggggtgtctcctctagctcttcatatcaagatcatcagtggtcagaatttcccaaagcccaagggagcttgtgccaaaggggatgtcatagatccctatgtttgtatagagatacacggaattccagcggattgttcggaacaaagaactaaaactgtcagcataanagtgataatcctatttt

SEQ ID NO: 37784 - DNA, 401 bp, Homo sapiens
gtcaactttgatgactatactgtgaatttgggtggtttgaaggatcacataaaggagatccagagatgccggcgtttgattcttattgcttgtggaacaagttaccatgctggtgtagcaacacgtcaagttcttgaggagctgactgagttgcctgtgatggtggaactagcaagtgacttcctggacagaaacacaccagtctttcgagatgatgtttgctttttccttagtcaatcaggtgagacagcagatactttgatgggtcttcgttactgtaaggagagaggagctttaactgtggggatcacaaacacagttggcagttccatatcacgggagacagattgtggagttcatattaatgctggcctgagattggtgtggccagtacaaaggct

SEQ ID NO: 37785 - DNA, 397 bp, Homo sapiens
  misc_feature (1)...(397): n = a,t,c or g
aaattaaagaaggatgtcttaggcatttagtaaaaattcagtggttccccgctatcctcgggggannnnnnnnnnnnnnnnnnnnnnnnnnnnnnnnnnnnnnnnnnnnnnnnnnnnnnnnnnnnnnnnnnnnnnnnnnnnnnnnnnnnnnnnnnnnnnnnnnnnnnnnnnnnnnnnnnnnnnnnnnnnnnnnnnnnnnnnnnnnnnnnnnnnnnnnnnnnnnnnnnnnnnnnnnnnnnnnnnnnnnnnnnnnnnnnnnnnnnnnnnnnnnnnnnnnnnnnnnnnnnnnnnnnnnnnnnnnnnnnnnnnnnnnnnnnnnnnnnnnnnnnnnnnnnnnnnnnnnnnnnnnnnnnnnnnnnnnnnnnnnnnnnnnnnnnnnnnnnatggtgggggatat

SEQ ID NO: 37786 - DNA, 245 bp, Homo sapiens
cccacgcgtccggttacctctgattctcaacattttgtggggtagtgatttggcaagtgttttttaaataaaacaaatctcattgtaaagttatcagtcatttagtagaatagaaaagcaacatagagcatacaagaacatttgggatagagttgtgatttgtgaagaatttgtactttgatattgtggcggaaagtctagactgagtgtgtatgctggtaaactgtagactttttttttttttt

SEQ ID NO: 37787 - DNA, 470 bp, Homo sapiens
  misc_feature (1)...(470): n = a,t,c or g
tttggangcccgtttgnaatccctncaggtaccggtccggaattcccgggtggacgcgtgggttcagaaatagagtcaaaccgatcattttctccagaggagagacgtcatcagtattctgattatgattatcattcctcaagtgagaagctgaaggaaaggccagttccagagaggacacgccgagcagattgtccaggatgggtgcgacacccactccctttaagtccacaggggatattgctggcacagttgtcccagagaccaactaggaacccagataccaagaggaacccccagcttctcaaccaaaagcagccccgagaacttttcttcgtcctagtcctgaagatgaagcagtatatggccctaataccanattggtaaggntcannaagggagacagcgtgggcctccggntggctggcggcagngattgtcnnggatattttgttgctggcattcaataa

SEQ ID NO: 37788 - DNA, 395 bp, Homo sapiens
  misc_feature (1)...(395): n = a,t,c or g
aaacaaatgggtgcattttattgtatataaattaaaattcaataacatttatttattaaaacaattccctaaagtatgaccaaaatatcaggtggtgagttgtttagataccttcttagcacattatcttagagaaaatccatgattaaaagtatggtcaatttacacaaagtctaattttatatattaaaacacatagctagttctttaacattatttgtcactcacaaaatgtacttaatgatttagggacattttatgagaattttagtgtgttacggcaaaggaaaatgttttcaatgcttctgcattgcttacagctgacagatggaaaagctagcanagacaactatgggagagatgatcagcactgactactgattaatacagctgta

SEQ ID NO: 37789 - DNA, 403 bp, Homo sapiens
  misc_feature (1)...(403): n = a,t,c or g
gaaaacagtgggtctgcagatagtgcccacaaaccccatgtgactggtttgaaggacccagagcataaaggtctctcaggaaaccatgtccaaaaccctagcagcggtacagcatgctgtctccaacccttatccccaggtttaagggtggtttatggccatacgtggaggnnnnnnnnnnnnnnnnnnnnnnnnnnnnnnnnnnnnnnnnnnnnnnnnnnnnnnnnnnnnnnnnnnnnnnnnnnnnnnnnnnnnnnnnnnnnnnnnnnnnnnnnnnnnnnnnnnnnnnnnnnnnnnnnnnnnnnnnnnnnnnnnnnnnnnnnnnnnnnnnnnnnnnnnnnnnnnnnnnnnnnnnnnnnnnnnnnnnnnnnnnnnnnnnnnnnnnnnnnnnnnnnccgacctc

SEQ ID NO: 37790 - DNA, 405 bp, Homo sapiens
  misc_feature (1)...(405): n = a,t,c or g
cagtgaaagcccagccatcatgacaaatccttgaatgttctcttaagaaaatgatgctggtcatcgcagcttcagcatctcctgttttttgatgcttggctccctctgctgatctcagtttcctggcttttcctccctcagccccttctcacccctttgctgtcctgtgtagtgatttggtgagaaatcgttgctgcacccttcccccagcaccatttatgagtctcaagttttattattgcaataaaagtgctttatgccggcttttctcaaaaaaaaaaaaanggggngcccnntnaaangnncccntggggggcccaantttaacnnggncnngcaangtaaaanntntccccnnanngggngccnnntnaaancctngccnnggcccgnnttttaaaaacg

SEQ ID NO: 37791 - DNA, 417 bp, Homo sapiens
  misc_feature (1)...(417): n = a,t,c or g
cccacgcgtccggaatttcactgatgctttataccaccagtctctgataaccgatgccctgtaccgggctttttcctctaaattctcccaggaattttcctcttcaaaaccctttcagaaacatttacattttattactaattgtatttggggggctcctgggttcacatcatccaggacaaagaccaatgtggatatcactaacttgggagtttttttgttttttatcctcaagcagctgtactgaacacaaacatgcagctttttttttccccaaagacttaattagttcataagaagctcatttccccaggatgacattacacagattgctctcattttcagctctcttaccaccactcatgaacctttcatatnatatgtnaatacatcttagatatcttgccatgtaaactt

SEQ ID NO: 37792 - DNA, 404 bp, Homo sapiens
ggcctcgacaactgcgcccagtgctttttgtcactggagcgcccaagagccgaggaggcccggggtgacaacagtgagggagatcctggctgtgttgggagcccaggcctacctggtcctccgggattgccaggccagagaggagaagagggtccgcctggcatgaggggctccccgggtcctccaggccctatcggccccccaggttttcctggtgctgttggctcccccggattgcctggccttcaaggagagcgaggtctcacgggcctgactggagacaagggggagccgggtcctccagggcaaccaggttacccaggtgccacgggccccccaggactgcctggcatcaagggggagcgtggctacaccgggtcagcgggagagaaaggagagccggc

SEQ ID NO: 37793 - DNA, 387 bp, Homo sapiens
ggaatatgatacaagtggcatcaggaaatgaggaaataatggaactattttttttaagtggaggtagtttgttctccaagggggaaaaatagaccatgaactatacacaaaagtgaatccagagattaaaaacagaaatatggaaaagctatgtactaaaatgcatatgaccttgggaatagggaaacattccttggaacaatttgagaaatacttagcggttctacttatgagtatgaatgctcaggaaatacgcactaggatatttactgtggcttgatttgtagtagccaaaaattagaaacaactgagaaagcccatcacgaacaatatgggaaattcttatgtaatactatatatctgtaaaatgcaacaaatgaaatccac

SEQ ID NO: 37794 - DNA, 396 bp, Homo sapiens
  misc_feature (1)...(396): n = a,t,c or g
tttgnancctgcaggtaccggtccggaattcccggggaagcacaagccactggagctgctgctctgcttcctagcgggcacacacatactcatggcagctgtgcccctcaccacctttgccgtggtgcagctgcgtcgtcaggcttcctccgactatgactggaacgagagtatctgcaaggtcttcgtgtccacctactacaccctggcgctggccacctgcttcacggtcgcctccctctcctaccatcgcatgtggatggtgcgctggcccgtcaactaccgcctcagcaacgccaagaagcaggcactgcatgccgtcatgggcatctggatggtcagcttcatcctctccacactgccctccattggctggcacaacaacggcgagcgcta

SEQ ID NO: 37795 - DNA, 354 bp, Homo sapiens
  misc_feature (1)...(354): n = a,t,c or g
cgaccacgttgaaacgcaaacaagaggaggtgtctgctattattatccagagggcttacagacgctacctcttgaagcaaaaagttaaaaaggtatcaagtatatacaagaaagacaaaggcaaagaatgtgatggaacacccatcaaagaagatactctcattgataaactgaatgagaattcaactccagagaaaaccgatatgacgccttccaccacgtctccaccctcgtatgatagtgtgaccaaaccagaaaaagaaaaatttgaaaaagacaaatcagaaaaggaagacaaagggaaagatatcagggaaagtaaaangtanaaagaacccaagaattttccttttg

SEQ ID NO: 37796 - DNA, 348 bp, Homo sapiens
  misc_feature (1)...(348): n = a,t,c or g
nnnnnnnnnnnnnnnnnnnnnnnnnnnnnnnnnnnnnnnnnnnnnnnnnnnnnnnnnnnnnnnnnnnnnnnnnnnnnnnnnnnnnnnnnnnnnnnnnnnnnnnnnnnnnnnnnnnnnnnnnnnnnnnnnnnnnnnnnnnnnnnnnnnnnnnnnnnnnnnnnnnnnnnnnnnnnnnnnnnnnnnnnnnnnnnnnnnnnnnnnnnnnnnnnnnnnnnnnnnnnnnnnnnnnnnnnnnnnnnnnnnnnnnnnnnnnnnnnnnnnnnnnnnnnnnnnnnnnnnnnnnnnnnnacctcctntctcatactcgggntcgaatgtgctntagggnnnnccgnnaccngaaacggg

SEQ ID NO: 37797 - DNA, 350 bp, Homo sapiens
  misc_feature (1)...(350): n = a,t,c or g
gttttatttgttcacttacgtgctttgattatcccctctgaattatagaccgagtcttgttgtttagcctaagagaagatttatgtagtaatttcttctcaggtatggaaccacggtcataactaacatgttggccagaatagaaccactggttaaacatattttattcaccattaagtgatctttatcaatattctggattagacaacaaattacctttcgggggttncttggaaactatactccngttnganggttaaactttgtnctaaagttaaatttaaanangttggnagggccagtttangtnttgngaccncnntancccaccctttntatanaaaaaaaaa

SEQ ID NO: 37798 - DNA, 377 bp, Homo sapiens
  misc_feature (1)...(377): n = a,t,c or g
caggctttttaagaaatctgatgttttatttctccatattgtcatggaaaaggccagcttttagcatgcctggtgtttctggtgttttcttctcttcactgttttctacatttctttctttgcattggtcctttttttttctttttttttttttaaaaaaaaaaaaancccnngttngntttntngntngnnncttaacngcaatanngggggaaccnntgnttncntttaaaaaaacccccngccctngaaaggggccccanggtttccangnnnnnnttnntnnncnanntggncnnnaanggnnntttgcatnggccanngattnggccttaccnntgggnaaatgnctccttntttgancncactgggntggt

SEQ ID NO: 37799 - DNA, 381 bp, Homo sapiens
cttatttcatatcttgttacatgtggatgctataataactgtctcctattctctcctcaaattactctatgatttttagagcttggtttcagtatcatcattgttctgggaatttttctaaccaggctcatgctcacaattctcaaagtttaggagctctacagctagaccattttgctcgtttctttgtctccagggtttggcaatttatagggtgggtaatgaacattctttggatggtttcattttggttatggttatgggaaggaatgaaagcgtgggtgaatgttatgaggataaactgggaagcaagctatgggtgaggcgttccctaaagcaattaagataactaaaaccataatgtacagtaacagggaagct

SEQ ID NO: 37800 - DNA, 409 bp, Homo sapiens
gggtgggaaaatagaggtaggaaatagtagcctaaaggaaatcgccacacgtctgtctaaacttaggtctcttttctccgtaggtacctccctgggtagttccacacactaggttgtaacagtctctccctgaggagcagactcccagcatggtgtagcgtggccctgtcacgcacatggggtcccgcagcagtgactgtgtgtcctgcagaggcgtgacccaggcccctgtagccctcagcctcctctagaagcttctgtactccttgtaggatcagatcatggaaaacttttctcagtttacttctaagtaatcacagataatacatggccagtaatcccaggctggccattcattcaggttttttaaaggatatttaacttttatggactagaaggaatcacgagg

SEQ ID NO: 37801 - DNA, 400 bp, Homo sapiens
  misc_feature (1)...(400): n = a,t,c or g
gtagtggatgacttccgggacactgtcgaacggagggctgttctgacccagaacgtatttctctttggttttggccagtttcatgtgcataaaaccctggttgctcctcagggagagggagtagtcatgcttgctggtctggctgttccggacaaggtagctacactccttgcagagtcgcagcaggttctcggcgtctcctctgctgatggctccgtgataccatatttgcttctccagggggacggcaggatccaccctttctcctaggatcccgcagaactcagggctcccatgtttgataggcttaaagccccctccaggggcacgaagctggcgccgcggtcccgcgaaggtgagggggatgactgccgcttctcgttgccattaaactgngctg

SEQ ID NO: 37802 - DNA, 386 bp, Homo sapiens
cttttctttttgccttttggccctaggatcgtgtttaggaggattatcccaccccgagattatataaatcttatcctatatttctctaacttatatggttttatttagaaaatgttttgtcctgtctggaattatcttgatgtatggatttaggtattctaacttttttgccccaaagggttagccagttgttaacatatttaccttttcccccaacatatgaaatgtcatacatgtatatactttattctgtgtttggattccctttagttccattgaacattgtggcaccagtacaccagcctgtagatgagttagaaatgggactttgtatcttttaatgtgagacctcctcttgatcttttttattttttacaatattctga

SEQ ID NO: 37803 - DNA, 382 bp, Homo sapiens
atgatcgaaaactgttcctcaacaactgccaaacttgctgttatatgggtgggagctctattgttagcacttccagaagttgttctccgccagctgagcaaggaggatttggggtttagtggccgagctccggcagaaaggtgcattattaagatctctcctgatttaccagacaccatctatgttctagccctcacctacgacagtgcgagactgtggtggtattttggctgttacttttgtttgcccacgcttttcaccatcacctgctctctagtgactgcgaggaaaatccgcaaagcagagaaagcctgtacccgagggaataaacggcagattcaactagagagtcagatgaactgtacagtagtggcactgacca

SEQ ID NO: 37804 - DNA, 368 bp, Homo sapiens
cccatttgctgctaacagcagagctaagacaaatgctgacacagatggcatggtgaagatccttgggcagaaatcgacagacagagtactgggagcacatattcttggaccaggtgctggagaaatggtaaatgaagctgctcttgctttggaatatggagcatcctgtgaagatatagctagagtctgtcatgcacatccgaccttatcagaagcttttagagaagcaaatcttgctgcgtcatttggcaaatcaaccaacttttgaattagaagattatatatatttttttctgaaatttcctgggagcttttgtagaagtcacattcctgaacaggatattctcacagctccaagaatttctagg

SEQ ID NO: 37805 - DNA, 366 bp, Homo sapiens
  misc_feature (1)...(366): n = a,t,c or g
gtttgttgccaaggtgatgcaggttctgaatgctgatgccattgttgtgaagctgaactcaggcgattacaagacgattcacctgtgcagcatccgaccaccgaggctggagggggagaacacccaggataagaacaagaaactgcgtcccctgtatgacattccttacatgtttgaggcccgggaatttcttcgaaaaaagcttattgggaagaaggtcaatgtgacggtggactacattagaccagccagcccagccacagagacagtgcctgccttttcagagcgtacctgtgccactgtcaccattggaggaataaacattgctgaggctcttgtcagcaaagggcctagccncagngatca

SEQ ID NO: 37806 - DNA, 366 bp, Homo sapiens
  misc_feature (1)...(366): n = a,t,c or g
gcagaaagaggtgacagtgagacacctcaaaaccaagctgaaggaatctgagcgccgactccatgaaagggaaagtgaaatcgtggagcttaagtcccagctggcccgcatgcgagaggactggattgaggaggagtgtcaccgggtagaggcccagttggcactcaaagaagccaggaaagagattaaacagctcaaacaggtcatcgaaaccatgcggagcagcttggctgataaagataaaggcattcagaaatattttgtggacataaacatccaaaacaagaagctggagtctctccttcagacatggagatggcnccagtggctctnttaaggaccaactgggccttanactttccttgg

SEQ ID NO: 37807 - DNA, 351 bp, Homo sapiens
  misc_feature (1)...(351): n = a,t,c or g
aatattacacaaccattaaggtaatgtctgggcacactatgtatcagtatgaaagtcaccctgcagtactgtttattaaataaaggttatagaatggtaaacattctgatgcttgaaaacaattgcatatacacacgtaagcaaagactggaaggggatccatacaagatcggcaagttacagtatgagaggttgttttcctgcttttgaaatcccaaatcacttttgtgaagtgaaatttaaaatacagatcagtagtgcctacggctggtgtggcatctgtacatgcaagagatcattccatctttgcaggaggacacattttgagcagcnncttactctttgntggtg

SEQ ID NO: 37808 - DNA, 382 bp, Homo sapiens
ggcagcaaacacggtgcgagcgaacaggagtgggggggaaattaaaaaaagctaaacgtggagcagccgatcggggaccgagaaggggaatcgatgcaaggagcacaataaaacaaaagctacttcggaacaaacagcatttaaaaatccacgactcaagataactgaaacctaaaataaaacctgctcatgcaccatggtttttcaaactcggtacccttcatggattattttatgctacatctggctgctccgctttgcacacacaggggaggcgcaggctgcgaaggaagtactactgctggattctaaagcacaacaaacagagttggagtggatttcctctccacccaatgggtgggaagaaattagtggtttggat

SEQ ID NO: 37809 - DNA, 379 bp, Homo sapiens
  misc_feature (1)...(379): n = a,t,c or g
cccacgcgtccgatcatatttaaactacagaaaaaattgnnnnnnnnnnnnnnnnnnnnnnnnnnnnnnnnnnnnnnnnnnnggatatacattccatatattccatgggtnnnnnnnnnnnnnnnnnnnnnnnnnnnnnnnnnnnnnnnnnnnnnnnnnnnnnnnnnnnnnnnnnnnnnnnnnnnnnnnnnnnnnnnnnnnnnnnnnnnnnnnnnnnnnnnnnnnnnnnnnnnnnnnnnnnnnnnnnnnnnnnnnnnnnnnnnnnnnnnnnnnnnnnnnnnnnnnnnattaanccaanctatgaanatgcaanggcataaganggatatcatgaactttggngactcgggngaaggctgngagggggtaaggaataaaa

SEQ ID NO: 37810 - DNA, 391 bp, Homo sapiens
cggacgcgtgggctgtaaatcaaatcatgggcagccaagacttcctggtgctagcaatgcagaatatcgtcttaaagaaaagttttttatgcgaaaggtacaaattaatgataaagatgacaccaatgaatacaagcatgcttttgaaataattttaaaagatgaaaatagtgttatattttctgccaagtcagctgaagagaaaaacaattggatggcagcattgatatctttacagtaccggagtacactggaaaggatgcttgatgtaacaatgctacaggaagagaaagaggagcagatgaggctgcctagtgctgatgtttatagatttgcagagcctgactctgaagagaatattatatttgaagagaacatgcagcccaaggct

SEQ ID NO: 37811 - DNA, 153 bp, Homo sapiens
ctatatcacagagcaggcgactgtctagaggaaaggctcttccctctcaagttactgcctaatcttgaaattagtggtacaaatgtattatatatttattattttgcactcagattcatttaataaaatattatcgaacaaaaaaaaaaaaaa

SEQ ID NO: 37812 - DNA, 391 bp, Homo sapiens
gataaaaaccaccaagaacaattataaaataagaatgatcacactaaagagcaataataaagtctaataggcgcaatcatgagttagagtaagctaaaggagggaaattgcaccaaagttctccaggtcttggctccagtagtatttctttggggatgttgttgcttagaaaactgggtccacaaactaagatatttaaaacctactattgttcaaggaatttgccacccattaattactccattacaaatttaaattagtgtatttgataacatttatctttgggacttcttaagctttctctttttttaacaaagacattaaagtagtagctaataggacaaagctactcttctctgaatctcatttgttctattcaacgtcattaagg

SEQ ID NO: 37813 - DNA, 384 bp, Homo sapiens
  misc_feature (1)...(384): n = a,t,c or g
ctatcttctaatttgaatctatagttactttgtaccatttgaaatatatgtatatatatatatataatattttgaaatattatctattctcttcaagaaatgaacagtaccacagtttgagacggttggtgtacccctttgagttttggatgttttgtctgttttgctttgttttgttagtcatttctttttctaacggcaaggaagatatgtgcccttttgagaattcaagatggcactgacacgggaaggccagctacaggtggactcctggaatttgaggcatcatantgatactgaatcaagaacttccttctgcttctaccagatggcccnaggaagcacatcgtcctgttttattgctttctaccctgtgcaatatta

SEQ ID NO: 37814 - DNA, 393 bp, Homo sapiens
acttgctgatgaagaggaggatcctttgatttaccagcatcggatgcttaggagtggccaaggggatgcattggctagtggaccagtggaaacaggacccatgaagaaactgcacgtcagcaccatcaacctccaaaaggcctggggcgctgccaggagggtctccaaagatgactggctggaatggctgagacggctgagcctggagctgctgaaggactcatcatcgccctccctgcgctcctgctgggccctggcacaggcctacaacccgatggccagggatctcttcaatgctgcatttgtgtcctgctggtctgaactgaatgaagatcaacaggatgagctcatcagaagcatcgagttggccctcacctcacaagacatcgctga

SEQ ID NO: 37815 - DNA, 388 bp, Homo sapiens
atttcgaagaattccaacagcgacttgtgcatgtggatcaagactaactctgaaaatgttaattaaaaagtggttaatttttaggagtaatttattcaaatttaacaggatatgcaaactattttaaatataagtaaagtcaacagtttgagctcaattaacatacctgaatataataacacttcctggagacaagttttcaaattctatttcttgaatatattcattgggcccttttgtggcaactccagcttgtttaacaattttactttcattaagcttgaaaaaaagtacattaaaaaaatccattcaacaaatagttctaatgttcttaaaatgctaaacacagtagtaagatgagagtcccaaatacctgaatatgttctct

SEQ ID NO: 37816 - DNA, 402 bp, Homo sapiens
gtaatgcatcctagccctgggtctagatgattggggaataatgggattgtacaactgcagggatgacaaacaatagtgcagcgtctttctctgatacactgaaccccacgcctccaacgcaaggtcaaaggcatcacaaaataggcactgagtctgccccttggatgaagttagcattttttggcccgaggagcatctgctctggcactgaaacagcaataccgacacggagacgagagccatgcaaaaacactcagtttccgagccccagccaggacagtgcgagtgagtatcctgcttttctttgtggttagaatcaagtgtcatctaaaaataaccggttggtaggaagaagtcactgcatagtacaatgccaagaaacccggggatcagagagtcctt

SEQ ID NO: 37817 - DNA, 400 bp, Homo sapiens
agtgaaggcaacatgagggtgcatgctgtggattcttgcatgagcttccagtgtaaaagaggccacatctgtaaggcagaccaacagggaaaacctcactgtgtctgccaggatccagtgacttgtcctccaacaaaaccccttgatcaagtttgtggcactgacaatcagacctatgctagttcctgtcatctattcgctactaaatgcagactggaggggaccaaaaaggggcatcaactccagctggattattttggagcctgcaaatctattcctacttgtacggactttgaagtgattcagtttcctctacggatgagagactggctcaagaatatcctcatgcagctttatgaagccaactctgaacacgctggttatctaaatgagaagcaga

SEQ ID NO: 37818 - DNA, 395 bp, Homo sapiens
  misc_feature (1)...(395): n = a,t,c or g
ctcgaacgagtgtgggcgcgaggcaggatgacgacctcaggcgcgctctttccaagcctggtgccaggctctcggggcgcctccaacaagtacttggtggagtttcgggcgggaaagatgtccctgaaggggaccaccgtgactccggataagcggaaagggctggtgtacattcagcagacggacgactcgcttattcacttctgctggaaggacaggacgtccgggaacgtggaagacgacttgatcatcttccctgacgactgtgagttcaagcgggtgccgcagtgccccagcgggagggtctacgtgctgaagttcaaggcatggtccaagcggntnttcttntggatcnngntcccnnnacnnaccannangannnncatngccngaaa

SEQ ID NO: 37819 - DNA, 398 bp, Homo sapiens
  misc_feature (1)...(398): n = a,t,c or g
tgattttcctggacagttttctgctttaatttcatgaaaagattatgatctcagaaattgtatcttagttggtatcaaccaaatggagtgacttagtgtacatgaaagcgtaaagaggatgtgtggcattttcacttttggcttgtaaagtacagactttttttttttttnaancaaaaaanncntngaacntnannaccnttnacntccaaatgggtncccagnacngnaccngnnnccngncntcngggtncnnaggggaccaggtnnnccccnnggnccnttngaacccatttnnntttttttntttcctcngcctgggnanaccanangtttttgnaggttnanncatncggtattttnaggaantttcaaannaanttnggcagnntttcaaa

SEQ ID NO: 37820 - DNA, 404 bp, Homo sapiens
cactttcagtgtcctaaatggccaaatccagatagccccattagtaaaacttttgaacttataagtgttataaaagaagaagctgccaatagggatgggcctatgattgttcatgatgagcatggaggagtgacggcaggaactttctgtgctctgacaacccttatgcaccaactagaaaaagaaaattccgtggatgtttaccaggtagccaagatgatcaatctgatgaggccaggagtctttgctgacattgagcagtatcagtttctctacaaagtgatcctcagccttgtgagcacaaggcaggaagagaatccatccacctctctggacagtaatggtgcagcattgcctgatggaaatatagctgagagcttagagtctttagtttaacacagaag

SEQ ID NO: 37821 - DNA, 402 bp, Homo sapiens
ctctaagggcatttgaatgataactgctttctttctgaatacataatgtttctacttgaacttatcttgcttgtaggcatgacacaagcaacatgaaggctgggcacttgcagtagacctccttctaggtgtatgtggatggccagctagatcactttcacttcactgagctgtgaaattgacaccaaattgtgctattagcttgtttctgaagggtatgttgtgctggatattttcttcttgcttgcacggtacatgaaaaaagatgacaagataaaaatgtcccataaatgaacatgagcaagaaaatttagatgtaatttgtcatgaattaaaaacattgaataatggatcaaaagcccctggaagcagaggtgctgagaattcagagcagccgtttat

SEQ ID NO: 37822 - DNA, 386 bp, Homo sapiens
  misc_feature (1)...(386): n = a,t,c or g
ctgaggacagagcatatttgcaagagtagcatcagaaacatggtttttgacaaattgaatttgagctacctacttgatatttttatccagtgtcaagcaggcagttttatatatgggtacaaagggagaattgagggctggagatacaaatttgagagtcatcaccagatagtagatggtatttaaagccgtaagtctggatgaggtaactaagagagtacagtatgtggaaaatagaggacccaacaaaacttagggcagttcaacagttacaagtcagggagctgaggaggaaccagcataagaaaatataanatacaatggtatccagtgacatgagaactgagaatgctgtctcaaagccaaagaaatgtttcaagaaggca

SEQ ID NO: 37823 - DNA, 379 bp, Homo sapiens
  misc_feature (1)...(379): n = a,t,c or g
gtgtccccccaccatacatggctgacagagacgtactcttagaagtcacacctggggtctgattgcgtccctcgccttcccagatcccccaaggtctccttcctgtgccgacatatctgcagttcttaggactgtctaaacatgctttgttcaactaggtaatcacacggggtaaataggatttaaatgtaattaagattaaataaaaatacacatgcaaaaanaaaaangggggngcngantannnnnacccnctgggggttccnatcttancngnngnnnccaagtgaaactgnnccnccnnatncnngnacttttaannnctaancttggcctactattaannnncnccatatnggtaaaaccaggcgaccnggaa

SEQ ID NO: 37824 - DNA, 408 bp, Homo sapiens
  misc_feature (1)...(408): n = a,t,c or g
aagcctgtggcaacctgacattgcagcaccacatgctggagcctgtgcagcgcatcccccgctatgagcttcttctcaaggactatctgttaaagctgccccatggctccccggacagcaaggatgcccaaaagtctctggagctgatcgccacagcagcagagcactcgaatgctgccatccgcaaaatggagcgaatgcataagctgctgaaggtatatgagctgttagggggcgaggaggacattgtcagccccaccaaagagctcataaaagaaggccacatccttaagctgtcagcaaagaatgggaccactcaagaccgatacctcatactattcaacgaccgnctcctttactgcgtgcccaggctgcggctccttggccagaantttaacgtgcggcccc

SEQ ID NO: 37825 - DNA, 400 bp, Homo sapiens
  misc_feature (1)...(400): n = a,t,c or g
agagagcggcgcctgggacattcctggagggatcatgcctggccgctacaaccaggaggtgggccagaccattcctgtctttgccttcctgggagccatggtggtcctggccttctttgtggtacaaatcaacaaggccaagagcaggccgaagcggaggaagcccagggtgaagcgcccgcagctcatgcagcaggctcacccgccaaagaccccttcggtgggaccgaatgcctggttgaccgagagggccatanngagncntgannnactgnnnttgttgnaagaaactnctattttncgagtnntgcantcgtaanngattgntcnnannnntctacttnnatctgngntnntntctatntantnttntnnntnnttgnngncctntttnnngtgg

SEQ ID NO: 37826 - DNA, 404 bp, Homo sapiens
ggcaaggatcacacagtaccccacctgcactcagcgtgaagcacaatggttatatgcatgggctttagtcacacagagctgagtgacagcctggggcaagttaagtatttatctgtaaaatagaagtagtaaaaatgataaccaaacagggatataaggattaaatgaaataaagcacgtaaagtgcttaatacaatgcctggcccacaataggccctcagtgaaataaatattaactacaacgatcaccttatatccctgtgcattttctttgctcactttctggtccttttctgttctgttctagataggtgagtttaccaaatagctgagacacataggttatagatacgtaggtgatattgcatttagatttggccattcatttgtcatttggaaaaaaa

SEQ ID NO: 37827 - DNA, 404 bp, Homo sapiens
gacaaactcagaatccttccctgttcccatgcttatcattgcaagtgtgtagacccttggctaactaaaaccaaaaaaacctgtccagtgtgcaagcaaaaagttgttccttctcaaggcgattcagactctgacacagacagtagtcaagaagaaaatgaagtgacagaacatacccctttactgagacctttagcttctgtcagtgcccagtcatttggggctttatcggaatcccgctcacatcagaacatgacagaatcttcagactatgaggaagacgacaatgaagatactgacagtagtgatgcagaaaatgaaattaatgaacatgatgtcgtggtccagttgcagcctaatggtgaacgggattacaacatagcaaatactggttgactttcaga

SEQ ID NO: 37828 - DNA, 398 bp, Homo sapiens
ccttacaaccacatttctggccatttaactagcactttataagccaatgaagcaaacacacagactctgtgagattctaaatgttcatgtgtaacttctagaaacacagcagaaactgatagataagggaataaagttgaaatgattccttaaaattcatggacacagataaatgcaaggtgagaattgacaaatgctataaatgctttctttttctgaaaagattttgaaaaatttaagaaagtatagctactactgtgttcaaaacgttttaaatgacaaatgactttcccaggggaatttgcagttctgtaaatatcttaaataaaagccaacttaagaagagcccagcattaaatttacgatcttaggtggtaatgaaaagtatatgctgcttt

SEQ ID NO: 37829 - DNA, 395 bp, Homo sapiens
agataatggcccaaggttccactgacatgcaagctgtgctgtaattctggacagctgttttacacacatgtttttgtccatgaagagatgaaggtgctagagtgagggagcctggacatgtgtctggtcctgctctcagaggactagcttgggaaacattgtaaagcatacatcatcttactgagaagaacaacatttgaatacatgtgtagagagaggcaagtacagtgggaagagcccagaattttcattttacaatcaagcgagagccctggttctcagggaacaagtcactaacttaattgtactttagtgatcacatctataaatatgggaaaataataacaataaactaaaagtaaattttgaatcaatttcaaaggattgttgtgggg

SEQ ID NO: 37830 - DNA, 385 bp, Homo sapiens
  misc_feature (1)...(385): n = a,t,c or g
agggtttccctgggaattgttaactatcctacatttcaagagtactcaatgttcttgtccagcaggctccagaagatgcctgtagctgtcagaaaagtccaagcagaaagtgaagagtgcacatttgagacattgtcagtgtgaattaagcccaagaccatacataattcagctgaagctatgtctcaactggaggtcattactacatgatgaaagttgggggcaacagaggcatatgataaattttctattcaagaaataaaagatacacatattttacatgtcattcttatttaaataaagtgcttgattaaaaaatannagaaacanaaagctaanaanannnnnnnnnnnnnnnnnnnnnnnnanaaaanggggggggggg

SEQ ID NO: 37831 - DNA, 392 bp, Homo sapiens
attagaaaaaagctactactcagttctctcttagatgactttgtattttattaaccacaacatggactgcacatttgaaaaatgttaatacatgtatgtgagaaattgtctttatgtaatgcaatgccctgggtacccactgagataactaatttaacagcttcccaggaggctgaaagctcataagttagaaatcattgcgttctaatgaatcaacaataagagaataaaggattgcttagaagtagtattctgtcaaaattaaaatgaacttataatgaactcactttgaaggattccataactttttattcagtagtacttggcagttttgagcaagatgacagaaacaaaatgatctagggttaggcataacattgtatagaaaggcc

SEQ ID NO: 37832 - DNA, 381 bp, Homo sapiens
  misc_feature (1)...(381): n = a,t,c or g
tggctttttagttttgtgaatggatgatcacaaagaaaaagcatttttaaaaagttggcaaacgctgaaacgcactgtggtatgaagcgcattgcatttccatagcactgaagtaccagtttccattcctgggctgagattgtttttcccgtggttgtattgttctgatttcacgtacaccagagtaactgatttttttttgtttgttttcttgtggagttaacaccaaataaaaattgtaaaaaacaaaaaaaaaaaaanggggngcccntttnaangnacccntggggggcccaannttnacnnggncttncaacgtnaaanctctcnccctaangggngngnnttaaacctngcccggccggnntttaaaangggggg

SEQ ID NO: 37833 - DNA, 411 bp, Homo sapiens
  misc_feature (1)...(411): n = a,t,c or g
gttgaagtcaaggaagaaaaaccctcagtgagcaaggaagaaaaaccctcagtgagcaaagtggagatgcagcctactgaattagtaagtaaggagagagaagagaaggtaaaagaaacacaggaagacaaattagaaggaggagcagcaaaaagggagaccaaggaagtgcagaccaatgagctgaaagcagagaaggcatctcaaaaagtcaccaagaagaccaaaactgtccagtgtaaagtgaccctcttagatggcaccgaatacagctgtgacctggagaaacatgccaagggacaagtgttatttgacaaagtgtgtgaacacctcaatctcttggagaaagactactttggacttttgnttcaggaaagccctgagcagaaaaactggttagatcctgctaaa

SEQ ID NO: 37834 - DNA, 410 bp, Homo sapiens
ggcgggtgtcttcggccgggcttgggaacataaaagtttgtttcaccacgtaagccggacctcgcactccggtcccggtctcgtcgccaagatggtgaagcccaagtacaaaggacggagcaccatcaacccgtccaaggccagcacaaacccagatcgagtgcagggagcaggaggccaaaacatgagggaccgggccaccatccggcgcctgaatatgtataggcaaaaggagcgcaggaacagtcgtggtaaaataattaaacccctgcaatatcaatcaacggtggcttctggcacagtggcaagagtagagccaaatattaaatggtttggaaacacacgtgtgattaagcagtcatcattacaaaaatttcaagaggaaatggatacagttatgaaggatccat

SEQ ID NO: 37835 - DNA, 400 bp, Homo sapiens
ttcttcttggctttgcttgagcagttcaaatgcttgaagaagacctcggaagtcagtgattccatacatgcgggcatatttttcatattctttaggatcaacatttttgagaagttccatgatatcaatttcctcttcttctccagctcctttctttaagattggagtcctaaataaaatttaaaaagtaaggataaaacacctgtcttctacttatttttaattgtctatcatcattcaaagattatatacttcattaaggttttctatgttctttattcaataaatattaattttaccatgttagctgtgaaacaatttaaaaatgtgggtttggagatggagtcgattaagatcagatggattaggaccattgtaataaaatatagatgtaggaatg

SEQ ID NO: 37836 - DNA, 103 bp, Homo sapiens
  misc_feature (1)...(103): n = a,t,c or g
agaaattagtgactgtagcataattagaagtcctgtgagaagtagtatgcatctttcttaatgtaaaaaannnnnnnnnnnnnnnnnnnnnnnnnnnnnnnnn

SEQ ID NO: 37837 - DNA, 404 bp, Homo sapiens
  misc_feature (1)...(404): n = a,t,c or g
cccacgcgtccggaaacctctccattgtctttctcttcctctttctctctccctctttctctctccctctttctctccttttttccttccttccttccttcctctttcctttcttttcttacttcctttcttcccttccttttcctctctttcatttccctcccttctcttctcttccctacttttcctttctttcttccttccattcctcccacacacacgctctctctgtctcatggaagttaggataacaaaaaaagtatttatttatttgtattaaaggctttgatagaaaattgctaaannnnnnnnnnnnnnnnnnnnnnnnnnnnnnnnnnnnnnnnnnnnnnnnnnnnnnnnnnnnnnnnnnnnnnnnnnnnnnnnnnnnnnnnnnnnnnnnnnnn

SEQ ID NO: 37838 - DNA, 388 bp, Homo sapiens
aattgaaattagattgggatggtgttcgtaagcatttggatgaatatgcatctattgcgagttcctcaaaaggaggaagaattggaattgaagaattcgccaagtatttaaagttgcctgtttcagatgtcttgagacaactttttgcactctttgacaggaaccatgatggcagcattgacttccgagagtatgtgattggcctggctgtcttgtgcaacccttccaacacagaggagatcatccaggtggcatttaagctgtttgacgttgatgaggatggctacataacggaggaagagttctccaccattctacaggcttcccttggagtgcctgaccttgatgtttctggtctcttcaaggaaatagcccaaggggactcaat

SEQ ID NO: 37839 - DNA, 396 bp, Homo sapiens
ccaggactgggggcctggcagcatggcccacgtctctgtggtccctgtctcctcagaagggacccccagcagggagccagtggcttcaggcagctggacccctaaggctgaggaacccatccatgccaccatggacccccagaggctgggcgtccttatcactcctgtccctgacgcccaggctgccacccggaggcaggcggtggggctgctggccttccttggcctcctcttctgcctgggggtggccatgttcacctaccagagcctccagggctgccctcgaaagatggcaggagagatggcggagggccttcgctacatcccccggagctgtggtagtaattcatatgtcctggtgcccgtgtgaactcctctggcctgtgtctagttgtt

SEQ ID NO: 37840 - DNA, 399 bp, Homo sapiens
gcattgttaatagtcttattttatccttccatgtccatcttttaatgaagttcttctgattttccacatactgggaaagatacattttcatctaccctattgcctcagttacatcaacatttgtagatatccttgacaacagtgagcacaaattattcatctttgtattctcgtatggcatttttttcagattattgcatataatacatactgaataaatatttgttgaataattgtagaatttatttttgagatttggaattcacatttcatgttttatactagttcatttctgctgaaggaatgaatgtactatgatagttgatgaaaagatactagattgtgaaaatagatacttggtcagcctatgtgtgagttgccatatgaatttgagcatac

SEQ ID NO: 37841 - DNA, 418 bp, Homo sapiens
aggcaagtgagaggttatgtttggcaagtgaaattgtctgaagctttgcaatgtgagggaagagtgcagaggagaacacttggtccctggttcccttggtccccaactctgagcttttccccaaggttgggggtcctttattttctggacaggcactgggagtctggttgggggctgatgtgtaatgatgaaagggtaagtgaccatttctatgcccttagtgagcccaaggcatttttgttttcttgggagttctgaatctcctaattctatccttagaccttggtttgtttttaaggtatccttgttttagaagggattgacatgctgtacagctgttaaaattcacttgccaaagaatagaatttagctgccctttaggatttgacggtatctttgttctaaaacaaatccaggg

SEQ ID NO: 37842 - DNA, 316 bp, Homo sapiens
ctcaaattattacatatgtatgtattatatatccacatatatagttttccctgattaaatggatattaaaataattgcgggtgcttcaggactttttgcttctatatttaagtatattgtttttatagcaagaacatattctgaatgttttataaatctttaataatttatatgtaggtaatatttttgtatcacaatgcattatttttttcctcctttccttccaaactataccactgtatttaccacttctaagagtgactgacgacgggccagatgacccttgaagtagtcattatgtagcaataaatgaagc

SEQ ID NO: 37843 - DNA, 298 bp, Homo sapiens
atcatttgtctgacaaactcatgcacattcagcacttagctcaggcacctgtgattctgccctgccaatgcctccaccctcctcctacttctcctcctcctccatcatctctgagccatagggctaagctcacacctctatttatagctcttagaacagtcagttataacttccctactagagtatgtgctccttgagggaagagaccacagaccattcatttttatcttctgcattttttcccagtgttcaataaatgttgaataaacaaatgattatcttgcaaaaaaaaaaaaaa

SEQ ID NO: 37844 - DNA, 398 bp, Homo sapiens
  misc_feature (1)...(398): n = a,t,c or g
cttgaagtcagccacactgggcctggagccctgggcggagtccccggggttccccacacagggcactgactgatagcttacactgaggactgtggcgactctgcagagtcactcacaccgttcgtacgcccaggacagctggatcgtggtttttacattcaataacaactattatgattatttaaaaagagaaagtttcagatttgccattcaaggcttatttatatatatgtgtgtgtatataaatacatgcacacacttgcatacatatatatttttggctgggggagacgtgagttttgcctttctaagggagggaccgcgcaggctcctttgntctgattctggcgganatgggtcctgccttgggtcactggcttatccttaaagancatctc

SEQ ID NO: 37845 - DNA, 402 bp, Homo sapiens
ctggactgaaagaggatggcaatctcgctgaagctgtttctttttcttcacaacatataggaaagtgttgcccctttttggagtggtgcataggacgatgactatagattttcatctgtaactcctaaaaacttactcagaaagtaacaacctccaccaacactacttgaatcagtactgaacgaatgtcaggtccttgggaaattctccaatcctgtctcctgtcctggccgggtgtgctcctggtgcaccattcgactaagtcaatttgaactatttgggagacctttgtacctacgtttccttctgcttggaagatcctttctgttttgtcagctcttacttccatgttgtggaaaactgatctgacctcctagtcctgaatcaggggccataaagaaa

SEQ ID NO: 37846 - DNA, 392 bp, Homo sapiens
cggacgcgtgggggcctggagcccgctctaggtgggtgtcccctcggtgcttcccagctgccgtctgcaccagccatggactgctacacggcgaactggaacccactcggggactctgccttttaccggaaatatgagctgtacagcatggactgggacctgaaggaggaactcagggattgcctggtggctgctgcaccctatgggggccccattgcactgctgaggaacccctggcggaaggagaaagctgctagtgtgaggccagtgctcgatatatactctgcttccggcatgcctctggccagcctgctgtggaagagtggacccgtggtgtccctgggctggtcagctgaggaggagctgctctgtgtgcaggaagatggtgctgt

SEQ ID NO: 37847 - DNA, 391 bp, Homo sapiens
  misc_feature (1)...(391): n = a,t,c or g
ggacaatgtatgtattaaagagcaactaaaaactcccattactgtttgccaacccagttgtcttttgatttctctgtcaacttgcaagtatcaaatatctaagtcacagaacccagagacacatcaaataccccaaataccccatggtagttttcggatgaactctgacagctattggccatttctggtgcaagtcagaanaaaantgcttttagngtgaaatttttgatgctgaacaaagntgattgtattgaagagacnctggccctttatgataaaggaagtcnngnttacngttntgatatttgtttactttcttatttctaatttttggaaaacaattttcttanactttcatttgtgatattgatcatttctgngtgtnntaatc

SEQ ID NO: 37848 - DNA, 377 bp, Homo sapiens
  misc_feature (1)...(377): n = a,t,c or g
gtgacacaacacatttatgcaatctgcagctattcaattgttattgcaccttacagaatacctgctatctatcaactttagttgattcttgaagtacagtaagctttctctggcttgggaagccataactgttactataaaaacttttagttttggctgtggtttatatattgtgactttgaatttgactctattatttcacatcatggtttgttatactgtcttaatcagggttttttatacaagttgagtacttgttttgcacttcttgttaggactcagaagctttattaatatngganatcaaggggccaactaagcataggcccaataagttanggncactaatcggnggtaatcaaaggccnnantgaaac

SEQ ID NO: 37849 - DNA, 387 bp, Homo sapiens
acaggatcatatgatcatactgtgaagatgtttgatgcacgaacgagtgagagtgttctctccgttgagcatgggcagccagtggagagtgtcctacttttcccctctggaggtcttctggtgtcagcaggaggtcgttatgttaaagtctgggacatgttaaaaggaggacaattgttagtatctttgaaaaatcatcacaaaaccgtgacatgtttatgtctaagcagctctggacagaggttactctctggctcactggataggaaggtgaaagtatacagcacaacttcctacaaagtagtccacagttttgattatgcagcttcaattttgagtcttgcccttgcacatgaagatgagacaatagttgtaggaatgaccaat

SEQ ID NO: 37850 - DNA, 388 bp, Homo sapiens
  misc_feature (1)...(388): n = a,t,c or g
gtcattttgtccatgcatgttcatttctgtctgtttctatgtctgtagctgtatccatatttttatctacacctgaaattctattttgcatctgtagctacatctgtagctatagctgtacttatatctgtattgaaaagtagtatgtcctaggaaattctaggaatatagtgacagctggaaaacaaaaatcaaaaatccatgaagttaatatttataatgaaactaggtagcaaagtatttttttaagcctcaaaatataagcagatagaaatatgtcaccaatagccacaaactctgcattataccaatatcttcattagaaaaaacaagaaggaagcaacgaatgactaaaggacttgagaatacnaacttccaaattagccca

SEQ ID NO: 37851 - DNA, 343 bp, Homo sapiens
aaatcagccaagttttataatccttaaatcttaatgttcctcaaagcttggattaaatacatatggatgttactctcttgcaccaaattatcttgatacattcaaatttgtctggttaaaaaataggtggtagatattgaggccaagaatattgcaaaatacatgaagcttcatgcacttaaagaagtatttttagaataagaatttgcatacttacctagtgaaacttttctagaattatttttcactctaagtcatgtatgtttctctttgattatttgcatgttatgtttaataagctactagcaaaataaaacatagcaaatggcaaaaaaaaaaaaaa

SEQ ID NO: 37852 - DNA, 393 bp, Homo sapiens
  misc_feature (1)...(393): n = a,t,c or g
atttggcgggggtgggtgggcacaatttagctcataaaactcactaaggtttaattagggcatggactgtagagcattctactgttaatttagtttttgtgtttggaaagcattttgaaacataatgatttttatttacaatttcattatttatattttcattatgtttagaattgcttggaggtaaatgaagaaagaagagttccgcattagtgaggcagggatgtcagtatataaggaattggaaagacatcagtgataatggcaaaagctgcttataaattaaattaagagcttaattaaactgaggaaaaaagcatattgccaaactacatgcagttgttttgtaacagcatttgccacttgctgtgccctgagatttccangcacatt

SEQ ID NO: 37853 - DNA, 403 bp, Homo sapiens
gttattgatatgcttattctaatatctttgcaagagttaggtagtaatactttgattcctccctgggactgcagaaatcttgccagactccagagaaagagaattctttcttaggccaactgtcttctcttcagtgagctgagatatccagctactcgacatggtttcttctcccaagcgaattcaaactggagctgcaaagcatcaacctgcatttcctttttgtaattaaattgcagttagacttcttttattgtgataagaatatttagtatgcaatctacccacttacaaaatttccaagtgcataatacagtattattagctataggcacacagtgttctacagcagatctctcgaccttattcatccgcttgcatagctcaaatggtacatttggtg

SEQ ID NO: 37854 - DNA, 395 bp, Homo sapiens
  misc_feature (1)...(395): n = a,t,c or g
ctccagccatgcagaaccgnnnnnnnnnnnnnnnnnnnnnnnnnnnnnnnnnnnnnnnnnnnnnnnnnnnnnnnnnnnnnnnnnnnnnnnnnnnnnnnnnnnnnaccagaacctgannnnnnnnnnnnnnnnnnnnnnnnnnnnnnnnnnnnnnnnnnnnnnnnnnnnnnnnnnnnnnnnnnnnnnnnnnnnnnnnnnnccaaggctcataggtgaagagacttnnnnnnnnnnnnnnnnnnnnnnnnnnnnnnnnnnnnnnnnnnnnnnnnnnnnnnnnnnnnnnnnnngtgaattattgggaagtcatgattgtacttttgcaatgtgaggaggacacgagatttggagggatcaggggtgaaataatttggtttanatctgngtccttaccc

SEQ ID NO: 37855 - DNA, 401 bp, Homo sapiens
  misc_feature (1)...(401): n = a,t,c or g
cccacgcgtccgcactaaagagtttttcaggagatctaaaattgcagtgtttgataaaatgtggacctacatgcggagtgcggagccctctgtgtttgtgaggactacggccgaaggggtggctagagtgcggaagtccaaagggaaatatgcctacttgttggagtccacgatgaacgagtacattgagcaaaggaagccttgcgacaccatgaaagttggtggaaacctggattccaaaggctatggcatcgcaacacctaaaggatcctcattaagaaccccagtaaatcttgcagtattgaaactcagtgagcaaggcgtcttagacaagctgaanaacaaatggtggtcgataaaggtgaatgtggaccaaggactctggaagttangaaaagacc

SEQ ID NO: 37856 - DNA, 364 bp, Homo sapiens
ctcagcagagccacccaggtgttcagagagcagtacattctcaaacaggacttggcaaaggaggagattcagcggagggtcaaattattatgtgaccaaaaaaagaaacaactagaagatctcagttattgtcgagaagagaggaaaagtctgcgggaaatggctgagcgtttagctgacaaatatgaggaagctaaagaaaaacaagaggatatcatgaacaggatgaaaaaactacttcacagttttcactctgagctcccagttctctctgatagtgagcgagacatgaagaaagaattacagctgatacctgatcaacttcgacatttggggcaatgccatcaaacaggttactatgaaa

SEQ ID NO: 37857 - DNA, 240 bp, Homo sapiens
  misc_feature (1)...(240): n = a,t,c or g
nnnnnnnnnnnnnnnnnnnnnnnnnnnnnnnnnnnnnnnnnnnnnnnnnnnnnnnnnnnnnnnnnnnnnnnnnnnnnnnnnnnnnnnnnnnnnnnnnnnnnnnnnnnnnnnnnnnnnnnnnnaacgctgttatgcagcacatgactgtatataccctgaccaagtgagatttgtcttgggaatgcaagcgtacttcaacatataaaaatcaatatcatacaccaccaaaaaaaaaaaaaa

SEQ ID NO: 37858 - DNA, 324 bp, Homo sapiens
  misc_feature (1)...(324): n = a,t,c or g
cttgtaaagggtgaacagagccatgggaggaaggtctggcattgggatgccgccctggggacatacgaaccgcctccttccaccattgtgcactatgggaggccgctgctgcgtggagcacttaaagtccagcctccaggaccggatgcccctcctgtctcccgctcccatcgtgcccttaaatgccagatctggtggagggaagagagaagaggtaggaagaaaggtgatgaaaactcctggtcattccttgaataaacttgattttatttaatagaataaaatgtatttgattttgtaagataaaaanaaaaaaaaaaaaaa

SEQ ID NO: 37859 - DNA, 383 bp, Homo sapiens
cttcatataaattctattctaagaccaaatagaaaaataaatgtaactaactttgcagagctattgacattgagagacctaacaacagactgcaatggggattgtaaaataacttttcagccttgcacttgctcatatatgttttgagaaaaatgtaagttaggtataacttattgttttaactattataaggcagtgtttacataaattaatcatctctttcttggaaaacattgagacaaatttattttcagttttacttaaacatgaaacctgtattttagttgctttttgttttgtccagaaatttccagattttgtcttcattttttttcctggttaaaatctaaaccatagtgaagatagtatttatgtttacattt

SEQ ID NO: 37860 - DNA, 408 bp, Homo sapiens
  misc_feature (1)...(408): n = a,t,c or g
ggaacttttgctgctgttacaaatacttgtcactagcttccatttcctcttcattgtatttgaaaacaatgggagaatcttggccagcagggtgtcctggggtagggggtggggtaagcctttctgtggagctctgggtttgctcttagtactgctgccagaaacactgttagaatggcaaccctgccattctcccctccagtggaagattctactttattcaggaaggctggtggcttgcaggggctaggcttacacaagccagccaagattgagaaggtaggggagtgctttcaatggaggccatagttgtcatcttttcttctgagcaggctctaggacaaacaatgagcanattgagatgtcctgtattgngaggatgaggctgatatggtncatcattctcaa

SEQ ID NO: 37861 - DNA, 398 bp, Homo sapiens
  misc_feature (1)...(398): n = a,t,c or g
ggaaggggttggatgtggcagagccaggccccagccggtgccgctcagactcccccgctgtcgccgccgtggtcccagccatggcatcctatccatctggctctggcaagcccaaggccaaatatccctttaagaagcgggccagcctgcaggcctccactacagctccaggagctgttcacccgctcactggctgagagcgagctccgtagtgccccgtatgagttccccgaggagagccccattgaacagctggaggagcggcggcagcggctggagcggcagatcagccaggatgtcaagctggagccagacatcctgcttcgggccaagcaagatttcctgangacggacagtgactcggacctacagctctacaaggaacagggtgaggggca

SEQ ID NO: 37862 - DNA, 361 bp, Homo sapiens
  misc_feature (1)...(361): n = a,t,c or g
gaagcataaatttggtgaatttagaattaggtcttttatcatatcctataaaaagttgagttnnnnnnnnnnnnnnnnnnnnnnnnnnnnnnnnnnnnnnnnnnnnnnnnnnnnnnnnnnnnnnnnnnnnnnnnnnnnnnnnnnnnnnnnnnnnnnnnnnnnnnnnnnnnnnnnnnnnnnnnnnnnnnnnnnnnnnnnnnnnnnnnnnnnnnnnnnnnnnnnnnnnnnnnnnnnnnnnnnnnnnnnnnnnnnnnnnnnnnnnnnnnnnnnnnnnnnnnnnnnnnnnnnnnnnnnnnnnnnnnnnnnnnnnnnnnnnnnnnnnnnnnnnnnnnnnnnnnnnnnnnnnnnnnnnnnnnnnnnn

SEQ ID NO: 37863 - DNA, 400 bp, Homo sapiens
ggcaaatctttactgtatggggccagagttacacagcaccaagaaggtacttaaactagtatgaagaacccagccaaagtgaaagtcagcaggggaataagaactggggttggagcccagagaaagacccagagactggccctgggtgaatgcaggaagctgaacactttgattcgagcaagacgaagtcagccaggaccctgagaaatcacagggctgggttgccccttccttgtgatgtgtgacagaatgaacatgggaatgcaactgtctctttgaaatgttgatttagcggcgggatgcctggattatttggtagttcaacttctaattttttgaaggacctctatactgttgtgcataatggctataaggatatatgagagtatccattttaaca

SEQ ID NO: 37864 - DNA, 393 bp, Homo sapiens
acgtaaatagcttcaaattttaaaagtggaattgcagtgttttttcactgtatcaaacaatgtcagtgctttatttaataattctcttctgtatcatggcatttgtctacttgcttattacattgtcaattatgcatttgtaattttacatgtaatatgcattatttgccagttttattatataggctatggacctcatgtgcatatagaaagacagaaatctagctctaccacaagttgcacaaatgttatctaagcattaagtaattgtagaacataggactgctaatctcagttcgctctgtgatgtcaagtgcagaatgtacaattaactggtgatttcctcatacttttgatactacttgtacctgtatgtcttttagaaagacattg

SEQ ID NO: 37865 - DNA, 400 bp, Homo sapiens
gcagaaagttggagtgactggtccccctgatccacaagtccgctgtccctctgtcattgagtttgggaagtatgaaattcacacctggtactcctccccatatcctcaagaatactcaaggctgcccaaattgtatctttgtgaattttgtctaaaatatatgaaaagtagaactattctgcagcagcacatgaagaaatgtggttggttccatcctcctgccaatgagatttacagaaagaataatatttctgtctttgaggttgatgggaatgtgagtaccatttattgtcaaaacctgtgtcttttggcaaagttgtttcttgaccacaaaaccctctattacgatgtggagccatttcttttttatgtactaacacagaatgatgtcaagggctgg

SEQ ID NO: 37866 - DNA, 390 bp, Homo sapiens
ccagcctccggctcagccggctcatcagtcggtccgcgccttgcagctcctccagagggacgcgccccgagatggagagcaaagccctgctcgtgctgactctggccgtgtggctccagagtctgaccgcctcccgcggaggggtggccgccgccgaccaaagaagagattttatcgacatcgaaagtaaatttgccctaaggacccctgaagacacagctgaggacacttgccacctcattcccggagtagcagagtccgtggctacctgtcatttcaatcacagcagcaaaaccttcatggtgatccatggctggacggtaacaggaatgtatgagagttgggtgccaaaacttgtggccgcctgtacaagagagaaccagactccat

SEQ ID NO: 37867 - DNA, 389 bp, Homo sapiens
  misc_feature (1)...(389): n = a,t,c or g
tgctgtgaaagataatttcctattctaaaatatcaaatttaaaataaagataatgaaagaaaacataagagaactattggactctaattgctttgaactagttttgcagtttgactttacgtcttatacatcttagttacaagtctttggaaactcttgtttacttatgagcataatcattccttggagttatactaactaataatgaatattaaatgatttttcttcagtcacagtgagagcatcttgctttgtggttgaaataggtagtgtatgtcagtctttgctttaggctgtttctcatctaagtgtttgaattaaagatgttaaatntttctaattgtgaaaaatatgttttntgntcgacncattttattaancttggcttt

SEQ ID NO: 37868 - DNA, 382 bp, Homo sapiens
  misc_feature (1)...(382): n = a,t,c or g
cccacgcgtccgctcctcccaaggacacttgtagcccggagctgctcatgtccttgatccagacaaagtgtgccgacgacgccatgaccctggtactaaagaaagagcttgttgcgcatttgaagtgcaccatcacgggcctgaccttctgggaccccagctgtgaggcagaggacaggggtgacaagtttgtcttgcgcagtgcttactccagctgtggcatgcaggtgtcagcaagtatgatcagcaatgaggcggtggtcaatatcctgtcgagctcatcaccacagcggaaaaaggtgcactgcctcaacatggacagcctctctttccagctgggcctntacnttagtccaaactttcttcnaggcttccaaaacat

SEQ ID NO: 37869 - DNA, 385 bp, Homo sapiens
  misc_feature (1)...(385): n = a,t,c or g
acgaaggaacaaaaactttgatctgttcaaagcgaatacaagcctgccacctggaggaaggactgcaccccttcaggtactaagtgctgattcactatgaaacctattaaccaaagtcagaaacatggcattgcaacgcgatcgttcgtctacgcttctccgcacgtaaagttgtgttacgaatttttacatttgtactaacagaacaataggaagcctgatttctcccatctttcccatctactgtctccacccatggggtgggtaccattgttgaagccattctgtgaggctcactattgggtttttttgtgggggtggnagggagggtggcctttttntttgnttttttttttganggggggntttnnngnncgggcccaaa

SEQ ID NO: 37870 - DNA, 386 bp, Homo sapiens
  misc_feature (1)...(386): n = a,t,c or g
cggacgcgtgggnnnnnnnnnnnnnnnnnnnnnnnnnnnnnnnnnnnnnnnnnnnnnnnnnnnnnnnnnnnnnnnnnnnnnnnnnnnnnnnnnnnnnnnnnnnnnnnnnnnnnnnnnnnnnnnnnnnnnnnnnnnnnnnnnnnnnnnnnnnnnnnnnnnnnnnnnnnnnnnnnnnnnnnnnnnnnnnnnnnnnnnnnnnnnnnnnnnnnnnnnnnnnnnnnnnnnnnnnnnnnnnnnnnnnnnnnnnnnnnnnnnnnnnnnnnnnnnnnnnnnnnnnnnnnnnnnnnnnnnnnnnnnnnnnnncatgacacantntacgngaatacnctatggagctttattttattaatgcttcattnnntaacntnncnnttttttnttncttt

SEQ ID NO: 37871 - DNA, 386 bp, Homo sapiens
  misc_feature (1)...(386): n = a,t,c or g
gagatactcaattgccagtgtcattagagtatctcttattgagatgggattttttgaaaagctcagatgggagcgaaccatacataaggatttaaacaagtcagtgtatatcattatacttttgcactcctaatcattacaacttctttaattcaagcctaggaatccttatttgcattattatttttattgtaatacagctcaaagtctgatttttttcccctttggcagaaatgtcagaaactgcttggcaagagtctgatagtgacatttgttagttgattaatggaacactttaagaaatagttgtagctctttaactccttcatgcagctgggttctaggtttaaactgngatttaaaaaatatttaactgnctcaggact

SEQ ID NO: 37872 - DNA, 391 bp, Homo sapiens
  misc_feature (1)...(391): n = a,t,c or g
nnnnnnnnnnnnnnnnnnnnnnnnnnnnnnnnnnnnnnnnnnnnnnnnnnnnnnnnnnnnnnnnnnnnnnnnnnnnnnnnnnnnnnnnnnnnnnnnnnnnnnnnnnnnnnnnnnnnnnnnnnnnnnnnnnnnnnnnnnnnnnnnnnnnnnnnnnnnnnnnnnnnnnnnnnnnnnnnnnnnnggcattacataatgataaaggggtcagttattcaagaagaaattcttaatatgtatgcatctaacaaaagagcatcaaaatatgtgagacaaaaactgatagaactgcaaagagaaatcaacaaattgaccattatagttaaagattttaatacatcttttagtagttgatagatcaagcaggcataaaattagtaaggacataattgac

SEQ ID NO: 37873 - DNA, 357 bp, Homo sapiens
  misc_feature (1)...(357): n = a,t,c or g
ctgaggaacagaaggatcatttagtgctcatggcctgctcattccttggcttctctgctgagctatccagcaggggtgccaattcttccatttagctgactattatatagcccttaaaagggaagggtttattttagctggctgctatattgattgctatagggacgtttctattttcactggctgctatattgactaggaaagggaaaggggccgtattgccgggagctgtcatattgactgttacagaaaagatctgtatttaagcaggaccagtgcactgggatctcccaggcnggatattaangctaantcatccgctcaccccctgctgngagtgtatttgttanatctgta

SEQ ID NO: 37874 - DNA, 362 bp, Homo sapiens
  misc_feature (1)...(362): n = a,t,c or g
aaatcaagtagagagaggccttgtcccagaggctgccccacccctccccattagctttcaattccgtagccagctgctccccagcagcggaaccgcccaggatcagattgcatgtgactctgaagctgacgaacttccatggccctcattaatgacacttgtccccaaatccgaacctcctctgtgaagcattcgagacagaaccttgttatttctcagactttggaaaatgcattgtatcgatgttatgtaaaaggccaaacctctgttcagtgtaaatagttactccagtgccaacaatcctagggctttccttttttaaaaatgcaaatcctatgtgatnttaactctgcatcacctga

SEQ ID NO: 37875 - DNA, 367 bp, Homo sapiens
aagactgccgggatccaggtctccggggtccgctttggccagaggcgcggaaggaagcagtgcccggcgacactgcacccatcccggctgcttttgctgcgccctctcagcttcccaagaaaggatgacacttctgtggtgtgtagtgagtctctacttttatggaatcctgcaaagtgatgcctcagaacgctgcgatgactggggactagacaccatgaggcaaatccaagtgtttgaagatgagccagctcgcatcaagtgcccactctttgaacacttcttgaaattcaactacagcacagcccattcagctggccttactctgatctggtattggactaggcaggaccgggaccttgaggac

SEQ ID NO: 37876 - DNA, 398 bp, Homo sapiens
  misc_feature (1)...(398): n = a,t,c or g
attttgtttccctttcatgaagtacactgtatttccgtcttccacaggggtgggagctgctattgctctagcccctgaaatcaaactcaggagctgaacactttggtgtatgggaggcactaatgggaagcctcaaccctggaatccaaatgccaggactaatagctgttaggctgaagatctcccaaggtcaaggcccagccttttgtgtggctgcaagcagcccaaagagaaagccatggattccagaagagttccaatcctggcatttgggcatggagggtgatgctttggttttgatgcttctgaatgaaaatgaggagtggggttaccagctgctctaggggatggtgaagttccatgagaggcttccgaaatctctgcaatgngcttacccc

SEQ ID NO: 37877 - DNA, 393 bp, Homo sapiens
  misc_feature (1)...(393): n = a,t,c or g
ggaattataaatgaatctttgttacagtgtttgatagtcctaagtatttaatattggtatattatgtcacagccatgaactgtcaacttacacaaaatccaaacgcactttcatttaaaatcaagattagcctatttcattttcaggaaaaaacagttgtcagaattgcttttttgacctctgcagggatgttttcacattgctattcttatgaccctttatcagagagggaataagtgtagtgttcactttcatctccttagggttgactgcaccagcatcttccatcaagcagtcgccttccaccttagaacctgttcacagttaataaagcaagggggaatatgcatttcatattaggaacagatttcttaagtgattgntatgaaaagt

SEQ ID NO: 37878 - DNA, 392 bp, Homo sapiens
  misc_feature (1)...(392): n = a,t,c or g
gtacttttgtcttcataatgattgtactgtctttcatgttataaaaaaaggtgataatttccttagaacattgtaaatgttaattgtcttaacatttcaatttagaattttgtcttctcacagagtgaagaggcataaattcacagtttatatcttttaatgtgttgggtttatagcctaagcttagtgggttcggtttatgataacatagtaattgatagtgaaattcatagctgggcatgatggcacacatgtacagagctgggctnnnnnnnnnnnnnnnnnnnnnnnnnnnnnnnnnnnnnnnnnnnnnnnnnnnnnnnnnnnnnnnnnnnnnnnnnnnnnnnnnnnnnnnnnnnnnnnnnnnnnntgacaagaaagacaggaaggga

SEQ ID NO: 37879 - DNA, 381 bp, Homo sapiens
gagcccagcaccgcggcccgggcttgggccctcttttggttgctgctgcccttgcttggcgcggtttgcgccagcggaccccgcaccttagtgctgctggacaacctcaacgtgcgggagactcattcgcttttcttccggagcctgaaggaccggggctttgagctcacattcaagaccgctgatgaccccagcctgtctctcataaagtatggggaattcctctatgacaatctcatcattttctccccttcggtagaagattttggaggcaacatcaacgtggagaccatcagtgcctttattgacggcggaggcagtgtgctggtagctgcagctccgacattggtgaccctcttcgagagctggcagtgagtgcgg

SEQ ID NO: 37880 - DNA, 397 bp, Homo sapiens
cgttttcacaactagcagcaaatcctgaagcatccttggccaaccgcaacagcatggtgagcagaggcatgacaggaaacataggaggacagtttggcactggaatcaatcctcagatgcagcagaatgtcttccagtatccaggagcaggaatggttccccaaggtgaggccaactttgctccatctctaagccctgggagctccatggtgccgatgccaatccctcctcctcagagttctctgctccagcaaactccacctgcctccgggtatcagtcaccagacatgaaggcctggcagcaaggagcgataggaaacaacaatgtgttcagtcaagctgtccagaaccagcccacgcctgcacagccaggagtatacaacaacatgagcatcac

SEQ ID NO: 37881 - DNA, 387 bp, Homo sapiens
  misc_feature (1)...(387): n = a,t,c or g
agtgaaattgtgttataaaacagagagtaactcttataaacatggccggtgtaaatcatgatgtcatcaccaaatcggaaaaggaggtgagggaacgctggcacttccctcatctttcagagcaggaagtaaaacttgaaacatgcagtcatatcaaaatccaataacctttaataatcactctttgtctacccttttctccccttgactttgaagggatcatttggtcctttttatattgcttgaatttgtttttttcattgatgcataatattcatacatatttgtgaggtacatataannnnnnnnnnnnnnnnnnnnnnnnnnnnnnnnnnnnnnnnnnnnnnnnnnnnnnnnnnnnnnnnnnnnnnnnnnnnnnnnnnnnta

SEQ ID NO: 37882 - DNA, 393 bp, Homo sapiens
  misc_feature (1)...(393): n = a,t,c or g
nnnnnnnnnnnnnnnnnnnnnnnnnnnnnnnnnnnnnnnnnnnnnnnnnnnnnnnnnnnnnnnnnnnnnnnnnnnnnnnnnnnnnnnnnnnnnnnnnnnnnnnnnnnnnnnnnnnnnnnnnnnnnnnnnnnnnnnnnnnnnnngtcagtatgaaaatgctttcctagtacattgattctaagatacattccaatttcagagatgctaaaatgtggaagggtacatgtcttagaactaatgggatacatctattttgcatatttggatttatttggactagttacccttaggtaaatcactaggccataaggngttgtgtagcaacagaagatagcatatagaatctctgaagtcccttttagcactaanagtctaattaattgaaatttccac

SEQ ID NO: 37883 - DNA, 451 bp, Homo sapiens
  misc_feature (1)...(451): n = a,t,c or g
gtgtntngnntttgaancttgaaggtcctgntncgnaattcccgggtcgacccatgcaggcggaaggagtacctgaacagccaacttttctaaaggtcatcaaagttgataaagacactgccactttatcttggggactacctaagaaattaaatggaaacttaactggctatcttttgcaatatcagataataaatgacacctacgagattggagaattaaatgatattaacattacaactccatcaaagcccagctggcacctctcaaacctgaatgcaactaccaagtacaaattctacttgagggcttgcacttcacagggctgtggaaaaccgatcacggaggaaagctccaccttangagaagggagtnaaggtatcgggaagatatcaggagtaaatcttactcataagactcacccagtanaggtatttgagccgggagctga

SEQ ID NO: 37884 - DNA, 394 bp, Homo sapiens
cggacgcgtgggtgtaactacccatcaacttaaagaaaaatattatctcttctctttacattcagtcttggaagaccacaagattgtctgaaggccttctaaaaccttctgaatgtcctgcagaaatataactgtaaaaccacttccatttctaagactaaatatatcaagactatttagtgactctctctgcatgtccccctcacccgccaaccctccgtttcattatataggagctgggaagtgccacatggataatgtcaacttgtgtgctatatctctgaggaatggtgaggtggcatgggagatgtctgtgcttggaggtacctcagagaggtaacccaggggtcagcccaggctgctgggctgtagccaatagccatgcaggactggg

SEQ ID NO: 37885 - DNA, 393 bp, Homo sapiens
cttttgaccaactaaaacagaatgctaccaaagcaagaattccattttatggaagctatacagaaatggatcctgtcatcattgcttctgaaggagtagagaaatttaaaaatgaaaattttgaaattattattgttgatacaagtggccgccacaaacaagaagactctttgtttgaagaaatgcttcaagttgctaatgctatacaacctgataacattgtttatgtgatggatgcctccattgggcaggcttgtgaagcccaggctaaggcttttaaagataaagtagatgtagcctcagtaatagtgacaaaacttgatggccatgcaaaaggaggtggtgcactcagtgcagtcgctgccacaaaaagtccgattattttcattggtc

SEQ ID NO: 37886 - DNA, 393 bp, Homo sapiens
gcctggggcacggaccctgaagtctgaaccaggaaagcaagccaaggtgcccgagagaggccaggagcctgtgaagcaagctgactttgttcgcagcaagtctttcctgataacccctgtgaagcccgctgtggaccggaagcagggggcaaagctcaacttcaaggaggggctgcaaagaggaatctcattgtcccatcagaacttggctcagtctgcagtgatgatggagaaggaactgcatcagctgaagagagccagttatgccagtacagatcagccatcctggatggaacttgccagaaagaaatctcaagcttggagtgacatgccccagattataaaataggtgggcagtgtgctgataaagcatgtccactaccctgacaagcc

SEQ ID NO: 37887 - DNA, 394 bp, Homo sapiens
  misc_feature (1)...(394): n = a,t,c or g
ctgagtacatctggtggtgtgcattagatgtgagggctatgttgacatggcatcacctccaaagacctgacctgcctaaagactgatgacaggccatccttcctgctgttctaggtactggcctgggtgacagagcaggacatgagacatagatacagtggggaggagaagtggggaaaggtggagcagagagttcttacttattgaagattatacagccctttcggttatgaagtccctgcttgaaggcaatggacctggggaagagactatcacaaaaagtctccattttcattttacatcctctctattggaggcagcacttttccctcatgctgtcctataggactccactttgaaggttgtgcctacgntgcanggaactaggaacatg

SEQ ID NO: 37888 - DNA, 402 bp, Homo sapiens
  misc_feature (1)...(402): n = a,t,c or g
nnnnnnnnnnnnnnnnnnnnnnnnnnnnnnnnnnnnnnnnnnnnnnnnnnnnnnnnnnnnnnnnnnnnnnnnnnnnnnnnnnnnnnnnnnnnnnnnnnnnnnnnnnnnnnnnnnnnnnnnnnnnnnnncnnnnnnnnnnnnnnnnnnnnnnnnnnnnnnnnnnnnnnnnnnnnnnnnnnnnnnnnnnnnnnnnnnnnnnnnnnnnnnnnnnnntgtattttttcccctttaggactgaaaaaattgggtgttacaagattacctcaaggactggtctgagaactggggatggtaaggaanaaactcaagtggccagcctntggtttgtgggggtaggngggcaatttntgtttnaaccanaagcngttctacttcatanatcantatattggaattgggctt

SEQ ID NO: 37889 - DNA, 405 bp, Homo sapiens
gaaatagttttcagtggttactaataattcattagccaacgtttcatcagggttacccttggattcgtagaaacactgagaattacgtttgttccaacacatctgttacattagtcagcttttagtgccatattatgggaatctcagaaaccttttgactgggttcaggttatctgtgaattttcatattattttatggccaccagctgcattttatgactatatattaaatgttttattttttcaaataatttttccaaatggtctcagtttcccatccaagggaaatcaagcatatgcctaaagatctactgttcagtaagttgcagctaatgcaaaaccccaaataaacaaaaaagaaacaaaaataaaaccctcctttcaaaaacaatcctgtgcaaaata

SEQ ID NO: 37890 - DNA, 400 bp, Homo sapiens
atttcaattagtctaggtttaggcccttgtacattttgcccataactttttacaaagtacttcttttattgcacattcagagaattttatatatatgtcttgtgtgcgtgtccttaaacttccaatcttactttgtctcttggagattgttgaacgcagcttgtctaggaaggggatgggactagattctaaaatttatttgggaccatgggaatgatagttgggaagaaaactatttgcacacgacagatttctagatactttttgctgctagttttatgtaatatttattgaacattttgacaaatatttatttttgtaagcctaaaagtgattctttgaaagtttaaagaaacttgaccaaaagacagtacaaaaacactggcacttgaatgttgaa

SEQ ID NO: 37891 - DNA, 403 bp, Homo sapiens
  misc_feature (1)...(403): n = a,t,c or g
cccacgcgtccgtattctttacaaatccatttgtgatgcagtggtaatttggtggcactgcaattatggccagcaatgaagattataaaataattgcctgaggaaccaagctcatgtgcactaaaaagaagcagggattcttagaagattcttagaagtatagagtagtgannnnnnnnnnnnnnnnnnnnnnnnnnnnnnnnnnnnnnnnnnnnnnnnnnnnnnnnnnnnnnnnnnnnnnnnnnnnnnnnnnnnnnnnnnnnnnnnnnnnnnnnnnnnnnnnnnnnnnnnnnnnnnnnnnnnnnnnnnnnnnnnnnnnnnnnnnnnnnnnnnnnnnnnnnnnnnnnnnnnnnnnnnnnnnnnnnnnnnnnnnnnnnnnnnnnnnnnnnnnnnnnnagtcatc

SEQ ID NO: 37892 - DNA, 393 bp, Homo sapiens
ggcaatccttggtattatggcaaagtcaccaggcatcaagcagaaatggcattaaatgaaagaggacatgaaggggatttcctcattcgtgatagtgaatcttcgccaaatgatttctcagtatcactaaaagcacaagggaaaaacaagcattttaaagtccaactaaaagagactgtctactgcattgggcagcgtaaattcagcaccatggaagaacttgtagaacattacaaaaaggcaccaatttttacaagtgaacaaggagaaaaattatatcttgtcaagcatttatcatgatactgctgaccagaagtgactgctgtgtagctgtaatttgtcatgtaattgaagactgagaaaatgttgggtccagtcgtgcttgattggaaa

SEQ ID NO: 37893 - DNA, 393 bp, Homo sapiens
  misc_feature (1)...(393): n = a,t,c or g
gaataatcttttgcaatgccaataaataatgaaaaagtatataaatataacgctgtatagaaagctctcaagttcagtgtttggttaaaatacatactcagtaaatggtagctattattgtcttagtttaagttattgcaagcattaaaattaaatgtttagctacagactcaatccagttttaatgtcattgtgttaataaggcctcttaacattgaagcaacaaagataaaggaatttttttgtagctattcacgattctgcccagctcaaggtaaagatagcaacaaaatactccaaccagantaaaagaagtctccacttgactgcagctcttnacaacacttcacaagggtcaagctgtgttagtttccttcagtgttaaacagaatg

SEQ ID NO: 37894 - DNA, 350 bp, Homo sapiens
  misc_feature (1)...(350): n = a,t,c or g
caagtaccttgatcactttggaatcatagcattgcaagctatttcaaaaaaagttgcgtggttggattgtgctagctacttttaaatttataaaaaatgccccatatattttcttgcttgtctgggaaatatagttgctatctaactagaaaaataagagggcattattaaagtaactctttaagcatcgtactaaatgtttgacttccattaaccatatttcttgtagtagctgtagctattatgatactgtgtaaaacagaacaggttctatatatgcaaatgacattttcatttaatgtaccaaattgtggatctaacttttataatataggttaaaacngancctt

SEQ ID NO: 37895 - DNA, 374 bp, Homo sapiens
caagagacttcgagcgatcccagtttccatttcaatctgtattcactcgtagtgagtttccttgaatgggatttcaagcggagaatgggggagtctcacttccccgccgccttgccccattggcctgggccagttctccactcctaggggccaagccacccctagccttggtgggggaaaggcagggcccacccgggccagcccgtgccctgaggggctcttgacacccacgtagaattctctacacaccagtaacgggatttcaattccgatggactctgccgccctggcggcccttcctgtgacttttgcgccccgcgcctggggtggggggtgcgaagagacgctacgttccttttcgaatggaggaaagc

SEQ ID NO: 37896 - DNA, 294 bp, Homo sapiens
  misc_feature (1)...(294): n = a,t,c or g
actagttctagatcgcgagcggccgctctagaggatccctcgaggggcccaagcttacgcgtgcatgcgacgtcatagctctcnnnnnnnnnnnnnnnnnnnnnnnnnnnnnnnnnnnnnnnnnnnnnnnnnnnnnnnnnnnnnnnngatctgctagcttnnnnnnnnnnnnnnnnnnnnnnnnnnnnnnnnnnnnnnnnnnnnnnnnnnnnnnnnnnnnnnnnnnnnnnnnnnnnnnnnnnnnnnnnnnnnnnnnnnnnnnnnnnnnnnnnnnnnngctgcatatgcttgctg

SEQ ID NO: 37897 - DNA, 397 bp, Homo sapiens
  misc_feature (1)...(397): n = a,t,c or g
cccacgcgtccgctgtggatacggacagccatgccgagcaggggccagctcagcagccccaggcccaggtggaggatgcagatgcattcgagcacattaaacaaggcagtgacgcatacgatgcacagacctatgatgtggccagcaaagaacagcaacagtctgcaaaagactctggcaaagatcaggaagaggaggagatagaggacacccttatggacacagaggagcaggaggagttcaaagcagcagacgtggagcagctgaagccagaggaaatcaagtcgggcaccacagcacccttgggctttgatgagatggaagtggagatccaaactgttaaaacagaggaagaccaagaccccagaacagacaaagcccataangagacagaatt

SEQ ID NO: 37898 - DNA, 360 bp, Homo sapiens
  misc_feature (1)...(360): n = a,t,c or g
ggtctttgcagctcccggccagggtgaggcggaagtgagccctcatcctgccactcctatcctccattcctgcaagagttttaagcttgagagagctgaccacagggccccccggggaacagggatggcacttccctgagcagtcctggcccccggccactgtctcggggcccacctctngccnctcatcttggtaattatccagcctcagatactntatgtnncactgangtgggatctcacggtcatacntaggatnntaatgtcaagacntatngntanagncanctnaatcttncggngntggttttngctnnttgnttnnnatnnanntnttannnnnnntttntntntnnttct

SEQ ID NO: 37899 - DNA, 394 bp, Homo sapiens
gtgagctagaacaagaaaggcaacagcatgaagaaacaattgctgccatgaaagaagaagagaagctcaaagtggacaaaatggcccatgacttagaaattaagtggactgaaaatcttagacaagagtgttctaaacttcgtgaagagttaaggcttcaacatgaagaggataagaagtcagcaatgtctcaacttttgcagttgaaagatcgagagaaaaatgcagcaagagattcatggcagaagaaagtagaagatctcttaaaccagatttccttgctgaaacagaatctggagatacagctttcccagtctcagacttctttgcaacaactgcaagcccagtttacgcaagaacgacagcggcttacgcaagagcttgaagaattaga

SEQ ID NO: 37900 - DNA, 394 bp, Homo sapiens
atttcttttaaaaatccttaagtgattaagagtgcaaattgagattttagctaattatataattcagttactatcatcacataaaatgaaattaaaagattgttttctgtcacctttattttgattcattctttaactccttcaatatgtatagtattttatatttttatatcatttaaaaagttatattaggatcataaaaattttttgagtagaaaaagaaggcatggttatacccattttgtcaatggggagactgaagttcccgctgatgaaatcagctccctaagaatttccagaattaagaggggaagcttcaagaggattgatggtctttagtctccaagccaggtcttttcccaacatcccttcttgcctcttttttatttttgag

SEQ ID NO: 37901 - DNA, 396 bp, Homo sapiens
aataaaatatgactgttttagggactagaccatgtgcttttttaacacttatatatataatggtctatttgaagagctcacttcaacctaacagctagatgtctttacaaaccttaaaccaaaggagtaaaaaaaacaatggtaagcactgaagtataataagtaacctttggtacagcaggtttgctgcagtgtttttttctgtccacatgcaaattttggattctatcccagacccaggttttctagttcagaagactaaccagcttagtcagaagatggttccatggaagaaaaaggccaaggagtttgaagatttttcttctagacatctcaaaatgtggtactcataccatccacatcagaatcccttgtaggattttctaaaattacagg

SEQ ID NO: 37902 - DNA, 309 bp, Homo sapiens
  misc_feature (1)...(309): n = a,t,c or g
tcttcacctggatgaacatgtgcctgtcgttattggacttatgcctcaggactacattcagtatactgtgcctttagatgaggggatgtatcctttggaaggatcacggagctattgtctggacagctcttctcccatggaagtctctgcggttcctcctcaagtgggagggcgcgctttccccgaggatgagagncatnnagancaggacctanntgtcncccatagattntngnggatnagcccngtgtctggcttgtcancngncntttctnngnanccntnatnnnnagntccantggtntcaca

SEQ ID NO: 37903 - DNA, 320 bp, Homo sapiens
  misc_feature (1)...(320): n = a,t,c or g
cttgagtttctgtgaaagctattgggaaggaaatcattannnnnnnnnnnnnnnnnnnnnnnnnnnnnnnncaagagcaagtacataaatagaagccaaggtttttgggaatgtgataggggatcagagtgccagagaaggcattagcagtgggtagctggagggccagctcctccgtgacccttggaaggaaagaaggtagatgtttagatgaagatttgcatgtngatntcnggantangannnnngnncatntnangacncnggctattcttgtnnnnttttgntnttttnctttgcggtctnntttnatnantaaa

SEQ ID NO: 37904 - DNA, 310 bp, Homo sapiens
cacccaagctcaagaggaaaagcaagaaggatgatggggatgcagccatgggatcccggctcacagagcaccaggtggcagagccccctgaggactggccagcactaatttggcaacagcagagagagctggcagagctgcggcacagccaggaagagctgctgcagcgtctgtgtacccaactcgaaggcctgcagagcacagtcacaggccacgtagaacgtgcccttgagactcggcacgagcaggaacagcggcggctggagcgagcactggctgaggggcagcagcggggagggcagctgcagga

SEQ ID NO: 37905 - DNA, 294 bp, Homo sapiens
ctgtatgattccatttatatgacatgctggaaaaggtgaaaatataacaacagaaaacagatcaaatgttgctgagtgtctggggtggggtggggtctgaatacagaggggttgcacgaggcaattctttgaggtgttggaattgttttgtatcctgcttgtggtcatagataaaaaatctatgcatgtgtaaaaaatagaagtatacatacaaaaaagtgaattgtactgtctgtaatttttttaaataaataaaaatccctagctctgcttcatcagcaaaaaaaaaaaaaa

SEQ ID NO: 37906 - DNA, 308 bp, Homo sapiens
ttgataaacagaatcaatcttccaggacagataattccctgaagggacctatccttgcataagtgaactagttactcatacagaaaatgatctgcacatcttactacaacactacacacaagaactaaaagattaatgattatctgtattctcttcactaattactattatgggggaataatgattagcaaattatatgaattcgagttctctctatacttttattagtaaagcttatcatttaatggactgaagtaagatgtgttacctttattcgagctatttgtagccacactaaatgaaggtgg

SEQ ID NO: 37907 - DNA, 317 bp, Homo sapiens
atttctcttgaaactgcggctcgggacctgcggtacctgctgtagtcacgagggacgggcggcggcctggtcggcagagagtagcctgcaacattcggccgtggttacgatgagtttacccctcaatcccaaacctttcctcaatggactaacaggaaagccagtgatggtgaaacttaagtggggaatggagtacaagggctatctggtatctgtagatggctacatgaacatgcagcttgcaaatacagaagaatacatagatggagctttgtctggacatctgggtgaagttttaataaggtgtaataatgtcc

SEQ ID NO: 37908 - DNA, 227 bp, Homo sapiens
  misc_feature (1)...(227): n = a,t,c or g
ctccccatttcccacacccttgtgccctgtgtctgcctctgtttcatcactgtgtcagaggcccatgtgaaatctttcattctgatgtgagttttataaagatgtacactgtgcttaatccctgcccatccttggtagcccctagtgcaataaagtctccctgagtggtgagttctcccggcaaggaggaggggagttcttntgcanaattcannccntnnttcttg

SEQ ID NO: 37909 - DNA, 389 bp, Homo sapiens
  misc_feature (1)...(389): n = a,t,c or g
aaaaccaccatggagggactgtggagtcatactgacatgagttcaaatcctgatttctctacatattgattttgactgttaattgttagtgttttttctttgtttgnnnnnnnnnnnnnnnnnnnnnnnnnnnnnnnnnnnnnnnnnnnnnnnnnnnnnnnnnnnnnnnnnnnnnnnnnnnnnnnnnnnnnnnnnnnnnnnnnnnnnnnnnnnnnnnnnnnnnnnnnnnnnnnnnnnnnnnnnnnnnnnnnnnnnnnnnnnnnnnnnnnnnnnnnnnnnnnnnnnnnnnnnnnnnnnnnnnnnnnnnnnnnnnnnnnnnnnnnnnnnnnnnnnnnnnnnnnnnnnnnnnnnnnnnnnnnnnnnnnnnnnnnnnnnnnnnnnnnnnnnnn

SEQ ID NO: 37910 - DNA, 374 bp, Homo sapiens
  misc_feature (1)...(374): n = a,t,c or g
atttttttaaagaactttatagtatttatacaatcatttttgataccttgatcatgaatcaaactgaaccaagttgtcaaaaatgattgtataaatactataaagttctttatgttccttggctatttttgatagttctggttttcaggtagcatcattatgttaaaaggctggctgtcaaagttagtgattaccaatagggtataatttcaggtatatcaggtaggactctatgtgaaatatagctccctaaatggctgcctgatatgtgagattttgnnattcagatttgagttgttgaatcactggganctgaaaagggctttaaanntctntatttnantatnntcntatattngcnccantacattaat

SEQ ID NO: 37911 - DNA, 388 bp, Homo sapiens
gtcctgacacgtcttcaagcagaagaagagcaaaaacagcagcctcagcttctgaagtgacatgaaaagagcctctggatgcatttccatttctctccttaacctccagcagactcctgctctctatccaaaataaagatcacagagcagcaagttcatacaacatgcatgttctcctctatcttagaggggtattcttcttgaaaataaaaaatattgaaatgctgtatttttacagctactttaacctatgataattatttacaaaattttaacactaaccaaacaatgcagatcttagggatgattaaaggcagcatttgatgatagcagacattgttacaaggacatggtgagtctatttttaatgcaccaatcttgtttatag

SEQ ID NO: 37912 - DNA, 382 bp, Homo sapiens
tgctccgccgctcgcggctggggggtccggggccgcgtctcctctcctccctccgcctctcctctttcctccttcctgctgcctcttcttttaaagcggattctttggccacaaatagcaactcggctgcccccctcggtgcctccctccccttctcttcttccccccaaaagtgaagcgcacgcgaggtaaagaaacgaagaccctgagaatttaaaatcatccaactatttggtgccagaagcaggacaagaactcagacatcatgatccagtgccctccatcccaccagctattcatcatcacctccacattctggatcaaagaagccagttttccaacttatcaatgagcaatacatatagaatatttttaaaactcc

SEQ ID NO: 37913 - DNA, 322 bp, Homo sapiens
  misc_feature (1)...(322): n = a,t,c or g
gctccttgcagtttctttctggtccccttgatcttcaaatgcacatcaaatctgtctcatgtttaaaatcctgtgatacccacttctgcttcaagacagaaaactctgcatttaaagggctctggtaattaggttaggccaacctgaatagtatttattttgtcaaataatgtaacataatcgctggagtgacatatcatatttttaggttccactnatgctgaaagngaaggacattatacatggcatgagtcactggaggtcatccntgggaantctgcgtacnanaccaagtggtaatnanngntcaagaaagntaata

SEQ ID NO: 37914 - DNA, 322 bp, Homo sapiens
ggattacctaaagccaaatctcatgcggaaaagaaagagcatagacggtcatggcgaatgtttgtcccggccaattttatggattatgcaaacaaaagtgaaagctcttttgttgaacctgctgatatgtcagatgctgttaccaaggccagcaagtgcagatggggtactaattctctcacttcggaggaggatgactctggtttatgtagccctccagcagagagggaagaaaaacagggcattttaactggagaccagtcacgaattaaaagtttgtcttctactgaagatattcttgtaacagaccaatacagaccat

SEQ ID NO: 37915 - DNA, 315 bp, Homo sapiens
  misc_feature (1)...(315): n = a,t,c or g
gactagttctagatcgcgagcggccgctctagaggatccctcgaggggcccaagcttacgcgtgcatgcgacgtcatagctctcnnnnnnnnnnnnnnnnnnnnnnnnnnnnnnnnnnnnnnnnnnnnnnnnnnnnnnnnnnnnnnnngatctgctagcttnnnnnnnnnnnnnnnnnnnnnnnnnnnnnnnnnnnnnnnnnnnnnnnnnnnnnnnnnnnnnnnnnnnnnnnnnnnnnnnnnnnnnnnnnnnnnnnnnnnnnnnnnnnnnnnnnnnnngctgcatatgcttgctgcttgagagttttgcttactg

SEQ ID NO: 37916 - DNA, 317 bp, Homo sapiens
  misc_feature (1)...(317): n = a,t,c or g
agagaatcttgtgatttttgtttcaaaaaaatataataaggctgagtgcggagccaaggtaccttgtggtctataatcctttagaacaagaccgaatctcgttggtctcagtctatgtgagttccccgacagtgcaagtgttctctgcttcaggaaaacctgtggaagttcaagtcagcgcagtttgggatacagcaaatactatttcagaaactgcctatgagatctcttttctagcacatataccgccattggnactgaaagtgnataanattntggangcancangtnnnaatnncatttanctgattntgttc

SEQ ID NO: 37917 - DNA, 306 bp, Homo sapiens
  misc_feature (1)...(306): n = a,t,c or g
cccacgcgtccgacgggaggaaaaggaaccccgaggccggtgtggcaaccacagatttgtacggcaactgcactctgaggcattctgggacatctgcagctgcccccgaggcagctggtgtgtttgcactggctctggaggctaacctgggtctgacctggcgggacatgcagcatctgactgtgctcacctccaaacggaaccagcttcacgacgaggtccatcagtggcggcgcaatggggtcggcctggaatttaatcacctctttggntacggtgtccttgatgcantgtnccatggtgaaa

SEQ ID NO: 37918 - DNA, 393 bp, Homo sapiens
  misc_feature (1)...(393): n = a,t,c or g
cacattttgtatttcactgctcatttcctcccagtgttgtttaaaggttcctgtctccccagtatttcctaaaaatgtgcagttacacaaagagccttgattagattcaggtgcggttgatctgacataagtacttcctgagtgactctgcatctttgttttgcatcatatggagaggaacgtgacatctggtggttccacacgctgtgactgagcaatggggtctgtggtgtcagtctggtcttttccattataaagtaccccactaaccttccacctgatggttctagcagccgtgtcaggggtccctgagaccaccctcatgcttgatgattcacaagatagattcacagaactctgaaaagctgctatacacatcattcctgnttattt

SEQ ID NO: 37919 - DNA, 319 bp, Homo sapiens
  misc_feature (1)...(319): n = a,t,c or g
gttctagatcgcgagcggccgctctagaggatccctcgaggggcccaagcttacgcgtgcatgcgacgtcatagctctcnnnnnnnnnnnnnnnnnnnnnnnnnnnnnnnnnnnnnnnnnnnnnnnnnnnnnnnnnnnnnnnngatctgctagcttnnnnnnnnnnnnnnnnnnnnnnnnnnnnnnnnnnnnnnnnnnnnnnnnnnnnnnnnnnnnnnnnnnnnnnnnnnnnnnnnnnnnnnnnnnnnnnnnnnnnnnnnnnnnnnnnnnnnngctgcatatgcttgctgcttgagagttttgcttactgagtatgatt

SEQ ID NO: 37920 - DNA, 332 bp, Homo sapiens
  misc_feature (1)...(332): n = a,t,c or g
gccaccgccacctcccaagcctgccaacgtgaatggcttgcagaatcagtcagcaggccagcggccttgggaaagagccactgtcctcgcagcctgggccagctgggggaacaatgtagggtttgttgcttaggggtcccaggcttgcgggggggttggcacatggtgggcagtggacttgagctgggatggtctgagggggcactgacacgctcacccaagggcagacttcagaccaggccctcagatcctgatgccaggttacagggcttaagggaacntgaaaatccattgggtctccctgtccacttgggagtcaccttctcatcacc

SEQ ID NO: 37921 - DNA, 302 bp, Homo sapiens
  misc_feature (1)...(302): n = a,t,c or g
taatgagttaggaaatatgagatatttaaatatggcttggtgaagttcattgaacactttaatgttggttatattatttatatcctctatatagtttaaaaaacagctagcatattttatagatatatttgcaagactgattttaaaataatatattttcattgntttgntaacaaatcanacttttcaagctatttntgactgntncntctttntntanagttgntnttattcntcnttnatcgttntttnnatttttnnnanttanncntnnnatnntncncnngnttacnctctttttc

SEQ ID NO: 37922 - DNA, 86 bp, Homo sapiens
gggtgaacttacaaccatctgtgggctccccctcatattcatcaccgtatcaacagcttagaagaaaaccccaaaaaaaaaaaaaa

SEQ ID NO: 37923 - DNA, 326 bp, Homo sapiens
  misc_feature (1)...(326): n = a,t,c or g
atttgacttcatcactacttttgttaatggatgcatccattaagcataagcatgctgccctactctccatcttggaaactgagattggctgcgaatattaaacagatgcatgtaaagtttcataaatttagagtacctaagcagtcagtgacaatatgcattacatattgtctggctaacaaagggaagaaggaaagtgatctagaagagaagactaaagaaagatatttgtanatatttttcttcctcctttacgcagtaggaaagattcctaaaaatgtatgactactgnaaataatgtaaatactacttacattatgttagtg

SEQ ID NO: 37924 - DNA, 324 bp, Homo sapiens
tgacaggaagggaagtgccctggctgggcatcaagagacttttctggccctttccctgccaacactttgctgtgtgaccttggctcccgcctcggcctgcctcctgctgatgctcctggccctgcccctggcggcccccagctgccccatgctctgcacctgctactcatccccgcccaccgtgagctgccaggccaacaacttctcctctgtgccgctgtccctgccacccagcactcagcgactcttcctgcagaacaacctcatccgcacgctgcgggcaggcacctttgggtccaacctgctcaccctgtggctcttctc

SEQ ID NO: 37925 - DNA, 318 bp, Homo sapiens
tttttttgaaaaaagacatttggaattgtttgaaaaactatttaccttctataatcattttcctaaaaatactacattggaaattgaaaaaacaaaagatatcaaatataatgaatatttattcaaaaagattacaatgtgattttctttttctagtttctcaactcattggatgctaaagaaatatatttggaagtaatacataatcttccagattttgaactactttcggcaaacacactagaggatcgtttggctcatcatcggtggctggtattttttcatttttggaaaaaatgaaaattcaaatgatcctga

SEQ ID NO: 37926 - DNA, 324 bp, Homo sapiens
cccctccactgacctaaagccagacacctgccgtgactgggcaggctctctcccattattaacagaggaagaggagggaggcagcaactttcaggtagcactgattcttggacatactctgtcctgggtcaaaccccactggcagcaggaattctgaatgtattggggacccctccttaggcctcgttaagtctcaaacacagtacagctcacccagcattgctgacgactgaagattcagaaacaaaacctacacacagcactgaggtcttaatcatagccaaaatgtgataaaccatgttgtgaaaaacttttatacattga

SEQ ID NO: 37927 - DNA, 335 bp, Homo sapiens
cccacgcgtccgatatttgatgccattaagaatagaatatgatattattccattatattttcaaaatggttattgttgacatagagaaaagctatttacttatgtgtttatattttctaacaggacaacttactaaaatcaccatcaatgaaactcacagacatgggtgagacaaaactggttcaagatactctatccttttagtggggtatgggtcccctttactgaccctgagtggccacctagactggtttgtctaaagatttgactagaagattcctagttctctgcctcaacactccaggggcttcccctttggaccaccttacttttcc

SEQ ID NO: 37928 - DNA, 331 bp, Homo sapiens
atttatcctaagccatcaaatggggtagtgcctcttaaaccattaacagtactttagacattggcactttatttttctcgtagatctttagctactttggggaggagggaaggtgctgataccttcaatttgttacttttcaagatttttaaaaataactagtgtagcttatcttaaacattttataaaaccttcagatgtctttaagcagattggaagtatgcaagtgcttccttagcagggacagtggataatccttaatggtttatcatagatttcaccctccccccttctcagaagagtgggaggtatgcctccttaaaatgtcaaa

SEQ ID NO: 37929 - DNA, 333 bp, Homo sapiens
ctcctcgcgggcagtgggggcaaccgcgaagacagaatttcacaaactttcagctccagcagtttcaaggaaatgtcaaatgacaagatggaagaccgagtgtcaagagctaagacaacaaaaaggcccccaaaatttgttttcaagaaaaccaatgaaaaaagcaagcaatcagaacgtgaagtccaggatcatggatgtgcttatcttcacagtcactgctgggtcctgaagttctcctctggcccagtgccagctgcgaagccctctgccaaagggccagaggaggccggtgatatagagcttcttggatttaccccaccccgtcagggg

SEQ ID NO: 37930 - DNA, 323 bp, Homo sapiens
agttctagatcgcgagcggccacccttttttctaagtgttcgtctttagttttgattttggaaagatgttaagcatttatttttagttaaaaataaaaactaatttcatactatttagattttcttttttatcttgcacttattgtcccctttttagttttttttgtttgcctcttgtggtgaggggtgtgggaagaccaaaggaaggaacgctaacaatttctcatacttagaaacaaaaagagctttccttctccaggaacactgaacatgggagctcttgaaatatgtaaggtaatttaaaaaaggtttgccattttgga

SEQ ID NO: 37931 - DNA, 324 bp, Homo sapiens
gaaacttttatgaggcttcagattggtttaaggaagctcttcagattaatcaggatcatccagatgcttggtctttgattggcaatcttcatttggcaaaacaagaatggggtcctgggcagaagaagtttgagaggatattaaaacagccatccacacagagtgatacctattctatgctagcccttggcaacgtgtggctccaaactttacatcagcccacccgagatcgagaaaaggaaaagcgtcatcaagatcgtgctctggccatctacaaacaagtactcagaaaattggattgccaataggaattctggtattgcc

SEQ ID NO: 37932 - DNA, 333 bp, Homo sapiens
agagtttcaactacagcttgtcttgctacaaaacacatttctatggtgcaaatttgctcatacacaattggtaaataggagaatgatgtctgcttagttttctagattggttcataagtgctttcccccaccaactccccaggcaaggggagttagaatatggtgaataaaattaaaatatttggccagcaaagcaaaaggcttagggttacctactacattagcagaagctttttccaacttacataagaaaattgtaaaagagtacctgccctttgggtgctcttccttgagaagtgcacttttccttttctttttattaggactttcagg

SEQ ID NO: 37933 - DNA, 309 bp, Homo sapiens
  misc_feature (1)...(309): n = a,t,c or g
cgtagttctaccggctttgccatgtgcttctgccaccctgctgagtctgttctggtaatcggggtataataggctctgcctgacagagggatggaggaagaactgaaaggcttttcaaccacaaaactcatctggagttctcaaagacctggggctgctgtgaagctggaactgcgggagccccatctaggggagccttgattcccttgttattcaacagcaagtgtgaatactgcttgaataaacaccactggattaatggccaaaaaaaaaaaaanannnnnnnnnaaaaaaaaaaanggggngccc

SEQ ID NO: 37934 - DNA, 315 bp, Homo sapiens
gtgccatgttacttttggtgccttaatacacctacttggattacttacaaatgttttatcacttcgttacaaaatccccacctggcttgtgctgccacataagcctctcctgcctatcgtatagagctgcagaaagagtaaatgatacacggtatttttatacagactgctgtgtttgtttaaacatttattattctcttcctgattgatggtaataatattagacttgttaattttagcacccaaagctgacgcctcatttgcactgtaagccttaactcttctgtacagcagtatcttatatacatggtatcc

SEQ ID NO: 37935 - DNA, 316 bp, Homo sapiens
cggacgcgtgggggaaacaagaaatacagaaaataagtcaatctgaaagatttttcaagaatcttaaaatctcaagaagtgaagcagattcatacagccttgaaaaaagtaaaaccctgacctgtaacctgaacactattattccttatagtcaagtttttgtggtttcttggtagtctatattttaaaaatagtcctaaaaagtgtctaagtgccagtttattctatctaggctgttgtagtataatattcttcaaaatatgtaagctgttgtcaattatctaaaagcatgttagtttggtgctacacagtgttg

SEQ ID NO: 37936 - DNA, 314 bp, Homo sapiens
ctttattggtattgtttttgtagtaatttaagaggtggatgtttgggattgtattattattttactaatatctgtagctattttgttttttgctttggttattgtttttttcccttttcttagctatgagctgatcattgctccttctcacctcctgccatgatactgtcagttaccttagttaacaagctgaatatttagtagaaatgatgcttctgctcaggaatggcccacaaatctgtaatttgaaatttagcaggaaatgacctttaatgacactacatttttcaggaactgaaatcattaaaatttta

SEQ ID NO: 37937 - DNA, 319 bp, Homo sapiens
aatttgctaaggaactgcaaggcaaaacagacaatcaaaatgaccctgaaggggaccaagaaaattagtaatggttaattgctggcctcagattgtccttatgttcctgagttatgatccttgagtaatgctttgattttaatagttggttctgtgttgcaacatatatctttagtgctgacactaactttgtccaactctgtctgtaagctggagcatttttctgatgccagctgaatattagagctgaaaacacatttgttgatatttgtcttgtccacatttgggatgttcagtatttgagcttatagtgaactga

SEQ ID NO: 37938 - DNA, 318 bp, Homo sapiens
ctaaaattcaatcattttagttcaaacataataagtgaattttacagtatttctaagaatggaattgtggtatttttttctgtattgattttaacagaaaatttcaatttatagaggttaggaattccaaactacagaaaatgtttgtttttagtgtcaaatttttagctgtatttgtagcaattatcaggtttgctagaaatataacttttaatacagtagcctgtaaataaaacactcttccatatgatattcaacattttacaactgcagtattcacctaagtagaaataatctgttacttattgtaaatactgc

SEQ ID NO: 37939 - DNA, 405 bp, Homo sapiens
  misc_feature (1)...(405): n = a,t,c or g
ctatgatgtaactccccttccttatggctaggctactgtaacacttgcctgtaatcagtgaagggctgtgcaccttgtactatttcacaatgggttctgctggacagataatgggccagtgttattgaggtgatcaagatctgttccacagggctaatgccaccatctcccctcaaaattttgtagaggttctaaaaagaaagtggtatgttgtgtgatgatcagcactaagtcctgcattcctgttaaagccacttgggtcataagaagggagtaanaaatgaagnctgactagaattctattgcanaggccaggttaccanttttaaattattgggcntttggaagttngtgatatagttttactttgatgtgcattttgaatttcagctaccctaaatagac

SEQ ID NO: 37940 - DNA, 393 bp, Homo sapiens
ggacagaaattagtctgactaatttccttctttcctcgcacttctccccactcgtcatcttttaactagtgtttcacaaggatcctctgaaaccctctctgtgccccaagtacagatgccattacttctgctttcgtatctcctcaggcaaaagtggagggtgccttatgggccctcctcataggttgtctctgcacacacgaacctaacccaaatttgctttggtgccagaaaaactgagctatgtttgaacaaagatgtcgtgcaaactgtactgtgaacaacagttggtttaaaatataaggggggccaaggggaagggaagggatgccatttcaaaagcttgattgatgtgttcagagctaaattaagaggagttttcagatcaaaaat

SEQ ID NO: 37941 - DNA, 410 bp, Homo sapiens
  misc_feature (1)...(410): n = a,t,c or g
atatttttaaaaatagtgataagactatcactaatatcatactcatcctgtaatatgtaaacacagttctgttgttactggcagaaaaattggaatacccagcattaagtgagagaagtcagcctacttttatgatgaagctctcttgactatgagtaaaggagaaaaggctcgactggagattgaaccagaatgggcttacggaaagaaaggacagcctgatgccaaaattccaccaaatgcaaaactcacttttgaagtggaattagtggatattgattgaaatagcagtgcttcagctctaaggatattacccaanccaaatggattaaaaaaccttgggccctttgaaagaaaatttacaccaactaggttagaacttggtactattgnaaaggaagagtcactgg

SEQ ID NO: 37942 - DNA, 408 bp, Homo sapiens
ctataccatttggcagccacggccaaacctaccatggccagatttcagtgaaaatgatgaagtaatcaaatcaaggtataatatggtgtccctttatgtgctttatgttcctttagagctgtttataaagttctttatatctcaagtgttaggataaatcgacatactaacttttccccctgcaaaattaaaagcctgaggtacaagtctaagaagcttttagtgctctacataatataaattctggctggtgttaatgctatgaagataatatgtagttagaaaattgagtcggggaggaatgctcttcatttttaaaggtggggattttttaaaaggttttcctcctttggagttggattgaagaacttgcctgggttgcaaaaatcttagttcaaaattatattt

SEQ ID NO: 37943 - DNA, 224 bp, Homo sapiens
ggggtggccaggcaggtggaggaagagcacacaagagacacatgtgggagtttgtgatgtgaaagggaagcttgggagatgagtgcagtggcatggactattaataaataatgttgctatcactgtctttgcttatggacaaaatagatcaccattaactcagaccacatacaaaacagacatcccaggaggactcagtgtctaaatttgaaaaaaaaaaaaaa

SEQ ID NO: 37944 - DNA, 384 bp, Homo sapiens
  misc_feature (1)...(384): n = a,t,c or g
ccttgtttaaaagttaaaaactcaccacttaaacagtctccaggttatcaaacagaactagttattcagttggtttgggtgggtggagaaccaccacaacaaataaccagcctggcagtcaattcttcctatggactggtggtttttggcaattgcaatggcattgctatggttgactacctccagaaagcagtgctgctcaacctgggcactattgaattatatggctctaatgatccttatcggagagaaccccgatctcctcgtaaatctcgacagccttcaggagccgggttcttggtggtggaataatttaagtggaaggggacttgtttgttccagaggatcgctgcaaatctncaacctctgggtcttcatcaccac

SEQ ID NO: 37945 - DNA, 271 bp, Homo sapiens
  misc_feature (1)...(271): n = a,t,c or g
ctgcaggtaccggtccggaattcccgnnnnnnnnnnnnnnnnnnnnnnnnnnnnnnnnnnnngatctgctagcttnnnnnnnnnnnnnnnnnnnnnnnnnnnnnnnnnnnnnnnnnnnnnnnnnnnnnnnnnnnnnnnnnnnnnnnnnnnnnnnnnnnnnnnnnnnnnnnnnnnnnnnnnnnnnnnnnnnnngctgcatatgcttgctgcttgagagttttgcttactgagtatgatttatgaaaatattatacacaggagctagtgatta

SEQ ID NO: 37946 - DNA, 324 bp, Homo sapiens
attgcagttagtctttaatgaaatgacttatatagtcgcaaaattaagactgagacaattatttgtttcctttaaataatctgctatttaattattattgtcgttgtttgcaaaatgtatttttggaatgttaacctcttttcatacctgcatacttgaacttgtcttttgtgtgggggccttaaaattcataataggaagtggaggcagtgaaaggaagtaagaaaaggaaattatgctaaaagatggtttgcaaatttaaattctttaaatgaacatatcacaaaatgttgttaagacccaggatgtccgttaagaatgtgt

SEQ ID NO: 37947 - DNA, 324 bp, Homo sapiens
gctctttaaaatggactctgagttccgaggaaatgggactgcattttgtgatattccttcctacctaaagtgctacaaatgggtgctaaaggagagtagcagatatggccttgaagactggagaaagaaatgggcacaagagccagctttggtgaagatctctgaggagctggcgggcattttagcacagcacgcacagccagtcaatgagaaacggttcccgacgtggaggaaattcctccaaacatttctcagtcaagggggtgtgatcgaagcattcccacctgcagacaatgtcaccaacctcacagtggacatgctgat

SEQ ID NO: 37948 - DNA, 322 bp, Homo sapiens
catagttgtatctcaggatggcctgcaaaccactggccttgtgtgtatttaagctaggaataaaataatggagaagtgttaatatgtatacaaaaaggtaaatattgatatatctactctctgttgggggcagaagtgtcattttaagttattcaaagcactttcttaagcattttagaaagcctttattctttgctgttggaagtctccgtactttgcagaattggtatttgtgtactagcctctgccgcaggatggggaggtgggcaggtagctgataggggcagccaggagtttttgaggcaggtggtgggaaattgtc

SEQ ID NO: 37949 - DNA, 324 bp, Homo sapiens
ctcaactaggaatctctgcagactatattggaggaagtcattatgttatacagcctcatgatgatactgaggacagcatgaatgatcatgaggacacaaatggttcaaaagaaagtttcagagaacaagatatatatcttccaatagcaaacgtggctaggataatgaaaaatgccatacctcaaacgggaaagattgcaaaagatgccaaagaatgtgttcaagaatgtgtaagtgagttcatcagttttataacatctgaagcaagtgaaaggtgccatcaagagaaacggaaaacaatcaatggagaagatattctctttg

SEQ ID NO: 37950 - DNA, 323 bp, Homo sapiens
cccacgcgtccggttggcattaaacatcaagagataccattcattcaacatatctatcagaagggcacgtccaccatcagcacaatgagatctcatactcaagaggatccttttctatgcaatgacttaggagaagatttcactcaacatatagcattgactcaaaatgtgattacctacatgagaacgaaacactttgtaagcaaaaagtttgggaaaatcttcagtgactggttatcctttaatcaacacaaggaaattcacaccaaatgtaaatcatatggaagtcatctatttgattatgcctttatccaaaactctgc

SEQ ID NO: 37951 - DNA, 323 bp, Homo sapiens
  misc_feature (1)...(323): n = a,t,c or g
gatacaatgtgtgacaatgttgtatcgtttttactgaatacttgatacttggagaaagcttattaagtcagtgcacatcctaacacagtggtccttattttagaagacttctgtaaataaggcaaggtttatcagtgcagatcatcagaattaaagttcaagcaggcgagcaagacagtatacttaaggggttgcaaagcttgggactggaaattgttttgttcttgaaacaaaatacttctttaaggttgcttttgctgtttgactgctgtctacattcgtaaaanngcntaatttttggtggaattgggtaagcttaaatc

SEQ ID NO: 37952 - DNA, 330 bp, Homo sapiens
  misc_feature (1)...(330): n = a,t,c or g
gtgaccaaacagcacatcataagtaggaaaaacttaccagggtgcttgtctatctaaaaagcaatctttgatagtccactctgtatgcccagccgctttcataatctggaacgagataaaatattcctaaaaagcggggaaaatcattttgctttgacagttctataaaaaaaagtgtaggcacattttaaacccactgtatatgatgttttcaatgtggatcgtgtagttctgatgagggagattaatttttacaatcagtattctaaagtgtggccgagtgacagtgggcatnggatttttanttaaccaaggggaaagttgacgtgc

SEQ ID NO: 37953 - DNA, 320 bp, Homo sapiens
  misc_feature (1)...(320): n = a,t,c or g
gttcagaagctactattaaaagctactattatcccacctcacagaggaggaaaccgaggctcagttgtgtaacttcttgctcagagtcacacagctaatagtaatacggaagcggggattcttaaactgcctgattgactccaaaatggactttactgctttctactgataaaagaatttgaaatgacactcagagctaactcagtcttctagaacgctggagctgggagtcactctagggacagcccttgttctgtaaacaagggaaccaccagccctgcagaagncccaaccttgggccagggaaagaagcccagcaa

SEQ ID NO: 37954 - DNA, 320 bp, Homo sapiens
  misc_feature (1)...(320): n = a,t,c or g
attggaaaagactaagatcggttaacaaataacaacttttttttctttttttcttttgttttttgaagtgttggggtttggttttgttttttgagtcttttttttttaagggaaatttattgaggaaaaatatgtgaaggaccttcactctaagaggttatatttttcttaaaaggtaactcctagtaggggtaccactgaatctgtccagagccgtaaaaactgaagttctgcctctgaggtattttgggagtttgtttctttgaattttcattttannaggtncccttttttccctttggcnttaccaaaaccaaggc

SEQ ID NO: 37955 - DNA, 331 bp, Homo sapiens
agcacttgaaaataagaaagaacaagctccgcgagagcagagatgccttcagattttattcgcgaaggcaccccacgctcctagaaaagagcacgacgcacccgatgctcggattggatgaagtggcaaagctttaatccctggaaagtccacgaacaatgaatccatttcatgcatcttgttggaacacctctgccgaacttttaaacaaatcctggaataaagagtttgcttatcaaactgccagtgtggtagatacaagtcatccttcctttccatgattgggattatctgtccaaaccaaggggcctgggtttgggcaacatcctca

SEQ ID NO: 37956 - DNA, 84 bp, Homo sapiens
cggctctgcccgtagccctgagaattaaacgccggctctccctgcagtggtttgggctccgggctgtgagaaaaaaaaaaaaaa

SEQ ID NO: 37957 - DNA, 320 bp, Homo sapiens
  misc_feature (1)...(320): n = a,t,c or g
ctcggaattgggtggcaaaaccctagtgatggctgtatatgattttgatcgtttctctaagcatgacatcattggagaatttaaagtccctatgaacacagtggattttggccatgtaactgaggaatggcgtgacctgcaaagtgctgagaaggaagagcaagagaaattgggtgatatctgcttctcccttcgctacgtacctactgctggtaagctgactgttgtcattctggaggcaaagaacctgaagaagatggatgtgggtggcttatccgatcctnatggtggaaagaatttcatcttggatgccagaaatg

SEQ ID NO: 37958 - DNA, 339 bp, Homo sapiens
  misc_feature (1)...(339): n = a,t,c or g
cggacgcgtggggcgagcggggctcgcccttgccctccatggtaccagttccagcaaagcactgcctacttcattaagggagtccagtaaggctttgttgttcttagcttcctttttcagttcctttggtctcatttgtgcnnnnattgnnnaaaggagactnnnancntntntnntacancnttannattgcanangnacnntatcattacaaatcnacagnnacaacattancnntnngntantanntagggcantcagnnanttntnnnncnnnncnntggggttnaanctgtattncccnnngntncttttnctccgttgggnannaaatttggc

SEQ ID NO: 37959 - DNA, 331 bp, Homo sapiens
  misc_feature (1)...(331): n = a,t,c or g
catgtctctaagcattgtttcttgtgttgtgtgacattcaaatgtcatttttttgaatgaaaaatactttcccctttgtgttttggcaggttttgtaactatttatgaagaaatattttagctgagtactatataatttacaatcttaagaaattatcaagttggaaccaagaaatagcaaggaaatgtacaattttatcttctggcaaagggacatcattcctgtattatagtgtatgtaaatgcaccctgtaaatgttactttccattaaatattggaagggggactcaaatnncnnggaaaaaaggcttacccaaggtcttgagtggc

SEQ ID NO: 37960 - DNA, 261 bp, Homo sapiens
tgaccattgaagaggtggcccccgccccgtcgggcctcacgaggtcagagttgatgtccatttctgtggagttaactttggtgatattttgatctgccgtgatcaatatcaggaaaggccccatcttcccttcacacctggaatggacttttctagggacacgtattggagacaaggcacacgatgtcatggacagttaaagagggagatacgagttattggcacaagaaactttaattgtattggcttgaagaatgccgt

SEQ ID NO: 37961 - DNA, 262 bp, Homo sapiens
cagggaataaactcttttctctccagttcagcagctaactctagaattacttttaagtatttttaagtatttttccatttttttcttgatatctccagggactctcaatgcttgaatttttctcaaggcccgacagtacacaccgccctaaggtgttcttcactagtatttctttttaaattacaatctatatatatcttattcatattattgaaagttgaaaacacattctaaatgaaaataacactaaggaatgtctgta

SEQ ID NO: 37962 - DNA, 388 bp, Homo sapiens
gtgtcaaggacatgcatactgtagtccatatctatatggcaatcagaaattaatcaaaaagtgatgcattggtaatgactttttgtaaatttggaaatctttgctaccaattgttgagaaaaatcatttttcagtggagctggaacagattggagctacaagctccaggagcaataagaactgtcccctatttataatgggtgtaaacagttttgtagaataatgctagcaccagacttacctaaaaatttctatagcagtggctgtgcttccctgctcaaccgttttttttaattgaaagcctggttttacctcaaacacacatctctataatcactttatacagagaggttatttctttttggtgcattagtattcttttgaaacg

SEQ ID NO: 37963 - DNA, 380 bp, Homo sapiens
  misc_feature (1)...(380): n = a,t,c or g
cgtcagcgttcacggacagccttgggcttttacagtgatcagagagacccctgccctcagcagggccagcactcctgggcagggagagagaagaaacctcacaaaccagggcctgaagcgaatgtggccagcgaagtcctcctggaccgacccccttgtggctccccgcgacgggtgctggtcggcggggtgcaggccacgtgtctgcacacgttaggtgctcaggtgctgacgtgctgggccttggttagacgcaggtctgggcccaggtctgcgtttanngttacccctttgngaaggggnagtgggngaatgaagggcagggtctgtaggtgactgggtagctttggaaaggtttttaaggctcgagggccnagcat

SEQ ID NO: 37964 - DNA, 383 bp, Homo sapiens
  misc_feature (1)...(383): n = a,t,c or g
aatgaattcaacctgctctgtccattatgtcaagcagaataatttgaagctatttacaaacacctttacttttgcacttttaattcaacatgagtatcatatggtatctctctagatttcaaggaaacacactggatactgcctactgacaaaacctattcttcatattttgctaaaaatatgtctaaaacttgtttaaatataaataatgtaaaaatataatcaactttatttgtcagcattttgtacataagaaaattattttcaggttgatgacatcanagntnttaattttttaccttttaatgcttttgcttttgatttttaatcacaattccaaacttttgaatccataagatttttcaatggataatttcctaaaa

SEQ ID NO: 37965 - DNA, 348 bp, Homo sapiens
  misc_feature (1)...(348): n = a,t,c or g
agagcgcggacgccgcaggaggcagtgcctggaccccagctgcccaggagagacggagcccgtggctggtgaggctgcagagcagggccaggccgggccctgcccgcaaggacgaccaaacccctcaccggcccctgggccccagagcccaccaggctctcctgctggccccaccatgacttcagagtcgacgtcacccccagttgtgcccccgctccactcccccaagtccccagtctggcccaccttccccttccacagggagggcatcagggtctgggagcggggtggtgtcccacctcgggacctacccagccctctgcncaccaagcggaccaangacctatt

SEQ ID NO: 37966 - DNA, 354 bp, Homo sapiens
ggctcttctcatgtatgggatccttccatatgtgtgatttgtcttcttccagctgcaaacagctaaagggatggtctggtgttggcgtgtgggagacatgtgtgctcgtgccgcacatacacatcctggccgtgcacggctctctcatgaccagctctctgcctcccttccaggaggctccatcccacactgttcacccaggctgcggagactcaccttcccgagctaacttaactactgtacataataatatgtattaaactggtatcgtggtgatataatgtggtgcagttacttatatattaaatatctattgtatccatagaataggcagcattatttcaaacatattca

SEQ ID NO: 37967 - DNA, 349 bp, Homo sapiens
gtgttgtctaaaagcccagcatcttttattattaggttatactgcccttgttaagataggatattaataatgtatcttttcatttatctattaattagtaatatctatcaataaatattaattgggcacctgctgtaaaccagtaactctggtgagcattggaaatgcgatggtgaacaagcaaaacatagtttctatctctgtgagttgaaacacagacaagatggaatataaacatttgttcctgtagtctactcttacataacaaaccagcccaaaacttaatagcttaaaacaattatttaattacctcgcatgaatctgtaggtttacaggtatcaagctgggg

SEQ ID NO: 37968 - DNA, 365 bp, Homo sapiens
  misc_feature (1)...(365): n = a,t,c or g
cccacgcgtccgggcatgttcgtaccatcctgttcaggctgtcgcactccacagattgaacaggctgtgggcatcgtgggagctgtcatcatgccacacaacatgtacctgcattctgccttagtcaagtctagacaggtaaaccggaacaataagcaggaagttcgagaagccaataagtactttttcattgaatcctgcattgcactctttgtttccttcatcatcaatgtctttgttgtctcagtctttgctgaagcattttttgggaaaaccaacgagcaggtggttgaagtctgtacaaataccagcagtnctngnngnccttgggcncttcttttccttaaagaataactcnaanactg

SEQ ID NO: 37969 - DNA, 371 bp, Homo sapiens
  misc_feature (1)...(371): n = a,t,c or g
caagggccagtctctgcagtggtcagggcgtgtgggccacgcacaaggagctggcactaagccgcttaggctgcaggaagacaccatctgcctggggcggacaaggccccatgtccgtcctcaaggaggctggtctggatgagaagggtcacagtctggccaggagtgtcaccgtgccccctgaccccatctggggtcgggctggacaggtcctcaggcctagacgtgggcccagccagaaccttctcccctggcatgtctcttccaggcctagttccagagctgtcattcttcggcgagccgcgctgcacgccagcctccagtcgngggcagggtttaaaaccttcactatgaaaatctgcttttgggat

SEQ ID NO: 37970 - DNA, 379 bp, Homo sapiens
  misc_feature (1)...(379): n = a,t,c or g
gacggcgatggcgacggtcgcagcaaatccagctgctgctgcggcggctgtggcggcggcagcggcggtgactgaggatagagagccacagcacgaggagctgccaggcctggacagccagtggcgccagatagaaaacggcgagagtgggcgagaacgtccactgcgggccggcgaaagctggttccttgtggagaagcactggtataagcagtgggaggcatacgtgcagggaggggaccaggactccagcaccttccctggctgcatcaacaatgccacactctttcaagatgagataaactggcgcctcaaggagggactggcggnnaangggcnnnaggaatttattgtgcctgcttcccagcaagcttgcttc

SEQ ID NO: 37971 - DNA, 363 bp, Homo sapiens
  misc_feature (1)...(363): n = a,t,c or g
nnnnnnnnnnnnnnnnnnnnnnnnnnnnnnnnnnnnnnnnnnnnnnnnnnnnnnnnnnnnnnnnnnnnnnnnnnnnnnnnnnnnnnnnnnnnnnnnnnnnnnnnnnnnnnnnnnnacttttcagagagaggagggggaannnnnnnnnnnnnnnnnnnnnnnnnnnnnnnnnnnnnnnnnnnnnnnnnnnnnnnnnnnnnnnnnnnnnnnnnnnnnnnnnnnnnnnnnnttgttttttttttttaaagagacagtntnacctnnttnngncccccaaaaggganngactttntaaaatngcaaaangcanaacnnncngcggctntgncgnggttannataaattatttatagccngtntcaa

SEQ ID NO: 37972 - DNA, 370 bp, Homo sapiens
  misc_feature (1)...(370): n = a,t,c or g
ggagagttcccatgtcaaaatgacataaatttgtcacaagcaccagccttgccacaacctgaagtgattcagaacatgaccgaattcaagcgtggtctgccactgtttccccttgtgaaaccacatattaacttcatggctgcaaaactctgaagattccccatgcatgggaaagtgcaagtggatgcattcctgagtcttccagagcctaagaaaatcatcttggccactttaatagtttctgattcactattagagaaacaaacaaaaaattgtcaaatgtcattatgtagaaatattataaatccaaagtaaattgngggngaaatcctntattaagaatgtangaaatattttttaaatacatgcc

SEQ ID NO: 37973 - DNA, 376 bp, Homo sapiens
  misc_feature (1)...(376): n = a,t,c or g
gtnnnnnnnnnnnnnnnnnnnnnnnnnnnnnnnnnactagtctagagtactttttattttaagcaaagtgacacttgaagttctatgcttagatttaagtggcctcagttttcacattgaggagctggtgggaggccacaaagaaagtgtttcagaaatgttacacactgagtaaaagcttattgaccactcctgcccattcatttacttcagaggagaaatgattcctaacatgacttcaaagaacgggcattactaaattatctactgaccaatccctctgattcctgatgggccctggagtcttgactacagcctagagncngcggctggaggtacctggcccatggatgcccaataagccattcttgcttac

SEQ ID NO: 37974 - DNA, 371 bp, Homo sapiens
  misc_feature (1)...(371): n = a,t,c or g
gaaattttcatgcacgcttattatgttattacatatgtttatataaaatccatctctgtgtgctttctggactgtgataagtgacgttttatagcctgttgtatagaaaatgcaaaatatatctctgctcttcagccatttttggtaaattcaatgttataagtgttgctaagtatagggagttttatgacatcagagcaacaattatttcagttgggtttttctttttttttgccaccattataaattgccacaattacttacttttattttttaaagaaattacagtgtagtgtttattctaaggaagatatgtangnnganantggttattattaccaaaagnacttcaagcttacttcttttcttat

SEQ ID NO: 37975 - DNA, 377 bp, Homo sapiens
  misc_feature (1)...(377): n = a,t,c or g
ccagtccatcgtgggctgcgtcatcgactccttcatgattggcaccatcatggccaagatggcgcggcccaagaagcgggcgcagacgttgctgttcagccaccacgcggtcatttcggtgcgcgacggcaagctctgcctcatgtggcgcgtgggcaacctgcgcaagagccacattgtggaggcccacgtgcgggcccagctcatcaagccctacatgacccaggagggcgagtacctgcccctggaccagcgggacctcaacgtgggctatgacatcggcctggaccgcatcttcctggtgtcgcccatcatcattgtcccngcggaggaattcggaccgaagggacaggcccccgcttttatggcatgggcaa

SEQ ID NO: 37976 - DNA, 318 bp, Homo sapiens
  misc_feature (1)...(318): n = a,t,c or g
aaaatgtatgttgttattgtctgttttattatattaagtgatgtataaagtattctgttgtgtttttatgtttctcaaataaattcccctttaaaaaataaaaaaaaaagggncgnccnttntanaggatccntngggggncccannnttacccgnccnnncnacnnnnnannttttnccntanagngngtctnatnataancttgnccnngnccgngnttttnnaacgcacggnannggnaaatctgannnctnggnaantttngnaaggaccttnnttcnnngggnggngtnnaccataatttnngccccntcttt

SEQ ID NO: 37977 - DNA, 317 bp, Homo sapiens
  misc_feature (1)...(317): n = a,t,c or g
gtataaagcaagaacaaattgatataaggcatcttggtcattgcacagatacagatgacactagtttgttgggaaagaaagatgatggactacaatatcgaccagatgtgaaagatgctagtgatcaaagagaagatgtttatattggaaaccacatgccttgccctgaaaacctcaatggttactgcatccatggaaaatgtgaattcatctattctactcagaaggcttcttgtagatgtgaatctggctacactggacagcactgtggactttngtnatttcctcttattgtaagtgcccaaagtaggccaaaa

SEQ ID NO: 37978 - DNA, 313 bp, Homo sapiens
  misc_feature (1)...(313): n = a,t,c or g
atttgaggcaattataacacaatggtaatatttgtctatctgaacatattnnnnnnnnnnnnnnnnnnnnnnnnnnnnnnnnnnnnnnnnnnnnnnnnnnnnnnnnnnnnnnnnnnnnnnnnnnnnnnnnnnnnnnnnnnnnnnnnnnnnnnnnnnnnnnnnnnnnnnnnnnnnnnnaaaaggcacaccttacatggtggcaagccagagaggagaaatctcttataaaatcatcagctcttgcgagatttattcactatcacagtatggcgnnaaacccngncccccccattggatttccaatttatctccc

SEQ ID NO: 37979 - DNA, 315 bp, Homo sapiens
  misc_feature (1)...(315): n = a,t,c or g
acaggatactgcataagccaaagaccacacaaagtatcaatgttaagtatcaagagggtgtggaggaagtgggttacaaccactttgtctcccaactgttgtatgttttgcctttaaaaatttttttaagtacgttaaattctaatgtactcagatgtggctgaaacaatgacaaaacattagttttctttaaatatgcgtgacttttaagctttttccctttcccagtgacttgcttctccactaagctctttttttttttttccnnaaantncggggntnccnnnggcncnttgggganncagggttaattcc

SEQ ID NO: 37980 - DNA, 309 bp, Homo sapiens
cggacgcgtgggtccgcatctccggcgggcgaggcctctcctagtccctgaccaactgggatcgcgtttctcggcctggggcgggtgaaggagctcccagttggcaccgcctggaatggcgcgaccccgcagccgaaggagacttgaaaatttttcctaactaccgttctgctccgagtgactgctacctgcgaggacagacagcccacgcggctccgggccgggcgatcttccgcgggaaccgggaacgtttccgaagaccccccgcagcccccttgccttcgggctttcccaagcgcaagcgggggg

SEQ ID NO: 37981 - DNA, 382 bp, Homo sapiens
tttgaaatatcataagatgacttttaatacacgaatcaattttgcatattctcattgtactttatggactctaatgagaagtatctgttaacttaattcttcactgattacacaggaaaataaggtcagataagaccctgtactatttttccgatatgttcagtctgtaagtacaatctcatcactcaacagcaaacctcatttataggagtttcacatcagagaacaattttgttactgacatggttaacaccaaatgatgacaatgttgacataaactaagtctacagggttctgcttctaatattccaatacagtgctcctccatatcctccggtgatccatttcaagacccctagtggatgcctgaaacccgtggata

SEQ ID NO: 37982 - DNA, 382 bp, Homo sapiens
  misc_feature (1)...(382): n = a,t,c or g
ctatcgttgtatttgcaatctatggattagaggtttaagtatttattattattggttaattattattaattatgtaaatttgcctcccatatgtctgttgccgttgggtttctgaggagaccctgggtgaggaggatgcactggcttcccgcttctcgccccccacccctgtgctgtccggcagacagtggtctggggccactggttgggcccccttctcccttcccccttccccttgtcccttctgcaggccgttgaggggggctgacngtctcanactgnctctgctcccactcttgaggcactggttaccgcaaagtgagcagccagcaggggggcnaaggacctgngntgccactgcctccttcagtgctgcangagg

SEQ ID NO: 37983 - DNA, 384 bp, Homo sapiens
cgaagatatccactggatgagcagaactgcaccctggagatcgaaagttatggctataccactgatgacattgaattttactggaatggaggagaaggggcagtcactggtgttaataaaatcgaacttcctcaattttcaattgttgactacaagatggtgtctaagaaggtggagttcacaacaggagcgtatccacgactgtcactaagttttcgtctaaagagaaacattggttacttcattttgcaaacctacatgccttctacactgattacaattctgtcctgggtgtctttttggatcaactatgatgcatctgcagccagagtcgcactaggaatcacgacagtgcttacaatgacaaccatcagcacccacctt

SEQ ID NO: 37984 - DNA, 383 bp, Homo sapiens
gagtgacagacccacagcaaggcggtggggtaagtgtggacctttgtgtaccagagagaacatcatggtggctttcaaaggggtctggactcaagctttctggaaagcagtcacagcggaatttctggccatgcttatttttgttctcctcagcctgggatccaccatcaactggggtggaacagaaaagcctttaccggtcgacatggttctcatctccctttgctttggactcagcattgcaaccatggtgcagtgctttggccatatcagcggtggccacatcaaccctgcagtgactgtggccatggtgtgcaccaggaagatcagcatcgccaagtctgcttctacatcgcagcccagtgcctgggggccatcattgg

SEQ ID NO: 37985 - DNA, 370 bp, Homo sapiens
  misc_feature (1)...(370): n = a,t,c or g
agagcttttcagggtcttctcattgtcctctgagttcaagaacatcacagtgagagaggaggagaagctggagctgcagaagttgctggagagggtgcctatccctgtaaaggagagcattgaggaacccagtgctaagatcaacgttcttctgcaagccttcatctcacagctgaaattggagggctttgcactgatggctgacatggtgtatgtcacacagtcggttggccggttgatgctagcgatatttgaaattgtcctgaaccgaggttgggcacagcttacagacaagaccctgaacctctgcaagatgatcgacanacgcatgtggcagtccatgtgtcctctgcgccagttnncgncggtg

SEQ ID NO: 37986 - DNA, 375 bp, Homo sapiens
  misc_feature (1)...(375): n = a,t,c or g
ctcatgaacttaatgaagagaagcggaaatctgcccgcaggaaagagttcataatggctgagctcattcaaactgaaaaggcttatgtaagagacctccgggaatgtatggatacgtacctgtgggaaatgaccagtggcgtggaagagattccacctggcattgtaaacaaagaactcatcatcttcggaaacatgcaagaaatctacgaatttcataataacatattcctaaaggagctggaaaaatatgaacagttgccagaggatgttggacattgttttgttacttgggcagacaagtttcagatgtatgtcacatattgcaaaaataagcctgattctactcagctgatangncggggggggggggggc

SEQ ID NO: 37987 - DNA, 371 bp, Homo sapiens
  misc_feature (1)...(371): n = a,t,c or g
gcaatctattgacactttctttggaagagattgaaaatttgatgggtctctgtggaagttcccataatgaacaattaaacagtttgcttgggcaggaatctcctggaataaaggcctgctgatgaagacagctgaacaatcatgttagtgccgaaagtaaattgtgatgaaacgggaaaagttcacttctccctctcccagggcatgtgatggggtgtggctcgcttcttcnnnnnnnnnnnnnnnnnnnnnnnnnnnnnnnnnnnnnnnnnnnnnnnnnnnnnnnnnnnnnnnnnnnnnnnnnnnnnnnnnnnnnnnnnnnnnnnnnnnnnnnnnnnnnnnnnnnnnnnnntagcgncggccccnncccg

SEQ ID NO: 37988 - DNA, 392 bp, Homo sapiens
  misc_feature (1)...(392): n = a,t,c or g
acacgtgaaattttgttacatgcgtgtaacatgtaatgttcaggccagagtattggggnnnnnnnnnnnnnnnnnnnnnnnnnnnnnnnnnnnnnnnnnnnnnnnnnnnnnnnnnnnnagctattttgaaatatacnnnnnnnnnnnnnnnnnnnnnnnnnnnnnnnnnnnnnnnnnnnnnnnnnnnnnnnnnnnnnnnnnnnnnnnnnnnnnnnnnnnnnnnnnnnnnnnnnnnnnnnnnnnnnnnnnnnnnnnnnnnnnnnnnnnnnnnnnnnnnnnnnnnnnnnnnnnnnnnnnnnnnnnnnnnnnnnnnnnnnnnnnnnnnnnnnnnnnnnnnnnnnnnnnnnnnnnnnnnnnnnnnnnnnnnnnnnnnnnnnnnnnnnnnnnnnnnn

SEQ ID NO: 37989 - DNA, 391 bp, Homo sapiens
ctccgctggtgccagcccgcttctggagaccctccgcctcctgccaacccctgctcttccaggtcgggccccggggttctgcggctgttagggacagaggcaaagaagggcaggacggtccggtttcccgtggatgttcccgcccgagaaagacagcaagttgtgtgtgcgcccgggacgcgggagggaaggtagccgccgcccgccagccatggaccatcatctttagtgcagaggatggaaagttgatgcccagtaagactgaagatccattctgcattacggaactgtggattatctgtgggtccctggtgatttcacaccttcattcactcctgcagtccctgaacacttacttggggtcctcattgccctatctggtgaaagatgg

SEQ ID NO: 37990 - DNA, 382 bp, Homo sapiens
cccacgcgtccgggttaaattaaaattggtcttgatttaaaagctctacttttaatctgtgaccagctgtttgacaacattagtatggataacatgctgaaaaaactagggtatcagcattaataggctgcatattaaaaagttactactttatttttactttgaaaaacactgccaatagattctgcagcatggcaaacaggtaatacttaaagccaaatggcgcttcggcttatttcaatactatttttatgtaaagatcagtgtgaaaatatcagctcaatggttgaggttctaggatcaattgccttgcagtttttatactagcttttgatatcttttgcctattaaaacactttgtgaactttagaattaaggaact

SEQ ID NO: 37991 - DNA, 384 bp, Homo sapiens
cttcacaacaatcctgtgaggaagccactatttccccattgtacagatgaggaaatcagggcccaaacacaggtgctaggtagtatagctgggccacaaaatgctaaacaaaatattaacaaaccaaatataacaatatgtatgtaaaagaaaatccataattattaagttggacttatctcagaaattcaaggtttatttttaacaaaagcaaattatggtcgttaaacacatcaatatattaaatgataaaaatcatggtcatctccatcactgcagaaaaagtgataaaagtcatccattcttgaggcgaattattgatagaagaagctttaaaacaagcaaaaaaaatccattacaagtgagtggataaatggtgagaat

SEQ ID NO: 37992 - DNA, 381 bp, Homo sapiens
tgcacaatggataaaaggaaaacataaaagtaatatataggatgtaatttttagttcaacaaatattaattatgtctacattgctgattggtttttaaattataaacattacaatatttcaaatagttttaatgattctgtcatttttcagagaggaacaatgatattgaaataactaagatagactttattttttggtctagcatatattttgctcattctgatggtttaaataaaataaatacatcttttaaaagatttactactaattaaactagggttagagaactgtttgttgtataatgaagtagccactcaagaaagttccaaacttgaaatgtagctgtggtaatctgtgattatgtacagcatgtagccatt

SEQ ID NO: 37993 - DNA, 371 bp, Homo sapiens
tacagacttcattagtgtttgatttcatagactggcattaaagcctttgtctccaaaatttgaaggcctggagacaggcatcccagggtataagcttccagctggatcacctttaactagcttacaaaaagacccttacacaaatactttccatttgtgagttaaaacagggttttttgacatcgaataaagcttcttttgtaagaagtttcttttatattgtaacaattggtgttgttagactgactatgtgttttatgaattgatcaatgagccatacatttttgctaggatgtatattttaataactacaaaaaaagagagtttaaaaaactattagggggtcctggtccttttaaaacccaccctta

SEQ ID NO: 37994 - DNA, 372 bp, Homo sapiens
  misc_feature (1)...(372): n = a,t,c or g
ttttcttttcctaaaacagacttgaaagtattatacagggattggcattcttcccggtcactggtaacaatagcaatatgtgtccagggacacagaatgttggtttctaacagactacttccaaaaacagtttgagaaaaaaactgtctgattttaagtctctagaggtctgtaatagtttttacatttttcaggcagtgtaaagttttttgataaggccattttaggtggctcactttctcattaagatatatatatagaaccactttttgtagattagtataagaaaaatatttaccctgttttggggcaaatgctacctatttgtgtcaccttttgttggaaacttcaccaggtttaggacnaatccat

SEQ ID NO: 37995 - DNA, 375 bp, Homo sapiens
agacgagctgtgttaaatcctcaaatacttctcatttattaaacaagtaactatttctctccctgctgggctccagataggctatcaaaagatttcacgatcaatacctagatacatagttactgctctaattattttaatgagtgaatttaaatcttgcataggttcttgttattcaaaatgtgatccacaggccctcagcatcagcatcatctggaagtttgtaagagatatatagtctcagccctaaccccagaccaaatgaatcagaatctgcattttaacaagagtctctttgattcaagtgcacataaaagtttggcacatagtgggcaagatcaatttacctttcaaaacctttattttgcccccaac

SEQ ID NO: 37996 - DNA, 370 bp, Homo sapiens
  misc_feature (1)...(370): n = a,t,c or g
gttgcttccttcagagtgacaactggaacaagcaataccacagccattaagtcaattgagtttgcccggaaggggagttgctttttaattaacacggctgatcgaataatcagagtttatgatggcagagaaatcttaacatgtggaagagatggagagcctgaacctatgcagaaattgcaggatttggtgaataggaccccatggaagaaatgttgtttctctggggatggggaatacatcgtggcaggttctgcccggcagcatgccctgtacatctgggagaagagcattggcaacctggtgaagattctccatgggacnagaggagaactcctcttggatgnagcttggcatnctgttcgaccca

SEQ ID NO: 37997 - DNA, 378 bp, Homo sapiens
  misc_feature (1)...(378): n = a,t,c or g
actatcctcactgttatcagttatttcatccatggggaaaatatgtagggagaggatctattctacttccttgtctttatttactgaccttagtatatatgtgctttatgtatgtttatcattgatttcttctaaattatacatttatataatgtataattgtgtaatgttctgttacacatttatactgcttccatattgggcatggtatagcttgtgcttcccaagaatatctcgttgaggaggtgggaatgagaagaataagatatgctgtagggaattggttcataagcctagctgatcatcagantcacatgacgtgctttaagagaaccacaggctcctgacctatcctatccccaccccagatccaggggg

SEQ ID NO: 37998 - DNA, 367 bp, Homo sapiens
ggggatcctgcaggtggcccatttcctgcaggtgagaactcggaagggctgatgtcgtcatcagaggccaaagggcagctgagagttggataaaaccgtttccaaggaggaggctgagtaacccagttcaggacagccaagcgcattaggcttgattggggaaggtggcaggtggagttgggaggttgggactctccatcttttgcaccacggatgcctttctgtcgctgtctcactctggggcaggatcaagtctgctctctggagtggggctgcctgcagtgcagctctgcacacctgaacgtgttctttgtcacttgtttggaaatgatgtgattgaagatttcagagaggtcattggaggctt

SEQ ID NO: 37999 - DNA, 373 bp, Homo sapiens
  misc_feature (1)...(373): n = a,t,c or g
tgaaaatgttcaaagcttttttatttacaaaagtaactcaagaacattgaaaatagacgaaaacagaaacacataaagctaagtagtgaaagttctttttaacagttttattgagatatcannnnnnnnnnnnnnnnnnnnnnnnnnnnnnnnnnnnnnnnnnnnnnnnnnnnnnnnnnnnnnnnnnnnnnnnnnnnnnnnnnnnnnnnnnnnnnnnnnnnnnnnnnncgcatagttacatttgtgtgcatgtgtgcatggggttgagtagggagatttaatttaggacttgtcctcttagcaaattacaagcatgtaatacaacattgttaactatcatcaccatgcagtgagtgcattagagctccagtaa

SEQ ID NO: 38000 - DNA, 369 bp, Homo sapiens
atagaccaagatggtcccctattagctgatattttcatttatgtaagatcctggacattctgttttgtgttggaacaaattttcaatgtttttaattctcccttttctgcctgttcctaaaaactttcaaaataaccatttcaatgtaatttgtcttgaagaagtttacccaatatctttgtcattgcaataatgtagtatggtgatggtcaatttaattattgcttataaaatgaacttgattgcagtaaccatggtatcgatgagactaatgcagtgaagctttattactaatatatatagccttatcaaagcaagctaagaagcttgctttaataattaataatttacaaatatttatttagatgg

SEQ ID NO: 38001 - DNA, 398 bp, Homo sapiens
cctttattctggtttcttgtttgtttgttttgttttgttttgttttctcaaaaatgttgaatttggaaagagaactatccagaaagatagatgtaggggtgtgttagtgtttgtgcatgtgtatgcctgttcacatgtccttacatttgtaaagatatctttttggtttattacttatcttgcgtatattttagaggtcattttttattaacttcagtaggaaagttacatctgcatcaaacaatatggcaacatctatttattaaccaagtttcctgtcctttcacattgttttttgctacctcttcctcagaatatatttgccaccatggtcaatttgataaattagaattgggcccaaagccagtgagataattcaatgtgtttttaacacatgg

SEQ ID NO: 38002 - DNA, 385 bp, Homo sapiens
  misc_feature (1)...(385): n = a,t,c or g
ctcagggagcagctgccttgggggacacacctactctgctcccctctcacacatctgggagtagccccactgccacctgcagccgcagcctggactgctgcccacgagtgaacctggggccccacaggattaacaggggctatagcggcctgggccctactcagctggggtggcagagggcgagaggctctgtgctgtgtcccttctgagggtccctttgcagtcccagtatattgtgcgtgcaccagccccagctggagcaaccaaaactgcttctggtttaggcacacgtcacgggtgcgggagacccgggcacgggagacccgggccgcttcaggccgctcccccgagattctggggcagtcggaaaaatgagggnccctgg

SEQ ID NO: 38003 - DNA, 370 bp, Homo sapiens
  misc_feature (1)...(370): n = a,t,c or g
gcacaaggccacctccctggtggtggggggcgaggctgagcggccggccggagcactgcaagcctcactggggctggtgcgggggcagctccaggacaacccggcctacctcctgttgcgggcgcggttcctggcagccttcaccctccctgcgctcctggccaccctggccccccaaggcgtccgcaccaccctctcagtaccttcgagggtgggctctgagagtgaggatgaagacctcctgagcgagctggaacttgcagacagggacgggcagccgggctgcacgacagccacatgccccattcagggagccccanactctggtaaatgctctgcttcctcctgnctggatacttntaatgaccct

SEQ ID NO: 38004 - DNA, 371 bp, Homo sapiens
agttgtgttgacacatatgaacacagacaaagtgctatgcggaggaaagcaagtgttggtcagtagtttcatgttttagggagtggttcctgtggagatcagaaagtgacatttgctttcggtactgtaatacgtgcaccaaactgcctcaatcctaggtaacgagggcaacagggagcacctgtctggattgtttttaaacctccatactcaagctgtctcttcggcagggaggtgaatactcttgaaaggccaacagcaagtgtttgtgggacacaacacagataattttttcttaagtcggccaagatgtacttctctgtgtgcacacccatgcacactcatgcacacagatacataggtctgtatgg

SEQ ID NO: 38005 - DNA, 371 bp, Homo sapiens
  misc_feature (1)...(371): n = a,t,c or g
ctgttaagaagccccggacagttaacgtggaagattcctgggccatggaggccacagcgtctgctgcctctacctctgttacttttagagagatggacatgagcccggaggaagtggttgccagccctagggcctcacctgctaaacagcggggtcctgaggcagcctccaatatccagcagtgcctctttctcaagaagatgggggccaaaggcagcactccaggaatgttcaatcttccagtcagtctctacgtgaccagtcaaggtgaagtactagtcgctgaccgtggtaactatcgtatacaagtctttacccgcaaaggctttttgaaggaaatccgccgcanccccagtggcattgatagcttt

SEQ ID NO: 38006 - DNA, 384 bp, Homo sapiens
  misc_feature (1)...(384): n = a,t,c or g
ctgaaaannnnnnnnnnnnnnnnnnnnnnnnnnnnnnnnnnnnnnnnnnnnnnnnnnnnnnnnnnngcaactgaacaagatcactactctaaaatttatttactgaatattccatgagtgtccaggaagtaactgagacttgtgtatttaatttggaaatgagacttctgagacaatcagatgcagacgaaaaattatttgcttcactattatttacttacctgagtgaattggtccttaatgttgtaaatatttcatttgctaactagctttcaaggtggcagaaaaggtgttttacttgaagaatttgaggagagggaagacttactgatttgcattatcagtcagtccccaattaccttggcataatcagtcccattattt

SEQ ID NO: 38007 - DNA, 377 bp, Homo sapiens
  misc_feature (1)...(377): n = a,t,c or g
gagtgttcttgtccatggggctctccctcagacaggaacctcagttgacagataggttgtatccttgctaggtcagccctaatctgttgttgtctgtttacttcctgagtaaacacggggttgcacctgcctgcagagttcaggtagaagtgggaccactgggttggaagctctagcaggtgtggcctggcctgtctggctacaagaggtggggggagggtggagttgcctgccctgctgtctggcaggccnnnnggangctgggccctattactngangaaattctgacatggnactannnngatnantctttgngacnttatgctaaatgaaatnancctgctnanaatgacntntactatatgattctcttaca

SEQ ID NO: 38008 - DNA, 382 bp, Homo sapiens
agaaaacttctcaggttactatgctgaaattccaaaatgtctgagttttgaatagtgatcactttgttctggtattgacgcaattatattaggaaaaaagttggttgactgtttttgtttaattgacttctaaaatgttcaaattgtctagttctaaaagtttactaaatgcctagtgcagttaaacatactcttgtttaagtgtgtgttgctaaattttttactgtcattactaaataatctgtgtggcaaaatgtgtgtcagcacttttccctccttttttatctcctattttcaggagtcaaatgtagccataaactgtatccttgctgacactttagctaaaaatttccagttaggggagtttattgccaaattaaat

SEQ ID NO: 38009 - DNA, 383 bp, Homo sapiens
gagtttagtaaaatgtgtttcaaaaaaagaaggataaaagaaagtttgaagtaagatttgtaaaagaatgaacactttaggttttgtgtgtgagtgcaaaatgtaaacacggcatttgaaattttttggtattgaaatccttaatgcctgttagtttctttatggttttatacaattgagataggttctgaagtttttttgttgtttgcttttagaaatttttaaaaatacaaaaaaaaagcgcagaaacattttcatctgggttactgtgtttatagactattctatgactcacgacaactaggacaccatcattttccagataagaaataacagttcaagttcattagggaaattatcttcccagtccaagcaagcaataa

SEQ ID NO: 38010 - DNA, 370 bp, Homo sapiens
  misc_feature (1)...(370): n = a,t,c or g
agttattattataaatggtatattttcataatctaaaatgaggtgaggtgtaaatgaagaacacctaaagtcattctttgtttctgttgccttttgaaattttggagttttaattttattttagacattgatagtttcttggaaggtcactggaaattctgttccccttaggatgaatatttaagctctgtagcaaagaagagtatgggtgcagatgaaggaaaatgaaggaagtgggaatcatggagtacagctcttctcattgctttcattttcttgtgaaccatccaccaataattgtacttcgaggccagggtccacctgcaggacctttggtatttgcagccattgncagtttgntaagctgaat

SEQ ID NO: 38011 - DNA, 294 bp, Homo sapiens
agggaattgagtaatagaagaataatgtttcagtatctcactggaattaagttagtataaatctgaaatagattctgataagctaaaatgaatagagtaagctctagagtaaccactaagaaaacaactgaaaaaaatagaatggaaaatgattgaaggaattaaaatgttacataataaaatattcacttaatgcaaaagaaagattaaaggagaaacagaggaatgaaaaagacatgacatatacagaaaatgaaaagtgatgaagtcagaaataaataaaaaaaaaaaaaa

SEQ ID NO: 38012 - DNA, 362 bp, Homo sapiens
ctaatcatgggtctagtgctactgaattatttttttactggcaggtatgttattggagaaataaagtgttatatatgtatctcaggtacagcaaggaaaaaaataattcagtagcactagacccatgattaggactacaaatagaagttataccccaaacttatcccacaaactatcatttaacagcattaaattcttacggtagctgggtttggcaaatgttttcctactgattaagatgaccgtcccttcagatgcagcccagtgaagtaattgtctcaaccaagtctcctaaagtagaggcctggggaaaccgtcgccactctgtgctcccagagtaatagactttttaaaaggtttta

SEQ ID NO: 38013 - DNA, 361 bp, Homo sapiens
tttttttaaatagtaggtatcccaatgagtgtgcgttcatatcccattggagttttgatttgtacttttagagtctttaaattattactttttccatatcaaagtactttgtgggaagttggttattttacattctcataccatgctttgtattactttcccatttggatgcccttttcatccttcacctcatcctgtaaacccaaaatctaacttaaatcccaaatccaacttccactgtaaagcctttgctgacttctttacttcacattgatttctgaatttctaaaagttcctcattgtctaccacaaaactaagtatttgtttataagaaaaagctttatttagtcctatattatt

SEQ ID NO: 38014 - DNA, 361 bp, Homo sapiens
  misc_feature (1)...(361): n = a,t,c or g
agagattatttttcctattattattaggtacaaagctattgttttttcatattctagtttcacctaaatcctatcttccttgtatttgtcatctcttactcttcttgttctatactatgatgccttttgtttatgatctcaaaagcctcttacaaaaatgtaaaatttnnnnnnnnnnnnnnnnnnnnnnnnnnnnnnnnnnnnnnnnnnnnnnnnnnnnnnnnnnnnnnnnnnnnnnnnnnnnnnnnnnnnnnnnnnnnnnnnnnnnnnnnnnnnnnnnnnnnnnnnnnnnnnnnnnnnnnnnnnnnnnnnnnnnnnnnnnnnnnnnnnnnnnnnnnnnnnnnnnnnnnnnnnnnnnnnn

SEQ ID NO: 38015 - DNA, 363 bp, Homo sapiens
attttctttggaagaggccctcaaaggcagaagaagcttgcagaaaagacagccaaggcaaagaatgaccgttcaaagagcgaaagcaaccgggtggatgctcatggaaatattctgttgacatcgctggaagttcacaatgaaatgaatgaggtctcaggcggcattggcgataccaggaattcagcaatatcctttgacaactcaggaatccagtacaggaaacagagcatgcctcgagaagggcatgggcgattcctgggggacagaagcctcccgcacaagaagacccatctacggaggaggtcttcacagctcaaaattaaaatacctgatctaaccgatgtgaatgccatagacaga

SEQ ID NO: 38016 - DNA, 373 bp, Homo sapiens
  misc_feature (1)...(373): n = a,t,c or g
ggtctccctagtggccagaggccctggagggtggccattcccacctgagaagactgcctgcttgccccctcttcctgctgtatcctgctttcccattgtctggactgtctcagcaagctcctgtgccttctgggagccctgagctccacagacagaagccatccagtggctggtgatgaggaacccacatccaggagtgcttgcccgtccctcggcaggagtctgcaccacactgccatgagccctactgtgttttcctgggagagttctctaccaaaaacacatgggaaacttttattttggagcccgctggttgacttattggcgagaagcacttcacctgctaatgtgaacaaaagaacgaggacnaggt

SEQ ID NO: 38017 - DNA, 360 bp, Homo sapiens
gttgttcatctgcaagccagcttaacaacttttaagaatagccagcctgtgaatcccaaacactctagaagaagtgaaaagaaatccaatcatcataaagactcctcaatacaccatcttcgtttatctgccaacgatgctgaagatagccttcgcatgcacagtactgtgattaacttactaacatggattgtattactcagcatgccttctctaatttattggctaaagaatcttaggtattattttaaacttaatcctgatccatgtaaacctttggcatttatccttattccgactatggcaggaacccacttccttcttccactcaaaagacttggcacttgctgctgggatccc

SEQ ID NO: 38018 - DNA, 375 bp, Homo sapiens
  misc_feature (1)...(375): n = a,t,c or g
atttcaaactaagagtcagcatatttaattaaatatcagaagtattatttattaaatgaggggaaaaatgatgcctacaccatgagtcaattttttctgaaaccactagtcatcataattaggaatgggaaataatatttgaaaagagnnnnnnnnnnnnnnnnnnnnnnnnnnnnnnnnnnnnnnnnnnnnnnnnnnnnnnnnnnnnnnnnnnnnnnnnnnnnnnnnnnnnnnnnnnnnnnnnnnnnnnnnnnnnnnnnnnnnnnnnnnnnnnnnnnnnnnnnnnnnnnnnnnnnnnnnnnnnnnnnnnnnnnnnnnnnnnnnnnnnnnnnnnnnnnnnnnnnnnnnnnnnnnnnnnnnnnnnnnnnnnnnnnn

SEQ ID NO: 38019 - DNA, 343 bp, Homo sapiens
  misc_feature (1)...(343): n = a,t,c or g
cccacgcgtncgnnnnnnnnnnnnnnnnnnnnnnnnnnnnnnnnnnnnnnnnnnnnnnnnnnnnnnnnnnnnnnnnnnnnnnnnnnnnnnnnntnatnaatttaanatnaaaaaaannaaaaaaaaanntaannngaaatttatntaatttgctnnagnngatttnanttnttnttatantnatgtatatnatatgtattntttatattttntnttnttnanttnttcttgnttnaggtatttatttaattttttnttnctttttttttnttnnnttntgtntnnttantgnntattttttttatttcntnnatttatnnttttttttntttttttttttttt

SEQ ID NO: 38020 - DNA, 378 bp, Homo sapiens
  misc_feature (1)...(378): n = a,t,c or g
cccacgcgtccgattctgagagaaggaaaactaatttcagcaagtgtctccttcacccttgctaacgaccaagtaaacagacctctcggaataagagtccccgcttttatatgccagagatacttgggcataaattacacccaagaccacatactgttaagagttcttgcttttcccctggttaaattcggcaaactcatgaatatttatgaaatgctatttactatgcaactaaaaggtatgaacggtgctaaaactgattaggactattgtgagagacagcttccttccatttttttagnttccatgcacttgagtctgtggnngnnaacaggnnnnggnnctanntnacttacnttttttcctgtgtntnaggat

SEQ ID NO: 38021 - DNA, 381 bp, Homo sapiens
  misc_feature (1)...(381): n = a,t,c or g
caacctttatatagctctacatacatcccctcccgtgtgcagatgcttcttgacttaccatggggttacctcccaataaatgcatcataaagtcaaaaagttgtaatctgtctggatatannnnnnnnnnnnnnnnnnnnnnnnnnnnnnnnnnnnnnnnnnnnnnnnnnnnnnnnnnnnnnnnnnnnnnnnggctgggtgcggtggcttannnnnnnnnnnnnnnnnnnnnnnnnnnnnnnnnnnnnnnnnnnnnnnnnnnnnnnnnnnnnnnnnnnnnnnnnnnnnnnnnnnnnnnnnnnnnnnnnnnnnnnnnnnnnnnnnnnnnnnnnnnnnnnntggtggcactgnnnnnnnnnnnnnnnnnnnnnnnnnnnnnnc

SEQ ID NO: 38022 - DNA, 372 bp, Homo sapiens
  misc_feature (1)...(372): n = a,t,c or g
gttgttcctataactagttatgacactgctggatcattccttctgcttggatgtaacaatggatcaatatattacatagatatgcagaagttccccttgcgaatgaaagataatgatcttcttgtaactgaactgtatcatgatccttcaaatgatgctattactgctctgagngtttacctcacncncaaaacatgtgnnanngntaanctgtaacnagaacnctattgtncnagnnattnttcnccnntnntttnngngctaacnnannttttntnntnnatnctannaanngntnntntnattcntantnntttnntnncttnctcantnttcnannttttnttttcantnncnncgncnatnactctt

SEQ ID NO: 38023 - DNA, 372 bp, Homo sapiens
atggcctttggcgattagtggagcccaggtgggccttcaggttgagtgggaagtggtttctgggaggagggttaagggaattggcacagagcagtgttgagtgtctgtttgcaggttttcgccctgttattcaacagatatttattgagcacctactctgtggcagacagctgcgcttgggtctgaaattacagtggtgaacaaagcaaacccagccctgccttcatggagcctcagggccagcaggggtgaggccacatgagtttgtactggacccgagcagggccagggccgccatggccctggggtcatcaggcctgggccacattctcactctgccatctgctagtttgtgatggaagtcaagccgtg

SEQ ID NO: 38024 - DNA, 374 bp, Homo sapiens
aaataaaggatgatggcaaagttatttaccatgtagaaaccattttctttctagaaacaatagctcagcctcactgtagcagctggcatgtgtggtcaagtggatagttgtactcttgcaagttggatttaatatcatatatactggaccttcagactgttaaaaatcaatgtaacctttttttattgctatggcaagcaattagtatttcactgcacgtcttccatactaatgttcatttctaaatcttatatgtaggcatttgttagttccaatgatttcctcactaatataacactttttaatgggaatctttccacctacagccctggaatgataatgctacagtaattcttctgaattgactttttctt

SEQ ID NO: 38025 - DNA, 374 bp, Homo sapiens
atgacttagattcaagcctcagctatatcaatcagttgccattcagtggaccgaactatctaagcccatcttgataaacaagaataagactatgctgagtcttttagaggttattcatagagagaaagctttcgtttcatctgattcagtctactcccatgagacctagcctcactgtcagtgaacaaagttcaaattgaattatgaatgagaaggtttcaaatttttctcttaatcccagtatcttcttttactgaatgttaaataaaacatagcatcccagtaaatgcattgggttaaaagagtcctaatttttagtcctaactgagggagtcacttaaatttctcaaatcaattcttagaactggcatcct

SEQ ID NO: 38026 - DNA, 378 bp, Homo sapiens
  misc_feature (1)...(378): n = a,t,c or g
ctgcagaccaacgagacgcgcaccgtgacgcagttccacttcctgagttggtatgaccgaggagtcccttcctcctcaaggtccctcctggacttccgcagaaaagtaaacaagtgctacaggggccgttcttgtccaataattgttcattgcagtgacggtgcaggccggagcggcacctacgtcctgatcgacatggttctcaacaagatggccaaaggtgctaaagagattgatatcgcagcgaccctggagcacttgagggaccttagacccggcatggtccagacgaaggagcagtttgagttcgcgcttgacagccgtggctgangaggtgaacgccatcctcaaggccctttcccantgagcggnangcct

SEQ ID NO: 38027 - DNA, 379 bp, Homo sapiens
gggacagctcggggggcaccaaggacggggacaggcccaagatcctgatggacagccccgaagacgccgacctcttccactccgaggaaatcaaggcaccagagaaggaggaattcctggcctggcagcatgatctggaagtgaatgataaagctcccgcccaggctcggccaacggtgtttcgatggacggggggcggaaaggaagtttacttatctgggtccttcaacaactggagtaaacttcccctcaccagaagccacaataactttgtagccatcctggatctgccggaaggagagcatcagtacaagttctttgtggatggtcagtggacgcacgacccttccgagcccatagtaaccagccagcttggcac

SEQ ID NO: 38028 - DNA, 379 bp, Homo sapiens
agatacccccggaggatagtgagatcatcaccaacatggctcacctcggcgtgcccatcgtcaccgattccacgctgcgtcgccggagcaagccggagcggaaggaacgcatcagcgagcagacctaccagctctcacggtggactccgattatcaaggacatcatggaggacactattgaggacaaacttgacaccaaacactacccttatatctctacccgttcctctgcctccttcagcaccaccgccgtcagcgcccgctatgggcactggcataagaacaaggccccaggcgagtaccgcagtggcccccgcctcatcattttcatccttgggggtgtgagcctgaatgagatgcgctgcgcctacgaggtgac

SEQ ID NO: 38029 - DNA, 372 bp, Homo sapiens
gtctcgtccttccggagacagacacccaactcattcagctgcacagtgtcacagagaacagatgttaacatgaagccaatgtacagcctcagcagctgcataccagacaatcgccacagcggctgatcgtcgttaagacatagcgtggcccgaggcaaatgttaccctttatctaataagggtggtctggaattatggaattcctgattagaagagtcagactaggacaggctaaggaaaatattcttacaggaagcactctgaggagaaggttcctcctaactagaatgtaagcgccatgcaggcaggaattttgactggctcactgctgtatcctctggtacctaatactgagtaacacatagtaagtgt

SEQ ID NO: 38030 - DNA, 378 bp, Homo sapiens
gataattatttcaattattattatttgtgaactgggtttattcacttttacagacttgtagaatatatacttccatatccccagcagctcacactgtaagtgtctgaagacagaatcataaatttcaatttggttcttctgccttttagtcctctatgtctctcaagtgttatgacactccacttccccatccccgtaactaaggaacaaatatctataaagttttccacatctctttgattggcagatgaagggggaaaacagatcacaaattttgttgcacaccgagtccctgctaaggcactagaatttcatgtcaacatgaaatcctggtctatgcttttatcagaaaattgagtgtgttagaaacttggaggt

SEQ ID NO: 38031 - DNA, 381 bp, Homo sapiens
ggaagaaagacccaacctttattcccagccttactcttctccttctcctactgccaatctccctagccctttccaaggcatggtcaggcaaaaaccttcactggggacgatgcctgttcaagtaacacctccccgaggtgctttttcacctggcatgggcatgcagcccaggcaaactctaaacagacctccggctgcacctaaccagcttcgacttcaactacagcagcgattacagggacaacagcagttgatacaccaaaatcggcaagctatcttaaaccagtttgcagcaactgctcctgttggcatcaatatgagatcaggcatgcaacagcaaattacacctcagccacccctgaatgctcaaatgttggcact

SEQ ID NO: 38032 - DNA, 381 bp, Homo sapiens
taaaaagagtaagttggaaaatactcagtgctgatgagaaagtggggtaattgaaactcttatacatcattctaggaacatccacttaggaaaacaacttggcagtgtctaataaagtccagtatatgcattccctataacccagaatttttactctcaggtgtatacccaacagaaatgcaggtgtgtgttcaccagaaatcatgttcaagaatgttcatggtatcactagtcatgaggcacaaaaactggaaatgttcatcaacaatgagtaggataaataagttgtgttaatatttatacaattgaaaattatacagcagaaagaataaataatctaaacctacacacaacagcatgaagaaatctcatgagtggaat

SEQ ID NO: 38033 - DNA, 382 bp, Homo sapiens
ctgcggtcttttaattcccttgaaatagctttcttcaagttgagcagcaatttgggacaaacattattctattgcacagattatggcatcttactctggtttacacacacagagcaagggcttacacacctgaattaagaattaactagcatgtggggacagcaatagggatagtcctaccacagacgaaaccatgcgctctacacgtccctgggtaaaatgtgacaagttagcccttgaatttgggtccccatgtcaccaaatagctctatatttaagttgtgttaatgtggtacgtttcagtggcataatgacccattcttatcgaggcctttgttccatattttatttgtgccaatctttcttaggttatgagccctaa

SEQ ID NO: 38034 - DNA, 324 bp, Homo sapiens
  misc_feature (1)...(324): n = a,t,c or g
gaagtagtaaaaggcagtctataattaactgacagacctaactgaagcacagagaatacatcagacttatgcatccaagacatcagaacttggattttatcaaacttgatgacttctctaaaaggagctttggaaacttcaaattcagctataggatagtaccaatgaacacatccagctgatcccaaaagctgttttcaggtataaggacaaggagaggagacaagtgacgacagccattcccctttgcagctatctactgtagtgacagccatttcttggttgatgggttgngaaagtccattcaagagggttttgaaagaa

SEQ ID NO: 38035 - DNA, 318 bp, Homo sapiens
  misc_feature (1)...(318): n = a,t,c or g
cggacgcgtgggttcattcagaaaagctattagcaggagagaaagggctgtggtgactgcagcatcgcttctaggactttggtctaagatcaagtgtgtaagtaacgctactgcatatatcagagcattcagttaactaattctcatgaatccatttcattgtcctcatccaaagtgttatccagtgcctccgcttgtgacatcttttttacagctgttggaggccccttattcattctgtttagcaactttaaaattacatattcactgtgactttaattnnttacctttaaaaaacttcccatgggaaaattggca

SEQ ID NO: 38036 - DNA, 376 bp, Homo sapiens
  misc_feature (1)...(376): n = a,t,c or g
nnnnnnnnnnnnnnnnnnnnnnnnnnnnnnnnnnnnnnnnnnnnnnnnnnnnnnnnnnnnnnnnnnnnnnnnnnnnnnnnnnnnnnnnnnnnnnnnnnnnnnnnnnnnnnnnnnnnnnnnnnnnnnnnnnnnnnnnnnnnnnnnnnnnnnnnnnnnnnnnnnnnnnnnnnnnnnnnnnnnnnnnnnnnnnnnnnnnnnnnnnnnnnnnnnnnnnnnnnnnnnnnnnnnnnnnnnnnnnnnnnnnnnnnnnnnnnnnnnnnnnnnnnnnnnnnnnnnnnnnnnnnnnnnntattcctttaangggggcccattcaaattttcatcacaacaattatcanntataaaaccccctgcataacccaataccancgcccct

SEQ ID NO: 38037 - DNA, 373 bp, Homo sapiens
  misc_feature (1)...(373): n = a,t,c or g
attcttttataagggcattcaatactacaaaatcaacatgatttcataaggtgcaaataaaagttggtgacagatttaatataattttgatcacaatttacaaatgatctttgcaaatagtggtcagacggcattagtttttcccttagttaagctaaattaaagggactccatcctgttatgattannnnnnnnnnnnnnnnnnnnnnnnnnnnnnnnnnnnnnnnnnnnnnnnnnnnnnnnnnnnnnnnnnnnnnnnnnnnnnnnnnnnnnnnnnnnnnnnnnnnnnnnnnnnnnnnnnnnnnnnnnnnnnnnnnnngcggccttggaggtaagcttggggaaattaccaaggcattgccgccactacacc

SEQ ID NO: 38038 - DNA, 313 bp, Homo sapiens
tgcctggttcttgctacgggactcaacgatgggcagatcaagatctgggaggtgcagacagggctcctgcttttgaatctttccggccaccaagatgtcgtgagagatctgagcttcacacccagtggcagtttgattttggtctccgcgtcacgggataagactcttcgcatctgggacctgaataaacacggtaaacagattcaagtgttatcgggccacctgcagtgggtttactgctgttccatctccccagactgcagcatgctgtgctctaggaagaaagttcggggcctttctattggaagcatga

SEQ ID NO: 38039 - DNA, 356 bp, Homo sapiens
  misc_feature (1)...(356): n = a,t,c or g
aaatggatagattctaagtgagtctactttaagctggagtttggagtcgcagggtcctgcgtgtgtaccaccatactctctacacttttaaaactaaaacagaaagtattctaaaacataaaacaaaactggattgtattttcaactgttccttcaactctgaaatactatgattatgctagagtatgagaaattttattttccaaacaaatataaagatgtatttctgatgaaaaacattttcaacctaagctaaaaggaaatctaatgaaaactttaaggatcctttaaaatactaatattgtgtttaaagagaaaatgatacttgtctttaaaatgttttaaaacattnaaaa

SEQ ID NO: 38040 - DNA, 374 bp, Homo sapiens
  misc_feature (1)...(374): n = a,t,c or g
gnnnnnnnnnnnnnnnnnnnnnnnnnnnnnnnnnnnnnnnnnnnnnnnnnnnnnnnnnnnnnnnnnnnnnnnnnnnnnnnnnnnnnngggaatncntaaaacngatngcttttancnctacctccatctnaacttcatngnctatatcattattancatttngnnnnnnnnnnnnnnnnnnnnnnnnnnnnnnnnnnnnnnnnnnnnnnnnnnnnnnnnnnnnnnnnnnnnnnnnnnnnnnnnnnnnnnnnnnnnnnnnnnnnnnnnnnnnnnnnnnnnnnnnnnnnnnnnnnnnnnnnnnnntnactatccngtnccaatttacngnattagcccattttnangcngctataaanancngccaanacnggata

SEQ ID NO: 38041 - DNA, 384 bp, Homo sapiens
gagcaagtttaataataagagatagttgaaggtttggactttcttcatgtaattccacatatctcagcacaggtggcaagcagtgtaataatgttggtctctaggtcatgagattatcctcttatagcttggaatgttacaagtccactggactttatcttaaaataatgccatattcaatttcttgtttttgaaatggattccagcaaaatgtatgtgattgtgtctatttcagaaaaatataaatgctaagttcttggaaatttatgtgaaatctaattttatagagtttatatagaatcattgtaagatgcaatagagacatctggtatttaaaatctttttgaatctacattttgtagatgtgtgtgctatagcttatgt

SEQ ID NO: 38042 - DNA, 378 bp, Homo sapiens
acaaaattcaagacagagtaatcagagtctgagactaaatttctagactttcgttggagaaacaaaaccttttgctgagttgcaactgaaatatggtatgactggaactgctgttgaccatgttgtcactgagagtgagactctgcctgaaaatgatactaaaaagagtaaagcacaggtgagggacagagggaaagacacctgacaatatctccttaacacccagactcagccttgccgattactgggcttttcggttacacaggagtgtttaagtcttacctccttctctcagctggaaaatgttgaaatcgaagagcttcactgtactggtttctaccactccaccacatgttgcctgctcttttcacaagaaat

SEQ ID NO: 38043 - DNA, 355 bp, Homo sapiens
  misc_feature (1)...(355): n = a,t,c or g
caagtttttacctagtctgactagaagtattccacttcaaggtctgaagtaggacttttaccttaaaaaacaacaacaaacaaaactatcacacaggatagataagaagattggttaaacagttttgtgtagatctttttggtgctgaactatgacatgagccttatagattgtaaaatagggatagttggaactaatgtacagaactaaattttttaaactttatttgctgttaaattctgtgaagtttcagttatctaaaataaatatacacaaatatgaaatataatgtttcagattgcaaggtaatatgtaatagtagtgnttggaaganactcttggctaatatttactt

SEQ ID NO: 38044 - DNA, 350 bp, Homo sapiens
  misc_feature (1)...(350): n = a,t,c or g
cccacgcgtccggctttgaaaacaagtttctccaaatttacagatttcctgatgatgttgggtctgaactcaccaacttgattaggtctttaggggccgagggactagccagctgcacaggtgactggatgggggaggggcaggtgaggtgggtctacagaggtggcttcgcctttgaccttcatgctggtctcggctgaggtgacacgctagtgacagcccaatagggggttacccttattgagtaaaatacttcagattgacggctcaatcttagtttgcctccagttaatcttttatgcttagggattaaatgtgnggnttttttttttggttttttttttttggaa

SEQ ID NO: 38045 - DNA, 359 bp, Homo sapiens
  misc_feature (1)...(359): n = a,t,c or g
atctcaggagaatccatttactggagccagaaacctactccatcatcgaacgccagcccttggtctgagcctgcggctgtagatgtggaactcacagcatatgcattgttggcccagcttaccaagcccagcctgactcaaaaggagatagcgaaggccactagcatagtggcttggttggccaagcaacgcaatgcatatgggggcttctcttctactcaggatactgtagttgctctccaagctcttgccaaatatgccactaccgcctacgtgccatctgaggagatcaacctggttgtaaaatccactgagaatttccagcgcacattcaacatacagncagttaacagaatggg

SEQ ID NO: 38046 - DNA, 355 bp, Homo sapiens
  misc_feature (1)...(355): n = a,t,c or g
aaagatatttgaccttgcaacttttttcccagggattatcttgagtcaagtattctaaacaccctatgaaagactttgccttccaccattaaatattagttaatacgtaacagccagtaatgttcctacttcagaacccacaggtatttctaaactgaggttccagtactacagtcagtgaagtataatgtcaatttcttggaactgtagatgttaaccaccagatggagctttcacctctacttttcctttttaggtttactctgttttctagtattgatgaagcacttgtagtttttttctaacatggattctcttccatttgntcagatagtgacaggntaaggcactggcc

SEQ ID NO: 38047 - DNA, 349 bp, Homo sapiens
  misc_feature (1)...(349): n = a,t,c or g
ctagttctagatcgcgagcggccgctctagaggatccctcgaggggcccaagcttacgcgtgcatgcgacgtcatagctctcnnnnnnnnnnnnnnnnnnnnnnnnnnnnnnnnnnnnnnnnnnnnnnnnnnnnnnnnnnnnnnnngatctgctagcttnnnnnnnnnnnnnnnnnnnnnnnnnnnnnnnnnnnnnnnnnnnnnnnnnnnnnnnnnnnnnnnnnnnnnnnnnnnnnnnnnnnnnnnnnnnnnnnnnnnnnnnnnnnnnnnnnnnnngctgcatatgcttgctgcttgagagttttgcttactgagtatgatttatgaaaatattatacncnggagctag

SEQ ID NO: 38048 - DNA, 382 bp, Homo sapiens
  misc_feature (1)...(382): n = a,t,c or g
cagtattcgaccagcagaacacctcacttacctgtgcacatgatctaatgcaacgaagagtccctaacaggttacaccnnnnnnnnnnnnnnnnnnnnnnnnnnnnnnnnnnnnnnnnnnnnnnnnnnnnnnnnnnnnnnnnnnnnnnnnnnnnnnnnnnnnnnnnnnnnnnnnnnnnnnnnnnnnnnnnnnnnnnnnnnnnnnnnnnnnnnnnnnnnggctannnnnnnnnnnnnnnnnnnnnnnnnnnnnnnnnnnnnnnnnnnnnnnnnnnnnnnnnnnnnnnnnnnnnnnnnnnnnnnnnnnnnnnnnnnnnnnnnnnnnnnnnnnnnnnnnnnnnnnnnnnnnnnnnnnnnnnnnnnntctttttaaaaaattaaat

SEQ ID NO: 38049 - DNA, 388 bp, Homo sapiens
cccacgcgtccgcacacacacacacacaatttaaaaactgagtaaatttaaatgtatgaaagtaccccacaaattgatttcaacaaataaatttcatttctctagctacttatgtctggccttattttgagcgttacaattttattgccttcatttgcctatttagactgatgtagtttgatatgatgaagttgtgaataaaagccttgtgttcattatttatatatactacctggtatgctatggactgtgtctgctgtagtgctattccctaatgagcaactaagagaagacacaacaataaaccatggaagtgttgggaggccatggaaatgatttagaggtataaaatattcccaagtttttattataaatttttattcatagg

SEQ ID NO: 38050 - DNA, 77 bp, Homo sapiens
gatgctcacttttcaccacttttatttaacataatattggaagtcctgttggagcttcccaggaaaaaaaaaaaaaa

SEQ ID NO: 38051 - DNA, 393 bp, Homo sapiens
attgtgttttattaagtgacacgtaatttctgattagttttgtacacactttccctcttaatactcttgtggccagggttacacttacagactgtgattgcacagacacggctgtgtgtttcaatgttgtcatatcttcagttacagacagacatgattccaagcagccgcatttcctttttacaaggagtaattcacatttaggctgtttgaattactcttggggttagcacatcaagaaggcattatcccaagattaaacactggtagctgcttgcaaaacgcttgcaaatacagaatatttgctagatggctgaacagatgcaattgtggtatgctagagatttagggaactcttaggaatggaacatattaagagaggatacttttatc

SEQ ID NO: 38052 - DNA, 386 bp, Homo sapiens
tagacactggggatatagtgttgagcaagacagatgaggtcaccctgacagtaggatgggcttggttatgcacagcaatccccccaaatctcaatggcttaaggaaacaaaagttgattcctcactcacataaagtaggctctgcttgtgggcagctgttcccctatgatagcttagcatcacgcctccgtgttaacacgtgctttctcatgtcgatcagcctctcggaggaagaaagtggtggagccttgcactggtgattaggtgcttctgcccagaagtgacgcacatcacagacatttcactggctagagcaagccgaatgaccatgcctgacctcaaggtggtaaggaagtccagtcttaccatggagtaaaggaaataac

SEQ ID NO: 38053 - DNA, 386 bp, Homo sapiens
  misc_feature (1)...(386): n = a,t,c or g
catatactcaatcccaagtactaaaatagatgtctttaacctttaataaacgagaaaattaaaggttaaagacatatactcaatcccaagtactaaaatagatgtaaaaaaattctggatttgaaaactgttggtttttaaaagagaaatatttttaaattcttattttaggatgaggatatgttcatgaaatttgtaagtgaagatcttcatcggtgtgcacttttaacaggtttgaacctattcatatagtttttgtttagcataaaactttgaatggataaaaaagaagatgaggaaactaaaaagtcagattgaataatatagggaatgattattctagtagattgtgaaagagaactgtatctacttgcngagttcaaact

SEQ ID NO: 38054 - DNA, 384 bp, Homo sapiens
  misc_feature (1)...(384): n = a,t,c or g
gtactttgttagacgcagcctgtgctgactcacacgctgccttatttgattttcattcacagctttgagaagcagatcggcttgaatgagcatggaatgtatctatttaaaaagcagctggaagtctgtcaagtgcattctggaaatggattcaggctaacagagtgttctgaatagagacgcctaaaacaagagccaaagacatagcaatggagaacgtgggtggtacagccctccaccctggcgagcagcacattataatcacgtaggagcttataaagtactgactggcctggtctttttcggtgtgaaggtgggatgcaggcttcctggggtaatnctctcgtacagccagagttgaganccatctgagtagcgcttgtc

SEQ ID NO: 38055 - DNA, 389 bp, Homo sapiens
catgtcttagactcaaatttatcttccagattgcaaaggttaaacagaaaattaaaatacaaccaatggctgtaattcttttacaaaatataattgggtacacgtaaaaatttgatgcaaggaagttgcttcttccacatcttcctttattatttatctaggtacactgacatatcattacatgaataccaaaagaaatgtttttgtgccctcctgctgtaaagtttccacctgtgggataaagtggtgcaaactctctgaattcatttattggtccatccccgggagtctgtgctagatcaggggttgcaaactatggtccacaggtcaaatggctcactgtctgtttctgtacagccccaaagctacaaatctcttttacgttttta

SEQ ID NO: 38056 - DNA, 364 bp, Homo sapiens
  misc_feature (1)...(364): n = a,t,c or g
gttagaaaagaatgaataacgacctagtatttgatatgcacaaccgggtggctatagtcaaaaataatttattctatactttgaaataactaagggtataactggattnnnnnnnnnnnnnnnnnnnnnnnnnnnnnnnnnnnnnnnnnnnnnnnnnnnnnnnnnnnnnnnnnnnnnnnnnnnnnnnnnnnnnnnnnnnnnnnnnnnnnnnnnnacatnnnnnnnnnnnnnnnnnnnnnnnnnnnnnnnnnnnnnnnnnnnnnnnnnnnnnnnnnnnnnnnnnnnnnnnnnnnnnnnnnnnnnnnnnnnnnnnnnnnnnnnnnnnnnnnnnnnnnnnnnnnnnnnnnnnnnnnnnnnnnnnnnn

SEQ ID NO: 38057 - DNA, 347 bp, Homo sapiens
  misc_feature (1)...(347): n = a,t,c or g
cccacgcgtccggctcttgatgcctcacctgcatcatcagtttaccgggaaaggtatcaataactccctcagggttctgaggggagttaaatgacactatacatgtaaaatacttaggatagtacattaaggttctctagagaaacagaacaaacaggnnnnnnnnnnnnnnnnnnnnnnnnnnnnnnnnnnnnnnnnnnncatgcacacnnnnnnnnnnnnnnnnnnnnnnnnnnnnnnnnnnnnnnnnnnccttggtacgtccaaaatctgcaaggcaggccagcaggctgaagacccagaaaacagttgtgattcnaagtctaaaggcagtctgctacacaatt

SEQ ID NO: 38058 - DNA, 351 bp, Homo sapiens
  misc_feature (1)...(351): n = a,t,c or g
tttgtggattattattttagtatataacattggattttatgtatgttacctgaagaagagcaatatctgtaccacatannnnnnnnnnnnnnnnnnnnnnnnnnnnnnnnnnnnnnnnnnnnnnnnnnnnnnnnnnnnnnnnnnnnnnnnnnnnnnnnnnnnnnnnnnnnnnnnnnnnnnnnnnnnnnnnnnnnnnnnnnnnnnnnnnnnnnnnnnnnnnnnnnnnnnnnnnnnnnnnnnnnnnnnnnnnnnnnnnnnnnnnnnnnnnnnnnnnnnnnnnnnnnnnnnnnnnnnnnnnnnnnnnnnnnnnnnnnnnnnnnnnnnnnnnnnnnnnnnnnnnnnnnnnnnnag

SEQ ID NO: 38059 - DNA, 356 bp, Homo sapiens
attttaacagtagataatttatcaatgtaacttaacattcagcagataaaaggaaaagttccaaataatcaccttaatagatgcagaaaaggcatttcatgtataccatctattcttgggtattattctcagaaatctagtaatatgagataacttctttaacataattcagatcaagcaaatagccgtcttagtgaggaaatattacactacttctcccaaaacaagaactacataaaaatgtccattatcaatagtttctactaaatattagaggatctcgccattccaatgggataaaaataaaataaaataaaagcatatatgttggtaaaaaaaccccacattattccaga

SEQ ID NO: 38060 - DNA, 348 bp, Homo sapiens
attaaaaggcagaaattgtcagactgaataaaatgaaaagaccaaacaatatgctgcttacaagaaacacaattcaaatataaggacacaattagtttaaaggaaaagaactggaaaagatataccatgataacacaagtcagaagaaagctgctgtggatatattaatatgagatgtagatttcagagcagtgaatattgccaggcataaagaaagttattacataataattaaggtatcagttcatcaagaagatgtaataaccctaagtatttatacaactaatatcagagcttcaaaatacatgaagcaaaaaccagtggaattgataggagaaacacacaatt

SEQ ID NO: 38061 - DNA, 147 bp, Homo sapiens
aagaaaaaaaatatagaaagaagaggataggattttgtttatttgtatggatggacccttggtataaaatcacttttggcgctttccattcatttggtttagcacagccagtgagcttctcgtactttctttctttttttttttttt

SEQ ID NO: 38062 - DNA, 344 bp, Homo sapiens
  misc_feature (1)...(344): n = a,t,c or g
ctagttctagatcgcgagcggccgctctagaggatccctcgaggggcccaagcttacgcgtgcatgcgacgtcatagctctcnnnnnnnnnnnnnnnnnnnnnnnnnnnnnnnnnnnnnnnnnnnnnnnnnnnnnnnnnnnnnnnngatctgctagcttnnnnnnnnnnnnnnnnnnnnnnnnnnnnnnnnnnnnnnnnnnnnnnnnnnnnnnnnnnnnnnnnnnnnnnnnnnnnnnnnnnnnnnnnnnnnnnnnnnnnnnnnnnnnnnnnnnnnngctgcatatgcttgctgcttgagagttttgcttactgagtatgatttatgaaaatattatacacagga

SEQ ID NO: 38063 - DNA, 349 bp, Homo sapiens
atgagctacaaagttgcttaaagcaaattattagaaacataaaattcaaagcacctccatgtaacacttttgtggatctgacttctgcatgtaaaatctctcctgcatcttataataaagaagaaagtgaacaaatggggaagacgtctagaaaagatatgcattgtttggaagcttccagcccaacattttctaaagaaccaatgaaagtgcaagacagtgtattgatcaaagcagataacactatagaaggtgacaataatgagcaaaattatataaaggatgtgaaactagaggaccatctcttagctgggtcatgcttaaagcagaagtagtaaaaaacattttt

SEQ ID NO: 38064 - DNA, 347 bp, Homo sapiens; identical to SEQ ID NO: 37457
  misc_feature (1)...(347): n = a,t,c or g

SEQ ID NO: 38065 - DNA, 407 bp, Homo sapiens
  misc_feature (1)...(407): n = a,t,c or g
cgccgtcggctctacctgcgtgctttagctccttctcgcctgatccttctgtctctcccaaccccggacacccggcttcgactggttatatcttcggtgttcttttcctctcttcttctttcgcggttcagcatgcaggaaaaagacgcctcctcacaaggtttcctgccacacttccaacatttcgccacgcaggcgatccatgtgggccaggatccagagcaatggacctccagggctgtagtgccccccatctcactgtccaccacgttcaagcaaggggcgcctggccagcactcgggttttgaatatagccgttctggaaatcccactaggaattgccttgaaaaagcagtggcagcactggatggggctaagtactgnnttggctttgcttcaggtttacg

SEQ ID NO: 38066 - DNA, 411 bp, Homo sapiens
  misc_feature (1)...(411): n = a,t,c or g
cagcaaatgcctttagaattgactcacgcaaattaacctgaatcacagaatctcaacatttcagagctggaagggaccagtgttctttcacaactagtcaatcaagtgaaaaagccaatgaagaaaccttggaaaaggaaatgagaaggacaacattgttgtatcagccaatctgttcaccttacaattgatgttaagcagaatctgatatgcaaagaggaagctcagcatcttgtactgcatccannnnnnnnnnnnnnnnnnnnnnnnnnnnnnnnnnnnnnnnnnnnnnnnnnnnnnnnnnnnnnnnnnnnnnnnnnnnnnnnnnnnnnnnnnnnnnnnnnnnnnnnnnnnnnnnnnnnnnnnnnnnnnnnnngcagtctctaaacataaattgtgaagatttcatgg

SEQ ID NO: 38067 - DNA, 403 bp, Homo sapiens
  misc_feature (1)...(403): n = a,t,c or g
cactctcaggtggttttttatggcagtgtgagaacggactaatacagaaaattggtaccagagaagtgggatattgctatannnnnnnnnnnnnnnnnnnnnnnnnnnnnnnnnnnnnnnnnnnnnnnnnnnnnnnnnnnnnnnnnnnnnnnnnnnnnnnnnnnnnnnnnnnnnnnnnnnnnnnnnnnnnnnnnnnnnnnnnnnnnnnnnnnnnnnnnnnnnnnnnnnnnnnnnnnnnnnnnnnnnnnnnnnnnnnnnnnnnnnnnnnnnnngagatgagaatcttattccgaactggagtgaaggtcactcttggctgtgctttacaaagagagtggtggcattgtgcccctgctctagagatctgtgaactctgactcgagagggtatctggcagaaaaaa

SEQ ID NO: 38068 - DNA, 407 bp, Homo sapiens
  misc_feature (1)...(407): n = a,t,c or g
ccagctatggctatcccaaagaagaaatgatttatagatggagaaaaaattcagtggaggcagctgaccagaaatcatggcggctttatcagtttgacttcatgggcctcagaaacaccacagaaatcgtgacaacgtctgcaggtgattatgttgtcatgactatatattttgaattgagtagaagaatgggatacttcaccattcagacatacattccctgtatactgactgtggttttatcctgggtgtcattttggatcaaaaaagatgctacgccagcaggaacagcattaggcatcaccacggtgctgaccatgaccaccctgagcaccatcgccaggaagccttgncacgcntgtcctacgngacncgcatggaccttnttntgacntgcctcctnctgt

SEQ ID NO: 38069 - DNA, 421 bp, Homo sapiens
cccacgcgtccgtggaaatctaaagaatggtgtcagtgatataaaaactcacaagtggtttgccacgacagtttggattgctatttaccagaggaaggttgaagctccattcataccaaagtttagaggctctggagataccagcaactttgatgactatgaagaagaagatatccgtgtctctataacagaaaaatgtgcaaaagaatttggtgaattttaaagaggaacaagatgacatctgagctcacactcagtgtttgcactctgttgagagataaggtagagctgagaccgtccttgttgaagcagttacctagttccttcattccaacgactgagtgaggtctttattgccatcatcccgtgtgcgcactcttgcatccacctatgtaacaaggcaccgctaagcaagcattgg

SEQ ID NO: 38070 - DNA, 425 bp, Homo sapiens
  misc_feature (1)...(425): n = a,t,c or g
caacttccagaaaagaaaaattaatgtttcttgaccattgacagcttctgtattttagcaataccaagtattttttaaaagttgtttttgtattttttcatttttaaatttgctttttaattttttcatcatgtcagtgatattttacagggatgtgtagactcaatcattattgaaatggaatgttgaccctttaaggtttaatggggaggaagaagatgaaaatatttaatatccttgttaaacatgggctggcatcatgggatgttgctgatggaggtgtttcacattttaatcatgccnnagaaccaccaanctcctgggttggtgtaaggacngnnncactanacagagatgccnntgtgntancccnnggtangagtatcntgngancntgctcccttngacntcncttgcggtnaaac

SEQ ID NO: 38071 - DNA, 426 bp, Homo sapiens
  misc_feature (1)...(426): n = a,t,c or g
tttactttttaactggcttcattttaggaataataaattcagccaaggattctgatgaattaaaatggtttttggtttttggtttttttttttacccagacaactntanaaangcggaccaaactacttnattttctcaangggcataccttgngcntnggggctnatgatganccntattaatngccngtnaaatatncnctagctngaacttaaangttaaaggttattattaccagcntttgcccttttgggaaancagtatcanaatactngcactntttaacacattctttataaaaggnataaattattcaaaactatttaaaataangaggagggntattgcntgctgataatcatttngagtttgcctnaganatnctaangcaaatgggttcaagtttttttaaaggccctttgagg

SEQ ID NO: 38072 - DNA, 408 bp, Homo sapiens
gcagtgttgattacagcagtaaagtaaatgacaaagttcatagcatgagcctctcctatcccagagtaagttgcatttcatacttaattttctactgccatcctggttctgccacttgccgcctcatataacctgtcttccgtgcgaacagtttgtgtatcagccactcttatcagagcagatatttttttcaagtactttctgtcttggttcttatatatatggaatctctttcttttgtgaacaaagcggtggatgaatgggtaaacagatacctggataatcaatgaaatataaattaactaatttagacactaaaatatatagaattctattgaaattctatttgtgtaaaaacagatttcaatgactttggcatttacttcctagcagagagaggagatactt

SEQ ID NO: 38073 - DNA, 404 bp, Homo sapiens
  misc_feature (1)...(404): n = a,t,c or g
cacaactccggtccactcaaattgctacagttcattgtagtgcacaaaccacttctcgacatctcctgcagaaactgagccagacttgcatggtaatcagtactaatactggtcgtgtatacagaccaaaagactgtgaaagacttgttctgtacttaaaagatatcaacctacctaaacttgataaatgggggaccagtactttggtagcattcctacaacaggtattgacgtatcaaggattttatgatgaaaatttggaatgggttggtctagaaaatattcaaattgtggcttctatgtcagctggaggaagactgggaagacataaacttactaccagatttacttccatcgttcgctttgntctatagattacccagaaagagagcagttacaacgat

SEQ ID NO: 38074 - DNA, 407 bp, Homo sapiens
  misc_feature (1)...(407): n = a,t,c or g
cggacgcgtgggataaaagtaatattgaccttaaataattgttatgaaaattaaatgagtttaatagacctaaagcacttagtacagttcctaacacttaataaatactttcgatatgttatttttgttaagtgaccagagtatctattgaaaaaaatctgcacacctagagtaagatataaaatctaccatttgatttttgatgatgttgaatggntacttcatgattcntttctttttccctgcngaactgtnttntgcntnaagctgtgntntgtgggtacctgnnntannttngntgannntgcnatnnctctnttcantngatnctgtntnatctntctntnnnncgggngtntggntnangttnnnggtcttttnngtngattngtntngggcngtcattc

SEQ ID NO: 38075 - DNA, 405 bp, Homo sapiens
gaagatactaatgaaatagactgggaagatcttccacatttatttcatacaacctttcaataaggctgaccttggcccgcagggcattcatgccatagtatatacgccgaccattagtcatccttattgaaaggttgtatgaaataaatgtggaagatactaatgaaatagactgggaagatcttgctagtgccataggtgatgttcctccatcttacgttcaaactaaattttctaggctgaaagctgtctatgttccattttggcagaaaaagacttttccagagatcatcgactacctttatgagacgactctacctttgctgaaggaaaagttagaaaaaatgatggagaaaaaaggcactaaaatccagactcctgcagcacccaagcaagttttccatt

SEQ ID NO: 38076 - DNA, 455 bp, Homo sapiens
  misc_feature (1)...(455): n = a,t,c or g
ccttggtcgcctgcggtaccggtccggaattcccgggttttaaattgtacaatttagtaatgttatgtatattcacatcattgtgaaatttagatctttagaaattttttatctttcacaactgaaattttgtacacattaaatactaattttccccctactcccacccccggcccttggcaaccactactttatgtttctgtgatttcgactaccttaaatacttcatatgaagggaannnnnnnnnnnnnnnnnnnnnnnnnnnnnnnnnnnnnnnnnnnnnnnnnnnnnnnnnnnnnnnnnnnnnnnnnnnnnnnnnnnnnnnnnnnnccgtaggctgcttaagtcttccattgtatgtatataccatattttatccttncatccnccaatggatatttggattgcatctcttggctactgngaataatgctggaanagggatngttgggat

SEQ ID NO: 38077 - DNA, 390 bp, Homo sapiens
  misc_feature (1)...(390): n = a,t,c or g
cccacgcgtccgcttgtagacatcatcgggatctgcaagagctatgaagacgccactaaaatcacagtgaggtctaacaacagagaagttgccaagaggaatatctacttgatggacacatctgggaaggtggtgactgctacactgtggggggaagatgctgataaatttgatggttctagacagcccgtgttggctatcaaaggagcccgagtctctgatttcggtggacggagcctctccgtgctgtcttcaagcactatcattgcgaatcctgacatcccagaggcctataagcttcntggatggtttgacncaaantgatgntnttanntggngntnnttttngnatnnnangctnnngnnnntntannnntntnncctnnttgg

SEQ ID NO: 38078 - DNA, 385 bp, Homo sapiens
  misc_feature (1)...(385): n = a,t,c or g
atttaaaaaggcatctatttctttatagaaagaaacattcacagtgaggtcttagtttgtgaacctcaaaatccagatattaatccactttagttattactttgtaattgcttctcagtcattggctgataatgcaatggtgtgataaatttgacttatctccacatacaaaagtcgatcagaagggatagttctcttcctttttttcccctcctactggctcttactgttttctaatctccagtgtaaatggaatgaacacatctatagttaaggtaaatgccaccaatcagaagattgagtgatncactgcttgtaaagcanctgcnncgaatcntatgaaataggcggngggngntcnagcngacnccnngaanggccttat

SEQ ID NO: 38079 - DNA, 402 bp, Homo sapiens
agaatatgcctgtattagagaacatggaccctgctgcatccgtctttatttcctcactcaactacctgtgtgccagtgtacaagtatttgcacaaagtgaattgttggtaaatgtttgatacctatagtgtttctggaagccaggaatgcagtgagttccattgccaatctgtggagtttgggagaattctttttaactatgtattcaatgatgtagaactctcctcattccttttcccttttttatcctatcctgattccctggataaaataccacaactgtcccaaacccttactccagcctgtttaaactgcatttactgtttctattattcacatgcttatggaaattttacgcatcgcttcgtgtgacccttcatgtggccagcctctcctgaggtg

SEQ ID NO: 38080 - DNA, 336 bp, Homo sapiens
  misc_feature (1)...(336): n = a,t,c or g
aaaccaagcaaggacaaagataaaaagaagaaaaaccctgcccctaccattgatatccgcccaagatcagcaaccattcaaatgaataatgctacacaccttcaagagagagatgaagagtacggctatgagtgtctggacggcaaggactgtgccagttttttctgctgttttgaagattgtcgaacaggagcttggagacatgggaggatacatatccgcattgccaaaatggactcctatgctcggatcttcttccccactgccttctgcctgtttaatctggtctattgggtctcctacctctacctgtgaggaggtatgggttntactgat

SEQ ID NO: 38081 - DNA, 390 bp, Homo sapiens
gtaaggaaaaggtgaacaaggagcttaaaagtatgataattatatgtgttggtttggccaaacagtcctggtttacctagcacagttctggtttgctgattgcctggtgtaatgattaatagcactgtcactccccaaattgtcattgtttggataatgaattatatgcatcctttttagagtaaaagtaacttttttctccttaaactggatggagggcatgtgggtctttatcattcttccttatacatgtatttttaaaatataatttaaaactagtcagtatttttaaaatataatttaaaatactgactagttttaaattataatttaaaactttagtcagtgttagtcactgtgttagtgacaacacagtaaaaaaaaaaaaaa

SEQ ID NO: 38082 - DNA, 404 bp, Homo sapiens
ggatggccaagctgacataacaggattcttgctacagttggagaatgcagagacaacatggaagtccgaaagtcaaggcctacctaagaagagagctcagaaaaggctgagtagagtttggtcaaggagaaaatttttatcaaggctaaaatatgttttactccataccagcaatccactgacttgctaatttattaatcataaaattatagtgtgtgatgctaatttcataagtgaaattcatttttaaaagttatcaatgtttcagaaaaaagatatactgctagttcctcaataatcatttctcttcactaaggaagaatatcctgtactttatgtaacaagagataggctggtacatattaaacacaatttccatagagtcagtttggtgaaatcattcc

SEQ ID NO: 38083 - DNA, 369 bp, Homo sapiens
gacagctttagccaaagaggccttggagttgcctgacactgaactcctgtcccctgaagccggcccagaccctggggacttacccctcgacaaccagaggacttagggccagccctgcgtgaactgcaggggcaatggatggtaaagccctttggctcttggcaggcagactttccaggaagaggctccatgtggctcctgcttcactttcccacccatttagggagacaatcaagctcttagttataggtggctcccagggtctaattggaggcacctggctggggtccactctgaccctagacttgcctaaaagagctctctaaggggcagcctcttacgatgccctggtgtctttctcctgggctt

SEQ ID NO: 38084 - DNA, 366 bp, Homo sapiens
gaagacatttttgagaatcttgagactgctatggaagttcagagttcagttgatcatcaaggggatggcagcagtggaactgaacaagaagtggagagttcatctgtaaaattaaatatttcttcaaaagacaacagaggaggtattaaatcaaaaactacagctaaagtaacaaaagaattatatgttaaactcactcctgtttccctttctaattccccaattaaaggtgctgattgtcaggaagttccacaagataaagatggctataaaagttgtggtctgaaccccaagttagagaaatgtggatttggacaggaaaacagtgataatgagcatttggttgaaaatgaagtttcattactt

SEQ ID NO: 38085 - DNA, 401 bp, Homo sapiens
  misc_feature (1)...(401): n = a,t,c or g
gatgggcttgccaaggtcatggggataggcagtgatgagcatttgcaaagtgaccccaaatcaagggtgtggatgtcatgatatggactacatcatatcaggcaaatgacaggaagtgtctttcaggttacttggttacaatgattcaggtaggtcgattgggcagtttcacttccatgttccagatggggaaactgaagctcagattacaagaccaagggctccctctccctaccacctaagttttattggctctcatgttgggtaacttcttgctggcacacctggcctttcttttctaatggaagaggaagggtctaagggactcaccactgctgtangttggctccctgagcacaggaggagaaatccgctcaagctcactcaagtacaggtgcatt

SEQ ID NO: 38086 - DNA, 402 bp, Homo sapiens
  misc_feature (1)...(402): n = a,t,c or g
catgggtgtgtttgtgtgtataatgtctaattgaatctgcagaaatgaccaagcaatcacttttttggagtatagttttataaaaaaagaatgcagggtttgaagttccttacctgataattgtgtctggcacatgataggggatcagtaaattgtaattcctaaccctactgtactcccaaacatggtgattcatggtcaagaaaaatctnnnnnnnnnnnnnnnnnnnnnnnnnnnnnnnnnnnnnnnnnnnnnnnnnnnnnnnnnnnnnnnnnnnnnnnnnnnnnnnnnnnnnnnnnnnnnnnnngcgcatgtatgtatgcatatgtgtgtatatatgcgtatgtatgtatacatgtgtgnatatatacgtatgtatgtatgcatatgtgggggnatat

SEQ ID NO: 38087 - DNA, 395 bp, Homo sapiens
  misc_feature (1)...(395): n = a,t,c or g
nnnnnnnnnnnnnnnnnnnnnnnnnnnnnnnnnnnnnnnnnnnnnnnnnnnnnnnnnnnnnnnnnnnnnnnnnnnnnnnnnnnnnnnnnnnnnnnnnnnnnnnnnnnnnnnnnnnnnnnnnnnnnnnnnnnnnnnnnnnnnnnnnnnnnnnnnnnnnnnnnnnnnnnnnnnnnnnnnnnnnnnnnnnnnnnnnnnnnnnnnnnnnnnnnnnnnnnnnnnnnnnnnnnnnnnnnnnnnnnnnnnnnnnnnnnnnnnnnnnnnnnnnnnnnnnnnnnnnnnnnnnnnnnnnnnnnnnnnnnnnntatgtcttagagtgaggggaaactgaggcacaaagcgtttatgtagtttgccaagggtacacatggtaagcagaaaaactgggatttgaggca

SEQ ID NO: 38088 - DNA, 407 bp, Homo sapiens
ctctgtattgtagtcaggacccacttcaaaatctctgggacctttttactgtcatctatgaatatatctaaaatttgcatgatagattgcaagaggtgttgagcccaaaaatggcccacctgcttgtcattctgaattgcttaccaaacagtcattgagtcctgccaaattatctctaaagtgagtcagtcaaaattttcgtaatctctcaggtttcttcccataaatgatttccatttttcccttttagtactccttgtagatgatgcatgtctctgtaatttttatctaaaagagggtgaaacctcctttgcctaccaggatgaattttagctgtacggtcatacaggattggttccagggcccctgagtataccaaaattcaagcatacttaaatcctgcagtc

SEQ ID NO: 38089 - DNA, 116 bp, Homo sapiens
gttgtgcccttcccaggcatcatcctcctaccaccaacctggggccccatcttggaatgggggctccttggggccagcccagtgtggctcaccacactcttctttttttttttttt

SEQ ID NO: 38090 - DNA, 411 bp, Homo sapiens
  misc_feature (1)...(411): n = a,t,c or g
ttttaagttaaaatgcattgtttctaagccacaaactacagatatatttagattacaactggagtagcattttaatctaaaaaccaaaattatgggctcaaaacaatccagtattttccataccactatgctatgtttcctggtatagtgtatttgctatatttgatgcatcacaaataattaagtacgtatgaagctttattcttttaaatgtaaaaaatcatagaatttatcaaaattttaaaattaatgaaccaaaaaaacctctgtatacacaccaaaatagagaaactttaaaattcatgcttactaggaaaaaaaagattgattttctaagttcaaggacagtatgcctataatatacaaatgaaatgaanctaaagggaaggaagaatactannacaccagcct

SEQ ID NO: 38091 - DNA, 407 bp, Homo sapiens
  misc_feature (1)...(407): n = a,t,c or g
cggacgcgtgggtttttatatccacccccaccactatactgagatttatcgaagtttgagagggtaactagtatcaaggcactggtatgggagtgaggtggggggaggtgtgtatganaggnntaattnaccttgcttttttactnttanganttnacaccnngatgtctgcttagatntnnnttatcctntgnngccttcnactattctntctattgtttacttnagagtnntgctncgatnatctcnttctgatccattataactctggtgntctggnccctnntngatngtcatgcntttnnnnncactntacattngattgttnnttangannatnttngaactttgaatatnttntatantatgtgactnggtatnttatatatngattctntccaatgacc

SEQ ID NO: 38092 - DNA, 402 bp, Homo sapiens
catcctgcagtgagctttgttaccttcttggccctgtttattgaatccccatcgtgcaagaaacaggaaatttggcactaagcagatgggaaaaaatgcattgtatagatatcaaagcatagtggttaaatgttgttctcttctgaggtggatggctcccaagaccctggtgctttttgaaatatgctctaactaacctatttttccatgtgaacaaagggctcagtggatgaaggttattttcacatagccctcaaggttaaagttggttgctcttccagatggtttctatctaattctttggattatgatactgaactaccctgcgatcaggactcctagtgccaagaataacaagaggtggaagccagctacagtgagggctgctggtctctgggcagg

SEQ ID NO: 38093 - DNA, 392 bp, Homo sapiens
gaattcctgcagtgggaggatctgatccattttgcgggacgcccttgctgaaggcaatactcacttgaaagaaaatcccagccactgattccacttaagtttagaacctcttaagggctgaaagggcgagctttgtttgctgagagaaaaacaatcaagatgcggaaggagttggctaaggaaagtctgcccagagtcagtttaaaaacatctgaggaagatagaaaacattttatctttcaagataaaaaaagaaaagctctttgccaacagaaaacataatatgcggactctatggctattgtttctgaaaaatataagagatgattacatcacattgtgtattctgtaggaaaaacactgtaatgcttatatggctaataatggaatga

SEQ ID NO: 38094 - DNA, 384 bp, Homo sapiens
gagccagctgaggggaaaaatggctcggactgtggcggcttcggcggctcaggttgtggtagaggcggaggctcaggcagcttgaggccttgctattttggaagctacaagaaaaaaatagaggaaggaaggtttggtctttttagtggacatggctcagatatctagcaacagcggatttaaagaatgtccatcttcacatccggaaccaacaagagcaaaagatgtggacaaagaagaagcattacagatggaagcagaggctttagcaaaactgcaaaaggatagacaagtgactgacaatcagagaggctttgagttgtcaagcagcaccagaaaaaaagcacaggtttataacaagcaggattatgatctcatggtgtt

SEQ ID NO: 38095 - DNA, 392 bp, Homo sapiens
  misc_feature (1)...(392): n = a,t,c or g
attctgtgctctggaacatagggccagaaagatttgtaagatttggttcctactctcaagaaactgggattccgattatctgcaaaaaatcatattcctgaaatcagattccctaaatgaaagcaagtccatatggtataagcccttggtacattttaagccgaggatacctttcctacctcccaaacctaagattataagagtggccaccagagccctcaccctggtctatttccttctacaacactggccagcacattcatagaacctggttgcagagataagtcaaatcactgcaaacttgggatggccaacgccccatcctagcttctctagattcctttgcagggatgtccacagggtgcttttatatatgncttcatgccctcctg

SEQ ID NO: 38096 - DNA, 386 bp, Homo sapiens
  misc_feature (1)...(386): n = a,t,c or g
tgaggatgtattcatcctacatggaccaagtttcaaatctttgtttttaaataaaaatttccttcaaaaaattaaatgttaaatttctgctgtgtgtcagtaaggtgaagaaaatagcaaatctgaatttttgctgctcagatattatggaggaggtaaaaaggggaatctccgtggacaaggacactggtactttgggctttagccatattcatttttttgaaaccaccaattatataatacttaaataatttatatcattgaacttgtgattcttttcaaatcacactgaaggttcagccgtactcctttcatgnntggnttaatactggngaatggatgaannanctagganggatgatanngccancnntaggnnacttgca

SEQ ID NO: 38097 - DNA, 389 bp, Homo sapiens
ggcaggagcagcgttggcaccggcgaaccatggctgggattttctatttcgccctattttcgtgtctcttcgggatttgcgacgctgtcacaggttccagggtataccccgcgaatgaagttaccttattggattccagatctgttcaggtagaacttgggtggatagcaagccctctggaaggagggtgggaggaagtgagtatcatggatgaaaaaaatacaccaatccgaacctaccaagtgtgcaatgtgatggaacccagccagaataactggctacgaactgattggatcacccgagaaggggctcagagggtgtatattgagattaaattcaccttgagggactgcaatagtcttccgggccgtcatggggacttgcaagga

SEQ ID NO: 38098 - DNA, 391 bp, Homo sapiens
ggaatgtcctgtagagagagacctagataggtcatgcaagtgagaaagacatctgaggaaaatggaagacctaaggcagacaggaaggaagcacaaaagacaagcattgggtcagacccataaaccacctcccaaaggctgtcatttcattgcactggaattttgctttatcagaagcaaggaagtaagggagtcattgccttgggcctgggaatctaagtgggagacaatattaatttggatccgattaattggagattactaactgtggacaaaagtttatctttgcacaatcaataaaaatggcatttttttagtaaattaagagcataaacaatattgctagaggtggcatgtttaagtctacccaaaaccattcttttcaggcact

SEQ ID NO: 38099 - DNA, 388 bp, Homo sapiens
gccgggtccagtacccaaccttcgcacgagtgtgttgcacgtttacacagggtgggctgcccccaccctgcactacctatttttgtgagtctccgtgacccgggtctgtctgctcatgaggggctgcggagttctatattcacatatgcaaacctcctgcctgactcgctagtccctgcaaatatgcaaaccccccatcatctgcacacccgggcagtgctcagagcccggccccaggcccccgcgctcctcactcctgcctctccacgctgccccgtccctctcccccaacagggagaggtcggattaggggaggttcagaggaggagaatgtctcaaaaaaaaaggacaaaaaacaaacccagagccactcctttaatacagaaac

SEQ ID NO: 38100 - DNA, 387 bp, Homo sapiens
  misc_feature (1)...(387): n = a,t,c or g
aagtaatgtaaaacttattttgttttatttatactttataatagttagatataacagattatggacaacttaatatttcttctnnnnnnnnnnnnnnnnnnnnnnnnnnnnnnnnnnnnnnnnnnnnnnnnnnnnnnnnnnnnnnnnnnnnnnnnnnnnnnnnnnnnnnnnnnnnnnnnnnnnnnnnnnnnnnnnnnnnnnnnnnnnnnnnnnnnnnnnnnnnnnnnnnnnnnnnnnnnnnnnnnnnnnnnnnnnnnnnnnnnnnnnnnnnnnnnnnnnnnnnnnnnnnnnnnnnnnnnnnnnnnnnnnnnnnnnnnnnnnnnnnnnnnnnnnnnnnnnnnnnnnnnnnnnnnnnnnnnnnnnnnnnnnnnnnnnnnnnnnnnnnnn

SEQ ID NO: 38101 - DNA, 380 bp, Homo sapiens
agaaaataaaatatttattttattttctcatcaatatcttagaaaataaaataaatattttaatgtagttaatctgcccttcaacaaaatatatcctctcatttccaattctggttgtacttaatgaataaaggttgaatgcatatttatgttaatagtcatgatatatacacgtcaatgaacaacagtaaaacatactttatttctgaaaatgttaataatgatttattaccttatttcattaaggacaaaagctccacattatagtcagctatagccaatagtcattttgtcattaatcttaaaatttcacaagtttccaatttatcaagtgtcaatttttaggtcagacaataataatataaaagaattgttaattg

SEQ ID NO: 38102 - DNA, 272 bp, Homo sapiens
agaagagcttactttaaagttcctatttcagcataaagaggctgtccttttttttgaggaatagtttggaccttgtgcctcctgtgggaggctgaggactgcaagaggagagctagcagatatgcctgttcacccctctctggtacttgtggcttgctagtatgtttttatgataatctcgggcattgtttgcattgtgtttattaatagggttttgtttttgttgtttccttttttacagtaaaggctgaattacataaaaaaaaaaaaaa

SEQ ID NO: 38103 - DNA, 381 bp, Homo sapiens
  misc_feature (1)...(381): n = a,t,c or g
cccacgcgtccgattaatttaatttaaataattaaattaatttaattatttaaaaattttaaatacttaaattaatattaaattaatattaaatttaaaattaatattaaatttgttgaggctgcttttggaaatcaataacttgattttcattatcattttaaagaacataaggccatttattgatttaaggtgactcgatttaagtttgggccttccttccttgcccctttagccttgatatgtgataccaggataaataggattacatagcattgcctcgaagtaaaaagaacaggtggaggctgtggttgtattttttttttcccccaanagcagtttgcacttctgcttgttagcaaattacagcctcttgtattc

SEQ ID NO: 38104 - DNA, 374 bp, Homo sapiens
  misc_feature (1)...(374): n = a,t,c or g
ggcccaagctcctcatcccttcctcagaaggagggttgtgtctgggctaaattagggcagcgtggcatttgcttcctctcctctcatctgactggtaaagattttcatttttctaccaaaaactgggtcagctgctccatgggtgcagggggagcaggatgtggagccaggagagggccatgctttcccaagtctgacttgagcctagaaatatgtgctggcagagctggctggaaggcccggcccggtgctgactcccagcaggtgcatcggcttccggacgggggccancattaccaaaggccancgtncanccggccaggancaccccggtctttttaggattcagcctctgcaagttaccaaaacatttg

SEQ ID NO: 38105 - DNA, 179 bp, Homo sapiens
attgtaagttcctaaaaacattttaataacaaaatgtctacttgtttaataaaaaaatgtgatctgtaatttctttgtgcagaatgatttgaagtattgtattcagtttacatgcattattggtttataattaatatctaatgaaaatacatgttgttatattgtaaaaaaaaaaaaaa

SEQ ID NO: 38106 - DNA, 373 bp, Homo sapiens
cccacgcgtccgcccacgcgtccggtttttttcctacacttttttttgccaactgacttaacaacattgctgtcaggtggaaatttcaagcacttttgcacatttagttcagtgtttgttgagaatccatggcttaacccacttgttttgctatttttttctttgcttttaattttccccatctgattttatctctgcgtttcagtgacctaccttaaaacaacacacgagaagagttaaactgggttcattttaatgatcaatttacctgcatataaaatttatttttaatcaagctgatcttaatgtatataatcattctatttgctttattatcggtgcaggtaggtcattaacaccacttcttttcatc

SEQ ID NO: 38107 - DNA, 376 bp, Homo sapiens
caattaataaaaatgaatgagtaaaaattgcttatgtattaatttacctcaggcttgtagcttctacttttaagattttctataagggattttatattctcttaatagaaatagcttctcctcaacaaagagcaaatgtttctgaattagtaaaatgtatcttaaatatggccagtagtttgaaggcactcattatcataccaaattgtcggaaacctagattcttgtattatgtctcagaaattactgctttttgtgggttataatgtcacagggtcatggaacattgaatctgaaacatactttagagactgtcaagtgttaaagatgagaaaaatgagccacaaataaaccaaattatttttaacacagttca

SEQ ID NO: 38108 - DNA, 371 bp, Homo sapiens
gattttagtcaatcccagtatgaaataatggggattgtttgaaaggagcaaacaaaaaagatctgctttccattaccacatcaaactatacagaaaggatgaactaataactctgaagtgatattattgctggtaagagtattaaatggctatacaatgtacaaaagaaaccactgaacacaaactagtgatatatttcaacctaccacttaatcttattccatgagaaaaatatctgaaagaggagcaggtaaagactagatcttcagaatttggccttctaaactgcctcttttatttataaatagcaaaagcagcagcactaattaccgtgggaatgctgtttttatatggagaaaataaatctacct

SEQ ID NO: 38109 - DNA, 390 bp, Homo sapiens
  misc_feature (1)...(390): n = a,t,c or g
attcactcgctcttttcattcacgaaggtagtgaggcctagtggaaagccatggagagcgctctccccgccgccggcttcctgtactgggtcggcgcgggcaccgtggcctacctagccctgcgtatttcgtactcgctcttcacggccctccgggtctggggagtggggaatgaggcgggggtcggcccggggctcggagaatgggcagttgtcacaggtagtactgatggaattggaaaatcatatgcagaagagttagcaaagcatggaatgaaggttgtccttatcagcagatcaaaggataaacttgaccaggtttccagtgaaataaaagaaaaattcaaagtggagacnngaaccattgctggtgactttgcatcanaaaaaa

SEQ ID NO: 38110 - DNA, 376 bp, Homo sapiens
  misc_feature (1)...(376): n = a,t,c or g
gtgtcagcatcacctcagactctccagcaatccctccctaggtcaatcgctcccaaacccttaaccatgagactccccatgaaccagattgtcacatcagtcaccattgcagccaacatgccctcgaacattggggctccactgataagctccatgggaacgaccatggttggctcagcaccctccacccaagtgagtccttcggtgcaaacccagcagcatcagatgcaattgcagcagcagcagcagcagcaacaacaacagatgcaacagatgcagcagcagcaactncagcagcaccaaatgcatcagcaaatncagcagcagatgcagcagcagcattttcagcaccacatgcagnagcacctgnagcagc

SEQ ID NO: 38111 - DNA, 142 bp, Homo sapiens
attttattgtgtagtcttataatttacttaaccttctttcaattgttagaaatttaggctatttccagattttcagtattgtaaataatgctgtgatgaccaattttgtgaataaaatgtttttatgtaaaaaaaaaaaaaa

SEQ ID NO: 38112 - DNA, 379 bp, Homo sapiens
  misc_feature (1)...(379): n = a,t,c or g
agctcaactacgaccgtgaggtagtgcgggtctggttctgcaatcggcgccagacgctcaagaacaccagcaagctgaacgtctttcagatcccttagggctcagcccctggccctgtgttctagcactttgtccatttcccgtggcatccggctgcagccactgccatgacagcacctgtcattttgccacgtgcagctgtgctcaccccaggtcatcagactccaccgtgtgcatgtgcatcaatggccctcttttctcccacacatctcacatcatggggaggccagagggggccacacganagctccaggcttngggctgtcacttctgaataagangatcnntganngtgacttantagnatcacntntggtta

SEQ ID NO: 38113 - DNA, 367 bp, Homo sapiens
  misc_feature (1)...(367): n = a,t,c or g
atttttattctgcccattaacagtgctttgaacccaattctctatactctgaccacaagaccatttaaagaaatgattcatcggttttggtataactacagacaaagaaaatctatggacagcaaaggtcagaaaacatatgctccatcattcatctgggtggaaatgtggccactgcaggagatgccacctgagttaatgaagccggaccttttcacatacccctgtgaaatgtcactgatttctcaatcaacgagactcaattcctattcatgactgactctgaaattcatttcttcgcagagaatactgtgggggtgcttnatgagggatttactgtatgaanngataccacnnnnttnntata

SEQ ID NO: 38114 - DNA, 374 bp, Homo sapiens
  misc_feature (1)...(374): n = a,t,c or g
cacgagccacggcctgacctgaacnnnnnnnnnnnnnnnnnnnnnnnnnnnnnnnnnnnnnnnnnnnnnnnnnnnnnnnnnnnnnnnnnnnnnnnnnnnnnnnnnnnnnnnnnnnnnnnnnnnnnnnnnnnnnnnnnnnnnnnnnnnnnnnnnnnnnnnnnnnnnnnnnnnnnnnnnnnnnnnnnnnnnnnnnnnnnnnnnnnnnnnnnnnnnnnnnnnnnnnnnnnnnnnnnnnnnnnnnnnnnnnnnnnnnnnnnnnnnnnnnnnnnnnnnnnnnnnnnnnnnnnnnnnnnnnnnnnnnnnaggcacnctacncttgcggaagactgcnnggtcgtttgcctangaaagcnggtattggtcaacgtnttttc

SEQ ID NO: 38115 - DNA, 372 bp, Homo sapiens
  misc_feature (1)...(372): n = a,t,c or g
gagaggtcaagcccaggaggactgccccgtgcagactggaggggacgctggtagagatggaggaggaggcaattgggatggcgctaggcatacaagtaggggttgtgggtgaccagttgcacttggcctctggattgtgggaattaaggaagtgactcatcctcttgaagatgctgaaacaggagagaaaggggatgtatccatgggggcagggcatgactttgtcccatttctaaaggcctcttccttgctgtgtcataccaggccgccccagcctctgagcccctgggactgctgcttcttaaccccagtaagccactgccacacgtctgaccctttccacccatagngaccggttggttttcctaaccc

SEQ ID NO: 38116 - DNA, 375 bp, Homo sapiens
ggaatttccaagtcaaccctgggagtgtccaccatggtaggctaaacaatggcctatcaaagatgcccatgttctaattcccaggactgctaggtcactccctacatataattgaacctctgtggaattgaaggatccatggaagaaagatgaaaaccgtttgtttatgtaaaagacagagcaagtatactaaaatcacagagcggtcacttaatagtaggttttgaaaacttaatttgcatgggaaaatactatacacagttttaaaatcaaattgatactgtcttggtgccattttaaaaaatcagaacaaaattctaaatttgcagatctggtagctctgtaagtatggttttatggtagagtatggttttt

SEQ ID NO: 38117 - DNA, 369 bp, Homo sapiens
aaatcagcatgcttcttgaaatgtcttaacaatttaaaatatttataatataactgattcttaaacttttatataatgcagtatatttgaaattttaaaagttcaattatttacattctccttgggaactacattttatatattctgttacttgtaatcaaataattatatgacattcttaatgtctgtacctacaaacattgaattcatgcatatttataaggtagcttattgactataattcattgttgacctttctgatgattctgtagttagatttttaaaatatgattgaatgtggaatatctaggcatagactaacatgggtttgaatcttagctgtgacatttatgagctgtgggctcaaca

SEQ ID NO: 38118 - DNA, 381 bp, Homo sapiens
  misc_feature (1)...(381): n = a,t,c or g
gttattaactttaatgttttttgccacagcttttgcaacttaatactcaaatgagtaacatttgctgttttaaacattaatagcagcctttctctctttatacagctgtattgtctgaacttgcattgtgattggcctgtagagttgctgagagggctcgaggggtgggctggtatctcagaaagtgcctgacacactaaccaagctgagtttcctatgggaacaattgaagtaaactttttgttctggtcctttttggtcgaggagtaacaatacaaatggattttgggagtgactcaagaagtgaagaatgcacaagaatggatcacaagatggaatttatcaaaccctanccttgcttggtaaatttttttttttttt

SEQ ID NO: 38119 - DNA, 375 bp, Homo sapiens
  misc_feature (1)...(375): n = a,t,c or g
gaggcgtcttgtattttcttcccatttgtaatgtatcttatttatatatgaagtaagttctgaaaactgtttatggtattttcgtgcatttgtgagccaaagagaaaagattaaaattagtgagatttgtatttatattagagtgcccttaaaataatgatttaagcattttactgtctgtaagagaattctaagattgtacataaagtcatatatatggaaatcctgttacttaaatagcatctgctcttctcttacgctctctgtctggctgtacgtctggtgttctcaatgcttttctagcaactgttggataataactagatctcctgtaattttgtagtagttgatgaccaatctctgngactcgcttac

SEQ ID NO: 38120 - DNA, 387 bp, Homo sapiens
  misc_feature (1)...(387): n = a,t,c or g
gtgggagggaaaggaagggtgccggccctgctcaggagcatggctcccctgcaagcatctggctccttggctgccactgcagtggggaccagaaaacagacaggggttgggaggggcgaacaggggagagcattccagaaagaggaaatagcagggaggtgtgccttagagtctggggcagggcatggagcagggaaggtgcaggcctcggcccggcagggtttggaatgcactctgcctgctgtggaaaatgcagaaccagggagacccatccaggtgctgcaatagggggtggncncanaggccaggcccaaacnctngagggnactntggacngaantntgnnnntttaccccntnttnnanaccnnancnngnctnnntccct

SEQ ID NO: 38121 - DNA, 391 bp, Homo sapiens
accgcgggccgggtttggccccgggacagatttacacgtaccccgcccgctgttggaggaagaaacggagactcaacatcctggaggaccccagactcaggccctgcgagtacaagatcgactgtgaagcacccctgaagaaggagggtggcctcccggaagggccggtcctcgaggctctactgtgtgcagagacgggggagaagaagattgagctgaaggaggaggagaccattatggactgtcagaaacagcagttgctggagtttccgcatgacctcgaggtggaagacttggaggatgacattcccaggaggaagaacagggccaaaggaaaggcatatggcatcgggggtctccggaaacgccaggacaccgcttcctggaggac

SEQ ID NO: 38122 - DNA, 385 bp, Homo sapiens
  misc_feature (1)...(385): n = a,t,c or g
gtgtggtgcacgcattgctgtgctccaactccctcagggcctgtgttgccgcactctgctgctatgagcttcctcaaaagtttcccgccgcctgggccagcggaggggctcctgcggcagcagccagacactgaggctgtgctgaacgggaagggcctcggcactggtaccctttacatcgctgagagccgcctgtcttggttagatggctctggattaggattctcactggaataccccaccattagtttacatgcattatccagggaccgaagtgactgtctaggagagcatttgtatgttatggtgaatgccaaatttgaagaagaatcanaagaacctgttgctgatgaagaagaggaagacagtgatgatgatgttgaac

SEQ ID NO: 38123 - DNA, 359 bp, Homo sapiens
gtagaaagcgatgtttctaaacaactgcagcggctctttcctgtctgaactgcatcgtgtgtctgactgccttgctgtccatacatacagactccttcccaggcccggctctgtgcagaacttccatgttttaccacatttttctctcctgaactccctttgtcagccccagggtgttgaggctgggtcctctctagcaatctctaccttcagaagagacttttctaaattgcttttccagttcttgttgcttttgtcattgtgaagagtcacccaggatgctggcgcttggtaccctaagatcagaagtggtgtgtgtgtgagctgtgagacatgcacaccctttcagagtgatactg

SEQ ID NO: 38124 - DNA, 219 bp, Homo sapiens
cctggttcttttatggggacttttcgtttttgggcaactccagtgtatttatgtgaaactttataagagaattaatttttccatttgcatattaatatgttcctccacacatgtaaaggcacagtggctccgtgtgttaaaaaacagctgtattttatgtatgctttactgataagtgtgccaataataaactgtgttaatgaccaaaaaaaaaaaaaa

SEQ ID NO: 38125 - DNA, 377 bp, Homo sapiens
gttcaagtgccaccatataagtgaagctgtcctcagtcgaccctagttgactctgtggccccatggaactttttctcatcaccatcgtagcagtcatgactctgttttgacctccacttctccactggagagtgtgttccgtggaatgaactggcttgtagtgtgacctgtgaacctccagagcttggctctgtgttgctcattgagtacttgttcttgcagtgggcccttgccaagagaggcccctgttctgggatgtgagccagagaaggtccgagactcataatttcatgtgtcatactcgtcctccacccagctccccctggccagatcacagccccctcctgctgcagggcctgtagtgccaggctggttgg

SEQ ID NO: 38126 - DNA, 368 bp, Homo sapiens
cggacgcgtgggcaacattgagatgtgtttttaatgttaaaatattgatttctacgttatgaaaacagatgcccccgtgaatgcttacctgtgagataaccacaaccaggaagaacaaatctgggcattgagcaagctatgagggtccccgggagcacacgaaccctgccaggcccccgctggctcctccaggcacgtcccggacctgtggggccccagagaggggacatttccctcctgggagagaaggagatcagggcaactcggagagggctgcgagcatttccctcccgggagaggagatcagggcgacctgcacgcactgcgtagagcctggaagggaagtgagaaaccagccgaccggccct

SEQ ID NO: 38127 - DNA, 359 bp, Homo sapiens
cttcttacagttaggaatactgcacttgtttgtgtaatattagaacaactgtagttttcctatcttagggcagaggttcagtattccatggggagaaaaaaacagtaattatctttgttactcttcttctttagaggaatattctagcatatccattatatccataacttcttaaatttgtgacttgggtgtcttctaaaaaggctcaggatgattattttttccttcagtgtatgctgaattttaggtgcgatggaaaaggtatccaaagtgatactccctttgactctgagcatcagttgcccgtgtttcagtcacttcaagctgaattcatgccctcaatgtaagtgctgtgccaa

SEQ ID NO: 38128 - DNA, 371 bp, Homo sapiens
cccacgcgtccgaagcgaggtggttgaattttggaagcacttcttgaatcggattaacccatgctcttattgaattttttcatctgctctgtttagtttgatattaaagcaaaattaagaggtcttagtttttcctatagaacttttaatatgtcaaaagctatattgtctaaatttcagtacttaagcaaatactgagtagtgttttaaattcagaaatagagcttctattatgaacacatgagaatgatttttttctcttaatcattattaaggaaatattttaatttcatggtcatataatggtgataagtaatacctgattggttcctttctggtctagtaactcagaggagatacgtggtttattt

SEQ ID NO: 38129 - DNA, 369 bp, Homo sapiens
gtgaacacttatctacttacctcttagattcaacaatgaatattttattatacttgttgcatatttatccccctacccatccctcttttcttccaacaattgtgaattcatctttgaggtattcattcaacaaacacataggtgctggggatgatttaatttaatcgaagatgattaaagcattcagtcctgtcctccaaagtctcacaacctagtgtagggaaatagacatgaaatatatcattgctgcaaaatgatgagtggcataatacaggtatatgtgaagttcagcagagaaacacgttggaagaaataatctttgactcttgaagtattgtttgaagtttttgggagttaccacgagtgaga

SEQ ID NO: 38130 - DNA, 381 bp, Homo sapiens
gtactcccagcagcagcagggtctcacagcaagggctgtgtcttaggggaggcagtttcaaaagcctctcaggtggttccagtcggggcgtctcccctcccagtggtgaaaatcattgttttacattagtgcacccaaaactgcccaattccaagcagtttcgggacagggtacagcatagactcttggcttccctcccctgggggctgtgaccccagaagtctgggcgggcccagggagtgcgcaggtttagaagcgttgcagtgccctgacgctcgggcaggctcagcagtgcagcgtttggagaccagcagcagttggctgctgtcagctcagtgtgcaccaagctttcatgggaagactgaaatttccagaaaaggg

SEQ ID NO: 38131 - DNA, 373 bp, Homo sapiens
  misc_feature (1)...(373): n = a,t,c or g
attcttgtggtttgtgacccaattaagtcctactttacatatgctttaagaatcgatgggggatgcttcatgtgaacgtgggagttcagctgcttctcttgcctaagtattcctttcctgatcactatgcattttaaagttaaacatttttaagtatttcagatgctttagagagattttttttccatgactgcattttactgtacagattgctgcttctgctatatttgtgatataggaattaagaggatacacacgtttgtttcttcgtgcctgttttatgtgcacacattaggcattgagacttcaagcttttctttttttgtccacgtatctttgggtcnttgataaagaaaagaatccctggtcattg

SEQ ID NO: 38132 - DNA, 379 bp, Homo sapiens
aattatggatcctgttcagcatgtttgctgccgactcatagaatatttccttgtctgtgtgtgttttaatgtttgcttatgaactcattttcttcccttctcctgattttccctgtggaagtcaacgttgcccaggtcctgaaaatttactatggcatatttgcattttctttgcttgaaagtcgaggacttttgccaatttggaaattaaaagcaccatgttgacttagcattccctttacacatgaaaaaattaaatttaaactcctaaccagtgcctggtactggtgctgcttaatttctcatgctggatgtatttttccattgtatagtcttagtgacatacaaacttcctcattgctatcacaggcttatgaac

SEQ ID NO: 38133 - DNA, 374 bp, Homo sapiens
  misc_feature (1)...(374): n = a,t,c or g
gttgccttctcacttttctctctgttttctatcttttgatctgtggttccatgtacataggaccttttgctctttcttctaagtctcttactctcttattttatttttaatctgtnnnnnnnnnnnnnnnnnnnnnnnnnnnnnnnnnnnnnnnnnnnnnnnnnnnnnnnnnnnnnnnnnnnnnnnnnnnnnnnnnnnnnnnnnnnnnnnnnnnnnnnnnnnnnnnnnnnnnnnnnnnnnnnnnnnnnnnnnnnnnnnnnnnnnnnnnnnnnnnnnnnnnnnnnnnnnnnnnnnnnnnnnnnnnnnnnnnnnnnnnnnnnnnnnnnnnnnnnnnnnnnnnnnnnnnnnnnnnnnnnnnnnnnnnntcttgcctc

SEQ ID NO: 38134 - DNA, 380 bp, Homo sapiens
cccacgcgtccgccacgcgtccgggatgcataaggcttagaaaaatgcccaaaatgttctgtgaaaacacaggatatagaattatgtatacagtaggatcccaaacatgattttttcttgcaacttttctagttttcaaatcatgtgtaataaatatttacatattttaatgagaaaaacttatttttaaaaagaagaaaaaaatgattggcaggcatggatagctatagcaagatatctcatggcttatcaaatatttgcctcgcttgaatatgttaattcttctccagaatttagccacttaaccaagtaaggaaaatagcctgctgtttacaataatgaacattaaaaagtcatgctgaatggcatctgggtgtctc

SEQ ID NO: 38135 - DNA, 388 bp, Homo sapiens
  misc_feature (1)...(388): n = a,t,c or g
aaattgagaagtttcaaaaatacatattcactttaaaagcacaataaaaattccatcacataaattccatattgttatgaaagtatctatattttccaaagccccaaagacaatgagtaggaacgacagtgttttggtgttttgcaaacctccctggcgtcagggttaatggaagacagctgggctgtccttatctgttcttacatttaggctgaatttgttacaatgtgttgccatggttgaagtagaggaagaatgtctggcctcacagaagtatggaagtgtaaaaaggaggagtatgtaagcagactttttagacaatagcaggctaccctgagtttcnttgacaagngcggttttctnacngnttaangtgcactgttagaac

SEQ ID NO: 38136 - DNA, 384 bp, Homo sapiens
  misc_feature (1)...(384): n = a,t,c or g
gagaaaagtaaagataattattttaaagtcttaggacaaataaatggaatgatgtatgtaaataaaatgcctggtccagagtaactgctcagtaggtcgtcactaatgttttctgtaagatcactttcaaaactagaattatctacacatatgtgcatgcagtccatatatttacatacaggcatagtgtgttttatccttacatcaagctgcccatcagaactcttccccatgaacgtgtgaagaactgtttctcctggattgaaatgagagataatgctcttgcctttcctcagaacacactgctagatgtgtatttgttgtggtgatgttcccgaggacattgtcctttttttatttattcntattctttgtcaagacgac

SEQ ID NO: 38137 - DNA, 387 bp, Homo sapiens
  misc_feature (1)...(387): n = a,t,c or g
aacaacatctcggacctgagcccactgtgcctgctggaacaattggaggtgctggacctggagggcaacagcgtggaggacctggggcaggtgcgctacttgcagctgtgcccacgcctggccatgctcaccctggagggcaacctggtgtgcctacagccggcccctggccccaccaacaaggtgcccaggggctacaactacagggcagaggtgaggaagctcattccccagctgcaggtcctggacgaagtgctggccgcacacacaggcccaccggcccccccgcggctgagccaggactggcttgcggtgaaggaggccatcaagaagggcaacggcctttcccgctggactgtnccccgtggancccccatcccggagact

SEQ ID NO: 38138 - DNA, 387 bp, Homo sapiens
  misc_feature (1)...(387): n = a,t,c or g
gaaaaacatgtctcaggacatgtaaattgcaaaatagagtatcattcttaattggttataaacttttaaaagtatctcaattgttgcaataaggtatctaggttttagaaaaaaaatcttaatttaaaaggacctaccattaaatgttatgtttagcaaaatagtatgctacaaaatcagcatatcaataaccaatatttatacaccagtataaatcagatataaaggaaaaattaagaactatcatatgatttaatatatgtttaaaaataatgtaaaccattaataatataactttcaattggcatgatggcattaaatatatttttctttcgttgcttttaagntctttaggnacattttttgcatgatttgntggtatatagc

SEQ ID NO: 38139 - DNA, 372 bp, Homo sapiens
  misc_feature (1)...(372): n = a,t,c or g
gggaccccagggctggacacaccccaccgtggccccagagctcagccggtcgcacggacggacagttggaagccggaccccagagcctgaggtgggcagtgtgccagggtcccttgcggcctcctcaagccctgtccaggctatgggcatcaagacagcattgccggcggctgagctgggcctctactctctggtgctgagtggggccctggcctatgctggccggggcctccttgaggcttcacaagatggggcccacaggaaggccttccgggagtctgtgcgacctggctgggagtacattggccggaagatggatgtggctgacttcgagtgggtgatgtgggtcaacttcctttcgnacgtcatcat

SEQ ID NO: 38140 - DNA, 359 bp, Homo sapiens
  misc_feature (1)...(359): n = a,t,c or g
gagaactgaaaagtacatccgggatccctggtgagcacactagatggtttcagccccgacggagggagctcagcaaaaaggtttgttcctattgcgtttttatttggttttggttgaggttttgtatagacgagtctttggaaagtgtttaggcataaaggggagaagcccagaagaagcgagtgtttttgaagtgtggggaagctaggtcacgtggtggagcagggacagctatggcaggctgaggtctggtaccaagcggtagggcagggccacggaccgtgtggcagcagcagtgtgccttagtgggctcacagctctttcatttttctgcaacaccctgcagtacanaggttttt

SEQ ID NO: 38141 - DNA, 371 bp, Homo sapiens
  misc_feature (1)...(371): n = a,t,c or g
ccagaacgcgcgctgggcattggtgtctaccccgtgcgcatggtggtcaggggcgaccacacctatgccgaatgctgcctgactgtggtggcccgcggcacggaggctgtggtcttcagcatcgacggctccttcaccgccagcgtctccatcatgggcagcgaccccaaggtgcgagctggcgccgtggacgtggtcaggccggccggatatgcagaagcaccgcgtggtggcatggctgtcgcagcacaacttcccccacggcgtcgtctccttctgcgacggcctcacccacgacccactacgccagaaggcaatgtttctgcagagcctggtgcnngaggtagaacttgatcntcgtggccggttat

SEQ ID NO: 38142 - DNA, 364 bp, Homo sapiens
ctacggggtctacgcctgcgacggctgctcaggttttttcaaacggagcatccgaaggaataggacctatgtctgcaaatctggaaaccagggaggctgtccggtggacaagacgcacagaaaccagtgcagggcgtgtcggctgaagaagtgtttggaagtcaacatgaacaaagacgccgtgcagcacgagcgggggcctcggacgtccaccatccgcaagcaagtggccctctacttccgtggacacaaggaggagaacggggccgccgcgcactttccctcggcggcgctccctgcgccggccttcttcaccgcggtcacgcagcttggagccgcacggcctggagctggcccgcggtgt

SEQ ID NO: 38143 - DNA, 355 bp, Homo sapiens
ggcatttaatatgtaaagattcaaagtttgtctttattactatatgtaaattagacattaatccactaaactggtcttcttcaagagagctaagtatacactatctggtgaaacttggattctttcctataaaagtgggaccaagcaatgatgatcttctgtggtgcttaaggaaacttactagagctccactaacagtctcataaggaggcagccatcataaccattgaatagcatgcaagggtaagaatgagtttttaactgctttgtaagaaaatggaaaaggtcaataaagatatatttctttagaaaatggggatctgccatatttgtgttggtttttattttcatatcc

SEQ ID NO: 38144 - DNA, 364 bp, Homo sapiens
agctactgagaaaacaggaaagctacagcaagaggaagtccaaaagaagaatgctgagcaagcagctactcagttgaaggttcaactacaagaagctgagagaaggtgggaagaagttcagagctacatcaggaagagaacagcggaacatgaggcagcacagcaagatttacagagtaaatttgtggccaaagaaaatgaagtacagagtctgcatagtaagcttacagataccttggtatcaaaacaacagttggagcaaagactaatgcagttaatggaatcagagcagaaaagggtgaacaaagaagagtctctacaaatgcaggttcaggatattttggagcagaatgaggctttgaaa

SEQ ID NO: 38145 - DNA, 354 bp, Homo sapiens
agctcctgctgggccccaacgacgcgcccgctggcccctgaggccggtcctgccccgggaggtctccccggcccgcatcccgaggcgcccaagctggagccgcctggagggctcggtcggcgacctctgaagagagtgcaccgagcaaaccaagtgccggagcaccagcgccgcctttccatggagactcgtaagcagcttcatctgacacgggcatccctggcttgcttttagctacaagcaagcagcgtggctggaagctgatgggaaacgacccggcacgggcatcctgtgtgcggcccgcatggagggtttggaaaagttcacggaggctccctgaggagcctctcagat

SEQ ID NO: 38146 - DNA, 351 bp, Homo sapiens
caggccactgaggtcctaaatgagtatttctactcccacctgagtaacccatatcctagtgaggaggccaaggaggagcttgccaagaagtgtggcatcaccgtgtctcaggtctccaactggtttggcaacaagaggattcgctataagaaaaacatcggaaagttccaagaggaggcaaacatctatgctgtcaagaccgccgtgtcagtcacccaggggggccacagccgcaccagctccccgacacccccttcctctgcaggctctggcggctctttcaatctctcaggatctggagacatgtttctggggatgcctgggctcaacggagattcctattctgcttcc

SEQ ID NO: 38147 - DNA, 365 bp, Homo sapiens
aagggtagcaatgcctttgactattaaaacacagagcttgtaagaaatgtgtcaagtttgtacagacctagcattccaggatctaacttactgtcttgcaaagggcattcagtatttaattataaaagtcaagaatactaaatatcctatttgaaagagtgaactggtaacagtagccgccagagaaagaggtgacaatctaaacaaagagccctgcttacctttctgtgactaaaactagtcttaaaaactgaatacatttggggcatccttatgaaataggtaaaggtcaacattgggagtgtccctaccttggcagatagaccaatacttttttcctagactcaacccatttttaaagcagg

SEQ ID NO: 38148 - DNA, 350 bp, Homo sapiens
catttctgaagaggaggggagctgctggagccctagcctgttggggaaaagctggcacactcttggctcgccctctttgagtggagctgatccaacacctcatgcctgccttggccggacactgagaggaggggcacacgtgcttccagagacactcaggagtcagaccccaatgctcagagtcacaatgtgttcatggcctcctgtaacaggactctggggatcccctctgtggcccagcccaccccaccctctgctcttctatgctgtgcccagggcagctgccctcttctgcctgtgccccatcccatcctgaaaacccaggaccaaggcaggggcaggcagccagt

SEQ ID NO: 38149 - DNA, 346 bp, Homo sapiens
agtgtattaaaaattagctattacattgtagatatcatatgtaaaaaatttagagagtaattttgtgtattcttatttacttaacattttacttttaattatgtaaatttggttagaaaataataataaatggttagtgctattgtgtaatggtagcagttacaaagagcctctgccttcccaaactaatatttatcacacatggtcattaaatgggaaaaaaatagactaaacaaatcacaaattgttcagttcttaaaatgtaattatgtcacacacacaaaaaaatccttttcaatcctgagaaaattaaaggcgttttactcacatggatatttcaacatta

SEQ ID NO: 38150 - DNA, 329 bp, Homo sapiens
  misc_feature (1)...(329): n = a,t,c or g
gactagttctagatcgcgagcggccgctctagaggatccctcgaggggcccaagcttacgcgtgcatgcgacgtcatagctctcnnnnnnnnnnnnnnnnnnnnnnnnnnnnnnnnnnnnnnnnnnnnnnnnnnnnnnnnnnnnnnnngatctgctagcttnnnnnnnnnnnnnnnnnnnnnnnnnnnnnnnnnnnnnnnnnnnnnnnnnnnnnnnnnnnnnnnnnnnnnnnnnnnnnnnnnnnnnnnnnnnnnnnnnnnnnnnnnnnnnnnnnnnnngctgcatatgcttgctgcttgagagttttgcttactgagtatgatttatga

SEQ ID NO: 38151 - DNA, 337 bp, Homo sapiens
gggaacctcagctctctctgccctgttggagatggaggccagtcagaagtgcctgggagaacagcaggcagctgtgcatggtgggaagagctccgcccagtcagccgagagcagcagcgttgccatgactcccacctacatggacagcccacgaaaggacggggccttctttatggagtttgtccgcagcccacgcacagcatcgtccgccttctaccctcaggtatctgtggaccaaacagccactcctatgttggacggcaccagtttgggcatatgcacaggccaatccatggacagaggcaacagccagacctttgggaactcccagaacata

SEQ ID NO: 38152 - DNA, 331 bp, Homo sapiens
  misc_feature (1)...(331): n = a,t,c or g
atatataatatgtatgtatattaattatataccttatatagttttatataatattgtatattatatatagtttatatatgtgtgaacatgtatgttattcaaaatgtaactatgcatgttatttaaaatcacatgcattacttttctgaaccatttgatggtaagttgctgagatcatatgcttttacccctcaatagtgaccttcaaatgttatttatattttttgcctctttcgttattctgtatttcccaagttttctatctttgtaattagataaaaataataacatacgttatctcaagaagtaaatcaaaaaaaaaaaaangggg

SEQ ID NO: 38153 - DNA, 341 bp, Homo sapiens
  misc_feature (1)...(341): n = a,t,c or g
ctnnnnnnnnnnnnnnnnnnnnnnnnnnnnnnnnnnnnnnnnnnnnnnnnnnnnnnnnnnnnnnnnnnnnnnnnnnnnnnnnnnnnnnnnnnnnnnnnnnnnnnnnnnnnnnnnnnnnnnnnnnnnnnnnnnnnnnnnnnnnnnnnnnnnnnnnnnnnnnnnnnnnnnnnnnnnnnnnnnnnnnnnnnnnnnnnnnnnnnnnnnnnnnnnnnnnnnnnnnnnnnnnnnnnnnnnnnnnnnnnnnnnnnnnnnnnnntcatgatcctttgtagactgagggacaaaagaagagggtgaggcctcccctctcctcagcgctgagtgcaaggaccctcaaggca

SEQ ID NO: 38154 - DNA, 325 bp, Homo sapiens
  misc_feature (1)...(325): n = a,t,c or g
cggacgcgtgggcaaaaaaaggcaacaagcatgctgggaccattctgtctgctgtttgggtctcacttgtcctgacaactaaaaatcatcagtggaaagaagctagagtcatcctaacaagagtgatagtctttccccaagtgagaccaggctgtgctgtctggggaaaagcattgttggccttgtcaagatgcaccgacgactcnntcagctanngacttaaccantacaggacttgctnnantggagcctgatctgnatatggaangcntaanaagcaagatctnnnnnnnnnnnnnnnnnnnnnnnnnnnnnnnnnnnnnng

SEQ ID NO: 38155 - DNA, 332 bp, Homo sapiens
aatttttaaaaaagtgatcttaggtttgttttttcatgcgggatgcagatgggtgctatcagagcctctcccacaccactatagtgtaataatgttattattacactacactgaaacgtattcagagttagatattattttagcttcagttgttctttagaggctttcaaatgtaccgatgatactgtttcttgcactgaatatataaacactccacagtgtttatattgggaagatattgggaaggaaatatatttgtaaaagatgaaggctgtatctatttttttttctttttaaagtttgttcacttaaattcttttgaggatgggatg

SEQ ID NO: 38156 - DNA, 362 bp, Homo sapiens
gaaatgactagattggccggttttactgctcggattacagaattaatgcaagtactgaaggatttaaatcatggcaaatatgagcgcacaatggtctcacaacaggaaaagggtattgaaggagtacaagtcattcccttgatacctggtgctggagaaatcattattgcagataacattataaagtttgatcatgttcctttagcaacgccaaatggagatgttttgatccgagaccttaattttgaagttcgatctggggctaatgttctaatttgtggtccaaatggctgcggaaagagttcacttttccgtgttcttggtgaattatggcctctttttggaggacgtctaactaaacc

SEQ ID NO: 38157 - DNA, 340 bp, Homo sapiens
  misc_feature (1)...(340): n = a,t,c or g
ctagttctagatcgcgagcggccgctctagaggatccctcgaggggcccaagcttacgcgtgcatgcgacgtcatagctctcnnnnnnnnnnnnnnnnnnnnnnnnnnnnnnnnnnnnnnnnnnnnnnnnnnnnnnnnnnnnnnnngatctgctagcttnnnnnnnnnnnnnnnnnnnnnnnnnnnnnnnnnnnnnnnnnnnnnnnnnnnnnnnnnnnnnnnnnnnnnnnnnnnnnnnnnnnnnnnnnnnnnnnnnnnnnnnnnnnnnnnnnnnnngctgcatatgcttgctgcttgagagttttgcttactgagtatgatttatgaaaatattatacac

SEQ ID NO: 38158 - DNA, 340 bp, Homo sapiens
  misc_feature (1)...(340): n = a,t,c or g
ccaaaacagagatatttcaattgctttaagagacatggaggtgtcttttctgacatactcacatgttcctgcaagataggatgaaaatgcgtgggtaaaatgcaatcaaaggaatgacttatttgtgtgcatcttacgatgacttgcgggggccctcccaagtaacttgtgaaacagggtgcatatcttttattattaaagcatgccaccccgtcaatgttgttttttgctccttaattggaatacaatacaactccctaatcgcctatcancngaaaacttggtttggcctccaaantttacttgtattgnaagtacaatgaaactgatttataaccat

SEQ ID NO: 38159 - DNA, 345 bp, Homo sapiens
gttaaaaacatataaggaataaacttctctgtaaaaaatgaatcaatcatttccctagggaaaatatggattgtctgtaaaattcacaatattgctttttgtaaactaaatcaaattctattttaacatgctagttttgcattcacaacttagagaagaggccaagtttaatcatagttatgaggaaacacatgttccaatgctttctagagatacgtgtaatatctaaattaatatattctaaaaaatatttgttctgcttccaaaatagaagattgcttataattattttaaatttagcctgcttatttcatgcttaagttggaggccatgagaattcaagtt

SEQ ID NO: 38160 - DNA, 292 bp, Homo sapiens
  misc_feature (1)...(292): n = a,t,c or g
gaaaaaaaggcataaataattcacacacagtgtggtcaacacttgaatgattaaaaaacattttaagtatatccctctaatttgttgctcttttattatttgtcttttaagcatttcctaggtgtaaggccctttgctgggcttgatggaaaggaagggacattcctgctcttagagagcggtagccatccataataaccaacttggatatgacgtccaaagngatgggggcaccnccnttganggcaggggaggacnnngnncngnnnnangngnnnnnnncnnnnttctg

SEQ ID NO: 38161 - DNA, 351 bp, Homo sapiens
gactgactttggcctctgcactggcttcagatggacacacgattctaagtactatcagagtggtgaccatccacggcaagatagcatggatttcagtaatgaatggggggatccctcaagctgtcgatgtggagacagactgaagccattagagcggagagctgcacgccagcaccagcgatgtctagcacattctttggttgggactcccaattatattgcacctgaagtgttgctacgaacaggatacacacagttgtgtgattggtggagtgttggtgttattctttttgaaatgttggtgggacaacctcctttcttggcacaaacaccattagaaacacaaatgaa

SEQ ID NO: 38162 - DNA, 344 bp, Homo sapiens
  misc_feature (1)...(344): n = a,t,c or g
caaatactaactgctagaagagaagactctgggttatactggtgcgaggctgccacagaggatggaaatgtccttaagcgcagccctgagttggagcttcaagtgcttggcctccagttaccaactcctgtctggtttcatgtccttttctatctggcagtgggaataatgtttttagtgaacactgttctctgggtgactatacntnnaganctgantagacngaacatgtgggattgannaatgtctatggannctggtcangagantacngtacnatgcnnccttcatnangacacacnttganacntactnntantggccnnnaccagaagcatgatctt

SEQ ID NO: 38163 - DNA, 349 bp, Homo sapiens
acaacccaagccctaggaaaagcagcgcagatagcacttcagctcggccatctcagatcccgactccagcgaataacaacacaaagaagcgagattccaaaactgacagcacagaatccagtggaacccaaagtcctaagcgccattctgggtcttaccttgtgacatctgtttaaaagagaggaagaatgaaactaagaaaattctatgttaattacaactgctatatagacattttgtttcaaatgaaactttaaaagactgaaaaattttgtaaataggtttgattcttgttagagggtttttgttctggaagccatattttatagtatactttgtcttcactggg

SEQ ID NO: 38164 - DNA, 342 bp, Homo sapiens
gaaactgcgcggaggcacagaggccggggagagcgttctgggtccgagggtccaggtaggggttgagccaccatctgaccgcaagctgcgtcgtgtcgccggttctgcaggcaccatgagccaggacaccgaggtggatatgaaggaggtggagctgaatgagttagagcccgagaagcagccgatgaacgcggcgtctggggcggccatgtccctggcgggagccgagaagaatggtctggtgaagatcaaggtggcggaagacgaggcggaggcggcagccgcggctaagttcacgggcctgtccaaggaggagctgctgaaggtggcaggcagccccgg

SEQ ID NO: 38165 - DNA, 343 bp, Homo sapiens
gagcagccggccttccgctctcaccagttccgcgtcggaatagacggtccttccccggggagtcagttcctccccgggcccctgagccatgcccatcgcagccgccccgaaggagccaggtgtaaattaattatttgaaagcaactgaacaatggagccagacatcattcgaatgtactcttcatccccaccaccattagacaatggagcagaggatgatgatgatgatgaatttggggaatttggtgggttttcagaagttagcccttctggtgtagggtttgttgatttcgatacaccagattatactcgtcccaaggaagagtttgtaccttcaaaccat

SEQ ID NO: 38166 - DNA, 333 bp, Homo sapiens
  misc_feature (1)...(333): n = a,t,c or g
cccacgcgtccgataatataggtcaagtatatagccttttggtgttttaacttgatccaattgtagaactttaggaattcagaccccgagatgttaaatgactgtcccctgttttaataggtttcctgagtttcagcataattgtcttagttcactgactagtttcttataagcataaccactggggggttacgtgcaaggatttcttcnnnnnnnnnnnnnnnnnnnnnnnnnnnnnnnnnnnnnnnnnnnnnnnnnnnnnnnnnnnnnnnnnnnnnnnnnnnnnnnnnnnnnnnnnnnnnnnnnnnnnnnnnnnnnnnnnnnnnnnnnnnn

SEQ ID NO: 38167 - DNA, 335 bp, Homo sapiens
  misc_feature (1)...(335): n = a,t,c or g
tttacaggtcataaggataatatattttccccatcaatgctgattctgagaaaagagcacgtgatccaaatgtgggcactgtaaaagaaaggacgtccacatgtctttacctacctaagtaaaacaggaagaatatcagnancattatccttaggcttagacaanggnncttgcttctngatgcntnatngntncctgaattcatgcanangcctgnccattcctggnannagnggntanctcataagtcactgtactccacanggcctcactgcaaggnctantggtagatgcnaattagaangcaggnannataacttttctgatgntgatgc

SEQ ID NO: 38168 - DNA, 137 bp, Homo sapiens
aatatatatctttattttaaaattatattgggatttatttgctcctcttatgaaaatgtataccataatacttaaaattattgcatgaaaacacatagctgtatagcatgaaataaatgttactttttttttttttt

SEQ ID NO: 38169 - DNA, 330 bp, Homo sapiens
ggaggcaacactgctgtccacatgacctccatttcccaaagtcctctgctccagcaactgcccttccaggtgggtgtgggacacctgggagaaggtctccaagggagggtgcagccctcttgcccgcacccctccctgcttgcacacttccccatctttgatccttctgagctccacctctggtggctcctcctaggaaaccagctcgtgggctgggaatgggggagagaagggaaaagatccccaagaccccctggggtgggatctgagctcccacctcccttcccacctactgcactttcccccttcccgccttccaaaacctgcttc

SEQ ID NO: 38170 - DNA, 336 bp, Homo sapiens
  misc_feature (1)...(336): n = a,t,c or g
ttttcattgtacctgtcccataaattttgcatgctcttttctttattttctgcaatgctttctccctcttttgttctcaatatttatttctgacctatcttccaattcactatattttcaatagtcctgtatgtcttattgttacatctatctgtatagttcttaatgtcagttctagaatttatattttctttgtttttataattttttgntcttcactgaatngtattgccttatttaatcttttaaacattttaatcactgatatcttaagtcctatcagataaatacaacaactgcatttctcatgtaattaaatgagtaaaaatggtcaga

SEQ ID NO: 38171 - DNA, 329 bp, Homo sapiens
  misc_feature (1)...(329): n = a,t,c or g
caagaagggcagcagagcgaaggtgcaccctgcacctgccaggacactgtccatccagcagggcgtgttgctctttccaatttcctttgcatttgtatacattttgtatagatctgggcttacagacagttctaaggaagacagcttttctatattctacagatgttgccaacagctttaaagaaattactcccacagagaacaaaaaaataaatgaataaggcaggttatgtttggtgtttctaaaaagaaatcatagactgtggnnnnnnnnnnnnnnnnnnnnnnnnnnnnnnnnnnnnnnnnnnnnnnnnnnnnnnnnnnnnnnn

SEQ ID NO: 38172 - DNA, 352 bp, Homo sapiens
ttcataagtaaaattttacatacagaatgattttttgctttgaagttgtttctattttaacaatatataagcatagaaacttgtctaatgtaacagtcatcaactatgaaccctggttatttttgattctgggaaattggctacttttctcttctgtcttgcctatttacttttttttcttttctttaaatattttaattaacttataaatattttattatttaattaaaaatttaaaatatgaaacgcttcacaaatttgcatgtccaccttgcgcagggggaccatgctaatcttctctgtatgagtccaattttagtatatgtgatgccaaagtgagcactattgaatg

SEQ ID NO: 38173 - DNA, 353 bp, Homo sapiens
  misc_feature (1)...(353): n = a,t,c or g
gcagaaattaagttgcttgcctggtacaaagccagtgagggaaaaactctatgagcaactcttaaagtgaaaaatctcatcaatacacaactgagtatactgccattgatcaactgctcttaaaatacttagataaaaatcactgctgtaggaaanagcanaacanaataatgattgaagcgngntttgctctgggatgcttacattngacgattnctgtcatacgctgngtaagttcatacctagcgctcaatcgtatttcattaccagactgctgcataattagagggaaaaagaaaattcatttgaacaaaccactttcacagatnaaccacaggattccacacttggct

SEQ ID NO: 38174 - DNA, 368 bp, Homo sapiens
  misc_feature (1)...(368): n = a,t,c or g
gggggcatgccaagttgggcatcactttgtcttagcaattaatgggatattgattactaaaataagttaatattaagcaaggtgccggttgtacaatctctgatcagtgtcttttcagcactttgagcatttacttggctcatttagtcttccttttgtagcgcatggttgggaggaaaaagtgcatgcatcattccttcactcttctctttttcccgcccccccctcccttcgcacataggcatttggtttgcttccatctttttttatgcagtgcctgnttttttttaaccaattaaaatcccttttgcngatgagctattganangctgcagtaattcgcttttaagactngnnggttgcncttt

SEQ ID NO: 38175 - DNA, 351 bp, Homo sapiens
  misc_feature (1)...(351): n = a,t,c or g
attttggtagacagaatataaaaacatacctcagggttgattttcatttacttcagataatagngtagaacacatctggggctgctttgttctgctggctttggttcctgtctgtgggactggagtcacaaaagaggacgggatcagaaaaccatggcttaaattatctatgatgccaggattggatttaagcaagttattttatcgaaaacacagcatatgtgaaaatggattatttacattcttataancaggatgcttaaatgaatgatnaaagncacacttacagtgtatgttcatccgtntntncactgctgatgaagacatactcaagactgggnnanttcataa

SEQ ID NO: 38176 - DNA, 347 bp, Homo sapiens
  misc_feature (1)...(347): n = a,t,c or g
agaggtttctttgtttctggcttctttggcagtgttgactgccagagtatgttagagtgactatttgtaatttgtatattcaatatgtatatttcttcagtataaaattctgctatccaagtgttaagttttagtggctanaanacataatgatatgntatggnggaagancncctttntccaccccancgnnggangagaccccnttcnatnccancacctatnctgactattcngcaccntgnnntntatctnnnnntccctaccangcttcgnaatnanctcccatatngtncntactaccccncncnncnnccncttcnnctncctccgcctnccctcctcta

SEQ ID NO: 38177 - DNA, 370 bp, Homo sapiens
  misc_feature (1)...(370): n = a,t,c or g
aatgtatattgatgtaactgtgtcaggattgaggatgaactcaggtttccggctactgacagtggtagagtcctaggacatctctgtaaaaagcaggtgactttcctatgacactcatcaggtaaactgatgctttcagatccatcggtttatactatttattaaaaccattctgcttggttccacaatcatctattgagtgtacatttatgtgtgaagcaaatttctagatatgagaaatataaaaataattaaaacaaaatccttgccttcaaacgaaatggctcggccaggcacggaggctcgngcatgtaatcctagcactttgggangcttaaaanggaagnatncttngaggccaaaaagtttg

SEQ ID NO: 38178 - DNA, 103 bp, Homo sapiens
cttttcactgcagcagtgtttatcagtagttcaaaatgatttatttgctcctggggagtaaaaccttttttattaaaaaaaagaaaaagaaaaaaaaaaaaaa

SEQ ID NO: 38179 - DNA, 364 bp, Homo sapiens
  misc_feature (1)...(364): n = a,t,c or g
cccacgcgtccggacactttgtataatttannnntatgtncttggattgttcctttttgaaatgtgaggatnatgccnttctaaatactattantttctggtgntactataatctcccaggactagttgntgaantcactattntnctaacanncngtngcctcnanancnnnttntnaaaccncancgaangannagannnnanganantccaacacntatngtnaatntnnngtcacnctgataggnatgaacattatcntaccactttncagaangagcctcnatagannatanttactactaangnanaggttagaacnagttcggatactcctactctgnnattnagctatcaaacttc

SEQ ID NO: 38180 - DNA, 381 bp, Homo sapiens
  misc_feature (1)...(381): n = a,t,c or g
ttaatgaatttttaagaagagagaaaaggaggaatgaaggttttgatgaaatggaaagccatatttgtcacggttccagaaaaagagtcatttgaattacatgtcctcctgctgtttggccctttctcagaggtgaacaatgaatcagatgtatttctctggaccctttcttattcagaagatgattagtttgaaactcatccaagcaacttatttcttctctttcttttggtgcctgacttttggccatttttctcattactactatgagagggagattaaaaaagacaaagaagtcagncntgattattaaaagcagntacaacatggttnattgagttcagaagtgaaaatattacataanacaaaatatctttattc

SEQ ID NO: 38181 - DNA, 383 bp, Homo sapiens
  misc_feature (1)...(383): n = a,t,c or g
atttgaagaataccaagaaagctcatatttttctcagtttttacaatggaaatggctggaaaggtttgcgcctgtcaagtgcgagccacaggaaaaatgtatgcctgcaaaaagctacaaaaaaaaagaataaagaagaggaaaggtgaagctatggctctaaatgagaaaagaattctggagaaagtgcaaagtacattcgtagttagtttagcctacgcttatgaaaccaaagatgccttgtgcttggtgcttaccattatgaatggaggggatttnangntnnntnncnnncnccntnncccatccngcctccgatgancnctanccctntantnnttnctnccnnncntntnncntccncctcnnnngnctncctctcg

SEQ ID NO: 38182 - DNA, 374 bp, Homo sapiens
  misc_feature (1)...(374): n = a,t,c or g
tgggattcagaaaatcagaacctgagtcaagcgagtgaccctcagcagcactgaagaaccagggaatgaacagtatgaggttgcacaacaaaaagcttcacatgaccaagaatatctttgtaacataggggaccttgagcttcctgaagaaaggcaacagaatcaacacataattgttgatttggaagctacgatgaaaggaaatgggctcccacagaatgtggatcctccaagtgcgaagaaaagtattccatcttcagaatgcattggctgctcaaattcagaaacatttatggaaatcgatacagctcaacagnccctagntactttgnttaattcaacangcangcanantgccaatgtnagaacattgc

SEQ ID NO: 38183 - DNA, 382 bp, Homo sapiens
gaccatgactaacttggctcttgggcattgttttagagggcgaaaggtttaaagcaagaatgcagcatggtaggattctctgcagagatgatccatggcctaaattatgaactgctatattaaataacttttacctgattttatttctcaatattgctctgtgtcaagagctgtaaaaggtctaagatgttacccttcttgaaaactagttttctgaatgctggcagaagacatgagactcctgggtcagacaacagacttaattatttagaacatagcaagcaacatgagtttgagccacagatcccatgggagtgacacagggcaagctaggtggatactgcacatgcagtgggtttgcgtcacagcccaaatctaatga

SEQ ID NO: 38184 - DNA, 382 bp, Homo sapiens
  misc_feature (1)...(382): n = a,t,c or g
ggcagggatacccagtgatgtcaggaggaatagtacagacagaaggtgctaagcagacaattcaactgccatgttttgccaccccctgtgagcagggattaggtgttcaggccagtatcttgggcatgggggagcctttggccagaagaggtataaagctcagaagtttttcagtctgataactattgatataatttccatagtgtgagggagcggcatgctctacccttgtgtatttaaggcaggacagagaaattgaggatgcccctggggctagatcgatgatatgaccagaaatcaaaaagggaatgcattatttattgctgtgtaacactgttaagagaggaggtagntaagggatcgattngtncatnnncngggg

SEQ ID NO: 38185 - DNA, 354 bp, Homo sapiens
gcaggggcagcgacgcggaagatgactcagggcccactttgaacctcctgggtacttgagcaagctcaagggtgttcggacctctagggagacgttgcatcacgcagtttggaaagaacttgggaattctccctggggggctcgctgtatttactgggaactagtcttgcaggaaggcttatgtacagaagtacgtcgtgaagaattatttctactattacctatcaattttcagctgctttgggccaagaagtgttctacatcacgtttcttccattcactcactggaatattgacccttatttatccagaagattgatcatcatatgggttttggtgatgtatattggtcaa

SEQ ID NO: 38186 - DNA, 361 bp, Homo sapiens
  misc_feature (1)...(361): n = a,t,c or g
ccctgtagtcatccatatattggtaccctgagtcaagtaaagttgtactccacaaatgttcagaaagaaggacagggatcacaaacactcagagtggaaaaagtaccatcatttgaaacagcagaaggtataggcgcagaactcaaagctccacttaagcaagaacctctccaagtaagagttaaagcagtccttaagaaaagggagtatggatcaaagtcactcagaataatttcatcactggaagtcaggagcnataaatgagttctgcctcaaatccagcgatctagaacaacttcgaaaaatcagacgacgaagtccccatgaagatactgagtcttttactgtatacttgagatca

SEQ ID NO: 38187 - DNA, 348 bp, Homo sapiens
  misc_feature (1)...(348): n = a,t,c or g
cctctgatgacaagagtagttgaaaggagtagttctatgacttcaacaatgacaataggcaagtttatgctagctcttgccttctttgctataattatagcttacttctagttgtcctattgtcactgccctgtttttcattgggaagcttatctacagatgccttcagaatctgacgagattgactctcagtttcatattgcccagaaatctactttaatgtctctttcgaaagcattaattcactttcctttttcctacaatgaaacctgttttccatttgtattaactcatctcccttccactcatgatccgtcactcttccttgnggnaatccctagactgggg

SEQ ID NO: 38188 - DNA, 356 bp, Homo sapiens
  misc_feature (1)...(356): n = a,t,c or g
cccacgcgtgcgattcacattttttgggttgatcttgggggcatttaggtaatgaatctattcgagaaatctatccttttgacccagggtatcaaatttgcagacatgaggttatttataatggtcccttgttacccttttaatgactttaggagctgtgttgannattnccttttcattatgatactggtaattnctgtnntcactttnctaatcanggtgggtagggggttatcancnttactgatcngnctttttatngcntcttatntnttttgngacagccttacnctgnntnccangntggnncgcagagnctncganctnggcttactgcnagctctgccttncgggcc

SEQ ID NO: 38189 - DNA, 326 bp, Homo sapiens
ctctttactcccctgtgagtgattcactgccttgtcattattacgatagatgtgtttgtattgttttttttctgatgatactgatgttgatgaatttttaattttatttgatgtggtagagttgggaggtttcagggttttttcccctcttttactttccattgaggaagggaatgagctcctttctcctctccttcagccaatcattatcaaatgttccttcagccctgcagttgccccaaataaccttttttcagcatcctctgtcctcagtcatgccagtctggacatgctctgttgtgccctgtgacaaaactgctcagtat

SEQ ID NO: 38190 - DNA, 337 bp, Homo sapiens
atttttattactgatgatttaaaagattacacattaagtgaagagattaaaaaatagacaaacatgtcaactcaactaatattttatttaaatcaataaatgatgatatttaggtatgtagaggaccttaagaatagggtttctgtaaagagaaatacacactacacactgaagaaaagaatgaccaagagcattactggagctgattgaaagaattactagttagtcctacggggtatatttcccataacacagaatgaagcacgtagctggaactaagtagatgcttgctgaattgaaatggagcatttgagattgtaattagagacagtactag

SEQ ID NO: 38191 - DNA, 340 bp, Homo sapiens
  misc_feature (1)...(340): n = a,t,c or g
cccacgcgtccgcaaatcctctttgtagaaagtgcctattatcaagtttttaaaaaaagtcacaaagagttgtcctgtatatagctagtcccttaaatgataaggattgagaataaaatacacattcacttgtaagaacccaggagaacttatttcttttgactaaactgtattttaggaagtcgttcagggaagcatacttttcagtcagggcatgcacagcatttagtatggggagcaggggaggcngngattgcangnnngagccaccacngtgagactttantatnattancnggaccatntgggcctngntgttgcnatgnggctnangatgatg

SEQ ID NO: 38192 - DNA, 343 bp, Homo sapiens
  misc_feature (1)...(343): n = a,t,c or g
gttttactcnnnnnnnnnnnnnnnnnnnnnnnnnnnnnnnnnnnnnnnnnnnnnnnnnnnnnnnnnnnnnnnnnnnnnnnnnnnnnnnnnnnnnnnnnnnnnnnnnnnnnnnnnnnnnnnnnnnnnnnnnnnnnnnnnnnnnnnnnnnnnnnnnnnnnnnnnnnnnnnnnnnnnnnnnnnnnnnnnnnnnnnnnnnnnnnnnnnnnnnnnnnnnnnnnnnnnnnnnnnnnnnnnnnnnnnnnnnnnnnnnnnnnnnnnnnnnnnnnnnnnnnnnnntaattttattattataaaaaattgagccagggtcttgctatgtggctcaggctcatctcaaaatcct

SEQ ID NO: 38193 - DNA, 363 bp, Homo sapiens
  misc_feature (1)...(363): n = a,t,c or g
gagccaccttttagctgcggaatctaaggtggtgttctaggctatcagactgtaaaatagtgaattcttaagttgttgagaagttgaaaataaattcatgtcttcttcttgttaaatttgctttaatgtgtttctggcacctaataggatttgatttgcttttagttctataactttgtgctactatacnattaataaaaaatggcntgattgttgtanaatttggggatttacttttttgcatgccatattnattctacctggtttgaaaaagttncagaatgccgtatacgtcacagntaaagngtttgatgtanaactncaaattanganccnnnanagaatctnctaggttgcattatt

SEQ ID NO: 38194 - DNA, 353 bp, Homo sapiens
gtgtatgttcaaaaagaaaagaatttaagccagttacatctttgaaacatttgcaaatgttaaaatagctattttaggccagaatcaagattactttcttttccttcaaataatgtgatattcagtcacacgcttggagcagtgtccttgccagaagccaggagtcttatccatcagaaatcctggaactgttgcgtttttggcatctactgtggaatctggtctggcttcagcagtaatggtgaggtggcctttgcataatgtggaagctttagcttatctcagtaagtggtaaattaaaagagtttctatttaaagtgttccggcagtgttttaatgaattaacctcagcc

SEQ ID NO: 38195 - DNA, 366 bp, Homo sapiens
tgacaacctccaccatcctgccagccccaccaggctgggtaggttgtcattcctgaagtctcccaggtcggagatgggggcatgagagtccagaaaactgggtgaagctgcctttcacataatagatctatccagaacactgtcccctccacccacctcaggctgccagacgcccgagggcagtgcttgggcagcaagaaggggagcggcaatggcagagcagcaggagtaaggaagtggggagctaccagtggccgggtctgctctgtgccaggggctgccaggccaatctgagagaggggagaagaggacagagagatcccagtggttgggcactgggggaagtgagccccttggaggctgaac

SEQ ID NO: 38196 - DNA, 373 bp, Homo sapiens
  misc_feature (1)...(373): n = a,t,c or g
gtgaataatgctatcataaatactggcatccacgtatctgcacttatttcagcctntgctttcantncttttgaanatnnncctangcaatggaattgcngggncntaangnaatnctataactttctgaggacnaattanactgntntccacagacggctgcaccatttcatattcctaccagnaataacaagggttcaaatgtctcantatctttgccancaatnntgccttttccatttttncnnnnnnnnnnnnnnnnnnnnnnnnnnnnnnnnnnnnnnnnnnnnnnnnnnnnnnnnnnnnnnnnnnnnnnnnnnnnnnnnnnnnnnnnnnnnnnnnnnnnnnnnnnnnnnnnngggccttnacctcc

SEQ ID NO: 38197 - DNA, 363 bp, Homo sapiens
  misc_feature (1)...(363): n = a,t,c or g
gaaaacaaaaacagaacacttctagcccccatccaatcaccctggcacagaagtaacctctgttgtaatttcatctcatataaaaggagtcatgcagaatgtagccttttgagtctggcttcattcagtaaggatgttgcaattagtaaactgtagnnnnnnnnnnnnnnnnnnnnnnnnnnnnnnnnnnnnnnnnnnngtngnccggnnttganggcgtncccctgnggnccnggttaccnggnnggntgaaatnggaggatcgttngaccccagggnggccgacnntgcanngaccggggatnnnnnnnnnnnnnnnnnnnnnnnnnnnnnnnnnnnnnnnnnnnnnnnnnnnnnnnnnnn

SEQ ID NO: 38198 - DNA, 355 bp, Homo sapiens
cggacgcgtgggcttgtgctaagaaagtaaatgtctacatcatgaaaaatatctcataagattaatttcttttccattttccttcagttttaaatgatgtaatatagtaatctttataacatgatcagccaagtataatttgagaagtcagttctgttggcaaatatctgaaggacaaaaccaaagccaccctagctgaggtttttgtcccttccttctttcatttaccaaaaaccttaattgggttaacagtaggggaattttagaaatcatgttttcctaatgtaacctgtgaaacaaaagcaaaatagattaaggcaaggggaaaaatgaacttaccaagagtgttcttttt

SEQ ID NO: 38199 - DNA, 336 bp, Homo sapiens
  misc_feature (1)...(336): n = a,t,c or g
nnnnnnnnnnnnnnnnnnnnnnnnnnnnnnnnnnnnnnnnnnnnnnnnnnnnnnnnnnttagcagnnnnnnnnnnnnnnnnnnnnnnnnnnnnnnnnnnnnnnnnnnnnnnnnnnnnnnnnnnnnnnnnnnnnnnnnnnnnnnnnnnnnnnnnnnnnnnnnnnnnnnnnnnnnnnnnnnnnnntgcagatgggttgtagttttaaacagggtagtcacggtgacctcattgaaaaggtaatgtgagcaaagactcgaaggaggtaaggggattaccatgtggatatctgtaagaagattgttaataggcagatgaaacggtgcaaagctccgaagc

SEQ ID NO: 38200 - DNA, 345 bp, Homo sapiens
aatatattctctttggtgtacaaaatggaactcattctggtctctctattaccactgaagatagaagaaaaaagaatgtcagaaaaacaataagagcgtttgcccaaatctgcctattgcagctgggagaagggggtcaaagcaaggatctttcacccacagaaagagagcactgaccccgatggcgatggactactgaagccctaactcagccaaccttacttacagcataagggagcgtagaatctgtgtagacgaagggggcatctggccttacacctcgttagggaagagaaacagggtgttgtcagcatcttctcactcccttctccttgataacagcta

SEQ ID NO: 38201 - DNA, 387 bp, Homo sapiens
caaaaggcaattaagcttaagtacaaaaacaaaataaaaatgaacaaaatctaaactaaagtgagcccaacaacctgagatacagcaatgtgtaacctgaaggaagataggtgtagactgaaggagtctttcaaaacaccccagcattaaatctcactctgcgctgcttctacacgtgattatagtcccagacagacgacctcatggttttttatcttgttttacaaaaggtccttgggtactctttaaaacatctattctttggcaggaaaattagctcattagaacaatgacaccattaagggacattataagggtcctggggctgaggtgggaagatttttctatctgccccatatagtttacccttccttgccttgaaaaaga

SEQ ID NO: 38202 - DNA, 378 bp, Homo sapiens
ctattctgaacaagtaaatccatccatccatccatccaaacctcctttatctaactgtgtctactaaaagcaccatgttttgtggggaacactcagataaatggaatatcatcctcaacttcaaaattctatgatctaggagatttaattaaaatgacattttaatttttctatgcgttccaacaatcagattgcatagtctcttttgtgaatagctgtcatataatcagttgtactgtaagatatctcctttaaactcatttgggatataagttaaacatccttcaaattgttgatgttgacaaacaggataatttcaataatattattcaaacataaactggtctaggagaatattgcatcactgactaattagcc

SEQ ID NO: 38203 - DNA, 358 bp, Homo sapiens
  misc_feature (1)...(358): n = a,t,c or g
cccacgcgtccnnnnnnnnnnnnnnnnnnnnnnnnnnnnnnnnnnnnnnnnnnnnnnnnnnnnnnnnnnnnnnnnnnnnnnnnnnnnnnnnnnnnnnnnnnnnnnnnnnnnnnnnnnnnnnnnnnnnnnnnnnnnnnnnnnnnnnnnnnnnnnnnnnnnnnnnnnnnnnnnnnnggacatagaggagttgggggcagaggggggaggatgagagaattttccatgtaactccttttccttaagaaaaagaagcaaaaatccctcatgcagtgccatntgactttatggtgtttacattatatagttactttttttaatanacgcataagattaactcttnctgcatcccanggtggat

SEQ ID NO: 38204 - DNA, 352 bp, Homo sapiens
  misc_feature (1)...(352): n = a,t,c or g
agaaggtcaagaagaagggggaatggaaggtgctggtggtggatcagttaagcatgaggatgctgtcctcctgctgcaagatgacagacatcatgaccgagggcataacgattgtggaagatatcaataagcgcagagagccgctccccagcctggaggctgtgtatctcatcactccatccgagaagtccgtccactctctcatcagtgactttaaggacccgccgactgctaaataccgggctgcacacgtcttcttcactgactcttgtccagatgccctgtntaatgaactggtaaaatcccgagcagccaaagtcatcaaaactctgacggaaatcaatattgcatt

SEQ ID NO: 38205 - DNA, 364 bp, Homo sapiens
cgactgatagtgtgcccagcgatgaagagagtgccgaggggcggccacactggcggaagaggaatattgaaggcaaacagtacctcagcaacatggggactcgaggctcctacctgctgcccggcatggcgtccttcgtcacttccaacaaaccggacctccaggtcaccatcaaagaggagagcaatccggtgccttacaacagctcctggcccccttttcaagacctccccctttcttcctccatgaccccagcatccagcagcagtcggccagaccgggagacccgggccagcgtcatcaagaaaacatcggatatcacccaggcccgcgtcaagagctgttaagcctctgactctccgcg

SEQ ID NO: 38206 - DNA, 363 bp, Homo sapiens
agagctcccgcgtgaggctgctgcccctcctgggcgccgccctgctgctgatgctacctctgttgggtacccgtgcccaggaggacgccgagctccagccccgagccctggacatctactctgccgtggatgatgcctcccacgagaaggagctgatcgaagcgctgcaagaagtcttgaagaagctcaagagtaaacgtgttcccatctatgagaagaagtatggccaagtccccatgtgtgacgccggtgagcagtgtgcagtgaggaaaggggcaaggatcgggaagctgtgtgactgtccccgaggaacctcctgcaattccttcctcctgaagtgcttatgaaggggcgtccattctc

SEQ ID NO: 38207 - DNA, 367 bp, Homo sapiens
ggaagaggtccagtccagcttgagaatcatgaatgcgctgagtcacaaggaaaaggagaagttcacaaaggccaaggagctgatttctgcggatttagaacacagcctcgctgagctctcagagctggatggagacatccaggaagccttacgcaccagacaggctaccttgactgaaatatatagccagtgtcaaaggtattatcaggtatttcaagcagccaatgactggcttgaggatgcccaagaaatgttacagctggcaggcaatggcctagacgtggagagcgcagaggaaaatctcaaaagccacatggaatttttcagtacagaggatcagttccatagtaacctggaggagctccac

SEQ ID NO: 38208 - DNA, 361 bp, Homo sapiens
ccgtgataactttctcctatattttcttataggacaaacattttgtatattttgtttatggtattaagaattgaagctcctttttagcccatatggatatcaagttgttctagcacccttaaaacagaaacaaaagcaaaagactaaacttattccattcaattatattggattgttaaaacaaaaatcaactgaccatatacatgtgggtctgtttctggaatatttataatgttctattattctataagtttatatttataccaaccatactgtcttggtagttttataataaatcttgaaatcaaatagtgttagcccaacattttctttttcaaaattgttttgactattcttagtt

SEQ ID NO: 38209 - DNA, 362 bp, Homo sapiens
gggaaataagagtctgaaataggtcattagtgggtgacagcaaggcttgcaaatgttttgagaaaaaagatgaaatactttgacagctatgaagacatagaaaacttaaaaaaaggaaacaacccttcaaaaactttattttgatattcttaaagtctgatagaaaaattggagaaggtctttaggcaagagggtagaatcatggaaataggataactaatgcatttttcatcctttttacttttttagcttctatacttgtggatgaacacaaatataattaaaatgaaaacaacatattaaaccctactttttggcatttcagatatgaagacacaggtctctacactgccaagtgactt

SEQ ID NO: 38210 - DNA, 363 bp, Homo sapiens
cggacgcgtgggcaaaatataagaccaaagatattctattgtcctacaaaagggcgtcaaggctcatacatgaatttggagatattttacttcaaataaaagtatgttctgtcttaaaaaaaaaaacaaactgatcagccttcacttgaagttaactacaaaaaaaggaatatataaatagcaggattggctggtctagcccactgttctgaatgccatattgctgttgcattcatttcatacagtaataggctgttaaatctgaaaggaagcttacccccagaatggcaaatcactttcattaaaaaagccaataacagtgggttggtggtggctgcctggagcccaaaattgaaaaggatt

SEQ ID NO: 38211 - DNA, 360 bp, Homo sapiens
cggacgcgtgggcggacgcgtgggggcatagaagtgtattaattagcataaaagttggagatgaaaaccctatagaaacaaattggccaatattatactaattgaatgcagaatgtggcattctattcccattcaactaataatcagcttcaactgacaggaatttgcacagaatgttacacaataccctgtttcccaagaaagtactaccttacctagagatgatctaagatatttttgttcatcctctgaataaggtgagactaaagggtgctaactccctggacctggctgtgaatggctactgaagagtatcaacacaactgttaattataccgccgtgctttaagtttaagactt

SEQ ID NO: 38212 - DNA, 356 bp, Homo sapiens
  misc_feature (1)...(356): n = a,t,c or g
ctgcgaccgggaccaaggcggagcaaagtcgccgggggtgtggggtgttccacgctatgttgggagtgttcgctttcgaggtacatgactacgttctaaannnnnnnnnnnnnnnnnnnnnnnnnnnnnnnnnnnnnnnnnnnnnnnnnnnnnnnnnnnnnnnnnnnnnnnnnnnnnnnnnnnnnnnnnnnnnnnnnnnnnnnnnnnnnnnnnnnnnnnnnnnnnnnnnnnnnnnnnnnnnnnnnnnnnnnnnnnnnnnnnnnnnnnnnnnnnnnnnnnnnnnnnnnnnnnnnnnnnnnnnnnnnnnnnnnnnnnnnnnnnnnnnnnnnnnnnnnnnnnnnnnnnnnnnnnnnnnn

SEQ ID NO: 38213 - DNA, 350 bp, Homo sapiens
ggcagctggtggatgcatctcagatcccggttcctctcggcgaatgctgcttgcgaatgtgtgcgacgccttccgtgtgatggaaacacactaccccgtcggacttcgaatttctacgtggatgtgcatgaagctcttgttttcgatgtgtgtttgtaaagggaaaattagtactctgctcgactcttggtaacatgaaattctgaatgttactttatcatgattgcactgcaactttttccttaaaataactgcttttgtaagaacggtgatattggagtgattagtataaattcaatggaatttgagaagcaatggcagcgggataatttagagtcactgatattacc

SEQ ID NO: 38214 - DNA, 350 bp, Homo sapiens
gcaggacaagctgagcattgaggatttcacagcatatggcggtgtgtttggaaacaagcaggacagcgccttttctaacctagagaatgccctggacctggccccctcctcactggtgcttcctgccgtcgactggtatgcagtcagcactctgaccacttacctgcaggagaagctcggggccagccccttgcatgtggacctggccaccctgcgggagctgaagctcaatgccagcctccctgctttgctgctcattcgcctgccctacacagccagctctggtctgatggcacccagggaagtcctcacaggcaacgatgaggtcatcgggcaggtcctgagcacac

SEQ ID NO: 38215 - DNA, 355 bp, Homo sapiens
accaggcgggccagcccagccagaagccaggagcctcggaaaacatcctgggatggcacgggtccaagtcacattccacagagcagctgaaaaatgggacacttggctctttgccatcagccagtgccaacataacctgggcaattttaccaaactctgctgaagacgaacaaacctcacagccagagccagagccaaactcaggctctgaattggttttgtctgaagatgaaaaaagtgacaatgaagataaggaagagacggaattgggcgtcatggaggatcagcgtagtataattcttcatctcatttcacaactcaaacttggaatggatttgaccaaggtggtgcttcc

SEQ ID NO: 38216 - DNA, 355 bp, Homo sapiens
  misc_feature (1)...(355): n = a,t,c or g
gaactctcccagttgcccttggtggggtttccacctggcttttggctacagagagggaagggaaagcctgaggccggcataaggggaggccttggaacctgagctgccaatgccagccctgtcccatctgcggccacgctactcgctcctctcccaacaactcccttcgtggggacaaaagtgacaattgtaggccaggcacaagtggcttaacgncctgtaatcccagcactnttgggaggccaaggcgggtggattacctccatctgtttagtagaaatnnnnnnnnnnnnnnnnnnnnnnnnnnnnnnnnnnnnnnnnnnnnnnnnnnnnnnnnnnnnnnnnnnnnnnnnnt

SEQ ID NO: 38217 - DNA, 344 bp, Homo sapiens
  misc_feature (1)...(344): n = a,t,c or g
gtgacaagcacaaacgctgccaagatcttcaacctgtatccccgcaagggaagaatatctgtgggttctgacagcgacctcgtcatctgggatccagatgctgtgaagatcgtctctgccaagaaccaccagtctgcggcagagtacaacatctttgaagggatggagctgcgcggggctcctctggttgtcatctgccagggcaagatcatgctggaagatggcaacctgcacgtgacccagggggctggccgcttcataccctgcagcccgttctccgactatgtctacaagcgcattaaagcacggaggaagatggcagacctgcttgccgtcccangggg

SEQ ID NO: 38218 - DNA, 339 bp, Homo sapiens
  misc_feature (1)...(339): n = a,t,c or g
tgacctcacactatacacaaaaattaacttaaaatggataatagacccagctgtaagagttaagactataaaagtcttcaaagaaaacataggagaaaaatcttcattcctttgggttaggcagagttttccccaaaacaccaccaaaagcttgatcaataaaaaataatacattggactgcatcaaaatttaaaatatttgcttttcaagacatcattaagaagatttttttaaagcctcaggctgggagaaaatacagtcatgtggcagctaatgaccaggttactttctgagaaatgtgccattaaacattgncatcattgnatgaacatcataga

SEQ ID NO: 38219 - DNA, 338 bp, Homo sapiens
  misc_feature (1)...(338): n = a,t,c or g
catgcatctgctattgtgttgggttggtttcctctcttttccacggacagtgttgtgtttctggcatagggaaactccaaacaacttgcacacctctactccggagctgagatttcttttacatagatgacctcgcttcaaatacgttaccttactgatgataggatcttttcttgtagcactataccttgcgggaatttttttttaaatgtacacctgatttgagaagctgaagaaaacaaaattttgaagcactcactttgaggagtacaggcaatggtntaaaaaattgcactnaanaanaatgantgtcnaaangattcattcagtgnttgaaa

SEQ ID NO: 38220 - DNA, 340 bp, Homo sapiens
ggcatctggacttgttccagcccagcccaccgggtgacatcaccgggcagggaggggtgctggtggtggttcatacggagtaagctgctctgcctgtgtgagtggctcctgggccctaaacaggcacctttaggccatgggtcactcaccgtgagccatcaatgtgctctggtctgacatggtttctctctgtcttctagtctagacctagtttttttgttctgttccccacgtatggatatagtagagattgttgtctgtgaaatttctcttttgtagattttgagttttcccttgtagtgtaaagaatgatcactttctgtaacaataacaagaccac

SEQ ID NO: 38221 - DNA, 377 bp, Homo sapiens
  misc_feature (1)...(377): n = a,t,c or g
ctttggagttcttattcagcaaatattgattgcaagcccaccatgtgccaggcatcatgcctggggcttgggatccagagatgaagagacagtcaaccaagtccatcaggctctgccaacccctgtagtgtgagtggtggttggagcacgtgttatacccccaaaaggtgggcttggccaagcccttccacttaccagccatgtgtccttctggatggcagtttcctcatctgcaaaatgtgtgtagccctaagacctgtcacccaggaccatttgggaggtcagctgttgttttgcaggtgaaaagatccatctggtctctgggcctggcactctatctataaaangaggctctactccagcatgtcccaccgtgg

SEQ ID NO: 38222 - DNA, 374 bp, Homo sapiens
cacctcaataatagggtccatccaactcacagacctaattaaaggaggaaatgggacataagtccaataagtaaaattttgagttgcttttacagtagggaggcttaccgccacagtaagtaccaccatcatagccaccattaggttactagttgtttttgatttgttctgtgctctcagattgtcctctgccatctgtgccagtttcctgatttgtccccatgttggagggtctgcctggtgagtattcttggtcttttcctttgtctctgagattttcattcatgccatcactcgtatagggagttctggctcttcccagagtcctctcttcctggtgtggctcatgatagaccttcagatggttggtgggc

SEQ ID NO: 38223 - DNA, 366 bp, Homo sapiens
caaggatttcacaagaactaaatgggtaaaaaatgccctggaagtgcatggggtagctattttacagagttacctctgctatattgttggtctgattcctcttgcagctgtgccttcaaatctgacctgtacactgttcaggtgcttgtttttaatagcatttgtcaccttctttcactgctttgccattttacctgtgatactgactttcctgccaccctctaagaaaaaaaggaaagagaagaaaaatcctgagaaccgggaggaaattgagtgtgtagaaatggtagatatcgatagtacccgtgtggttgaccaaattacaacagtgtgataatgtctgcttggcatattttcaccttaggc

SEQ ID NO: 38224 - DNA, 358 bp, Homo sapiens
ggaatacacagaaaggagaaaatacttggaggaaatcatgagagttttctgctttccaggctggagaatcattttctgaaactgtcataaagaagagaactgcagagaaaacacccagattgcagatgctggtagttctcagagaaagaggctctgtccctgctcataaagcaccttgtgtgggttaggaaaaggcacccccctgggtgcacagcttggtaactggagcacagttcacatccagctcttattacccgcttcgtccaggcactcatgtggagtgcacaacccatacaaccatacagagccgccttgcacaagccctaccaagtcctagaagaggcaaaaaaaaaaaaaa

SEQ ID NO: 38225 - DNA, 366 bp, Homo sapiens
gtagaacaagtcagccagttggctgtgttcatagaggcagcattagactatcacagacagtccacagagattctgcaggagctgcagagcaagctacagatgcgaatatcagctgcatccagtgtccccagacgagaatacaagccaaggcctgtgaaaaggagttctagtgagctcaatggagtttccaccacctctgtagtgaagacgacaggttctaacattcccatggaccagccctgctgtcgtggtctctatgactttgagccagaaaaccaaggagaattaggatttaaagaaggggacatcattacattaaccaatcaaatagatgaaaactggtatgaaggaatgatacacggagaa

SEQ ID NO: 38226 - DNA, 381 bp, Homo sapiens
gactcaaacagcatttcagaatttcttttgctcaaagcaacattactgttcgggatggcaccataaaatttgtaatttaaacttccatgtcagttgagcttctgtgtcgtttaattacttactcaaaatacaaatcaacatttaaagaaatatattttatatataataaatatcacaaaatatctcatctgacaaaactgcaactagaataggtaacatgggaatttccttatgaattcttatctcttatgcaaacattctagccaatcaaatagatctttcaatacgtgcagtgcctccgtagtgatgcctcatgctaactaactcccttcatcggtaagttatcactgctttaaaccttcagtctctgccatccatttg

SEQ ID NO: 38227 - DNA, 301 bp, Homo sapiens
gatttgtgttttcagtgtgtggggaagctgtcctgggggctggggcgacagatagcacataggctgtttctggggctgcaggggcttccctgagctggatgttgtgggtgttgccgtgcttcaggaagtgtggcgaccagaaagcgtagacccggggcccagggtctgcccgcccctgcagcctggcctccccgcacaggctgtggcttgcactccagccgctctagtctctcaggaatttgcttgttacttgtactgtgtaaataaagcttcctggttcaatacccaaaaaaaaaaaaaa

SEQ ID NO: 38228 - DNA, 375 bp, Homo sapiens
  misc_feature (1)...(375): n = a,t,c or g
attgattgaatgaacctgatctctagagtagaccattattagtggctcttttgaaggaacagtattaaagccattccctatagctcaggtccatggcgcctaagtaggtaaaaaagttgaaagaaattattaagaaagacatagtaagtcttgaagtcaagtagtatcagtcctccaactttgttctttccactcaatgttgagtttattattctggatttttgcttctccaaactttggactcagtttgttgatatgtacaaagtaaattactgggattttgattatgattgcaagcatcaatggaaagaactaataccttgacaatatttagctttcttatcatgaacaagaaatatctgncattattaagtt

SEQ ID NO: 38229 - DNA, 358 bp, Homo sapiens
  misc_feature (1)...(358): n = a,t,c or g
actacttgctcctgttttttcatagacgggtcctgctgttgctcaggctggtctcggattcctggcctcaagcaactttcctgccccagctcctaaagcggccagggttacaggtagccgccttgtctgtcccgtttcgaccatattttatttttgagaannnnnnnnnnnnnnnnnnnnnnnnnnnnnnnnnnnnnnnnnnnnnnnnnnnnnnnnnnnnnnnnnnnnnnnnnnnnnnnnnnnnnnnnnnnnnnnnnnnnnnnnnnnnnnnnngcnggtgnggaccaccatgtctgggtaatgncanttatttntatcnnatatggaggnnttgnnatggntnncnaaggntgtctcg

SEQ ID NO: 38230 - DNA, 360 bp, Homo sapiens
  misc_feature (1)...(360): n = a,t,c or g
ctttgtcagtgcacaaaatggcgccctacagcctactggtgactcggctgcagaaagctctgggtgtgcggcagtaccatgtggcctcagtcctgtgccaacgggccaaggtggcgatgagccactttgagcccaacgagtacatccattatgacctgctagagaagaacattaacattgttcgcaaacgactgaaccggccgctgaccctctcggagaagattgtgtatggacacctggatgaccccgccagccaggaaattgagcgaggcaagtcgtacctgcggctgcggtcggaccgtgtggccatgcaggatgcgacggcccanatggtcatgctccagttcatcagcagcgggg

SEQ ID NO: 38231 - DNA, 360 bp, Homo sapiens
caaataaataaattctcacagaagaattctaaacaaaatacgtaaattctcccaggaggtggagtttaattccttctcccattgagggtggactggaattagtgattcactttttttaaataaaaggatatagaaagaggaaaatagcaactttagagtagagagagctaacacgaccttaaccaagtaatcaacgttaacatctccaaagatgtcattggatgtcatgtacctactaatacaatgaaaggggtacatcttccctgacattcattcagaaacccataacctcagtctaatcatgagaaaaacaacaaacaacataaacacaggagcaaaattcgaggaactttctacaaa

SEQ ID NO: 38232 - DNA, 336 bp, Homo sapiens
  misc_feature (1)...(336): n = a,t,c or g
ccagcagctacaggataactgctaatctgggtatatctgtctactcaggaggtcagagttctggttatgtaagacttttatgatcttaacaggaagcctatcctatgcttctctgacttgggaggcaactgaagccttgacatctaagttctgtacccaagttagccatcagagagtcttgacataccatttttacctaaattccttaacagataatgaagaatatgagatctttgttcttggtgcttaaaaggtagtaagcacttacacagcttcttcccattcaggacatagaagaantatccgttggagtgggtattcatcnttgnancttag

SEQ ID NO: 38233 - DNA, 299 bp, Homo sapiens
  misc_feature (1)...(299): n = a,t,c or g
actagttctagatcgcgagcggccgctctagaggatccctcgaggggcccaagcttacgcgtgcatgcgacgtcatagctctcnnnnnnnnnnnnnnnnnnnnnnnnnnnnnnnnnnnnnnnnnnnnnnnnnnnnnnnnnnnnnnnngatctgctagcttnnnnnnnnnnnnnnnnnnnnnnnnnnnnnnnnnnnnnnnnnnnnnnnnnnnnnnnnnnnnnnnnnnnnnnnnnnnnnnnnnnnnnnnnnnnnnnnnnnnnnnnnnnnnnnnnnnnnngctgcatatgcttgctgnttga

SEQ ID NO: 38234 - DNA, 332 bp, Homo sapiens
  misc_feature (1)...(332): n = a,t,c or g
actagttctagatcgcgagcggccgctctagaggatccctcgaggggcccaagcttacgcgtgcatgcgacgtcatagctctcnnnnnnnnnnnnnnnnnnnnnnnnnnnnnnnnnnnnnnnnnnnnnnnnnnnnnnnnnnnnnnnngatctgctagcttnnnnnnnnnnnnnnnnnnnnnnnnnnnnnnnnnnnnnnnnnnnnnnnnnnnnnnnnnnnnnnnnnnnnnnnnnnnnnnnnnnnnnnnnnnnnnnnnnnnnnnnnnnnnnnnnnnnnngctgcatatgcttgctgcttgagagttttgcttactgagtatgatttatgaaaat

SEQ ID NO: 38235 - DNA, 331 bp, Homo sapiens
  misc_feature (1)...(331): n = a,t,c or g
nnnnnnnnnnnnnnnnnnnnnnnnnnnnnnnnnnnnnnnnnnnnnnnnnnnnnnnnnnnnnnnnnnnnnnnnnnnnnnnnatccttagtgttagatgatttttatataacatgctagaatgttaaattattgcatgtactatgtgcactgttttctatatagtatttacccagcatttgcctaattttaatgttgtatctagcacatgtatgcttaatctcttaaggacagagtttgaattctattattgtagattaatagaattaagatttatgagtgacttttttaagggacnnnnnnnnnnnnnnnnnnnnnnnnnnnnnnnnnnnnn

SEQ ID NO: 38236 - DNA, 315 bp, Homo sapiens
  misc_feature (1)...(315): n = a,t,c or g
actagttctagatcgcgagcggccgctctagaggatccctcgaggggcccaagcttacgcgtgcatgcgacgtcatagctctcnnnnnnnnnnnnnnnnnnnnnnnnnnnnnnnnnnnnnnnnnnnnnnnnnnnnnnnnnnnnnnnngatctgctagcttnnnnnnnnnnnnnnnnnnnnnnnnnnnnnnnnnnnnnnnnnnnnnnnnnnnnnnnnnnnnnnnnnnnnnnnnnnnnnnnnnnnnnnnnnnnnnnnnnnnnnnnnnnnnnnnnnnnnngctgcatatgcttgctgnttganagnnnngnttactga

SEQ ID NO: 38237 - DNA, 339 bp, Homo sapiens
attacagttaaatttatatttgagacttttatttttttacagtccacatgactttttagattttaattgtatctcctttcagatttcacttctcatgtctatagtgttctctttgatttcactcaggtgtcttaggaaagatgctcttttctatgccttttagagtaatttctgcatttttagagtccatagttccattaccattttgagggttaccacttagtacatatgttatgcattatctattcactccaaaattcataaattcttgaaagccaggcacttgaaggcaagattttaatctgtctggcagtagatataattctgggtgagtttctg

SEQ ID NO: 38238 - DNA, 329 bp, Homo sapiens
  misc_feature (1)...(329): n = a,t,c or g
ctctatgtctgaaaaaaaaaatgacactcctggaagatggctagggttccccagtttgagaagcagtggccatggtgaaaaatagtttttgaaaacatcagattataaaatcaagatagtnnnnnnnnnnnnnnnnnnnnnnnnnnnnnnnnnnnnnnnnnnnnnnnnnnnnnnnnnnnnnnnnnnnnnnnnnnnnnnnnnnnnnnnnnnnnnnnnnnnnnnnnnnnnnnnnnnnnnnnnnnnnnnnnnnnnnnnnnnnnnnnnnnnnnnnnnnnnnnnnnnnnnnnnnnnnnnnnnnnnnnnnnnnnngagaattgcttgaacccagg

SEQ ID NO: 38239 - DNA, 356 bp, Homo sapiens
  misc_feature (1)...(356): n = a,t,c or g
ccaccattccgagctggaaacgagtatcttatatttcagaagatcattaagttggaatatgactttccagaaaaattcttccctaaggcaagagacctcgtggagaaacttttggttttagatgccacaaagcggttaggctgtgaggaaatgcaaggatacggacctcttaaagcacacccgttcttcgagtccgtcacgtgggagaacctgcaccagcagacgcctccgaagctcaccgcttacctgccggctatgtcggaagacgacgaggactgctatggcaattatgacaatctcctganccagtttggctgcatgcaggtgncttncttctcctcctcacactncctgtc

SEQ ID NO: 38240 - DNA, 142 bp, Homo sapiens
aacaaagtatgctacaacaaaagtgaaaagagaaaaagaattccaagaacccgggctttctggatccaaagctctttcatggggacgtcctcttcccctcttggctaggtccagactttttctttttctttttttttttttt

SEQ ID NO: 38241 - DNA, 309 bp, Homo sapiens
  misc_feature (1)...(309): n = a,t,c or g
ggagccccagcaaacacagcccagtccagggactcttgtctgcatagcctctgagacacgcgggagctggtgcgcccagggggcctccccttgagaccagggctgctgatgacagagccaggatgcagagcagaaggcaaatcctgcagcggcaggatggcatctgagccaaggctgaggaagcagcaccagaattcgccatcaggccgggaaaaggcggaggcgctggtgggccttagtcncccggncaccgnntntntgtatnatgaganntnttntgntnnntnngtnnaggnatnngtntntttt

SEQ ID NO: 38242 - DNA, 372 bp, Homo sapiens
aagactttggtacagtacccagatctcgctatccattggtagcgctattgaccttagctgatgaggatgaccgggaaatttatgatattatttccatggtgtcagtgattcatattcctgataggacttataaactatcctgcagaatattgtatcaatatttactcttggctcaaggtcaatttcatgatcttaagcaacttttcatgtctgcaaataataatttcactccctccaacaattcctcttcagaagaaaaaaacacagacagaagtttgttggaaaaggtgggactctctgaaagtgaagttgagccatcggaagagaacagcaaggactgtgttgtttgccagaatgggactgtgaactggg

SEQ ID NO: 38243 - DNA, 378 bp, Homo sapiens
aaatacttcaaggagagaaaaaagctgttatggaacagttccgccacttgccaatgcctttccactggaagcaggaagaactcaagtttaagacaggcttgcggaggctgcagcaccgagtaggggagatccaccttctccgagaagccctgcagaagggggctgaggctggccaagtgtctctgcacagcttgatagaaactcctgctaatgggactgggccaagtgaggccctggccatgctactgcaggagaccactggagagctagaggcagccgaagccctagtgctgaagaggatccagatttggaaacggcagcagcagctggcagggaatggcgcaccgtttgaggagagcctggccccactccaggaga

SEQ ID NO: 38244 - DNA, 369 bp, Homo sapiens
atgagagaaagacttagaatgtacacagatccaaaatagaatcagattatctctttttttctaaaggagagaaagacttagaacatacacagatcctaagtagaaccaggtaattgtctctttttctaataaggaatttgggtaatttttaattttttgttttttaaaaaataacctagactatgcaaaacatcaaagtgaattttccatgaatgtttttaatattctcatctcaacattgtgatatatgctactaaaaaccttttcatatacatcttacctcatttcaagtgaattattttaatctttttctctctttccaaaaatttaggaatgtttagtgtaattggatttcgctatcagttccca

SEQ ID NO: 38245 - DNA, 291 bp, Homo sapiens
  misc_feature (1)...(291): n = a,t,c or g
actaggtctagatcgcgagcggccgctctagaggatccctcgaggggcccaagcttacgcgtgcatgcgacgtcatagctctcnnnnnnnnnnnnnnnnnnnnnnnnnnnnnnnnnnnnnnnnnnnnnnnnnnnnnnnnnnnnnnnngatctgctagcttnnnnnnnnnnnnnnnnnnnnnnnnnnnnnnnnnnnnnnnnnnnnnnnnnnnnnnnnnnnnnnnnnnnnnnnnnnnnnnnnnnnnnnnnnnnnnnnnnnnnnnnnnnnnnnnnnnnnngctgnntangcttg

SEQ ID NO: 38246 - DNA, 521 bp, Homo sapiens
  misc_feature (1)...(521): n = a,t,c or g
cagctttcgtgggctataatcataacaataaataacaaagacatcaatagggtttttccttccagtggttttctcccttttacttaagagtcatatggcactaagtaaaataattacttaaaacatgtatctctcaggcttagagctttatactcactcctttgacagccacgcttctatttctttttaaatctcaaaggtgtgggattacaagtcctgtcttagtaataaacttttgcagataaaccctgagatggtataactgcatcctttcttggcaccttaaatcaaattaactaaatacttagtgaggagagaaaaggaaaacacagtttttttgcaacgtatctgactgggtgagaagccactgctgcagcataaagaaccgacgggaatctggctttcccactctggaatgaaggggggaatancgggttgtggtcggtttcatggttaggaggcacccttcatttggtcacagntaacctggttccaatttaaagcccgaattcatancaacc

SEQ ID NO: 38247 - DNA, 323 bp, Homo sapiens
ggccaagtgctgtgctcagtacttaacatggataaactcgattgagtatcacaattcaaagaggtaggcactccaggttacccttgactctgctgatggcagaaacctcacttgtaataaataattatctttgacaagagaaacataaaacaagacctgtaataaatgatttgttcacagatttttcatgtcatagaaactatatagcattgatttttagctatgattttgattcagtttttaaagtatttaatttttattatatcagcccacactgaacattggtttttcagcagataatgcatcttccaagtgctccaagg

SEQ ID NO: 38248 - DNA, 381 bp, Homo sapiens
  misc_feature (1)...(381): n = a,t,c or g
atttaaacaaaaagatactaaatatacagaagttaaattcgaactagccacagaatcatttgtttttatgtcagaatttgcaaagagtggagtggacaaagctctgtatggaagactgaacaactgtaaatagatgatatccaaacttaatttggctaggacttcaattttaaaaatcagtgtacctaggcagtgcacagcacgaaataagtggcccttgcagcttccccgtttaacccactgtgctatagttgcgggtggaacagtcaacctttctagtatnnnnnnnnnnncnctctttgnattcccattttctacaggtttttccgnagacttctttctgcaaattattcagcctccaaatgcanatgaatgatataa

SEQ ID NO: 38249 - DNA, 377 bp, Homo sapiens
gtttattgctaaagaaacaactctctttttggcagcaactaacatttgtatggatcccttaatatacatattcttatgtaaaaaattcacagaaaagctaccatgtatgcaagggagaaagaccacagcatcaagccaagaaaatcatagcagtcagacagacaacataaccttaggctgacaactgtacatagggttaacttctatttattgatgagacttccgtagataatgtggaaatcaaatttaaccaagaaaaaaagattggaacaaatgctctcttacattttattatcctggtgtacagaaaagattatataaaatttaaatccacatagatctattcataagctgaatgaaccattactaagagaatg

SEQ ID NO: 38250 - DNA, 372 bp, Homo sapiens
  misc_feature (1)...(372): n = a,t,c or g
gacattcactctgataagtgtggtgatgttacttcccgggatttggtaactgaactcttctgtcctgacataccttactgaagtctcgatttcttctctctctgcatatgcctggaataagagatcctttttcaatgtaacaattatatttatgaaaagatatgttacactaacttctcagaagccaagctgaaatattcataaagtccctaaaactcaacgtttaaatgacacactttaaaaatatgtcttttttcaatctaactgaaaaccttcttaacttctaatatattaaatctgaagatgtgaagggcacagaagtgactttgaataagaagaatttantgtatctgtaattntattatcaattcc

SEQ ID NO: 38251 - DNA, 280 bp, Homo sapiens
  misc_feature (1)...(280): n = a,t,c or g
aatgcctgcaatgatggtgtttgtaatattgtgagtggcattaacttgctgccctaaatttagaagcataacctgtaaagaaagaagaccatccctgagatgtgtaagtgagtaattgccaaaaagtgcaagtccccattgtgctcagcaactgttctaaaatggaaactatggggagcagaggttccatctctggagatagatcgctggagatacatctctgcaaatatcggctgtggctgatgacctaacggcatgaggtttgtgcncgtnatatggc

SEQ ID NO: 38252 - DNA, 278 bp, Homo sapiens
  misc_feature (1)...(278): n = a,t,c or g
cccacgcgtccgtgcgtggcagaggtgcagaaatttccagaggactggcctagctataaacaccagcaacatctgcaacacaaaagcccttgaacttctaggcaaggactcatgctaacctagcagtactccagattgagaacgcagatggacaggtgtttcttgagcctgtgttccaagatgtctgtggaaaggattgnancngtttnctttgncanantntnnggaactctgtntgngctacatgnttntgcttgnnttntgggnatttnancatt

SEQ ID NO: 38253 - DNA, 286 bp, Homo sapiens
gggccgggctgagagcccaggaggaagggctccagctccttccttgttccgtagctgccaatggtcataacctgggacagttcctgtctccgcccttgagaatcatccgtaaaaggggagattacacctccccaaccgtcccctcctcccgggttgaccttacggggaaaagcaaaggaggccaccccggtgcaacatctgggataatatgcgaacttctttggatgggggccatcgaagctcccctgtgggtcagcctttgataactgcttggtgctggtccgac

SEQ ID NO: 38254 - DNA, 375 bp, Homo sapiens
aaaacaacaaaggttactttttcactctctctctgcttaatatctctgaaatttaaaactattcagaatcccactgggcccgatctattttcaatgctaatgctccactgctaaaactatataagcatcttccctctaggctcaggcactatcttggaagaggtaaatgtgtaagattgtaaaggttgatttttgagcaacaaaattaatttagatcttccaaataaaaaatgggcacacagatgcccaaacagttggcaaaataagatactttacctcctggaccagtatgtggacctttttcatccatcccaaccataatttcctctttcctgtagaattaaaagaaaattgcaaagaggatatgaacttttc

SEQ ID NO: 38255 - DNA, 377 bp, Homo sapiens
  misc_feature (1)...(377): n = a,t,c or g
ggtatgctttcctctctttttaaaggaacttcgtgacactaaacattagcccaaaggacttcttagccttcaatngggagatacctttggtctgctcctgcaccaaagccatatgggtggaagtcagttggcctccctggttctgcagagggccagaagaatgagagagaggaagactgctggcagggaaatcgaggaggcgagactagaactgcaccagcttccctgatgtctgcagccatggctttgcagcgcagacagagcttctctgggatgctgggattcttgcctgtatgaatgcatcaagtattcatttattgcccgaataggcattgcattaagtcctctgtaaggtgtcaggcaagccaaaaaaaaag

SEQ ID NO: 38256 - DNA, 166 bp, Homo sapiens
cttttttttatgctttgctagaaagattggaaactacttgatgacatgggccatgtttttaactccttttttctccaatagtatgtaaaatgtgctgaccctttatttattcttagtgctttgactcacaataaaactgaaatttaaatttgaaaaaaaaaaaaaa

SEQ ID NO: 38257 - DNA, 350 bp, Homo sapiens
  misc_feature (1)...(350): n = a,t,c or g
gatgctaaaggcataatatcaacaggaagtttttagtagtaaaaattattccagagtttcaaaggcatttttctgtaagagttttaaaatgggataaacagggaggcatatgagcataataaaactgccaaaaaatcataatgcagcattgttcacaaagagaaattaagttgcatcaaaagcattgctacagaaacaacaaaataaaagttaaaagaaccatacccaaactaataagtgaagtaacaaaattacaggatgacaaggtcattcattgtacaaaaatttaatgcatttctaaatattgccaatgactggaatatagaatatnnnnataaccctnnngaggg

SEQ ID NO: 38258 - DNA, 328 bp, Homo sapiens
  misc_feature (1)...(328): n = a,t,c or g
ggctacaacaaattttactagctttttcattgtctttccatgaaacgaagttgagaaaatgattttccctttgcaggttgcacacagttttgtttatgcatttccttaaaattaattgtagactccaggatacaaaccatagtaggcaatacaattttagaatgtaatatatagaggtatatttagcctcttttagaagtcagtggattgaatgtctttttattttaaatantacatnnattaaggagcctcgntggtgactttggccatnaacatttanccatatgcctttgcnataactagattgtggatangnnnacnngtgttg

SEQ ID NO: 38259 - DNA, 335 bp, Homo sapiens
aaaaaacaaagcacatccagaaagagtgtcaggaaatgatactcttaccagataggatgagatttcctgttttagcgtatgttgctttatttgttaaaatgctgtgatgacccactatactgacgatacaatcaacaaataggtttcagtctacagtttgaaaaacattgatctaaattaataataattatgataataaaaatagcaacagtgaataacaatacaataaaaagtttcaaccaacagaaccctgggccttctttagaagaattagttatctaagagtgaccttgagcaggagatatagagagactatcttatagtgtacgaggatg

SEQ ID NO: 38260 - DNA, 338 bp, Homo sapiens
agttctgtgcccctctcttggtggaaggagtgcaatgatttgcttttacatgatcttcaaggggatgttccagaaagccccagactctaaatatttcattgacgtggcaagctgtagaccttcttgctaggctttacctcccaccctctgacacacaggtcttcctcaggcattagctggacttgctccttcctgcccgtctagctcaatgagcctgatttcctcagtgtatcggatgagcatattctctggaatgtcacaacggccaaggtccctgcagactatattgtggaaaagagcaagagaatgattgcaagccttgcagcaagataggaaat

SEQ ID NO: 38261 - DNA, 318 bp, Homo sapiens
cccacgcgtccgcccacgcgtccgggatctgggccctggaactgaaaactcccattgcatttgctcctatgaccaatgggctttgctgcacattttttccacatggtggagtcattgccacagggacaagagatggccacgtccagttctggacagctcctagggtcctgtcctcactgaagcacttatgccggaaagcccttcgaagtttcctaacaacttaccaagtcctagcactgccaatccccaagaaaatgaaagagttcctcacatacaggactttttaagcaacaccacatcttgtgcttctttgtagct

SEQ ID NO: 38262 - DNA, 410 bp, Homo sapiens
  misc_feature (1)...(410): n = a,t,c or g
tttgaataccctttgaagtcccctgcaggtaccggtccggaattcccgggcggacgcgtgggcaattataatgttcagtgttgtatgtttttattattttattgtntatttttagggctatcnggnngttatataacanactattgcttatttannnntagncntntntatncantttancagtcntcaancatgtatnancactttataaaacnnaatagaanacntanaantnaaatnnnantnaaannagtantnanttatntntnnntanatngaatnacaaanngnantaannntcntnaaangttanattaaanaactnttnattnnanatattntaanngtgaaantatnntnaccnnattagnntntatttnaactnttaaatntatncggcnannttattt

SEQ ID NO: 38263 - DNA, 330 bp, Homo sapiens
gagaccctgtctcaaaaaaacaaaaacaaacaaacaccaaattagatatatcctattaaactatcacttaaactattaaatacatgtttcattagatttaaaagttctttaacatggctgtcaaaaacacttcagttttatatagcgaataaactgggaagtgaaattgactcaggaaagtaagatgcataactaaatagacagaatcagaaggaaagacacctctatattctttagattaaagaacacaggattcttaatattagaggagtgtaagtatgggtcacatttggatctctttgcacttttaaattagtggccacgtaattg

SEQ ID NO: 38264 - DNA, 328 bp, Homo sapiens
caaatagttaaatcatgttattcttttgtttacactgtaatgaatgtcttccccattgcttgtagaacaaagttctacaaagtctcccaaaagctggtcctggtcctttctagctttctcttgcataagtcttctttttatttttttcagcattgcaaattcttccccctatcaaacattctgaaatatttacccctttccagccatcttctctttgtcccatgtctcaatttgaatatccttaatcagtaatgattttcctgactttccagattagatatggctttaaattatatattctcatgtcagcctgaatttcttcctagaa

SEQ ID NO: 38265 - DNA, 346 bp, Homo sapiens
  misc_feature (1)...(346): n = a,t,c or g
ggggccgcttgcctgccccagggtcatgctgggcaaggtccctagntntntaccnnngggctgtnctccctaattttngagtgtatttgntctcgggagagacccatgagtatgaaagngnctgntgcntgggctttcntgggctcgaaaaccgngtccgggggagccgccatttgctttcctgttccctanctagctagctagctctctccgcgttgtccggcagccggcacctagaggttgggactttggcattgcatctgatttaatgaacttaagtctgtgaataaggcctttgtgttaacaactggnatttcggtcacagcatatttacaganaagactcg

SEQ ID NO: 38266 - DNA, 320 bp, Homo sapiens
  misc_feature (1)...(320): n = a,t,c or g
aaaagaaaaagtattgaacacaccagcacaaagtcagaaaactaaacaaataaatgaagctctttcgcataacaattaaaaaaaaaaagaattatatttngattatgaccctggatctnggncaananaggcaaagtaggaangatcanattccagctaggcttacagngatagggtagctaacagctcctggggtagctgcccagcccacantgattccctnttctttaanaaccctcctntgngcacacagtggngggtcntatgaccaggttggtntngnttcacccccnccattgnttacnnttggttggntctgc

SEQ ID NO: 38267 - DNA, 351 bp, Homo sapiens
aagacgaccaccatcctgctggacgggcggcgggtgaagctgcagctctgggatacttcaggccagggaagattttgtaccatattccgctcctactcccggggcgcacagggtgtgatcctggtctatgacattgcgaaccgctggtcttttgacggcattgatcgatggattaaggagatcgatgagcatgcccccggagtccccaagatcctggtggggaaccgcctgcacctggcgttcaagcggcaggtgcccacggagcaggcccaggcctacgccgagcgcctgggcgtgaccttctttgaggtcagccctctgtgcaatttcaacatcacagagtcgttcacg

SEQ ID NO: 38268 - DNA, 360 bp, Homo sapiens
aaataaattgtgaaaggaagtgtagttgactgaaaactacagttgtaataagtcttccactttttataggatttttgagcacacaattatgcaaatattttaatgtttattaatgtttacagtggaattgtgaataagttttcagtggactatcttatcccttgacaaaaatattttgtcttttttctatgtaatttcagagtttttattttgttacaaaaagacaaaaatgaaatatataacaacaatgaagttatttaacaagatttctaaagctgaaatttttgtgtaaaataaggtattatcttgcaacttgttaaatatatttattcagacattggatgttgtatttttatgtat

SEQ ID NO: 38269 - DNA, 358 bp, Homo sapiens
tttatttatgttcggtttgccttcacctggtgtagtaaaatcaaatgagattatttggtatgtgttttgctttgtttaacccaaaagattattttttggttcctaaagaaaaagatatttttaatctgtcaattatttcagtcatcatctcatcgtcctagaaagcctggtcattttactgtcctcacacatggaagacacttgtgttggctgtgcctcttttaatgtcatctcttgatgaaacaaaaatactggtatttatccaatatgttgaaagcgttttgttatcttctatcaaagcacataaaaccagttataggacacagttggaagcagagccagtcttcctcctcagtct

SEQ ID NO: 38270 - DNA, 348 bp, Homo sapiens
gttaaaagcttctattttcctctttgaacactcaagattgcatggcaaagacccagtcaaaatgatttacccctggttaagtttctgaagactttgtacatacagaagtatggctctgttctttctatactgtatgtttggtgctttccttttgtcttgcatactcaaaataaccatgacaccaaggttatgaaatagactactgtacacgtctacctaggttcaaaaagataactgtcttgctttcatggaatagtcaagacatcaaggtaaggaaacaggactattgacaggactattgtacagtatgacaagataaggctgaagatattctactttagttagtat

SEQ ID NO: 38271 - DNA, 353 bp, Homo sapiens
  misc_feature (1)...(353): n = a,t,c or g
nnnnnnnnnnnnnnnnnnnnnnnnnnnnnnnnnnnnnnnnnnnnnnnnnnnnnnnnnnnnnnnnnnnnnnnnnnnnnnnnnnnnnnnnacacagagagaaagagacactcagaaaaaagagaaaccaacacacagaggcaagagggagacagagagagaaccatccggagaccgagtgagagacaggacagagagacagagacaaacagaccaagaaacagaaagacacagacatacaggcatacacttacacagacagagaaaaaagagacaaaaagagacatcgacagatcagataggcagaggcagagaggatcagagacacagagagacaaagagacatctgagaaagg

SEQ ID NO: 38272 - DNA, 380 bp, Homo sapiens
aaaattagcaatgtcttctctgttaaaatcatgtgttcacatcactggagctctgttaactttgatttttagctctcacagttccaattgtcagtaacttcactgttctacttcatgggaaatcctttgatatcaacttcagtattctttccttatttctcatcacattatagcatattaattttttcagttcagtgatacttgttttagtaactgttttattgcaattagaaaacagatttttgggtctttgggctttcacatatttcttttgaagaatagactatacagagaacatcagccactctattattaatcagaatcatgagaaactcatttggtatgtcactaacagttaaacaaaatgggatgttactgca

SEQ ID NO: 38273 - DNA, 365 bp, Homo sapiens
cggacgcgtgggctgtctcgcatggagatcaaagaaatagcaagcaggacccgcagggaactactgggtaatggttctcaatcctggtttccactgtctgtgaacagaccagctggttttatctttggatatgaattgtcctcagaaacaatgagtttaaaaggaaagtttccttttaagaagggatttttaagtaagttctaatacctctataccaaggaatacactataatgtagccaccaacagtgatgttgttgatctatatttattggtgtggaaagctgctcaagccatgtgaaggggggaaatgggcagtttataaaacactatgtctagtctgataccatttttaaaaataaaagtc

SEQ ID NO: 38274 - DNA, 364 bp, Homo sapiens
ccgaaggatatacttcacaaagtaaatacatttggtataactgtggctttttaaaaaatctaacacaatgtagtaagtttctaactggcttcttttgtcttcgttaaaaaggaagtgaagcttcttttcgcttgtgatttgttagctgagaaaactaatatttaaattctgttcaactatttgagaaatcaatgctggatttcaaataggaatgataaagattgcctttttattagccacatagttgctcaatctcataacttgtatcatttctggcttctgtccctaaaaagtatagataatccctaacttactttcgacttaatgatttttcaactttacagtgggtgtattgagaggtaac

SEQ ID NO: 38275 - DNA, 359 bp, Homo sapiens
  misc_feature (1)...(359): n = a,t,c or g
aactgagcctgatatatagttggtactcaatcaatattgactgatttcctgccaaaaaagctcaatggtgaagactcctcaaagtctaggacagctaaagaaggttgaaattgtcgcctactcctgtttggggtattgaggtactcagtgacagataccacatgcaattagttccttaaaataaagaatacgagattaaaagaggaaatgtagttaaatactgaaattcagcctaaagatggcaggagaatggtttgagaagtggtatagagtaatgaggtgtaaaagggggaagagagtgagagcaccacacanaggacaggaaaaacaccagcaatacatcagctttacacagcagg

SEQ ID NO: 38276 - DNA, 350 bp, Homo sapiens
agaggtgttgaatcacacatgaatgtcagcaaatgatgccaactatggatcactttcctggggactttatctggtgtgaaccaagagaatcctacttcatgcatttttttaaacatccacagataactgttgtgctgtgtcatagaccaaaagggaaattacatttttctcataattggatttggtacttgtaggctttcctgaagacaaggaaaaggaaatttattttagattcttaaaaaaccttgaactaaaaaatttcaatcagcatatcaggtgcctatctgaattcaaccaccactgtggcagagatggatgacttcgtgtaccggtacaggagaaaagggttc

SEQ ID NO: 38277 - DNA, 347 bp, Homo sapiens
  misc_feature (1)...(347): n = a,t,c or g
aactgactcactttagaaagcaagttgctctccagtaggagagccatcaaggtacttctgaatgtcagcattaacactgcatgctacctacagtcactgtcaggggcacgaatatggagtacgtaccgaaagattttggccacatgttttgttagctaagtcaagtcttaaatgagccaaatgtagtatttgctgactaggaagtaagtcatttgaaattaacagtatttannnnnnnnnnnnnnnnnnnnnnnnnnnnnnnnnnnnnnnnnnnnnnnnnnnnnnnnnnnnnnnnnnnnnnnnnnnnnnnnnnnnnnnnnnnnnnnnnnnnnnnnnnnnnnnnnnnn

SEQ ID NO: 38278 - DNA, 350 bp, Homo sapiens
ggaagagcattgggaaacttgcacagctagctatgcatctacattttggtttggggttagttatgaaatgttcttaatatgacgtgttcaataacttcacataaacttcctgttctccaaaacctcaaagagatagagttaatgagttgttgttttttttaaatgggggtagttttctatctgtcatgggctctagcatctactccgctacccaattctgtcatctccaagctgagtttcctcttctgaggcagaggctggagcagttctttttcagttctcatcctctccatcccaatccagtatatcaatcaactctaactcggagacgtctagctggcaatgtttct

SEQ ID NO: 38279 - DNA, 352 bp, Homo sapiens
  misc_feature (1)...(352): n = a,t,c or g
ccagctctctgctcgctctgctcgcagtcacagacacttgagcacacgcgtacacccagacatcttcgggctgctattggattgactttgaaggttctgtgtgggtcgccgtggctgcatgtttgaatcaggtggagaagcacttcaacgctggacgaagtaaagattattgttgttattttttttttctctctctctctctcttaanaaaggaaaatatcccanggactaatctgatcgggtcttccttcatgtaagtncccctgatatttctcgaggaaatagaaaacccgggtattgnctctaaaatctgcatcaatatattccacggcactgggtctatctatccctg

SEQ ID NO: 38280 - DNA, 357 bp, Homo sapiens
gggaaggaagactgtgagccctctctccctttttaatatgagaattcgaaagcagtggggaagtgatgttggacctatcacagcattgctaacagacagcctattacagtatttaataaaaacagaaacagcatgcctatcataggctaataaatcctacctcctgcacgctttaaaacagtatgaagcagctttaacggagctccagataactaatttcaagcatggctgtctagcgtgcctgtcactcctattgtccttccaaactctttcagacattttgagcagggagtattaaagctatgagttagaaagggttgtgacattaatggtccacaaaggctttaggcacaagag

SEQ ID NO: 38281 - DNA, 356 bp, Homo sapiens
ggtctggaataaatgtggacaacttctagcacagcataaaagcattaaaaagtttattaacacatcatgtcggtgtcaatgaaaatcaaattggtataattttcaaagaagaaactaatgatattttaaggctgtgtttatagtaatactatctttctgaaagatactttgtttatgtactatattaacatagaaaaatagtaagcagtttccagctacaatcagtggtttaaattaagatgtaaatgtgggtctaccagtgagaaactaaggcaaatgtctccatctaagacagagttgccagataaaatataagatgatgcccacttaaatttgaatttcatatgaataacagg

SEQ ID NO: 38282 - DNA, 349 bp, Homo sapiens
  misc_feature (1)...(349): n = a,t,c or g
cccttcctaaatggggttggtgcttgctgtagtgtcaggtgataacttttcaatctagtgacttgacagtttcccaaaaggcatctcttctttgctcagaaaagagcataataagctaccttcctcttggttttgagtcaagatatgagtgttcctgcaccaagtgacaaagttaaatgcttgcttctgttcactctgttagacttaccaatcctcactcctcaggggctcctcattactggatgtgtattggtcagaatttcctttccttttactttttaaatccaaactttactttgctgnttaatctggaagttcctgcgtgttttgagtgaggntctcagcatcg

SEQ ID NO: 38283 - DNA, 420 bp, Homo sapiens
agaatttattttcagcaatttttatagaagttgctttatgacaaagaaagctttggttaactggcatttggcatttcatgcccctaacttttctacatgagggtgtatttctctggttctctcactctctcactagttatactgaattcatttatgttaagggctctcaacctttcttattcatcaaagccctgaagttggcagagccctctctggtacctgattagaagtccgtcttccgtctcatagggaagtgttagagatggataatgattctgtgtagcagaagtactcattatgtcctcttaaattcggtcactttgactgcagtagagcttcttagtgagcagtctatgttggagtgtactttcagagaagctcgtggtgggggaaatctggaatttgctaaatatttcattt

SEQ ID NO: 38284 - DNA, 415 bp, Homo sapiens
atttttcatttctccttctcatctttcagtgttgcgtttccctagagccgtgttttgattagttattccgattctacacctactgattgttcagttacaccatactgaataacatttgaaaagtcaagcaatggatgaagtttccctgaacataaaaaaaatcagtgtcaagaggctttttttattttttaatttgggcagggactttggtcatccaatagaaccaaatgttctctgtttttttcagaattctgtctgaacactagttaggaatgttccataactgccagactaatataatacagatatttatatatattttaaagtttcatttttattgagagtcctggtttgtccagtttccagaaggctgattgtgattccatctgagtaattgtcgtaagctcaaggctat

SEQ ID NO: 38285 - DNA, 423 bp, Homo sapiens
aggccccattaagtccccatgccaagagatttaggcacctcttgcattcatggcaacctttatcccagtttcagtgggataagtgttcctcccttccggttactcagtgttgtcaactcctcctgagaggtggtcacatttcagaaacgtgtgaagtgattccagtgtttatgagacatctgaggaaacttcagggctgacagcaagctgttggcattattcacatttgggtcctgtaagaaaaaataagaggcagtcccaatatgtgtttcttttcaaaaccacggtaattaagttttaactgctacccatggtttgggagatggggagcctcaccgatgtttccatgacaatatttgacagtatttcctgagtgctgttagctgccaggagaggtgaccagtgagtctggtctcaagcaaa

SEQ ID NO: 38286 - DNA, 340 bp, Homo sapiens
  misc_feature (1)...(340): n = a,t,c or g
ggttaagtaaaataaaaaattgagctttctagaatatttgcctaattgggaattaaaaagtaaaataataggccaggcatggtggctcatgcctatannnnnnnnnnnnnnnnnnnnnnnnnnnnnnnnnnnnnnnnnnnnnnnnnnnnnnnnnnnnnnnnnnnnnnnnnnnnnnnnnnnnnnnnnnnnnnnnnnnnnnnnnnnnnnnnnnnnnnnnnnnnnnnnnnnnnnnnnnnnnnnnnnnnnnnnnnnnnnnnnnnnnnnnnnnnnnnnnnnnnnnnnnnnnnnnnnnnnnnnnnnnnnnnnnnnnnnnnntttcagcctgggtgccacagcgaga

SEQ ID NO: 38287 - DNA, 360 bp, Homo sapiens
  misc_feature (1)...(360): n = a,t,c or g
atctttattactactatgcacacaattatattgttataaatagtgcaaatcctgtaataatcgagatgacatgtgttaaaggaacgagtaccattcaattcagtcaaggagaatcaagccaagactttaccatgttcacagataaaacatgtatttatctttcctctgtatctagagttagttgagtgttcaactgggctgaaatagctatcctgtgattgtgaggagttaggtactgacaattcatgaaagaaaggggattcaaggtagggacttgaaactgtaaatattgnttacatgttttaagcccatgcattaaactgcctttaagacaaccctcttccaggaagttttgtttat

SEQ ID NO: 38288 - DNA, 364 bp, Homo sapiens
  misc_feature (1)...(364): n = a,t,c or g
catttcatcccagtcaaagtgttttttatccaaaaagccagtggcaaagactggcaataacaaatgctgttgagaatgtggataaaggaacactcatagactgctggtgggaaggtaattggtacagccactatggagaacattagggagcttactcnnnnnnnnnnnnnnnnnnnnnnnnnnnnnnnnnnnnnnnnnnnnnnnnnnnnnnnnnnnnnnnnnnnnnnnnnnnnnnnnnnnnnnnnnnnnnnnnnnnnnnnnnnnnnnnnnnnnnnnnnnnnnnnnnnnnnnnnnnnnnnnnnnnnnnnnnnnnnnnnnnnnnnnnnnnnnnnnnnnnnnnnnnnnnnnnnnnnnnnnnnnnnnt

SEQ ID NO: 38289 - DNA, 357 bp, Homo sapiens
cggacgcgtgggctgagacagaaagagcggaaaagcagtgccccctctgcatcggtgccagccccctctacagcctcctgctctgggggcgtgcagcctgggggtaccctgtgcagcagtaacagcagcagtcttggcggagggccgctcgccccttgctcctctcggacccggacaccttgagatgagactcaggctgatacaccagctcccaaaggtcccggaggccctttgtccactggagctgcacaacaaacactaccaccctttcctgtccctctctccctttgttgggcaaagggctttggtggagctagcactgccccctttccacctagaagcaggttcttcctaaag

SEQ ID NO: 38290 - DNA, 360 bp, Homo sapiens
  misc_feature (1)...(360): n = a,t,c or g
aatgatcccttgccaagaagctttatgtacaagaacccatgtgatccaggaactggaagggctcagataagttagatatgctttctgctgactttactcacttaagattatactcaagacaaaatggaagttctgttccaaaacaccattttttttttctcatttagggaataaagatgggacattttagttacagggaatcaatttccattttctgttctactttggacttgctgaggttcaaaataccaccaactttttgcatggaaaagacccgctgtcttgaggcaggaggaagganagcccatntacttcctnagcattntcccaaatgtnncccctaaangccanatcaccttg

SEQ ID NO: 38291 - DNA, 359 bp, Homo sapiens
catgaagtatattcatttatcacttgctaaacataggccttgctctgtttaataaataatgggtgtctctttcaagattttaggataggcctttttaacagagcagaatcttctgttaaagttctcacaaacagaccaactcccaagagagatgggctggtgggtcactgacataaagcagtccacaagatctattttagaaaagtatcaatgacatttccttagttggtttgattctcttgagaatacatgagtttaaaagaactgaggtcaaattgctttatgtggaaagcaataaaaacaagtatttttgacttgcaaattagaggtaactgtaagcaatttttgctattgaagcc

SEQ ID NO: 38292 - DNA, 375 bp, Homo sapiens
aagagttccaagtttctttctagattatttgaaatagtttacaaaatgctattttaaacagactttcaacctgtttcaaaactcaaatatagatgcctgagggttgagagaaagagagtgtgttaccacatgtttatcattggaatgtagaaacaaattcatactcaattcagcaaatacttattgaataatatatatatttcagatgccttgataaaaattggtgacagtaggtaattgagaaagatattacgttattgacagaacacagttcctgccttcaaggagtttaccttttagtgagaaacaaccagtaaattctatttcaatataatgtatgaattgctgtaacagattgggtaccgtaagatacag

SEQ ID NO: 38293 - DNA, 350 bp, Homo sapiens
aaaaaattaaagtcaagtttgtctcttagtcactatcattcaccagcccttttctgaacttgtacaaaataagttcattctctcttctacaggagagacctccactatccaaatatgaggagcttatcatcccaaggctccaggtcttctcattgctaaatatagcaccctgggctaaatattcccagggtgctcagctgtttctcaaatgcagaggaaatgcccgatacaccattctccttcacagcatctttaccaccctgccacttggcctttttgaacccccattagatggtgagcattttccttatctgattgctttcccctgtcactgggctgtcaatgggact

SEQ ID NO: 38294 - DNA, 361 bp, Homo sapiens
gtcccgttttgtccagtggccaatagcaagatatgaaccggtcgggacatgtatggacttggtctgatgctgaatgggccacttgggaccggaagtgacttgctccagacaagaggtgaccaggcccggacagaaatggcctgggaagtagcagaagcagtgcagcaggaactggaagtgccttcatccaggacaggaagtagcacttctgaaacaggaagtggtctggctggaactccaagtggcttagtctgggggatcaggaggtgggaggtggatggttcttattctgtggagaagaagggcgggaagaacttcctttcaggaggaagctggaacttactgactgtaagaggttagg

SEQ ID NO: 38295 - DNA, 357 bp, Homo sapiens
ctgaagcaggtatcagcaccctcacttacaatggagggaacaaatgcagaagagttatatggctggtagatcccaccacctttgcgggttggctgatgacatcctctctggtggcagacatacccaaaaataccttttgccacaggcttgggactactatcctgtgaatgtcagcaagcctgtcctctacagggatccgtggagaagataaactctacaagaaacagaaaaatgtctacctgtctccagaaccatgcagactccctccccttcaggatctcctagcccctgatgaatgaacagcacttccaagatgcttgagacaccgggcacagctactatcagtcatggcgctcc

SEQ ID NO: 38296 - DNA, 368 bp, Homo sapiens
agggaaggtggagtagagtgcatgtgtgttacttgtgatttgcttcattttaccaagcatttgagatggtatatgggaaatataatctgataactattttgatattgaggataagggaaaacaaagtaggagatatatgaaaagggtggagggtaggggatgaagggtaaaatagagcacaaataagcaggctgtaagggtctatgacatgtttaaaatatagttgaattataaatttggccttgagttttcttagctggtttttctcaactctggctgtgtgttatatttacctgggagtgtaaaaaaattatccatgccagtgttccactcagagattcacatttaactaatctagagggggcctg

SEQ ID NO: 38297 - DNA, 360 bp, Homo sapiens
gtgtctataaattttgtatatgggggaggttggaagtgggtgatagtatcagttcaacattagcagtagcagctcagcatttgctgaaggttcagtctttatgtgtggagttgagaataaagagtagacaagacaaagttgctcttctcaagcatcttatgttttcctaaatgtatgttttcaactcacaattctctcctaacgtattcacctgcatattcagctgcttatatgacatttccagtgcatttttcgtaagcatctcaaacccagccagtgcattatcttaccattgccacttcctcctgtcctcctggtttaagtcttgaaaacaatgagagtagatataatcttctctta

SEQ ID NO: 38298 - DNA, 360 bp, Homo sapiens
ggttctggaatgttatccatcagagtcatcccagatggaccaactagagcactccagataacagatttctgccaccggaaaagcagccgttcatatgaagtggatgaacttcctgtcaccgaacaagagctgcagaaattaaagaatccagatacagagcaggaattggaagtgcttgtgaggttagaaggtggaattgggttgtccttaattaataaagtcccagaagaactggtctttgcaagtcttacaggaatcaatgtgcactatacacagctggcaaccagtcacatgcttgaactcagcatacaggatgtacaggtggacaatcagctcattggtaccacgcagcctttatgg

SEQ ID NO: 38299 - DNA, 381 bp, Homo sapiens
aaggattgggattatggaaaatggaggagcagcagcagtcataaaagaaggaagagatcacatagcagtgcccaggagaacaagcgctgcaaatacaatcactctaaaatgtgtgatagccattatttggaaagcaggtctataaatgagaaagattatcatagtcgacgctacattgatgagtacagaaatgactacactcaaggatgtgaacctggacatcgccaaagagaccatgaaagccggtatcagaaccatagtagcaagtcttctggtagaagtggaagaagtagttataaaagcaaacacaggattcaccacagtacttcacatcgtcgttcacatggggtatgaacgttttaaaacatttttgggaaattt

SEQ ID NO: 38300 - DNA, 256 bp, Homo sapiens
actttttcaagtgaacaacctatcccagtgcattctacatttactaaggttttgcttttacctttgagcagtggattattttgataaatttgagataaattgctatacttttttaaaaccaaattctgtaattattttaattgatccatcaattcattcaaaacgctgggtttcatagctcttgttagtcacagcttaacatgaggcaaattccttactgaaggaaaattaatgaagttgagcaatgaatcattga

SEQ ID NO: 38301 - DNA, 369 bp, Homo sapiens
  misc_feature (1)...(369): n = a,t,c or g
ctccgctgaggtggacgtgtacaacccgacgaggaacgaatgggacaagatcccgtccatgaatcaggtacatgtggggggcagcctggccgtccttggggggaagctgtacgtctctgggggatacgacaatacatttgaactctcggacgtggtagaggcctatgacccagagactcgcgcgtggagcgtggtggggcggctcccagaacccaccttctggcatggcattgtcagcatcttccgccagttcatgccccataccttctcgggtggtcgtggcttcgagttggacagtggcagncgatgacatggacccaggcctaccccgtcgtcgtggnacccntnagntgtccttccccantttgg

SEQ ID NO: 38302 - DNA, 362 bp, Homo sapiens
  misc_feature (1)...(362): n = a,t,c or g
aaatactttacacagtgtctggacttcgttacagtctggaacacattttccttcatataaaattttgcccgaattctatgaccactagannnnnnnnnnnnnnnnnnnnnnnnnnnnnnnnnnnnnnnnnnnnnnnnnnnnnnnnnnnnnnnnnnnnnnnnnnnnnnnnnnnnnnnnnnnnnnnnnnnnnnnnnnnnnnnnnnnnnnnnnnnnnnnnnnnnnnnnnnnnnnnnnnnntcatgcttggcttagattttttaaaaatatgtacaacaatatgcaaataatgtccaatatctggctgaatatgtacagggtatataatgacattcttatcagatttccccctttatatgagttgg

SEQ ID NO: 38303 - DNA, 375 bp, Homo sapiens
  misc_feature (1)...(375): n = a,t,c or g
aatccgtgcgcaaggagtcaaaagaagaaacccctgaggtcacaaaagtgaatcacgtggaaaagccacccaaagttgaaagcaaagaaaaggtaatggtgaaaaaagacaagccagtaaaaacagagaccaaaccttcagtgactgaaaaggaggttcccagcaaagaagagccatctccagtgaaagccgaggtggctgagaagcaagccacagatgtcaaacccaaagctgccaaggagaagacggtgaaaaaggaaacaaaggtaaagcctgaagacaagaaagaggagaaagaaaagccaaagaaagaagtggctaaaaaggaggacaaaacacctatcaagaaggaggaaaaaccnanaaagggaagag

SEQ ID NO: 38304 - DNA, 363 bp, Homo sapiens
cttggacagtcagtctcgatggagcaaagtaaaagacaaagtagaaagtgatccacgttacaaagcagtagatagttcatcaatgagagaagaccttttcaaacagtacattgaaaaaatagccaagaatttagactcagaaaaagaaaaggagcttgaaaggcaagcccgcattgaggcaagccttcgagaacgagaaagggaggttcaaaaggcccgttcagaacaaacaaaagaaatagatcgagagagagagcagcacaaacgagaagaagctatccagaatttcaaagctcttctgtctgacatggtacgttcttcagatgtgtcatggtctgatactcgtaggacccttcgaaaaga

SEQ ID NO: 38305 - DNA, 360 bp, Homo sapiens
agcccagcctgttctaccagagaacttgcccaggtcagaggtctgcgtagaagcccttttctgagcatcctctcctctcctcacacctgccactgtcctctgcgttgctgtcgaattaaatcttgcatcaccatggtgcacttctgtggcctactcaccctccaccgggagccagtgccgctgaagagtatctctgtgagcgtgaacatttacgagtttgtggctggtgtgtctgcaactttgaactacgagaatgaggagaaagttcctttggaggccttctttgtgttccccatggatgaagactctgctgtttacagctttgaggccttggtggatgggaagaaaattgtagcagaa

SEQ ID NO: 38306 - DNA, 360 bp, Homo sapiens
acaagacacaattcctgatctcaggtgaacaattcaaatacaacccacacaacagcaatttctctcctttcctttctccttcccttaagaaaggggcagggagaccacagaaatatgacattttcagtaataatctgacataccagacgaccttattaataaagaaattccggacccatagagacagaagaccaattacagccattgctttttgatatctgaacttccaaataggcttatgaactttaacttgatccacataatttggaatttataatggaatttttagcaaactatttgttatctaccagtattaggtatcgtagtgacatctaggaatagagcaatctcctactccat

SEQ ID NO: 38307 - DNA, 370 bp, Homo sapiens
atttaaaacaccagaaaaggcaaaagagaagaaaaaacctgaagattctccctcagatgatgatgttctcattgtatatgaactaactccaaccgctgagcagaaagcccttgcaaccaaacttaaacttcctccaactttcttctgctacaagaatagaccagattatgttagtgaagaagaggaggatgatgaagatttcgaaacagctgtcaagaaacttaatggaaaactatatttggatggctcagaaaaatgtagacccttggaagaaaatacagcagataatgagaaagaatgtattattgtttgggaaaagaaaccaacagttgaagagaaggcaaaagcagatacgttaaaactttccctt

SEQ ID NO: 38308 - DNA, 371 bp, Homo sapiens
aggagaaacttttaattcgaagattttattaaatagttgactacaataccttgctatatatacatagtttttcttcaacatcttaactcttctgagtggaaataaaaatatcaggcataaggttttctcatgctgaaaaatagaacgcggtttttattttgcttagttttctttttaattccagaaataagtgaaaacatgttacttgacagtcaagtgtggtaatatggcaagccttgttcctttctgcatgagaatctaggagagaattcataaccacaccaataacgaaatagaagttttaaactatgtgcctaatcaatgtgtttcccaccaaagattcagaaaacaatgcttgagaaaaatgggtt

SEQ ID NO: 38309 - DNA, 362 bp, Homo sapiens
ctcggcacgcagacaccccgctcgagccgcagcagtcgctctactcccgggatcagcacctttccgccagggctgctctcagttagcgatgtcaggccagagctcctcttgcagatgcacctttaatttggcctccctcagatgactggaatcttctgcggcttgtccatagtgtgaataaaaactaaatcacatctataattctactgaactggtcatacagacgctgccatatatgtcacagtacactgaaaaggagccagcagcaatggaccaagaatctggtaaggctgtctggcccaaaccagcaggagggtatcagacaattacaggcaggagatatggaagaagacatgcttatg

SEQ ID NO: 38310 - DNA, 365 bp, Homo sapiens
gatcagggtaggaagacactttgccctgccttttaggggccaggttggaagtgagtatgacttggaagaaatgcaaggctgtgcaagaatcaattcacacccatcaggggcatttggtgatggtcatgtgcagtactgtgacaatgtagttgacaggtggccattccttcctcttttctgcacattctttccagatggatggggctgcttctgggcggcccagagtgttgtaggttcttgggggagaggaaatgggcctcaactgctaccccaagagctctggaaatggcattggcatgggtatgctccacggctcagccttctcctgttccctgggcctcctggcgtcatcacgcacccttgac

SEQ ID NO: 38311 - DNA, 362 bp, Homo sapiens
caaaggtctgagacctttgagaaccttatgaaagctttaaaacaaacagacaaacaaaaaaacactactattttaaatagtggaactttcagcccagcgtttctgcaatgcagagtgaagtggatactgggcagttcgagacaggtttttaatcataagtggtcttttcaaatgtccatcaattgatggggaaggctggcacccaccaagaagtggaagtcctcagaaattctcggcacaccctagagtattgtacaaccaacacccccacataactttgtcccctcttccccaacaacccagagcaggtgttgcagacaggagggccacagcgtgtggaaagtaaagactttggagctaga

SEQ ID NO: 38312 - DNA, 343 bp, Homo sapiens
gaggatttgactttatttgatgagatgccacttatccccagaactatactagaggaaggtcagacatgtgtggaactcattagactcaggattccatcgttagtcattttagacgatgaatctgaagcacagcttccagaatttttagcagacattgtacaaaaacttggagggtttgtccttaaaaaattagatgcatctatacaacatccgcttattaaaaaatatattcattcaccattaccaagtgctgttttgcagataatggagaagatgccattgcagaaattgtgtaatcaaataacttcgctacttccaacacacaaagatgccctgagggagg

SEQ ID NO: 38313 - DNA, 363 bp, Homo sapiens
acatgtgtgactttacaacaaaaagaaaacagtggtgaagtatgttagtcagacttcagcatcgttctcatcagttagaataaagaaacgcatgaggaaagagacaagtatttttcacaggcctcaggttagaacacatgggcagaacagcatggacacttcccttgactcccctgtttgccttgctgcccccacctctgatcagtcactaagcctgtgctgctgcctctggagtgcctgcctttgtggcttacttcttgtattcctgcctcagcacctgcccaccacctcccctcagaatcatcagctgtgccgcgatggtgccagcacaccgcacacatctgatcatacaccatatatacc

SEQ ID NO: 38314 - DNA, 371 bp, Homo sapiens
  misc_feature (1)...(371): n = a,t,c or g
nnnnnnnnnnnnnnnnnnnnnnnnnnnnnnnnnnnnnnnnnnnnnnnnnnnnnnnnnnnnnnnnnnnnnnnnnnnnnnnnnnnnnnnnnnnnnnnnnnnnnnnnnnnnnnnnnnnnnnnnnnnnnnnnnnnnnnnnnnnnnnnnnnnnnnnnnnnnnnnnnntcttaaccttaaagggctctgaatatggagatagaacactggagtcgaagtcccagccccctctgtcgctctctctgaagctcagtgactactccagtattaaatgatgcatgtataaagttagtcactctatcattatctgtaatagcagatgattggaaatgacctaaatgtttcataataaggaactagttttaaaaagcatggtc

SEQ ID NO: 38315 - DNA, 370 bp, Homo sapiens
  misc_feature (1)...(370): n = a,t,c or g
agtgactcggcggccattagctgtgtgtagttgcccgggactaggagcttaagtgaagaggtacgccttgttcggtggaaatcagccgtagccatgagtttctgccggggctagccctagagtacggagcaggcggacttttcggttccccgccccgccaggtggcggggcctactaggcctccgggcatccccggtctcaagtaggcctcatctgccggcaagggcgcccgaaacgcgggaggcgccatgtcgctggttgcttacgccagcagcgatgagagcgagccggatgaggctgancccgagccggaggaagaggaggcggtggcttctacatctgggccccntttaaggggcttgtcgcttct

SEQ ID NO: 38316 - DNA, 369 bp, Homo sapiens
  misc_feature (1)...(369): n = a,t,c or g
ggagctctacggtgactttgaagacttggaaacaggggacatgcacaagggaaaatcgggccccgacactcagaatgaagatatagagaaacaaggaagaaattgaccccgacgaagaagaaagtgccaagaaaaagcatttggataagaagagaaaattgaaggagatgtttgatgcggaatatgatgaaggagaaagcacatattttgatgatcttaaaggagaaatgcagaaagaagcacagctgaatcacgtagaatttgaagatcaagatgatgaagccagagttcagtatgatggttttcgacctgggatgtaccgtccgcgttgagattgaaaatgtccctgngaatttgnnccnaacttta

SEQ ID NO: 38317 - DNA, 364 bp, Homo sapiens
gtgaaaggtgaatggaaaccttaccctaggttaaggtttaaaaaatgttcataatatatatttgaaagttccattatttaaaatattcattagacatgctttgtaatgttaagttacttcaaaaaatcttacacaagggaagggaagtatgtattattccttcatttaagagaaagataatgtgtgaatattagttaatatttatcgtacatttactacctgtgtcgaagcgtagtgttacacacttaatttcaattatttaatttgattctaacaatgaatcccctgagatggataatatcctcttcattttacagatgagacaattgagacttaaaggttaaacaaatgatttcctaagctc

SEQ ID NO: 38318 - DNA, 372 bp, Homo sapiens
  misc_feature (1)...(372): n = a,t,c or g
cccacgcgtccgcccacgcgtccggagtttnnnnnnnnnnnnnnnnnnnnnnnnnnnnnnnnnnnnnnnnnnnnnnnnnnnnnnnnnnnnnnnnnnnnnnnnnnnnnnnnnnnnnnnnnnnnnnnnnnnnnnnnnnnnnnnnnnnnnnnnnnnnnnnnnnnnnnnnnnnnnnnnnnnnnnnnnnnnnnnnnnnnnnnnnnnnnnnnnnnnnnnnnnnnnnnnnnnnnnnnnnnnnnnnnnnnnnnnnnnnnnnnnnnnnnnnnnnnnnnnnnnnnnnnnnnnnnnnnnnnnnnnnnnncttctgttgctatttttggatatgaagtcccacaattctttggtgttaaatatttataatagctaaaatctatt

SEQ ID NO: 38319 - DNA, 369 bp, Homo sapiens
  misc_feature (1)...(369): n = a,t,c or g
nnnnnnnnnnnnnnnnnnnnnnnnnnnnnnnnnnnnnnnnnnnnnnnnnnnnnnnnnnnnnnnnnnnnnnnnnnnnnnnnnnnnnnnnnnnnnttttctagactcctttttgtttcctattttattgatttctgctattctgtttttatttcttttattctatgtattttgagtttagttttctctttttctagcttctctgaaagctcagatcattgattctaagcctttcttttctaacacacttgaaaatatataaaaatatgaagttataaatttcttcctgtatattacttaagttgcatttcatgaacttgactagtttgtgtttttattgccattcagtttgnactattcttctttgatcca

SEQ ID NO: 38320 - DNA, 375 bp, Homo sapiens
atctaaattcccaagagagggtcaaaagacctgtttagcattcagtgttatatgtcttcctttctttaaatcattaaaggatttaaaatgtcgttgtaagattatttatttctaacctacttttacttaagtcctttgatatgtatatttctctattttatgaagagttcttggattcaatggaaacaaaactgattttaaaaaggcaactcaaatgaactagtaaatagcaccaatcaaaactttctttcattagctgtgtctctgcatctaaattgttaatcattaatggtggagaattaaataacaaatcccattttatagatctaaattgtatttcggtgctttcaatttcaaattaggttaaaggaatgc

SEQ ID NO: 38321 - DNA, 374 bp, Homo sapiens
  misc_feature (1)...(374): n = a,t,c or g
aataacttctctgtgaactattaatcatcctctgagttaaataattgctcctatactattgaagtatgtagttttgtacataacttagagactttagagtctaagaaaatgatcttaatttactttaagcattggttattcaagtattcattgttgatcctcctattctcttccgtctaatctctcacctgctaaaggagatttacacattagaaagcaaagattattttcatttatccagatgaccattttctgccacaggtaacatgattgtttgacacaccattatatttaattctagtttctctcaatgaataattgtatttttgtaggaaatgtaagatttcattctgaaacataattattggnatggc

SEQ ID NO: 38322 - DNA, 368 bp, Homo sapiens
gggctaattatctactttgtgggtgtgttttgttttttcttttcagcgtgtagggcttgggctctgtttccttttattagcatgtcacctgagggtggaacaaacaattggaaataaaatttgattattttatttcttataaagtattaatttcttaagggggtttgaaatcattggtaaaattaatatcagtacattatatgtcataaattttgattatctataatgtcttttcttatctaccacaaataattgagagttggctaaattcttgcagaatatatgggaaaaaaatcatagcaaagaattcagcttccctcaaaagaaagctatttttggttccttccttcactaaaattggacccaga

SEQ ID NO: 38323 - DNA, 371 bp, Homo sapiens
ggctctcaaactcctctcctccgggcttcggctctgcgcctctgcccgcggatctggggcaacctggtacaagggatgtgtttgttccttttccaccagtgctcatcgccataccaagttttatacagatccagtagaagctgtaaaagacatccctgatggtgccacggttttggttggtggttttgggctatgtggaattccagagaatcttatagatgctttactgaaaactggagtaaaaggactaactgcagtcagcaacaatgcaggggttgacaattttggtttggggcttttgcttcggtccaagcagataaaacgcatggtctcttcatatgtgggagaaaatgcagaatttgaaccacagt

SEQ ID NO: 38324 - DNA, 355 bp, Homo sapiens
agatgtcttacatttttatattaaatgaaccttaagcatgattcttttggtaagccagtatgaatgccagtggttggggggcgggggggggagtcagttgacataagatttagtcctaataaggactctgtattcacttgattattctgacccttcctaagggagggaggtggattagataccactggaggcccattctgtattcctaatccagtctcagcactttattcatacaaaataatcaaaataggttttctacaccaaatgctacccaggcagtgctctataatttatttgcacacctgtatgtgtggtgccatgttagccactaaatctgaacttttaccctgctttc

SEQ ID NO: 38325 - DNA, 393 bp, Homo sapiens
  misc_feature (1)...(393): n = a,t,c or g
atgatccttacggccactttccacttctactcagagccgcctcggtggcctcgagcgctcgaggtgctatgcaagccgcgggccaagaacgcttcaggccgcccgctgcccctgggcccgcccacacgccagcacctgctcttccgcagcctctcgcagaacacggccacacaggggctactccgcggggccatggccctggcgcccccaccgcgcggcctgtggcaggccaaggacatctcccccatcgtcaaggcggcccgccgggatggcgagctgctcctctccgcccagctggattctgaggagagggacccgggggtgccccggccagcccctatgcgccctacatcctagtctatgccaacgatctggccatctcggagnccaaca

SEQ ID NO: 38326 - DNA, 393 bp, Homo sapiens
  misc_feature (1)...(393): n = a,t,c or g
gagcctttttcggtctcattcttcagtcttcatcgatccttttcagggtcgcttctcgaatcagtctgttagctgcccccctgcggtacaggaggtggaaaggagaccctagttcaggggccagccctgtgttctccgaattagagagcgggcagaaggggagggtgggctacggggatgcgggcgcgtgtcgggagtgaggtccggtcgccttcccctctctcggattatctgacatataatgagtgctttccttctaaacatttacaatacatgcagtacttctcctggttgaggtggtacctacctcgtaagattgctcagagagttaagtgctgtaatacatcgaaaaatgtgtaaatgcccagccgatagcttnctttttttttctaa

SEQ ID NO: 38327 - DNA, 324 bp, Homo sapiens
  misc_feature (1)...(324): n = a,t,c or g
ctctagaggatccctcgaggggcccaagcttacgcgtgcatgcgacgtcatagctctcnnnnnnnnnnnnnnnnnnnnnnnnnnnnnnnnnnnnnnnnnnnnnnnnnnnnnnnnnnnnnnnngatctgctagcttnnnnnnnnnnnnnnnnnnnnnnnnnnnnnnnnnnnnnnnnnnnnnnnnnnnnnnnnnnnnnnnnnnnnnnnnnnnnnnnnnnnnnnnnnnnnnnnnnnnnnnnnnnnnnnnnnnnnngctgcatatgcttgctgcttgagagttttgcttactgagtatgatttatgaaaatattatacacaggagcta

SEQ ID NO: 38328 - DNA, 331 bp, Homo sapiens
  misc_feature (1)...(331): n = a,t,c or g
ctctagaggatccctcgaggggcccaagcttacgcgtgcatgcgacgtcatagctctcnnnnnnnnnnnnnnnnnnnnnnnnnnnnnnnnnnnnnnnnnnnnnnnnnnnnnnnnnnnnnnnngatctgctagcttnnnnnnnnnnnnnnnnnnnnnnnnnnnnnnnnnnnnnnnnnnnnnnnnnnnnnnnnnnnnnnnnnnnnnnnnnnnnnnnnnnnnnnnnnnnnnnnnnnnnnnnnnnnnnnnnnnnnngctgcatatgcttgctgcttgagagttttgcttactgagtatgatttatgaaaatattatacacaggagctagtgatta

SEQ ID NO: 38329 - DNA, 385 bp, Homo sapiens
gggaccaagctggacctgaggctgcagtcttctctcctgcaggctgcttgccttgtctctcatgcggaagaggcattcgagttacctggtgagagaccgtgttgccccctcccacagctctctgccctgcgcgttcttccctttggtgccgagtatgtttcggtcccctccagactccaggacacgcccatgtatgtcccctgcgtgttcatcctgggcccagatccccctgccccagcaagactcgcagtgggatggctgctggcatgcccaccctgcatgcgctttgccctctccttgcaagcctggcatatagcttctctccatactcctaagggactttgcagacacccaagccactgggacccctgctaacacatgcagg

SEQ ID NO: 38330 - DNA, 383 bp, Homo sapiens
tctgcaggtaatcctggggaacctggcttgagagggcctgagggaagtcgggggcttcctggagtggaaggaccaagaggaccacctggaccccggggtgtgcagggagaacagggtgccaccggcctgcctggtgtccagggccctccgggtagagcaccgacagatcagcacattaagcaggtttgcatgagagtcatacaagaacattttgctgagatggctgccagtcttaagcgtccagactcaggtgccactgggcttcctggaaggcctggccctcctggtccccccggccctcctggagagaatggtttcccaggccagatgggaattcgtggccttccgggcattaaggggccccctggtgctcttggtttgaa

SEQ ID NO: 38331 - DNA, 384 bp, Homo sapiens
  misc_feature (1)...(384): n = a,t,c or g
ccatcttaaaaataatcctgattatttcttttacaatgtaagatggttttactatgtgtaaatagataaacaagtggcaatgtccttataaggagaaaggagagacgttcattcaggattatttttaagatgacttgcttttattagattataaacacagaacctgtaagaagtcaaaatcacttttttctggttttgttttgttctgctttgctttgtttgtcaccactgacaaataacctagacagacttactaggtttttttccnnnnnnnnnnnnnnnnnnnnnnnnnnnnnnnnnnnnnnnnnnnnnnnnnnnnnnnnnnnnnnnnnnnnnnnnnnnnnnnnnnnnnnnnnnnnnnnnnnnnnnnnnnnnnnnnnnnnn

SEQ ID NO: 38332 - DNA, 377 bp, Homo sapiens
  misc_feature (1)...(377): n = a,t,c or g
ctggccgccccactttccggcataactttttagaaaacagaaatgcccttgatggtggaaaaaagaaaacaaccacccccccactgcccaaaaaaaaagccctgccctgttgctcgtgggtgctgngtttactctcccgtgtgccttcgcgtccgggttgggagcttgctgngtctaacctccaactgctgtgctgtctgctagggtcacctcctgtttgtgaaaggggaccttcttgttcgggggtgggaagtggcgaccgtgacctgagaaggaaagaaagatcctctgctgacccctggagcagctctcganaactacctgttggtattgtccacaagctctcccgagcgccccatcttgtgccatgttttaag

SEQ ID NO: 38333 - DNA, 346 bp, Homo sapiens
  misc_feature (1)...(346): n = a,t,c or g
atcctattaatgtccatgggatttggaatggtatctactctttcttttcaatattaataatttttattttcttcatttttttcttagtttccaagactagagactaataattgctatgagtcttttcaaaaaaccagtctcttctttctctactgatttcctgtttgcaatgttattattttctgctttaatttttgttatctctttttttctgcttactttggatttaatcatctcttttgttttttctagtcccatggggtggaagtggagattattaactggaaatcattcttcctttctaacatgatatnccaaagcctaaatttcctttaacatnggttac

SEQ ID NO: 38334 - DNA, 346 bp, Homo sapiens
  misc_feature (1)...(346): n = a,t,c or g
ggtaggagcttcagcaaatgacaagtggcattttggctgagagttcatgcaggaaagattgccagtcacaaatgcctgcagagagacccatttctaatcattatcccaagctttcagttttgacgtagtgacttcttgataacctgtatcattttaaaatatatttatatcaggtgcttccatttcaattttatcttcagccaaaccctctcttttctgtactgttcattccccaggatgcaatcaatatttcattgattcatccacttatccattatcctaaaatcaatgcagacatttggcaagactgnccaatggtttgtctctntacctggggtaattattg

SEQ ID NO: 38335 - DNA, 343 bp, Homo sapiens
  misc_feature (1)...(343): n = a,t,c or g
aatcttaaccctgtcttcaaagatatattatatgcagctttctacaaaaggaaggaaatgtattactttttctatgctagttaagcttggatcttcctggtccataaaatgtcagtagctgtgaattgtactgaaatctgctgcatggttttgagatgattcttctgtacactggggatttggctttgaagacaacgttcttttttctgcttgggtgaccagcctgcatttttcataactccacaaataaaaactatgctacagccatgaagaatggtattattgagatagaaccagagagcagacattaatgattttgaccccccagtaacntagtaaaacc

SEQ ID NO: 38336 - DNA, 343 bp, Homo sapiens
  misc_feature (1)...(343): n = a,t,c or g
nnnnnnnnnnnnnnnnnnnnnnnnnnnnnnnnnnnnnnnnnnnnnnnnnnnnnnnnnnnnnnnnnnnnnnnnnnnnnnnnnnnnnnnnnnnnnnnnnnnnnnnnnnnnnnnnnnnnnnnnnnnnnnnnnnnnnnnnnnnnnnnnnnnnnnnnnnnnnnnnnnnnnnnnnnnnnnnnnnnnnnnnnnnnnnnnnnnnnnnnnnnnnnnnnnnnnnnnnnnnnnnnnnnnnnnnnnnnnnnnnnnnnnnnnnnnnnnnnnnnnnnnnnnnnnnnnnnncggncttccaggcctatgggctttaaatactatctatatgctaaggaatgccaaatttaatttccca

SEQ ID NO: 38337 - DNA, 349 bp, Homo sapiens
  misc_feature (1)...(349): n = a,t,c or g
gcctccgacagcgatttcatccgcaccctgcggggcaacgtgggggcctatccgtagctttcagcgtttcctggaccctaccaggacaagaatcgcggggagaggtgcgaagaaggtctggagaggaggaggcttgggacaatgcagagtcctggaagtgaggctgaccgctgaccgctgtcaggagggacatggaccgctgccggggaatcatgggatttcccaccggcccagtcatcttccacgtcgggaaaagggaaaaagctgctttcccatggcgtgtgccncgtgggaaagggtcttnggccaaanaagaaggcctttttctgnccttcaagctggtttccgc

SEQ ID NO: 38338 - DNA, 390 bp, Homo sapiens
attctcacagcaaccctgggaggtaggccttatggtttctgttttgcaaatgaagaacctgagattgaagaagagtagagattggaggatcagatcctgagaggtcccatgtgctttccaataacagttcagtatattagaagacagtgtggcatccacggccaagtactactagtgagtaatacagtaattgctttttacatttgataaacacggagaaagggaaggcatttcgggtcattggggcagctaggacttataagagcagtgctagggtggcagcagcattcaggtagatggtaaggagaattaagttagagagacaggatcctcagtctggttcagaagtaaatatataagggcctgttctatggaatgtagtgagaagtg

SEQ ID NO: 38339 - DNA, 367 bp, Homo sapiens
tttgtgtttaacaaagtaattaagcaagtcgtagatccttgaacctgagattgacactccttgactcatttgccctttgttagttgttatttattgtattttttacctctgcaaaaatacacagtaagtgagatatctttagttgtgttgtaatttcagaatatgataaatgctctagctggcattgcacagatttcaggtggggcattcagagggggacttagacctctgacatggcagacagattttttttgaacctttagtaccatcattcaataaacagtcagaatatcttagttataattaagagagacaaccaacagcccattttgctccagagtcactcatcacttaaaaaaaaaaaaaa

SEQ ID NO: 38340 - DNA, 384 bp, Homo sapiens
ttcctctcctataacatggttcacagtgtttgtagatgtcttttaggccccttcaagttatcctataggaattgggaactggaacaaatgctgatgctctggctcctgcaatgctatgaggaataaattgtctgtcttctctgattcaggagtcttatgtcttctacaagcatccatgaaactatggcaggctagtctcagacccttcaaagttcttgaaacttgggaatatgaagaaggcatgcttatataagcaaatagaatagcaatggtattgtgaggtatgaagaatctaggaaaattgggtctgtgaggatgtggggtgagaaaagacagaagtaaatgaggaaaaaaatgaagacacaggtagaggggatagcatga

SEQ ID NO: 38341 - DNA, 384 bp, Homo sapiens
cggacgcgtgggagccagagctggagtatctcaggtgttaaaccgcctgacttttgcgtctactctttctcacctgcgtcgtttaaattctcctattggtagagacggcaagctagcaaaaccaagacagttgcataatacgttgcggggaatggtgtgtcctgccgagaccccatagggccatgctgtaggacttgtgaagaatttagccttgatggcgtatatttcagttggatctcaaccatctccaattctggaatttttagaagaatggagtatggaaaatttagaagaaatttctcctgcagctattgctgatgcaaccaagatttttgttaatggctgctgggttggaatacataaagatcccgaacaacttatgaa

SEQ ID NO: 38342 - DNA, 380 bp, Homo sapiens
ggcattcttagctgattgaaatgagacaaagggaataaatggctgtatttgtgctaagagcaaaggatgcatcttcccacagcctcctcgctttactctgccattggtagcttaaagactttctttttccttgtggtctcccttttttcaaaattgaagttgggttggctctttgtgaacctctcatccccacagcagaatcaccaacactctccgcttcccccagcacacacacatacaacacagatcatttcccagttagatccgcaggaagtaggttggtgggggtggatgtagctgcagaaagcatgcacaactttgtgaaagaggccctgccttgtgcatgtccatagtgaggctacagatggcttattgtatat

SEQ ID NO: 38343 - DNA, 382 bp, Homo sapiens
gcataaatgctaggagcagcagctctatggttatgaggtggggagaacggaatgacgtcatcgcttgggagctgctgcaggatggagtggaaagctgctgctgatggcattgtttttgtggcagcaagctgaatgacagatcctcactacaaagatacccctttggcccccgtgtaggcctccttggttcgggtgtttcaccatgccagcacagcgccatgagtcctggatgcatgctgctgtttgtgtttggctttgttggcggggcggtggtcattaattctgctatcttagtatctctctctgttttgctgcttgtgcacttttctatttctaccggtgtgccagctctgacgcagaacctaccaaggatactcagaaa

SEQ ID NO: 38344 - DNA, 380 bp, Homo sapiens
  misc_feature (1)...(380): n = a,t,c or g
ggaaagtgtgagggatgtcgcggctttacaacaacacactcttgccggaattaatccattccctcaagaattaatacagtctctagaaagcaagaattcactcactacagtgagaacagcaccagcaattcatgaaggatctgccctcataacccaaatacctcccaatnnnnnnnnnnnnnnnnnnnnnnnnnnnnnnnnnnnnnnnnnnnnnnnnnnnnnnnntggtacaaacaaatcatattcaaacaatagcaggcggctatatttttttaaaaaaaaggaaaacagcaagtgttagcaaggatgtgaaggaataggaactctcatacattgctagtagaaatgtaaaatgatgccagccactgtcgagaacaatt

SEQ ID NO: 38345 - DNA, 382 bp, Homo sapiens
  misc_feature (1)...(382): n = a,t,c or g
caaatatggaataggagaccatttgattttctaggctttgtggtagagaggtgaaggtatgagaattaatagcgtgtgaacaaagtaaagaacaggattccagaatgatcattaaatttgtttctatttattcttttttgcccccctagagattaagtccagaaatgtactttctggcacataaagaaatcttgaggactttgtttaaaccttccataaaaaaacaattttcggtttctcgggtnnnnnnnnnnnnnnnnnnnnnnnnnnnnnnnnnnnnnnnnnnnnnnnnnnnnnnnnnnnnnnnnnnnnnnnttgtgtattttattcaagatgagttggacccattgccagtgagtctgaatgtcactgacagccctgt

SEQ ID NO: 38346 - DNA, 377 bp, Homo sapiens
cacctgcagggtctcactcatgctgcctccctgtaaggctcagttggtggcactgaggaagcacactcggatgtcaccactgtctgtggaccctgactatgtgtcgggttgcatcttcctccacacccatgcctgcttcctgttctggtgccccttgcctttcattgtggcaactgcgtgcatgatctgtctgcctttctgctgctgcttttccaacaccctcctcacctggaagctgggcagttaaggcacagtcattaatgtgtcattgcaatagcacctacagtcaaagcaaaaactacaactgcaaaactggtgttgcgtaaacagaacagccaatgacttgatccagatagatgatatgtttctactagtgg

SEQ ID NO: 38347 - DNA, 352 bp, Homo sapiens
  misc_feature (1)...(352): n = a,t,c or g
gttttgctttttgtgctctgtattgggaaggcagataaaatgccaggtctggactgcctctggggataacctcaccctgtgggatgtgaatgaatagcatcttgcctggtaaatccacaggaattgataaggcaggcgcagttctcccaaacaggccttttctctttaagctgtagctgtggtttctgcagcaattttgtttttgccttgaaagaggtgctctggattatcacacctccatgtatgacaatttgtacctgcatggaattgaagactcggaggctgaagaataatgtnatgtgttacccannatgttgtnannagannttcaagccatgnanaanactaggcc

SEQ ID NO: 38348 - DNA, 330 bp, Homo sapiens
  misc_feature (1)...(330): n = a,t,c or g
gttaacttgttcctctatctgctgtgtttcttatataaacttaaagttagttccaaaggcttgataagatttagagcctttttttttttgnangggttnntnggnctncnnatggggncnaagnnggaaacntcaaanancgggtggccccnntttaagggatttaaaggagncttaaaaacngatggggnnttggggggtgnncnttnggaccnttcngtancttttttttnnncaanggatttaagnncccaanangggtggcggcctaantaaattccccaagggggtngnaaaantggnttttctnccccaaatccnaanatccct

SEQ ID NO: 38349 - DNA, 354 bp, Homo sapiens
  misc_feature (1)...(354): n = a,t,c or g
acattttaatggttcagatcttcaaatatcattgatttaaaaactaaaaggtgagtaaatttttaataaagcagacaaactgagataaacatggatgagttgcttaagagaattcactatatttttaagatctaaataagcaatatatgcttcaaaataggaatatatagagttatgatttgattccatttgggctaaattttttaacttaaagcaaaattacatagacactaattttggagtagcaaataatatagaaaaaaatgcctgcaaatgttcttttattttggaaggacagtgctacttaattcggattcactgnatattttcacttttaaagtataacaattgttg

SEQ ID NO: 38350 - DNA, 551 bp, Homo sapiens
gagatcagttactaggatgagagatgtgtgcagctgtggttattatttaacacagttgtagacttaattcagaggttctgacagtgtaggctgtggacttctagtccccaagacactttcaggggtttgcgatgtcaaaactctttataatagtacaaaacccttttgtaataatacggagaaggtatttacatttccctttgttgacatttgcactgatgctgcaaaagcaattgttggtaaaacttctgataccttagtatatgtcaaggcactggctacactggtagtcctggtgttcttcactgccaagtgctggcttcacaaataattcactgaagaatgccttgatgaagcactaaaagtaatgttattaaatcttgacccttggagacccatctttttaatattctgtgtgatgaagtgggaagtctgagtaaagcccttctgcatgctcggaagctgatggttttcttgaggcagaacacttgtatgattgaattgcaagctgactcctacttttaaaaggatattgttttatttgaaagaat

SEQ ID NO: 38351 - DNA, 509 bp, Homo sapiens
aaggcacaaagcctgctcgtacctgccaagaactgtttactgaaaaggaattggagatgtgggatgacagtgatcctagctagtctggccatggacctctggcatggacttttcctttccaggagaatgaatacctcttgtactgtttgctgtgtgcttcttccacccccttgtaccaacaaagagatattgaaaaagagaatatgggattcgggccagggacagatgcaaatatccattgtttacagaaccttgttgagagatgcctaactcacagagaacggcagtgaccatcaggcatgctgtactgttcatttggcctcagttccgttagccctggtccttagctccatgcatgcccccttgtgggagttgattttcttattatccgggagggggtttcaccagaatccagcatgtattttcccagaaatacaggtgttcttcaagattatatgttttttcctttgagggaagttgaaataaaatggtttcatgggaaaaaaaaa

SEQ ID NO: 38352 - DNA, 519 bp, Homo sapiens
  misc_feature (1)...(519): n = a,t,c or g
taggatttcaaagtgccctaatagtgtgagtctccagttcctagaatatgaagagtgctgtcgttggggtgaaaccatgagactgacagatctgcttgaaatggggggtgtgggaggtggtggcgggggttattctctttccttcaggaaatgaacccttcttacatcattcaagttctgctctgaggatcaagcttgggtctgatttaactcagcgacactgtcatttctgcttcattactggactagagggttgagccacccacttgccatttgctcctgtccttccaggaaatcacaattttcatcagagcccangagattatttgagactcaggattcagatcagaggttcgactgtggctgggacaggagttgngngtataaattcaccangtggcctgancgcacggggacctccaggnctgtnttgancatcctctcncactgcctcnttctcgttgnggcaaagcancacgtatcacctnattcatcnctnggncacatcgcctttgattg

SEQ ID NO: 38353 - DNA, 362 bp, Homo sapiens
cctaaatgctagttctcagcagctgcgtggcttaccgttcgccatttccaccaccgccagctgccagcaccgctacagatcacagagatgtgaacagacaatggaaagcactcttagccttgcagtggtctacattttttaggaaccaatatttcagcattctttattacccggcacgctgtgtcctttgcagagttcaagtttatgttactgccagggtcagacagtcatttgctgctgctgctgctgctgctgcttctcgaactggatgcattaggaagctgctgtctgagtgtaggaatgtcttgctaagaaagcaatgtcttccttcatccttttctttcttccctctgcgtgccttg

SEQ ID NO: 38354 - DNA, 359 bp, Homo sapiens
tgtagttgttttttaaaaattgtgacctatagtctattaaataatttactataggtcacaattttatcttggatttaattaaaatttatttttaactggaaattaacttttaaaaaggctgcaagggcctttagaaattgattatattttgttattaattttgggaagacttaacagcaaatgtctaacattatagaataagtgaaattggagaatatgtaataagttttgtttgcaggtaacaggactggatttttttttctttgcactactttatatgctggagattgagagagacttcaaactgtgaatgtttactaatgtaacagttcaatgacaatcattggaagaatgatttc

SEQ ID NO: 38355 - DNA, 363 bp, Homo sapiens
ggaagaatttgctttcccagttgtatgtataatttaagtcgtttactagatagaacttttttttaggtttagatggccaagacatctatatggtttagaaggcagagtatacattttcctttgcaaacagtatgagttaaaactttctatgctaaatgagaatgcggcataaagtctccacttactgaaatttaaagattcaacaagacaaaccgagaagggggtcagaggagctctaggaaaggcccaggagagggcagttggaggcaggtgtgagcatgaggagctgccccctgccagggcatggctcaggtggcacagggacatctgatgaaccctgcccgaggttctcggtgcctcccg

SEQ ID NO: 38356 - DNA, 332 bp, Homo sapiens
  misc_feature (1)...(332): n = a,t,c or g
ggagaaataaaaggactgaaaactctcgtgtgtgtatccgaatgattgggcataatgtggagggaccattcagcaaagccttcagagaccagatgtacattattgaaatgccgctttcggaggcccccttgtgcatttcctgttgccctgtgaaaggagaccttctcgttggctgcacaaataaattagtcttatttagtttgaagtaccagatcattaatgaggaattctcactattggactttgaacgttctttaattatacacatagataatatcactccttgtgaggtttctttttgtgttggatatgttgctgcntggcaaanctta

SEQ ID NO: 38357 - DNA, 341 bp, Homo sapiens
  misc_feature (1)...(341): n = a,t,c or g
cgtgactccgattacaggaaggggagcctcctctctctgcccttgagaacagtctctgcagggctttccagaaaagtctggaacagatccgggtttccgagggcctccgagcacccttgcatggtgagcatttgaatcctcaggtgccatcatcccattttatgggcaaggcacatgggtattggagagatggcatcacttacccaggacagctcggatgacgccaggatctgaaacacatcggtatgacctcctgcctttgngnctgcctgngacttcacctattgganatnaataaagannactttaannnacnnnnntcnagctnnnntattcctaag

SEQ ID NO: 38358 - DNA, 342 bp, Homo sapiens
  misc_feature (1)...(342): n = a,t,c or g
gaacctaccccagatcctggaggagtccaggtctgaatgagtcagaagggcttctgggaccaattccagctcctgacattcccccagtcctgcctctcccccatcctatcagggacatttggctcctcttagctggctctgctcatccagaggatattcccccatcccccccccatcaagtttggtgggcagagctacagatgggacccaagggagtggccgagcctcactgcctaaaccaatgcccttctcatccctgtttccccaggctcctggctgtttatctgccccaaaggagaagcctcatggggttgacatagggccttttttgccntcttgggc

SEQ ID NO: 38359 - DNA, 406 bp, Homo sapiens
gtgaaagaggactaaattcttccaaacaaaaggtggagattggcaaactgaatacaagagcaaaacctatctatggactgcctgcaagaggtgcattttaaatacagatagatatgtatattggctgaaggaaaaagaatggaaaagatatcatgtgagtaaacattagaaaagctgaagtgaaaaatgtataaatatcagagaagatagatgttaagacaaagaatattactagaaatgactatgttttataatgcaaaatagttcagtacagcagaaagatacaataatttgagtgcatatgaacttaaaagagaacttcaaaatatatgaagcaaaaattgacagaatgcaaaaggcaacaaacaagattaaaatggaattataaaaatcactcaatccaaaa

SEQ ID NO: 38360 - DNA, 354 bp, Homo sapiens
  misc_feature (1)...(354): n = a,t,c or g
ttgancccctgcaggtaccggaccggaattcccgggtcgaggggcccaagcttacgcgtgcatgcgacgtcatagctctctccctatagtgagtcgtattatnnnnnnnnnnnnnnnnnnnnnnnnnnnnnngtcgtgactgggagatctgctagcttnnnnnnnnnnnnnnnnnnnnnnnnnnnnnnnnnnnnnnnnnnnnnnnnnnnnnnnnnnnnnngagattnaangctntanggaaaanntaaaattttnaagggaataaggggtnaannnacntgcnnannctggnngctnnaaagtttggntannngagatnnattaatnaaatnttnttccccggaacntangaat

SEQ ID NO: 38361 - DNA, 333 bp, Homo sapiens
  misc_feature (1)...(333): n = a,t,c or g
agaccatggagctttaaattggaagaagtacagaaatacctgtgtggagtctcctgtaggctattgtctgggtgttggttatgcttgagaattccacgttagcttagcctctgcatggtttaggaacccccagccaggaaaagcccaatattttggcaaattataattcagttttcagcagttttctcacctccatagtgccctttgaaacttctcactgtccctttacttgaaccaaaggagaagaatgacncttattngttggggccaacctgcnttacctnntntagtaccaccttggcntacntcagttccnatatatgcanaattttc

SEQ ID NO: 38362 - DNA, 336 bp, Homo sapiens
  misc_feature (1)...(336): n = a,t,c or g
cttttttcctgtcaaaacctgccaaccacatttacagaaactaaagaaaaaagagagttacacaaaatattgtatttgagcatcgatttaatttccttttgatatttacctgtgttgtaagtgaactatgccagttgaatgcaattgagcagtgcctatgactaatgaactggaatgtaaactccgtgcagaatggtcanaaccgctgggtgtcgtttccatttcaaangngattagggnctcaaagttcagctnagngcctggngtatatgcagngtccatttgngancctgccaaagcggncntgaaacttnatggaancggaaccacgtttgc

SEQ ID NO: 38363 - DNA, 370 bp, Homo sapiens
  misc_feature (1)...(370): n = a,t,c or g
ggcacataagcaaggttttgaaggttgtgtaggagtttgagaagcaaagcataaaatggcaaaaagagagatcactgtgggtaaaagcagagtcttaaaagctcagggaatatttagggagcagtgaggagtgctgtcttctctaattgttatttttcagtcacaaaaaccatcataaaaacgagcagcctagattacaatctaaaaggtaattatatnnnnnnnnnnnnnnnnnnnnnnnnnnnnnnnnnnnnnnnnnnnnnnnnnnnnnnnnnnnnnnnnnnnnnnnnnnnnnnnnnnnnnnnnnnnnnnnnnnnnnnnnnnnnnnnnnnnnnnnnnnnnnnnnnnnnnnnnnnnnnnnnngtggcgc

SEQ ID NO: 38364 - DNA, 361 bp, Homo sapiens
  misc_feature (1)...(361): n = a,t,c or g
taagccttaacatgtatcttcattcagaaaacagttatattgtcataccatagtaggaagaaaaacctttatttggaatatacactactgtaagtttgtacagatcatatacctaccacctgtctttgcttaaagagccttgattacataaatatgtaggaaaaaacatattgagttcaaaatttatatctaacattgtttatgttatgatttttttttaattgcaaagactaggtgtatatttttttctgtttttctaaatgacccgtggtacttaataggtgtactaaaattgtgttgggagcagggatttggaaatttctgagagatgtgtagttaatttagtaattctgnttcatga

SEQ ID NO: 38365 - DNA, 368 bp, Homo sapiens
gtctgattggcaccggctcccattccggctccagcctccaatccgacccccatttcggctgcagcctcggacctagctccggccctcggtctatccggttgcatcctccctccctgttccggatcttatcttgcgccagcgcctactccaggatcccgtagccagacctcaagccatggctggtcccttctcccgtctgctgtccgcccgcccgggactcaggctcctggctttggccggagcggggtctctagccgctgggtttctgctccgaccggaacctgtacgagctgccagtgaacgacggagctgtatcccccgagcgctgagtacccagacctccgaaagcacaacaactgcatgggcag

SEQ ID NO: 38366 - DNA, 350 bp, Homo sapiens
ctgaagttaacaagacatacatcttctcttactaacttaagccatatctgtcaactctatgtttgatttttctgaccctggtgcttttacttctgtttctgccaaacttcagcctactctatggggaaggtgagtaaaactagtagttagaacaaatatgaagactgaaaaaaactaaacatactcttcataatgagatcctgttcagagaacagtagtgatcaaagtgcaaactgttggaaaatatggatatatgtacatctgtacatgtatatagtgtataatatgtatgtatatgttattgctcatatgcagaaatctatccatttgcagacagcccaggtgggtca

SEQ ID NO: 38367 - DNA, 353 bp, Homo sapiens
gccattaggcagcctaattaatgctggaggctgagccaagtacaggacacccccagcctgcagcccttgcccagggcacttggagcacacgtagccatagcaagtgcctgtgtccctgtccttcaggcccatcagtcctggggctttttctttatcaccctcagtcttaatccatccaccagagtctagaaggccagacgggccccgcatctgtgatgagaatgtaaatgtgccagtgtggagtggccacgtgtgtgtgccagtatatggccctggctctgcattggacctgctatgaggctttggaggaatccctcaccctctctgggcctcagtttcccttcaaaaaaaat

SEQ ID NO: 38368 - DNA, 354 bp, Homo sapiens
  misc_feature (1)...(354): n = a,t,c or g
ggttaatttattaccgacaaaaaaattcaannnnnnnnnnnnnnnnnnnnnnnnnnnnnnnnnnnnnnnnnnnnnnnnnnnnnnnnnnnnnnnnnnnnnnnnnnnnnnnnnnnnnnnnnnnnnnnnnnnnnnnnnnnnnnnnnnnnnnnnnnnnnnnnnnnnnnnnnnnnnnnnnnnnnnnnnnnnnnnnnnnnnnnnnnnnnnnnnnnnnnnnnnnnnnnnnnnnnnnnnnnnnnnnnnnnncatgtttagatacacaaataccattgagtataattgtttacagtatccaggcaatttggatttgtagcctcgaagtgataggctgtaccatcaggctacatcatctaggtt

SEQ ID NO: 38369 - DNA, 376 bp, Homo sapiens
cactgttaacagtaattatctccaggagtagatatgaggacatgaagtacagtaggaactttttctttttgggctttttttggttgtttacgcttttttgtttaacatgaatgtatgttatgtttgcaataacagaaataaagatagaaacaaaagatatgtatttcctaacatatgcttttgcttaaacacttaatgatgtcttaccactccctgctccatgtcccacttcgttgcctacattgtaattgcgtgtctaaaggcaaacagccctgtgtaaactgcttagattctgttctctcatcttcctttactttactgtgtgtcccacttttcttgagctccatcatctagtattcacctgaaataggatcga

SEQ ID NO: 38370 - DNA, 375 bp, Homo sapiens
gagcctagctgacttcagcatcacctcaccctttggtctccagtattacttctttacattttacttcattagctatttcttaatattaaatgtctgaagagtgtggcactgtatcaggagttggggcattgaaaggttgaagacatcatgaaatatctgggaaactctgctcttaaggaaattgcaccgatgttggaactcattgtccagttaaagagctctttggggactcaagcatattattcaacatgttgttttgggattatcttcaaatgatagtcacctacctctttcatttctaatttttattcacaggtaaaattgtttttgtccatagggattttataggacataagcactgtagtagatctagta

SEQ ID NO: 38371 - DNA, 373 bp, Homo sapiens
caccatacctaatactagcaccttgtctgatttgggattttatataattggaatcatgcagaatgtactctttggggtcttttttctttcactcaatattttattcgtgtcattcatctatattgttgagtacaggtgtagtttgtttattcccattgctgtatagtgttccactgaatgactttaatacaagttacttattcattttataaataaattccagtttgggaatgttgaagatagcattgttatgaacatctttatagttgctacacaatgtgaagctgtatatgctcacatttggaaaactcatatatgaaaacgctgtgtaaaatatgtatatatttaattttttgacatattgagatagagg

SEQ ID NO: 38372 - DNA, 365 bp, Homo sapiens
aaattagaaacttttgatggaaagtaggttgttttattttctgtatgacttttgaatatttgtacttttgagaaaattattagcaccaagtgtttctcaaaatataatttttaaaaaatccttaataggcttttagctatgtgctttattgttttatcacaatgcagtttatttgtagtttctctctttttttcctcacacctatggtttttttacttccaaaattattttcaaataatccatttttggctttcatcattatccctactagatgttatgtgttcttttgcaattgtttctgcttatacctttactagcaaagggaaaaataacaatttggtgtcaatgatctggtgaaaaatagg

SEQ ID NO: 38373 - DNA, 376 bp, Homo sapiens
gtaattctgaggatggtcttgtgaagaaagcgtcatgaacgccttattctagatctggagatggcatccaggattatgaatgtcttgcccatcaccacacaaccagaaatccgcaaagctaggatttatgtatgaggatctttggactccaaacctcactttttcctcctttacatatctcggttaaatgttattaaatagacttcaccatttgaattttgcataaaaatgtccatctacccagataattttaattattctagggtcatttccaaatttcttctgtaacagtggggcattttattttctctctactacttggatgtatttaatgaccagtatattggcctacctaaaaggaaattatcattcaacc

SEQ ID NO: 38374 - DNA, 360 bp, Homo sapiens
  misc_feature (1)...(360): n = a,t,c or g
caccatttggcaaaccccaatgcaaaaataggaaggtgcaaggttgtggaagaacaggatattcacattatctaagataatcacnnnnnnnnnnnnnnnnnnnnnnnnnnnnnnnnnnnnnnnnnnnnnnnnnnnnnnnnnnnnnnnnnnnnnnnnnnnnnnnnnnnnnnnnnnnnnnnnnnnnnnnnnnnnnnnnnnnnnnnnnnnnnnnnnnnnnnnnnnagtccnnnnnnnnnnnnnnnnnnnnnnnnnnnnnnnnnnnnnnnnnnnnnnnnnnnnnnnnnnaccacaggtatctcttnnnnnnnnnnnnnnnnnnnnnnnnnnnnnnnnnnnnnngactggctctaccctaagtgc

SEQ ID NO: 38375 - DNA, 368 bp, Homo sapiens
  misc_feature (1)...(368): n = a,t,c or g
tgtttctaccccctattcattacagtcaaattaacaggcaatataataggtctaacagaatgcttgcatttcattagggaaaaatgaacgtctctctcctgaaacaggttgtcggtaccttgaatgacataatattggtgtatagactaggttcagcagagggattttttccacatcttgaatgaaaatgttaaacatgtgatgcacagagtattaacctgtttcaaaaaagtatagataaataatttattaaaaaatatatataccttgtatatttaagccatatttgagaacaggctangataggattattttaaaaaaagatatttactagagttagaaattacaacctactgnttaaataatgg

SEQ ID NO: 38376 - DNA, 364 bp, Homo sapiens
gtagatgccccaaggaaccaaccaacataatttccagggggtgattttgtttttagaagagctgctcccctctgttaggaccagccaagtcacatttttggacgtccgtggactctgatcaccacagccctcctcttccgtgagccttccttactctctcgagtgcattagctcattttttttcttttgctggttgtcaccttattcctgttttagtttttagcagcttaaaatacgacctctcaggaatatttgcaagtgaaaataacaatggtccttacactaccacaacatttggtggtgggagttccgttgcaggtctcagctataacatagtcatttatgagggatcttaccaataggg

SEQ ID NO: 38377 - DNA, 336 bp, Homo sapiens
ggccgagacgggtggatcacctgaggtcgccctgatgagatattttattaccaatgttagtattgagaaactgaaatgtttgaagaagcacaacccaggatcgtgctggtagcaccacagtacttaaactgttggtcaattaaggccagaaagggaaattgttaatttagctctggtgctttggtttacaggaacataactcttaactgacatctgacatcatgatagccatatgtgctcagctctgggtagagtttctgcagttactcatctgaactaatgaacaataactgaccactagtcactttatgccgtgtaactagctctaggccatac

SEQ ID NO: 38378 - DNA, 334 bp, Homo sapiens
ggacatacgtgtgttgaaagcctagaaagtgcccttcttgattcagaacacgaattttggtccagttgttccttcagtgaacatttattgagcaactactctgtttggtcactgtatgagataatggctgtacagtgatgagctaagcgatgcagtacctgcccgcatggaccttctgatctagccagggagtcaagcaaaccctaaataatttaacaaacttggtactagttctctttaaggaggtaatatttaatctgagacctgaaagatcaactcccttcgttcttcactgctatcatatgttgcatctgacctagatgtaggcttggga

SEQ ID NO: 38379 - DNA, 347 bp, Homo sapiens
  misc_feature (1)...(347): n = a,t,c or g
gcgaaggctctgctgcctgcagggcagagaggagagggaggaggccagcgagagggagcctctgtcggggcgtgggaggaaagcaagataacgcaggcgacccgagaaggacggtgaatctgactggccagactgggaatcttgtctgtcaccgaggctggagtgcagtnnnnnnnnnnnnnnnnnnnnnnnnnnnnnnnnnnnnnnnnnnnnnnnnnnnnnnnnnnnnnnnnnnnnnnnnnnnnnnnnnnnnnnnnnnnnnnnnnnnnnnncccgtgaaggaaacggannnnnnnnnnnnnnnnnnnnnnnnnnnnnnnnnnnnnnnnnnnnnnnnnnnnnnnnnn

SEQ ID NO: 38380 - DNA, 347 bp, Homo sapiens
  misc_feature (1)...(347): n = a,t,c or g
gaatagtatctcattttatggacatactcatattttatgcattcatttgtcagctaatannnnnnnnnnnnnnnnnnnnnnnnnnnnnnnnnnnnnnnnnnnnnnnnnnnnnnnnnnnnnnnnnnnnnnnaatgnnnnnnnnnnnnnnnnnnnnnnnnnnnnnnnnnnnnnnnnnnnnnnnnnnnnnnnnnnnnnnnnnnnnngtagaagctttcaagctgccgtactgtttccagagtggctgcactattttccattgatgttgaacatcttttcatgggcttatcgacgatttgtatatctttggagaaatgcccattcggtttctttgcctgatttttaattat

SEQ ID NO: 38381 - DNA, 356 bp, Homo sapiens
  misc_feature (1)...(356): n = a,t,c or g
gggaagagtgcctggaatcagaagaccctgttgaggctgaatttagctgtatgacctcatgcaagccatttaaactctgtgcctcagcgtcctcatttttaaaaggaggtttgatctctatgtttacttccagctctgattctgggattctaatccacaggacttgggtgttagggtggaacctagaannnnnnnnnnnnnnnnnnnnnnnnnnnnnnnnnnnnnnnnnnnnnnnnnnnnnnnnnnnnnnnnnnnnnnnnnnnnnnnnnnnnnnnnnnnnnnnnnnnnnnnnnnnnnnnnnnnnagtattaccnnnnnnnnnnnnnnnnnnnnnnnnnnnnnnnnatattaattac

SEQ ID NO: 38382 - DNA, 357 bp, Homo sapiens
  misc_feature (1)...(357): n = a,t,c or g
tagaagcaacaatacatatccagaaacaatgagcaaatctactgcannnnnnnnnnnnnnnnnnnnnnnnnnnnnnnnnnnnnnnnnnnnnnnnnnnnnnnnnnnnnnnnnnnnnnnnnnnnnnnnnnnnnnnnnnnnnnnnnnnnnnnnnnnnnnnnnncttttccaaaagcaagttacgcttgaagaataatggaaannnnnnnnnnnnnnnnnnnnnnnnnnnnnnnnnnnnnnnnnnnnnnnnnnnnnnnnnnnnnnnnnnnnnnnnnnnnnnnnnnnnnnnaataagatataatactgaataaacaggaaatcatgattctatatataaatgaaataaattgaaagttttat

SEQ ID NO: 38383 - DNA, 414 bp, Homo sapiens
  misc_feature (1)...(414): n = a,t,c or g
agnnnnnnnnnnnnnnnnnnnnnnnnnnnnnnnnnnnnnnnnnnnnnnnnnnnnnnnnnnnnnnnnntntcgaggatccgaattcgcgnganatntctcgaggannccaattcgcggnnnnnnnnnnnnnnnnnnnnnnnnnnnnnnnnnnnnnnnnnnnnnnnnnnnnnnnnnnnnnnnnnnnnnnnnnnnnnnnnnnnnnnnnnnnnnnnnnnnnnnnnnnnnnnnnnnnnnnnnnnnnnnnnnnnnnnnnnnnnnnnnnnnnnnnnnnnnnnnnnnnnnnnnnnnnnnnnnnnnnnnnnnnnnnnnnnnnnnnnnnnnnnnnnnnnnnnnnnnnnnnnnnnnnnnnnnnnnnnnnncntgtnatcgtccgactnntttgtnnccaagnttgngccntntncctntnngggg

SEQ ID NO: 38384 - DNA, 423 bp, Homo sapiens
  misc_feature (1)...(423): n = a,t,c or g
agggnnnnnnnnnnnnnnnnnnnnnnnnnnnnnnnnnnnnnnnnnnnnnnnnnnnnnnnnnnnnntctcgaggatccgaattccnnnnnnnnnnnnnnnnnnnnnnnnnnnnnnnnnnnnnnnnnnnnnnnnnnnnnnnnnnnnnnnnnnnnnnnnnnnnnnnnnnnnnnnnnnnnnnnnnnnnnnnnnnnnnnnnnnnnnnnnnnnnnnnnnnnnnnnnnnnnnnnnnnnnnnnnnnnnnnnnnnnnnnnnnnnnnnnnnnnnnnnnnnnnnnnnnnnnnnnnnnnnnnnnnnnnnnnnnnnnnnnnnnnnnnnnnnnnnnnnnnnnnnnnnnnnnnnnnnnnnnnnnnnngtttgnnngncttantacacgagntaaggntntgcaggaaagaaattatctttggnatctgcatnangcta

SEQ ID NO: 38385 - DNA, 408 bp, Homo sapiens
  misc_feature (1)...(408): n = a,t,c or g
ggttatgaggnnnnnnnnnnnnnnnnnnnnnnnnnnnnnnnnnnnnnnnnnnnnnnnnnnnnnnnnnnnnnnnntctcgaggatccgaattccnnnnnnnnnnnnnnnnnnnnnnnnnnnnnnnnnnnnnnnnnnnnnnnnnnnnnnnnnnnnnnnnnnnnnnnnnnnnnnnnnnnnnnnnnnnnnnnnnnnnnnnnnnnnnnnnnnnnnnnnnnnnnnnnnnnnnnnnnnnnnnnnnnnnnnnnnnnnnnnnnnnnnnnnnnnnnnnnnnnnnnnnnnnnnnnnnnnnnnnnnnnnnnnnnnnnnnnnnnnnnnnnnnnnnnnnnnnnnnnngngantnatgggnnttnttcgncnnnggtncancttggctgctactgcattaatggngntcntannntncttggt

SEQ ID NO: 38386 - DNA, 299 bp, Homo sapiens
  misc_feature (1)...(299): n = a,t,c or g
nnnnnnnnnnnnnnnnnnnnnnnnnnnnnnnnnnnnnnnnnnnnnnnnnnnnnnnnnnnnnnnnnnnnnnnnnnnnnnaatatccaggactggttaaaaaaaaaaattgtatttatattacatatattccacacattaaatatctaaatggacagttgcctaatggtggggaaattagggagtgattgcctagtgatgtgggtttctttctggaataataacaatgttttaaaactgattactgtcacttaatatctcaataaaggcttaggattgctctcagtccanagtcttaaaga

SEQ ID NO: 38387 - DNA, 320 bp, Homo sapiens
ccatcttccaggtagggcctacgcgtggctcccgggcgctacgtgttcgacagacttgaaccgcgaccttgtggcctcagaggtcgttcattgggaccgtggggagactctctaacctgtttgaggtccattggcatgggcgggttaaaccatgttctgccagacggggagcagcgtgcgccgggtcgggcctgggccgtgggctgagaaccggactgcgatgttgcggccctgcggggggacatttgcgagaaagacgagactgagtcgcttggggtgaggcgactcgagttaatctttaaaagacttcgttttatgtt

SEQ ID NO: 38388 - DNA, 409 bp, Homo sapiens
  misc_feature (1)...(409): n = a,t,c or g
gaannnnnnnnnnnnnnnnnnnnnnnnnnnnnnnnnnnnnnnnnnnnnnnnnnnnnnnnnnnnnnnntctcgaggatccgaattccnnnnnnnnnnnnnnnnnnnnnnnnnnnnnnnnnnnnnnnnnnnnnnnnnnnnnnnnnnnnnnnnnnnnnnnnnnnnnnnnnnnnnnnnnnnnnnnnnnnnnnnnnnnnnnnnnnnnnnnnnnnnnnnnnnnnnnnnnnnnnnnnnnnnnnnnnnnnnnnnnnnnnnnnnnnnnnnnnnnnnnnnnnnnnnnnnnnnnnnnnnnnnnnnnnnnnnnnnnnnnnnnnnnnnnnnnnnnnnnnnnnnnnnnnnnnnnnnnnnnnnnnaggttacccnacncccccccccctcnccccnaccanctccccncnnccnaancctctgg

SEQ ID NO: 38389 - DNA, 313 bp, Homo sapiens
gatgcgtgcattcttccctgggtctgtcaggcaggattcctttaaatcctgtcttttcagtggtcagacttaagtaagatttgtttccctgtggtcacagacagctgaggagtgtgtgatgagagacaaggaaagggataacctgttgaaaactttccctcttataggaaagattaatttctattacaatttttaaaaaggtggccttcatacatttatcccaacaatgaatattcattgcatgcccacccagaggccaggactgggcactgaccttgggggaggggcctgcatccttgattggtgaagaaac

SEQ ID NO: 38390 - DNA, 338 bp, Homo sapiens
caagaatatcttaggacatgagtgccctcccaagtagagtttgtgtggatatttaacttcaccaagttgctagttcagttagcacttcactgacaactgcagtggagtgaacagggaaacttaagctcttattcttagaggtatcttgaaaatgtccggtggtatcttctagccagttctctggttataccatttcagtgggggaatatatggggaatacatttgtcttcactccttcccatgctcttttttgcattggtttgaagacttttcatatttctgagaactctagtcatttcaaatattagttgataccacttcaatatgtgacttataac

SEQ ID NO: 38391 - DNA, 272 bp, Homo sapiens
  misc_feature (1)...(272): n = a,t,c or g
gattctttcttttttaaccattctttacttcaaaatgaagtctgacataagaaaatttgaaaaacgttttacattaactctgcatccctttaaaggtttatttttctttctgtgaaaataaaagttccttgagaagtctttgagaatggattgttttaatgaagtaaaatttcccctaatctacatgctgtttcataagttatactttttgacaaaaaaaaaagttttangaatncccaanaagctggaatttcatgagtatagtttacaga

SEQ ID NO: 38392 - DNA, 280 bp, Homo sapiens
ctgcaatttcagtttgtctaatgtttttctcatgattagactagggttagggggcttggggaagaagatcccagaggtgacgtggcattttcatcatatggtgagagtacatgctagtgacatgacttatcactgatgatgttgaccttgatcctatggttgaagtcttatttatcaggtttctccattgtaaagttatatttccccttcatttccttactgtactctttggaagtactcactgtgcacagcccatccgtaaggagtagggaattgcgct

SEQ ID NO: 38393 - DNA, 410 bp, Homo sapiens
  misc_feature (1)...(410): n = a,t,c or g
ttggagagcnnnnnnnnnnnnnnnnnnnnnnnnnnnnnnnnnnnnnnnnnnnnnnnnnnnnnnnnnnnnnnntctcgaggatccgaattccnnnnnnnnnnnnnnnnnnnnnnnnnnnnnnnnnnnnnnnnnnnnnnnnnnnnnnnnnnnnnnnnnnnnnnnnnnnnnnnnnnnnnnnnnnnnnnnnnnnnnnnnnnnnnnnnnnnnnnnnnnnnnnnnnnnnnnnnnnnnnnnnnnnnnnnnnnnnnnnnnnnnnnnnnnnnnnnnnnnnnnnnnnnnnnnnnnnnnnnnnnnnnnnnnnnnnnnnnnnnnnnnnnnnnnnnnnnnnnnnnnnnnnnnnnnnnnnnnnnnnnnnnnnnnnaccncacngncncncttccccnctcccnnnnctgnnccccannctcacc

SEQ ID NO: 38394 - DNA, 326 bp, Homo sapiens
gagaacccaccatggtgctgtctcctgccgacaagaccaacgtcaaggccgcctggggtaaggtcggcgcgcacgctggcgagtatggtgcggaggccctggagaggatgttcctgtccttccccaccaccaagacctacttcccgcacttcgacctgagccacggctctgcccaggttaagggccacggcaagaaggtggccgacgcgctgaccaacgccgtggcgcacgtggacgacatgcccaacgcgctgtccgccctgagcgacctgcacgcgcacaagcttcgggtggacccggtcaacttcaagctcctaagccactgc

SEQ ID NO: 38395 - DNA, 323 bp, Homo sapiens
gttgactgaataaacacatgctgcatgagagcaaaagacatcccaaatgggactcaattgtcctagagggtctttgagaatttggtactctgggttaaatgtgtatttcgggaggacagaaaggagtagaggttggctctaagcttctttagtgtgctacagttaatcctactctttaatgattggcctacctgggatgttagcaatccctaaacattatacctctaggaacactatccatcagacttgcctgttaagaaacactttggaagacctttacaatatagatttccaggacttccacccgctaccaccatgtcact

SEQ ID NO: 38396 - DNA, 314 bp, Homo sapiens
  misc_feature (1)...(314): n = a,t,c or g
cagctgtccaggagnnnnnnnnnnnnnnnnnnnnnnnnnnnnnnnnnnnnnnnnnnnnnnnnnnnnnnnnnnnnnnnnnnnnnnnnnnnnnnnnnnnnnnnnnnnnnnnnnnnnnnnnnnnnnnnnnnnnnnnnnnnnnnnnnnnnnnnnnnnnnnnnnnnnnnnnnnnnnnnnnnnnnnnnnnnnnnnnnncnnnnnnnnnnnnnnnnnnnnnnnnnnnnnnnnnnnnnnnnnnnnnnnnnnnnnnnnagccatgtcaattcattagcacacaaaaggacatcactggagtttctaagtattttacgagttgt

SEQ ID NO: 38397 - DNA, 482 bp, Homo sapiens
  misc_feature (1)...(482): n = a,t,c or g
nnnnnnnnnnnnnnnnnnnnnnnnnnnnnnnnnnnnnnnnnnnnnnnnnnnnnnnnnnnnnnnnnnnnnnnnnnnnnnnnnnnnnnnnnnnnnnnnnnnnnnnnnnnnnnnnnnnnnnnnnnnnnnnnnnnnnnnnnnnnnnnnnnnnnnnnnnnnnnnnnnnnntccttgaagtttactaacaattgggataactgagggaagagaagtgacaattccactcagtctattagaggtctggatataaggtagccacacaataactctaacttgacttctaaccattctatcttattgatttggaggctgtcttctgccagattttttgtggcttgagatgatattttcgaacccttctttcactacctttcttacccttaatgtgccaagcttgaaacaggatttgatttcctgagctacttgttcgccttctgtgcgtcaccaagtaatctggttcatctttcatctcattcatgtatttt

SEQ ID NO: 38398 - DNA, 489 bp, Homo sapiens
  misc_feature (1)...(489): n = a,t,c or g
aacattagtcaaactagcactttgagaaaaggagttaaagtttttttattggtaaatttgggtaactggtcatattttcctttgtctcttactgtctcatacccttagatcaggggtctccaacccctgggccacagactagttagtaaannnnnnnnnnnnnnnnnnnnnnnnnnnnnnnnnnnnnnnnnnnnnnnnnttgagtgnnnnnnnnnnnnnnnnnnnnnnnnnnnnnnnnnnnnnnnnnnnnnnnnnnnnnnnnnnnnnnnnnnnnnnnnnnnnnnnnatatgtacatannnnnnnnnnnnnnnnnnnnnnnnnnnnnnnnnnnnnnnnnnnnnnnnnnnnnnnnnnnnnnnnnnnnnnnnnnnnnnnnnnnnnnnnnnnnnnnnnnnnnnnnnnnnnnnnnnnnnnnnnnnnnnnnnnnnnnnnnnnnnnnnnnnnnatcattattattantacagggaataatantagaaagaaagtgc

SEQ ID NO: 38399 - DNA, 483 bp, Homo sapiens
  misc_feature (1)...(483): n = a,t,c or g
gtgataatgatgttaaaaggtatgtctattaattatacagaaaaaacatacaaaaagcaaaaattacatcctaaatctatttttgatgttaagctagtcttgtctgttttaatcatagatgctgatttaatgagacaagactagcttaacatcaaaaatagatttaggatgtaatttttgatgttaagctagtctgtcgacgcggccgcgaattccnnnnnnnnnnnnnnnnnnnnnnnnnnnnnnnnnnnnnnnnnnnnnnnnnnnnnnnnnnnnnnnnnnnnnnnnnnnnnnnnnnnnnnnnnnnnnnnnnnnnnnnnnnnnnnnnnnnnnnnnnnnnnnnnnnnnnnnnnnnnnnnnnnnnnnnnnnnnnnnnnnnnnnnnnnnnnnnnnnnnnnnnnnnnnnnnnnnnnnnnnnnnnnnnnnnnnnnnnnnnnnnnnnnnnnnnnnnnnnnnnnnnnnnnnnnnnnnnnnnntccccca

SEQ ID NO: 38400 - DNA, 172 bp, Homo sapiens
ccacatgccaatttcgccaagtgatccaataatatcctttattgtattttcccctctatacaagatccagtctaaaatcaggtagttcatttagttaccacatctcttaagtcttctttagtctggaatgtttccacagactttgtctttataatattaaaaaaaaaaaaaa

SEQ ID NO: 38401 - DNA, 307 bp, Homo sapiens
cccttccagaagtttcttgagagcaggagccatatggattcgtctctgcatgcccagcctgagacatcagtgcctaggactcaggaggcatacccagcacatgcttgtagaagaaagaaagaaacagggaaggtgttttttgctatttatcgcatatttaatttcatctttattatatttttcctgattgtaacaggatgatgtcttaggtgtgaaaaattagaagtggaagtgttagagctcttctagaatttgtctagcaggttctctggtttttactgaaaccaaactcccatgagaaaaccac

SEQ ID NO: 38402 - DNA, 406 bp, Homo sapiens
  misc_feature (1)...(406): n = a,t,c or g
gatgatgtatttnactagcnnnnnnnnnnnnnnnnnnnnnnnnnnnnnnnnnnnnnnnnnnnnntctcgaggatccgaattccnnnnnnnnnnnnnnnnnnnnnnnnnnnnnnnnnnnnnnnnnnnnnnnnnnnnnnnnnnnnnnnnnnnnnnnnnnnnnnnnnnnnnnnnnnnnnnnnnnnnnnnnnnnnnnnnnnnnnnnnnnnnnnnnnnnnnnnnnnnnnnnnnnnnnnnnnnnnnnnnnnnnnnnnnnnnnnnnnnnnnnnnnnnnnnnnnnnnnnnnnnnnnnnnnnnnnnnnnnnnnnnnnnnnnnnnnnnnnnnnnnnnnnnnnnnnnnnnnnnnnnnnnnnnnngccnacgggctttgtntnatnnaancnnnngnanggctttntnnggggntaaa

SEQ ID NO: 38403 - DNA, 293 bp, Homo sapiens
  misc_feature (1)...(293): n = a,t,c or g
tgacacctttgtctaaaaatcagtcattacttcatagttaaatattatgcagggagattttaatttcttaaatggtattttcttttcaagttaatgatatatcaatattttgaaaagttttgaagaagatggttgcaagtcagccttattggaataccaacaaagaattgcctcataaaagaataccatccatctgtctaaaatcaaaggactcggggctgtgaagagagaagactctaacagcctggactgggtaccatatttgtctacaacagatttttgncaagntaaaa

SEQ ID NO: 38404 - DNA, 328 bp, Homo sapiens
  misc_feature (1)...(328): n = a,t,c or g
ggaaaacacatttataacgtaacaatgcaaaagcttcacaattcctaaccttatctgtgcgaagcacttggatactttttttttttttgggggngggntttngttttntgnccnngnttaangggcnggggnnaantttgggttancnaanncnttngggtaaacnggnccgaaattncnaaatttnnnannggaaaatcnngaaaaccccnganggtnnntttaannggggnttgggncccntttnaattttttttatttnaannntggttngncnttttttnnngaanntanccnccttnaanttnaantttggncctngaaccct

SEQ ID NO: 38405 - DNA, 320 bp, Homo sapiens
gatatagtgatgaaaaaatatagttattatcttttaggagcttacaattctcaaatgggcgatgataagtatataatacaaggttacaagtgttatcttttctgcatggacaacgtccttatggatgggcagaagagtaattggtcttacagatttctaagaaaattcatgttgctaataggcataaacagaagaatgtcatagtccctgctcctccgggccttcaatctttaccattttacatatttcatgtaaatgttcgcttctttttaacaactcttaaattactcccttctgccctttatcccatactctccaac

SEQ ID NO: 38406 - DNA, 471 bp, Homo sapiens
  misc_feature (1)...(471): n = a,t,c or g
tttaagtatcacgtgtacagttagaaatgcacttcatctgaagtcagctacaggcattgtaagcagaggaaatattgtggttctactttaaaaactgcctgttagtctcagagtgcaaacttgataggtatcactcttcatctagtttctcttccacccattttccttattggcaactatggactaaatgtaaaattaccaccaacaaccaagcatatttacgttagtgaattgatcaacaaaaaactataataactgcttatttgggaaaaagagatgagaaaaaaagaaactcttactgattaatgaattgccacaaaaaactataattacttatttggaaaaatgaggtgaggaaaaaagaaacttctacttacagattcttgaatcttgnaatatggaagangnggtatcagtactgggccaaagttatattgcatccnntaaatgccctgnaacttgaatataggg

SEQ ID NO: 38407 - DNA, 476 bp, Homo sapiens
  misc_feature (1)...(476): n = a,t,c or g
ttctttttgaggtgatgaaaatattcctataagccattttgcagtcagtctgcacttnnnnnnnnnnnnnnnnnnnnnnnnnnnnnnnnnnnnnnnnnnnnnnnnnnnnnnnnnnnnnnnnnnnnnnnnnnnnnnnnnnnnnnnnntttgtgtgtattagtttaccatatacataacttttatatatacagtctgcctaatatataatatacagtattataatcttttacacctgatttatttcacttagcatgcttttgagggtattccatgttatcctctataattatttcattactaaatggnttttnnnnnnnnnnnnnnnnnnnnnnnnnnnnnnnnnnnnnnnnnnnnnnnnnnnnnnnnnnnnnnnnnnnnnnnnnnnnnnnnnnnnnnnnnnnatgaacaatttcatataatggttgggngaaatatgggtttattctcatggactgagaaatctacttcctaaaaga

SEQ ID NO: 38408 - DNA, 444 bp, Homo sapiens
  misc_feature (1)...(444): n = a,t,c or g
cattgatctagttcccactctgtgttgccattcctagtgatcctcctccctacctctcccattatggtagaaaaaactctgtgtcctggctacatcaaaatctgttggggtggatcttggactcagcacccagggattctgataaggtaagtttgagaatccatattttttcaaggtttacaggtgattctgacaagtaacttggttgcaacccactgattaagtacatttttttttaccttcaggtgtgtgtatgaggtctttctaaatttaagaaatttccataacaaatgtaaccttagtcattccagtgtttaacgcttctgactcaaggaatttaaaaattgctaacgtangagatatanaatataatgcatttcttctatttatctgggngcaatatgnntgcattgccctttanaagggcttnntatatttanatga

SEQ ID NO: 38409 - DNA, 322 bp, Homo sapiens
  misc_feature (1)...(322): n = a,t,c or g
agaagatgaaattgttaccaaagcaggagaagaatgtcagacactctgcatgcttgccagagagctcgctagaggacgtgcagaaggtcaaagtcctccatcaccagagcaagttcagccaccaggccccttaagcacagtgccaagagcctgtgaaaacatgaaacctttgaaaatatgggtgccaaaatataaaaacaaagaatgtatgaatagtatgaaatctttataaaacataattttgcagtttcattcactgtcaaatgtaatgagactattttgaatattaaatttgacagngaatgaaactggccatttttat

SEQ ID NO: 38410 - DNA, 482 bp, Homo sapiens
  misc_feature (1)...(482): n = a,t,c or g
nnnnnnnnnnnnnnnnnnnnnnnnnnnnnnnnnnnnnnnnnnnnnnnnnnnnnnnnnnnnnnnnnnnnnnnnnnnnnnnnnnnnnnnnnnnnnnnnnnnnnnnnnnnnnnnnnnnnnnnnnnnnnnnnnnnnnnnnnnnnnnnnnnnnnnnnnnnnnnnnnnnnnnnnnnnnnnnnggcctaccaaagtaaatttctaaggctgtacttttccctcagagtattgttttatctacattacacaaatagtaatatgaggtattttctgacatcatttctctttgactcctaggttatttggaaaagtgttttaattttttataatacaattcaagagatttattatgcaacatgactatagtnnnnnnnnnnnnnnnnnnnnnnnnnnnnnnnnnnnnnnnnnnnnnnnnnnnnnnnnnnnnnnnnnnnnnnnnnnnnnnnnnnngcannaagtttttctaattaantttacgntatcttttc

SEQ ID NO: 38411 - DNA, 350 bp, Homo sapiens
tcctttccttccagcgctcaacacaaaattcctaaataaaagggagtatcaacatcagattgatgtattttgtatataataaggtcacattatacttgtcattttagagatgtaacctagaagtcaagcggtaaaacaagctttgcaactatgtggatggacaagatgtaattgaagatgaagtactttagagatggtatgggtaaggaatggaggaaaaaaagggaggattcctctgcattcgtttagtcctgcaatgtctattcatgcgggccaaaaaactcacaagcagataaaacagtgtaataagaaaaaaaactaaaacatttttatttctttttttttttttt

SEQ ID NO: 38412 - DNA, 478 bp, Homo sapiens
  misc_feature (1)...(478): n = a,t,c or g
nnnnnnnnnnnnnnnnnnnnnnnnnnnnnnnnnnnnngtctgatgtttttaagatgacaaatgcaataaaccatagtggcactattgatatctgtcactttggaccaaaagaaatcacagaaaatcacagtagagttgctgcagaaatctgaagtacttatactcaccacgacatcaaaatttgagtagttattagacccatcactagattgttacttagtgccttaataaaaaaaatacattactatatcgtatattttaagtgagatagtgagaatcctttgtaaccctatgaatttgttttatgccttcaaaaatattctggaaagaggctcccaagcttcgccagagtgcctaaggagtccctggtacacataaaatgttaagaactcaatatttagaggctatttgcagtaaagcaccttttagaaggctgtgtagatcaacttctttggaatcactttgaaccccaatgtgt

SEQ ID NO: 38413 - DNA, 309 bp, Homo sapiens
agaggaggcgtttacttaaagaaaaaaaagttaatatttcatcatcaggtagtaaatagaaataccagtttccacacaaggggactgagcaaagaactcattttgatacaggttctagtttaatcaaaaggtttaaataaaatgcttaatctacagaactccaatgaggactaattctttaaaatgaaaaatgggtgcaaacaatattaaaaacaggcatttcctccttaccacccaaatctatcactgttttgcatcaacagtatcatggtacccaaaatgctatttaaaacccaattaccctttggc

SEQ ID NO: 38414 - DNA, 313 bp, Homo sapiens
  misc_feature (1)...(313): n = a,t,c or g
nnnnnnnnnnnnnnnnnnnnnnnnnnnnnnnnnnnnnnnnnnnnnnnnnnnnnnnnnnnnnnnnnnnnnnnnnnnnnnnnnnnnnnnnnnnnnnntgggagaagagaaattgaggatagccagaatatacagtggtgtcttcccagggaatttagataccataatttccaccctcccatcctatggataccaaaatctgctgattctcttgtagtaagagatgactttaagtcatcttaaagnnnnnnnnnnnnnnnnnnnnnnnnnnnnnnnnnnnnnnnnnnnnnnggntaattggantttggnatggtaa

SEQ ID NO: 38415 - DNA, 347 bp, Homo sapiens
  misc_feature (1)...(347): n = a,t,c or g
ggctgatttgtatgagggaatacttcatattctatttgtcttattttccatatgccttttaaaccatttcctttaagcaataaagtgtagagagaagagtggcccaggagttagaaagcctaggtcaattttcatgtcacctcttaataattgtgttgtcttgcccaagtcatttaacctccccaggtcaattttattatctttaaagcaagaatatattttcttttaagatgagtcaatcccatgagataatgaacctgttacaatggaaattgctacaccatatggaagttatatctaaatgtgtcccttacaaccatcctaatgaagtaatctattgnaatata

SEQ ID NO: 38416 - DNA, 343 bp, Homo sapiens
cacaatatgatgtcaattatgtagggggaaagagttgggggaagggtacaggaaagacaaatgtgccaaactcttctaattttaaatatttcctagatttgctaaagtaagcataaagtggacttaaaaagagaaacactaaaagaaaaaaagaaatggccactgagcgactgatcatttgaatgctattaccaattactgataattacaataatcttacctatcagtgagacttaacatcacgaacagcaaagcagggttatgatacaggggaagaacactttgtaaaggaataacgatcaaaataaaatcctctttgattataaactcaaaaaaataaaaa

SEQ ID NO: 38417 - DNA, 346 bp, Homo sapiens
  misc_feature (1)...(346): n = a,t,c or g
ctggtctgatggctatcagcctatttcacaaccacaactaaataggaaacagggctcaaaaagtggggtgatttatctaatgtcacagtcagagctgtactgaacctagcccaggctgacttctgtgtcagcatcccatcttatcatattaaacatggtaacacaaaaaataactgtggaggggagggaaaaaagaaaatactggttgtaacagctaagaagtctgnnnnnnnnnnnnnnnnnnnnnnnnnnnnnnnnnnnnnnnnnnnnnnnnnnnnnnnnnnnnnnnnnnnnnnnnnnnnnnnnnnnnnnnnnnnnnnnnnnnnnnnnnnnacctgncttacaa

SEQ ID NO: 38418 - DNA, 342 bp, Homo sapiens
ctcagagagaacccaccatggtgctgtctcctgccgacaagaccaacgtcaaggccgcctggggtaaggtcggcgcgcacgctggcgagtatggtgcggaggccctggagaggatgttcctgtccttccccaccaccaagacctacttcccgcacttcgacctgagccacggctctgcccaggttaagggccacggcaagaaggtggccgacgcgctgaccaacgccgtggcgcacgtggacgacatgcccaacgcgctgtccgccctgagcgacctgcacgcgcacaagcttcgggtggacccggtcaacttcaagctcctaagccactgctgctggtgac

SEQ ID NO: 38419 - DNA, 483 bp, Homo sapiens
caataatctacttattttggttacaaaccagagttaagactaactgttacataacacttggcctgacttccaagaaagctatgttttgcttaagcaaatgaagtaatttaataagtactcgaaaatcttgctctaatttcatgtgggagggcagcttaatcttttttgccccatacttctgatggtgtttttgatgactacccaaaaatctaaccaaactcatttctgatctcttctacatgttgtgtaacttacgtgatgtcttatccttttaaatgccaacgaaactaagttgatttttgtccatcaaatatatctaatccattcactatgaaatgattgtagttcctgtgaatttaaacacttcttatacgctgatacatacaccttgggtcttaaagacagatgagcccttggggatttctttctgtatatgatctgtagggactacatttggggagtggagacaatttcccaggatgg

SEQ ID NO: 38420 - DNA, 481 bp, Homo sapiens
  misc_feature (1)...(481): n = a,t,c or g
ggttagtgtttcaattgttctcacaaaagtgtaatttatctaattactgtgaagctatgtacagctcaaaagaaaaaaacaattttcttgactctggaaaacaaaacataaaaagtatcagcaatgtctcaaaccaaaaaaaggttatgaaaatattattttggcattttatcagttcagccccatgtaattaacttattctgcttgatgttggattagcaatcttcattaatttattagattttaaaaaattattttagaagtttttaactagtccaacggtgtgaattccaaagttatcagaaaactgtgtttaagtgtgtgtgctgtcagggccctttccatggattttttttttnnannacccaattttnnggnnggcccatttnnaacccnttttnnaaaaaacccnggnaaancannatnctttnggnanngcaaannttttaaaanncctngttcngggccnttggccaaaaaa

SEQ ID NO: 38421 - DNA, 472 bp, Homo sapiens
  misc_feature (1)...(472): n = a,t,c or g
cttaattatccttgggaaaatatgatcagtgtggacatctgtggaagtagttacagtgcaaaataatcaagctacctcttacgttaaacaatccaacaaatgagagcaaaatcaattattgcttcaacttttttttctttttttnnttttttgnaanngggntntnntncnttccccnnggnngnagncnagggggnccttttaanttantnaaannncccncttcngggnttannccntttttcgggcntanncnnccaangaagngggnnccnngggggcccncnacnnnccngggcaatttttgggggnntnttnnanaaaaancgggnttnccntngntacccnggnttaacttttnaaaangttttncccnngnattttaanccgggntaaaaaaaaattgggggggcccttgggnnnggtnaaaccccngaaagacnttccnaangggttttnnggantntncaaa

SEQ ID NO: 38422 - DNA, 479 bp, Homo sapiens
  misc_feature (1)...(479): n = a,t,c or g
ctgggggaacaactcggcccccactgatggagaaaaaaacaaacagatggaagtaaagacgagatagaaacacaacaaggtagaaaaagaccaggataatttggaacccctttagtgggaggtaagaaaaagaagagaaagaacaacaacaacaaaaagagcaagttcaaatccaagggggagagctcctctggaacaaaactcctaccaaagagactaagagctaaggagagggcaaaatccaggattccttcttgtgtttaagcaggagcaggcagaaaagcctaacaacccccgactttcccatcggcagccccacacccatcatcacacaaggccccaaggatgggaaagagaaaagctagaaggacccaggggcctcgggactacangangaatggaaagttacagactgtanatagaagtcgggtangcttgggcctttcttanttggccggtccttctttggtggttntggt

SEQ ID NO: 38423 - DNA, 470 bp, Homo sapiens
  misc_feature (1)...(470): n = a,t,c or g
caaagttgtcatgaaaatttattaagaaaaataaaatagagttcattttattaagagggcattaaatcttagttggtaatgtctctttccttctttcctttgcagagtatgtatgtaactgctctgtggttggaagcctgaatgtgaatcgctgcaaccagaccacagggcagtgtgagtgtcggccaggttatcaggggcttcactgtgaaacctgcaaagagggcttttacctaaattacacttctgggctctgtcagccatgtgactgtagtccacatggagctctcagcataccgtgcacaggtaagcaacagagggtggaactgaagttgagagaacccaccattggtntgtctcctgccgacaagaccaacgtcaaggccnccctgggnaaggtcggcgcgacgcctgcnaatattgggcgagcccnntggaaaaggntctgccttccccaccaccaagactat

SEQ ID NO: 38424 - DNA, 478 bp, Homo sapiens
  misc_feature (1)...(478): n = a,t,c or g
gttaggctaccccagccctccgggaggcttctctacaggaagccctcccgggaacacccagcagccgctgcctggcctgccactggcttccccgccaggggtcccgcccgtctccttgcacacccaggtccagagtgtggtcccccagcagctactgacagtcacagctgcccccacggcagcccctgtaacgaccactgtgacctcgcagatccagcaggtcccggtcctgctgcagccccacttcatcaaggcagactcgctgcttctgacagccatgaagacagacggagccactgtgaaggcggcaggtctcagtcccctggtctctggcaccactgtgcagacagggcctttgccgaccctggtgagtggcggaaccatcttggcaacagtcccactggtcgtagatgcggagaagctgctatcaaccgggtcgaactggcacaaggcccggctntgccanaccgtggagaaa

SEQ ID NO: 38425 - DNA, 478 bp, Homo sapiens
gcttctttgaagaataatggaaaattaaaggaactatgtgaaagcatgcaaacgtctatgaaaacatgttcctacatctggaacttctctgattaaagaaaaaaactaccataaattattagaaaaacaccaaggtataatactaatgaagaaatgaaaacagactttccgataggctaccaagtcaactgcaaagtgaaaaaaagcaaaggctactaggtttttgttgtcttattatcataccatactaagcttgtgtgtacatattacaaaaatcagccatttgtgttacaaggaattactctgcactaacactgaaaatataatacctgacaaactccttattcatcattctgagacattcaaacttcaactaaagtcttttacctccattatttaaaatttcaagtaaatggggcatctcaaaaattcacctgcaaaatactacatttggttccatccttcttagctcttggat

SEQ ID NO: 38426 - DNA, 341 bp, Homo sapiens
tgtggctagagaatgctgagcttaaaaagatgagtaggggctccttttcttcagcagacagctctggaatgttagaacaattcttccacaggcacgtgggcagacgctgatggggcatttgcttcttctgagttcacaaacacagtcttttgtagggtctccaaaagtagattttaaagtcaacttgatttgaaaaaacttgagtttttccaaacccaaagcaaaaaagactctttgggaaaaaaaaccaggcagaaatgagttaagtctcacagatcccaattagtgctaacctgccacagcgtgaaaaggaatttaaacagcagcccccagaatcactt

SEQ ID NO: 38427 - DNA, 319 bp, Homo sapiens
  misc_feature (1)...(319): n = a,t,c or g
agaaagcaaaaaatataagttttatatgccaagaaatttttatgccaatatgtggatccagttacctttcctcccagctctgcgatctatgcatttctctgccacctcctcgaccaaaaacaccctctacttcatcaaaacttctttggtagaaaccacattcacctctgcctctgcctcgccctcttgaagaacttcgacctctaggagcccccaccactgttcctcctcctcctcgtcctgtcaatcgcaggacagcagcactatttacagacatggaaaggttctctgccaaaaaaaaaaannnnnnnnggggaaa

SEQ ID NO: 38428 - DNA, 267 bp, Homo sapiens
  misc_feature (1)...(267): n = a,t,c or g
ctggaataaggcnnnnnnnnnnnnnnnnnnnnnnnnnnnnnnnnnnctaatcactaatcaccagagaaatgcaaattagtgattagcattttttcatatgcctcttgtcagtttgggtgtcttcttttgaaaatgtctattgatctcctttgtccactttttaacacgattattagggggttttggttgaattgcttgagttccttatnaattctggatggnnnntncttgnnnatcnnagtttgnnnatattttntncnattatgc

SEQ ID NO: 38429 - DNA, 308 bp, Homo sapiens
  misc_feature (1)...(308): n = a,t,c or g
gtccacttggaggaccctgtccacggtgcagttggagaagaactgcctgtggatgccggtgatgaagccctgggccagggggttgggccagtagcagcccacgacattggcctccatctcggtgcagttggtgaaactctcatagtacacgatgaactcggacaggttgcaccacttccagacgtccaccttgcccatcatgtctgcgaaagccttcccacacaggggcagnctcttcaacatgcctgtctcgttgcagcgcctgntntgggacacccancgnagagcannnnnngnnnnggagaatt

SEQ ID NO: 38430 - DNA, 427 bp, Homo sapiens
  misc_feature (1)...(427): n = a,t,c or g
ggtttganagcatnatgatannnnnnnnnnnnnnnnnnnnnnnnnnnnnnnnnnnnnnnnnnnnnnnnnnnnnnnnnnnnnnnntctcgaggatccgaattccnnnnnnnnnnnnnnnnnnnnnnnnnnnnnnnnnnnnnnnnnnnnnnnnnnnnnnnnnnnnnnnnnnnnnnnnnnnnnnnnnnnnnnnnnnnnnnnnnnnnnnnnnnnnnnnnnnnnnnnnnnnnnnnnnnnnnnnnnnnnnnnnnnnnnnnnnnnnnnnnnnnnnnnnnnnnnnnnnnnnnnnnnnnnnnnnnnnnnnnnnnnnnnnnnnnnnnnnnnnnnnnnnnnnnnnnnnnnnnnnnnnnnnnnnnnngacttcttcgccagagggttntgtganngggngnngtgngngnngngggnggntnngngggtgngntgggcg

SEQ ID NO: 38431 - DNA, 341 bp, Homo sapiens
cttcccagtctgtatggtatagagaagttagaattcaggcagaaaaccacaatcttattggtttgtgatgttagcgaatggagctggcattggcaaagtagctgaaattgaggaaggaagtattagaaaggatggagccatcgagggaaggctcccatgaatctacatataagttaccctaacattctggctgatataaactgtgcatgtatgtgggagcctataagtgcctggagaaaagcaacaactagaaagctaaaagagctgaacagatacattagatgaagaggagacaaagttaggagtttgagtttacaaagttagaagggtttggtaaatgg

SEQ ID NO: 38432 - DNA, 433 bp, Homo sapiens
  misc_feature (1)...(433): n = a,t,c or g
ggnnnnnnnnnnnnnnnnnnnnnnnnnnnnnnnnnnnnnnnnnnnnnnnnnnnnnnnnnnnnnnnntctcgaggatccgaattcgcggccgcgaatncctnaattatgaataatncatantgnncaatnactctgggtnnnnnnnnnnnnnnnnnnnnnnnnnnnnnnnnnnnnnnnnnnnnnnnnnnnnnnnnnnnnnnnnnnnnnnnnnnnnnnnnnnnnnnnnnnnnnnnnnnnnnnnnnnnnnnnnnnnnnnnnnnnnnnnnnnnnnnnnnnnnnnnnnnnnnnnnnnnnnnnnnnnnnnnnnnnnnnnnnnnnnnnnnnnnnnnnnnnnnnnnnnnnnnnnnnnnnnnnnnnnnnnnnnaacgttgttgccttggcattggagggtaacaattattttgcttatacttgcctttntcannattggttg

SEQ ID NO: 38433 - DNA, 336 bp, Homo sapiens
  misc_feature (1)...(336): n = a,t,c or g
ctcttgtgtaatgtctatttacaaaaacagctcttttgcattttcaatttgctaggtttctccatcttttgtttcctcactccctctgcagaggcagagataaaaggcaggcccagatggcagttggggagggatcccctggtcaccccagaaccctaaacctgcttcctgggtctttgcttggcctccagaatcctactaaacatggataagcctaggcctggcttggggatggaaagaaccctggagtgattcagnctgcccaccccttatctttctgctatctctagctgggcgatgaagacccacagttttgggggcnanggatgtanggga

SEQ ID NO: 38434 - DNA, 434 bp, Homo sapiens
  misc_feature (1)...(434): n = a,t,c or g
ggnnnnnnnnnnnnnnnnnnnnnnnnnnnnnnnnnnnnnnnnnnnnnnnnnnnnnnnnnnnnnnnntctcgaggatccgaattccnnnnnnnnnnnnnnnnnnnnnnnnnnnnnnnnnnnnnnnnnnnnnnnnnnnnnnnnnnnnnnnnnnnnnnnnnnnnnnnnnnnnnnnnnnnnnnnnnnnnnnnnnnnnnnnnnnnnnnnnnnnnnnnnnnnnnnnnnnnnnnnnnnnnnnnnnnnnnnnnnnnnnnnnnnnnnnnnnnnnnnnnnnnnnnnnnnnnnnnnnnnnnnnnnnnnnnnnnnnnnnnnnnnnnnnnnnnnnnnnnnnnnnnnnnnnnnnnnnnnnnnnnnnnnnnntcgncagaagcntgagctnnnggatctttatganagtgttgacnancanaantggngtgatgtctnnnanaancttg

SEQ ID NO: 38435 - DNA, 345 bp, Homo sapiens
  misc_feature (1)...(345): n = a,t,c or g
ggagatattttgaacaaagaatttacataagccaattcatgttttgggaaggaaacacaagctttagggggtagaaaaagaggtggaagctaaagttaggagtctgattagagggaaaagtattgaataactcaagtttttaattaatatataatggttgtacatatatttctgggggtacatnnnnnnnnnnnnnnnnnnnnnnnnnnnnnnnnnnnnnntaagatttccaatattctctcacctttctgacttggcatcactaagaacaaaatctaccctttccccaaaaccctgcaagttgatactggacaacttaacataaacttaggagaaataaccaca

SEQ ID NO: 38436 - DNA, 334 bp, Homo sapiens
  misc_feature (1)...(334): n = a,t,c or g
ctcctctcctctctacttgttttgaatcatactccttcccaccagccatatccttcaaatcgaagtccaaatcccctatcttaataccttcctagatttagaaaatcgaattcctttcaacctgttcttgcttctcttcatggtgcagttcatttggnattacctggtganatttttggganngcttnngnttngngnngagangtgangtangnaantttntngagcgnnnnganngcggtntatngannggngngcggnnagagnnngntggtnngnctnggnganngnncttngcntgananngannaanntgtgntntggcgnggggagg

SEQ ID NO: 38437 - DNA, 475 bp, Homo sapiens
  misc_feature (1)...(475): n = a,t,c or g
gccggctgctcgtgccatggagcggagtcccgacgtgtcccccgggccttcccgctccttcaaggaggagttgctctgcgccgtctgctacgaccccttccgcgacgcagtcactctgcgctgcggccacaacttctgccgcgggtgcgtgagccgctgctgggaggtgcaggtgtcgcccacctgcccagtgtgcaaagaccgcgcgtcacccgccgacctgcgcaccaaccacaccctgaacaacctggtggagaagctgctgcgcgaggaggccgagggcgcgctgctggaccagctaccgcttctcgcgtgtctgcgctgcaccgcggacagctcagcctcttctgctcgaggacaagganctgctgtgctgctcctgcaggccgacccncgacaccangggcaccgcgtgcagccggagaaggacactgccacgactttnggccaagtgcaggaacatggagcatgcact

SEQ ID NO: 38438 - DNA, 479 bp, Homo sapiens
  misc_feature (1)...(479): n = a,t,c or g
cttgtgaatgcacgccagaggaaacagattcttcagagaacaacctacacgcagactttgcaaagtacctcacagaaacagaagatactgtaaaaacaactcgaaacatggagaggctaaatctggtctctctagatccagacatagataccttgaaacttcaaaaaaaagatctcttggaacctgagtctgtgatcaaaccatttgaagaaaaagctgccaagagaatcatgatcatctgtaaagccctcaactcaaatcttcagggatgtgttacggagaatgaaaatgatccgataacgaatattgagcctttttttgtgagtgtggcactttatgacctcagagacagcaggaagatttctgctgattttcatgtggatctaaaccatgctgctgtcanacagatgctcttgggggcttctgtggctttggaaaatggcaacatcgacaccatcactccaagacatcagaagaag

SEQ ID NO: 38439 - DNA, 471 bp, Homo sapiens
  misc_feature (1)...(471): n = a,t,c or g
catgagggtgtgagagcaggcttggatgagtccagaggctttctgcctctgctaatgcagccagacatcaaatctacctttgtgctggccacgtcccactgcattcctttcatctaagacctcaaccttttttttttngtnccntccangggcaaagnntngnntttctttttaaaatcccntntngaaaanntnancttttantcctagnncnggggntttannnggggcggnaaanttnatggncaaanccttnnngggcntaatctcnttcnnngcttagnanagttggnnggacctcncanaggggatngangcagnntcccccnggnacccgggngaantcncanactccagcagcagttttngaaatnacngngacctttaggccagcnggaccccnttccntgaaaggngggtagnaaggcccccanagntnaaacccnccngaatttggggggaaatcctgct

SEQ ID NO: 38440 - DNA, 466 bp, Homo sapiens
  misc_feature (1)...(466): n = a,t,c or g
ccgacttttccagattttggttcagatttattctatattttcattattctctgcatatctattcattgtacagtattctttgaatttactctttctaatgattcatttttgacaggtggatttaacagacgtttctaagtttcatagtgattatcagaggttaatctacgtttattactactgattagatgaaacaatgagtaataaatgactcacgtaatgaatacacatctccccaaagtcaaagggaataaacgtgaagcaccctttagtttgttttttcctctggtcttttgcaaggttatagttaacctactgatatgttacaaaatcatcatattcatcaaattaacatgatgttctgtagcctgaatattaaaaaatagataaaatcatgtataataagactttgataaaacttaatagatattgcaatanagaacagttcttcatacttctttttatg

SEQ ID NO: 38441 - DNA, 342 bp, Homo sapiens
  misc_feature (1)...(342): n = a,t,c or g
gctcactaaagggtcacccctcactttaaagccaagactgccattgtcactgctatggtaagtcacagccagccaggccttctggcaaaaggtgatactaccagcactataaacagacaggactggttgtgaggtagctacacagttttaaagatgctgttaatgaacattacggacaattcatggtgtggctagttggtaacacttcagctgatttttcttatgagatggaaaaaaaaaatcagccaagtaagggcacatcttcagttcatttagaagtcagcatccaaggtaaaanaattctctgttggacttgacatcacttccattctntggaaatcc

SEQ ID NO: 38442 - DNA, 334 bp, Homo sapiens
  misc_feature (1)...(334): n = a,t,c or g
gttatacaagatcaagtttttgcgtgttatttttcctgagaagtaatttttaggtaaagatcttaaagatttacactttttaagagtttataaacatccaacaagcaaatctggatataatttgagtggttcttttaaaccacgtcagtaggccatctcttaagtaatttataatctaaaaataaataggatagaatatgaaaactgaattttcttggcaaaaccaaaaaattgggcttaattntananctatgaatngtanatactganaaacccnntangntnacttgaactgtgcntnntgccnatnttaatttntttcatttatacatcg

SEQ ID NO: 38443 - DNA, 345 bp, Homo sapiens
  misc_feature (1)...(345): n = a,t,c or g
ctccagttgatctcagctctgattatgcatcagaacaccctgtgaggtctattaagttcctataccaaatcccaaacactcttgaatcagtctacaaagttgggacctaggtatctgtacattttttaaagttcctcaaaaaattgtcgacgcggccgcgaattccnnnnnnnnnnnnnnnnnnnnnnnnnnnnnnnnnnnnnnnnnnnnnnnnnnnnnnnnnnnnnnnnnnnnnnnnnnnnnnnnnnnnnnnnnnnnnnnnnnnnnnnnnnnnnnnnnnnnnnnnnnnnnnnnnnnnnnnnnnnnnnnnnnnnnnnnnnnnnnnnnnnnnnnnnnnnnnnnnnn

SEQ ID NO: 38444 - DNA, 467 bp, Homo sapiens
  misc_feature (1)...(467): n = a,t,c or g
nnnnnnnnnnnnnnnnnnnnnnnnnnnnnnnnnnnnnnnnnnnnnnnnnnnnnnnnnnnnnnnnnnnnnnnnnnnnnnnnnnnnnnnnnnnnnnnnnnnnnnnnnnnnnnnnnnnnnnnnnnnnnnnnnnnnnnnnnnnnnnnnnnnnnnnnnnnnggattctttgtgtattgtggatattaactctttttggttatataattgtttttttttttttaangaaaatncctanttntcccccaaaangcatttcnttngncntttnnaantnatccaanttttnccncntaanttttgcanaaattaaaancaaannctntnnttttgnngnnagggngacccctaancntnttcaaaatntatcatnngaaatcaaanangggttttttccanccctgtngnaaaaaatactttngggnncggccaanttanggagggctttnctttctttttttctttggcnaaaa

SEQ ID NO: 38445 - DNA, 471 bp, Homo sapiens
  misc_feature (1)...(471): n = a,t,c or g
gtaaaagcatatttttttcttgcaagttattttatatttactatttttatatgcggtatttataaaatgtagatgccctgtgtttaggatgaaccaagctaacttgtaaaagtagtgattaagcactaatgttatgctgaactcctggtacgcctttcacctcttggaagcagtatagaaaaatataagaaattggcaatgtctagtaaaagtagatagagttatgatagaataatatatcatttactcttccacactgagattttaatgtaagcagagaaacttgacctgtggttgctgctgtctcaattaggacttttcctggcttctctaagcacgtgatatacatttcaagaaatgacttttcaaattaagtattaattatagccttttcttatgcaatattgggtgagaaagtgtaaatattcctgngttcaagttctacttctgggacgatgtggccaggagcaa

SEQ ID NO: 38446 - DNA, 472 bp, Homo sapiens
  misc_feature (1)...(472): n = a,t,c or g
gcttattatacaaataatttgggtcaagatatctcatttcatgtttcttagttataaaatattttggttgtgagtagatttgaaagagcatgcgaatgcaaaaactacttattaaaatgagagcatccaaatcatggtggcagtgaacgttcagcagcatctgaggaaaatgccatatccatcatagacacattcataaatttcttttgattaggctttgcgatcttcaatggaaattttcagggtcattgaaaaaatctcacacattttttttctgtctcaatcttaattcttcagagaataattaaggaaagtgaatagctctgttaggcatttctcaatcatctttaaatgggtcatggttttaaataggatgtgtcaaattgaaattatatgaactaaattatacctaagttacactgtaccgctgcttaatgacttctttccagggggncaagtgagtatcaactat

SEQ ID NO: 38447 - DNA, 457 bp, Homo sapiens
  misc_feature (1)...(457): n = a,t,c or g
cagcttttttctggaaatgcatgtttctctgaactctgagtcccaagaaaaatcacttgagacaccaagaaaatgggggaagtgctaaaattgtgtgggaattcaagcttagcaataaacatcaagacatttttgataaaaatgaatccactgacatcggggaggagcaagagaacagcacgctgacactgggtcagaggctaagaccgacatttctgggaaccactcccggaagggcacagaggagacgctttcagcctctcatcagccagcctggcctgtagctgctgcacgttatgagtgtgttcctggcatgactgcttctaacaggaccagatctgaacagtctggagagaggagctgtggtggcagcagacagatctctgcttcaggggccaggtgtctagaagaaatgctgaagcagtgtcaccnctgtggctgcctccttacagaatgc

SEQ ID NO: 38448 - DNA, 460 bp, Homo sapiens
  misc_feature (1)...(460): n = a,t,c or g
nnnnnnnnnnnnnnnnnnnnnnnnnnnnnnnnnnnnnnnnnnnnnnnnnnnnnnnnnnnnnnnnnnnnnnnnnnnnnnnnnnnnnnnnnnnnnnnnnnnnnnnnnnnnnnnnnnnnnnnnnnnnnnnnnnnnnnnnnnnnnnnnnnnnnnnnnnnnnnnnnnnnnnnnnnnnnnnnnnnnnnnnnanctcatgattaggactganttcaaaccctggntgccnttggcccgntgnntanccgaggcaaaggantttgccntgaccccgngnaatccangganggnctcntttttttacntgcntgccagcgntggggtgaaacncaggcccagtncncaaagcctgntcagggaattanctgccantgncatcatcatcgnacntaatganggtgancagaccattagcaggaaagntacatcccttagggnttcgntgtgcagggcactttntgcatga

SEQ ID NO: 38449 - DNA, 465 bp, Homo sapiens
  misc_feature (1)...(465): n = a,t,c or g
gcaagaccccgcctctacgaaaagtttaaaaattagcaatagggcannnnnnnnnnnnnnnnnnnnnnnnnnnnnnnnnnnnnnnnnnnnnnnnnnnnnnnnnnnnnnnnnnnnnnnnnnnnnnnnnnnnnnnnnnnnnnnnnnnnnnnnnnnnnnnnnnnnnnnnnnnnnnnnnnnnnnnnnnnnnnnnnnntttgatgaaactataaactcacagatccaacaagttcaaggaacccagagcaggataaacaaagaaaataaaaatcttcaatttccgaaagccagacattaacagaaaatcttaaaatactgaaaaatcttttaagactatctttccaagaaataaaaggcacatgcagaggagcaaagatgaaggaaaaaggagaaagatncnaacnaaatgtcccaaagaagtaacatcttttaaggagattttttaaggatcatttagaaatctatccc

SEQ ID NO: 38450 - DNA, 470 bp, Homo sapiens
  misc_feature (1)...(470): n = a,t,c or g
ggtaagactttcaagcagaaacaaaaacaggagcagaagaaacaaaaataggagctaaaatagaaggctatggggaagggacccctggctgcaggtgaaattaagaaannnnnnnnnnnnnnnnnnnnnnnnnnnnnnnnnnnnnnnnnnnnnnnnnnnnnnnnnnnnnnnnnnnnnnnnnnnnnnnnnnnnnnnnnnnnnnnnnnnnnnnnnnnnnnnnnnnnnnnnnnnnnnnnnnnnnnnnnnnnnnnnnnnnnnnnnnnnnnnnnnnnnnnnnnnnnnnnnnnnnnnnnnnnnnnnnnnnnnnnnnnnnnnnnnnnnnnnnnnnnnnnnnnnnnnnnnnnnnnnnnnnnnnnnnnnnnnnnnnnnnnnnnnnnnnnnnnnnnnnnnnnnnnnnnnnnnnnnnnnnnnnnnnntctgcacaagtaagctgtgccttgngccctaaggaatggtgaccttgatttatt

SEQ ID NO: 38451 - DNA, 442 bp, Homo sapiens
  misc_feature (1)...(442): n = a,t,c or g
aatttagattttttaatttattaaaaggtaaatttctggtaccatgcctgaaaatatgcaaaatagaaaacatttacttggttatcacacaataataaaaagtcatatagatttttattagttcggaaataaagtatcacaggaaggtcttttttggtttttggttttgctttttaagttttactacaaatgagtgacagctgtatagtcacagtccttagtttctatatctagaaatttcctttaaatggtttaaagcaatttccaaagttttattaataagagaaactgggactggacagattaaagaatttaattgagaaccttatagtaacctattaaaatattcacctgcatgtccggtttgcacatcttgntgaatttagaagtgagntctgntataaagaaaggnccgaagntcttttccttctncggatctcta

SEQ ID NO: 38452 - DNA, 452 bp, Homo sapiens
  misc_feature (1)...(452): n = a,t,c or g
gtccgggttcgcttgcctcgtcagcgtccgcgtttttcccggccccccccaacccccccggacaggacccccttgagcttgtccctcagctgccaccatgagcgaccaagatcactccatggatgaaatgacagctgtggtgaaaattgaaaaaggagttggtggcaataatgggggcaatggtaatggtggtggtgccttttcacaggctcgaagtagcagcacaggcagtagcagcagcactggaggaggagggcaggagtcccagccatcccctttggctctgctggcagcaacttgcagcagaattgagtcacccaatgagaacagcaacaactcccagggcccgagtcagtcagggggaacaggtgagcttgacctncagccacacaactttacagggtgccaatggctggcagatcatctcttcctcctctggggctacccctacc

SEQ ID NO: 38453 - DNA, 321 bp, Homo sapiens
  misc_feature (1)...(321): n = a,t,c or g
caaaatgtgtcttctattagtctattttaacatttgtcagagtagagcacacttctgaatttaaatcaacccaattttagaaccaagtattagacactaaatttcgtcgacgcggccgcgaattccnnnnnnnnnnnnnnnnnnnnnnnnnnnnnnnnnnnnnnnnnnnnnnnnnnnnnnnnnnnnnnnnnnnnnnnnnnnnnnnnnnnnnnnnnnnnnnnnnnnnnnnnnnnnnnnnnnnnnnnnnnnnnnnnnnnnnnnnnnnnnnnnnnnnnnnnnnnnnnnnnnnnnnnnnnnnnnnnnnnnnnnnnnnnnnnnnnn

SEQ ID NO: 38454 - DNA, 440 bp, Homo sapiens
  misc_feature (1)...(440): n = a,t,c or g
gaggggngtccccnttgaccccnnnnnnnnnnnnnnnnnnnnnnnnnnnnnnnnnnnnnnnnnnnnnnnnnnnnnnnnnnnnnntctcgaggatccgaattccnnnnnnnnnnnnnnnnnnnnnnnnnnnnnnnnnnnnnnnnnnnnnnnnnnnnnnnnnnnnnnnnnnnnnnnnnnnnnnnnnnnnnnnnnnnnnnnnnnnnnnnnnnnnnnnnnnnnnnnnnnnnnnnnnnnnnnnnnnnnnnnnnnnnnnnnnnnnnnnnnnnnnnnnnnnnnnnnnnnnnnnnnnnnnnnnnnnnnnnnnnnnnnnnnnnnnnnnnnnnnnnnnnnnnnnnnnnnnnnnnnnnnnnnnnnnnnnnnnnnnnnnnnnnnnattgttcntcacggcttnnantgtttnnctgnccgtttntgtttgtnnttnnntattntntnnggtg

SEQ ID NO: 38455 - DNA, 451 bp, Homo sapiens
  misc_feature (1)...(451): n = a,t,c or g
tgccagagttgagactccatctcaaaaaaataaaaataaaaataaaaaaataagtgaattagagaaacaggttcaagtaactgtctaggagcccagagaaaagccctaaaacatgcaacatgtcaggattgcaaaggcttcttgagaaagcagctctctgaaggccgtcgacgcggccgcgaattccnnnnnnnnnnnnnnnnnnnnnnnnnnnnnnnnnnnnnnnnnnnnnnnnnnnnnnnnnnnnnnnnnnnnnnnnnnnnnnnnnnnnnnnnnnnnnnnnnnnnnnnnnnnnnnnnnnnnnnnnnnnnnnnnnnnnnnnnnnnnnnnnnnnnnnnnnnnnnnnnnnnnnnnnnnnnnnnnnnnnnnnnnnnnnnnnnnnnngtngncttgatggntttgatgacntnttncagggnntatnctnatnttnnttntnntnnggngagtt

SEQ ID NO: 38456 - DNA, 370 bp, Homo sapiens
  misc_feature (1)...(370): n = a,t,c or g
ggatttgnnnggnnnnnnnnnnnnnnnnnnnnnnnnnnnnnnnnnnnnnnnnnnnnnnnnnnnnnnnnnnnnnnnntctcgaggatccgaattccnnnnnnnnnnnnnnnnnnnnnnnnnnnnnnnnnnnnnnnnnnnnnnnnnnnnnnnnnnnnnnnnnnnnnnnnnnnnnnnnnnnnnnnnnnnnnnnnnnnnnnnnnnnnnnnnnnnnnnnnnnnnnnnnnnnnnnnnnnnttgnccctgtatgcttagatntattngaattttgtaaatgactagagttacnnnnnnnnnnnnnnnnnnnnnnnnnnnnnnnnnnnnnnnnnnnnnnnnnnnnnnnnnnnnnnnnnnnnnncttcttngccngagg

SEQ ID NO: 38457 - DNA, 302 bp, Homo sapiens
  misc_feature (1)...(302): n = a,t,c or g
cgannnnnnnnnnnnnnnnnnnnnnnnnnnnnnnnnnnnnnnnnnnnnnnnnnnnnnnnnnnnnnnnnnnnnnnnnnnnnnnnnnnnnnnnnnnnnnnnnnnnnnnnnnnnnnnnnnnnnnnnnnnnnnnnnnnnnnnnnnnnnnnnnnnnnnnnnnggaactcctntntaattagtaggtacctgctgtccaacntggctgacattataaatacnnataatgaaggtgaaaatttcntatattcttattanaatatggcttannattatncnngatttgtatnttcntangtgtnnttttt

SEQ ID NO: 38458 - DNA, 307 bp, Homo sapiens
aaatgatccctctatcttgaaaatacagccaaagctagaaccatcgttttcaggaaaatctcaataattccctgcctcactctctttctttgcacttcttgtgacctgggtctgtctagatgcctctattaaaaagctcctccaggttggtctttccaaaggacttagaagggcttctactctataggatcagccccttgtaaatactcaaatccttggcgcctggctgtaacaatggccaagtacatggaagctagctgttcagaatcaggagacctgtgatcatcctctctagtcagggtggaca

SEQ ID NO: 38459 - DNA, 311 bp, Homo sapiens
  misc_feature (1)...(311): n = a,t,c or g
tttttataatttacatttattttgtgaatatacttttgtatttctattttactgtattttattttatatttagtaaaaacaatttttgaacataattttgcaagttctacaatgacacaggtggtaggcaatagagtataattaggttaaaagcacagggtctaaggntaaaatggcatgcatgaagcccagncccaccacttactagctctgtgaccttgggcangctactaacccgngtacccnatnngtanngcggngganagntatgcntangggatgngtnnnntcgcttgnangggagngtgtcc

SEQ ID NO: 38460 - DNA, 294 bp, Homo sapiens
  misc_feature (1)...(294): n = a,t,c or g
nnnnnnnnnnnnnnnnnnnnnnnnnnnnnnnnnnnntgcccttctccacagctgttagaagcaaatgcagtattcacagacaagctggcaggacctctcaaatacatatggatctacaacaactgtgggggagatgcatgagaatcagtatcagaagaactaatcctgtagcaatgacagcaaatacagaaaaaactttaaaaaggttcaatagtacactatattcagagaaagactcaactatagatcttggacgtaaaaattttatttatttantattattattttttttga

SEQ ID NO: 38461 - DNA, 308 bp, Homo sapiens
  misc_feature (1)...(308): n = a,t,c or g
ggggcatcaacatatattattttacattttttatgatccatggtgattatgatgataaggataggactatgaagacagtgtatgttccacaacaaaaccatattcgtttgctttaaattcggngtgcaggagccagtgaattttncccantaaatttcaaaaggatttgnctactnctanaanagaatagtgtgtggnnngtatntanntgggggtaaattnnntctncntgntngttagtcgannnnnttttttnntcactgggtngnngnacngnnnnngggtttnannnttttgtntananactc

SEQ ID NO: 38462 - DNA, 310 bp, Homo sapiens
  misc_feature (1)...(310): n = a,t,c or g
tggatttgagtnnnnnnnnnnnnnnnnnnnnnnnnnnnnnnnnnnnnnnnnnnnnnnnnnnnnctnnnnnnnnnnnnnnnnnnnnnnnnnnnnnnnnnnnnnnnnnnnnnnnnnnnnnnnnnnnnnnnnnnnnnnnnnnnnnnnnnnnnnnnnnnnnnnnnnnnnnnnnnnnnnnnnnnnnnnnnnnnnnnnnnnnnnnnnnnnnnnnnngtagaacttttaacccaagnctcatttnttttttgaaagggannantgcncaagattanctgcntcnttggatgaatcattngtananaanagctngggc

SEQ ID NO: 38463 - DNA, 290 bp, Homo sapiens
  misc_feature (1)...(290): n = a,t,c or g
tgagcctgtgcagcggtagtttagctttctctcctggttaactttaactgccacatatatcacttcacacgtcatttttcattcaaacgtatttaactggctcttcattcataagaagctggaatttgtcgtttgactgatattttaaagattttatattttttctccatcctcgttctaatgttgtatcttgtgtcattngntcattcntanacttaacgacttagntanncncttgagcatncaggnanncngtatctatcatgngaatnctctaatantggngatcc

SEQ ID NO: 38464 - DNA, 293 bp, Homo sapiens
caaagtgtaattatatctgacaaacaatttttgagtacaattctgtgccaggccatgtgctgttatggaagtttcataagtaaattaaaaaatcattgccctcctgggtccctgacctactcagagaaattaatacaagttattcaagtaatgagaattacaaagcacactgttacaattggaatcaagtctctgacaaaagctttcacctgctctgtcaacccactaagtgtggtgtcatctcttaaaatatcatagggtatctttaatagatttaaatctatttaatccta

SEQ ID NO: 38465 - DNA, 291 bp, Homo sapiens
cacttgccatattacacagccatcgattcccttcaccagctgctgctcagtgggccgcacaagcccgccagtcttttctcagggcagggatggaaaatgagagggtaggatgagaggaaagtaatccaactggattggcttcttaaaatacagaagatttgagtgagagtgaaactgaacattttgtgcttttgatgaccaccaaatgactacctactacttcaccacagctggagaaactaaaaacacatgctcttttgctgccgggtcagaaatgctttttttcccata

SEQ ID NO: 38466 - DNA, 315 bp, Homo sapiens
  misc_feature (1)...(315): n = a,t,c or g
tgagttttcacatgcatgtgtgagatgtgcctccctcaaaccttgttatgttggcacattacctgtctgacatggggaaaaaaaaaanctancagnctattttaataggttaaaattggnaattntgngaaaanactgatactttttaaaaatataagngnanctctnatttccatctttctttnatcttgnctttngcttnanctttgtaaaangtattaaagagccnttaaaaangcanaatttcaaaaatcaanctttgnacaaatagtaatattaggcatgnactttgantatttangccttcccttttta

SEQ ID NO: 38467 - DNA, 300 bp, Homo sapiens
  misc_feature (1)...(300): n = a,t,c or g
cctgaatctgcgcaaccgctacgcgggcgaggtgtatggaatgattcggttctcaggcaccacaggccagatgtctgacctgaacaaaatgatggtccaggatctacattcagctttagaccgcagtcatcctcagcactacacgcaggccatgttcaagctgaccgcaatgctcattagcagtaaagattgtgacccgcagctccttcatcatctgtgctggggtcccctccggatgttcaatgagcatggcatggagacggncctggcctgctggnaatggctggtngnctngcttgg

SEQ ID NO: 38468 - DNA, 334 bp, Homo sapiens
  misc_feature (1)...(334): n = a,t,c or g
cttttttctaaatcaacaatagaaatatacaggaggcaaaaattatatttgaggatgtcagaaaaagagaatcatagttttgttttgttttttaagagtgttaataccaaaggtcttttactaccgatattaacatctcctgccttgttgtaggactcagtaattacttgtgaacttaagggggcaactataaatcttccaggctataccaagggttctcattctccttccaaagctgactgtgaaatgctcagtaacatatgtgtgtacacacacacacacacacacacgcgcacgcatttgnttcagtnataaatgntggactaatgnctag

SEQ ID NO: 38469 - DNA, 305 bp, Homo sapiens
  misc_feature (1)...(305): n = a,t,c or g
attggaaaaaggtaaagctggatgcatatctgatagcatacaccaggataaaatctaaatggattataaattaaaataaaaacaaaatcttaaaaaaactattgctctgacttgggaagccaaggtagcaggatcacttgggcnnnnnnnnnnnnnnnnnnnnnnnnnnnnnnnnnnnnnnnnnnnnnnnnnnnnnnnnnnnnnnnnnnnnnnnnnnnnnnnnnnnnnnnnnnnnnnnnnnnnnnnnnnnnnnnnnnnnnnnnnnnnnnnnnnnnnnnnnnnnnnnnnnnnnncttnnnnngacc

SEQ ID NO: 38470 - DNA, 301 bp, Homo sapiens
cgcggccgcgtcgactttgttagggaactgatcgaaattagtgacccttcccccccaaattaggttgctaaaacagttacttacatttaaccttcttaaaattcagagtgttgtctgcagactaggtaacattgctctgacttgagaacttaatttagaaatatttactatcaggttctatccctacacctggaatcagcattttaataggattcttgggtgattcatgtataaagtttgagaagcactgttcagtgtttgtgtgattgtggaacaatgtggaaagcaaacttattccaag

SEQ ID NO: 38471 - DNA, 286 bp, Homo sapiens
  misc_feature (1)...(286): n = a,t,c or g
nnnnnnnnnnnnnnnnnnnnnnnnnnnnnnnnnnnnnnnnnnnnnnnnnnnnnnnnnnnnnnnnnnnnnnnnnnnnnnnnnnnnnacactcatctattaagtagagctaggaattcctatcctaagggacacaaaaatgaaaaaagataaaatttgtgaagaggcacataatgaaagcccatacatgtcactgagttcagaggagggtgggtctgacctcccattggctggtctctgcctgatggacatcgtgaagaagagagccaggactagtgtggctggggga

SEQ ID NO: 38472 - DNA, 291 bp, Homo sapiens
  misc_feature (1)...(291): n = a,t,c or g
tgcctttctctcagtccatgatacatcctattattttagnnnnnnnnnnnnnnnnnnnnnnnnnnnnnnnnnnnncctatggctagaaaaatatgaattcaagctgaagacagtaaacaaaaggaatttatctttcctaaaaggaacacagaaataatctcccaaattgtaaattccgagttcatggaacatatttgtcctactctttggaaaatgctttctaactcattcacacagaagtcactgcaaagtgttaattaatacttaangatgaaatctgatgacctgtac

SEQ ID NO: 38473 - DNA, 288 bp, Homo sapiens
  misc_feature (1)...(288): n = a,t,c or g
nnnnnnnnnnnnnnnnnnnnnnnnnnnnnnnnnnnnnnnnnnnnnnnnnnnnnnnnnnnnnnnnnnnnnnnnnnnnnnnnnnnnnnnnnnnnnnnnnnnnnnnnnnnnnnnnnnnnnnnnnnnnnnnnnnnnnnnnnnnnnnnnnnnnnntcatgctcagcaggttgattgactcttaataaagaactctgacctggatagtctttttttttttnaattaaattttnaattttctttttctntgaacactntccaaggttacggatnttttctaaggccctaaaagct

SEQ ID NO: 38474 - DNA, 316 bp, Homo sapiens
gggcgggccaggtgactggtccgggccatgccgaggaagaagccattcagcgtgaagcagaagaagaagcagttgcaggacaaacgggagcggaagagagggcttcaagatgggctgcgctccagttccaacagccgcagcgggagccgggagcggcgagaggaacagaccgacacctcggacggggagtctgtgacccatcatatccgcaggcttaaccagcagccttctcaggggctgggtccacgaggctacgacccaaatcgataccgactgcattttgagagagacagcagggaggaggtagagaggagaa

SEQ ID NO: 38475 - DNA, 322 bp, Homo sapiens
  misc_feature (1)...(322): n = a,t,c or g
taaagctcagtggctcttcctggttagcaaacacatcagtgtctggagactgatgcatcctggctccacatcatggagttaggagaggttatggaagctctgtgtctgggaccttcccaaacctcaccctgtgtgtatcttttatagttaaactagttgtaagtgtagcacttttcctgagttctatgagttgtagtgaattattaaacctgaatggactgtgggagcccctctgtagccagtcagcttgggggggatgcccgttcctgagactgacatatcagaagtganggcagccttgtggaggactttaccttcactg

SEQ ID NO: 38476 - DNA, 121 bp, Homo sapiens
taaatgtacagttcagtggcacttagttctttcacaatctagttccaaaatattttctctgtcttacattttttcttcttctctattttatctttctttttcttttctttttttttttttt

SEQ ID NO: 38477 - DNA, 343 bp, Homo sapiens
  misc_feature (1)...(343): n = a,t,c or g
cgcggccgcgtcgacgttagcctgtgaggaaactggagaggcgtggctggaccaagacctccccccatgtgagcaggcttcctcctcccccaacaaccgttgccaccacgcccagaagtccttaagccctggccctcaggggaaaggtaacaggaggccagagccgggaccatgtgacggcgctggccctcgccaccgccgtcccccgaccctggccccaggcccggnaccatgatgttncgagaccaagtgggcatcctcgctgctggttaaaaggctggaatgagtgtancagacagtggcccttctgcacttctgaaacgggtcacccgtacccangccc

SEQ ID NO: 38478 - DNA, 339 bp, Homo sapiens
  misc_feature (1)...(339): n = a,t,c or g
ggagggagggctggggttgaaccgcttcccgccaccaccggggccgccccgccgcccggccgccgcttgcatgtcagctccctgaccgcagaggcctggcctccatgccgcgggaagagaaagcttcattgaacgagccgggagggccagggagggggagggggcgcggcagtggccagctccacggggagggaggacccagaggaggagaggagggaactgccgggaggaatggaaggaaaaggcggantngacgnggctgcnaatttcagatctntgaatcgtanatnnnnnnnnnnnnnnnnnnnnnnnnnnnnnnnnnnnnnnnnnnnnnnnnnn

SEQ ID NO: 38479 - DNA, 295 bp, Homo sapiens
ccacaagctccaatgacaggaaatggtggggacccccgatctgccagcataaaatcccagagcattggcaagtgccagctgagctgccagagccaatcaccgaggcccctttctggccccatttcctacagccgagatctgttctctccaggcacagcctgggcagccatggagggaaaggcctcatgctcccctgcctgaagggttccctagcccagatctcagggcccaggattgtgggggaggatatggccccagctcccgaccccaggggcctgtgctgggctgggattgg

SEQ ID NO: 38480 - DNA, 312 bp, Homo sapiens
aaacaatcagagaaatcagaatgtggagcgttctttaaaacccttggtctggattcttaaaaaagacgctgaagtatttatttaggggtgaagtcaagatgtctgcaacttactttcaaatggtttcacaaaacacagagatacagcaaatgtagcaaaacgttaactattgatgaacctaaatgaagagtacacaagtgttaattttaatagtcttttaattttcctgttttcaaagtgtagatttttaacagttaattgataataaaatatgactctgaaggtcgacgcggccgcgaattccagatctat

SEQ ID NO: 38481 - DNA, 310 bp, Homo sapiens
  misc_feature (1)...(310): n = a,t,c or g
cccagggtggcagaaacatgatctcaaggaatgcaacctccaagtcaaaactgctcagggaaatagcccttcccatggctgtctttttcatctttctttcagatacctgagaaattgagannaatnatgatantggtcatanatggncttctnngnnatgntnngaacnttcttttntntnnttatgnactcngataagcttgtttntattctatttttnncnttntttaattggtnaatntgatgacctgatttagtttnatgnnanatnttngatgnttttattgnatnnttatttanttnntntttt

SEQ ID NO: 38482 - DNA, 317 bp, Homo sapiens
  misc_feature (1)...(317): n = a,t,c or g
ggtgctgtctcctgccgacaagaccaacgtcaaggccgcctggggtaaggtcggcgcgcacgctggcgagtatggtgcggaggccctggagaggatgttcctgtccttccccaccaccaagacctacttcccgcacttcgacctgagccacggctctgcccaggttaagggccacggcaagaaggtggccgacgcgctgaccaacgccgtggcgcacgtggacgacatgcccaacgcgctgtccgccctgagcgacctgcacgcgcacaagcttcgggtggacccggtcaacttcaagctcctaagccactgnctgt

SEQ ID NO: 38483 - DNA, 314 bp, Homo sapiens
  misc_feature (1)...(314): n = a,t,c or g
ggagtgcaatggcgcgatctccggctcaccgcaacctccatcacgaactgtcccgcgtaggtgcccgtcatggtggagctctgcccagccgccaggagacctatggcccagatgtagagggccgcggggccgaacaggcagcccaggatcacgcccccctggtaaatgtccacggccacggtggcgttgttcatggggaagatcttggcgtagtcgtggaggctgctgttggcacagatgttgaacgtcgacgcggccgcgaattccagatctatgaangtanatnctggaaaaccccgnnaggttncttttaa

SEQ ID NO: 38484 - DNA, 296 bp, Homo sapiens
  misc_feature (1)...(296): n = a,t,c or g
gcagaatcacaaaattcccagatgacaattcaaacagttactataaaaagtaataaggtgtatttgacatcctttgaggccacactaatgtcagagtttctgatagtttatgcggttttaatggacactgtattactgtgancnnnatatntntatntntnnntatgattagngctcatgnntattttttnnctnaattnttattnnncatgtattactatngctnnngcntanncttngnnttgntctccntntggaaangngnnncnnnngnncntnngnngnnntngtntttc

SEQ ID NO: 38485 - DNA, 325 bp, Homo sapiens
  misc_feature (1)...(325): n = a,t,c or g
nnnnnnnnnnnnnnnnnnnnnnnnnnnnnnnnnnnnnnnnnnnnnnnnnnnnnnnnnnnnnnnnnnnnnnnnnnnnnnnnnnnnnnnnnnnnnnnnnnnnnnnnnnnnnnnnnnnnnngctattgtttgtctttgctttcttgtataatggaaatacatgaacacccctttgttttccaataagcatttattaagtcctatcaactgcctaacagagaacagatttcacaattgatcagcaatctcttgttgaatatttagagaatgtactgaagtccctaagtttttcttttggaacatcttttatctgctatcaccacgtggt

SEQ ID NO: 38486 - DNA, 63 bp, Homo sapiens
tttttaaattgtagtgtttcttttttgttttgttttgagacggagtctcaaaaaaaaaaaaaa

SEQ ID NO: 38487 - DNA, 412 bp, Homo sapiens
  misc_feature (1)...(412): n = a,t,c or g
nnnnnnnnnnnnnnnnnnnnnnnnnnnnnnnnnnnnnnnnnnnnnnnnnnnnnnnnnnnnnnnntctcgaggatccgaattccnnnnnnnnnnnnnnnnnnnnnnnnnnnnnnnnnnnnnnnnnnnnnnnnnnnnnnnnnnnnnnnnnnnnnnnnnnnnnnnnnnnnnnnnnnnnnnnnnnnnnnnnnnnnnnnnnnnnnnnnnnnnnnnnnnnnnnnnnnnnnnnnnnnnnnnnnnnnnnnnnnnnnnnnnnnnnnnnnnnnnnnnnnnnnnnnnnnnnnnnnnnnnnnnnnnnnnnnnnnnnnnnnnnnnnnnnnnnnnnnnnnnnnnnnnnnnnnnnnnnnnnnnnnnggtgnggaaagacntannaagctnttgnggnanngctntggngaatggctnnaggagaggg

SEQ ID NO: 38488 - DNA, 314 bp, Homo sapiens
tgaaaagctaaaggacagactgctgacagggtttctgctagaggttttggaatggtggaaaagaggtagagacagggaggtgaaggagaggaagaagtggcaagtgccttttcccccactatctccctgttttggattttccccacaactgttgatatacatctataaatgagaaattcaattataaccagcttatttaaaatatcctctatgatagaaatctacttaagttaaaaaaatcaaagggaaactagatgcctaatatgtaatagctagtattttcattcattcatatgttacctatcaagattctg

SEQ ID NO: 38489 - DNA, 312 bp, Homo sapiens
ctcagagagaacccaccatggtgctgtctcctgccgacaagaccaacgtcaaggccgcctggggtaaggtcggcgcgcacgctggcgagtatggtgcggaggccctggagaggatgttcctgtccttccccaccaccaagacctacttcccgcacttcgacctgagccacggctctgcccaggttaagggccacggcaagaaggtggccgacgcgctgaccaacgccgtggcgcacgtggacgacatgcccaacgcgctgtccgccctgagcgacctgcacgcgcacaagcttcgggtggacccggtcaact

SEQ ID NO: 38490 - DNA, 309 bp, Homo sapiens
  misc_feature (1)...(309): n = a,t,c or g
tgaagaaagagctcatgagaacaccacaggctcttgacccagtgtagagagaacagtgaagaggctcggaatgactttctggaggagatgcttaaccagatcatagtgaatacagcagagtctccaatatctctggaggcggaaagcaaaaaccacaatgcaaacagggaagcaggggagatgagtccagagaggcaggcaggggctgcaccatgagctgcctttctggctgggctaaggagctccagctttacctggacacaccaagaaataatacaagggtgacagcatgaaagccnccanggtcca

SEQ ID NO: 38491 - DNA, 301 bp, Homo sapiens
gactaagccttcgaaggggcagcagggaggagggtgtggtgactcattggagcagtggagatgggctgaagtgagagcagggggtgaaggagttggactggcagtgcggggtcctctggggaagtttcactgttaaggggaccaggaggggagtaagcctctaccatgagccagcatttaatgctgtacctgatgccactttacagttggagaaactgagtccagaggtcaagtaacttagggtcacacagtagtgagtagggacaccaggatttgattctcagtgtctaactccaaagcc

SEQ ID NO: 38492 - DNA, 302 bp, Homo sapiens
cgcagcgctcggtgtagacgccgcacgactgcccctcggccagggcgcaggtcatgcagcagccgcagcccggctccttgaccagctcgcagcccagggggctgggggggcacatggagagggctttctcgtcgcagggctcgcagtgcacgaaggagcccaggctctgggccggccccgcataggcggccagcagcaggaggaccgcggtgagcaacaccatcttctcttagtcgccccctttacctcggggtggggcaggagagcgagagtgcagggataaaggggccaagagggccccc

SEQ ID NO: 38493 - DNA, 308 bp, Homo sapiens
  misc_feature (1)...(308): n = a,t,c or g
ctcagggtgataagaagagaaggaacaaagaggggaaaaagatcacagcagagagacagagtgctcattttaaggtggaaatatgccatttcctgaccacagcgggacttccctaggttgtattaaaaaatcctgtactgcccatgtctggtcgacgcggccgcgaattccnnnnnnnnnnnnnnnnnnnnnnnnnnnnnnnnnnnnnnnnnnnnnnnnnnnnnnnnnnnnnnnnnnnnnnnnnnnnnnnnnnnnnnnnnnnnnnnnnnnnnnnnnnnnnnnnnnnnnnnnnnnnnnnnnnnnnnnnn

SEQ ID NO: 38494 - DNA, 302 bp, Homo sapiens
ctcagagagaacccaccatggtgctgtctcctgccgacaagaccaacgtcaaggccgcctggggtaaggtcggcgcgcacgctggcgagtatggtgcggaggccctggagaggatgttcctgtccttccccaccaccaagacctacttcccgcacttcgacctgagccacggctctgcccaggttaagggccacggcaagaaggtggccgacgcgctgaccaacgccgtggcgcacgtggacgacatgcccaacgcgctgtccgccctgagcgacctgcacgcgcacaagcttcgggtggac

SEQ ID NO: 38495 - DNA, 310 bp, Homo sapiens
  misc_feature (1)...(310): n = a,t,c or g
cacggcccaccttcctgccccctcgcctgccacggcccaccttcctgtcccctcgcctgccacagcccaccttcctgccccctcacctgccacggcccaccttcctgccccctcgcctgccacggcccaccttcctgccccctcgcctgccacggcccaccttcctgtcccctcgcctgccacggcccaccttcctgccccctcgcctgccacggcccaccttcctgccccctcgcctgccacagcccaccttcccgtcctcacctgccacggtccaccttnccatcctcanctgncacagctnancttt

SEQ ID NO: 38496 - DNA, 408 bp, Homo sapiens
ataaaataaaaccctaaaatacatactgtgctagggatttgaacaaacttcaggatttttaaggaaggctgtgtctcacatctcaattaatcttcccaaaagaaccctaagaggcaaggtttattccaattttataaattaggaacgtaaggctcagtaaaaagaaaatacctgcctcaaggtcgactggtaaggctgcagagccagaactcaaagagatgtcttctaaatccagtgctctctccagcacatctcagctacatcctctatctttctcatcagtataggtcttcatgtatacaaagcatttctgcattcattgttcacactgcttctgccacagctcatgaaaaggacaatgcagatgtctaaatggcccagatctatacccacctttttttttttttt

SEQ ID NO: 38497 - DNA, 479 bp, Homo sapiens
  misc_feature (1)...(479): n = a,t,c or g
ggggaagtaaggtacaaatttgagaatgtatttaatgatacaaagagtaaatggatgatgtggtagctgatgtgtacccagatggcttttttaatacaatggttacttttaatcataatgacaacatgcatattggaagtatatgtggaagagggagaagtgttgtttctcttcagacacaatatcagagaaagtttgtgactgcttattacatacacacgggtatacatgcgggttgttgctataccttggtagtgcttctcaagctgtgttaagggaccatatctctccccacccccactcccttgtaaaatgcaatgagaatgatgtaggggaaaaaataaggtatgancttgtattttcccctaatngacgcggccgcgaattccagatctatgaatcgtanatactgaaaaccccgcaggtcacttnactgtgcatcgngcaccatctaattctttattatnatcgntttgctt

SEQ ID NO: 38498 - DNA, 482 bp, Homo sapiens
  misc_feature (1)...(482): n = a,t,c or g
cctagtcagcatttggagttgtcagggtgtgtgtttgttttttttatccattctagtaaatgagtagttctttcttagtttaaagtaaaagtcttgcaagatgaattcatcaaaagaacaatttaaatgtgaggtaagcatttactgaatgtctgttgtatgccaggccctctgctcgataatgggaatgcagagaaataagacacatttctgctcccatgagacttacagtttattgagagtgacaggcatgtaaagaagtaattacaatatacttagttctaattacctagaatcagtctgggatggggaaggaaagttgatacctggaagaagaaaataatattaggagctacatgtacttctgcataaagttctaanataggttttgatagcaaaggttaagctccccctttattggtatacctaataaatcaatgcccagtaaacttcttgagataatattctgctggtaacacccc

SEQ ID NO: 38499 - DNA, 473 bp, Homo sapiens
  misc_feature (1)...(473): n = a,t,c or g
nnnnnnnnnnnnnnnnnnnnnnnnnnnnnnnnnnnnnnnnnnnnnnnnnnnnnnnnnnnnnnnnnnnnnnnnnnnnnnnntggggctccataggctttattgaggttttcatgggaaggaacagaggaggcagggtaggtggctgagtgtgcttaggattggatagtttgaataatttcagtaggctccggactatatggtccttaattgtcccggtgtctggccctggagtgatttgaggcagggagaatattggcttggtgtgtgagtttgataaaggagataattgggtatggctctgggttggttggcttgatgntaaagctctactcacangggagtctttgctatctttangaatnagccacccctgngangggcacctggcgatgtcaagactccaaatctacagcatnaagaatcntaanatcgggcaaggtggntgcgcctgtatttnacactttgggaggccg

SEQ ID NO: 38500 - DNA, 494 bp, Homo sapiens
  misc_feature (1)...(494): n = a,t,c or g
cactgattgtgtgtaggggctctgctaccactttctacctggaggagtagtgactgctcccttttctgtatgtcaggactaagtgtcattgaatccactcctgactcacatttggtcatatggggaaatagacatcaagggctgtggtcagctggtggagcagagcatggattctggagctataccacctgcatttgcatcctggcggctgtgttacctggagtgagttactttactgctctgcctcattttccccctctgagaatgaaagtgatactagtatctaacgtcgacgcggccgcgaattccagatctatgaatcgtannnnnnnnnnnnnnnnnnnnnnnnnnnnnnnnnnnnnnnnnnnnnnnnnnnnnnnnnnnnnnnnnnnnnnnnnnnnnnnnnnnnnnnnnnnnnnnnnnnnnnnnnnnnnnnnnnnnnnnnnnnnnnnnnnnnnnnnnnnnnnnnnnnnnnnaaatgactagaattaatg

SEQ ID NO: 38501 - DNA, 561 bp, Homo sapiens
  misc_feature (1)...(561): n = a,t,c or g
tttggagatccttagctatctattcgatgatgaanataccccccagacccaccaccaganatctctcgaggatccgaattcgatgccgagtcgacctcctctttccaagcagtagcttagctgacaaaaccaacttgatctcactaacatgaccataaccttcctttttatgaatgtattttggttcttcccatacacatcaaatcctttatgtttctccctaatatatttcagataaatttgtacttaaaagaataaatatatgtacatatataattaatacttcatttaagtagaggagaataaagaaagcttgcagacaatcacttagcaggataaactatatttagtgcacataaacatctccctgttaaataagtagaagtggtgantaaatgnnggnnncntantgnnnatngatnntatnatnnntcntngnnnanacngntnnnnngntnctagtgnntanannnnctnctngnnnnncccnnttnttncannnnnnnnntcttgnnnnnactgnnnntnanctctctctanngnnntcctcnnnctnnacgg

SEQ ID NO: 38502 - DNA, 359 bp, Homo sapiens
  misc_feature (1)...(359): n = a,t,c or g
gcttggnngnnnnnnnnnnnnnnnnnnnnnnnnnnnnnnnnnnnnnnnnnnnnnnnnnnnnnnnnnnnnnnnntctcgaggatccgaattccnnnnnnnnnnnnnnnnnnnnnnnnnnnnnnnnnnnnnnnnnnnnnnnnnnnnnnnnnnnnnnnnnnnnnnnnnnnnnnnnnnnnnnnnnnnnnnnnnnnnnnnnnnnnnnnnnnnnnnnnnnnnnnnnnnnnnnnnnnnnnnnnnnnnnnnnnnnnnnnnnnnnnnnnnnnnnnnnnnnnnnnnnnnnnnnnnnnnnnnnnnnnnnntcttctngaaantntttccanggcttnttccaaacctttggncttttttcccaaaggttt

SEQ ID NO: 38503 - DNA, 365 bp, Homo sapiens
  misc_feature (1)...(365): n = a,t,c or g
gtagcnnnnnnnnnnnnnnnnnnnnnnnnnnnnnnnnnnnnnnnnnnnnnnnnnnnnnnnnnnnnnntctcgaggatccgaattccnnnnnnnnnnnnnnnnnnnnnnnnnnnnnnnnnnnnnnnnnnnnnnnnnnnnnnnnnnnnnnnnnnnnnnnnnnnnnnnnnnnnnnnnnnnnnnnnnnnnnnnnnnnnnnnnnnnnnnnnnnnnnnnnnnnnnnnnnnnnnnnnnnnnnnnnnnnnnnnnnnnnnnnnnnnnnnnnnnnnnnnnnnnnnnnnnnnnnnnnnnnnnnnnattctttatggaaaattttttaccaagggcttattccnaaaanttttggaccttttttncnaaaggttaat

SEQ ID NO: 38504 - DNA, 370 bp, Homo sapiens
  misc_feature (1)...(370): n = a,t,c or g
ttganngttgagtcctgcttcattcgatgatgaagatnccccccaacccaccaaaagagatctctcgaggatccganntccnnnnnnnnnnnnnnnnnnnnnnnnnnnnnnnnnnnnnnnnnnnnnnnnnnnnnnnnnnnnnnnnnnnnnnnnnnnnnnnnnnnnnnnnnnnnnnnnnnnnnnnnnnnnnnnnnnnnnnnnnnnnnnnnnnnnnnnnnnnnnnnnnnnnnnnnnnnnnnnnnnnnnnnnnnnnnnnnnnnnnnnnnnnnnnnnnnnnnnnnnnnnnnnnnnnnnnnnnnnnnatatattacgannnnnnnnnnnnnnnnnnnnnnnnnnnnnnnnnnnnnnnnacagcggtnnnggcgtg

SEQ ID NO: 38505 - DNA, 283 bp, Homo sapiens
  misc_feature (1)...(283): n = a,t,c or g
ctccttctccctccttctccctcctcttgcctccctccttctccctcctcttccctccctccttctccctcctcctccctccttctccctccttctccctncntccgnctccctccttntccntccntgtanctncntccttgtccatccttttanntnnctcctnctnnnncctattgcctccttcggancttntnttnnctacgatcnntctccntcntggtncnntntctcaatcttnctactncttnnttnganngtcntnntncccnntggannataa

SEQ ID NO: 38506 - DNA, 466 bp, Homo sapiens
gacaaactcaccaaagatgctcagcatgccttgcgaagaaccatggaaaaatatatgtctacctgcagattgatcttgtgctgcaattctacatctaaagtgatcccacctattcgtagtaggtgcttggcggttcgtgtgcctgctcccagcattgaagatatttgccacgtgttatctactgtgtgtaagaaggaaggtctgaatcttccttcacaactggctcatagacttgcagagaagtcttgtagaaatctcagaaaagccctgcttatgtgtgaagcctgcagagtgcaacaatatccttttactgcagatcaagaaatccctgagacagattgggaggtgtatctgagggagactgcaaatgctattgcagtcagcaaactccacaaaggtccagtataaaatgatgacagtaaagctttcattatcaggatatcataggacacatattaactatttt

SEQ ID NO: 38507 - DNA, 467 bp, Homo sapiens
  misc_feature (1)...(467): n = a,t,c or g
ctttcagaagggtttaaacattttaaatctaagttatattagaagtggtcaagagtttataatagttgtcagctcatttaatgtctgtcaacacagaaaaataagattaagtgtatatgttatgcagaatattcaagaatatgnnnnnnnnnnnnnnnnnnnnnnnnnnnnnnnnnnnnnnnnnnnnnnnnnnnnnnnnnnnnnnnnnnnnnnnnnnnnnnnntctaaaactttactcatggcctactttgactgaaagacctactgataacatnnnnnnnnnnnnnnnnnnnnnnnnnnnnnnatgtattgtatactatattcttacaataaaggaagaattctttattcttacaataannnnnnnnnnnnnnnnnnnnnnnnnnnnnnnnnnnnnnnnnnnnnnnnnnnnnnnnnnnnnnnnnnnnnannnnnnnnnnnnnnnnnnnnnnnnnnnnnnnnnaacc

SEQ ID NO: 38508 - DNA, 221 bp, Homo sapiens
ataattcttacatcaaagcaactgacaggattaaatgagataataggtgtgaagaccctagcgcagtgcctggttcttggtgggcgtgtaggaaacggagttccttttctggaccatttgtttgttaggtccctaacaaacaggtcccccttcttagagagtttgttacttccttcgttgttgttatttgtatgttaggtcataagctttttttttttttt

SEQ ID NO: 38509 - DNA, 312 bp, Homo sapiens
  misc_feature (1)...(312): n = a,t,c or g
gtttcctaggtatagaatcatattgtcagtgaggagagatcatttgacttctaagnnnnnnnnnnnnnnnnnnnnnnnnnnnnnnnnnnnnnnnnnnnnnnnnnnnnnnnnnnnnnnnnnnnnnnnnnnnnnnnnnnnnnnnnnnnnnnnttatcttgtttacacaagacccattttctcaaaccgttaagaatgtttcataaatgtgactttaaatgacttgaaatggacataatatttttgnctgnaantgcgcattggngnccttttggggaaaaactccaaaaagnggatttcttgggccaaaggccc

SEQ ID NO: 38510 - DNA, 304 bp, Homo sapiens
  misc_feature (1)...(304): n = a,t,c or g
aatggatacannnnnnnnnnnnnnnnnnnnnnnnnnnnnnnnnnnnnnnnnnnnnnnnnnnnnnnnnnnnnnnnnnnnnnnnnnnnnnnnnnnnnnnnnnnnnnnnnnnnnnnnnaagtttatctaatatggtgacactttagcaaatagctatgggaaggaagcgaagggagcaagcagcataggtatctagcagaagagaattctaggcaggaggaacaacagtaccaaacacctgagataagagtgcttggcatatgggaggcattgcaaagaagatggcgtcgacgcggccgcgaatttc

SEQ ID NO: 38511 - DNA, 93 bp, Homo sapiens
gagacattctattagtgacatatgccccttcccccaaaaacaacaatgaagtgttctgtgtgctaacaacatagcttttaaaaaaaaaaaaaa

SEQ ID NO: 38512 - DNA, 304 bp, Homo sapiens
  misc_feature (1)...(304): n = a,t,c or g
ctcctgtgtagggcttccttggctcaccaaagacatagggcacttctccagctcctcttcattcttgatctgcacatctgcgatggagatatacttgtgctgacaaagataagaagacatcaacaagggctgagggcctcattcacatgtgtaccagtctcttacttaaattccccaaaagcaaggaaatgttctgcttatgggtttggtcgacgcggccgcgaattccnnnnnnnnnnnnnnnnnnnnnnnnnnnnnnnnnnnnnnnnnnnnnnnnnnnnnnnnnnnnnnnnnnnnnnnnnnn

SEQ ID NO: 38513 - DNA, 303 bp, Homo sapiens
tgatgcctgacacaggggacactgaaccttgttgatgccagctgtactgagttctcatccacagaggccaggcatggcccagcctggagccgtggccgagggcttccctagatggttccctttgttgctgtctggctttcccgaatctttttaggccacctccaaggactctaaaagggggctattccctggagaccccagagtagggttgccagtcctgcaagtccatagctgagctggaaaggatgcttctgctcacattccctctcatccaggtcctttccttctcgtcttcctctcttt

SEQ ID NO: 38514 - DNA, 302 bp, Homo sapiens
agagaacccaccatggtgctgtctcctgccgacaagaccaacgtcaaggccgcctggggtaaggtcggcgcgcacgctggcgagtatggtgcggaggccctggagaggatgttcctgtccttccccaccaccaagacctacttcccgcacttcgacctgagccacggctctgcccaggttaagggccacggcaagaaggtggccgacgcgctgaccaacgccgtggcgcacgtggacgacatgcccaacgcgctgtccgcctgagcgacctgcacgcgcacaagcttcgggtggacccggtc

SEQ ID NO: 38515 - DNA, 306 bp, Homo sapiens
cccagagaggcattggaatgagacagtagtcatgtcttgagctaagtaataattttgaagcccttgttatgtgggctctggactgacacaaccaatagctatatattaaccttacaatgccctccactagacattataactcatactctgtagttcaacaatgtataattactaaccaatgtcatttctgcaaaccaatgaaaattactgaaaagcaacttttgtacttgccccctctcctgattcatcttttttcttaaaaactccagcctctcttttgctctccagagtgcttccaagggtact

SEQ ID NO: 38516 - DNA, 302 bp, Homo sapiens
cagagagaacccaccatggtgctgtctcctgccgacaagaccaacgtcaaggccgcctggggtaaggtcggcgcgcacgctggcgagtatggtgcggaggccctggagaggatgttcctgtccttccccaccaccaagacctacttcccgcacttcgacctgagccacggctctgcccaggttaagggccacggcaagaaggtggccgacgcgctgaccaacgccgtggcgcacgtggacgacatgcccaacgcgctgtccgcctgagcgacctgcacgcgcacaagcttcgggtggacccg

SEQ ID NO: 38517 - DNA, 306 bp, Homo sapiens
caccctgactcatggcatgctcaggacagaggccccctggccacttcccatgcagcatgctctgttttcagcccaggaaccagttgtcacgccagggcagcttctaggcagaagtccccggggcagggctgggcaggccgtaggacagcgcttaaagggaaggcatgagtttctttcctggctgctggcccaggaccccgcctcagatttgaatgtcacggtcgccggagtctcttccccagggccctgagaggcactggttgcgcgcgaaggctgtggcttcccttccagcacgccccgatttcg

SEQ ID NO: 38518 - DNA, 457 bp, Homo sapiens
  misc_feature (1)...(457): n = a,t,c or g
tcttgtcatcaaatactgtgtaggacacttcagtgagctacaaagcaccaacctatgacagcccttcctatgaaacatgctgccataaaagctagtatctaattaaatgtgagtatggatattaacttttaggtcttttgatttctggattatagtacaaaaaagtagttatggtctctaattttaatacaagttgacaatatttcaaaagccttagtgagaactgatagcacaaacatattttttcctactcatttcgtatctgtgaggataagtacattcaatgtagcctacagcatatctaaatttgaagtattaacatacacttggcagtggtttacattagtaataatcttaattcctgaatgtgcaaacattttcccctaaatgatacttanggaaaaagttcactatgcagtactcatcagtactcatcctatggtaacagttttctctt

SEQ ID NO: 38519 - DNA, 457 bp, Homo sapiens
cgatctgctccaagtaggggctccagcgcgggtcggagtctgggggttcgcgcccgccgacccgcgccctgctccctctcagcacctgggcggacgaaatgaccattaagaagtagatgcccagatgcaaaagtgatgaaacagtccatttgtcataaagtaagatgcagctgtggcatgtcaaccagcttggaacaaaattgtatctgtttttctcagaagagaattccacaaggttaaatcagcaaacaaagaaaacatggtattttgaaatatgattaaactcctgatgctgcagcagaggctaagaaatattaatggccagatctagtgcacacatggtcttctgaagaagccatgggtagctgttgtagctgtccagataaagacctgtcccagataaccatcggaacaagtttaaggtcagtaaaactggttgagttatatatcttactgg

SEQ ID NO: 38520 - DNA, 322 bp, Homo sapiens
  misc_feature (1)...(322): n = a,t,c or g
gggatttttacatgggaaaatgtaaaaggttgatattactagggttgagtctctggggattacatggggaagttgtcgacgcggccgcgaattccnnnnnnnnnnnnnnnnnnnnnnnnnnnnnnnnnnnnnnnnnnnnnnnnnnnnnnnnnnnnnnnnnnnnnnnnnnnnnnnnnnnnnnnnnnnnnnnnnnnnnnnnnnnnnnnnnnnnnnnnnnnnnnnnnnnnnnnnnnnnnnnnnnnnnnnnnnnnnnnnnnnnnnnnnnnnnnnnnnnnnnnnnnnnnnnnnnnnnnnnnnnnnnnnnnnnnnnnnnnnnatatat

SEQ ID NO: 38521 - DNA, 316 bp, Homo sapiens
  misc_feature (1)...(316): n = a,t,c or g
gcggccgcgtcgacgcttttcacaggcatgccaaatgtactaacttttaggtctgtgtatgcatgttctaacagaaaagcatctttgggatgctgcggctcctgggctaagactttatcaaaacctacccttaaaatgctacatgtggccagagaagacagattttggtacaatgatggaagcttcaagtctgcaagttttanaaaccttttccagaatcatgagttacaagtagaaattagagttaataccaaataggtgcactttattctagtaatacaaagggcacatctgaaatggccctgaaattccatca

SEQ ID NO: 38522 - DNA, 307 bp, Homo sapiens
  misc_feature (1)...(307): n = a,t,c or g
ctgttggctggagttgtccctctccttctggggctcctgtttgagctggtcattgtggctcccctgagggttcccttggatcagactcctcttttttatccatggcaggactgggcacttggagtcctgcatgccaaaatcattgcagctataacattgatgggtcctcagtggtggttgaaaactgtaattgaacaggtgttactgcggaaatgcaaaacttagtccatcggcggatttatccatttttactgatggtcgtggtattgatggcaattttgccttccaagnccgcagtttaagcgcc

SEQ ID NO: 38523 - DNA, 310 bp, Homo sapiens
  misc_feature (1)...(310): n = a,t,c or g
taaaattctactattcttggaaaaagtagtttcttaccattattttaataccatttattttttcctcttgatttttatttattgtaaaaacagtactaaaacaaaagttaaacattttaaagtcatctaaaattttattatcctaattaacttttgtggtcttttcttatccttaggcatacataatgaaatatttttacgtaattaaagtcatagcttttttcccactttatattgaaggtcgacgcggccgcgaattccnnnnnnnnnnnnnnnnnnnnnnnnnnnnnnnnnnnnnnnnnnnnnnnnn

SEQ ID NO: 38524 - DNA, 482 bp, Homo sapiens
  misc_feature (1)...(482): n = a,t,c or g
actaaatgtaactaaaaattctacctctggaactgagtgttcatccatccaacaaatttttactgagttgccttactgtactaggccttactctagatgctggggaatcggcagggagcagaacattctaatgaggagacagacaaaacatgattacatgagtatatgcccatgctctgaagaaaatgtaagtaaggtaaggcagtgtagtgatgggaggattatttttaaaaaggtaatcaggaagccttctcagagatgacatttaagcaaagatgggtaagagcgaaccatgcagctatctggaggatcattctaggcaatgaacacatcaagtgcagaagcgcaaaggttgctggntgcagtgntgcagaatcgagaagaggcattgaccacggggtgaggaaggtcgacgcggccgcnattccgaactatgatcganatctgaaaaccccgaggtcacttnactgggcatngggccc

SEQ ID NO: 38525 - DNA, 492 bp, Homo sapiens
  misc_feature (1)...(492): n = a,t,c or g
gccacgtgagtctgctcctcttctgcatgaaatgcccacacgtctgctctgccccatttcatactggatcctttacctcgtcacaggcagttttacaatttagtctttgtacactaattaactttttaccttttcgactgtagaacagacgtttattctcaatctccgttttccctaccaacctacacatggtctattcttcaatataaggcccaacataattatctccttttgtttctaccttgtggaattattattataaaatctgttagctggggattacatgccaagaggggggaaacaaaaagaaacaaaaaaccccagaaaaccagttcttaccacaagttagaaaaacccagcgaggggctgctgggacctgacattagggcttctttaactcanaggaagggaggagaaaggaagcgccgggcgagactctgggcccccccgaaactactttctttactttggngcaatttgaaaattnnaaac

SEQ ID NO: 38526 - DNA, 498 bp, Homo sapiens
tcacagttgaatcactaacggcatctgacagctgctgcatttcttgtttgcgttaagtgttcaaattgaagcaagttgatggttcggaccttgccaatttaaagcttcattatttttgaaatgtttttcaaatgttatattttaacattgggtgttcattgatttttttactttaaaagtactcctttgtcagtttactcaaaatttcaaaactagctgcatgtattttgctttaatgttgaatctacacttagaggttgtactctagatctagttaaaattcaatatcattgtggccctgcattgctaggtggggcttattaaggttagacataaaatatttcatatccccccaaaaacttgtgaattcattcttcatcatgaacatttaatcttccattggaattctagagggacttcagactttaaaaggggtttataaacctcatctgtattggaaataattctggagaccttaaatttaagatattgaaatac

SEQ ID NO: 38527 - DNA, 321 bp, Homo sapiens
  misc_feature (1)...(321): n = a,t,c or g
tttaaatctactgcagcttgctgtcaatgaaatgatgaatgccttatgtaatcaacaagaaaaaagaagactgatgagaaaacagaaaaaacaataagctggatgagaaagtcagggtccaaaaataagtaagtaagccatgcggtatgatatttatttatttatttatttcccatgagtttcctgagcttccgtcgacgcggccgcgaattccnnnnnnnnnnnnnnnnnnnnnnnnnnnnnnnnnnnnnnnnnnnnnnnnnnnnnnnnnnnnnnnnnnnnnnnnnnnnnnnnnnnnnnnntcggtttggccttctttaa

SEQ ID NO: 38528 - DNA, 297 bp, Homo sapiens
  misc_feature (1)...(297): n = a,t,c or g
atttgtcttcagagacatgcttagaaaggcttttcccatgctgattatttactcatgcttatttttatggttttgtttcttaacacttaatatttaaactacctagaatatattaaatgcaataaaatcaaaaccttacatattagtaataaagctattcaaacagaacaaaatatagctataacacaactacattgcctgttatcaatattttaacgacaagtttaatacaatgcagttcagctacaacttgctgacccagtgaagccaccagtgctgntcatcacacctaacttg

SEQ ID NO: 38529 - DNA, 317 bp, Homo sapiens
  misc_feature (1)...(317): n = a,t,c or g
ccggtttcctcatctgtattatgaggctaatatctcactgataaggtggttgtaaggatgaaaaatgataatgtattcaaagtggaatacattaggactgtgcttaacatagtccactttgaatacattaaaggactgtgcctagatccatcataatataaatacacgtgggctgtttactattacaaagctcaagtactttaaatggtaggagtgatggtctaccagacagatttgtatgttaaactgacagattataaaaagcacgctggcgcattaggaaagctaatgnaaagtcatgaccccaaaaggttatt

SEQ ID NO: 38530 - DNA, 312 bp, Homo sapiens
  misc_feature (1)...(312): n = a,t,c or g
gcggctcctcggcgggtggcggtggtggccgtagcggttcctcctggccctgttaatgtcggggccaggccgggggaggatggcgccctaaaacccggccttgctggggtaggggcggtaggggacggggtggggaccggncatgttggaggtgacccgtantntgctgnancnctggnncctcaganttatganaggcgcngaattcgantcttgnngcaanntttgntgaagntnatagacnagtatcnatnnattncttnacntttncaaanggaggtccnatcatnatacantnttttttnanttcac

SEQ ID NO: 38531 - DNA, 292 bp, Homo sapiens
  misc_feature (1)...(292): n = a,t,c or g
ctattatattgcactgtatacccttaagttttccaatactcccttgagggatatggctcatattggtaattttcattaatgtctgtcttaatgcccttcctgcatcataagggaagaagctattntgtattgtatcngntcntnnnnnnnnnnnnnnnnnnnnnnnnnnnnnnnnnnnnnnnnnnnnnnnnnnnnnnnnnnnnnnnnnnantnnnnnnnnnnnnnnnnnnnnnnnnnnnnnnnnnnnnnnnnnnnnnntgnttnnnnntnnnnnttnntgnnttttatttgt

SEQ ID NO: 38532 - DNA, 310 bp, Homo sapiens
  misc_feature (1)...(310): n = a,t,c or g
cttgannnnnnnnnnnnnnnnnnnnnnnnnnnnnnnnnnnnnnnnnnnnnnnnnnnnnnnnnnnnctgtagnnnnnnnnnnnnnnnnnnnnnnnnnnnnnnnnnnnnnnnnnnnnnnnnnnnnnnnnnnnnnnnnnnnnnnnnnnnnnnnnnnnnnnnnnnnnnnnnnnnnnnnnnnnnnnnnnnnnaataagttctttacatgtttggtaaattcagcattgaagccattgagtcatgggcttttctttaccgggagactttttattatgattttgatctcgttacttgatactggtctgttcacgttt

SEQ ID NO: 38533 - DNA, 318 bp, Homo sapiens
  misc_feature (1)...(318): n = a,t,c or g
ctttgccttctgctatgactgtacgttttctgaggcttccccagagcaggggccnntgcagatgctggnccangcccttctngactnganactnatgggcctgaatcaccaaagggctctgctctgngggacagcgaggaagaagggactcaacagaaggcgagagagagcatcacaggctagcaggaagaaggcaggagccaggagggtgtggggcgctgccggacactggatgtgtggacaaggagctgctggtgatctctcccatacagtctcactgtggtgagggctgggccagggatcaaggggtgatgaaat

SEQ ID NO: 38534 - DNA, 293 bp, Homo sapiens
  misc_feature (1)...(293): n = a,t,c or g
aaacatcaagtatgtcacagacagatgctgtctataaaagaaaccaataacaaaaaatcaacttgggctgtactcatcaaattacagtttttaaaccttcttagcatgccttgtgctgctcacttnctatctgaantattatatgntnttntgntantttnnnttnnngtnnnanntgttgntttntnngctngttttnnnnnccttttntatcgtnttgtatntnntggttntnntntgnnnnntnttntnntnttttntnnncntnnccttttnttttnantcgncttttt

SEQ ID NO: 38535 - DNA, 307 bp, Homo sapiens
  misc_feature (1)...(307): n = a,t,c or g
nnnnnnnnnnnnnnnnnnnnnnnnnnnnnnnnnnnnnnnnnnnnnnnnnnnnnnnnnnnnnnnnnnnnnnnnnnnnnnnnnnnnnnnnnnnnnnnnnnnnnnnnnnnnnnnnnnnnnnnnnnnnnnnnnntttttttaaaaaatatttaatcaagttgacctacaatggattataaagttctgaagtatcaaaaccatgtttccctggaccaacattgccatcagcatgtattgtgtgctcaatgagtatttatttgttgaacgcgtgaatgaatgggtgaatacatgaatgaatacctggtgtgga

SEQ ID NO: 38536 - DNA, 314 bp, Homo sapiens
  misc_feature (1)...(314): n = a,t,c or g
gcagaagaagcagaagcagaagcagaagcnnnnnnnnnnnnnnnnnnnnnnnnnnnnnnnnnnnnnnnnnnnnnnataaagtattgatatttccatgtgaccagaaacttgatctaaaaattttaaatataattgaagacgtcgacgcggccgcgaattccnnnnnnnnnnnnnnnnnnnnnnnnnnnnnnnnnnnnnnnnnnnnnnnnnnnnnnnnnnnnnnnnnnnnnnnnnnnnnnnnnnnnnnnnnnnnnnnnnnnnnnnnnnnnnnnnnnnnnnnnnnnnnnnnnnnnnnnnnnnnnnnnnnnnnnnnn

SEQ ID NO: 38537 - DNA, 313 bp, Homo sapiens
ccgattttgagaagatatttgagttgagagaaaaggttatttataaaggatctaaaacaaggaagacagtcgttctaaagctcctttacaaaggtaaagaggagaagagaataggacaagttgtaaacacatgggtgtcttataagacaagagatgacatctgaggaaagctagaaggtaaatacatccctctggccctaggatgagaaaaagaggtggaattataaaatcacacatgcagagaggattcaaacttctatgtaaagcgccagagaaaaagttatttattactttttgttcatcttggtttcta

SEQ ID NO: 38538 - DNA, 312 bp, Homo sapiens; identical to SEQ ID NO: 38489

SEQ ID NO: 38539 - DNA, 312 bp, Homo sapiens
ctttgcagttgtgaggctgcgtgctatgctaaacttagcagaaaaaaggaacagatttttctttatgatccaggcacacttacacttgaaaagaaattaacaagattctctaaggaaggttttgattccagcattcatattaatttttctttaaggggagttattctactaatattctgttaatattagtagaaatgttgattggatgttgtagagggaaaatagggagctcaaagggtacatcttggaagagacagaagccattttataaggaggttaggattgctttctccctcagaaggtggagggaat

SEQ ID NO: 38540 - DNA, 312 bp, Homo sapiens
acagactcagagagaacccaccatggtgctgtctcctgccgacaagaccaacgtcaaggccgcctggggtaaggtcggcgcgcacgctggcgagtatggtgcggaggccctggagaggatgttcctgtccttccccaccaccaagacctacttcccgcacttcgacctgagccacggctctgcccaggttaagggccacggcaagaaggtggccgacgcgctgaccaacgccgtggcgcacgtggacgacatgcccaacgcgctgtccgccctgagcgacctgcacgcgcacaagcttcgggtggacccggc

SEQ ID NO: 38541 - DNA, 306 bp, Homo sapiens
ccgcgtcgaccagtattgtaccacacttggaacttcctccatttcttccattttagaaggatatgaacctggaacttttgatgattctaagccttaaactatcaaaaagatcagggattgccaatgcttctaatggcactgcaagtatatgccataaccgttccctcctaaaagtgaaaaatgagagaaattcagtattttcccaggctcagcatccagaagtctagctctgggctggaagaaaagggtactaatatttagggaagagatgagaataagtagtgggtggcaggagagggctgagct

SEQ ID NO: 38542 - DNA, 306 bp, Homo sapiens
  misc_feature (1)...(306): n = a,t,c or g
gtgagcatgaggttttccaatcaggtaaagaattattctatttcttgatttagactcgtccagagacatttaagcttaattgaagaggaaatttttgttctgaataggtttttgttgttccttctgacggaaaggtttctccctcttctggttagttaagatttacttgtgtcgacgcggccgcgaattccnnnnnnnnnnnnnnnnnnnnnnnnnnnnnnnnnnnnnnnnnnnnnnnnnnnnnnnnnnnnnnnnnnnnnnnnnnnnnnnnnnnnnnnnnnnnnnnnnnnnnnnnnnnnnnnnnnn

SEQ ID NO: 38543 - DNA, 319 bp, Homo sapiens
  misc_feature (1)...(319): n = a,t,c or g
caaaaacaaaacaacaaaaaaagtgaaaaataaaagggacaaaattaactacaaagttattcagttaaacggggagataatgcaagtagctataggaaaatcccaaagacccagtaaataaataagcactacagcaaggcgggtagcaacttttgtctaagttagaaatagctgagaagactaaaacatgtgccacatgattcaccagggactgcgcaggagagggtcactgaggttttattattcctctatttgcagcttccagatgggtcatctagtcagttggntcccacgttnacgcggnccgngaattccagat

SEQ ID NO: 38544 - DNA, 324 bp, Homo sapiens
  misc_feature (1)...(324): n = a,t,c or g
nnnnnnnnnnnnnnnnnnnnnnnnnnnnnnnnnnnnnnnnnnnnnnnnnnnnnnnnnnnnnnnnnnnnnnnnnnnnnnnnnnnnnnnnnnnnnnncggtggaggnnnnnnnnnnnnnnnnnnnnnnnnnnnnnnnnnnnnnnnnnnnnnnnnnnnnnnnnnnnnnnnnnnnnnnnnnnnnnnnnnnnnnnttgttagtcaatctgtgtgttactggtaaggcttctggtcagtaataggccattagtagttaagtttttggaaaatcatatgtaaatttttgatttgattttctaacacccacattgttcangggtcaactgtt

SEQ ID NO: 38545 - DNA, 324 bp, Homo sapiens
  misc_feature (1)...(324): n = a,t,c or g
gtgtgaggccacgcatgagcggacgctaaccccctccccagccacaaagagtctacatgtctagggtctagacatgttcagctttgtggacctccggctcctgctcctcttagcggccaccgccctcctgacgcacggccaagaggaaggccaagtcgagggccaagacgaagacatcccaccaatcacctgcgtacagaacggcctcaggtaccatgaccgagacgtgtggaaacccgagccctgccggatctgcgtntgcgacaacggcaaggtgttgngcgattacgtgatnttgngacnagacccanaanttggcccagt

SEQ ID NO: 38546 - DNA, 306 bp, Homo sapiens
  misc_feature (1)...(306): n = a,t,c or g
ggtggacggactgtaattgatagattgattatggaattaaattgggtacagcttcaaatcccgtcttctctgtggcactgggggttagagggggcactacaggctatgaatgtgggaaaagaggggctgagaggggttggggtcctgaatgacagctgccagcttggggattgagggctcanacagctgctgtggacggtgtggnggcagtggacgccctgacatcagcnggccggttcttctnaatcacctntcgcagncctttggcnnagtggagatcagccccgatggtgangaatccttgac

SEQ ID NO: 38547 - DNA, 305 bp, Homo sapiens
cctgtctcaaaaacaaaaacaaaacaaaaaaatccacagaaaagtaataatgaccaatccaaatttacaaactagagtatattttagttgctttagataatctggcagtatttacaagagctttttaaactgctattatgattttaaatgggtgctaattttgaaatatgatctaagctactttcacatattctctaaaccctgtcccccaactaatcatacatgctatatatatatcacatctatctatatgaaactattgctcttcatttttgcaaactagcagttctataattgtaaaaatt

SEQ ID NO: 38548 - DNA, 308 bp, Homo sapiens
  misc_feature (1)...(308): n = a,t,c or g
nnnnnnnnnnnnnnnnnnnnnnnnnnnnnnnnnnnnnnnnnnnnnnnnnnnnnnnnnnnnnncctttttcctttgagatacagtcttgctctgtcactcaagcnnnnnnnnnnnnnnnnnnnnnnnnnnnnnnnnnnnnnnnnnnnnnnnnnnnnnnnnnnnnnnnnnnnnnnnnnnnnnnnnnnnnnnnnnnnnnnnnnnnnnnnnnnnnnnnnnnnnnnnnnnnnnnnnnnnnnnnnnnnnnnnnnntttctatgttgcccaggcgcatctcaaactcctggacttcaagcaatntccatttcaac

SEQ ID NO: 38549 - DNA, 338 bp, Homo sapiens
  misc_feature (1)...(338): n = a,t,c or g
ttcccatctttatgtccatatgcactcgatgacttacgagaacatgttgttttcggttttctgctcctgtgttaattcactaacannnnnnnnnnnnnnnnnnnnnnnnnnnnnnnnnnnnnnnnnnnnnnnnnnnnnnnnnnnnnnnnnnnnnnnnnnnnnnnnnaatggctcacatttactgcacacttaccttcgtaacaactgtgagtcaggtactagcattattccagcttacagtggaaaaagctgagtcagagagggtaataaaattgcctcggatcacacagttatcaagtagtgaagccaagaatcaaacccaangcagtaagcctggg

SEQ ID NO: 38550 - DNA, 341 bp, Homo sapiens
  misc_feature (1)...(341): n = a,t,c or g
gcagggaggtgggtagccgggctcccaggcacgtgggtctctgcggctgcggcgggacccgggcactggcacccgggagcggcggcgacggcaccccgagaggagaagcgcagcgcagtggcgagaggagccccttgtggcagcagcactacctgcccagaaaaatgctggaggctgggcgtggccccaggcctggggacctgtttttcctgtttcccgcagagttccctgcagcccggtccaggtccaggcgtgtgcattcatgagtgaggaacccgttgacgcggcgcgaattccnnnnnnnnnnnnnnnnnnnnnnnnnnnnnnnnnnnnnnnnnnnn

SEQ ID NO: 38551 - DNA, 344 bp, Homo sapiens
  misc_feature (1)...(344): n = a,t,c or g
gtcgacgcggccgcgatctccaaaagataaggactacatttaaaaacaagcacatgaccattatcactccaaggagaaatgaattacattttcttaatatggtcagttagtgttcagatttccaatagcctgaaatgtcataatttttagcataggnngantcatgattcnnntaacaatccatattttggaattnntggnttagntcncntcatgnntnacntgtactcantangcttncatncagctgancttnnnggagttnatntgctgatgncgnggctaaccttngnctnccnnnatntgntnctctcntgntttcnangnccntggncancancatt

SEQ ID NO: 38552 - DNA, 306 bp, Homo sapiens
gttttttgttttgttttctcaggatgtaggactttgaggcaagtgcagggaggaggcaaatttccagccaccacctctcacatcagcccggcctctgcccttccctgcttctgcccctctccaccggcctccatcaccactactgcccaggaccagtccacatcaaccatggggagacaggacatagctgggggcaactgctgaagagaaggaccagtgcatttggcctccactttctctctctccctttatcctccctttccttttcatggaaccagaggcacactcatgttgccctgtcacttg

SEQ ID NO: 38553 - DNA, 309 bp, Homo sapiens
  misc_feature (1)...(309): n = a,t,c or g
nnnnnnnnnnnnnnnnnnnnnnnnnnnnnnnnnnnnnnnnnnnnnnnnnnnnnnnnnnnnnnnnnnnnnnnnnnnnnnnnnnnnnnnnnnnnnnnnnnnnnnnnnnnnnnnnnnnnnnnnnnnnnnnnnnnnnnnnnnnnnnnnnnnnnnnnnnnnnnnnnnnnnnnnnnnnnnnnnnnnnnnnnnnnnnnnnnnnnnnnnnnnnnnnnnnnnnnnnnnnnnnnnnnnnnnnnnnnnnnncctggcccacattttcaactatttaactggtttactccacatcttgagtttttttctggattcctaaca

SEQ ID NO: 38554 - DNA, 305 bp, Homo sapiens
  misc_feature (1)...(305): n = a,t,c or g
cgtgtatgcttgttggcaacggaatagatagagataaagaagtacaattattaaccataaatctgcagaaatgctaatacaggttttttgagatgatggagtaatgcagttgttatttcttgagatatagttacattttgcaggaaacaaagtctaatagatattgttaaaatttaacaacattcattagtactcacgcaaaatgctaattagagtacaaataagagagaaatgactcttcananantttnnnttnctttgcncaagngttntctnccnttactntcnnncncnnnntcttttgc

SEQ ID NO: 38555 - DNA, 312 bp, Homo sapiens
  misc_feature (1)...(312): n = a,t,c or g
nnnnnnnnnnnnnnnnnnnnnnnnnnnnnnnnnnnnnnnnnnnnnnnnnnnnnnnnnnnnnnnnnnnnnnnnnnnnnnnnnnnnnnnnnnnnnnnnnnnnnnnnnnnnnnnnnnnnnnnnnnnnnnnnnnnnnnnnnnnnnnnnnnnnnnnnnnnnnnnnnnnnnnnnnnnnnnnnnnnnnnnnnnnnnnnnnnnnnnnnnnnnnnnnnnnnnnnttatgctttaattattttaaaaatcagtttactgttttttttaacttgtctcagtaaagtgcctctatttaagcatgctttcaggnacnntttttgg

SEQ ID NO: 38556 - DNA, 313 bp, Homo sapiens
  misc_feature (1)...(313): n = a,t,c or g
cctctatcttgcctcactttctaccccttctctatgagacatgtcactccagccccatgggactccccaccgcgtctcaatcatgcctcggggccttcgagtttgctgttcctcagatacccacagggcttgctccctcgtcacctttcctcgtctctgcccaataacactttctcagtgtggcctgtcctgacaaccccgtctcatagtcgacgcggccgcgaattccnnnnnnnnnnnnnnnnnnnnnnnnnnnnnnnnnnnnnnnnnnnnnnnnnnnnnnnnnnnnnnnnnnnnnnnnnnnnnnnnnnna

SEQ ID NO: 38557 - DNA, 322 bp, Homo sapiens
  misc_feature (1)...(322): n = a,t,c or g
ctgcggtgtaaacagccgcggcgggcaggccaggactgtcagtgcccgcccctcggggcaggtaatttcatgctcccaaaatgggacataaagtggttgtcttcgacatttctgtcatcagagccttgtgggaaactcgtgtcaagaagcacaaagcttggcagaagaaggaggtggaaaggcttgagaagagcgccttggagaagataaaggaggagtggaactttgtggccgaatgcaggaggaagggcatcccccaggctgtatactgcaagaatggctttataaaccccaccgtgccggtttttggacaanattgaaa

SEQ ID NO: 38558 - DNA, 312 bp, Homo sapiens
atcactaagaagatgaattaacttagtctctgatatttatctaagatggactcctgtcaaaaatctctaaccagtcctccatgcccaaccgcatagaactctctgctctgttcagggtaccatttcatgttgattggcttttatttgcttttgtttttttccctctgtgttatgtccttgggttctgcctaccttccacagtcaaaacacattcgttgattgtgggtgctgtttttcaaagtgagattgtcactaatgtttgccagatttataaatgtaaaacaacttgacagattttggatgaagtttttg

SEQ ID NO: 38559 - DNA, 323 bp, Homo sapiens
  misc_feature (1)...(323): n = a,t,c or g
atagaaccacatatgcgtgtgaacaggtgtatgataggaatgtcatcacaatcagtggagaaaagatagacagtcaaaactggccttgggacaattgtctatccttgcagacatagataatagaccccaatcccacatcatacaccaaataaattctaattatttaaagacacaaatatgaaaagcaaaatattaaacctcaataagaaaacacaaaataccttaatgtatggatttaaaataaatataaatatcctataacaattaagaaaaagtaaagtatnccaaagaggaagggggcaaaggctgaatcaggcaattta

SEQ ID NO: 38560 - DNA, 322 bp, Homo sapiens
  misc_feature (1)...(322): n = a,t,c or g
ctcaaattacagatgagtaaacggaagtcggctgaagaaaaccgcctcacccaacttcagagagagagagagtggggtggtgggtgggaggttggaggggggctcttttcacctcaccctgcctcctattattcacaaaacaccagaatttctcaagttcttgaaagtgcttaggaagtttgttctcttacgcatttagaaaaatccctccttcaaattatatttgcactgtcagtgaagtatggattagcacagactgaatttagtagaggttatactgtcaatggaaagtattatttcaagcnttttaagcttccttgct

SEQ ID NO: 38561 - DNA, 318 bp, Homo sapiens
  misc_feature (1)...(318): n = a,t,c or g
attaatgttacctaagaaggaagagatgtaggatcaatcttatcctgtctgtgtgaagtctttattttatttttttttttgncactgacttcaggctcatgagngaagcncttttttttntttttaaatngttcnttntgaaggggacttgggngtgggngcttcgntttcaaaccctcatgaatttttttttcangggggaagtntttataagtattttttagggatttgaatatggaanggaaattaattnaatttgcctggggatgggttttaggggnnnnnntccttttaanggncaccccccnnnttnttttt

SEQ ID NO: 38562 - DNA, 304 bp, Homo sapiens
tttgggagctcattgaaagatgaaagtgaagtaattatttatcctaactaaaggagaatctaaaatacatgcttaaagcattttccaagtaactgtttatataagtaatgctgttgctttttctctctttcctcaaagcctcagggattggctattctgacccacagctttatctgctgtggacaatcttctatgtctgtggtttattgggtttaatgatttatatttgcaagggaatgcttgactggcgtgggctgggttagttcagctagagaaacttactaataaagccaagggtgaggag

SEQ ID NO: 38563 - DNA, 156 bp, Homo sapiens
  misc_feature (1)...(156): n = a,t,c or g
gttcgtgtttacttttcaaatatacttcttttggctttctttggattatttacatcttttgtcagcgtagcaaacttttagaaaaccttattgaaaaactgtgcttgctcaggttgtattttgattattctgnctgngcggnttnntnttggaatg

SEQ ID NO: 38564 - DNA, 304 bp, Homo sapiens
gtgcacgccatagttcatagtcatgaaccaacctcccccggcaaccatgtctttgtaggagtaccaagagtacaggagcacagtgatgtggtgataccagtgcaggaagatcagcttctgcttcctcagaataatgaatattgtatctcctagttcgggtgctttgcttagcacaaatgcataagcccagaatttgctgacaggtccattgtaaaaaccctggtcacaaactgactgcttcaggcctttggtcatcaaaatgtacaccatataagcaccagttcgaagagcaccgaatatactg

SEQ ID NO: 38565 - DNA, 304 bp, Homo sapiens
ccactgcagaaaagtacgtattcaaatcttaacatacagctcatgcccttaactctctccccctaagcaagaattaagaaaagccgttcacagctttagagtgtagtgtttttatttttttaaggaactccttattaggccctctcttctagaccagattctccttcccactacctctcagagttcccggatgtgactagtaagagcttatacagagaaaggcaacaaaaacctctggatttaaaaaataataactaggtcaactaggaaaattagcaactcaatttacttaatagagaatctg

SEQ ID NO: 38566 - DNA, 299 bp, Homo sapiens
aaacatttggttattgatccgtcccctaagctctcaggagatctggatggaggtaggttgaggtggccagaacctccaaccacttttctagggttttcacattgtgtgaaaaagttgggaaacactgctttggcttattttcattagtataaatgcagattggtttaatgaaaatgaacagttgtatctaaagaaaatatatgaagatgatgaactttgtggaacatactaggtagctaatgactgttggcatggccctgaggattttagataaaggttataaatgtcatcaacaaatc

SEQ ID NO: 38567 - DNA, 308 bp, Homo sapiens
  misc_feature (1)...(308): n = a,t,c or g
ggtggatagggtagggttactgacaaaggatatggaactggaatggtcagagagttaccagagggacttaatgtcttagaaactgaggggagcaggggcagggtagtcaaaaaggagaaagtgatttgccggtacacattaggtattaaatgaagaacagaaattgatgctaagctaaaggggtctttgtctttaggatctatcactggggaaatcattggcaaacttagagtgggggaggagtttcagaggaatgntgagacttaancatgatgccagtnggtaaaaatatngctgncngggaagag

SEQ ID NO: 38568 - DNA, 399 bp, Homo sapiens
  misc_feature (1)...(399): n = a,t,c or g
ggnnnnnnnnnnnnnnnnnnnnnnnnnnnnnnnnnnnnnnnnnnnnnnnnnnnnnnnnnnnnnnnntctcgaggatccgaattccnnnnnnnnnnnnnnnnnnnnnnnnnnnnnnnnnnnnnnnnnnnnnnnnnnnnnnnnnnnnnnnnnnnnnnnnnnnnnnnnnnnnnnnnnnnnnnnnnnnnnnnnnnnnnnnnnnnnnnnnnnnnnnnnnnnnnnnnnnnnnnnnnnnnnnnnnnnnnnnnnnnnnnnnnnnnnnnnnnnnnnnnnnnnnnnnnnnnnnnnnnnnnnnnnnnnnnnnnnnnnnnnnnnnnnnnnnnnnnnnnnnnnnnnnnnngactttttngcagaggttngggnnnnggnnngntcggnnntggnaagnggganggggggggg

SEQ ID NO: 38569 - DNA, 241 bp, Homo sapiens
  misc_feature (1)...(241): n = a,t,c or g
gtaaaccgtctcagaatgcaaaggaggtcaagggactagcttttgttcttaacaattcaatattgttacatgatgcagaagttacaaagctttcattaacaattactgactactttcattgtcatcctcatgtggtgagttctgaattcntncgggctttgtggntantgnctgttttggttgntgangntntantgnttatantttgnatnaantgnatttnnttnnnttattcatgtct

SEQ ID NO: 38570 - DNA, 390 bp, Homo sapiens
  misc_feature (1)...(390): n = a,t,c or g
nnnnnnnnnnnnnnnnnnnnnnnnnnnnnnnnnnnnnnnnnnnnnnnnnnnnnnnnnnnnnnnntctcgaggatccgaattccnnnnnnnnnnnnnnnnnnnnnnnnnnnnnnnnnnnnnnnnnnnnnnnnnnnnnnnnnnnnnnnnnnnnnnnnnnnnnnnnnnnnnnnnnnnnnnnnnnnnnnnnnnnnnnnnnnnnnnnnnnnnnnnnnnnnnnnnnnnnnnnnnnnnnnnnnnnnnnnnnnnnnnnnnnnnnnnnnnnnnnnnnnnnnnnnnnnnnnnnnnnnnnnnnnnnnnnnnnnnnnnnnnnnnnnnnnnnnnnnnntgaagctttggacttgatggccggaggtttggnnggtngggtnngtgntgnnnngcnngcnggaa

SEQ ID NO: 38571 - DNA, 405 bp, Homo sapiens
  misc_feature (1)...(405): n = a,t,c or g
tgggggatgatgtatggganaagctattcgatgacganganatgangaanataccccaccaaannnatntaangaagagntctcgaggatccgaattccnnnnnnnnnnnnnnnnnnnnnnnnnnnnnnnnnnnnnnnnnnnnnnnnnnnnnnnnnnnnnnnnnnnnnnnnnnnnnnnnnnnnnnnnnnnnnnnnnnnnnnnnnnnnnnnnnnnnnnnnnnnnnnnnnnnnnnnnnnnnnnnnnnnnnnnnnnnnnnnnnnnnnnnnnnnnnnnnnnnnnnnnnnnnnnnnnnnnnnnnnnnnnnnnnnnnnnnnnnnnnnnnnnnnntnnnnnnnnnnnnnnnnnnnnnnnnnnnnnnnnnagaggttngctcntncngggnncganangctnnnnnatnggcg

SEQ ID NO: 38572 - DNA, 418 bp, Homo sapiens
  misc_feature (1)...(418): n = a,t,c or g
gnnnnnnnnnnnnnnnnnnnnnnnnnnnnnnnnnnnnnnnnnnnnnnnnnnnnnnnnnnnnnnnntctcgaggatccgaattcnngnncnnnnnnnnnnnnnnnnnnnnnnnnnnnnnnnnnnnnnnnnnnnnnnnnnnnnnnnnnnnnnnnnnnnnnnnnnnnnnnnnnnnnnnnnnnnnnnnnnnnnnnnnnnnnnnnnnnnnnnnnnnnnnnnnnnnnnnnnnnnnnnnnnnnnnnnnnnnnnnnnnnnnnnnnnnnnnnnnnnnnnnnnnnnnnnnnnnnnnnnnnnnnnnnnnnnnnnnnnnnnnnnnnnnnnnnnnnnnnnnnnnnnnnnnnnnnnnnnnnnnnnnnnnnacctggacaacnttttgggtnncctttnncancttnantgagctgcantgtgacaagggtgc

SEQ ID NO: 38573 - DNA, 317 bp, Homo sapiens
  misc_feature (1)...(317): n = a,t,c or g
cttcaactggctacctctgccatccctcgggatgaactaaacctcagactcacccctaatgctgccaccatctgggttctcctagtaatcaattcccctatacttggccccttgtttcttggnattgaattcanatttggagttgctgngatncactttcactctggactncactgctacccntgacccccactgcccctccctggttgangtgcanncctctntgcnnganacccngtgctgggacaggaaagattccatatgcagagtgcggtgcacacaccagcgttnacaggaggcgggaaacaagaactttg

SEQ ID NO: 38574 - DNA, 309 bp, Homo sapiens
  misc_feature (1)...(309): n = a,t,c or g
gtcaccctggaagacaggcggcctgcttgctcaactcaccgggagcccgcctttggaaggccacccacacgcctttcctctctgcttccacctggggcagactctgcagggctgttagctgcttactacctgcagaggccccatggggtaatgacagtcacatggcacaatgggaacacaccatctcagccatgagtcatgccatgctcttgggtgtgaagatgacctaagaataccaggaaaatattggcacgtgccattggcacatgaaaattagtaacctgcgcctgtgaatgaggtcgnaaagaa

SEQ ID NO: 38575 - DNA, 415 bp, Homo sapiens
  misc_feature (1)...(415): n = a,t,c or g
gttgangggnnnnnnnnnnnnnnnnnnnnnnnnnnnnnnnnnnnnnnnnnnnnnnnnnnnnnnnnnnnnnnnntctcgaggatccgaattcgcggnnnnnnnnnnnnnnnnnnnnnnnnnnnnnnnnnnnnnnnnnnnnnnnnnnnnnnnnnnnnnnnnnnnnnnnnnnnnnnnnnnnnnnnnnnnnnnnnnnnnnnnnnnnnnnnnnnnnnnnnnnnnnnnnnnnnnnnnnnnnnnnnnnnnnnnnnnnnnnnnnnnnnnnnnnnnnnnnnnnnnnnnnnnnnnnnnnnnnnnnnnnnnnnnnnnnnnnnnnnnnnnnnnnnnnnnnnnnnnnnnnnnnnnnnnnnnnnnnnnnnnnnnnnntnntantttttttantnttntgntatttnanttnntattttntnnantttgt

SEQ ID NO: 38576 - DNA, 324 bp, Homo sapiens
  misc_feature (1)...(324): n = a,t,c or g
attcttttcagcctgtgccatgtacttggacacacttccaattttctaaccagctatatccagacacatggcacaggctgaaaagaatttcttttttcttttctacagaccattttaaaagtgccagtttatagtgagttggaaaaggctggtgagaagaagcanaccgntctattntgaattcatantgtncctagtctctcagngattctaaatgcttngacangnattttatgccacttaaanttnnttgannngtnntgntnanttagagntatnnantntttntttctnggantantnngntggttnnttnttgtttgg

SEQ ID NO: 38577 - DNA, 305 bp, Homo sapiens
ttttcctttgatcttttgatgtagtcccaaaccttttctttgagtttgtatttgccacttgggttctgaagtatcttttttggcataaactttcatcattaatgggtcatgcaagatttgccattttaaattttaaaaatgaggtgaaagcttaagcacctgtgagtcaatcaatgcatgcaaaatcctagattttaacaaaactttcagtcttttcctgttatattatgaacaccttattttgtgacagttttgtatagaaactcatctttaccaagtttttctaaaacatcccatttaatggt

SEQ ID NO: 38578 - DNA, 313 bp, Homo sapiens
  misc_feature (1)...(313): n = a,t,c or g
attttctgttgctatttataatgtcaacatgcaaagcactcctctgagtgttacatatcaaagtggatactgaccctgccctctagggctctaatgtccagagagataagactatgggaaatgaataatcctggaagtgatagcaaaatgatactaannnnnnnnnnnnnnnnnnnnnnnnnnnnnnnnnnnnnnnnnnnnnnnnnnnnnnnnnnnnnnnnnnnnnnnnnnnnnnnnnnnnnnnnnnnnnnnnnnnnnnnnnnnnnnnnnnnnnnnnnnnnnnnnnnnnnnnnnnnnnnnnnnnnnnnnnttt

SEQ ID NO: 38579 - DNA, 299 bp, Homo sapiens
  misc_feature (1)...(299): n = a,t,c or g
attatctgcaggctttagggatttttgcttatcagtatatttcatttgccccattgttcagcccatccaccacctccttccatttgttcttagaaactaaactaggagaacataagcacttggttatgtgaaaatgtacttatgattcttccatgaaaacctagagtattaaaaacccaacagttcacttgggttctttcatgaacaggtatgtgcatgctatgattgctttcatttgccaagtcattttttaattnaangagctgncactctgctgtcattggatcagngtgctgatt

SEQ ID NO: 38580 - DNA, 308 bp, Homo sapiens
ttttatccatgtttaaaaaagaaggaatttggacaaaggcaaaccgtctaatgtaattaaccaacgaaaaagctttccggacttttaaatgctaactgtttttccccttcctgtctaggaaaatgctataaagctcaaattagttaggaatgacttatacgttttgttttgaatacctaagagatactttttggatatttatattgccatattcttacttgaatgctttgaatgactacatccagttctgcacctataccctctggtgttgctttttaaccttccttggaatccattttctaaaaaag

SEQ ID NO: 38581 - DNA, 305 bp, Homo sapiens
  misc_feature (1)...(305): n = a,t,c or g
cagacctgcaccacaagaggtgttctgatgtctgatggaaatctggatctatctagggggatgaaggggcgactggggttgcgaattccagagctatgaatgnnnnnnnnnnnnnnnnnnnnnnnnnnnnnnnnnnnnnnnnnnnnnnnnnnnnnnnnnnnnnnnnnnnnnnnnnnnnnnnnnnnnnnnnnnnnnnnnnnnnnnnnnnnnnnnnnnnnnnnnnnnnnnnnnnnnnnnnnnnnnnnnnnnnnnnnnnnnnnnnnnnttgaagtnntggctcttttttttttttgggnntgtntgtt

SEQ ID NO: 38582 - DNA, 300 bp, Homo sapiens
  misc_feature (1)...(300): n = a,t,c or g
nnnnnnnnnnnnnnnnnnnnnnnnnnnnnnnnnnnnnnnnnnnnnnnnnnnnnnnnnnnnnnnnnnnnnnnnnnnnnnnnnnnnnnnnnnnnnnnnnnnnnnnnnnnnnnnnnnnnnnnnnnnnnnnntggatctgaagagctctcccagccccaatcctctggggttctttgggagtccctggaaggntgaaatgcctttcctgagcacaggtctacgnttctcanggtggaacttnngtctctggnnggnggattnttagntnngattcntggttncttttcangnntnnnnagattg

SEQ ID NO: 38583 - DNA, 315 bp, Homo sapiens
  misc_feature (1)...(315): n = a,t,c or g
gtcttgttctcttttccaccctttgccctgctctctgatgggatgtgcacttacacgtctcacaggtacctcagatttcttagaaccaaacctgccttccttgcgaaacttacctgttcttcaagtcagtcaagactgaaaaattgaattctcccttgacttcgccctctccatctcaatgagttctgaacttcanatctctttctctgngaatcagnctttctcttttcctctatctctttctctgtatctctcactcctcacctnttctccccaattcaggcaatcntaaaatcatgatattcatagagaaag

SEQ ID NO: 38584 - DNA, 306 bp, Homo sapiens
  misc_feature (1)...(306): n = a,t,c or g
ctaaaatctaaaatgaaacaatgtatatatgcttaaaagtatagataaacgtaatactcaaaattttaacataatttaaaatagatctgaccatatttaaaaactatagaacaatattctctaaggtagtcttttctttaaagaaacaaaaattcgttttttaataaatattaagataaaaggtttgctaactttgtatacacatacacacacagagaaatcaaacactggttagattcactgttcatatttgaagtggtgagtactgataataattatgtgtataattacttannatatantggg

SEQ ID NO: 38585 - DNA, 286 bp, Homo sapiens
  misc_feature (1)...(286): n = a,t,c or g
cgcgtttggattactgaatgctccttgagaaatttccgtgagcactgtattcagagtttgttggcaattccagtcattttcattataatagtctgatgatacaaagagggcctgcatggcttctcctgtgctaaatgtgtttccaatgagaccattttcttttttctcagacagaatcttttctaccagtgactttgtataaatactgatgttctttaaactgccttcatctgctttgatctgcccatttattanactcttnttnacacagggtcnnanccnggac

SEQ ID NO: 38586 - DNA, 335 bp, Homo sapiens
  misc_feature (1)...(335): n = a,t,c or g
atgaanangatgnngaananaccccccaaaccngancnnnagaggattcgaggatccgaatcgccnnnnnnnnnnnnnnnnnnnnnnnnnnnnnnnnnnnnnnnnnnnnnnnnnnnnnnnnnnnnnnnnnnnnnnnnnnnnnnnnnnnnnnnnnnnnnnnnnnnnnnnnnnnnnnnnnnnnnnnnnnnnnnnnnnnnnnnnnnnnnnnnnnnnnnnnnnnnnnnnnnnnnnnnnnnnnnnnnnnnnnnnnnnnnnnnnnnnnnnnnnnnnnnnnnnnnnnnnnnnnnnnnnnnnnnnnnnnnnnnnnnnnnnnnnnnnnnnnnnnnnnnnnnnnn

SEQ ID NO: 38587 - DNA, 271 bp, Homo sapiens
  misc_feature (1)...(271): n = a,t,c or g
nnnnnnnnnnnnnnnnnnnnnnnnnnnnnnnnnnnnnnnnnnnnnnnnnnnnnnnnnnnnnnnnnnnnnnnnnnnnnnnnnnnnnnnnnnnnnnnnnnnnnnnnnnnnnnnnnnnnnnnnnnnnnnnnnnnnnnagcttgctgcttttcttaatggctccgtgttgtcttattaacctactagaaaacaagttgtctttagtttctcccccagtacccccactactatctgataattttcttggccagttgtatatcanagtggtanggca

SEQ ID NO: 38588 - DNA, 361 bp, Homo sapiens
  misc_feature (1)...(361): n = a,t,c or g
gcnnnnnnnnnnnnnnnnnnnnnnnnnnnnnnnnnnnnnnnnnnnnnnnnnnnnnnnnnnnnnnnnnnnnnnnnnnnnnnnnnnnnnnnnnnnnnnnnnnnnnnnnnnnnnnnnnnnnnnnnnnnnnnnnnnnnnnnnnnnnnnnnnnnnnnnnnnntaggaagaaaaaatatactagtttgaggaggtattcagaggaaattctttttaataacaaagaagacctatgcacatttgtaaggctgttcacagtgaagccccagcctgcctctccaagctcagtactcaccattgccactattagaggcctagagatgaatctgttttaagtccattccattgcctggnaacatactttgtt

SEQ ID NO: 38589 - DNA, 251 bp, Homo sapiens
  misc_feature (1)...(251): n = a,t,c or g
nnnnnnnnnnnnnnnnnnnnnnnnnnnnnnnnnnnnnnnnnnnnnnnnnnnnnnnnnnnnnnnnnnnnnnnnnnnnnnnnnnnnnnnnnnnnnnnnnnnnnnnnnnnnnnnnnnnnnnnnnnnnnnnnnnnnnnnnnnnnnnnaaacagtattagtattattctagtcattttttttcctgaccattaaaaatccaaaaacaattcttagctcgcaggccgtacaaaaattgatgatntggtggngtgtaa

SEQ ID NO: 38590 - DNA, 320 bp, Homo sapiens
  misc_feature (1)...(320): n = a,t,c or g
gatttttctcttccaaggtgagaagtttaaagaatgtttggataagttcctaaggatgaatttcagcaagggttgcccaccagtcttcaatactttaagatcattatacaaagacaaagaaaaggtaaagtgaaatatgatactttcttttggctaccatttctttgctcggtatttggaattattgattcttgattatctctgcacagtagtacgtgttttgtgaatctcatgtcagncttcccagnttgcagnttaaatgcttntgantcctctttttccatttnatcctntttttttntttancccannacttattg

SEQ ID NO: 38591 - DNA, 332 bp, Homo sapiens
  misc_feature (1)...(332): n = a,t,c or g
gaaatattgaagtattttattgcctaaaacagatcttagatgatacctctgaaataatgtgtttattgggatttctaaatttatattttagagaatgttatataaacacataattttaaaagctattatttctcatagtacttgaagtttcctgttaaaacttataccttctatgtttttataatcnatatatatttctcctacattacttcttaggtttncatatanaagancaactattattttcattcatatataattttttcacttncgntnngggaatggtncnnnncnnnnnnntnnganncntatnnnnntgnaccttnngggaa

SEQ ID NO: 38592 - DNA, 364 bp, Homo sapiens
  misc_feature (1)...(364): n = a,t,c or g
ctctaccttaagttttcttggtaaattactaattcataagaatttcacagtctttgtttcaaaatgaaactcccaaagggagcagggagcctcataaaagtatcatttttcttcttcagaattgaaacttttaaagattaaaatacaaacactaaggtaaacaatgatcaacatctgacaataccatccggagtctacctaccattaagttcatttgttaaatgctaagaattcattcagctttcttagactgcttggccaggctacctctattcattcagttttctttattaagaaaccacaaagatnnnnnnnnnnnnnnnnnnnnnnnnnnnnnnnnnnnnnnnnnnnnnnnnnncgaggc

SEQ ID NO: 38593 - DNA, 349 bp, Homo sapiens
ctttaattgagcacattattttctcagtaattgttggagtttaatcgtagcattacccttgaggctatgtcttagggttgaggtcttccctagaacctctgcagtgccagtattatctttgtatcaagagttcttgataatttctgctctttggaggtagaagtgtcacccattaatgccttgtacggttcccttgcttttctcttttcccatgtactctttgtaaaataaacaagtgctccctatctgtagagcctcaggaaccttcttacacacctggacaaaaaaatgaaataagtgaaattaatcaggaagttgaggtcgacgcggccgcgaattccagatctat

SEQ ID NO: 38594 - DNA, 350 bp, Homo sapiens
caaaaccagagtgatttcctttatgtaaattcctcccactgttcctttgagagaatgtagcagggaaaggcggagtctgcagagctatgccagctctttgggcacctttgagggaattataaaaaggcacatggcttggctggcacaccccagctggggcagtccacactcacctcctcattgaggaccacagtggtcctgggcaagagggggaggcacatgctaaatacggctctaggattcccctagaaggaggcttttccctgaagaaaggatttccaagcctggtgatgtcagcagcaatgtcctcccacccagggaagtcccagggagaggttctctcctgtgcc

SEQ ID NO: 38595 - DNA, 361 bp, Homo sapiens
  misc_feature (1)...(361): n = a,t,c or g
caaaaaaaaacacaaaaaactcccataatttattttgtttcttttccccatcctgaaaattccaaaatcatgtttccattatggaaaaatgataagtaaatgactaagaactacattaagattatgcctatacacttaaacaaaaaaaaagcttatgcttttttttttaattaatgagagctattttttatgatattcttaccataggggtgttttgctgctaaaacaaatcaaaaccaaaagctgtaaattcacaaacctgggangcnntttgaggnggaggaacctaaaagtcagagaaatcctaanggagtaggagtggaggancatttaaaggggncccnccttntgnaaaaaagcc

SEQ ID NO: 38596 - DNA, 340 bp, Homo sapiens
  misc_feature (1)...(340): n = a,t,c or g
gtcatctttgatttgttgtgtggtcttgtggtatgccattttatgactgcaccacaattaattaaagtctcttcatgctgatacaaaatgaacataaatacgatgacataccaacatagatttgcttatgtggttgcgtttattgatttgtactatataagaaattaaatagaagtatttcagataccctgaatatagctatgtacactgccatagctgtattgactatattcattactccttagagccatgtttttccatcatgttatgactctgaaaaaccccagagtatgcttttcagagaatgacattggaaagaagaaatggcnaagtatcattt

SEQ ID NO: 38597 - DNA, 340 bp, Homo sapiens
  misc_feature (1)...(340): n = a,t,c or g
nnnnnnnnnnnnnnnnnnnnnnnnnnnnnnnnnnnnnnnnnnnnnnnnnnnnnnnnnnnnnnncccgtggagacagaggcctcccaaggttcttctgcactcacaggaccaatcctgccacgcctctgaccatactgaattgcagaggcctgggtaactgcccttaaaactttataagctaggatcatactcatccccaaataattgtggtagaattggtgtctgggggcatccctcatttcaggtattgtgttggttttctacttggttttctacttgtatttgaagctaccacgaattggtcttcacagcatcttgtttggacactaatgattggatt

SEQ ID NO: 38598 - DNA, 339 bp, Homo sapiens
  misc_feature (1)...(339): n = a,t,c or g
tggacacctgatttgcaacagtttcctagactgaacccaatatagaaggaatttcaagacatgctagaggccgttggtcttctctatttatagggatcacttaggaagaaataaacaacaactgtagtctaaaaattaagtaagtttcaaggatcaaagaagcctgagataaaagcgaattctttggatttagctttattttatcataactatattacccgccaatgcttcaccagttacagtaannnnnnnnnnnnnnnnnnnnnnnnnnnnnnnnnnnnnnnnnnnnnnnnnnnnnnnnnnnnnnnnnnnnnnnnnnnnnnnnnnnnnnnnnnnncg

SEQ ID NO: 38599 - DNA, 448 bp, Homo sapiens
  misc_feature (1)...(448): n = a,t,c or g
gnnnnnnnnnnnnnnnnnnnnnnnnnnnnnnnnnnnnnnnnnnnnnnnnnnnnnnnnnnnnnnnntctcgaggatccgaattccnnnnnnnnnnnnnnnnnnnnnnnnnnnnnnnnnnnnnnnnnnnnnnnnnnnnnnnnnnnnnnnnnnnnnnnnnnnnnnnnnnnnnnnnnnnnnnnnnnnnnnnnnnnnnnnnnnnnnnnnnnnnnnnnnnnnnnnnnnnnnnnnnnnnnnnnnnnnnnnnnnnnnnnnnnnnnnnnnnnnnnnnnnnnnnnnnnnnnnnnnnnnnnnnnnnnnnnnnnnnnnnnnnnnnnnnnnnnnnnnnnnnnnnnnnnnnnnnnnnnnnnnnnnnnnnncaggacttgggntannggganttcangtcctnacggnngcngaaancagtanacgggtgncctntactgtaangatccttnntatnttggcg

SEQ ID NO: 38600 - DNA, 299 bp, Homo sapiens
atagagtccatcctttctagatcctgaagagtttagttactaaacaaaagggttttgaaattatcgaaaggatacctgcaaattgttttattcgaaagaaagtcaaaagtgttaatgttcaatataataacctatcaaaagagacttttagttacacaataatgtaaatgcttctaaaattgacactgaaaacagaatttgccaaaaaatgaaagttgtgtttttcagatcaacttgcttttcttgcttgtgtactaattagatacatactgccatgaaagaaagctcacctttatttg

SEQ ID NO: 38601 - DNA, 338 bp, Homo sapiens
  misc_feature (1)...(338): n = a,t,c or g
caaaaattcagattttatttttcgtctcttcgaagacaagattaaggccttcagcatggcatccaaggnnnnnnnnnnnnnnnnnnnnnnnnnnnnnnnnnnnnnnnnnnnnnnnnnnnnnnnnnnnnnnnnnnnnnnnnnnnnnnnnnnnnnnnnnnnnnnnnnnnnnnntcgacgcggccgcgaattccnnnnnnnnnnnnnnnnnnnnnnnnnnnnnnnnnnnnnnnnnnnnnnnnnnnnnnnnnnnnnnnnnnnnnnnnnnnnnnnnnnnnnnnnnnnnnnnnnnnnnnnnnnnnnnnnnnnnnntctaagttcaatcttggccatgtaacctc

SEQ ID NO: 38602 - DNA, 323 bp, Homo sapiens
atgaagaatgtaaataggattcgttcactagcttaaaccctacagtgactttctatccatttggagtccggtcagcatgaataatctggcctctgcctctccatttcctaccaggtgcctcttccctctaagcacccttcccatacggggaatccatcaaacatgattcttttttgcattcgctggtttctctacctaaaattatttcctctcctccccatctttgtttgctggctcctttgtgtcattcagggctcacctcaaatgttatatcctcagagagaccctcccccgatagcctgatgacaggtgatagtcccctg

SEQ ID NO: 38603 - DNA, 320 bp, Homo sapiens
  misc_feature (1)...(320): n = a,t,c or g
gtcttaagcaaagaaataatttgtccataaaactgctcatttttgacagtcctttcagctttttttcctaattgagttgagatactgaaggtctaccgagctggaccaggtatgactactttgaaagagtctaaataatatagtaaatatatatgtaaanncancanngaaggataatagctaatattanagngctttntcantggacctacnttntnantnaaacgcatnanaacccttannnangatgctannanangnncnatanaaccnaantntanccttnancngntanntgnnncttcntnnnnaatntactt

SEQ ID NO: 38604 - DNA, 204 bp, Homo sapiens
  misc_feature (1)...(204): n = a,t,c or g
ttttcattattgtaggcaattatgtccacatcacttacaaagctattgccaaatctgtccaaggaagcagagtttgaagtgagggctagggacaggaatcttgggaaaaattcaacagtggcatagcagagctctcaatatgagaaagctgacataatgtggacttttgctgtgaatttcctcaaaatatggggagaggnttat

SEQ ID NO: 38605 - DNA, 353 bp, Homo sapiens
  misc_feature (1)...(353): n = a,t,c or g
ttttgcttggctcttctcattctgaagnctaaatcctactcgttcttctcttcaaggccacgctctccattaaacccctggtgatcncctancacancannntaganaannttatttgtactnnnnnactcctactcctgagaantgccncntaaccgagacgccntatatgtacctgtnncntgtggannctgactntggcntntcanctgantncngctcangggactcccanggagcccaaggggggcttanncganggnccctanttccacccntantgaaacangcctantccaaccngtngancnttngcccnantntgngnttnnnntnaggganncnagnntgca

SEQ ID NO: 38606 - DNA, 232 bp, Homo sapiens
cctggctctgcctcccctccttcaccagggaagatggtgacattgggtcccctgggtgagagaatcttcaggggagatctgggcagaggggaactatggcatcaggtcctcaaaaggcccaccttcgggaaggaggtcgaatcaccctccagggctcacgtgttagctcagaagcatggagttggtattagatgggctctttgctaactgatggagggagggaataggagat

SEQ ID NO: 38607 - DNA, 257 bp, Homo sapiens
  misc_feature (1)...(257): n = a,t,c or g
tttttttctaatccaacagttattttattaggatgtcagccctgggtccagagtgagagatagggacaggggacagcccagcgaggctgggtcgggggtcaccccaggatgttccaaccacaggggcagcatctcctccactccacatgctggccaagggcacagagctgccgtatcgcctgccaagggggtggctcaatgctgctgccctggtcctgtatgggcccgcgnnancttncnncnngnctnngcgccgg

SEQ ID NO: 38608 - DNA, 131 bp, Homo sapiens
gagaaaggcatgaagaatagaacagaacagtaattgatggagtaagaccctttaggcagagtgagaaggaaacaaggtaaagacagaatttgaatgaaaaggatggtcttgggtgttaaaaaaaaaaaaaa

SEQ ID NO: 38609 - DNA, 338 bp, Homo sapiens
  misc_feature (1)...(338): n = a,t,c or g
cgaatacccaccacaagtatagtgaccctcctgtgaactttctgccagtaccctctaggaccagaataaataatcctgcctgtcataaaacagtgattccaaataattcttttgtttctaatcaaattccagaaggtatgtaaggcattgatcttgtggagggaggcattcagaatgatgggtttagaattntnntctttngggtgntttangntntcttagtnnnntgnnatnnttntnntggngtntnnnntnantttntntntnngttngntttctttnngttnntgtttntngnttntngcttntttntgnntnnttntnnntttngtnggatc

SEQ ID NO: 38610 - DNA, 349 bp, Homo sapiens
tgtgagtctgactggcaatctaataggtatctcaaatacttaaatgtaaaagaaaaatttttaaatttaaaaaagacacagaattctctttttgaccttaaggtaggaataactccttaaatttctgaagtacaaatcacaaagggaaaaagtgataaaacttgaatccattaaaaattaaatatttttaaaattattatttcaaaagaaatataaagcaaaacaactaagtatactgttaccttacataaaacctttataagctaaactccctgtggtgtttaaacttctttagaagagttctggagctatgtttaaaagtctggagataatttactgatgaatacat

SEQ ID NO: 38611 - DNA, 295 bp, Homo sapiens
  misc_feature (1)...(295): n = a,t,c or g
cagagaggaggaaataaaaagcaacaaagcatattttggaatgataagcagcgctggacttttactatagcataaaatctcttcttttctctggagccgacagatctaactgccattttaattcttctatnngacntgnntattnttanatgccttntgnncnnntncnnttgtntnccntctnntacctttntnnnntnatactggnttctctctnctaggnnnttntcttttntttncatannngtntctctcttncgctttntttnnnntngtnntattgnttntttctttt

SEQ ID NO: 38612 - DNA, 295 bp, Homo sapiens
  misc_feature (1)...(295): n = a,t,c or g
aaccgttcctatacacagtaaacttactaagaactgctaatccttctccaggttcttagaatctgggtacagcattatagaaagtaaccacgctatgaaaacacacacccaaaacccgatgggtggcaattgtgatagattaggaagacaaaacagattcagaagtagcagagaatactgcacattttcttggaaaatttcttaattgttcagtgctttctgacaagttttcccagcccaatttatctattctntgntacttagtcctgncttntgacnatnatnatatggggac

SEQ ID NO: 38613 - DNA, 436 bp, Homo sapiens
  misc_feature (1)...(436): n = a,t,c or g
ttggaagnnnnnnnnnnnnnnnnnnnnnnnnnnnnnnnnnnnnnnnnnnnnnnnnnnnnnnnnnnnnnnnntctcgaggatccgaattccnnnnnnnnnnnnnnnnnnnnnnnnnnnnnnnnnnnnnnnnnnnnnnnnnnnnnnnnnnnnnnnnnnnnnnnnnnnnnnnnnnnnnnnnnnnnnnnnnnnnnnnnnnnnnnnnnnnnnnnnnnnnnnnnnnnnnnnnnnnnnnnnnnnnnnnnnnnnnnnnnnnnnnnnnnnnnnnnnnnnnnnnnnnnnnnnnnnnnnnnnnnnnnnnnnnnnnnnnnnnnnnnnnnnnnnnnnnnnnnnnnnnnnnnnnnnnnnnnnnnnnnnnnnnnnnnnnnattnattggtttnnaggtnnnatntatntcttgttgntggnaaccnggtacagggggtttttgaattattc

SEQ ID NO: 38614 - DNA, 312 bp, Homo sapiens
ctgatttctgctcctgaagtcataaaagattattcaatcataagccttatgtttgggattatcttcaactataagcggctgcacacattcagcttgttcttcctgactgaagggtccagaagcagacagtctatgggtgggagggtaactcacaatgtcaccagggacccagttccttttcatttctactcagtcatccttggcacaggcgtggtactctgtgttacaagagggctgtttggggtctacttgagggtggagggtgagaggaaggagaagcagaaaagagaactattgggcactgggcttaat

SEQ ID NO: 38615 - DNA, 303 bp, Homo sapiens
agaaatcttgcagaagactttggatttccactagctgtggaattgtacaggttgaaagggtgctagctgtttagaaactagtttttgcagctcagaaactgctcctttcccgctccacacttcaaagctgtttcctctacaagaagcagcctctcctgtcaaaggcagagcgacagtcagcccccacgacccgccgccggcagcggtcggccctcggagaccgcagcagagaggcccacacgtttcctggctgcctcggccccagtggccgcttttcgacctcagctacgcagcgccaaccgc

SEQ ID NO: 38616 - DNA, 309 bp, Homo sapiens
tgaggatgtagtgattaaaatccaagttagtgattaaagatgattttagagatttttaggtagaaacaatgtgtccaaaatagtaagtttagccttttaaaaaatcagctgcactttttgtattgtatataaaatatttgctttatagaatcagaaatacagatgtattgagtactatgtgtcactctagaaaggtgaccatttacttattcacatttaagaagcgacttctcaggtatgaaaagcttcagctgaagccaattttctttttgtaaaaatcaacattttgtaaacattaaaatggcactc

SEQ ID NO: 38617 - DNA, 296 bp, Homo sapiens
ctgaattgtatatttaaaaatggttgaaatgtaaattttatactatgtatattttgccaccaataaagaaaaaaaccttagaggaaaaatttgttacttattggactccctagaacccaagaaagtaaaaaagatctaacatttaataagtaccaggcattacatatactacctcaaatagccctcccaacaacactataaggtacacttagtatctctgttttaatgaggaagaaacaggcaaaaagcagataactcaaaagtcacagagctaggaaatattgggcataggactc

SEQ ID NO: 38618 - DNA, 229 bp, Homo sapiens
  misc_feature (1)...(229): n = a,t,c or g
gtgnnnnnnnnnnnnnnnnnnnnnnnnnnnnnnnnnnnnnnnnnnnnnnnnnnnnnnnnnnnnnnnnnnnnnnnnnnnnnnnnnnnnnnnnnnnnnnnnnnnnnnnnnnnnnnnnnnnnnnnnnnnnnnnncaattatcaagtgggtcataatttgcatggaaataaattatgtatagatttaccagaaggaataagtccatgagaaaaggtaagattgtactgttcac

SEQ ID NO: 38619 - DNA, 235 bp, Homo sapiens
cacagactggggttacccagaagcctcatattggtgtttaatctatattccagaaaacactgatgccgtgtggtaccagagagtcccaggattgagtgtgggaggaagccgcaaagacgcctgggcactgtgagctgggttagggaaaatcactgagaatgcccttttgaatggtcctccctaaagagccggtggtacctgttctggagacctggattacctcttgccctcaggg

SEQ ID NO: 38620 - DNA, 130 bp, Homo sapiens
gtccagagctgcatacactacactaaataaaattgttttgtcatattaaacacagtctataattgaatggcctgtttaaaatttaattctaaagaatgaagtatttattgtggaactttttttttttttt

SEQ ID NO: 38621 - DNA, 221 bp, Homo sapiens
  misc_feature (1)...(221): n = a,t,c or g
gtaaaaaacagctcacaagccagcaccacgggcagaccacactttgcacatgtgctcagacntnngcctaacaacctggcttngnttntnacttttancaacntttnntgaantatnnttctctnnntttcaatcttgnccatgtancttntgatgnatannnnnnnnnnnnnnnnnnnnnnnnnnnnnnnnnnnnnnnnnnnnnnnnnnnnnnnnnnnnn

SEQ ID NO: 38622 - DNA, 223 bp, Homo sapiens
ggagaccttaatgtgctgcagggaggtacaaagggtttgagaaggcttatcagggagttgtcagacctggtggtgaagggctcagcatatgcaaacagggaaaggcatggtgtgaagggctttctgggtttgtggttccctggcacacatctggtataagatgctgctagggaaagtagactgtgggtccatggattataagtgatgatgatttttggaagtg

SEQ ID NO: 38623 - DNA, 338 bp, Homo sapiens
gcttgaatgagtgaaaaacctgcttcctttcatgatttttgagaacagtgttgtcaataatttgcccacaaaactgctgagattttgtaaatggaagtctaagggaaaacattaaggtctccagctatctttgtgcgtgatactaaggattttaaaagataaatgtgataaactatgtttagttttaataactcaagttagtggcagagtttaaaaagtaagccttttaaaaataaaaatgttatttattttagaagatacctcctgaagttaattgactgtgacacttgcttaagtaactccaagacttgaattaaaaatttgcattaacctcccta

SEQ ID NO: 38624 - DNA, 331 bp, Homo sapiens
  misc_feature (1)...(331): n = a,t,c or g
gctggatagtattaacgataggttagactatctactgttaattagagataagagagggtagaattactaaatttgaggacaaaacaatggaatccacccaatcagagcaatagaccaaaaatagactgaaaaaatgaacaggaccccagagatctgtgagacaatgacaaatggcccaacattcatgtcattggagtcccagaagaggataaagataatgggactgaaagagtatttgattagctgacnnnnnnnnnnnnnnnnnnnnnnnnnnnnnnnnnnnnnnnnnnnnnnnnnnnnnnnccatattgcttgactcangagttcaaga

SEQ ID NO: 38625 - DNA, 331 bp, Homo sapiens
  misc_feature (1)...(331): n = a,t,c or g
gtctttatctccacaatagaaatgcctaacttctcatgaaagatttaagcagatttttaatttccggtaatttaaataagaaatgctagtttgactttttgccttcagtgttactatagtttaggctgtataacagtagtgaatgtgtggaaataggcaccttttttaaaagtcatgatatagtagttaagtgtacggcctctggtgtcacatcctccggtgggttcaagtcttagctttgccccttactaactctgtctttggagaagatcccccctctggtaccacatgactctcatctgtaaaacagagacnataatggnacctacct

SEQ ID NO: 38626 - DNA, 436 bp, Homo sapiens
  misc_feature (1)...(436): n = a,t,c or g
tttgannnnnnnnnnnnnnnnnnnnnnnnnnnnnnnnnnnnnnnnnnnnnnnnnnnnnnnnnnnnnnnnnntctcgaggatccgaattcgcggccgcgaattccnnnnnnnnnnnnnnnnnnnnnnnnnnnnnnnnnnnnnnnnnnnnnnnnnnnnnnnnnnnnnnnnnnnnnnnnnnnnnnnnnnnnnnnnnnnnnnnnnnnnnnnnnnnnnnnnnnnnnnnnnnnnnnnnnnnnnnnnnnnnnnnnnnnnnnnnnnnnnnnnnnnnnnnnnnnnnnnnnnnnnnnnnnnnnnnnnnnnnnnnnnnnnnnnnnnnnnnnnnnnnnnnnnnnnnnnnnnnnnnnnnnnnnnnnnnnnnnnnnnnnnnnnnnnnnnnncnattttnatttgnanctaaatttttatnaannttanannnnnncttaancnaaagcag

SEQ ID NO: 38627 - DNA, 336 bp, Homo sapiens
  misc_feature (1)...(336): n = a,t,c or g
ctttgctttggtactaacacagaacattttagggtcaaggtgaaaaaagaaggccagaatttttgggccttcataatccagggcaccaacatacctactaataacaggtctgagctgagcagtattacagggctccaacattcagagtttagtcctatcacttatttggtgagtatgagacaaactgagtgctctctcttgtctcatttatagatgcaaagaatagccctttctcttcccaagagtcagcgagggattgaagacaatatctctttgagggaccttgcagatcacctgtggttcaagcangctatgccttntcccattgggggggcc

SEQ ID NO: 38628 - DNA, 336 bp, Homo sapiens
  misc_feature (1)...(336): n = a,t,c or g
nnnnnnnnnnnnnnnnnnnnnnnnnnnnnnnnnnnnnnnnnnnnnnnnnnnnnnnncgaaactgggaggaagaggaccaaagacaccctaaataaaaatgcagtatccccacaggtccttcccgaccagcactgtgcttaccatgaacacatttctttcttaaacaaggtcatccattcagggagtcagctagaagggtttctgctaaatgtaataacccaggcacctctaaggaagacaactcagaacacagagagcactttaaccacagaggggattaggaaagccccgacaagctaagctcactnaagaaacnagggntttctggttggaaaa

SEQ ID NO: 38629 - DNA, 333 bp, Homo sapiens
  misc_feature (1)...(333): n = a,t,c or g
gaaacagcctcaacaaacagagaagacctcaatggttcttgtggctccacctgagagggtctagggcaagagaaagggcaagaatattagggctgcccaagatgtggcggagccggaagagcacagatgttgctggaggattggtgatgcctctctgaggggtccttgacagcagagaggctggcctggagctgagcactgccccaggcacactctatttcatctacttaggaccactgtgtctgcagaggccaccagcagcaaacagaatgtcgacgcggccgcgaattccnnnnnnnnnnnnnnnnnnnnnnnnnnnnnnnnnnnnngttc

SEQ ID NO: 38630 - DNA, 332 bp, Homo sapiens
  misc_feature (1)...(332): n = a,t,c or g
ctcccggatgcagctgagccttgtctccccggagccctgttccgctgccctgttgtcttcaggcaggagatcctcgtccaagtgatcgggactctggagctggtgggagagatcgaggcctcttccatgttcagcctctgcagctccctctccatctccttcaacagcagcaagcatttccacctctatggcagcaacgcctccctggcccaggttgtcatgaaggttgacgtggtgtatgagaagcagatgctctanctntangtgctnaacggnattggggggcttgttggttntgntggtaatttnaaaaggctggaaaagggtgggtt

SEQ ID NO: 38631 - DNA, 330 bp, Homo sapiens
  misc_feature (1)...(330): n = a,t,c or g
aaattttactgtgaattatttttttcttccagaacagaagaaaagcaaggtcgacgcggccgcgaattccnnnnnnnnnnnnnnnnnnnnnnnnnnnnnnnnnnnnnnnnnnnnnnnnnnnnnnnnnnnnnnnnnnnnnnnnnnnnnnnnnnnnnnnnnnnnnnnnnnnnnnnnnnnnnnnnnnnnnnnnnnnnnnnnnnnnnnnnnnnnnnnnnnnnnnnnnnnnnnnnnnnnnnnnnnnnnnnnnnnnnnnnnnnnnnnnnnnnnnnnnnnnnnnnnnnnnnnnnnnnnnnnnnnnnnnnnnnnnnnnnnnnnnnnnnnnnnnnnnnn

SEQ ID NO: 38632 - DNA, 326 bp, Homo sapiens
  misc_feature (1)...(326): n = a,t,c or g
gtcgacgcggccgcgnnnnnnnnnnnnnnnnnnnnnnnnnnnnnnnnnnnnnnnnnnnnnnnnnnnnnnnnnnnnnnnnnnnnnnnnnnnnnnnnnnnnnnnnnnnnnnnnnnnnnnnnnnnnnnnnnnnnnnnnnnnnnnnnnnnnnnnnnnnnnnnnnnnnnnnnnnnnnnnnnnnnnnnnnnnnnnnnnnnnnnnnnnnnnnnnnnnnnnnnnnnnnnnnnnnnnnnnnnnnnnnnnnnnnnnnnnnnnnnnnnnnnnnnnnngtcggncngnnaattncagatttatgaatngtanatcttgaaaacccngnntnttttttt

SEQ ID NO: 38633 - DNA, 331 bp, Homo sapiens
  misc_feature (1)...(331): n = a,t,c or g
agcagacttggaattgtgcagacgtgctttagagaaatgggctgggggtacacacacagccgtcttccagaacttcgcttcaggggcacctgagggccagagcgtcggaatttatgtgcaatggtagaatgttaacttcaccataggaaactcttaattcattactgtgaattatgagaagtcgtgattctagttactgacatctcactttgagatgtgaccacactatttatgttcagccagttccagggtgggaacaggtgattaaacacaatgaaagaaatcaagactttgtaattattcatgaaaggtttacctncctgggtccagc

SEQ ID NO: 38634 - DNA, 338 bp, Homo sapiens
  misc_feature (1)...(338): n = a,t,c or g
gacaaatggaaaagaaggcgatattactgcattaggttcccagaggtgctatacaaacagaaacatgttttctaaatggtgaaacaggtattgaaatgactctttatcagaactatgagtctttttcgcaagagaaattggatttactagttgaatgtttttctcttcctctggccacaaaggatattggggcaacttgagagaggaatcaataatgtagagtctgatggacactcaatgatcagcctcataatctgactacataagcacaataaaacaaagtcagagtgtcttgcaagctgtcacaggggtactaagctgagagaangaccttagtt

SEQ ID NO: 38635 - DNA, 336 bp, Homo sapiens
  misc_feature (1)...(336): n = a,t,c or g
gtcacgcggccgctttctttctccgtgtgtgcatgtgtgtaaccaaacaggtccaccattcacttaacactcaaccaatatttattaagcacctactttgtgctagaaaccctctactatccaaaataagtaaccctgttattttgttacagaatactcgactactctggactgctgtnnnnnnnnnnnnnnnnnnnnnnnnnnnnnnnnnnnnnnnnnnnnnnnnnnnnnnnnnnnnnnnnnnnnnnnnnnnnnnnnnnnnnnnnnnnnnnnnnnnnnnnnnnnnnnnnnnnnnnnnnnnnnnnnnnnnnnnnnnnnnnnnnnnnnnnnnnnnnn

SEQ ID NO: 38636 - DNA, 376 bp, Homo sapiens
  misc_feature (1)...(376): n = a,t,c or g
ctgaaatcctatgttcacttttctctgtctctctaaaatcaatacattattcctgatctatgctatgagaccttcccaaaatactacaaccacacagactatcccacttccagacaataaccatcgctaccaaaccatcttatttgtgtctcctcatttaaacaaagctcctaaaagccagaatcatgtttcaaattttagnggacacttcataanggcagctttttcagttttttatggggtatattnccattctttccattcgggggatntntntgnngcaaanaaaattannccctaaaanancatttttcnngggggggggaannncttttgttgnttaaatgnggggncttttttaanaagggggngggcc

SEQ ID NO: 38637 - DNA, 378 bp, Homo sapiens
  misc_feature (1)...(378): n = a,t,c or g
ctttactatgaggtagcccttcattttccttggaactttggctgtgcaaaacatgttgaggtgtgagatggacaactccctacaaaatatttgcttctaatagacaacagagcactatagttcatgcactaattatactaaatcctcaccttaactttttttttgccttcnaaanattgggaatcccngctataatctgcaataaaggctgnatttgggttatgaatnctnaggaaagatttttttccnccttaattcacccccaagttatttnnnggggctgancnngctagggggggggtttttannangggntnttttnanggnaaangnnacctttttgggggaaaattnttttggagccattnttngtggaag

SEQ ID NO: 38638 - DNA, 376 bp, Homo sapiens
  misc_feature (1)...(376): n = a,t,c or g
ctggggtagatttttgtcgtttgtatttaatatggtattttgaaccatgcaaaaaatgaaatgccaaagtaatataaagtctataccggtgacttttgtccatctagtcgtcctccctcccatagaactaaacactgttactagtgtgttatttgtaatatagctaggatattttttaaacatggatgggctattattaactagacccctgttgatagacntttaaactgtttcccatggttgtttngcatgggtcaagtgtttntgtaagaagcaaaaattgnggggtcaaaaaatcnttagaatggngnnncaaantgntggatncccttcaaggggngcgtatcgntnactttcnntgaccttgtagaaaacc

SEQ ID NO: 38639 - DNA, 365 bp, Homo sapiens
  misc_feature (1)...(365): n = a,t,c or g
ctcggcagagatactacttggtaggactgaaagagctaaaatgatatgatttggatgttttatagatatattttgtagttgtgttttggtttttgaggggagttttatttttgctactgttagcttgtttttatttggacatcccagtagaaaacaaagtatacaaagctgtagctcagagatggaaattttaaatagtaggatattaccaatgtcaggcagggntgtgaancactgatgtagacttttttaatatcaaataatgttaaaaatgtgcttcaaccggccgnatttccaaatctngacngganacctgaaaanccgcgagggttcttttnangtggcnttngcncccntttnaattt

SEQ ID NO: 38640 - DNA, 352 bp, Homo sapiens
  misc_feature (1)...(352): n = a,t,c or g
tgttaaagttaattgccgttctggaaaaagaaacagcacaacttcgagaacaagttgggagaatggaaagagaacttaaccatgagaaagaaagatgtgaccaactgcaagcagaacaaaagggtcttactgaagtaacacaaagcttaaaaatggaaaatgaagagtttaagaagaggttcagtgatgctacntccaagcccntcagcttgaggaagatnttgggtcagtaccacttnagcatttnaaaagaanccganttancagtttaaaggacaaactcangaaaggcccaccttgaanggcgacgcgggccgcgaattccngatctntgaatcgtanatnctgaaaa

SEQ ID NO: 38641 - DNA, 330 bp, Homo sapiens
ctttatctttcatccaattcagcagaggctcaaattctttctcaactgcttcacgactctccttagctaattctcttacctttaaatattgtcctaatttagaattctgtcctcggccatcttaccttttccatccggaggacccataatccagtgcttccatcagctttccactctccccacaccctcctttctctctacgcagcttagattctaaggtctttttccctgtagttccaccctttgcatagacctttaactctctagagctcttctaatttcacaacaaaatcctaacccctgttaaattcaacgtcgacgcggccgcga

SEQ ID NO: 38642 - DNA, 324 bp, Homo sapiens
gtgaactgttggtggactgaaataaagattagcctagaaattcaatatactgactttgaatattttactttctacccttgataagggacaaactggacatggtaatcttagtattaaataacattaaccatacaactgagagataacttggagtatttttaattcaagtgttataaattgggaaaacagacagcaagacgagtctatttttgaaattaagcttaattattaaaaccacattacctaccacatgaatgactatatggatcttcagactttctgagaggactacgcagaaaaagcccattgaataactctgagtaa

SEQ ID NO: 38643 - DNA, 340 bp, Homo sapiens
  misc_feature (1)...(340): n = a,t,c or g
ggaagggaagggaggggagggggaaaggaaagaaaagagagaaagaaagaagaagaaaaagagaaaagggcaagaggaaactttttggggtgatggaaatgttcactctattagttgtggcaatggtctcatgaaggtatacatatgtcagtattttaaaaattgtatcctttaactatgtgcagcctattacatgtcaactatatttcaataagccctttaaaaattttattgggaaaaaagccatacatataattagtgattattaaagagcacaatgttatagaattaaaactaagatactacactaatgaaagttcatctatgttaaggnaacact

SEQ ID NO: 38644 - DNA, 348 bp, Homo sapiens
tggactccttcttattacctatgttaaaataaacttcagattgatcaaagatgtaaatatgaaaagtaaaactatagaagtattaaaagaccagaggagtatagaggttgtggtatgacagaaagcctctaatatatgatgttaaagctagggtctgtgcaggaaaaggttaccaactctatctaagaagaactataacaatcttgaatagccaagattataagtaatacactaggggaacaatttttgagaggttaggcaaaacattaattttcttaatatacaaaaagccaaaaagtaaatggtataaatagacatttcacctaaaaagaagtgcaaataagcaat

SEQ ID NO: 38645 - DNA, 338 bp, Homo sapiens
  misc_feature (1)...(338): n = a,t,c or g
ctgaactctggcctccagaatcctgtgccctttctttggcctttggccttatttcatggtcagcaacaatcctgcatgccttctatggctctcatactcattaatnnnnnnnnnnnnnnnnnnnnnnnnnnnnnnnnnnnnnnnnnnnnnnnnnnnnnnnnnnnnnnnnnnnnnnnnnnnnnnnnnnnnnnnnnnnnnnnnnnnnnnnnnnnnnnnnnnnnnnnnnnnnnnnnnnnnnnnnnnnnnnnnnnnnnnnnnnnnnnnnnnnnnnnnnnnnnnnnnnnnnnnnnnnnnnnnnnnnnnnnnnnnnnnnnnnnnnnnnnnnnnnnnnnnnnnnn

SEQ ID NO: 38646 - DNA, 339 bp, Homo sapiens
  misc_feature (1)...(339): n = a,t,c or g
gggaggctgacggnnnnnnnnnnnnnnnnnnnnnnnnnnnnnnnnnnnnnnnnnnnnnnnnnnnnnnnnnnnnnnnnnnnnnnnnnnnnnnnnnnnnnnnnnnnnnnnnnnnnnnnnnnnnnnnaaatagatactaacaaaaaaacacacatcacatgtgaaaacacaatgtaatcatctaagggaaaaataattacatgattatctccacagaagggaaagtctgacaaaattcaatatctattcataataaaaaatactcaggaaaatacagaaattgagatactttaatatataaatacaccttagtcctaaagccaaaatcttatttcatgggca

SEQ ID NO: 38647 - DNA, 337 bp, Homo sapiens
  misc_feature (1)...(337): n = a,t,c or g
agatatttcattatagactaatatggtagcagattatttatgcttttaaaaattattttctggagcaaacagtatttgaagaaaaggtaaaaactatgaatgtgtaattctaagaatagttaataattttactgaaggtcgacgcggccgcgaattccnnnnnnnnnnnnnnnnnnnnnnnnnnnnnnnnnnnnnnnnnnnnnnnnnnnnnnnnnnnnnnnnnnnnnnnnnnnnnnnnnnnnnnnnnnnnnnnnnnnnnnnnnnnnnnnnnnnnnnnnnnnnnnnnnnnnnnnnnnnnnnnnnnnnnnnnnnnnnnnnnnnnnnnnnnnnnnnnnnn

SEQ ID NO: 38648 - DNA, 344 bp, Homo sapiens
cttgaacataggatgcccatccgatgtgcagggccagctattggttgggcagtggggacatggcctggggtctcggtgggcgatggcctggaggggccaccctgagcaggacatttggaggagtgctggggtgagtcagacaggaccatgtggtggttttctccagtgcaggcagtggagggggaaggcggagctttgcaggtgagggcttgaggcagttccgacttcagactcccccccagggagactgagggaccaccaccatcattactcaggccaaggaggcccagaacagggcagacggggctgcaagagttcctatggcgatagttgttggggcacag

SEQ ID NO: 38649 - DNA, 328 bp, Homo sapiens
ctcagagagaacccaccatggtgctgtctcctgccgacaagaccaacgtcaaggccgcctggggtaaggtcggcgcgcacgctggcgagtatggtgcggaggccctggagaggatgttcctgtccttccccaccaccaagacctacttcccgcacttcgacctgagccacggctctgcccaggttaagggccacggcaagaaggtggccgacgcgctgaccaacgccgtggcgcacgtggacgacatgcccaacgcgctgtccgccctgagcgacctgcacgcgcacaagcttcgggtggacccggtcaacttcaagctcctaagcca

SEQ ID NO: 38650 - DNA, 347 bp, Homo sapiens
cagcggcccatgcatggaatttattgtgtgctactgtttataaaatactcgaatagtcctgcacatgcataatatttccaacttagacaggagaccatacagggtgcactttctggcaaacaaaacaatagatggttccgctgcctggagctctgagttgtattccagggcatgagggaagcaggccaccaaagtaaagggaaataccaaactacagtggcaatcaatacaggtcaataattgtgaaaaattagcacatggttccatttagtttaaccaagcagttcagtaactatcaaaagaaaggtttcaacatgcagtcttgacttttatgcttccactaacat

SEQ ID NO: 38651 - DNA, 337 bp, Homo sapiens
ctggtttaaatattttaagttatctcattggctcatatatggaagaggtcaaatcagttgagttgtcgatattgggcatgaagaattaatttactttcaggtaacctgtaacaatatgctgacctaattatcgaaggatttgagatgaaatcaaacttctgtactcttacatctgcaattcacatagttttcatctgggttgtgtatctcaaagggaagaagccaggcaataaatttgaggttagtctgttgatactaatttaggtcacagaattccgtggaagaaattggtaaaggtgattgccgtaggaggactactcaagtcacagggaatgaa

SEQ ID NO: 38652 - DNA, 324 bp, Homo sapiens
  misc_feature (1)...(324): n = a,t,c or g
ggcagctgcaacctcnnnnnnnnnnnnnnnnnnnnnnnnnnnnnnnnnnnnnnnnnnnnnnnnnnnnnnnnnnnnnnnnnnnnnnnnnnnnnnnnnnnnnnnnnnnnnnnnnnnnncnttnntgcncttatccnntgntatatagcaantntctgtntttctnnttnntncttacgttcatacntnnatacatacttacgtacttncgaacnannncntatntacctttnactnanttttanacctanaataanacttnntcntgtgcatcnattttttnggggttatacgttnnnnccngcngntanttctgatttattattc

SEQ ID NO: 38653 - DNA, 335 bp, Homo sapiens
  misc_feature (1)...(335): n = a,t,c or g
cgcggccgcgtcgnnnnnnnnnnnnnnnnnnnnnnnnnnnnnnnnnnnnnnnnnnnnnnnnnnnnnnnnnnnnnnnnnnnnnnnnnnnnnnnnnnnnnnnnnnnnnnnnnnnnnnnnnnnnnnnnnnnnnnnnnnnnnnnnnnnnnnnnnnnnnnnnnnnnnnnnnnnnnnnnnnnnnnnnnnnnnnnnnnnnnnnnnnnnnnnnnnnnnnnnnnnnnnnnnnnnnnnnnnnnnnnnnnnnnnnnnnnnnnnnnnnnnnnnnnnnnnnnnnnnnnnnnnnnncagttcttttgaaaaatgagtaatagcttcttttgtttgctctttagtcttaa

SEQ ID NO: 38654 - DNA, 320 bp, Homo sapiens
gaacccaccatggtgctgtctcctgccgacaagaccaacgtcaaggccgcctggggtaaggtcggcgcgcacgctggcgagtatggtgcggaggccctggagaggatgttcctgtccttccccaccaccaagacctacttcccgcacttcgacctgagccacggctctgcccaggttaagggccacggcaagaaggtggccgacgcgctgaccaacgccgtggcgcacgtggacgacatgcccaacgcgctgtccgccctgagcgacctgcacgcgcacaagcttcgggtggacccggtcaacttcaagctcctaagcca

SEQ ID NO: 38655 - DNA, 332 bp, Homo sapiens
tgcgtattccttaggctgttgcaaggagccatggagactgaatatacgacttcctgctattctgcaaactccagcatgctatctaagctttgtctaccatcaccaccacactgatccagggcccgtgagggagacaatacttcgaggttaaagaatagtgccaggcaacaacaggtttaagttcctaaaaatgccaatcaggactgagggaaaggggacaactaaaaacaccatggggctggtctggtcagctggcaaaagagaaaagccacagacaggtggcgaaaaagaggccgaccctgctcatcatcccctcacaggccctgtctggc

SEQ ID NO: 38656 - DNA, 320 bp, Homo sapiens
gcaaatgattaaagcaaaggtcattgcctatatgactcaaatgcttggttgcctcagaagataatgagcctgatactttcacagtgaagctgtattgcacgtttgtgtttgtttattttccatctttcccactagacggtgagggactttatctgtctcattcaccactttgtccaacctaggacagtgtccgacacatagagatgctcaataaatcttggctgagtcaatacgtttcaaaatacaaggtgactccaaatataaaacaattttttattttcaaatgaagtggacctcccctaaattttgtgcccagttta

SEQ ID NO: 38657 - DNA, 322 bp, Homo sapiens
ggcaacatagcaagatgctgtctataaaaatcgaaataaaaaattatgtatgagaaaggcctccagatatagagggttacattcaaagaattgtacatttagttactttaatcaaggcagaaaaacagtgataagcttataatatttgcagtacaaagtttggattaaaaaaaaatccaaaaaaactccctcatttatttccatctgattatatacaatttctcaaataactgatgtgaaagtatgtggacaactaaagcgtacaatacatacttgagggattacttatatgttaaaattgtaaaacctcaaattatataga

SEQ ID NO: 38658 - DNA, 327 bp, Homo sapiens
  misc_feature (1)...(327): n = a,t,c or g
ctcaagagaccttcctcctnnnnnnnnnnnnnnnnnnnnnnnnnnnnnnnnnnnnnnnnnnnnnaacaaaatatatttttctaacactaatcaaaggaaagctagaataactattttaacttcagacaaagcaaacttcagacaaggaaattattaggaataaagaaggccattacataatgataaaggggccagctgtccaataagccataacaatcctgtgtatgcacctcacaacagagtgtcaaaataggtaaggcaaaaactggtaaaactgcaaggagaaatagacacaaatagaatattgcagttggggnttttcagtat

SEQ ID NO: 38659 - DNA, 337 bp, Homo sapiens
ctcaactactacaaaaaaatttcctccttaaaatttaaactgggttattttagcaattaatctcatcattttttcatcctgttccatcataaagtcaaatatttattgagaacctataatatctacacttccgagttctgctaataaacccatgaacaagaataacaagttccctggcctcttgaaatgtgtgtcttagaaaaagtttcaaagaagtatttcccttctgctttaggctaatatcactgtcaatgctcttaatcttactccatttccatagcccaggaattttaagtatcattaactcccaagcttaaacttcaagaacccttacttt

SEQ ID NO: 38660 - DNA, 328 bp, Homo sapiens
gaaccaagtactgattacacaagtgtgttcattttgagaaaatgtatcaagttgtacatttaaatttgtgcatgtccctgtatttatgttacacctccacaatacttacattaaaaaatggacttctacacaatgacagcatagtcatttgtcatggcattagagaatataaaccagccatcatccaaatccttacggtcttatttctcctgataggtcagcactaatgtacgctaaattcttctttggtattctccctgaaaatatgacctgctctcagaaaagcaagaagtccaactgaaacggaagtttctatgggtaggtaatg

SEQ ID NO: 38661 - DNA, 336 bp, Homo sapiens
  misc_feature (1)...(336): n = a,t,c or g
catgctcctacccacaagttacagtgattcacgctggctccattctgtactcttgcttcacatgtttggatatgagagtcagaagactcggggtgagccagaaatgaggtcaggggcagctgggtagcagaagcgggatgtctgtttctttcttgtagctgacttaagatttttgatactcccagtgcagggcaatttctgcccgtacaagctgtggcagataggagtctaccgctggctctatttgagggcattggagatttcttactacctggcaggcacccctgtgcttctagccccttcactgntattgacaaacaggtttgtgcttncacc

SEQ ID NO: 38662 - DNA, 338 bp, Homo sapiens
  misc_feature (1)...(338): n = a,t,c or g
ttctaacatcactttttattctagtgtccatttgtacatcaattctttcaaattagtaccctttatgtaagaaatgatttatgatcttcctacttttcttaattccaaacattcataggtgcaagcnnnnnnnnnnnnnnnnnnnnnnnnnnnnnnnnnnnnnnnnnnnnnnnnnnnnnnnnnnnnnnnnnnnnnnnnnnnnnnnnnnnnnnnnnnnnnnnnnnnnnnnnnnnnnnnnnnnnnnnnnnnnnnnnnnnnnnnnnnnntaaggcactgttgatggaaatactaagcaggtggttgaaaatgaaaattacaatttcagaattatttatgta

SEQ ID NO: 38663 - DNA, 337 bp, Homo sapiens
  misc_feature (1)...(337): n = a,t,c or g
cccaagccangctggctgtaggaagtcagcaaacatgcacgtggagccaggaaagcggtggatgaacgagcatgaccacactcaggggagacatctgggccggtgtcatcagggcgcggatgggatttaaagccacaggcgggacaaggtcactagggaagtgagtgtggacagagcagagaaggccaagggaccctttcctctggcgggtcatgaacatctctggcagtgacgtcgacgcggccgcgaattccnnnnnnnnnnnnnnnnnnnnnnnnnnnnnnnnnnnnnnnnnnnnnnnnnnnnnnnnnnnnnnnnnnnnnnnnnnnnnntttat

SEQ ID NO: 38664 - DNA, 430 bp, Homo sapiens
  misc_feature (1)...(430): n = a,t,c or g
ttggannnnnnnnnnnnnnnnnnnnnnnnnnnnnnnnnnnnnnnnnnnnnnnnnnnnnnnnnnnnnnnnnntctcgaggatccgaattcgcggccgcgaattccnnnnnnnnnnnnnnnnnnnnnnnnnnnnnnnnnnnnnnnnnnnnnnnnnnnnnnnnnnnnnnnnnnnnnnnnnnnnnnnnnnnnnnnnnnnnnnnnnnnnnnnnnnnnnnnnnnnnnnnnnnnnnnnnnnnnnnnnnnnnnnnnnnnnnnnnnnnnnnnnnnnnnnnnnnnnnnnnnnnnnnnnnnnnnnnnnnnnnnnnnnnnnnnnnnnnnnnnnnnnnnnnnnnnnnnnnnnnnnnnnnnnnnnnnnnnnnnnnnnnnnnnnnnnnnnnnaaggggccaggatttgccttgggggntcctnaangggantaaggattgcccct

SEQ ID NO: 38665 - DNA, 322 bp, Homo sapiens
  misc_feature (1)...(322): n = a,t,c or g
ctcctgtctcaccctgtgactaagaatgcctgtcccggacnnnnnnnnnnnnnnnnnnnnnnnnnnnnnnnnnnnnnnnnnnnnnnnnnnnnnnnnnnnnnnnnntgaacacctgtaacaggggaacattgaacttcttatagaaaatgatcttcatctctgaagcaggaattcaggctgctcatttgttgtagtgtgtttaagattctaagaaaaaaagtgggactgatgacgaaaattgactgtgggtcttgaggactcacaaaaaggttgggtaataaaaacaaatcagaataagattagaaaagaaagcagagagaat

SEQ ID NO: 38666 - DNA, 289 bp, Homo sapiens
  misc_feature (1)...(289): n = a,t,c or g
ccccccaatcccaaaatacnaganctctccnggatccgaantcncngncganncganttnccggaaacaaacaacaatatgaaggagagagggaagatgtagtgttgattccaagtttatattctgacaaactagaagaagatgaataaaagttgaaaactgggaaagagagttttggggtaagatttgagtttgaggttatgaaaggatatgcattcaggttgaaatggtctgagacagaaaggactacngagaagnnnnnnnnntnttgnnnngctncntnnnaagc

SEQ ID NO: 38667 - DNA, 348 bp, Homo sapiens
  misc_feature (1)...(348): n = a,t,c or g
ttttgaaatttcatttatttatnnnnnnnnnnnnnnnnnnnnnnnnnnnnnnnnnnnnnnnnnnnnnnnnnnnnnnnnnnnnnnnnnnnnnnnnnnnnnnnnnnnnnnnnnnnnnnnnnnnnnnnnnnnnnnnnnnnnnnnnnnnnnnnnnnnnnnnnnnnnnnnnnnnnnnnnnnnnnnnnnnnnnnnnnnnnnnnnnnnnnnnnnnnnnnnnnnnnnnnnnnnnnnnnnnnnnnnnnnncataagcaatgtgatccacctcagcctcccagtgttgggattacaagcgtgagccaccacaactggcctatttatctttttcttagagacaggatctccctctgttg

SEQ ID NO: 38668 - DNA, 323 bp, Homo sapiens
  misc_feature (1)...(323): n = a,t,c or g
nnnnnnnnnnnnnnnnnnnnnnnnnnnnnnnnnnnnnnnnnnnnnnnnnnnnnnnnnnnnnnnnnnnnnnnnnnnnnnnnnnnnnnnnnnnnnnnnnnnnnnnnnnnnnnnnnnnnnnnnnnnnnnnnnnnnnnnnnnnnnnnnnnnnnnnnnnnnnnnnnnnnnnnnnnnnnnnnnnnnnnnnnnnnnnnnnnnnnnnnnnnnnnnnnngtattggctattttcataattttttggaagtttttatttgattggaaagcagattttacactattaaaataagtattacttgagaaaagcatntgttgaataattgaaagtat

SEQ ID NO: 38669 - DNA, 337 bp, Homo sapiens
tataaataataatggttaatttatgcactggcacacaaaataacactctagcaggtttgctgaactaaggagtcctaccctctacaagatggttagccaactatcttgccaaagtcagaggttcaaggaggaactccgccatccacgtgcacaccttggtatttaactctcctagagtaggagccacaaggggttaggcgcatgcaagaacacgaaaggcctgccagcgggcactgggagctgcgtgtggcccagcagagccaagtggttagagcacctgcctggcatctagccctgcaaagcccagcgccagctctgaacctggaagacctggagc

SEQ ID NO: 38670 - DNA, 309 bp, Homo sapiens
  misc_feature (1)...(309): n = a,t,c or g
aggcaagttattttatacactggctcattaaattttcaaaccaaaccataaaataggcattatcaccccagttacagatgcagaaacattctaagattaagctaacctattgatatacagctagtaagtagcagagctggattcaaacactgacctgcctggttccaaggcctaactgggatttccccatgattacaggtgtttaatagaggagattcatgagtcacatgagccagaagttgtaaacggtgtaataccacctcctagggatgntcttcttttatgcagtcacactgntcatttatacgt

SEQ ID NO: 38671 - DNA, 299 bp, Homo sapiens
  misc_feature (1)...(299): n = a,t,c or g
gggatacaannnnnnnnnnnnnnnnnnnnnnnnnnnnnnnnnnnnnnnnnnnnnnnnnnnnnnnnnnnnnnnnnnnnnnnnnnnnnnnnnnnnnnnnnnnnnnnnnngcttagcnnnnnnnnnnnnnnnnnnnnnnnnnnnnnnnnnnnnnnnnnnnnnnnnnnnnnnnnnnnnnnnnnnnnnnnnnnnnnnnnnnnnnnnnnnnnnnnnnnggcttataggctcactctctttctatcaaagtttttgatttcttttcataaagacaagggcactactggatgaccttgtgcaatggg

SEQ ID NO: 38672 - DNA, 302 bp, Homo sapiens
  misc_feature (1)...(302): n = a,t,c or g
cttgaagcacttaaaatttaaatcacactctgaagaacaaagaaaagaaaatcaggagtaacactatgacttgaacacttaacggggggtagggtcatctacagaattctctatcttctctaccacctccattcccttagcacaggagttcacccttttatttaagtgggtcaccactcagctcatcattccacaccagcttttacatgctattctttctttgttaaaaaattaacaacaatggcaatcatgagctgtaaattaaagctgnattttcaacagatggaataaaatagtggtgg

SEQ ID NO: 38673 - DNA, 315 bp, Homo sapiens
agaaccctttctacaggcagctgccaggagtttgcagagtgttttgttgttctttctgtccagtgtccactgtggtccctgagaatcacatttgctttgggtctagaatcacagcacataataaaactgtcatgggcacacccaatgttgcatgatcacagaagccaaggaggaccgggcaccgttatttctaggataagacggttacctgaaaatgctgtttttcaagcagcagcctggggtagcagttatgaactatttggagaagcctggatttgacccgactccacgcttgttggttttgtccttgggcaa

SEQ ID NO: 38674 - DNA, 315 bp, Homo sapiens
gtaagcctcctaacaaccctgggagaaaggttatctctatcttgcaaatggggaaaaaggagcgcagagaagttaagtttgtctaatgtcataaagctatttaagtggttgagctatgagtttttaaaagaaaatctcaagcttcccccttactatctcacactgtaacccttctttttggtctcctcacatcttattatcacccactccccctcgaagatgagattcttgggctcaggaagcacagtttttccaaacacagagccttggttctatggagtatcaggctacttgttactcagcagataaattttc

SEQ ID NO: 38675 - DNA, 321 bp, Homo sapiens
ggtcactgcacatgtaccccctgaactaaaataaaagttggaaaggaataaaagtttaaaaatgaaataaaaactactcctttagcaatttccaagtaaaacataaataatctgatatgaagaaatgctttgctttgatggtcttcacagtgttattttctctgaagcaaaaattatctcaattacgtatattacaaaagagatcatttcctccaaatggagacaacaaacaatattagagaaagcagcatagcacttctgtctctaattctctgaacttaactgtgaaaccttgagtaagcagcatctgccatctcatct

SEQ ID NO: 38676 - DNA, 311 bp, Homo sapiens
  misc_feature (1)...(311): n = a,t,c or g
cttattgtaccaattcaagcctcagcaccaagtgcatgaaaaataagcgacagtccccaaatacagcctggttggttggtgccaccgtgctctctgcttgcaggctatgtagctaataaaactggaaccnnnnnnnnnnnnnnnnnnnnnnnnnnnnnnnnnnnnnnnnnnnnnnnnnnnnnnnnnnnnnnnnnnnnnnnnnnnnnnnnnnnnnnnnnnnnnnnnnnnnnnnnnnnnnnnnnnnnnnnnnnnnnnnnnnnnnnnnnnnnnnnnnnnnnnnnnnnnnnnnnncatattccagctactnaaga

SEQ ID NO: 38677 - DNA, 313 bp, Homo sapiens
  misc_feature (1)...(313): n = a,t,c or g
cctaaataaagatctttgcagcataaaaatccctgttttctattatatgacttctaaaattctttgcctggctttcaaggagcaccaaaatacgaccctaaatggcaactaaattgttttatataattaaactaaccttctcattgtcctacaaatatctcatgttatactcggcttttatatcttactacctacttggaatatcttttaataaataatttaggtgtttccatttcacagactattccttccccaatacttagtaagataaacaaaacgaattttaaaaagaaactatctaaatgatncctac

SEQ ID NO: 38678 - DNA, 308 bp, Homo sapiens
gcctaacagaggagatccccctggcaaactgagagggaagagtacagacaatcatcacagagccccgaagcaagcgctgaacaaacaagataatccacttagaaggtccaagtctcctgtgatagcacttgcaaaattcccagaaattggagagagacaaactaaagggggaacttttatgggaaagtcaataggctggtctctaaagtgatcttctgcttccctgatagccctggggcaggaaattcctgttccaggtttgtctccagagaaattataccccagtcaagacaatcagctctcagccc

SEQ ID NO: 38679 - DNA, 441 bp, Homo sapiens
  misc_feature (1)...(441): n = a,t,c or g
ggnnnnnnnnnnnnnnnnnnnnnnnnnnnnnnnnnnnnnnnnnnnnnnnnnnnnnnnnnnnnnnnntctcgaggatccgaattcgcggccgcgtcaccagccatgtaaccggaggggccagaccttcaggcacgtgggacctcagcgtgtggagccacctgaacagaagatgaccatcatttaagggctttttaaaaaatcactgttaacagacctccaggtgattctactgaaatgcacagtcatgcagagcccaggaggcaaatgtttgtacactgatctttttcatgaggatgggtccaagggcctgtaatcccgtccaacaggtatggtccttttgagctcttggcacactttggtcgacgcggccgcgaattccnnnnnnnnnnnnnnnnnnnnnnnnnnnnnnnnnnnnnnnnnnnnnnnnnnnnnnnnnnnnnn

SEQ ID NO: 38680 - DNA, 311 bp, Homo sapiens
  misc_feature (1)...(311): n = a,t,c or g
ctcagatacatgagataaaatccagttcctcaggtagcagccagaaaagctggggtgctagttatttggtctgtctcctttgcttttcagagagaagctggaagccaggctttatcactgcactgagccaaagtggggagcagggggaagtgcccacatgcttattaaaaaccgctctgaaaatatttgaagtaacagggctataacaattattattttaaaagcaactgctgttttggtttgtgtagccccagaggtttagcagatgctgggcccttgtcagctnaccaaatcngggaaattanaaaccc

SEQ ID NO: 38681 - DNA, 114 bp, Homo sapiens
ggacgttctagcaggacatcggtgctttgctgtccatcttcccatgctgcaatttcttcctgagatttctataaatataaatgtatgtatgtattataagaaaaaaaaaaaaaa

SEQ ID NO: 38682 - DNA, 393 bp, Homo sapiens
  misc_feature (1)...(393): n = a,t,c or g
ggnnnnnnnnnnnnnnnnnnnnnnnnnnnnnnnnnnnnnnnnnnnnnnnnnnnnnnnnnnnnnnnntctcgaggatccgaattccnnnnnnnnnnnnnnnnnnnnnnnnnnnnnnnnnnnnnnnnnnnnnnnnnnnnnnnnnnnnnnnnnnnnnnnnnnnnnnnnnnnnnnnnnnnnnnnnnnnnnnnnnnnnnnnnnnnnnnnnnnnnnnnnnnnnnnnnnnnnnnnnnnnnnnnnnnnnnnnnnnnnnnnnnnnnnnnnnnnnnnnnnnnnnnnnnnnnnnnnnnnnnnnnnnnnnnnnnnnnnnnnnnnnnnnnnnnnnnnnnnaaaacnttngnantttttcgccagaggtttgnntnnagtntagtgntnnntnttttttgctnattt

SEQ ID NO: 38683 - DNA, 275 bp, Homo sapiens
  misc_feature (1)...(275): n = a,t,c or g
atttacagaaatatgctcaatttcctcatcaaaaaaaatctaaaaatattttacttggatatgtagccaaaatcaatgttattttccccaatactttgttgtttatttatattattatatataattataaagaaaaaataaggaaatttttttcaccaagctcctcataggcctcccctcagatttacccccatgtgttctgcaaatattagaattttatctttgtgccatgacataacgaagttgggaagcnngnnggnggttaacttanttta

SEQ ID NO: 38684 - DNA, 268 bp, Homo sapiens
  misc_feature (1)...(268): n = a,t,c or g
ctaaattcagaacaaaattaaaaaccatgccacagggaaatattgttctagtggattagcctctggccctaaaaattggtcagaaatgaaacagggaggttgaaaatatctaggaacagaaaatcaccttcaacggcacatttgagcccaatggctagggttctggagccttgactgtagtaatcagagaataggtgaaaagttattttgttccaacttcatcaggtacttctgggaaaggcatagtaagaacnaccagctttatgac

SEQ ID NO: 38685 - DNA, 270 bp, Homo sapiens
  misc_feature (1)...(270): n = a,t,c or g
ctgacattgcccactgcaagtcctcagacttgaccaaagaatatagcccatccaggcgctgaggatatatcttctgaccctcaagggtctggtttgagaaatagacaaaaacaaacaaacaaaaaaaaaaancancaaancaaaaannngaaattttcnttngnncaaatntntaggggnaaantacnntgnaaanttanggannanccccttntnaccncagtngggnccccnttngnaaancccnggtttaaancaanttaacctttt

SEQ ID NO: 38686 - DNA, 262 bp, Homo sapiens
  misc_feature (1)...(262): n = a,t,c or g
ccaggctntgggggcacatggctgatggaaccaagcatggggagtgaaggntggtcgntggctttnattttattctnnnnnnnnnnnnnnnnnnnnnnnnnnnnnnnnnnnnnnnnnnnnnnnnnnnnnnnnnnnnnnnnnnnnnnnnnnnnnnnnnnnnnnnnnnnnnnnnnnnnnnnnnnnnnnnnnnnnnnnnnnnnnnnnnnnnnnnnnnnnnnnnnnnnnnnnnnnnnnnnnnnnttntttnntttaggttttggtt

SEQ ID NO: 38687 - DNA, 270 bp, Homo sapiens
gcccgattatggctctttaagaaaaaaaacttcccacactgaaacctcaaatactgatcacaggatccacctgtgttacccagctgttctagcagcaaaagtctgaaaacgacccctcactttaatcaggcaggcaggcaggcattccacatgtacacctgaaaccacaccagactatttctgcatattataagtcacgagagaaaaccagctagaccaatgaagcagcttcttctacgattagatgcttgtgttgggggtgcgggaatg

SEQ ID NO: 38688 - DNA, 270 bp, Homo sapiens
  misc_feature (1)...(270): n = a,t,c or g
gcggcggggcccgagccggagaagatggcggtgcggaagaaggacggcggccccaacgtgaagtactacgaggccgtggacaccgtgacccagttcgacaacgtgcggctgtggctcggcaagaactacaagaagtatatacaagctgaaccacccaccaacaagtccctgtctagcctggttgtacagttgctacaatttcaggaagaagtttttggcaaacatgtcagcantgcaccgctcactaaactgncgatcaaangtttccta

SEQ ID NO: 38689 - DNA, 317 bp, Homo sapiens
ctttgtcaaccctttctaatcaaccaggatggcaaaactctctcagtaaagtaaggaatgcgtcagatgtgctcagcaatgagaaataattagctgaaagtttccctggcattccctgagccttgtggtttcgcccccatcaccgtggcaggaacgttgggccatcccaagaatgtggccatgggtatctgcagcagtctgggagggcctgggcatgtttcttggcatgtgggcaggttgcagtaccatcatctgggttggtttggcagcggttgagcaaggcctttggtcgacgcggccgcgaattccagatctat

SEQ ID NO: 38690 - DNA, 265 bp, Homo sapiens
  misc_feature (1)...(265): n = a,t,c or g
ctgatcttcaagccatgtatttagggaagctagacagaatacatgtttttggggccaggatgatgttttagaagcaatgttggatttctcctcaagagacttgtctttaagactgaatggtacctcataagtgaagtcatttctctttctatgtagcaatagctgggagatttttatttcttgcttggttttatacctaaatncttcatgantnnatnttacgagggcttattcnnaannnnnnnnnnnnnnnnnnnnnnnnnnn

SEQ ID NO: 38691 - DNA, 321 bp, Homo sapiens
ggcttaagtatgttacttttaagattcagatttttaaagtttgtagatctcataccaatttgtcctggataaactgacatgctatctgggatttacgtggaaatatcccagctggaaagggaagaagggagaaagtggtaggatatagattaaattggcaaaatgttattaactattggaactgaatgatgagaacatggaaactcagtgttgttatactattctctctactttggtgggtaaatttttctataataacattttttaaaatttcagtatctaaagtatagtcttccattaaagattatcccaaagaaaatg

SEQ ID NO: 38692 - DNA, 187 bp, Homo sapiens
agataatgtaacacaggaatttgaatagcctgggggtgccagcaggtcagagaaggctttcctgaggaaataaagcttgtggtgcaatctaatggatgaggagttagtaatgtaaaggaggtaaagaatagctagatcaaaggccctgaaggaagaaggaacatagcatatttaaaaaaaaaaaaaa

SEQ ID NO: 38693 - DNA, 314 bp, Homo sapiens
  misc_feature (1)...(314): n = a,t,c or g
caggaagtgcctggccaaacagaggcagaggatgctgcaagagagaaaagctgcaaaagaggccgccgctgccacctcctgaggcagctgtgggtgcccctgctgtgtggctctgtatgactgttgctgaaatataaagcccgtcgacgcggccgcgaattccnnnnnnnnnnnnnnnnnnnnnnnnnnnnnnnnnnnnnnnnnnnnnnnnnnnnnnnnnnnnnnnnnnnnnnnnnnnnnnnnnnnnnnnnnnnnnnnnnnnnnnnnnnnnnnnnnnnnnnnnnnnnnnnnnnnnnnnnnnnnnnnnnnnnnnn

SEQ ID NO: 38694 - DNA, 415 bp, Homo sapiens
  misc_feature (1)...(415): n = a,t,c or g
annnnnnnnnnnnnnnnnnnnnnnnnnnnnnnnnnnnnnnnnnnnnnnnnnnnnnnnnnnnnnnntctcgaggatccgaattccnnnnnnnnnnnnnnnnnnnnnnnnnnnnnnnnnnnnnnnnnnnnnnnnnnnnnnnnnnnnnnnnnnnnnnnnnnnnnnnnnnnnnnnnnnnnnnnnnnnnnnnnnnnnnnnnnnnnnnnnnnnnnnnnnnnnnnnnnnnnnnnnnnnnnnnnnnnnnnnnnnnnnnnnnnnnnnnnnnnnnnnnnnnnnnnnnnnnnnnnnnnnnnnnnnnnnnnnnnnnnnnnnnnnnnnnnnnnnnnnnnnnnnnnnnnnnnnnnnnnnnnnnnnnnnnnntnantgcaggcccctgagcccaagctaanccatcataaccctgngacctgnacatatt

SEQ ID NO: 38695 - DNA, 311 bp, Homo sapiens
gaaagacaagaaagaacatggagctgttccaagttgaaaaaagactgatgctctgaggatatgataattaagtgctatccagaacataggttgcacttaattatcatatcctcagagcatcctatgttctggatagcactgtggatcagaaaggattttgaaatttaaatgaagtctgtgaatcgcatagtagtgttatatcaaaattgatatataagggagtgaccctgctttgagcagataccaatagttatgtttgggattacagggcaccatttcagaaaaagatgctgctggctggcttggttgga

SEQ ID NO: 38696 - DNA, 340 bp, Homo sapiens
aaggccctgaaatcagactgtgtttaaattgcaacccaactgctcagcaagcagtgtgacctccaacaagacacttcgtccactctgttgtgttatttgtagaatggaaggagtagtatcctcttcatgaaattatcgaatacattaaataaaagaatacgtatgaaagtgcccagtgtagctaggataatatatattataattggtatattattaaattagctcacctagtttccaaaaatgcccattttgtaaacatgcaaactgaggttcagatagatgcaatatttaggtctcaataatcaagggataaacagagctgaggtttaagttcaagaca

SEQ ID NO: 38697 - DNA, 330 bp, Homo sapiens
tgactagtgatgctggccatctttgcacgaaccaatggcccatttgcttgctgccagtccctggagagatgtccaattggatccttcgcccatttttatcatggagtccttcatatatatgccacaagtatcttctctttcagtgtgttgtattttcagtttcttgatggtgtcttttgaagcataaacatttttaagtccagttcatttttccttttgttttttgtgctcctggtctcacagctaagacgggattttttcctgactatgctgcgacactcagcagtccattttcccacatgccctgcagcgctctgtgatcctcagagc

SEQ ID NO: 38698 - DNA, 424 bp, Homo sapiens
  misc_feature (1)...(424): n = a,t,c or g
ttgacngcctgatgctactttganctccnnnnnnnnnnnnnnnnnnnnnnnnnnnnnnnnnnnnnnnnntctcgaggatccgaattcgcggccgcgaattccnnnnnnnnnnnnnnnnnnnnnnnnnnnnnnnnnnnnnnnnnnnnnnnnnnnnnnnnnnnnnnnnnnnnnnnnnnnnnnnnnnnnnnnnnnnnnnnnnnnnnnnnnnnnnnnnnnnnnnnnnnnnnnnnnnnnnnnnnnnnnnnnnnnnnnnnnnnnnnnnnnnnnnnnnnnnnnnnnnnnnnnnnnnnnnnnnnnnnnnnnnnnnnnnnnnnnnnnnnnnnnnnnnnnnnnnnnnnnnnnnnnnnnnnnnnnnnnnnnnnnnnnnnnnnngnancccngaagntagcngntnctccaaatnnnnnnngagnggnngtagacg

SEQ ID NO: 38699 - DNA, 317 bp, Homo sapiens
  misc_feature (1)...(317): n = a,t,c or g
aatnnnnnnnnnnnnnnnnnnnnnnnnnnnnnnnnnnnnnnnnnnnnnnnnnnnnnnnnntaacggaatacatatggacagaaagatgagaacaatagacatttagagttgtctaaaggagggaggggggagggagggggaaatgggctgnnnnnnnnnnnnnnnnnnnnnnnnnnnnnnnnnnnnnnnnnnnnnnnnnnnnnnnnnnnnnnnnnnnnnnnnnnnnnnnnnnnnnnnnnnnnnnnnnnnnnnnnnnnnnnngaacctaaaataagaaattatttttaaaatatatacataggcttaaaactaaagaa

SEQ ID NO: 38700 - DNA, 317 bp, Homo sapiens
cgcgccttggtgagccgttggcgtggtggtcccggagtgatcctggcagccggtggggaagacaaggagggctgagggtaaaaagctgggattggtaggctgggtccagaacactgaccggggcacagtgcaaggacaattgcaaggtcccatctccaaggtgcgtcatatgcaggaatggcttgaaacaagaggaagtcctaaatcacacatcgacaaagcaaacttcaacaatgaaaaagtcatcttgaagttggattactcagacttccaaattgtaaaataatggcctgaatttaagttttctaagataaact

SEQ ID NO: 38701 - DNA, 332 bp, Homo sapiens
  misc_feature (1)...(332): n = a,t,c or g
ctcccaagacagacaaaagctcattcagattggccctcttccagtcagggaaattttctaaagtgttataaacaatccagtcagaggaaagaagaaaagaaaggaaagataaaaggaagaagagaaacagagttgaaggaagacagaaagaaagagaagaagcttctatgttgtcttcttcgcactcattgaggaatttaaaataagaaacacctttataagtgtggaaagttagtatatttttaggagtagcattttttaattaacagtcgacgcggccgcgaattccnnnnnnnnnnnnnnnnnnnnnnnnnnnnnnnnnnnnnnnnnnn

SEQ ID NO: 38702 - DNA, 332 bp, Homo sapiens
  misc_feature (1)...(332): n = a,t,c or g
aaaaaaggggactggcccattctgttctgagtctcagcacccagggccatcccttctcacctcccaacctcccttctctgttctctgctcctagccatgctggcctcctttccatgccttttttttttttccnanncttaanggnnttngccttggnctngcccanggnctttggnnaaagnggnccnnttngcnggnacccccccnacntngnnnagttngcngnttgggntaatttttangnattcaaaaaatnggccnnanggnttngccnccnngttttanagggcccttgggccntcctngncccaatttccnngggttggnaaagg

SEQ ID NO: 38703 - DNA, 431 bp, Homo sapiens
  misc_feature (1)...(431): n = a,t,c or g
ccctgnnnccttgganggcnnnnnnnnnnnnnnnnnnnnnnnnnnnnnnnnnnnnnnnnnnnnnnnnnnnnnnnnnnnnnnntctcgaggatccgaattccnnnnnnnnnnnnnnnnnnnnnnnnnnnnnnnnnnnnnnnnnnnnnnnnnnnnnnnnnnnnnnnnnnnnnnnnnnnnnnnnnnnnnnnnnnnnnnnnnnnnnnnnnnnnnnnnnnnnnnnnnnnnnnnnnnnnnnnnnnnnnnnnnnnnnnnnnnnnnnnnnnnnnnnnnnnnnnnnnnnnnnnnnnnnnnnnnnnnnnnnnnnnnnnnnnnnnnnnnnnnnnnnnnnnnnnnnnnnnnnnnnnnnnnnnnnnnnnnnnnnnnnnnnnnnnnnncntagcgggnanctntggagnnannnagggggcgnangggggntaggngaggngcac

SEQ ID NO: 38704 - DNA, 329 bp, Homo sapiens
cagaattagttacacatcttctcctccccctcatcacacctaatgaccaacttgcaattcccccatcactgcgactctggttctgctggtttaacagtctcagcacccaagtgaagaatgatttcaccaagggactcaacaatacctccactgatttggaagcttaaactgcaacctagcaattctgaactcctcatgacacagaacagggacaaaaagggaggtgacagaattggttgtgttaatgaatcttgattatcaagggtaaagaagattgttgcaacaggatgagagaagggaggtgtgtgtctggaacctggaacacctgt

SEQ ID NO: 38705 - DNA, 318 bp, Homo sapiens
aaaacaggatggagagtcctcaaaaaattaaaataaaactacatatgattcagcaatcccattgctaggtatatgtatatttatgaaacaagtttttaaaacctaaacttactattatgaagattcttttaagcagagtttctgctaaatgaagcatcatagattattattacactgtaagagatctttgctgacctgcccaatagtgatctatatacaggaaagctgtgttatctggaacttttatcaactggaattttagaaaacccaatgcgaatcttgactccactagaccactgtacatcaaaagacctaatc

SEQ ID NO: 38706 - DNA, 316 bp, Homo sapiens
  misc_feature (1)...(316): n = a,t,c or g
gttttatctattttcctgagtttttcagaaagtcagctttttgttttattgaattttattgcgtattttcctggtctttactgctactttaaaatttaccctctaattcttttccttaactcttgagttaaatgctgagcttatttattttctaatttttaaatcaatgcattaaagttgtaaacttttctaagtattctttcaatgtattctaacagttttaatatgtattactttcactatggttatttaaaaaatatttggtcccattgtgatttcctctttaattcaggagttatttangaatatatttcta

SEQ ID NO: 38707 - DNA, 315 bp, Homo sapiens
cgataccaatagctagtgttataagtgtcctttcctgaaactcttgccacgcattgtgttttggcgattttcatggttgtacgaatttagtcagacagccaattagaaatatatttttagaaaattaaaaatgaatttatgtggattcaatgagatcagttgggtaaatcccttaattcagtgtcatgctcatgtaaatactccataaatggtagccattagtattgattgttcttatctgaatgccagagtttagtctaagttatctttcttcttatgggaggaactttgtcttaggtcagaataaagattgtt

SEQ ID NO: 38708 - DNA, 321 bp, Homo sapiens
agtgtgtgtgcgtgggaaaggtgcagcactttctgtgtacgccttccgcgtatggaagtggagttctgtttcaagcctcactgacctgccaccggcagaactctcctttagaaccccttcctgttgccaagtgctcatctgggctgttgctttgttttccgggggccacccgcatcccccccgtctccctgctgccacgcacagctagtggctcctggagacctcgggaggaattccttgtgctaaacccagagaggaattgctgggtcaggcatcagcctctgcaccgttcaccctgccgggctcagctgctccccagca

SEQ ID NO: 38709 - DNA, 428 bp, Homo sapiens
  misc_feature (1)...(428): n = a,t,c or g
ttgtgcnatactgagctcttatggnnnnnnnnnnnnnnnnnnnnnnnnnnnnnnnnnnnnnnnnnnnnnnnnnnnnnntctcgaggatccgaattccnnnnnnnnnnnnnnnnnnnnnnnnnnnnnnnnnnnnnnnnnnnnnnnnnnnnnnnnnnnnnnnnnnnnnnnnnnnnnnnnnnnnnnnnnnnnnnnnnnnnnnnnnnnnnnnnnnnnnnnnnnnnnnnnnnnnnnnnnnnnnnnnnnnnnnnnnnnnnnnnnnnnnnnnnnnnnnnnnnnnnnnnnnnnnnnnnnnnnnnnnnnnnnnnnnnnnnnnnnnnnnnnnnnnnnnnnnnnnnnnnnnnnnnnnnnnnnnnnnnnnnnnnaagntgccnccntgggaannccccannnngnnngggnncccnaangggtttngnntnaaaaaactg

SEQ ID NO: 38710 - DNA, 303 bp, Homo sapiens
  misc_feature (1)...(303): n = a,t,c or g
tccagagcatacaacaaaattaaatatgtggactgacaaacttgaaacaactaattatcaaatatgtcaaaaataatcaannnnnnnnnnnnnnnnnnnnnnnnnnnnnnnnnnnnnnnnnnnnnnnnnnnnnnnnnnnnnnnnnnnnnnnnnnnnnnnnnnnnnnnnnnnnnnnnnnnnnnnnnnnnnnnnnnnnnnnnnnnnnnnnnnnnnnnnnnnnnnnnnnnnnnnnnnnnnnnnnnnnnnnnnnnnnnnnnnnnnnnnnnnnnnnnnnnnnnnnnnnnnnnttcagaggtccaggcc

SEQ ID NO: 38711 - DNA, 302 bp, Homo sapiens
  misc_feature (1)...(302): n = a,t,c or g
tttttgttctgggtatatgaattacctattgaaaaatatatataagtgagcatagatgattctttaaaataaaaatgtgttttactctgaattcccatctaacaattgtgtcacgaaaatgagttagtataaataagaacttaagggtctgtttatagagaatgttggctttagtatatgggctttgtaacatctattttgtctctttttagtggcctttgttttctccaggattctaagttgcgtataaatggcttgtnctngttntnnnnnngnnncntcnngnnnnngtgnttnngatc

SEQ ID NO: 38712 - DNA, 309 bp, Homo sapiens
caactgtgttcactagcaacctcaaacagacaccatggtgcacctgactcctgaggagaagtctgccgttactgccctgtggggcaaggtgaacgtggatgaagttggtggtgaggccctgggcaggctgctggtggtctacccttggacccagaggttctttgagtcctttggggatctgtccactcctgatgctgttatgggcaaccctaaggtgaaggctcatggcaagaaagtgctcggtgcctttagtgatggcctggctcacctggacaacctcaagggcacctttgccacactgagtgagct

SEQ ID NO: 38713 - DNA, 318 bp, Homo sapiens
  misc_feature (1)...(318): n = a,t,c or g
cttttttatctccttttagtttaatttttttctctttactaactatagctttagttgctttccatacatttttatttgcagtaatttcattatcattttttccacatttttttctaatttccattctgatatcttttattattggtacttggattatctataaatatatttctttttttttngggacannnnnnnnnnnnnnnnnnnnnnnnnnnnnnnnnnnnnnnnnnnnnnnnnnnnnnnnnnnnnnnnnnnnnnnnnnnnnnnnnnnnnnnnnnnnnnnnnnnnnnnnnnnnnnnnnnnnnnnnnnnnnnnngt

SEQ ID NO: 38714 - DNA, 246 bp, Homo sapiens
  misc_feature (1)...(246): n = a,t,c or g
ttggannnnnnnnnnnnnnnnnnnnnnnnnnnnnnnnnnnnnnnnnnnnnnnnnnnnnnnnnnnnnnnnnnntctcgaggatcnnnnnnnnnnnnnnnnnnnnnnnnnnnnnnnnnnnnnnnnnnnnnnnnnnnnnnnnnnnnnnnnnnnnnnnnnnnnnnnnnnnnnnnnnnnnnnnnnnnnnnnttgcgcctggccctaatgtgtttgtttcttcatctgtgtaaggggatttttttttttttt

SEQ ID NO: 38715 - DNA, 314 bp, Homo sapiens
gtggctttcaaagagccctaaagcgcccacatttctgttccctaagagcgaggcactggctcatctggaaagctgaaggctgggctcagctatagcacaatccaggcattctacctgcagaagcccaaatgggtgaggtccctgcagaacactgcacaaactctccaagaataaacagcctgaaaataaggtttgaggaaaccacagagtggggaaagtggggttcctggtaacccagtgttccttatgggagacatgagccatccccagaagaccacgcaccccaaggagacagcatatataggaagcaacaa

SEQ ID NO: 38716 - DNA, 317 bp, Homo sapiens
  misc_feature (1)...(317): n = a,t,c or g
ttccgccttttcccttgacttgaaagcctcttcctgcatgtacgcccgtggctccccactcactggcttcagctctttgttcaaatgtcaccttatcagagcaaccttccctcaccatcctacacaaaatagcaccccattctacattctcactgtctttttcacagcctttgccacctgacatatcatgtttacggtctatatcccaaagcagaatgtaaaccccgagagcaagaatactatttattttctgtcgacgcggccgcgaattccnnnnnnnnnnnnnnnnnnnnnnnnnnnnnnnnnnnnnnnnnnnn

SEQ ID NO: 38717 - DNA, 294 bp, Homo sapiens
  misc_feature (1)...(294): n = a,t,c or g
ggcaggtgcacggcagtgccagccaggtctctcgcagggtggtgtggacacagatgactcgtgtcgagcacacgtgttgtggcctgcacgatgagctaaattgaacagtgtttcaggaaggaagccacatcggggagctgagaagtgggcgggaaggacacaagggagggatctgggagtcgacgcggccgcgaattccnnnnnnnnnnnnnnnnnnnnnnnnnnnnnnnnnnnnnnnnnnnnnnnnnnnnnnnnnnnnnnnnnnnnnnnnnnnnnnnnnnnnnnnnnnnnnnn

SEQ ID NO: 38718 - DNA, 299 bp, Homo sapiens
  misc_feature (1)...(299): n = a,t,c or g
gtcttcnnnnnnnnnnnnnnnnnnnnnnnnnnnnnnnnnnnnnnnnnnnnnnnnnnnnnnnnnnnnnnnnnnnnnnnnnnctatcacctttttatagtttggctatggatactgtctcctaaaagagatcattccctaagttctttttttttttccctnanaagnttttttnnagggantnaanttttcccnaaatttnnnttccaggnanngtngntancnnnnattggtaannattnttggnaaaaaagggggttcantngcaaaatttgntnnaaaaaggcaaantngaanaattt

SEQ ID NO: 38719 - DNA, 307 bp, Homo sapiens
aaaagacttaagtactggctgtggtgatggtgaaccaaggatattggaggctagtcaaaggctacaaggacatcctgagaaatatggtaaaggtgaaccaaagactgaaagcaaaagttcgaagtttaaaagtaactcagattctgactataaaggtgaacgcattaactcttcttgggagaaagagacccctggagaaaggtcacacagtcgagtagactctcaaagtgacaaaaaactagaaagacaaagtgaaagatcacaaaatataaataggaaagaagttaaatcacaagaccaaaaaaaa

SEQ ID NO: 38720 - DNA, 299 bp, Homo sapiens
  misc_feature (1)...(299): n = a,t,c or g
ctcgtatccttttcttccttnnnnnnnnnnnnnnnnnnnnnnnnnnnnnnnnnnnnnnnnnnnnnnnnnnnnnnnnnnnnnnnnnnnnnnnnnnnnnnnnnnnnnnnnnnnnnnnnaggtgtgagccactgtgcctggcctcttgtatcctgttaataaatttcccttttatgcttgagctggtgagtttgtttctatttgcaatcagaatttggatacattagagttcaatggattgcagaaaaaaaaccaacaacctacaaatggctttcaaactcaggaaaagatgctcaatcatc

SEQ ID NO: 38721 - DNA, 303 bp, Homo sapiens
acatttcttaagaggacacaaaaagcactaacataaaaaaaaattgataaattctacattaaaatgaagaacgtctgttcttcaaaaggcaccatgaagagaaaaggtaggttacagaatggaagaagatatttaaattaccatgacctgccaaggagctgtagccagaatacgtaaataactcctataaattgggggtaagggcgggttgtaaatccaacaggtagatgggcaaaagatttgaacaggtaattcatgaagaaagacacccaaatagctaataaacatataaaaggacactcc

SEQ ID NO: 38722 - DNA, 334 bp, Homo sapiens
  misc_feature (1)...(334): n = a,t,c or g
agaaaatcaaaaaatgataaccaaatctcattatttcaaaagggtcatctattaatgagacacatttctgagtagagattattctcaaaaaaagagtacgtgctaaaaagggtcagatgctttttctagatttttcagatgaacagtctgttacagtataaaactctgacttcatctcatctgtcagagccagccctgtcacattcggattttccaaactcgccagcactgcagattgactgactctgcgcttataagctaagatcagcagaaattcccccaggcccctgatgggccagagccttcaagagcactnacaacttggccttttgaa

SEQ ID NO: 38723 - DNA, 337 bp, Homo sapiens
  misc_feature (1)...(337): n = a,t,c or g
ccatgatccatcacgatacttgctataactagatagaattattgtctatctagtatttttggaatctatacacttaagtgatttataagaaatatgcttcataggtatttccatgtatttcagattaccatatggaaaataccctttgaactggtatatttctaatataaatttacccaagcccattccaaagtcgacgcggccgcgaattccnnnnnnnnnnnnnnnnnnnnnnnnnnnnnnnnnnnnnnnnnnnnnnnnnnnnnnnnnnnnnnnnnnnnnnnnnnnnnnnnnnnnnnnnnnnnnnnnnnnnnnnnnnnnnnnnnnnnnnccctaa

SEQ ID NO: 38724 - DNA, 404 bp, Homo sapiens
  misc_feature (1)...(404): n = a,t,c or g
gatggcnnnnnnnnnnnnnnnnnnnnnnnnnnnnnnnnnnnnnnnnnnnnnnnnnnnnntctcgaggatccgaattccnnnnnnnnnnnnnnnnnnnnnnnnnnnnnnnnnnnnnnnnnnnnnnnnnnnnnnnnnnnnnnnnnnnnnnnnnnnnnnnnnnnnnnnnnnnnnnnnnnnnnnnnnnnnnnnnnnnnnnnnnnnnnnnnnnnnnnnnnnnnnnnnnnnnnnnnnnnnnnnnnnnnnnnnnnnnnnnntnnnnnnnnnnnnnnnnnnnnnnnnnnnnnnnnnnnnnnnnnnnnnnnnnnnnnnnnnnnnnnnnnnnnnnnnnnnnnnnnnnnnnnnnnnncgttggttatgangnagagggcgacnnacctaccnagcctggtgatagcnggntgccc

SEQ ID NO: 38725 - DNA, 395 bp, Homo sapiens
  misc_feature (1)...(395): n = a,t,c or g
agttggataggcnnnnnnnnnnnnnnnnnnnnnnnnnnnnnnnnnnnnnnnnnnnnnnnnnnnnnnnnnnnnntctcgaggatccgaattccnnnnnnnnnnnnnnnnnnnnnnnnnnnnnnnnnnnnnnnnnnnnnnnnnnnnnnnnnnnnnnnnnnnnnnnnnnnnnnnnnnnnnnnnnnnnnnnnnnnnnnnnnnnnnnnnanncntcntttangttnnannntnggccntgtancctnnnactantnaaatttttnaanggactaaaattaaggccannntttttttgggnacctaaatnntttgagaaaatatttcacagggggnttattcaaaantttggncttnttttcccaaagnggggntngnntnnagannnggntatnntttgt

SEQ ID NO: 38726 - DNA, 296 bp, Homo sapiens
ggctttgaaattagcgtgcagaagaatgacccaatccgtgtcatttgatgtattaataataggcctgaagtgggaccaggaatttgcattttacaagcactctaggtggtgatactagggtctgaaaactactgcaggcccaaggcggcccaccagccaagaatggtttacatttttaaaggattgtaaaacaaaaatagtaatatgtgacagatttcagtagtccacaaagaccgaaatatcttctatctggccttttacacaaaaggggaaaaaaatcttatttgggctccttg

SEQ ID NO: 38727 - DNA, 286 bp, Homo sapiens
  misc_feature (1)...(286): n = a,t,c or g
tttgggcctgcccttagcattaataagcttcagcactagtcacaagactttcattcactggtggggaaactttcttgttttaaaaaatgcaattcaagaaagggcatctatttcttgggggctgcggagacagcaggcttctcttcacgggtgatgggaatggtgcgctcagggccagagacctgtttccttggtccattcacagtgagggnccccttcaaatgncagggataaagtattggtgaaagggctacatcagctgggatccggtatttcctgtggaact

SEQ ID NO: 38728 - DNA, 290 bp, Homo sapiens
tgggaagaaggatgcagggacatcacacactcctgctgctccctactactggccaacaagcaggaaactgagcaggatgaaatgactacactgtctttaacatgacaatcacagagaagtgtaatgataaggaaaaatacttatgacacgatgttaaacaaaaacaaaagtaacatataagatggaattaaatttgcaaaaaagcatgccctcccccagtggattaagtagaagtacttcaaatgttaattactgtgttaaggtcctggaattataggtaatttctttcc

SEQ ID NO: 38729 - DNA, 69 bp, Homo sapiens
cttatgactgcacatacagttaatctgcagaaagaagtcatagattttttttttctttttttttttttt

SEQ ID NO: 38730 - DNA, 343 bp, Homo sapiens
  misc_feature (1)...(343): n = a,t,c or g
ggtcccttttataacagcatgaatcccatccatgagggcagagccctcatgcnnnnnnnnnnnnnnnnnnnnnnnnnnnnnnnnnnnnnnnnnnnnnnnnttaggatttcaacactttgtaggggacataaacacttagtccataacaagagccctctgcttccagcatatattgctctaatgagagttatcaggtaagggtttagcacattttaatctcaagtcagtcaaaaactcacatcaccaattatctgcaaatacagaacaattaaaatggtaattaaattactccagatattcatctanaaaactctttaggttccactatgctctactgaaaaaa

SEQ ID NO: 38731 - DNA, 334 bp, Homo sapiens
cacaggtaagttaacaaaagggcatttaggccttaggagacagttatgggtattttaattttttaacttaaaaacaatttcagtgtacagcagttgaatttgtcgtagcatttaatcattggcccaaaatatactttaattttttttattggaatgaagttatttaaaactcatggattcaattttccttgcggtaacattctcttctcacttgctttttataatcgcatccaatccttgccaacccagctagagtttagaacattttcagatggcttctatttccaggctattattggacttgcgaattcaggcacattctcctgttgtgatt

SEQ ID NO: 38732 - DNA, 333 bp, Homo sapiens
  misc_feature (1)...(333): n = a,t,c or g
gtgtcacagtgatcattctcatatatatatctttgaacatttatgggtgtattcttagtctagagccctagaagtggaattgcctggtcaaaggagatttaaattggatagtggcaattggttgtcccgtttttatttcagtctgtactcccactaatggtgttttggtgttctttcccctattcacttgcctacaacattatctattaccgatcccttatttttctgtatcttaaaattaatgttgaaatttttatcaaaataatacttggacattgtttaaaaatagcgagcataaagcttgcantgaaaaatagaggcaaactctatttt

SEQ ID NO: 38733 - DNA, 343 bp, Homo sapiens
  misc_feature (1)...(343): n = a,t,c or g
gtagtattttttaagttgctaaataggagaaaaccattttggtaattagcttcagagacaatcacttaacctcaatacttactatcaatatccttacctcagtacacttgctagattagtctccaattggattaccatcaccatgatatatcacactgaactaataactgtaatcagtatcactcaaggcacaataacaaaagaaactcaatgccatgtacctctaggaggaaacaggatggtctaccaataaagtagaacctaaaggtacaggggctttttgtacaaaagctctgatctggaaaatatttgaantatttgntgtagcatgaggccataagaa

SEQ ID NO: 38734 - DNA, 342 bp, Homo sapiens
  misc_feature (1)...(342): n = a,t,c or g
actgaatatacagtgtcttttgtattattctaacaaccttaggtttaagtcacaaaaatttctagagcagtgtttctcaaactttgaaacattaataggtgatctatggagggaagaaggtggtgagggaattggtgggtcgacgcggccgcgaattccnnnnnnnnnnnnnnnnnnnnnnnnnnnnnnnnnnnnnnnnnnnnnnnnnnnnnnnnnnnnnnnnnnnnnnnnnnnnnnnnnnnnnnnnnnnnnnnnnnnnnnnnnnnnnnnnnnnnnnnnnnnnnnnnnnnnnnnnnnnnnnnncctntgatctatangaantttttanatggctagaattta

SEQ ID NO: 38735 - DNA, 314 bp, Homo sapiens
caagtatcaggagttaggacttcagtgtatctgttggatggggacacaattcattccataacactggtgatagctatcacttgatttttttgcggcagtgtgtggtggctttgatgatctgatacaaaccttggttattcatctttctgttcttcccagaccccatttgttttccaaggaaatagcagttcactttaccacatgaagggaaatactgttaggaaagtcttgcagccttgcccgtcattaatcaaatttctccaaacttgaaaacccaagcctaacaagctttaaaattaagtctaaaggaagag

SEQ ID NO: 38736 - DNA, 316 bp, Homo sapiens
ggacaggcgacagctgttgatccagttccagtatgggaccctcccctgtgatagggcattccaggcaggggcaagtgtaaaaattaaggcctctcccaaccaacagctttcagcttcctgccagctgcacgtggctcacttagatctcaggagtaatatcttaggacagactaggcttccaccaaaaaaatcaccctatgtaccctggtacataaaatgaccagcataaatcattctcattggcccttctctccccagccagacaactgtatctaacgccccttatcctgtcttttctatatcccctagtatttca

SEQ ID NO: 38737 - DNA, 307 bp, Homo sapiens
cttggcatcatctttggagtgatttagatttcatcattcagtgactcatttttattcccagcatctagtgctttttgcatggcccaaaggggctctgtgctgctccactacagaggaaacttcaagaaatgctggtttgctacagtgttttagcttgtgagattctctgggaccttccctgctccatcatggggtcacctctaggtgggtattagggggagactggtaattggtttaacctttaaataaagaacttgataatctttagtgatccaatgaggtctgtatcaaatgttcctgccttaaa

SEQ ID NO: 38738 - DNA, 339 bp, Homo sapiens
  misc_feature (1)...(339): n = a,t,c or g
tcccctacaaatatttaaatgaacatttcgtcaactaaggataaaacgatataatatacaccagaaagtagatttgacttttctttcgagtattttttgaagaacccaattatttgtttcggnnnnnnnnnnnnnnnnnnnnnnnnnnnnnnnnnnnnnnnnnnnnnnnnnnnnnnnnnnnnnnnnnnnnnnnnnnnnnnnnnnnnnnnnnnnnnnnnnnnnnnnnnnnnnnnnnnnnnnnnnnnnnncctccaagctcccaaaacagaggttaaacagtcttgttctatttttagtttgagcttgcctaatcaatgaattttttaataaaaaaattta

SEQ ID NO: 38739 - DNA, 335 bp, Homo sapiens
ttttaaagaaatatttttacccatgccctcactcaatcacagccctgaaaaagtgtcagcattctcaaaatgatgcctaaaccctaacttctaactcctatggggtaggaggtggacgtcagaggaaaatgggatcagggatccttggcaactgaacaactaagaatactaaaaggaagagaaaaattcaaacatctctcacctgcctcataaggccatggtgaagcaatagattggaatgaagcacaatccctgtctcagggcctcccagattcctcatgcctgtagaagggacaaacaaggggactggggccaatcattttttctgcagcccc

SEQ ID NO: 38740 - DNA, 339 bp, Homo sapiens
cccattaccacttttaccttatggccactattgccccttgggcattccattccaggcacactggctccttgctattcctccaacaggccgagcaaactacttggtgctggaaagttcttccccccgattattttgaggctaattgctttatcttttttaaatcttggctcaaattgcatcttgtccacatggactaccctgaccacactatttagttttattgctagtccgacccctactttatagtttatttttttctgtagcacctatggctttctaacaaactacattatttacttacttttttattggttattggcagtttttcctggggtagaa

SEQ ID NO: 38741 - DNA, 306 bp, Homo sapiens
aacatatttaaagctaggacatatacagattaaaggcacaaaggcaaaataaatctgttgttttcagggtcctgccaataggataaaggagctgtgttgagataagactgcagaagtatgcacgggctagttagagtaaccaggtgaggacaatgagactttaagcttgttttagttggtaacagccaatgttatcaagaaaatggctttgaaaatcatcagagttggcatttgaattactatgacattacagaaattgtccttgggcagcaatttttgcaattccataattagagaattttattt

SEQ ID NO: 38742 - DNA, 301 bp, Homo sapiens
acaaaactctgtatttattaaattaattggtgaaatacccacacaatcctagcataggctaagttgcaagtttcaagtgtttgttattcttaaaccactgtctgtacatcttctccatcaaaacatgaaaaaaggacaaaaatcataataaaacattagatctactattttgttacctaagcaatagatccccactttctctgtcaataagtacatataaaaaccatagtatctaatacacaatttcttgcaagccaaggctttgggtgctctcttgctttaataatttaattttctggcc

SEQ ID NO: 38743 - DNA, 295 bp, Homo sapiens
gggagctccaggggcaccagcatcacccttagcaccatcgttgccgggagcaccgttggcccctcggggaccagcaggaccagggggaccttgcacaccacgctcgccagggaaacctctctcgcctcttgctccagaggggccaggggcgccaaggtctccaggaacaccctgttcaccaggtttgcctgcttcacctggaggaccagcaggaccagggagaccctggaatccgggggagccagcagggccttgtcacctctctcgcagcgggaccagcaaggcccaggggtcc

SEQ ID NO: 38744 - DNA, 318 bp, Homo sapiens
  misc_feature (1)...(318): n = a,t,c or g
aggcttttgtcatagacaaatctggcttcgagtctccctcctgttggttagtgctgtgaacatggccaaatcacttaccctctttgagttggctttctcatcagtaataagggtaaggctgtccacctcatcatgggatgctatacatgaaacccttagctcctttcccggtgagtggtagcagctgttagtagggatggaaagccttgagggagagaactaggtcttttttatgggattcccagtcaagcctagttcctaaagagtagtaggcatcaatgaataaatgntgaattaatctgaataagaaaaagtatc

SEQ ID NO: 38745 - DNA, 108 bp, Homo sapiens
cccctgtccaactgaacgctttagcaaattataattctgttccaaaatactatgccaccaaataacaatacttttaatgatctggctgattaccatgaaagagaatat

SEQ ID NO: 38746 - DNA, 120 bp, Homo sapiens
gggagatgggctctggaatcacatctcaatggtggatgtcacttaggtggctttacttaccatctctgggcctcgattttcttatctccaaactgaatagagagacaaacaaatgtaagg

SEQ ID NO: 38747 - DNA, 121 bp, Homo sapiens
ctgattctattaatgctacttcttgaatattattcatatctattttctttccatatccattgtcactgctttaggttcaggcttttatcatcttgaacttcaactacaatggactcctaac

SEQ ID NO: 38748 - DNA, 109 bp, Homo sapiens
gccaaagccatcctgagcaaaaaacaaaactggagaaattgcattacctgacttaaaattatactacagtcacttcctggtcttttttggcttagatcaagtgcaaagt

SEQ ID NO: 38749 - DNA, 368 bp, Homo sapiens
cttggagcctgccctcatcctcatcaccatcattaccaagcatcttgtttatttatgatgtcaagctccatgatatcagagacctcatctggttttcattgctatagccccagtacctgagcagtgtctatttagtaggtgtccagaaatatctgcagaaagaaattcttggaagaacaaatagcgcagctatcacaagtaacgtgcagaaaatctaggcaggacgtttttataacaatcgttcagaatttggtgtttccttcaatcccttaggcccatcttcaagtttcgtaagacaccccccagagtcatacaatctgctttttcttaaggtcacacctaaagaagatgctgagctgctaactggc

SEQ ID NO: 38750 - DNA, 360 bp, Homo sapiens
  misc_feature (1)...(360): n = a,t,c or g
nnnnnnnnnnnnnnnnnnnnnnnnnnnnnnnnnnnnnnnnnnnnnnnnnnnnnnnnnnnnnnnnnnnnnnnnnnnnnnnnnnnnnnnnnnnnnnnnnnnnnnnnnnnnatgacccaaccatctgttatcttcaagagacctatttcacattaagaacaaccacaggctcacagcaaaagaagtcgacgcggccgcgaattccnnnnnnnnnnnnnnnnnnnnnnnnnnnnnnnnnnnnnnnnnnnnnnnnnnnnnnnnnnnnnnnnnnnnnnnnnnnnnnnnnnnnnnnnnnnnnnnnnnnnnnnnnnnnnnnnnnnnnnnnnnnnnnnnnnnnnnnnnnnnnnnnnnnnnnnnnnnnnn

SEQ ID NO: 38751 - DNA, 344 bp, Homo sapiens
ttttctttctctagttagtatggttttgttttgtttcttatttttcatttatttattttggtttgttttgagtagtggatgttgttgaaaatgttaatgtcatttcagtgtcttggggtctcgttttcatctaatcctgtgtataatatgttaaaaaaaatttaagtgattctgtttgttatctttgaagcagatgtttgaatggtaaaacttataaagtctagctttttgtcatatgttttcaaaatttgatggtttaggataatgagttaatcaaaagtaaatgtgatctatactgtgtaagagttcaataacttttatagggaggggagggggaactgccc

SEQ ID NO: 38752 - DNA, 439 bp, Homo sapiens
  misc_feature (1)...(439): n = a,t,c or g
ccggaagaaccctattgtnnnnnnnnnnnnnnnnnnnnnnnnnnnnnnnnnnnnnnnnnnnnnnnnnnnnnnnnnnnnnnnnnnnnnnnnnnnnnnnctggaaaccattcccatcaccnnnnnnnnnnnnnnnnnnnnnnnnnnnnnnnnnnnnnnnnnnnnnnnnnnnnnnnnnnnnnnnctttaatccatcccactcccccatttgttccttcctctttttcacaatgagattatccatccatttggaaaaaaaaataaanaannananaanaaaanaaaaaagaaannanaaattnaaaaaataaaantcnaaaaaaaantnnntnncnatcancctaaaaaaannnnncnnnncgngnntttacnnacannnnttcncntgattttnnnannaccccgtttattttntttgnnngtggnnnctgnccttnatttt

SEQ ID NO: 38753 - DNA, 436 bp, Homo sapiens
  misc_feature (1)...(436): n = a,t,c or g
cagccattgagttatttcctaaatatataatcaaattcaataggagtctagttaagccttttttccctttatattttaaacatggataaaaacttggtttaaatgtaaactcatcacttaaggtctgatgttctgatgatactatcaaatggtacagactatagaaatgatggcctgggagactgtcaagtgcatccattctgctgaatgcatgacacagctcttaactgctcatttcatcatctgtaatatgtgacagaaacagcttcacatttgtaagtaacttcatttgtttacagatttatgaaaggtgaagagaagtctcttttgatatggcaaaccttcagttttcgccgacgcggccgcnaattncnnnnnnnnnnnnnnnnnnnnnnnnnnnnnnnnnnagttcacttcaactgtgcatngngcccat

SEQ ID NO: 38754 - DNA, 72 bp, Homo sapiens
gaagagggagagggcctggaaatcccctggcttgtgtcttgatctctctctctctctctttttttttttttt

SEQ ID NO: 38755 - DNA, 423 bp, Homo sapiens
  misc_feature (1)...(423): n = a,t,c or g
nnnnnnnnnnnnnnnnnnnnnnnnnnnnnnnnnnnnnnnnnnnnnnnnnnnnnnnnnnnnnnnnnnnnnnnnnnnnnnnnnnnnnnnnnnnnnnnnnnnnnnnnnnnnnnnnnnnnnnnnnnnnnnnnnnnnnnnnnnnnnnnnnnnnnnnnnnnnnnnnnnncctaagctgattnnnnnnnnnnnnnnnnnnnnnnnnnnnnnnnnnnnnnnnnnnnnnnnnnnnnnnnnnnnnnnnnnnnnnnnnnnnnnnnnnnnnnnnnnnnnnnntgaataagaaaacaaaactaccttattgttcatatggagaaaggttcagtggtatagacagaannnnnnnnnnnnnnnnnnnnnnnnnnnnnnnnnnnnnnnnnnnnnnnnnnnnnnnnnnnnnnnnnnnnnnnnnnnnnnnnnnnnnnnnna

SEQ ID NO: 38756 - DNA, 433 bp, Homo sapiens
  misc_feature (1)...(433): n = a,t,c or g
tgatactccacttgatggaacagcataatattgaaggggaaatacattcagattatgaaattcattgtgatcttaatggctgtggccagattttcacccatcgtagtaattactcacaacatgtatattaccgacataaagactattatgatgatttgtttagaagcctgaaagtatcaaatgacagactactaatgagtgataaggtatgtctaacagctgttactcaggggcatgaacatcagaccaccanngagatcatttaatgctaantctaagaaaatgtggcttaatcatagannttgaatgcccccntantnttagnaccnnangctnngactatgngncncgnaaattcctgatctaagnntnngngntcttgtannactnnttatgctncctttagnntggtctttngccccagagnttgtcg

SEQ ID NO: 38757 - DNA, 319 bp, Homo sapiens
  misc_feature (1)...(319): n = a,t,c or g
nnnnnnnnnnnnnnnnnnnnnnnnnnnnnnnnnnnnnnnnnnnnnnnnnnnnnnnnnnnnnnnnnnnnnnnntaagaggaaataactctacattcaaatttgagcagggcacttggtgacctacttagacatgacattccttggcctccctttcagcaagatgagaaaactgaggcacagagaggtgaaataaggaatgaaatattactggatgaaataattatactgatcctagccttattttaaaaggtttttgctaaagctctactagactggaacagaacaataggtggtaaatactccattcctcagtgagatg

SEQ ID NO: 38758 - DNA, 309 bp, Homo sapiens
ctcagcttccagggcagcacccacgcccatttctttcctaccagcaagcaactatgagaagacatgcccatgggcagaattcaatcccagaacaaaaatgatgcaggctttagttcacagagctgccagctcttggagaagccactctgaccagtgttttcacagaggttagaagctgcatcaacttaaggaacatcacaaacacacacatggccccacccaaggacttcactgtcaacacacacattaacgggggggaagggggaggcagcacaccaaaattcagcattatcaaaaggacttctccat

SEQ ID NO: 38759 - DNA, 312 bp, Homo sapiens
  misc_feature (1)...(312): n = a,t,c or g
tgagaagacactcctgtgcagtttgggctcaggtgaaaggtaaaattattttctgcctatgaatgctgtccttatttcttttctgcagcatcaagttcatattgatgaccatctgantatattgtgtcactggtgaccataacccaattcatactactttatnnntgacancttnatanctgaaaaaaaatggnaggagggttgantgnatgncntccgantncncttgnatcntnnncntcntgnnncattnnnaacttctagccntggtnctatnngnngcctgnngnattccnntggnncttncttttt

SEQ ID NO: 38760 - DNA, 314 bp, Homo sapiens
caacaagaccacacagaggaatgtggaagtcatcatgtgtgtgtgcgcggaggatggcaaaacgctgcctaatgcaatttgcgtgggagcaggggacaagcccatgaatgagtatcgctccgttgtgtactatcaagtcaaacagccacgctggatggaaacagtcaaggtggctgtccctattgaagacatgcagaggatccatctgcgattcatgtttcgacatcggtcatctctggaatctaaagataaaggagaaaagaactttgccatgtcctatgtgaagctgatgaaagaagatgggactactctac

SEQ ID NO: 38761 - DNA, 311 bp, Homo sapiens
  misc_feature (1)...(311): n = a,t,c or g
tttgtctgaagaatttcttttaacatttcttttggtaggggactattggtgataaattctttctttttttctaactttgaaaaaggatttcatctttgttttgaagatattttcactgggtatagaattataaattggcttttcttctttagtattttaaagatactgctccactgttttgtcacttgaattgtttgtgatgagaaatttgttggctttatttttgttcctccatatttaacatatcctttttttctctgggtgcttttaaaattttctctttatggctggcnacgcggtcgcaaattccg

SEQ ID NO: 38762 - DNA, 310 bp, Homo sapiens
ccggacagtaaatattttaagctttgtgggcaatcagatctctctgcaacctacttttccactgtagcacaaaagcagttatacataatacaaattccagtgcctgaaatacagcaggtaggaaaaaaaaatgtgtatttctcccctctacaaccttgtcctcactatttctgtataaaacataaacagaaaatataattatttccatggaagaaatgaagttaaaagtctcattaaacagtggtacaaatgaaaattacatacagccccttagatctctcaaatttctcaacatttaacccttaatatt

SEQ ID NO: 38763 - DNA, 318 bp, Homo sapiens
tcctataccacctggaaatgagtcctcacccccgacagcacaagaggatatgcaagcggcaaataagcacacagaagatactcaacatccttagccatcagagaaacacactgaaaccacaaccagagagccctacgcacctatcacgatggctacaacagaaactagtgccaacaccacctgctggagagaatatggagaaagtggatcttactgttgggtgggatgtaaaacattacggccactctgcaaaacggtttggcagtttcttaaaaaaccaagcatgtgactagcatatgacccagcattacactcttc

SEQ ID NO: 38764 - DNA, 314 bp, Homo sapiens
  misc_feature (1)...(314): n = a,t,c or g
cagaatgcatatttctgacaaaaagacttacaacaataatataaaaagaatctttagaattcatttaatgagacaaacaacccaattaaaaataggcaaaagatatgaacaaacactttataaaagtatatttgaatggacaataaacacatataaggaagtgaaacagctcaatagcaaaagaaaacccacaaatactgtgnnnnnnnnnnnnnnnnnnnnnnnnnnnnnnnnnnnnnnnnnnnnnnnnnnnnnnnnnnnnnnnnnnnnnnnnnnngaaatgctatagcatcactaatcatcacaggaaatgt

SEQ ID NO: 38765 - DNA, 204 bp, Homo sapiens
cgtgagattaattttctaaaaagaaaggaaatactgagtcccccctgctttttggtagattatcctaaagaatgacttaatcatttatgaaccacagagtaaaatgtcctagttcattaaggtgtatatgccacagacgctgaggttttaacataatctattattgtaaggtcactaggaatataagcactttttttttttttt

SEQ ID NO: 38766 - DNA, 363 bp, Homo sapiens
  misc_feature (1)...(363): n = a,t,c or g
gacagagtgagaccttgtcacaaaaaacagatatgaaaagtaaacataaataataaaaaatattaaaaaataaattaaaattaaaaatataaaaataaaaattaaaaatagacagtagaaactaggtgaatggggagggagggaggaggacaagggctagnnnnnnnnnnnnnnnnnnnnnnnnnnnnnnnnnnnnnnnnnnnnnnnnnnnnnnnnnnnnnnnnnnnnnnnnnnnnnnnnnnnnnnnnnnnnnnnnnnnnnnnnnnnnnnnnnnnnnnnnnnnnnnnnnnnnnttttttttactgatgggtttttatgattaacttatgggagaangtttgagaaattcttnntgaaatggcc

SEQ ID NO: 38767 - DNA, 345 bp, Homo sapiens
atgatatgtcattctcctacctaaaattcttccaagagacttatgcttcttgccaacatagagtaacagggatgaaacttatgctcccacctgaaacaactaaaaatctggaccaaaaaaagtatgaaaattatttctgacaaaagaaacaagacaacacaggacagtgatcaatgaaagagaaaaaataaatgaggtaaagcctacaattgtccccagtttacttactggagaatttctaagctgcagagaaaggaaggtgtcccaagcaagctcagtggttttctggagttaagataatgaagtgaggagtttaggggaggccaaggtagctacagtctccca

SEQ ID NO: 38768 - DNA, 360 bp, Homo sapiens
  misc_feature (1)...(360): n = a,t,c or g
ggtaaatacagattttagaaagggaagagaaaatattttaaaatagttctgctgattgcctgcaattctgcttaaccaatttagttccacaaacagtggatttaatcaaacctgatagaagttaataccagttggaaaaaacttatgaacaagtatgcataattctaaggatttggggctattgacaaggaaatcataaacactatttaggtagccaaccaagtaagatgatgatgccttcgtccatatcttacagnnnnnnnnnnnnnnnnnnnnnnnnnnnnnnnnnnnnnnnnnnnnnnnnnnnnnnnnnnnnnnnnnnnnnnnntcagtgaggagtcagccagcatgaattacccc

SEQ ID NO: 38769 - DNA, 315 bp, Homo sapiens
  misc_feature (1)...(315): n = a,t,c or g
gagaaactgctagagttttgcagaggtttgtgtgttgacagaaggtttctgaaaccatcaccttaagtttcagatgaagagttcattaagaaaaaatggtaatttttgnaaaatatngaaaagtnagaaaaattnnaactatacattatcaaactacctaaaatagctatattagtatttttatatattgcgttnacgcggcgngaattncanatctatgaatccgtagatnctgaananctcngnaagntnagnttctnctgngtgttngngcaccatntcnaannnnttcatttnttcgtcnnttcgnctttg

SEQ ID NO: 38770 - DNA, 330 bp, Homo sapiens
  misc_feature (1)...(330): n = a,t,c or g
aagaaattcaaaataaaaagtcatgaccttatgagaaaataatatcataatttgcttcacctacacagatatgagtattcaacaaaatcaaacccaataatcactctggaaaaatatgtgatgcaaactaaaagggaaaatggctagtgattcctaattactactggaattgcttgccagatggtttatatgaagtggaggggatatccctcatcacatctataacctaaaaacaaatgttatcctattagttacagaagaanttntaacactctagctacnnangcnncnatttaaactcanctangggagcttnatttgttcnntacc

SEQ ID NO: 38771 - DNA, 346 bp, Homo sapiens
  misc_feature (1)...(346): n = a,t,c or g
ctggcttctcatcacaccgtatttctggctctttcacagaattttcatttggcatgctggcttcttcttccccctcgtgtcgacgcggccgcgaattccnnnnnnnnnnnnnnnnnnnnnnnnnnnnnnnnnnnnnnnnnnnnnnnnnnnnnnnnnnnnnnnnnnnnnnnnnnnnnnnnnnnnnnnnnnnnnnnnnnnnnnnnnnnnnnnnnnnnnnnnnnnnnnnnnnnnnnnnnnnnnnnnnnnnnnnnnnnnnnnnnnnnnnnnnnnnnnnnnnnnnnnnnnnnnnnnnnnnnnnnnnnnnnnnnnnnnnnnnnnnnnnnnnnnnnnnnnnnnnnnnnnnnnn

SEQ ID NO: 38772 - DNA, 311 bp, Homo sapiens
  misc_feature (1)...(311): n = a,t,c or g
ctcttttatagtttcagtgctttaggattacatcttttttcttctttgctctgtattctaatttatgtcttctgaagtggagtatttaaaaggtatttttagtagagatatttgcagaaggtacatgattttgtcttttctgtttttatattagtctgtgggattaccttgtattagtgtagattaaaaagcactgaattggccagtgtggctgatgnnnnnnnnnnnnnnnnnnnnnnnnnnnnnnnnnnnnnnnnnnnnnnnnnnnnnnnnnnnnnnnnnnnaaacctcgtctcgacaaaaaattttaa

SEQ ID NO: 38773 - DNA, 315 bp, Homo sapiens
ggcaattattcaaaattatccaggataagactttatgattatggtagaactccttctcaaagtgtttgcagtctgccttgaaactctgtcaatcacattaatcacagctaagtcagctgatttcagtgcccagtgatagaaacatttttaggaagtcaaagattctaatggatcatctagtttaatagcaccctcaagcaaagggccattggtttcatgtgatactcaattttgaataatgcaaattatttcatgctgtgaaatgcattactgtagaaaagtggccaaacgaatttccaaatttctctgtgcaat

SEQ ID NO: 38774 - DNA, 322 bp, Homo sapiens
ccagacttgaccaagtaggagtcctgattgcagctgccatgctggctggatatcactgcctggggagattaataaggcctcaggcacatggcaagcagctgtggatttggtgagtgcattccctcccatttcatttagaagatggatatggaatgattcacattcacatgggatttataatacatttattgatagcttgcatcagggctaccttaactcctcaaccttctataaatatcaccttaagagacctggacgaatcagacattccacagatactaaattagactctgctttataaatctatgagtttggattggac

SEQ ID NO: 38775 - DNA, 318 bp, Homo sapiens
ttttaatacgaagtctttgaaaatacaccctgaatttcaaagactcataacacatctcaatttttattgccaatttttaaagactccgtattcgcttgtggctggctgccacatcttggacagcacagttggagtgctgcggggctgacaaaacttttatgcttctcagtgtttcaccccatgttgtctccctctcttcattcctcttagttttcagggaattttaatttgtttgggaagtctcagtcattatgaacaaaagaaataaaaatatactttgtactgggatcccaagactcagtggaggaagtaaaatca

SEQ ID NO: 38776 - DNA, 309 bp, Homo sapiens
gatttgcctggaaggaaatcttgttactgagccgaatagcaagaatgtttgtagatacaagtaaaataaaagaagggtttatttttgtcatataaggagaaggctggaggtgggtagctacttctggtgtttcagtggctctgccatttcactggcctttccctcagagttgtaagattgctgctgcagctccaggcatcacattcctattcacatgaggtaaaaaggagaagggactgccatagctcccccacacccttttttttaaaaaatttttttaggacatagtaggtttttaggatcctccca

SEQ ID NO: 38777 - DNA, 307 bp, Homo sapiens
tacatttattagattaaaagattttttaacatttatgttctaggtggtacaaaaaccagaataaataggtagtttagaaacaaatctattactctctttaggttgaagaagtgtttttgcatgacttaatgatcaaagaaagcacatcaatcatataattttttaaactgtatagcaagtcatgtactgccttaaccgtatctttataatcagttttacttatagagatttttaggatgagagggtgaccaagttgttgtgttaggtaaaatgaagtccatcttgacgtttattctgaattttaaaa

SEQ ID NO: 38778 - DNA, 332 bp, Homo sapiens
  misc_feature (1)...(332): n = a,t,c or g
cttgttaaagtatgtcaaaggcagaattcagtgtttagctgataccacaaggcagtatcctaaaattatgctgtaaaagatataaagatgctgtaagtgactcagaaacctagtgactttgtaatgcagttgattcttagaatactgtcactttaacagaataggagctaggaatgaagaaatagttattaaattactaaaatagaaaatttattgacacatgtaaagtgacatttgcttaaatattgaaaaatttgtagtactatttccttgctttataaaacattggttaccactttttttatttgtagnagtntgnttttgcctngcgg

SEQ ID NO: 38779 - DNA, 313 bp, Homo sapiens
  misc_feature (1)...(313): n = a,t,c or g
gttcttatttttattgttactgttttgtgttttatgatccctctgcttcttttgtaaaagccttcttaaatgcttttggtgaggccatctccacgtaaagataagtctcctttgctgtgaaaaagtatcacttaggcaacctacatgtcctctgctagctgtaaaggttagcattcttttactgtatttaacttctatggaaaacgttaaggccaccataattacnagagtgctggtcnacgcngncgtgaantcccnatctntgaatcgtagatnctgnananccccgcaagttcncntnacttgtgnattg

SEQ ID NO: 38780 - DNA, 347 bp, Homo sapiens
  misc_feature (1)...(347): n = a,t,c or g
gtgagacagtgctcacagcacacgagtgtgggtgcgtagacagagcaagggtgggtcctgaaaaggcctgcaggctttctcatagattagcaagagtgctggttacggaggtttctaacatttgtgaacagatcgaaactgtgttaaattgggattgcagtaatcctggaaggacagggatagagggtgaaggggaaaaaagggtatggatgtgagacttaattgctgattttcttaagacctttctccaaagtaaataaatgatgtggcacatttttgaactggcaaattctaaactctagatatgantatctctataacatatcttactccatcttcttttgcta

SEQ ID NO: 38781 - DNA, 355 bp, Homo sapiens
  misc_feature (1)...(355): n = a,t,c or g
nnnnnnnnnnnnnnnnnnnnnnnnnnnnnnnnnnnnnnnnnnnnnnnnnnnnnnnnnnnnnnnnnnnnnnnnnnnnnnnnnnnnnctggcccagcctcctgcgtttggttttttaattctgcttgtttgtagtgacattcatcaagaatgaatgactttaaaacaacaacgaaaaatctttagggatttttactcttgggcaagcatgcttctgtctctgagcattagttttctcatatatcagataaaagggtttggagtatatcaatgatattctggttgtggacagaactcttgagggttccttgaacatgatcctttggtagcattggattgctctcggcatcccacgaaa

SEQ ID NO: 38782 - DNA, 338 bp, Homo sapiens
tctggctctacagtcccagcagcagagactacatcatgctgcccccgtctcttatgatggacttggaaaactctgaggacagagcaggagaacagagaaaaacttgacaggaattctgggcatttccctgagtactaagcagcagccactgatttctgagtgttgggtaggggagctgagaaagacatggccaacatgattactacagaaactgctcaagattagaagacagataagctttctatgcagtaagagtgtacaggtatatgcgttataaattttactaaaatgtctcccatgaaacttaaaaattgtaaaacaatttttgtaattttata

SEQ ID NO: 38783 - DNA, 318 bp, Homo sapiens
gggaaatacagcaagactctctccaaaaaacaaaaaacattttaccgaaactccactccctggccaatcttagttcccagaatcatagaattttagagccaggaaaggccatggagatcacagaatttaaccccctcaattacagataaggaaacaggcaaagagatggccgggcaactcccttaaggttagccaacaagtcagtggaaagatcaactctaggtccttgacttcctgtccagttctcttttcactctatatatagactacagagcaataatgggtagggtgacttaattgaatgactgaaactatacc

SEQ ID NO: 38784 - DNA, 307 bp, Homo sapiens
gggagatgaacttttttaaactggaattttattagctgattgaacagctaaaattggtcatttaattagaagggcagtaagtctctccctctcactgaattttctcttagtacatacagaatagttgaaaagactttgctttaaaaagtagtgtttttggtttttgttacccagttaatagcttattaaatcaggaagatgatgtaatggctttagaagtcactcactcatgcatctttcttccgccctttgccaggaaacattaacttccttgtttctccatattgactctttaatttgacttact

SEQ ID NO: 38785 - DNA, 314 bp, Homo sapiens
ctttctggctgtaaccaaggtagttattatgatttaattagaagttcttattcactttattaattacagagttaattatgtctgtttaaagtgaactgtgggatttgcagagccaacctactatttgttttttttaaaaagtgaagatgttttaagtactaattagcaaaggtatgttttatatttgctcctagtacagtttccagtcttgaaagattagatttccacttgactctctaacacagacagcaaaactgtcacgcagacatgagaagcaaatgtaaaacaattgtgatagagaatgttttgtttca

SEQ ID NO: 38786 - DNA, 313 bp, Homo sapiens
  misc_feature (1)...(313): n = a,t,c or g
atcaaatggggcagcagcaggcagggaagcaaagacgggggccagtccagattatcttactcaagaacaccaccaagaagaagggaaggcctgatgttagccacagctgtgggcaggctcctgggaagtgctgattcagtctttgtctggactacatctccccacactgcgagatcaccacaggtagcttgggcttattgttggggcctgtgggaacattctcaatctttctcatcactagaagtccatcgatgatttttccgtcgacgcggccgcgaattccnnnnnnnnnnnnnnnnnnnnnnnnnnnnnn

SEQ ID NO: 38787 - DNA, 198 bp, Homo sapiens
  misc_feature (1)...(198): n = a,t,c or g
nnnnnnnnnnnnnnnnnnnnnnnnnnnnnnnnnnnnnnnnnnnnnnnnnnnnnnnnnnnnnnnnnnnnnnnnnnnnnnnnnnnnnnnnntgagtgaaatactaatgtacagattctgtctatgaatatttgacatctttttttattggtactctagagaaatagatttgatttttgtatattgatttttttttttttt

SEQ ID NO: 38788 - DNA, 304 bp, Homo sapiens
caaaattttagtcaagtctttagtttaatagggtcaggggattccatttgtctggactgcccaaggtttctggagacccatcaaaccaatgcttataatattatatattataatatacattatataacaaccactggaaggtttgtggaatttatacttgttttgtccttggaatcttgaaagtgtaatattgaggactatcctactccttgaaagacaagaagcattaggcaactgataacaaatgaaacaataaagatgaatgtggagactaatgaagttccgaagactgttcacaatagca

SEQ ID NO: 38789 - DNA, 312 bp, Homo sapiens
aaacaagatcttgcctacgcaggaataggaatgaagcaaaggttagacatggcttgggggagtttttttctttttttttctttttttggtttgattgaataacaggctagaaggaactctcaaagttcaaagtgggccttagaccctttaaaagtaggtccataaacttgtgtagaggacagtgagttctctgtttagagtaaatttaatgacaactatcatttgtaaaaggcatcataatttacaaagccctttccacatgcactgtatgtgtatataaatactatatgtgaccttcccctttaagattat

SEQ ID NO: 38790 - DNA, 312 bp, Homo sapiens
  misc_feature (1)...(312): n = a,t,c or g
ctctttgtaaaaattatttcctaccagtcatttaatgagttggccagaaaaatatatatatatatttgcaagaaccatttctgttatcttccctataatcccttttcaggtatcactttatattttgattttatgaaattttaagtcgacgcggccgcgaattccnnnnnnnnnnnnnnnnnnnnnnnnnnnnnnnnnnnnnnnnnnnnnnnnnnnnnnnnnnnnnnnnnnnnnnnnnnnnnnnnnnnnnnnnnnnnnnnnnnnnnnnnnnnnnnnnnnnnnnnnnnnnnnnnnnnnnnnnnnnnnnnnnnn

SEQ ID NO: 38791 - DNA, 339 bp, Homo sapiens
  misc_feature (1)...(339): n = a,t,c or g
atnnnnnnnnnnnnnnnnnnnnnnnnnnnnnnnnnnnnnnnnnnnnnnnnnnnnnnnnnnnnnnnnnnnnnnnnnnnnnnngtggagctaggatcagcaatggcagtcaactgtaaatggtcctgtggggtcttactggggaataaaaatgttatatggtgctggttgcatactcaataaactacctaaaaatcatggaactatatacttacagtgggtgaagtttatgatctgtaaaatacaactcaggacaaatttacatggatatttacaaattcaatatagataaatgccaattttaaaaattcattggaagtttactatgaggagtaccatggc

SEQ ID NO: 38792 - DNA, 329 bp, Homo sapiens
  misc_feature (1)...(329): n = a,t,c or g
ctgacatatgtgtgcaatttaaaagctactatttactacctaatttttaaaaactcagaaaagtttctaataatatatatactgcatttaacagcccatggaaatatagggtaatttcaaattataaaaatagaaatacaaagagtaaaactgcatttgtttatcacatgttctcacatgtgggagctaattaatgtgcacacattgtcatananagnggnggnaatagactctggagacttnaaaaggtanaagaggttttgggggggntaagggatgaaaaactacctaatgggttccatgcacactattngaggggtaggaactct

SEQ ID NO: 38793 - DNA, 354 bp, Homo sapiens
  misc_feature (1)...(354): n = a,t,c or g
gggggggggagattaaaacaacctgtagacaatatgatcgtcattattctatttcataaattttctataataaacacatatctctggtcgacgcggccgcgaattccnnnnnnnnnnnnnnnnnnnnnnnnnnnnnnnnnnnnnnnnnnnnnnnnnnnnnnnnnnnnnnnnnnnnnnnnnnnnnnnnnnnnnnnnnnnnnnnnnnnnnnnnnnnnnnnnnnnnnnnnnnnnnnnnnnnnnnnnnnnnnnnnnnnnnnnnnnnnnnnnnnnnnnnnnnnnnnnnnnnnnnnnnnnnnnnnnnnnnnnnnnnnnnnnnnnnnnnnnnnnnnnnnnnnnnnnnnnnnnnnnnnnnnn

SEQ ID NO: 38794 - DNA, 356 bp, Homo sapiens
ctgatttgtttcctagctcttccgtttcccaaaatctcaagcttaacaagaacaggtcaaagatttggttggaaggtcaacgttttcaattttaaatgcttttccagaagttgaacagaagccagttcttgcaacactgaagaaaagtctcactattgaagcagggggaaagaaaaaataactctcagggaaagctctggtcaaagatcgcctaagcagcagccagctggttctgttccacgaaggaacacacccttgctgggtaagaggctcaagtcagcctaattttgataagggctggatggtcaagttctacattgcacgcttccaacactcatgttacagcctggaactca

SEQ ID NO: 38795 - DNA, 127 bp, Homo sapiens
taaaaaaataagaaagtagatacagctctatttgccttcctttctccagtgtttactgttctagaattatatctttacaactgtattcttatgttttattagtatatatactctttttttttttttt

SEQ ID NO: 38796 - DNA, 370 bp, Homo sapiens
  misc_feature (1)...(370): n = a,t,c or g
cataaacagccaagccttctggatgcagcgggccaggatcgcaccacannnnnnnnnnnnnnnnnnnnnnnnnnnnnnnnnnnnnnnnnnnngaactgaatgtcttgggagtttaaccatgtcagtgcagtctttcttacattagtaactgaagaaaaattccttaagcatgccccttaaggaatttttgagattaggaaacaaaaaggtcgacgcggccgcgaattccnnnnnnnnnnnnnnnnnnnnnnnnnnnnnnnnnnnnnnnnnnnnnnnnnnnnnnnnnnnnnnnnnnnnnnnnnnnnnnnnnnnnnnnnnnnnnnnnnnnnnnnnnnnnnnnnnnnnnnnnnnnnnnnnnnnntntgggcat

SEQ ID NO: 38797 - DNA, 348 bp, Homo sapiens
attctttctctgtgtagtacattcccacagcttcatcacctctacttcaatgtagcagtgaagcaatgtaaatctcatccctctaataattcaatgcatttttgtgttcctaggcatcttaaggacaaaggttatattgctttagtcttcccaaaataataaaattgtatttcatattatataatatatacatacaaagagagggagagattcctaattttgctaaagccctgaatctatcttcaatttcttccctgaatgctgtgaaacacttgaaatgtactgttgacttttaatgaaaaggttacagaagtctaaagtaaaggcttatattatacattgctaagt

SEQ ID NO: 38798 - DNA, 337 bp, Homo sapiens
  misc_feature (1)...(337): n = a,t,c or g
caccggcccaatgtactgccttcatcccccaccatcctcaagggacccttgctgatcaagcccgggagactaccctttttgacctctctttggtgatcctgaccaccgtagaaatttgcagtcatgacatttcattgccctacatactgcaaaatgtcaaagtgctgagctgtggtaaattgctctggggtggaaggcgctgttactgacaacacgaagcagctagccgggtcaggaggggaaatggagcttgcagaaactaatttagccacatttaaaaattaacccctggnaanggtcccagtntgaactgacnaaggtncanggntcctgtctg

SEQ ID NO: 38799 - DNA, 415 bp, Homo sapiens
  misc_feature (1)...(415): n = a,t,c or g
ttcganggccnnnnnnnnnnnnnnnnnnnnnnnnnnnnnnnnnnnnnnnnnnnnnnnnnnnntctcgaggatccgaattccnnnnnnnnnnnnnnnnnnnnnnnnnnnnnnnnnnnnnnnnnnnnnnnnnnnnnnnnnnnnnnnnnnnnnnnnnnnnnnnnnnnnnnnnnnnnnnnnnnnnnnnnnnnnnnnnnnnnnnnnnnnnnnnnnnnnnnnnnnnnnnnnnnnnnnnnnnnnnnnnnnnnnnnnnnnnnnnnnnnnnnnnnnnnnnnnnnnnnnnnnnnnnnnnnnnnnnnnnnnnnnnnnnnnnnnnnnnnnnnnnnnnnnnnnnnnnnnnnnnnnnnnnnnnnnnnnncccnngcnacccgcgctctccacncncntcgccccccncnncctcganngcnatcncttc

SEQ ID NO: 38800 - DNA, 331 bp, Homo sapiens
  misc_feature (1)...(331): n = a,t,c or g
cttaaggggaatacaatttttagaagggcctaatctgtgtgtgcaaaactacaaaattaaggtagactgtgctagggcaatcagagagtagacaaaaatggctacagaaatgcaagtgggatattattccggctagggccattggagggggcttccaaaaaaaaaaaanaaaaaatnaaaanaancgggnatnancgttggacttnaccnttaangtnaagccctnttggnannngaaaaaaagggnaacngnaanccnttnttggaaaaannctttaaaagggnaancttggnncagggaantccnantgccaaaccttncccanaaaaa

SEQ ID NO: 38801 - DNA, 302 bp, Homo sapiens
  misc_feature (1)...(302): n = a,t,c or g
cagaaatctaattttctgatgacatcattatatctctgtagcagctggctttgagagaggattctaagttcagtgagatcagcagcaaacgaacttagaagaaacagaaatcttggaaatattctttttttaagagcttaaaatttggaaatgattttaagcaggntnttttagaaatttgancatatntntntntataaaatccnaantattcccnggggntttccggggnctttaaatggccacacnttatggtattaanggtttctgggggttctggaaggggggcccangaaaacccg

SEQ ID NO: 38802 - DNA, 294 bp, Homo sapiens
  misc_feature (1)...(294): n = a,t,c or g
ctttttaggtgttaccacccccagagagtgatttcgttggtctgtaaatcagtacagctgtcctttagcatgaagagtaaaattaaatacagaggatgcattctgagactgtcttagaatgcccaaattacccagcgcttaacttaaatgtagttnacctcntaacctacggncaaatttgcaaaaattttgaacntnnttatgggcngntaatatggtaatgacttttacccttccaaccttaagatagnaaatctaataaataattggttaagtcgacgcggcccgaaattc

SEQ ID NO: 38803 - DNA, 361 bp, Homo sapiens
  misc_feature (1)...(361): n = a,t,c or g
nnnnnnnnnnnnnnnnnnnnnnnnnnnnnnnnnnnnnnnnnnnnnnnnnnnnnnnnnnnnnnnnnnnnnnnnnnnnnnnnnnnnnnnnnnnnnnnnnnnnnnnnnnnnnnnnnnnnnnnnnnnnnnnnnnnnnnnnnnnnnnnnnnnnnnnnnnnnnnnnnnnnnnnnnnnnnnnnnnngatgcagtatctgtacagcacagtaaagtcaagtgcaataaatgaggtatggctgtatttaagtctctattactgtggttgccattcttcctatattctctgtggtttccgcttcattggtttataactctgcttgtagtaaaataaaactgtttgtgacagttttattagtgattatactg

SEQ ID NO: 38804 - DNA, 354 bp, Homo sapiens
  misc_feature (1)...(354): n = a,t,c or g
agaaacctgattgcatcatctcatgtatataagaatgagccattgctgtcactaacaactgctgccctctccatcctcttatgtaaaaaattattcctttaaatagtgatttgcagagtatggttcttctatttctttttcctttatttgttaaaatatttgagaagtaacagtagtgatctgtactttcttttttaaaatttgtatttatttattttttgagactaggttataagannnnnnnnnnnnnnnnnnnnnnnnnnnnnnnnnnnnnnnnnnnnnnnnnnnnnnnnnnnnnnnnnnnnnnnnnnnnnnnnnnnnnnnnnnnnnnnnnnnnnnnnnnnccgggattac

SEQ ID NO: 38805 - DNA, 357 bp, Homo sapiens
ttttaatcttctaatgtaggcggggcggcccctgaaggcagaggtgtgtggacacaagaagagtgcagactcttggggcacctggggaagtagtgtccgtgtcacattaaattcatttaaactcttatattttattttaatttatacaatatgaatattttttaaaactatgaattgaaaagtattacccttgagtaaaattaatgccccaagaagatgtgccatatttaccctctggcacactaccaagtacccccaggggcattacagatctctgttagaaaagtacagattacattatcctcataacatttagaagctatgagaccttggcagggaagtttcctaatggttctg

SEQ ID NO: 38806 - DNA, 465 bp, Homo sapiens
  misc_feature (1)...(465): n = a,t,c or g
gcgccccccnctttgacccccaacagacagtctnatgnnnnnnnnnnnnnnnnnnnnnnnnnnnnnnnnnnnnnnnnnnnnnnnnnnnnnnntctcgaggatccgaattccnnnnnnnnnnnnnnnnnnnnnnnnnnnnnnnnnnnnnnnnnnnnnnnnnnnnnnnnnnnnnnnnnnnnnnnnnnnnnnnnnnnnnnnnnnnnnnnnnnnnnnnnnnnnnnnnnnnnnnnnnnnnnnnnnnnnnnnnnnnnnnnnnnnnnnnnnnnnnnnnnnnnnnnnnnnnnnnnnnnnnnnnnnnnnnnnnnnnnnnnnnnnnnnnnnnnnnnnnnnnnnnnnnnnnnnnnnnnnnnnnnnnnnnnnnnnnnnnnnnnnnnnnnnnnnnntcctccttnnccctcncncanccctcctncctcccannccncccnnnnaccncnnncgccnccccgcctcnccncccccccc

SEQ ID NO: 38807 - DNA, 465 bp, Homo sapiens
  misc_feature (1)...(465): n = a,t,c or g
gtgtcccccntnaacgnctttgatacccttnnnnnnnnnnnnnnnnnnnnnnnnnnnnnnnnnnnnnnnnnnnnntctcgaggatccgaattccagatctatgaatctnnnnnnnnnnnnnnnnnnnnnnnnnnnnnnnnnnnnnnnnnnnnnnnnnnnnnnnnnnnnnnnnnnnnnnnnnnnnnnnnnnnnnnnnnnnnnnnnnnnnnnnnnnnnnnnnnnnnnnnnnnnnnnnnnnnnnnnnnnnnnnnnnnnnnnnnnnnnnnnnnnnnnnnnnnnnnnnnnnnnnnnnnnnnnnnnnnnnnnnnnnnnnnnnnnnnnnnnnnnnnnnnnnnnnnnnnnnnnnnnnnnnnnnnnnnnnnnnnnncannncacnactnncgcacccctctctcgncctnnnntatcccncgaaccacntctccnacccntcctnancctgcncttgtnctnancnccatctcc

SEQ ID NO: 38808 - DNA, 469 bp, Homo sapiens
  misc_feature (1)...(469): n = a,t,c or g
gccccccncttgaccccnntgnaccgncnnnnnnnnnnnnnnnnnnnnnnnnnnnnnnnnnnnnnnnnnnnnnnnnnnnnnnnnnnnnntctcgaggatccgaattccnnnnnnnnnnnnnnnnnnnnnnnnnnnnnnnnnnnnnnnnnnnnnnnnnnnnnnnnnnnnnnnnnnnnnnnnnnnnnnnnnnnnnnnnnnnnnnnnnnnnnnnnnnnnnnnnnnnnnnnnnnnnnnnnnnnnnnnnnnnnnnnnnnnnnnnnnnnnnnnnnnnnnnnnnnnnnnnnnnnnnnnnnnnnnnnnnnnnnnnnnnnnnnnnnnnnnnnnnnnnnnnnnnnnnnnnnnnnnnnnnnnnnnnnnnnnnnnnnnnnnnnnnnnnnnnncttganntccnctncccntcaccntnccnccncncncngcgcgcccccccccgctcnncccccncctctcntcccnnnccccncnacgc

SEQ ID NO: 38809 - DNA, 465 bp, Homo sapiens
  misc_feature (1)...(465): n = a,t,c or g
gccccgcttgacccctntggnaccgccnnnnnnnnnnnnnnnnnnnnnnnnnnnnnnnnnnnnnnnnnnnnnnnnnnnnnnnnnnnnntctcgaggatccgaattccnnnnnnnnnnnnnnnnnnnnnnnnnnnnnnnnnnnnnnnnnnnnnnnnnnnnnnnnnnnnnnnnnnnnnnnnnnnnnnnnnnnnnnnnnnnnnnnnnnnnnnnnnnnnnnnnnnnnnnnnnnnnnnnnnnnnnnnnnnnnnnnnnnnnnnnnnnnnnnnnnnnnnnnnnnnnnnnnnnnnnnnnnnnnnnnnnnnnnnnnnnnnnnnnnnnnnnnnnnnnnnnnnnnnnnnnnnnnnnnnnnnnnnnnnnnnnnnnnnnnnnnnnnnnnnnnccacnttctaagtccncncncnncctantttcnntcntttcatctctnctnnnntnncttntcncttctttnccccnngcntttcc

SEQ ID NO: 38810 - DNA, 352 bp, Homo sapiens
  misc_feature (1)...(352): n = a,t,c or g
cgcacagtgcctgcaacccactgggaccgctccatagccagggcagtcttccaaggcccagtgacctctgcgcagaaacaggccacggctgctctggagaagccagacagtcactgcaagttttatcagtgcccaggccccacagatgggaggccgctctgaatacctcccgctccaaaacctacggccctggtgctagccgtctgtcccctccattcccggggtgccttttctgataaggaaaacaaacagaaaactcacgaagatgctcacgaacactgaaaacacatatcttagaacaaagctgtggaaccactaaaaacaaattaaccatcttctaanttcagaggct

SEQ ID NO: 38811 - DNA, 463 bp, Homo sapiens
  misc_feature (1)...(463): n = a,t,c or g
gcgccccccctttgaccgcctgttgannnnnnnnnnnnnnnnnnnnnnnnnnnnnnnnnnnnnnnnnnnnnnnnnnnnnnntctcgaggatccgaattccnnnnnnnnnnnnnnnnnnnnnnnnnnnnnnnnnnnnnnnnnnnnnnnnnnnnnnnnnnnnnnnnnnnnnnnnnnnnnnnnnnnnnnnnnnnnnnnnnnnnnnnnnnnnnnnnnnnnnnnnnnnnnnnnnnnnnnnnnnnnnnnnnnnnnnnnnnnnnnnnnnnnnnnnnnnnnnnnnnnnnnnnnnnnnnnnnnnnnnnnnnnnnnnnnnnnnnnnnnnnnnnnnnnnnnnnnnnnnnnnnnnnnnnnnnnnnnnnnnnnnnnnnnnnnnnncctgccccncnntcngcccccnntcctccnnnntcctnncncctntcccnccttcctctcnngccgannccnccctccttnccntnncccc

SEQ ID NO: 38812 - DNA, 357 bp, Homo sapiens
gttggcaggcagtgtggtgtgtctagtgcccctctatgagaagactataatttaatcagaaacaaatagtaggcatggggagcaagttggaaagtgaggttattattttttttccttaaaattggtgttactgtctttagtggcttgaggctaaagaaagctgatactttatctttgccaaataattatttataagatttatttttaaataagcccaatctctcacctgcagttaagaatcatcattttctgtgactgacactaaagctcttccttatcagagcttgttctcaatctgtgatcacagtccacagtggcaaagacaactctttgattaggaaggaaaccatgtttggg

SEQ ID NO: 38813 - DNA, 451 bp, Homo sapiens
  misc_feature (1)...(451): n = a,t,c or g
tgaacgcnccnctntgacccncnnnnnnnnnnnnnnnnnnnnnnnnnnnnnnnnnnnnnnnnnnnnnntctcgaggatccgaattccnnnnnnnnnnnnnnnnnnnnnnnnnnnnnnnnnnnnnnnnnnnnnnnnnnnnnnnnnnnnnnnnnnnnnnnnnnnnnnnnnnnnnnnnnnnnnnnnnnnnnnnnnnnnnnnnnnnnnnnnnnnnnnnnnnnnnnnnnnnnnnnnnnnnnnnnnnnnnnnnnnnnnnnnnnnnnnnnnnnnnnnnnnnnnnnnnnnnnnnnnnnnnnnnnnnnnnnnnnnnnnnnnnnnnnnnnnnnnnnnnnnnnnnnnnnnnnnnnnnnnnnnnnnnnnnncgncccnccctcatctcnccacccaanccnccnctcncccncnattnnccccgccncaccccnccccctnctanccnccnnncnaggccctc

SEQ ID NO: 38814 - DNA, 459 bp, Homo sapiens
  misc_feature (1)...(459): n = a,t,c or g
gccccccnccccctttgaatccccccaagngacgnnttnnnnnnnnnnnnnnnnnnnnnnnnnnnnnnnnnnnnnnnnnnnnnnnnnnnnnnnnnnntctcgaggatccgaattccnnnnnnnnnnnnnnnnnnnnnnnnnnnnnnnnnnnnnnnnnnnnnnnnnnnnnnnnnnnnnnnnnnnnnnnnnnnnnnnnnnnnnnnnnnnnnnnnnnnnnnnnnnnnnnnnnnnnnnnnnnnnnnnnnnnnnnnnnnnnnnnnnnnnnnnnnnnnnnnnnnnnnnnnnnnnnnnnnnnnnnnnnnnnnnnnnnnnnnnnnnnnnnnnnnnnnnnnnnnnnnnnnnnnnnnnnnnnnnnnnnnnnnnnnnnnnnnnnnnnnnnnnnnnnnnnncccaccnncccncccctcncncntcgncagcccccccctcnctccanccccnctccnnncctnnancctc

SEQ ID NO: 38815 - DNA, 432 bp, Homo sapiens
  misc_feature (1)...(432): n = a,t,c or g
tgaccgncnnctttgaancccnnnnnnnnnnnnnnnnnnnnnnnnnnnnnnnnnnnnnnnnnnnnnntctcgaggatccgaattccagnnnnnnnnnnnnnnnnnnnnnnnnnnnnnnnnnnnnnnnnnnnnnnnnnnnnnnnnnnnnnnnnnnnnnnnnnnnnnnnnnnnnnnnnnnnnnnnnnnnnnnnnnnnnnnnnnnnnnnnnnnnnnnnnnnnnnnnnnnnnnnnnnnnnnnnnnnnnnnnnnnnnnnnnnnnnnnnnnnnnnnnnnnnnnnnnnnnnnnnnnnnnnnnnnnnnnnnnnnnnnnnnnnnnnnnnnnnnnnnnnnnnnnnnnnnnnnnnnnnnnnnnaaagttgnaacncacccccncgcncccnctccttnaaccccccncctcncgctncttccnccncnncggccncnacccag

SEQ ID NO: 38816 - DNA, 465 bp, Homo sapiens
  misc_feature (1)...(465): n = a,t,c or g
gccccccgcccccccntttgattccccccccagnagacgnnctnnnnnnnnnnnnnnnnnnnnnnnnnnnnnnnnnnnnnnnnnnnnnnnnnnnnnnnnnnnntctcgaggatccgaattccnnnnnnnnnnnnnnnnnnnnnnnnnnnnnnnnnnnnnnnnnnnnnnnnnnnnnnnnnnnnnnnnnnnnnnnnnnnnnnnnnnnnnnnnnnnnnnnnnnnnnnnnnnnnnnnnnnnnnnnnnnnnnnnnnnnnnnnnnnnnnnnnnnnnnnnnnnnnnnnnnnnnnnnnnnnnnnnnnnnnnnnnnnnnnnnnnnnnnnnnnnnnnnnnnnnnnnnnnnnnnnnnnnnnnnnnnnnnnnnnnnnnnnnnnnnnnnnnnnnnnnnnnnnnnngctctccnccancncncctctccccgtcctccngcccccnancnctcnccgcnnnancnncacacccnccccc

SEQ ID NO: 38817 - DNA, 435 bp, Homo sapiens
  misc_feature (1)...(435): n = a,t,c or g
tgaacgcnctgactttganaacccnnnnnnnnnnnnnnnnnnnnnnnnnnnnnnnnnnnnnnnnnnnnnntctcgaggatccgaattccnnnnnnnnnnnnnnnnnnnnnnnnnnnnnnnnnnnnnnnnnnnnnnnnnnnnnnnnnnnnnnnnnnnnnnnnnnnnnnnnnnnnnnnnnnnnnnnnnnnnnnnnnnnnnnnnnnnnnnnnnnnnnnnnnnnnnnnnnnnnnnnnnnnnnnnnnnnnnnnnnnnnnnnnnnnnnnnnnnnnnnnnnnnnnnnnnnnnnnnnnnnnnnnnnnnnnnnnnnnnnnnnnnnnnnnnnnnnnnnnnnnnnnnnnnnnnnnnnnnnnnnnnnnnnnggacnacnactcccnntcccnccncctcanncgccnccccacncnaccacgcccccnctnctnnaccanngnccca

SEQ ID NO: 38818 - DNA, 428 bp, Homo sapiens
  misc_feature (1)...(428): n = a,t,c or g
gacgcgcgannnnnnnnnnnnnnnnnnnnnnnnnnnnnnnnnnnnnnnnnnnnnnnnnnnnnnnnnntctcgaggatccgaattcgcggccgcgaattccnnnnnnnnnnnnnnnnnnnnnnnnnnnnnnnnnnnnnnnnnnnnnnnnnnnnnnnnnnnnnnnnnnnnnnnnnnnnnnnnnnnnnnnnnnnnnnnnnnnnnnnnnnnnnnnnnnnnnnnnnnnnnnnnnnnnnnnnnnnnnnnnnnnnnnnnnnnnnnnnnnnnnnnnnnnnnnnnnnnnnnnnnnnnnnnnnnnnnnnnnnnnnnnnnnnnnnnnnnnnnnnnnnnnnnnnnnnnnnnnnnnnnnnnnnnnnnnnnnnnnnnnnnaggttgnncnnctcnccctcccagaccctnctgcnccncncncncnngccccgcccgccctc

SEQ ID NO: 38819 - DNA, 446 bp, Homo sapiens
  misc_feature (1)...(446): n = a,t,c or g
ttcgacccccccctactgnaccgnnctnnnnnnnnnnnnnnnnnnnnnnnnnnnnnnnnnnnnnnnnnnnnnnnnnnnnnnnnnnnntctcgaggatccgaattccnnnnnnnnnnnnnnnnnnnnnnnnnnnnnnnnnnnnnnnnnnnnnnnnnnnnnnnnnnnnnnnnnnnnnnnnnnnnnnnnnnnnnnnnnnnnnnnnnnnnnnnnnnnnnnnnnnnnnnnnnnnnnnnnnnnnnnnnnnnnnnnnnnnnnnnnnnnnnnnnnnnnnnnnnnnnnnnnnnnnnnnnnnnnnnnnnnnnnnnnnnnnnnnnnnnnnnnnnnnnnnnnnnnnnnnnnnnnnnnnnnnnnnnnnnnnnnnnnnnnnnnnnnnnnnggcccatcngnctcctngaccccnctnccnnccccnccancccnacccccgccaccccaccnctgccccg

SEQ ID NO: 38820 - DNA, 439 bp, Homo sapiens
  misc_feature (1)...(439): n = a,t,c or g
cccccccantcnacgnnctnnnnnnnnnnnnnnnnnnnnnnnnnnnnnnnnnnnnnnnnnnnnnnnnnnnnnnnnnnnntctcgaggatccgaattccagatctatgaatcnnnnnnnnnnnnnnnnnnnnnnnnnnnnnnnnnnnnnnnnnnnnnnnnnnnnnnnnnnnnnnnnnnnnnnnnnnnnnnnnnnnnnnnnnnnnnnnnnnnnnnnnnnnnnnnnnnnnnnnnnnnnnnnnnnnnnnnnnnnnnnnnnnnnnnnnnnnnnnnnnnnnnnnnnnnnnnnnnnnnnnnnnnnnnnnnnnnnnnnnnnnnnnnnnnnnnnnnnnnnnnnnnnnnnnnnnnnnnnnnnnnnnnnnnnnnnnnnnnnnccnccccgannncntntcnantccttacncacnaactncacnnaccccgcccnccccncccccnctcc

SEQ ID NO: 38821 - DNA, 321 bp, Homo sapiens
  misc_feature (1)...(321): n = a,t,c or g
ggggactatggcttgttcagaatgtgtccctcctaccttctcagggtcttgttctagtaggtcctcagcaagcataagtcctggtgacagttatttaaaatagcttttggtgactctcaccgcctccttcctccctatggtgcgtccccttgaacttgtccatgatgttaaaaagagatggctggatgcagaggatggtggctgctgcgctctgattaccactcgtgcgtcttggagtccaggacagggcccatgaggcaggaggctgttttgggtagattccttccttgcaggaaagggaatgagagggcttatnattgt

SEQ ID NO: 38822 - DNA, 418 bp, Homo sapiens
  misc_feature (1)...(418): n = a,t,c or g
tgaacgcnctnactnnnnnnnnnnnnnnnnnnnnnnnnnnnnnnnnnnnnnnnnnnnnnnnnnnnnnnnntctcgaggatccgaattccnnnnnnnnnnnnnnnnnnnnnnnnnnnnnnnnnnnnnnnnnnnnnnnnnnnnnnnnnnnnnnnnnnnnnnnnnnnnnnnnnnnnnnnnnnnnnnnnnnnnnnnnnnnnnnnnnnnnnnnnnnnnnnnnnnnnnnnnnnnnnnnnnnnnnnnnnnnnnnnnnnnnnnnnnnnnnnnnnnnnnnnnnnnnnnnnnnnnnnnnnnnnnnnnnnnnnnnnnnnnnnnnnnnnnnnnnnnnnnnnnnnnnnnnnnnnnnnnnnnnnnnnnnnnnngccccccancncncncccccctccctcncnacnacccctcnancngnccnccacctcca

SEQ ID NO: 38823 - DNA, 445 bp, Homo sapiens
  misc_feature (1)...(445): n = a,t,c or g
ccccccccctatncaaccgnnctnnnnnnnnnnnnnnnnnnnnnnnnnnnnnnnnnnnnnnnnnnnnnnnnnnnnnnnnnnnntctcgaggatccgaattccnnnnnnnnnnnnnnnnnnnnnnnnnnnnnnnnnnnnnnnnnnnnnnnnnnnnnnnnnnnnnnnnnnnnnnnnnnnnnnnnnnnnnnnnnnnnnnnnnnnnnnnnnnnnnnnnnnnnnnnnnnnnnnnnnnnnnnnnnnnnnnnnnnnnnnnnnnnnnnnnnnnnnnnnnnnnnnnnnnnnnnnnnnnnnnnnnnnnnnnnnnnnnnnnnnnnnnnnnnnnnnnnnnnnnnnnnnnnnnnnnnnnnnnnnnnnnnnnnnnnnnnnnnnnnngncccnnccncacccaccccctnccccttcncntnccccccccntntcnccacnaccccacacnnccccaccg

SEQ ID NO: 38824 - DNA, 333 bp, Homo sapiens
  misc_feature (1)...(333): n = a,t,c or g
ctcatttataagtttataggctaaacattgggcactcatggacataaatatactgaggacttactagaagaggagggaaggagggggcaggggttgaaaaactattaggtagtctgcttagtacttgggtgacgggattgcttgtaccccaaacctcgccattatgcaatatacccaggtaacaaacccgcacatatacatcctcaagctaaaatanaantttanaangntagntgaanaattgtgnaatgnnnnnnnnnnnnnnnnnnnnnnnnnnnnnnnnnnnnnnnnnnnnnnnnnnattggncggatcgattgnacgtcacgagtttc

SEQ ID NO: 38825 - DNA, 339 bp, Homo sapiens
  misc_feature (1)...(339): n = a,t,c or g
ttatccttgaactataattattttaaccattgttctgcacacataaatatgtttcattccctagctcatgtccagaacaatgaagtactaaaacatcatgtttaagttaatgtttgctgaatagcgagaagccagaaaaaaaaaaaanaacccagnncaaatngnccntgantnaannggggtttttcatgtncaantactntccttaatcattttttggnaaangcaggaancaaanggncntnnggaaaangntaanccncatntgntgaccctgccgngcanaactgggggttttcncctgtttncaacanggaacnntttgttnanaactgttta

SEQ ID NO: 38826 - DNA, 430 bp, Homo sapiens
  misc_feature (1)...(430): n = a,t,c or g
gaacgcnctnacnnnnnnnnnnnnnnnnnnnnnnnnnnnnnnnnnnnnnnnnnnnnnnnnnnnnnnnnntctcgaggatccgaattccnnnnnnnnnnnnnnnnnnnnnnnnnnnnnnnnnnnnnnnnnnnnnnnnnnnnnnnnnnnnnnnnnnnnnnnnnnnnnnnnnnnnnnnnnnnnnnnnnnnnnnnnnnnnnnnnnnnnnnnnnnnnnnnnnnnnnnnnnnnnnnnnnnnnnnnnnnnnnnnnnnnnnnnnnnnnnnnnnnnnnnnnnnnnnnnnnnnnnnnnnnnnnnnnnnnnnnnnnnnnnnnnnnnnnnnnnnnnnnnnnnnnnnnnnnnnnnnnnnnnnnnnnnaggttgnncgccccccaacnananccgngccnccgcncgcncaccngnnccccaccccccgnnctcanncccctcc

SEQ ID NO: 38827 - DNA, 342 bp, Homo sapiens
atcttctttacaaagtcattaatgaccagatgaaaacttggaaggcatgcctgtcatacttgcaagtaatacagagttacccagatagcttattttctggcaaaacactcaggatttacaaagggaagctaaactttggtggtgggttttaatgtgctattcattattctcaagcaaatcatgtattcgtttcacttaattctcaaaataactgcgattttggtcttatctcctttgtggagataggagaattaaggtcccaagaggatcacctagccagtaccagattgggttatttatttaggttgaaagccatgttgaaagttctcatcagggaagaaa

SEQ ID NO: 38828 - DNA, 341 bp, Homo sapiens
  misc_feature (1)...(341): n = a,t,c or g
atgagtttatgctttgtgaaatgggtttaaaatggagaaatgcattcatatcgagtggattcatcacttcactacagttaacagtcacagagctgttgtaattattaaattatacaaagtaggccaaatggttaaatagtaaacactcagcaaatatgctatcactgtttataaaagggcgtctcacttgattccacagcattggaaaactaaatcctagagattaaattctcacacaactttttttttttgccttacnggactactaaaantaatagcttacnttngggctattaaatnttanctntngttnaattngaatnggccnttcaattcntacc

SEQ ID NO: 38829 - DNA, 335 bp, Homo sapiens
  misc_feature (1)...(335): n = a,t,c or g
atttagcaatcacttatgggatgctatcattgcttcatctatctttgcccagaaactagggaagcatttgagaagacatcactagcaaaatcaggttttttgattttgtttttgttttgttttaaaaggtcattcgaagaaagcatcctgcctacttaacatttctttatcacagaaatagcatgtgaatctcagtctctttatgttacctctcatgactttcctcaaacaccaactgctcctacacatttcctactaggcttaagtgtatccttcagctttggtcttggaaaagtatcttgnaataacactcttgcctccccacagtgttgttt

SEQ ID NO: 38830 - DNA, 318 bp, Homo sapiens
tggacacaagatagtgatgaaaatgaaactcctgtagatcttcttttctctcttggtcgtcgtcgttctctgattgatttaggttgtgatttatcttctccttctttctcctcttctcttttttctccctctctttcattttcttttgttattcctctggagtaagcagaagttatgcctacaagactatttggcctgtttagttgacttgaagcatacagtgaactgctcatagtagaaagtgaagaggatggagtggttgaacttgaagttgatactggcctataacgctggtaagtctcatcatacgttctggag

SEQ ID NO: 38831 - DNA, 356 bp, Homo sapiens
  misc_feature (1)...(356): n = a,t,c or g
ctccgtctcactctgtcgtgaagatggagcacattctagtagtaaatcctagtacacagacacaaaagaatctcagacttgagaaaataccactaaacataaggtcgacgcggtcgcgaattccnnnnnnnnnnnnnnnnnnnnnnnnnnnnnnnnnnnnnnnnnnnnnnnnnnnnnnnnnnnnnnnnnnnnnnnnnnnnnnnnnnnnnnnnnnnnnnnnnnnnnnnnnnnnnnnnnnnnnnnnnnnnnnnnnnnnnnnnnnnnnnnnnnnnnnnnnnnnnnnnnnnnnnnnnnnnnnnnnnnnnnnnnnnnnnnnnnnnnnnnnnnnnnnnnnnnnntgnnaatatnttacgagg

SEQ ID NO: 38832 - DNA, 352 bp, Homo sapiens
gccgggcggtcctgccgagctgtgagggcaacggaggggaaataaaagggaacggctccgaatctgccccagcggccgctgcgagacctcggcgccgacatcgcgacagcgaagcgctttgcacgccaggaaggtcccctctatgtgctgctgagccggtcctggacgcgacgagcccgccctcggtcttcggagcagaaatcgcaaaaacggaaggactggaaatggcagaccatatgatggccatgaaccacgggcgcttccccgacggcaccaatgggctgcaccatcaccctgccaccgcatgggcatggggcagttcccgagcccccatcaccaccagcagcagcag

SEQ ID NO: 38833 - DNA, 341 bp, Homo sapiens
cggaattcttcgatggactggtgcaggcctcggtggctgcccagctgcgcctccacgctgggcaggtccacaccccactcagcgccatccacacggtgctggttctcctccacccaggccagcaggtcctgcaggtagcgcagagtggagtcctccagctcggggcgcctctgcacactctgcagagtcacctgggccacctgggttgcaggggccgccacgcctgccttcagccgtaggttgtactcggtgcggatggctaccaggcgctcgtgcagacggtacaccctgcggtacatctgctcgccctgcgggtgccgtccatccgtcgacgcggccgc

SEQ ID NO: 38834 - DNA, 350 bp, Homo sapiens
  misc_feature (1)...(350): n = a,t,c or g
ctgaaatgcacttagagtttttagagagaaattataatttcttgagatatcaatcgcaaataataacaaacaaaatgttgtgtattctctttttttctgtcttctgatcaattcttaatctacaataatagattttttgcattattatttcaacattttttatgtgcctctattactaagcctagcgtggttctatagtctcattgtggtaactgggtctgtgatgaaaaaaaatggatgcgttttgatagtttgttttgtttattttatttgcacataatcggccttgtttttttatacccagagtacattgaaatgcataaattatttgggataaattatttanaacc

SEQ ID NO: 38835 - DNA, 264 bp, Homo sapiens
tctcccttccccaacacaagcttcatttcccactcttcagtcatttttgctgttatgtagaaagtaaaacaaatgactggatttgaccttatttcctttttagtctatagagtaatacttgcttaaaataataataataataatgaagccaaacattacagaaatagagtaacccaaaaagaactggagttttgatttctgataaaatatggctaagaatcagaagcaaagttatgtcttgaaactattctttttttttttttt

SEQ ID NO: 38836 - DNA, 331 bp, Homo sapiens
ataggcgtgagccaccgcacctggcctgagtactattctttatcaggactgggctaggtactttcacatgcattattttagttaatcctcacatcgggtctctcactttatagctttttgtacaaggcaatcttggttcagtgccctgtgattgatactgatagtcttgttggcagttgtgatcttctctgctgagggagatcagagaagctttgtagaggaggtagcagcttagtgggtcttcagatacttcaggtagaaatataagggaatttgtgggaagtattccagtcataggaaatgttatgagtaaaggtctggagtgggaaaa

SEQ ID NO: 38837 - DNA, 334 bp, Homo sapiens
gtttagtcactaagcaaaaatataataagatgcttgaagtaaagtttgaaaatgagggaggaatctctttaaaaggataactaccaggtgaacattggaagcctggcctccgttccagaccataagatcctttttttgtctttcaacttggagccaacactaaattcatgtccagtgcacttgtattcactaatggaatgtcctgtttcttggtggaagtttacacactgggctttagaaacatgtagaggcatttgtagattcccgctaactgaataggtggcaagtgttttaggcaaaggtgagtttgttggaaattcacttctagggtatt

SEQ ID NO: 38838 - DNA, 338 bp, Homo sapiens
  misc_feature (1)...(338): n = a,t,c or g
gacaaatcagccctgggaaatggatactcttttctggtacagaaaaggccggggagaaatgagacaagagctcttcgtcgacgcggccgcgaattccnnnnnnnnnnnnnnnnnnnnnnnnnnnnnnnnnnnnnnnnnnnnnnnnnnnnnnnnnnnnnnnnnnnnnnnnnnnnnnnnnnnnnnnnnnnnnnnnnnnnnnnnnnnnnnnnnnnnnnnnnnnnnnnnnnnnnnnnnnnnnnnnnnnnnnnnnnnnnnnnnnnnnnnnnnnnnnnnnnnnnnnnnnnnnnnnnnnnnnnnnnnnnnnnnnnnnnnnnnnntatnttacgagggcttattca

SEQ ID NO: 38839 - DNA, 341 bp, Homo sapiens
caggccttttatttgctccagaacttggctactgtgtggtctgagggtgccatgctttcccaaagcccccgagggacactccacccagggggtgccagatctctgtgtgtagccagactgcagtgtccccccaggctgccttagtccagaaggccagctgcctgccaccggtgcccgggacgagcatatcccctgaagctggagaatggtgtccacctttgcatggcagcttctcccaaggcattggctaaaatattgcacttgtaaatcaggaaaactgatgaggcaagggtttcctattacaggacgacgtgccaagcatccactactattttaataaa

SEQ ID NO: 38840 - DNA, 329 bp, Homo sapiens
gccagaggagacagggcccttgggaaatgacacttagagcctggccctgggtaagggttggtgtgggccaatggaggaaatgcggtggaagggcccccacctcaccccacaccatgaaggtggccaccatacaccccgtcttggcctggcccctgaggaagctgtggcccagtgtgcccgccctggagcctgggaggctccctcacctagttctgctacttcctcctctccacaaagagccagctccaggatggacacactcagccagtgataatataaaaatacaacgcttcaatgcttccatcaagtaaaacgggaagttccagaaa

SEQ ID NO: 38841 - DNA, 334 bp, Homo sapiens
  misc_feature (1)...(334): n = a,t,c or g
cacacatctagcctgattggcaaattggttttttttatacttcaaattctactcatgattggactgtttctcaccattccactgctacacctctgatccaagcaaccatcagctctgacctggcatactacaacagcctcctaacctgttcttcctgcttctgacctcactacctccctcgcaggtctattatccacagaccctttaaaagtcatagtcctgnnnnnnnnnnnnnnnnnnnnnnnnnnnnnnnnnnnnnnnnnnnnnnnnnnnnnnnnnnnnnnnnnnnnnnnnnnnnnnnnnnnnnnnnnnnnnnnnnnnnnnnnnnnnnnnn

SEQ ID NO: 38842 - DNA, 275 bp, Homo sapiens
  misc_feature (1)...(275): n = a,t,c or g
tcagaacccttgcacattttttttcttctgttttccttctttcttcttctcttttttcttctctccctccttcccttcctcttctctttttctcttctcttcccttctttctgacaggatctctgtcacctaggctgatggaannaatnnncagaagncnannatnntngcncngctttctggaggacnnnanaccccngnnaacngngannngnnnggctganccgactnacnngaatgnttgnnctgngnntnnnnncnngnncccctggaca

SEQ ID NO: 38843 - DNA, 335 bp, Homo sapiens
  misc_feature (1)...(335): n = a,t,c or g
ctcgattggttctactgtgggtctggactgatctccatgtcctgttgtggggcttttacagcctttggattgtgaaaactgctgagagagacttgcaatccagtcacataagtataataaagaaatattggtcctcatggaagaagagcaagatttaccagagcaaccagtgaaaaaagccaagatgcaggaatcaggagagcaaactataagtcatgtaagcaatccagatgtcagtgatcagaagcctgaaacatcaagccttgcttcaaaccttcccatgtcagaggaaattatgacatgcacccgttacatccctcggtcatncaatgatt

SEQ ID NO: 38844 - DNA, 335 bp, Homo sapiens
catagattaatcatataacatttgtgaatgattttttagcccttggtccatttttgtacaagccgtcaatgaaaagtaatgaagaattagttcaagtatttcaagaactactcatggaaatcagcattatgttatgatattgcctgctaatgcttgttcaacacaacattattgtttatttaagttcacattattttattacaaaaagtagcctgcaactactctattgatgatttgattaagaattaaatcacatttcttattaaagatgttgaggaaagtagacttggggtttcggctctgaatgaatgatagaattatttgtatagggacac

SEQ ID NO: 38845 - DNA, 338 bp, Homo sapiens
  misc_feature (1)...(338): n = a,t,c or g
nnnnnnnnnnnnnnnnnnnnnnnnnnnnnnnnnnnnnnnnnnnnnnnnnnnnnnnnnnnnnnnnnnnnnnnnnnnnnnnnnnnnnnnnnnnnnnnnnnnnnnnnnnnnnnnnnnnnnnnnnnnnnnaaggctaattattattaagagctgttttggtagagtgatggggtacaaaatctatggaatattcaacaatagtgagtggatgggtataaaataaaggtagtggaggcaactctttccttggagttggtcttagttcatctgtaatctttttttttttttnggggnaancnaaantttnntnnttnncnattttnntntcccgggacctttgg

SEQ ID NO: 38846 - DNA, 337 bp, Homo sapiens
gtgagtccttctagtgactctgaacatagggggatcttggggactctgacacacagcccccatttgtgtaatcttgataattaggctctccactgccttgcaataaaacaaatgctcagtgttttaagtgctcaattttttaaaaaagaacacaaatatctcatcttcttaactaagtgttatgcttctacaacttattttctggtcttactttgtaatccttttcagtaaaggattaaacccactaggtgagtggatctcaactaaaaagggcacataaaaacaacaagtttctcaaattacaaatctgccttaccacataaaacaaaaaaaaaaa

SEQ ID NO: 38847 - DNA, 321 bp, Homo sapiens
  misc_feature (1)...(321): n = a,t,c or g
tagcaatcaacttcctacttactcttatttgttggaatttaagcagatcctttatttatactaattaccttttcacaaagaggtagttggtatttttatagtggtggtgtttggtaagttgggatttttttctttaatgtaattactggtgcctaacccaggtgcctggaattgcacatgtgcttaataaaggtgcacatgtgcttaataaaggtatacatgtttaaaaattagtgaatgaattaatgaaatcaatttccccacacatttccaagctccctacaaaaaaaaaaaanccanccnnntnttcaacctttttta

SEQ ID NO: 38848 - DNA, 326 bp, Homo sapiens
  misc_feature (1)...(326): n = a,t,c or g
gtgatcctaaccaaaggagagaagggatggagtttatctttagcactgtcactgctagctactagaatctacccaagtgattgaacagtagcttgttggtaaattggatgtcaggaagtaggtagaacagnnnnnnnnnnnnnnnnnnnnnnnnnnnnnnnnnnnnnnnnnnnnnnnnnnnnnnnnnnnnnnnnnnnnnnnnnnnnnnnnnnnnnnnnnnnnnnnnnnnnnnnnnnnnnnnnnnnnnnnnnnnnnnnnnnnnnnnnnnnnnnnnnnnnnnnnnnnnnnnnnnnnnnnnnnnnnnnnnnnnnnnnnnnnnnnnnnnn

SEQ ID NO: 38849 - DNA, 325 bp, Homo sapiens
  misc_feature (1)...(325): n = a,t,c or g
nnnnnnnnnnnnnnnnnnnnnnnnnnnnnnnnnnnnnnnnnnnnnnnnnnnnnnnnnnnnnnnnnnnnnnnnnnnnnnnnnnnnnnnnnnnnnnnnnnnnnnnnnnnnnnnnnnnnnnnnnnnnnnnaattttttcttaatatcttaatattttatgtcattttgtgtacaaaatgaaattctggcttttaataatagtacattcttacttgtttcatcctatagaatacatacaactgtttcaaaattatcataccaaaattattattagcaatattaaaatagctatgctagctttcttttggttattggtagcatgttatgg

SEQ ID NO: 38850 - DNA, 321 bp, Homo sapiens
tctccttaaatatagatccctgccggacgctcactggtggccatctcttgatcactcaagagacttttatgtgttctctatacatatagtaatcactccactcctggaaagatgtggtttttactcacaaatattatgcccaccacaactgatctaaaggacaagagattttactcctcttagaattcatacatacaacttttaaaatagacttttcccttcactcggctgtgaagaatctggctgtctacatttctccattctcaaatgtactcatcaattcctatactaggcagacttggtttagggatagggggtgtc

SEQ ID NO: 38851 - DNA, 333 bp, Homo sapiens
  misc_feature (1)...(333): n = a,t,c or g
gcctggcacagtgccgtgcacctgcagtctcagctactaggttggggtggatggcttgagcccagttttgggctgtagtgcactatgccaatcggctgtccacactaagttcggcattgatatggtgacctcctgggagttagggaccatcaggttgcagtgagccgagatananccnttgcgtctacgcggncgctaattcnatatntatgantcntatatactgantnaccccttngttcacttggnnnnnnnnnnnnnnnnnnnnnnnnnnnnnnnnnnnnnnnnnnnnnnnnnnnnnnnnnnnnnnnnnnnnnnnnnnnnnnnnnnnnn

SEQ ID NO: 38852 - DNA, 319 bp, Homo sapiens
gtttatcaagtgtatatttctttgtactcttccctgtatgtttatccttcaataaaaagttaatttaaaacattgcttcttcaagatcacagtttacaatatgctgagtttcatgagacagatgcaaaatgagaagcataagtactcaagaagtatattaagatactaattcttggagtatcaacttgagctgaactacacaaatactgccttttatttgcccccatccatcattttcaccattttgcgtgtttgatatatgtcagtaacatgggaaaaggcccatattatcaactcttttatggatctagtcagtacg

SEQ ID NO: 38853 - DNA, 418 bp, Homo sapiens
  misc_feature (1)...(418): n = a,t,c or g
tttganttgnnnnnnnnnnnnnnnnnnnnnnnnnnnnnnnnnnnnnnnnnnnnnnnnnnnnnnnnnnnnnnnntctcgaggatccgaattccnnnnnnnnnnnnnnnnnnnnnnnnnnnnnnnnnnnnnnnnnnnnnnnnnnnnnnnnnnnnnnnnnnnnnnnnnnnnnnnnnnnnnnnnnnnnnnnnnnnnnnnnnnnnnnnnnnnnnnnnnnnnnnnnnnnnnnnnnnnnnnnnnnnnnnnnnnnnnnnnnnnnnnnnnnnnnnnnnnnnnnnnnnnnnnnnnnnnnnnnnnnnnnnnnnnnnnnnnnnnnnnnnnnnnnnnnnnnnnnnnnnnnnnnnnnnnnnnnnnnnnnnnnnnnnnnnnncagatnngtttggactncnnanngataacttggggatcnnngannctgggc

SEQ ID NO: 38854 - DNA, 294 bp, Homo sapiens
  misc_feature (1)...(294): n = a,t,c or g
tttcaacatgatccagcagttctgctgcttgatatttacccaaggagttgaaaactttttttttttttnannttnngactttnttnnaagggatgggnattngngttanctttgnaggggggggggggggtntttnaaaaanggannttttngaaaatantncnggggggnntttccttccccntaggnaaaanngnngttggccccancnttgccnnnncngaaccanaanaaattttaaaaanggnnttnaannccttngggaaacnggacangngaanaanttaaaaaatt

SEQ ID NO: 38855 - DNA, 329 bp, Homo sapiens
tctttgattatttcaaataattggtttacttgaaatgagattcgaataggattcattttattttgttgtgatctctgttaggtctctttaaatctttcttattaaaaaaatttttgttttttgccactccctaactcataatttccttctcaaactaatcttcgatttgtcctcttatacaattccacaaagcagattaagactcttcccctcaagaagctaaaaatttaggggaagagaactttacttagttagggcatggggaatcagggataccacctaataaggaaatagaagtacttaatatatttttaaaatcatattttaaa

SEQ ID NO: 38856 - DNA, 320 bp, Homo sapiens
  misc_feature (1)...(320): n = a,t,c or g
ctctgttcataaggctgcagtagaatgtgacatgaacacaaagtagctacacacaaacccatgctaaaacttcgttaactagaacttttaaggaattggaattttccacaggtggaaagaactcctgctgcaaggtaaacctcaagttcatatgaaattttaaaagcattaaagatggtcagaaacacaaccaagtagctataaaaatcaagtccnnnnnnnnnnnnnnnnnnnnnnnnnnnnnnnnnnnnnnnnnnnnnnnnnnnnnnnnnnnnnnnnnnnnnnnnnnnnnnnnnnnnnnnnnnnnnnnnnnnnnnnnn

SEQ ID NO: 38857 - DNA, 432 bp, Homo sapiens
  misc_feature (1)...(432): n = a,t,c or g
tttgannnngttggaagggnnnnnnnnnnnnnnnnnnnnnnnnnnnnnnnnnnnnnnnnnnnnnnnnnnnnnnnnnnnnnnnntctcgaggatccgaattccnnnnnnnnnnnnnnnnnnnnnnnnnnnnnnnnnnnnnnnnnnnnnnnnnnnnnnnnnnnnnnnnnnnnnnnnnnnnnnnnnnnnnnnnnnnnnnnnnnnnnnnnnnnnnnnnnnnnnnnnnnnnnnnnnnnnnnnnnnnnnnnnnnnnnnnnnnnnnnnnnnnnnnnnnnnnnnnnnnnnnnnnnnnnnnnnnnnnnnnnnnnnnnnnnnnnnnnnnnnnnnnnnnnnnnnnnnnnnnnnnnnnnnnnnnnnnnnnnnnnnnnnnnnngnttggnnactntggnccngccttctttgangacttcnnnccacaagggccacttggtggtg

SEQ ID NO: 38858 - DNA, 165 bp, Homo sapiens
cccatccaacccccagaagcagacattcctttgctgtgggccatggacaggcagaaggaagcgcctcctcatggcagaggcctacccaggagaaacccaagggaaggcactgcctggccagcccctctgccaaagccattttcttttttcctttttttttttttt

SEQ ID NO: 38859 - DNA, 432 bp, Homo sapiens
  misc_feature (1)...(432): n = a,t,c or g
ttganncctttgaannncnnnnnnnnnnnnnnnnnnnnnnnnnnnnnnnnnnnnnnnnnnnnnnnnnnnnnnnnnnnnnnnntctcgaggatccgaattccnnnnnnnnnnnnnnnnnnnnnnnnnnnnnnnnnnnnnnnnnnnnnnnnnnnnnnnnnnnnnnnnnnnnnnnnnnnnnnnnnnnnnnnnnnnnnnnnnnnnnnnnnnnnnnnnnnnnnnnnnnnnnnnnnnnnnnnnnnnnnnnnnnnnnnnnnnnnnnnnnnnnnnnnnnnnnnnnnnnnnnnnnnnnnnnnnnnnnnnnnnnnnnnnnnnnnnnnnnnnnnnnnnnnnnnnnnnnnnnnnnnnnnnnnnnnnnnnnnnnnnnnnnnnnnnnccccacattccagggatatccaagcccagttaagtcacaagagccatttctgattgggc

SEQ ID NO: 38860 - DNA, 318 bp, Homo sapiens
gtcatttacatcatttatctcaaataataaaaatgggtcactttttttgagcactactatatgtctgacactgtggtaagtgccttttctgcattattctcacttggtgatatcacacctgccctgtcctataaaatgtataatgtgcatatattacctccacttataagcacagaaattaaggcttaaagaggttgagtaacttcttaactaacctcactaaagtcacaaagcttattagtgacagagccaagatataatacaggtcatctaattccgtagctcatactgttaatcactattccacatttccctcaa

SEQ ID NO: 38861 - DNA, 318 bp, Homo sapiens
caaacctttatttaccaatttgtggttttttccccccggtcttaaatcttgggtattttgtattttcacatttttcactttccttctgtccctagatcctcctaatttcctattactcaagtaatttgttctgtttaatcaaagaaatcaacctgatatttcattacattttgctaaaaactcagaaataaacctatttatgaagcgcactatgtcatatactgtaaaaacttcattttagccgtgttatattgctggcaattactgaactacgaaaggctttttttttccccctctctctctctcaacttaataaag

SEQ ID NO: 38862 - DNA, 432 bp, Homo sapiens
  misc_feature (1)...(432): n = a,t,c or g
tttgannccttggaagngnnnnnnnnnnnnnnnnnnnnnnnnnnnnnnnnnnnnnnnnnnnnnnnnnnnnnnnnnnnnnnnntctcgaggatccgaattccnnnnnnnnnnnnnnnnnnnnnnnnnnnnnnnnnnnnnnnnnnnnnnnnnnnnnnnnnnnnnnnnnnnnnnnnnnnnnnnnnnnnnnnnnnnnnnnnnnnnnnnnnnnnnnnnnnnnnnnnnnnnnnnnnnnnnnnnnnnnnnnnnnnnnnnnnnnnnnnnnnnnnnnnnnnnnnnnnnnnnnnnnnnnnnnnnnnnnnnnnnnnnnnnnnnnnnnnnnnnnnnnnnnnnnnnnnnnnnnnnnnnnnnnnnnnnnnnnnnnnnnnnnnnnnnnnagtcaatccnggccgagcgtggnggctcacgcctatnatnctaacactttgggagccc

SEQ ID NO: 38863 - DNA, 320 bp, Homo sapiens
ctgaaattcaacttggtgaaatgggctttacttaaacaatttttaaagcaaataagaaacaaatttgttcctatagatgcacttctttatctccttctcacctctgtccttaagtcatattctttcaagtcaactacttttcttcaagctgaactcttaaatgctagaggcaataactgagttgctaaatatttctacttcatctccccttttacttaggataaagaaaaagacttaatggatatatgcaactcattttcacttacttgaaaatcttttactggaattaagccacaaaaggttaaaaaagaaaactccag

SEQ ID NO: 38864 - DNA, 327 bp, Homo sapiens
  misc_feature (1)...(327): n = a,t,c or g
cttgaacagtgctaatgcctaccacagtatatgaaaaggaaaatgaatgaatgacgggaaaaagagatggatcaatggaatgactgaaagaatggagaagataatgaaggaagagagaatcaaggggtgaaggagtaaattaaggggtaagtaaggtcgacgcggccgcgaattccnnnnnnnnnnnnnnnnnnnnnnnnnnnnnnnnnnnnnnnnnnnnnnnnnnnnnnnnnnnnnnnnnnnnnnnnnnnnnnnnnnnnnnnnnnnnnnnnnnnnnnnnnnnnnnnnnnnnnnnnnnnnnnnnnnnnnnnnccatgtaacctctga

SEQ ID NO: 38865 - DNA, 325 bp, Homo sapiens
ctcacagtgaacacgtgaactgggtgtcgtgtaggatgagatgtgactgagaacacaaagacgaaagcaaaggaaaggtttggtgctagattgccttgaaataggattttttcccctgagtctcctttcaagaaggtggaagacgggctctccctgtatgtaaccgactgtgggttactcgtaggtaagctctgtctgctctgggaaagtggctagaaaggcagacttccggaaggttggggcatggcaaacacgatgaaagatggcaaaaaagtggcaaaagtgaggcataaaggtcaaaaatgaagggcggagatctgtaaaa

SEQ ID NO: 38866 - DNA, 328 bp, Homo sapiens
  misc_feature (1)...(328): n = a,t,c or g
nnnnnnnnnnnnnnnnnnnnnnnnnnnnnnnnnnnnnnnnnnnnnnnnnnnnnnnnnnnnnnnnnnnnnnnnnnnnnnntcccattctctaacaaaagttgtaagactnnnnnnnnnnnnnnnnnnnnnnnnnnnnnnnnnnnnnnnnnnnnnnaatagaaagggccaggccagttatgcacagcattcaagtctccatgaaaatttatgacccatatggaagcagtaagttaatattaagacagttttgctctccagggctgtagcaccaggttgtttcagttacttcgtcacattaaggaaaagatccagagttaggacactaacc

SEQ ID NO: 38867 - DNA, 328 bp, Homo sapiens
acgatccttcctgacatataccggtgtatatatcaaatggttttggttcctgcaaatattcttccatcaaatgttcagagaagggctattttgagaaagatttaatgggatttgtaacataaaacctcaaatgaatactgagttaactaagacaactctggaacacaaagcgtggttgttataaccttgctttttctggtgactataattgaatccaagaatctaataaaatagtctctcatgccagaaagaaacccaagaaggtatgtcctcagaaaatttagtctgaagttggtcaattcttaggcagtcactctacgtgatcaag

SEQ ID NO: 38868 - DNA, 323 bp, Homo sapiens
caactgtgttcactagcaacctcaaacagacaccatggtgcacctgactcctgaggagaagtctgccgttactgccctgtggggcaaggtgaacgtggatgaagttggtggtgaggccctgggcaggctgctggtggtctacccttggacccagaggttctttgagtcctttggggatctgtccactcctgatgctgttatgggcaaccctaaggtgaaggctcatggcaagaaagtgctcggtgcctttagtgatggcctggctcacctggacaacctcaagggcacctttgccacactgagtgagctgcactgtgacaagc

SEQ ID NO: 38869 - DNA, 434 bp, Homo sapiens
  misc_feature (1)...(434): n = a,t,c or g
tttgatnncnnnnnnnnnnnnnnnnnnnnnnnnnnnnnnnnnnnnnnnnnnnnnnnnnnnnnnnnnnnnnnntctcgaggatccgaattccnnnnnnnnnnnnnnnnnnnnnnnnnnnnnnnnnnnnnnnnnnnnnnnnnnnnnnnnnnnnnnnnnnnnnnnnnnnnnnnnnnnnnnnnnnnnnnnnnnnnnnnnnnnnnnnnnnnnnnnnnnnnnnnnnnnnnnnnnnnnnnnnnnnnnnnnnnnnnnnnnnnnnnnnnnnnnnnnnnnnnnnnnnnnnnnnnnnnnnnnnnnnnnnnnnnnnnnnnnnnnnnnnnnnnnnnnnnnnnnnnnnnnnnnnnnnnnnnnnnnnnnnnnnnnnnnnatgcaagggangcaancnnttctgggatgggncgctgcaatcgntcnngggcgtgcggnncctnatcagg

SEQ ID NO: 38870 - DNA, 330 bp, Homo sapiens
gaaaggaagagatacataaaaaaagggaaagagaaaatagtaaatatttttcatatgaatccacctctttaaattcattagagaccagataaaaggataggtcagttaatttcacctagattatagaagattggccacctcctcccagggaggtagtgtactgttgtggaatcaacaccgaatttgggagttagtaagactgacttattgtctcagactttgtcattaacctgtccttaatgacataatatgaggtttgaggatgagaagtagggaaagagatgtatcagataattgctaaggttgcttcaagccttgaacttttatgat

SEQ ID NO: 38871 - DNA, 294 bp, Homo sapiens
gggtgggtttctagacagcagtctgctgggactcaactcaccatctttcctgtctgtacttaggtgtgtgtttaagtgaacatcctggtgagcttccaggctgtgtcaaacatagcagtgaaacctcttcagaccaataagtaatgcagggggaatgagggatggggagatcatgatggtccaagctgattctaacctggaaaaaattagaattccgacttaatttttgtaagacatatcataacaaaattaatatagattgttataatttttaaaacaaaatagattgactta

SEQ ID NO: 38872 - DNA, 427 bp, Homo sapiens
  misc_feature (1)...(427): n = a,t,c or g
ttgatttgaatacnnnnnnnnnnnnnnnnnnnnnnnnnnnnnnnnnnnnnnnnnnnnnnnnnnnnnnnnnnnnnnnntctcgaggatccnnnnnnnnnnnnnnnnnnnnnnnnnnnnnnnnnnnnnnnnnnnnnnnnnnnnnnnnnnnnnnnnnnnnnnnnnnnnnnnnnnnnnnnnnnnnnnnnnnnnnnnnnnnnnnnnnntgancttgttctgngnatntntngtacngtgnnnnncacatttttanntggtnnagnnagncntgnnnantanggnngcnngtgatgcacgcngctattcngngattatcaancnatgggncnatttgagcctgaatgctacgnaggatagcttttgtganctgcanaggacccttgcagtnncgttntgtnngtgaaantanggntcgattggtgtnattacg

SEQ ID NO: 38873 - DNA, 324 bp, Homo sapiens
gtttcattcttataatcttgtgatatggattttcacagacaagtgggccagatttttaacattttaaaaacattaatctttgatcatatccagcaagaatgaacttgttctggagatttcttctacagtgggcatcacattttaaaaatgtttggcttgtcatggggattatggtggggggtgatactggtacctatttctgattataaacttatgggaccatatgaaccagaagattaagaaggatagcttttctgagctgtatagcacccttgtgtttacattttctggaggaaaggaaagctgctttgttttattaggaac

SEQ ID NO: 38874 - DNA, 321 bp, Homo sapiens
tgtacctggagtgataatttccagttttctgaacttccatttataacaagtattttcagtagcaatgggatagataaacaaggatcacaactagaaaaactaccctggatactcaatattaatgaaataataatatctgatttgggtacattacatctctccaataacctaatgaggcaggatagaaggccattgcctcaattttacatgcaagaaaaatgaacgggtggtggcatggagtgacctgagacttttcagaaagtcacaaagcaagttagatgtaattttaaatgaagtctcataattctggtcctcttgtag

SEQ ID NO: 38875 - DNA, 322 bp, Homo sapiens
  misc_feature (1)...(322): n = a,t,c or g
tgctaaacatcacaatcttaaaatccatgcacagaggcgtcctacacacactgctgaacatcacaatcttaaaatccatgcacagaggcgtcctagacacactgctaaagancgctggctnaaaatccatgcacagaggcgtnctagncacactgctaaagatcacagccttaaaatccatgcacanaggcatcctantcacactgctgaanatcaccatcttaaaaaccatgcacanaggcgtcctggacacactgctaaagatcaccatcttaaaatccatgcacagaggcgtnctggtcacactgctgaagatcacaac

SEQ ID NO: 38876 - DNA, 340 bp, Homo sapiens
  misc_feature (1)...(340): n = a,t,c or g
ggaagaggtcacaaactaatctggtgagaatgtccccagaagttcccagcgcagccatgttagtattcaatatatgtaattcacataaaataaaattctctattttaagtgtacatattagtggttttggtgannnnnnnnnnnnnnnnnnnnnnnnnnnnnnnnnnnnnnnnnnnnnnnnnnnnnnnnnnnnnnnnnnnnnnnnnnnnnnnnnnnnnnnnnnnnnnnnnnnnnnnnnnnnnnnnnnnnnnnnnnnnnnnnnnnnnnnnnnnnnnnnnnnnnnnnnnnnnnnnnnnnnnnnnnnnnnnnnnnnnnnnnnnnnnnnnnnnnnnnnnnnngg

SEQ ID NO: 38877 - DNA, 334 bp, Homo sapiens
caccactacccacatctccacattcctagctgcctaaaacttttcatctaattctctgctagcatcttatcctctgtctctcctcctccttattactgttttgcccaatcttcacatgtgcctctgttattacctcataatccttccattctagagagacccaatgttagatcaaataaagatgacataagtgaaacaaaggaaaagtgctactagtgttctctgggtcatgggaacctggccagagagagatataatggaattataatttggatttttcaattacagtttaatttatgaactttatatattataaagattatcaggaactttt

SEQ ID NO: 38878 - DNA, 249 bp, Homo sapiens
ggcaagactagttaaatgaggcagatactccccaaagatggaattccagaaaggtgcttgaaaaggactgaattcttaaagcctactgctgttagtatgtagagttcttgaggaaacaagcagtttggcataacttaatctactaagaaactataagaaggtgaaggaagttggaacatcttactggaaaaagaatgagggagtgaagagggaatcttgtgaattcaaaacttgcaaaaaaaaaaaaaa

SEQ ID NO: 38879 - DNA, 329 bp, Homo sapiens
  misc_feature (1)...(329): n = a,t,c or g
gtcgacggtaattccttcttttcctctctccctcagcctctactagtgaatgtagtgttattctactacgaatgcagttattagaacaacagtgatatgggttacttccctaggatttatgtcccagtttgagttaaaacaccagcaaacatgaacataattctgaagttgcaagttttttgtttttttttttttnaaaccnnnttttgtttttntnncangntngaatngcngngnntnnntntgnnttnatngaaccttttncttcccannttaagnnntttttctngcttaaccttccnaggnnttggganttacgggcttnaccc

SEQ ID NO: 38880 - DNA, 334 bp, Homo sapiens
cttaagtccaaactcaatctatcccgcaacaccgaatggaaaagtgaaaagcaggaagtcaaaatgtgaaaacccctaacaagtaatgactgcaaacgcaggaggtacctcagtagctgggatagcagccctatgctctagaaccaaaccccaccagcttacttttgccttatatctaatttacactattatttcttaatatgtttctttttgttgattagtttttttttactttttatttgtattaccctagaaggggttgacatgctacttatatttttaatataactgaaatagtgattgcagtaagtgttcatctttgagattatctgaa

SEQ ID NO: 38881 - DNA, 342 bp, Homo sapiens
  misc_feature (1)...(342): n = a,t,c or g
caagtttggaattttaaaacacacagacattcnnnnnnnnnnnnnnnnnnnnnnnnnnnnnnnntgtaaaagggtcaggcagccctgacgtatgagaaccagcctggcactcgcagcttcgccctggtggaggtgttactattgaatagaataatctcgcagaacactaacatcagagaaggtcacctgtgtgactgtgctgaaataggaccaaaagtaagtaaactttaaaaaaaacaactgataatcgtttctaagtagtgacaaatccaagatcatcatacaaaccacaaaaatcaccaaatatctcctgctcccggcagtaagagtgagggcccgaag

SEQ ID NO: 38882 - DNA, 337 bp, Homo sapiens
ttttttttaaagaaaatcccagtgtgggtaaaaatctaacaatgaaatattaaattgattacctgcatagcactgttctaattaataaacagtttctataaacatcaaggaacatcacctagagcattaatcaggtaccaaacaatttaaccattgacttcacacatatgcatatgtaggtggatgctcatacagtttaccttcttttttcccatttcccagagattttggttttgtttgttgttttttttcccccaaacctttaagtgtatgaaattctattctttgattgaagtcagggaaggcgtatgcattcaccagagaagtcaatttgttc

SEQ ID NO: 38883 - DNA, 339 bp, Homo sapiens
gtccttaagatatttctacttgagcaacaggaaacaatgctttcacttccagtgggatcatgggccgtagtaaggatgttgctgaagttgtttgtggcattattttctggtcagtgagagcagctcctcgcagaatgaaaatatcctgaagaagcaaagctcaccatagcagtagcttcatgtctgttcttccagtctccccatacattcttgacacgcatcgttgctggagcagcctgtgatcatttaaaaattaggcaaaggaaggaagaaggtgacagcttcatggttttggaaggtccctaactctcccacaaaaacaaatgtcgacgcggccgg

SEQ ID NO: 38884 - DNA, 333 bp, Homo sapiens
attttcttctttcaacactggagtgttacttgttttactttctagttatacttgagagtatgttatcactaaataattgatcataattatgctccttttaaaagaaaaacacttttctagaaatgcggacttatgggaataaacctttaaaaaaatatgtgtcggattattctactattcattcaaatggaagttgttaagtctaaccagatattccttgaggactgtagtggacttcttaagcaaccagtaaggaacaaagagttgtggatgcagctgaccaccgctaatcctaactaaattcctttgggataaacagtttaaatggttgaa

SEQ ID NO: 38885 - DNA, 339 bp, Homo sapiens
atgaccccattatttttaattatcacatagttttccatagtgttatatcatatcttttaaccaattccatattgatggccatttaagctatatcagatattttcataatcacatatggttctaaatgtgcgtattatatatatctcattcttctatgtaaataaggtatttcaatcatttctaagtttgtccttatcataaataactttctttataagcttttgtctgcatgtatgccttgggagagatttctagaaactgaatcgatgaatcaagagagatgaacttgttaaaatgaaacacttacatgcttaattatccaattactaatccacaagg

SEQ ID NO: 38886 - DNA, 331 bp, Homo sapiens
  misc_feature (1)...(331): n = a,t,c or g
gggcaccagagtaagtgcagcttgctgtgcaaaggatgggaatgctcctttgagcagggagtcctgggtacaggtgctcattttaaatattcttgaaatagagctgagaggactcctgcttggcagcagctgagctaaatgaggatctttttctttctcactgaaagttataattctattcctgctattccagatccccttgcctaggaaaattaatatgtgaacccacttgttatactggaatgatcttacttaccacttaaaagctgtgttacagaaacatgtctcacaatataacagactgnatttgctaatttgatgcgtgaaaatt

SEQ ID NO: 38887 - DNA, 337 bp, Homo sapiens
  misc_feature (1)...(337): n = a,t,c or g
caattttgtatcagcccatttcttgttctcttttgcctttaaaaacctgcttgtaacctatgctgaatggaccactccccaaaccaacttggaagccagttgccctcaaccttggcccaaataaactgtctacattcattttgcctcagattcttcaggtcaacgttttgtttccatctcttggctattgcaaataattctgctgtgaacatggatgtacgtatatctgttcaagtccctgcttttaattctttcggatatatacctaatagtagaattgctggatcctaacagtaattctgctaattttttgaggaccaccatgctgntttccacg

SEQ ID NO: 38888 - DNA, 334 bp, Homo sapiens
ttttaaggaagaacagaaacatatttgaacttgatgggttaaaggtaaatttatttttctttttgggtcctatgacaatgtattagatatgttatgtgaatgaaattatcttgaagagttaatttttatttttcttaagtaaatattggctctagtagacctccttttgtgcatgtgatttttgttttgtttttgtttctttaaataagcaacccttctgtggggctcaattttggaaatcttggaagtacttcaactccagcaactacatctgctccttcaagtggttttggaaccgggctctttggatctaaacctgccactgggttcactc

SEQ ID NO: 38889 - DNA, 339 bp, Homo sapiens
ggcaaaaggaaaaaatggggagagataaaagggaaggtaacgggaacaggtagagagagacagatgcagaaaacaaagagagatctagaaagtcagaaggagccaggctcattaagtgtgaagtgactagagtactgtcaaatagcgtgcctacagctgggggagaggtgtaaatatctctctaaataaatatgatttttttttctgccatttctattggtaaagcaggttgttctaagaatcaaaatataaattaatataactaccaattgctaaggttttggcttgtgtacttgcaatattgagattttcactattaaagacatttacaaatagttg

SEQ ID NO: 38890 - DNA, 337 bp, Homo sapiens
  misc_feature (1)...(337): n = a,t,c or g
caaaaaattaaataataaaaagaagcagctgcattctcatctccagagacgggaagtcaagactgaaaaaaataatctgtacaaatagactttgttaaaataactctttccttcctttgggctccccatatatttcagtcactgttccacaattgccaccatgtccaacctactatataatcatttcggttttgccacgtctttagggcttcatctttctatgggggctcccatgtatgtgtaccaatctgtatgcttttctcccatgaatctatctatgtcaatttaattttcatgcccaggcagagaccctaagagggtggaggtanagtattgc

SEQ ID NO: 38891 - DNA, 330 bp, Homo sapiens
aaaaagtattagtttccttgtgtaaaaagtgtcatgaaaagaaagtctaactgtagctaaacagaatgcttataagaacagaatgtaaagaacttttcctttcccattcaccctcccaagtgaactgcaaacaggtactccttcaaaaacgtactaagaacaggagagtggctgatgagaggccctggggaaaaacagaggcagggaagactgtgctcaggatacatggaagacacaccctggagaacataaggaaggctcaagcacatgacgtctgcctccactgtgcatttgatttttatgttatcgtttttgttaaagaaatatagt

SEQ ID NO: 38892 - DNA, 335 bp, Homo sapiens
  misc_feature (1)...(335): n = a,t,c or g
gggattttgtacagtattcttacctcatctctggtttggtttgtctctgaagataactatcgtcactattaagctagaaaatgtagacaaaaagactgtcacttaaattttatatgtagatttatgttttatctcaaaagcagttttcatcttctaattatatgtcttcactgtggatacgtagttatagcaaaaagcatgcgtgtaatcctgtccaagcagatgatcacttgggatattgattctattaagcatttgtgaaatcagcctgcctttgcagatttagcagtctgtgacagagcagacgttttatatgtttttaggaaggntagctg

SEQ ID NO: 38893 - DNA, 207 bp, Homo sapiens
taataactgtacagctcaatacaataataaaaagttaaaatatctgtgtaaccacaactcaactgaatttcaattcaagaaacggaatatcacaagaaatagaacattaccagctcttaataattttgaaaattttatttcattgctgctattcactagtttcttattgtgcctaaaagctatcatccaagtctttttttttttttt

SEQ ID NO: 38894 - DNA, 372 bp, Homo sapiens
  misc_feature (1)...(372): n = a,t,c or g
gcagtttgtaggtcgcgagggaagcgctgaggatcaggaagggggcactgagtgtccgtgggggaatcctcgtgataggaactggaatatgccttgagggggacactatgtctttaaaaacgtcggctggnnnnnnnnnnnnnnnnnnnnnnnnnnnnnnnnnnnnnnnnnnnnnnnnnnnnnnnnnnnnnnnnnnnnnnnnnnnnnnnnnnnnnnnnnnnnnnnnnnnnnnnnnnnnnnnnnnnnnnnnnnnnnnnnnnnnnnnnnnnnnnnnnnnnnnnnnnnnnnnnnnnnnnnnnnnnnnnnnnnnnnnnnnnnnnnnnnnnnnnnnnnnnnnnnnnncaaaacnaacnaaccaaaccanaaacaccg

SEQ ID NO: 38895 - DNA, 378 bp, Homo sapiens
  misc_feature (1)...(378): n = a,t,c or g
cannnnnnnnnnnnnnnnnnnnnnnnnnnnnnnnnnnnnnnnnnnnnnnnnnnnnnnnnnnnnnnnnnnnnnnnnnnnnnnnnnnnnnnnnnnnnnnnnnnnnnnnnnnnnnnnnnnnnnnnnnnnnnnnnnnnnnnnnnnnnnctaataataaaggcaaaaaataaaatataaaaaggaataaaattgtaaaaatcaaaattacaaaatcacgtgcttcctttccactagaaaggaattgtcactagaaattaaggttactaggggttaagaattttannnnnnnnnnnnnnnnnnnnnnnnnnnnnnnnnnnnnnnnnnnnnnnnngagcaagagaatcacttgaacccangagttttgaaaccggnctgagcaac

SEQ ID NO: 38896 - DNA, 386 bp, Homo sapiens
  misc_feature (1)...(386): n = a,t,c or g
ttttattaaaaaattacatagaaatgtattaaaaaatctataaatttcataccatttaaaacttagggagaaatatcttaaattagcatatagtatgcacatgaccttaatataaaggaaacattatattactgtttttagatgtcattgtctttatgattcagcctctcatcaggcatttgtcacatctcatcaggtgcatttatcatagagccatatcagaggcatgattttatttaggacatgtataccttatttcaaacaaattccttatttgaaagcgtgcagcctaaatagtgtaatttggagataattatttacctttaaaagttangagctttctacctggcttccgaagtanctgnacttctagagagcagagctgg

SEQ ID NO: 38897 - DNA, 387 bp, Homo sapiens
  misc_feature (1)...(387): n = a,t,c or g
gggggttgagccaaatagagaagaagaactagtcatctcagagaataggagaataaatggattggactagggaaatacagaaggaatactaggaatatctgttccaagaaatactgagggctcacttgagatttggttcataaatttaaagtgagatcagacactgtggttttgtgtttttcttaagccatgcttaacagcgagaatactggcacagagtaggcaggtagctgagaaacacttgtggatttgacaacagaagatgaggagcaaggctgctaaaggtgtatacaaagaggatatatgtgatagaccatggaggttaagctggggaaagangatagagagaacccnaaggattgggactggntgaataaattatactgg

SEQ ID NO: 38898 - DNA, 387 bp, Homo sapiens
  misc_feature (1)...(387): n = a,t,c or g
tttttggtcactgtttatatagtgctatgaaaaagtactatgaaaaagtttggcagctgaagaacagaatattatccctttttagaacagtgttctagccttatagcacatgtgtagggagagtcacatttgtcagggcaaagatcatttgaattctttttaagttacattttagaagctaaatgcaccaagcttattttcttaatcacagaattattcctgtaagtctttattcttttattaaatggggaacaacttcaggagaaacaatacaaagaaaacattctgccatgatttaattttcagtgaattttcnnaaagngtgggtttgatgaccnttctttccctaancacntagaatgcccntaatccntnnnttnggggccc

SEQ ID NO: 38899 - DNA, 328 bp, Homo sapiens
  misc_feature (1)...(328): n = a,t,c or g
tcgtagtaagattctacagaatttcatcaataaaaaacatgtcaaatattaagtacaaaactgtttacatgacttcctactgccatggaaaataaaagaaggaaggaaaaactacttgataggtgcttcagaagttgctcttttctccctactctcactacttctcctttactaaccatatctgtgacttaatgaaattctgtagaatcttactacgagaactgtcaacacatgaagcagcagattctagaattttaaccatcctttcacttagaaagaaactgaacaagttnncantaangatgacctagntctgganaaanaaggc

SEQ ID NO: 38900 - DNA, 330 bp, Homo sapiens
  misc_feature (1)...(330): n = a,t,c or g
ggattacatcaaactacaaagcttctgcataactacaaaaataatgaacagagtaaggagacaacctgcagaatgagaaaatatatttgcaaaccaaacatctgacaaggggnnnnnnnnnnnnnnnnnnnnnnnnnnnnnnnnnnnnnnnnnnnnnnnnnnnnnnnnnnnnnnnnnnnnnnnnnnnnnnnnnnnnnnnnnnnnnnnnnnnnnnnnnnnnnnnnnnnnnnnnnnnnnnnnnnnnnnnnnnnnnnnnnnnnnnnnnnnnnnnnnnnnnnnnnnnnnnnnnnnnnnnnnnnnnnnnnnnnnnnnnnnnnnnnnnnnnnnnnc

SEQ ID NO: 38901 - DNA, 328 bp, Homo sapiens
gtccttcctggcatctttcatgccgctgcagttgtctgaacacttgactacagctggagaagtcaagatagcctaatgcgtgggtggacatctcagttggcgagtgaggatcagtgaggggccagctgagtctctctctccatgtgtgttcacctttcagtggtctagcatgattatttctctaataaaatgtactaattatttgattagccttattacctttattatgttgtttctgtgaggaaaagccaaattacattacttcgtttttacttacaacatcttttccaggaaaaatattgagtttaagaggtatttagtctctgaa

SEQ ID NO: 38902 - DNA, 324 bp, Homo sapiens
gtcacttgctgataactagttgaaataccattatccccttgtaacacctttaagaaacagccttttaaggcatacactgtgtaactcttcgtatttcctgctatacatattacagattacataaaagccgacaaatccacattgatataagcattaagcactggctgtattttaagatttttagttctaatactagcagtacagagttacagagcataattttaaacacttagttgcaggtatataagtatggtatgtttcatggactggaggaaaacgggcatttgtctttaaatttactactgacaatctgaatagttctgg

SEQ ID NO: 38903 - DNA, 420 bp, Homo sapiens
  misc_feature (1)...(420): n = a,t,c or g
tttgncaannnnnnnnnnnnnnnnnnnnnnnnnnnnnnnnnnnnnnnnnnnnnnnnnnnnnnnnnnnnnnnntctcgaggatccgaattccnnnnnnnnnnnnnnnnnnnnnnnnnnnnnnnnnnnnnnnnnnnnnnnnnnnnnnnnnnnnnnnnnnnnnnnnnnnnnnnnnnnnnnnnnnnnnnnnnnnnnnnnnnnnnnnnnnnnnnnnnnnnnnnnnnnnnnnnnnnnnnnnnnnnnnnnnnnnnnnnnnnnnnnnnnnnnnnnnnnnnnnnnnnnnnnnnnnnnnnnnnnnnnnnnnnnnnnnnnnnnnnnnnnnnnnnnnnnnnnnnnnnnnnnnnnnnnnnnnnnnnnnnnaagttgantggactacaacacggcccatctttttgtggnnccaacntgnnnganngnntatta

SEQ ID NO: 38904 - DNA, 317 bp, Homo sapiens
acgggatataaatactcagagaaatacacgaataagatgtaactctgcatttgggaagccatataaatattccttttatgtgcccaaactaaattatcaatgtaccagttagatggacatacactcactatgtgctttactattttacttgctcaaatgttctacagtcatcattctctagtgttaacatcaaatcacatttgtaagtgaactattatgtccatgtttgcacatactcgtccactgtgtgtgatcacctgaaggagacattgtgcatcttagtttggggttatataattacaaagatgaccctgtgc

SEQ ID NO: 38905 - DNA, 203 bp, Homo sapiens
atcaatgaatttagtgcatttcacaaacaagggaagcttaccagggggtttttaggccatataactgcatagcctgtgaaagatctctatagcatgtcttgcttcctgactttccaacttcacttcaattaattttgtcacattgctcccttttcctttttcttccttaaacgtataaaatgctgtttgtttttttttttttt

SEQ ID NO: 38906 - DNA, 321 bp, Homo sapiens
  misc_feature (1)...(321): n = a,t,c or g
gagtccacagctccatcagatgtgcttaaagaattaagaaaatggcttcctgatttctacagtgattccttcccatttagtgagtaatcattagtcttaacatgaataatgcaaaaaaggcagctaagcagtttaaattttatccataaaagtaagccctgggtttcaccacagcatttaacttcctgacctattttattgaatccccgcatatcttggacagcttccttgagtgtaaattaccatgaaggtaaattgaacatgttcaagaaatgggcaaggatgttaatgcagaatcaaggcntcatcgacttcagttgg

SEQ ID NO: 38907 - DNA, 333 bp, Homo sapiens
  misc_feature (1)...(333): n = a,t,c or g
ccaggacatggcaggaaataatgattaactaatctgtgtttatcctgtcaactgtactgtatctgggaacataagtcctcatggaaaaatttggcctttgtttatttaaatctgctcccacaaaggaaaggtaactgcatgagttttgccaaggctgcagggctttttattctttccctgccccacctcccccacccttccaatataaatctaagggctgcaggtttattgctctttattctattcaatgcaaaatgagttgtccttgttgtccttcagccttgttttgccaaagttttattttggactatagatggtgtatttnaaaaaata

SEQ ID NO: 38908 - DNA, 335 bp, Homo sapiens
cgcggccgcgtcgacgtaaatgtctggatggggatgttacgggataagctgaaattagagcttaccatgatgttttagcctaattaatgacagggaagtcagaaggaggctagatgcctgcttaacaacaacaacaacaacaaaaatcacataattcttttacttgctcctttgtaggcaggcatctttattttcttagaaataagtaaatgtcatttgtagaggctagaggttagtgttattaataagatatctagttcagtcatattacctaggcaacaggtaatgttttagatagtgaatggtgagttatttgatctcaaagaaatcaatat

SEQ ID NO: 38909 - DNA, 320 bp, Homo sapiens
  misc_feature (1)...(320): n = a,t,c or g
atgacagtgtcttttaaagagcagaagacattaatatgcatgaaatccaatttatcagnnnnnnnnnnnnnnnnnnnnnnnnnnnnnnnnnnnnnnnnnnnnnnnnnnnnnnnnnnnnnnnnnnnnnnnnnnnnnnnnnnnnnnnnnnnnnnnnnnnnnnnnnnnnnnnnnnnnnnnnnnnnnnnnnnnnntttttttttaatggatcatggtttcagtgtcaaatctaagacatctttgctgtacccacatttgcaaagatttttttcctaaagttttccctttagaagttttatagtttttgngtttttttttttttt

SEQ ID NO: 38910 - DNA, 334 bp, Homo sapiens
  misc_feature (1)...(334): n = a,t,c or g
atttatgagaagctgaggatgaaatgttgggacacaatgtttatacaacgtcatgttttgaagacttttaaccttttgagtatgaccagccatacacaaagaataacggtgtccaccaacaaagcactgaaacaatcatttggctgagacttgcagatgacccattctatgccacgcctttatggttctacaaacaccaatcagcatttccttacaagtttaacaaggttaaagaacattaaggccattcgtatagtggtaaggggtgtctattattaattcatccagcatttactaaacacattaatgtaccaagtatttttaatgnaagttg

SEQ ID NO: 38911 - DNA, 341 bp, Homo sapiens
ccaaattccagccaatgagctatggatttcaagcagtagctaaatggttgatcaattcactcaacaaacgccagttgagcataaactgctaggcactgggttgataagaacaaagatttttttatagaactttatagtagacacttagattagtggttctcatgatgaagtttcttctgtttataataagatgaaaaaatagcgacaatgaaacttctcccccacaaaactacatatattctacttaaaagaatgttttttatcttgagatcgctttcttagttcttggtgtcaacataatctttcttttcggatattatggtgagattagggctttgagc

SEQ ID NO: 38912 - DNA, 296 bp, Homo sapiens
  misc_feature (1)...(296): n = a,t,c or g
gaaagaaccattgctttcctgcttttctctcttgtatttaaaacgaaaaaaaaaagtggctgccactcggcctaaaattgctttttctctttgcatgctacctaccacatcatctcatatgtaccattgtagggctttcaggaaangccttaagtaagggaantggttnagtgggcctttgttaaaagggccaancntnttacnttnaanccngtnnttctnanggggtnacccttnnaccaccggngattaatgncnnnacntgnanantggtcggnaaagggctcttgtaacct

SEQ ID NO: 38913 - DNA, 302 bp, Homo sapiens
  misc_feature (1)...(302): n = a,t,c or g
aagaaacaagattgcctttgttcacagatgacaagattgtctatgtagaaaattgaaaataataaagaaaatcgaaaataataaagaaaatccctggaactaataagcaagtattacaaggttgcaggatacaaggttaatatanaaaagtccattgntttcctatagatcatcaatgaataantggaatctgaaattaaatccccatggcctttcctttngncctcaaaaaatcactcctctgganctcnttaattatgtccggatnttatgnttcattaaaaangacctacttcntttaa

SEQ ID NO: 38914 - DNA, 383 bp, Homo sapiens
  misc_feature (1)...(383): n = a,t,c or g
tggggnnnnnnnnnnnnnnnnnnnnnnnnnnnnnnnnnnnnnnnnnnnnnnnnnnnnnnnnnnnnntctcgaggatccgaattccnnnnnnnnnnnnnnnnnnnnnnnnnnnnnnnnnnnnnnnnnnnnnnnnnnnnnnnnnnnnnnnnnnnnnnnnnnnnnnnnnnnnnnnnnnnnnnnnnnnnnnnnnnnnnnnnnnnnnnnnnnnnnnnnnnnnnnnnnnnnnnnnnnnnnnnnnnnnnnnnnnnnnnnnnnnnnnnnnnnnnnnnnnnatcttttttttggacctaaaattcttcaatgaaatatattaacgaagggcttantncnaaactttggacttttttcgcaaaaggttggnntnattnanaggnntgnctttt

SEQ ID NO: 38915 - DNA, 400 bp, Homo sapiens
  misc_feature (1)...(400): n = a,t,c or g
tgaggnnnnnnnnnnnnnnnnnnnnnnnnnnnnnnnnnnnnnnnnnnnnnnnnnnnnnnnnnnnnntctcgaggatccgaattccnnnnnnnnnnnnnnnnnnnnnnnnnnnnnnnnnnnnnnnnnnnnnnnnnnnnnnnnnnnnnnnnnnnnnnnnnnnnnnnnnnnnnnnnnnnnnnnnnnnnnnnnnnnnnnnnnnnnnnnnnnnnnnnnnnnnnnnnnnnnnnnnnnnnnnnnnnnnnnnnnnnnnnnnnnnnnnnnnnnnnnnnnnnnnnnnnnnnnggacctaattcttcatgaaaaatntntnncgaaggctaatccaaaaccttnggactntttcncnaaaggttggttttacgnctntannnnacnnttnanncttgtnnnngtnnaattc

SEQ ID NO: 38916 - DNA, 383 bp, Homo sapiens
  misc_feature (1)...(383): n = a,t,c or g
ggagtcggaggggcnnnnnnnnnnnnnnnnnnnnnnnnnnnnnnnnnnnnnnnnnnnnnnnnnnnnnnnnnnnnntctcgaggatccgaattccnnnnnnnnnnnnnnnnnnnnnnnnnnnnnnnnnnnnnnnnnnnnnnnnnnnnnnnnnnnnnnnnnnnnnnnnnnnnnnnnnnnnnnnnnnnnnnnnnnnnnnnnnnnnnnnnnnnnnnnnnnnnnnnnnnnnnnnnnnnnnnnnnnnnnnnnnnnnnnnnnnnnnnnnnnnnnnnnnnnnnnnnnnnnnnnnnnnnnnnnnnnnnnnttntttntggaaannntntaccaaggcctantcngaaacnttngacttttttnccaaagnttggnantgnttnncnctgagt

SEQ ID NO: 38917 - DNA, 316 bp, Homo sapiens
tgaaaattcgctgaaatgagcatcagtagacgtgagctctaacgagctgaatcaccttggacatggaacacaagctctcttggattcaatttccccagttttaaataagaggatttgacctgatgatggcacaggtcttttctggctctaaaagtcttactctaaaatttcccattgtggaggaaattagatggaatactaagaagcttttaagagtaaaaaggaggttttaagtaaggcaaaggatttgagagggagagtttgaaagaatctttaaatatgcttgcctgcttaggattaccactccactgtcttg

SEQ ID NO: 38918 - DNA, 305 bp, Homo sapiens
ctccactcagcagagacatctgagctacatggtgtcagtttgtgaatgttctcagtggttcaagtcttaggtttgaatgaggtactggaggaatctatagaatcagaaaagcagaaggcaaggatgcaactctgggcaacactgaatttgaaggtgaggtaagaatttagagaaagaggggatgattagcagttttggatgccatcaggagatcaaaaagggtaagaatttaaaaaggttatttggatttggcaatatgaaaaggattggtaattttaacaaaagcagcttgggcaagatgagga

SEQ ID NO: 38919 - DNA, 394 bp, Homo sapiens
  misc_feature (1)...(394): n = a,t,c or g
nnnnnnnnnnnnnnnnnnnnnnnnnnnnnnnnnnnnnnnnnnnnnnnnnnnnnnnnnnnnnnnnnnnnnnnnnnnnnnnnnnnnnnnnnnnnnnnnnnnnnnnnnnnnnnnnnnnnnnnnnnnnnnnnnnnnnnnnnnnnnnnnnnnnnnnnnnnnnnnnnnnnnnnnnnnnnnnnnnnnnnnnnnnnnnnnnnnnagccatgccccaccaaggcgaccttgctaaatctcactttcttcatttgtgaagttggaataattacagtagtgacctcttagagttgtgaggattaaaattaaacaatntatatagggagattttanccagtgcttgncattgttnaaaaaactttnaaaanctgggnanaatggnttatttntttttgngnatttt

SEQ ID NO: 38920 - DNA, 382 bp, Homo sapiens
  misc_feature (1)...(382): n = a,t,c or g
cttgaatgcatatcagtcagggtgagaaatctgctgtgcaggcaggtgtgcgatgatgcggtaaccagatgggcttcttgcagcttcaaccaccgccagtgtcattcactacccttcaaactatcagctctgattggagttaaaggaataatcagtctcccacagaagtaggacctatttctcttccttcaaaacaatcctcaaagcctgtgaatcccctccagtgtgcttattatgcagttagctctgctcgtggctgcagagacagctcgttttgcattcctagaagcccctctcagggctgggcatgcttcggtgggntttgagtggtgagaantgcttttctcaaangctggttcccatggggcntttancagnaaaa

SEQ ID NO: 38921 - DNA, 331 bp, Homo sapiens
  misc_feature (1)...(331): n = a,t,c or g
tacgtgttcgaggccaacctcgtcaatatttttaaaaaactctcatccattgataaaaagaaaaaaaaaaattagctgggtgcaatgannnnnnnnnnnnnnnnnnnnnnnnnnnnnnnnnnnnnnnnnnnnnnnnnnnnnnnnnnnnnnnnnnnnnnnnnnnnnnnnnnnnnnnnnnnnnnnnnnnnnnnnnnnnnnnnnnnnnnnnnnnnnnnnnnnnnnnnnnnnnnnnnnnnnnnnnnnncaaccaatcaacgcaatacatcactttgagagaataaacctacataattatctggactgatgcagagaaaacatttgggaaaacaat

SEQ ID NO: 38922 - DNA, 447 bp, Homo sapiens
  misc_feature (1)...(447): n = a,t,c or g
tgtgncttgaanntcntnaanccctnangannnnnnnnnnnnnnnnnnnnnnnnnnnnnnnnnnnnnnnnnnnnnnnnnnnnnnntntcgaggatccgaattccnnnnnnnnnnnnnnnnnnnnnnnnnnnnnnnnnnnnnnnnnnnnnnnnnnnnnnnnnnnnnnnnnnnnnnnnnnnnnnnnnnnnnnnnnnnnnnnnnnnnnnnnnnnnnnnnnnnnnnnnnnnnnnnnnnnnnnnnnnnnnnnnnnnnnnnnnnnnnnnnnnnnnnnnnnnnnnnnnnnnnnnnnnnnnnnnnnnnnnnnnnnnnnnnnnnnnnnnnnnnnnnnnnnnnnnnnnnnnnnnnnnnnnnnnnnnnnnnnnnnnnnnnnnnnnnnttggacttaangaagatggatgggatctntnggacctgttggccanaatctanncntantggccaagggct

SEQ ID NO: 38923 - DNA, 333 bp, Homo sapiens
  misc_feature (1)...(333): n = a,t,c or g
tgatgagcggactgatgtggagtgaagtaaagagtgatgggcacaaatttagaagtgcaggactgccttgtggtgtttgtccttcctgatggtgccacaacgttttctggaaaagtagcaagtacctaatatgttgattttcacaatgaaggataagttttaaaagactatcaatgactggcatttacaatctacaataagagactagttgtgcaaataaaatacagtgaagncgacgttnnagannctgnanagntgtatngnnnnanaactactnggaacaagcttgntgncgnttnctgnacagacnntnttctnnattcntggngtggg

SEQ ID NO: 38924 - DNA, 61 bp, Homo sapiens
cttgagcatctggattctgcctaataaaaaacatttattttcattgcaaaaaaaaaaaaaa

SEQ ID NO: 38925 - DNA, 317 bp, Homo sapiens
  misc_feature (1)...(317): n = a,t,c or g
gcccatcataactagaaccctgaagctgacaaacccacaagggaggctttaaaatcatcttgccgggatctcccagccacatcacatgcccctgaggacagggccaagccatctgctcccctccccaggaccaacccctattaagtaagaactgcatctacagatccaacgcaacccccaaaattccaccagggttgtgtgtgtgtagattccagcagggtggtgtgtgtaaattccagcnnnnnnnnnnnnnnnnnnnnnnnnnnnnnnnnnnnnnnnntnatnttgcngtntatnnttntagggtnatanattgg

SEQ ID NO: 38926 - DNA, 334 bp, Homo sapiens
agtgccgccagaagttcatgctcggagactattttgtgttcacaggaaactgctctttcattcatgccccttttgttctcccgagtcagggatctcagctccctcttttctcctggaaccctctaattagcctaactgtaaatcgaataagcagatttttcagtgacataatgcagtttggaactatatacctcttatgggctgcatctattttccctttccagtacctctgcaactacaaaaatcttatgttgacaatagagatcatgtcatgtttcctttggtttgagattctgtgtgacctgaatactttaggcaattatctatgaacatc

SEQ ID NO: 38927 - DNA, 328 bp, Homo sapiens
  misc_feature (1)...(328): n = a,t,c or g
aagtcgtaataaggtaaacactgaatcaaaatttgtgatgtaactgatgtcgacgcggccgcgaattccnnnnnnnnnnnnnnnnnnnnnnnnnnnnnnnnnnnnnnnnnnnnnnnnnnnnnnnnnnnnnnnnnnnnnnnnnnnnnnnnnnnnnnnnnnnnnnnnnnnnnnnnnnnnnnnnnnnnnnnnnnnnnnnnnnnnnnnnnnnnnnnnnnnnnnnnnnnnnnnnnnnnnnnnnnnnnnnnnnnnnnnnnnnnnnnnnnnnnnnnnnnnnnnnnnnnnnnnnnnnnnnnnnnnnnnnnnnnnnnnnnnnnnnnnnnnnnnnnnn

SEQ ID NO: 38928 - DNA, 325 bp, Homo sapiens
  misc_feature (1)...(325): n = a,t,c or g
gtgaattatgacaaatgtatcactctaacataagatgttactaataagggaaactaagtatnnnnnnnnnnnnnnnnnnnnnnnnnnnnnnnnnnnnnnnnnnnnnnnnnnnnnncatactgaaaaataaagttcacctttaaaaaatttgaaacattgtactatcaatgacctaatattgtgcttatcactttaactacatttaaancngtatntatatatatcnnnacagaatnntncngttntaagtntgcgnctntncgtnnntntnnnntcgntancngngnntttttcatatnannttnntgntttggnnngtttggcg

SEQ ID NO: 38929 - DNA, 331 bp, Homo sapiens
  misc_feature (1)...(331): n = a,t,c or g
cttgatcatcactgacatgctagcaatgtggcttaatttggagaaaggtttaatccactgggttgtcctctctaacttggtcagcatctagcagtaatcagtggctgaggtcgacgcggccgcgaattccnnnnnnnnnnnnnnnnnnnnnnnnnnnnnnnnnnnnnnnnnnnnnnnnnnnnnnnnnnnnnnnnnnnnnnnnnnnnnnnnnnnnnnnnnnnnnnnnnnnnnnnnnnnnnnnnnnnnnnnnnnnnnnnnnnnnnnnnnnnnnnnnnnnnnnnnnnnnnnnnnnnnnnnnnnnnnnnnnnnnnnnnnnnnnnnnnnnnnnnnn

SEQ ID NO: 38930 - DNA, 332 bp, Homo sapiens
  misc_feature (1)...(332): n = a,t,c or g
ccaagagtcacaacttaaatgtatgtcactcctcaagaagtttccctgaccacccctctaaaattgccaccatgatgcattctcccaataccctgcttcattttctttatagcactcagctatcagctattacattgagtatttagcacagaggcgaacgacttaatcacattcactgcttatgaattaatgagtgttctcaaaattggacagactgtcagaataggatccaccgaaagcacacagattggaagcttttttcttctctccaaaattggcatgtagcaagtttctgacacatggntagtacagttgtcccttggngnccacag

SEQ ID NO: 38931 - DNA, 269 bp, Homo sapiens
  misc_feature (1)...(269): n = a,t,c or g
nnnnnnnnnnnnnnnnnnnnnnnnnnnnnnnnnnnnnnnnnnnnnnnnnnnnnnnnnnnnnnnnnnnnnnnnnnnnnnnnnnnnnnnnnnnnnnnnnnnactggccaaaactgtaaatgtgtcagaatcttctgtgattccctttcagcccttcttgggcaccctagtcttcttagatattcttacagtagaatnnnnnnnnnnnnnnnnnnnnnnnnnnnnnnnnnnnnnnnnnnnnnnnnnnnnnnnnnnnnnnnnnnnnnnnnnnc

SEQ ID NO: 38932 - DNA, 314 bp, Homo sapiens
ccgctgcccaggctgcctcggggtggggccccttcctctcttccttccctcattcatggcccaggactcagcttgttctctcttcccagccatttaaactaaagccctctttggggaaacataaaaaccttaggccccgcaggagtttttcacttgccccaggcagggcagagagtgtacacatccctgccacactttgtgggaaggctgattagagcgccatggatgtgtcttcagggatgtaacacagggttgttgagcccttctgatcccctacattcctgacctgccctgcattacgaccttccagtaga

SEQ ID NO: 38933 - DNA, 317 bp, Homo sapiens
gtttttaggctcaaagagcaggctaaggcagaagagtaagataaatgtaagaaattaatctcccctcctctgcccctccccacatcttcctgctttcatagtgtacctaagatagagttgagcaaggagaatatatacaataaatgaaataaatgtcttagatatgacattaaattttgtgaatatttatgtacacacaaacatgtatataaataacttgggtgtgtttctactatggatctctgattactacatcccagttcccttttatctattgcttatatcaagggattctttttttttaatccaaatgattt

SEQ ID NO: 38934 - DNA, 296 bp, Homo sapiens
ggtgaataaagcaagaaacaaaatataaagtgtgatgcttgctactatgtgcaaaggtagaagtgtagattgcatggatccatggagtacttgcagattgatagagttttaaaatttaataatttccccttgaagtagcttaagtctttttctctctcattttctttatctttcttctttttttgtcattttagtcatggttgttgcggtcgtcgtcttcttctttttaaaaagaaaatctaactttcagttcctaacatggactaagcctatttctcagacttttagggtaacac

SEQ ID NO: 38935 - DNA, 304 bp, Homo sapiens
cttgttttcataaaaatagtaagacatttttcttttatgttcatattcccaggggtgtactgaggagttttccagaggccacagaatgcatgctatcacaacagacagaaaacagaagcaaagaggagaatccagatgtcttctattaagccaggcattaaagagacttgcagaaatgtgcaagatcaatttttttctatgttttggaaaacagagttattgttcatagaaaactatgttagttatgcatatatgcaatgggtttattcaagaagtatatattgaagcatttcttagttttaat

SEQ ID NO: 38936 - DNA, 295 bp, Homo sapiens
  misc_feature (1)...(295): n = a,t,c or g
nnnnnnnnnnnnnnnnnnnnnnnnnnnnnnnnnnnnnnnnnnnnnnnnnnnnnnnnnnnnnnnnnnnnnnnnnnnnnnnnnnnnnnnnnnnnnnnnnnnnnnnnnnnnnnnncgcggccgtgaattccnnnnnnnnnnnnnnnnnnnnnnnnnnnnnnnnnnnnnnnnnnnnnnnnnnnnnnnnnnnnnnnnnnnnnnnnnnnnnnnnnnnnnnnnnnnnnnnnnnnnnnnnnnnnnnnnncccctntaannttcaatcttgncctgnanccttggnnctnttganntttttaaa

SEQ ID NO: 38937 - DNA, 305 bp, Homo sapiens
  misc_feature (1)...(305): n = a,t,c or g
gannnnnnnnnnnnnnnnnnnnnnnnnnnnnnnnnnnnnnnnnnnnnnnnnnnnnnnnnnnnnnnnnnnnnnnnnnnnnnnnnnnnnnnnnnnnnnnnnnnnnnnnnnnnnnnnnnnnnnnnnnnnnnnnnnnnnnnnnnnnnnnnnnnnnnnnnnnnnnnnnnnnngcagaggtatttaaacaagaagcctgagtacaaggaccagaagaaaggttatatagctggaacgtggatagtgagccggatgtgtgtactgtggagatattgatagtanccagattacacgaggccttatggncatat

SEQ ID NO: 38938 - DNA, 305 bp, Homo sapiens
  misc_feature (1)...(305): n = a,t,c or g
attttctctcacatttttggtgggggattgttcggcttcatgggcaatcagagtagaagtcgaaatggcagaagaagaggagaggacatgatgcatccactcaaagtatctttagaagatctgtataatggcaagacaaccaaactacaacttagcaagaatgtgctctgtagtgcatgcagtggccaaggcggaaagtctggagctgtccaaaagtgtaatgcttgtcgaggtcgaggtgtgcgcatcatgatcagacagctgctncagggatggtccacagatccanctgnggggctttaatg

SEQ ID NO: 38939 - DNA, 314 bp, Homo sapiens
  misc_feature (1)...(314): n = a,t,c or g
ttgaaacagagtcttactgtgatgtggcnnnnnnnnnnnnnnnnnnnnnnnnnnnnnnnnnnnnnnnnnnnnnnnnnnnnnnnnnnnnnnnnnnnnnnnnnnnnnnnnnnnnnnnnnnnnnnnnnnnnnnnnnnnnnnnnnnnnnnnnnnnnnnnnnnnnnnnnnnnnnnnnnnnnnnnnnnnnnnnnnnnnnnnnnnacctggtttcnaaacaaccccaaattaacttttagggccaaaggttaatctcaaaagtncttggccaagttgttanaaaccggatttttaaggggaacnntcaaaggggaaattgg

SEQ ID NO: 38940 - DNA, 305 bp, Homo sapiens
  misc_feature (1)...(305): n = a,t,c or g
caaggcctcactgtacctgaagtgttgtgaccaggacctgtggctatctggaagaaaattccagatggaaatagacaaatgctgagagcctgaagactgcagggtggtggaagctgaatgagggagggggtgactagtaaaagcactnnnnnnnnnnnnnnnnnnnnnnnnnnnnnnnnnnnnnnnnnnnnnnnnnnnnnnnnnnnnnccggagcttaatgatgaccacncattggncccgtaaagggaaccacancnccttggggccaccgaaggttgaaaggtggaaaaaaaaaaaggntcag

SEQ ID NO: 38941 - DNA, 300 bp, Homo sapiens
  misc_feature (1)...(300): n = a,t,c or g
nnnnnnnnnnnnnnnnnnnnnnnnnnnnnnnnnnnnnnnnnnnnnnnnnnnnnnnnnnnnnnnnnnnnnnnnnnnnnnnnnnnnnntcgacgcggccgcgaattccagatctatgaatcgnannatnctgaaaaccccggaaggttcatttnactnggcttngggncccantttnatttctttatttanncnttggtttngcttnntttatggnacntttcctcntttangttcnattttggccntgnaacnttggactnntnaaatttttaagggctnaattannggcctttttttttt

SEQ ID NO: 38942 - DNA, 352 bp, Homo sapiens
tctttgatggtcaattagccagaaaatgtgctaaagcctgggtgctgtgctggattacaggcccaggaattacccccaaggtcctcagagtggtcctgccgtctgagcacagagacaattacagacctctaggagatgctacaaaggctttaattaagggacttactaacaccccactaagttttggaaattgaattcttttttgtgcttacctgatgtttcttttgtccagactttcacatgtatttcaacagagaacactatttcccccacatctgttttatgttggaagccgtttactgtgatagcagcaaagctgagagtttaaccagtataaggaagtaggtagaaa

SEQ ID NO: 38943 - DNA, 298 bp, Homo sapiens
cttaattctcaacattttctgagtaggctctacatctatagtgtctacagataaaatagaaactatattattgacggaacagatacacagagactatatggctaacagtgtatcaccaactaaaataggtccagtgtcctgtgggaaaataaaagtctcatgttcttggatggaaccatgtttggcacaagttcaaaaatcaaaaaattgaaagcagtaaatgtttctgtacattacccatatatctattttttgcaatcacaattttacccacttagggtgttaaaaaaaaaaaaaa

SEQ ID NO: 38944 - DNA, 353 bp, Homo sapiens
cttccgttgttctgcctttcttttaggtttccttttctcaaccccatctaaagcagaaagaaaaaataaagccgattaaattttactgttggtgaatattaatagctgatacgtggcacttgtacagtgtaattagtatcactagtgagtaattgagtaaatgttggaattaggtgacagtgggaaaggacctggggggagggatgtggatgggtaacatttttggtgtccctgaagtcattaactgtacagaaggcaagccttatatgagaataggatttaggtcacaaggtcctgtgctatctttagacagatgtgaaatggtctgttctccccacccttctgctctcttg

SEQ ID NO: 38945 - DNA, 352 bp, Homo sapiens
gacagggtcttgggcaggaaaagcagtctacagagaagaagtgaacagcctggctatgaatgtagaaaccacgcaagaatgggaggtggaaaacactactgcctggctcacttcccaccagctttctggtctccagtttcagtggactgtgtgacttcacttaacttagattctgtgagccacctgatatccttgtcacatgtctccttatatttaagctaacttcggtaggtatttgtttcttgtaaacaaactattcttggagaagaacaagaaaaacatgtctagacttcgttcaactaagatattctcactagcagtatcaattacattcctgttttgttctgatgga

SEQ ID NO: 38946 - DNA, 351 bp, Homo sapiens
atttttctttatgatgtggtatttttatataattataaaaagatccataaactgttagatttagaaatatatttttttaacctggtaaaagcagaaatgtatatctgcactgctcttttctacgttaagcctacccactgggtctataatattatgctgcagagatatccccattcacttcttgggagctatcctgagtttagatttaggatataaccatacatctattcttaaattcctttttctaatttggcaaaaggtaaagcttggtaataccattttttccactaaaattactccacaatgtgtttgtagtttcagagtgtatatgattgtgggtagagtgcagcg

SEQ ID NO: 38947 - DNA, 341 bp, Homo sapiens
ctttatgttgcatatcaaggaattattatgtgatagttgtttgactttaaaaagctaatgcagcacccattttttcccctacatttgttttgtgcaggaaatggggcctcattaaccctcctgggataatacaggttaatatgcacataaatatttttatgttctataatttcatgaagtacattttgtttgaaacatttactccaatggtcttatggtaatgttgcatgaaaacaaggctcactccagatgtgatttgctctcgctacaataaagttatccttgtaaattattccagtgtttacaaaaaaatgggggatcatggagaaaaattgtgactt

SEQ ID NO: 38948 - DNA, 72 bp, Homo sapiens
aaaacttcctgtaatttggccagtgatatgagtaaattctttgtccctgggatagattaaaaaaaaaaaaaa

SEQ ID NO: 38949 - DNA, 335 bp, Homo sapiens
ggatgaagggagatgtcaatctaaatgtcaacatgggatccaactctcagatgatacctcagaagatgagagaggctggggcgggccctgaggagatgctgaaattacccccaggtggctcagacatgctgcctgctcagcagaagatggtgccactgccatttggtgagcacccccagcaggagtatggcatgggccccagaccattccttcccatgtctcagggtccaggcagcaacagtggcttgcggaatctcagagaaccaattgggcccgaccagaggactaacagccggctcagtcatatgccaccactacctctcaacccttcagta

SEQ ID NO: 38950 - DNA, 427 bp, Homo sapiens
  misc_feature (1)...(427): n = a,t,c or g
ctttggaaggcnnnnnnnnnnnnnnnnnnnnnnnnnnnnnnnnnnnnnnnnnnnnnnnnnnnnnnnnnnnnnntctcgaggatccgaattccnnnnnnnnnnnnnnnnnnnnnnnnnnnnnnnnnnnnnnnnnnnnnnnnnnnnnnnnnnnnnnnnnnnnnnnnnnnnnnnnnnnnnnnnnnnnnnnnnnnnnnnnnnnnnnnnnnnnnnnnnnnnnnnnnnnnnnnnnnnnnnnnnnnnnnnnnnnnnnnnnnnnnnnnnnnnnnnnnnnnnnnnnnnnnnnnnnnnnnnnnnnnnnnnnnnnnnnnnnnnnnnnnnnnnnnnnnnnnnnnnnnnnnnnnnnnnnnnnnnnnnnnnnnnnnnnacagcnactcagttgnttaanctgccccaagtacanaccanagactnaancaagagaaaaagc

SEQ ID NO: 38951 - DNA, 295 bp, Homo sapiens
  misc_feature (1)...(295): n = a,t,c or g
ggtcaatgtatgaagacaatttttttcttcataaacactaagtacattttattgaaatataacatgaatnnnnnnnnnnnnnnnnnnnnnnnnnnnnnnnnnnnnnnnnnnnnnnnnnnnnnnnnnnnnnnnnnnnnnnnnnnnnnnnnnnnnnnnnnnnnnnnnnnnnnnnnnnnnnnnnnnnnnnnnnnnnnnnnnnnnnnnnnnnnnnnnnnnnnnnnnnnnnnnnnnnnnnnnnnnnnnnnnnnnnnnnnnnnnnnnnnnnnnnnnnnnnnnnnnnnnnnnnnnnnnnnnn

SEQ ID NO: 38952 - DNA, 306 bp, Homo sapiens
gaagttttgtggaagagatggaggaaaaggacggggttgtaaagataggtagtttttttttcaagtaaacacaaatatgtatataggactttcttcttcctatccaaatcaaacttttaaaaacaaaacttgagtttttaaagggtcattttaacacctctttttgaatttttcaatttacatataattcacatacaataaatttcacactcataaagtgtgtacactttaagtggtatattaacaaagtttgggaaccttccctgctacctggtttgagaacattttcatcaccacaaaaagaaa

SEQ ID NO: 38953 - DNA, 356 bp, Homo sapiens
  misc_feature (1)...(356): n = a,t,c or g
aacttgtttacatgtgtttggcccatctgtttaaacttcttgtttattttaataggagcaactcttgggtgcaagctccttttgtgcttgagaccactactggcctcttctccagctctgtttccctaatctgcattctaaatctcttctgtaaacaaaacttgaataacaactttttatgataaatgctgaacacctccaagatgactgctgcaaaataaactacttttacaaccagaaagcattctaaacacacagaaaatacttttttaatgctgtccttttcttaaaaaaacaaatagcaaaaacaaaaacacacacaaagaattttattttctgtgtgtgtgngctacata

SEQ ID NO: 38954 - DNA, 339 bp, Homo sapiens
  misc_feature (1)...(339): n = a,t,c or g
gattagggcagttgaattgaggaaagacttaggtaaaggaaaagtaatcagttgggagaaaaaaacagtatttagggaaatcattcctgatacaaagatgctaaatgagcatatagaagaaatgaaaacagtaaatgcattttcaactttcagaaagcttttgatgaagatccataccaaagtttcccaacatctaattcctaggagaatattttgtcacaattagatctggcttagagatgtgggaaacagggtaaggatgatcaggtatagtgtcctgaatgattgagcccgatactttgatcatttttcataaatgatttanaacagcctaataga

SEQ ID NO: 38955 - DNA, 337 bp, Homo sapiens
  misc_feature (1)...(337): n = a,t,c or g
tagaaatgcatttattcactaggtacaacagcaatgtaaagttatcaagttgtagttaataatataaaaaaattagaaagtattagtgcagaaatgattatctttctgtaagggtatattcccattatggtataaatgaactgatgaataggcattttcctaagttgattttaaaaattgtataactgatatgttttgagtttactttttatgaaatacatggaatgtgaagcaggtggccattatggaggtctgatataattgtgggcactcctgttatagcactagaatattgnntttttccctttttctttggcaaatagatttctctgtatga

SEQ ID NO: 38956 - DNA, 340 bp, Homo sapiens
tgggcccaaagtgtcaatagattctgtacacgagaagcccaagcttgagacaacacatagttgatatgaaatagcaatggaatgaatgaatgagtcttttgtttgatattatacattacaattagacttaagttctcattttataaataaatacagttacttacttcggtacctaaaatgacttgttgtttgatatgacagctgagccaaaaattacttaagccagtttcatggtttagaactatctcctgtccttgctaacggtgatacatagtttgacttggtgttaaaataattggtattgagaatggagctctgctgctagagtacaaggagttct

SEQ ID NO: 38957 - DNA, 335 bp, Homo sapiens
  misc_feature (1)...(335): n = a,t,c or g
catcaataccccatcctcagtaccaccattggtaatttgaacatttgtttttgttactgagctttactctatttaagaataaatatgttactgtttatccatgatcccattgatggacaactggactgtttttggctatttatgactaaagatggtataaatatttttgtaaaagtgtttttgtggacacgttttcatttttcttggtatataactagtattggaattgttatatcaaaataaatgtaagtttaattatgtaagaccagacttttccccaagtnggntgngccttttacattctcncaatggnntgtnaaanttccattgncctt

SEQ ID NO: 38958 - DNA, 341 bp, Homo sapiens
  misc_feature (1)...(341): n = a,t,c or g
gtcccctgagacctccccagaagctgagcagatggtggcttgannnnnnnnnnnnnnnnnnnnnnnnnnnnnnnnnnnnnnnnnnnnnnnnnnnnnnnnnnnnnnnnnnnnnnnnnnnnnnnnnnnnnnnnnnnnncagaagctcctatttcgattggtataaacaaagtaagactttttgtaagaaaaccaaattttcagagagaaagtaaaaaaacaaaaaacttcaatgggtgagtttactggctttttaaggaatttcaaatagttaaggagatgggttgaagaagttagccatggtttaatggccttgattgccagattaccagaaacaaangata

SEQ ID NO: 38959 - DNA, 337 bp, Homo sapiens
  misc_feature (1)...(337): n = a,t,c or g
aactggcacattctctatgaaaaagacaattattgttcttggtcaggtggccagttggcccagttttttggagcatagtgttaataaaggttagtctcttcagatatgagccagttgacttggctatataaatagctgctgtcacgggcaggtcagaggtatgtgtgtggatagactggatctgtaaccaccaatcagaaatcaatcagcaatcatttactgagcatttgctatgtgcctggcactatactaggagtggagctttgaaagattttttaaaaatacatgagctataggctangtacagtggcttatgtctgtaatctnggcactttta

SEQ ID NO: 38960 - DNA, 320 bp, Homo sapiens
tagcaacctcaaacagacaccatggtgcacctgactcctgaggagaagtctgccgttactgccctgtggggcaaggtgaacgtggatgaagttggtggtgaggccctgggcaggctgctggtggtctacccttggacccagaggttctttgagtcctttggggatctgtccactcctgatgctgttatgggcaaccctaaggtgaaggctcatggcaagaaagtgctcggtgcctttagtgatggcctggctcacctggacaacctcaagggcacctttgccacactgagtgagctgcactgtgacaagctgcacgtgga

SEQ ID NO: 38961 - DNA, 339 bp, Homo sapiens
  misc_feature (1)...(339): n = a,t,c or g
nnnnnnnnnnnnnnnnnnnnnnnnnnnnnnnnnnnnnnnnnnnnnnnnnnnnnnnnnnnnnnnnnnnnnnnnnnnnnnnnnnnnnnnnngcgcctggccttcccctttgcttttataccctggaattagttgttgctattcttatttgatgaagtctgcttatttgaattcactcacctgcttgccaacttttttgccttcccttccttcttttatcatacttcatccttttgagttaaatttccttcttccagaggtaggctttaacactgttttttagtgagagtctgttggtgctaaactctttttgcttacctaaaagtgtttttatttgtcata

SEQ ID NO: 38962 - DNA, 329 bp, Homo sapiens
tacaaaaggaaatttatttcaaaagcataaggggacatttacatttaaacaagatgataaacaggtgtcttgcaaaagaaaaaaatccatggcattaagtttttcattcaaattcggaagcaaaaataacctaagttgtgcactattgccttaggaaagggaaggggaagggtgagggataagggaacagtcaactcagtatcaaacttgagaaagtaaagtcacttctgctcagttctgagtttacaaatatgcttataaagacaaaaagtggtaaaattatatttaatgttcaaatttatttagctgtagtctctataattctgtac

SEQ ID NO: 38963 - DNA, 328 bp, Homo sapiens
ccgccctgggccagggactccacaatgacctccgccgagcccacctccagctctgcaggcggctgcagcgccaccaccaccatcttctcgtcctcgatgatcaggttgcggagcttgcgctgccgcgggttgtagttctctacccggtcgtggatctccatgtgcctccgcaggtgggcctgtcgggtaaacttgtagccacactcggtgcactcaaacttacagaaatcactttgttgtcttaagaaattaatactctgcatcttgttaattttaactaatgcctacattcataactgaatctagaccagaattgtgagatacaaaa

SEQ ID NO: 38964 - DNA, 455 bp, Homo sapiens
  misc_feature (1)...(455): n = a,t,c or g
gtggtgctcgccctttganagcctgntgcttgggangngnnnnnnnnnnnnnnnnnnnnnnnnnnnnnnnnnnnnnnnnnnnnnnnnnnnnnnnnnnnnnnntctcgaggatccgaattccnnnnnnnnnnnnnnnnnnnnnnnnnnnnnnnnnnnnnnnnnnnnnnnnnnnnnnnnnnnnnnnnnnnnnnnnnnnnnnnnnnnnnnnnnnnnnnnnnnnnnnnnnnnnnnnnnnnnnnnnnnnnnnnnnnnnnnnnnnnnnnnnnnnnnnnnnnnnnnnnnnnnnnnnnnnnnnnnnnnnnnnnnnnnnnnnnnnnnnnnnnnnnnnnnnnnnnnnnnnnnnnnnnnnnnnnnnnnnnnnnnnnnnnnnnnnnnnnnnnnnnnnnnnnnnnnnntgtgactgnttnaaggggngggntnttngtnggntnnttntnactcgtgtnnngcttttt

SEQ ID NO: 38965 - DNA, 333 bp, Homo sapiens
  misc_feature (1)...(333): n = a,t,c or g
ctagcataagcccctatggtccatggtggaaaggacaggtcatctgttttaagaatagtttaaatacactgtttttccttttccagcagtgtttgcaaaaaattttcatgtcaaagcagtaatgaagacttccgtgttgctgtcttgggagattccagagaattataactccgccatgcctttcaaaattctttatgatgatgggaaaatggtagaagaagtggatggccgagccacacagaagttaattgtcaacctgaagcctgagaaatcatattcatttgtgctgacaaatcgtggaaacagtgctggtggctgnagcacagggtccgg

SEQ ID NO: 38966 - DNA, 321 bp, Homo sapiens
gctgaaatggttcattacgacttttggtaatttcttcacattcatctgaagagcttttgctctgagagtgagattcactggtactctccggtgctagattataagctgcaagaggaacctgacttcctaagttacttgtgtgactttcagtcaaatccatattttcacctgataagagttcagtctttctatcagtcaatgaaatagacaaaggatttgacaggctctgctgtattctttccttagatacatgaggaactgagttacaatttacattcattttcccatcttctgatgtggtcataagattttggagcatca

SEQ ID NO: 38967 - DNA, 329 bp, Homo sapiens
  misc_feature (1)...(329): n = a,t,c or g
nnnnnnnnnnnnnnnnnnnnnnnnnnnnnnnnnnnnnnnnnnnnnnnnnnnnnnnnnnnnnntttgggttttggaatatttgcatttgnnnnnnnnnnnnnnnnnnnnnnnnnnnnnnnnnnnnnnnnnnnnnnnnnnnnnnnnnnnnnnnnnnnnnnnnnnnnnnnnnnnnnnnnnnnnaattttggattttggagcatttcaaattttggagtttaggatgctcaccctatgttttaaagcaatttatttctctctaattaaatatgtcttctgcaatcttttactttattaatttgctgataatttgtgtagacagtaccaatggt

SEQ ID NO: 38968 - DNA, 352 bp, Homo sapiens
  misc_feature (1)...(352): n = a,t,c or g
nnnnnnnnnnnnnnnnnnnnnnnnnnnnnnnnnnnnnnnnnnnnnnnnnnnnnnnagtggactacttttgtaattcacatttaaagtttacatttattataaagcacatggacaagctctcactgtatcaattacacatatgaagcaacttgcctcatatattgtacaactagatcatgagttccaaaactatgttaatcctcagactttaaatgtgacatccataacccctatcagtgtacagacatggatcaaggccatgagcttaaaatatattaccatgaatgagttcatcacacccaagcacatttcaagagtaaataanatgggtgcccaatgctctgangcatta

SEQ ID NO: 38969 - DNA, 334 bp, Homo sapiens
  misc_feature (1)...(334): n = a,t,c or g
nnnnnnnnnnnnnnnnnnnnnnnnnnnnnnnnnnnnnnnnnnnnnnnnnnnnnnnnnnnnnnnnnnnnnnnnnnnnnnnnnnnnnnnnnnnnnnnnnnnnnnnnnnnnnnnnnnnnnnnnnnnnnnnnnnnnnnnnnnnnnnnnnnnnnnnnnnnnnnnnnnnnnnnnnnnnnnnnnnnnnnnnnnnnnnnnnnnnnnnnnnnnnnnnnnnnnnnnnnnnnnnnnnnnnnnggcttctttgagcccagaaagagtgtgtttgggtgacttgatggccagtggagagaaaaaccaataggttagaaacnatgtcagaatgagaaaggggaatcat

SEQ ID NO: 38970 - DNA, 334 bp, Homo sapiens
  misc_feature (1)...(334): n = a,t,c or g
ttttcttatatctactcttttgcttacagtgatccctgacttagactcactggctgtgagacttagaaagggtcttaggaagccaatcctttatttaagcctatcggatttgagttcagcaaggttgagcaacaagtccaagcacacacagtgattagtggctattatgattgagaangtatangcgngacancatntnctgggantatatttaannanctcctttnnnngnatntcantnantgntnttcncnnntanaggnntnnacnntatgttattttgggnntgctncnnnngtttccttgttttnnnnntgatatnnnngnnnttttg

SEQ ID NO: 38971 - DNA, 332 bp, Homo sapiens
attttatttatggaaataagaacctctcattggatgactattcaaatttcaaagcagacttcttgaattgtttacgtaacttttgcctgaaggatttagactgctttctaatagtgaaactaatatatatggtggccagagtgtaatatatgctaatactttggcatgggagatatttatcatgagtttttactattaaaaaatgttatacatttgcctacgagttttataaatgatgttgccttcagaatttgtgtgaaggtacaaaactaaaaatatcatgtatctgatgtgcaatggaaagtcttgtcatcattagatatgagttcttg

SEQ ID NO: 38972 - DNA, 332 bp, Homo sapiens
  misc_feature (1)...(332): n = a,t,c or g
gagaatctctnnnnnnnnnnnnnnnnnnnnnnnnnnnnnnnnnnnnnnnnnnnnnnnnnnnnnnnnnnnnnnnnnnnnnnnnnnnnnnnnnnnnnnnnnnnnnnnnnnnnnnnnnnnnnnnnnnnnnnnnnnnnnnnnnnnnnnnnnnnnnnnnacaagcggggagcttaaaatagtaccttgtatgtaagagcaaaataaaagttttctatcctgatgacttgagaggcccaaagttagtgatacatgattatacttcatttttatgggtgtagtcgcacaattttgttctatggcaaatactatttacaaaaacacctgtaaatgatcgg

SEQ ID NO: 38973 - DNA, 338 bp, Homo sapiens
  misc_feature (1)...(338): n = a,t,c or g
gggaggataaaatgttttcagattgggatgttttgggtttctagcattattggtacatgtaggtaagaatgttaagagtaaggctttggttgttggagaagctactaattgttagtaggtgttcagagaataactgctggtggtctgtgcacccatgaccatagtaagacacataggattcagtgttcttgtgggaacctgggttaggtaagagatttagagggaacccagaaatacagattgtgtttgactgatgtggctgagggactgaggttatgaaattggctctctgaaatttatganggagagagaataatatgtaaatcccctcttcattt

SEQ ID NO: 38974 - DNA, 314 bp, Homo sapiens
ctaaattctagtgatccattgatctatttgttcattttaataccaatgtcacactgtagttttttatgataagttttatgataagtctttatttctgatagagccaaacctcccaccttgctgtttctctttaaggtgatcctggccctttatacttcctttgagttttagaattagctcataaaattccacaaaaattgtggatcttatttactgagtttttatttaagactgcattgaatccttaaaaattccacttctaggtatttatccaagtgaaatgaaaacgtatgtccacaaaagagtggtacatg

SEQ ID NO: 38975 - DNA, 416 bp, Homo sapiens
  misc_feature (1)...(416): n = a,t,c or g
cctaagggggagccccttgatgcngattgaanctgaatcgagatgaagaaccccaccnancccaaaaaaagagatctctcgaggatccgaattccnnnnnnnnnnnnnnnnnnnnnnnnnnnnnnnnnnnnnnnnnnnnnnnnnnnnnnnnnnnnnnnnnnnnnnnnnnnnnnnnnnnnnnnnnnnnnnnnnnnnnnnnnnnnnnnnnnnnnnnnnnnnnnnnnnnnnnnnnnnnnnnnnnnnnnnnnnnnnnnnnnnnnnnnnnnnnnnnnnnnnnnnnnnnnnnnnnnnnnnnnnnnnnnnnnnnnnnnnnnnnnnnnnnnnnnnnnnnnnnnnnnnnnnnnnnnnnnnnnnnnnnnnnnnnnnnngananaccannnngananaanannacnaanatgcntgcncnnanaaag

SEQ ID NO: 38976 - DNA, 306 bp, Homo sapiens
  misc_feature (1)...(306): n = a,t,c or g
tttaagttctggagtgatcttgccaatggtatttagatggaatgggtctagttgggaacactaggtggatgggagaggatggaaaagagagatcagagcactgagccctgggcataccacctatactacagttttggagacatgtgctgttttaggtgctggagatacatagtattacattcattccttctttcagcaagcctttgttgaatggccactannnnnnnnnnnnnnnnnnnnnnnnnnnnnnnnnnnnnnnnnnnnnnnnnnnnnnnngtcaaaaagtctgtaagtttaaggaactta

SEQ ID NO: 38977 - DNA, 308 bp, Homo sapiens
  misc_feature (1)...(308): n = a,t,c or g
aatatatctcacaaagtgtgtccttgctgaaatgggctcaaaacacatgcagcttggccatnnnnnnnnnnnnnnnnnnnnnnnnnnnnnnnnnnnnnnnnnnnnnnnnnnnnnnnnnnnnnnnnnnnnnnnnnnnnnnnnnnnnnnnnnnnnnnnnnnnnnnnnnnnnnnnnnnnnnnnnnnnnnnnnnntcgacgcggncgngaattncagattatgaattcgtanatactgaaaaaccccgcnagttnacttntctgtgcntngtgcnncatntctatttctttcatttatacattgggtttgct

SEQ ID NO: 38978 - DNA, 253 bp, Homo sapiens
  misc_feature (1)...(253): n = a,t,c or g
atgcannnnnnnnnnnnnnnnnnnnnnnnnnnnnnnnnnnnnnnnnnnnnnnnnnnnnnnnnnnnnnnnnnnnnnnnnnnnnnnnnnnnnnnnnnnnnnnnnnnnnnnnnnnnnnnnnnnnnnnnnnnnnnnnnnnnnnntatgcttctgtcactcaaatcaacatgaaaatcaaacatcagtgaggaggtggggaatgggaatcatagaattgggagcagtgaaaatactaagtcctctttttttttttttt

SEQ ID NO: 38979 - DNA, 341 bp, Homo sapiens
taaggccatgttttatttgctgattaatggacaaaaggcaatgtaatttattttcaagtattttcttgaaagtctgtgctcataaaaatcatgaaaagttggaaagactgttaaatcactgaaacttcaaatatatcttacacaatcttgtttgtacaaaaatacaagttaaatataaacataaagcaatcatggtaattttatgcaaatctgttttatgtgatcatcagttatatataaaagtttctcagttctgttatttgtgaaaagatcaataccagattgaatgactacctattggcaaagggccctaaaaagcttactttagcactcatcttttc

SEQ ID NO: 38980 - DNA, 339 bp, Homo sapiens
ctacaacccagtttactgtttcaaaagcaatttctctttttaagcagacatttttacacacatgcatattttattacatccctttttaaaagtaaacagttgggacttagtatactcaaatatgcccatatcacatgtagatctagtttgtttcttttaaataaacacagataccttatggtgtagataaaagcattagtttataatatgaaaattaatattaggtaccctaagactctgtagtgataatgacattgatacattgtattggtgtgtgttccttcataatttcaggatactacccagaaaattatcattagaaattttttttttcttggg

SEQ ID NO: 38981 - DNA, 129 bp, Homo sapiens
atcattctcatgtggcttcctcaaattttaatttaagctaatatttatatgattacatacatgttattatagttaaatactcattatagaaattttgtagaaaaattaaaaccacaaaaaaaaaaaaaa

SEQ ID NO: 38982 - DNA, 328 bp, Homo sapiens
  misc_feature (1)...(328): n = a,t,c or g
ctcccctgccccgcaaaacaaacctatggactgtaagatacttttggttattctcctcccttcctatatgtatttgttgcataatattttctgattattattttggtcttatacagtctgcatgcttagatttacctaggtgtactaatgccttaaccattgcatcttgtgtaaattgccatcttctgtaactacattcatttgctttgtttcactgtcactcttttttttnnttaaattnannntagtgttcnaangnttnnngnagttnntancgngagtntatttngcngttttggnnnnttggtaanacncgtgnggnnnacct

SEQ ID NO: 38983 - DNA, 318 bp, Homo sapiens
ctccatcctacttatgttagatttctgccttttagtgcactgaagggctgcagaaaagtacagtggctaggagtgtgggttctgaatccagactagttaaattcagatccatcgtctaccaattactagttgtattccacatctgcaaaaagggaacaatagtatctatcttatgatactatagatagtatatagatactacctatagtatatagatactacctatagtatatagatactacctatagtatatagatagagactacctatagtatcttatgatactatagatatagatcaatagtctctatcttatga

SEQ ID NO: 38984 - DNA, 371 bp, Homo sapiens
tttatatcctaaaggtggtctctcttggccaacagcaatttagaaattaattgagtgggtgattgcttatttactatatgatgtaatacgttagaagtatattaggcaatattacattacaaattttacaactatctaatccaggggttatatcaggcattttggatcttcccagggaaacaacaaaaacttttctattgaattccattgttttatctatgttgtaaggatatttcacaaaccatgtgtcccaagcaccatcagtcttcactttgagagttttctgagagtgttctcttagttacaaggaacagccctagggtggtggttgcctgtcaactagtaagaaagatggggactgaaaatggtgg

SEQ ID NO: 38985 - DNA, 376 bp, Homo sapiens
ctgggattcatcgggaacccccacctccacccttttcagtgaataaaatgcttccacgtgaaaaagaagcttctaacaaggagcagcccaaagtgaccaacaccatgcggaagctctttgtaccaaatacccaatctgggcagcgggagggtctcatcaaacatatcctggcaaagcgagagaaagaatatgtcaacattcagactttcagattttttgttggaacttggaatgtgaatggccagtctccagatagcgggttagaaccttggctgaactgtgatcccaatcctcctgatatctactgcattggattccaagaactggacttgagcacagaagccttcttctactttgaatctgtgaaggaacaaga

SEQ ID NO: 38986 - DNA, 371 bp, Homo sapiens
tttagacattaaaagaaaccaagaaggcctagaagagctgttatattaatataataagttaaatgattcttaacctctaatgcaataaatgttaaacatgtatgaataaactagaactggagattgcccatctcctggcttcttagtaagaagtgtctgttctagttttgatcagctaaataagtttgactcattttttagtttttagtgtggttgtaaaatggagttaggaaataaaaacacctcaaataaagagacttcttaaatgcatagccacgttaactgtgacaaggaagcccataatctgcttaaggtcacagcaaatttcaatacattttgcagctgtcccccaaaagggattaaaacttgtt

SEQ ID NO: 38987 - DNA, 368 bp, Homo sapiens
gaactgagaagccatttcacatttaaaaatttttaaagctccacagttgagactatggagaaagggtagctctcatacacaaatgttgggagtataaattggtacaatactttggagatcaaatgatgatgacctccaccttgatatatatgtagaaactctcacacatgtgcacaagaaggaaacatgcaagaatttcagagcacactgtttccaaaaaaactaaaaatgaccaaatatcgatcatctaaagaatggataatgtgggaactacaaacaccaaattcaagatagtggttacctctgtaggacaggaaaggaggtgtaatggggaaaggacaacgggggtttcattatatttggatgta

SEQ ID NO: 38988 - DNA, 379 bp, Homo sapiens
  misc_feature (1)...(379): n = a,t,c or g
atttaatatcaagagtgcaatacaaaaggcccaaatacaatgaaggaacacattcccccattaacaccaacgacaaagctcttttaaacatgtgcctgttgaatggaacggggatttcataaaattcactaaaaaaaataatgcagtgagtctcatcacagctaatatccttatacaatctagttgtgaaatgaatgtttataatgcttcaaacagtttcaacctgaagtttgataccacaccttcatgtttgtcagtcctcagtaagattatctacagtttttgcaaccattcaaagaacnnaccattgaataaaaccacattgattaaggctcaagcaagtaatatagagcccnaaactanatgggtaaanatatgg

SEQ ID NO: 38989 - DNA, 349 bp, Homo sapiens
  misc_feature (1)...(349): n = a,t,c or g
tgacgatagctctgatgggcacagagcttgctgatggcttccaaaggatggctcctgccttttaccttgttaccacagctcctcatatggcactttgagtggcagttctggaatctgaaaaagaaaggatagtgtaagaatggtggtaaaataaaaagaactgtctttatagttcctgctttataggctcaataaggatttttaatacatccttgcaaaattgtttttgtagtttttgatactaatctgttacttnngnanttcctaangantagatttggcctgntanntcnnggtnatnngnncgtanntcctnntggnttcttancctgggtnntntatggccggg

SEQ ID NO: 38990 - DNA, 347 bp, Homo sapiens
  misc_feature (1)...(347): n = a,t,c or g
gagtgggattttagagttaatctcaaaaaatgctggtgggattgaacatttacctagtctttctagagggaagataagcagtacacagcaaaagtccttaaaagacttcagacactgatacaaaatgactnnanntnttggttgttntgntgnntgtttcntgattgtntttngctgnttnttngtgggtntntttngtngtttttntttccgggtnntantnttnntnangnctnnttnttnnagnnntntntttnagangtatntngnntnntgnatnttctnnngattnttgnnnntttnttgtgnttnnttntttgctnngncgatttnggttttnaanatgt

SEQ ID NO: 38991 - DNA, 346 bp, Homo sapiens
gcatggtactggtgtaaaagcagacatacagaccctggaacttattacagagttcacactaagttattgttgctttaatcaatcaatagtctttaaattaaaaaaatagtattttatatttgtccacctgtttgcccttccatactctttaatttcatcccatcaatctgcatgcacctcagcctgggattatttctcttcagtatgaaacacttcctgtagtatttcccatagcacaagtttgacaatttattttgtcagcttttgtctcaaaatggaattttgtatttttgaagattttttttgcaaagcatacaattaggtttttctctttcagcactttaaa

SEQ ID NO: 38992 - DNA, 337 bp, Homo sapiens
  misc_feature (1)...(337): n = a,t,c or g
ccccctttggttttcacatgtggcccctcacgagccacatctgattgctgaaaattaataatcttcactctccaggcacttactcttcacaaactcagataatcgtcgacgcggccgcgaattccnnnnnnnnnnnnnnnnnnnnnnnnnnnnnnnnnnnnnnnnnnnnnnnnnnnnnnnnnnnnnnnnnnnnnnnnnnnnnnnnnnnnnnnnnnnnnnnnnnnnnnnnnnnnnnnnnnnnnnnnnnnnnnnnnnnnnnnnnnnnnnnnnnnnnnnnnnnnnnnnnnnnnnnnnnnnnnnnnnnnnnnnnnnnnnnnnnnnnnnnncctaaattctt

SEQ ID NO: 38993 - DNA, 350 bp, Homo sapiens
  misc_feature (1)...(350): n = a,t,c or g
cttttatgaatgtcaagctattaattcaagacttggaggatattgagcagagggtgcctgtgatggatgcccaatacaagataattacaaagacagcacacctcattaccaaagaaagcccccaagaagaaggaaaagaaatgtttgcgaccatgtcaaagctcaaagagcagctaaccaaggtcaaagaatgttactccccactcctttatgagtctcagcagctgttgattncgntggaggaattagaaaagcanatgacgcctttttgacttacttnngaaaatcattgaaattattantgctntnngnnttgangtctntcgacnngtcttttttngcnaaaattt

SEQ ID NO: 38994 - DNA, 335 bp, Homo sapiens
  misc_feature (1)...(335): n = a,t,c or g
ccaaagtgtaccaattttttttttttactgggcttcaaataaatagaaaaatagttataatattgatcttcaactttgccattcatgcttttatgcatattaggctacgtattccacattgaaagcatgaaagtgtctaggcctttgaatggcatatgccatttctgggaaatgcatctggaggctaagtattgctttttacaaataattgccccctttgttttaaaaagaagaaatgcatattgaagtagtttgatgatttgtttggcatataggaagcacgctggtgctaagtattttttaaanggttatgtaagcaaagctgaactgnaaat

SEQ ID NO: 38995 - DNA, 449 bp, Homo sapiens
  misc_feature (1)...(449): n = a,t,c or g
tttgaagnttgatgtgggttgangaactatnctatgtatnngatgctganganacnccccaaacccagancnngagaggnntcgaggatccgaattccnnnnnnnnnnnnnnnnnnnnnnnnnnnnnnnnnnnnnnnnnnnnnnnnnnnnnnnnnnnnnnnnnnnnnnnnnnnnnnnnnnnnnnnnnnnnnnnnnnnnnnnnnnnnnnnnnnnnnnnnnnnnnnnnnnnnnnnnnnnnnnnnnnnnnnnnnnnnnnnnnnnnnnnnnnnnnnnnnnnnnnnnnnnnnnnnnnnnnnnnnnnnnnnnnnnnnnnnnnnnnnnnnnnnnnnnnnnnnnnnnnnnnnnnnnnnnnnnnnnnnnnnnnnnnnnntatatnngcttagatngtttggatantnnnntttngtatncgntttatttttnggnggtatnttngnganatgcnttat

SEQ ID NO: 38996 - DNA, 330 bp, Homo sapiens
  misc_feature (1)...(330): n = a,t,c or g
ggcactaattgtaatgtgaacttagtagcaaaagacccagaaatagtaagcccttgacctaaaaactaactgatttgtatgatattcatgcagaaacaatgatgaaatggagtcaagttttctagtgtcattgttatcaaaataactgtcaaaatagtaagtttgaaacttaaatgagcacaaaataaaattttgttttctaacaagaccagatttctttttaaaaataattctgagttagacatagtgaatttcctaaaatctaggtgatgctaccttatatatnccntattntnngtacnngtgnttcnannncntcncnncntcgat

SEQ ID NO: 38997 - DNA, 318 bp, Homo sapiens
  misc_feature (1)...(318): n = a,t,c or g
atcactctgctgttagtcatttctaatcaaagccttttagacattttgggaaaagaatattggactaaattagttatgggatctggcttctatcttccccactctacccagtgacctgggcatatcatttaccttgttaagtgaaggagtttgtcatttctgattttatgatnataagtgtgcatttcctagggtttctctgttggtcagatgatatataaaagtgctttgaaaacttaatcacaatanagtgatattttgagtaaatttatttgataaaatttgtaataaatactgntaatacttaaaggttgatat

SEQ ID NO: 38998 - DNA, 325 bp, Homo sapiens
  misc_feature (1)...(325): n = a,t,c or g
ctttttttttgtttttcattttttattttcactgctttacattatttttaacataattggtatcagtttcagtttttttcttttgtgtttttcaatttgttcttttacttttttatttagtactttcagattgcaattgatttttgcattttctttctatcagtttttgtgaccnnnggtanannttttaggtgnggaangttnctattcccttgntggannnnnnnagtnctnntncanaacttnnannnnttntttntnagnngnnantnngggncnngnagnnnnncttttttngngngggngncncnntttncctnaaaga

SEQ ID NO: 38999 - DNA, 345 bp, Homo sapiens
  misc_feature (1)...(345): n = a,t,c or g
gcnnnnnnnnnnnnnnnnnnnnnnnnnnnnnnnnnnnnnnnnnnnnnnnnnnnnnnnnnnnnnnnnnnnnnnnnnnnnnnnnnnnnnnnnnnnnnnnnnnnnnnnnnnnnnnnnnnnnnnnnnnnnnnnnnnnnntagaacatggagtgaaagcaacagcttacaaaaatacaaagacactaaccacttttaggaactcaagtctatataatccaactgaaatgactgaaaccctgtgacatgaaaatggaaaagatttgggaatattttcaaaagataaggggtttagatcaaaatttcagagactgaatgttctaacatgatatagaatcaatttcaggaatg

SEQ ID NO: 39000 - DNA, 344 bp, Homo sapiens
  misc_feature (1)...(344): n = a,t,c or g
ttttgtggtctcaggatagaaaaagatttcttaaataaaattccaagaacataaccgtaaggagaaaaatctgattacataaaaatcaagatttatgttcaacagacaggctacagaatggaaagatgtttccaatacccaaaagtgacgatggaatagacaatggcctggaatttgataaccaaaaaaagggacaaattagaaaagtagttaaagcataggaaaaggatattcacataacgggaaaccaaaataactcaggatacaaagaaatgcccacattcaaatcattcaaaagttcaatttaaaacaagaaactaccactttataccatgngnggggtg

SEQ ID NO: 39001 - DNA, 326 bp, Homo sapiens
  misc_feature (1)...(326): n = a,t,c or g
caaaatttgaaataatttcaccaggctaaataaaggaaaatggaaaccagttaagaggcacagtgtacagaggaggccgggatagagccatgagggttataatattaatatgtatatatgtaaaagcatatatatgttaactattgagaaaaaacaagttttgcattttataattggatatagtcaacatataatgtatgtttttgtttgttgctggattatggtnnttttantctatctntgnacnnttttntncacanntgntttgngtnnttannnctttgntttnaaatttnantatgttgtannntttattttaatnttta

SEQ ID NO: 39002 - DNA, 444 bp, Homo sapiens
  misc_feature (1)...(444): n = a,t,c or g
tttgaangcnnnnnnnnnnnnnnnnnnnnnnnnnnnnnnnnnnnnnnnnnnnnnnnnnnnnnnnnnnnnnntctcgaggatccgaattccnnnnnnnnnnnnnnnnnnnnnnnnnnnnnnnnnnnnnnnnnnnnnnnnnnnnnnnnnnnnnnnnnnnnnnnnnnnnnnnnnnnnnnnnnnnnnnnnnnnnnnnnnnnnnnnnnnnnnnnnnnnnnnnnnnnnnnnnnnnnnnnnnnnnnnnnnnnnnnnnnnnnnnnnnnnnnnnnnnnnnnnnnnnnnnnnnnnnnnnnnnnnnnnnnnnnnnnnnnnnnnnnnnnnnnnnnnnnnnnnnnnnnnnnnnnnnnnnnnnnnnnnnnnnntngttncannggtttnnctnactnattttcngttntgtnttnnntnaaaccaggngacagnggttntngaattatcaccatcttc

SEQ ID NO: 39003 - DNA, 329 bp, Homo sapiens
tttcaagccaccaccacctcccatcaagtacacttgcattcaagagcccaacgaaagtgatctgccttatcatgagatggagaccctctagtctcgtgagactttgccccatggcagaactctgctggaatcctattgagaaggtagacattgtgctttattaatatagtcgctcttcagccatgcctttgctgcagctgaaatggaagtcagaagtgagtgacctgttttcccagcaactcaccctcttccatctccaaacgcctgaagcttaaccaagagtgagaggatatgtcatgttcacactcaatgcaattcgtagtggtttt

SEQ ID NO: 39004 - DNA, 329 bp, Homo sapiens
  misc_feature (1)...(329): n = a,t,c or g
nnnnnnnnnnnnnnnnnnnnnnnnnnnnnnnnnnnnnnnnnnnnnnnnnnnnnnnnnnnnnnnnnnnnnnnnnnnnnnnnnnnnnnnnnnnnnnnnnnnnnnnnnnnnnnnnnnnnnnnnnnnnnnnnnnnnnnnnnnnnnnntgctgtggtccacgcactgtaagagcttcactggtctacagaaagaaaataatatttaagggattatttaaataactttcatccatcaaccatttatggcttgcctgaaaagtcctggagatacagtagtctctgacctcaaataatacacaaactattttctctaaaaatattagtggcccagca

SEQ ID NO: 39005 - DNA, 322 bp, Homo sapiens
  misc_feature (1)...(322): n = a,t,c or g
gaaaaatgtccagtggatagtagttttcaaaatctaggaaaactacattcagcatgatcccaattttatgtaacaaattcgtaaggaaggaaatttcttaacttacacatcaccagccattctttctaggttgtagaatgacaccagtgtgggttgtgggtttttgttttttgtttngggggntattnnctgnctannnntnnctttntnccncntcngtnctcccatntatntnntcgnnnttcntntcnatngctatgnnnnctgnctncnnnntncnttncntnngntntactccntaatctttnntttanntnctccc

SEQ ID NO: 39006 - DNA, 332 bp, Homo sapiens
  misc_feature (1)...(332): n = a,t,c or g
tttgcttcttatcacacacctacttctgtttcccatcacataccatactgctccattctttctgatcttttagctgtgaatttctgccactgcaagaccaactgaatccaaatggggtcttagccctaggaatggaggcaggtagtattttgcattttatnnnnnnnnnnnnnnnnnnnnnnnnnnnnnnnnnnnnnnnnnnnnnnnnnnnnnnnnnnnnnnnnnnnnnnnnnnnnnnnnnnnnnnnnnnnnnnnnnnnnnnnnnnnnnnnnnnnnnnnnnnnnnnnnnnnnnnnnnnnnnnnnnnnnnnnnnnnnnnncaccgcaccaccc

SEQ ID NO: 39007 - DNA, 332 bp, Homo sapiens
gagcacaactgcaaattcctttggtttcttcttacattttcaacatttgaaacagctgttttaagattgtattttcctggggggcatcctgtagcaacatctcattgattgctttgtcatcatccttctgggtccatacctcagaaccatacaagttcatcactccaggccacagtgaaagcaagaggcgtggtcttcaggccacctctgggcatcattctgaacccccttgtgatccagcccacttctcacccacaggtaacacgtacacagacctctcggccggaatctccagggatgaccagcccctccccacgcatccagataatctg

SEQ ID NO: 39008 - DNA, 329 bp, Homo sapiens
aattcccacatgcattttctctctctgcctgactcctttcctgcctcatgcaacccggagatggaggactgccctcccagcccattccgcccttcctgtccaagatctatgaggaaactgaggaagaaagtggctatgctcacttgcccagcatcatataagctagggagtgacagaacccaggatttgaacactgactgtctgacatcagaactagtgcttctggtttcagaaaatctgcttttcctaactatagaaaagaacattgctggccattacattaaagtaagcaatgggaaaataactatgcaaagctgcaggcaggaaaa

SEQ ID NO: 39009 - DNA, 340 bp, Homo sapiens
  misc_feature (1)...(340): n = a,t,c or g
nnnnnnnnnnnnnnnnnnnnnnnnnnnnnnnnnnnnnnnnnnnnnnnnnnnnnnnnnnnnnnnnnnnnnnnnnnnnnnnnnnnnnnnnnnnnnnnnnnnnnnnnnnnnnnnnnnnnnnnnnnnnnnnnnnnnnnnnnnnnnnnnnnnnnnnnnnnnnnnnnnnnnnnnnnnnnnnnnnnnnnnnnnnnnnnnnnnnnnnnnnnnnnnnnnnnnnnnnnnnnnnnnnnnnnnnnnnnnnnnnnnnnnnnnnnnnnnnnnnnnnnnngagcgtctattttgctgtgggttacaaaatcaaggattttagaattgccctttgcaaatggaaaaattcctatat

SEQ ID NO: 39010 - DNA, 199 bp, Homo sapiens
cgttccttcttaatatgatttagctggaattcattttcttttcgtttcatgtttaatttcataaaacgtttaacaattggcatatatacttggcattcctgtccaccaaggattgtaatccaagcctgggaaaatcttaaatttctttttacttaaatctggaaatttgtctccattctgccacctttttttttttttt

SEQ ID NO: 39011 - DNA, 448 bp, Homo sapiens
  misc_feature (1)...(448): n = a,t,c or g
ttgactcctttggaaggcgcnnnnnnnnnnnnnnnnnnnnnnnnnnnnnnnnnnnnnnnnnnnnnnnnnnnnnnnnnnnnntctcgaggatccgaattccnnnnnnnnnnnnnnnnnnnnnnnnnnnnnnnnnnnnnnnnnnnnnnnnnnnnnnnnnnnnnnnnnnnnnnnnnnnnnnnnnnnnnnnnnnnnnnnnnnnnnnnnnnnnnnnnnnnnnnnnnnnnnnnnnnnnnnnnnnnnnnnnnnnnnnnnnnnnnnnnnnnnnnnnnnnnnnnnnnnnnnnnnnnnnnnnnnnnnnnnnnnnnnnnnnnnnnnnnnnnnnnnnnnnnnnnnnnnnnnnnnnnnnnnnnnnnnnnnnnnnnnnnnnnnnnnntcnctcgcntngagntctcgcnaccntcccntntgnccnnntnnantccatncntttctcctgngggntttctcc

SEQ ID NO: 39012 - DNA, 421 bp, Homo sapiens
  misc_feature (1)...(421): n = a,t,c or g
tttgaanggccnnnnnnnnnnnnnnnnnnnnnnnnnnnnnnnnnnnnnnnnnnnnnnnnnnnnnnnnnnnnntctcgaggatccgaattccnnnnnnnnnnnnnnnnnnnnnnnnnnnnnnnnnnnnnnnnnnnnnnnnnnnnnnnnnnnnnnnnnnnnnnnnnnnnnnnnnnnnnnnnnnnnnnnnnnnnnnnnnnnnnnnnnnnnnnnnnnnnnnnnnnnnnnnnnnnnnnnnnnnnnnnnnnnnnnnnnnnnnnnnnnnnnnnnnnnnnnnnnnnnnnnnnnnnnnnnnnnnnnnnnnnnnnnnnnnnnnnnnnnnnnnnnnnnnnnnnnnnnnnnnnnnnnnnnnnnnnnnnnnnnnnnnnctatagtttagantttnatnccnntntntttttggccncntcntttgatatntttt

SEQ ID NO: 39013 - DNA, 319 bp, Homo sapiens
  misc_feature (1)...(319): n = a,t,c or g
gtaaaagtagataacaaagtgaagagaacaaattattttgttgtaagataatggaaaaaaggatactactgttgaattttttagtcctatagtgaaagaagtggaaagaaggtagaccaatagtcattactgtttcagtgacaaaaataattttgtaatctctgcctccaaaaaattggatttatagaatgaatttctgtaagagtntttctgcnatatttgccatngactgtcaanctnnaanaanagtcnacncggnnncttnnttccanatctatgantcgtnctatactgntntnacccnntntngntnacttct

SEQ ID NO: 39014 - DNA, 427 bp, Homo sapiens
  misc_feature (1)...(427): n = a,t,c or g
tttgaatncccctntantnangncgcnnnnnnnnnnnnnnnnnnnnnnnnnnnnnnnnnnnnnnnnnnnnnnnnnnnnnnnnnnnnntctcgaggatccgaattccnnnnnnnnnnnnnnnnnnnnnnnnnnnnnnnnnnnnnnnnnnnnnnnnnnnnnnnnnnnnnnnnnnnnnnnnnnnnnnnnnnnnnnnnnnnnnnnnnnnnnnnnnnnnnnnnnnnnnnnnnnnnnnnnnnnnnnnnnnnnnnnnnnnnnnnnnnnnnnnnnnnnnnnnnnnnnnnnnnnnnnnnnnnnnnnnnnnnnnnnnnnnnnnnnnnnnnnnnnnnnnnnnnnnnnnnnnnnnnnnnnnnnnnnnnnnnnnnnnnnnnnnnnnnnngntctactncttngattttgtncatnttttcnnatcggncntttnccttta

SEQ ID NO: 39015 - DNA, 448 bp, Homo sapiens
  misc_feature (1)...(448): n = a,t,c or g
ggagttgcttttgaagcctttgaatgnccnnnnnnnnnnnnnnnnnnnnnnnnnnnnnnnnnnnnnnnnnnnnnnnnnnnnnnnnnnnntctcgaggatccgaattcgcggccgcgaattccnnnnnnnnnnnnnnnnnnnnnnnnnnnnnnnnnnnnnnnnnnnnnnnnnnnnnnnnnnnnnnnnnnnnnnnnnnnnnnnnnnnnnnnnnnnnnnnnnnnnnnnnnnnnnnnnnnnnnnnnnnnnnnnnnnnnnnnnnnnnnnnnnnnnnnnnnnnnnnnnnnnnnnnnnnnnnnnnnnnnnnnnnnnnnnnnnnnnnnnnnnnnnnnnnnnnnnnnnnnnnnnnnnnnntnnnnnnnnnnnnnnnnnnnnnnnnnnnnnnnnnnnnnnnnnnnnnntttntcctttcttcnnagcccnnntnntcnngntntnncnnnnctttccc

SEQ ID NO: 39016 - DNA, 325 bp, Homo sapiens
ggaaaacagttcttgtggccttctattaaatactttgcacttaagccttgccagtgttctgagcttttcaataatcagtttactgctctttcagggatttctaagccaccagaatctcacatgagatgtgtgggtggttgtttttggtctctgttgtcactaaagactaaatgagggtttgcagttgggaaagaggtcaactgagatttggaaatcatctttgtaatatttgcaaattatacttgttcttatctgtgtcctaaagatgtgttctctataaaatacaaaccaacgtgcctaattaattatggaaaaataattcaca

SEQ ID NO: 39017 - DNA, 337 bp, Homo sapiens
  misc_feature (1)...(337): n = a,t,c or g
caatcttagacctacaaagcaccttaagagattacctcatttgatagtgtgccaacacttaaggtattattttttatccccatttggagatgaaaatatatgactcagatatactctaggttgccccaggccattcagccaagaagtggtagagtaacaaccaaaccctcttaagtaacaactaaacactcttctctcttttgtttatttatttattgagatggagtcttgctctatctccccctgggctggaatgcattgantgccnnannnnttgcgtnantagtaatnnnaaatcggnanttggagtntnantaattntgaaaaganggaggcc

SEQ ID NO: 39018 - DNA, 325 bp, Homo sapiens
ccacctcttaattaatattgggcttgatacttgtccttatgatcaaacttcactcctacatttgattggccacagattttagtatctctctgcatttacagtatccacctgacatatacatgtatttttgaagacttttatctctttcttgattataagctttaaaggaactcaaattttagaatcccatgatatctaccacgtagtagttgctcaatcatctaaataactatctgaaaacaaacacttgtatttctgaaagcaacaacagtggaactgagaaatagctatttggagtcattctcattaagaaaagagtaccccg

SEQ ID NO: 39019 - DNA, 143 bp, Homo sapiens
ctttttatgaatgagccctacaaccataacaggacaggttgtgaatatattgtacaagttcagaggaacggagaggccacgtgaggtgatccttttgtaaaaagcacagcttgagacaggaggagaaactttttttttttttt

SEQ ID NO: 39020 - DNA, 327 bp, Homo sapiens
  misc_feature (1)...(327): n = a,t,c or g
gcctgtttatgtaaatacagtttgattggaacacagccagggtcatctgtttagatattgcctatggcggctttagtgcttcaagagctgtgttaattagtcgtgacagagaccatgtggcctgaaaaaccttcaatattcactatatgccctgtacagaaaaagtttaccaatccctgttttaatcaatggaataatatgcagcccactcaaaaaaaaaaataaaaaaaaaagaanaaaanggggnntacnccnngggggggatncccccnnnnnnngggaaaantngggacccccngaaaaaanggggnnatttttttttttttt

SEQ ID NO: 39021 - DNA, 328 bp, Homo sapiens
caaatattagccccccagctacagtttgaaaacatgcagttctgtgataatatgtcatggttggattacttcttcagagatttttttcataatctctgggtttaaaccctgtgatattcttattaccaaatatattggaaaaatgcatttaagctggaggatttgttggtttgccctaggctttgtctgcccatgccgattgacgttgtttacacctgggtgaatggcacagatcttgaactactgaaggaactacagcaggtcagagaacagatggaggaggagcagaaagcaatgaggtaaaactgattttttttttccatcaggg

SEQ ID NO: 39022 - DNA, 359 bp, Homo sapiens
  misc_feature (1)...(359): n = a,t,c or g
gctttgannnnnnnnnnnnnnnnnnnnnnnnnnnnnnnnnnnnnnnnnnnnnnnnnnnnnnnnnnnnnnnnntctcgaggatccgaattccnnnnnnnnnnnnnnnnnnnnnnnnnnnnnnnnnnnnnnnnnnnnnnnnnnnnnnnnnnnnnnnnnnnnnnnnnnnnnnnnnnnnnnnnnnnnngccttctttnaggnnnnnnnnnnnnnnnnnnnnnnnnnnnnnnnnnnnnnnnnnnnnnnnnnnnnnnnnnnnnntgnnctanattnatggccaatntttttttggacctnaatttntctngnaaantntttccanggcttttttaaaacctttggaattttttcccaaggnttgg

SEQ ID NO: 39023 - DNA, 312 bp, Homo sapiens
  misc_feature (1)...(312): n = a,t,c or g
ttatgatgtcagaaaagactaatgtatattaaactggatatatgtttctgaaataataaagatcataaacatctgatcccccattaaaaaatantantaattncntagactttaattaccntaccctctnattataangnaggtttgancnnaanctaacntttganggnagaattacctttaggaaatacctntcaaaanttaaaattttttncaagagcggtttcnttnaaantaaanaaggnccngattttttttnccttttttttttttngaaanngganntttntttntttcccncggggggngggg

SEQ ID NO: 39024 - DNA, 322 bp, Homo sapiens
  misc_feature (1)...(322): n = a,t,c or g
ggnnnnnnnnnnnnnnnnnnnnnnnnnnnnnnnnnnnnnnnnnnnnnnnnnnnnnnnnnnnnnnnnnnnnnnnnnnnnnnnnnnnnnnnnnnnnnnnnnnnnnnnnnnnnnnnnnnnnnnnnnnnnnnnnnnnnnnnnnnnnnnnnnnnnnnnnnnnnnnnnttgagcccctcctgctgtgaggccaggttcctaacaggctacggaattggcttgtagcctaggggttggggacccctgctgtataggagttgtgaaagtcgacgcggcgcgaattccnnnnnnnnnnnnnnnnnnnnnnnnnnnnnnnnnnnnnnnnnnn

SEQ ID NO: 39025 - DNA, 423 bp, Homo sapiens
  misc_feature (1)...(423): n = a,t,c or g
tttggaangncnnnnnnnnnnnnnnnnnnnnnnnnnnnnnnnnnnnnnnnnnnnnnnnnnnnnnnnnnnnnntctcgaggatccgaattccnnnnnnnnnnnnnnnnnnnnnnnnnnnnnnnnnnnnnnnnnnnnnnnnnnnnnnnnnnnnnnnnnnnnnnnnnnnnnnnnnnnnnnnnnnnnnnnnnnnnnnnnnnnnnnnnnnnnnnnnnnnnnnnnnnnnnnnnnnnnnnnnnnnnnnnnnnnnnnnnnnnnnnnnnnnnnnnnnnnnnnnnnnnnnnnnnnnnnnnnnnnnnnnnnnnnnnnnnnnnnnnnnnnnnnnnnnnnnnnnnnnnnacttnntgnttgnnggnngancttntgcctctggatnaaccataantntnnaacctttnctatgntggtggcacntggantattatc

SEQ ID NO: 39026 - DNA, 323 bp, Homo sapiens
  misc_feature (1)...(323): n = a,t,c or g
gctnnnnnnnnnnnnnnnnnnnnnnnnnnnnnnnnnnnnnnnnnnnnnnnnnnnnnnnnnnnnnnnnnnnnnnnnnnnnnnnnnnnnnnnnnnnnnnnnnnnnnnnnnnnnnnnnnnnnnnnnnnnnnnnnnnnnnnnnnnnnnnnnnnnnnnnnnnnnnnnnnnnnnnnnnnnnnnnnnnnnnnntcttgggcctctttctacttcagtacattgactttcacttcatgtttggtgggtgaccttctgccctctggatgaaccataattatttaacctttcctatgttggtggacacatggattattatcagctgtgggcat

SEQ ID NO: 39027 - DNA, 351 bp, Homo sapiens
  misc_feature (1)...(351): n = a,t,c or g
aaaaaagtgtacaaatcataaatgcagaactctgtgaaatttaaaaaatctaatcnnnnnnnnnnnnnnnnnnnnnnnnnnnnnnnnnnnnnnnnnnnnnnnnnnnnnnnnnnnnnnnnnnnnnnnnnnnnnnnnnnnnnnnnnnnnnnnnnnnnnnnnnnnnnnnnnnnnnnnnnnnnnnnnnnnnnnnnnnnnnnnnnnnnnnnnnnnnnnnnnnnnnnnnnnnnnnnnnnnnnnnnnnnnnnnnnnnnnnnnnnnnnnnnnnnnnnnnnnnnnnnnnnnnnnnnnnnnnnnnnnnnnnnnnnnnnnnnnnnnnnnnnnnnnnnnnnnnnnnnnnnnnnnnnnnnnnnn

SEQ ID NO: 39028 - DNA, 349 bp, Homo sapiens
  misc_feature (1)...(349): n = a,t,c or g
gacatttaataatatatcacttttatataaataaatgagatttatccagtctagtttactgaataccctaatccttggagaaatgaataccatgcagtagcttgaactcactaaggttacatgacaaattaaatagtaatttacttctgataataatgttaacataatgtcaaatcttggcaaaagccccatttccttctgtcttattttctactgttttttggaatttaaaaaaatgcttcaatttgacaaaatgtagcataagcaagtaagatattttttgaaaccccaaagagaaattaacacttcaggcacaaaaggattangaaaattttcgnttagtaaatac

SEQ ID NO: 39029 - DNA, 326 bp, Homo sapiens
  misc_feature (1)...(326): n = a,t,c or g
cttcactctgagccaaacctctgtgaacagttgtgctaaaatagagcttggctattagctccatgtccttggacnnnnnnnnnnnnnnnnnnnnnnnnnnnnnnnnnnnnnnnnnnnnnnnnnnnnnnnnncgttctttgtggcattattgagagaattaaatgaaatagtatggttaaagcaaacagtccaaacttgacctcaattaatagtagctattgatactagtaaagaagaaaaatattcccttttttcatcaaatctggttttatagacttcatacactgatagtcgacgcggccgcgaattncagatctatgaatcgt

SEQ ID NO: 39030 - DNA, 315 bp, Homo sapiens
gtgagtctctggcgtcccaaattgcctgtttttctcgcaggctctattccgttcgctggttcgccacctcaggggaacgatggccatggagtccacagccactgccgccgtcgccgcggagctggtttctgccgacaaaattgaagatgttcctgctccttctacatctgcagataaagtggagagtctggatgtggatagtgaagctaagaaactattgggtttaggacagaaacatctggtgatgggggatattccagcagctgtcaatgcattccaggaagcagctagtcttttaggtaagaagtatggaga

SEQ ID NO: 39031 - DNA, 316 bp, Homo sapiens
ccgaggtcaaacaaggcaatgctttgccttcttgtttcaactctcatactataaacaagcatcgttttcacagtctgttcagtgctacgtttttcacatttttctgcttttttgttggtgatttggctgtttaaaatggcccgcaagcatagtgttaaaatgctatctagtgttcccaagcacaagaaggctgtgatgtgccttggggaaaaaatacctgtgtatataaacttccttcagttatgagttacagtgttcttgactgtgagttccgtgttaatagaccaacagtgtatattaaaaataaagttgcccc

SEQ ID NO: 39032 - DNA, 367 bp, Homo sapiens
  misc_feature (1)...(367): n = a,t,c or g
gataatccgaaatacctactttgtatcatgttttcagttatacagtagttaatagatgtaaaccctttagcctaaaccctggcaagtatagggcctgttgggggtcctctatctgaacaaggagggtccttgtggaacactgacctgcgatcatcttcaattctgaaactgtgaaaacaagatgtgaggatgtaacagtagagagattcactccagtaagaaacaacaactttgggttagtttcaatttgagaacagctacacataatgacactataaacatttctgtataggattttccataaactaaagtgtttacttggctaaaatctggngagtaaagtgtgttcngtttgnttggtgattta

SEQ ID NO: 39033 - DNA, 464 bp, Homo sapiens
  misc_feature (1)...(464): n = a,t,c or g
gccctcgcncccctncccccttngacgcccnnnnnnnnnnnnnnnnnnnnnnnnnnnnnnnnnnnnnnnnnnnnnnnnnnnnnnnnnnnntctcgaggatccgaattccnnnnnnnnnnnnnnnnnnnnnnnnnnnnnnnnnnnnnnnnnnnnnnnnnnnnnnnnnnnnnnnnnnnnnnnnnnnnnnnnnnnnnnnnnnnnnnnnnnnnnnnnnnnnnnnnnnnnnnnnnnnnnnnnnnnnnnnnnnnnnnnnnnnnnnnnnnnnnnnnnnnnnnnnnnnnnnnnnnnnnnnnnnnnnnnnnnnnnnnnnnnnnnnnnnnnnnnnnnnnnnnnnnnnnnnnnnnnnnnnnnnnnnnnnnnnnnnnnnnnnnnnnnnnnnnnnntncnccctntcnnccnccncntctctgcnncttcncctccgagnccanttcntcctnctcatcngccnnctnccnctctcc

SEQ ID NO: 39034 - DNA, 354 bp, Homo sapiens
gggctagttaagaaccaattagttccaactcagaaatcacctatacagagctaggtacaaataaccttaaataaatacaacttaacatacacatcatggaaaattggaaggtaccttagaagtcatttctcccactcttattttataaatattaaaagagacatcaaaacatgaagaagtaaattagacagctgtcaatactatacttttggtttcagttaattcattctttacttaattttagaaattgtacatgtgcttataagagaacacacaaagagacaatgcaacacaaggagataaagagatcaatatgcagaatgaatcatagagaagaatctataaatccagatt

SEQ ID NO: 39035 - DNA, 327 bp, Homo sapiens
ggttttcagcatgatctgttaattttgaatacagagaatgaacaaagcaggtaaatatatgtatatgctgaataatgtaattccatatacaattcacagttagatgcacttaattgtggaaaataaaggaagacaataacatcaagatctttttccaaaacacggtaaaaataacgttcacatgcattaaacatttcaagccatctcagtatatgtctttcttgagtaagtagtgaaccaatggaccagtggttattgttggagaaaacaattaggcaactcatcaatgcgctatttatacaatcttagtgactatttaccacttca

SEQ ID NO: 39036 - DNA, 337 bp, Homo sapiens
gttccttctcttagcttccaaatgtgctgaagaaactccaacatgcagacggtgacatggcaggaggaagaggaccctgccctggctagcatcctcctctccctaatgcacttaatccatccttcccaagcaaatatctaaagagtcatctaccgtgctgtttttctgcttcttcctttcccattcacttctgaatccttatcagtctgactttcacacccattactttactgctcagcaaagttcatcaatgctgtcaggaaagccaagtccaaagactatgttttgttcttgcctttacttgacctgtacatgatttacaacttcctttttcttg

SEQ ID NO: 39037 - DNA, 336 bp, Homo sapiens
  misc_feature (1)...(336): n = a,t,c or g
ttggagagaaatactttaacaaagtttatgtataagtggaggggaaactagagaggatttcaagaggtcgacgcggccgtgaattccnnnnnnnnnnnnnnnnnnnnnnnnnnnnnnnnnnnnnnnnnnnnnnnnnnnnnnnnnnnnnnnnnnnnnnnnnnnnnnnnnnnnnnnnnnnnnnnnnnnnnnnnnnnnnnnnnnnnnnnnnnnnnnnnnnnnnnnnnnnnnnnnnnnnnnnnnnnnnnnnnnnnnnnnnnnnnnnnnnnnnnnnnnnnnnnnnnnnnnnnnnnnnnnnnnnnnnnnnnnnnntnttacgagggcttattnagaancttt

SEQ ID NO: 39038 - DNA, 345 bp, Homo sapiens
  misc_feature (1)...(345): n = a,t,c or g
ctagagcttattgggtttccttcattttttagcccagtttttggtaccagctggatgaaataaagtctttttattcctgtgataattcaaacaatcttgagttttatttaattttcttaaaataatccaatttagagggattgtaagcattgaaaactcaaagtttgtgatctttagatcataaccccgttttcaattactctttgtctcatcaggaaaagcagtctgaaggtttgtcgggtaatagtcaagtggatatgaaactgccctttgtgaacctcagaatccctgaagctaatggtacccttgcttcttctcattccttttgnttgattaagctcttac

SEQ ID NO: 39039 - DNA, 345 bp, Homo sapiens
gccactcaaagctgagtggtatgggagaagtctgtggtattatacaatttgaggaattcaaaaagttccacattactgccaggcctgctaaagtaatttggaggaatttatttactatcatgcttccttgctaccatttacaatcactgatttgttaaaactagatgttttgcagtggaagtggagattgtatttagcctctgaggtccagccacggttctgctggtgccggcaatccaggggttttggctcctggggtctcttgtcaacatcatctctgggtagccagttacccccaatgtcctttttcagggcacagggtgtctggccagaatccccacttat

SEQ ID NO: 39040 - DNA, 335 bp, Homo sapiens
  misc_feature (1)...(335): n = a,t,c or g
nnnnnnnnnnnnnnnnnnnnnnnnnnnnnnnnnnnnnnnnnnnnnnnnnnnnnnnnnnngngannatngnggnangnggaggncctgatcatgtattgnaggtgggagnncaanncngntacngtggtgnaagcnntanatgacactgnttcacataagccanacatgtttgaaggaggacagggttnnatgcaaattatcanttgattgttagttagacttgntcctttccantgcctcattgccagtntttcttggaaacctgaacttnnattccncataaccgatttctcacacaaacctgaanttnggncantcttaagnnnaccccatgg

SEQ ID NO: 39041 - DNA, 342 bp, Homo sapiens
agataaacaaatattttcaaatgctgttgtaggaatggagctgatgcattcatttatttcttcaacagctgtaaatagctgtgagccccaccatataccaaacactccactgggtactggaaacatacaaaaaaaaaagggtacctgcaccaccctcaatgagctcacaggtcctcaatgagctcacaggtcctcaatgggctcacaggctagtgaaggggatggttatttaaagtttttaactgcttaaaaagcgatgggatgaaaatgtttacttatctctaattgaaaacatttatagtggcatgaatatatctgaccaacaacagcagcagtaattat

SEQ ID NO: 39042 - DNA, 342 bp, Homo sapiens
  misc_feature (1)...(342): n = a,t,c or g
ctccctccctccctccctcccccctcagcccaggaaaggcacaggagaggatcctgccaggtaaagggaaagtggcccgggaggagcccacgtgccaacaacaggagtcccagaagacagaaaagaccacagatgagaaagcagttcacgcagagaacaaaacgttcccggaccaaacccagggtcgggttgctcattcccgaggcccgatagcgnnnnnnnnnnnnnnnnnnnnnnnnnnnnnnnnnnnnnnnnnnnnnnnnnnnnnnnnnnnnnnnnnnnnnnnnnnnnnnnnnnnnnnnnnnnnnnnnngtttttccagagcttacacaccttctaagc

SEQ ID NO: 39043 - DNA, 457 bp, Homo sapiens
  misc_feature (1)...(457): n = a,t,c or g
tttgacgnncgttgtatnnnctntgaangccatnaggaanatnccccancanacccaaaaaacganatctctcnaggatccgaattcgcggccgggttgccagggtgaggggactatgatagtgacagacatgtttccaaggaagggcctgtggtacttgatgattagctcagtgcaggagctaaagaaatgtaggatgacaccaagagggtgagcctcgctagctgacaagagcatgccaccacttgcagatgaggggtaagttggaaaacaaaacttgactagagaatctatcttatttattcacctatacattatagctgactttttgtttgtgtacagaactaaatggtccctaaaagngttagntccctcagancacttcaagcactttttanaaantggaggactattgctgcctttatcangatanaggnttgaacatnatatctacccc

SEQ ID NO: 39044 - DNA, 344 bp, Homo sapiens
  misc_feature (1)...(344): n = a,t,c or g
tataaatcatggttgctttaaattcctagtctgataattgcaacattactgccatttcgaagtctgattctgatgcttgctccatctcttccaactgtattttttgccttttaattttttcctgatatcgggacatgatgtactaagtaaaaggaactgctgcaaataggcctttggtaatggtgtggggggaagggacgcctccttcnaccncnccatttngnctccccncaccttctancnncnnctacnttaatccnntatagttnntccgttctcaccancntngtntcccnctantnnnatnctctcccnccnnctncnncccccnaanatcgancctg

SEQ ID NO: 39045 - DNA, 348 bp, Homo sapiens
  misc_feature (1)...(348): n = a,t,c or g
ataaaatcacactgacatgtttttgaggaattgaaaattatgctaaagcctgaaaatgtaatggatgaatttttaaaattgtttataaatcatatgatagatctttactaaaaatggctttttagtaaagccatttactttttctaaaaaagttttagaagaaaaagatgtaactaaacttttaaagtagctcctttggagaggagattatgatgtgaaagattatgcctatgtgtcttgcatantgtctgattcatagaggctgacncgncctctganttncnnatttctgactcgcnnacntctgntanctcctcttgntgctcttncctnttccntntnctccat

SEQ ID NO: 39046 - DNA, 440 bp, Homo sapiens
  misc_feature (1)...(440): n = a,t,c or g
tttgacgcctgatgnnnnnnnnnnnnnnnnnnnnnnnnnnnnnnnnnnnnnnnnnnnnnnnnnnnnnnntctcgaggatccgaattccnnnnnnnnnnnnnnnnnnnnnnnnnnnnnnnnnnnnnnnnnnnnnnnnnnnnnnnnnnnnnnnnnnnnnnnnnnnnnnnnnnnnnnnnnnnnnnnnnnnnnnnnnnnnnnnnnnnnnnnnnnnnnnnnnnnnnnnnnnnnnnnnnnnnnnnnnnnnnnnnnnnnnnnnnnnnnnnnnnnnnnnnnnnnnnnnnnnnnnnnnnnnnnnnnnnnnnnnnnnnnnnnnnnnnnnnnnnnnnnnnnnnnnnnnnnnnnnnnnnnnnnnnnnnnnnncctngctncancnnctnctnnctccttntaaattgnngnctcncntttctntangcacagtcnttaatcngngcncccct

SEQ ID NO: 39047 - DNA, 447 bp, Homo sapiens
  misc_feature (1)...(447): n = a,t,c or g
acgcccccntcccccctttgaccgccnnnnnnnnnnnnnnnnnnnnnnnnnnnnnnnnnnnnnnnnnnnnnnnnnnnnnnnnnnnnntctcgaggatccgaattccnnnnnnnnnnnnnnnnnnnnnnnnnnnnnnnnnnnnnnnnnnnnnnnnnnnnnnnnnnnnnnnnnnnnnnnnnnnnnnnnnnnnnnnnnnnnnnnnnnnnnnnnnnnnnnnnnnnnnnnnnnnnnnnnnnnnnnnnnnnnnnnnnnnnnnnnnnnnnnnnnnnnnnnnnnnnnnnnnnnnnnnnnnnnnnnnnnnnnnnnnnnnnnnnnnnnnnnnnnnnnnnnnnnnnnnnnnnnnnnnnnnnnnnnnnnnnnnnnnnnnnnnnnnnnnnnnantccccccncgtacnnnnccnnctnannnntctccgtncctctcgcntcttnacccntcncnccccc

SEQ ID NO: 39048 - DNA, 335 bp, Homo sapiens
  misc_feature (1)...(335): n = a,t,c or g
gttttttagggagataaacactgactttcttgtgtgacaagtactgtgataaaggatgatagaagtaaggcaagggggtgccatgagagaatactgtgattatgatgaaacttttggtggtaatatagtttttaattatttaatggttttataggatccagggatttgatcatctctgcttcacagctgattacccttgcacatgatggcacccaggaaatatttgttgggtaaatgactgaatgaatgcacagctatggcatatacagacacatgctctcaccctaccctctggctgtgtctttgncttctctttggggtgcaacagacatgat

SEQ ID NO: 39049 - DNA, 337 bp, Homo sapiens
gttaaaaaacaaaccagcaaatgaactctctttcttaagatgtaagcaaaagcctgctgaggatttctggaaaggttttaccttctgagacagttgtcacctctgcttttctgttacatctttctttctacctggaatgtgagtgcaattcgtggagtaatggcagccatgatgtgaccgtaaggacaaaagcaatatgggggagaagaaacataggaggctagtcttctgtgacaccagtgacactaaggaacatttgtaccaacccctagttacctctagaatttttggccttttacttgtagtcaaagtgattctcactagtatcggttttaat

SEQ ID NO: 39050 - DNA, 348 bp, Homo sapiens
ctcccaaggccctgcttattgtagaaaagtcattcaacaaatctttttaggtctctattaacaatttattttctctacccccatcacaaaaaagcagaggaagtagtgtagcagccccagccacagccacagccacaccccacttgcttcctaggtgtgtgtggtgtgtgactgcctgcaagcaactccagctctctgaacttgtttcctcatctgcaaactggaaatatttatttatttgacaaggacattatgagaatttactctgaaaaatacatgtagagtacctagcattcaattaagactaggtgaatgcccttctcaggaaccgtactagagaaggtgagt

SEQ ID NO: 39051 - DNA, 323 bp, Homo sapiens
  misc_feature (1)...(323): n = a,t,c or g
ttcttgcctggttttggttttgctttgtgtggagtatctttttccatacctacactttcagtccatatgtgtgtttacgggtgaagtgagttttttgcaggcagcatacagttgggtaatggggttttttgtttttttgnttattttaatncattcagactttntntaacttttatgngnntaattnantncggntacatttanngntnttnttgncnnntgaanacttgcttcttgtntttttntnagtngttntctnnnnnnatntncatangnnnntgtttttctnnntattcnangctnatttattgtnanccttagag

SEQ ID NO: 39052 - DNA, 342 bp, Homo sapiens
  misc_feature (1)...(342): n = a,t,c or g
ccagtctgggattctgcaaacttctaaagcacctggtagtggcctcctggaggtgtgttgtgaacggttctgcagctgcctctgggctcaacaggaaagagtggtgattgattattgatgtctgccagggcacacagttctgagaagtagcagaacggatgctacaggaatctcctgcccaactctctgaagcaggatatttctctgaatctttctgctccttagcttctccttgcgtcgacgcggccgcgaattccnnnnnnnnnnnnnnnnnnnnnnnnnnnnnnnnnnnnnnnnnnnnnnnnnnnnnnnnnnnnnnnnnnnnnnnnnnnnnnnnnnnnn

SEQ ID NO: 39053 - DNA, 327 bp, Homo sapiens
  misc_feature (1)...(327): n = a,t,c or g
ccnnnnnnnnnnnnnnnnnnnnnnnnnnnnnnnnnnnnnnnnnnnnnnnnnnnnnnnnnnnnnnnnnnnnnnnnnnnnnnnnnnnnnnnnnnnnnnnnnnnnnnnnnnnnnnnnnnnnnnnnnnnnnnnnnnnnnnnnnnnnnnnnnnnnnnnnnnnnnnnnnnnnnnnnnnnnnnnnnnnnnnnnnnnnnnnnnnnnnnnnnnnnnnnnnnnnnnnnnnnnnnnnnnnnnnnnnnnnnnnnnnnnnnnnnnnnnnnnnnnnnnnnnnaggttgnggacnaanctatgctttgncgncnacncggcngggaattncnnatntatgaa

SEQ ID NO: 39054 - DNA, 331 bp, Homo sapiens
  misc_feature (1)...(331): n = a,t,c or g
caaaatccctttcacaagccaaaattatctgctggtgactggaactcacagacagaggcttgctagcccttttgcattgattgagaggcttttcaaaattaatcattgctatgatttcaatatctgttcccacctaaactcattttaggatttaattgacatggggcctttaagggctgatgagatcatgaaggctctgcccttactantggattaatgccattattgagggagtgnnttngttattatgnnactgggnttganntattatctngttgnccnatttnctggctttgtnttgggctcttggttttncttctgtcntgggatt

SEQ ID NO: 39055 - DNA, 352 bp, Homo sapiens
ttaatttattggaattccaggaaagaatagttaacttttatttttaatattatgaaaataagagaaaaaagcagatgacattcaaataaatgctctttctttatatattttggtttataacctgtatcttttcatgcatcataatattcctctgagaaacatatatatgtatatatatatgtatgtatatacttgaattttttttaactttagcattgaggctataaaccttggcacactatttagggttaaggttaacctggggtttgttctgaggctatgatccttggggggttgacctgggttcaactgggcattgattgttgagtgactacaaggcacatgtgagaca

SEQ ID NO: 39056 - DNA, 357 bp, Homo sapiens
ctttgagatccctctccacactacctttaaaactactgccctgcaccaaccagccatggcagaagcactagcacctgcacattgtccgtgctgccctgcctcagcccacgcggttttctgtctgactttcatccaccaaagtcacttcctaaccttcaaaactcagcccaagaccctgcttccttcgcccctccagctggcaagatatcattcttccctacactcggggtgtgtacagcctttttccatgcacacacaacttcatgtgctttggtgaagagcagtaacagtcaaacgaaaactagactttaaacaaacactactttgttgctataaaactactctgagtgaaccata

SEQ ID NO: 39057 - DNA, 355 bp, Homo sapiens
  misc_feature (1)...(355): n = a,t,c or g
gannnnnnnnnnnnnnnnnnnnnnnnnnnnnnnnnnnnnnnnnnnnnnnnnnnnnnnnnnnnnnnnnnnnnnnnnnnnnnnnnnntttnnnnnnnnnnnnnnnnnnnnnnnnnnnnnnnnnnnnnnnnnnnnnaatttaatgtcttttgacaaacgtatacactcacgaaccaccaccccaattaagatacagaatacttgtgtctcacaagaaaatccccttgagaatgatttgagttttttaattgaaatacatttagacatacaaacattaaactaaaaattggagaaagttatttcagcttgcaaagcagagaatttgtaaaggttttttatggtatcaaattngcatatt

SEQ ID NO: 39058 - DNA, 355 bp, Homo sapiens
tgtaactggaattaaaaaccttaaaaaactcaagttggagctctgagtgcattttcccacaaaaaccatgttatatatagtggtttggttctatggtactattaataagacagaatacttcagctatgatttctgggctggcctgggaaaccactaaatatgacatagtttcagtgaaaaagtgcgttcagggttcccagcaatgagttttacaaacccacaatcagaacacaacccatctgaaagctgagggccgcctacttcgcagtaggtttgacagcctcacaaaggcatccgaatgtcatagacgtcaacgccaagcttaagagtctcctgcgtggcgctccagcagtac

SEQ ID NO: 39059 - DNA, 348 bp, Homo sapiens
  misc_feature (1)...(348): n = a,t,c or g
tgtagtgtttgagattgtgcttgttgggttcttggaccacctgagttcaaattactgatctagtaatattaaaagttttaaattcaggacatacttttatttccatttggttgacttctcaaatatgatgttactgtgttagagttgtgaatgttgaaaagtaatacatatgaagagtagaaaatgagcaatttaaaaattgattatgtttctgggaaagtgatagttgtggcctgaaaggagtttagttttcttgtttcactgtatcatagtgaaattgccaactgaactttataaagaaacaaaatggagacttaatttcctagggctgntgtactaatgtaccaa

SEQ ID NO: 39060 - DNA, 354 bp, Homo sapiens
  misc_feature (1)...(354): n = a,t,c or g
cctannnnnnnnnnnnnnnnnnnnnnnnnnnnnnnnnnnnnnnnnnnnnnnnnnnnnnnnnnnnnnnnnnnnnnnnnnnnnnnnnnnnnnnnnnnnnnnnnnnnnnnnnnnnnnnnnnnnnnnnnnnnnnnnnnnnnnnnnnnnnnnnnnnnnnnnnnnnnnnnnnnnnnnnnnaccagtctactaatgaaaatcctgggaaattttatatactttgtattggcttgataaaaaatatgtgcacaatataatatatatacacatatatgcatatttatatcaagatagtttttctaccatcattggataatttggggcattttctgagatgggcatacttatgttggaaagccc

SEQ ID NO: 39061 - DNA, 319 bp, Homo sapiens
  misc_feature (1)...(319): n = a,t,c or g
ctccagtattgtgtgagagttccagttgctccacatttgccacacttgatgtgtggtctttgtgggtttgttttatttttaagccactatgttgtatgtgtgttaggtttttttttttnaanctngnnttaaaaaataggantancnntntttttaaaanganctanttnatattatntgaggtnaatttttttgaaacncaggacaggnggnanttaaaagnccanagtnntacccanactcccataatantaancccnggtaataancaangganctcnttccagtttcagggtntcanccccangtaccaaataaa

SEQ ID NO: 39062 - DNA, 326 bp, Homo sapiens
gctctctgaaaatgaaccctcctccataccttgcccttcaaatagccagaagggagccagccagccccccactgtggtgctgaaatacccttcaggcctgggcgtctgctgccctgtgcctgatagctgggctacaggcttccccagagcactctgggaatgtggggtgaagcctcttttgagaagccccgtccatgctagatggttccagaagtctagatttctaggtccatgagcttatgggccacctttgctttttgtctagaatagaaggaaggcatgggcttaataagcagtgctgcatcttaacttcgatctctctttct

SEQ ID NO: 39063 - DNA, 326 bp, Homo sapiens
aagaaattcactgaagacttcttatcttctccttaagtcagagtccagcccaaaagatatacagagttggcaattatccatgtgatgttaccttaggacacccataggcctatttctgccctaaaaggttctttgcaaccacctgccacagtgagccaaacgctactactagagatcttgtagttacagaggtctccctctgctctagatgagtcacaatgaaatcttatcagaaagtggggacacagtaatccatcactggcttttggctctggcatgaccctctcctcttgtctgagggatccacacttataaaattcttcaag

SEQ ID NO: 39064 - DNA, 321 bp, Homo sapiens
  misc_feature (1)...(321): n = a,t,c or g
ttcagatccccgattttcactgtcactttgctgatggtgtgactgccaatgagcttcacaacctgctgggtggtggtgtaccgcgtgtccactttaatggaagacagcttgatataacagaacggtacttccgggttattacacaccaggcagggatcgctctccaggtaatagccatcaaactccactaagccagacaaagtgttataaatgttcgaggtcgacgcggccgcgaattccnnnnnnnnnnnnnnnnnnnnnnnnnnnnnnnnnnnnnnnnnnnnnnnnnnnnnnnnnnnnnnnnnnnnnnnnnnnnnnnnn

SEQ ID NO: 39065 - DNA, 325 bp, Homo sapiens
  misc_feature (1)...(325): n = a,t,c or g
tttttttttggctcaatgatatatttgccagttattttattttttctaaaaacaatagaaaaaaatcaactttaaaaagcaaaatgtacttaaataaaaaaaattagggtttatagtacctataatactaggtactatatactaggattgaaattctgtgtaactgctataaacgttttattaaagttatttacatttaatggcaatatttacagagaaacattgtgtaaatcttaaaattttttaaaaacaattcttaaatacaaatctgttaaagaaaaaaaangatggtaagcntaaaaaagttnttttatgcccaaagtcc

SEQ ID NO: 39066 - DNA, 418 bp, Homo sapiens
  misc_feature (1)...(418): n = a,t,c or g
ggnnnnnnnnnnnnnnnnnnnnnnnnnnnnnnnnnnnnnnnnnnnnnnnnnnnnnnnnnnnnnnnntctcgaggatccgaattccnnnnnnnnnnnnnnnnnnnnnnnnnnnnnnnnnnnnnnnnnnnnnnnnnnnnnnnnnnnnnnnnnnnnnnnnnnnnnnnnnnnnnnnnnnnnnnnnnnnnnnnnnnnnnnnnnnnnnnnnnnnnnnnnnnnnnnnnnnnnnnnnnnnnnnnnnnnnnnnnnnnnnnnnnnnnnnnnnnnnnnnnnnnnnnnnnnnnnnnnnnnnnnnnnnnnnnnnnnnnnnnnnnnnnnnnnnnnnnnnnnnnnnnnnnnnnnnnnnnnnnnnnnnnnnnacgattttntctgntcttntgatggggttgatggaggcanaanaaaccttttatgatattaa

SEQ ID NO: 39067 - DNA, 320 bp, Homo sapiens
cgcggccgcgtcgacatttttagaaaataaagccttctgcccaattccttgtcggcatctgctggtatgctggggtagagaaatgtgggtttcagccctagttctgtgttaactaatgttatgtaccggagcaggtcatgtagtacatctcagcttccttcttatctaagatgattgcacccaatattctccaaggtaccatagagctctgtgcaccaaagctttctgtctggaaagaaaacagtcacagtatggacctgttactaacttattcttatgcatgctgacaacaataatagaatagattttatatgaagaat

SEQ ID NO: 39068 - DNA, 323 bp, Homo sapiens
attgaaacctgcaggactaataaaataatctagcaagagagtagagataaagaaaagaaggccagaatcgagctatagcaccgtcacacagttagtctgatagagtagaggagccaagaatggagatgggaaaaaatcagtaatgaggtagaaggaaaattaagagtgatgtcacagatgtcaaaaaggggagtggctcaagaaggcagttgttttggggagtaccatgaccacctactagtgatttgctggaaggactcactcacgactcaatatagaatcatattcaaggctaagatttattacagcaaagggtatggtgc

SEQ ID NO: 39069 - DNA, 440 bp, Homo sapiens
  misc_feature (1)...(440): n = a,t,c or g
ggtgnnnntttgaanggnnnnnnnnnnnnnnnnnnnnnnnnnnnnnnnnnnnnnnnnnnnnnnnnnnnnnnnnnnnnnnntctcgaggatccgaattccnnnnnnnnnnnnnnnnnnnnnnnnnnnnnnnnnnnnnnnnnnnnnnnnnnnnnnnnnnnnnnnnnnnnnnnnnnnnnnnnnnnnnnnnnnnnnnnnnnnnnnnnnnnnnnnnnnnnnnnnnnnnnnnnnnnnnnnnnnnnnnnnnnnnnnnnnnnnnnnnnnnnnnnnnnnnnnnnnnnnnnnnnnnnnnnnnnnnnnnnnnnnnnnnnnnnnnnnnnnnnnnnnnnnnnnnnnnnnnnnnnnnnnnnnnnnnnnnnnnnnnnnnnnnnngcttaggtttgagactaaatttgggagaaccatagatntggtagcttntgtagntacngtgcttttttttt

SEQ ID NO: 39070 - DNA, 442 bp, Homo sapiens
  misc_feature (1)...(442): n = a,t,c or g
ggtgnnnnnttgaaangcctgttgganggnnnnnnnnnnnnnnnnnnnnnnnnnnnnnnnnnnnnnnnnnnnnnnnnnnnnnnnnnnnnnnnntctcgaggatccgaattccnnnnnnnnnnnnnnnnnnnnnnnnnnnnnnnnnnnnnnnnnnnnnnnnnnnnnnnnnnnnnnnnnnnnnnnnnnnnnnnnnnnnnnnnnnnnnnnnnnnnnnnnnnnnnnnnnnnnnnnnnnnnnnnnnnnnnnnnnnnnnnnnnnnnnnnnnnnnnnnnnnnnnnnnnnnnnnnnnnnnnnnnnnnnnnnnnnnnnnnnnnnnnnnnnnnnnnnnnnnnnnnnnnnnnnnnnnnnnnnnnnnnnnnnnnnnnnnnnnnnnnnnnnnnnnnntnttanngtttgngatgcanngagaatnancttatttnatncanactacctttttgag

SEQ ID NO: 39071 - DNA, 323 bp, Homo sapiens
gctccctatgccccaggattaagtccaaacaccatggtgtggcatgtgagaaagtcttcctttgtctggcttctgcagctcttcagcttcatctcttgccactctgtcatctctgtgtccccagtgcatgtcccatggacacagtgtgcagtcatacccccatacaccagctgtcctaaactatttgcaatacagggaggaaggttctagatagccagatggcttcattccgtagctttgttccttccctctgtttgggatcctcttgacaagcacagaaccatctttctaggctccattaaagcataccttttctgaaagac

SEQ ID NO: 39072 - DNA, 217 bp, Homo sapiens
  misc_feature (1)...(217): n = a,t,c or g
cagcattgttggctgttcctgcagtagaatgggggcagcacctcctaagaaggcacctctctgggttgaagggcagtgttccctggggctttaactcctgctagaacagtctcttgaggcacagaaactcctgttcatgcccatacccctggccaaggaagatccctttgtccacaagtaaaaggaaatgctcctccaggagnntnancttnnccct

SEQ ID NO: 39073 - DNA, 335 bp, Homo sapiens
cccatttccaatggcaccagaatccctggccacccatgggttgcggtggcccagagtaggcactggtatcaccaccctctgaatctgcatagcggccttcagtcccgtgcatcccagagaccaaggcggctcctggagagctggccggtcctctcgagtcaatggtgtctccctctcttctatggagggcaccagctgcatcctcaggaacagccccggccccatttgcatgtccctggaggatgcttcttccaaaagatcctgcatagaaggcaactcttcgggtttaagttgagattcccaggcaacacctgtggcacggagaatccctcgtt

SEQ ID NO: 39074 - DNA, 326 bp, Homo sapiens
aaagtcttcaaatcgagatcattatgaaatcctcagacccagagcacataaatcctaccctcagagtcactgagcagttaacattacaaattacaaaccatatccaatcagagtcattctctttcctgcttgtcgcctgtactcatgttacaggttagggcagtaccccgagtggagtgaacaatctctggactaacttgtcaggatcagaagctgaggtatctgcacccacattacaggaataggatatgtgctcctagggaactgagggtgtcaggagatgaggaaagtccctggagtcacagaaaggtcgacgcggccgcgaa

SEQ ID NO: 39075 - DNA, 84 bp, Homo sapiens
agaaaatcagccaccaggaaagggagaaaatcaattagtttatacagttccctttccagaaaagctactctttttttttttttt

SEQ ID NO: 39076 - DNA, 331 bp, Homo sapiens
  misc_feature (1)...(331): n = a,t,c or g
gggggcaaaaaatcaccttttcccatagggaaacgagtggtgggagtgcaggtgagctaaagatgcccatctatgctcacacagacacaaaaaattataaacacactcttgtgacgagtgtggcaaatctaaggactgtcaactacataaaagacagaaccatcagaagttccaggaaattagtaaagtcatggtcagtatacaaattaggaaaaccaaggatgagcagctttgaagtaatgtgcatcttggctgaaatatttcaactgtgatgtcgacgcggccgcgaattccnnnnnnnnnnnnnnnnnnnnnnnnnnnnnnnnnnnnn

SEQ ID NO: 39077 - DNA, 329 bp, Homo sapiens
  misc_feature (1)...(329): n = a,t,c or g
gtccttctagaaagtcctaggtaacttcccccacttttaaaaattttaatctttaaaactgtggtgaaatagacataaaatttaccactcttaagcgtacagctcagtggcattgagtacagttacactgttggaatccatcccaggacttttttatcttcccaaactgaaacctttaccaaggtccccaatttcaaggtctcttggaaaacatcatttcttcccttctattaagacaaagctaagctccttcctcccctctctcccagttttgtgtgcacccctggtgaggaaaggtgcagcaataatatangaagacagccagtgcc

SEQ ID NO: 39078 - DNA, 418 bp, Homo sapiens
  misc_feature (1)...(418): n = a,t,c or g
aaggnnnnnnnnnnnnnnnnnnnnnnnnnnnnnnnnnnnnnnnnnnnnnnnnnnnnnnnnnnnnnnnntctcgaggatccgaattccnnnnnnnnnnnnnnnnnnnnnnnnnnnnnnnnnnnnnnnnnnnnnnnnnnnnnnnnnnnnnnnnnnnnnnnnnnnnnnnnnnnnnnnnnnnnnnnnnnnnnnnnnnnnnnnnnnnnnnnnnnnnnnnnnnnnnnnnnnnnnnnnnnnnnnnnnnnnnnnnnnnnnnnnnnnnnnnnnnnnnnnnnnnnnnnnnnnnnnnnnnnnnnnnnnnnnnnnnnnnnnnnnnnnnnnnnnnnnnnnnnnnnttantatatgcantggntcagnattnaacccanaattactanacncccncaactannnnaatcatgaaaancnatctactattgaa

SEQ ID NO: 39079 - DNA, 341 bp, Homo sapiens
  misc_feature (1)...(341): n = a,t,c or g
cttctcctcattctctaggttttagccacattagccttctctctgtccctcatacattccaagataatttctggctcacagccctttcacctgcttgttccttcttggaataccattccctccagatctttaccagactgctgcttctcgataataaaatgacatctcacannnnnnnnnnnnnnnnnnnnnnnnnnnnnnnnnnnnnnnnnnnnnnnnnnnnnnnnnnnnnnnnnnnnnnnnnnnnnnnnnnnnnnnnnnnnnnnnnnnnnnnnnnnnnnnnnnnnnnnnnnnnnnnnnnnnnnnnnnnnnnnnnnnnnnnnnnnnnnnnaaataattaa

SEQ ID NO: 39080 - DNA, 345 bp, Homo sapiens
cctcaattgaatcttaaaatgagattcccaatattactgaaaattccacttatatattagaatactgggcaatattcccataaggacttactatacacaaaagaacaagtagataaaagctctgaggtaaactttacagtaaatgaagaaatctctctctctcaatagaggactgacatcacttctcctaaaaagggaccatatagacatgtagttttgtttcactgtctttatggtgcaaaaagattacctggttataagccatgtgacacaaacgaagtctgtttaaacttcttgaaatatactgagtatataatatgctcaaagatcgaaggaagtgagcat

SEQ ID NO: 39081 - DNA, 342 bp, Homo sapiens
agaaaacattctgcttttttcaaaggttatatttagtcttaaaactaaacaggaagctacactgcccatgtccaatttcctcattcaaaatagtcttccttcattttcttgacaaaaccagattggttttatgagcttatatttatgctataaaacatgtttctttttcttctagaaatataagatttattaagttcaccagtagagttccctagaagatgagttccatcattttcttgatttaaggaaaagatatattcaattctgtctctattgagatcaatatctagattctgaaagaaattttaaggcatttggtctgagccaaaagttctacttttg

SEQ ID NO: 39082 - DNA, 339 bp, Homo sapiens
gggttctgattcactggtttactaggaatagggtcaagaatgccaagtggatctttctcagatgttaatggctttttctgaagagcacaagaaggtggaggagggggaggtgggccttggggtggtttgtggtggaacattgctcgtggtatttccatattagttgaaaaattacacattggttttttcattactggactctttgtagtcaaggttggggaaagaggtatattagtccttccagccattgcacaggatgactgtacaggagaaccatgtaccattactgaaggtggagaaagaggagtcctattcaggtgaataggactagaattggga

SEQ ID NO: 39083 - DNA, 339 bp, Homo sapiens
ggggaggagggagaatcctaacattttttaactttattcctagcaccatgggaagccattaggggttttaagctgtcgagtgacacaatttggtttacgttttaaaagatggcttcatctacagagtggagaattgtagaggagcattctggccagcttagctgtgggagggtgtggaattcacctttgtgctgcagagggcctcagctgaagccatgctgtccctgggataattgctttcccgcctaggttgttttcacaatctccacttctaaacatttaatctgtgttctggcttaatcaaggtcgacgcggcgcgaattccagatctatgaatcg

SEQ ID NO: 39084 - DNA, 342 bp, Homo sapiens
  misc_feature (1)...(342): n = a,t,c or g
nnnnnnnnnnnnnnnnnnnnnnnnnnnnnnnnnnnnnnnnnnnnnnnnnnnnnnnnnnnnnnnnnnnnnnnnnnnnnnnnnnnnnnnnnnnnnnnnnnnnnnnnnnnnnnnnnnnnnnnnnnnnnnnnnnnnnnnnnnnnnnnnnnnnnnnnnnnnnnnnnnnnnnnnnnnnnnnnnnnnnnnnnnnnnnnnnnnnnnnnnnnnnnnnnnnnnnnnnnnnnnnnnnnnnnnnnnnnnnnnnnnnnnnnnnnnnnnnnnnttgtacccagcccatttgaaccatcttaagttgcacaatctcatggcatttattgcatttaccatgttgtacaaccatcacct

SEQ ID NO: 39085 - DNA, 336 bp, Homo sapiens
ctcttcaccagtcagagaaggagaaaaagaaaacaaaacaacaacaacaaaaaaagaggactgggattaatttctttataatataagtatttattagaaggaaacatacatcttttcatctgtggattcctaaacttagcacatcccctggaaaagaatataactgaatttgtttctagaagttagtccagagttccagtgaaattcgagttttagttttctcctaaaacataaatggttgtataatcttagttaagcttcctaatcactctgactttcagcttcctcgactgtaaatgaagataatgtttttagctccaacagaaatagatttct

SEQ ID NO: 39086 - DNA, 325 bp, Homo sapiens
  misc_feature (1)...(325): n = a,t,c or g
aaagacattggcctgtagtttnnnnnnnnnnnnnnnnnnnnnnnnnnnnnnnnnnnnnnnnnnnnnnnnnnnnnnnnnnnnnnnnnnnnnnnnnnnnnnaccacttcagtttttgtaataatttgaggagagttggtattatttctcttttatatgtttggaagaatttggcaatgaatccatccagtcctgggcttttctttgttgggagactttaattactgatttaatcttgttactggtctattcaggttttctgtttcagccttggtaggttcagccttggtaggctgtaggtttccaggaatttatccatttcctctag

SEQ ID NO: 39087 - DNA, 330 bp, Homo sapiens
caaaatttgggaaagtaaataaaatagtattttatactattagcaaagggaaggtccactgaataaggggctatatgttatcttttgacataatcaagtgtgagagagctactgtgaagccctcgtggtaatttcaaacaagcaactaatgtacaaaggagtcacacatacaatgacattacacatgtcagaaaaaaacagactatccaaaacaatcagcattttttttcaaactgttgaaagactagtttgatttcctggcttaccttaaaactaggaagaatttagcctttcccgccccttcaaaaaaatcttgatgtatacaaaatt

SEQ ID NO: 39088 - DNA, 329 bp, Homo sapiens
gaaatacaaaggattgcacaggcagggaatgcttttgatagttactagttttgccttatcagtgagccagcaaagggcattctgttctctagaagtcaacttttcataagcgtcagaatccatttgattacctttaaggcttctgatgcatccacttgagccattgggctcaagaactctttcattcagataaaatgttcctccataatatactagaaaatggcgtgacttctaatcctcatttattttctaaatagtctatcttattttttaaatattgcattcagatattgaatcaatagatttagtaataatttgttagcatgtgc

SEQ ID NO: 39089 - DNA, 325 bp, Homo sapiens
agatactgtttaataggcagtctgcttttttttctgcagtaccaaatatgccccaacagcggcaagaccagcatcatcagagtgccatgatgcacccagcgtcagcagcgggcccaccgattgcagccaccccaccagcttactccacgcaatatgttgcctacagtcctcagcagttcccaaatcagccccttgttcagcatgtgccacattatcagtctcagcatcctcatgtctatagtcctgtaatacagggtaatgctagaatgatggcaccaccaacacacgcccagcctggtttagtatcttcttcagcaactcagta

SEQ ID NO: 39090 - DNA, 325 bp, Homo sapiens
  misc_feature (1)...(325): n = a,t,c or g
nnnnnnnnnnnnnnnnnnnnnnnnnnnnnnnnnnnnnnnnnnnnnnnnnnnnnnnnnnnnnnnnnnnnnnnnnngtagagatggggtcactcttnnnnnnnnnnnnnnnnnnnnnnnnnnnnnnnnnnnnnnnnnnnnnnnnnnnnnnnnnnnnnnnnnnnnnnnnnntgtaaaagaaggttttagtactatgaactcaatagtctgttttaagtttttccatagcaatttttgtgaggtagggagtttttaatcacatgatccattcaaaaaatataaaattgttggatgattaccagaggctggaaagaatagtagggggtta

SEQ ID NO: 39091 - DNA, 325 bp, Homo sapiens
  misc_feature (1)...(325): n = a,t,c or g
agggatttatcgtctattagaaatggtacattttattagaagataaatccctcagtggatcaaactgtcagtttcctgcaaaaaacaaattcagatacagtcttccccactctggtgttctagagttgtacctttgaggggttattattgctacctagggttcatttgtaagcatgttaataaatttgtgatacttactaaaaaaaaaaaangtagtnttgaaactccntganctacccgggcagcanaacctggcagntnanaccaccnngggctacagcntntgctgtatgacccttganggtatggcntaancntgnggacg

SEQ ID NO: 39092 - DNA, 319 bp, Homo sapiens
  misc_feature (1)...(319): n = a,t,c or g
ccgctgtctcttccttctccagatagcaaagataaaagcgaggatcccaggacattggactagatcagtggttctcaactgaacttttcagggaatgttttggggctagggaatgtttggtcctcctttttaagagacaagattactgctcatctttctttttgaaattaaagtctcncaattnaanatctatgaatnagggatcttaaaaaccccgccagntcactgcaactgtncatngggcaccntnggnaatttttttcatggtacatngccttnccttcttttatntaactatactnnnatnngtttnaatttt

SEQ ID NO: 39093 - DNA, 338 bp, Homo sapiens
  misc_feature (1)...(338): n = a,t,c or g
cgattctgctgcnnnnnnnnnnnnnnnnnnnnnnnnnnnnnnnnnnnnnnnnnnnnntggggnnnnnnnnnnnnnnnnnnnnnnnnnnnnnnnnnnnnnnnnnnnnnnnnnnnnnnnnnnnnnnnnnnnnnnnnnnnnnnnnnnnnnnnnggaaattagctttttcactagagacagcatgaatttttgagactgggtttgagttcctgtgctatttcaccattagccttctccctttccacatttcagttcttagagcaaaattctgactgcttaaatgtgcttagggtatgagtataatagatgatatttccgcattanctgtggntagattgccc

SEQ ID NO: 39094 - DNA, 337 bp, Homo sapiens
  misc_feature (1)...(337): n = a,t,c or g
gtgctaagtgcccgcctcacagttctactcaggaagatggttcaatgaactgcaggtgtgagaataattacttccgggcagacaaagaccctccatccatggcttgtacccgacctccatcttcaccaagaaatgttatctctaatataaacgagacctcagttatcctggactggagttggcccctggacacaggaggccggaaagatgttaccttcaacatcatatgtaaaaaatgtgggtggaatataaaacagtgtgagccatgcagcccaaatgtncgctttctncctcgacaggtttggactnaccaacaccacggtnacagtnacaggac

SEQ ID NO: 39095 - DNA, 334 bp, Homo sapiens
  misc_feature (1)...(334): n = a,t,c or g
cggggctgccttgaatggccagataagctgtttcattaatacccacttcttgtttgcgtgcttttatcagaatacatgctctacatttggcttttcaagcattctgtttatatgtgacccttgtcaccccaacgctggccgttttgcagattgttccttctgctgagagcacagaggctctgcggaactttctgtggattcctctggtctcccaatgtcccttcatgggattctgagtgtccactttctcaatacagaaatctcaggaggtaaaggaaatccaagaaaaaggggaaacttttctttgcccctgatgggaaacttnacacattgg

SEQ ID NO: 39096 - DNA, 336 bp, Homo sapiens
  misc_feature (1)...(336): n = a,t,c or g
cgaggttctagagaaaaaagaatgnnnnnnnnnnnnnnnnnnnnnnnnnnnnnnnnnnnnnnnnnnnnnnnnnnnnnnnnnnnnnnnnnnnnnnnnnnnnnnnnnnnnnnnnnnnnnnnnnnnnnnnnnnnnnnnnnnnnnnnnnnnnnnnnnnnnnnnnnnnnnnnnnnnnnnnnnnnnnnnnntgcctnnnnnnnnnnnnnnnnnnnnnnnnnnnnnnnnnnnnnnnnnnnnnnnnnnnnnnnnnnnnnnnnnnnnnnnnnnnnnnnnnnnnnnnnnnnnnnnnacgttgtatctatgcaanccttaaaaaggacaggatcatgtnctttgaag

SEQ ID NO: 39097 - DNA, 435 bp, Homo sapiens
  misc_feature (1)...(435): n = a,t,c or g
ttganttganaggnnnnnnnnnnnnnnnnnnnnnnnnnnnnnnnnnnnnnnnnnnnnnnnnnnnnnnnnnnnnnnnntctcgaggatccgaattcgcggccgcgaattccnnnnnnnnnnnnnnnnnnnnnnnnnnnnnnnnnnnnnnnnnnnnnnnnnnnnnnnnnnnnnnnnnnnnnnnnnnnnnnnnnnnnnnnnnnnnnnnnnnnnnnnnnnnnnnnnnnnnnnnnnnnnnnnnnnnnnnnnnnnnnnnnnnnnnnnnnnnnnnnnnnnnnnnnnnnnnnnnnnnnnnnnnnnnnnnnnnnnnnnnnnnnnnnnnnnnnnnnnnnnnnnnnnnnnnnnnnnnnnnnnnnnnnnnnnnnnnnnnnnnnnnnnnnnnnnnttttncntctttttnctnttnnttnnnnttttntncattngntctntattttt

SEQ ID NO: 39098 - DNA, 341 bp, Homo sapiens
caaaatataacacatatctagatttttctgctcgcatgatattcaggtttcaggaatgagccttgtaatataactggctgtgcagctctgcttctctttcctgtaagttcagcatgggtgtgccttcatacaataatatttttctctttgtctccaactaatataaaatgttttgctaaatcttacaatttgaaagtaaaaataaaccagagtgatcaagttaaaccatacactatctctaagtaacgaaggagctattggactgtaaaaatctcttcctgcactgacaatggggtttgagaattttgccccacactaactcagttcttgtgatgagagac

SEQ ID NO: 39099 - DNA, 355 bp, Homo sapiens
  misc_feature (1)...(355): n = a,t,c or g
aggatgatgtatatggctnncnattcnangatgaanatccncancaaacccccaanagagatctctcgnggatccnaattccnnnnnnnnnnnnnnnnnnnnnnnnnnnnnnnnnnnnnnnnnnnnnnnnnnnnnnnnnnnnnnnnnnnnnnnnnnnnnnnnnnnnnnnnnnnnnnnnnnnnnnnnnnnnnnnnnnnnnnnnnnnnnnnnnnnnnnnnnnnnnnnnnnnnnnnnnnnnnnnnnnnnnnnnnnnnnnnnnnnnnnnnnnnnnnnnnnnnnnnnnnnnnnnnnnnnnnnnnnnnnnnnnnnnnnnnnnnnnnnnnnnnnnnnnnnnnnnnnnnnnnnnnnaagttgg

SEQ ID NO: 39100 - DNA, 326 bp, Homo sapiens
  misc_feature (1)...(326): n = a,t,c or g
nnnnnnnnnnnnnnnnnnnnnnnnnnnnnnnnnnnnnnnnnnnnnnnnnnnnnnnnnnnnnnnnnnnnnnnnnnnnnnnnnnnnnnnnnnnnncatatgagttaaagagaaacctaggatattctcattctaaaaggaataagaagagttctatccatttttacagataaataaataaattacatgataatctaaatgatttattttattaaatgactggacaatctgactccaacatatgtttaatctttacgtggctaataacacaaatggttttattattttcaaacatctatttaagcccacaaagttggtaaatgacacct

SEQ ID NO: 39101 - DNA, 329 bp, Homo sapiens
ggagaggaagttgtggggaaaggcagaataacaagcagagaaactaattttttaaaaaggtttttaaaatgttgtgggtgaaataaaacacgagctatcagttaatctgtataaccaatgccaagtttcattacctctcttgtccaacttcctcatcaagaaaatgagcatagccacatctttttttgccttaaggggagaggcagaattctaacaatcataagacatgattcctgatgtgtgcgtgatccccactgaatctgagagtcaagcactgttgcctcggtcatacaacatgtatgtgttgatcctgactttgcaccaggtcc

SEQ ID NO: 39102 - DNA, 427 bp, Homo sapiens
  misc_feature (1)...(427): n = a,t,c or g
ttgaagtttgatgggnnnnnnnnnnnnnnnnnnnnnnnnnnnnnnnnnnnnnnnnnnnnnnnnnnnnnnnnnnnnnnntctcgaggatccgaattcgcggccgcgaattccnnnnnnnnnnnnnnnnnnnnnnnnnnnnnnnnnnnnnnnnnnnnnnnnnnnnnnnnnnnnnnnnnnnnnnnnnnnnnnnnnnnnnnnnnnnnnnnnnnnnnnnnnnnnnnnnnnnnnnnnnnnnnnnnnnnnnnnnnnnnnnnnnnnnnnnnnnnnnnnnnnnnnnnnnnnnnnnnnnnnnnnnnnnnnnnnnnnnnnnnnnnnnnnnnnnnnnnnnnnnnnnnnnnnnnnnnnnnnnnnnnnnnnnnnnnnnnnnnnnnnnnnnnntnttnagtntntnagtntncctgactnngnaatggnattnanngcttaa

SEQ ID NO: 39103 - DNA, 425 bp, Homo sapiens
  misc_feature (1)...(425): n = a,t,c or g
agtttggatgnnnnnnnnnnnnnnnnnnnnnnnnnnnnnnnnnnnnnnnnnnnnnnnnnnnnnnnnnnnnnnnntctcgaggatccgaattcgcggccgcgaattccnnnnnnnnnnnnnnnnnnnnnnnnnnnnnnnnnnnnnnnnnnnnnnnnnnnnnnnnnnnnnnnnnnnnnnnnnnnnnnnnnnnnnnnnnnnnnnnnnnnnnnnnnnnnnnnnnnnnnnnnnnnnnnnnnnnnnnnnnnnnnnnnnnnnnnnnnnnnnnnnnnnnnnnnnnnnnnnnnnnnnnnnnnnnnnnnnnnnnnnnnnnnnnnnnnnnnnnnnnnnnnnnnnnnnnnnnnnnnnnnnnnnntccttcntccttnccagcntganaccnnggtgnagntngtcntccggatttgncagtctgnaagtggntaacc

SEQ ID NO: 39104 - DNA, 318 bp, Homo sapiens
  misc_feature (1)...(318): n = a,t,c or g
nnnnnnnnnnnnnnnnnnnnnnnnnnnnnnnnnnnnnnnnnnnnnnnnnnnnnnnnnnnnnnnnnnnnnnnnnnnnnnnnnnnnnnnnnnnnnnnnnnggttttctgtttctgtgttaattttctaaggtaatgtccccattttacaggtgtagaaagcaaagcttagcggagataggaaacttaactgatatcacgtggcaggtaagtggcagcattaggttcaaaccagacagtgtgaccaggaatcccccctnttaaccatggtctttcctcaaacagcctgtcagcctttgacccagcagcctcantnatttgg

SEQ ID NO: 39105 - DNA, 329 bp, Homo sapiens
caaagcactccagcctgagtgacagaccctgtctcaaaaataaaaataaaaacaattagttataactcagatgttgctatctaaggtaagtagtaattactataataaacaagctatatattaacatcttaattttctttcctctgaactttactactgtaggtgtgtagtgaacttcatacaagttaatctttttgtagctctatttcttcatttctgtttgttcatcggttggagaaattttgcttaaattaatgaaagtaataatacagatattaatggctcataaatgtgcacaacccacttcatctatagtaagtaaaagtggc

SEQ ID NO: 39106 - DNA, 337 bp, Homo sapiens
aggcaagatatattttacatgtatgaaagccaaatgtatatatacaagctgagtgatgtgattacaggttggttttttcttctacttatgtatattttctaatttttcttccagaacacgtattacctatttaaatgaataatggtaattttccattaccagtaaaatttaataaaatggagtagactctgtaagtaatatgtacatgaagtataaatgcgtaatagtggtgaaaagctcagatcttagccttcacttaccctgcagtcaaatggtgttaatggagataaacctttttagggttattatgaaatttaaaatccatgtaaagtgctta

SEQ ID NO: 39107 - DNA, 337 bp, Homo sapiens
tcacttttttaaaaactcagtttcttaaagaactgtacttttcccccctttcttatgctctttttcttattttgacttgctttttaaaatctttttcaaagtaatacatggtttaaaaagtcaaactggactatcctaacaaaatataccattatgccttcatactcttgattcttgatccatcaagacaatcattttcaacactttcttctagtgtttagctccatatttcgaaataattttatttccctgtcatttctttactattttctatagaaggattaggttctctaacctctcactactactgccactacctacataacccctctctctc

SEQ ID NO: 39108 - DNA, 446 bp, Homo sapiens
  misc_feature (1)...(446): n = a,t,c or g
gcctttganagnnnnnnnnnnnnnnnnnnnnnnnnnnnnnnnnnnnnnnnnnnnnnnnnnnnnnnnnnnnnnnntctcgaggatccgaattgcggccgcgtcgacctttggatcaagagactgattcccagtggatctttcaggcttctttcttaaattagaaagaagcttttgggagaggtgatgggatgtgcccatctgttggacaaggagttggaatcctaatggctacttttaaatcctgatgcctttacttagcagtggtgtggtttgggggcaagttcctgaattgctgggcctcagctttcttagttgcaaaaaagcaggtactaatccctagagaactgttcaaggatcaagtcacatacatgaaaatgctttgcaggtacctcccaaatgctaggtataattatcactagttacaattccctgttttttttggaacg

SEQ ID NO: 39109 - DNA, 346 bp, Homo sapiens
ctttgggtgtgtttatatgaaggtcctctacctgattttctctggggttttggatctctgaataattcatatatttccaaatcaaaatttagaggatctgtagtgcactagtctgtgtttgtactatgtctgatgcgatggcatcacttctaagttctgttgcatattcagttagtcagctctggtaaccgagtaaaactcacattctagtagaaattgtttggtatctagaaccttactaaggacactaaggggtaaatggtaatattcaacagataccacattaaaaagttttcactaatttttaagtcaaatatttatcatatcagtgagaagttgatccaaa

SEQ ID NO: 39110 - DNA, 318 bp, Homo sapiens
gtcctgctccggttttagtgtatgtgctgctgaagcaagcactctacctttgttttaactgcaagttgattttatgttacagctctaaatcttactagttttatatcttaaatagatgagatctaaactttgttgattagaagacattttgataggcatttatttttgtgtttgaagagtattatttctgcttagcttccttaataaaccatgttttaactattttatacttcttgttccttctatagcagaggggaaagagggagagaatttcccagaaattactgattatatctgactaaatattttgggtgcaag

SEQ ID NO: 39111 - DNA, 327 bp, Homo sapiens
  misc_feature (1)...(327): n = a,t,c or g
cacgtgggaaggctgcggctggagattcgcgcgctcggacgagctgacccgccactaccggaaacacacggggcagcgccccttccgctgccagctctgcccacgtgctttttcgcgctctgaccacctggccttgcacatgaagcgccacctttgagccctgccctggcacttggactctcctagtgactggggatgggacaagnnnnnnnnnnnnnnnnnnnnnnnnnnnnnnnnnnnnnncacaatgctgggtggttttcccacgaatggaccctctcctggactcgcgttcccaaagatccacccaaatatcaaacacggact

SEQ ID NO: 39112 - DNA, 332 bp, Homo sapiens
  misc_feature (1)...(332): n = a,t,c or g
gaggtcggaggctgcgagtgtcgctgctgaaggctgtggtggaccgggctggatcgcggattgtggagtagattatagatttgaaatagcggagttggggttggatcggggctttggggttggataggggatttggggcgnnggggtcggggaggggggtggngaaaagggttcaagggaacttncctngctnnanaacccggtggtttgggngnntgaaaaagaaacccccnttttaannnnttnngnttttnngagccncagggnnaaancngccanggtttncttnnacnnagtttacnccngnttccnganntncgaanncgggactt

SEQ ID NO: 39113 - DNA, 338 bp, Homo sapiens
  misc_feature (1)...(338): n = a,t,c or g
caacattctaagtggtagctcatgaatattttgactcaacgggaattccaggagtataatattatgccattctccagagagcagtgtgacttgtcactatggagttggtcagaccctgaagtcttgtgcaagcactgtcacttcccaaaagctttcccccatcacccccatctgagtgaagagctcgtagaacagtgctcttccttagcacttagattaaagtcctctttagtctgattgccaaataaaatacaggccccatgcaatattcaggacaaacttttagtaataaattatttgntggttatctgaaattcaaatctaactgggcatcctat

SEQ ID NO: 39114 - DNA, 319 bp, Homo sapiens
  misc_feature (1)...(319): n = a,t,c or g
cccggtttcacctcaagacaccaacctcactcaagtatgtggatcctattcctacaaaccagcaggtaaagagcttggaaaaggaggagttgcaaattcactcagtgtccaggttctgtttctggcatttcaaaggacagagatttttttttttcttagcaancncnncttttttnntaaatgncttannnctccctnaaactnnnacaggnntnanaatnnaatgataggtanctggntttntncgantnnttntntaaaanncgtnnaaannttaccnttaanntnnnnggttntntttctatacattttngcttgt

SEQ ID NO: 39115 - DNA, 320 bp, Homo sapiens
caatactagaaatagctctgctcccaatctgtaactttcatcagctctggttgccaagccactaaaaaattatcttctgtgcttttgtttttaatccttcaacaacattatttatgagaaatgaatttctctagatgtctaaaaaatactgagtaaaaacaagtcaaagaatggtacatattgtataatcctatttgtttaaaaaagtacattttcatatctgtatagaaaacatataaccaaatggaagaagacctaacaatggctatcttttagagataagatatgagatgaatgatatcattttatacattctttac

SEQ ID NO: 39116 - DNA, 326 bp, Homo sapiens
  misc_feature (1)...(326): n = a,t,c or g
tgtacactcattatttctgatttgggagccaagttatgctaaccggaaccagaaggttggtagcaagaggattgtaatctcagaaggaaaaatgtcctgataaaaagaacaaggccttttgttttgtattgttcaaaactaaattgttaagtccgtgctggatagtcaacctttcctatgtagggatcttcggaagacatgctggtgtctaagaaccagttgctatttaaaatactggttttatgtttacaattgtgcggaactgatgttacaggctttaactgtcttggaattcanggagatctttttcctccctggtggtcatc

SEQ ID NO: 39117 - DNA, 314 bp, Homo sapiens
ctcttccccaccgcaggacccagctctcattcctttgcagcgtttatcaaactgtgcaagtactgtgttcatctgctgacttgttcctgtgttgaaacatgggccccatgagggagggactgggcctgacacatttgccactgaccctgggcacatgacaccatccccggcaggttctcattaaggacctggtgaccgatcccaaggattctctctccagtcactgcagacgggcactaccagcatctctgttcagcctcactacaccctgatgatgtggattgagcaggaatcattaattccatttttgagac

SEQ ID NO: 39118 - DNA, 348 bp, Homo sapiens
gccacatttgcctccatagaggttgtatcaatacacatacccgccagcaataattcctcacaggcttactaatggcatgtgtcatcaaactttaggagttttccattctgttagatagtatagcagtgcagttttaatatgtatttctcttattttgagtgaggttaagggtctttttatatatttcactgtctggtcattttttttagggctaagtcttaaaacaagtattttcttcataaatagaactgctagtacagtgccatacttagaattcagtgaaaacttggttgaaccagatttagcagttcttcactttctggcataacaatatgttccaggatcaac

SEQ ID NO: 39119 - DNA, 348 bp, Homo sapiens
  misc_feature (1)...(348): n = a,t,c or g
ggcgtgagccaccactcccagcaaatctttttctttatgagtattcaagaaatgatagctgttaaactatttttactatctatttatatttttcaaaccaaaaatagaggtcgacgcggccgcgaattccnnnnnnnnnnnnnnnnnnnnnnnnnnnnnnnnnnnnnnnnnnnnnnnnnnnnnnnnnnnnnnnnnnnnnnnnnnnnnnnnnnnnnnnnnnnnnnnnnnnnnnnnnnnnnnnnnnnnnnnnnnnnnnnnnnnnnnnnnnnnnnnnnnnnnnnnnnnnnnnnnnnnnnnnnnnnnnnnnnnnnnnnnnnnnnnnnnnnnnnnncctaaattcttcatgaa

SEQ ID NO: 39120 - DNA, 432 bp, Homo sapiens
  misc_feature (1)...(432): n = a,t,c or g
gnnnnnnnnnnnnnnnnnnnnnnnnnnnnnnnnnnnnnnnnnnnnnnnnnnnnnnnnnnnnnnnntctcgaggatccgaattcgcggccgcgaattccnnnnnnnnnnnnnnnnnnnnnnnnnnnnnnnnnnnnnnnnnnnnnnnnnnnnnnnnnnnnnnnnnnnnnnnnnnnnnnnnnnnnnnnnnnnnnnnnnnnnnnnnnnnnnnnnnnnnnnnnnnnnnnnnnnnnnnnnnnnnnnnnnnnnnnnnnnnnnnnnnnnnnnnnnnnnnnnnnnnnnnnnnnnnnnnnnnnnnnnnnnnnnnnnnnnnnnnnnnnnnnnnnnnnnnnnnnnnnnnnnnnnnnnnnnnnnnnnnnnnnnnnnaagnntgnnntagtcnnaaaaacagggnncctttttacacaggangacntnccctangacctacgtttt

SEQ ID NO: 39121 - DNA, 350 bp, Homo sapiens
  misc_feature (1)...(350): n = a,t,c or g
ggcaggtgagacttggaggaaaaaggaggatccctggggtacctcaagtgcataagatcacccaagaggaaagggacagggtaggcaccccaggtgagtctgactcaaaaatggtacttcttgtaaacagtacttcctggtctgtccctgtgaagtcctcacagcaacccctttaaggttatacttgctgtgcaccaagtacttccccaagtacttttatgcaaatcaacttctttacccccaaagacctagaaggtggtcaggtaacccagttagttagctggnnnnnnnnnnnnnnnnnnnnnnnnnnnnnnnnnnnnnnnnnnnnnnnnnnnnnnnaggattgcttg

SEQ ID NO: 39122 - DNA, 346 bp, Homo sapiens
ctcaatgcagatgttcacagtggcagagagggaaagcgagacccccaaatgtaagtacctgggactgcactggtgagtacgggcttccaggctctccactcaacagagtttcactgttcatttttgttttcagacaagcaatgtatcgactgcagaaatctttgcagagttcgttaaccttttccagctcaagaagatgaatgcgcaaaacctggattgcttttaccattaaattatcggtttctggatcttcacaaaagaaaggtttcccttccttctcttgctttcttacaaaattttcgatgtctacatcaaaactggcagaagttgtgccttcagagccctg

SEQ ID NO: 39123 - DNA, 281 bp, Homo sapiens
  misc_feature (1)...(281): n = a,t,c or g
ctcacgcagtgcgagtgggagcaagatggggtgaggtcatgccacacacttannnnnnnnnnnnnnnnnnnnnnnnnnnnnnnnnnnnnnnnnnnnnnnnnnnnnnnnnnnnnnnnnnnnnnnnnnnnnnnnnnnnnnnnnnnnnnnnnnnnnnnnnnnnnnnnnnnnnnnnnnnnnnnnnnnnnnnnnnnnnnnnnnnnnacaggcaacatcatccaacatatcagagtgcagctcacattactgtctggccagctataaattccctttttttttttttt

SEQ ID NO: 39124 - DNA, 349 bp, Homo sapiens
  misc_feature (1)...(349): n = a,t,c or g
atcatggaagttgtggcagcctcagtttgtccatcattaaaatgggggtcataaaattgtatgtgctttacaggatattcatgtggattaaacgtatgtatgggctgacagcagagcttgtcacataatatgttagctatgttgctactgattaaaatagatttttatagaaaaaactttaatattcatcttacactcttgaaaggtgattagtcgacgcggccgcgaattccnnnnnnnnnnnnnnnnnnnnnnnnnnnnnnnnnnnnnnnnnnnnnnnnnnnnnnnnnnnnnnnnnnnnnnnnnnnnnnnnnnnnnnnnnnnnnnnnnnnnnnnnnnnnnnnnnnnn

SEQ ID NO: 39125 - DNA, 348 bp, Homo sapiens
ttaaggcatggatttttaaaaatagtttttgtaaacatagtaacctgagtttgatatcaaatatgggtttacatctagatttttttaaagtgtgttactgactcaagtccctagaggtcactctaataatttaaataaatttgtgtaccaaataaaagctgtaaagtggtttaacaagaatataaaatttcactcaaatgaagctattactttatattggcaatatttttaaaagaataaatatttgattctaatatattcttcaagttaaaaaatggatagcaaataggaacaaaaagttctaggcacaacaaagtgctccagactgctttgaaaccagtgtattcg

SEQ ID NO: 39126 - DNA, 304 bp, Homo sapiens
  misc_feature (1)...(304): n = a,t,c or g
caactgcccaggactcaggcacatcaaaatatgacacaaaagcagaagcttttcataatggagattagaccatgtctaggattcctacccagtcctcttgagctctcctcactccagtgttgttttccatgtttgttttttgttttccccagagcttcttcgagacgctattcagtnnatagntnngggaatgaatgnntcgganntaantttttnntntggtatattacaaggtctnaanttnangnttcnnggtatntncnagantnttgggcaatttgcngtntgcnngngcacnnaaact

SEQ ID NO: 39127 - DNA, 427 bp, Homo sapiens
  misc_feature (1)...(427): n = a,t,c or g
ggnnnnnnnnnnnnnnnnnnnnnnnnnnnnnnnnnnnnnnnnnnnnnnnnnnnnnnnnnnnnnnnntctcgaggatccgaattccnnnnnnnnnnnnnnnnnnnnnnnnnnnnnnnnnnnnnnnnnnnnnnnnnnnnnnnnnnnnnnnnnnnnnnnnnnnnnnnnnnnnnnnnnnnnnnnnnnnnnnnnnnnnnnnnnnnnnnnnnnnnnnnnnnnnnnnnnnnnnnnnnnnnnnnnnnnnnnnnnnnnnnnnnnnnnnnnnnnnnnnnnnnnnnnnnnnnnnnnnnnnnnnnnnnnnnnnnnnnnnnnnnnnnnnnnnnnnnnnnnnnnnnnnnnnnnnnnnnnnnnnnnnnnnnnntttatacntngntntgccttcttttatgaactatactcctntaangnnaatcttggncatggaacctcc

SEQ ID NO: 39128 - DNA, 331 bp, Homo sapiens
  misc_feature (1)...(331): n = a,t,c or g
gctgcacactataatgaatgtaattaatgccacttaattatacacttacaaatcattaaaatgacaaatcttatgttatcttcaaaaacagtgatannnnnnnnnnnnnnnnnnnnnnnnnnnnnnnnnnnnnnnnnnnnnnnnnnnnnnnnnnnnnnnnnnnnnnnnnnnnnnnnnnnnnnnnnnnnnnnnnnnnnnnnnnnnnnnnnnnnnnnnnnnnnnnnnnnnnnnnnnnnnnnnnnnnnnnnnnnnnnnnnnnnnnnnnnnnnnnnnnnnnnnnnnnnnnnnnnnnnnnnnnnnnnnnnnnnnnnnnnnnnnnnnnnnnnnnnnn

SEQ ID NO: 39129 - DNA, 326 bp, Homo sapiens
cccactctttgatgtaaaaggcgtattactaattaatataaagcagagacagaacatctcaattcctgtttttcctctatcttttctgtcaagaaaaatcatcttgaaagtagaaagaaaagaagaaatattaggaaaagtggattagtgaccaagataaataaggagactgtcaaagggtgcctatctctctaaatgaataaaaaattcctggatgaattctacactagagaacttgaagagtctctgcagatgagacccatgagtgacactgtggaaacccagacaaatctcatgattctaataatcccaaatatcacattagc

SEQ ID NO: 39130 - DNA, 333 bp, Homo sapiens
  misc_feature (1)...(333): n = a,t,c or g
atttgtttatccatctatgactcatccatccatctgtccattcatttatctcatctctatatctatcttatctaannnnnnnnnnnnnnnnnnnnnnnnnnnnnnnnnnnnnnngtatctatcatctatctacctatctatcatccatctatctctatctatgtatcatctatttattctatcaatcatctacctctgtattatttttctacccatctatcatccacccattcgtccatttatctcctttctatatctatcttatccattaactatctacttctatctatctctctatctatctattagnctatanctttatatttatcatca

SEQ ID NO: 39131 - DNA, 336 bp, Homo sapiens
  misc_feature (1)...(336): n = a,t,c or g
cttcacctggtattcaagcccctccagagtctggcttcttcctacctggccaacctatcctccccctcccttcccactataaaccctaccagctttctgaacctccatcaaccaaagaaagaataaagcagtgatcacacaataaaaagggaaaggttttctcttggccttcttggattctgctaaccaccaaagccacaaactaggtaacatnccctacnccntttacnccatntntatttccctcccctnccttctcaacccacttgcttccttcctcttttaatgctattaagggtntgaatttacatatgggntctcattgggcgagaagca

SEQ ID NO: 39132 - DNA, 444 bp, Homo sapiens
  misc_feature (1)...(444): n = a,t,c or g
ttgatcacngnanatngcnnnnnnnnnnnnnnnnnnnnnnnnnnnnnnnnnnnnnnnnnnnnnnnnnnnnnnnnnnnnntctcgaggatccgaattccnnnnnnnnnnnnnnnnnnnnnnnnnnnnnnnnnnnnnnnnnnnnnnnnnnnnnnnnnnnnnnnnnnnnnnnnnnnnnnnnnnnnnnnnnnnnnnnnnnnnnnnnnnnnnnnnnnnnnnnnnnnnnnnnnnnnnnnnnnnnnnnnnnnnnnnnnnnnnnnnnnnnnnnnnnnnnnnnnnnnnnnnnnnnnnnnnnnnnnnnnnnnnnnnnnnnnnnnnnnnnnnnnnnnnnnnnnnnnnnnnnnnnnnnnnnnnnnnnnnnnnnnnnnnnngagctnccatactgatntgactaggcnncctggaatgctacngnnagctgaanantnaaanccnccnnaacatgcc

SEQ ID NO: 39133 - DNA, 339 bp, Homo sapiens
  misc_feature (1)...(339): n = a,t,c or g
ctgctgaaaaccagggacgttcctgcctttgcactggctgttccctcagccaagaagagtcatgtccaaatagccccagagcaaaccccccaacctccttcagatctttgctcagatgttgcctctgtgagaagtgctctagccattccttttttaaaaggaaaaacttcacctcctccccaactcatacctacattctcagtcctttaccccgatctgtatttgtgtccacagtgcttatcactttctaacataggcttatcaatcatgatcattgcttattacgtattttccccccaagaacataagctccatggnggcagggatctttggttggtt

SEQ ID NO: 39134 - DNA, 338 bp, Homo sapiens
ccaggacccagtataaacttaatgttattaattgcaaaattttagtccttgtataacacatgtcttctccatctctgttgaatttttatttaatattaaaatactgggctagtttccaggtcttcaataacacggcatttctttcatgcatctgttgactgtgatgcctaatataactgtagatagagacacatttctataatttatatagttgttgtaagggggtagaaaatagaatttacagacctttaataatctgtgaacatagggtacctatttgatacttttagtagcctctaagaagtaaacaacaaagtcagtgcctgattctgactctc

SEQ ID NO: 39135 - DNA, 342 bp, Homo sapiens
  misc_feature (1)...(342): n = a,t,c or g
aataaattctaaactataacaaaaacaaattacagtactagaaaaaagaaattaaaaaacaaaaacataaatatataagctctgattttttatttttgattcaacagacataaaactgctgtattaaaatgctataaaaacttctaaacactcattctcaatttctatactcatctcattgaggctcagaaacaaaaagctggtgatagggcactggcccacaccatacactgagtaatgctactctatggaaacctgcacatgtacactgtatccaggaggccntggataanaantgtattgaggcagnngttgtaataagggaaaacttanaaccttccc

SEQ ID NO: 39136 - DNA, 346 bp, Homo sapiens
  misc_feature (1)...(346): n = a,t,c or g
tttcaattcagtttatttcagtctaatctgattcagggcaattcaactccactcacgtcagcacaagggaagagcgccccggagcccacaatgggcaccaacacacagacagtggcctcaggcagcccggctggaaggagcccactggtctcacaggcgtaacccgtgtttgcaggcataactcgtgcacacgtgtggcactgctcggcctgggcaccgagcgctccccgtgcctcaggtccctccagacatgccccctccaccgcccctcctgaggacgctcatctttgaaaatgncctaanacggaactggaagctctaangnacccgttncaancnttacggg

SEQ ID NO: 39137 - DNA, 338 bp, Homo sapiens
  misc_feature (1)...(338): n = a,t,c or g
atttattttaacagcaaatattatggtcttttatccttaagttccattacatcaaaacaataaagtattaacatttaacttaaggtaatccagtgccctcagcttttaaagaaataaatactttaaaacaatgaaaataaatcagtttgctttcagaaactacacactaaatgaatttctcttcttggttgatgatggccaaaatcccaactgtagaaccatcctcagagaacttgtcatgtaaaaacacttggttcaatttagatatcatcaatgtcttcatcatcatctccaatatcgncaaactggatttcatcatnatcttcaggacccaatgg

SEQ ID NO: 39138 - DNA, 367 bp, Homo sapiens
cttttgctcacagtgaaagcatttagacaattcattgtctcttcttgaagacttgtttagtgtgctcagttaatgtattaatgtttttcctggtaaaaatgatcatttgaaaaatctctcttgttcagaattactgggagatgtactcaaagatcggccccaggaagcagatggaatcgattcggtgattgtagtggacaatgtccctcaggtgggacccgaccgacttgagaaactcaaaaatgtcatccacaagatcttttccaagtttgggaaaatcacaaatgatttttatcctgaagaggatgggaagacaaaagggtatattttcctggagtacgccgtcccctgcccacgctgtggatgg

SEQ ID NO: 39139 - DNA, 360 bp, Homo sapiens
ctttacaacaagcagcctgcttcttcaaatccagcaagagaggaagagagtgagtttgctagtatgactggattttatatagcataagcataagagtgacagggcatcacttttgccacatcttatttgttagaagcaacttaaagttcctgcccatattcaagatgaggaaaatataaacagttgtgaataccaggaggaaagaatcatgagggttaccctgatatctgtctgccacatcccaaaaagaaaatctatttcaggctttggtatcatttgaaaggtttccagataatcaggtagtcaacattaaataattgtttgaatgacatttaactattgcacaaacaggtgcctctt

SEQ ID NO: 39140 - DNA, 364 bp, Homo sapiens
gttttggggttaatcctattcatatttttggttttcttcttcattcccaagatatataaaaattaaaagcatttgagattgcacattagtgcattggatttttatctggggtggtcccttctctaagtgggtagtgggagtgtggaagggtgaagcaatatctactaaccttatttgtgatttgggagctagattatcctttttccaaaacatcctaagcgaagactaccctgactgtttttactgaaagctcttcctgtcattctgggtagtttatactggttatttaccttgtataaggaaattctttctttactgcccatcttatctcagatcaaagtttccacccagggatcctacttaa

SEQ ID NO: 39141 - DNA, 357 bp, Homo sapiens
  misc_feature (1)...(357): n = a,t,c or g
ctctattgatctgtgcgttttttcaccaataccatgttttaatcactgtggcttcataacctgtttcgttacctgatgttcttccagatgaaattttaaaacattaagttccattctcaacaaaatgtttctttggaatttttgttaggcttgcattaaacttaaaactaattttcaacaggggaattgttatctttatagtattaacattttaatacaggaacatgatctgattcttaacttacacaagacttttactatttataggcatcttcatacagagcctatgtgtttattgctgagnttattcctcatgaagcttcttttgttggtactatgaatgngaatctttcttcc

SEQ ID NO: 39142 - DNA, 362 bp, Homo sapiens
cagagagaacccaccatggtgctgtctcctgccgacaagaccaacgtcaaggccgcctggggtaaggtcggcgcgcacgctggcgagtatggtgcggaggccctggagaggatgttcctgtccttccccaccaccaagacctacttcccgcacttcgacctgagccacggctctgcccaggttaagggccacggcaagaaggtggccgacgcgctgaccaacgccgtggcgcacgtggacgacatgcccaacgcgctgtccgccctgagcgacctgcacgcgcacaagcttcgggtggacccggtcaacttcaagctcctaagccactgcctgctggtgaccctggccgccacctccccgcc

SEQ ID NO: 39143 - DNA, 369 bp, Homo sapiens
ttcagcatatacaaacatgtcaggagttagtaataaaaaatacaactaaaagctcaacaagcaatagatatagatctttgggggattcaaaatcttattctttcactcggtttttgaattatattaatggccacaaatgatgacgcagtagcacaagggatcagactctgctcagctaatgtttagaaattccataaacataacctgctccataatatctacccaccagactgacctcagcagtgaaaaacacctattacagtagcatttgggttaagccatattttactccaaaagatgcttgtgaaatacaaacacactaatgaaagggaagaatcatgaagctagtttgaaattagcgttgattca

SEQ ID NO: 39144 - DNA, 366 bp, Homo sapiens
  misc_feature (1)...(366): n = a,t,c or g
ctttaaacagttatttttaactctcaaattgctctgataacagagttcctatatgtgcatcctcccatttcttgctcctgctgattcttttaaggtgctttgtaattttttttcctctaaggtcatcttcagtaagacgtatttgctataaaaataaatcctcactgccctgggttatagatgtgggatagtttcatgtttcccctactaatactagatggatttcatgggttccaatttagtttttatggctatttcttagctagacatctctgaatctcataggtagtataaattcagaacccctaccatgtgtggcttanatttaggnacaatttctttcaggngcttctttttctcccatgt

SEQ ID NO: 39145 - DNA, 363 bp, Homo sapiens
agagaacccaccatggtgctgtctcctgccgacaagaccaacgtcaaggccgcctggggtaaggtcggcgcgcacgctggcgagtatggtgcggaggccctggagaggatgttcctgtccttccccaccaccaagacctacttcccgcacttcgacctgagccacggctctgcccaggttaagggccacggcaagaaggtggccgacgcgctgaccaacgccgtggcgcacgtggacgacatgcccaacgcgctgtccgccctgagcgacctgcacgcgcacaagcttcgggtggacccggtcaacttcaagctcctaagccactgcctgctggtgaccctggccgcccacctccccgccgag

SEQ ID NO: 39146 - DNA, 371 bp, Homo sapiens
tgttgttacaagaaaaatcatccaggaaatggaatttaagtatctcctatacttgctacttacaaaatatcattgctggggaaggaggaaagtacattcttacgcttcttcccctccatatacacataggagtcttttcatagctagccacaaaaattattttcctcttatgtatgggaaacagataggtcataaacatgatgtatcaaagaaagccctagcttagaaatttaaaaagcatctcaaaaaaggagttcttagcatcctaaatttatcaatttataactatgtgaccagcaataaatcattaaacctcagttacatcactgatacagcaaattaacatctgacctagaattaatgagaatata

SEQ ID NO: 39147 - DNA, 371 bp, Homo sapiens
gctgaatccattccccacacagcagcaaaaatgatctttataaaagggtagatcagataatgtaacttgctcagaacccttcatgatttctcactgcactgaggataatatcaaaattcctcatcctgactggcgagggcctctggtgagctggctgtggcccatctgtctgtcttgtgtcaggttccctttcctcccattcactccattcagttcctcaaggaccctaagatcttcctcacctcagggcctttgcacatgctcttctctcccatccacttgatgtctccataacccttactcattacacatagctttgagttagatgtcactttcttacaaaggttggacatcatccttttagttctccc

SEQ ID NO: 39148 - DNA, 363 bp, Homo sapiens
agacaacggacagaagcaaatgtagcacactcttatcctatatatccaattatttctataaatattcataaataaaatgtctagtacaacaataatagaatcaccagatacatgaaggacagaactagaatgaaaaccaacagaaactaagagaaaatcacaacagacctaaaggaactctaggcagactttaatacattgattaactgaaaacgtcaaacagaaattggcaactgaaggagggacttaacagaaaatcagatgtcactgaagagagaattagttaactgaagatagttcaaagtaatcatctggaaggaagagaggttaaagaatggcaaaatttttaaaaactgaagaccc

SEQ ID NO: 39149 - DNA, 354 bp, Homo sapiens
aaacctcatcagcagatcgggctctcttcccttgccttgcctcctaacccccctaggccaggtgagggggacagggtactgggaggtaagaaggaactcttctgcaaggagggctctcacgtctgtcttaggcctgctccttaccagagtctttggggaagcagtagggagggcctgagggtctcaggaaaggctctctgctggtctggctctgctctgtagctccatctatttccctgtcccaggtcctttcttcctcctaaccccattgactctgaccatcccctgcccagagcctgaggtcccttctctggcccctctgctgggctggccatgcaggtgaggcccggcatc

SEQ ID NO: 39150 - DNA, 355 bp, Homo sapiens
ggctgacggtggcccaggctccaatcctgggggaagcgggcgcccaggcgaccccaaactccaggaccctcttactctctgcctcctgagaggctcggcggcatgggaccccttgtacttgcctgatccctgagtcagcacccccacctgcgcctgctatccctgtgtacacacggggaaactgaggccctgggccattaaggcagggttgctgggcaggcagtgattgtaaggcttaccttctccccttgaccagctgaacccctctgcctggaagccctccaagcctggggttcaccctggagggcagggcaggcactgagacacccagaatcagaccttgacatggccctgg

SEQ ID NO: 39151 - DNA, 325 bp, Homo sapiens
gaacccaccatggtgctgtctcctgccgacaagaccaacgtcaaggccgcctggggtaaggtcggcgcgcacgctggcgagtatggtgcggaggccctggagaggatgttcctgtccttccccaccaccaagacctacttcccgcacttcgacctgagccacggctctgcccaggttaagggccacggcaagaaggtggccgacgcgctgaccaacgccgtggcgcacgtggacgacatgcccaacgcgctgtccgccctgagcgacctgcacgcgcacaagcttcgggtggacccggtcaacttcaagctcctaagccactgcc

SEQ ID NO: 39152 - DNA, 312 bp, Homo sapiens
  misc_feature (1)...(312): n = a,t,c or g
nnnnnnnnnnnnnnnnnnnnnnnnnnnnnnnnnnnnnnnnnnnnnnnnnnnnnnnnnnnnnnnnnnnnnnnnnnnnnnnnnnnnnnnnnnnnnnnnnnnnnnnnnnnnnnnnnnnnnnnnnttatgtttnnnnnnnnnnnnnnnnnnnnnnnnnnnnnnnnnnnnnnnnnnnnnnnnnnnnnnnnnnnnnncttcttaaaaattttttaataaatttaatttaaaaaataaatagagacaggatattaacnnnnnnnnnnnnnnnnnnnnnnnnnnnnnnnnnnnnnnnnnnnngcctggtgtggtggctca

SEQ ID NO: 39153 - DNA, 324 bp, Homo sapiens
ctcacaaccacgggtaccaacaaaacagacaatgaagcccaaatgtaggtaatagttagcaattttgtcatgagaaagtcgagtccttaatccttaatagctacagacacgttaagcttcgaaaggctcgacataaaacatgattaatgacatcatccacataccttagcaatttttccaccggtaaaatttgcaaaacgtttcagagaaagtgtaagaacattagaggatctatggatagtgaacctctttgaagctggaaccatctttttacaccttgaaacaaacagaaacaaaagtataagaagacgaatatatacacac

SEQ ID NO: 39154 - DNA, 310 bp, Homo sapiens
aaaaatcataccagtcattgataatttagtttatcctgaggcagtcgacttgcagaggcacagtctacaaagcctaggatattgccactcaatggtttacattttgggacatcttttaagttgtttgtagcactgcagttcaaagtgttaatatttagagggacttctagattttatacctaatgcagtagaaccttgaagtatatttaagctttttttgttaagcttgaacagttggcaagaataatgtgagttcctatctgaaatagaatggtacattaccacttttaagttttaaaaattgatagat

SEQ ID NO: 39155 - DNA, 377 bp, Homo sapiens
  misc_feature (1)...(377): n = a,t,c or g
tttggacgcatactcatcaggctgggatatagcaccagcctaaacgcttctaatcttggcgtctctttgacttatacttggtctgtagtttaaagaagtaattaaataattactttttaaacagccttaagaagtaacagctttattgggctgtatctggagcagagataaatagaaatggtaatactattaattttaaacccagtgtgtgacaatgatgacaacaatttgtttagcacttactgtgngtcatgtcngtgtattaagnatgctatgtgcatttaatctcatttaatcttcacatactttgaagtagtcactattattttcatatctcatangagaaaatggaagcatangaatactgaagctnctgc

SEQ ID NO: 39156 - DNA, 376 bp, Homo sapiens
cacatgctctgtgaatttgaagaatcatttaatatctctgagatggtttttcttcccttaaagacagacgttggagaaaattatttgtaggatgcacttgacatcaaacatcctaatttccaacctatttagtttggctgaagtaatttggctggatttgtaacaattcatggaatatttatgaaacatcacagtcatgtcaagagagcaacagcaattgattatcccaagctccaaagacttggcagaaatagtcaaagcaggatacggaagatagaattctgctaataaagataacttcctaagcactctcaacaagcttatacagtagctgtgaacttaataaaggaattattgcctgggcaagatgtgaatt

SEQ ID NO: 39157 - DNA, 365 bp, Homo sapiens
  misc_feature (1)...(365): n = a,t,c or g
aggaaagcaaaagccaaacaagtacagctgaagcacctgagatcctaggaggagacaagaagaatacaaggtgccattgtcctatcagccaggcagaaagatggtaggaaacaaggccatttaaaatctaattgcaattgcnnnnnnnnnnnnnnnnnnnnnnnnnnnnnnnnnnnnnnnnnnnnnnnnnnnnnnnnnnnnnnnnnnnnnnnnnnnnnnnnnnnnnnnnnnnnnnnnnnnnnnnnnnnnnnnnnnnnnnnnnnnnnnnnnnnnnnnnnnnnnnnnnnnnnnnnnnnnnnnnnnnnnnnnnnnnnnnnnnnnnnnnnnnnnnnnnnnnnnnnnnnnnnnnnnnnnnnnnnnnnnnn

SEQ ID NO: 39158 - DNA, 339 bp, Homo sapiens
  misc_feature (1)...(339): n = a,t,c or g
nnnnnnnnnnnnnnnnnnnnnnnnnnnnnnnnnnnnnnnnnnnnnnnnnnnntctgagtagctgggtcttcaggcaagcgcaactgtgnnnnnnnnnnnnnnnnnnnnnnnnnnnnnnnnnnnnnnnnnnnnnnnnnnnnnnnnnnnnnnnnnnnnnnnnnnnnnnnnnnnnnnnnnnnnnnnnnnnnnnnnnnnnnnnnnnnnnnnnnnnnnnnnnnnnnnnnnnnnnnngtgttgtttttttcattcattcattcctctattccctgtaaagtgtagtacttaactggacacgcacaaaactaaggttcctgctctcaggaagcttggcaatcaaaa

SEQ ID NO: 39159 - DNA, 336 bp, Homo sapiens
  misc_feature (1)...(336): n = a,t,c or g
cttcaagttagcagcgagaagagtaacaaaaacgtgccaatttaaaatactgaaattctgggaaaatgttttacttatgagtatttcttagtattgggctagtgtgataaagatggcagcatgttttgatatctactcagaaattcatttcacaaacgaagatgttttagagttggcgaacatacctggcccattactgacaaaaccaattaccgtatttattggtaatagagctgtttacaggatgctcactgtaaaaaaaaaanaannnaannanaaanaaaaaaaaaancccngcttttttttttnannnccccnntntttnnaanaaaaaaa

SEQ ID NO: 39160 - DNA, 332 bp, Homo sapiens
  misc_feature (1)...(332): n = a,t,c or g
nnnnnnnnnnnnnnnnnnnnnnnnnnnnnnnnnnnnnnnnnnnnnnnnnnnnnnnnnnnnnnnnnnnnnnnnnnnnnnnnnnnnnnnnnnnnnnnnnnnnnnnnnnnnnnnntctgctcttaacccaggttttacgtcctgttgccttctaaaacccacataaccgtttcacagaaacaccagaaaagtgccagaatttccttgtgcatgaaaaaaaacagggacagaaataccttttcttaattactttatatcacgaagagaagtgaatgagaacattagggtaataagnttctagttgaaagataaaatttgaaatgagtacttaagta

SEQ ID NO: 39161 - DNA, 337 bp, Homo sapiens
  misc_feature (1)...(337): n = a,t,c or g
cacatttcaagattttgttttatggttttgtttgtttgttgttttttaagacagggtctcacgtcgacgcggccgcgaattccnnnnnnnnnnnnnnnnnnnnnnnnnnnnnnnnnnnnnnnnnnnnnnnnnnnnnnnnnnnnnnnnnnnnnnnnnnnnnnnnnnnnnnnnnnnnnnnnnnnnnnnnnnnnnnnnnnnnnnnnnnnnnnnnnnnnnnnnnnnnnnnnnnnnnnnnnnnnnnnnnnnnnnnnnnnnnnnnnnnnnnnnnnnnnnnnnnnnnnnnnnnnnnnnnnnnnnnnnnnnnnnnnnnnnnnnnnnnnnnnnnnnnnnnnnnnnn

SEQ ID NO: 39162 - DNA, 360 bp, Homo sapiens
ggggtgtgtacctgtggatgaaggggcacagggctggtgaggctgcaggcaagaggctattcatttattaaataaggtcagtcaacattcatccaatactgactaaggtgcctaccactccaaatgcccactgcttaaaacggcatgaggactccctgtccctggtcatggtaccaggctccaggtccgacagggctgagaaccatggtgaccttctatggtgacagaaagcaactaaaacaactggatttttaaaatgtgtgttatgctaagacttaaagaatcaacaagatggtgaagaattacccaccaaaaagagaagatagaaaggaaaacaaaacagatatagaaacactcagc

SEQ ID NO: 39163 - DNA, 337 bp, Homo sapiens
  misc_feature (1)...(337): n = a,t,c or g
caaaatatccttaagagaaaatctcttagacaattcaataatttgatactatgttgagnnnnnnnnnnnnnnnnnnnnnnnnnnnnnnnnnnnnnnnnnnnnnnnnnnnnnnnnnnnnctacctttatttggcagaactctgtgtcagggttttcctctaactttaaaaccaagtttcnnnnnnnnnnnnnnnnnnnnnnnnnnnnnnnnnnnnnnnnnnnnnnnnnnnnnnnnnnnnnnnnnnnnnnnnnnnnnnnnnnnnnnnnnnnnnnnnnnnnnnnnnnnnnnnnnnnnnnnnnnnnnnnnnnnnnnnnnnnnnnnnnnnnnnnnnnnnnnn

SEQ ID NO: 39164 - DNA, 370 bp, Homo sapiens
atttatagtgataatgtgggcttttaagggcaaaattctgaaatcagctaacccttaaaaggttcccccattcctgttgtggacagaaatccagtatttgacaactccaaagtgtaaagataaaaatgttttcgtgtttcactcattatccaattacatttcagggaaaactgcctttgcttctgagccggatgaaggaagtagggaaagtatttcttgctaccaacagtgactataaatatacagataaaattatgacttacctgtttgacttcccacatggccccaagcctgggagctcccatcgaccatggcagtcctactttgacttgatcttggtggatgcacggaaaccactcttttttggaga

SEQ ID NO: 39165 - DNA, 452 bp, Homo sapiens
  misc_feature (1)...(452): n = a,t,c or g
gtgttttgnactccgnacgcccgntgcnnnnnnnnnnnnnnnnnnnnnnnnnnnnnnnnnnnnnnnnnnnnnnnnnnnnnnntctcgaggatccgaattccnnnnnnnnnnnnnnnnnnnnnnnnnnnnnnnnnnnnnnnnnnnnnnnnnnnnnnnnnnnnnnnnnnnnnnnnnnnnnnnnnnnnnnnnnnnnnnnnnnnnnnnnnnnnnnnnnnnnnnnnnnnnnnnnnnnnnnnnnnnnnnnnnnnnnnnnnnnnnnnnnnnnnnnnnnnnnnnnnnnnnnnnnnnnnnnnnnnnnnnnnnnnnnnnnnnnnnnnnnnnnnnnnnnnnnnnnnnnnnnnnnnnnnnnnnnnnnnnnnnnnnnnnnnnnngcgaccctngccttctcccnnngntcccaccanncccgcnctgcnnnanngcactnnctcncnccnatcntccctcccctc

SEQ ID NO: 39166 - DNA, 365 bp, Homo sapiens
cttggtattgagtctgtggccgacttcggttccggtctctgcagcagccgtgatcgcttagtggagtgcttagggtagttggccaggatgccgaatatcaaaatcttcagcggcagctcccaccaggacttatctcagaaaattgctgaccgcctgggcctggagctaggcaaggtggtgactaagaaattcagcaaccaggagacctgtgtggaaattggtgaaagtgtacgtggagaggatgtctacattgttcagagtggttgtggcgaaatcaatgacaatttaatggagcttttgatcatgattaatgcctgcaagattgcttcagcccagccgggttactgcagtcatcccatgcttcg

SEQ ID NO: 39167 - DNA, 375 bp, Homo sapiens
  misc_feature (1)...(375): n = a,t,c or g
ccctcctggtctggggagcccgcctggggacagactcgctcagtctggttggcccttcagcttgggggcccctccccaaacttcccagccagcctgctcacaccctgaccccggggcctgccgtccccacttcctcagctctcaccatggtccccgacgatcctctctgcagagctgttctgaatgtcgacgcggtcgcgaattccnnnnnnnnnnnnnnnnnnnnnnnnnnnnnnnnnnnnnnnnnnnnnnnnnnnnnnnnnnnnnnnnnnnnnnnnnnnnnnnnnnnnnnnnnnnnnnnnnnnnnnnnnnnnnnnnnnnnnnnnnnnnnnnnnnnnnnnnnnnnnnnnnnnnnnnnctatagaattttttaaa

SEQ ID NO: 39168 - DNA, 375 bp, Homo sapiens
gttgaatccagaaaagagagggcaggggaagtcctggaacccttaatgtgtgcaagagggactgaaggtctctagagcagctgttttcttcatgggctttgtatcacaaataccttggagcttcctaaaagctctatagatgagtctacaacaactctgggctgaatgaggaggagcagaaaatgaggagaagtaggatagtgggaggtgatctcacaggaaactctttgggacttcagagtattgtgaaatagaacactttcatgctggggctcttttctgagtgactaaattacaaggctgaaggttagctgcattgctactatttggcactgtgaggctaagtaaggccttgaaatataagagctgatagca

SEQ ID NO: 39169 - DNA, 294 bp, Homo sapiens
  misc_feature (1)...(294): n = a,t,c or g
nnnnnnnnnnnnnnnnnnnnnnnnnnnnnnnnnnnnnnnnnnnnnnnnnnnnnnnnnnnnnnnnnnnnnnnnnnnnnnncggggttttgccgtnnnnnnnnnnnnnnnnnnnnnnnnnnnnnnnnnnnnnnnnnnnnnnnnnnnnnnnnnnnnnnnnnnnnnnnnnnnnnnnnnnnnnnnnnnnnnnnnnnnnngaagtgttacattttgatgaagtccagtatatcatagaaaaaatttttttaatgtttatagctttttgggtcctattttagaagtctttttttttttttt

SEQ ID NO: 39170 - DNA, 428 bp, Homo sapiens
  misc_feature (1)...(428): n = a,t,c or g
tttgatagcgtnnnnnnnnnnnnnnnnnnnnnnnnnnnnnnnnnnnnnnnnnnnnnnnnnnnnnnnnnnnntctcgaggatccgaattccnnnnnnnnnnnnnnnnnnnnnnnnnnnnnnnnnnnnnnnnnnnnnnnnnnnnnnnnnnnnnnnnnnnnnnnnnnnnnnnnnnnnnnnnnnnnnnnnnnnnnnnnnnnnnnnnnnnnnnnnnnnnnnnnnnnnnnnnnnnnnnnnnnnnnnnnnnnnnnnnnnnnnnnnnnnnnnnnnnnnnnnnnnnnnnnnnnnnnnnnnnnnnnnnnnnnnnnnnnnnnnnnnnnnnnnnnnnnnnnnnnnnnngtagngggggttnttnggtttnntnnttnantgtctngttgcgnttggttgagtngntgcngcnntnaggtttgannttactnntaggctgg

SEQ ID NO: 39171 - DNA, 313 bp, Homo sapiens
aacaaaactaatcctcagtttctagcagcaaattaaatatatgtaaaaccattttactgtgtgacctggcaaaagtcactttatctttctgagcttcagtgttctcaactgtaaataagattaatctagatatctaagggtcccttctacttctgaagtactgtgaacccagctgccactaacaaaacatgggatgaagaaactaactggacaagaatctgaagttggcacaggtctcatcacttaaaaaaatttctaaaccttgtctcctgccttccccaaatacatgatctcactcatagctgaatgcaca

SEQ ID NO: 39172 - DNA, 313 bp, Homo sapiens
tggaaagtaatttcagtgagtttttcagaacaattttccctacaaattggggccgtgtatgtctatttgtaaacacacagtgttttcttcaaccaaagcagtttatcttcatgattcaaaccccgctagccttacaatcgcccatttagtgtttaactcccttgtatacatagtatgctttaacaatgtcaatcagtgatttaattgtcaaagataaaccttcctaacaatatttctaattaatgctgtaaatatctcaaagagtactgttggattagaggaaaggacaagctttggaaccatgcagaacctg

SEQ ID NO: 39173 - DNA, 310 bp, Homo sapiens
  misc_feature (1)...(310): n = a,t,c or g
gtttttgactgttctgtctcaatctgtctgtgcaaatccctttttaaagctatgctaggaaacttgttttaatcctttttttttggtttgtttggggattttttttttggnctnaatttttattacncanaantaatntccccaggcttnatatngntntgaaaaagtgttnataancccantaggtatttgnggggcaagcggaaagtntaacgngncattcttnaaactnaaatttgncatccctggggctttnatatttcacctaattttctgttcnattgccctgatctgtcagcctttnaagcct

SEQ ID NO: 39174 - DNA, 315 bp, Homo sapiens
cagacttcaaaatgttataaaccagtaacattctcctccaaatgttagacacaagaaactgtcaacttctaactttactaaggtcatttttaaaaattaccatcatttttcattttagaaacactaagaagtagaaagatatcatcttagaataaaggactgcccgaaggattaataaaaatataccacaatgccctatttttgtggactatgatttctttggaagctcatatccaagatgagaataagtaacagatcattttatgcagtttgcacgtactcagctaaaaatcagcctgaaaactgggaccattt

SEQ ID NO: 39175 - DNA, 325 bp, Homo sapiens
attcattataatttgtggttaaaaactatcttgccgagtgggctatgaactccactagagaagtgccactctttattcttccctgtaccctcccatggtatccagcaggtaagaacgtgccctgtggatagccaaccaaaccactgagttctcttcctcttactgccctctaacttcctgaattctactcatttgtatttcctcgttggctgcccagcccagccacactggataatcaccctcccaactctcccaattttgattccttttctctagacctaatgttttatgtagggacctctagccacttcagggaaagaggaaa

SEQ ID NO: 39176 - DNA, 320 bp, Homo sapiens
ctgctcttaaaatacaatgatgaagtagggataccataatagtcagagacatatccattcaaacaatgaattaaaataaaaggaaaacaatgagtcaccaatcccaagcaactctgaatccaactgagaaaactctattaggtttcaaagcccttaatcatctgtgattgtggctttgctttctagttgctcagctccaccctctgggctcccaattccacattcttgactaacaactctgccctaaatcatctcttcttttacaagaagggtaacacatgtttgtagctaagtagatttaaccacctgtttcctgcctg

SEQ ID NO: 39177 - DNA, 321 bp, Homo sapiens
ggaatccatcatctaatctttctcttaatttatccacttctatatcctactatttcctgacattctttatctattaaaatcaggcctacctagtctctgttcttcatcccatccaaacttttttttcccactatcacatctttacttgtgacatttttctctcttgaatgtgctcccattttctgttctataaataatctttctcatatgtcatggcctactttaatttccgtatcctccatgaaaactttccctcttgcaatagctcatagcgatcagacttctgtgaatttatactgtgcttttactcagtaacataaa

SEQ ID NO: 39178 - DNA, 313 bp, Homo sapiens
caaagaatgagagatttaagggcaaagagtgaagtaaggagaatataagtaataaagcaacacatggaagaaagggggtaatcaatggattctcagaaaattactgagaattcagatcaaattcagaatacaggtgcagagagtagagagaaggtaaggatgagtataactgcagatgagtttgtgggttaagaaaatgtattttcttaagagagctcacacctaatgactgctgcttcatcagtgaaagaagaaacaaggtcatctgattataggggagtggagaggaatcacacattgaagaaagtggtaa

SEQ ID NO: 39179 - DNA, 325 bp, Homo sapiens
ctcagatcctgggaaaagtctattccgttctcagtgacagagaacagagagcagtgtacgatgagcagggaacagtggacgaggactctcctgtgctcacccaagaccgagactgggaggcgtattggcggctactctttaaaaagatatctttagaggacattcaagcttttgaaaagacatacaaaggttcggaagaagagctggctgatattaagcaggcctatctggacttcaagggtgacatggatcagatcatggagtctgtgctttgcgtgcagtacacagaggaacccaggataaggaatatcattcagcaagctat

SEQ ID NO: 39180 - DNA, 315 bp, Homo sapiens
  misc_feature (1)...(315): n = a,t,c or g
gccactttccccactgagtcaaatggtatcatgaattctactgttattttatatataacaattataatattctccttttaaaaacaattgatgtgtatgtaggatttattgagtaactttgggaatataattttttaattaaaatcctgtttatgtatgtatctttgtgagtatttaaaatacacatatttacctctagtgagcgccctatcattgaaggaagatttagttctcattgtatttttactcattgcaaggtttacaacatactgggttttttcatattaaanatgntnacctaccatgtntnttccg

SEQ ID NO: 39181 - DNA, 315 bp, Homo sapiens
  misc_feature (1)...(315): n = a,t,c or g
tcctcccctacataaactctgggctggccatgagacttgccttgactaatggtagtagcaaatgagacacaagcagagacttgaaaggcgtctgtctgcacaatgggatttgttctcttgttgctggaaactcctctgccaccacataaacccagactagccttagacacatgtggcccaatggataaaaccagcaatatgactgaaggtaccttagatcatccattctgttttccaccttatnnnnnnnnnnnnnnnnnnnnnnnnnnnnnnnnnnnnnnnnnnnnnnnnnnnnnnnnnnnnnnnnnnnnnnnc

SEQ ID NO: 39182 - DNA, 415 bp, Homo sapiens
  misc_feature (1)...(415): n = a,t,c or g
ttgganngggnnnnnnnnnnnnnnnnnnnnnnnnnnnnnnnnnnnnnnnnnnnnnnnnnnnnnnnnnnnnntctcgaggatccgaattcnnnnnnnnnnnnnnnnnnnnnnnnnnnnnnnnnnnnnnnnnnnnnnnnnnnnnnnnnnnnnnnnnnnnnnnnnnnnnnnnnnnnnnnnnnnnnnnnnnnnnnnnnnnnnnnnnnnnnnnnnnnnnnnnnnnnnnnnnnnnnnnnnnnnnnnnnnnnnnnnnnnnnnnnnnnnnnnnnnnnnnnnnnnnnnnnnnnnnnnnnnnnnnnnnnnnnnnnnnnnnnnnnnnnnnnnnnnnnnnnnagantnaatcnnggccatgttcctcngatntataganttntttaagngactanaattatntgccnatcttttttttggacntaaa

SEQ ID NO: 39183 - DNA, 320 bp, Homo sapiens
ggagtatatatgtaaaaactggagttatgggcagagtttcttctataagattgttatatttaggactcaaacaatgagtataatttcacagcacttattaactataatcctaacttcacttttactaaaataatgaaaaaatttaaaaattattccttaaatttattttttaacaaattcatttttcagactatatttagcatatagttctttggaaagtatcttatatttctgtataaaataaagaaaaacagatttaaaataaaaaatcagaccaagcagcactacaaggttcatttatttgcacaactattgtgagt

SEQ ID NO: 39184 - DNA, 297 bp, Homo sapiens
  misc_feature (1)...(297): n = a,t,c or g
tcgcctnnnnnnnnnnnnnnnnnnnnnnnnnnnnnnnnnnnnnnnnnnnnnnnnnnnnnnnnnnnnnnnnnncnnnnnnnnnnnnnnnnnnnnnnnnnnnnnnnnnnnnnnnnnnnnnnnnnnnnnnnnnnnnnnnnctatcctcaatgcctttctaattctacccattgacatggattggactnctcaatgccaactccattnatgaaatactttccaagcccttttatacncagnatgtncaattggccccntanntttttancanggttgttttnaatagctnagnnattctta

SEQ ID NO: 39185 - DNA, 318 bp, Homo sapiens
  misc_feature (1)...(318): n = a,t,c or g
nnnnnnnnnnnnnnnnnnnnnnnnnnnnnnnnnnnnnnnnnnnnnnnnnnnnnnnnnnnnnnnnnnnnnnnnnnnnnnnnnnnnnnnnnnnnnnnnnnnnnnnnnnnnnnnnnnnnnnnnnnnnnnnnnnnnnnnnnnnnnnnnnnnnnnnnnnnnnnnnnnnnnnnnnnnnnnnnnnnnnnnnnnnnnnnnnnnnnnnnnnnnnnnnnnnnnnnnnnnnnnnnnnnnnnnnnnnnnnnnnnnnnnnnnnnnnnnnnnnnnnnnnnncaagtttcttaaatccatgatccatagtaaaaacattttacacatatcttc

SEQ ID NO: 39186 - DNA, 319 bp, Homo sapiens
  misc_feature (1)...(319): n = a,t,c or g
caggcgcccaccaccatgcccagctaacgttttttgtataggattaatgagagggaggaggagggaagactgttttgactgaaggatctctctaaagaaacagcatttgagctgagctcagggcaaagcctctgagacagagaacttggtgcactcaagggagtggaaaaggccatgcctggttctgagagaggaggtgtagtctacagcgatcccaccgtaaatacaccnnnnnnnnnnnnnnnnnnnnnnnnnnnnnnnnnnnnnnnnnnnnnnnnnnnnnngagagagaggctcagcangggtagagctagggagg

SEQ ID NO: 39187 - DNA, 321 bp, Homo sapiens
  misc_feature (1)...(321): n = a,t,c or g
ggaaaataatgtactatttcgtagagtccatatcaattgaataggtaacaactccattttttcttttcaaaaagagaaaagaaagcttcagtagagaatatcgggaaaggatgccagcaggcgagccagaccaagggctgagtctgacctcaaagctctaccacgtatcnnnnnnnnnnnnnnnnnnnnnnnnnnnnnnnnnnnnnnnnnnnnnnnnnnnnnnnnntaagggtatcgacttcattggagtggtgagaaccatcttgagagcttagcacagggtctgggacacagtccatgttcaatcgtcgacgcggccgg

SEQ ID NO: 39188 - DNA, 316 bp, Homo sapiens
  misc_feature (1)...(316): n = a,t,c or g
nnnnnnnnnnnnnnnnnnnnnnnnnnnnnnnnnnnnnnnnnnnnnnnnnnnnnnnnnnnnnnnnnnnnnnnnnnnnnnnnnnnnncattctttcagtgaacacttttttaatacctattatgtgcatagcacgagttaggtgctgtgggaattacaaaagaattgttcatatagggctttttgctgtaggtgcttcctctctagctgggttcccagtacttangccatnanatggngaggtnatgtngatgagtacnntcatagagtgntctagttnagangggagnngggtnntaagnngcntngnttgantgtg

SEQ ID NO: 39189 - DNA, 424 bp, Homo sapiens
  misc_feature (1)...(424): n = a,t,c or g
tttaagagtacttaatggataaaaatattagaataatgttttctctggaaggaagaggctaggcaggaagtcaaaataaatggaactgctttacttaagaatttgcaaggtttagctgtgaaatgactagataaatgatattgttggaaagtaaagttacctactagagaatgcatattttgttcctttccattatagagaaactgttatgtttttaaatataaagggtgggtttaggtaaaatcagttcactgtattagtagttttgaagtttggggactggtcttaaaattgtgatccatgcaaggcattatttatttgtggaaagtgagagaaagggagggaggaagaagtcgaaaaacacctccttggctgntaataccttgaaacttantggaaaggaaataacactcaatttataagg

SEQ ID NO: 39190 - DNA, 426 bp, Homo sapiens
  misc_feature (1)...(426): n = a,t,c or g
aattgtcttagctgttctgaaatgccaacatacaccagatcagctaagacaattactctattcactacactgtgagttgcctcctcactatgaacttctggaaaataagaattatgtcttatttattcatctttgtatcctcatgatctagttcagtgtctggctctagaaatcattaaataactttgtgaaatcaattcagtagaataacttcatcatcttagatttattgcaaatgtatagttattttagggttaccattaggattttccttacaacaatgctaatttcaatccccattagtgntgngatttttttaaagagggancactaacnanaagcagaanacttcaattaactgcccntacnnagataggacctcttatgctnagagggaagaaaaaatctagcagtccatattctata

SEQ ID NO: 39191 - DNA, 432 bp, Homo sapiens
gagagttacacggttggaagtagcagagatgaaaatttgtaatccaggtctgtcttattagagtcaagaagacgggtatgagaatgatatacagcttggtatgtgtacattttaagttcagttcaaggtttgaaatgttgatcaggctttcccaactatttagtgaaaattttaataacataaagtcttacttacattttgatttaagtcaggcctaggaagttattctaaaagcctcccttttttcattatgtatttatgggccatcgtgcttcatttgaacatcagaggttaaaagtgtagaccaaataatggctggccaactttaaatgagattggaactcaccttgaatatatgaaataagtactagtgttgaagataattaggattctttttaaaatctgctgttaaccatcatcctatagagcagg

SEQ ID NO: 39192 - DNA, 435 bp, Homo sapiens
  misc_feature (1)...(435): n = a,t,c or g
ggcttcagggccgaggtcatacaggagggctaggcgtggagcctcagcccttcatgtcctgggacgtcaaaggaacaaagcaataggtagaaaggccctcacccggtgctacagtagcaggcagcattcacccagcagctccttccttccctcctctgtccttccaaaaccacatactgatcccaactgtgtgccagatgctgcgttcacactgaggtaagtacatggggactttcaggaaggcttaagaattagcagggtannnnnnnnnnnnnnnnnnnnnnnnnnnnnnnnnnnnnnnnnnnnnnnnnnnnnnnnnnnnnnnnnnnnnnnnnnnnnnnnnnnnnnnnnnnnnnnnnnnnnnnnnnnnnnnnnnnnnnnnnnnnnnnnnnnnnnnnnnnnnnnnnnnnnnnnnnnnnnnnnnnnnnnnnnnnn

SEQ ID NO: 39193 - DNA, 416 bp, Homo sapiens
  misc_feature (1)...(416): n = a,t,c or g
ctttccagcaaaacatcgcggagcctgcacgtgagggtacagaaaagcaaagctgttttacaaagcaaatccaccttggcgagtaagaaaagaacagaccggttcaatataaaatctagagagcggagtggggggccagtcacccggagccttcagctggcagctgctgctgacttgagtgagaacaagagagaggacggcagcgccaagcaggagctgaaggacttcaggaacttcctgtagaaaagcccccaaaacaaaacaaaccttagttgactaaaaagtattgcatgctcaacttaggataagcactacggcaaaggatacgaaatctaccaagcttgcaagaccagttgaaagctgactcaaaaatcctancattcagctgattgccggcngcttagagtcaggcatct

SEQ ID NO: 39194 - DNA, 346 bp, Homo sapiens
gttgtctcttcttccagtggtaaagattcagttagtggaataacttcgtatgtaaggacagtcctgtgtgaaggtggagtaccacagaggccagttgtttttgtcacaaggaagaagctggtgaatgcaattcagcagaagctctccaaattgaaaggtgaaccaggatgggtcaccatacatggaatggcaggctgtgggaagtctgtattagctgcagaagctgttagagatcattcccttttagaaggttgtttcccagggggagtgcattgggtttcagttgggaaacaagacaaatctgggcttctgatgaaactgcagaatctttgcacacggttggatc

SEQ ID NO: 39195 - DNA, 183 bp, Homo sapiens
aaagactcttaagttttcaacacttacccatttcatcatgtctgaagttttctggctttcaaaattataaatgtatcattctgagttcagaatacctggtggtgtcagtggtatcaagcttaatgtcagtattttcagttagaagcttttccccccgccccgtgaaagctttttttttttttt

SEQ ID NO: 39196 - DNA, 441 bp, Homo sapiens
  misc_feature (1)...(441): n = a,t,c or g
tttgaanggggnnnnnnnnnnnnnnnnnnnnnnnnnnnnnnnnnnnnnnnnnnnnnnnnnnnnnnnnnnnnntctcgaggatccgaattccnnnnnnnnnnnnnnnnnnnnnnnnnnnnnnnnnnnnnnnnnnnnnnnnnnnnnnnnnnnnnnnnnnnnnnnnnnnnnnnnnnnnnnnnnnnnnnnnnnnnnnnnnnnnnnnnnnnnnnnnnnnnnnnnnnnnnnnnnnnnnnnnnnnnnnnnnnnnnnnnnnnnnnnnnnnnnnnnnnnnnnnnnnnnnnnnnnnnnnnnnnnnnnnnnnnnnnnnnnnnnnnnnnnnnnnnnnnnnnnnnnnnnacncntggtgnnnnnnactangtttgnaagcccntgctganggcccagannnntgctagnattnaatatgtgttaancgaaannccgnaataanngagtngatgg

SEQ ID NO: 39197 - DNA, 338 bp, Homo sapiens
tgaacatttgctttgttccagacactatattgaataatttacatgcatttttcatttaagcctcaaaacaactagttgctgtaattatttctattttaaagaaaaagaagtaagtgatagaagctagtaagtgatagagcaggaattctaatctgtgaagtccaatttggaactcataatcacttaatctaaacttgtaatcaccacatcacattgtcttcagactcttcagacaacattagcattgacatatggtcagggaaaaagtggggctgatagaatagacagaatgagactttggttgtttggggtcctggaataataaattcacttttgag

SEQ ID NO: 39198 - DNA, 338 bp, Homo sapiens
attagataaaaaataaataaataaaagaagcttaaaaagttacaaacttcacagaaacactacaattcaagactggaagaacttacaaataggcttatttgatacatatggccttgtcaatgattctacaaaatcattaagcttccaaaaattgtaattaacacatgcaagttacactgattctttctacatttattaatgcaaatctctcatgtgacccttagctttttctatattctccaaaggaaaagagtgttaatgtaagttgatttttttaaattctagaatataaaactaagtgcattgaagaaaccatggaaaacacaaagacgtctata

SEQ ID NO: 39199 - DNA, 337 bp, Homo sapiens
aaggaagccttactgtgctcgaggtatttgagcccagcgtttttccagtgctggctaattgctaagctgtgcagacacggtggtgacccctaggaagccaaggttgaaaattaaaataggcatgtgggaaggaacggggtggccacgagctgtgagggagatggatttcacggacaaccagacaggcctcggtggtaacaacgaaagggaaaacttagaatccagaattgctacaaatgtattatctaaaatacaaagaagtatgacagtgtgacccgtactgaggaagaacatcatcagtagaaactgtctgagtgtccagatgttgaatttagta

SEQ ID NO: 39200 - DNA, 330 bp, Homo sapiens
ctcccttcttcagatgttgtaattaattatgccaaaacaaacctctggatttctatccaagcctaaatcccagtttattttatttcttagaaatgataaatactttttgacaatttgttttgctacatccaagtcttttagtggctggctttgttatcaaattcaccattttaaatgattttaacaaggttgccaaagaacatacggggaaaaaaaacttttccatatatccttggcagaaactggcattccccttttctcagttcccttctgagagtgcctgctgtcgctggagcagctatagcagtgtgtttacccagttgatagtgc

SEQ ID NO: 39201 - DNA, 326 bp, Homo sapiens
  misc_feature (1)...(326): n = a,t,c or g
nnnnnnnnnnnnnnnnnnnnnnnnnnnnnnnnnnnnnnnnnnnnnnnnnnnnnnnnnnnnnnnnnnnnnnnnnnnnnnnnnnnnnnnnnnnnnnnnnnnnnnnnnnnnnnnnnnnnnnnnnnnnnnnnnnnnnnnnnnnnnnnnnnnnnnnnnnnnnnnnnnnnnnnnnnnnnnnnnnnnnnnnnnnnnnnnnnnnnnnnnnnnnnnnnnnnnnnnnnnnnattgttttttggtttttagatttttaaaaagaaaataactacacataaaacaaagccaattaatggacaataggtaacatgctccttttcagaaatgtttttatg

SEQ ID NO: 39202 - DNA, 320 bp, Homo sapiens
cccaggtgtttctcaacaagaacaaataagtgctgtttgcatttttaatcatttctatatctgtaacaacaatacctgcctcacagggtgatatgagatccaatcaggcgatccatgtaaaactgctacataaaccataaggaattatctaatctgtagttatggctgatctcatttttatttggtcttagataccaaatgaaaacagaccaaagcaaaacaacaaaagtggtcaggcctactttgaaactagagactcatgccctcaggtttaagggctttctcccaatcatatctagtggggcttttcagactagatt

SEQ ID NO: 39203 - DNA, 324 bp, Homo sapiens
  misc_feature (1)...(324): n = a,t,c or g
nnnnnnnnnnnnnnnnnnnnnnnnnnnnnnnnnnnnnnnnnnnnnnnnnnnnnnnnnnnnnnnnnnnnnnnnnnnnnnnnnnnnnnnnnnnnnnnnnnnnnnnnnnnnnnnnnnnnnnnnnnnnnnnnnnnatcttttcacttttaagtgtcttttggtgtataaaggttttaaattttgctgaagtccaatttatttttttcttttgttgcttgtgaacaacagtgcacttttgagtaagaaacgttctggattttagctaagttggaagaaacgtatttaatggtggtactcctaagaaataatnaggatttatcaagggtt

SEQ ID NO: 39204 - DNA, 319 bp, Homo sapiens
  misc_feature (1)...(319): n = a,t,c or g
tgttgtcataacattatttnccttttctcttttattacccccaagcccagtttgtggagagttaacatttttatttggccccagattgggagatctgttactctttcatggaagagttaaaaggtggttagaccaaacagaattttgcatccaactggaatactttgcatctgaggagaaaatgctatttctagtacaagcaattaatggaccactggagcggtctgaattactttaatttttattatatgtttgaaagttatcacatagtccaagaagagtgaacagaaggcatttactttttaaaataacttctttt

SEQ ID NO: 39205 - DNA, 320 bp, Homo sapiens
cgcaagcaagcgcactcttcagatgtcacttctcacgggaggcctctgtgattgcagaaggaaaggccccagcagaactcaccatctgccgcctgaggctccaccacctcgaagacatccttgcaagatccacagactggcccagaccaggaggtttctgtcttcttcttgtgtcttcttcactctcctggactggttcgtgaaccctttctcctatctctgtttcctctggatgttaaatgctactttctttgttgtggaacgttaacctgtaacatgtatatactgattaagtacactattacgttgtcgtgtgcaat

SEQ ID NO: 39206 - DNA, 104 bp, Homo sapiens
ttccttttccagattaaataagattattacgataactgtaactcaactacactcccattttcctgatatcctggaacattagacaaaatatttttttttttttt

SEQ ID NO: 39207 - DNA, 436 bp, Homo sapiens
  misc_feature (1)...(436): n = a,t,c or g
nnnnnnnnnnnnnnnnnnnnnnnnnnnnnnnnnnnnnnnnnnnnnnnnnnnnnnnnnnnnnnnnnnnnnnnnnnnnnnnnnnnnnnnnnnnnnnnnnnnnnnnnnnnnnnnnnnnnnnnnnnnnnnnnnnnnnnnnnnnnnnnnnnnnnnnnnnnnnnnnnnnnnnnnnnnnnnnnnnnnnnnnnnnnnnnnnnnnnnnnnnnnnnnnnnnnnnnnnnnnnnnnnnnnnnnnnnnnnnnnnnnnnnnnnnnnnnnttgacgctatttttgtaaagtaaacataatttttacttagactgtgtatttgtttgatacaagtgggaaaagaggctgatggaaattggggtggaaggcaggccattaccactgaagtatatgagtgaaggtcaagtgagaatataatgtgggcaggntaaggtgaagtgtgaggntgtgt

SEQ ID NO: 39208 - DNA, 423 bp, Homo sapiens
agccactgcacttggcctgatttgttttaaaaataatcactgacacagaaatagattttaaaccccagcaaaaatggtaattaattatttgagcctaatcctagtttccaaaattacgtagcaggctctcaatttggcgtataaaactatactctgaaatagacataaaaactcagctgaaaatagtccaccttcattgtttaatttcatttacttttcaacattttataagatatttagcatttcgcccctctcatactaacacaataaatcaactgtctaaatacggaaattttagatataagagtaactatgaaaacagattaaagcaatatgttttaaattatcttttgatattgcatggtccccagtgacaaacagaaatgattgttacggcttcttcttcttcttttttttctttgg

SEQ ID NO: 39209 - DNA, 428 bp, Homo sapiens
  misc_feature (1)...(428): n = a,t,c or g
tttactgaaaacagaaaaccgggcgaaccaaggattacaaacaggaatgtggactcgtagcaaaacaaaacaaaacagaacaaaaaagggaggggggaccggtcgaaagaaccgaaggggggagcgagatcgaggaaaggggcggagaattttttttcttcttcccatttctttaaaaaaccaacacaagaaaacacacacacacacaaccaacgtttgttcccgagtagaaacataaatagggcagaatcgaacactctgttcttctctcttccaaagaaaaaaaagggtngncccgcccccnanttccnnatcnataatnggtatnttntgaaaanccccgngggtncntttaaactgggcttngggcccnttctnaattntttnnttantncntggttttcctnnttnnatgnancnntnncctt

SEQ ID NO: 39210 - DNA, 422 bp, Homo sapiens
  misc_feature (1)...(422): n = a,t,c or g
nnnnnnnnnnnnnnnnnnnnnnnnnnnnnnnnnnnnnnnctggtatttaatgcagtttcttcctggcattgatggtctttacaatttggcatgtnnnnnnnnnnnnnnnnnnnnnnnnnnnnnnnnnnnnnnnnnnnnnnnnnnnnnnnnnnnnnnnnnnnnnnnntnggtgacaaagtcgacgcngccgtgaattccnnnnnnnnnnnnnnnnnnnnnnnnnnnnnnnnnnnnnnnnnnnnnnnnnnnnnnnnnnnnnnnnnnnnnnnnnnnnnnnnnnnnnnnnnnnnnnnnnnnnnnnnnnnnnnnnnnnnnnnnnnnnnnnnnnnnnnnccanngnnnnnnnnnnnnnnnnnnnnnnnnnnnnnnnnnnnnnnnnnnnnnnnnnnnnnnnnnnnnnnnnnnnttntgaanntntatta

SEQ ID NO: 39211 - DNA, 395 bp, Homo sapiens
  misc_feature (1)...(395): n = a,t,c or g
tnnnnnnnnnnnnnnnnnnnnnnnnnnnnnnnnnnnnnnnnnnnnnnnnnnnnnnnngccatctggatttttaaaagcaccttggcttctagtgcatctctctgcccactctgcagatggannnnnnnnnnnnnnnnnnnnnnnnnnnnnnnnnnnnnnnnnnnnnnnnnnnnnnnnnnnnnnnnnnnnnnnnnnnnnnnnnnnnnnnnnnnnnnnnnnnnnnnnnnnnnnnnnnnnnnnnnnnnnnnnnnnnnnnnnnnnnnnnnnnnnnnnnnnnnnnnnnnnnnnnnnnnnnnnnnnnnnnnnnnnnnnnnnnnnnnnnnnnnnnnnnnnnnnnnnnnnnnnnnnnnagcccggccaagcttcttgnttttacattgatttttttttttttt

SEQ ID NO: 39212 - DNA, 361 bp, Homo sapiens
  misc_feature (1)...(361): n = a,t,c or g
aaaacattaagagatttatcttgggatagacttcttcccacattttctacccttatcctttaactgcttgtcttcaggagaggaaggcatcaagcatagagattaagggtatggctgaggagccaggctgcctgggtttgaaacccagccatgccccttaggagctatgtggaaatcatcatcatggtgtctgcgatttggttctgttgctgtgaggattaaatgaggcactgacaacagtgcctggtacatagttaaagttgtatatgtgttcacaattactagtcagcatcatcaggctgcttttagcagagttgattgaataacatttcttcattttatgnttntttttttttttttt

SEQ ID NO: 39213 - DNA, 414 bp, Homo sapiens
  misc_feature (1)...(414): n = a,t,c or g
cctccggcttattaaaaggagtcaatttcagtaaacgttaactatgttttggtagtgcatgaatcaaactggcaagtcttacttactaagctattttagcagaagagcagtcacacaaaccctgccaacataaaacaatggcaattacaaagattcttgtcacagttacatttaaacatctcatatcttattactgcttatttttctctaattctttttgaaaatgagaattgcatcttctcccaaacacaataatcccaaatgagcactgtcttgcttgcagcaaaccaaaaggacaacttaccaggcagtggttcaaaaatctgcaactagcattgcctatgttttggggttgaccttacttaccaaggtgattcaaaattaagataagcattcttctgntcccaaataatc

SEQ ID NO: 39214 - DNA, 398 bp, Homo sapiens
  misc_feature (1)...(398): n = a,t,c or g
nnnnnnnnnnnnnnnnnnnnnnnnnnnnnnnnnnnnnnnnnnnnnnnnnnnnnnnnnnnnnnnnnnnnnnnnnnnnnnnnnnnnnnnnnnnnnnnnnnnnnnnnnnnnnnnnnnnnnnnnnnnnnnnnnnnnnnnnnnnnnnnnnnnnnnnnnnnagtcatgttatctctgtttcangtnnnagatagtagtatngtacnaatgctggagtttaagttagagtactaggaatnnattnannnnnnnnnnnnnnnnnnnnnnnnnnnnnnnnnnnnnatgnttnggttgtacngtnanctgntattattcatcctntnnggtntttaatgagtatgntagatttncgtagctngnttggttaatcntctcantgnttgntntattgnattntgnttata

SEQ ID NO: 39215 - DNA, 321 bp, Homo sapiens
  misc_feature (1)...(321): n = a,t,c or g
nnnnnnnnnnnnnnnnnnnnnnnnnnnnnnnnnnnnnnnnnnnnnnnnnnnnnnnnagttgcccaggctgaagtgctgtggcaacatcatatttcacgtcaacgcggccgagaattccnnnnnnnnnnnnnnnnnnnnnnnnnnnnnnnnnnnnnnnnnnnnnnnnnnnnnnnnnnnnnnnnnnnnnnnnnnnnnnnnnnnnnnnnnnnnnnnnnnnnnnnnnnnnnnnnnnnnnnnnnnnnnnnnnnnnnnnnnnnnnnnnnnnnnnnnnnnnnnnnnnnnnnnnnnnnnnnnnnnnnnnnnnnnnnnnnnnnnnnnnnn

SEQ ID NO: 39216 - DNA, 318 bp, Homo sapiens
cagactcagagagaacccaccatggtgctgtctcctgccgacaagaccaacgtcaaggccgcctggggtaaggtcggcgcgcacgctggcgagtatggtgcggaggccctggagaggatgttcctgtccttccccaccaccaagacctacttcccgcacttcgacctgagccacggctctgcccaggttaagggccacggcaagaaggtggccgacgcgctgaccaacgccgtggcgcacgtggacgacatgcccaacgcgctgtccgccctgagcgacctgcacgcgcacaagcttcgggtggacccggtcaacttc

SEQ ID NO: 39217 - DNA, 319 bp, Homo sapiens
  misc_feature (1)...(319): n = a,t,c or g
nnnnnnnnnnnnnnnnnnnnnnnnnnnnnnnnnnnnnnnnnnnnnnnnnnnnnnnnnnnnnnnnnnnnnnnnnnnnnnnnnnnnnntttgggaaaagaatatagattatttttcaaagctggggtaagcggggagttctagattaataacaaagatagtccctacattaaacacgtgaagataatagtgagatgcttcctagagaactgggaaataaatatgtcatcaatttggatcagaagagaaataaatgaattctcttccaaagaaatggattccaaggtcagaaatatctttctatataacttgactgaatata

SEQ ID NO: 39218 - DNA, 327 bp, Homo sapiens
  misc_feature (1)...(327): n = a,t,c or g
nnnnnnnnnnnnnnnnnnnnnnnnnnnnnnnnnnnnnnnnnnnnnnnnnnnnnnnatcgcttgagtgatcagttcacatacattcctttattgtttggggactttttctattgttactttcaagcctttttgcattaaatgagtatttttgagtttccatctcaagcattataatgcttataataataatagaggttacttgatttagggtgggctttgtttgtttgtattctaacacgaagttcatacatttggctcacctaggcagaactcttgagaggaacttggtaattgcattgatttgttatttttgcttttttgcatttg

SEQ ID NO: 39219 - DNA, 335 bp, Homo sapiens
tatagactttattcaaatcatatcagtatttctacaaatgtcctgtttctattccaagatcccatccaggaactcacattacagttagccaccatatctccttagtctccagtctgtgacagtgcctcagtctttccttgtctttcataaccttgtggcttcagagacctggtcagttatttttagaatgtccctccatttggaattttctggtgttttctcatgattatattgcaattatatattaatgagaagaacatcacagaagtgatgtgcccttctcagtgtttcatattagttgcttttgctcaaatgtcattgctagtgatgttaaa

SEQ ID NO: 39220 - DNA, 327 bp, Homo sapiens
  misc_feature (1)...(327): n = a,t,c or g
gccctgcactggggttcttggctgatggtattttggggagggggacaaataggctaaagaaaggcaccccctcccagggacagacagataccaaggagaacttttcccaagctctgaggctttggtttctgttgccaaagccaccgcacactctaggccttctctgcttcgccaacctccagcctcactgagcttcagaccaactctcagtcgacgcggccgcgaattccnnnnnnnnnnnnnnnnnnnnnnnnnnnnnnnnnnnnnnnnnnnnnnnnnnnnnnnnnnnnnnnnnnnnnnnnnnnnnnnnnnnnnnnnnnnnnnnnn

SEQ ID NO: 39221 - DNA, 346 bp, Homo sapiens
  misc_feature (1)...(346): n = a,t,c or g
tttttttaatatnnnnnnnnnnnnnnnnnnnnnnnnnnnnnnnnnnnnnnnnnnnnnnnnnnnnnnnnntgcacatacctgttacttagattcctctgatggttaacatcttgcaaaactataacacagtatcatgtcgacgcggccgcgaattccnnnnnnnnnnnnnnnnnnnnnnnnnnnnnnnnnnnnnnnnnnnnnnnnnnnnnnnnnnnnnnnnnnnnnnnnnnnnnnnnnnnnnnnnnnnnnnnnnnnnnnnnnnnnnnnnnnnnnnnnnnnnnnnnnnnnnnnnnnnnnnnnnnnnnnnnnnnnnnnnnnnnnnnnnnnnnnnnnnnnnnnangccat

SEQ ID NO: 39222 - DNA, 348 bp, Homo sapiens
  misc_feature (1)...(348): n = a,t,c or g
gcannnnnnnnnnnnnnnnnnnnnnnnnnnnnnnnnnnnnnnnnnnnnnnnnnnnnnnnnnnnnnnnnnnnnnnnnnnnnnnnnnnnnnnnnnnnnnnnnnnnnnnnnnnnnnnnnnnnnnnnnnnnnnnnnnnnnnnnnnnnnnnnnnnnnnnnnnnnnnnnnnnnnnnnnnnnnnnnnnnnnnnnnnnnnnnnnnnnnnnnnnnnnnnnnnnnnnnnnnnnnnnnnnnnnnnnnnnnnnnnnnnnnnnnnnnnnnnnnnntattcttaatttcttgagtaagcccttgatttctcatgtgaccttttttctgatcccttaaattaaaaaattttttttgagaggat

SEQ ID NO: 39223 - DNA, 441 bp, Homo sapiens
  misc_feature (1)...(441): n = a,t,c or g
ctcagcttctcaaactaggcttcctattcacaccttgcagcaattgccttttgaaacaagactgaagttaaaggaaccaactataggaaaaaatgaattaaaaggtcaaacattacagataattaaaggtctaacaattgcacacggtgaagacaatcaggattaaaatgagagtaacccaaattctctgcattatagaaaacttctttttaccatcatctaaactgatgcttcttatactttaaggtgcctataaattacgtagaaaatctttctaaaatgcagttctgactctggcactcttagatggagtccaaggttctgcattcttcacaggttcacaggtatgccgatgccggcggtagctctgctactcaacagtgtggtagggcaaannnnnnnnnnnnnnnnnnnnnnnnnnnnnnnnncaagaatcttgag

SEQ ID NO: 39224 - DNA, 430 bp, Homo sapiens
  misc_feature (1)...(430): n = a,t,c or g
ctttgnagcgnnnnnnnnnnnnnnnnnnnnnnnnnnnnnnnnnnnnnnnnnnnnnnnnnnnnnnnnnnnnnnnntctcgaggatccgaattccnnnnnnnnnnnnnnnnnnnnnnnnnnnnnnnnnnnnnnnnnnnnnnnnnnnnnnnnnnnnnnnnnnnnnnnnnnnnnnnnnnnnnnnnnnnnnnnnnnnnnnnnnnnnnnnnnnnnnnnnnnnnnnnnnnnnnnnnnnnnnnnnnnnnnnnnnnnnnnnnnnnnnnnnnnnnnnnnnnnnnnnnnnnnnnnnnnnnnnnnnnnnnnnnnnnnnnnnnnnnnnnnnnnnnnnnnnnnnnatanancntgcgancntggattgaaaatgaatngtataggccaggcgcagtnggccatgcctgtaatcccancttntgnggggtnggacagatgngacg

SEQ ID NO: 39225 - DNA, 321 bp, Homo sapiens
  misc_feature (1)...(321): n = a,t,c or g
gtttattcttgtctttcttgncttttgctaaattacagtcatgcattgcttaatgactggatatcttctgagaaatgcattgttaggcgattttgtcattgtgtgaacatcatagagtgtacttaattannnnnnnnnnnnnnnnnnnnnnnnnnnnnnnnnnnnnnnnnnnnnnnnnnnnnnnnnnnnnnnnnnnnnnnnnnnnnnnnnnnnnnnnnnnnnnnnnnnnnnnnnnnnnnnnnnnnnnnnnnnnnnntttgtatatctaaatatacnnnnnnnnnnnnnnnnnnnnnnnnnnnnnnnnnnnnnnnnnnnnnc

SEQ ID NO: 39226 - DNA, 437 bp, Homo sapiens
  misc_feature (1)...(437): n = a,t,c or g
gaaacncatgatgtatataactatctatttggatgaccnnnnnnnnnnnnnnnnnnnnnnnnnnnnnnnnntctcgaggatccgaattccnnnnnnnnnnnnnnnnnnnnnnnnnnnnnnnnnnnnnnnnnnnnnnnnnnnnnnnnnnnnnnnnnnnnnnnnnnnnnnnnnnnnnnnnnnnnnnnnnnnnnnnnnnnnnnnnnnnnnnnnnnnnnnnnnnnnnnnnnnnnnnnnnnnnnnnnnnnnnnnnnnnnnnnnnnnnnnnnnnnnnnnnnnnnnnnnnnnnnnnnnnnnnnnnnnnnnnnnnnnnnnnnnnnnnnnnnnnnnnnnaganctggattcagccagattcttacagttatgaaccattagtttacaggaatttgaacataccctatgatcccattggaaaacaagcctctttgaactccctacca

SEQ ID NO: 39227 - DNA, 324 bp, Homo sapiens
cggagctgaggatggctgtgcccggctccttcccgctgctggtcgagggctcctggggccccgaccccccgaagaacttgaacaccaagttgcagatgtacttccagagcccgaagaggtcgggaggcggcgagtgtgaggtccgccaggatcccaggagcccatcccgcttcctggtgttcttctacccggaggacgttcggcagaaggttctggagagaaaaaatcatgagttggtatggcaaggaaaaggaacattcaagttaactgtccagttacctgcaaccccagatgaaatcgatcatgtctttgaagaggaacttt

SEQ ID NO: 39228 - DNA, 309 bp, Homo sapiens
ctaatgaatgggcagggaaaatgccagagcaaaattcccacaatccatgctgcagacaattcctacagaaaaaatgagacccactgagatcacaagttataaaagcacatcaaaggggaggattctagccccaaggactagaaataatagaaaaatttaagaatataattgcgtatgtttaaaatgagagaaaaaataatcagatgccaaaactacatttgataaaattcaacattcaatcatgattttttttaataacaaaacagaacaatcaagaaaagacttcctacaaatctaagaaagacattt

SEQ ID NO: 39229 - DNA, 308 bp, Homo sapiens
  misc_feature (1)...(308): n = a,t,c or g
caaaaagttgttttaaattagccaggcacggtgggtggcacagacctgtagcagtagctactnnnnnnnnnnnnnnnnnnnnnnnnnnnnnnnnnnnnnnnnnnnnnnnnnnnnnnnattgttgcagatttaagtcctagtttccaaaacccacaggatctaaactgtactcaacttggtagcaggaactatatatcgctcatcttttcatcccctagtacctatcacaatgtctggcatatatttggcaaaattaagaaaagaaaaaaaaacactactcatagtattgatttcatgaataaatacat

SEQ ID NO: 39230 - DNA, 333 bp, Homo sapiens
agcgacagtaaagaaatcctcttcacaagaaaagttttgttacttctttattgtttaggaaaagtatagtcttcaagaactcccagttttttcaataccgcagtgtttacactgattcttggctctcttccacatcactaatcttttgcaagaattttctgtgatactcgtccactgcaaattaactgccttttaaacatttactaatttgaattccctcccacttaatgtacagtgttttaaatggcctagcagattttatgaaccattttctatcttcagttcataatatatggaggactccttcacatcctagaataaaattctacttct

SEQ ID NO: 39231 - DNA, 313 bp, Homo sapiens
  misc_feature (1)...(313): n = a,t,c or g
atttagttcccctctaatgttatggaagagtatctaactgtgtcttagtttttattgggttggaagaccttgctgtcttggagattatacttgctgaaaagttcacgggattttcatttgagaaaatcatcccagcagatttaatggttttggtgtaaaaattaaattctagaatgatagtcaaccacaggtctgaaataaacaatgtggtgtttttatctttcgtttaatctttctgggtttttttttttttggtttttngtttttggtttttnaaatgnagtttggntgnaaattnanggntgganngcat

SEQ ID NO: 39232 - DNA, 309 bp, Homo sapiens
  misc_feature (1)...(309): n = a,t,c or g
nnnnnnnnnnnnnnnnnnnnnnnnnnnnnnnnnnnnnnnnnnnnnnnnnnnnaagcccaaccaacagaaagagtgagaggttgaagagatagaagaggtgggaaactgatgcaattcannnnnnnnnnnnnnnnnnnnnnnnnnnnnnnnnnnnnnnnnnnnnnnnnnnnnnnnnnnnncgtgatccaccgcacctggccttgttttgttttaaatgggaaaataattgggacagatttgtatagcaagagaaaagcccaaccaacagaaagagtgagaggttgaagagatagaagaggtgggaaactg

SEQ ID NO: 39233 - DNA, 248 bp, Homo sapiens
  misc_feature (1)...(248): n = a,t,c or g
nnnnnnnnnnnnnnnnnnnnnnnnnnnnnnnnnnnnnnnnnnnnnnnnnggaaatttattttttttaaaaattattatttgttttctgaatagaaacacatagttcaaaattcagatgattcaaataatatacagtaaaaaccttctctcctacacttgttccccaacacccagttcacccagtccccaacaccagtaacactggttagtgttactgatttaaaaaaaaaaaaatttttttttttttt

SEQ ID NO: 39234 - DNA, 348 bp, Homo sapiens
cagggactcagatagcttggctttgctttttatggtggcttcctttttagacaatgataaaaaaaagtctgtagcatctctaaatttaagtcaagctgaagagtgagcatgcctctctatgtctttccagctgatcccaagattgactctcattggctttgactgggtcatgtgtctatctttaaaccaatctctttgacagggtgaattgaattactcaactgaccagctcttagtcatgtgtatcactcctgaagccagatgattttcttcacagctgaactacagaaaatgttggttttactaggtgctctcaggctctttaaataaaaataccaggactttgag

SEQ ID NO: 39235 - DNA, 356 bp, Homo sapiens
  misc_feature (1)...(356): n = a,t,c or g
gagcagactaattcttgagtacttaggctttagagaactttcacacctacggacaaagataaggaaaaccatgattttctaatcttttgagaaaacagctccttgaagaaaattcagtgttaaatcctacttttgttactgtacagaaaaatcactttttaaaaataattgctaagaagtaaggtacttggattttaagaatgaatgttacctaacacaatggttctccatttttttttgttttgttttaaagacccttttacactcttagaaattattgaagaccacttttgcttgtgtgatctgctcttttctgnattagaaattaagactgagaaacttaagatatttattcc

SEQ ID NO: 39236 - DNA, 307 bp, Homo sapiens
gttaaaaaagcgttacctgcagctttatcacctggagataactgcttaacattttgatgtgtttctgtccattattacatatgtgatgtgtcgtgtgtacacacatgtacacgtaagtatacactcacatggtacaaatggggatgaaactgatttttttcattgcatatagtatcaattcttttccatatcattacgtattatttcacagcattatttcaatagcagtttagtattcgctgtaagagaaagactataaccaataccttattgttgggtgtaggacattcccatttttttttttttt

SEQ ID NO: 39237 - DNA, 323 bp, Homo sapiens
gccttttgtatgcaacaagaataaaaacgagttctaacagtgctccagtgttattttacattatgtttctctgcctggcccctccttttcctaagtctttgcttaggcattcttggtcataaaaatgacaaatggtaggagatgatagaccaaaaacaagctgatggttagaaattcagccagcaatttaaatattggtgcggatacctagcaagtggatgaaccacacaaataaataagatccaactcaaatggtgttttcttttgaaaacccacattttcgttttcttagatctcactggtttttacctttagaagcaggc

SEQ ID NO: 39238 - DNA, 317 bp, Homo sapiens
ccggctttccctctccctttgattttagaaacaggcaggattgtgagaacgctctcaggagtttctcaagcctcattttgctcattcgtttcaaggccctatctgtggcccacaggttcttattgggggtccctggatgggtttcctgaagccaccatgtatttaagtgtattttgggggacagtgcatctaaaactctcattaaattcaccaggaaggtatttaaaaggcccattttttatgaaagtggataaaaagtgaaaattatgccatggaaagttccttcatatttctatctttctctttttagaggaact

SEQ ID NO: 39239 - DNA, 319 bp, Homo sapiens
ctcctaccctggagctccacagccttgtgccatggttacttgtgtacctatcttattcctgcaagagaatggaaactcaaccaggacagggactatgccacctatgtctctgaatgccctggtgtggtgttttgcaagcagaaaatacttgcggcaatgaattaaactttctgactgctggatgaagcaggcagggaccagtggcagtaagggttatgaggatccggaatcatggtgccactctttagagcacaccatctgctaggaatataatgcaagccaaattttcaatcttaaattttttagcagccacattgag

SEQ ID NO: 39240 - DNA, 325 bp, Homo sapiens
cagacctaaagatacatatggggagtatgacaatgtaaactgggttacatcctttaagtagtctggaaatatttatcaaaagccacagaaaggttcactctttctcttgagttctctaaagcttcctaaatagtgtgcccagtggtcccagctatgtgctgggatagggtcttcagcctaccacatttatcgaatttacccagcatgccatgtaaatattatcattttgtacatgaaaagaattggaaagcactatcttaatggatcagagttccatccttacagcctagttacaactaattgtagcctggaaacgggatataca

SEQ ID NO: 39241 - DNA, 327 bp, Homo sapiens
  misc_feature (1)...(327): n = a,t,c or g
ttttactttggtgtgaacattttttctattataaattcttagaaaatatttctatggctatgagatatttgattcaagtgccttgtaatttacttctcaaatgtccctgatgttggacatttgtttctagtgtttcactattttaaaaaacagtaatatctgtctttatgcttagagctttttcagtttttcaaattatttccttagggtaaaatcctagggaaataattgtcgacgcggccgcgaattccnnnnnnnnnnnnnnnnnnnnnnnnnnnnnnnnnnnnnnnnnnnnnnnnnnnnnnnnnnnnnnnnnnnnnnnnnnnn

SEQ ID NO: 39242 - DNA, 330 bp, Homo sapiens
  misc_feature (1)...(330): n = a,t,c or g
cttttttctatgagtaccttaagggcaggaactgagttttatttgtgtttgtaatttggctctgggcagaattcttggcatagtacgtgctttatgtgtgaactgaattatatttcttcatcttaattttacaggtgtgagccactgcaccaggccccttcatcttaattttaatatatctttgaataaacaccattgtatgaacctgctgtaagcttgggagtggtctgttagtctacagcttgtgtctgagatgtgctaattgaatatttgctcagtacctcatcttaactgcctttggctttatgntgcttatccttcatagnatct

SEQ ID NO: 39243 - DNA, 325 bp, Homo sapiens
ggagcatctttcctataaaactcccctctgccatgcttttcttggtagaatgacgaccatcctagtctcaccgcgggtcctgcaagagcttttcacacagcctttgcctttcaaagatttttctccccgacttttcctgctggcttttgttttctggctgttctctctctgcttctaactttgtttcttgttggtgttgctaaggcatgcatgcaaatgaccacagaaagtttaaaggctcttcaggttcccttcggaagtttgttgctggtctggttctgtcccctccgcaagctccccaaccagagcaacttcgtcgacgcgg

SEQ ID NO: 39244 - DNA, 325 bp, Homo sapiens
  misc_feature (1)...(325): n = a,t,c or g
gggagtcatatcagaatcctttggagagaagagatgggcacatgtgtcatctaaaaaagcattttcaaaattataataaaatacacaacatttgcaaagcaggctttctgcccgttgtgaccgtgaaaacaaagcagctgaagaggcctgatgtgaaagtgacctcctctgtgctctgtcactggcaagaacaggaaaaacacttggggcaagcaagccagccccactttcacacatgactcgtcgacgcggccgcgaattccnnnnnnnnnnnnnnnnnnnnnnnnnnnnnnnnnnnnnnnnnnnnnnnnnnnnnnnnnnnnnn

SEQ ID NO: 39245 - DNA, 327 bp, Homo sapiens
  misc_feature (1)...(327): n = a,t,c or g
cgcggccgcgtcgaccttcagtctcctttaatctgaaactcttccttactttttcttcagtactttcttttattaagcatctagttagatactgttggtaacacaaagataacaggctctgcccacgaggaatttagattatacaatttacttttagcataatttccaattatgcagattcatatgactagctatgtatacttatttctgatttttgaggcattattcaaagagcagagctaaagaaaataactataaaactagaattaagaaacatataaaaattactttttaaacctttttctggtgttttttttttnagatgga

SEQ ID NO: 39246 - DNA, 326 bp, Homo sapiens
  misc_feature (1)...(326): n = a,t,c or g
gagtgatcagtattcatagaggttggaatgtttctggacatttcttcatttctttttcnnnnnnnnnnnnnnnnnnnnnnnnnnnnnnnnnnnnnnnnnnnnnnnnnnnnnnnnnnnnnnnnnnnnnnnnnnnnnnnnttctcatgttttcggaggcactttatcagtatgtttaagacattttcacctgtggccaaattgacaagtttacaatttcactttaactgaagagtgggcagtttatcagttattttagaagttccatttagttttctattttaaatatagtaagttttttcccttaacattttttgcattgggatatt

SEQ ID NO: 39247 - DNA, 332 bp, Homo sapiens
  misc_feature (1)...(332): n = a,t,c or g
cttggggaccctagaaacacaaagtctattctttggtacaataaaattaaagtagaaatcaataacagaaagatatgtagaaacttccaagtatttggaaatcaaataacacttctaaataatccataggttnnnnnnnnnnnnnnnnnnnnnnnnnnnnnnnnnnnnnnnnnnnnnnnnnnnnnnnnnnnnnnnnnnnnnnnnnnnnnnnnnnnnnnnnnnnnnnnnnnnnnnnnnnnnnnnnnnnnnnnnnnnaactcannnnnnnnnnnnnnnnnnnnnnnnnnnnnnnnnnnnnnnnnnnnnnnnnnnnnnnnnnnnnnnnnnnnntt

SEQ ID NO: 39248 - DNA, 341 bp, Homo sapiens
ctctctgctaccatcatgaccctgccctctctaacctgtaataactgcaacagtgcttcactggcctctgcttctaatttcttcccactctgtcccatttttctgtcatgacatcaactgagataacttcctaaaacacaaagctgattgtaccatatcattgtaagttaccagttgcctagtatacacaaaactctccttataatctgagccccagcattatctcaacctctcatctcttgccattcccttaaatgtgtatcttgactctcaataatcatcaaacctgtcatacccttcctgatgctattcctatgagcatgcctcaattctgagtacct

SEQ ID NO: 39249 - DNA, 340 bp, Homo sapiens
ggttgccaggcctcacttagtggagaagagcaaaagcacgagaaggtcatcttctgggttttgagaatacaacacttcaggctctattatgaaccattcccttcctcttccattcttaaggtgtgacttcaaaagaatacatattaataatataatctgctatgacagtatataagtagagaatgtttaataaatactaatttaccattgcattcctcttgtttttaaatcttctatggtacttgcctagtgcttgacacaatggcattctataactttttcttgtgtattttaaaagtatacaatcaataatttcctacatacctaaaacactgtagag

SEQ ID NO: 39250 - DNA, 345 bp, Homo sapiens
tctgcggcaggtccctctgcatagcacagcttctgctttctttgagatgaccaactcctggaactcctctctaccctacatcttccctcctctgtaaatcttttctgactgtacccccccaggagctcctccctctgcaccttctatatacttgcaataggaactaaacttactcctcttttgtgtcctcaggcccacaaacacagcaggccctccactgattagtgaatgaataaattaatgaactcactgtgctcagtaaagtgttttctggatgcgcctactcactggtgtcaccagcttctcatggcacattcgtccatgaaacaccaaagttaccctctg

SEQ ID NO: 39251 - DNA, 340 bp, Homo sapiens
  misc_feature (1)...(340): n = a,t,c or g
gaaactaattaaattcagtgcaagtcaacttaattcagctctacataggttctaaaggtctaaaccacaacatttatggtatgccttctctctaatggagaaatatgctttggtattcaattttttaattagctgtcagaaaatattaacagttgatatataatatatatagactatatcagatatttcagcatttgtcttcagtataagtaaagcaaagcaaacaaatggaatataaacacattgttgatttatgtgtactaatctaaggagaaaaaagaatataaaagtgcagannnnnnnnnnnnnnnnnnnnnnnnnnnnnnnnnnnnnnnnnnnn

SEQ ID NO: 39252 - DNA, 321 bp, Homo sapiens
gggaagggaggattctgtctggagctggaactgctcagggagcccctctctggattctgcactgacagctgcagacagaaaccacgtggcacctccgaaaggagaaagctctgaaatcatccaggtagcattctttgacttttcaatccttttcataataaagtatttaaaatgtacaaaaatgaataaagaataatacatctgacgtccatgtatccaacactcaatttaaaatctaaaaagctaacttggtttctgtatttcacctccctttgccgttttatagaccttttggttctaatgacttaaaaaaaaaaaaaa

SEQ ID NO: 39253 - DNA, 334 bp, Homo sapiens
cgcccatgaccctggagatgccctttccctctaatgagaacatctcctttctggtttactctcttgttttcactgaactcctcctccagtagttacctaagatggtaaaatttttgagacatttcatacctacaattatcttcacacttccctcaatcttgactgcttctttggctggtaacagacttttggttaaggaacttttcctttcagaattctgaaggtgttgctccagtatatcctagcttcccatgttgccatttggaagtctgaggcccttctgaatcccaattctgtatgtttgccatgtttttccagctcctagtattcttaa

SEQ ID NO: 39254 - DNA, 105 bp, Homo sapiens
gatctgcaacatctgttacaaatgggacagcttagctgtttaatctgttaacttttatgttttcaaattacaataaatgcggttaattttgaaaaaaaaaaaaaa

SEQ ID NO: 39255 - DNA, 336 bp, Homo sapiens
  misc_feature (1)...(336): n = a,t,c or g
nnnnnnnnnnnnnnnnnnnnnnnnnnnnnnnnnnnnnnnnnnnnnnnnnnnnnnnnnnnnnnnnnnnnnnnnnnnnnnnnnnnnnnnnnnnnnnnnnnnnnnnnnnnnnnnnnnnnnnnnnnnnnnnnnnnnnnnnnnnnnnnnnnnnnnnnnnnnnnnnnnnnnnnnnnnnnnnnnnnnnnnnnnnnnnnnnnnnnnnnnnnnnnnnnnnnnnnnnnnnnnnnnnnnnnnnnnnnnnnnnnnntccaaattttgaggaccaatatgatcctcaaagtaaatgcttgctggagcattttggttttgggggtttaggatgctcaacctgtaaatgag

SEQ ID NO: 39256 - DNA, 333 bp, Homo sapiens
cccaaccaggaatctctaccaatatatgagatttagaaggtaagaattctttttaacaaataagtggttacccaactctaattagaaagtggaaaatactcttctagcaatttgtaaacaattaagatgagaagataggagatcctgagaacttagaatactttgaaaaactgtttagccacatgataaattgtgactttacccgtcaggagactttactttgacaaggtatattaaatatgtagttgtttttgcaaacacccttgtaggataggttagtattaattaccctatttatgcaggagatatctaagcatagaaaagaatgttaat

SEQ ID NO: 39257 - DNA, 329 bp, Homo sapiens
aaaaaagttattttgaaatgtataaagtatgatgtctagaatttgctttaaaaagagaaaggggtacaaacaaaaagataaaagcccatataccaaaatctcaatacctgataattctgggtgatgggtctatgaggttcattacagtctctttaatctgtttaaaatttttcataataaaagctatttgtttaatcatcaatccattcttttaaaataacatagcatatgtatttacttatagttcagatcaacagttttcaattctgactatacatcagaatcgtctggagaaatttcaaaacaaaaagtatcaatgtttaggcccc

SEQ ID NO: 39258 - DNA, 332 bp, Homo sapiens
  misc_feature (1)...(332): n = a,t,c or g
attagcttacttttatttccttatttcaggcttcttttaaaataagatgtagcattgatgagcatgaaaaaaaaaatctaatattgcttccactcattgaaacccatcagtgactcatgcaataaacagcaagtctcctggttttgtttctgaagagggcacaccaacagtttcaacagcatactccagttttactggaaacagttctcaaaagatgacttaccacaccctgcctgagaaaggacagcatgaaactggggaaaattctgatcttcagaaatacaacagacaatgagtatttccaatttcatgctgtttatatgaanagaaca

SEQ ID NO: 39259 - DNA, 328 bp, Homo sapiens
ccgagttatgactctactagttacgcttctctatcccggcactaaccttttccgtatttgttttcatgagtttcatgtaggaaactgtcaaaattattcgaacagatagattccacataggcacggcttgtcgcataaaataggagttttccttcttccttcatctgcgatttcttcctaatataagagatgtgagacttaacacggagacatccccttcccactccagttgataacattaatcccagctaaagtctaatcatctaaaaatttcactccatcagctttcacaacggagctactaactttaaggcagcagctgtacaat

SEQ ID NO: 39260 - DNA, 334 bp, Homo sapiens
ggctgctctatatgcgctgatatgaaaatatctctaagatacgtcatcacataggaaaaaaaaaggcaacaaggaaaaaaaatatgtgtgaggtgctactaagggtataaggttcatatgcggaatgtctctctactaatatataggagactaatgacagtagtactcctccagagaactgaagacttgaggacagaagtggaatggggagattctttattcactgtataccttgttgtacctgtaggatttcaaactttgcattgtatattcaaaaacaaattatttcaattgataatacagaggtaaaaatacctaggaaaggaagataaag

SEQ ID NO: 39261 - DNA, 343 bp, Homo sapiens
gcttcttctatttatttagctatataatgttgaaagacttagcatttctggacctgtttcttcatttgtatattcttatcttgtaagatcatttttgtagaggttacaaaactaacaaagataactgtggaagagtagtcaacactgtacttactctcagtctctttcttctgtaatcagagtatctgataattcctcatcttcactgatgactgtttaatcatacatgaaaaactggtacagaatacgcaacaataaatggaaactatcataattgccatttatagcaaaatactataataaaaatctctaatccatcatgatgaaaggatagagtattgtt

SEQ ID NO: 39262 - DNA, 345 bp, Homo sapiens
  misc_feature (1)...(345): n = a,t,c or g
ctgatagctcatttcgttttagcactgaatgtctgagtgcgccgtagtttgtttatcattcacttactgaaggacattttggttgcttccaacttttggcaattataaataaagctactaaaaacatccatgtacaggtttattatgacagatactctcactggatatggaattctaaatttatattttcttcctttcaacacttaaaagatgtttccattttttaataatagtttctaataaaaatataattatctttttcccccatatgtcttgattttgccttttataaacagtttttagcgggntgtnggnataccttggntttggattctttgtgtttaa

SEQ ID NO: 39263 - DNA, 254 bp, Homo sapiens
ttatagcctagatattgtgattttcaaactctttgtattttagcatcaaaacttttttttaagttaccgtggaaagtttaattgtatccccaatatttaagtagatatggtaaaattgctttggttgggtgaagttcccagaaccccatctgctttcctttactttccacaatggccccagaagctttctcatggatcccaggactctgaggaacagtttgaaagccaaagtctggcttgaaaaaaaaaaaaaa

SEQ ID NO: 39264 - DNA, 341 bp, Homo sapiens
  misc_feature (1)...(341): n = a,t,c or g
tttttttccagaaaatgttttgattgcaacctgatagcagatccccccacatcataaatagtacattccttttttttaaacctttgcatcatcatttcatttgatgattcaatgccatgaaaaacaggtttttgaagactattttaaacaattaaaacagcattggtnnnnnnnnnnnnnnnnnnnnnnnnnnnnnnnnnnnnnnnnnnnnnnnnnnnnnnnnnnnnnnnnnnnnnnnnnnnnnnnnnnnnaggccgggcgcggtggttcaggttgacgcggccgcgaattccagatctatgaagcgncatactgaaaaaccccnnnngttcacttcaacc

SEQ ID NO: 39265 - DNA, 348 bp, Homo sapiens
  misc_feature (1)...(348): n = a,t,c or g
gttttcagcagcaaatagttattctgtgcgtgcacgcatgcacacatgcccaagtggcaactggggtttcggccactgaaagagctccaggtcatgtttttcagtcagctggagacagaggtgtgtctatgggctggaccttggctatcacctgatgggaacgggatggtggccagtagactcgatttctccccttgtatcctgactgctctttggctctactggggtggctgactgtcacattttccctgaatacggagtcaaagcaaggtcgacgcggccgcgaattccnnnnnnnnnnnnnnnnnnnnnnnnnnnnnnnnnnnnnnnnnnnnnnnnnnnnnnnnn

SEQ ID NO: 39266 - DNA, 347 bp, Homo sapiens
ttttattcctttttggttgtttctttatggaagcttttgggatcttgacatccttagttagaaatttcatcacaaggtgcctaatgtgattcctttttcattatttttacttcatactttgaaggcacttctcaatggaagaaatgagttataaactgtgtgtgaatctgtagctctttgtgtttgagggagtttgcctttttagatgttgggggctacctgttttgttaccagagggttacctgaggtgatattcaattcctgttctttgacctgagggtaaaaaatgggatctcaagtgttccaagattgggtcagctcttttgccatcttattttaatttcctg

SEQ ID NO: 39267 - DNA, 452 bp, Homo sapiens
  misc_feature (1)...(452): n = a,t,c or g
gattttgactncgttgccnnnnnnnnnnnnnnnnnnnnnnnnnnnnnnnnnnnnnnnnnnnnnnnnnnnnnnnnnnnnnnnntctcgaggatccgaattcgcgcnnnnnnnnnnnnnnnnnnnnnnnnnnnnnnnnnnnnnnnnnnnnnnnnnnnnnnnnnnnnnnnnnnnnnnnnnnnnnnnnnnnnnnnnnnnnnnnnnnnnnnnnnnnnnnnnnnnnnnnnnnnnnnnnnnnnnnnnnnnnnnnnnnnnnnnnnnnnnnnnnnnnnnnnnnnnnnnnnnnnnnnnnnnnnnnnnnnnnnnnnnnnnnnnnnnnnnnnnnnnnnnnnnnnnnnnnnnnnnnnnngncattannggngngtggttnctncttgngaggctgatgtgtgaggatcanttgantccagnagctgnannaggcaatnngctatgattgngccantgnnnttcac

SEQ ID NO: 39268 - DNA, 325 bp, Homo sapiens
  misc_feature (1)...(325): n = a,t,c or g
cttcacagaaatttggatagaatgannnnnnnnnnnnnnnnnnnnnnnnnnnnnnnnnnnnnnnnnnnnnnnnnnnnnnnnnnnnnnnnnnnnnnnnnnnnnnnnnnnnnnnnnnnnnnnnnnnnnnnnnnnnnnnnnnnnnnnnnnnnnnnnnnnnnnnnnnnnnnnnnnnnnnnnnnnnnnnnnnnnnnnnnnnnnnnnnnnnnnnnnnnnnnnnnnnnnnnnnnnnnanttatgaaaggnggaacttgcntgtcctcctgtnttatacccnnnntgacagtnccctctcaaaactttncataaatnatgncctaatttcttc

SEQ ID NO: 39269 - DNA, 417 bp, Homo sapiens
  misc_feature (1)...(417): n = a,t,c or g
nnnnnnnnnnnnnnnnnnnnnnnnnnnnnnnnnnnnnnnnnnnnnnnnnnnnnnnnnnnnnnnntctcgaggatccgaattccnnnnnnnnnnnnnnnnnnnnnnnnnnnnnnnnnnnnnnnnnnnnnnnnnnnnnnnnnnnnnnnnnnnnnnnnnnnnnnnnnnnnnnnnnnnnnnnnnnnnnnnnnnnnnnnnnnnnnnnnnnnnnnnnnnnnnnnnnnnnnnnnnnnnnnnnnnnnnnnnnnnnnnnnnnnnnnnnnnnnnnnnnnnnnnnnnnnnnnnnnnnnnnnnnnnnnnnnnnnnnnnnnnnnnnnnnnnnnnnnnnnnnnnnnnnnnnnnnnnnnnnnnnangtgnntacnaagctgccttagatttccagnantgatnaccctcancnacnaacattttnctatgaa

SEQ ID NO: 39270 - DNA, 359 bp, Homo sapiens
  misc_feature (1)...(359): n = a,t,c or g
ctcattgcagtggtcttccaaatatttatgtcaatttcaccccaagctgtacctttgagggagaaaacactgtcatgatgctcccctgaaggaaatccccngngancngactgantccatacnnataatacagnatacatanactccttaagacngattgagacgacncggccncnaattccanannnnnnnnnnnnnnnnnnnnnnnnnnnnnnnnnnnnnnnnnnnnnnnnnnnnnnnnnnnnnnnnnnnnnnnnnnnnnnnnnnnnnnnnnnnnnnnnnnnnnnnnnnnnnnnnnnnnnnnnnnnnnnnnnnnnnnnnnnnnnnnnnnnnnnnnnnnnnnnnnnnnnnnnnnnnnn

SEQ ID NO: 39271 - DNA, 352 bp, Homo sapiens
  misc_feature (1)...(352): n = a,t,c or g
agagatttgaaaagaactgtagatgcccggctgaaattaagtgaggaattgagtggtggtagattgaagccaaaacctattgatgtacaagtcattacacaccacatgcagcgatatgcagtttggtttggaggatcaatgctggcttccacgcctgagttctaccaagtatgccacaccaaaaaggattatgaagaaattggacctagcatttgtcgtcacaatccagtgtttggagtcatgtcgtaaaattggcttcatagttattggggttgggggtgggagaagantcnngatncnnnctaccntnntnattgganaactgcttanncggtactntgnnangccaaga

SEQ ID NO: 39272 - DNA, 326 bp, Homo sapiens
  misc_feature (1)...(326): n = a,t,c or g
gtggaccttaggacccccctttctgacactttgcatctccctgtgtgggtagacaatgatggcaactgtgctgccctggcggaaaggaaatttggccaaggaaaggtcgacgcggccgcgaattccnnnnnnnnnnnnnnnnnnnnnnnnnnnnnnnnnnnnnnnnnnnnnnnnnnnnnnnnnnnnnnnnnnnnnnnnnnnnnnnnnnnnnnnnnnnnnnnnnnnnnnnnnnnnnnnnnnnnnnnnnnnnnnnnnnnnnnnnnnnnnnnnnnnnnnnnnnnnnnnnnnnnnnnnnnnnnnnnnnnnnnnnnnnnnnnnnnnnnnnn

SEQ ID NO: 39273 - DNA, 331 bp, Homo sapiens
  misc_feature (1)...(331): n = a,t,c or g
cgcggccgcgtcgaccttggggattggactccatgggagaggtcagctccttgtctccctggtggtgagacagggaatggtagagtgtgtcctacctatgtgcctgccttgctctacatcagtgcttcttggatattttggtatcaggactctaaactcttagtagttatccaggacccaaaatagcatttgtttatctgggtcatttttactgatatttatcatactagaaattaaaatagaaatagtcaaattctttattaattcgtttataagtaagaaacctattacaagtgaacatagagtcnaccggccgcggtcgacgcggccg

SEQ ID NO: 39274 - DNA, 345 bp, Homo sapiens
cccacctagagttcttctctctgagcctagtgacctgaccactataccctaaaacaaataagctaatgagttaactattccatagtaaaccctgcatgtggaatctgctttcactagtcttctcatgcagcagatgttatagaggacaaaagcacctaagaggtctatgagaaaaagtgtaattcatacaatttaagaaataaaaatatgtcctttttttaaaaaaaaaagtcaatttagtaagttaagaagactctgtcaataacttcaaagtatattccatttcattgaaggaggaacagaataaaaacaagtgaacatattctgcactagttaacctgctct

SEQ ID NO: 39275 - DNA, 351 bp, Homo sapiens
aaaaaacgtgttttgttttctttggcttgtatttttgatctaatgattaaagtcaggaagcagttctgtaatccaaaccaccaccttgagatatatttctttgtagaaaatcttcaaagactattcttaaccttcctatttctagaagttgttttctgagtccttaccttttttgtgttctgtcctcaacaccattttccccaagataatgtcctttaattctccctctctttgttcccaccctacatttcaatacatttaccctacacctgaaaagtttcagtacaatgtggagagtgaatccttctgatatgttcttaaagatatcctttttatttagttgatctcata

SEQ ID NO: 39276 - DNA, 352 bp, Homo sapiens
  misc_feature (1)...(352): n = a,t,c or g
gagagaagaaaaatttctcatccaaaatatagaaatctgtacaactttgccacaatcaatatacatgaactgtacaaatttacaccagttcataatttaccaaataaaagatgactaacaaagttcacaaaatagatggtggtttgtggaaaagacttttacccaattaagtacaaggaaagttacaaaccagacctccactttctaaaaataagaagtttactcagtcttagaaaactacaagctagcaaatgtacagagagctggcgtcgacgcggccgcgaattccnnnnnnnnnnnnnnnnnnnnnnnnnnnnnnnnnnnnnnnnnnnnnnnnnnnnnnnnnnnnnnn

SEQ ID NO: 39277 - DNA, 350 bp, Homo sapiens
gatattttatttgatattattcagtaatacaggttttgtggcaaatatgcatttctaaaagtgcataatgaaacattttatttttctagctcttgaatttgtcatagaaataagccatagattgttactttctgatttactacttatagattcatattgaagatgccatgaagaggagataaatgagtttatatgacactatttactgattatgaaaatagagaaatacaaaaatattatctaataataacaaaaaatatatttcttttaaacataaacactaaaacagagagtagtcaaactgatttggcacacttaatatatattatcaacattatatttttcattct

SEQ ID NO: 39278 - DNA, 348 bp, Homo sapiens
  misc_feature (1)...(348): n = a,t,c or g
aacgtgttaactactatatatctttttgggaaattccaactataagttttgaggatactttgataacaggagagaagaaagatgagataaaagcagaaaagcagtgttaaagttgctgtaagtgctttgtttcatacaaaatatatataaatgcctgtgacacataatatagcccaacactaacatctttgacaagtgtaggatagactgaaaaaaaaaaaaanggntgaccgcccccttaccgccaacacntncaantttncagggcaaagttcaaananggtncgtntcnttgggaaaangagctttncntntttaanctaaacttccgggctatttnncccatta

SEQ ID NO: 39279 - DNA, 350 bp, Homo sapiens
caagtgtgtttgccaaaacagggagtgaagtgtcttgcaaggccacttgttccagaagaaagacaggataagggaagtggcagaaactgtgatagggaaggagtttttccacgctaacaaagcgtgaaccgataagcctgaccttatagacaaatgttgagggtcctaagagcacctctcaggccaaaattaactgagcaaatttgacttggcttcccattttataatggaaaaaattcctagggagaaagaaaactcaacattggctgctatcacggctgatggatttgacttcttatctgccagattttcctactaaacaagtcaatggaatcactttctaatatgcc

SEQ ID NO: 39280 - DNA, 245 bp, Homo sapiens
  misc_feature (1)...(245): n = a,t,c or g
aattaactaccctttctggggtccaagaagaatctgccctttgctatcttctccaagttgatgagtttagatttttattggactgtggctgggatgagcacttttctatggatattattgattccctgaggaagcatgttcaccagattgaggcaggntgnngtntnaccttnnnnnnnnnnnnnttnntnnnatcnatnctgnnntnnattnnnnntnnnnnnttnnnnngngntgctgncttt

SEQ ID NO: 39281 - DNA, 303 bp, Homo sapiens
  misc_feature (1)...(303): n = a,t,c or g
aaaaaataaaaacatgnnnnnnnnnnnnnnnnnnnnnnnnnnnnnnnnnnnnnnnnnnnnnnnnnnnnnnnnnnnnnnnnnnnnnnnnnnnnnnnnnnnnnnnnnnnnnnnnnnnnnnnnnnnnnnnnnnnnnnnnnnnnnnnnnnnnnnaaattaggcaggcatggtggcaggaaatcttgttcaccttgtcaactgtttggatgtgactggtaagaaagggaagtcaagtgtaattccagctatagtccccatattacagatggggaaactgaggctcgaagagtagagagcagtgacttg

SEQ ID NO: 39282 - DNA, 319 bp, Homo sapiens
  misc_feature (1)...(319): n = a,t,c or g
gtcgacgcggccgcnnnnnnnnnnnnnnnnnnnnnnnnnnnnnnnnnnnnnnnnnnnnnnnnnnnnnnnnnnnnnnnnnnnnnnnnnnnnnnnnnnnnnnnnnnnnnnnnnnnnnnnnnnnnnnnnnnnnnnnnnnnnnnnnnnnnnnnnnnnnnnnnnnnnttttactgngatggggcntggnggctcactcntgtaatcccagnantttgggaggcaggtgcntcacttgaggttnggagttnnagaccagnctanccaactnggngaaactntttttntantaaaaatcnaaaactanctgggngngggggcaggc

SEQ ID NO: 39283 - DNA, 320 bp, Homo sapiens
  misc_feature (1)...(320): n = a,t,c or g
ctctgccactgacgacttcttcaagaaacagacaaagaatgacccatttacctcggatccattcacgaaaaacccttccttaccttcgaagctcgacccctttgaatccagtgatcccttttcatcctccagtgtctcctcaaaaggatcagatccctttggaaccttagatcccttcggaagtgggtccttcaatagtgctgaaggctttgccgacttcagcactattgaaggtcgacgcggccgcgaattccnnnnnnnnnnnnnnnnnnnnnnnnnnnnnnnnnnnnnnnnnnnnnnnnnnnnnnnnnnnnnnnnnn

SEQ ID NO: 39284 - DNA, 306 bp, Homo sapiens
ggatgacaaatctctcaacatcaaaactgaccctgtggatatttacaaatcttgggttaatcagatggagtctcagacaggagaggcaagcaaactgccctatgatgtgacccctgagcaggcgctagctcatgaagaagtgaagacacggctagacagctccatcaggaacatgcgggctgtgacagacaagtttctctcagccattgtcagctctgtggacaaaatcccttatgggatgcgcttcattgccaaagtgctgaaggactcgttgcatgagaagttccctgatgctggtgaggatgg

SEQ ID NO: 39285 - DNA, 316 bp, Homo sapiens
ctcatatacaccccaaattgtaaaatattttcctaagtctgggtaacatgggcaaagcatccaaatgaaagtaaccaattcccgtgatataatttgctgatagagctgactgagtatttcacaaagtgtggtcctgtgaacactcatccagcagagggatccataaaaactaaacaagcatgggaagcccagggacttctgtccccttcttggagaattactgtgcacattaagggctctcaaaggatccgcaatctgcagtaaaagtctgtttcactttgtttgccctcgtgtttcccaaacatatttgatcact

SEQ ID NO: 39286 - DNA, 439 bp, Homo sapiens
  misc_feature (1)...(439): n = a,t,c or g
ttgagcccgnatganttggannccggnnnnnnnnnnnnnnnnnnnnnnnnnnnnnnnnnnnnnnnnnnnnnnnnnnnnnnnnnnnnnnnntctcgaggatccgaattccnnnnnnnnnnnnnnnnnnnnnnnnnnnnnnnnnnnnnnnnnnnnnnnnnnnnnnnnnnnnnnnnnnnnnnnnnnnnnnnnnnnnnnnnnnnnnnnnnnnnnnnnnnnnnnnnnnnnnnnnnnnnnnnnnnnnnnnnnnnnnnnnnnnnnnnnnnnnnnnnnnnnnnnnnnnnnnnnnnnnnnnnnnnnnnnnnnnnnnnnnnnnnnnnnnnnnnnnnnnnnnnnnnnnnnnnnnnnnnnnnnnnnnnnnnnnnnnnnnnnnnnnnangnntgaggcctcnttngnccccnanttggggaggaaacagggnccctgcctgggttttnggga

SEQ ID NO: 39287 - DNA, 323 bp, Homo sapiens
  misc_feature (1)...(323): n = a,t,c or g
nnnnnnnnnnnnnnnnnnnnnnnnnnnnnnnnnnnnnnnnnnnnnnnnnnnnnnnnnnnnnnnnnnnnnnnnnnnnnnnnnnnnnnnnnnnnnnnnnnnnnnnnnnnnnnnnnnnnnnnnnnnnnnnnnnnnnnnnccggcctctacaccttctattaatagttgctgttccttgctgccttctcctgggaggctaagtcaacactggggatgatgggtatgcagttagaaataccaaggaatgggaaaacagtgtaaggagcatgtctgcatttctccacactagagccagccaaatgggacaagtgtgctcaatatagtta

SEQ ID NO: 39288 - DNA, 447 bp, Homo sapiens
  misc_feature (1)...(447): n = a,t,c or g
gtgtnnntctnanccggnnnnnnnnnnnnnnnnnnnnnnnnnnnnnnnnnnnnnnnnnnnnnnnnnnnnnnnnnnnnnnntctcgaggatccgaattccnnnnnnnnnnnnnnnnnnnnnnnnnnnnnnnnnnnnnnnnnnnnnnnnnnnnnnnnnnnnnnnnnnnnnnnnnnnnnnnnnnnnnnnnnnnnnnnnnnnnnnnnnnnnnnnnnnnnnnnnnnnnnnnnnnnnnnnnnnnnnnnnnnnnnnnnnnnnnnnnnnnnnnnnnnnnnnnnnnnnnnnnnnnnnnnnnnnnnnnnnnnnnnnnnnnnnnnnnnnnnnnnnnnnnnnnnnnnnnnnngaaanggnagtctntntggcccggnttccctcggngtgctactgngcgctcgatccagcaccatggggaancgntacaatnggnnggnctatnganccctntngcaa

SEQ ID NO: 39289 - DNA, 336 bp, Homo sapiens
gttcctaataatgtatcttcaaaaatatataaacccaaaaataaaagaacctcaaggagaaactaaccataagacagtctcatttatgaacataaatgcaaaaatcctgaacaaaatattagtaattcaaatctaataatttccaaagaaaaataatgtgtctaaatttgggttattccataattcaaggttgcttcaatatcaatcagtgttattcactagatgaaagaagaaaatatatgattatctcaaagaatatagaaaaagcattcaataaaatacaacattcatcattcatgattaaaacaaagaatagaaagaaacttcctgactggt

SEQ ID NO: 39290 - DNA, 334 bp, Homo sapiens
  misc_feature (1)...(334): n = a,t,c or g
tgctggaattacaggtatgagccacggtgcccagcctgaatcccatatttaatacaggatttgacaccaagattttgtatgtaggaattataatcactcatgaggcaaaagccatattttgaatatgaatgtaaaagaaaattgtgttcgttctttanaggtactcccaattttcccaactcatattatcattcaatgtatttcttcatgggacctctagtggtttgacagaccacagaagcttaaaaagtttgaaatacatgcatgaaaataaacaataattaattatctcaaacctattatttttaagtaaactttgcagtagaggatacag

SEQ ID NO: 39291 - DNA, 315 bp, Homo sapiens
ctccatagtttcttcctgtgcgttgtaacctggcaaatgttcaggcttctgagaagaaggttgagctgatgggtcatccagatcctggcctgaaagttgcatgtctgagtgcttgaaaataaaataaaactcaatcttaagttttttttcttttaagataattaacctttttgttcccttatttttgtatatatgattaagagttagaagcagcatgtttgggaacattttcagaaaaattgatacaaaaatgtcctgaattagctgtatgtatttggtagtgaaatagcataagcattgactgtaaagatgagg

SEQ ID NO: 39292 - DNA, 315 bp, Homo sapiens
  misc_feature (1)...(315): n = a,t,c or g
cggagcttgcagtgagccgagatagcnnnnnnnnnnnnnnnnnnnnnnnnnnnnnnnnnnnnnnnnnnngaaacaaacaaacaacaacaacaacaaaacttactatgaaatatggacacctgttttaaaaatgcattacaaatatctgtttcagtctttgcacctaatatgtataagatatatataactgaatttgaggatgttgtgtggaaaatattacttaacaagttattatttaatatacatatataaagaatcccaaacagatctacataaggaaaaaaattacagtatagatttctaaattaattgccg

SEQ ID NO: 39293 - DNA, 323 bp, Homo sapiens
  misc_feature (1)...(323): n = a,t,c or g
aaatgtctttcggtatttgagatcactaatgactatgttccctacagtttaaaaagaaaaaaagaaacacacacacttgtcatcttttataatggttttgtcacaattcataatagacaaaatagaacaacaaacataaaattccaactgctccctcttttctctttgaaagagtctgataggtaagggaaaaaatagcatcaatctggccatgatattanctaancngnatacncangnnataantntnntnnnanctgnatgtgatctcaaatggtgatcttganccgnntnattttttacagagaacananctgangccc

SEQ ID NO: 39294 - DNA, 328 bp, Homo sapiens
  misc_feature (1)...(328): n = a,t,c or g
tgcaccatagattagcaatgtannnnnnnnnnnnnnnnnnnnnnnnnnnnnnnnnnnnnnnnnnnnnnnnnnnnnnnnnnnnnnnnnncagcctgatgatttggccacttatttttgtcagcagggcaagagtttccctcagacgttcggccagggggccccaagacctctaatcattgtcgacgcggccgcgaattccnnnnnnnnnnnnnnnnnnnnnnnnnnnnnnnnnnnnnnnnnnnnnnnnnnnnnnnnnnnnnnnnnnnnnnnnnnnnnnnnnnnnnnnnnnnnnnnnnnnnnnnnnnnnnnnnnnnnnnnnnnnnnnnnn

SEQ ID NO: 39295 - DNA, 346 bp, Homo sapiens
  misc_feature (1)...(346): n = a,t,c or g
taaaacttaatgtctgtctaaattgaaagcatccatatgtcagtttctacctagaaatttgtggttcatatattcatatagcttgaaggactatattttcttgccatttatatttaaaatgatgtgtaatctacagacacagagtttttccagtagtggtcgacgcggccgcgaattccnnnnnnnnnnnnnnnnnnnnnnnnnnnnnnnnnnnnnnnnnnnnnnnnnnnnnnnnnnnnnnnnnnnnnnnnnnnnnnnnnnnnnnnnnnnnnnnnnnnnnnnnnnnnnnnnnnnnnnnnnnnnnnnnnnnnnnnnnnnnnnnnnnnnnnnnnnnnnnnnnnnnnnn

SEQ ID NO: 39296 - DNA, 347 bp, Homo sapiens
  misc_feature (1)...(347): n = a,t,c or g
nnnnnnnnnnnnnnnnnnnnnnnnnnnnnnnnnnnnnnnnnnnnnnnnnnnnnnnnnnnnnnnnnnnnnnnnnnnnnnnnnnnnnnnnacnnnnnnnnnnnnnnnnnnnnnnnnnnnnnnnnnnnnnnnnnnnnnnnnnnnnnnnnnnnnnnnnnnnnnnnnnnnnnnnnnnnnnnnnnnnnnnnnnnnnnnnnnnnnnnnnnnnnnnnnnnnnnnnnnnnnnnnnnnnnnnnnnnnnnaaataggttcttaagcacctgtttcacatggccacattttaataaatttacttactatgaatattggagactccccactatatcacaagttaaaatttaagttttact

SEQ ID NO: 39297 - DNA, 399 bp, Homo sapiens
  misc_feature (1)...(399): n = a,t,c or g
attgaatttcgataccgnnnnnnnnnnnnnnnnnnnnnnnnnnnnnnnnnnnnnnnnnnnnnnnnnnnnnnnnnnnnnnnntctcgaggatccgaattccnnnnnnnnnnnnnnnnnnnnnnnnnnnnnnnnnnnnnnnnnnnnnnnnnnnnnnnnnnnnnnnnnnnnnnnnnnnnnnnnnnnnnnnnnnnnnnnnnnnnnnnnnnnnnnnnnnnnnnnnnnnnnnnnnnnnnnnnnnnnnnnnnnnnnnnnnnnnnnnnnnnnnnnnnnnnnnnnnnnnnnnnnnnnnnnnnnnnnnnnnnnnnnnnnnnnnnnnnnnnnnnnnnnnnnnnnnnnnnaatngnacnnaccnnggccctgggttnaagccannctggncggncatttgggcnnacctga

SEQ ID NO: 39298 - DNA, 405 bp, Homo sapiens
  misc_feature (1)...(405): n = a,t,c or g
cggtnnnnnnnnnnnnnnnnnnnnnnnnnnnnnnnnnnnnnnnnnnnnnnnnnnnnnnnnnnnnntctcgaggatccgaattccnnnnnnnnnnnnnnnnnnnnnnnnnnnnnnnnnnnnnnnnnnnnnnnnnnnnnnnnnnnnnnnnnnnnnnnnnnnnnnnnnnnnnnnnnnnnnnnnnnnnnnnnnnnnnnnnnnnnnnnnnnnnnnnnnnnnnnnnnnnnnnnnnnnnnnnnnnnnnnnnnnnnnnnnnnnnnnnnnnnnnnnnnnnnnnnnnnnnnnnnnnnnnnnnnnnnnnnnnnnnnnnnnnnnnnnnnnnnnnacgnaanttanatagngatagcantggctanaanaagcgcttnatcccccagtggagngctttgngngaggnganggaatgca

SEQ ID NO: 39299 - DNA, 308 bp, Homo sapiens
  misc_feature (1)...(308): n = a,t,c or g
ctcnnnnnnnnnnnnnnnnnnnnnnnnnnnnnnnnnnnnnnnnnnnnnnnnnnnnnnnnnnnnnnnnnnnnnnnnnnnnnnnnnnnnnnnnnnnnnnnnnnnnnnnnnnnnnnnnnnnnnnnnnnnnnnnnnnnnnnnnnnnnnnnnnnnnnnnnnnnnnnnnnnnnnnnnnnnnnnnnnnnnnnnnnnnnnnnnnnnnnnnnnnnnnnnnnnnnnnnnnnnnnnnnnnnnnnnnnnnnnnnnnnnnnnnnnnnntaccgcgtccatcctaataaactcttataggagaataaagtatatagttgaat

SEQ ID NO: 39300 - DNA, 350 bp, Homo sapiens
  misc_feature (1)...(350): n = a,t,c or g
ggctgaggggcaaggagaggcggggggcccttgcaggggatgaatggtgccaaccgaagaactaaaacagaaaccaaatctcagccaacaaactcttctgttgtgagcaaaggaccaaatcatagaataaaacaaaattaaagctacctttttgcttacattggatttaatgtatcttagaactagtattaaaatgcctttaaaaagcgatgtgaaattctagatggttatacttacaaataaaataaacaaaagaaagcaaaggcaaaaacactgcttatatattcannnnnnnnnnnnnnnnnnnnnnnnnnnnnnnnnnnnnnnnnnnnnnnnnnnnnnnnnnnnnn

SEQ ID NO: 39301 - DNA, 351 bp, Homo sapiens
ccatattatattttcttctatattacattaatatagaagatagtgaacacttcttctttaatcaattaattcttacttcgggcagtctacatgttcctaacctattaataaccacaaagacaatgttttgtcttgctttttcagtcaactactgcagcaatcgtgtggtctttcaaaatataaatcatacttgattttagggtcttagattcttttttaaaagtgaccacagaagattaaaacatgtatttttttttactgtaatatttggtttaaaacatattttctaatgaaccctaacccaaacagctatttatttatttatctatttttgagacggagtctcactgc

SEQ ID NO: 39302 - DNA, 342 bp, Homo sapiens
ctgttgtcttgtccttcccacagacccaagaagcttcgcttccacccaaagcagctgtacttctccgccaggcaaggggagcttcagaaggtgctcctcatgctggtggacggaattgaccccaacttcaaaatggagcaccagaataagcgctctccactgcacgccgcggcagaggctggacacgtggacatctgccacatgctggttcaggtgcggcggcacggcgccctcctagggctcttcacctgctctcttttatttttaccaaagtaaaatcataccacgttcgcggttcttccagtgtaagagttccgtagtgctgtggaaagtttcagacta

SEQ ID NO: 39303 - DNA, 350 bp, Homo sapiens
caacaccaaagctgatgagaactatcccgtgagttaaagctctcaacgacagcaggggataggcaaggtcctcgcctcttacttttaatttgccctttgacatcacggtcttcccctgagtgttcttcctcgtaatgtgagtgaagctgatagaaagactgcagatccttcaggcacagagggcagaggaagccctccctcacttcccctgggtcgtccagagaagccatggcagtgccgctctcaaccctaggaaggcaggaatctcatgccaagagtcagcttgattcctcccaaggaaccatggttcccgcagcattagcttaagcagcacacagatggtgaggaag

SEQ ID NO: 39304 - DNA, 351 bp, Homo sapiens
  misc_feature (1)...(351): n = a,t,c or g
nnnnnnnnnnnnnnnnnnnnnnnnnnnnnnnnnnnnnnnnnnnnnnnnnnnnnnnnnnnnnnnnnnnnnnnnnnnnnnnnnnnnnnnnnnnnnnnnnnnnnnnnnnnnnnnnnnnnnnnnnnnnnnnnnnnnnnnnnnnnnnnnnnnnnnnnnnnnnnnnnnnnnnnnnnnnnnnnnnnnnnnnnnnnnnnnnnnnnnnnnnnnnnnnnnnnnnnnnnnnnnnnnnnnnnnnnnnnnnnnnntaataataataatattgttgtttttaaaaagtagaattttaaaaaatatataaaacgttattatttatgacagtcaacatcctgtacaatagatcactaaagctttttc

SEQ ID NO: 39305 - DNA, 344 bp, Homo sapiens
ctggttctctctgttgcacactgagcaacattgtctttttaaaatctattatgaaataaagttaaacagcttcataattatcattgtcattatttttctttttagctactattttttggtctgtcctgtggaaacagcttgcaatcctcacaagaacctcgtaatgtgaatatgccagcgtgttgctacagaccgtgcttacttcagccaatttctctgctgaatatcctccttttactgatgaggaaaccaagtcaagaagtcataaatgacacacccaaggctgggaagtggttgagcaggtatttagactcaggtctattttactcctgtgcctgtgggcc

SEQ ID NO: 39306 - DNA, 356 bp, Homo sapiens
  misc_feature (1)...(356): n = a,t,c or g
ggattttgaaaaggcacagaaaaaattcttttcatgccattattattgactaaaagagaaatattagtttagnnnnnnnnnnnnnnnnnnnnnnnnnnnnnnnnnnnnnnnnnnnnnnnnnnnnnnnnnnnnnnnnnnnnnnnnnnnnnnnnnnnnnnnnnnnnnnnnnnnnnnnnnnnnnntaccttgcgcatacctgggagcataaagcattaggcttttaagcggctcagccagccccatggaactcctatcctacttcaagcagccggtggaagtcaccaggacggaggtaagggccgctgactacctgccgtggctgtagacctgctgcanangaaactgcngtcntgtgg

SEQ ID NO: 39307 - DNA, 348 bp, Homo sapiens
ttttaatgtgattcatctgttccagtttgcctgggaccctggcagttttagcactcaaagtctagtgtcctggggaacacctcccagttccaggcaaatcagaaagattggtaacctgatcgcaaaactattaatttctgaatattttatcttgtgtctggctcccttactgaagtcttgtaagtgctagtcatttttcagctgatagcctatctggaaactccaagagaatcatttcatcaacaaataacacttttgtcttttcctttacatgatttgcattttttctttctctggtttttgtgcactggctaaagccttcagaacatggaataattgtagagacaa

SEQ ID NO: 39308 - DNA, 345 bp, Homo sapiens
  misc_feature (1)...(345): n = a,t,c or g
ccnnnnnnnnnnnnnnnnnnnnnnnnnnnnnnnnnnnnnnnnnnnnnnnnnnnnnnnnnnnnnnnnnnnnnnnnnnnnnnnnnnnnnnnnnnnnnnnnnnnnnnnnnnnnnnnnnnnnnnnnnnnnnnnnnnnnnnnnnnnnnnnnnnnnnnnnnnnnnnnnnnnnnnnnnnnnnnnnnnnnnnnnnnnnnnnnnnnnnnnnnnnnnnnnnnnnnnnnnnnnnnnnnnnnnntatttatggagtatctacaatgtagaaggttcggttcttttttaacacaattnttttttcctctggttgantgtctccattntttatttctaanttnagancatnnttntgga

SEQ ID NO: 39309 - DNA, 325 bp, Homo sapiens
  misc_feature (1)...(325): n = a,t,c or g
nnnnnnnnnnnnnnnnnnnnnnnnnnnnnnnnnnnnnnnnnnnnnnnnnnnnnnnnnnnnnnnnnnnnnnnnnnnnnnnnnnnnnnnnnnnnnnnnnnnnnnnnnnnnnnnnnnnnnnnnnnnnnnnnnnnnnnnnnnnnnnnnnnnnnnnnnnnnnnnnnnnnnnnnnnnnnnnnnntattatatatattctttgtctataattcatttcactgtagaatgttaagttcaactgtaaatttattcttagaaattttacatggatccnnanggnngtatnntcnttnatatgncctngtcttccggatgtgnnttnnnnttgtta

SEQ ID NO: 39310 - DNA, 341 bp, Homo sapiens
  misc_feature (1)...(341): n = a,t,c or g
cactgatgtaggaagcacgaggaaaggaagacgttttgatatagtgttactgtgagcctgtcagtagtgggtaccaatcttttgtgacatattgtcatgctgaggtgtgacacctgctgcactcatctgatgtaaaaccatcccagagctggcgagaggatggagctgggtggaaactgctttgcactatcgtttgcttggtgtttgtttttaacgcacaacttgcttgtacagtaaactgtcttctgtactatttaactgtanaaaaaanaaaaanaaaaaaaaannatanaacaantaaaaacnaaaaanncattnaacactannatnatnnttgacaa

SEQ ID NO: 39311 - DNA, 405 bp, Homo sapiens
  misc_feature (1)...(405): n = a,t,c or g
ggttgancccggnnnnnnnnnnnnnnnnnnnnnnnnnnnnnnnnnnnnnnnnnnnnnnnnnnnnnnnnnnnnntctcgaggatccgaattccnnnnnnnnnnnnnnnnnnnnnnnnnnnnnnnnnnnnnnnnnnnnnnnnnnnnnnnnnnnnnnnnnnnnnnnnnnnnnnnnnnnnnnnnnnnnnnnnnnnnnnnnnnnnnnnnnnnnnnnnnnnnnnnnnnnnnnnnnnnnnnnnnnnnnnnnnnnnnnnnnnnnnnnnnnnnnnnnnnnnnnnnnnnnnnnnnnnnnnnnnnnnnnnnnnnnnnnnnnnnnnnnnnnnnnnnnnnnnnatagaanngngttnaatcatggnnangnatnctnngacntatagaantgtntaantgcttnnttnnngaccatcg

SEQ ID NO: 39312 - DNA, 349 bp, Homo sapiens
gtttccagatcagctcaacagccatgtttaccacatgtaaaatgctgggaatagatgcccacctttctttagacttccagtcaacacctatagttcaccaatctaacatgacacagcaagatcgactaaaactgaaatgttaaaaccagttgaaagaatccagatctccaacatagccagacctcatctctcaaaaaatacaaaaagaaaaaaagaatccaggtctctaagtgtaaacacttcccttctgaagttggtctctgctctctacctagataactaactcagctgttatctatgataaagactaggagaaaacaatccattttcctccctacaaatttaagaa

SEQ ID NO: 39313 - DNA, 340 bp, Homo sapiens
  misc_feature (1)...(340): n = a,t,c or g
cagaaagggtcaccttnnnnnnnnnnnnnnnnnnnnnnnnnnnnnnnnnnnnnnnnnnntgaactcaaagtaaacagttgaatggtagttagcagagccagttgggggcatagaaaggggtgtattgggctgggaaaggggagacattggtcactgggtacaaagtttcagttagcaggaataagttctggtgttccattgcaggggttctcctctgctccctgttgctgnnnnnnnnnnnnnnnnnnnnnnnnnnnnnnnnnagcaggttggnnnnnnnnnnnnnnnnnnnnnnnnnnnnnnnnnnnnnnnnnnnnnnnnnnnnnnnnnnnnnnnnnnt

SEQ ID NO: 39314 - DNA, 341 bp, Homo sapiens
ggcatgccgggtgccagttcaaagccctgctgtggaagaattggctctgcagactcaggaacccggtccttttccttgctgaattcttctggccttgtatcctgtttgtaattctgacagttcttcgttttcaagaacctcccagatacagagacatttgttatttgcagccccgagatctacccagctgtggtgttatcccctttgttcaaagccttctttgtaacactggatcaaggtgtaggaacttcagctatgaagggtcaatggagcatcattttcggtaagagaaacacaaagatctttttcagaaatctcagaaagctgatacatagaacagg

SEQ ID NO: 39315 - DNA, 348 bp, Homo sapiens
  misc_feature (1)...(348): n = a,t,c or g
ataattctcactgtattcctgtgagttaggtactctatcccttagtttgaaatgaggaaactgaggctcagaagtcaacttccttggggtcattcacatagtaagtagtggagttggatttgaactaaggtagtctagtctcccataattttccctcttaaccactataccaggatttctcatctctgtcctcctnnnnnnnnnnnnnnnnnnnnnnnnnnnnnnnnnnnnnnnnnnnnnnnnnnnnnnnnnnnnnnnnnnnnnnnnnnnnnnnnnnnnnnnnnnnnnnnnnnnnccccctttctcagttatgaccgtctaaaatgtccccctggaaagaggtggtgg

SEQ ID NO: 39316 - DNA, 362 bp, Homo sapiens
ctcccttttaaataataagctgcatcagatctggaattggtgtcagatttgtatcgtttagagcgcctagtaaacaactttcagtagattattttcaaccctcattgtacattagcattgccaggagaacattaaaaaaaaatgcctgtggacttaccagacacaaacttaatctgaatctctggggtagagactgaactctgattttcttttctttttttaatgttcacagttgatattgacgcctagggatgggtgagcacctccgctgtagaccagtggttctcaaactttgggttacaggagaatcatttggagagctgaaaattcagtcttactctcccagtttcagattcagtagg

SEQ ID NO: 39317 - DNA, 361 bp, Homo sapiens
  misc_feature (1)...(361): n = a,t,c or g
cacaaattcagttttaggcttgctgagcttcagaaatatgaagcatgtaattgtagatatggagaaagcaaggaaatggccctcaaaagagatttgggctgaaattacaaagtggcataacttattggcatatggatagatattgaaaatcacagatttggaagagaacacctcaagtaagttgaaaagagaagggtggggacacagaaccaagaattgagaactctcatacataaagtcctggtagaagggaaagagttgacnaagacnactaangatgaggtcagacacatangaaaacgagacctgacccccaggaagccaaaagggtaaggatgtttaaaaatnaagggagatcaag

SEQ ID NO: 39318 - DNA, 362 bp, Homo sapiens
  misc_feature (1)...(362): n = a,t,c or g
tgccattctaaaactatattatatgattcagaagaaaggatttatatctaaacggattgatttttctccaaacccacacacaacaaacttacaccttaccaaataactctgaggtaaacagttcagtcaaggtgttcagcattgaataaatgcttccgagaaggaaatataacactataaatagtaaacttcccctgaatcacaaggaagacattcaggaatatgtctagttgggtgttcactggtttttttttannnnnnnnnnnnnnnnnnnnnnnnnnnnnnnnnnnnnnnnnnnnnnnnnnnnnnnnnnnnnncatcattggtttatcttatacgaagtgagcaaatcctaagtcact

SEQ ID NO: 39319 - DNA, 367 bp, Homo sapiens
gcggcttgtaaggggttagaatggaagtaggaagacaagttagaatggagtgaggtatgccatctggacaacaaacttaaaaatcgcctttcaaaacctaacctgaaggtactttagagaagcctctgtattcagctattcaactttttaaaaaagtaaaaatttgatatgctggaagcaccataaaggtgattaggtatatatcacaaatcgctacaatactttagtactggcttcctacagattatgtgagtggataaccaaatttccaaggtcagatttttaaaattctcaagttactgcagtggtaacttatgaaatatggatacttactttgactaagtacttaacatcaccaggaattagc

SEQ ID NO: 39320 - DNA, 343 bp, Homo sapiens
ccacgatgatgttctcgggcttcaacgcagactacgaggcgtcatcctcccgctgcagcagcgcgtccccggccggggatagcctctcttactaccactcacccgcagactccttctccagcatgggctcgcctgtcaacgcgcaggacttctgcacggacctggccgtctccagtgccaacttcattcccacggtcactgccatctcgaccagtccggacctgcagtggctggtgcagcccgcctcgtctcctccgtggccccatcgcagaccagagcccctcaccctttcggagtccccgcccctccgctggggcttactccagggctggcgttgtgaaag

SEQ ID NO: 39321 - DNA, 345 bp, Homo sapiens
  misc_feature (1)...(345): n = a,t,c or g
caggaaaggagggttctgggcagagagaaaacaaagactcagaggtggggcagcctggggtgttggaggaatggggaggtgccatcgtgccctnggtcannatcanccctggaggtccccancttcacnaaggnctggatttcncctntccgnatgcctttgttcngggttcttattgncanccncttcacngnantctccgnntgnnnnngttaantntgtngaantaagtcncactntagnntnnntngantcngatgtntntttttgnnctanntcctntnnctgtttgtncttntcnnttanttnnnttnttntgtnccnattntnntnnangntnncgtc

SEQ ID NO: 39322 - DNA, 348 bp, Homo sapiens
tggacgaatacctataaacgtataaagaaaaagaggacttcagagatttgattagacaaggaattctaaaaaatgaaaatggggctccagaagatgaagagaattttgaagaagctattaaaaatgtgaacacagcactaaatacaactcagatcccaagcagtattgaagatatatttaatgatgatcgctgcataaatatcaccaaacagactccatcattttggattttagctcgtgccttaaaggaatttgtggccaaagagggtcaaggaaatttacctgttcgaggcacaattcctgatatgattgcagattcaggcaaatatataaaactgcaaaacgttt

SEQ ID NO: 39323 - DNA, 358 bp, Homo sapiens
  misc_feature (1)...(358): n = a,t,c or g
ggaaaatgtatcataaaatgttttgttcttcagctccgtgtaagtgtactaaatgttatcttcctcataaattctaccttttcatttgaaaatccaagtatttacagccaaataagtcaaaatacaatctgctgtcttgttatttctagccatcaacaccctactaaaaagcagggggaaatgtactaagtcagaaaggaccgcccaataggacattgaagtttttggaatctgaagttagagggcatatatttcctcttctcagattgattcagaaggcatgtgtgtcttctcccccaccctaccccatgtctgtacattanctgaaaggatttaaaaacttgtatccataccctaa

SEQ ID NO: 39324 - DNA, 366 bp, Homo sapiens
  misc_feature (1)...(366): n = a,t,c or g
ggatacaagaccctcctgaaaggaatttccgggaagttcaatagtggtgagttggtggccattatgggtccttccggggccgggaagtccacgctgatgaacatcctggctggatacagggagacgggcatgaagggggccgtcctcatcaacggcctgccccgggacctgcgctgcttccggaaggtgtcctgctacatcatgcaggatgacatgctgctgccgcatctcactgtgcaggaggccatgatggtcaaggagatactgacagcgctgggcttgctgtcttgcgccaacacgcggaccgggagcctgtcaggtggtcagcgcaagcgcctggcatcgngctggactggtgaacaaccg

SEQ ID NO: 39325 - DNA, 358 bp, Homo sapiens
  misc_feature (1)...(358): n = a,t,c or g
attcctagctcaggtgactctgtttggaggccttcttatgaggagatgggggagttggctgaggcacttcccaggtacctccactgaggcttccttttggaggctttgactaaggtatttctgtcttatctgactcagtacttttctgcttctagcccttcctcctcttcctccccgtgggcccctgggttcatgaagatgcagagaggcagcagccttcttcagggcttctcagcagtgagacagtgtgccccaccccgacaacccagcagtgcatatttatctcaccctttcctagggaagtaatgaaacactggagaactagcacctctcattttgcccttgttatactgnggca

SEQ ID NO: 39326 - DNA, 360 bp, Homo sapiens
agcccttccatcccaagggctgttttaggaaaagcagggttggagcttgagagccaagggatgtgggcatccatagcttccacgcctcctgccctgctcctgtgcccacaccggatgccagagagtttctgtgtgtgggcagaggactgcagggcgctcacgcttgctgtgaagtaaggcgtttgaaggtgaggctaagccttgacttggtgaggatgaggaagaaggcagaggggagtaaagaggtgggattgaggcagcggttggacgatttggggtgctacagaccatgggaatcagagagggggccatgctcaatgccagaggctcactcccatggtgattgtgcccctagggtcg

SEQ ID NO: 39327 - DNA, 349 bp, Homo sapiens
ctgctccccaatattctctccgatctccaattatctccttggtccctaataatctctctggtctccaatcatctttctgattccaatattctctctggtccccaatattctctctggtccccaataatctccctgctccccaatattctctctgatctccaataatatctctgatcccaatattctctctggttcccaataatctctctggtccccaatcatctttctgattcccagtaatctctctggtcccaatattctctctggtccccagtcatctccttggtctccaatattctctccaatttctaatattgtctctaatccccaattatcttcttggtcccag

SEQ ID NO: 39328 - DNA, 329 bp, Homo sapiens
  misc_feature (1)...(329): n = a,t,c or g
nnnnnnnnnnnnnnnnnnnnnnnnnnnnnnnnnnnnnnnnnnnnnnnnnnctagactatagggaaatgatgtataaatatgaaaagaagaatggggtctgggcatggcacgacacnnnnnnnnnnnnnnnnnnnnnnnnnnnnnnnnnnnnnnnnnnnnnnnnnnnnnnnnnnnnnnnnnnnnnnnnntcacactactgaaactctggnnnnnnnnnnnnnnnnnnnnnnnnnnnnnnnnnnnnnnnnnnnnnnnnnnnnnnncaggatacttggnaggntggggcanaaggatnccttagcccaggagttggatggtgnnaatgagct

SEQ ID NO: 39329 - DNA, 335 bp, Homo sapiens
tgcctttatatttgttggtatagttcctttattattatatctagtgtattcttttattttcaaaactgttttctttctgaatactgtattccccatctctatcccatgtgggcagcccccaaaaggcaacatatcttcttctctttcagaaacttcagcatcttcatgaagcatgaatgctgaagcacatacaacttcaactatcacctccatgtgaatgactgaaaactgggtttctgctttatctttcctaatttccagtacatattcaataatctggtggccactttcacccagacatgctgctgcatctcaactcagcttgttctaaagac

SEQ ID NO: 39330 - DNA, 331 bp, Homo sapiens
  misc_feature (1)...(331): n = a,t,c or g
atcacactgtcttccaggctagtacnnnnnnnnnnnnnnnnnnnnnnnnnnnnnnnnnnnnnnnnnnnnnnnnnnnnnnnnnnnnnnnnnnnnnnnnnnnnnnnnnnnnnnnnnnnnnnnnnnnnnnnnnnnnnnnnnnnnnnnnnnnnnnnnnnnnnnnnnnnnnnnnnnnnnnnnnnnnnnnnnnnnnnnnnnnnnnnnnnnnnnnnnnnnnnnnnnnnnnnnnnnnnnnnnnnnnnnnnnnnnnnnnnnnnnnnnnnnnnnnnnnnnnntttttctccacccctgacaccatctccttccccaggctggtctcgtgctcctggactca

SEQ ID NO: 39331 - DNA, 334 bp, Homo sapiens
  misc_feature (1)...(334): n = a,t,c or g
nnnnnnnnnnnnnnnnnnnnnnnnnnnnnnnnnnnnnnnnnnnnnnnnnnnnnnnnnnnnnnnnnnnnnnnnnnnnnnnnnnnnnnnnnnnnnnnnnnnnncagtttgggtcaataatttgcgtttacagtactagtttatgtacttatttgtcactttgtaatttttagggagttgcttttcaactgtaatctgtttttattaaactatttgaaatgagctttgtattcagtcactagttgtgtttctcccttccaagtactaaccaggctcaaccctgcttctgagatcagacaaaatcaggagcgttcagggtggtttgggtgtaacacta

SEQ ID NO: 39332 - DNA, 329 bp, Homo sapiens
taatgatgaagtattgaaagcagtgcctctgcagaactattttttaggcaggagcaaagcaaacgagaatgtttggaggcatctagtttctaggaaaatgaatggagcccaattcttttttttcttttattttgctgctttttctcactggaaaatagagcccaattttatagtccgttcttctccagaaattgaattatggtgatgagtacttgtttctggattgtttggcctaggatgaactattgacaaataccttgttaacctgaattgtatgcacttgaatatgggcttttaaatgttgtctccagttgtggaggatcctgtcc

SEQ ID NO: 39333 - DNA, 425 bp, Homo sapiens
  misc_feature (1)...(425): n = a,t,c or g
atttgaanccgnnnnnnnnnnnnnnnnnnnnnnnnnnnnnnnnnnnnnnnnnnnnnnnnnnnnnnnnnnnnntctcgaggatccgaattccnnnnnnnnnnnnnnnnnnnnnnnnnnnnnnnnnnnnnnnnnnnnnnnnnnnnnnnnnnnnnnnnnnnnnnnnnnnnnnnnnnnnnnnnnnnnnnnnnnnnnnnnnnnnnnnnnnnnnnnnnnnnnnnnnnnnnnnnnnnnnnnnnnnnnnnnnnnnnnnnnnnnnnnnnnnnnnnnnnnnnnnnnnnnnnnnnnnnnnnnnnnnnnnnnnnnnnnnnnnnnnnnnnnnnnnnnnnnnnatagaaanctnntncaccantgaanannngntntggntctgantnccgcaaaancanaaggtncactttatanntgtnctncnatcttgnncatag

SEQ ID NO: 39334 - DNA, 337 bp, Homo sapiens
  misc_feature (1)...(337): n = a,t,c or g
nnnnnnnnnnnnnnnnnnnnnnnnnnnnnnnnnnnnnnnnnnnnnnnnnnnnnnnnnnnnnnnnnnnnnnnnnnnnnnnnnnnnnnnnnnnnnnnnnttacaattttatacttcaaaaacatagaacaacatagcaactttaagatgaaatttcaaacattaaagaattacattaaggccnnnnnnnnnnnnnnnnnnnnnnnnnnnnnnnnnnnnnnnnnnnnnnnnnnnnnnnnnnnnnnnnnnnnnnnnnnnnnnnnnnnnnnnnnnnnnnnnnnnnnnnnnnnnnnnnnnnnnnnnnnnnnnnnnnnntttttttttaaagaaaagaatttta

SEQ ID NO: 39335 - DNA, 327 bp, Homo sapiens
caagctttgggtctagagtaggggatgaggcaatggaatgtcagtaaagacttcacagaagatgtatgagttgactcttacaggataaggtttcctacactgacttacaaaggcaggacctaccttctagaaggaggcatgaagacatgacaagcaatacatagttcagcatagtttgagagcatattgtttgtgaggaagcagaagaaatgagagtggagatgccacagtgcctggcacacaatggatgccacctaaacattgttgactgaatggaagatgaagaggctgagatcagcttgtggggattttattttataaaaagga

SEQ ID NO: 39336 - DNA, 325 bp, Homo sapiens
caactgtgttcactagcaacctcaaacagacaccatggtgcacctgactcctgaggagaagtctgccgttactgccctgtggggcaaggtgaacgtggatgaagttggtggtgaggccctgggcaggctgctggtggtctacccttggacccagaggttctttgagtcctttggggatctgtccactcctgatgctgttatgggcaaccctaaggtgaaggctcatggcaagaaagtgctcggtgcctttagtgatggcctggctcacctggacaacctcaagggcacctttgccacactgagtgagctgcactgtgacaagctg

SEQ ID NO: 39337 - DNA, 366 bp, Homo sapiens
  misc_feature (1)...(366): n = a,t,c or g
gcagtttcttcatagtgtcaatggtcnnnnnnnnnnnnnnnnnnnnnnnnnnnnnnnnnnnnnnnnnnnnnnnnnnnnnnnnnnnnnnnnnnnnnnnnnnnnnnnnnnnnnnnnnnnnnnnngatttggtacagctgattttgcactataacagcagagttgaagagttgtgacagagaccacatggcctgcagggcctaaaatatctactatctggctcttcacagaaaaactttgcctccctccttgtctatgagctgagggcataatcatgtaagccttaacactaacattcaagtcaccaaacatacatatgcctggcacatactacacaaatatttacactgttgaattatctgcttgagg

SEQ ID NO: 39338 - DNA, 358 bp, Homo sapiens
cagaatgcaaattttaattttcaggaaaaatattaggtgtatgttcttagttacgctctcagatatgtagttgcaggagaagtactttaattctgcttaaactgagcagtttggtccactgactagtataactagttattctccactttcctcaggcacgttttcttccatgttttttacagtattctaaaatttcaggcatttgagaacaatctgtcctgtttttgcctgtttgcctttgaccctagtagagggtcactaaaattaactgtcagattgtaaagaatcctcgttaaagcaatgatcagaaccagcagtttaaagggcccagttaagggagaagtctgccttcaacttg

SEQ ID NO: 39339 - DNA, 359 bp, Homo sapiens
  misc_feature (1)...(359): n = a,t,c or g
aannnnnnnnnnnnnnnnnnnnnnnnnnnnnnnnnnnnnnnnnnnnntttctaacaggcatagtgactgctgcttttgtggtgatatttatgttgatctgaatttttgaatagttctggttttgtgcaattttactgaatgtgagtcaatgaatgtataattaaatgtgatttaatattaggatttaataaaatgcttcacaatgaaataattattttctagatattgtgaccacatttttggtttatttctataaaagaaaatccttccagtccctgccgtctgtatagtgactagcctggaaggatctcccctactgcaacccccagaggatcaaaagataccactctatgtntttg

SEQ ID NO: 39340 - DNA, 366 bp, Homo sapiens
  misc_feature (1)...(366): n = a,t,c or g
gttaaatcacttctgtttttagctcatgcatgccacattgtatcctagtgacccttctctgctggaggtccctgaaaacacagcccaaaatcttgtcaatgtgccccccaccagtgtaagcagaaagcctggcagggcaggtattcagcaaacgttctcctaacagagcagattaatcaattagcaactggaattctgatagccccaacataaggcagatacgtctttaaaatcaagaactgcttgtccctgaattaaaacatttttatttaaatttttatttttggagacagggtcttgctgtatnnnnnnnnnnnnnnnnnnnnnnnnnnnnnnnnnnnnnnnnnnnnnnnnnnnnnnnnnngc

SEQ ID NO: 39341 - DNA, 326 bp, Homo sapiens
  misc_feature (1)...(326): n = a,t,c or g
gatgatttgcttattcattcatttgtttatttattaagcacattattgaaatgcccattatgtgccaggcataataatatagtaagtaaaatagatggcattcctaacctcagtgttactctaattgcatagacaggaatgctggggaaagaatttatctttcagccagctattctcctgcctgggacccagctttagctagtcttggctctacaaaggaagttgtaacctaattggaacataatttcttctccgtaaaaactgagggttacaccaaatactttcaccacttctacctctaaaattcttgcttttaatgngaattt

SEQ ID NO: 39342 - DNA, 350 bp, Homo sapiens
cccggacggagggccggcgaggtgcggggtctggtgatgcgagctgcgcctctcggcaagatttcgcgctgcccatcccgggccctttcatcagtaatcggtagtggatcactctgccaagcggcaggaagaattaaggaaacgacaaggagacgctcggctctctcccgcttggctccttgcggcctcctcttcccttcgctccggcccggtgaaactgaacttataatcgtcactggattgtaagtacccgaggcgaagagagctcgctgagccctgattttttgagtgtctttgttccgggagagtttgtgagttgaaagtatctctgctgggctttctggccgaaa

SEQ ID NO: 39343 - DNA, 351 bp, Homo sapiens
  misc_feature (1)...(351): n = a,t,c or g
gtcaaattcacactcctttttagagagacttccctccaaaggagtagcagctacggttacacacccagattaaagctcaaacctctgtactatcctttgggttttataaggaaaaaaaatgctcaagtgttttttttttccttgaaatttttaaaaacttgtaaaatcaaaaataaaacaactgatgggtcagtaaggtccaaagagaagacaaaaatgagcaagcttgctgattcgagtattagagacaccaaagaaccagagaaggaaaaaaagcaccaaaggggaattaagtgaagaaaaaaagacatcctcntgccccaanaatcctcaccctgaaggtcaanaatg

SEQ ID NO: 39344 - DNA, 367 bp, Homo sapiens
  misc_feature (1)...(367): n = a,t,c or g
ctgttccatcagatttgtaagaagaaagaaaaagaaaaggaggtgtcagatatacatgcttgaaggaaaggcaggagggtggggaagagggagtacttttgtatacaaagacacaactagtgaatatggtgaatggtgaaatgtgctgccaattggaaagtgactatatttgaacactaaatgaggtcgacgcggccgcgaattccnnnnnnnnnnnnnnnnnnnnnnnnnnnnnnnnnnnnnnnnnnnnnnnnnnnnnnnnnnnnnnnnnnnnnnnnnnnnnnnnnnnnnnnnnnnnnnnnnnnnnnnnnnnnnnnnnnnnnnnnnnnnnnnnnnnnnnnnccatgtaacctctgatctatagaag

SEQ ID NO: 39345 - DNA, 357 bp, Homo sapiens
  misc_feature (1)...(357): n = a,t,c or g
taggtatagagcttttgttttacaagatgaaaagagttctggaaatggaaggtgatgatcattgtacaatattagaaatatatttaatacctgaactgtacatttaaaaatggttgagatnnnnnnnnnnnnnnnnnnnnnnnnnnnnnnnnnnnnnnnnnnnnnnnnnnnnnnnnnnnnnnnnnnnnnnnnnnnnnnnnnnnnnnnnnnnnnnnnnnnnnnnnnnnnnnnnnnnnnnnnnnnnnnnnnnnnnnnnnnnnnnnnnnnnnnnnnnnnnnnnnnnnnnnnnnnnnnnnnnnnnnnnnnnnnnnnnnnnnnnnnnnnnnnnnnnnnnnnnnnnnnnnnnnnnnnnnnnnn

SEQ ID NO: 39346 - DNA, 352 bp, Homo sapiens
  misc_feature (1)...(352): n = a,t,c or g
nnnnnnnnnnnnnnnnnnnnnnnnnnnnnnnnnnnnnnnnnnnnnnnnnnnnnnnnnnnnnnnnnnnnnnnnnnnnnnnnnnnnnnnnnnnnnnnnnnnnnnnnnnnnnnnnnnnnnnnnnnnnnnnnnnnnnnnnnnnnnnnnnnnnnnnnnnnnacaaatgtatctttagaataaatttcaataagtgctggagaaacagatgaatatgtttgtaattttggtagatgttgcccagttactctttctataacacaattgtgccagcttatgtttctgtaaaacataatgacaaccctttttcccataacctggccagcagagtgttatcaacttggatatttgccagtat

SEQ ID NO: 39347 - DNA, 347 bp, Homo sapiens
  misc_feature (1)...(347): n = a,t,c or g
ctgatacagagagacaacttgctcctttccatcagctttataataaactgtttaacgtgaggtttcagtagctccttggttttgcctctttaaattatgacgtgcacaaaccttcttttcaatgcaatgcatctgaaagttttgatacttgtaacttttttttttttgggtggnantggttaaaaantnnggnnttantttttggaannttttggnnnntggccntngggnnncnnnanngccccnngngggnaacccnnngtnanncaaaaggggggnttntaaangnccaanttttnaaanaaanggtttggaantnnanggggaaannaangncanccngcccg

SEQ ID NO: 39348 - DNA, 349 bp, Homo sapiens
aataaataaaaataaaaaaataggaaatacagatacaccactgtgaaagaggtgttccaacattaattactgacgaggtagacagtggaaaacttggagaacactccatgaagagcacccacctgctacactatttagaaccagctggcacaaggggccacctttgaagataggcaaactctctcccttctgcccaaaattcaagaaatgttgtggtgaagagagacagtggagacagaaatgaaattaaatctgatgggcctgggttcaaatccagttcaaccacttactagctgtgtgactttggcaaacttatttcccttctctgagctccaggctagtgagtaac

SEQ ID NO: 39349 - DNA, 346 bp, Homo sapiens
  misc_feature (1)...(346): n = a,t,c or g
ccctgggccatcagcacaatggttccacttccctcctctcctggggccactgacatgctgcatgatgttgggagccgaaacactcacttcctcttaaatgtttcctcttccttcttcctggttagctgcacagagtgaagtttatcctctaaatcctttaccctgaaaagaaacaaaaaaaaagtcattgagtctcgtttgagttgtgttaggacattctcactgttttactgcttcttgaattttcatttttcttctccctcccaatcctgataaaacagcagtatgtacccctaatgcctcagngtcttctaattatcacctcattttgaactcatttttatca

SEQ ID NO: 39350 - DNA, 352 bp, Homo sapiens
  misc_feature (1)...(352): n = a,t,c or g
cttaagtgtcttgtaccttaagaacacagaggacactgtctgaaccagaattctggccctcaccagacactgaacctgtaaggactttcatcctgggacttcactgcctccagaactgatacccaannnnnnnnnnnnnnnnnnnnnnnnnnnnnnnnnnnnnnnnnnnnnnnnnnnnnnnnnnnnnnnnnnnnnnnnnnnnnnnnnnnnnnnnnnnnnnnnnnnnnnnnnnnnnnnnnnnnnnnnnnnnnnnnnnnnnnnnnnnnnnnnnnnnnnnnnnnnnnnnnnnnnnnnnnnnnnnnnnnnnnnnnaaaggnagtntngttcngtccccnaggntgnagngnagggc

SEQ ID NO: 39351 - DNA, 347 bp, Homo sapiens
  misc_feature (1)...(347): n = a,t,c or g
tttttgttttgttttgtgtggtttttctttgttttttttttgtttgttttcttttttttctttttgagctaatattctcctgggatttcaaaaatataacctcaggatatcttttctcccttaccttccatacttgttactatgttaatgttggtggggtgacttacttggtgctgaagtgttggggtgacaagggcagggnaagtntntgngtccntancggngaatccatccaanaggcttcaanatggctgtcantntnatccacanagcttcattnaggcttgatgantcaggctntntgctggttccctgccatacctgaaggcacanaantcattccattg

SEQ ID NO: 39352 - DNA, 131 bp, Homo sapiens
ctcaagtagtttgtttcacttccaatgtttgggatactgaaactttcagggaagaatttacagaatcattgtataattgaattgattacaaaagacatgtacacatttatttgaagctttttttttttttt

SEQ ID NO: 39353 - DNA, 335 bp, Homo sapiens
ctacactctgcagggcctgctgggctgtgaactgggccctgacaacacctcggtgcccaccgccaagttcgccctgaacggcgaggagttcatgaatttcgacctcaagcagggcacctggggtggggactggcccgaggccctggctatcagtcagcggtggcagcagcaggacaaggcggccaacaaggagctcaccttcctgctattctcctgcccgcaccgcctgcgggagcacctggagaggggccgcggaaacctggagtggaaggagcccccctccatgcgcctgaaggcccgacccagcagccctggcttttccgtgcttacctgca

SEQ ID NO: 39354 - DNA, 342 bp, Homo sapiens
cacaggtgtcgtgaaaactacccctaaaagccaaaatgggaaaggaaaagactcatatcaacattgtcgtcattggacacgtagattcgggcaagtccaccactactggccatctgatctataaatgcggtggcatcgacaaaagaaccattgaaaaatttgagaaggaggctgctgagatgggaaagggctccttcaagtatgcctgggtcttggataaactgaaagctgagcgtgaacgtggtatcaccattgatatctccttgtggaaatttgagaccagcaagtactatgtgactatcattgatgccccaggacacagagactttatcaaaaacatga

SEQ ID NO: 39355 - DNA, 337 bp, Homo sapiens
atttataatcactccaaaaaattaaaatacttacatataaagcaaataacaggtataggatttacatgctgaaaattacagagtgctaatgaaagaaatcaaggaagatttaaatagacatatcaggtgaatggattagaagactcaatattatagatatcaattctccccaaatttatctaaaagtttaaatacaattcctatcaaaattgcagtaaagttttttgcagatatagacaagtatattctaaaatgcatacataaaggcaaatgatctagaatagctaaacaattttctaaaagaataaaggaaaaatcactgttcaatgttaactta

SEQ ID NO: 39356 - DNA, 344 bp, Homo sapiens
  misc_feature (1)...(344): n = a,t,c or g
ctccttgccatgcctctaatcctgcctgcctttctctggaagtaatataatgcaagagcccactagtgaagagaaagcctaagaaggaagttttaggcccttccaagcccacaaaatgcaaaccttttaacagtgacattttaatttccatcacagtacacactacctatgtatcttctagaacagtaactgcatatttgcctaggatttcctgaaattaacgttacaggaagcctccaacttgcaaaagagttgggtcccaaaagttcacttctaagctaagtatctgtaactctgaatatgtttttacccaaaatcaatggttcatatggaatttangtttt

SEQ ID NO: 39357 - DNA, 328 bp, Homo sapiens
ggatttcattgtcctgatctgtgaggtggctgctttctagctcactgggctcatacatttcaaagatgctcctacggctcacacgcttcttggtggtcttcttggggcgcactcggatttcaccctcagccttatcatcctcatactcatactcttcctccagttcttcatcatactcattgtatttctcaaattcatcatagtcaaagtccacaccgaagatttcctgggcttcttgcagggccgcgtctgtgtatccaggaagctttttccgccacttaggttttttcagaggctgtccatcatcatccacaatgaagtcgtcaat

SEQ ID NO: 39358 - DNA, 333 bp, Homo sapiens
  misc_feature (1)...(333): n = a,t,c or g
agataatgaaattatactgcatatatgtctctgtgacatgcttctgccagtcacttttacgtttgtgatactcaccatgccaataagtgtaataatagtagttcatttcttttcactattctgatataaaataattatcctttccactgttgaaggacatcagagtttccagtttgtggtttctctaaagaagtgctgttgggaacattgctgttcttctctcctggtgctgtgtgcaaacatttcttacccttggatgnnnnnnnnnnnnnnnnnnnnnnnnnnnnnnnnnnnnnnnnnnnnnnnnnnnnnnnnnnnnnnnnnnnnnnnnnn

SEQ ID NO: 39359 - DNA, 129 bp, Homo sapiens
aaaatttcttaatattcatccattcttgggtggcataaattcacttagttgtgatgtacactactgttcttttaatttattgttgaatcctatgcactaatattttgatctccaatttttttttttttt

SEQ ID NO: 39360 - DNA, 324 bp, Homo sapiens
  misc_feature (1)...(324): n = a,t,c or g
ctcccgagtagctggaaccacaggcgcgttgannnnnnnnnnnnnnnnnnnnnnnnnnnnnnnnnnnnnnnnnnnnnnnnnnnnnnnnnnnnnnnnnnnnnnnnnnnnnnnnnnnnnnnnnnnnnnnnnnnnnnnnnnnnnnnnnnnnnnnnnnnnnnnnnnnnnnnnnnnnnnnnnnnnnngtgcaaaatttttaataggaatttttacgtctttttataaagtctatctaaaagtagtccaaaattttactttacatttataattgctttaattctagtcttttaaatcttgttcactgaaaccacttaggtgtaatgctat

SEQ ID NO: 39361 - DNA, 330 bp, Homo sapiens
tttacttttcatgagcatcggtccatgctactagaagttctttgttatcattttaatggctctttgtcagtatctggtaccatactatgccataaatctcactggttgcagttgaataaagaagtttatgaaggctcccccctactctggaagaggcttcctcacagcacactcatgtccttaggtatcactgggggcaggtagcatcgatctccttgtcccatttcttcccactcctcttaaaaacacagagtatagtttttctgtatctgtaccatcagatgccactgagatctggccatgatgttccgttaggctgtagacctgagc

SEQ ID NO: 39362 - DNA, 331 bp, Homo sapiens
tgccactgcactccagctgggtgacagagcttgactctcaaaagaaagttgtcaagttgagataatgaaacaaaatgaactcagaaaaggagacctacataaggaagcttgatgtgacagaagtggttttgttgtgagaactaaaaggactgtttgattgataatattgaaacaattagctattaatttttttaaaaaaaattggactcctataaatcacataaaaataaattctaggtggattaaaatcaaaaggtgaaaaagtcataaagcttccaaaagttaatactaaaaatgtcttcacgacttcaaaacagggaggatttaagag

SEQ ID NO: 39363 - DNA, 321 bp, Homo sapiens
  misc_feature (1)...(321): n = a,t,c or g
ctgaataatgctctcacccacccaatgatatccacgttctaatgcccaaaatgtgagtatgttatgttacatagggttgccaatggaattaaagttgctaatcagttgatttttaagtagggagatcattctgtattatctatgtaggcccaaaataatcataagggtccttaaaagtagaaggagagaggaccatagagatggcagcttgagaaggactgtgctcaatgatgcccactttttttttttttgnaaagggnnnnnnnttttnnccccnggnnaaaatnccaaggcnngggnttggnttaanggaannncccc

SEQ ID NO: 39364 - DNA, 429 bp, Homo sapiens
  misc_feature (1)...(429): n = a,t,c or g
ttgaanagnattnnnnnnnnnnnnnnnnnnnnnnnnnnnnnnnnnnnnnnnnnnnnnnnnnnnnnnnnnntctcgaggatccgaattccnnnnnnnnnnnnnnnnnnnnnnnnnnnnnnnnnnnnnnnnnnnnnnnnnnnnnnnnnnnnnnnnnnnnnnnnnnnnnnnnnnnnnnnnnnnnnnnnnnnnnnnnnnnnnnnnnnnnnnnnnnnnnnnnnnnnnnnnnnnnnnnnnnnnnnnnnnnnnnnnnnnnnnnnnnnnnnnnnnnnnnnnnnnnnnnnnnnnnnnnnnnnnnnnnnnnnnnnnnnnnnnnnnnnnnnnnnnnnnnnnnnnnnnnnnnnnnnnnnnnnnnnnnnnnnnnnngagtctgngaacaaataanggtcagaccaactaacaagtgnccaggatnatggcataatacgtgat

SEQ ID NO: 39365 - DNA, 319 bp, Homo sapiens
cgatagttgaatgcatggaggttcctgcagggtggaagctctgttccccttccctgacacctggccctgtggatcttttcatctctaggtgaggcactgtccaatggatagcctaaagaacctgattcatctttaaccaagctgaattgcttcaagttcctagagctgaagaatcgtggcacacctgtataataccaaattattcttttaaggaaatcaacatatcactaaaaatgcatagaaaaaaatctgttagtgggacttcagaccattaatttttttcaagatataatgaaaaaggcaacttatcaagagtgca

SEQ ID NO: 39366 - DNA, 327 bp, Homo sapiens
  misc_feature (1)...(327): n = a,t,c or g
gcaacctcaaacagacaccatggtgcacctgactcctgaggagaagtctgccgttactgccctgtggggcaaggtgaacgtggatgaagttggtggtgaggccctgggcaggctgctggtggtctacccttggacccagaggttctttgagtcctttggggatctgtccactcctgatgctgttatgggcaaccctaaggtgaaggctcatggcaagaaagtgctcggtgcctttagtgatggcctggctcacctggacaacctcaagggcacctttgccacactgagtgagctgcactgtgacaagctgcacgtggatcntgagaa

SEQ ID NO: 39367 - DNA, 332 bp, Homo sapiens
  misc_feature (1)...(332): n = a,t,c or g
caaaaacaaaaaaaaacacatggatgtacaaacatctgttcgagtccctgcttttagnnnnnnnnnnnnnnnnnnnnnnnnnnnnnnnnnnnnnnnnnnnnnnnnnnnnnnnnnnnnnnnnnnnnnnnnnnnnnnnnnnnnnnnnnnnnnnactgcatcattttatattcccaccancaatgcacaagggcttcaatttctttacattctgctttttggtgacctccataattctaaattatatgtatatgctgtttcttcttaattcttttattaataaaaaagacaacataattctttgcctctccagtgtgaaaaaatgggaatttacc

SEQ ID NO: 39368 - DNA, 411 bp, Homo sapiens
  misc_feature (1)...(411): n = a,t,c or g
agttngatggcnnnnnnnnnnnnnnnnnnnnnnnnnnnnnnnnnnnnnnnnnnnnnnnnnnnnnntctcgaggatccgaattccnnnnnnnnnnnnnnnnnnnnnnnnnnnnnnnnnnnnnnnnnnnnnnnnnnnnnnnnnnnnnnnnnnnnnnnnnnnnnnnnnnnnnnnnnnnnnnnnnnnnnnnnnnnnnnnnnnnnnnnnnnnnnnnnnnnnnnnnnnnnnnnnnnnnnnnnnnnnnnnnnnnnnnnnnnnnnnnnnnnnnnnnnnnnnnnnnnnnnnnnnnnnnnnnnnnnnnnnnnnnnnnnnnnnnnnnnnnnnnnnnnnnnnnnnnnnnnnnnnnnnnnnnnnnnnnnnnttncttaattcttttattantatnnnnanacncntanttntttgcctcntcca

SEQ ID NO: 39369 - DNA, 358 bp, Homo sapiens
  misc_feature (1)...(358): n = a,t,c or g
cttttcaaaaagtatcttttttgtcacatccaggtcatgataaaacgtgtaagtttttcttcctatattgtataaaaagtaaactggcaaccttactttttgaagaagggggaaaggaaagtatgaattagggacaggaaaagaggaaggctctaaattcagaaatataggcccatataaaaccacaagatagaaacatccagagaaagttcaaagaccttttttctagtaaagttaatcctttcataaagtaggtttttatttttacttttagaaatgagatctccctatgttgccccagnnnnnnnnnnnnnnnnnnnnnnnnnnnnnnnnnnnnnnnnnnnnnnnnnnnnnnnnn

SEQ ID NO: 39370 - DNA, 346 bp, Homo sapiens
  misc_feature (1)...(346): n = a,t,c or g
cacgcaatgacacctaagtcatgaacccacacctttggctttaaatcttgaaacaaatcaagaaaccttttgttaaccaaaccagaaaagttccagcttactgggagacttctcaaatttgtcatttttccatgaattcagattgtgctgtttaagaccttcctggtccacgaattcagtttgtgctgtttaagacctggttatttcccatgaccncacatgcttncaatctttcnttgaagtagtgcacatgttccttcccagagctagnttctatttncccatctnatntaagnccatatacatagaattgcnttcnttganaccatttcgtacttttataaat

SEQ ID NO: 39371 - DNA, 363 bp, Homo sapiens
tgaccatcagctacagaactttgcagcagctacaactgacccattctggcttcacattcctaatatgcatctctgcatattattcataaaatacattctgaatccaaaaattagatgaaatcatgggcaactcaggagtcctaatcttcctactcatctaccttttgcactagcaggaaaaaaatgggaggaagggaataggatatatctaataatttccaaagcatcattcccataggaatgagtagggaagatgggacctcagttatcagatccatataccaattatgtcaagaggcaaaagaaaactgtcagtaccaaagctaagaagtctcagtactccttaatgacaaactgtccttg

SEQ ID NO: 39372 - DNA, 365 bp, Homo sapiens
  misc_feature (1)...(365): n = a,t,c or g
cggagtcggacgcaggcagaccatgtggaccctggtgagctgggtggccttaacagcagggctggtggctggaacgcggtgcccagatggtcagttctgccctgtggcctgctgcctggaccccggaggagccagctacagctgctgccgtccccttctggacaaatggcccacaacactgagcaggcatctgggtggcccctgccaggttgatgcccactgctctgccggccactcctgcatctttaccgtctcagggacttccagttgctgccccttcccagaggccgtgggcagcagtgatggcgtcgacgcggccgcgaattccnnnnnnnnnnnnnnnnnnnnnnnnnnnnnnnnnnnnn

SEQ ID NO: 39373 - DNA, 364 bp, Homo sapiens
  misc_feature (1)...(364): n = a,t,c or g
ggtcannnnnnnnnnnnnnnnnnnnnnnnnnnnnnnnnnnnnnnncccgaaatatatttattccatgaataacaaacaactcctagatccttgcttctcaaagtgtggtcttcagatatgcagcatcagcagcatcgggaggtttgttagaaacagaatctcagccttctgcggccggcaccgcctcggctgcggttccttccctcgaagcccagaccccagctgccttcaggccgaccccgcctggactcgcgccctcctctccgccagctccaggccctccggcgcccacgggaaaagtttgcgggaggcattttttgcgttcggagtcgagcgcttctgggccactccgggccctactcac

SEQ ID NO: 39374 - DNA, 357 bp, Homo sapiens
  misc_feature (1)...(357): n = a,t,c or g
gttttaaggaaccctataatgtaaaaagcaggttgttttgtatttttaagttgtgagggagttgcaagtcaactagtacattttagttatcaccagcatccgcctccagtgacagaaggcaggaaaattaagggagtggaaaggactagctgtttcttcaaactcataggaaggggtaattagaggtaaaatgcacatttggtttaatagaggtttattttaaagtttgtgagacattatgttagattttgtattttgttaggtttgccttaaattttgaggtcatcttgtatttataacagtaaatcataaactgtttatgtagttacctcttanaatacatgtatcattattatt

SEQ ID NO: 39375 - DNA, 331 bp, Homo sapiens
  misc_feature (1)...(331): n = a,t,c or g
ctgacttcctttgggtctttatatgaatgccaccttctcagtgaggtcttccctggccatcctttaaaaagaaaatacaacccctcacccccaaatgcccagcatttcttagatttcttctctactttactttcttgttagtacttatcaccatctcacatattacatattacactatctatacatattatatattatattatctatacatattatatatattcctacccccatccttcagaataagtgatcccagagggccatgactnnnnnnnnnnnnnnnnnnnnnnnnnnnnnnnnnnnnnnnnnnnnnnnnnnnnnnnnnnnnnnn

SEQ ID NO: 39376 - DNA, 462 bp, Homo sapiens
  misc_feature (1)...(462): n = a,t,c or g
tttgantgcctnttgnanggnnnnnnnnnnnnnnnnnnnnnnnnnnnnnnnnnnnnnnnnnnnnnnnnnnnnnnnnnnnnnnnntctcgaggatccnnnnnnnnnnnnnnnnnnnnnnnnnnnnnnnnnnnnnnnnnnnnnnnnnnnnnnnnnnnnnnnnnnnnnnnnnnnnnnnnnnnnnnnnnnnnnnnnnnnnnnnnnnnnnnnnnnnnnnnnnnnnnnnnnnnnnnnnnnnnnnnnnnnnnnnnnnnnnnnnnnnnnnnnnnnnnnnnnnnnnnnnnnnnnnnnnnnnnnnnnnnnnnnnnnnnnnnnnnnnnnnnnnnnnnnnnnnnnnnnnnnnnnnnnnnnnnnnnnnnnnnnnnnnnnnnnncaatctctttacttaaaaaaattgtggtaagaacactttatgtgagatctaccctcttatcagatttttgagtgtacnatacattattggtg

SEQ ID NO: 39377 - DNA, 329 bp, Homo sapiens
  misc_feature (1)...(329): n = a,t,c or g
tatggataataaaagaacctctatcattgccatgagggctacatgatataacacatataaagttcttggactcatctcctggaactcagtacatactcaataaacgtaagctgctattatgatcattatcattttattattgctatctctaccaccaatattggttgtagaaatggagatgtatgtaaaaggacttgttangctagncccggnggttnatgcnnngnantcccancactttnagagngccgagncngncgtatnangatntcagagncatggagncnacctgncttcacgtngtnnantnnngangtacannancctta

SEQ ID NO: 39378 - DNA, 329 bp, Homo sapiens
ctgtattcccagctattgctcaggagatttgtcaggaagaggtatccaggccagctgggaaggacatgatgaggaaattggaaaaacatatgactgcagagaagggccccatgattgtgttggtattggacgagatggatcaactggacagcaaaggccaggatgtattgtacacgctatttgaatggccatggctaagcaattctcacttggtgctgattggtattgctaataccctggatctcacagatagaattctacctaggcttcaagctagagaaaaatgtaagccacagctgttgaacttcccaccttataccagaaatcat

SEQ ID NO: 39379 - DNA, 328 bp, Homo sapiens
  misc_feature (1)...(328): n = a,t,c or g
tttgacttgacccatggagacttggaggccacagaatgagagagatatctgggagacagggcagggggcagtctcatcccaataggacttcattcattcattcattcattcaacaagtatgtattgaccaggctttctgtccaacactgataccttaaatcctctcaaggtcacagatgacatttcctgaggcatctcggcgcattttttctctttgttcgctcctgtacttgtttcagagaccccacacaagggtcattatggaatccatttggttatttgttgntgnnnnnnnnnnnnnnnnnnnnnnnnnnnnnnnntggagtgc

SEQ ID NO: 39380 - DNA, 404 bp, Homo sapiens
  misc_feature (1)...(404): n = a,t,c or g
ttggangccgatttgaanggncnnnnnnnnnnnnnnnnnnnnnnnnnnnnnnnnnnnnnnnnnnnnnnnnnnnnnnnnnnnnntctcgaggatccgaattccnnnnnnnnnnnnnnnnnnnnnnnnnnnnnnnnnnnnnnnnnnnnnnnnnnnnnnnnnnnnnnnnnnnnnnnnnnnnnnnnnnnnnnnnnnnnnnnnnnnnnnnnnnnnnnnnnnnnnnnnnnnnnnnnnnnnnnnnnnnnnnnnnnnnnnnnnnnnnnnnnnnnnnnnnnnnnnnnnnnnnnnnnnnnnnnnnnnnnnnnnnnnnnnnnnnnnnnnnnnnnnnnnnnnnnnnnnnnnnnnnnnnntctnntanacnggtnttntnaaggntnnnngggngttaaatctgtttngnaacgtga

SEQ ID NO: 39381 - DNA, 325 bp, Homo sapiens
  misc_feature (1)...(325): n = a,t,c or g
tttaaccataatctacaaaatatagtattttcatcaaggcctgagattattagggttaaaggtatctgctgctgaaaagattgttttaaaaggttcccctgtgaaaatgacgaaagtaaactgagtccttttttccatgacagtctcctacaatataacactgactaatttaaaggagccagaatgcaccttcaggagaaaatattacgacaaactttggtggaaagaagagaattgagatcatgacaaaataatgcnnnnnnnnnnnnnnnnnnnnnnnnnnnnnnnnnnnnnnnnnnnnnnnnnnnnnnnnnnnnnnaaaaaa

SEQ ID NO: 39382 - DNA, 335 bp, Homo sapiens
  misc_feature (1)...(335): n = a,t,c or g
tgnnnnnnnnnnnnnnnnnnnnnnnnnnnnnnnnnnnnnnnnnnnnnnnnnnnnnnnnnnnnnnnnnnnnnnnnnnnnnnnnnnnnnnnnnnnnnnnnnnnnnnnnnnnnnnnnnnnnnnnnnnnnnnnnnnnnnnnnnnnnnnnnnnnnnnnnnnnnnnnnnnnnnnnnnnnnnnnnngtcgacncggccgngaattncngatctatnaatcgtagatactgaataacccnnagnnnnnnnnnnnnnnnnnnnnnnnnnnnnnnnnnnnnnnnnnnnnnnnnnnnnnnnnnnnnnnnnnnnnnnnnnnnnnnnnnnnnnnnnnnnnnnnnnnnn

SEQ ID NO: 39383 - DNA, 325 bp, Homo sapiens
  misc_feature (1)...(325): n = a,t,c or g
cattcctttgcctcttcaggtctagtagtattgccaaccatgttgctgccatagctgcttttccttgcccacaccctttgtgaatgatcccatcattattaaactctccaatccacccaatttcaggataacctctgtgttttgccaagaccctgactggtgaaggtgtccagttaatgaactggcacataacatcacaaaaggtgaaagcacattcaagcattaactgcaatggaatcaaaaggagactttttgtttagtcatgtagatcccctaaattgactagctgaacatcacagaanaagaccagncagctcatccccca

SEQ ID NO: 39384 - DNA, 325 bp, Homo sapiens
  misc_feature (1)...(325): n = a,t,c or g
nnnnnnnnnnnnnnnnnnnnnnnnnnnnnnnnnnnnnnnnnnnnnnnnnnnnnnnnnnnnnnnnnnnnnnnnnnnnnnnnnnnnnnnnnnnnnnnnnnnnnnnnnnnnnnnnnnnnnnnnnnnnnnnnnnnnnnnnnnnnnnnnnnnnnnnnnnnnnnnnnnnnnnnnnnnnnnnnctgtttccctggctcttaaagaaaaaaaaangatgttcatatttactcgtagtcnggagaaaaactgatgccntttnattctcatnanactggcaaacntttaaaagactgatanctatttctcatcatttgctgatngaantatgaat

SEQ ID NO: 39385 - DNA, 355 bp, Homo sapiens
  misc_feature (1)...(355): n = a,t,c or g
cannnnnnnnnnnnnnnnnnnnnnnnnnnnnnnnnnnnnnnnnnnnnnnnnnnnnnnnnnnnnnnnnnnnnnnnnnnnnnnnagaaatttctcatcctcccaaacttgtctccgtgcaacacccactccccgttgtccctcccccagcccctggcacccaccattctcctgtctctgtggatttgcctcttctggacatctcatggattacaggcacatgccaccgcggctggctaaannnnnnnnnnnnnnnnnnnnnnnnnnnnnnnnnnnnnnnnnnnnnnnnnnnnnnnnnnncattnnnnnnnnnnnnnnnnnnnnnnnnnnnnnnnnnnnnnnnnnnnnnnnnnnnnnn

SEQ ID NO: 39386 - DNA, 358 bp, Homo sapiens
  misc_feature (1)...(358): n = a,t,c or g
nnnnnnnnnnnnnnnnnnnnnnnnnnnnnnnnnnnnnnnnnnnnnnnnnnnnnnnnnnnnnnnnnnnnnnnnnnnnnnnnnnnnnnnnnnnnnnnnnnnnnnnnnnnnnnnnnnnnnnnnnnnnnttagggggnnatagnatgatcatntactgtggcgngtangcctagnattgtggnggctatnnttnangcaancagatttttgttnattttgnttntcaggnnttnntataaattctatggttntttttttnngntnatnnntttngnngtttanttngtgtntatgttntatttgtgntttttttttttttnngttnttntnttattnanttagttgtgttnttgtnnttttt

SEQ ID NO: 39387 - DNA, 363 bp, Homo sapiens
  misc_feature (1)...(363): n = a,t,c or g
cagaatacttgcattgtgagccagaaagagaacaactgagcaatgggagaaggggctccccagagcaccaaagcacactgctggggagggtctctctccactacagagacgagcaagtgtgtgtcaattctggcctactaagagtttgccagaaagagttgggcaggaatcctcaatgatcacaaagaactacatgaggaagcaaggtggggcaagggaggcaggtactgccttagatagttaaccaccaataacagcagttaggaacacaggtgtgagtcctaactccactatgtatgacgttaaataaattatttcacctnctatagctgaatgttttcatctataaaatggntagcaaaa

SEQ ID NO: 39388 - DNA, 351 bp, Homo sapiens
  misc_feature (1)...(351): n = a,t,c or g
cagctttgcaagaattgcttttacttggcaaatgctcgtcctgacaactggttctgttatccttgtatacctaatcatgagctggattgggctaaaatgaaaggttttgggttttggccagccaaagtcatgcagaaagaagacaatcaagtcgacgttcgcttctttggccaccaccaccagagggcctggattccttctgaaaacattcaagatatcacagtcaacattcatcggctgcacgtgaagcgcagtatgggttggaaaaaggcctgngatgagctggagctgcattancgtttcctactanaagggntattttggaaatctaanaatgtggcctgaggttat

SEQ ID NO: 39389 - DNA, 355 bp, Homo sapiens
ctaaaacagtgccagcacacagtaggcattctaatattcattgaatgaataaacattcctaacttattatctgaagtattctcacttgactgaaaaacatttgcacatgacaattcagtacccttatcaaatcaccccatgcctctactaaaagtgcacaattattacatgttggaatgcaggcttgggggcttagaggagaaataaagtggaataagggactgaagtagctgaatggcaggcaaactacatttacagctaaaagtcaatattaacacaatttccattcagctccattttgctaacaagattttatatcttggataagcatacaaaggtaaaaaatagaggagat

SEQ ID NO: 39390 - DNA, 333 bp, Homo sapiens
  misc_feature (1)...(333): n = a,t,c or g
gttagttagaaaacccagaggctggaggggtgagggccctgtggcagcctgtgcgtcactgccccagtgttctctgtgatgggaggctttaatgaacaggagcgcctctgagatgccagcttggtttttcttcatttagcacagagcacggggcatactttcggtgttgcactgagtgagaagagtccccaccctnttcagtctgataacgaggtggagatgccntaagcatanatttagcggatggagggtttttgnggaacatatggntatgtnccnnatnccnngcttanttttntntngtncttntnttggnttgngtgngtntntgtt

SEQ ID NO: 39391 - DNA, 311 bp, Homo sapiens
  misc_feature (1)...(311): n = a,t,c or g
cgatatatggtttgcaaacattttgtcctattctttgtgttgtctttcactctcttgatgttgtccttggaagcacaaaagtttttagtttcgataaattcatcaatttatctttttattttttttttggccgcttgtgctcttggggtcatatctaataatccttggccaattctcaggtnntgaagacttaccttatttttnattanaantttaatngttatanctcttanatttnggtttttcggntatattgngnantttttncattnggtntnnggttgggtcnanangntngnctntntnttttt

SEQ ID NO: 39392 - DNA, 351 bp, Homo sapiens
  misc_feature (1)...(351): n = a,t,c or g
nnnnnnnnnnnnnnnnnnnnnnnnnnnnnnnnnnnnnnnnnnnnnnnnnnnnnnnnnnnnnnnnnnnnnnnnnacccatcgcacccagacattttgtacttctttaatttggagtgtctttcctttccatgcatgcctatagaatttatgattatcatttagcccaaagaagactttcgcataaattctgccgtaacccttgttggaataaatgtattcctctaagctccctctagctctatttgtatctttattataaatattaatatatctttccttgcattgctgttacatgtatgcacatcttatcttctggcaataaataagcctcgtcccttgggggaagggcta

SEQ ID NO: 39393 - DNA, 353 bp, Homo sapiens
  misc_feature (1)...(353): n = a,t,c or g
nnnnnnnnnnnnnnnnnnnnnnnnnnnnnnnnnnnnnnnnnnnnnnnnnnnnnnnnnnnnnnnnnnnnnannnnnnnnnnnnnnnnnnnnnnnnnnnnnnnnnnnnnnnnnnannnnnnnnnnnnnnnnnnnnnnnnnnnnnnnnnnnnnnnnnnnnnnnnnnnnnnnnnnnnnnnnnnnnnnnnnnnnnnnnnnnnnnnnnnnnnnnnnnnnnnnnnnnnngaatctttatatctgttagggcatatccttttgttctttaggttcttttgctcttttatgaagtaattattttcnttaacangatnnantcagnttannttcatttcntntnnnnttntactnaacntgct

SEQ ID NO: 39394 - DNA, 352 bp, Homo sapiens
  misc_feature (1)...(352): n = a,t,c or g
actgactcctaatcagcaatcacttccctctgacatgggatcagagttacccagaacaagttcatcctggcactgatggatgatgaaaatctaaccacagaatgattagtcagcaatggttttagagacgtattttgatcaaaaggggcaaatgtgaaagttgtctgaatcaaaatgaagtcacttgtgtcagacactgacataatgaagccaggaaaggccatgaagaaagcattttcatacacaattgcctgataataagactttgacaaaactacaatcatatacaaagccattgcaacctattacacacacacatacncacactcgcgtgcatgcacacgctttgtga

SEQ ID NO: 39395 - DNA, 351 bp, Homo sapiens
  misc_feature (1)...(351): n = a,t,c or g
cggaaatgcagtactgtaaggaagagggacctccagcttccacaaacaccatcttcagctgtatgaaagggacggttgtggtgaagtttgtcaggcacggtaagcatgctgagtggcggggatcagaactctcctatctgaacctactgaggagcaaagcagcaattacatgggatcctgtggctctcccgttgcagaggccacaggaagataggatggaacgtgactggtctcctaaccaaggtgcactgagaagcaatcaacgggtcggtcgtggccagtcctggggaggtctgagtggtggtctttgggataacctttggccttatggatttggactcnaaattagaa

SEQ ID NO: 39396 - DNA, 347 bp, Homo sapiens
  misc_feature (1)...(347): n = a,t,c or g
ttcaggaaaggtttatggaagggcttttcgatttcccaaagcctaaacacatgaaaatatagtgttaggtatagttggtgctcttccctaagatgtatcaagctatggctttacttctatttatgctgcttaaggattcatgtctagcatcagttgttgaaaaattcacgccactatctcttcaaatattgtcccttcctcattctctctagactctctttatggacttcgttctaggtatattttgaaactttccctttttctgccatgtcttctagcttctcatattttgtactgttttatctttgngtgctgcattctgggtgatttattgagatctatatttg

SEQ ID NO: 39397 - DNA, 344 bp, Homo sapiens
gttgttttccatagtggtgctaccagtatggaaaacaacattatatacagtggtagtcagaaatctaaagatagtcctccaagattcctgcccctggttattcaaacactaatttgagtatagctgtgaaaggaccacggagataaaatagagtaatctagattatcccagtggacccaatcaaatcatatgagcccttaaaagcagagaatggtctccatctagagaaggaaaaaaatatgagtcagagagattcaaagcatgagagagattcaacctcctattgccggctttgaagatgaagaaagaaagaggatcacaaggcaagaaatgtatggcctgta

SEQ ID NO: 39398 - DNA, 342 bp, Homo sapiens
ctttttctctcccatgactatagaatctataatgatttccttgttattattcatgatatttagaatttgtggatactcttttttttaaatttcatgcataatcatggtatatttttatcagtcttttcaaagtaactttggcttttgctgatttcatttattttatgattgtttccttttctcatgcttcttatgtatcttctcttttctaattctttggatttaatttgacatcacattttaaatttttgaaattgacaattagattattaattttcaagctttaattttttaaacatatttatgtaagcatatgcatttatctccaagctgaggtttgcc

SEQ ID NO: 39399 - DNA, 359 bp, Homo sapiens
gcgaaacaggctgtgtcctcacggggattctggcagccccaagaatacagtgctgagagccagaaggtccacaaaaccaaagggtctcacctgggtgtgtcctctcagtcacctgcaaggcttgttaaaaatatagatccccaagtcccatccgaagctgactgaatcagctaggggcacctggaggacccagactatgtcttactcatctctgtccctggtggcctgcagaggggctggcaaggagcaggtgcttagtcaatgtctaatgggtaagtgggcggggtggggtagatggtgtcactagtgtcctgaagggggcttaaatggagcaggtggctcagccaggcaatccggca

SEQ ID NO: 39400 - DNA, 444 bp, Homo sapiens
  misc_feature (1)...(444): n = a,t,c or g
atgnnnnnnnnnnnnnnnnnnnnnnnnnnnnnnnnnnnnnnnnnnnnnnnnnnnnnnntctcgaggatccgaattccnnnnnnnnnnnnnnnnnnnnnnnnnnnnnnnnnnnnnnnnnnnnnnnnnnnnnnnnnnnnnnnnnnnnnnnnnnnnnnnnnnnnnnnnnnnnnnnnnnnnnnnnnnnnnnnnnnnnnnnnnnnnnnnnnnnnnnnnnnnnnnnnnnnnnnnnnnnnnnnnnnnnnnnnnnnnnnnnnnnnnnnnnnnnnnnnnnnnnnnnnnnnnnnnnnnnnnnnnnnnnnnnnnnnnnnnnnnnnnnnnnnntgntgtngncnngntnanccaaggcntnactaaaggccctancaccttcttgccatnanccttcaccttaggnntncccataacagcttcantagaaggactnntctcannngncctttttga

SEQ ID NO: 39401 - DNA, 356 bp, Homo sapiens
ccaatataagcttgcagaggtgtctgttaaaattttatttcagactaattttctggtaggtattcagttttagcacataatcatatttttagttttgttctctttcgtttttttcctgtatgagtaacattaacttttgtctctagctcttttaaggaagaaaaagatataaagccaatcattaaagatgaaaaaggtcgggtcggcagcggttctggtcggaacctgtgggtcagcgggctgtcctccacaacacgcgctacggatctcaagaaccttttcagcaagtatgggaaggttgtcggggccaaagtggtaacgaacgcccgcagcccgggggctcgatgctatggatt

SEQ ID NO: 39402 - DNA, 354 bp, Homo sapiens
agccatttctttttatttacagtttgtgttcaatgcaaatcaattccataagaagttactatgaatcaaagcgtaaatacacaaacacaatatacaatccaaaatagatgtacagcattctggaataaagcaagagtgttcattcacacacacagtagcttcaaaactgttcgatctgtttgttcccatgtagttttctaaagatggaaaaaaaggactttggtcatcaagactactgtggccatattagattactggaacatctaagcatcagtgtgtgaccatgcgaacaaaagacttcggggagtgtctatttttaaaaaggtttatgtgtgtcgaggcagttgtaaaaga

SEQ ID NO: 39403 - DNA, 324 bp, Homo sapiens
ctgttatcacatatactaacgtttgagacttttaattttgactttagggtacatgtatcaatacagttgtcttaactttctaagatgtttgatataaaacactgtaaatcacttagtttaagtatgaagaccatttttgtttcctcttaagagggtttttattacacttttagcctaagaagtgttgctgctgaggccttcagatgtatattctaaatttttcttttttctttttattccttttctttctcatactggtggtcagaagaaggccttatgatttagtagaattgagcaatattgataaagattgtagatacaagt

SEQ ID NO: 39404 - DNA, 360 bp, Homo sapiens
  misc_feature (1)...(360): n = a,t,c or g
agaaactgccaggtgtagaaacagcaagaacattttagtcacttcattgttgacatttttgactatcatagattaagtatcaaacacaataacagtattttgttatatgaaccaaatatatctctttttacgagacatagtctagctctgccatccaggctcaacnnnnnnnnnnnnnnnnnnnnnnnnnnnnnnnnnnnnnnnnncnnnnnnnnnnnnnnnnnnnnnnnnnnnnnnnnnnnnnnnnnnnnnnnnnnnnnnnnnnnnnnnnnnnnnnnnnnnnnnnnnnnnnnnnnnnnnnnnnnnnnnnnnnnnnnnnnnnnnnnnnnnnnnnnnnnnnnnnnnnnnnnnnnnnnnnnn

SEQ ID NO: 39405 - DNA, 360 bp, Homo sapiens
  misc_feature (1)...(360): n = a,t,c or g
gaattgtgttcctttccttcagagaatctatctcagttcttaatgatagatgtttgagagttaacttgaggagtgtgtttcgtcctcattgactgcaaattcttgatggccattatgctgtgcctgttttgttttctgaatatagtcagtacctaagagattgtatgctctcagtgagtgttcactggtgaatagatgagtgatgacatgacttccgcatcacagcacaccttgtccaaggagccccctcgaactcctgcttcccagccatggcccctgcctcatttagaacactgggatccacctcagggcctgcccatgggggtctcatgaaagccactgtagactccctgnctcctt

SEQ ID NO: 39406 - DNA, 349 bp, Homo sapiens
  misc_feature (1)...(349): n = a,t,c or g
ctcccaaggaacttttttcccctcacagtaattgtcaccatttgacacatatattttatttggnnnnnnnnnnnnnnnnnnnnnnnnnnnnnnnnnnnnnnnnnnnnnnnnnnnnnnnnnnnnnnnnnnnnnnnnnnnnnnnnnnnnnnnnnnnnnnnnnnnnnnnnnnnnnnnnnnnnnnnnnnnnnnnnnnnnnnnnnnnnnnnnnnnnnnnnnnnnnnnnnnnnnnnnnnnnnnnnnnnnnnnnnnnnnnnnnnnnnnnnnnnnnnnnnnnnnnnnnnnnnnnnnnnnnnnnnnnacacatatattttagtgtccatcttttcctgcaataaagtgtataattatt

SEQ ID NO: 39407 - DNA, 222 bp, Homo sapiens
  misc_feature (1)...(222): n = a,t,c or g
nnnnnnnnnnnnnnnnnnnnnnnnnnnnnnnnnnnnnnnnnnnnnnnnnnnnnnnnnnnnnnnnnnnnnnnnnnnnnnnnnnnnnnnnnnnnnnnnnnnnnnnnnnnnnnnnnnnnnnnnnnnnnnnnnnnnnnnnnnnnnnnnnnnnnnnnnnnntttcagtacttgtcttttgtgagatatcttcatccgcaaaaagcttcaggtctttttttttttttt

SEQ ID NO: 39408 - DNA, 107 bp, Homo sapiens
atcacttgcagatgtattgaaatctaacctctgcacctctacaatgccagaaaccataactcaattttttctactggccaacacaagacaaactttttttttttttt

SEQ ID NO: 39409 - DNA, 363 bp, Homo sapiens
  misc_feature (1)...(363): n = a,t,c or g
tgtaccttacaatatctggcatccagttcaaaattacaaggtacaaggcaatctataaaaacaaaagcggctataaagaaaccaaggggaaggaataaaagcagaccttcatttgattgacatattgcatttataaaatataatagactttatgattaatacattcatgaaaacagaagaaaagttggtcgacgcggccgcgaattccnnnnnnnnnnnnnnnnnnnnnnnnnnnnnnnnnnnnnnnnnnnnnnnnnnnnnnnnnnnnnnnnnnnnnnnnnnnnnnnnnnnnnnnnnnnnnnnnnnnnnnnnnnnnnnnnnnnnnnnnnnnnnnnnnnnnnnnnnnatgtaacctctgatcta

SEQ ID NO: 39410 - DNA, 360 bp, Homo sapiens
  misc_feature (1)...(360): n = a,t,c or g
ctttgcccctcccattttaggattgctcaattcaaaactgtgttgctttttaaggattagagaaaatataaatagagtgcccgacccacagatggcattcattcagtactgcccgatattattatttttgttatgacttaaaaggaaagttagacatttgatattaaattgtgcccattccaaacataagcaaatatatttcttcataagggaggatgtattttatgcaagagaaaaagaattctcaatatggcaatttaaagattcttttggtcaaataaattagtctgaacaacgtatatattcaaatctggaacttctttttcttcttcttttttcctttnttttttttttttcccc

SEQ ID NO: 39411 - DNA, 360 bp, Homo sapiens
gtcaccagctctctgaacttctgcttcttccaaagggtctagttatccaacagataactaataagcaatctgaaagataaattccacctcaatcaatcaaatccttcttcctttctctttccctccctccttcatcattttgatagccttacagtatcaattatagggaacaaatcttgccaaagagaagataatgaacttcgatttttgttttgttttataagtaacatttgatttagactgtagaaatatcttatacagagatcaaagcttctcaagccaaaggtcattgtctctccctttcgattagaagcatgttaatatataaataaaacccataaaaccacacatgtcataccc

SEQ ID NO: 39412 - DNA, 360 bp, Homo sapiens
  misc_feature (1)...(360): n = a,t,c or g
cgatttacattagagcacgtgtgtatttaatggaatttgaccctgtgggaaaaaaggattatggaacttttaagttttttcgtcgacgcggccgcgaattccnnnnnnnnnnnnnnnnnnnnnnnnnnnnnnnnnnnnnnnnnnnnnnnnnnnnnnnnnnnnnnnnnnnnnnnnnnnnnnnnnnnnnnnnnnnnnnnnnnnnnnnnnnnnnnnnnnnnnnnnnnnnnnnnnnnnnnnnnnnnnnnnnnnnnnnnnnnnnnnnnnnnnnnnnnnnnnnnnnnnnnnnnnnnnnnnnnnnnnnnnnnnnnnnnnnnnnnnnnnnnnnnnnnnnnnnnnnnnnnnntaactttggacttcttg

SEQ ID NO: 39413 - DNA, 364 bp, Homo sapiens
  misc_feature (1)...(364): n = a,t,c or g
tgattatcatgcctccttctaatgcctgnnnnnnnnnnnnnnnnnnnnnnnnnnnnnnnnnnnnnnnnnnnnnnnnnnnnnnnnnnnnnnnnnnnnnnnnnnnnnnnnnnnnnnnnnnnnnnnnnnnnnnnnnnnnnnnnnnnnnnnnnnnnnnnnnnnnnnnnnnnnnnnnnnnnnnnnnnnnnnnnnnnnnnnnnnnnnnnnnnnnnnnnnnnnnnnnnnnnnnnnnnnnncagnggccttattcagtaanctttgtacttcttngncaaangtttggctnnnattntttnnacntatatntgttnnntncnnnntnttttaantatgnttagtnntnaganagtantntctcntagattgt

SEQ ID NO: 39414 - DNA, 397 bp, Homo sapiens
  misc_feature (1)...(397): n = a,t,c or g
ggtacatatatatttgggatagttagannnnnnnnnnnnnnnnnnnnnnnnnnnnnnnnnnnnnnnnnnnnnnnnnnnnnnnnnnnnnnnnnnnnnnnnnnnnnnnnnnnnnnnnnnnnnnnnnnnnnnnnnnnnnnnnnnnnnnnnnnnnnnnnnnnnnnnnnnnnnnnnnnnnnnnnnnnnnnnnnnnnnnnnnnnnnnnnnnnnnnnnnnnnnnnnnnnnnnnnnnnnacataccaattggtctgggctctttatccagcttgccacttagtgccttttaactggggcatttagtccattactttcaacantagtnttgatatgngaggatntgantntgcatgatnngcanccagnattntgcgacttgnncntggntntnaggncnnactgg

SEQ ID NO: 39415 - DNA, 427 bp, Homo sapiens
  misc_feature (1)...(427): n = a,t,c or g
gttttctcggcctccacactattaacactatgggccagttannnnnnnnnnnnnnnnnnnnnnnnnnnnnnnnnnnnnnnnnnnnnnnnnnnnnnnnnnnnnnnnnnnnnnnnnnnnnnccctccaggctnnnnnnnnnnnnnnnnnnnnnnnnnnnnnnnnnnnnnnnnnnnnnnnnnnnnnnnnnnnnnnnnnnnnnnggctggtttatagatattcccatttctttatcctgaaagcctctccttctctatgctgagcatgattttctttttttaaaaaataagcacttttaaaaaattaacttgnttcctgtaacttatgctcatcctcccaccctctttttagaatgaatagcttcacatttccaccttatttctggttttatcccatgggnctctcaagtgtttataagctccatgatttc

SEQ ID NO: 39416 - DNA, 338 bp, Homo sapiens
  misc_feature (1)...(338): n = a,t,c or g
nnnnnnnnnnnnnnnnnnnnnnnnnnnnnnnnnnnnnnnnnnnnnnnnnnnnacccatggggcaggcagacatgccagaaattcagttaagagttgatgttgcagtcttgagtcccaaattcatagcacaggccagcagactggaaactcaggcaggaattctatgttacagtcttttttattttctttctttttttctgtggtaagaacaaaacttgagatttaccctcgtatcaaatgtttaagtacaccctgtattattnttgatnatgtcaagacaagaatgacagtggntttctagggcttattnntcttgnttnncctgnnctttnttccca

SEQ ID NO: 39417 - DNA, 352 bp, Homo sapiens
attaaaaggaggaaagattctgtttcaatctgtgaacaaaagtgagcttgaaagagcaaatccctcaagatggattccaagtagctaactgggcctaaatttaaaatagagccaagcagccacttcccgactacaggacacacacacactctgacttcccgctaaacccgcacctctttaaatctgggagttttcagagctctgctgtatcaaccagttacagctgagatgaattgcccaatcagaactcagctatattgaccaatcacaactaagtaaacttgaatcctttatctgcataaatgaacctgattgggaacccaaatgagagcttttgctataaaatccaaac

SEQ ID NO: 39418 - DNA, 342 bp, Homo sapiens
ggaactaggggtaaagcaactgggtggtcagtggcaagaaaactccaattctgggagggtaaaacttaggatctctctctttcaaacaatgtgtgctactgtgacatttatgtgttctgtggcgctaaccaggcacataatgattcacatgtgctttaatatatgtcagattaatttattgtgaattttatttgtaagcactatacattccacagatatttatagatatttttatagtttattactaaaatatcatggcctgaaactttttaaaatctgaaaactccttaaatttctttcttggtgaaagttaagcaaagtatgatcaccaaaccggaatac

SEQ ID NO: 39419 - DNA, 342 bp, Homo sapiens
  misc_feature (1)...(342): n = a,t,c or g
gtttttcccctttcctaaaactgaaggggggaaaaaggatctgtttgttcaagattgagagacaaattccaatctggacgaaacttcctggtcttttcactacagatcatcaatggaaggcaaaaacaaaacaaaaaaccaaaattacttgttctgttcattttgaatgttcacttactgatacgatcttctaattccatttttgctttaaccatgtgcatcttagaaatgtctgacagagacataatttaggatcaataattttaccattggtcatacaattaaccttctagcttttacagatggggcacatctgctttgacatttgntggttttggctgg

SEQ ID NO: 39420 - DNA, 467 bp, Homo sapiens
  misc_feature (1)...(467): n = a,t,c or g
ggcccgtggatgatggatatgttgataccattgnnnnnnnnnnnnnnnnnnnnnnnnnnnnnnnnnnnnnnnnnnnnnngancccaacnaaagagatctctcgaggatccgaattccnnnnnnnnnnnnnnnnnnnnnnnnnnnnnnnnnnnnnnnnnnnnnnnnnnnnnnnnnnnnnnnnnnnnnnnnnnnnnnnnnnnnnnnnnnnnnnnnnnnnnnnnnnnnnnnnnnnnnnnnnnnnnnnnnnnnnnnnnnnnnnnnnnnnnnnnnnnnnnnnnnnnnnnnnnnnnnnnnnnnnnnnnnnnnnnnnnnnnnnnnnnnnnnnnnnnnnnnnnnnnnnnnnnnnnnnnnnnnnnnnnnnnnnnnnnnnnnnnnnnnnnntnggtntgnggaaaacntcantncttgatatgacttgcttggcctcctgggggnanactggtgatgaaagnggtatagctnattag

SEQ ID NO: 39421 - DNA, 389 bp, Homo sapiens
  misc_feature (1)...(389): n = a,t,c or g
gagcccgtggatgatgtatatattgatccattnggatgatgaatatacctntctattccngatgaanannccccaccagaacccancnaaagagatctctcgaggatccgaattccnnnnnnnnnnnnnnnnnnnnnnnnnnnnnnnnnnnnnnnnnnnnnnnnnnnnnnnnnnnnnnnnnnnnnnnnnnnnnnnnnnnnnnnnnnnnnnnnnnnnnnnnnnnnnnnnnnnnnnnnnnnnnnnnnnnnnnnnnnnnnnnnnnnnnnnnnnnnnnnnnnnnnnnnnnnnnnnnnnnnnnnnnnnnnnnnnnnnnnnnnnnnnnnnnnnnnnnnnnnnnnnnnnnnnnnnnnnnnnnnnnnnnnnnnnnnnnnnnnnnnnagaagtttggg

SEQ ID NO: 39422 - DNA, 340 bp, Homo sapiens
  misc_feature (1)...(340): n = a,t,c or g
gccagaggctgcctatactgtgttccttgccacatgggactttcccacaggaggcttgcttcatcaaagtgagcaagctgagagggcaatagagtaagctgaggaggcagtagctaccaggacagaagtcacagtcttttgtaacttaattacagaagtgacactctgtcgcctcggctgaatttttttttaaatttttaaatttctttttcttttttttcttttttttttccttattctttaatttganatactggggattgaacatctgctgaattctgngattaaaagcaattnctcttggtccaggccatactnaggggaggggatttataagggg

SEQ ID NO: 39423 - DNA, 389 bp, Homo sapiens
  misc_feature (1)...(389): n = a,t,c or g
gcagcgtgggatgatggatatattgnatccattggatgatgaananacnatntannannngatgaagataccccaccagaggctccgaatgagatctctcgaggatctgaattccnnnnnnnnnnnnnnnnnnnnnnnnnnnnnnnnnnnnnnnnnnnnnnnnnnnnnnnnnnnnnnnnnnnnnnnnnnnnnnnnnnnnnnnnnnnnnnnnnnnnnnnnnnnnnnnnnnnnnnnnnnnnnnnnnnnnnnnnnnnnnnnnnnnnnnnnnnnnnnnnnnnnnnnnnnnnnnnnnnnnnnnnnnnnnnnnnnnnnnnnnnnnnnnnnnnnnnnnnnnnnnnnnnnnnnnnnnnnnnnnnnnnnnnnnnnnnnnnnnnnnnnnnnnnnnnnng

SEQ ID NO: 39424 - DNA, 351 bp, Homo sapiens
  misc_feature (1)...(351): n = a,t,c or g
nnnnnnnnnnnnnnnnnnnnnnnnnnnnnnnnnnnnnnnnnnnnnnnnnnnnnnnnnnnnnnnnnnntgaacctctatcgttttaaaaaatttctgaagaatattaatatttttctttcttcaatattttgagtcattcactagtaaagccatctggacatggagttttctttgtagaacggttttaattacaaatctaacctacaggactattcagattttattctttcttctcatctcatatttatttacttgtattttccaaagcctctgctgatttcatctaaattattcaaattattgtgcaaagatagttacaacatcgtattatcttctattgttgtagggctg

SEQ ID NO: 39425 - DNA, 326 bp, Homo sapiens
  misc_feature (1)...(326): n = a,t,c or g
ggcagacagagttgtctttttattgcttccattcccagtcgacgcggccgcgaattccnnnnnnnnnnnnnnnnnnnnnnnnnnnnnnnnnnnnnnnnnnnnnnnnnnnnnnnnnnnnnnnnnnnnnnnnnnnnnnnnnnnnnnnnnnnnnnnnnnnnnnnnnnnnnnnnnnnnnnnnnnnnnnnnnnnnnnnnnnnnnnnnnnnnnnnnnnnnnnnnnnnnnnnnnnnnnnnnnnnnnnnnnnnnnnnnnnnnnnnnnnnnnnnnnnnnnnnnnnnnnnnnnnnnnnnnnnnnnnnnnnnnnnnnnnnnnnnnnnnnnnnnnnag

SEQ ID NO: 39426 - DNA, 363 bp, Homo sapiens
ttgagaggaaaaattctctttttttctgagtcagagcgggtttcggccaaggcacttgtcgggcttttaatatttcaaggtcagggatgaatacctctcacagaaaagtgacatacacaaacacactcaaaattctgcaaccatttcagggattttatgcatcattcaaaccatgcaaggaatccaggccatcatttcctttaactgagtaatacagaaggaagttaggaagagaaatataaatagtcatttctttattcactctgtgaatactcttatcctgtcaatatctccaaacaacctaattaattgtaattaatttgtagagaggctatatctcccaaagacgtattttcagttggg

SEQ ID NO: 39427 - DNA, 343 bp, Homo sapiens
cgcggccgcgtcgacagtttgtgtatgtcgtcacaaaaataaaaggttccttctttaacagctccaaatgaatcctttcttatgacttcattgaatcaggaagactcagactactctcagtgtagttattttgtgatatcataacatctttgtaaacctggtgggaggttgtgatagtgtgaagaactgaggattccagatttctggtgttaacactacaactcaaacgtcctggtggtagaaatgttaatcaaggggagttcacatttccctgttctggtaatagacagtattgccctggatttaaccttttcttgctgatgtagggtcagttggagtgcta

SEQ ID NO: 39428 - DNA, 353 bp, Homo sapiens
cttttaggtacttatttttcaattcaaaatgaaaatgtattaagtgatatggaaaacagtaactttaaaagttagaaaaccataaaaaaaaatgacaactcaagggcagctttcaaatacatggtgttgaaattagattatagaccacatggtaaagccaaggaaactgcatatagcctctaggtggctcattattgtttcagatagtaaagagactgagaagaacatctaggcagcaacactggaacagaacctactgggctgtggtaataaacagatgtctcattttgaggccaggagactacaccagtaataaataagggaattgtgctacataatccttttaattaagg

SEQ ID NO: 39429 - DNA, 346 bp, Homo sapiens
  misc_feature (1)...(346): n = a,t,c or g
tgccatctgaagaagagccattttgtgatctcttctgaaacaaaattataaaattagatacttcatacaaattagaaagggcttattaaatacttgaattttggccattccggaatcaaaaatttctataaacgaaaagaacaaaaactacttaaaaattttatcaggtcactaatttaaagataaggaagcttgcttactgaaaaaacttaaatgctttcacagtgcccccagtgttagcgaacagtgttcggtcgacgcggccgcgaattccnnnnnnnnnnnnnnnnnnnnnnnnnnnnnnnnnnnnnnnnnnnnnnnnnnnnnnnnnnnnnnnnnnnnnnnn

SEQ ID NO: 39430 - DNA, 309 bp, Homo sapiens
cttgtacaatgtgctgacatgaagtcctaacctcagccccaaagaggctcacaaagtaggaacctgaggccagtacacaaccaagtgacatgctctttgttgacttcattgctgcttctgccagaagcacactgctgcagcattgtgacttgtgtggaattgtttctgctctctaccactcagaaaaaaagaaacagaaaagtaaatttctaagtatttatttcctctctattttctaagtctttttgttagaacatctgtgaaatgataaaagcaacttaaaacaatatggggctttttttttttttt

SEQ ID NO: 39431 - DNA, 350 bp, Homo sapiens
ctcgatttctcatcctctccagtgatactaacactagtacacactaccatcatttctcccttgggttttggatatagattactcactgctagttctgcttcttatttgcatttatttaataatcttccaaataacaaatagagtgatcttttctaaacacaaagtaggtcattttactctttaactcaaagtcaccaagggcttcccactgtacttagaaacaatgtcaaattattttccataaagccctatttcatctggtcctgtctaccccttcaaccttaccttttaatcctccttcctctctagtgttcagaaatgccaacaaataactcagttctgtaggaacc

SEQ ID NO: 39432 - DNA, 357 bp, Homo sapiens
  misc_feature (1)...(357): n = a,t,c or g
gaaaaatgatttacaaactaatgaatagcaagacaaagagtagctaagagctaatgatgcgacacaggctataagcactgtaggagttcagacaggattgctgctccagtctctactcaaattgtatagaccaaaattgcaaacgcgtagctggcaggctgaaaatctggcttttctggcttcaaccttaaatttgtttttctaaaaaagannnnnnnnnnnnnnnnnnnnnnnnnnnnnnnnnnnnnnnnnnnnnnnnnnnnnnnnnnnnnnnnnnnnnnnnnnnnnnnnnnnnnnnnnnnnnnnnnnnnnnnnnnnnnnnnntaaaaaaataattgnagaaaaaaatattttttt

SEQ ID NO: 39433 - DNA, 346 bp, Homo sapiens
ttctgttcctgttgttacagggaagaactgaggaggagggagcgggaaccggatggggagctcctggtgcacaggttctgaacgggtggaacactgaagggcaaggaggctaaacaaagttaagctcaactaattggctcatcaagaacacagtccccatgttgagggggaaaatgcagtaatgtttgtgggagcctggctggaaacttttaagtgtgtgcacacaggagtgctgccaggctggcaagagcaggtcggggctggatggcacctcaggggctgtactattcctctgcagagcttgacttgatgaggtttgaagtcttggggaggaatggcaaaggag

SEQ ID NO: 39434 - DNA, 319 bp, Homo sapiens
  misc_feature (1)...(319): n = a,t,c or g
gagatatctggaatagggcctagcccttgaagtaattgataaacacctgaagtcctcgctcctggtcttgcccaaaagtcttcacattttcactttggttgggggaggtggtagcttgattacgacaaagtcttctggtctcatttagttgccttttagcaaataattgngacccattgtgccaagtggatgggaagggngcttntcttattccctggncagtnccaaatggtcttagactngagnaccanttnttcaggttttggatcantgcttttgtgccnnttanngatannggagagggntntggtctnnttat

SEQ ID NO: 39435 - DNA, 335 bp, Homo sapiens
  misc_feature (1)...(335): n = a,t,c or g
nnnnnnnnnnnnnnnnnnnnnnnnnnnnnnnnnnnnnnnnnnnnnnnnnnnnnnnnnnnnnnnnnnnnnnnnnnnnnnnnnnnnnnnnnnnnnnnnnnnnnnnnnnnnnnnnnnnnnnnnnnnnnnnnnnnnnnnnnnnnnnnnnnnnnnnnnnnncatttttctttagatcttcatgactcttttgttctctcatccagaaaatcttaattcttaagtaactgcttccagaatatatgaattntaagacaattttctgttaaaaaaacngattngtgtgtaatgntgttatngtaantttattcnntatagnctgaaatgtngttagnaagctt

SEQ ID NO: 39436 - DNA, 295 bp, Homo sapiens
tataagttaaatatattatatttaatttatatctaatttatctataaattatatataatatatactttaacaaataaagtacatatttggttataatgtataaatatattataaatatataatataatttattatatattataattaatataattatatattacgatataaatacataattataatatagtatatatgtataatatataatatgtaatatataattatatattataaatatacaatataattatatatacgtattaaatacatatatatataattatatataata

SEQ ID NO: 39437 - DNA, 282 bp, Homo sapiens
  misc_feature (1)...(282): n = a,t,c or g
ctccttctccctcctcttccctccctccttctccctccttctccctcctcttgcctccctccttctccctcctcttccctccttctccctcctcttccctccctccttctccctcctcttccctccctccttctccctcctcttccctccctccttctccctcctcttccctccccccttctccctcctcttccctnnctccttctccctcntnttccctncnctntcctccctnntnctccctcctgnttctccctgnncctctnngnttnnntttntgtt

SEQ ID NO: 39438 - DNA, 284 bp, Homo sapiens
  misc_feature (1)...(284): n = a,t,c or g
aacacattttatgtacatatgcatcaagnnnnnnnnnnnnnnnnnnnnnnnnnnnnnnnnnnnnnnnnnnnnnnnnnnnnnnnnnnnnnnnnnnnnnnnnnngctgtggacnnnnnnnnnnnnnnnnnnnnnnnnnnnnnnnnnnnnnnnnnnnnnnnnnnnnnnnnnnnnnnnnnnnnnnnnnnnnnnnnnnnnnnnnnnnnnnnnnnnnnnncnnctgcaccaatttcagcttccaccancnatgngtaaggctctgatttctctantcctcaccncnctgc

SEQ ID NO: 39439 - DNA, 346 bp, Homo sapiens
ttcagtttttacaattagtaattgaggctttgtcatatgaagcaagaaatctgctattattttaaaaaatcaattgtatatcgaccataaagaaatagtataaaagtcataaaaacactgccatttactgtagtaaaatgtggggcattttatttgagttcctaagaaatttcctgtatttagaactcttggaccttcactacttgtaaatgtgagtctatcctttaccttaccctagcttttaccccagggatttggtacatttttattagaaaaaggaaaatgtcgacagtgaaaactgagacagagttagaagacttcaatcacaatggcccagcatgtgtat

SEQ ID NO: 39440 - DNA, 356 bp, Homo sapiens
  misc_feature (1)...(356): n = a,t,c or g
tgcaaatagtctttcgttactccatctcttctccaaatacccaatctgtattctagcactctgatcatcagaagaaagacctttatgaattagttaaaactttttttttttaaaggtttttggtctttttaagtncaccttctcanaatnagntcntgggtcttcntacanaaannaaaccncngantntctgantgntagangcactgaagccctggnctgaacccnnggnctggantnggnaacnntttcaaaggggnanactgagggtcnnntctcttaccctggggnaattngtntggaanaaggagnancgnnatnctntttcnngnangcnnnatggnncgtactggtcc

SEQ ID NO: 39441 - DNA, 369 bp, Homo sapiens
tttttagtgggttgagatggtaggcctgtctgggctgaatgtttcccccatggttaatgggcagttgtgcaaagattgagccaagaaatgccaatgcgaaagtcgcagctattatcataaagcttggacacccacagcgtcaaggcaaatgcaactcactgctctcctgtgtggctatttctgggtgcctcctcgccgcctctcccagagcctcttctcaatgtcgccccctagagggaagtgtggaagctgtggggttgagtctccactcctccctgcgcaagagtgtcttttaaaaagtttgagtcttttgtctgataaccctaataaatatcatctttttgtattttttatagattctttctaaag

SEQ ID NO: 39442 - DNA, 360 bp, Homo sapiens
  misc_feature (1)...(360): n = a,t,c or g
ctcatgaaagcctgaaacccctgccttccctaaatgttggtgcccatggccctaagccagctccagtgctcccagcacatcctctccccaggcggatgagaacccaccagtgggtggtcatccctcctacactgaccagcccgaaccctgggctctgagccagacctggtgagcctcagacccgtttccaaacttcctggatggccctgggggcccacagatagaggttgctcatgcctgccccacgctggggtgattaatgccccctgcaggtgcctgccctcaccagggtcccaagcttgncgacggctttgtcatccatccagtcaccccagggagatccttggaggcattccttct

SEQ ID NO: 39443 - DNA, 362 bp, Homo sapiens
  misc_feature (1)...(362): n = a,t,c or g
gggcaagttacttaatctttttatgtcagttttctcatcagtaatataaggatagtaatacctctctgggttttaggtcgacgcggccgcgaattccagatctatgaatcgtagannnnnnnnnnnnnnnnnnnnnnnnnnnnnnnnnnnnnnnnnnnnnnnnnnnnnnnnnnnnnnnnnnnnnnnnnnnnnnnnnnnnnnnnnnnnnnnnnnnnnnnnnnnnnnnnnnnnnnnnnnnnnnnnnnnnnnnnnnnnnnnnnnnnnnnnnnnnnnntnnnnnnnnnnnnnnnnnnnnnnnnnnnnnnnnnnnnnnnnnnnnnnnnnnnnnnnnnnnnnnnnnnnnnnnnnnnnnnnnnnnnnnn

SEQ ID NO: 39444 - DNA, 356 bp, Homo sapiens
  misc_feature (1)...(356): n = a,t,c or g
gcagcctccgcctccctgttgaagcaattctcatgnnnnnnnnnnnnnnnnnnnnnnnnnnnnnnnnnnnnnnnnnnnnnnnnnnnnnnnnnnnnnnnnnnnnnnnnnnnnnnnnnnnnnnnnnnnnnnnnnnnnnnnnnnnnnnnnnnnnnnnnnnnnnnnnnnnnnnnnnnnnnnnnnnnnnnnnnnnnnnnnnnnnnnnnnnnnnnnnnnnnnnnnnnnnnncattcattttaaataagaattgggcatttttagtttaacttggacttttgttgatacagtgataaaacttaaattcctttactcactcagcacctgtgaagttcccagtgtacgccaagcattgtgccagg

SEQ ID NO: 39445 - DNA, 363 bp, Homo sapiens
  misc_feature (1)...(363): n = a,t,c or g
ttataataagaaaattggtggcaaaattcaaatcttttaagtacttgattcattttttatatcaagatagtcaataaatgtattacatattaggttttttctctcttgctattagcaatacttagtttaaacacataaatgaggcaatcttttaaaatccaagtgtttgctatcaaagttgttttttaaaaaaaatctagtgattattcctctagcttgtaattaagcaaaactttgatgtattaaaataaccttcnnnnnnnnnnnnnnnnnnnnnnnnnnnnnnnnnnnnnnnnnnnnnnnnnnnnnnnnnnnnnnnnnnnnnnnnnnnnnnnnnnnnnnnnnnnnnnnnnnnnnnnnaaa

SEQ ID NO: 39446 - DNA, 381 bp, Homo sapiens
  misc_feature (1)...(381): n = a,t,c or g
agnnnnnnnnnnnnnnnnnnnnnnnnnnnnnnnnnnnnnnnnnnnnnnnnnnnnnnntctcgaggatccgaattcgcnnnnnnnnnnnnnnnnnnnnnnnnnnnnnnnnnnnnnnnnnnnnnnnnnnnnnnnnnnnnnnnnnnnnnnnnnnnnnnnnnnnnnnnnnnnnnnnnnnnnnnnnnnnnnnnnnnnnnnnnnnnnnnnnnnnnnnnnnnnnnnnnnnnnnnnnnnnnnnnnnnnnnnnnnnnnnnnnnnnnnnnnnnnnnnnnnnnnnnnnnnnnnnnnnnnnnnnnnnnnnnnnnnnnnnnnnnnnnnnnnnnnctttgacttcttcgccagangntgnntgcnnatgatttanntngttnntnntgnngttgt

SEQ ID NO: 39447 - DNA, 328 bp, Homo sapiens
  misc_feature (1)...(328): n = a,t,c or g
atgcatttcattggctggttcagtgcaaagactttaaataaagaaatggcaagataagaaagttgcctataggcgatagcagtgctgatgtttttttcttctccaaatgtagtacaagatattaaaactgtctcttaaaaannnnnnnnnnnnnnnnnnnnnnnnnnnnnnnnnnnnnnnnnnnnnnnnnnnnnnnnnnnnnnnnnnnnnnnnnnnnnnnnnnnnnnnnnnnnnnnnnnnnnnnnnnnnnnnnnnnnnnnnnnnnnnnnnnnnnnnnnnnnnnnnnnnnnncgtggtgcatgccctgagtcccagtactggagctgag

SEQ ID NO: 39448 - DNA, 332 bp, Homo sapiens
tggcagtataggctgggggcaaagtactatggaaagggggcatgaagaaaattctggaggcttgggtcttaatcctagctctatctctaactagctacaggggtttgggcaaggcacttaatatcgataggtctcaattttaaattttttatctacaacagaacttacagatttcctttcagttctaaaagtgatagaggctacacagaagattagggatttaagctgtttcacgaagggtgtgtaaaatttagaaatacgaatggaagagaggaccagcattcctggtagagtgggagtatgaacaaagcagacacagaggcaagatattt

SEQ ID NO: 39449 - DNA, 361 bp, Homo sapiens
ggagaatggaaatgtaaattttaatgtgaatgtttagctaccaaagtatttaagatatcatttagaaaggtttacagaagtggaaatattctttttaaagacctatttgtttatttctgaaaccagaatgtactcaagactgatcttctaagttcactggaaatgattttatccccaactgtggtgtctatactgaaaatcaatagtcaactaaagcatattttcaagacttcattgacagtggccgataagatagaagatcaaaaaaaggaactagatggctttctcagtatactgtgtaacaatctacatgaactacaagaaaataccatttgttccttggttgagtcacaaaagcaat

SEQ ID NO: 39450 - DNA, 357 bp, Homo sapiens
  misc_feature (1)...(357): n = a,t,c or g
cgaagatgatgtaacctctagagttaagtgcgaagaagttgattttgagaatatattgcagaaggtgcaaggaacgtcatctgggttatgacctctggaagtggaggtagttttttgtcattgggtcgccagtgcttggcatgtgatctgtgaggtgatcgagaatattgcagacacaagggcaggagtaatgcctctgttaggggtgttaagttcgtagtgggttcaggaagagatggtggaggctgagggacagatgttttcattcagtgcagtaatatttgctaacaggaagaaagtagtgtgggtaagggtgaagaaggggccagagaagagagtgcagatgtgcnnaaagtg

SEQ ID NO: 39451 - DNA, 131 bp, Homo sapiens
ggaacacaaaagactatagaaaatgagaaaaatgaggataagaacaaaaataaccagtgaattgtcaacaaaagatttgcaggatagaagagaacagtgtgatatagtcaaagttctaaaaaaaaaaaaaa

SEQ ID NO: 39452 - DNA, 341 bp, Homo sapiens
gaacaaagttattgcttaagttgccctattcaatttggtttttattttgcctcatagaattagggatataaaaatacttttaaggttcaaggccaatgataaattcaatggaagaaaaattgctcatagaaaaggagtatgaataatgagaatagttcaataattagatattaagattaatgcagaatttatcataaagcttttgtttgagcattaactgaaagaaatttcaagatgcttgccatctttgccttgattaacatggaacataatttaatcttagattgattacctttggcattgtagggctttcattttgaaccacagattttttgttattg

SEQ ID NO: 39453 - DNA, 346 bp, Homo sapiens
  misc_feature (1)...(346): n = a,t,c or g
tttctttcccactcatgaagactacctgggatgctttttcaatcttctctctcttggtgaaaggtcttacgcgtactgccactgtcacttgactattctctacttttaaggggtcttttcctgcagaggtgttctgaactacagtttcttcttcgggaagaattgtattttctgcggatctttcctgtttatttgcaagaaaggaactttttggtctttgtttaacttgaaggttagacattctattcttcagtattgatggagctgggctcttaagctgaggcaggctgcactttgttgtcagtttgtgttctgttgtacattttgtaggtgntcttttttctaa

SEQ ID NO: 39454 - DNA, 331 bp, Homo sapiens
attccacaccatctgcaggctgcatctgtgcagcttcatccagctcggtaacagtcacagctgaacttgacattcacccactttgaaagtatagaattcataaaatctgaaaccacatatgtgtataaaacccatgcaagagtgggtaggaactaaaaggaggagaaaaagtagtcctccccttcaggagtgttctctcttatcccagcccctttcatgtaatgaatgggtgaatgggtgaaaatgaaattatttaggcattgactgacaggtaggaacagaaactcaggcttctagttattattatttattattattgaatctactgttc

SEQ ID NO: 39455 - DNA, 312 bp, Homo sapiens
  misc_feature (1)...(312): n = a,t,c or g
ctttcctgggctctcctggcgggcacgcttacttttaacaaagcgtgcctgccaggagagcccaggaaagcatggattgatttatccagcatttactgagcacctttgatgtacctgcgagctttaatgctcaaacacactggtcaggcctggaaggagcacagagtcggtggtcacacaacttgggcacatgagcacatttttgagacagaaaaaggaacagcatggacccttctacagagatgggcagagaagcagtancagcattgttcaggaccaccccganggnggaaataagtactgacangaggg

SEQ ID NO: 39456 - DNA, 110 bp, Homo sapiens
  misc_feature (1)...(110): n = a,t,c or g
tgggcttttaaaaataaagtaatattttatgatgggatattctgtagcttcctcctccctgtgactgttataannnnnnnnnnnnnnnnnnnnnnnnnnnnnnnnnnnnn

SEQ ID NO: 39457 - DNA, 357 bp, Homo sapiens
  misc_feature (1)...(357): n = a,t,c or g
gtcttaaatttgtatagcattcatgcaatttaataacaaagaagtgagtttccttatcaaaacaatctgagtagaatcagattgagactgagtggaaacatcatctctaaaaaatatacaggccgggcacggtggctcatgtctgtatattttttagagatgatgtttccgtcgacgcggccgcgaattccnnnnnnnnnnnnnnnnnnnnnnnnnnnnnnnnnnnnnnnnnnnnnnnnnnnnnnnnnnnnnnnnnnnnnnnnnnnnnnnnnnnnnnnnnnnnnnnnnnnnnnnnnnnnnnnnnnnnnnnnnnnnnnnnnnnnnnnnnnnnnnnnnnnnnnnnnnnnnnnnnnnnnn

SEQ ID NO: 39458 - DNA, 419 bp, Homo sapiens
ctgactgggtcatagggtaaccacatatttggtcttactctgggtgtatctatcaggatatttctgggcctcattcaacccattgaaggcctgtacagaacaggaaggctgattaagagagaatctctgtctttgaggtggaaaatcagtcttctaccttgtgacgtggactcagactggaactcataccgtcagctctcttggttttcaggcctttggaattggctggaactataccattggctcttctgggtcctcagcttatcacctgcagatcttgggacttctcagcctccagaaccatagaagccaattccatatagtaaagctctgtctctcatctatatatcttatcggtctgttctctgggaacagactaatgcatcatattgacaggaaatagtcattcttgaattgct

SEQ ID NO: 39459 - DNA, 408 bp, Homo sapiens
ctcaagtccctcgcatgctccaggtctccgattccacgctcctcggctttctctttgccagcagggactgagtgtgtgacgaaggttgtgcctttgacctcagaggaatgtgacaacggccttccttgcattgttcccacagtaaccagagccagctgtccaggccggctggccaagttgtggcgcaggatcacacacaagttggggctctgcttgggggactccgcctcaaggcctcccccttcctctaggtctttatccgcaggtcgggaccctcctaagaacacaagaatgagcctgcaatccttcctaaataacttttgggggcttaaaatcctgggtgtagctacatcatgtgaaactccccctaatgacagctagaggatttggtgtgattcaattttgagc

SEQ ID NO: 39460 - DNA, 198 bp, Homo sapiens
  misc_feature (1)...(198): n = a,t,c or g
gttcccagctcccatcagtgcagccacgcagcctggaaatgaactgcccacgccctcatgtcagctccttcccattttctcttttctcttcctcttctcagagaggccttcaactcttaaagttgagttccagaatcaatcaagggcctcacnnnnnnnnnnnnnnnnnnnnnnnnnnnnnnnnnnnnnnnnnnnnnn

SEQ ID NO: 39461 - DNA, 408 bp, Homo sapiens
gtggaagtggactgaacagtctgggggatacagagacaagagtgtcacaggctggctcaagacatgcgacccgcaaacaagaagagcaaacagcacagggctcaggcctgtacccacatcctgctccactgagggctggagggtacggctgcagcaggagttcggaggacagtggggtcaggcgtggggcagcctctgcacaggacagaggtttaataaatcaagcccatgctattttgggatttgctttagatcaggctggaaaagtaggctgcttttcaatgtagggtagcttggtgtcataccactttaggaatgtgcattttcttccctaaatactagaagctgatcttatgctcagaggttgtttcttgtatgatttcacacagtggtgaaaagaaaacacaa

SEQ ID NO: 39462 - DNA, 259 bp, Homo sapiens
gtagtgtttttagtttatggcttctggatagcgtcttttctggcaataataatctccctttgtgtaagtgccacattagcagacaactgtttatccacagtgagacattcacctggttcttatgagagtaggaagcttttttattctggctggttgcaaaaatggtgaaatctcatttagccaagatataatctaactgaaacccttaggtaatgagaagatagtcttatgatagagtttttctctttttttttttttt

SEQ ID NO: 39463 - DNA, 395 bp, Homo sapiens
  misc_feature (1)...(395): n = a,t,c or g
aaattgaattgtagagagaatatctcaagtgctgtgtaaatatcgctgagctccagtgaaagcaaatggtcatttggttgccaatctaagtaagtttttaaagaatattcctagcattcaaatttaaaagttcagtcttgtcgacgcggccgcgaattccnnnnnnnnnnnnnnnnnnnnnnnnnnnnnnnnnnnnnnnnnnnnnnnnnnnnnnnnnnnnnnnnnnnnnnnnnnnnnnnnnnnnnnnnnnnnnnnnnnnnnnnnnnnnnnnnnnnnnnnnnnnnnnnnnnnnnnnnnnnnnnnnnnnnnnnnnnnnnnnnnnnnnnnnnnnnnnnnnnnnnnnnnnnnnnnnnnnnnnnnnnnnnnnnnnnnnnnnnnnnnnnnnnnnnnnnnct

SEQ ID NO: 39464 - DNA, 204 bp, Homo sapiens
  misc_feature (1)...(204): n = a,t,c or g
atttttacttcaaatgactgatttgtgatttgcttttaatttcttaaaatgttaccacataattcatctaaagtataaaaaggaatagcaaattttagatgttgtgcagatatataatgcttgtgtcagaattattataatattgataataaactttagatatnnnnnnnnnnnnnnnnnnnnnnnnnnnnnnnnnnnnnnnnn

SEQ ID NO: 39465 - DNA, 397 bp, Homo sapiens
  misc_feature (1)...(397): n = a,t,c or g
gaatgcactaatgcatatggatggtaatacattaaccttgcctcatccagtcctgttcaagtgaatatatttgagatatcttacatcgaaaactattttcttagatcctttcatagtggaagaagaaagaagaaggccttctagatacggaagaccacagtttatctgtttaacaaagtatctaacatagcaatcctgttagattctgtgggaaaaggtaaatatctacatatgtaggttggatcccagtggggctgacccatcctttaaaccttttacttactttgattggaataggatatcattaaagtattttaaagtaaataataagtctactttgcggagaagctaaaaattctacagtggtttcaatggaagtntgtcacttagtaataac

SEQ ID NO: 39466 - DNA, 401 bp, Homo sapiens
attcaggcagttttcccattcacaggtctgtgctgtggatgtagattcagaatttccacaagtacttaactaatatgaaccaaagtagcttccacaggtaagtacttaactaatatgaaccaaaatagcttccacaggtaagtacttaactaatatagaccaaagtagcttctcctccaaacaatcctttgtgaggttttgtaagtagaacagtgacttactcttttctgagagttatttttggggagaaaaagaccttgctttatatccaggtaatcaacaagtcaaaattttccagaatcacggacaaaattacttcttaaacacgtttcaattaatagcatactgtttatgtaaacacacagatgcattaataggagtcttcagaaataaaacaaatt

SEQ ID NO: 39467 - DNA, 399 bp, Homo sapiens
  misc_feature (1)...(399): n = a,t,c or g
gagaaagtgaaaggattagaaaatctattactaaaacaacagaggaaaatttctcaagtctaacaagaaatgtagacatcctgacacaggaggctcagagatcaccaagtagatacaatttaaaaaggtcttctnnnnnnnnnnnnnnnnnnnnnnnnnnnnnnnnnnnnnnnnnnnnnnnnnnnnnnnnnnnnnnnnnnnnnnnnnnnnnnnnnnnnnnnnnnnnnnnnnnnnnnnnnnnnnnnnnnnnnnnnnnnnnnnnnnnnnnnnnnnnnnnnnnnnnnnnnnnnnnnnnnnnnnnnnnnnnnnnnnnnnnnnnnnnnnnnnnnnnnnnnnnnnnnnnnnnnnnnnnnnnnnnnnnnnnnnnnnnnnnnnnnnncactgactccaggctgagtg

SEQ ID NO: 39468 - DNA, 399 bp, Homo sapiens
  misc_feature (1)...(399): n = a,t,c or g
aggaaattgaaattcaaaaacatgaaataactgagccaaaatgaggagtccaaggaccctgaaccttgcctaatcattcaattattgcataataactgtgacccaggcactatgctaggtgctggtgacacaaagctgaataacatatggttcattcttttatcagctcacagacacgtaagagaaagattacgatgggatgtgatcaattcaatgattggtcgacgcggccgcgaattccnnnnnnnnnnnnnnnnnnnnnnnnnnnnnnnnnnnnnnnnnnnnnnnnnnnnnnnnnnnnnnnnnnnnnnnnnnnnnnnnnnnnnnnnnnnnnnnnnnnnnnnnnnnnnnnnnnnnnnnnnnnnnnnnnnnnnnnnnnnnnnnnnnnnnnnnnnnnna

SEQ ID NO: 39469 - DNA, 470 bp, Homo sapiens
  misc_feature (1)...(470): n = a,t,c or g
ttgganggcnnnnnnnnnnnnnnnnnnnnnnnnnnnnnnnnnnnnnnnnnnnnnnnnnnnnnnnnnnnnntctcgaggatccgaattccnnnnnnnnnnnnnnnnnnnnnnnnnnnnnnnnnnnnnnnnnnnnnnnnnnnnnnnnnnnnnnnnnnnnnnnnnnnnnnnnnnnnnnnnnnnnnnnnnnnnnnnnnnnnnnnnnnnnnnnnnnnnnnnnnnnnnnnnnnnnnnnnnnnnnnnnnnnnnnnnnnnnnnnnnnnnnnnnnnnnnnnnnnnnnnnnnnnnnnnnnnnnnnnnnnnnnnnnnnnnnnnnnnnnnnnnnnnnnnnnnnnnnnnnnnnnnnnnnnnnnnnnnnnngttgtcnacngggggnnccttacnnaggggctnnaaaccccnnngggatttgaantgnannggaaaaaggntttnnnggaaaagggggctaancnngnnttcccnaaaaagat

SEQ ID NO: 39470 - DNA, 354 bp, Homo sapiens
ttgtactttggaattcttagtcacaaaatatattttgtttacaaaaatttctgtaaaacaggttataacagtgtttaaagtctcagtttcttgcttggggaacttgtgtccctaatgtgtttagattgctagattgctaaggagctgatactttgacagtgtttttagacctgtgttactaaaaaaaagatgaatgtcctgaaaagggtgttgggagggtggttcaacaaagaaacaaagatgttatggtgtttagatttatggttgttaaaaatgtcatctcaagtcaagtcactggtctgtttgcatttgatacatttttgtactaactagcattgtaaaattatttcatga

SEQ ID NO: 39471 - DNA, 344 bp, Homo sapiens
  misc_feature (1)...(344): n = a,t,c or g
nnnnnnnnnnnnnnnnnnnnnnnnnnnnnnnnnnnnnnnnnnnnnnnnnnnnnnnnnnnnnnnnnnnnnnnnnnnnnnnnnnnnnnnnnnnnnnnnnnnnnnnnnnnnnnnnnnnnnnnnnnnnnnnnnnnnnnnnnnnnnnnnnnnctggcaagtgactgaggaggggaggataaagagaagtcagctaatgggtacaaatatacaggtatataagaagaataagcttgagtgtatgctagcacacatannnnnnnnnnnnnnnnnnnnnnnnnnnnnnnnnnnnnnnnnnnnnnnnnnnnnnnnnnnnnnnnnnnnnnnnnnnnnnnnnnnnnnnnnnnnnn

SEQ ID NO: 39472 - DNA, 340 bp, Homo sapiens
gacagacttagctaagtgtaactgttacagagtgattagcctttaggcatagactgcatggataagtgattattatcagaagatgttaatggagtaaaatattagccctacatgatgactctggaagagtaaagttgtgaaagattttagggttggggagatggtaaagataatttgtggtaagttatgatataccaggaaggatagtttagaaaattccgtgtagtcagagcatatttatagctaaagaagaataattacaacctgaaatcaggagagaaggatgacagacctgaggccctgccagagacagttttccttcataagaggtcaggtgttt

SEQ ID NO: 39473 - DNA, 372 bp, Homo sapiens
  misc_feature (1)...(372): n = a,t,c or g
tttgannggatgttgtataggangatgnatatnnntnncnattcgacgatgacgataccccaccaagccctctnnngagnnctctanaggatgcgaattccnnnnnnnnnnnnnnnnnnnnnnnnnnnnnnnnnnnnnnnnnnnnnnnnnnnnnnnnnnnnnnnnnnnnnnnnnnnnnnnnnnnnnnnnnnnnnnnnnnnnnnnnnnnnnnnnnnnnnnnnnnnnnnnnnnnnnnnnnnnnnnnnnnnnnnnnnnnnnnnnnnnnnnnnnnnnnnnnnnnnnnnnnnnnnnnnnnnnnnnnnnnnnnnnnnnnnnnnnnnnnnnnnnnnnnnnnnnnnnnnnnnnnnnnnnnnnnnnnnnnnnncnaaagtg

SEQ ID NO: 39474 - DNA, 361 bp, Homo sapiens
  misc_feature (1)...(361): n = a,t,c or g
gttaatttccactggattctgaattgggcagaaaatggaaacattaacactttttgcataacgccattttacatcccgtcgacgcggccgcgaattccnnnnnnnnnnnnnnnnnnnnnnnnnnnnnnnnnnnnnnnnnnnnnnnnnnnnnnnnnnnnnnnnnnnnnnnnnnnnnnnnnnnnnnnnnnnnnnnnnnnnnnnnnnnnnnnnnnnnnnnnnnnnnnnnnnnnnnnnnnnnnnnnnnnnnnnnnnnnnnnnnnnnnnnnnnnnnnnnnnnnnnnnnnnnnnnnnnnnnnnnnnnnnnnnnnnnnnnnnnnnnnnnnnnnnnnnnnnnnnnnnnnnnnnnnnnnnnnnnnnnnnn

SEQ ID NO: 39475 - DNA, 345 bp, Homo sapiens
  misc_feature (1)...(345): n = a,t,c or g
nnnnnnnnnnnnnnnnnnnnnnnnnnnnnnnnnnnnnnnnnnnnnnnnnnnnnnnnnnnnnnnnnnnnnnnnnnnnnnnnnnnnnnnnnnnnnnnnnnnnnnnnnnnnnnnnnnnnnnnnnnnntctcaagtgattgatgaancngnatanattattacgcttattnnnttttnacccttttaatagttnatgtggcacaatgggaggtatggttaaagcacttntgntgcatactaaagnatactgggnggnctggaanaaaagcnctggngnggntgcttacactgaaatacttgctttttatttnttatanaanttatttttacttgannntattactgacg

SEQ ID NO: 39476 - DNA, 356 bp, Homo sapiens
cttatattagttccgctttttcaagatccaggaaagaggaaatgtttgtttacgctggaactaattcatgtcattgcttggattactgaaaggttaggaaggaaaaaaatgtggtaaaatgaatactctgctatactttatctatttgatacaaacagccttagtttatttctaagtgcagcttggatgaggcagaataaccaagttttatcacagggttcctgtgggagagacccttagttgagagaaagtagtatattggaaacatggcccaatcatagatcctgtgtggtgtgtttaaagggttcttagcttgtctcagataaagtgtaaataacttagtggttaaaaacaca

SEQ ID NO: 39477 - DNA, 345 bp, Homo sapiens
  misc_feature (1)...(345): n = a,t,c or g
ctggaccacctgcccccctcgatacagtgtgaaattcgcccccgggaagttcccaggggccatgcatgcgatgtggatggggtcctcttggctgcttgggtacgggggcaccagccggatggatggtgctgggatcgccaaggagccagctgcaaagagcaagatggtccagggcatctctctctgcgtttggctgggaaatccggctgaggccagaggggcccaaggctccccgccaactcctcctgtgaggcgtcgacgcggccgcgaattccnnnnnnnnnnnnnnnnnnnnnnnnnnnnnnnnnnnnnnnnnnnnnnnnnnnnnnnnnnnnnnnnnnnnnn

SEQ ID NO: 39478 - DNA, 311 bp, Homo sapiens
tttgcttactggtgaaattggttttcttatattttgtcaacagtaaataggctgtgtgcttggataatagttaggctaatataggaaaatttaatcatggcttttctcaagtttaatttgaaagagtgcagtggggaagtcccctgcagggtggaaatcgtagtagttgaacatgagtgacctttttggttgactgactgcccttcctgtgaagctggcccaatatctttcccctgtcaggattacttcctgtctcagcctgaatagtttaagtagctgcaagattgatgttggatatctctgggaaaatt

SEQ ID NO: 39479 - DNA, 312 bp, Homo sapiens
  misc_feature (1)...(312): n = a,t,c or g
ggctgctgtatccactgagacagggctccagccgctccgggaagaaaatgaccacagcaggcagaagccagctgattttgaggccaagttccagcttctccggggtggtgctttggctcctggggttctgcccgcagcccacaggggcccggaagtgtcagggggaccatgggacgacagggcccccagaagggaggcaggtcacaatgtgagggtttgggtccagagtacctgctggtttgattctgttttccctgtaaccaggtcctgaacgcccagagcctcagcagaacatcagccagtggngctccc

SEQ ID NO: 39480 - DNA, 317 bp, Homo sapiens
gaaattactcatagtcatttgggtagttggattgtctttccattggctttcatatataaggcaaaaaatgtccaaaaatactgagaagcaccaaatggtgctagtaatgcaattcatgaacattttccaaatttgctagcaagatagtcggtaaaatgtgccattttcacatcttgttcatagagcaaacaaaataatacttaactatgcaataatatacagtattaaatccccctgggaaaagagttggttttaaatactttgaaaagaaactttcaagttagtgatttacacagttaattataaacaacaagact

SEQ ID NO: 39481 - DNA, 313 bp, Homo sapiens
gggagctccaaataaacatgtgacctgaaaattcagatttgagaatccgtgtagttaatgccacagaaacaaatgagatcacttgaggggtgtgctttgagcaactatcactgtgtagcaaagtaccctaaaacctggtaccttaaaatgataagaatcatttcttttgctcaaatatgtgtaagctcatctctgcttcatgtggcattagtaggctatttcaactggaggctgaagattctactttacagatggctcatacacatggctaataagctgttgctgactattaggagctcagccagggctgtgg

SEQ ID NO: 39482 - DNA, 318 bp, Homo sapiens
  misc_feature (1)...(318): n = a,t,c or g
nnnnnnnnnnnnnnnnnnnnnnnnnnnnnnnnnnnnnnnnnnnnnnnnnnnnnnnnnnnnnnnnnnnnnnnnnnnnnnnnnnnnnnnnnnnnnnnnnnnnnnnnnnnnnnnnnnnnnnnnnnnnnnnnnnnnnnnnnnnnnnnnnnnnnnnnnnnnnnnnnnnnnnnnnnnnnnnnnnnnnnnnnngaataatgcccagagaatgcattgctgcttggtatccgaatttggtagttatgttggggaatcaatttattagaggaaaataatgacatttctaaatttgaggttcataagcaagtcttataagtaagcata

SEQ ID NO: 39483 - DNA, 318 bp, Homo sapiens
  misc_feature (1)...(318): n = a,t,c or g
ctagaattggctcttgagaaatagagatagttgtaaaaacctaaaaaaaaaaatttttaaaccagtgaaaaacaaatccagccaaaataaaattgagttannnnnnnnnnnnnnnnnnnnnnnnnnnnnnnnnnnnnnnnnnnnnnnnnnnnnnnnnnnnnnnnnnnnnnnnnnnnnnnnnnnnnnnnnnnnnnnnnnnnnnnnnnnnnnnnnnnnnnnnnnnnnnnnnnnnnnnnnnnnnnnnnnnnnnnnnnnnnnnnnnnnnnnnnnnnnnnnnnnnnnnnnnnnnnnnnnnnnnnnnnnnnnnnnnnnnnnnnn

SEQ ID NO: 39484 - DNA, 317 bp, Homo sapiens
  misc_feature (1)...(317): n = a,t,c or g
caaccaaaatgtccatcaacagataaatnnnnnnnnnnnnnnnnnnnnnnnnnnnnnnnnnnnnnnnnnnnnnnnnnnnnnnnnnnnnnnnnnnnnnnnnnnnnnnnnnnnnnnnnnnnnnnnnnnnnnnnnnnnnnnnnnnnnnnnnnnnnnnnnnnnnnngacctatgatctcaattatgtgcagatttgataaacaatcaagttcacagaagcagagaatagtagaacggtggttatcagcagctggggtgaggaaaatggtgagatgtaggtcaaacggcacaaagttttagtaaggaggagtaagtctcttg

SEQ ID NO: 39485 - DNA, 314 bp, Homo sapiens
ggaaggagatgtcagtgctttatcaaagatgaaggggtcacagagggacaatgggacaaaggccctcagctgggacatttcttggccacaatgagaacagcagaaggcacgagtcccagctcctgcagaggccgctccatgtcagcttctgagaaggcccgtctggggaagccactgagcaattgcacagggtcctggcccccacctagttcctccccacggtggagctccacatagagcctcacagctgccagctgttcccgggcccggaacgtctgggtcagtgaggtcccatctggcagcctgacctgtat

SEQ ID NO: 39486 - DNA, 428 bp, Homo sapiens
ctctgagacactgttccacaggctaaggaatactgctgttcagttttgctgaaagaggaggagcacacaggaaatcaccccctaaatttggcattggctacaggaactgaatagacctcagttttatcccttctgtggaaatgggaaaggagttctcgttgcatgagggatagcagcagtgtgtcacgcaggagcttttgtttttaagcttaggtatgaaaaaaggaggcgtgttcactgtagaaaacaaaagggataaattatagtgaaatttattttgggcccctaatacccaaaactactattagattgggatctttttggtataatatgaccctgagaagtagcacccagaccaatctttggagggggaaaaaactggttgtaaagcacaactgtttaagatctttgacttgtacttcttatca

SEQ ID NO: 39487 - DNA, 342 bp, Homo sapiens
caattatctgcttgttcttctttttatccacttctttgtctccatcaaatttctgtttctggagcatataaaggcaacaggacacttgctcataagaagcttgaagtttttaaaacgtaaaatatgcaagtaaatatgtagccagatatgtgagcagatatgggggtccagtaaaatcccctaacacaagctatatacaaggtatatagatttacacctataactcaaatgtgctttgtaatagctgaatgtagcctggctaccttatgataaagggtatgaaaataatgggttttttaaacctcattacaaaattgagggcaacgataattaattagtatt

SEQ ID NO: 39488 - DNA, 340 bp, Homo sapiens
  misc_feature (1)...(340): n = a,t,c or g
gtcattttgggctgatatcacctgaaaacagtcatttaaaagattttaatgtaatttgtgggaaagaacagcagaagcaccttctttcccacaaattgagaattaatattataactgtctttctttaatagcatttgttgctcagtatttcttagtgttatacatcttttgctgggtatcagaggcttggtcctattttccctattccacattaaattttgttagagtaacagtagttcatttttggtgcagctttctcaagtgtcaagtacagttcttaagtactactattctaaagctgcctgattgttttcagngtttgaccctgcagagcctagtc

SEQ ID NO: 39489 - DNA, 287 bp, Homo sapiens
  misc_feature (1)...(287): n = a,t,c or g
nnnnnnnnnnnnnnnnnnnnnnnnnnnnnnnnnnnnnnnnnctnnnnnnnnnnnnnnnnnnnnnnnnnnnnnnnnnnnnnnnnnnnnnnnnnnnnnnnnnnnnnnnnnnnnnnnnnnnnnnnnnnnnnnnnnnnnnnnnnnnnnnnnnnnnnnnnnnnnnnnnnnnnnnnnnnnnnnnnnnnnnnnnnnnnnnnnnnnnnnnnnnnnnnnnnnntgagaaatgcctggggcaggacccganagtcggacgctcaattccaacttgcacttttacganccanaccttc

SEQ ID NO: 39490 - DNA, 319 bp, Homo sapiens
gccccagtgtctcagctcgctggccctaagaatggctggttgatagtttcacaaaagtcaagggaaatgaagaaagcactgagatagatgcagcattttctagccatcatttgatggaagcttaaataaaataaagatacattcaccttttgatgcctcacccttaactctttcctgcaaagatgcgagttctcataaacaacaaaatgatagcccttgatcgatatagatgcttctttctctagagtatttgtcttaataggactccaaatatgacttcattgctctactgaacaccacccccaaaaaaggaaacaga

SEQ ID NO: 39491 - DNA, 328 bp, Homo sapiens
  misc_feature (1)...(328): n = a,t,c or g
ggagattctgtaataattctggtgactgatattgaaggccaagactggggtgagggttgggagtggaaggcgaagaagagttgactctgcggtaggattccccaggaagtggagttggaagaacatgatggagggaatggcaggagtcaagtgcagagtgtgggccgggattattggctgggacagtgtagtggagtagagtgtgaagaggagagaaggcatgggttcaatttgggatgggctgagttggaagttccagggcatatctgatggcagcggggaatgggggctagcagggagcagtgcatatgtcatgtgnattagcaaa

SEQ ID NO: 39492 - DNA, 324 bp, Homo sapiens
  misc_feature (1)...(324): n = a,t,c or g
nnnnnnnnnnnnnnnnnnnnnnnnnnnnnnnnnnnnnnnnnnnnnnnnnnnnnnnnnnnnnnnnnnnnnnnnnnnnnnnnnnnnnnnnnnnnnnnnnnnnnnnnnnnnnnnnnnnnnnnnnnnnnnnnnnncttntattantaggatatatgtgctatgtactnancataaaacttcatggatatcaaattctcaaancaacctatgcaattatgtaacttgngcnagggnaaaaanananntgaccnancangattnaaanatatatntgactntaaacctacagtacttantcttanatttttaanacacanagncatttta

SEQ ID NO: 39493 - DNA, 335 bp, Homo sapiens
  misc_feature (1)...(335): n = a,t,c or g
tggtagtaaggtggagtgggtttaggacccctttgctagggaaaagaataaagctcagttggagggtgccaagaaaaggtggaaaataaatccatatacttttcccaggattgtctacattccagaaaagttgaaaaggagtgttctttagagtccaagaagaaaaatcagcaagaagaaaaatgcctttgggcatttttttttttcaaaactaaaacgcaatgtatttatctttgccagcattcaagtaactagaagtattctggatgggcccatttcaaaaagctctgagtaggccacaggtgcaatgccaaatgcacagctganaggcccct

SEQ ID NO: 39494 - DNA, 392 bp, Homo sapiens
  misc_feature (1)...(392): n = a,t,c or g
tgcgttaaagattaaacactggagctcttatccaagcttgctcttgcagccaaaagactaattgcaaaggcatcttctcagtgaagggggcggggtgggctagggctgagtggaaatggtgagagagattattgtagaaaatatctcttccgggaacttagggcaaagagttttattttcaggaatcacatccctgtctcccccaacctcagaccaggcccccaatctcctccccacaagaaaaagcaaaggcagtctgaaaacctgttgcaaaggaagggaacacttctgaaggaggaagttgagagtcttaggccaggtcttgaaggagggggtatcaattaagcagagactgattggaaggggcctaacgtacctatgatagntctttt

SEQ ID NO: 39495 - DNA, 301 bp, Homo sapiens
  misc_feature (1)...(301): n = a,t,c or g
gagtcgttttaccctcttctattgaattgccttgggatttcttctccctttccctgcccaccctgtcccctacaatttgtgcttctgagttgaggagccttcacctctgttgctgaggaaatggtagaatgctgcctatcacctccagcacaatcccagcgaaaaaggtgtgaagcacccaccatgttcttgaacaatcaggtttctaaataaacaactggaccatnaaaaaaaaaaanaanaanaannananntnnntaaaaaaaattaaaanttntatttnnnttcttnttnnnnattt

SEQ ID NO: 39496 - DNA, 305 bp, Homo sapiens
  misc_feature (1)...(305): n = a,t,c or g
nnnnnnnnnnnnnnnnnnnnnnnnnnnnnnnnnnnnnnnnnnnnnnnnnnnnnnnnnnnnnnnnnnnnnnnnnnnnnnnnnnnnnnnnnnnnnnnnnnnnnnnnnnnnnnnnnnnnnnnnnnnnnnnnnnnnnnnnnnnnnnnnnnnnnnnnnnnnnnnnnnnnnnnnnnnnnnnnnnnnnnnnnnnnnnnnnnnnnnnnnnnnnnnnnngggcntnacaccnnacccngcttattgttgnatttttagtananacnnggngnacccnatntggggcangantgtgntatttttttttttntccc

SEQ ID NO: 39497 - DNA, 302 bp, Homo sapiens
  misc_feature (1)...(302): n = a,t,c or g
gtataatatagtcagtttagcttatgtcttgtgaaggttaaatactcctnanatttatggaaaactttaaggtttacaaaggcctgtctcatatacattatctcaggaagctgagatttagagtttgngattacacntgggtgcatgaccagnngtgttactgctagaatttgaacccagngtannctttctntcttntccnntttcnntnncttcttttntgtntatntntntntctnttttattnttggnccttttttnacatgntntnttttntntntntttttnttantttgtntttt

SEQ ID NO: 39498 - DNA, 348 bp, Homo sapiens
  misc_feature (1)...(348): n = a,t,c or g
gcctgggtcctttccccaatcttacaggtaaacaaactccttaaagaccttaaatatgataggtgcatgtcttgctgactgaatgattctgttccagggtctgttcacctcaaatgtgatagcttcctaactttgtcttgcccatcctgatccatccccttatcccaacagtttgcctgcttagaaacatgcagtggcttcccatttgcagagataaagtttacttttctttttacttggcatttgaggctagctatgttttggttcttcccctgggtaaatgtgtctctcattccttgnctcttgatcattgcattttaatagcccttgaacagttatatttgcttt

SEQ ID NO: 39499 - DNA, 347 bp, Homo sapiens
  misc_feature (1)...(347): n = a,t,c or g
ggcaaaccttaaactagagccaagggagaaggagacaagcttaaaaggaaaaggcataccaatggaaatgggagagaagagtaaaggttgagagcaaaaggagaaaaggtcatccatgtatacactggtgtgtggcatggtgccattctggtgacataggatgccatcactgtccatctttggcttaagcagaggccacagacagaacattttaggctacagccaacttcagaatctttggggaaactccaaaattatttagcatatttgtaatgacaattccctatggaatgaagataaattagggtggattctgaaactancacgnactgcacacanganatcaa

SEQ ID NO: 39500 - DNA, 84 bp, Homo sapiens
gtgagccactgcacccagcccccacctattcttttaagtccattcatttgttttttggtgttttcttttctttttttttttttt

SEQ ID NO: 39501 - DNA, 311 bp, Homo sapiens
  misc_feature (1)...(311): n = a,t,c or g
ccagcttggccaacatagtgagaccccgtctctaaaaaataaaaaagtaactgggtgtggtgcacaccacacctgtagttccagctattcggaaggctgaggccnnnnnnnnnnnnnnnnnnnnnnnnnnnnnnnnnnnnnnnnnnnnnnnnnnnnnnnnnnnnnnnnnnnnnnnnnnnnnnnnnnnnnnnnnnnnnnnnnnnnnnnnnnnnnnnnnnnnnnnnnnnnnnnnnnnnnnnnnnnnnnnnnnnnnnnnnnnnnnnnnnnnnnnnnnnnnnnnnnnaatgtaatgacttgctggtagaatggat

SEQ ID NO: 39502 - DNA, 311 bp, Homo sapiens
  misc_feature (1)...(311): n = a,t,c or g
aacaaagatggcccattttgtgttgttgcagaaagccaaactagaactatttgttagaaactatcttgggacaaagtttaggtaaaataaccccccaaaaaagtaaaataactctctgaggcactgtttcctaaagtgtgatgctgttgctccttggagtacccaagatgattttgatgtacacagatacacattaaaataaatgcatgactgttgcaattaaagaacattccttagaaaatgcagaactgacagaaagctgacagtgatgctaggcttgagtttctttaataaaacatactgntacaatt

SEQ ID NO: 39503 - DNA, 323 bp, Homo sapiens
  misc_feature (1)...(323): n = a,t,c or g
ctgatatagttttatccaattttaaaaatgatttgctttttaaattagaatagttttcttttacttaaatacaaaagcattacaaataaagttgaagaaatctatgactctctactannnnnnnnnnnnnnnnnnnnnnnnnnnnnnnnnnnnnnnnnnnnnnnnnnnnnnnnnnnnnnnnnnnnnnnnnnnnnnnnnnnnnnnnnnnnnnnnnnnnnnnnnnnnnnnnnnnnnnnnnnnnnnnnnnnnnnnnnnnnnnnnnnnnnnnnnnnnnnnnnnnnnnnnnnnnnnnnnnnnnnnntgacgangtnttcaccgtgttg

SEQ ID NO: 39504 - DNA, 321 bp, Homo sapiens
  misc_feature (1)...(321): n = a,t,c or g
nnnnnnnnnnnnnnnnnnnnnnnnnnnnnnnnnnnnnnnnnnnnnnnnnnnnnnnnnnnnnnnnnnnnnnnnnnnnnatgccctgctggctagaggattttaaaagaggaaaaggtcagtgtgagttaaaagtggttgaggcaggttttatggaggtgtgagatttggagggtgagtaggagttagatgtatggaaaggtggaagaggaacctttaggcanantaaggtataagcaatgatgtggatatnggaatgggaagccctcttgggactnatatttcacagggaacannttgangagatcnggggccnacttaaaa

SEQ ID NO: 39505 - DNA, 314 bp, Homo sapiens
  misc_feature (1)...(314): n = a,t,c or g
ggactagatgatctctacttcccagcctagttgagtagattaccaacagctaagtttacactgctgtgcctagttttcttcttttgaaatgattcttgtttagtcaactttgcaaaattcctttctttttgacatatctgtttatatttacatttccagttttactggttacttgagtttaacattagccagcttccattatcctaataaacagtaagaattctgtcactgaatattttatctgccaggtttgttcttaccacttcctttaatgactccttaattattccatcttcntattaaaanagtggggg

SEQ ID NO: 39506 - DNA, 329 bp, Homo sapiens
  misc_feature (1)...(329): n = a,t,c or g
nnnnnnnnnnnnnnnnnnnnnnnnnnnnnnnnnnnnnnnnnnnnnnnnnnnnnnnnnnnnnnnnnnnnnnnnnnnnnnnnnnnnnnnnnnnnnnnnnnnnnnnnnnnnnnnnnnnnnnnnnnnnnnnnnnnnnnnnnnnnnnnnnnnnnnnnnnnnnnnnnnnnnnnnnnnnnnnnnnnnnnnnnnnnnnnnnnnnnnnntagaattaatnatancatttttgggngngnaaatntttcnncagagntttanaacntgntcttctttaataacantnttgtntcaaattgnggcanttttgncnttccanaatntngtttnaaaacttt

SEQ ID NO: 39507 - DNA, 88 bp, Homo sapiens
gcagaataggaaatattgtagcttacttctctggaaatactaaagaatgattatgaaatatcaaatgcatcgtgtttttttttttttt

SEQ ID NO: 39508 - DNA, 355 bp, Homo sapiens
  misc_feature (1)...(355): n = a,t,c or g
ctaacactttgggaggcgaccgtgggcagatcacttgaagcnnnnnnnnnnnnnnnnnnnnnnnnnnnnnnnnnnnnnnnnnnnnnnnnnnnnnnnnnnnnnnnnnnnnnnnnnnnnnnnnnnnnnnnnnnnnnnnnnnnnnnnnnnnnnnnnnnnnnnnnnnnnnnnnnnnnnnnnnnnnnnnnnnnnnnnnnnnnnnnnnnnnnnnnnntgcactccattgtgggggacagagtaaataagacactgtctcaaaaaaaaaggatgaatggaagggagaagggtactatagagggaataaaagcaaaatcacccttcttcctttagaagaagaagagaatttgttcgggacata

SEQ ID NO: 39509 - DNA, 414 bp, Homo sapiens
  misc_feature (1)...(414): n = a,t,c or g
tttgaagggccnnnnnnnnnnnnnnnnnnnnnnnnnnnnnnnnnnnnnnnnnnnnnnnnnnnnnnnnnnnntctcgaggatccgaattccnnnnnnnnnnnnnnnnnnnnnnnnnnnnnnnnnnnnnnnnnnnnnnnnnnnnnnnnnnnnnnnnnnnnnnnnnnnnnnnnnnnnnnnnnnnnnnnnnnnnnnnnnnnnnnnnnnnnnnnnnnnnnnnnnnnnnnnnnnnnnnnnnnnnnnnnnnnnnnnnnnnnnnnnnnnnnnnnnnnnnnnnnnnnnnnnnnnnnnnnnnnnnnnnnnnnnnnnnnnnnnnnnnnnnnnnnnnnnnnnnnnnnnnnnnnnnnnnnnnnnnnnnnnnnnnnttngntatngntcanttgnctntacntgnanngnttcttgtngtnnattagt

SEQ ID NO: 39510 - DNA, 325 bp, Homo sapiens
  misc_feature (1)...(325): n = a,t,c or g
ctcacgtgtaaaatggggataacaacagtactcaccacgaagcattgctatggtgattaaatgacttattatatgttgagactttaaaacagtacttggtcaatggtaaatactcaaaaaattgctggctactacatttgcatatgtcactttattattcggtgcctgcctttactcctttcttgcacctggtccatcagtgatgaaaagtttctcactttgtaatttgttaggcatccagtagagttctatagatgagcatcatatatctctctaagcctaatccatccacagttcattacaagatgncctcacnnccctaagt

SEQ ID NO: 39511 - DNA, 300 bp, Homo sapiens
  misc_feature (1)...(300): n = a,t,c or g
nnnnnnnnnnnnnnnnnnnnnnnnnnnnnnnnnnnnnnnnnnnnnnnnnnnnnnnnnnnntgnnnnnnnnnnnnnnnnnnnnnnnnnnnnnnnnnnnnnnnnnnnnnnnnnnnnnnnnnnnnnnnnnnnnnnnnnnnnnnnnnnnnnnnnnnnnnnnnnnnnnnnnnnnnnnnnnnnnnttgtccaatacgtaactaaataacgttgtagataattcttattttattgatcaaatcattattttacattcatgttatatgttacatctggaatngtaaantcttcattantatattactc

SEQ ID NO: 39512 - DNA, 314 bp, Homo sapiens
  misc_feature (1)...(314): n = a,t,c or g
ctttccctcttttttaacctgtgcttgccctttccccgtttaaacaccgaaattcccaaaacccctctagaaaagcacaggtcacaactgttcctgtggcttgtttttcccaggcacatactaaacccttgactaagtaaacctctatggattgagacctgccactttttggttaacaagtgatatagaacaataaggaggaaaaactatactaaagatactgtgaattagccccaaaataatgaggattaaacaaaagtaaatcagctaatagtttatcttgactgtaaagatccttcactgnccacatttat

SEQ ID NO: 39513 - DNA, 314 bp, Homo sapiens
  misc_feature (1)...(314): n = a,t,c or g
nnnnnnnnnnnnnnnnnnnnnnnnnnnnnnnnnnnnnnnnnnnnnnnnnnnnnnnnnnnnnnnnnnnnnnnnnnnnnnnnnnnnnnnnnnnnnnnnnnnnnnnnnnnnnnnnnnnntcctggcactttctatctcccttctctgcttaattttctcaatatatattttacttatttgtttattgtctgtctctaccctgtccattcctcaaacagtgagctcactgctctattcccagtacctagaaaagtacctggcacacagcagatattcaccaaatatttgtgggatgaatgaatcagtggtcgacacgg

SEQ ID NO: 39514 - DNA, 328 bp, Homo sapiens
ctctggtctcacttctcaccattgactctcaaatgtcacaatctcctaggaagctagttaaaagtaaagatttctatgccctaaacccaatgattccaaatctggttaatggatgggggcctaataatcttattttttaacaattatctctaggtgaccaaggtacatactgagaaacattgctctaaccactttaactagaagagctcattaaaactctcagcttgtggaagaaaacatcatgtttccaattattttttatagctgataattcccaattctgtatttcagaccagctcttcatctgaggtccaaacctatttgtttt

SEQ ID NO: 39515 - DNA, 326 bp, Homo sapiens
ttttgattactgttgctttgtagtaagttttgaattagagaactgtgcatcctccaaccttgtttccaggattgtttgggctattctgggctcctttaatcccatatgaattataagatcaacttgtctatatttgaaaaatatgcagatggaattgtctctttcgttcttgattttagtaatttgaatctttcttttcctttggcagtctagttaaaggtttgtcaaattttttttatcatttcaaagaaccaactttggtttcattaattttctctatcattcttctgttctctatatttttcaccctgctctaagctttatta

SEQ ID NO: 39516 - DNA, 321 bp, Homo sapiens
  misc_feature (1)...(321): n = a,t,c or g
nnnnnnnnnnnnnnnnnnnnnnnnnnnnnnnnnnnnnnnnnnnnnnnnnnnnnnnnnnnnnnnnnnnnnnnnnnnnnnnnnnnnnnnnnnnnnnnnnnnnnnnnnnnnnnnnnnnnnnnnnnnnnnnnnnnnnnnnnnnnnnnnnnnnnnnnnnnnnnnnnnnnnnnnnnnnnnnnnnnnnnnnnnnnnnnnnnnnnnnnnnnnnnnnnnnnnnnnnnnnnnnnnnnnnnnnnnnnnnnnnnnntgatcccttttctattccttttggatggctttcctcttgtgcctgccacatcccctctttctcgaacagtctgatct

SEQ ID NO: 39517 - DNA, 326 bp, Homo sapiens
ctccaatcttcaaagccattcaataatggtctaataacaaaccaaacaatttaataatgaaatatctaaatcttgaacttctaattctatgggtacaacatacttactatgcactggttcattaattcacaatgtgataaagattttatgaaggacagtgtggtaagaggtaatcaattaactatgctacttgtgaagacattcaaaacataattatttctataggtaatatggagtttgataaaatacagctctgcctgttcactcccctaatgtcctttactttcaaaggagaacattttatagtaaccccctccactacttac

SEQ ID NO: 39518 - DNA, 323 bp, Homo sapiens
attttttttcatggttgtcctatatattgtcagagcatataatcattacatactatgctgtctctcctccagtctttacttagtcttaattctgttagtaaccgtatatttaatgctcaccactagttcttataatgatgtttctttagtcatttggattgcctcaagttttgcctctagtaaattctttaggaaaggcttaagggaatattcatatttcatgaattttcttgctcgttcataacattttgtctgtgttttttatatctaaagtttgtgtttgccagaaatagaatccttggctcactttttcttttcttgaa

SEQ ID NO: 39519 - DNA, 321 bp, Homo sapiens
  misc_feature (1)...(321): n = a,t,c or g
tgtatttttagtagagatggnnnnnnnnnnnnnnnnnnnnnnnnnnnnnnnnnnnnnnnnnnnnnnnnnnnnnnnnnnnnnnnnnnnnnnnnnnnnnnnnnnnnnnnnnnnnnnnnnnnnnnnnnnnnnnnnnnnnnnnnnnnnnnnnnnnnnnnnnnnnnnnnnnnnnnnnnnnnnnnnnnnaataggcgtaatgttttggcattcaaaaaaatttcagattgtgttgtaagtttcttttttcacatatttttaatataaattttttcatcccaatctcgccccagcagctcagctgacttccaccccgtttctcccctt

SEQ ID NO: 39520 - DNA, 322 bp, Homo sapiens
  misc_feature (1)...(322): n = a,t,c or g
cttgcagggaagctgcccactaggatgtcattgagacttgctggaaagccacctgccggggagctgacaaggctaaccgggaagcttcccgttggcaccctgacataagagcaagaaggaaaagcaccagaaccaggagttgagcactttcttggcagtgtccctccagcaccacctactgatgtggataactttgtgcctgctggtaaaggtntatttttttnanngtaaaggncnnttattacantnnatgncnttncattatgnttnaaancattangtnncaattnttanttaatttttatnaantttaananntgga

SEQ ID NO: 39521 - DNA, 317 bp, Homo sapiens
  misc_feature (1)...(317): n = a,t,c or g
taaacactttttattttcagaaacaggatctcactctatcnnnnnnnnnnnnnnnnnnnnnnnnnnnnnnnnnnnnnnnnnnnnnnnnnnnnnnnnnnnnnnnnnnnnnnnnnnnnnnnnnnnnnnnnnnnnnnnnnnnnnnnnnnnnnnnnnnnnnnnnnnnnnnnnnnnnnnnnnntataanaatnaaaatannagtttaaggtctnntttnnngnttntttttnnntnannttnntttttttttttaatnnnaaatttttttttnaanaaaatttttnnttntgtntnatttttttaanttaatnnatnncccc

SEQ ID NO: 39522 - DNA, 327 bp, Homo sapiens
cccaaatggcctggtccccaccatcccttcccggtcagttctgagaaaggaggtccctaaccatcctgcctacaccagcagccaccctctgtcagcgcccatgtctttcgtggcatcatcactgtcatcagtgaagattaaatctgttgtctcaatcactgtctgtcccaacactaaatacagacgacacacttgtctttggcatcccaagcactttgcacacatctgccactcagtgaagatctgctgaatgaatcagagagccccccacaaccccaaaaaagccaagattcactcaaagccaagcctggcaaataagggaggtaa

SEQ ID NO: 39523 - DNA, 323 bp, Homo sapiens
tagcattaggggaaatggggtgaggaatgtaagggaactctactatttttgcagctcttccgcaagtctaaaattagatgaaaagttttttaaaaacagtaagaaattctgaacaaaggtagaggaattaccctttaaataaaagaagaaaatctcttccagtgaggccagaataaaggaagaaggaacctgtagagatagtgaagagtaacatggaaaaatggaaggttcaggcagttcgtttttgctgtcttactttcttgtgaaataggagttatcatttgaccgcctgtataaaacagcaccaatgaggaaaatatagt

SEQ ID NO: 39524 - DNA, 328 bp, Homo sapiens
  misc_feature (1)...(328): n = a,t,c or g
gaacgatctagtaaaacatatgaacgtttgcagaaaaaattgaaggatcgccaaggaacacagaaagataaaatgagcagtccaccatcatcaccccagaaatgcccttctcccattaatgaacataatggacttataaaaggacaaattgctggtggtataaacacaggatcagcaaaaatcaagtctgggaaggggaaaggtggtacacaagttgatacagaaattgaagaaaaagatgaagaaactaaagcatttgaagcacttctttccaacattgtcaaaccagtggcctncgacatncaggcaaggacagtagtacttacct

SEQ ID NO: 39525 - DNA, 310 bp, Homo sapiens
  misc_feature (1)...(310): n = a,t,c or g
ggacatcagtttaatttaaacatcacccagactaatacagcaattgaatacaccagcagttacaccttgttgagaaaattagaaatctggctttgaggagagggaattttaaaagcaccttactagtgtcgagttcagacatatgacttaagtttaaggatttaatacttctgtctgtattttatttaaacttcaagggattgaaaatgttttgggggagagagaagagtcactttattttttagaaattctagtatcggtggtcgacgcggccgcgaattccnnnnnnnnnnnnnnnnnnnnnnnnnnn

SEQ ID NO: 39526 - DNA, 307 bp, Homo sapiens
ttctagagcgatgaagcaaagaccttgtaaggacactaaaaagtaacaactgtcccccacacaggcagaatcaagacgactgctctctacatttcaacagtgggagtcacactgagttatcattagcttgctttcttcaacggaaggagataacagaccttaaccagacaagaaggaaaccccagtgaagtaaagtatacattatttcaagatcttagaacaaaagtactgttaatcaacagattaatattcatagtaggtatgagacttgctataaatcatttttgtgacaatttatcacaatctc

SEQ ID NO: 39527 - DNA, 316 bp, Homo sapiens
  misc_feature (1)...(316): n = a,t,c or g
catccatccactcatccatctatccatccacccagccgtcaatccatctacctactcatctgtccatctacccatctacccacccatccacccacccatctacccnnnnnnnnnnnnnnnnnnnnnnnnnnnnnnnnnnnnnnnnnnnnnnnnnnnnnnnntnnnnnnnnnnnnnnnnnnnnnnnnnnnnnnnnnnnnnnnnnnnnnnnnnnnnnnnnnnnnnnnnnnnnnnnnnnnnnnnnnnnnnnngaacctctgatctatatgnaaattttttaaaatgactaagaaatntaantgcccattcttttttttg

SEQ ID NO: 39528 - DNA, 312 bp, Homo sapiens
attttaataggatccctctggttgctggtggaggtgagagtatggtgtaggggcagtgaagatcccagagaggaggctactgtaatggtccaagcaggaggtgatagcgatttggatcagggtaacagagctgaggtggtgagaggctgacaggtcatgcatctattttgaaggaaaggccaagtccaggctccttagctcggcattcaaggcttctctccaccactggacacacttactctctagcttctcagaccctgtagcaatcagaatcatgacccccggtgatgtccacatcttaatcccctgaat

SEQ ID NO: 39529 - DNA, 308 bp, Homo sapiens
gtgaaataaaataataaaactggggagcctgtatcaggtttttaaaaaaatgttattaagtctatttttaatatcatttcatgaaagactaaaatcaaggaaagagaaaagctcagaataaaagtctttcctaaaggaggatgagaggcaacttcaaattaaatatattgtttaagggatatatttaaatacttagaaagcagaaaaaaatcacaatgtcctattttacaatatgtatacaattttctctcatcacaaatttatcaacttttctatgatctaaaatacaattaaatccccaaaattta

SEQ ID NO: 39530 - DNA, 311 bp, Homo sapiens
attaggtttgttttaatcaggaataaatacatgatttagcaaagtgtaatgcttcccactgagaaatccctctgggtgctccccaaatgttccaatcacattcgtcacaacggaaaacaacacataagatactgtgcagacatctggagttcagggggtcaccctgccttatgcgggaagtcaatgtccacagtgttacattcatttctcatacgttggctggttcctttgaaatagccttttggaacggttggggaaaccacagatgtctccttgtataaacacactagaatctatgatacagaaaactg

SEQ ID NO: 39531 - DNA, 295 bp, Homo sapiens
caaaaacgaagtcttgaaagaaatatgcatgtaacatacttttgtattaggaaaattattcagaagtgatatttgtatgcagcggatctagtgttttcttcttttcaaattttgaagaaaatataggagactagaagaggaatagatttggggatgtttcagctccatcaggaaaaatccatttgcttgaaaagcataaagccaagtagggtttatcttagattcataaggaaggtagaggaggttctgtttcacataaccctaaaccctataatcatttcttcttaaatctgcg

SEQ ID NO: 39532 - DNA, 306 bp, Homo sapiens
  misc_feature (1)...(306): n = a,t,c or g
gtcaggcccacccaggatgtctcctttttgatgagctcaggtcaactgaccaggaaccctcgtcgcatctgcaaaatccctttaccgaacacacgacctaactgcattaacctaaccactggagtgacaccccatcgtatccgcaggtccagcccatcctcaagtgcaggggattagacaagatgtgggcaccaggcggtgggggtcttgggcgccatcttggaattctgcctaggactgtagctgtaaaagacatggtggccattgctgctgtaggtgccattagtaggaaacacacncanagtg

SEQ ID NO: 39533 - DNA, 231 bp, Homo sapiens
cacagcacagcacagcaaagccctgagagctctgagtttctgcctgagtctaattatctataaaggaaagagactggatcctcaagtcttccaatccatccattgtagaatacaggactctgttctgatgtttcaaaggatgaattatattgaaggctgcctcaaaagacttcccagtctgggcaacacagtgagacctcatttctgctaaaactggaaaaaaaaaaaaaa

SEQ ID NO: 39534 - DNA, 311 bp, Homo sapiens
gtgaattttgcaaacaggaaagtctgagttgggaggctcacacgcaacagaagctggtcactttgtacaaatagaaagggcttagcaaacatcctggaaaaggcctggtggcagcacccaaccccctacaaatagcaggaacaattcaccaaagggaactgagcctgaccttggccctggtgggctctgctctaaaagtggagttcctgggctggcggggacagcctggcccaagcgtgccccgcctggcccaagcgtgccccattcacagcctcctcacccaagaagggcaggcttcaaggcagcatttt

SEQ ID NO: 39535 - DNA, 309 bp, Homo sapiens
gcaagctcttgtcccggggtcatggcaagagaatttgctttcggcttgaatcttctgagctgatggactgtggtggcagtaacagggcaaatacttatccttacataagtaacacactttcaaatagtatgtttttgtggaaagaatgcgtactgtttgccataataggaagtaattactctaagtagcgtggaaagaggaactcttggcttatataagagatgtctgaatattcagggcagttccttgttgtatagactgtgtctactaatggtctatcatcattatcattaccatgtctacagaaaa

SEQ ID NO: 39536 - DNA, 235 bp, Homo sapiens
ttcaaatatgccaactttcataatcctattaacccttagatttttatgttctgttttcaggaacttcacccccagaccattttaccctttcttgtacaaaaagctttgggtcccttgctgccaagggttgagccaaaggactccagcccttttgtcagtagtttccccccctattgccccacgccagatcagatttttcactgtagtctctgccttccagctttttttttttttt

SEQ ID NO: 39537 - DNA, 311 bp, Homo sapiens
tgttcacctcaccctccagaaggctaatagtctcaactacagctgactgtcaatacaggaataaaagaaaatcataaccatcaaaccaactcatctcctaaaacatctactttgggttgctttactgaaacaaatgtgagttaaaatttgtaaatattgaagatgagataagtaagcacagttaagtgatacttgcaacctaagagtggaacaaatgagtttgctgtggtttagctctataactcaatccaatgcaaagggcacaaaagctagtacttttgctatagagaatgactgttctatgtgctaaa

SEQ ID NO: 39538 - DNA, 310 bp, Homo sapiens
gtcactgtcaccatcgctgggagccctttctcttaacctgaggtatatcagtttcctgctggccccttcagcattctccatacccacaacgattatctgttggcatctcagtgattacactgtgagcccctcaaagatagatagtatctcattgattttcctatcggtgaccaataggtgcttcatgaagtatgtttcatgcaacagaacacacatgctccaagggcatgatttttttctaaccttgccactgtctccagagaaaagaggaagttcttcttccatatggactcagtcctgggcaggccct

SEQ ID NO: 39539 - DNA, 311 bp, Homo sapiens
gaaaaaagaaaaagaaaagaaaagaagtcccggctcggtggcttcccaaagtgctgggatcagtgtgagccagcacaccaggctgaaaactatttaaatcaatgctcatttttgtgtttccacatgtaacattattttaggtgatggtttatttatattaaaatatgaactaaatttcaattttgaagaatatagattctgaatccaactgtgtggtatagtgattttagttgcagattggtgattgaaccacgcaagtctcagctttcaataatgtagacagtttctgagttacgtataatatatatctc

SEQ ID NO: 39540 - DNA, 306 bp, Homo sapiens
  misc_feature (1)...(306): n = a,t,c or g
ttcagaaggactgagctagtttgcgaaaccacagcacactttggcaaagagggaatgcacaacaaaacgnnnnnnnnnnnnnnnnnnnnnnnnnnnnnnnnnnnnnnnnnnnnnnnnnnnnnnnnnnnnnnnnnnnnnnnnnnnnnnncagatatgacagctgcatagattcaacctactatgaaaagccaaaacatggaatattacactaattaaacggttacacaacagaacatggaatgtgcgacacttcatcttgggatgcaaatttttgtgctaaaaaaaactgagaaaaacaaanagaaa

SEQ ID NO: 39541 - DNA, 305 bp, Homo sapiens
gtgctttacattttctagtggctttctaatacaaaaagtctaaagtcctcggcaatacttagcctcaaatttaaatttccatcttatctctttccccatttccttttctttggctacaatgctcttggcacatctctgctaaagtatagattttatacctccatttccttataaacctcctgctggaatgtccttgcctgaattctccatttatgagacacctatcaatttttctctgataaaagaaaggggttactaatgatttatcttatagttgtatcattatctcactccctggcaaaggc

SEQ ID NO: 39542 - DNA, 308 bp, Homo sapiens
  misc_feature (1)...(308): n = a,t,c or g
nnnnnnnnnnnnnnnnnnnnnnnnnnnnnnnnnnnnnnnnnnnnnnnnnnnnnnnnnnnnnnnnnnnnnnnnnnnnggcaatacgaatgtccttaaaacaaatggaaaatagaaaagaaatgaaagttatagaaaaaaaagaccaatggaaattataggattaaaaaatacactttggaaatgnnnnnnnnnnnnnnnnnnnnnnnnnnnnnnnnnnnnnnnnnnnnnnnnnnnnnnnnnnnnnnnnnnnnnnnnnnnnnnnntacaaaaattagccggtgtcgtggcaccaagatcacaccactgca

SEQ ID NO: 39543 - DNA, 306 bp, Homo sapiens
ccaggatgagaaatccaggctttcctctttttgtctgtactcttttctctttaccgctcccttgtttagccttgtattttattttctcccttccttttctctccatttctctcttgttctttgccttccatcctaattttctctatttgtgtttcccttgttctttctcttttttgcttttcccttttgatcctctcctcccagtgcttttctcttccatttctctttcctctttaatttttctttaatatttatttgtcctccttttcttccccatgtcacttctaatagatacacatattcctt

SEQ ID NO: 39544 - DNA, 322 bp, Homo sapiens
cattcatctaatacatatttaatatctacttcaagattaaaacgaactttgaattctaggtcgaggagtttagataggatatgacaagtatgtaataaacacttcaggtacacagataacatgataaaaactgtaaactgtatgtgaatgtgattatttcagtaactacacagaagatgacctagagtgaagaggaacttatgagtgatacacaaaagcagagatggcctgttacaaagtatgataaaatatgacctatgcaggtaagtctttcttctaatattttctctgctggcaaggcactatttctgaaaatcccctg

SEQ ID NO: 39545 - DNA, 302 bp, Homo sapiens
gttttatattaccattattccagatgggaaattttttattgtagatgagtctttttttttaattatcgggagccaggagaattggctgtgttgtgtgtttacttcttactcctgttgaggctgctagggcaatgaagggggaaaataaaaggtttggaagccttggaagaatcatagaatttgcgagaaacatcttgatcctaattgtggtgcttagtaaaactgcaaaccaaggaatatatcataactaaataactaacaaccagttaagctaaaagtggaatactcttcaaacccaccta

SEQ ID NO: 39546 - DNA, 312 bp, Homo sapiens
gggattcctgggccgagagcgggtggctgagccgggacctcgcgtgattctcggaacccgaggagaagcggcgtccggggctatggctgtgactctggacaaagacgcttattatcggcgagtgaagagactgtacagcaattggcggaaaggagaagatgagtatgccaacgttgatgccattgttgtatcagtgggtgttgatgaagaaattgtttatgccaaatcaactgccttacagacatggctctttggttatgaactaactgatactatcatggtcttttgtgatgacaaaatcatctttatggc

SEQ ID NO: 39547 - DNA, 307 bp, Homo sapiens
ggcatctaacatatagacattcacattgccctttgtggctgggccatctgcctctttgttattatcaaatagggggcattcaggtcttgcattccatttggtttcctatcaaaaggctgtccattgagtgggagcaaatgtgttttggcacattctgcatttccagggtcttgcttctgactgttataactaagagagaagttggtgcccccagagccaaatcagtctcagaacactgggatacgttgctcccagcatagttttattagccagttaaagggataggctgaagcatactcactgtata

SEQ ID NO: 39548 - DNA, 312 bp, Homo sapiens
cttggatatctatggctttgaaatctttgacaacaacagttttgaacaattctgtatcaattactgcaatgagaaactgcagcagctatttattcagctggttctgaagcaagaacaagaggaataccagcgggaagggatcccctggaaacatattgactacttcaacaatcagatcattgttgacctcgtggagcaacagcacaaagggatcattgcaatccttgatgatgcttgcatgaatgtcggcaaagtcaccgatgaaatgtttcttgaagcacttaacagtaaattgggcaaacacgcccattt

SEQ ID NO: 39549 - DNA, 308 bp, Homo sapiens
  misc_feature (1)...(308): n = a,t,c or g
nnnnnnnnnnnnnnnnnnnnnnnnnnnnnnnnnnnnnnnnnnnnnnnnnnnnnnnnnnnnnnnnnnnnnnnnnnnnnnnnnnnnnnnnnnnnnnnnnnnnnnnnnnnnnnnnnnnnnnnnnnaactggagtgcatagaggttaagcaacataccctgaaatcactccactactaagtaggaagccaggattcaaatttaggcctctctggcttcagagcccatggttttttcccaatatactgtggcatgttgtcattggactattaaaggtgattgagttggagaatgaagcgattggagtagggct

SEQ ID NO: 39550 - DNA, 310 bp, Homo sapiens
gcaatgtaaaggtgacttttgccaaaaatttggcataagtagacatgtaaagaaaaaagtcatttatttaagccaataaagttgaaaagattagctttaagtaagcatttaggcagcaagcaggtcacagctgacaagccttctaataagagaggaaactgaaaaacttgaaagcagtctggctggcgccatttagcatagggacaaagtcctagtcattgaatgaaggcatcactatattacagttataaaactaacacataggaaatacctaactgattttattaaataattctgggtatcagaaata

SEQ ID NO: 39551 - DNA, 355 bp, Homo sapiens
  misc_feature (1)...(355): n = a,t,c or g
atttttttcctcattatttatatttctgctcaaatgtcatgctcaaaaagagggccttcctggatatctaaagcaggggttggcaaacctttttctgtcaaggaccagacagtaaatatcttaggtttagaggccatgtggcctttgtcgtaatggctcacctctgctgtgtcagggcaaagtggctatggacaataggtgaatgaatggccatggctgtatacccataaaactttatttacaaatacaagcagcaggctggatttggcccaagggctgttgtttgctgaccccaatctgcagtgtcccctgtttgcccgtttgtcactggactcctttttttttttcngcattt

SEQ ID NO: 39552 - DNA, 317 bp, Homo sapiens
caggagaacagcttgagcccaggagttagagaccacagtgagaccccactctctaaaaaaaagaaaaaaagagttatagaagattctcaagcaggaatgtgtccagagtagaagtagccaaatcaggcagaaagattacatgcttcagctattttgtagtcttaaagaccagaattgtgttctagagtttcagaaggcctgttgctccatgtgggtagactgtcacattggtggcccctaatgaatgatgcatccttgtattcatgcccttgtatagtccccgtccaagtctggacctggtcagatgactttttttt

SEQ ID NO: 39553 - DNA, 301 bp, Homo sapiens
gagaaaataaagcttgtgatgtaacacttgggatatgattaagggatggatagagaaagatataacttcagtgaaggctgaggagtgaccagaaggatgtggaggaaaactaaagagttctggctcatagaagataaggatgcatttcaaggttagattttcctataacatgttcaataccttacaatggtaatactttcacactcgtatttctcatgctgcattataagctttaggatcatagtgtctctattggccttattgaactaagggggctgcaatgggctcggaaagccttgaa

SEQ ID NO: 39554 - DNA, 308 bp, Homo sapiens
gtgggatggcagatgaggaagaagaccccacgtttgaggaagaaaatgaagaaattggaggaggtgcagaaggtggacagggtaaaagaaagagacttttttctaaagaattgcgatgtatgatgtatggctttggggatgaccagaatccttatactgagtcagtggatattcttgaagatcttgtcatagagtttatcactgaaatgactcacaaggcaatgtcaattggaagacaaggtcgagtacaagttgaagatatcgtcttcttgattcgaaaggacccaaggaagtttgccagggttaaa

SEQ ID NO: 39555 - DNA, 296 bp, Homo sapiens
attttattttgtaaaatggctggtgttggagaaaacctttccatatttttgtttgtttagctgtttttctaaaatatgaaaagttgtaagtaaagcggttaaacaatcacgaatttagaatctcccttaaatcctcgactcacggatttccagagtttaatgtgctgtaatgacctcttcccatgcctcttaggcaccatacaatttggcatacaacccatatcttagagtttatcatcactattacatgatatttactgggtggcctagcatgttgggtggtcccctgctaagaa

SEQ ID NO: 39556 - DNA, 297 bp, Homo sapiens
atgacatatgacaaactatttctactgcttgtatagctactgattttcttgagaatatttggaactgtgtagtctgaatttctccaaaggattggaaaaaaaagtcacaacctttaccccttttctgaaaacacatctgatatctcactttagagattggaatattcagtctccgtggttgagaagagaagtcacaaagtccactgaactcatagcatcaccatatcaaagtcacactgatggcacattggtgtctacctctttcatgccagcaggctacgaaaatggcaatgaatt

SEQ ID NO: 39557 - DNA, 298 bp, Homo sapiens
tgtgcttaaacttaatccttagaaaatagagaaatgaaaccaactaacttcctttacatgatttatttcagttgaaggcaaatatcaaaaatgtttattttcctttgaaaatgaatgcattaattgcatttaaaacgttttttaaacaccccgaataagatagcatgttaaagcaagtgtgagttcagtatgttaattgcttgctctcccagtttctaaaaaccccgttgttaaatgttttgttctttttaacaaatgaagatcatggggctatgttcaaaaaggggagaaaattgtt

SEQ ID NO: 39558 - DNA, 310 bp, Homo sapiens
gcttatcacatttaatgccagtaactgaagggaaaaaagtatcacattattttatatgataattgagttatccactagatctctagaatccatgtatttagtccctgaggtagtatacccagtagaaaaagcacatgattggcataaggcttccatattacttctgagatagagagcacactcaattctgaatcctctgaactaaaatgtcagattctttttaccacattatacagcttccataagacatataatagcaattgctatagtgagcaattttttctcactatagtaattactaacgagaaga

SEQ ID NO: 39559 - DNA, 311 bp, Homo sapiens
  misc_feature (1)...(311): n = a,t,c or g
atttttaataaatgtaacccaatatatcaaatattatttcaatgcaatcaataaactattaagggcagggtgcagtggttcatgcctataatctttttgggctcaagcactttggnnnnnnnnnnnnnnnnnnnnnnnnnnnnnnnnnnnnnnnnnnnnnnnnnnnnnnnnnnnnnnnnnnnnnnnnnnnnnnnnnnntggtgacacgtgcccccnnnnnnnnnnnnnnnnnnnnnnnnnnnnnnnnnnnnnnnnnnnnnnnnnnnnnnnnnnnnnnnnnnnnnnnnnnctgtataactacaccccagtct

SEQ ID NO: 39560 - DNA, 311 bp, Homo sapiens
aaaagattcatgtaggaaaaggtgcctggactaagatgtataaggcaggcagagaggagagaagaaggttctcaaagtaaaggatagcttaggtaaagatataaagtggaagatggaagtctttccaagagataatgaccattcagctgcatctagaccaaaggattttcactgggagagtaggaattaagaccagaaatacaggttgggaccagactttggaagagtatgagtatcattgtgcctgtttttatttatttacttacttattttcctgaaggtctgtacatatggaagtaacatgttcaaca

SEQ ID NO: 39561 - DNA, 299 bp, Homo sapiens
ctcctaatgagacccaccctcctggtagtcacataggcccctcttatattgtactgaagttggtttgtgtggaagtgacactatgtaatttctgagattaggttacaaagcaccttccatgctgggggctgtctctctgcctatctctcaatcattagttctgaaaagccagctttgagattgtgaaaaaccctacagagagggctacgtggtgaggaactgagctcttctgtcaacagccaggtgatgaacctggacgtgaatcttccagcccagtcaagcctgtagatgactgcaaa

SEQ ID NO: 39562 - DNA, 312 bp, Homo sapiens
ctcagcaccatttctctggcgacttgtaacaggcagggctatacaaaagaaaatcctttttactaccccaattcatatcaatcaaagaccaaggaaaggctcctaatatctttttaaaatgttttcatttatcttggagtttacttgtcataaaaaccgcatgtttaaagtgtccattgggtgtaaatggtcccataaactcttgtaactgagtgacacgtgataatgaaagtagcttcacaaagaacaacaaaatagatctcttttttattgtaatcatcaaatagtgtgccccaaggtattgattgaatt

SEQ ID NO: 39563 - DNA, 300 bp, Homo sapiens
ctccaagatggctgcctccatagtgcggcgcgggatgctcctggcgcggcaagtggttcttcctcagctctctcctgcaggtaaaagatacctgctttcttcagcctatgtagacagccacaaatgggaagcaagagaaaaagaacattactgtcttgctgatcttgcatctttaatggataaaacatttgagagaaagttgcctgttagttctttaacaatatcacggcttatagacaacatttcctctcgggaagagatagatcatgcagagtattacctttacaagtttcgacacag

SEQ ID NO: 39564 - DNA, 300 bp, Homo sapiens
gtttccggatgtgtctttttaggacttcagaacttattatttgaatagaagtttaaagcatctggatgatgatgctgtagctaaaacagctgcttgtcagaagagaccctatttaacacttctaaacttgtttcagaggtggaggaaaggataatctgggaaggcctccctctcaagtccacaggttggtatcagctgtgttcatcccccaaaaggaaaataaaatgacaacaatattttggtcacagaattcctgagaaacctctgtttctatcttcatgtctttaagatagggacatg

SEQ ID NO: 39565 - DNA, 313 bp, Homo sapiens
  misc_feature (1)...(313): n = a,t,c or g
caaaagttcatcagaatatcacatttaggaaactgctggtcattaaggtgttaggttgtgaatttgagcctcaatggatgctgctttcttttagaatgaattaccaggtggttattgaggtatactgagtcaggattttttaatttaatgagtgctgtgtaacacttaaggtcgacgcggccgcgaattccnnnnnnnnnnnnnnnnnnnnnnnnnnnnnnnnnnnnnnnnnnnnnnnnnnnnnnnnnnnnnnnnnnnnnnnnnnnnnnnnnnnnnnnnnnnnnnnnnnnnnnnnnnnnnnnnnnnnnnnnnn

SEQ ID NO: 39566 - DNA, 358 bp, Homo sapiens
  misc_feature (1)...(358): n = a,t,c or g
ggatgctacattttaattacctcaattattcactgtttgttttagctttatttttgttccaaactggatatttaactttattggttacagatgccagagtggtacagttcgaacaaactgcttggattgtcttgatagaacaaatagtgtgcaggcatttcttggcttagagatgctagctaatcagttggaagctcttggtttagctgaaaagcctcagttggtgactcgctttcaagaagtttttcggtcaatgcggtccgngaatggtgattcnatcaggnagatatatgcnggaactggagctnttgaaggnatatgcnaangctggaaaggnnanagatggggcttcgntctg

SEQ ID NO: 39567 - DNA, 356 bp, Homo sapiens
cccatatgtgactagtgaaaaggagaatagtggtagcaaaacagagaggttatactggtttacatgggattttttccaagcacattaatgttttgtgccacaggtaactgcagctgaatacaaattatgttaagagctaaaattggctactatttttaacgcatgaatttgcagaacatgaggtttttcagtaatatttatctgcagtagaaatgactgtacattcatctttgatgagctatattaaatttattaaataagcagacattaaataagctactttattaaataagctacaattatgtgttaagatgaggaataaaggagaaacgaaataactaacaattaccgatgat

SEQ ID NO: 39568 - DNA, 353 bp, Homo sapiens
gttagtacatagtatagcatttagggtttatgtaaaatgttaatttgtttctaatttaaaacctagcatgacctgtgaatagcttcttgcttccacacacaatcatttaattaaaaatatcattggtttaatctagtcaagaaaaggtaaaatgttcctcttgatcatcccataatgggttgtctgttaactccaatatatgtcttctaccttgaagataaaattttgtcaatatgaaacaaacctgtgttagttagattgtttttcttttcatttttttagtatcttctgggtagtcactccccattcttatttgggaacccacaaatgaaaaggatcaaattatctaggtt

SEQ ID NO: 39569 - DNA, 348 bp, Homo sapiens
agcaaagttaagtgacctgccatggttacattggatgagtcaggatttaaacttaagtccgttgacttcaaagctccactgtaactactgcctccccatgtgataaaacattctggtttcaatgtgtagtctctattttgaagtatgcagtagagatcagaagaaaaatctttagcattgacaacaagcttagttagtagaaatgaaaatgaggtacattaaattcaagtaaaaggcctaagtccaaaaggcccagggccccgtaaggaaacacatcagtgaggcaaaggagaatgcagaactgcagaatgtttatattctcaccatcaaaaaagtaaaataaatttt

SEQ ID NO: 39570 - DNA, 352 bp, Homo sapiens
gttctcttccctgccttaaaaacttatttatgtatatatatttatgtatatttatagtaatgtgtatgtgtatatatgtgaatatatgtgtgtatatatatgaatagagtaaatatatttgagttcattgatgttttaattagacttgacaataaaacaatttactcataatggcttaagtagttccttactaggtgtgtgtatgtgatattatgaaaatggttatctttcttctctccattatttatttctcttactagtttataactacatacatattgataaggaattggactccatttggaagttgttattgaaaagaactgattatagcagaaaaggaacaagagct

SEQ ID NO: 39571 - DNA, 353 bp, Homo sapiens
  misc_feature (1)...(353): n = a,t,c or g
gaggtaaattgggctcaggtcagctaagaaggatatacaaagcatacctcagccaggaattacagttttggggtttttccccccaannnnnnnnnnnnnnnnnnnnnnnnnnnnnnnnnnnnnnnnnnnntcgttgtcgacgcggccgcgaattccnnnnnnnnnnnnnnnnnnnnnnnnnnnnnnnnnnnnnnnnnnnnnnnnnnnnnnnnnnnnnnnnnnnnnnnnnnnnnnnnnnnnnnnnnnnnnnnnnnnnnnnnnnnnnnnnnnnnnnnnnnnnnnnnnnnnnnnnnnnnnnnnnnnnnnnnnnnnnnnnnnnnnnnnnnnnnnnnnnnnnnnnnnnnnnnnnnnnn

SEQ ID NO: 39572 - DNA, 347 bp, Homo sapiens
  misc_feature (1)...(347): n = a,t,c or g
cttggttataaaaatgttaattcagaattagtttaatgccttaattaaactaattaatagctttggacacttaaaagagctctaaatttgcttgtacataaaggcttaatttgttttccttgttagggtcaagggtgtcctccactctttaacagctgctggacagacacattagagcagctgtttgttattgataataaaatgtcgacgcggccgcgaattccnnnnnnnnnnnnnnnnnnnnnnnnnnnnnnnnnnnnnnnnnnnnnnnnnnnnnnnnnnnnnnnnnnnnnnnnnnnnnnnnnnnnnnnnnnnnnnnnnnnnnnnnnnnnnnnnnnnnnnnnnnn

SEQ ID NO: 39573 - DNA, 348 bp, Homo sapiens
ggggacctgaccacagcatgtgttttatttcatttctttatcagaatgatattttgcctgaaaaggggctccactgctttacaaaaaaggacagaaaacacatagtagaccggtgattctcaaagtgtgggctgtaaaccagcagcaacaggatctgggaatttgtcagaaaggcaagttctcaggcctcatcccagaaccaccaaatcagaacctcggggctggggcccagcaaccggtgctgattctgatggccagtaaagtataagaactctgaattagactactccatgcttcctgcatcacagtggtctccaacacccgttgctggattctcgttggtggtac

SEQ ID NO: 39574 - DNA, 354 bp, Homo sapiens
cttttagcacccagaatgccacccaattaaagggatgtctagattcttgtgtaatgagtaaaaagcctgccttgctcacctctgaaaccccagccaagtggaatttactgggaactggtcacacttgtcagctgcatagtgacctttaactctctctgcacctagctcatcactgttcagaagaaacagagacctagggaggcccgaccttccttatgagtcttgcttagggtactagcttctgaaaggacaagacagtccccactctggggatgatgtttcttgctaaacagaggtttacctggttgaacaccagaaaaagtagatgtttgcatttgggtgcttctctgtatg

SEQ ID NO: 39575 - DNA, 348 bp, Homo sapiens
  misc_feature (1)...(348): n = a,t,c or g
cccaactcccgttcccccatcttgatttttttccattctcaaattaattatttcccctataggtgatttgtggaatggaaacagatttagatttcctacctatttagatttttccaaagactaaaattacaaatcagaaaaactgctattgacacatttttggttaggaaaatctggatgtggttcctatgcctagcctagtcatataaattctctccccatgtatctttttgtgtgtgtgaaacagggtctnnnnnnnnnnnnnnnnnnnnnnnnnnnnnnnnnnnnnnnnnnnnnnnnnnnnnnnnnnnnnnnnnnnnnnnnnnnnnnnnnnnnnnnnnntaatag

SEQ ID NO: 39576 - DNA, 354 bp, Homo sapiens
cgaaactctgtctcaaaaaagaaaagaaaatagtatttgattctgaataaatactcaataaatttgcctattgttattgttaataaattagcatttcttcagtgcgtaagataaacacattccaagtgcgctgaaggaaatatacgaaggctaagagagtgactaagtgagagcaaggagaagtcctctttggttaggtaaggcccctgagaaaatgagcagaggatgagaaggcaccagctgtgtaaggggaaagaacatcccaggccaaaggtatatgtgcaaaggttctgaatttagaaagagtctggcatgctttaggaactgaaagaaggccaggtactatatgatagt

SEQ ID NO: 39577 - DNA, 346 bp, Homo sapiens
aaacaaaggtaaaagttttgtttttttaagttttcaaacagcctgaaaagtggggtgatttccttttaacatgccagtgggtagcataataaatgtataatctgcccaggtccgctcattacctggaaatacagtgagctttggggagctactctgatgcttcccagccctgagttacacttcaggtccccaaaaggatcttattaattggaacttagatcctagattctaatttttcaaaaataacttcgatggcaggagtgatggttgggaagatcttctttcttttcaaagaaatggagtgatatgcaattgtaatcattcataattgaatgaaaactttgct

SEQ ID NO: 39578 - DNA, 353 bp, Homo sapiens
  misc_feature (1)...(353): n = a,t,c or g
cnnnnnnnnnnnnnnnnnnnnnnnnnnnnnnnnnnnnnnnnnnnnnnnnnnnnnnnnnnnncaccacacccagcctggaaaaaaattttgaactcattggtgataaattcctagatgttgagttgctggattaaaggtatcagtttattttccttctatctgtgtagactactctgagttcattttggcattatccttggtaatttggaagaaaacatatttaaatcagagacaggtccgtagagatgtctanaggatgcttatataattcaaaagngataatgctcccaataacttttttgnttcttccttctctatccctttactttagcttttaagtgaattttgatttt

SEQ ID NO: 39579 - DNA, 310 bp, Homo sapiens
ctagaacaataagatgtggtggttagagagtgggatatttaaaactgagattagggaggagtgacagatgaaaatgacaaggtccactgtatgacaagagagcgagcaactaagatagggaggggcccagattatcacagtggcggggaggtcacactgagatagtcgggtgttggaatgaacatctacagagatagcaaagacatcaaggatcatggcagaggttatgttgaagaaacagcaacagtgagccaggagctaacatctttaaggaatgagggggattgatcatgcagggggtagataaagg

SEQ ID NO: 39580 - DNA, 308 bp, Homo sapiens
gttcttttgctttcccattactttaaacgttggaaatatcatagagtgtttaaatagtctttacctttaaaaataggtaatgttttgttctttttcagtagcaaatgtctgctaccacagtaaaaattgtctttaacttcaggtatacacttatgtgtatgagctcatgttacttgctaatcaatattattgtcaatatttacagatttatcttcaagaagtttcttaatctctctacttttctcatagcgtatgtttaatcggttattgtgtaggaaggcacatactttcctaacctttgtgaaatg

SEQ ID NO: 39581 - DNA, 314 bp, Homo sapiens
  misc_feature (1)...(314): n = a,t,c or g
tttgtctcagagtggggttagcacacggtaccatctccatcccctttaaaagtatttattacatttttctggaaatggaagtctggaaattatatttccctgatagtcttatgaacaggattccaggttgattctgccaaatgtgaggcactcaggtgagactagaaagcagaaagatggtttaaaaaatcatcgttttcttcctttgactctgcacttacgacagcaggatgctcgagactcttgcagtaatttgggcaaagatttccacagtgcaaaatagaaaaaacaactggcaaatagctgtacnaatt

SEQ ID NO: 39582 - DNA, 314 bp, Homo sapiens
ctccaccacttcttattgttttctaagcacttttcacatatgaagaatattagcttgttttcactcagatttctcctcattaggaaatgagcctattgtaaaggaaatgtccaccttgatcctgtcctgtctttttcttctgttgttctctgcttgccctcctttcttttttctgccccatttctctgccatttcagccatctcagcctgatctctgcctcctcagcccggtgggatctccctactgtgctcagactccagctctctgcactgcagttgggaaattatccccaggtagaggaactaggtgactt

SEQ ID NO: 39583 - DNA, 315 bp, Homo sapiens
aacaaatcccatgttaacttttcaactgatttttaaattgggtacagcctaccctttagcaagctactgtcatgtacccacctcttggcaagttgccttagacctggatcacacttaccaggttgatctggctggagaagaaagtgagcacaggcagtgcctgggcagctaagtggttgtaagtgcctgggagtgtcaattaagctcctttacttgtgacttaatctgaaaaatgtcatttttatgaggttactaggtgatttggtttcctcctcaataatctgcccttaaatgtaatctataaaacacgccctg

SEQ ID NO: 39584 - DNA, 317 bp, Homo sapiens
atcaagaccctgcatctcaagggattttgtcaaggaactatcaatattctggttgtgccacagaactatgtgacagtaatgtctctgggtctcattacttttctacttaatgaaagaaactgcatcagcaactaaaattctataaagttgtgacccaaatgagaggcttaaaccttcaaaattccctgttttgacacttactatatgttgtcatagacataaaatatggtagttctcttattctttattggattataaactttgagaccaggatttataatcttcccaacacctaacatagggccttgtaatagcaa

SEQ ID NO: 39585 - DNA, 309 bp, Homo sapiens
atttgtggttgtttttgtttgtttgtttcttaaatcctactatctcctggcctggacctcagaaggagctttttgcttatctataatttttcactgccaatttttgatatcctctctcctagagttactgttaaaaggttggttcgtaaagtccacaccccgatgctcagaagtgtcttgccagcaacattcctgctagcatacaggagtgatttcctaaaccagtttcattctagtctgaatagggacaaacaaatcttgaggaagcccaagtgcgtacctttatttttgcccccaccaccctctttt

SEQ ID NO: 39586 - DNA, 314 bp, Homo sapiens
  misc_feature (1)...(314): n = a,t,c or g
nnnnnnnnnnnnnnnnnnnnnnnnnnnnnnnnnnnnnnnnnnnnnnnnnnnnnnnnngaggctcatattttaattgactcnnnnnnnnnnnnnnnnnnnnnnnnnnnnnnnnnnnnnnnnnnnnnnnnncaaaggagtttattaagtattacacttactttttttttgtcttttttttcttacttttngtgnaaaacannnnnnnnnnnnnnnnnnnnnnnnnnnnnnnnnnnnnnnnnnnnnnnnnnnnnnnnnnnnnntgcgctactgagagcntggatntacaggagtgaacttgntctgcanccaggagt

SEQ ID NO: 39587 - DNA, 316 bp, Homo sapiens
ttaagaagtatttaattcaacatacatctaaaaattgtccaaagtttttctcttcaattataacaagtttatcatggcaataattttagaatcaacttttactgtaaaatagatgaggatagttcacagttctaaacagtcaaaaatattaactctgaaataaaacactgacaatataacattttttccaaatgaatttttttttcactttgatacaatctgcaattactgttatataaacttctcagctacaagatttaatataaaattttgggtccaagcacaaagcatatacttgccaaggactcagcagtta

SEQ ID NO: 39588 - DNA, 328 bp, Homo sapiens
cagggactctgcagtggtacaaccgggagcaggtacccttcacttttcttacccccgagtccctttgcctggagcactgtccatctatccacccatgcactcagtaggtattttccaagcagctactatattccagctttcttgttcccagtttagagctgggtgggatcaggagggagggcatggaaggggttgctggagaatgtgcaatggcatcagagccccattctggctctgggtccaaggccctcctagagaggcacaatctggaagatgtgagagccccacggtaggttggggtggatcatggaccccatcctagaagagg

SEQ ID NO: 39589 - DNA, 333 bp, Homo sapiens
tttatctcttgactacttccctccaattatgtctaaatacctgtgtgcctgttccctatttcctctcagttttctttgttagaaccaccagtctccagaattattgcattaccattgctggttcatgttttagggacttttaaaatgaaagtgtcagttctctaaatagccctttatgtagtttctctttgaaacatgtctaggccctgagaatctctgaagtgtttgtcagtggctggtgatcgctgcagttgagggcttgggattccagggaaaggtgcaaggtgtctagccaggaaaacttacatctttattcgctatgagtactacagc

SEQ ID NO: 39590 - DNA, 328 bp, Homo sapiens
gagaaataaaacctcaatattctcctgtggaaatagaatgggccacctctcagggacacacctttcagccctcgggatggctgcaatcagaggacagcaaacttcatctaccagctaccagccaggtagttcttaaaagttcttaaaatccttcagcaagccctccacctaggtaagcataaaacctatcaattggcccaaatgtggttttcaggtaaaaatctgctaaaaatggtcaaaaaggtcactaatgcttgtgagacttgccttagaaataatcccctcaagcaacatcttctcccttctggaacccaaataatgggaggtt

SEQ ID NO: 39591 - DNA, 326 bp, Homo sapiens
gtggctgcctgtgtgtgcatgtgttatgtgtgggtgcaacacccggggagcagtttgcagcttttgttttcttgaccatactctggttctgagagctcttgagagttgtctggggcagaggttctggccagtgaggctgagctgtggtcagggagctgtgagtggaatgtatgttgtggcactggtgccacctttccattgagtgccaatctggccagagaagggaattttcctgaacagtgtctaggtttatggaggcccctcctgagtgaggacatcactctgtcctgtctcccaccccattcagacagaccggagaggcttct

SEQ ID NO: 39592 - DNA, 328 bp, Homo sapiens
cttgctcagatgtaaaggccaatcctcacagtggcctctgagtcattctataatgtggtcctgttacttctctgtgcccactgcctactatgctctatcttgctcacctgctcaagttacacaccttggggcctctcttcagctagaacacctcccccacatattcacatggctcactcccttacttgcttcaggtcttctgctcaaatgtcaccttctcggtaaggcttttttaagattttaaatccacctttgcagtaagcctatttaaaattagaaattccccacacaccttcacagatttattttcaatagttctttcctcagg

SEQ ID NO: 39593 - DNA, 327 bp, Homo sapiens
gcttgctgagcaccggcactgtgatgacagtcttggcttaatctaaaaggcatgtcctttctttgttgaggaaattgagcaatattgtgtcactacaatatagggtcactcccaccctaaccctaagcctaaccctaaccccagcgctaaaccctagccccaaaccctaactcctaacccctaacccttaaccccaacccaggtacccttggctctgactaggccagttctccttcactccctggtggctttttggggccttggatcctttgcaatgccagtccctctccagcagatgactttgtaaccttggcctgaagcctcctg

SEQ ID NO: 39594 - DNA, 335 bp, Homo sapiens
ctcatgatcacttacacccgtaaaagtgacgctggcaaatatgtttgtgttggtaccaatatggttggggaacgtgagagtgaagtagccgagctgactgtcttagagagaccatcatttgtgaagagacccagtaacttggcagtaactgtggatgacagtgcagaatttaaatgtgaggcccgaggtgaccctgtacctacagtacgatggaggaaagatgatggagagctgcccaaatccaggtacacatcagagtttcatgatatgatttgtcaactcagcatttctacgtttctcatcacatcatctccacatccgggccattagaatag

SEQ ID NO: 39595 - DNA, 328 bp, Homo sapiens
aaaaagcaaaaatcaacaacaatgcagagaggaagaaatgagtggattggtaagataaggccatgggtagttcacagaaactgcttgctttctctaacatgcttgctccctttggtaaactttggatgcatatttgtctcaaagtgtcatattagacaaagcaataagaaaatggttagttttaagattgacataattcataaattctcacaaatacatttgatgaaataaggcagtttgtgtttctcctggtcctgaggacccccaaaactcagaacctcataaataggacagcgaatgatatggaggaagctatttcttcagctac

SEQ ID NO: 39596 - DNA, 333 bp, Homo sapiens
  misc_feature (1)...(333): n = a,t,c or g
cnnnnnnnnnnnnnnnnnnnnnnnnnnnnnnnnnnnnnnnnnnnnnnnnnnnnnnnnnnnnnnnnnnnngttttctgaacattcttcaggtgatttgatagtacttcctcagtatatgtgttgtaaaatttgcttaggctgtgtctggatgcagtgcctcatttgaaatttactgttttcaaaatgatccttttaagagtggggctgtctgaggtgcgtttccagtttcctcacggcatggataataaaatgcccccagagtaaagatcagaatttcagggaccagggagagtataaaaagattaaacagctgatccaaggctcatcattatc

SEQ ID NO: 39597 - DNA, 305 bp, Homo sapiens
gtggagggtcaagagggaaggaaggagcagaaccccaagatagtggctgtggagcaggggctgcttcacagcaggggaggaagagctatggcctccagttgaaggacgcagccagcctacaacgaacctgagtgagggctgcggccgggagagcatgcccctgcctctcgcttctcccatcctctcatctcctgctggggtctacttcagaggacaagttggtgctttgggggcacagaatagagaggagagtggatctggaggggcatttaaatacaatccaggacgttagggttgcttcaata

SEQ ID NO: 39598 - DNA, 293 bp, Homo sapiens
  misc_feature (1)...(293): n = a,t,c or g
nnnnnnnnnnnnnnnnnnnnnnnnnnnnnnnnnnnnnnnnnnnnnnnnnnnnnnnnnnnnnnnnnnnnnnnnnnnnnnnnnnnnccgagaaaagagcaaagtttggatgataaagaagggacggaagaacttaattagaggcaaaattaatactttacgatgaaatatttttttaaagtagcaggtattcagggaccagattttgaaagcatcacaaaatgcatctttgtagtgtttgatcaaattttgagagcaatcctcttctagtaacagtcttcttctctgggttctct

SEQ ID NO: 39599 - DNA, 304 bp, Homo sapiens
gggttatccacatgaacaagaaaaccaaggaagaaaaaaaatatgcttttaatatgttaactttcaagtgcagagattcatgtccagtaagtagaactcaatttttaaattattataattaacagtgaaagatacaatccactcaaggtcagcaaaaggaatcagagaagtcaaatccacaagcttcactaccccaaagacccaaaatcaactactggcattaatctgggactctgtttatgaaaaaggagagagtaaaaacaagctcagatcacgtggtgctatgctggcctgctgtttggtc

SEQ ID NO: 39600 - DNA, 302 bp, Homo sapiens
ccgggacctttagccaagaggagctgcagggaccatggccaggttaccaaaatgccctgctctgaagccttgacacctgggtggaaagagaggctgttttctgaaagggtaaagggcttggtctggattcccagaagcatagcttaaatgggaccacagtgggcaattttgacctgtcctgcccttcttagcttgaagggaaaccccagagactcttctgtcagggaaaactagggactctcttctagagccatatagttccttgggattagctcttggccaagaaggctgagtatggttcc

SEQ ID NO: 39601 - DNA, 287 bp, Homo sapiens
cttttatccctctgactttgaagacatttttccttctgttgaatcagaattgtttttcctttaattttaccccagcgatcttttcatttgttttttggtgaagattataatggttttctcattgtcatcttggttatggtggaaagaacataatttggaattaggagactttcgtattagccctaattcttccattattggccatgagacttcggacaagtcacttctttaaatcttaattttcttatccacaaagtgagggtatttgggtttcaattcagaaattc

SEQ ID NO: 39602 - DNA, 302 bp, Homo sapiens
ctgagaccaactatctaggaaatacacccaccatgccattcagctccttgccaccaacagatgaatctataaaatataccatatacaatagtactggcattcagattggagcctacaattatatggagattggtgggacgagttcatcactactagacagcacaaatacgaacttcaaagaagagccagctgctaagtaccaagctatctttgataataccactagtctgacggataaacacctggacccaatcagggaaaatctgggaaagcactggaaaaactgtgcccgtaaactgggc

SEQ ID NO: 39603 - DNA, 285 bp, Homo sapiens
cttaaatctaatatccatatattcctattagactcaccctttccctatagctaaaattaaattcttagagaagaaacttacatcagaagttaacagtttgggaaaaattttttttagatgtattatactttgattttttaaattctgggttaaaatttctcttgaatctcacaggtatatgtttatatgtctagtgcgttaaactaccatggttcttctcagtagcactgagtatatcttttttattttattcttttccacaggctgcaacaaagaaacaaaaat

SEQ ID NO: 39604 - DNA, 287 bp, Homo sapiens
  misc_feature (1)...(287): n = a,t,c or g
nnnnnnnnnnnnnnnnnnnnnnnnnnnnnnnnnnnnnnnnnnnnnnnnnnnnnnnnnnnnnnnnnnnnnnnnnnnnnnnnnnnnnnnagaccattctttaatgataaacaaaacctctagaaaatttccaaaacaaagcagtcctccaagtaagatctctgaaggttaaggtcttctgcataaacagcaatatacaagaagcacaactccttttctacttagcttcaatgaaagaaaaatgtctgccttcttatcatttgggagatcagtgggcaccacaggcaggc

SEQ ID NO: 39605 - DNA, 288 bp, Homo sapiens
caaggcaattattacattttactgatgagtgaaggacgttcaaatagaaagaagggagacagcaaggaaaagatggttaaaatgatgcaaatgagttcaggtgtatgagatgcacctggacaagaggtgctgtacagaaggggctgagtgtgtaagaaggttcaagagcttggtgagcacagagtcatggggactccacattttctaggatttaaatatggaaatacaggctgagaaaaagaacagtgagaaaacttatagatgagaaatccatggtttgtgatattg

SEQ ID NO: 39606 - DNA, 300 bp, Homo sapiens
tattaagcctgatttactcagaggggggagaaaaacactccaattggtagatagtaatcttatgtaaatgtcaaaatgtcttagtattcagggtaagcaaaagctgccatgcctatacaacaaatcctataagacaaaagttctacaaaatttttaaactgcacactgcgaaaacttaaaaattaaaaacttttgtgcataccaccaaatttatgtatatttgcttataaattatatacatactttactgtagaaaaattggttgtgtatattacataacatatataaaatagaaatgaa

SEQ ID NO: 39607 - DNA, 287 bp, Homo sapiens
cccccattccctttatttcaactaatcaaggattgacagtattcactttcatactgagatgtaacatttttatatataataaagattttttaatttgtttatgagcaagggttatcaaatttccagtatatatacttttcattctctatcacagataattccacaaaaaaacaagatcaaatttattttgaaaatgcaatacaattctttgagctacagcagagaatataagtcaatttctgttgttaaaaacaaagcatttgggaggcagaggcaagaggatcact

SEQ ID NO: 39608 - DNA, 299 bp, Homo sapiens
tttttttataggggtgaattatttaatttaaatgcaatcaaccattagaaatacagttaacaatggacaagagatactcagtttttcagtacatgcttatcttgtgctcaagacacttttagccaattagctgctcaattgactaagtacctcctaccttacttatttgaataagtaaggaacttcagtagaggaattcaataagcagaagaacttcagcaagacataattattatatagcagcacacaaagcagacacaaatccttgatggaaaataacttatacaaagcaatatggc

SEQ ID NO: 39609 - DNA, 301 bp, Homo sapiens
tgttcatgtagttccccagtgcaagtatgatctgtccaaagaatgtgtgggaggcaggtcaggctcaggtcctgaaggctccttcttcctctctgtatagccccaggcccccacctaggacctgaaaacccccagcacccctgttcacaacctcttcccacctccaacatctgcttcagcttctgtgaagacttgacggaagcggacgccgcaatgatggcattgagttgctgtaggacaatatgaacactgaagtaaccccaggctgagatggggtaaagacagggaggggtcagaagga

SEQ ID NO: 39610 - DNA, 333 bp, Homo sapiens
  misc_feature (1)...(333): n = a,t,c or g
cgctctccagcctgaggcttgtctgccctccagcttgggccaccgccaccctgagcagccttttctgcctccccttcctacctcccctgccttgggtttctaaacccctaaccgtgcactgtcagggcacactggcttccctgtgatgctcccagctaatgtcaacccagatcattaataaatccacctcgtcaggtaatgagacacccgggaggggtgtggaaaggtgtgagttcttcaagccgattgaagtcccctcatcagtgaccacaggaatgggcatgaatggggaatttgagagccgcatcatttanagtgagangtgtcacattt

SEQ ID NO: 39611 - DNA, 323 bp, Homo sapiens
  misc_feature (1)...(323): n = a,t,c or g
ctgaccaacattctccctcagacaagaggggaaaaacccaaaatacctggtgaacaaaaaaaaattgttccattttggcagagcacagtggctnnnnnnnnnnnnnnnnnnnnnnnnnnnnnnnnnnnnnnnnnnnnnnnnnnnnnnnnnnnnnnnnnnnnnnnnnnnnnnnnnnnnnnnnnnnnnnnnnnnnnnnnnnnnnnnnnnnnnnnnnnnnnnnnnnnnnnnnnnnnnnnnnnnnnnnnnnnnnnnnnnnnnnnnnnnnnnnnnnnnnnnnnnnnnnnnnnnnnnnnnnnnnnnnnnnnnnnnnnnnnnnnnnnnnt

SEQ ID NO: 39612 - DNA, 322 bp, Homo sapiens
caaaattatttttaaaaagtagacttctgccattgtgtgctgttctcagctggcctagggtcagggtgagtggaccctgacattggtactttacgtccaagcagctttctctcccctgtgtcctccttgctgccaaacactgaaatggtttgagctacacttttgaaaaagagactctgcttcctttatagggatgagaggaaagttatagggcaaacagtcactctgttcagaccccttatttcctgcattctttagccatttgttttaaacaaaattgttcatgtggggatttgtttatagaattaaaagtcctagacaa

SEQ ID NO: 39613 - DNA, 334 bp, Homo sapiens
  misc_feature (1)...(334): n = a,t,c or g
nnnnnnnnnnnnnnnnnnnnnnnnnnnnnnnnnnnnntggtatacattaaaagaatggtatatattaaaagaaccttttaatggttcctgtattaggattaggccatgagggccttgccctcatgaatagattaatatcattatcacagtagtgggtttgttaccacaagaatgtgttgttataaaaattttctgtcccttgctctcaccctcacttgtcgttctgctttctgccatgggaaggtgtaggacaaaggtcctcaccaggannnnnnnnnnnnnnnnnnnnnnnnnnnnnnnnnnnnnnnnnnnnnnnnnnnnnnnnnnnnnnngg

SEQ ID NO: 39614 - DNA, 324 bp, Homo sapiens
ccccacccagcgtgaaccggacagagattgtcttcactggagagaaggaacagttggctcaggctgtggctcgcatcaagaagatttatgaggagaagaaaaagaagactacaaccattgcagtggaagtgaagaaatcccaacacaagtatgtcattgggcccaagggcaattcattgcaggagatccttgagagaactggagtttccgttgagatcccaccctcagacagcatctctgagactgtaatacttcgaggcgaacctgaaaagttaggtcaggcgttgactgaagtctatgccaaggccaatagcttcaccgtct

SEQ ID NO: 39615 - DNA, 323 bp, Homo sapiens
  misc_feature (1)...(323): n = a,t,c or g
gttnnnnnnnnnnnnnnnnnnnnnnnnnnnnnnnnnnnnnnnnnnnnnnnnnnnnnnnnnnnnnnnnnnnnnnnnnnnnnnnnnnnnnnnnnnnnnnnnnnnnnnnnnnnnnnnnnnnnnnnnnnnnnnnnnnnnnnnnnnnnnnnnnnnnnnnnnnnnnngagctttcttttaaagataaacttaggtacaaaggtgatatattaactaacagacacatagaattctgtcacaggtttagtgaagtaaataatctcccttagaaataagaaatgtgggcaatgtattatagtttttgaaatgtaataggtaagtttcatgag

SEQ ID NO: 39616 - DNA, 333 bp, Homo sapiens
tgaagacccacttccgatccaaagaccacaagaaaaggctgaagcagctgagcgtcgagccctacagtcaggaagaggcggagagggcagcgggtatgggatcctatgtgccccccaggcggctggcagtgcccacggaagtgtccactgaggtccctgagatggatacctctacctgacatggcctgaagatgcagggcagaggaattgcccatggacagtgacgcaaggactaggctgggagggagcgtgccaaccccttttgcctctgggtttggggagcggagggcctcttcttggtgccctgcccaaataaaggaactggaccaaaaa

SEQ ID NO: 39617 - DNA, 332 bp, Homo sapiens
  misc_feature (1)...(332): n = a,t,c or g
ggaactttgtctgatctactaacttgctttctagttaattcttccttctcttccttcctctcacttatatatatctaagagaatatttagaatgtggtcacatgatttgttgagggtatactgatgactttctgcatgctgttttaatcaaatatttaaattcacatcaccgttaagctgtttctctgaactgaacaaaagaaatttcatcatctttggggctgagggggagcagagttagcatctttttcagcagaattcaaaaacatttatttcagcttcagcatatactttaaaacttactattccctatataacctcagtgngaaatt

SEQ ID NO: 39618 - DNA, 333 bp, Homo sapiens
tgtagataaatagtttctaccacagatggtgaaaaaatacccatggtttacactaagtctaggtcttgtccagttctgagcattttaatcagaaaagcattactatactcacttgtgtttatattaaaataagggctatttattgccaccagctcaggaaatgacccagtgtggccgtgtaagacagaattaatttgaagtgactccagctaaaagttggctgccttttaacttaataacttgagaactgtcagtatcctttgaagttaatgatagttgtaaagtgcaaataaaaatttttctaaaggaaatcaaacccactacagccaataa

SEQ ID NO: 39619 - DNA, 326 bp, Homo sapiens
  misc_feature (1)...(326): n = a,t,c or g
nnnnnnnnnnnnnnnnnnnnnnnnnnnnnnnnnnnnnnnnnnnnnnnnnnnnnnnnnnnnnnnnnnnnnnnnnnnnnnnnnnnnnnnnnnnnnnnnnnnnnnnnnnnnnnnnnnnnnnnnnnnnnnnnnnnnnnnnnnnnnnnnnnnnnnnnnnnnnnnnnnnnnnnnnnnnnnnnnnnnngtcnttgatgngggtttaaaagtntaatngnntaatttccaancanttgtgtttgaggncaantttnaggggtncaaaggtggtggttngnagttaggaccnttgancncaaaanggntaggacaaggnggatggaggccncccc

SEQ ID NO: 39620 - DNA, 330 bp, Homo sapiens
  misc_feature (1)...(330): n = a,t,c or g
nnnnnnnnnnnnnnnnnnnnnnnnnnnnnnnnnnnnngtannnnnnnnnnnnnnnnnnnnnnnnnnnnnnnnnnnnnnnnnnnnnnnnnnnnnnnnnnnnnnnnnnnnnnnnnnnnnnnnnnnnnnnnnnnnnnnnnnnnnnnnnnnnnnnnnnnnnnnnnnnnnnnnnntactggcatattttctggagaatgaatgagccttaattgtttaaaagcccttngctatgannctattactagtttttacatgtagngtcagtgtntntnagaantgtntattatagnaancngntntnaatttattaattgnnntntcnntatnttgatt

SEQ ID NO: 39621 - DNA, 326 bp, Homo sapiens
  misc_feature (1)...(326): n = a,t,c or g
nnnnnnnnnnnnnnnnnnnnnnnnnnnnnnnnnnnnngtannnnnnnnnnnnnnnnnnnnnnnnnnnnnnnnnnnnnnnnnnnnnnnnnnnnnnnnnnnnnnnnnnnnnnnnnnnnnnnnnnnnnnnnnnnnnnnnnnnnnnnnnnnnnnnnnnnnnnnnnnnnnnnnnntactggcatattttctggagaaagaaagagccttaattgtttaaaagcccttagctatgaagctattactagtttttacatgtgagtcagtgtatgtgagaaatgtttatcagagaaaactggtttgaatatattaattgctgaaacccaaatttg

SEQ ID NO: 39622 - DNA, 327 bp, Homo sapiens
  misc_feature (1)...(327): n = a,t,c or g
nnnnnnnnnnnnnnnnnnnnnnnnnnnnnnnnnnnnnnnnnnnnnnnnnnnnnnnnnnnnnnnnnnnnnnnnnnnnnnnnnnnnnnnnnnnnnnnnnnnnnnnnnnnnngcttttaaaaatccattaatccactgtgtgctgcatttagtgaaaggttcatgcgtgttagcccacttagtgtcgacgcggccgcgaattccnnnnnnnnnnnnnnnnnnnnnnnnnnnnnnnnnnnnnnnnnnnnnnnnnnnnnnnnnnnnnnnnnnnnnnnnnnnnnnnnnnnnnnnnnnnnnnnnnnnnnnnnnnnnnnnnnnnnnnnnnnnnnn

SEQ ID NO: 39623 - DNA, 326 bp, Homo sapiens
  misc_feature (1)...(326): n = a,t,c or g
gagtaaacttgctgggtacagaccaggcagaataggccagtggtgaggaatggtgaggaatgtggattctacggcaagatggacctggatccannnnnnnnnnnnnnnnnnnnnnnnnnnnnnnnnnnnnnnnnnnnnnnnnnnnnnnnnnnnnnnnnnnnnnnnnnnnnnnacctcacagggtggggaagatcgttgcagtagcacgtggaaaatgctaagcagaatcacccacacacaggctccaaaaatgggagctactattcttagaatgaaggacagaaagtttcagggaagattagagttcaacataataaagaacagac

SEQ ID NO: 39624 - DNA, 326 bp, Homo sapiens
aataattacatgtaatctcaggaaaatcttggaacgcatctgtgaaatggggataaaaataccatctagagcccagagtaaatgccccactctaggattttgtccagttctgagatctgtgaatgtgtgaatttgactacagttcaggtactgtgtcagagtaatgtaatttcaatgctttttttcaacccactacccatttttatcatttgcaagtaccttattacttctccatctgtcggagaaaaccctaggatagcccttgttagttagccacaggaaatctggttataccccaatttttagttgaaatttctgccactggc

SEQ ID NO: 39625 - DNA, 335 bp, Homo sapiens
  misc_feature (1)...(335): n = a,t,c or g
gtgggagaggaagacaggtttgagatgaggccagagaggtcgctagtggccaatttgtggaagaagaccttgtaagccatgttaaggattttgggctttaacttaagaccactggggagacctctgagagattttaagcaagactatgacatagtcatatcttcggtttaaaaatatttctctgacttccttattttttttccattgttttttatgaatagggaaagattcagggtgctgtaggtttttctgctagttgtctagaagtgggaggctggtggcttggaataggttagggcaatggtattggagaaatgagatgattccnaagaaat

SEQ ID NO: 39626 - DNA, 326 bp, Homo sapiens
gaaacttacgcctcacctgaaatactatgtggctatggacttccaagccaagttaggtgatggctttgaagggttttataaaagcacatacagaactcttggtggtgaaacaagaattcttgcagtaacagattttgagccaacccaggcacgcatggctttcccttgctttgatgaaccgttgttcaaagccaacttttcaatcaagatacgaagagagagcaggcatattgcactatccaacatgccaaaggttaagacaattgaacttgaaggaggtcttttggaagatcactttgaaactactgtaaaaatgagtacatacc

SEQ ID NO: 39627 - DNA, 327 bp, Homo sapiens
  misc_feature (1)...(327): n = a,t,c or g
aagaaaggttaggaaaggtctttattttgggcaacagggtgccagcacaattttcaaagaggatgatggaataatgggtgtcaattagcagtctctgccatgccaaccaagtggttaatcaaatacacaggaagcaagcagatgttctctaacatgtaagagcacagagaatatagcactcctttcttgaaaaatactgcttgatgattaaatcaagtcaacctcaaatgaaacaaaattaaatagtgatgacttcaggtatggcaaagccatcttaaaagaatcgggggtgatcatcagatccatttaaatacngaagaaaatggg

SEQ ID NO: 39628 - DNA, 322 bp, Homo sapiens
gtgacatggaatttttttgagtgtatcatgtttggtttttgtttagctttttgatttgtcggtttatgccctttgccaaatttgggaatttttaaccattatttcttgaaatattttttcatccctactctttctcctctctgtgatatgaatggtagagcttttgttactgtctcagaggtctcttgtgctttcatgtttaccccctttttctggtctatttttccctttttttcatattggttaatttctgttgactttttttcagctcactgattctttttttctgccatatgcagtctactgttgagcttgtccaatg

SEQ ID NO: 39629 - DNA, 321 bp, Homo sapiens
  misc_feature (1)...(321): n = a,t,c or g
agtagactctttctctggctaattttagattcccagtgttgaggttgggaatgagggcttgtcacatagttagtatgttttcagaggctctgatctccctgagactacaagtacaaaggctgtgtggccatttctgtttcctggggtttactcttccatccgttgtctcactgcacaggttctccctggctctgtctcattctgcttgccccatggcagaaaaggggggcggttcagggctccttgacattctggcattaggccaccaagctgtgggatgggggaattcagggtgggggagaatttgacagtanggcatcg

SEQ ID NO: 39630 - DNA, 323 bp, Homo sapiens
  misc_feature (1)...(323): n = a,t,c or g
aacactacacagcagaggaggcaaacacatcacaacgtaagtcaatctcacaaatnnnnnnnnnnnnnnnnnnnnnnnnnnnnnnnnnnnnnnnnnnnnnnnnnnnnnnnnnnnnnnnnnnnnnnnnnnnnnnnnnnnnnnnnnnnnnnnnnnnnnnnnnnnnnnnnnnnnnnnnnnnnnnnnnnnnnnnnnnnnnnnnnnnnnnnnnnnnnnnnnnnnnnnnnnnnnnnnnnnnnnctcccctctccgtcgacgcggccgcgaattccnnnnnnnnnnnnnnnnnnnnnnnnnnnnnnnnnnnnnnnnnnnnnnnnnnnnnn

SEQ ID NO: 39631 - DNA, 312 bp, Homo sapiens
  misc_feature (1)...(312): n = a,t,c or g
gttctctcctggcctgtaaggtttctgctgagaaatccattgttagtctgatgggtttcctttataagtgactagatgcttttcccttgctgtttttagaactctctctgtctttgacttttgacagtttgagtatagtttgtcatggagaaaaccttttttttttttnggtttnnaaacaaantntanttntgncnntnacccngnannncanaggtngcggggagncnanntnaaccctttgcnntcnacccnggncantaaaancnaanntttgtntnaaaaaatngattaannaagggaaattttttt

SEQ ID NO: 39632 - DNA, 311 bp, Homo sapiens
  misc_feature (1)...(311): n = a,t,c or g
attaccacttggcaccttcttcctaatagggaatctcagattaagggaaatacttgccctctcataaaaggaggaagagaaaaaaaaaaaagggntaaaaannggaaaangnganncaaaaancgngncanttnttacngtnntttnngncntancngattntatgnncntatttnaaaaaaanngaaggggganananctnannaangttnccaantccnnntgctttnatnngggnncccnanaaatntnttagggcccgggnaaaanccnctcntttngnattntttacnccattgacctttgngggt

SEQ ID NO: 39633 - DNA, 312 bp, Homo sapiens
  misc_feature (1)...(312): n = a,t,c or g
ggnnnnnnnnnnnnnnnnnnnnnnnnnnnnnnnnnnnnnnnnnnnnnnnnnnnnnnnnnnnnnnnnnnnnnnnnnnnnnnnnnnnnnnnnnntnnnnnnnnnnnnnnnnnnnnnnnnnnnnnnnnnnnnnnnnnnnnnnnnnnnnnnnnnnnnnnnnnnnnnnnnnnnnnnnnnnnnnnnnnnnnnnnnnnnnnnnnnnnnnnnnnnnnnnnnnnnnnnnnnntttaccttacctgctttaagagctttgagcatacttgtagtattttcagactgtaatcctagctgttattccaattattatctgtcaac

SEQ ID NO: 39634 - DNA, 306 bp, Homo sapiens
  misc_feature (1)...(306): n = a,t,c or g
gtggaaaggccaccaacgccggtgacgctggagctcagaaaagactccgaggaccagaaggaagaagcatcaagggaccagggggtgatatgccaaggtagagaggatgggtctgaggtgttcctctgtgacgggacagaagagatgtgaggacctgaagaggcgccacctgggatctttttatcaagttcccgtngacgtggncgnaaattcnngatctatgantnnnagattctgaaaaanccngtatgtttactttnattgtncatnntgcnctatataaatttntttnattnatactttgtt

SEQ ID NO: 39635 - DNA, 322 bp, Homo sapiens
tttaaaaccagtgtttgttttgccagcaaacattttgtttcaatccttgcagctaaacaagtgggtaagatttaagtggcctcctagtaaaaacaaatgtaaaaccattttcagaaaactcagggctgagcagaaatctatttgctgttagagggtgagtgtagaccttcagggatataatttatactttctgtatagttctgtgcttagctgcagtcagagtgaaaagtcttaggtttggggaagagaactttattttttttgaggcaagaagggaagaaatagaaaagaattattcaataaaatgtattggctaagtgtg

SEQ ID NO: 39636 - DNA, 321 bp, Homo sapiens
  misc_feature (1)...(321): n = a,t,c or g
cttatgcataagaaatactcactgtatatgagnnnnnnnnnnnnnnnnnnnnnnnnnnnnnnnnnnnnnnnnnnnnnnnnnnnnnnnnnnnnnnnnnnnnnnngaacaactctccannnnnnnnnnnnnnnnnnnnnnnnnnnnnnnnnnnnnnnnnnnnnnnnnnnnnnnnnnnnnnnnnnnnnnnnnnnnnnnnnnnnnnnnnnnnnnnnnnnnnnnnngtcagtggcttatttcactctgtataatgtccagtaggagaaaatatttgcaaaacttcttcccaaatttctctctcataactgtctaacacccacggcc

SEQ ID NO: 39637 - DNA, 339 bp, Homo sapiens
  misc_feature (1)...(339): n = a,t,c or g
tggccccatggtagagagcacagagcagtggcagagcacatggtcgctcattaatgcttttgctcggaaatggtatatcccatttctgctcacatttcattggccaagacattcagcaccaaccttaaaatctaatgcataacaaggtatcatctttcagtaggaagatacccaaggtacatggccaagcttgatatcagtgggacaggaagggatagcatttatttatatagtatacacattgggatagtatacctttgggaaaagaatatgtctgccatacctattaattgagtnatcttncngntctgntactgnaatctgacttccagacagctg

SEQ ID NO: 39638 - DNA, 324 bp, Homo sapiens
gaacaatcaagtttcacctcttcatggtgcttctcttgaatgctgtagctcactggttcccaaatgtttggaatattttaaagtacagacttaaaaacaaattttgtggagttacatcaaaatgatcatctcctgtcaccattatttttgaaaagaaattacattttcatatctgaaaggcaggaggaatatgatgtccaattaaggatagtttttataattgaattaaatatctttatatggaaagtacactgtattgtccccgtttttctcattttgctactgattagaaaaagcctcattgcatcctatccgctgataatc

SEQ ID NO: 39639 - DNA, 320 bp, Homo sapiens
tcttaatttgccacttgtcatcggtaccattcctctacatccatttggtagcagaacctcaagtgtaagcagtcagtgtagcatgaatatgaactggctcagtttatcacttcctgaaagacctgaaggtaatttgataatacacgtctaagcttaatctcttactactattatcaagaaaattattttgcctctgatattttatgaccctagatgaacataatcttttcctaaagaaagtagatgtgcccctaatattcagttttgattatatgtcttcatagtttcgatcaccaaacaataattattttaccttgacg

SEQ ID NO: 39640 - DNA, 320 bp, Homo sapiens
  misc_feature (1)...(320): n = a,t,c or g
ctggtgctctcctttgcacccaaacatattaactccaagtcctgtggcccatcacttactgtaaaatcttggacaaatcnnnnnnnnnnnnnnnnnnnnnnnnnnnnnnnnnnnnnnnnnnnnnnnnnnngttaaggacccccttaaatgttgaaagacttaaatgacctaatgtattctaacctgtttacaacagtgcttggcacatagtgattgctcaatacaaactgtttttactgctgtagttgtagctattttctaatccatctctcctttctttcaaatacatggaaaatacatgggaaccgaataacctttgc

SEQ ID NO: 39641 - DNA, 334 bp, Homo sapiens
cttgatctaggtggtggctacaggggtgtatacgtatgcaaaaatttattgagatttatgtactttaaaattatttatgagaagtattccttaattttttaaaaaacaaaataattaaaaatttaaaagtagagaatccctcaaatatagtttattgaaaatacaaatattactaaaagtgtaaaacttccatgtaaaagcaaaaacagaaaaagttaaaggcagatttaatactataaccagtgaaaatagaacaaaaatttaaagaacaagacaatatttgactacgaaaatggctgaagatatcagagcttcccttttgacttggggtatg

SEQ ID NO: 39642 - DNA, 336 bp, Homo sapiens
atttgaacttgtatttatttgggttcagttataacatagcataataaaaatcaaagcactggtcctctgaaataaagcaggcaatcaccattcaataaacacacttgatttattttgtataaaagggttaagtttacaactaaacttttataaaaagtttagcatgaataagtacatcattacacttttgaatgcagaaatagacatctctgccactatacaagaaaactctaattaaagagttcacaaggtttcactcaaatagatatatttatatataaatatatacacagcattcagtaggctttggtggtcaaaaaggtaatttctgaccaa

SEQ ID NO: 39643 - DNA, 318 bp, Homo sapiens
  misc_feature (1)...(318): n = a,t,c or g
cgtattggaaaccaaccagacattggcaatggtgctaacaaatagcataataacagtagcgatgtggaccacaaagataccagccagcaataccaacatgttggctcttttttttttggtaacttgtgagcaaagagagttctgaagggtcccagcgacagaggcgctctgagtggcaggtgctggcagcagccntggtccgntnttntggaagtatgtgaccgcactgaggggaaggacctgcntcccgaggttataagtttcctntgctggtgtactggggtgtgtaatgggcgtnnacgcggccgcnaattccaa

SEQ ID NO: 39644 - DNA, 324 bp, Homo sapiens
tccatttagtatatatcttttaaggtaggaatttaatctgtttacctcaaggttattatttttaagtgaagacttgcacaccgtcacactgttaactggtagagaggcagtgctgtatcttccgcttctcctaaacgttggtctagggttcatcctgccttatagcacatgtttagtatacatatccaaggaagtttttttggtcactgaggctgaaccttatggacagtactgctgatttagtgatctgaccttgaattaggggtttcacaagaatccaggtcctggtccatggaagaacagtgagcacttttgatgtcgacg

SEQ ID NO: 39645 - DNA, 324 bp, Homo sapiens
  misc_feature (1)...(324): n = a,t,c or g
gtccaggagcctccccgcctcccatgctggaatgcgagctgtacatacctcttggtggtttcatactccaagccggaagcaggacaagtcatgtgaaggccattccaacagtagggccctgagtctctccccagcctcccctgtggccccaggctctggagcaaacaccattctcagttcacccaggggtggctctgaaaaccatgggcactgggtaatgctgaccaagtcgactgacttttttttttttnaacctnaangacccaangcagaaantttttaaaaggttctnaaatttacaacgggggacntttacaaaaaaaa

SEQ ID NO: 39646 - DNA, 311 bp, Homo sapiens
  misc_feature (1)...(311): n = a,t,c or g
cttttctcttgttaatatggctactgtcagttaatgtgtagcccctcaactactgaatccaatttgagagagaaagaactcttttggctccaaaaagcaaaatgaagcgttgagataaaataggtcactatttgatgttccagcatatctcattcaagtttccgaattcaaaaattataaagttagcaagttaatattattataattggattagctatattaaatggcatggccgcagtaagacagacaccgtggaatgtttctagtggactggaaattggcgtcatttnctggaaagcaatttttcagta

SEQ ID NO: 39647 - DNA, 324 bp, Homo sapiens
ctcactgccaccaaggtgttcacggccctggcactggtgcgaatgctcattcttcctctcaacaacttcccttgggtgatcaatggtctcctggaggccaaagtgtccttggaccggatccagcttttcctcgaccttccaaaccacaacccccaggcctactacagcccagatccccctgcagagccatctacagtattggagctgcatggagccttgttctcctgggacccagttggaaccagcctggagaccttcatcagtcatctcgaagtgaaaaagggtatgctggtgggcatcgtggggaaggtcggctgtgggaaa

SEQ ID NO: 39648 - DNA, 305 bp, Homo sapiens
  misc_feature (1)...(305): n = a,t,c or g
ctggcataagagattcttctatctggacaaaggacagctgggaagtggtggaaggactgaggggggagatgaattacacccaggagccaccagttcagaaaggatttttgctgaaaaagaggaagtggcccttaaaaggctggcataagagattcttctatctggacaaaggaatcttgaaatatgccaagagccaaaccgatgtaagtctttttgcccaattgnancctcctggagacctttattagtcatctngannnactaagggtatgcnggnggcanngggggnngggcngctgantaaa

SEQ ID NO: 39649 - DNA, 312 bp, Homo sapiens
cgtactgctggcaaagcattattatttatgtaaaatgtgaaaaaaaaggtgtaaaaatttttcaactgcctatgatcatgatgaaaggttactgccttcttacaaaaattatattggcatcttcttaaaaataattcgaaaaagggataaactccctagccaaaaataaataaataaaaaggtgcattttttaaaatgatgctactgcaatgcaatggtttaaataccaaaaaactgagaaaatgagctgtctgtgatccagcattaaagaacatactaaaaaagagcattaatgtaaattaagtagaaagg

SEQ ID NO: 39650 - DNA, 325 bp, Homo sapiens
gagttcatcactgagatcctggaaattagagctttgttaaagatgcgtgggttttcagtcggctttaccacagggactgggatgaggtcgcatggccccaactggcagttgtggtacattggactagaatctcaacaagtgcttccgagggtcatcagagcaaggggaccaaaaggatataagggggaagcagaaggagaagggaggctggatgagtgatagcagcacacaagcctgagtgtcgcatggttcccgtattgtgtcagttttgtccatggagaacagacttttagaattaagaatgtatccaagacagacaataggg

SEQ ID NO: 39651 - DNA, 322 bp, Homo sapiens
gacaaaaacagatattaaaaaggttagaaaaagctaaattaccatatactttctcctctttgcagttgcttgatatcattgatccttgacattagaaaattcatcatagaagaaaataacacagttaataattaaccttattgttgtgtcttgccatatccttctaccgtttagaggcttacgaatggatggttttgatctcccaagtcctttgtattgatcatggtcactgtgtaggaggttggaaaaaatgggacattcatagagatgctatggctttgtttgcttttttgtgaatatcctacagctggtaattaagaga

SEQ ID NO: 39652 - DNA, 321 bp, Homo sapiens
cccgtgcgtaggctggacacaagcacaggctgtagcatggtgaaaataagccaagcagtgcagaatgcctcagaaagggtgggcagggggcccttaagaaggttcagagaccagccttctccagaggctgtcactgcaggagccgtgggcctgggaagacttggaagcggcctctctcaactggtttctgtctccgtggagctggaactgcctgcacttgccttcagagggaggcacagtccacccagatccacctttccagcaagacccccagtggctgcccagcctgggagcacctctttgcttttcacaccaaaccaa

SEQ ID NO: 39653 - DNA, 310 bp, Homo sapiens
gttgactttaaatgctttataatgcccttgcgagaaatgtggcagcctgtcatcctacttagtggcaggagattgtttctatccagaagggacactgctggtggtattttagtataaatactgccagatgcgtcccaaaacgtctgcattaataatggcatcctccagcagtccgtttaccctccaccagttctgagacggcctgatgggtgagagtggtaaccccttctaaccgcgttcgaaatacagcccttcagcagacggcgttgattttaaagcatgtgtctcctgtcttctagtatgtccaaaa

SEQ ID NO: 39654 - DNA, 335 bp, Homo sapiens
  misc_feature (1)...(335): n = a,t,c or g
agaaacttcacaagaacttaaaatgccttgtttataatttctaaaaattagataaatgaaaggcagcaaaaagttactaaaagttaaagtcagcaggccagnnnnnnnnnnnnnnnnnnnnnnnnnnnnnnnnnnnnnnnnnnnnnnnnnnnnnnnnnnnnnnnnnnnnnnnnnnnnnnnnnnnnnnnnnnnnnnnnnnnnnnnnnnnnnnnnnnnnnnnnnnnnnnnnnnnnnnnnnnnnnnnnnnnnnnnnnnnnnnnnnnnnnnnnnnnnnnnnnnnnnnnnnnnnnnnnnnnnnnnnnnnnnnnnnnnnnnnnnnnnnnnnnnnnnnnnnn

SEQ ID NO: 39655 - DNA, 114 bp, Homo sapiens
ttaaagtacacgttatcaatgaattagaaattcattgctttaaaaatacttgttttttgaaaaactagagctgcactaattttcatattagaatgtttgatttttttttttttt

SEQ ID NO: 39656 - DNA, 344 bp, Homo sapiens
attttatgctactataatatgcaacatgtaagcaccaaagccaaatataagaaattccaggttccacataataatccaacatttggtaacaattaattaaattaaatatggtctataatctatctagatcatttaatatgatatgttaacttaaggactgatgttctgctaccctgtggtctgttttatttggcatcactatgtttgtcaattttctggttttcattgaaaaatcactgcttcataataaacactgtgatgcatatccattcgaaaaaaattgaatttctatgcttaaatatgaaaaaagtaaaaccaataaagtatgctggctttcttaagga

SEQ ID NO: 39657 - DNA, 332 bp, Homo sapiens
tttctttctcttttttttcactgctcttttgtactccagtgttctctgctttcctccctctctcttccaacctaccagcccctttctctctcttctcctcccattcctcatttacatgcagcctgaacaaaccaaagagtttgctgtacattctgcctgtaaaagaatagtatgtgaacattgcttttgagtcagcgaactgggcaggtcaagtgagaagttatctgaccaacaaggatcaagtcaggaggatgctgggaatagcataaatcttagatcttaggagattgtccaaaaaggagagagctgatccaggatgagtagtagttttc

SEQ ID NO: 39658 - DNA, 339 bp, Homo sapiens
  misc_feature (1)...(339): n = a,t,c or g
taaaggcaccctccctgcactcagtagtgcatagtctctggcaagaatgcattacctatgagaataattactgtagagctcagaaagtgttatgatgcggtttagaaaaatactgtgggagcatagaggaggaaataattattccaggcagggtagaagtgtgaacgaataaaaaatgattttttgtttgtatggnttttgnntnntganacngggnntnnnntnntaanctttnttgnnccnnttnngncncnatttcggncgatnnntnnnnnttgnttgcntnnnananntgnnttaaatcgngtanncgggtnnttttgnagntcnangnggggt

SEQ ID NO: 39659 - DNA, 332 bp, Homo sapiens
tgtagtatttgtgggaaattgaggaaagaatggttaactgtccactggaggttgagaaagtctcaaagaagtgagaattgaattgagttgcagggaggcgagaattgagttgtagggaggcaggcataggaatgtgccttctaggtactaggatcaggcaacaaaggcatattcaagactgtctagtcctctgccacaccttgcctccactaactttccctgaaggggcgctgtctgctactgtcgcggacacaaaggctgactatggcctggaaacttgagtacagagacaagagcgcttttctgtacacagctaggtttctgcttgctac

SEQ ID NO: 39660 - DNA, 340 bp, Homo sapiens
  misc_feature (1)...(340): n = a,t,c or g
aaattttcctattttgcagaagtatcttgtgacaaaaagtgaccatcacatcaatcagtctgttgaaactgctcaagagattcatggatttgccctaagaaaaggacctgagatttttttttcatcagcatgtgttcgctttttgtagggaagagtgaggcattgagaggcattgaacccagtgctgtaataaaagtttgctttagtaagtaaggatatgaagctatccttacctgaagatttagatctcacagaatccttgagaacatatccatttgctggagtggggagcttatagggtntggtgcttccntntgagcttncagngtgttctgaaacc

SEQ ID NO: 39661 - DNA, 332 bp, Homo sapiens
gctgtcgaaaaattctactaccgcacacatcctcatgatataacttcataatactggtaaaaacctctgcaatcttacattttctacaaaaatgacagaaaaatagctgaatgatgcaaacgctgccatgatttgacccatggcttcatgagtccagtttctgatgaaagatgtgttcaaacaatgcccttctggtttctccagccgtccttgaagctcgcctcctcttcctattttgacactaacccgcgccctcacgtcctgcccccatggtcatgcgcggtgagaggcctttcacgctggcgcgtcttcaaggtgccatgagaaagaac

SEQ ID NO: 39662 - DNA, 317 bp, Homo sapiens
  misc_feature (1)...(317): n = a,t,c or g
ggaatattgcgcatgacttgaattctgctcttgaatattcatagctaggcagcagagagcgatgtgaggactatacttatggcatgataccatttttattgcaaatatataggtatatgtggaagttgattaaaaatttatgtgtgatcatttttacagtgcctgtctctaggtagtaggataatttttatttnnccctttgtctttcattgtagttnntnagttatttccaatangcnctgcattagttttatagttgtagnaantgnttaanantgannttgcccangnnnnntttagnntctncngtntngata

SEQ ID NO: 39663 - DNA, 318 bp, Homo sapiens
  misc_feature (1)...(318): n = a,t,c or g
cttgacttcattttataggcatcaagaaagagcatctttgaatgttgctgaagatgaaaaatatcttgggcatggtagtagggaggtgggagggaggtttactgttccttaaatgaggcttatcccttcctgcttccatgcggctgatcaccattgtgatgaggaaagagatgattttgagccagatctgggnttganacctagatttaccttgggcaaatttcttaaactggttaaaggctttgagagatacaccctttcctagggtcatntgttgngaggtngngaggtctgattanaatntatgngtannntctt

SEQ ID NO: 39664 - DNA, 333 bp, Homo sapiens
cagattggctctacccagagtagagggcctggacgtcgaaaggaaggcctcctttagcccgcctgctaaacccccttcatgggatatacagaaaaatgaggctccagaggtgggagggactcacccaagaatgcacagccagtaagagcagccactctctaatacagctctcccaagcaactacttggtgcctggccctgtgctgagtatgggggactcaaagtgaattagacttggtacctgcatctccttggttttctttcttgatgaacaggggtgtcctccactgagcatagaactgagttggcgtgaaaacatgcaggattgaagtta

SEQ ID NO: 39665 - DNA, 312 bp, Homo sapiens
  misc_feature (1)...(312): n = a,t,c or g
gacagaaacagtgcttgctttcatgtggcttttcattgcctcaaaatgtatcttcctcttaattgttcctaattttatctttgttttctggagaaaagttttttcacatgacaggctaaatattgcctattcgtttgaactttcctcaaagtacatctttattttatntatctaatgantanttttacttanngttcatanaanatgtgnacttacnngnnccgtccagnggnntnnatntngnnattnattgnnttcttnntntgnnggnnntncntgtnntntnnctgnnngcactcgtnnnctanttta

SEQ ID NO: 39666 - DNA, 337 bp, Homo sapiens
gaaagttctgacatgtgtcatgttccacatgtgtccgagtttctcttaagtacatgcctaagagttagggagtaatcttaaatttaacttttcatgatgatgccaatttttactttccctaaagtgtgtttggcaatttataacttcactaccaaaaggtagtagcagaactaccacatctacagcctctccaacgtgtagtaatgccaactttttaatgctgggtatagaatggcatctaattgtggtcttagttcgcacttccttgtcaattaatgatgctgagtatttcttcatgtttcttggctatctcatattttctctcgtatgaaatgcc

SEQ ID NO: 39667 - DNA, 337 bp, Homo sapiens
  misc_feature (1)...(337): n = a,t,c or g
atgaaacttcacacagggacccggccagccctgtgaccttcccaagggcgaggactggggacgtgcaccactgtccacagatcagtctcagggaaaaggtggatgcacctgacttcaggccctgcaattgccacccactccccactcatcctggacacatgtcctcacctgaacaatggccccatgacgggctgcgcctcacaggacccaggagatggagagaagcagccgcagctcataggacccaggagatggagagacacagctgcggctgacaggatctgggccctccggcttcattccctnctgaatccncagtgcttaacacaganctgtc

SEQ ID NO: 39668 - DNA, 337 bp, Homo sapiens
  misc_feature (1)...(337): n = a,t,c or g
ttttttttcactcaaaactttttttttttaatctgggccatgtacatgtattatacagtatattcacaaaaggaggggggaaattccatttttaacaattaaatacttaattattaagttttaaaaattctcctttgggtaccattccaaaatcctctcctgcacatactatttttttggaaacacctagtcgtctcatcgttatcacaccggttgtaactatgtacctacgtgtctaccttccccatcagactcgggaacagggagtcgggtttgagtcccactgtcccaagcacagancgctggactcccagtagaccntangttgcaantaagg

SEQ ID NO: 39669 - DNA, 346 bp, Homo sapiens
  misc_feature (1)...(346): n = a,t,c or g
cttacacacccagagcctgaaaatgtgaaaagaaaatctgcatattccagaaaccaagagggaatgcaaagcagtgggttggtctggtctgctaatttgaatcccggtggggttttaatttattgatatttcttctcattggtatattttcctgattctttgcatgcttggaaattttttaatagataccagacattttgaatttcaccgtgttgggtgctggatgtttgtgnttttctgnantgatgactngagtttttcaatnttngtntttanttanttttgtnttttntnnatnnntttantntnngctttnattttttttnnnnntncnnttttttttatt

SEQ ID NO: 39670 - DNA, 355 bp, Homo sapiens
  misc_feature (1)...(355): n = a,t,c or g
tgcctgcctgcagnnnnnnnnnnnnnnnnnnnnnnnnnnnnnnnnnnnnnnnnnnnnnnnnnnnnnnnnnnnnnnnnnnnnnnnnnnnnnnnnnnnnnnnnnnnnnnnnnnnnnnnnnnnnnnnnnnnnnnnnnnnnnnnnnnnnnnnnnnnnnnnnnnnnncctgagaaaatttgctgccagcagatgtgcatacacaaaaaatactaaagggaattcttcaggtagaagaaaactgatctatgatagaatcacagaaatgcaggaaataataaaaaaaaacagagtgaatatgtgggtgaatacaaatgaatattgactgcacatagcaataataataatgtctcgttaggtg

SEQ ID NO: 39671 - DNA, 344 bp, Homo sapiens
ctcagacagaaaaatatatttcacgaagagagccctgaaaaatctcatctctagtcccagtgatgccttaaactggttgtgtgaccttcgtaaacctcagttttctttgttgtaaaatgaaaggtcggggtcggtgacctctagagtctatcccacccctagcctgctccgagagtgattgcatttggcacaatatgcagtttgcttcgcagcagtagcaaaatgacacatgcaacttattatcatcattgtctatcttttgatttccttgagttttccagtctcattaggggagacatctctggcttatcgcacaatgacatcgtgtcttgtaacttaatttc

SEQ ID NO: 39672 - DNA, 344 bp, Homo sapiens
gagaaattccagatgcagcttttatacatgctgcaaggaaaaagcgccaaatggcccgagaattgggagatttcactcctcatgataatgagcctggtaaaggccgccttgttagagaagatgagaatgatgccagtgatgatgaagatgacgatgagaaacgccggatagttttttctgtgaaagaaaagtcacaaagacaaaaaattgctgaggaaataggaattgaggggagtgatgatgatgctttagtaactggagaacaggatgaagagctcagccgatgggaacaggagcagataaggaaaggaattaatatccctcaggttcaagccagtcaacct

SEQ ID NO: 39673 - DNA, 342 bp, Homo sapiens
cagattttgagttgcatgccatcagtggggaaattacaaatactcatcagtttgacagggagtctcttatgaggcggagagggactgctgtgtttagctttacagtcatagcaacagatcaggggatccctcagcctctcaaggatcaggccactgtacatgtttacatgaaggatataaatgataatgctcccaaatttttaaaagacttttaccaagctacaatatcagaatcagcagccaatctgacacaagtgttaagagtatctgcctcagatgttgatgaaggtaataatggacttattcactattctataataaaaggaaatgaagaaagacagt

SEQ ID NO: 39674 - DNA, 327 bp, Homo sapiens
  misc_feature (1)...(327): n = a,t,c or g
tgtatctaaaatcaaagtaaggggaaattttaagagatgtttggcaaactaacttcatatattattattatttccgaagatggaatatactatgcttctattccaacttgaagcttattagaaaaatatcttgatataaatgattgtgtgtagatttctcctccccagttttaaaaagactcaatatgatgatttacaacagggtggatgtgcaatatcccaagggctatggaggctaccatatgaggtgggatatnattggcccacactggaangagaaatactcttgtaggagtngnngnttnnngncnttnttnnaannnccag

SEQ ID NO: 39675 - DNA, 330 bp, Homo sapiens
  misc_feature (1)...(330): n = a,t,c or g
aaaaaagtaaaataaaaattgcagtgtaagaattaaatgatggacaggttgatgtttttgttatctgatgggctctactgcactttctttggttagtataatatgaacaaatcttcagttgaaataatgtgaaatttctactgaaacaccttggggaaataatattatttgaagccagtattatttttaattttaaagattccatttgattttattacagaggagattatgtaaacattcctgagtggcatctgtaagagttgntttatctgattacttataggagaagngaaantttgcttttnaanacngnngacctangntnttttt

SEQ ID NO: 39676 - DNA, 318 bp, Homo sapiens
  misc_feature (1)...(318): n = a,t,c or g
gcatccaggtttttctactcattaaaaaagtggctaggactgataacctgtagtgatcttccaggttttgctgcagtgagaaaaccattactgttaaaaacctgctgtcatatcacattatccttctcaacaagcactttgttacaatggaagttctctttgcagtggagtcctccttgcctcccttgtcctaagttaaacctctatttttagagttaagaatcattaaagacatggaagagttcgcacaactggttgtggcatgaacgatagcatgtaattttataaatgnataaaatggtgttttgaaantttttc

SEQ ID NO: 39677 - DNA, 328 bp, Homo sapiens
  misc_feature (1)...(328): n = a,t,c or g
gtaagttccaaaggattctattcaggggctactactttttcattcttatacttgtcagggtaacggacaagttatactgtgacgagtagccagtgatagtccaaactcctcatgaggttacattgagggccagagatcctgtgggccaggcaattgctgcaggggagaccacttaacttttcaaatgattctcattccttatgaagaaaagggcagttctgagccattggccaaatgataagcatttcccaaaatgctgtgtttttggtgtggagagccagcctgtccccttgaccacctgggtgccagggactnttcccngnacctg

SEQ ID NO: 39678 - DNA, 308 bp, Homo sapiens
cccacagttacttggagaggcttaaaatcagttcctcccaattctaggttctgggccaaaatgcgctaccacatgcctgtgaaaaactctcagggattcacgtggaaccagctcagaattacctctaggatttttcagtggaaaggactcagtagaacagaaaccactgggaggagctcccagcctaaggaatggtgaaatgagccctggagccccctccagtccagtccctgggatagagatgttgctggacagaactcacagctctgtgtgtgtgtgttcaggctgataggaaattcaaagagtct

SEQ ID NO: 39679 - DNA, 325 bp, Homo sapiens
  misc_feature (1)...(325): n = a,t,c or g
ccctcttttagattggtccagatgcccatctgtggtttagcaactgtagtaccgttcttcatatactagtattacacttaatgtaattatagtgagtttctgtgaggaaattgggatttcatcatcactaagaaggccagattttaatttttaagtaataaaaccaaatccacaaattgtataacacagttataacacagttatactatttccacggaaaaagattacttcttatttatatagtcctttacagtttgttcctgagtgacaatgagaaaagtagaatcctgattttctgattctcattccaatgctctttnctctt

SEQ ID NO: 39680 - DNA, 309 bp, Homo sapiens
aaaaattttcccttttcatgcttgtgtgttatttgaaattagatagctatattggttacctggtattaagagatgggattagaacatgagcttttgatgggtagagtcaggttatttgaattgaacacactgcatcctcttgaatatgtcattccttttttactcatttatttctactatgtttgtgaaggaacttttcatttttcaattcattgacagttgaaaacatcctccagaatgcgttttgtcagttggcattgaataaatacaccaaacaccaaacgtttctaaaatctttcatctgagaat

SEQ ID NO: 39681 - DNA, 325 bp, Homo sapiens
  misc_feature (1)...(325): n = a,t,c or g
gaaagctcatcttccaaacaactcacagggaagatggcatgatcctgtttagacaaagaataagaaggaagaaagagctgcatggcttgaatatctgatgtgatactaagagcttgcagagaggatatggggtttctttcactgactttgtatttgttgacttcactaaacaaaatgctcttcaaactgcgaggtgctcaaccaacagaagaggacattgggggctggttaaatgagctaaagactagtttaaaatacattagactgagataagaanttnnaaagcnttttangtnaaggcggaagttnggaantnttgtnatcc

SEQ ID NO: 39682 - DNA, 304 bp, Homo sapiens
  misc_feature (1)...(304): n = a,t,c or g
caggtgctatggctcatgtctctgatcccactttgggaggccaannnnnnnnnnnnnnnnnnnnnnnnnnnnnnnnnnnnnnnnnnnnnnnnnnnnnnnnnnnnnnncagtaacaacaacaaattatatatannnnnnnnnnnnnnnnnnnnnnnnnnnnnnnnnnnnnnnnnnnnnnnnnnnnnnnnnnnnnnnnnnnnnnnnnnnnnnnnnnnnnnnnnnnnnnnnnnnnnnnnnnnnnnnnncccacactcatagcctaggcgaagggcgagaccctgtatcccaccaaaaaaaaaaaaaa

SEQ ID NO: 39683 - DNA, 312 bp, Homo sapiens
cggatgatggagaacttttgctcctgttcaatgcggcactgcagcccccggaattgcttctctttgctccaatcattaaaggcagtcactaacaccacgatgatcactgagaaaaggatggctgccccctcaatccagccagcttgtgcctcattttcatcttctggggtagttgcgacttgaccacacagttcattttcttcaccagcagggcgataaaaggacaggaccagggagatgatggctgcaatctccaggatgatgagcgtgacatcttgaagagcttcccacactaattctaagaaagtcttg

SEQ ID NO: 39684 - DNA, 325 bp, Homo sapiens
  misc_feature (1)...(325): n = a,t,c or g
acagaaagtagattagtggttacctagagttgggtagcgggagtagatggaagaagggggtatgaccactagggatatggggtttttggaggaaggggtaatgaaaatattataaaattgcttgtggtaatttgatggttgcacagctcttacnnnnnnnnnnnnnnnnnnnnnnnnnnnnnnnnnnnnnnnnnnnnnnnnnnnnnnnnnnnnnnnnnnnnnnnnnnnnnngttataaaagaagtgagttacctatgcttagtgatttatggctcaaaaggtttttctccatcactaaaatgtctgtgatcattcctgtcatttg

SEQ ID NO: 39685 - DNA, 325 bp, Homo sapiens
ttctacttttatttctgcaaattttactttttgagaccatgttattgggtataaatgtaaaattgttatgtcttcctggtgaattgaaactcatatcactatggagcaacctttctatttgctttttttctttacagtctactttgctgacattaacattcttgtattaatgtggtcaaggacaatctgtctagattgataatctttgtcctttatatggagaatttaatctatttgcatttcatgtcacaattggtatacagtatttgggtttaaatctaccatctcactcctctttctatgtgtcccacttaatctggctttc

SEQ ID NO: 39686 - DNA, 309 bp, Homo sapiens
  misc_feature (1)...(309): n = a,t,c or g
ctcatctctgaggtttagacactgataacaaagataaacaatatcattcttatatcacataatttcaaccttccttacctactgaaaccaattatttgggtctaaacctaaagttacagtagtcaaagttgaaaagtgaatgaagtattactcaagaaaaaaaaaaangaanaaaatataatcgtnttctnttttaanggataangancttgaaangaaaagnctttgnaaaacngtnccttntttaattattaangttctttttctaatatgcaancangantaaaaaangtaggccaagcccagggg

SEQ ID NO: 39687 - DNA, 326 bp, Homo sapiens
tgaacattgaataaaagtttcattataggactgtaaattgtaacttacgttgcagaggagaatttcaaactgggagttaaagatctgaaattaaaattccagtgcctgattatgtaattgtttttcagcatcctaacatatctttatactgttattttttaaatgccataatttctagtcttactgaatacatgtgatatgcatttgaaaatgttaacaactttgaaggaaaggagcctgtgtaatttaagtgaaattgagaataaggtggcttgtctactactccattggtcaaagctaaaagtgacaaactcctttttagagta

SEQ ID NO: 39688 - DNA, 330 bp, Homo sapiens
  misc_feature (1)...(330): n = a,t,c or g
ttgccggcttgctcactgcccaaacacacacccctccccccagttcatctcttacccactcacacaacgaagatccgacttatccaatttgctgacgtactttacctgaagccccacccacccccctccacttttccagagttctacccacaagaaaaggaaagcagccggcccggtctaaatacaaaagatttactgtcaacaccttgaaacttggaaagggtccattacatgccagcatcagacttttggtggagaagcgcggtggtggggagggtaggaagatgctgagangaaaagacnaagggggaagaaggagattgaaaattc

SEQ ID NO: 39689 - DNA, 313 bp, Homo sapiens
cttttccctccttctctccccagccactccccgggtgtttaacatgcccatgcatttttaaacattgttaatacacagtctgtatatatgcatattgttttgcatgtttttaaacattaataaatggcatcacagtgtacaaatcattctgtgacttgctttttcactcaacattgcgttcattttaactgccatatagaattccattgtatgaatataccatatttatccattcccctattgatggccatttaggtcgttttcatttctttactcttacaaacaatgctatcatgaaggcatgtacatatct

SEQ ID NO: 39690 - DNA, 310 bp, Homo sapiens
  misc_feature (1)...(310): n = a,t,c or g
attttatttcattctagagaggaagtatccagattatgtatcaaggtgctattttagcattttattctgtagacagcttctttatgggaatagaattaaacttcagacaacattttgaaatccttgaatctgttaataggttacttctttgccagaggttggcactggaatgtaagctatgtaaaagcagtacctggcatattgtaggtgtnanactttatctattgagnaatttttatatgtctggaccngagaatttagccngctaacctgtggggnantaaaaactgtgagggagcatgctttgtat

SEQ ID NO: 39691 - DNA, 313 bp, Homo sapiens
aaagttgtctgggaattttattatgccatcttagtctgctatttgagagttctgaacttaggatatggttagtgctcaaataatctagacttttttttatccttttctaaggaagtaagcaataggacagcaaaactgactggaaatcagtttttcattcggctcatgctccaagctgttctcttgtatagatgctatcgttattggctctagtattccgaggaggacaaagtaatgaaggaaagtgacaaggtcatagaggtagaaaaggggacgcttgcaagaatagagaagtaggaggttatatgaagtc

SEQ ID NO: 39692 - DNA, 312 bp, Homo sapiens
atctggttcgactcccagaccagcccggcaagttgagggagcttggatgggatcattttgctttccgttgattcaattgactcatctgtacgtcgggaatgaaaatacttgacccaatgtttgcggtagagcctggtgtgaaacccagcaccccagacccggtcatgcattaattcagcaagcatgtgtggaaatgcctactgtatgccaagcaccagaacctaatggtgatcaagacaaacagagctctgcccttacagggcttatgtaatccagccaggagacaaacactaagcagtcagcaaggtgaat

SEQ ID NO: 39693 - DNA, 310 bp, Homo sapiens
caggcacacagtcttcacaatgctttggaaaccagttgaagaaaattctcgttaaattactcatccacccaactcattttccatacatgatctattgttggggtgcctgcctgttttcaagataagtgcatatttcagaggcaggttccttttaccccagataagcaattatttaagaaattggctttgacatacattttcagttttaatttttccttttacattctgaaataatctctggttgcatgtagcttcccactactgcatataaagatgtattccaggcatccgtcaggagtttgtctattcc

SEQ ID NO: 39694 - DNA, 307 bp, Homo sapiens
cttttttttgcttatttgtgtgcttgctctaccagtaggttttatactttggtatgttttcatgatggcaaatactgtccttgtgcttccatgtgtaggattcccttaagcatttcttataggaccaatctggtggtgaattccctcagcttttgcttgtctgggaaggactttatttcttctcatttatgagtgataacttggatggatatagtatctttggctggccttttttttttcttttagcactttgaatatatcatcccattctctcctggtctataaggcttctgctgacaagtctgct

SEQ ID NO: 39695 - DNA, 315 bp, Homo sapiens
tggatggatagacagacagttagttattaaattgagtggaactgggaggagatttgttggtcttaagagaccctaaatgtatacagtgaaacgatttataattttgtcaggatcctggctccaaagccctggttaacgtaacaattgataagcttagtcaatatcatgaggcatctttattgttaggatggaagcatccaagagccattgttttgatgaacagtgattgcaatctgaccaggaaagtttatatacatgatttgtttgtgtatttatttattttttaatctcttaagtggccaaaattgtattgat

SEQ ID NO: 39696 - DNA, 306 bp, Homo sapiens
  misc_feature (1)...(306): n = a,t,c or g
nnnnnnnnnnnnnnnnnnnnnnnnnnnnnnnnnaaacaaacaaacaaataaaacccaaacatttgtttgggtgtgctagtaaggttcttgttattgattgtgcgggcaaacattatgcatgatgagttatacagcctgatattgggaggaagcatttggaaatagggtaaaatcatagcagatgggaaaggtgtttataagtagattacattaccgtggagggaagccactacaatattttcatgcaaacagctcagagtgaggatatcatacttaactatcttttgctattgtcatccaaacaaa

SEQ ID NO: 39697 - DNA, 304 bp, Homo sapiens
  misc_feature (1)...(304): n = a,t,c or g
caatttgatataggaaagtttctccttagattctgccctaggggatctcgttcctgaagttagctgctgacgataatgaagagaacggccaacatttattgagcactcacaatgtggcaggccgtgtactaaactctgtacacgcatctcattaatcctcatagcaaggcttaaggtggagaggattcttcccactgtacagatgcnnanactgaggcttagcagaantcgatgactttttnaagaccacnnggctgggaaaagagtggagntncnanactntnggccntnnttnnttgcccta

SEQ ID NO: 39698 - DNA, 399 bp, Homo sapiens
  misc_feature (1)...(399): n = a,t,c or g
tgatgcctctcaaaataagaaaaagtaccaaaaagcctgaatagnnnnnnnnnnnnnnnnnnnnnnnnnnnnnnnnnnnnnnnnnnnnnnnnnnnnnnnnnnnnnnnnnnnnnnnnnnnnnnnnnnnnnnnnnnnnnnnnnnnnnnntagaaatagatgaatagatcaatggaaaagaatagagaacccagatgatgggtacagcgatgctaggaaaattcaattgccatatgcagaagaatgaaactggaaccctgtctctcaccatatacaaaaattaactcagggtgcattaaagacttaatgtaagacctgaaaaatctggaagaaaaactgatgaactcttctggaattggctaggcaataattcatgactaagacctcaaaagcnaaagcaac

SEQ ID NO: 39699 - DNA, 393 bp, Homo sapiens
  misc_feature (1)...(393): n = a,t,c or g
gtaaaaaccaaaacaagaacatagaatagtacctgaaatgaggccaacacaaaaaccacacatttggctctaagccctttagtagccaacattaaaaaaaaattatttgcacaggtcacaatggttctgagatgaaacagactgatactcagaaaaaaacacaattatccttgatactaagcagaaaaaaaaaagagtacctcataaagaaatataatgaacagtacattcaacaacatcctcagaggaagcagaacaaatgttaatggcatcatacttaaaacatctgtcanaanaattctgtcaagggcaaatataaaacagtcctctaacaacactcctccctgctggtctgcttcanaagggagcaatttaaagtatttgaagaaatat

SEQ ID NO: 39700 - DNA, 371 bp, Homo sapiens
aaagatgtgaatattaggggcatttgaaacatcatgaataaacgttgctatttctgttcatgaattttaagctgtttgttcttgcaaggttcccagtcatcccttcccaaatagtgctccttaaaattttcatcaggattttgaataaacaggaaatatgtccatttctctcagtattgattactctctaggctgtctgacagactcacactaaattgccaatctgcttcttaggagtcaggagtgaaaacatcagagtgggtgagagcctggtgggaggcctgtgagctgggagttatctgaatagagatagcatactggctgtggggctagactcctcaccatcatcttggaacatggctgggaaatag

SEQ ID NO: 39701 - DNA, 389 bp, Homo sapiens
gaagaagaaggcaatctcgaaagccagtgtacatgttaggcagcagctctcatgttggtgaatttcagttttgtgccctaagtctgtaagaaaggtctatgtgtaccttttggtcttggaacttggtagttttgtcatggaaaaaacactttatctgctgctgtcctctgtcagagtacccaggcactccttctagattctctctagactgagatcctgagttattttcctgaagccctttgttcctcaacttctgtagtcatctattcttgagccttgaccttggttatttgttctggtgttctgtgattctgttaattttttctgcatctcttttgttagggccctcctcctttctagggtcccgatgacaccttcgtgattctcag

SEQ ID NO: 39702 - DNA, 391 bp, Homo sapiens
gacagccccatgcctgcccacctcttcagatcctctcctcctcttctttttcccctgccctggacaggagctggctgttctcttttgtgatttcaggtctttgaacctgttgttctggaatgtctttccattctcttattagggagctcataattatcctccaagtgccagctcagttgtcatctcctttgtgacaccttccttctctcctcttgctcccgcaacacctaccctagtttagcatgagccatggcaagtccatctgcctccccagactgagcttctcaagagcaggggctggctgggcctccctcatccctagcatcccctcacttggcatagggtctgcacatggcagtgctcaataaatgcagcttggggtaaaagaata

SEQ ID NO: 39703 - DNA, 373 bp, Homo sapiens
attgagtctgtcttcaatctcctgtttacgtatggccacccttaagcagaggtcctcccattgtctgtgcaaatgctctatttgctccttcaaaaccatcacatcttccacgagaacgtgccgggttaagtccgccttcatagtttgaagttctttcaagttctgagtccagctagccaaagactgttctagttccttaatcagctctttttcgttatggaggtcctcgtgaagctctggaagaggatcttcactttgtgcctttaaaacttgcagcctgcttttcaactccttgattttcttttcacactggtcccaggtctctacagtgctctggaactgcttaatcatctctgccagctggggctccatg

SEQ ID NO: 39704 - DNA, 396 bp, Homo sapiens
  misc_feature (1)...(396): n = a,t,c or g
nnnnnnnnnnnnnnnnnnnnnnnnnnnnnnnnnnnnnnnnnnnnnnnnnnnnnnnnnnnnnnnnntacaggcatcanccactgctcctggcccagaaaggttttttagaccccatcaggtcgactgctcaggccacagaggcagaaaacaaaaaccaggagggagggggtcactatcaagcatgaagcctgcctgcaagggatgggccaccaagaggccaggagtgccacccttctagagagcactcctggacagaatgaaaatcaggccacaataggcagctacaagaaaccatcagatgagatcataagaaagtacaaagttaaaagctacatgttaacactcctcaaaccccaattttaatttagcgtttacttttccttttttaatatattt

SEQ ID NO: 39705 - DNA, 396 bp, Homo sapiens
  misc_feature (1)...(396): n = a,t,c or g
gggtattggaaattagaattgaggtttgtatcatttctctccaagcctcgctggactctaagagaacactggctgagtggttgtccatggactaatcgatggaggaactagtaattacttcactataaatcaaggcagcatcctgataggatcagctcctgcagagtagagggagaaatggctaaaaaataggttctagagctgcatgttgtaaaactacgctggagagcaaataaatgctggatttttcttcttaaccataagcaagctggctttccccaagtatcacaagcttatcaagctgaaagggttccaaatatttacttgcaaagtgtttttacagaaataatattctcccaagaaatgngngtaagttagaaacatatcccgnccagt

SEQ ID NO: 39706 - DNA, 383 bp, Homo sapiens
  misc_feature (1)...(383): n = a,t,c or g
atcaactttaccaatgtgtaaacaaataggaaaaataggaaaaaattttagttttatgaattccacttaagaaatgaaataattaaggaataaatctagagaataatcaatagcttctactgtcacataaagaggaacaactggaaattatatctcctgataaaaaagtatttaacattatccatgaagtatttttgtaaaaagaaataagaaactgattccatctaaatctatctgccagtctgtaggacacacacagggacagaagatcatgttattaaatgatattgttgggggtacaagtagcaaaatagagactacggtaagttctaaaggggaaaaagactcagattcttcaccaattaaatgcaagggagnaggag

SEQ ID NO: 39707 - DNA, 390 bp, Homo sapiens
ctcaaaggaatctcattattgcatccctgtttgtcagatggcaggcttctgtgtagcccacctatttctgcctctgtcatttcctgctttcagccttctaggaagtcaccatcccactcctcagatagctttctctttgtcaactgaaggcagggttggcctcagatgttccctggctgagtttagaggcatgggccctaggctgtgtgtttttgctcaggctccagctgtaggccagatcttttatataacaagtctgggcttcttgccacagcaagacagaggtcagcgatgagcctccgtgggtctggcaaggccaagccatgcagctttcctctttccctgggatggctccagccctcgaggaactcttaacaacctgcaatattg

SEQ ID NO: 39708 - DNA, 376 bp, Homo sapiens
gtttaaataaaatttaactgatacgtatatttaatctcaacaaagagctttacatttatacacaatatgtttcattctactagttttaaactttctagagtttggaagtccttttcttcctgtctctttttaaaaatccaaattcttttattcagagtatacaccctctgtcatgggcatctgctgctcttgcctccctggtgaagccgtcctggttttcttgtggaacatcatccttcacatagcaatccatgtgctgtggctgggctgaccatcctccacatcccgaggcaggcgtgtgacccaggcagggccaagtagcaccagcctggcactttcctccaaggaggatacagggatgagcctggcggggggg

SEQ ID NO: 39709 - DNA, 375 bp, Homo sapiens
tagaatttttatatttggattttaattaacctttggttagtaaagttgagaaatatttagtaaagaatcatggttactaaatattattcattgtttagtaatatttatttgagtagataatttatgtcatgaccagtttaaggccctgggaatgcagggatgaataagccttcatggagcttatattttagtggggaagataagaaatgagctaatctgtcatgtgaagaagtggtaagtgctatgaaaaaatataacacagaataaggggagagactgtgacggggtgggagctatttagatagattagtcagaaaaggctgttcctgtgaggaagaaaatcttgcaaaacttatttcaggtaacagtaaacgc

SEQ ID NO: 39710 - DNA, 389 bp, Homo sapiens
  misc_feature (1)...(389): n = a,t,c or g
gacatgttctggcacttttgtttttcttgtgacttattaatttttcataatgatattcatttgcaacgcaatttggtcaccaggtatgctatgctcagaaagagccacacaatcagtaaattggggctcagagctaataaagggatggaacagaggaggctggggtctagccttaagtctcggatgggcaccaggccgctcaagttcttctgggtgactacctcccgtgttccaatgctgtgaaaaggaaaaagtttgggagaaagaaaaaggaaaaaggaaaggaaagaaaataaagaaaaaaagaagacacatgcgatggattttatcaaaaaggatgggataaacaagagaaacanaagataaggttaaaaaaaaatganatgaag

SEQ ID NO: 39711 - DNA, 385 bp, Homo sapiens
tgtcctgctattgcattatcatctccaagctgtcacactccaagggccaccagaagcgcaaggccctcaagaccacagtcatcctcatcctggctttcttcgcctgttggctgccttactacattgggatcagcatcgactccttcatcctcctggaaatcatcaagcaagggtgtgagtttgagaacactgtgcacaagtggatttccatcaccgaggccctagctttcttccactgttgtctgaaccccatcctctatgctttccttggagccaaatttaaaacctctgcccagcacgcactcacctctgtgagcagagggtccagcctcaagatcctctccaaaggaaagcgaggtggacattcatctgtttccactgagtc

SEQ ID NO: 39712 - DNA, 381 bp, Homo sapiens
  misc_feature (1)...(381): n = a,t,c or g
ctagtctggagctatttccctggtattctacatttaaagctcttcatgtattcaaaaacttatcccaaatggcaatttgggataaataatatttgtaactgcttcccaaaacaacagaatttaaactgatttgccagactcgtagaaatgaaatatgggttgaaaatagtatatactttaaaagaaagaaactcagctattcttgttttctgtttaaatgaactctttactttttttttttaaggagacaaggtctcactatggttcctnnnnnnnnnnnnnnnnnnnnnnnnnnnnnnnnnnnnnnnnnnnnnnnnnnnnnnnnnnnnnnnnnnnnnnnnnnnnnnnnnnnnnnnnnnnnnnnnnnnnnnnnnnnnnnnn

SEQ ID NO: 39713 - DNA, 372 bp, Homo sapiens
  misc_feature (1)...(372): n = a,t,c or g
aaatagttacatgtagctagtggctactgtattagcacagatatacagcctcataggccacagtaagggctgtgaatttgaaaccatcctcaaagagttaaagaaaccaatgactaacaaattcttgagtttggactgggcnnnnnnnnnnnnnnnnnnnnnnnnnnnnnnnnnnnnnnnnnnnnnnnnnnnnnnnnnnnnnnnnnnnnnnnnnnnnnnnnnnnnnnnnnnnnnnnnnnnnnnnnnnnnnnnnnnnnnnnnnnnnnnnntgtggtggcgtgtccctgtaatcnnnnnnnnnnnnnnnnnnnnnnnnnnnnnnnnnnnnncggcagaggctgcagtgagttgagatcacatcagtgcacttaa

SEQ ID NO: 39714 - DNA, 375 bp, Homo sapiens
  misc_feature (1)...(375): n = a,t,c or g
ctgatcaccccctcctgccactcatttggcaggagggggtgattagaaggtgtgaccagagcctggtgggcccagcgataaatcagcatgctctggagggatggcacgatggggagcttcagctgggtgtgngctttntacaananngaangggctttgagtagncacanaatgaacataaatgcaaacggttaactctttctaagtgatccaactgaaanaccanacattctgnnttnaattcaataatatatnntttaaaagncacataaaactnacttntacaatccactagttaacattttaacctcnttggtagcaagatatgtagggcagctntttattntgtcnnaacacttcacanacccngaaaag

SEQ ID NO: 39715 - DNA, 383 bp, Homo sapiens
gaaaagcgctggaccacatggtctcaaggatgtcattgtccgagatacatgagtttatgacccttactaaaatatattttatgttcttcagcaagagtactaaatttcaggaaacaaacacaattatttagattttattttctaattttggggactgtaactaataatgttatcagtagaaatttgaagaaaataacacatctctattttttaggtgtccctggcaaccttgtgtgtctatttcttactggatgaaggaaacattttaacagccactaaagtgttcacatcgatgtctttgtttaatattttaaggattcctctgtttgagttaccaaccgtgatctcagctgtggtccagacaaagatatccctgggccgtt

SEQ ID NO: 39716 - DNA, 383 bp, Homo sapiens
  misc_feature (1)...(383): n = a,t,c or g
nnnnnnnnnnnnnnnnnnnnnnnnnnnnnnnnnnnnnnnnnnnnnnnnnnnnnnnnnnnnnnnnnnnnnnnnnnnnnnnnnnnnnnnnnnnnnnnnnnnnnnnnnnnnnnnnnnnnnnnnnnnnnnnnnnnnnnnnnnnnnnnnnnnnnnnnnnnnnnnnnnnnnnnnnnnnnnnnnnnnnnnnnnnnnnnnntagacagccctttcacaaacataaactcagcaaccatcataaccatcctacaagggaaatgctggcattattgctagtttatggctaaggaacctgaggcttagggaagtcatttgacttgctccgagtcacactacaaacaagacctgcaattgtttgagtcccagagcatatatgntcttatttactc

SEQ ID NO: 39717 - DNA, 378 bp, Homo sapiens
  misc_feature (1)...(378): n = a,t,c or g
cttttaacatagacgggaaagagcttggagagcatcacacaccaggcactgtttacccaaatgggagtaaggggtgctctgctctcagtcggccaccggggaaagcccattttctctacaaccacctgtagtcctaacacagctcccctgccctgggacacttgctgttgctccttcaaaaagccccnnnnnnnnnnnnnnnnnnnnnnnnnnnnnnnnnnnnnnnnnnnnnnnnnnnnnnnnnnnnnnnnnnnnnnnnnnnnnnnnnnnnnnnnnnnnnnnnnnnnnnnnnnnnnnnnnnnnnnnnnnnnnnnnnnnnnnnnnnnnnnnnnnnnnnnnnnnnnnnnnnnnnnnnnnnnnnnnnnnnnnnnnnnnnnn

SEQ ID NO: 39718 - DNA, 377 bp, Homo sapiens
  misc_feature (1)...(377): n = a,t,c or g
gaaaaatatcatccagagagaaataagatattgcaactatgaaacaaaaacaagatgctataatgaagaacaagtcgaacaaaaaaagtacttgaatattaaaagtatgatatcagaaacaaaaaaaaaaanaagngntgncaaaaanggttgaggaatntttccaagaggannttaaaatnttaanaggngaaaantaaagatanttatnggncntacntcntaanaangggagttntgganaaagantgaanaaancnggaggncagttcccanattgaanggaaatgaatatccagattgaangagcntcaggattancncagacccggactaaggcncattctgtaaaactgcanaatctggggaataaaaaa

SEQ ID NO: 39719 - DNA, 386 bp, Homo sapiens
  misc_feature (1)...(386): n = a,t,c or g
gtttataaatggggagcagttagactggaccagacaggtatctgaagaaagacaaagtcagatgtgggaaggaggtgctgcagaccaccagtgggagattaaggtctgtgctctttaagaagctacgtattcattcagggagtcagcaaagcctgtgccagccagatgtacaaagatgggcacgatgcacttctcccctcaaagggcttatgctctagtcagggggaaatagcagcaaacaaggggttagggtagaattcaagataggttgtcagtaaggaaaatattctcacttgtgtctaccttgaaatagaccaagaaaaaaatgaagatgctaataataatttgatcanatgcttattaaaattgtgagagttatcaaatcg

SEQ ID NO: 39720 - DNA, 381 bp, Homo sapiens
  misc_feature (1)...(381): n = a,t,c or g
ggaagctccttaagcaccagaaccacattggtttgtatgttttgcacctagcacgtggcatggaacataggagccactcattaagtgtaaactgcatgcatgcatgaatggggtgctctggttcagaacagtggctactctcctcctctgctaaaactccaagatgacactggagattgcttctgtggccaaagtttaatcgggagaagcgatgggggctaatttaaaactaaaaggaaagagaaagcagaagcccaaaccgctgctgtctcaaagtgggagaaagggaggctggctgtgatgttctaagggtanaaggggccctcanaaattctcacctccctccctcacttgcagatgaaacaactgcacttccacaga

SEQ ID NO: 39721 - DNA, 372 bp, Homo sapiens
tggacattgcttattcggtctaagaattcttggatgcttcaaattgattggaatgtatagtctctcagagacaaatttttatggcgagaaaaagagaagctagtggatgcaatcagaaacccacaatcctaagcacctccttgaaaacagttacaaagctgattttggtcaaggtgggacactgaagtttacgtgcaagggagttgtgggcaggtccaatacgttacctaatcagaaccaacagggagaaccttcaaggagacagccgcagtgcccactctcttagagaccaagacacgccttgtgactgtcctgcagctttattctcttgatgctggtgctggaatagccctcatcactgccgaggctctg

SEQ ID NO: 39722 - DNA, 367 bp, Homo sapiens
  misc_feature (1)...(367): n = a,t,c or g
cacaggggtaagactgcctagaggatgacaagtgccatgacggaaagcagttcgttcctttttggtctagagccaggatcctagcctcaagtcaaggctttcaagaactcatttgtagaagtgaaactcagagaccatatagagaacttcatttctcctggggggcccatgaaatttatcttgcactaagtttcttctgtttaaaacgcgagtttgcnnnnnnnnnnnnnnnnnnnnnnnnnnnnnnnnnnnnnnnnnnnnnnnnnnnnnnnnnnnnnnnnnnnnnnnnnnnnnnnnnnnnnnnnnnnnnnnnnnnnnnnnnnnnnnnnnnnnnnnnnnnnnnnnnnnnnnnnnnnnnnnnnnnnnn

SEQ ID NO: 39723 - DNA, 367 bp, Homo sapiens
  misc_feature (1)...(367): n = a,t,c or g
gagccgtgtnnnnnnnnnnnnnnnnnnnnnnnnnnnnnnnnnnnnnnnnnnnnnnnnnnnnnnnnnnnnnnnnnnnncttaagtgctcttcccaccttaaccttctgattaactaggattacaggtgtgcatcaccacgcccaggtaatttctaaaaaaaaaagttttttgtagaagtgatgcctcgccatgttgcccaggtgtctgtcttgaatgcctggcttcaagcgatcctctcccctcaactctcaaaaggctgtaaccctgattttaatggtagtgtaaagtgacatgggatgaaggaaccgtaacattcttaaagtttccccattgttgggcatttgcattggtcccagttttttataag

SEQ ID NO: 39724 - DNA, 364 bp, Homo sapiens
cttttatctgtaaccacttttgtggaactatcaaagggatataactattagaagaaaattatgttgttttaaaggatagtctttaaatatctagaaaattaatttttgaaccttttattccttgtttatattcaataagttagtgattgtagttgctgctacagtagtcaagtttatcatatataatgggtaataatgtatggcttctgtagccttctcccatcagcaagtactaggtataacagaccacctagctgctgtgggagaatccagaatgaagcagaaactgaagtttggctgagccagaagagagatgagaggacagtgggatctcattagcacatgcagctgcagcaggcctaga

SEQ ID NO: 39725 - DNA, 366 bp, Homo sapiens
aaaagtcttgtttttccagactttgaattgaatatataaatattatatatacatgtttcttgtaaatatcccattttgaatgcatacctgtggtggttctgtccgggctaatccccatgctagaatgtcctttccagctacgtgaataagaagtcccatgcccgcacccaccggaagcagaagcctggtggatgcctggttcgttccgcagcaccagggcctccaccgtgctgtggcagcaccccccatgtcggtatttctaaataaccttatttatacctgcagagatacacttcagtcccattcagaagtcttctcttaaagcagcattacagtcccagacctgcgggtttctgagggcagctt

SEQ ID NO: 39726 - DNA, 367 bp, Homo sapiens
  misc_feature (1)...(367): n = a,t,c or g
tttcgctttatttttgtggcagggnnnnnnnnnnnnnnnnnnnnnnnnnnnnnnnnnnnnnnnnnnnnnnnnnnnnnnnnnnnnnnnnnnnnnnnnnnnnnnnnnnnnnnnnnnnnnnnnnnnnnnnnnnnnnnnnnnnnnnnnnnnnnnnnnnnnnnnnnnnnnnnnnnnnnnnnnnnnnnnnnnnnnnnnnnnnnnnnnnnnnnnnnnnnnnnnnnnnnnnnnnnnnnnnnnnnnnnnnnnnnnnnnnnnnnnnnnnnnnnnccaccatgcccagccaacagtatctatttttcaactagatagtaccaattgtccaaaatctcatattttgagagttttagttttcaatatttaatcatttcta

SEQ ID NO: 39727 - DNA, 362 bp, Homo sapiens
  misc_feature (1)...(362): n = a,t,c or g
tggagatcctgatgctaccctcctcactactctctcagagccagacccaactgctggccctaaaggacatgttttaaaagtaccactcaatgacttctggttgaagacaataagatataaaaactatagttaaagatacccctgggaaaaattcgaggtgaannnnnnnnnnnnnnnnnnnnnnnnnnnnnnnnnnnnnnnnnnnnnnnnnnnnnnnnnnnnnnnnnnnnnnnnnnnnnnnnnnnnnnnnnnnnnnnnnnnnnnnnnnnnnnnnnnnnnnnnnnnnnnnnnnnnnnnnnnnnnnnnnnnncaacannnnnnnnnnnnnnnnnnnnnnnnnnnnnnnnnnnnnnnnnnnnnnn

SEQ ID NO: 39728 - DNA, 373 bp, Homo sapiens
aggaaggccaacatggcccgtaccataacctcctgcccttcataggggtccaggctcccacgggtttcagtggagaagaatttaccaatcaagttgccagtcacaaaagcaaagtcagtttgactccgatgaacagaaccaagaacggttatgatcctagactgttcatgctgggcacatatcttcttcatcaaattgacactctccattgtctggaatttctcagtattgataaagaacacaggtcctcgggccttggggtaaaagtcacgttccagaggaaacatccaagcatccagagccaccgcacaccgaaattgggtctccttggccaaagccagaatagctgtggccctccaaatgaatgcccatc

SEQ ID NO: 39729 - DNA, 365 bp, Homo sapiens
  misc_feature (1)...(365): n = a,t,c or g
cgcggccgcgtcgaaatttttttaaccagccttcaatgctcagccaagccattaatacctctgccttgccttttatctcctgcttgcattcttaaggtcagctagactgagtttagggccttctcagatcttccctgagcaggtgtgtggatttgggcatgtacctagccttgtgcctgtgccatgttgtattagtctnnnnnnnnnnnnnnnnnnnnnnnnnnnnnnnnnnnnnnnnnnnnnnnnnnnnnnnnnnnnnnnnnnnnnnnnnnnnnnnnnnnnnnnnnnnnnnnnnnnnnnnnnnnnnnnnnnnnnnnnnnnnnnnnngcncatnttatgtggcagtacacaagggnttgcggagg

SEQ ID NO: 39730 - DNA, 364 bp, Homo sapiens
tgcaatttaagccagccaggaagctgtaacgtgggcttgggtttccatttggcatggatatgtggctgatgtgatctaagcttccctgtgccatcaggggatggcagacaatgcaggtaagtgtagacacgcctttgcttgcctgccgaccagggcattcacattcatccaggtaaccagtcagggaagagaaaactcacgtgggggattggatgggcttggagctgctctcccgagtaacagaaaaacaggctagcagggttccagaatacattgcaagctggggagaacttatctcaccagggaggaaaatagagcccccgtgaacctgttttatattctgtttgtatagcatgccgttttt

SEQ ID NO: 39731 - DNA, 372 bp, Homo sapiens
  misc_feature (1)...(372): n = a,t,c or g
ttcattttgagtgaaggctgtcttctaaggttggaactgagtcatgctgatccacttggaagtatgtcatcctgatagtgaccaccttgcctgtgtactgggtgttaatatacagaaggcttattttaaatgtactattcagcagtgtgttttgttatttctttgcagtatgttttataataatggaaggcttttgagatgagaaatatatggttatggtaggagttgaggtcaaaaggaaggcctagtatctctaattctgatccacagggntctaacttaactttgcnnagtaagacatggatttacaactgnnttatatagngcatgcttgngccctacntctcaaatgcncttcgatttttttttttg

SEQ ID NO: 39732 - DNA, 365 bp, Homo sapiens
  misc_feature (1)...(365): n = a,t,c or g
gtgggtcatgcttagtgtgaaaggttatatatagaagctgtgcaacactccaatttgcttgctgagattttgctttcaaaagtctgcagtctacttttgtcagctgggaatgtaactgtcttcctctgctgtgtcataacttatttttaagatagtaaatattttattttcatatgtggaactatatgttggtgctgctttaggttgttttcttcccccaccccccaaaagtaaattgttttagtcagtattagggttgatttttgtagttgttaaaataccttcatttccttttatgaagacataatgaagaaagtgaaaaggcaggcccanaatggangaagataattgcagtacatgtaacg
